United States Patent Application Publication US 2002/0048763 A1 - sequence listing, part 5

SEQ ID NO: 13268 - DNA, 546 bp, Homo sapiens
  MAP TO AC009263.6; EXPRESSED IN BRAIN, SIGNAL = 1.5; EXPRESSED IN BONE MARROW, SIGNAL = 1.5; EXPRESSED IN LUNG, SIGNAL = 3.3; EXPRESSED IN PLACENTA, SIGNAL = 4.2
cccaggacctcttgattctgaccatgccctgccccaaaccctgccttcccgggtcccaggactccagctgctcctcgcgtgacaacacttgcccgctttgaaagccctcctgccccgcccgccgggtcctcaccgtgtggtacatgagggcctcgccgtccccgggctctgacagctcgctcagcttgcggtcccactgcagcacgccctgctccccgctctccagcacctccatggcggtgcgggccgcgctgggccgaggatgctaagcgcaggaggggacgcgcagagctgcctcggaccggcaaggttcctctctctccgcgtgtgcttgcgtgtgtgcgcgcgcgtgtctgtagttttgcacttggaaagcaaacgtctgctcctctgccggagagaggatggccaagcgctcccgtccggtgtcctcggagatccgagaatccccagggacacgagccggaccaaaggctgccggggctaaagcgggatgtgcatccaaaatgaaggcagaagacccgctctcatcccaggaaaatccct

SEQ ID NO: 13269 - DNA, 504 bp, Homo sapiens
  MAP TO AL135745.2; EXPRESSED IN BRAIN, SIGNAL = 2.8; EXPRESSED IN BONE MARROW, SIGNAL = 1.6; EXPRESSED IN FETAL LIVER, SIGNAL = 3.1; EXPRESSED IN LUNG, SIGNAL = 5.6; EXPRESSED IN PLACENTA, SIGNAL = 1.5
tttgccagaaggaaaattgggtagtgaattttctgatttgaaggtttattcctaacccatgtttcattcctaaacaacagagtaaagacatcatcatgatgaacaaacaacttttagtgtatattatgtgtaagacgctggccaggcaccaggagaacacacagagagaatacataatttatactcggatgatttactatcttgaggagattagatatatgcatttaaatacatacatacattttaacaaacaaataaaaactaccagataacacataccaagtgccaaagggtaatatataagtaggttgaccatatggcccagcttgtcctggacagtcccagttcatacctgtggtttcagagtaattgtgacccttttaacaagcaaatatacaatctggatgataaattatatggtcaccatacgtacagaccactaatctaggaatcaagaggagggggtgattatcaatggctggggcagtgggtggtgagttcatg

SEQ ID NO: 13270 - DNA, 530 bp, Homo sapiens
  MAP TO AC011455.3; EXPRESSED IN BRAIN, SIGNAL = 3.7; EXPRESSED IN BONE MARROW, SIGNAL = 1.6; EXPRESSED IN LUNG, SIGNAL = 2.8
ctttaagtggcaccattgggatgaacagaagagtcttcagataaaccctgccacttgcttctcctccctcccttctccacctgtccccaccacctcactgctcctcgtggccctcaactccctactgtgccttctggcctacaaggggtggctcactcctcacccctcttccctccatctctccctctagaacatagataccctggagcgaatagccgggctggaacaggaggacttggtggaggcgcacggcaccttctacacatcacactgcgtcagcgccagctgccggcacgaatacccgctaagctggatgaaaggtgaggctggagggcatcctgagggcaggcctcctctcagcaccaggagcagtgtctccatgcagtgggcacccattctgtcctgctcaattctttggggtttttttgttttgtttgtttgtttttgagacagagtctcactctgtcgcccacgcggggagttcagtgggtgatcatggctcactgcagcccaactgcctgatttcctgt

SEQ ID NO: 13271 - DNA, 552 bp, Homo sapiens
  MAP TO AL049836.2; EXPRESSED IN PLACENTA, SIGNAL = 1.4; EXPRESSED IN BRAIN, SIGNAL = 1.9; EXPRESSED IN BONE MARROW, SIGNAL = 1.6; EXPRESSED IN ADULT LIVER, SIGNAL =   2; EXPRESSED IN FETAL LIVER, SIGNAL = 1.7; EXPRESSED IN LUNG, SIGNAL = 1.6
gagtagcaagtgcaggggacaagcagctgctgtctcgccacgcctcagttgtcctccccagtgaaatgggggtggtcctgcctgcctcactgggtgtgtaaggactgaatgggctggtacctgcaaaaagctcccggggcagtacgtggtagccggccttgatatttccggatgttgccattactgatcaggagaggtctgggctgggcattggtgaagcgtttgctctcaactttactgccaccatcagtgtgctgagctccttccctcctagactcagtgctcacatcggtgcaaggggtgaatagacagcctggaggcagaagagctgcccagaccctgccctgaggctgaaagccttccctcttcctgggccagctgggatccctggagagcctgatgtccctggagcccctgtcccctctgctgtgatccccagcagagcctcatgggcaatccccccagctggccctgcctgagctccctggctgtcccccagcaaatgcccacagagccctgtgaggtaggattccttcaacggggtgtccatag

SEQ ID NO: 13272 - DNA, 534 bp, Homo sapiens
  MAP TO AC004554.1; EXPRESSED IN LUNG, SIGNAL = 3.6; EXPRESSED IN ADULT LIVER, SIGNAL = 1.5; EXPRESSED IN BRAIN, SIGNAL = 2.5; EXPRESSED IN FETAL LIVER, SIGNAL = 1.9; EXPRESSED IN BONE MARROW, SIGNAL = 4.5
agacattgccatctgttccctgtcagggcaacattgctcccacttgagacccactgctctaagacacatataacaggggcatcacaatctttaatgccagcgtgccttgcagagttatggagagggtccaagtgacttcggtacatatttacgaccctcctggagtagagagagcatttcgtgtcttcagaagcactccatgttctggaaaggccctttgagccatgtgtgacatcctccatcttccctaggagccaggaggaactctctcccagtccgcctttgttgaatccatccacgccacagtccacagagagtcagccgaccaccggtgaaccagccacccccaaaaggcgcaaagctgagccagaagcattgcagtctctgaggcggtccacgcgccacagtgccaactgtgacaggctttctgagagcagcgcttcacctcagcccaagcgccggcagcaggacacatccgccagcatgcccaagctcttcctgcacctggaaaagagtaggttcattctcgggtgc

SEQ ID NO: 13273 - DNA, 525 bp, Homo sapiens
  MAP TO AL138827.2; EXPRESSED IN PLACENTA, SIGNAL = 1.3; EXPRESSED IN BRAIN, SIGNAL = 1.4; EXPRESSED IN HELA, SIGNAL = 1.9; EXPRESSED IN ADULT LIVER, SIGNAL = 1.5; EXPRESSED IN FETAL LIVER, SIGNAL = 2.3
ctgatcattttcctccacgcgtttcaggaagctatttcagttcttagagtgcttaatgtgctcaatatgcacattaattctcttggcaagaatcttgcccttaacttgtgtgtttacagcaatgctaacagcatgctggggaacactgtagactcttccagctttgggaacacttgtggggcatttctcccaacctatctttccaggcttttcactgacttctcccaggtcttgctttattccaatcttcctgcatatccattccatgcccttgtacataccattccacttgtctgtatgctcacctccatctgtcaaaagttgacttatcacttcacacctaggtcaaattctcctttccctcagcctgaagtcactattttgagtaggaatctccacagctttcttttttgaccactcatttatttatctgtacatattcactcattttgttattctacccttgtttttatgtccttttcctcaggtagatcataagcagattgaaggcagggattgttgaaa

SEQ ID NO: 13274 - DNA, 559 bp, Homo sapiens
  MAP TO AL138498.2; EXPRESSED IN BRAIN, SIGNAL = 1.3; EXPRESSED IN FETAL LIVER, SIGNAL = 1.7
gcactctgctcttctacccctaaagaaaaatttaaaaaagctctgcattaattgtgtttctgtgatttgagtttgtgtttccttcaaatcctgcactatgcctgaaaataggatcaagatgcagttttattcactcattgtaaatacaaactgtttaacaaaattcttggcccaggacagattctccataagcagcagctgcagcagccgtcattactgcaacagtgtagtaagcaagaacaataacaaagtggaaacagcctattaccaattttagggtgaacaatgctacatcaactcagtgaattttaaatcaagccattgaaatgtttatgactcataaagaagtggaatttagacaaaagtttagtgaaaaaacagaataaactatcatatatacttttgtgtatgcaaatctatacgcatatctgtgtgcacacatatgtgcccatgttatgtgtttatgagaaagtactagttgcgtttctaatatccacttgtcccttctttagaagaagaacctaatttttacccattgcattgcccagaatgtttgttt

SEQ ID NO: 13275 - DNA, 543 bp, Homo sapiens
  MAP TO AL158153.2; EXPRESSED IN ADULT LIVER, SIGNAL = 1.8; EXPRESSED IN FETAL LIVER, SIGNAL = 1.9; EXPRESSED IN BRAIN, SIGNAL = 1.4; EXPRESSED IN BONE MARROW, SIGNAL = 1.5; EXPRESSED IN HELA, SIGNAL = 1.7
ggtaactcagcacaggagcctgactcttacatagattgtggctgattttcagaactggctaatgtcgaaccagccatagtatctcctcctttccacagcagctcttccctcacctcagccacgtccttctcacccttagccgaagacatcactgccctgctctgcgctgaaaatgtaggccccccagaaagaatgctcacagcttctccgacatccacatctacacccttatcttcacttgcacccattttcacttttcccccttgttttgagagcaaagtgtgtctgattgcaaagttcatgttcttttcatggtgggacagagaagactaatcctacacaattaatgttgaagatgcaagtggaaaataaatgagaaaaacctctgaaaaaaatgaacattagacaaagctaagatgacatcatttttaatgttttagtctctaattccccaccctaataatgaagacattattatatttaattaccccataaagctttcattatcactgaaggaaaataggtgcaaatgccttcctgatt

SEQ ID NO: 13276 - DNA, 590 bp, Homo sapiens
  MAP TO AC020904.3; EXPRESSED IN LUNG, SIGNAL = 3.4; EXPRESSED IN PLACENTA, SIGNAL = 1.6; EXPRESSED IN BRAIN, SIGNAL = 2.4; EXPRESSED IN ADULT LIVER, SIGNAL = 1.6; EXPRESSED IN BONE MARROW, SIGNAL = 1.9
caccctctctgagcctcaacgatcacatctgtaaagtacaacagtcatggttcctttcagggggtggttgtagggatttggtagggaatcatgtgagtggatggaatgggctgggtatgccataagtgcttaataaccagccgttgtgattgagatagtcgctcttcgtgtctgtaagacaaagtggatgttttcgtttctccctcaggcctccaggccctgatatcccaggagcgatggatgtctagcccccccaccccccgggcagggttgcacccctgaccgtctggcccactgggccccaggaccttggccttgcacctgtctccatcctccaaggacaactctgtatccagggccagctcaggggcaccctcaggtagctctgtcttctcgagaggctcagtcctctcgcctttgtcccaggacatctctaccaccagggcctcctgcagggatgcctcttcctggaagtccactgggttgatccactgccaagtctgcagagggagggtagggccacagctgtgagcagagctctacttcccatccacagcaggatggaacggaccaggtcactgctggttaaa

SEQ ID NO: 13277 - DNA, 562 bp, Homo sapiens
  MAP TO AL121955.4; EXPRESSED IN BRAIN, SIGNAL = 1.3
agcccaagaatgttgtcctgggcttcctctctatactgagtccctaggtcaacttatacagtctatgtccagccccaagccatgagcttcagtctcagatatccagttacctacatgacaatgccattcagatgctgaaatcacatatggaatgcatgtccggaatctcacctttcatatccatcctcatccttcccgggccaatcaactggacctttcccaatctcctccacctccttaagtgacagtggtttgcacccagctgcttaagccccaaacctagaagctgcccttgatcctgccttttcccacctgtcacatccaagccatcagcaatccttccagatccttctctactgcccatatcatccaattccccaccctgaaacatacatgccttcgaaaatagtcctttgactactacccattcattgcaattggaataaaatccaaactccttaccacggcctgtaaggtcctgggtcacccccaccatccacacccacacccttcctgacttcatcttatgtactctacccttgctccttctattggggccttc

SEQ ID NO: 13278 - DNA, 519 bp, Homo sapiens
  MAP TO AP001205.1; EXPRESSED IN BRAIN, SIGNAL = 2.4; EXPRESSED IN ADULT LIVER, SIGNAL = 1.7; EXPRESSED IN BONE MARROW, SIGNAL = 7.1; EXPRESSED IN FETAL LIVER, SIGNAL = 6.2; EXPRESSED IN HELA, SIGNAL = 3.7; EXPRESSED IN LUNG, SIGNAL = 9.9; EXPRESSED IN PLACENTA, SIGNAL = 2.5
tgacctggctagggtaatgcatatgtgtagtttgcccttaataattgggtattaaggaaaaattgtgaactcaatgggtaaatacaagatgattaagcattaacagggtttagttatttgattcagtgatttataattgtctaaattgtaacgctctttttttgctcctcattctaccattacgttaactttttttttcttttttttaataggttatgatggagggtggtcgcagcaaagggtttggttttgtatgtttctcctccccagaagaagccactaaagcagttacagaaatgaacggtagaattgtggccacaaagccattgtatgtagctttagctcagcgcaaagaagagcgccaggctcacctcactaaccagtatatgcagagaatggcaagtgtacgagctgttcccaaccctgtaatcaacccctaccagccagcacctccttcaggttacttcatggcagctatcccacaggtaggttttagaaggcaaccagaaccatgaaggt

SEQ ID NO: 13279 - DNA, 507 bp, Homo sapiens
  MAP TO AP000957.2; EXPRESSED IN FETAL LIVER, SIGNAL = 2.5; EXPRESSED IN BRAIN, SIGNAL = 1.3; EXPRESSED IN HELA, SIGNAL = 2.8
actcagacatggcagtgcagatgaaaaactgggaaccatttgtgttgggtccagcacattctccacggacaagatgccaggacctgtataatttaggacgaagttctcatcatcaaatttcttcccgtagatggacttgccaccagtgccattatgctgtgtgaagtcaccaccctgacacataaacccaggaacaattctgtgaaagtaggaacctttataaccaaatcctttctctccaatgattagagcacaaaaattttctgctgtctttggaatcttgtctgcaaacagctcaaaggagacacgtcccaagagctcaccatccacgatgatgtctaagaacctggtggggttgaccatggctgatagaacggggctcctggcagcggtggcatctgcaaagccatagtaattcttttaatttgttggcaataattaagtaaagttaaatttggcattacttatgttttatatgagaaaacagaagcaaagttaggaaggtca

SEQ ID NO: 13280 - DNA, 510 bp, Homo sapiens
  MAP TO AH009158.1; EXPRESSED IN BRAIN, SIGNAL = 1.4; EXPRESSED IN ADULT LIVER, SIGNAL =   2; EXPRESSED IN HELA, SIGNAL = 1.6; EXPRESSED IN PLACENTA, SIGNAL = 1.4
tttatgcatccaatgcaacctgttatcaggcctgcccctggggcacctactactgcatgagtgtaattacatcctacgacttcaagccccaactgatcatagtaacttctgagtcacccaaacagctccattcagatggcttgtctgcttctcagggccccccaaaatcatcacctcctccctgcttaacaaacagtccaggttttctaatggcaaacataccccctgcatgaccattcacccctggaccccaccctccagcagcgcccccaccactagtgaatgccttcttgccactcagtttgctcccaacacccctttccagccactcactgaagctaccttggcaagtactctaggagtatgggaaaatgaaaacaacaaactcacacacctgtttaacatgcataactagttctgtctacccagccaaggtatattcttcttatgtggaacatcgacctatatctgcctccccactaactggacaggcacctgcaccttagtctt

SEQ ID NO: 13281 - DNA, 567 bp, Homo sapiens
  MAP TO AC004460.1; EXPRESSED IN FETAL LIVER, SIGNAL = 1.6; EXPRESSED IN HELA, SIGNAL =   2; EXPRESSED IN BRAIN, SIGNAL = 1.3
tcctcagtttcccctgtctgaggtctgcatgccagcagatagcacttttcatttgttggtgtcttggtttctggaaatcaacttaaggacttctgttaaaatgttatctttagtctctatgggaactttggtctattctgtgacttaaacttccctggctattgttttaagttattcttcccttcttgcttcagttgctcatttacttccctgtgctggctaggtacctggaaatgcctttgaaggaacttaagatttccttttatttccatgcttgggggcaggtgcccggcaagcccctaagaggggtctctgctccatctcatcttcatatcagccccttgcatgtccctgaagtggttctccaaaacaaattctagtcaggtaactccatttcctccaatttttcatactccatccccattacctgcaaaataaacttctccaactggtactccagcccttcagcatctagtcgtattccgtccctcccctcattacctgaggcatctcttcaccatccctttccctgacttgacacccacctctgtgcttctgcctctaccc

SEQ ID NO: 13282 - DNA, 582 bp, Homo sapiens
  MAP TO AL121964.16; EXPRESSED IN BRAIN, SIGNAL = 1.4; EXPRESSED IN BONE MARROW, SIGNAL = 1.7; EXPRESSED IN LUNG, SIGNAL =   2
gatgagagttccatcccagcccataattatatttgattagtgtacctaagatgcaaaatgataaaccaagaataaaaattctcattaattgagcttccatcatcagctactaaggtatgaatttttccatcatgtgtaatattatgtggtatttgtttgtaggcaagaactagttgcagaactggaccaggatgaaaaggaccagcaaaatacatctcgcctggtacaggaacataaaaagcttttagatgaaaacaaaagcctttctacttactaccagcaatgcaaaaaacaactagaggtcatcagaagtcagcagcagaaacgacaaggcacttcatgattctctgggaccgttacattttgaaatatgcaaagaaagactttttttttaaggaaaggaaaaccttataatgacgattcatgagtgttagctttttggcgtgttctgaatgccaactgcctatatttgctgcatttttttcattgtttattttccttttctcatggtggacatacaattttactgtttcattgcataacatggtagcatctgtgacttgaatgagcagcactttgcaa

SEQ ID NO: 13283 - DNA, 569 bp, Homo sapiens
  MAP TO AF233390.1; EXPRESSED IN ADULT LIVER, SIGNAL = 1.7; EXPRESSED IN BRAIN, SIGNAL = 1.5; EXPRESSED IN PLACENTA, SIGNAL = 1.4; EXPRESSED IN LUNG, SIGNAL = 3.3
agtgtttgtctttgcaggggaacttttggtgctggatccctgatcagacacccccctgcagcccggggtgggaaagccctggactcacccagagaggccaacacagccacggccaccaggagcagggccaggaagaggtaaagaatccgcaccgatgtgtgcaaagataggttcttctggcagcggctgcagcggggccctggccggcctgtgggggacacaaggaggacaatggcttaggccaggggcccaggttggagctgaagggtcagttccatgttcctgctctggtctgtctcatcacattcaaaccaggctcagaaggggagctgttctcgaccctcattctctacctgtcctacctcctttctctaggtgctggtgctttctggaatgcaggagaccgagtcaggacttcaaagaacagcccccagcactaccatcatcctctctccatggtgtcttcattcggcccatggggaggggaaacacctcttccctctccattggtcctactgaggacccacaggatgagcagccagcctgaggccccactgagtgaccaactt

SEQ ID NO: 13284 - DNA, 539 bp, Homo sapiens
  MAP TO AL159141.1; EXPRESSED IN BONE MARROW, SIGNAL = 1.5; EXPRESSED IN PLACENTA, SIGNAL = 5.2; EXPRESSED IN BRAIN, SIGNAL = 1.7; EXPRESSED IN ADULT LIVER, SIGNAL = 1.7
attgtcttgccacttccagggtgacattatggagttctgtgattctgcaaggtcagttgcctagagtcacatcggtggcattctcttatttagcttgaagactaaatcgacaggtagactggcaggtgtgttacccagtgtctttctctccccctcctttctcactctgccccttcaccctgcagaggccagaggggacaaggtcaagtgggtgttcacctggcccctcatcttcctcctgtgcgtcaccattcccaactgcagcaagccccgctgggagaagttcttcatggtcaccttcatcaccgccacgctgtggatcgctgtgttctcctacatcatggtgtggctggtgagtggggggagcagggggtggactgtgtgcacagccagggagaggtggagagctgggttcaaggctaaccacaggtactgctgtgccacctttgggcgagtcactggcctcactgaccacagcgtatttctcagtagaaaagggtttgaatgaggtgcatgactctgtgtcaggtacccggaat

SEQ ID NO: 13285 - DNA, 563 bp, Homo sapiens
  MAP TO AJ246003.1; EXPRESSED IN FETAL LIVER, SIGNAL = 1.6; EXPRESSED IN LUNG, SIGNAL = 2.1; EXPRESSED IN BRAIN, SIGNAL = 1.5; EXPRESSED IN PLACENTA, SIGNAL = 1.8; EXPRESSED IN ADULT LIVER, SIGNAL = 1.6
tttttaaagcttgaattctgtgaactttaaggttaacttatttatgaaaagtgtaaatgttaggttgtattttcatattaaaattttgtatcctttaagggtactccgaaaacaaataggacaaataaaccttctacccctacaactgctactcgtaagaaaaaagacttgaagaattttaggaatgtggacagcaaccttgctaaccttataatgaatgaaattgtggacaagtaagttttgccatctaaatgttttattttatagtttttatattttaattttacttataaaacatgtcaggagtgaaatagataataaataccttgtctggtttacatacttaatttttatgatagttttcaattataaatgtagaaaaccattgctttactgatttaactatagtttaacagttaacattaaaaataactatatgtcatagggcttaggcttcatcttgtaataactgggccctgtttgtatcgtagaactaactgaggtcttgtttcttagtggaacagctgttaaatttgatgatatagctggtcaagacttggcaa

SEQ ID NO: 13286 - DNA, 501 bp, Homo sapiens
  MAP TO AL136226.2; EXPRESSED IN BRAIN, SIGNAL = 1.5; EXPRESSED IN PLACENTA, SIGNAL = 9.5; EXPRESSED IN ADULT LIVER, SIGNAL = 1.6; EXPRESSED IN HELA, SIGNAL = 3.6
agagccaatgaacttgtgggacaccatcaagcggaccaacttatgcactaggggagtcatagaaaaagaagagaaagaaaaaggggcaaagagataatttgaagaaacagcagctgataacttttcaaattggattaaggacatgaatataaacatccaggaagctcaaagaactctatgtaggataaattcaaataaatctacaccaggacacattatgatcaaactctcaatagacaaagaggaaatcttgaaaaatagcagtaagggagaagtgacctatcacatgccagggatcctcaagaaaattatcagcagatttctcatcagaaatcttggaattcagaatgtagtgagctgaaagaagaaaaaaaaactgtcaaccaagaatcctatatctagcaaatgattcttcaaaaatgagggagaaattaattttcccagataaataaaagcagaggagttcattatcattggacctgccctgcaagaaatgtagga

SEQ ID NO: 13287 - DNA, 600 bp, Homo sapiens
  MAP TO AC024168.1; EXPRESSED IN PLACENTA, SIGNAL = 1.4; EXPRESSED IN LUNG, SIGNAL =   2; EXPRESSED IN BRAIN, SIGNAL = 1.3
tggaatcccagctctaccaccaactagctgtgtgatgtggggcaaataacttttcttatcctcagtatgccacctgaaaaataacctgcctcatggggttgctgtgagaaattaagatgaaatatatacaataaaatgcttcacacagttctgccacagaatgcagtaaaaatggtcagtcaatcttagctgctattaaagcattcttaaaagttctggaaaagaacaagttctccctcctttccccaatcccattacctctgtcaaatagccagttgagttcacaaacttctcaaattcagtattactgacttcataggcatccatgtaaaaggcatcaatagtaactctcctcgcaggtgcttccccatcctgctttatctgaggatcatctgtgcccattgtaaatactccagcagggatggggaccatctacaatgaaaggtgaaacacaggaagtcatgcatcacagccaaggtgtacctgtgtaggggtaaagttcctagcacccaggaagcacgcaagtttgtaaatcttcaccacagtaataactgtaaaattcggaaaaatctctctataccccaaagaaggtgaatcacg

SEQ ID NO: 13288 - DNA, 549 bp, Homo sapiens
  MAP TO AC000134.14; EXPRESSED IN BRAIN, SIGNAL = 1.8
atgtcagggcagatggaaaggggtggcccatggaaggggaagggtccagaggcctcctgaccttttcgcccatccctctggaagtccacgtgacaccactcgccatcattgaccttgcggctggatgcccgcagcttgatgcccccagatcccatgtccagcagaagatagaggtggccgtccaatagctccatggcaaagtagtcggcccgctgagcagagctgtggctgccagctccacccccagcccgccggccctggctgaagagcagcagcccattgggctcggtggtgcggaagtctagggagatggagccagtgcgcttagcgctccagcggggcagcgccacaaaggcctcgggactctcaaaggtcacagggtccagggcagccacatcctcacagcggaatgacaagtccccctgcagcttcatcttggggtccccttcctttgccaggcgggatagttccaatttgaagtcattgttcttatagaccacctgcagggaggggtggggtcagggataaagaatccgaaagcagcttagg

SEQ ID NO: 13289 - DNA, 520 bp, Homo sapiens
  MAP TO AL121654.1; EXPRESSED IN BRAIN, SIGNAL = 1.3; EXPRESSED IN ADULT LIVER, SIGNAL = 1.7
tttgttggcagaaccagttgcagataactttaaggaggtatgtccatcagtcagcttagattgtgttaaactgtgggaatgatcacccaagtctcaagcatttatagaaatagtgattttttttttctctctcatacatcctgtggtcatctaataccctgggctccaggctgaaggagcagcctctatgtgagacaatgtcactctcattatagatagaaaagaaagtctgtgggctgatgtaatagctctaatgcttctgctcaggagtggcattcttcacttctacttgtggaccaaaatgagtttcatggtcaatatctgataccagagaagcataatcctcctatgtggaggggcaccacctctcatgtggccaagactgatggcaaaggtagggaagtagaataatcttatcacacagaggcagcagatactgggggcaaaacttaatctaacacagcaagaaagtataatcctatctataactcaaagtggaggggcatgggatatttgtgaa

SEQ ID NO: 13290 - DNA, 526 bp, Homo sapiens
  MAP TO AC013568.3; EXPRESSED IN PLACENTA, SIGNAL = 1.5; EXPRESSED IN BRAIN, SIGNAL = 1.5; EXPRESSED IN ADULT LIVER, SIGNAL = 1.6
ctgtgtgatccaaccactgccccctaaccaaagttgcatttttttcttctggaaagtcaaaacaccaagtgcaggttctagagggtgacaccagcagggatctctcatcttgattaaattggcacatcaacatgtttaattagatctttcagaaagtgccagaacataggatgtaaatgtcttctccattcatatgcagccaaatttcccaggcaaaatacttatcctgattctgatgtagttcttcacttaggactaaaaaaaggcttaagtataattgcttaagtgtataaggtggtgaaacaggaatcttgagctacggattttaagtggtaatagctacaggatttacttgaattgtttgctcttttaggtaattctcttgtcttgttcttcccagtatttcctggatttgttcctggcaacctcgctgggtctgaactgctggcctgcccagtggcagaagactgcttgcaacctttggtaggctttttagaaatttatgtgaccgtaatggctgcatttc

SEQ ID NO: 13291 - DNA, 542 bp, Homo sapiens
  MAP TO AL121603.2; EXPRESSED IN LUNG, SIGNAL =   6; EXPRESSED IN PLACENTA, SIGNAL = 3.7; EXPRESSED IN BRAIN, SIGNAL = 1.6
ttcttactggggctttgctatctataatacttatgcaaaattctatataaaataaaatcctaattgcattcttcccaaagaagcacaattactggagaccaagaaaaactgcttcttataatatgaattcacctacaagatagaaactacaaggataatatttttaaaaaacttacattttaatcatttttcttgctacccaaagccttggcctaaatagtttaatcaagttgaatttagtgatctcaattatgatggtgacccaccattttattaccaacaagtgtagacctgtgtttagttctacaacaagcaaacatcaaatattgtactaataaaatcaaaacaccattccgattattcattcacaacaaaatttcacaaatgtttatttcaatatgcctagttatatatgtaaattttaattctactttgattttaccataatgggagttgtttttcctaatatattatgaacatttgacaataaagttataaaaaattaaacaattttctgtatcagcaccacagaaatgaccaaa

SEQ ID NO: 13292 - DNA, 551 bp, Homo sapiens
  MAP TO AL109847.3; EXPRESSED IN PLACENTA, SIGNAL = 1.4; EXPRESSED IN BRAIN, SIGNAL = 1.3
cacctccgtcacttttgctctggtatttcgagcaagttatttaacttcctttgtaaagtgaagattatacttctttagagttgctgtgaggatgaaagcactcagaataagttcttgttgaatggtggatgtataaggaataccatgtggtaatgattatatgtttcaatattgtcaggtgaagtgaaggacaaaaatgttcaagtggtcgagcttcccattgtagacagtcttcatccccgtcctccatatttacccttggctgtaccagaagacctcgcagatcgacttgtacgagtgcatggtgaccctgcagtgtggtgggtgtctcagtttgtcaaatacttgatccgcccacagccttggctagaaaaagaaatagaagaagccaccaagaagcttggcttcaaacatccagttattgggtaagaatctgattttttccctcaaactgtgatatgtagtagttagggttatgtatctttacaatatattgtgaattttacaatatgtagttcaatttttatagtcccaccaaaggacagaggttc

SEQ ID NO: 13293 - DNA, 563 bp, Homo sapiens
  MAP TO AC012404.4; EXPRESSED IN PLACENTA, SIGNAL = 2.8; EXPRESSED IN BRAIN, SIGNAL = 1.8; EXPRESSED IN ADULT LIVER, SIGNAL = 1.4; EXPRESSED IN LUNG, SIGNAL = 3.2
agctgggaaaaggacagatggtatcaaggagaaaaatgacagtgaattcaaagttcccgttttggcagccaatcactctaatcaagaaaaagggatttggttactttcaataataaaataattcttaaaatgtaaaggatggaaaaaatgtaaaggatgaattaaaacagttccacacgaagaagaagaagaagaagaagaacaagaagaagaagaagaagaagaagaagaggaagaggaagaggaagaggaagaagaagaagaagaagaagaagaagaagaagaagaagaagaagaagaagaagaagaagaagaagaaagcctttctgacaagcaccacccaactactagttccatggaggtggaggggtttccgtattatttgatttatcttcattgcctagagcacaatgtggttccagatctcagtcaaacccaggaaatgaatagattgtaaactaaatcctttcagggagagacagagttcacacttctcaggatctccaccacgcctagtatcctgctgggccaaagtgcgtgcctggcaaacatgtccctggtac

SEQ ID NO: 13294 - DNA, 545 bp, Homo sapiens
  MAP TO AC009425.2; EXPRESSED IN BRAIN, SIGNAL = 1.5
tggaagaatcaagctctgtgcagagaaactaactaaatgttcaagtaagacacctcacttaggtagtcacattatttcattcagtgaagataaacacaaaacatacctgcttgaccagtggtgatactgacagcagcaaagagcctctgggatcggcttaagtcagaaactccatttacagcttcaacttcaaaagtataattagcgtgggctagcaggtccatgacagtgacatagttatcctctaatccagtctgctggggcatgtatccaatgttactcccacagggaacacattcgccctgctcccaactgcaccgcttacacaatattctgtaggtcacatcgtttcttcccccattgtctgcaggaggactccattccaaacttactgtggtttggttgatgttgaaaatgaggttctgtggtgcagatggaggcccttgggaaaccaagaataaataagtaaataagcaaaaatagaaaaaaaaacatacaaacaaaaagaacaaaaggatctgtgtggggcattaagctagtggctc

SEQ ID NO: 13295 - DNA, 549 bp, Homo sapiens
  MAP TO AC022013.2; EXPRESSED IN BRAIN, SIGNAL = 1.3; EXPRESSED IN ADULT LIVER, SIGNAL = 1.5; EXPRESSED IN PLACENTA, SIGNAL = 1.6
gggccttctctttcctatcggatcttacttgcagaatgctcttgagtcatatggacctggggcaaaacctggctttactcttgtcagatgtgatgagttgttttatctcagcctcagtttctgtatctgtgaaagttaaggacaacagttccaacacatcgtgattgttatgagttaaatgagaaaaagtgtatgatatttcctggcacagtgcccagcatctaaaagctgcccaataaatgtgcatttaatccttaattttccttttatttttttccacttaagtttttctcataccaatagaaatcaacaccggttggaaatcacagccccagcttcctgttttggccttcttctcacaacttagtcctttcacccactcttctggtatctgggaccctggcctctatacccgtcagaactcactgtggaatcatgtggactttaatgtgaaccactaagcttgaacctgaaattacacctgaatttccccaacctcaggctttcttgtatcaatactgccatcattgcactggttccctgatcatt

SEQ ID NO: 13296 - DNA, 594 bp, Homo sapiens
  MAP TO AC013528.3; EXPRESSED IN BRAIN, SIGNAL = 2.4; EXPRESSED IN BONE MARROW, SIGNAL = 2.5; EXPRESSED IN FETAL LIVER, SIGNAL = 1.6; EXPRESSED IN ADULT LIVER, SIGNAL = 1.5; EXPRESSED IN LUNG, SIGNAL = 2.3; EXPRESSED IN PLACENTA, SIGNAL = 2.4
caccacaatcaagcgttcaccatgcctaaaaccagggccagctgggtgggagtcacctttctgtgcagaaccagggtccttgggatgcctccaaagatatcatcaggcccctctcggtgtccccagccctccacccagtccagccaaccgcgcacacaccaaaccccgaggaggcaactcagccctccctcctccagggggcgcactctggcccacaccgacagcggcctggaggcacttctaggaaatcaaggtgcccttggagacagaatcccagcaggagccccacgccgagtgggagagacctccgccctgcttctgaagccgcaggcgctggcctcaataatcccccagccgcgggccgatttggcatcctccgacccctgcggccactgccaggtaagtgctcctgccaatgcatcagtgtagagcaagcctgccacctggtggtgaggccacccaactacaggctggggctcttgagggccatgctgtcccgcgccgagggccccacacccgggtgcccgctggctcccgcagagcagaccctgaaggcgcggagccctgcccagggcccttctaggcactgctgag

SEQ ID NO: 13297 - DNA, 555 bp, Homo sapiens
  MAP TO AC006548.20; EXPRESSED IN ADULT LIVER, SIGNAL = 1.9; EXPRESSED IN PLACENTA, SIGNAL = 1.5; EXPRESSED IN BRAIN, SIGNAL = 1.6; EXPRESSED IN BONE MARROW, SIGNAL =   2; EXPRESSED IN FETAL LIVER, SIGNAL = 1.8; EXPRESSED IN HELA, SIGNAL = 1.8
ctgacatgcttctgcctgacttgccttgggcaggggaagggaggctatgggcccaggagtggccaccaccatggcatagaggttcttgtctaacgtgactgtcctaggaatctggtgcactgagagtggggtggccggaacaccactattgttcaccaggtggcccccaaactcctggaacagggtgcttctgggtgccttgaaggggtacacaccctcattatccgcctcagagcctgtgaggctgcctctggtgtggccatgggaggccaggctccaggggattctgtgggtgctgcctctgaattctgcattgtgctggctgggcttggaaaggctatggaagccatggatgtgaccgctgaccccatcaacactgtatccactgtgctgggcaagattttgcatggctgtgtttctcctcatgatgaatggggcctcagaaccctgggagaagctggcactcctaagagagagaaagaagggaaggggcaggggtgagaggaggccaggactgccccagggaggcaggcggggaagttcacagcccaatgt

SEQ ID NO: 13298 - DNA, 598 bp, Homo sapiens
  MAP TO AL133271.11; EXPRESSED IN BRAIN, SIGNAL = 1.3; EXPRESSED IN FETAL LIVER, SIGNAL = 1.8
agacccacagcaaaaggttggtgcaaaagtaattgcggttttaaatcattataactaggctcagtcacatctttatttatcaaaatagaaaccattataatcaacacattttttgacaatgagaaataagtttgtttattcctgtcatgtagaaatccatgctttggtatttgatgaactcatggaaagcatttcctgcatgctgctgcttgtggaagtcttttccctgaaaaatattgttgctttgcttgaagaagtggtagtcagttggtgagaggtcaaacgaatatggcagatgaggcaaaactccatagcccaattcgtacaacttttgaagcgttgattgtgcgatgtgcggttgggcgttgtcatggagaattgggacctttctgttgacgaatgtcagctgcaggcattgcagcttttgatgcatctcattgaattgctgagcatacttctcagatgtaacggtttcgctgggattcataaagctgtagtggatcagactggcagcagaccaccaaacagtggccatggcctttttttggtgcaagtttggctttggaaagtgctttggagcttcttctcagtccaaccg

SEQ ID NO: 13299 - DNA, 566 bp, Homo sapiens
  MAP TO AC010931.5; EXPRESSED IN PLACENTA, SIGNAL = 1.4; EXPRESSED IN BRAIN, SIGNAL = 1.7; EXPRESSED IN HELA, SIGNAL =   2; EXPRESSED IN LUNG, SIGNAL = 3.1
ctcttgctgtgccatctctgcctccctgtgataagagctctgtcttcctcttcctacaggcaaagaaaacaaacaatgaaatacacaaagcacaaatggagcagttagaggtgagtggagggtggggagctttctcctgtcctctggagaatgtttctttccttctctttcagcatttccttggcttttctcccaaacgttcaattccagacaatcaacatcctcacattggaaaaggcagacttgaagaccaccctttaccatactaaacgtgctgcccgacacttcgaaggtgggaatctgggcatcccgtcatccttcaacctggcactttgacaggtctttagggggagtcttttgggccccatctcaacctctctcattacagaagagtccaaggatctggctggccgcctgcaatactccttacagcgtattcaagaattggagcgggctctctgtgctgtgtctacacagcagcaggaagaggacagggtgagtccaaccagctgccccatcccctggcagcctggcttcccagatagaggagtgagcctaaaggtccc

SEQ ID NO: 13300 - DNA, 530 bp, Homo sapiens
  MAP TO AC008132.34; EXPRESSED IN BONE MARROW, SIGNAL = 4.8; EXPRESSED IN LUNG, SIGNAL = 5.1; EXPRESSED IN PLACENTA, SIGNAL = 1.9; EXPRESSED IN BRAIN, SIGNAL = 2.8; EXPRESSED IN FETAL LIVER, SIGNAL = 1.8
aacatggactctctgtggggcccaggagccgggagtcacccctttggggtccacaacacccggctgtccccagacttgtgtccagggaagatagtgttgagggccctcaaggagagcggggcagggatgcctgagcaggacaaggaccctagagtccaagagaatcctggtgatcagagaagggtccccgaggtcaccggggatgcaccgtctgcatttcggcccctgcgggacaatagaggcctctctccctttgtgcccgggcccgggcctctgcagacagacctccatgcccagaggtcagaaatcagatataaccagacatcccagacctcctggacgagctcctgcaccaaccgaaatgccatctccagctcctacagctccacgggaggcttgccggggctaaagcggaggagggggccagcctcatcccactgccagctgaccctcagttcctcaaagacagtgagtgaggacaggcctcaggctgtctcttcaggtcacacccagtgtgaaaaggcagcaga

SEQ ID NO: 13301 - DNA, 587 bp, Homo sapiens
  MAP TO AC009499.2; EXPRESSED IN BRAIN, SIGNAL = 2.3
tattgtttggggaaaggcagtctggatcgatgaagactaaaatttccatgttattcattttccagatgacatttttaattgatactaaaacagtaacttggcctactgcaaatacttacgagtctcctttaattaaccaagtttctgatataccttgaaatttaacatctctcaggcattaagtgatggaaacataggttgtaaaatgtggacttgagtcttagtgaccatacagtgtattgtttacgttttcagtatttttattttcaagtttagtttgattaatttcaaaacctctctcactccagttcaataaacacttactcagcgcttgctatgtgcatagactatatgggtctacagttaataaaataacagcaaagtctttgattttatggaggtcattggggaaatgaaactcacacatgttatacaggatgtttaaagtgatgctgagatcctgggctgtgatggcaacagtaaggctcaaatggaaggcacccatgtcgggggcatcattaaaaatcggtgactgacggaatatgtcagtcaagagagagctaaaatggcaatttggaaagcaaaaa

SEQ ID NO: 13302 - DNA, 537 bp, Homo sapiens
  MAP TO AC023490.4; EXPRESSED IN BONE MARROW, SIGNAL = 3.9; EXPRESSED IN LUNG, SIGNAL = 2.3; EXPRESSED IN BRAIN, SIGNAL = 1.9
agaatcatccgtgggaagtgcaagcaggaccccagcatggccacagcacagcaagcgaggggaagagagaggatggaagtcaggtgggaagggggcttgcaggtcacagaaacaagcccaccttcgagtctgtaggggggctctgattcccccctggcttgcgccaaccgcatgtggagaaggggaagatgcctggggttggggagcaggaggccaggccagggggcagcagctgggatgctgggacttgtcagatcctggataaacctcaaaggtgaaggtgatgggatgtgctgagagtcatcagtgggatgtgcataagagggagtcaaagatgtctgagcagagagaaggacctcgctggcatctacagtgaagggagggacctcgctggcatctacagtgaatggagggacctcgctggcatctatagtgaagggaagggtcacgctggcatctacagtaaagggagggacctagctggcatctacagtgacgggagggacctcgctcacatctacagtaaagggaggggcc

SEQ ID NO: 13303 - DNA, 529 bp, Homo sapiens
  MAP TO AC011467.3; EXPRESSED IN PLACENTA, SIGNAL = 1.4; EXPRESSED IN BRAIN, SIGNAL = 1.5; EXPRESSED IN ADULT LIVER, SIGNAL = 1.6; EXPRESSED IN FETAL LIVER, SIGNAL = 1.7
tcccctgtctacctcacctgcctgtgcctggtggcctgttgcatccctccctccagagtgcaggtgccccacaggctccctctaggctgagctcatggccctgctcctagtggccagaggtggcttccaggatgagccagctaagctccagggtctttccgggaaaagagttccttggaaagcatgtgaacttttcaccgcttccgacaaccatgaaagctctgagccaggtttagatgccgtaggattcaagggggcagcaaggggtccagagctgcagacagctgagggtgaccattggggtctgctcaggcaagatcctggagtaggtgaccacgtccaaggcaaactgtgactaaaaggaagtgctgggttggccagaatagaggaggctgagtgctgagaatccccaggggatctcggagggggcgtggaaagggccataatgggagggcagaggtgagaacagggaatgatgatgtcacagtgctgagcagcggggctggggacggagtaagtggaggtggag

SEQ ID NO: 13304 - DNA, 564 bp, Homo sapiens
  MAP TO AC008545.3; EXPRESSED IN BRAIN, SIGNAL = 1.6; EXPRESSED IN PLACENTA, SIGNAL = 1.7; EXPRESSED IN FETAL LIVER, SIGNAL = 1.6
acgtgctctgtgatgtcagcaaaccctaccgtctggccacgcctgtttatgcctccctcacacctcggtcaaggcccaggccccccaaagacagtcaggcctcccctggtcgcccgtcctcggtggaggaggtaaggatcgcagcttcacccaagagcaccgggcccagaccaagcctgcgcccactgcggctggaggtgaaaagggaggtccgccggcctgccagactgcagcagcaggaggaggaagacgaggaagaagaggaggaggaagaggaagaagaaaaagaggaggaggaggagtggggcaggaaaaggccaggccgaggcctgccatggacgaagctggggaggaagctggagagctctgtgtgccccgtgcggcgttctcggagactgaaccctgagctgggcccctggctgacatttgcagatgagccgctggtcccctcggagccccaaggtgctctgccctcactgtgcctggctcccaaggcctacgacgtagagcgggagctgggcagccccacggacgaggacagtggccaagaccagcagctcctac

SEQ ID NO: 13305 - DNA, 501 bp, Homo sapiens
  MAP TO AC010618.4; EXPRESSED IN BRAIN, SIGNAL = 2.8; EXPRESSED IN PLACENTA, SIGNAL = 5.4; EXPRESSED IN BONE MARROW, SIGNAL =   3; EXPRESSED IN HELA, SIGNAL =   3; EXPRESSED IN ADULT LIVER, SIGNAL = 1.6; EXPRESSED IN FETAL LIVER, SIGNAL = 2.1; EXPRESSED IN LUNG, SIGNAL = 7.9
ggggtaactagatccctggctttctgggcaagctccctccggagggcgggaggagagtgacaggcccgatcttgcaccccagctatgtgggccggaagcggatgcaggtggagcaccccgagaaggctgtgcctcgcgtgaggaacctggtggaggccgactattcctactggaccctggcctacgtgatctccctgcaaggcgcccgcaaactgctggctgctgagccgctctccaagatgctgcctgtggacgagttcctgcccgtcatgttcgacaaacacccagtgtgagaggggcaggcggctgctgggctggggtttcacggtgggtctgtcctgggagaatggggatgtgagactcacggcctccgagaagatgtctcttcttttgcctacttctccctccgtttgccccctcgcagatctgtctccatttgtatcccctgcacacttacgttttaatctgtccccgctgacttcttcacccccaatttttcct

SEQ ID NO: 13306 - DNA, 578 bp, Homo sapiens
  MAP TO AL117667.2; EXPRESSED IN BRAIN, SIGNAL = 1.6
cgaaacagtttgattgccaccatcttatataattacaaaagtgcttcatcttaatttttttttctttctcttgcatacaggaatgctttcaattcatactgccagctctacctcatgccattgaccttttacgtgatgccattgtaaaagtaaaggaggtgcatgatgaacttgaagatttgccttccccacctccccctctttcccctcctcctactaccagcccccataaacagacagaagacaaaggagttcaatgtgaggaagaggaagaagagaagaaagacagtggtgttgcttcaacagaagatagttcctcatcacatataactgcagcagccattgctgccaaggtaagcctgatgagagttactcagaggcctaaaggacccacaggtaaatgtactggtttcatctgttttgcatcgcatccctccctacatttaatacttcttcagagaaccctaaaaaaataagtgggatgtccatgacactccactactatgtttccttcttgatatagattccttgaagtcactgaagttaattctgagttctgaggcattactgatgagctg

SEQ ID NO: 13307 - DNA, 518 bp, Homo sapiens
  MAP TO AC018720.2; EXPRESSED IN BRAIN, SIGNAL =   2; EXPRESSED IN PLACENTA, SIGNAL = 2.6; EXPRESSED IN BONE MARROW, SIGNAL = 1.9; EXPRESSED IN LUNG, SIGNAL = 4.3; EXPRESSED IN ADULT LIVER, SIGNAL = 1.4
tgacagcttggaaagggaagatcttatgccttttcttttctgttttcttctcagtcttttcagtttcatcatttgcacaaacttgtgagcatcagagggctgatggattccaaaccaggacactaccctgagatctgcacagtcagaaggacggcaggagtgtcctggctgtgaatgccaaagccattctccccctctttgggcagtgccatggatttccactgcttcttatggtggttggttgggttttttggttttgtttttttttttaagtttcactcacatagccaactctcccaaagggcacacccctggggctgagtctccagggccccccaactgtggtagctccagcgatggtgctgcccaggcctctcggtgctccatctccgcctccacactgaccaagtgctggcccacccagtccatgctccagggtcaggcggagctgctgagtgacagctttcctcaaaaagcagaaggagagtgagtgcctttccctcctaaagctgaatccc

SEQ ID NO: 13308 - DNA, 523 bp, Homo sapiens
  MAP TO AL138750.5; EXPRESSED IN BRAIN, SIGNAL = 1.6; EXPRESSED IN PLACENTA, SIGNAL = 1.6; EXPRESSED IN ADULT LIVER, SIGNAL = 1.6; EXPRESSED IN LUNG, SIGNAL = 2.3
tgggcatcacacagaaactcactgaatcagatctacttcttttgcagactcaaatgacttagacttaggaagttgggtggtgcttggaagtgaaccctgcaaattttgcccctgcctatctctctgcatgcagtgacgtttatccaaggcacaggaagagtctgcagctgagagagtcctgaaaagaggtcaatcctagaaatgtcacgtctatgaattttgaaatcaaagacatgctaagagaaagcacaataactataaaacatacgtctgactttctgatttcttaccttgttattgtgtcatgacattgtgttatcataacccagattcccttcaaattcttcattacgttcacagccatgataccggtccttattgcagggcctaaatacctgctgctagttagtgggatgcacatttggcgacagatctcctcgttctcgttcattctgtaggactaatctgcagttttgactagtagacagtagttcatgtgtaaagctgcctcacatgataagca

SEQ ID NO: 13309 - DNA, 517 bp, Homo sapiens
  MAP TO AC018558.2; EXPRESSED IN BRAIN, SIGNAL = 1.6; EXPRESSED IN HELA, SIGNAL = 1.8; EXPRESSED IN ADULT LIVER, SIGNAL = 1.8; EXPRESSED IN FETAL LIVER, SIGNAL = 1.7
cttgtcagcgtggagaaaccctcagtccaatcctaaattttaatctgagcaagataattcctactgaagtaaatccatgtgaatgtagtctgtgttggaaaatctttatttttatctattccttcctaggcacctcatatctcaccctggaaacaagccatatgaatgtgaagaaaatagacagaagccagataaaccttaacaatgtcagaaagccatcattttgttcacacatcttcaaggacacatggcattgcacactagaaatggaccttataaaagtactgtatgtgaaaaagcctttgattttcccaatgtaccttatatacgtcagagaaatcacaccaaacagaaagcctgtaagtgtaaacaatgtggtagagccttcagccacttggattcttttgagaaacataaaataactcacactgggacaaaactctgtaaatggaaggtatgtggtaaggccttcagatatttcagttatctttgtaaccatgaaaccactcatactgga

SEQ ID NO: 13310 - DNA, 557 bp, Homo sapiens
  MAP TO AC025286.1; EXPRESSED IN ADULT LIVER, SIGNAL = 1.8; EXPRESSED IN BRAIN, SIGNAL = 1.6; EXPRESSED IN PLACENTA, SIGNAL = 1.4; EXPRESSED IN BONE MARROW, SIGNAL = 2.1; EXPRESSED IN HELA, SIGNAL = 2.2; EXPRESSED IN LUNG, SIGNAL = 2.8
gaggaagtggctttgtgagccatcgacctcacagagggggagaagcagaaacgtaaccaagcaaggtgcagagctattttcagccttggggttttcaccccagggtccccaaagtgcttggggcagagtacagctcccctttgagaaagtcggtgctctggactgatgaaaaggacaaaagagaagccaggtgagaacaaggagattcaggggatgcgggggtggcacatgtcctcagtggagccttgggctccgggcacccacgctctgggcctcagttttctcacctgctctctgaggttctgtgtgagattcctatggcggctgtaacaaatgaccacaaatttagtggcttgaaacaacacacattcattcttttacagttttgagaagtcaaagtgtgggcagaacggttcctttctggaggctttaggggagaatctgtttcctcgcttctccagcctttagaggccacctgcagtccctggctcacggccatcttcaaagccagcggtcgcatcgccctgacctccgcctccatcaaccatctccttgct

SEQ ID NO: 13311 - DNA, 510 bp, Homo sapiens
  MAP TO AL157885.2; EXPRESSED IN BRAIN, SIGNAL = 1.6; EXPRESSED IN PLACENTA, SIGNAL = 1.4; EXPRESSED IN FETAL LIVER, SIGNAL = 1.7
aaggaccagtgagatgagggttagaaaattcagtgccatggtagataaacacataattttcaaatagagttgtatctgagacaggagaaagatgatagtcatattcctcaaatgattcaattttcttttagaaaaacgattccttatccctttagggggaaatttcagagatgttagaatcaaaataacttcagatgttacaattttctctttattttgtatctgatttcagtgtatggaaaccaaaacgctgcagaaaaaatctggaatagtgagcagtgaaggtgctaatgaaagtacgcttcctcagttggcagccatgatcattactttgtccctccagggtgtttgtctgggacaaggaaacttgccttccccagactactttacagaatatattttcagttccttgaatcgtacgaatacactccgcctatcaggtaaggatgttttcacgaatttaacttccaagtcacacctgctaaataaactatgccaaaaacaaaggcc

SEQ ID NO: 13312 - DNA, 536 bp, Homo sapiens
  MAP TO AC011455.3; EXPRESSED IN BRAIN, SIGNAL = 1.3; EXPRESSED IN HELA, SIGNAL = 1.7
caaggaggaggtgaggagtgtggaggccttgccctgcctcacctagctggggccctgccctccctgcacagcctgccccatgatcctcattgccctcaaaccagctgctctcctccccatctcccctgccctcaacctcccctctgacccggcacccctgccccccagctgacccgctgtctggcagaggtggtcacagaggtgctgaccgtgggccaggtccagagaggaccctgcactgctcttctccacaagggtaaggaggccccgggccccacttgccctccacaaccccatgggaccctaccctaccccacccagggtcctgcccaggtgcccacatgctctcccacccaggctacctggaggaagaggtcctcattcccagagccctgttgcctggaccagcggggcactgcccagcattcacacctgacagagcctggccaccagcaacacccttgtggttccctgcagaggggccagatggggcagggaacatcccctcccaggtgggatgaaataggaccctcccc

SEQ ID NO: 13313 - DNA, 533 bp, Homo sapiens
  MAP TO AC005678.1; EXPRESSED IN BRAIN, SIGNAL = 1.9; EXPRESSED IN PLACENTA, SIGNAL = 2.4
actcatgcccctttctgatgcaccaaactgtcaaaaacatgctttgtgaaaaaatggctgttcttcactctggcctagaaatccacaatttatgttttctcaagcagaagtcacatcttttttctcacctgctctcctggttcatccagttctctctctaaatcctccagcacagtcaccacctcctccccactctctggatgctgctcctgcacccaggcctggagctcctcaggtaggatggtcaggaactgctccagcaccagcagctccagaatctgttctttggtgtgggtctctggcctcagccactgatggcaaagttctcggagtcggctcaaagcctcacggggaccagatgtctcctggtagcagaactgtctgaagtactgacggaagacctctctgctatgggtgttgtttttacgcaggtcccaatcctgtctggtggtatatttctcttcctctatctttacttccaaaggttcatcctggtccatgtgggcctggatagcccaagtagatgccatttt

SEQ ID NO: 13314 - DNA, 577 bp, Homo sapiens
  MAP TO AC011497.3; EXPRESSED IN BRAIN, SIGNAL = 1.7; EXPRESSED IN BONE MARROW, SIGNAL = 1.6; EXPRESSED IN FETAL LIVER, SIGNAL = 2.4
tgtttgcttatacccagccctgtaaataacagtgaaaggttgctcgtagacactcaacgttttctcatacaccatgaaaatcgaacctccccctctatgcagttaccccatcagtccccattacaacctctgatggctgccgccctagctggatccctaggagtctgagtgcaagacacctcttttagtattccttctcatctttttactttgcatttccagttttgccttgcacaaggtctcttcttcctctgtggatcctctgcctacatgtgtctacctgctaattggacaggcacatgcacactagtttaccttactcccaaaattcaatttgcgaatgggactgaaaagcttcctgttcctctcatgacaccgacatgacaaaaaaaaaggttattccactaattcccttacttgtcggtttaggactttctgcctccgctattgcgctcagaactggaatagcaggcatttcagcctctgtcacgaccttccagagcctctctaatgacttctctgctagcatcacagacatatcacaaactctatgagtccttcaggccaaggttgactc

SEQ ID NO: 13315 - DNA, 598 bp, Homo sapiens
  MAP TO AC011625.2; EXPRESSED IN PLACENTA, SIGNAL = 8.5; EXPRESSED IN BRAIN, SIGNAL = 1.3; EXPRESSED IN ADULT LIVER, SIGNAL = 1.5; EXPRESSED IN BONE MARROW, SIGNAL = 1.6
gatcactccaaagaccgagccgctctcgttgacacctgacagatagtgctccttcttatgataaggctcccccagcttgaagaggtcctccagcctcagcagcttgcagatgccttggtacaggctcccacaggcaatcagcctgttctccttgtagtctatgaggagcatcttgttgacattgttggtggtggtcaggggctcattgcaggtctggacgatgcggggtgggtaacacttggggttgtcctcgtccggccctgtctcatgcgtcaccaagaccttcaggtcgctggagagcttgtaaatccgattgacggcccccaagtaaatgtgtcctgtcctctcatccaccaccaggtgattgaaaccctcggcgggctctcctcggaatgtgacaaatgaccgctgcttctgggacagcggggctggctgccgggtgagcaaagtggaggagcccatgcccaccatgaggaggtgggagagaaggcaggtccagttccagggcatggctttcatggcagaggcgggtcccagtggcacagcagcactcaggcacagtcgtcccctcagagggccaggactcagcaatgcagtc

SEQ ID NO: 13316 - DNA, 545 bp, Homo sapiens
  MAP TO AC002036.1; EXPRESSED IN BRAIN, SIGNAL = 1.3; EXPRESSED IN PLACENTA, SIGNAL = 1.7; EXPRESSED IN ADULT LIVER, SIGNAL = 1.4
tgttgtctctgtggagccagaagataggctttagatagtcatagtgatgtcttttttaaaaagtctctctctttgcctaggaaaacccttttgtaacaatgagaccttcggccagtatcctcttcaggtaaacggttatcgcaacttagacgagtgtttggaaggggccatggtggagggtgatgttgagcttcttccctccgatcactcggtgaagtatggacaagaggtacgttggagatctttatttgctgtgccagtgacaaagccagttaagtaggagtgagcttttgggcagactagtttcccatcacatattaagtaactttacacttagcagaacttgaatttgtcttaagtctctcatcagttgatgtgagtcagtgagtatcagtactttgataaataatttttactaaaactatgaatttgagttactcgtgtaaaggttgtatgctgcttctgatgttttaagtatgatcaagtttctctctttctgttgaagcctacctgtacctgagtagggagaacccactgcctccata

SEQ ID NO: 13317 - DNA, 502 bp, Homo sapiens
  MAP TO AC008967.3; EXPRESSED IN BRAIN, SIGNAL = 1.3; EXPRESSED IN BONE MARROW, SIGNAL = 3.5; EXPRESSED IN ADULT LIVER, SIGNAL = 1.4; EXPRESSED IN LUNG, SIGNAL = 2.9; EXPRESSED IN FETAL LIVER, SIGNAL = 1.6
ggttctagttgccatgagcctattctcttgtctaatatccaaagagctaatgaaagcagtataggattaccactgatgcatttcttcctctgtgtgacattagactatcaactttattagctcaattatttttcttgcatatccatccaaagtatggtctttgtccatattgttccatttaattttaaaagtcatcaaccaattcattagatagaagatataccccaaatataagtaattgaactaatttaccgttttcttagcaactcgccacttatcttcttcaatgctatggtactggatgagagtgtttttaagtttagttgcaaaagaagcaacatcagacaggccttccattacttctctctgttatggagaccaagattagcatcagcaaataccacagtttgaggcaataggccagtgggtctcgaatctggtttcacaatataataacctaccagagctataaaagatagctaccctcaccccaaatcaacta

SEQ ID NO: 13318 - DNA, 531 bp, Homo sapiens
  MAP TO AC002044.1; EXPRESSED IN BRAIN, SIGNAL = 1.5; EXPRESSED IN PLACENTA, SIGNAL = 1.9; EXPRESSED IN BONE MARROW, SIGNAL = 1.9; EXPRESSED IN HELA, SIGNAL = 2.2; EXPRESSED IN LUNG, SIGNAL = 1.9; EXPRESSED IN ADULT LIVER, SIGNAL = 1.8; EXPRESSED IN FETAL LIVER, SIGNAL = 2.1
tgagatccccctagacatgcggctcgggggcgggcagctggtgtcagaggagctgatgaacctgggcgagagcttcatccagaccaacgacccgtcgctgaagctcttccagtgcgccgtctgcaacaagttcacgacggacaacctggacatgctgggcctgcacatgaacgtggagcgcagcctgtcggaggacgagtggaaggcggtgatgggggactcataccagtgcaagctctgccgctacaacacccagctcaagtccaacttccagctgcactgcaagacagacaagcacgtgcagaagtaccagctggtggcccacatcaaggagggcggcaaggccaacgagtggaggctcaagtgtgtggccatcggcaaccccgtgcacctcaagtgcaacgcctgtgactactacaccaacagcctggagaagctgcggctgcacacggtcaactccaggcacgaggccagcctgaagttgtacaaggtaaggcccagctccttatggctcaggcgctctttctgaaa

SEQ ID NO: 13319 - DNA, 552 bp, Homo sapiens
  MAP TO AC023753.5; EXPRESSED IN PLACENTA, SIGNAL = 1.4; EXPRESSED IN BRAIN, SIGNAL = 1.3; EXPRESSED IN FETAL LIVER, SIGNAL = 1.6
ttttgcatgggtcaagtgagattaccctgagaacatttttgctacatttttgaggttcatgattatactctcacccacacacagtatgcacacacatacacatacatttatttaaatccagtgtacatattattttcaaaatatgtattccttgaatgactgtaccttaactgaaaacaataatctgaaaattttcaagctatgcattgaaagagggaatacttcagtaggcatatattagaaaggcataacagtccttgatctcaaggagtctgtactctagtaggagagacatatgtatgaacaagtggccacaatataatgcattgagttttatgactaatgcatgtccaagaggatatggaagcacatgaaggaggaatccttgataaactggtgtgagatttaaaggcaggtcaggcaagattctcttgaagaagtgataaccaaattctccagactaaaaggaaaatacaaaactattagttactgttagcgctctttgaaaagatgtgaaataaagagtgagagagactggttgattgaggggaa

SEQ ID NO: 13320 - DNA, 551 bp, Homo sapiens
  MAP TO AC023078.2; EXPRESSED IN BRAIN, SIGNAL = 1.9; EXPRESSED IN PLACENTA, SIGNAL =   2; EXPRESSED IN BONE MARROW, SIGNAL = 1.5; EXPRESSED IN HELA, SIGNAL = 2.1; EXPRESSED IN LUNG, SIGNAL = 1.8; EXPRESSED IN ADULT LIVER, SIGNAL = 2.1; EXPRESSED IN FETAL LIVER, SIGNAL = 1.7
tgtgcatcttcagagcttgcaccgttgccaccaacacaaccacactgggcaccaagctggaagcttgacacttgttgaaaaatttctccatttcaatgtcagcaccaaagccagcttcagtcactacaaatccttcttcaccaaccagtttcagggcaattttgtcagccaacactgaagaattgccatgggtgatgttagcaaaagggcccacgtgcatgaatacaggtgtccattccagggtctgcatcagatggccaccaccatccttcccagccatgtcttcatgtctgagaggctgttcataagggccagcaccaccatgatctcgctggccaccacgatatcaaacagcgtttgccaagaggagcctttctctgtgtttgcctgcctgatggttattttttgtagaaatcagttgtttgtatttttttaattaaatttttttatttccataggttattggggaacaagtggtgtttggttacatgagtaagttctttagtggtgatctgtgacaaaacggggcagcctgtggcactgatgatttg

SEQ ID NO: 13321 - DNA, 590 bp, Homo sapiens
  MAP TO AL136143.6; EXPRESSED IN BRAIN, SIGNAL = 1.4; EXPRESSED IN PLACENTA, SIGNAL = 1.5; EXPRESSED IN ADULT LIVER, SIGNAL = 1.6
ttggaaaaaggctgtatggggccagtacaaagagaattgtttatgcttctgtgaggagatgccaaaaaatatataagaacaacaacaacaaaaaatccgccatcaaatttactccttaagtttactgacagcctgtcacaatgaaataaaacatttatattcactttatggacttaatttaaaatgacttagttgaagaaagcagccccttgctttgaactacctgcaatccgaacacgaaactcgtcatgagaatgtggaaggaggttgccggacgctgctggctgccttccagcgtccacttccctttctctctctcctgacacagctccgtcgtgtgtttggtccccaggcctgaggtctctgtgctgccggggaagctgaccatgctagttccaatggtggccttggtttagaaaatgcaaaaaagatctctgcaggtcaaacagcgataaggaaaggttagcagtgagaattcatcagacaagaaggtgcctgagttttggcacaaggtcacgttcactctctgcttttgactgtgctgcttgtttaggcacagagatgctgtggctgagtgtcttgctggtgga

SEQ ID NO: 13322 - DNA, 519 bp, Homo sapiens
  MAP TO AC004254.1; EXPRESSED IN HELA, SIGNAL = 1.7; EXPRESSED IN LUNG, SIGNAL = 2.9; EXPRESSED IN BRAIN, SIGNAL = 2.7; EXPRESSED IN PLACENTA, SIGNAL = 1.4; EXPRESSED IN ADULT LIVER, SIGNAL = 1.6
agtgcccttggaatcacatcatcagggttcattgattctggagataatctttaatcaggcccagaccctggtaaacaatgtgaagccctaactcagcctgggtctggaaggtcttggtgcctaagtctgggaaggaagttggtgatacaagctgtttaaatctgtactgcatgatgtcttcagcattgtgataaataaataagtaaaaataaagcccttgaaagaaagatgaaaggtgacattgacagaccaaactgagacatgattcaggcttcaccttcaggaatattggcaggaccctctgcaggacaagaaaacagagctacataattatctgagtttataatctaactgaaaaggtaagaaaatacacatatataagcatatgccagaaagcagtaaatgccataacagaggtgccaagcgattatgagggatcagaagagggatgaatcatatgtgacagagatgtgttagattttagtctcatgtcccactagggcttacccagtgactgaa

SEQ ID NO: 13323 - DNA, 505 bp, Homo sapiens
  MAP TO AC010636.3; EXPRESSED IN LUNG, SIGNAL = 3.2; EXPRESSED IN PLACENTA, SIGNAL = 1.5; EXPRESSED IN BRAIN, SIGNAL = 1.4; EXPRESSED IN ADULT LIVER, SIGNAL = 1.6; EXPRESSED IN BONE MARROW, SIGNAL = 1.7
ttgtctttgcgagcacattactagcttgtaattggagaatatgagcaagattcatgttatttatttttaataaaacaggtattgttgtctctaagccagacctcatcacctgtctggagcaaggaaaaaaacctttgaccatgaagaaacatgagatggtagccaacccctcaggtaggtgcaagtgaaaatgaatatagcagacgacacagataagaggtcccaaagtcaaagagaaagccagtccttaaagtgtgatttgggaagctgtgctccaaagaaaatagtacctgggagctgttttttttttttttttcttttttaaattttgctcttataaaggggcatcttctgcttatgcttttaaattctgtaaaaattctacttttctttcggtgagctcccttcaagttcacagtgagagccagagtcctcttcatggcatataaaatactgcacagtctggctgctttttcattgttttggggacacacaaatatctgca

SEQ ID NO: 13324 - DNA, 508 bp, Homo sapiens
  MAP TO AC019224.2; EXPRESSED IN BRAIN, SIGNAL = 1.8; EXPRESSED IN PLACENTA, SIGNAL = 1.7; EXPRESSED IN FETAL LIVER, SIGNAL = 1.8; EXPRESSED IN HELA, SIGNAL = 1.8; EXPRESSED IN ADULT LIVER, SIGNAL = 1.6
cagcaagaagctgccctaagcaagccctcttccagccagcacagacatggaccacttttccagaaggacaggttctttcatggcctctcctttggcaagcttaaccaaccacctacaagcactctcacttccaagacaaagttatgtgggatacatatcaattcatgtccatctctagtcaatcacattttgccaactctaacacatggtacatggtgatggttttggagtatcaaatgagggatctggggagaagggacaccggcattttcaccaaaaccctggtggccgagcacacctacacattatgctccagagtgcggagatcttccaggagctcctgggctgcggtttgcaggcgggggttgcggctcttggacattgccaggatgcgttgcaggggcagggagctccggaactcagaggccgacttggagaagacttcaggttccagaaccacagactggacaagcctcagtacatgaaggcacacctctgcatctggatc

SEQ ID NO: 13325 - DNA, 505 bp, Homo sapiens
  MAP TO AC018552.2; EXPRESSED IN ADULT LIVER, SIGNAL = 2.2; EXPRESSED IN BRAIN, SIGNAL = 1.6
caatttgaaaaccatgatccgattcagccaactattcaaaatctgtattcaaaatcagactcagcaaagattccagtatctgaagaccataatcccactcggcaaaaaattgctcacgtcattgatggacaaatgaaattccgacacgtatctttgttgtttccttttttttcttgttaatgtaaatgaaaatatcaatataggtatccaaacaacacttagagagcctgttgtcaatatttagcagcccaccactaatgtggggcggaggaggccagctctggcccgcccaggactgaggggcccaaggctgcagggcctgcacgggtgggtggaccgactgcctgcgtttcagctgctctgggtggaccagttccagtgtctcctccctgggagtggggtggggggctgccttcctaccctctaccctgggaggcttctgcagggtttctgcttggttcctagtgatctccggctatcaggaccctgtggtgttagcagctga

SEQ ID NO: 13326 - DNA, 562 bp, Homo sapiens
  MAP TO AC023890.3; EXPRESSED IN LUNG, SIGNAL = 2.3; EXPRESSED IN BRAIN, SIGNAL = 1.7; EXPRESSED IN PLACENTA, SIGNAL = 1.7; EXPRESSED IN ADULT LIVER, SIGNAL =   2; EXPRESSED IN FETAL LIVER, SIGNAL = 1.7; EXPRESSED IN HELA, SIGNAL = 2.4
tctccacagggtcaggagacaaacaaccagtcggcctcccccagcagggggcagacccaagccccagcccaagcccaagcctcaggtgccacagtgcaaggctttgtatgcctatgacgctcaggacacagacgaactcagctttaatgccaatgacattattgatattatcaaagaaggtaagtgtgtggctggttggctgggacagcctcccaaagagcatgcagtcacattgctgtaagatctagtgtgaaaatgaaaagaatttatgggctcctcaaactgcaatttgtagaggcaggtcaggcctcaggctcagtctgatcaagacaccagcttttttaatgcttctttcagctctgcccccttatttatattccctcccttgtcaagctgtttttcttcatggtagcaaaacggcagcagcaattccaggccaacatatcaaaccatgtctgaaatgtgcatcatctctgaaacttctgttcttagtcattggacaaaagtcctgacttttattctgatcagaccaaattagccatgtgtccatccctgaaccaac

SEQ ID NO: 13327 - DNA, 591 bp, Homo sapiens
  MAP TO AC013827.4; EXPRESSED IN BRAIN, SIGNAL =   2; EXPRESSED IN PLACENTA, SIGNAL = 1.9; EXPRESSED IN BONE MARROW, SIGNAL = 1.5; EXPRESSED IN FETAL LIVER, SIGNAL = 2.1; EXPRESSED IN HELA, SIGNAL = 2.1; EXPRESSED IN ADULT LIVER, SIGNAL = 2.1
aaccatgcgttagagccaagaggcctgtattttgatgcagcatgagttgaatgaacacaaaggagcaatcactgaagtgtgcaaggtcgtgaacaagggtgagattcctgaaacgctttcattgttgctggttttttacctgatggtgcagaaacttgcttcagggatcgacataaggctggagagctccagatgattagatactattctcaggataaaattgtttgacaatacgcttttagtgaagatctattcaacggattatttattacgcaccaagtatatatcaagcactatagatggcattggggatacagcagtgaataaagtatggtcctcgttcacatattaaaatgagaaattgtaatgcaactgttaagtggaagttagtagacagtactgtgggaacacaaagagtataaccacacttggtctaagatggtcagaagagatttgcagatgaataatgccaaggcagaacacctttaattgcgtaaaaattactagataatgagacaagttatcctgtgtagaggcccatagcctagcatgcttggaggatgaatcacaggtggctgagcaagtgtgaaa

SEQ ID NO: 13328 - DNA, 504 bp, Homo sapiens
  MAP TO AC003692.1; EXPRESSED IN BRAIN, SIGNAL = 1.8; EXPRESSED IN BONE MARROW, SIGNAL = 3.2; EXPRESSED IN FETAL LIVER, SIGNAL = 1.9; EXPRESSED IN LUNG, SIGNAL = 1.7; EXPRESSED IN PLACENTA, SIGNAL = 2.9
ttgatctttgcttccctgtgaaccaattttaaaaaattgctcaaaacaaaatataatctatctgtacagactcaaaatataaatttgaggaacttggcagaagaatcaagatttaagtactaataacacaataaaaatccgctgatacgaagaagtatctttatctaaaaatggtttcataaagtcacaatccttactgggtgattaactttagggtgattttcatgctttttcttcatttcttcaaatttagactcttcttcttttctcttttcttcattcaatgtttttaaatattctctcctttcatgttccttcatcatttcatattttttaaattcttcatgacgagtcttgtcatagtgttccagatcacttgttgcctgaaatgcaataatgcatttaagttaaataaaaacattcacttgaaaaatgtaaataaagccattcttgaatatagcatactcttgaacagaagtggtacgggagggcaaaaacatactg

SEQ ID NO: 13329 - DNA, 563 bp, Homo sapiens
  MAP TO AC022377.1; EXPRESSED IN PLACENTA, SIGNAL = 1.7; EXPRESSED IN BRAIN, SIGNAL =   2; EXPRESSED IN ADULT LIVER, SIGNAL = 1.6; EXPRESSED IN BONE MARROW, SIGNAL = 1.5; EXPRESSED IN LUNG, SIGNAL = 2.6
tcagatttcccgcttaccagaagcttctcacctctctctcctctgcagcgtcgagggcgaggcccccagcagtgagactggcacatccctggacagcccctcagcctacccccagggccccttggtgcccggttccagcctgagcccggatcactacgagcacacgtcagtgggagcctatgggctgtactcggggccgccggggcaacagcagcgcacgcggaggcccaagctgcagcactcgacctccatcctgcgcaagcaggctgaggaggaggccatcaagcgctcacgctcactctccgagagctatgagctctcctcggacctgcaggacaagcaggtaggagagcacagcccctcaggccacacatgcaagcgcagggcagctctgcccaccatgtgtgcccccaccaggcatggtggcagatctctcccatagacttgagttggggtgcatgtgggctaaggctgagggctctgccccagttccagctccacctgtagctgctctcaggagcctcttgccccagctggctctggctggcgtgtatgaaggacct

SEQ ID NO: 13330 - DNA, 596 bp, Homo sapiens
  MAP TO AC008962.4; EXPRESSED IN BRAIN, SIGNAL = 1.4; EXPRESSED IN ADULT LIVER, SIGNAL = 4.8; EXPRESSED IN FETAL LIVER, SIGNAL = 1.6; EXPRESSED IN LUNG, SIGNAL = 2.2
ccatctatcatcccactgccaccatgctggcctcagggctgcttctggtgaccttgctggcctgcctgactgtgatggtcttgatgtcagtctggcggcagaggaagagcagggggaagctgcctccgggacccaccccattgcccttcattggaaactacctgcagctgaacacagagcagatgtacaactccctcatgaaggtgtcctaaggcagggagatgggtggcacggggtgggggctgcccagttggctggggctttgtggcaggggattgaccagtgtggaccagagtcttaggaaagggagtcttggagtttcagcatcagggtcctagcaggaaagacaggatcttgggatgtccagctccctgactgtgagaacctgggggcgaagcatcccagtacatgatatctcagtgctgggcccattcagagtgggggctgctccctctaaccactcccacctgcctccaacagatcagtgagcgctatggccctgtgttcaccattcacttggggccccggcgggtcgtggtgctgtgcggacatgatgccgtcaaggaggctctggtggaccaggctgaggagttcag

SEQ ID NO: 13331 - DNA, 532 bp, Homo sapiens
  MAP TO AC002400.1; EXPRESSED IN PLACENTA, SIGNAL = 1.5; EXPRESSED IN BRAIN, SIGNAL = 1.7; EXPRESSED IN BONE MARROW, SIGNAL = 2.3; EXPRESSED IN LUNG, SIGNAL =   4
tctgcatggagaagcaacagcatctggggataacatgtacatctctttccagcctggctgtccggggggtttgtagtggtgttaaaccttctgcttgtgccctttataccaggcagcctgccgcctctcattgtgtatgaccggaatggattcagaattctgctccacttctcccagacgggagcccctgggcacccagaggtacaggtgctgctcttgaccatgatgagcacggctccccagcctgtctgggatatcatgtttcaagtggctgtgccaaaggtgagtcatctgttggggatttctcagtaatggctgtcgtttttgagtgccaggttcttttctgggacttacctgtcgagtgtcaaggaaagaatcttcactcaaactaactgaagataaagtgggaatgtaatggcttacctgactggggattcctgaatatctgacttcagatatgagtgaatccaaataggttcttaaacaatgccttaagaatctgtatctcttgactctgcttttctttggcacc

SEQ ID NO: 13332 - DNA, 513 bp, Homo sapiens
  MAP TO AL133523.2; EXPRESSED IN BRAIN, SIGNAL =   2; EXPRESSED IN LUNG, SIGNAL =   3
gcacagaacctcctctccactctgcaagctccttagagaatgtaagctcatcacctcaccaggcagttcttccatagatgttggaagttctggcaattggaaagtttctttatgtcaagtagcaattggcctctatttcagaaaagggcaaagtcaacttccatccactgtagctgaggctgacaccagttttttcttgctcggcagtgaacagagtatctgccaagcccgggcttccgtgatggtctacgatgacaccagtaagaaatgggtaccaatcaaacctggccagcagggattcagccggatcaacatctaccacaacactgccagcaacaccttcagagtcgttggagtcaagttgcaggatcagcaggtcagtgctggaattacagattatacccgtgagcctgcgcaccacctcctcaccgcccaccccttacacacatgtatcattaagaggtcagaacaaaaaggtcaatattcggaatcagaggacctgggctcagattt

SEQ ID NO: 13333 - DNA, 505 bp, Homo sapiens
  MAP TO AC011458.2; EXPRESSED IN BRAIN, SIGNAL = 1.3; EXPRESSED IN LUNG, SIGNAL = 2.2
ttgtcaaagcagcacacctcgaccttgcagcaaaggggatccggaagggctctgtgcagtacatgtctaggggcggagtgaggtcaggggtcctgcttggccccagcccactcggcaccccatccatttgacacactcacagagcttggccagggcgatgagggaggtgttgacgccagggacagctcgatgggcagctcaggaggcacgaccgaggtgaggacagggtgcactccagaaacagcttgtagcggttccggctggggtccttgtacctgtggagacagggcctgccaacctggagcctcggagggtgggcgcggggaccacagaggccgtggcgcttaccttcaatccatacataggcagcgcagcgatggcaaacaccaggaggaagaggatgaagatgaaggtctccagttgttcgcagtcaccctcttgaccccgaagaggatggtgcgcagcagctgccctggaggaatggaggaacagcctttctgctgtc

SEQ ID NO: 13334 - DNA, 593 bp, Homo sapiens
  MAP TO AC022063.3; EXPRESSED IN BONE MARROW, SIGNAL = 2.5; EXPRESSED IN ADULT LIVER, SIGNAL = 1.7; EXPRESSED IN BRAIN, SIGNAL = 2.1
aggaacaatgagaacacgggtgtgttcgtttctaggtacagggcatgtagcagtggtaaaagaggtgaaggctgaaaaagaaagtgaatttgtacaacacttgatttctgtcttgggcaaatcaacattcaatggccacacgtgagtgacattttaaatcaaatgttttctataaaaagatattggttagtagattactattaacattaaagttagaacagatgaagactcatttaatatataaatcatagaaaactcttaactaatatgaccaactccttttcaatgctcagagtgcattgatcctactgctttgctcaattgattgttctcatttagaaagttcatgaagcacggacaccaattcacttaaatgcatgtgctgagtcttgtcacttgggattttatttcttgagattgatgctcagagtattagaaaaacttattattggcttctataatgcagttttgtttttcaaaataataaattagcattaatttagggttgtgacaagcttaatctgctgcaaaagccaggtcatacattacatttaaatgattatttacctcattccttcattgctgtggttgac

SEQ ID NO: 13335 - DNA, 513 bp, Homo sapiens
  MAP TO AC023074.2; EXPRESSED IN BRAIN, SIGNAL = 1.5; EXPRESSED IN ADULT LIVER, SIGNAL = 1.5
tgacagaatggccttgacacccagttcatacaaattatatggcattttgcaaatttaaaacctaaatgtgttaataactgtgcttttaataactccaaagttacttctacctgtgtatttttagggagtgtttattctcatgtgtttattttttattctgtgaaccacaatgcatcttctcctatttgtcttccgagcagaaatcagtccaaagcaggccaagtccatgcctgtgggctgctttatgtggctgtgcagctctctgttgtctgctagggtgagagatacagtgggggctggacctggaggcatgtgtgcctcagtgatttatacttttctagtcccactttaaagaagtgccttgcccatgcacagttgtctgtgatggtgaacacagtgacagcaaacttagttgttcatttaacctttttaacagtaaataccatatgaatccaggccttttgtacctggattccggcaggcctgtagtagtgctgaggagctttccatagg

SEQ ID NO: 13336 - DNA, 503 bp, Homo sapiens
  MAP TO AC008636.4; EXPRESSED IN ADULT LIVER, SIGNAL = 1.7; EXPRESSED IN LUNG, SIGNAL = 2.7; EXPRESSED IN BRAIN, SIGNAL = 1.7; EXPRESSED IN BONE MARROW, SIGNAL = 1.8; EXPRESSED IN HELA, SIGNAL = 1.7
aaattagtgctgtgggcaggaggcctcagctctcaccgcatggacctctccacagcatggctggggtgtcctcaaacatggcagctggctcctccaaagccagcggtcccacagagaaaggtggaagccacggcatctttatgaccgtcatttctgcagtatcctgtgggttacacaggtcagtcctcatgtgactcactgggaggcatctacacaggggcacaaatacgaggaggcagggattgtgaggccacttcggaggctggggcctcggctgactgattcactgctgtgtcctgagtatgcaccagatcttgtgctaaacccttttacacacaatatctcatcttccagtcctgcctcctctatttctttacaggaaactgagtctcagagaagttaagtaccttaatcaaagtcataaagtgggtaagtggctgagccaggattcaaacccaggcctgccaaggagggtctgtgtaggccaaagtcatcaagtgggt

SEQ ID NO: 13337 - DNA, 596 bp, Homo sapiens
  MAP TO AL157882.1; EXPRESSED IN HELA, SIGNAL = 1.7; EXPRESSED IN LUNG, SIGNAL = 5.6; EXPRESSED IN BRAIN, SIGNAL = 1.5
caccatccccaataccagagcatacctgggagcctagggatcactcagccatgtcaaccagcgctggcacctgagcactcctcccaggggtctgcggatgggccacctcatctgccactaccaccacagctggcacacacccacacataccatctgtgggtctggggactggaccacccagcctgtcacagccaccaccaacactagcacagactgcttaggaggcagagggttgtcccaccactgatcctctcattgctcatgctatgcctgctgctcaggagccaaaggacccacccacctatctggcccaaagctgcaactgccagcatctgagaaagttgcatgggggcccaagaactggcccatttagacccactaacaccagtcatgctgggtcctaaggacaggaatctttggcctgctgttgccaccactggtgcccaaggaatggccgacctggcatcctcattcccagcaaatttcaccacagccaccactaacaaccacaccctaagccagtgaagaaattacaggggccacattactgcatccacccagaatcaaagccacagtgccctatccagccagtatca

SEQ ID NO: 13338 - DNA, 542 bp, Homo sapiens
  MAP TO AC011483.2; EXPRESSED IN BRAIN, SIGNAL = 2.2; EXPRESSED IN PLACENTA, SIGNAL = 1.7; EXPRESSED IN HELA, SIGNAL = 2.1; EXPRESSED IN BONE MARROW, SIGNAL = 1.5; EXPRESSED IN ADULT LIVER, SIGNAL = 1.9; EXPRESSED IN FETAL LIVER, SIGNAL = 1.9
ttttctgttgggtggaggtcaccgccctcaggccccatgctgttggaggtcaactgcatttctatgtgtgtgtgtttctgcctccccatgtctgttctgtttctctcttcctttgcttctctttattcctgtgtttatttctcttttctctcagtttctctctctagttgtcactgtctccctgtgtgtctctcatctctgcatctcgccatgcggccctgtgtgtctctgtctcccccttcccacccttccctgagtcgcctgccctcccctttcccctctctcacgttgaggagtccttctggtcttgccctccgccggcgcagaacatgctggggtgtacagcgggtcatagagcttactgcagacctcctcagacaccaccgacagttcacgcactgcagcacggtaggcattctgcctgggacgcagagctctggtcagcccccgcgactgggcagaggacctccttgaagagggcagacaccacccgtgagctcaccgttcgccagcagaccccagccagaaacgaggcagagttc

SEQ ID NO: 13339 - DNA, 510 bp, Homo sapiens
  MAP TO AC013379.4; EXPRESSED IN FETAL LIVER, SIGNAL = 1.6; EXPRESSED IN BRAIN, SIGNAL = 1.8; EXPRESSED IN PLACENTA, SIGNAL = 2.1; EXPRESSED IN ADULT LIVER, SIGNAL = 1.5; EXPRESSED IN BONE MARROW, SIGNAL = 1.8
aaccttaacagccctctccccagcaggagcttgttggaggaggtgtgggtgctgagtcccccctccctagcttgtcttgccctcagtgctctgggtgcttttgcctttccaggtactgcccttggtgtagaggccatggtccttgatgtacgtgatgacagcatcgggaatcaggtactttacgctctgcccttggcccaaggctcgcctgatgtatgtggcactgatctcattctgcacaggctccttggccaggtgaatgttgtgctggtgcatccgtaggatgggagattctgcgatgtaaccttttgggtcgtgacctactcggcccacgcacaccaagccaaacttctccactatttcctggatgtgcgcatccttccagaggttgggggtctggaaggtcttcaagacgtctgccccacagagaagcttcagctcaggcacagctgcaaaaacaaggatggacccagtaaagttagagagaggtcactgccaggaaagacaaca

SEQ ID NO: 13340 - DNA, 556 bp, Homo sapiens
  MAP TO AC025289.1; EXPRESSED IN BRAIN, SIGNAL = 1.7; EXPRESSED IN LUNG, SIGNAL = 2.1
cccccatttttcaagtttcctaccttgaggaaaaacacattataaacaaaaacacttacctgaaacatggcaatatgcagctgaacccgctgcaggcttgtcttacaagaagaaatactggtttctagccttcgcaccaagtcatgcttcttccaggcagtgtcgtaagaacttgctaacacagttgccctgttcataaccagctgagagaacttccctatctggatgttatgttccaccgctttcttacagagatcatcaacagaaactttgctttcggcaccaaagtcctttgcctctacttgagcaatgatgtctacacccagagcactgataaaactgcacagtgtgagtccgagggcttggttgggtagccctatcaagagctgcctcacaaagtcagctgtgaatgccttgataggtttggccatttggtcttcactgaaacaagagtttctaaaaagggttttcacattgacaatctgtacaggcccattcacagtattctgatcttcaagtgaacttgatcctacaaaaaggaaaaatttcttgtatt

SEQ ID NO: 13341 - DNA, 583 bp, Homo sapiens
  MAP TO AC021097.3; EXPRESSED IN BRAIN, SIGNAL = 1.7
agcatgattgtaggccatcccgaagcccagggtgagtgctgtgaagatggtctcacacaagaagccaccataccaggccaggtcagcacctggggtaggaactgtgggagttcctctggaggacggaggcaatcaccccctgaagacctaactcctcagcaggccacctccttctccctgatgcagaggtgaggaggtaaatggtgggatccatggagttctggggagcccagtggagctggcccaagcctctgctggaggcagtgttggcagccagcatggggcagaagcagtggtggtggcggtggagggggagcagaccgtggggccaggcccgggactagctgggaagctggcatactaactgcccagggtaactgccagaaggggaggctggaggctgccctgtggctcttcatggagccaggtggggaattagtgttctagcagcccaggggcccaaggactggacagtggcagggagtcgacctgtccctcagggcgttggctcttcctgtgatggggatagcccagggttttgaatgcctgtcagctccctgaggctctgaccatctcgctcctc

SEQ ID NO: 13342 - DNA, 520 bp, Homo sapiens
  MAP TO AC011449.3; EXPRESSED IN FETAL LIVER, SIGNAL = 1.8; EXPRESSED IN LUNG, SIGNAL = 2.2; EXPRESSED IN PLACENTA, SIGNAL = 1.5; EXPRESSED IN BRAIN, SIGNAL = 1.8; EXPRESSED IN ADULT LIVER, SIGNAL = 1.7; EXPRESSED IN HELA, SIGNAL = 2.1
cttcctcccaggttctttccacccctcccagagtttacgatgccagtagcgaggtcatcatactgcagaaatagttacaggcacctgctggtatgtgcagggcaccttctgggaagggccatcagctgtgtcctcctctgctcatgccctcttgggttcttttccttgcaggcttgtcggacgcctagccgggatgaggccggggtggaactgctgatgacatacttcatccagctgggctttgtcgagagtcgattcttcccgcccacacggcagatgggactcctgttcacctggtaggtgcttgaggtctgcgctggcgcttcacgtgttatggcagccacaattttggagcctcagcatcacagacgcccctctgcgggtgcccctgtgcacctcagccccctttcctatcttgcatttatctggggaagtctcaaaagatgtcaatacattggtatttatttatgaaggtgatccgaggggagatggctccaacagactgtggcctcttgcttct

SEQ ID NO: 13343 - DNA, 552 bp, Homo sapiens
  MAP TO AC018633.2; EXPRESSED IN BONE MARROW, SIGNAL = 2.9; EXPRESSED IN HELA, SIGNAL = 1.9; EXPRESSED IN LUNG, SIGNAL = 3.2; EXPRESSED IN BRAIN, SIGNAL = 1.9; EXPRESSED IN PLACENTA, SIGNAL = 1.6; EXPRESSED IN FETAL LIVER, SIGNAL = 1.9
atcaggaaagtcatggcaggaaaccatggagaagatgctgccatgaagactgaggagcctttgttccaagtggaagacagcagcaaagggcaggaacccaatgataccaatcaatatttgaaacctccatctcgcccatctccagattcttcagaaagtgactgggaaactttggatcctagtgtcttagaggaccccaacttgaaagaaagggaacagctgggatcagaccagacaaatttgtttccaaaggactctgtcccctcagagagtcttccaattactgtacaacctcaagctaatacgggacaggtagtcctgataccagggctcatttcgggtttggaagaggatcagtatggcatgcccctggccatcttcacaaaggtaaagtgtaatattttttatcgaattccttaaagaatttgaaaaatcctttcggagtttaacttttgaacttttggtattcaacacattttcaggtggaaaaatttccttgaaaactgtaaagtacaaccaaatacatagtactgtggcatccgtgaccatagt

SEQ ID NO: 13344 - DNA, 534 bp, Homo sapiens
  MAP TO AL135787.3; EXPRESSED IN BRAIN, SIGNAL = 1.4; EXPRESSED IN ADULT LIVER, SIGNAL = 4.6; EXPRESSED IN FETAL LIVER, SIGNAL = 3.4; EXPRESSED IN HELA, SIGNAL = 2.2
gggagagaagggaaatggacctgcatttgcagtggaaatgaactttagagagggttgttttgttttcctttcaaagatgggaaaagtaagaatatttatactctaagcacaatgacccaatagggaaaaactgacgatgcggcagagatggggaagaattggtagaacaaaagccttgagaggcaaagggagtgtgacctagtgtacaattggaaggggtggctccggagctccttacctctaagacccatttcagcaagtccttcagagctttttggcgggcatctccttgccagcggtagacgacaaaagcttccatgcgaagctcctgatagataacaatctctgggggtgggcctgtgaagagaagggcacatttgggtggcaggatccagggaggtgcccatggtgaaacaagcagtacaggtcactgtcactgtgcttggtgctgggagttttttggtgcttctccccttccatttcctcactcctttctgatccacgggactgctggccaatcaacatgcactctgc

SEQ ID NO: 13345 - DNA, 566 bp, Homo sapiens
  MAP TO AC009275.5; EXPRESSED IN LUNG, SIGNAL = 3.3; EXPRESSED IN PLACENTA, SIGNAL = 2.7; EXPRESSED IN BRAIN, SIGNAL = 1.4; EXPRESSED IN HELA, SIGNAL = 2.9
gttccatccttgaaagcgactccctggaaagggagggccaatccacaacctcagcctcatcagcacgggactctaagcaatgggcccagatggaatgaccattcaacagagagccaaggatgggcgagctctggagccctgtatggccgtgggtgatacgtttcccctggaagaatcgcccatcagtgaaaagtgtagctgtattgagtgtggacttggctttgggctgatgcaccaacagatgatgggaccgagagccccttccagccccaccgcggaacgataccttgctgacgatgaagagctcctcacgcttcaccacctgctccctgagcttctcctgaatggccacccccacctcattctcattctggtacacatgggcacagtcgatgtggcggtacccgacgtcaatggccaccttcacggcctcagtcacctgccctggaggggactgaaaggagaaagaacgtgagccccgcagaatgcagagtctgcacagcaaggaggaggggcagtggcagccaccgatccctgctgaccagcctgccactttgttcagcaaa

SEQ ID NO: 13346 - DNA, 513 bp, Homo sapiens
  MAP TO AC010352.4; EXPRESSED IN BRAIN, SIGNAL = 1.6; EXPRESSED IN LUNG, SIGNAL = 3.2
acatgcttaccccgtctgaggtcgtgtgcctcacgggtgctgtgccccctccctctgctgcctgccaggacgccgttactgtcaagcactcacttgagagtcccgtccgggttctccacgatgactgcactggtgtggcccaggacaaagcctggaatccagccctcagctgcggggcactggtcagtggcggctcggaacaccagaaacatgttctgctggttgctggccagaatttgaacgacctctccttggtagacgttgatctcatcctccttcactgccgtgtaatcgtgtgtcaccaacatggtggagatgttgctactgctgctgctttcactctgcagagggacagatgaagacagagaaaggcagggaggaactgaaacgagacctgatcacatgaaatcccttgtcagtgtgccccatggcaccatgaccccgtgcagggctcaccaggcaagcaccgagaaattttcaacatttcctttaccctctggctaactgtgtgca

SEQ ID NO: 13347 - DNA, 546 bp, Homo sapiens
  MAP TO AL138829.2; EXPRESSED IN FETAL LIVER, SIGNAL = 1.7; EXPRESSED IN BRAIN, SIGNAL = 1.7; EXPRESSED IN PLACENTA, SIGNAL = 1.6; EXPRESSED IN ADULT LIVER, SIGNAL = 1.9; EXPRESSED IN BONE MARROW, SIGNAL = 1.5; EXPRESSED IN HELA, SIGNAL = 1.8; EXPRESSED IN LUNG, SIGNAL = 2.2
atctggaagccaatgacctgtcaaatgtcacaaagccagcaccagcaagagcgacaccgagctcccacgctttgtttcgagcctaggaaacctttcacttccctgttgataccccaagttcctgaccttttctgcccaaactttccccttatctcttacattgtcctcacaaaagtctctcacaggagaaaacagaatcacagcatattcaatactcctctggtgttagctcttctgttttgattcatatttatcccttaaattctatctcctttcagcctctccagaaataatccaaccagattcagtttatcctgaagtcctggtgctggattgtgtccactcattcattcttgaagaaatatcactggtcccctaagacaaggcaggccatgtgccaggcactggggctgcagcagagactctgacggaagcagacctgaccttgcagaggttgagatctaatgccataccagtaataccaatggtggggtcttgggcccagaacaggacgaaggcagatcctgggtgagaaaccagggatta

SEQ ID NO: 13348 - DNA, 546 bp, Homo sapiens
  MAP TO AF236875.1; EXPRESSED IN BRAIN, SIGNAL = 1.7; EXPRESSED IN PLACENTA, SIGNAL = 1.5; EXPRESSED IN ADULT LIVER, SIGNAL = 1.5
cagtagtccttgctcagcccttccaatcccgcaagcaacgcaggactggtcttgaaggtccaggagaatctaagcctctccgtcaatgtcaagtttgttacctccatcgctgcaggtcctaaaatctgaggccaggctgtccgtggagccggtggtgaaactgacgtggacacccctgaaggatgggctgaggctttctgcagagccctggctcactttttccaaatcagagctgctcttgttcatttttagaaggtgcctggaaaaggtaggaacaaacaatacaaataactcattggatttccattcagaaaccaggctgatggatcatgaacttaccatgctcttgaaacctggccaatgtcagcaagtttattaaaagaaaaaaaaaagattttggggagacagtagaggttctcttctgagttcttatgtgcatgaatgacaggagacttccagagtgtggttaggagaagcgagtctattaaatttaaacaagcaccaaaattcttacatggaaggaattgccttcatattctgacccca

SEQ ID NO: 13349 - DNA, 540 bp, Homo sapiens
  MAP TO AL133238.2; EXPRESSED IN ADULT LIVER, SIGNAL = 1.4; EXPRESSED IN HELA, SIGNAL = 1.8; EXPRESSED IN BRAIN, SIGNAL = 1.5; EXPRESSED IN PLACENTA, SIGNAL = 1.3; EXPRESSED IN FETAL LIVER, SIGNAL = 1.9
tgtttctctcactgggaccacatataaaaataatagccacatgtgctgaattttttaaattactctcattattaaatattctatcccattgttctctatacaaatactcacccacgcatgtccaatttctgttttagaaaacgtagtcaccatgagtattggaaacagtgaaagacgtaattgaatgttcttgataagctctgcagggagtgtaaaaagtgcttctgtggagatcagtaggagggatgaaccagaaatatcatagtggtgccgcccatgcaccaacaaaggcttcatcggccagggagactttgatgccaggcatgattaagtcctggactggctcagcttaatggaaatgcacagagattgaaacaagcaccagcaacaagatagctgttaggaagaccacgggtgccttcactggcaccatctgtacattttctacctctaggaagacacgtgggaagccaaatcttctgatggtccacacttaggacctgtcatgagaaatctctatcagaggcatcaaaaccccta

SEQ ID NO: 13350 - DNA, 598 bp, Homo sapiens
  MAP TO AL138831.2; EXPRESSED IN BRAIN, SIGNAL = 1.5; EXPRESSED IN PLACENTA, SIGNAL = 1.4; EXPRESSED IN FETAL LIVER, SIGNAL = 1.9; EXPRESSED IN ADULT LIVER, SIGNAL = 1.5; EXPRESSED IN BONE MARROW, SIGNAL = 2.1; EXPRESSED IN LUNG, SIGNAL = 2.3
attatgtgccatcagtggggtctgcagcagaccccataatcaaacacgttaatatttctacagtgaggcatactgtagtagtcacactggggagaaaataagacaataaatggtgcctcatctgatcaggtccagtgctgccacctgatgaatgtgcactgaagaaagaaaaactttttcagatttttgtgaatttagaaattacataagggattgcagatttgattgaaccaataaataccatttggtttgttacattatttgatacgttctcttaacttttcactgcagcaactcttagccatgaatgtatttggatagcatccaattttatgaaagtattatcttctgtattgttattacagaaatataaataccttgctgaagatagcaacatgtctgtgccatctgaaccaagcagcccccagagcagtacgagaacacgatcaccatctccagatgacattctggagcgagtagctgctgatgttaaagagtatgaacgggaaaatgttgatacatttgaggcctcagtgaaagccaagcataatctaatgacagttgaacagaataatggtgagagagttttgtcctggcg

SEQ ID NO: 13351 - DNA, 573 bp, Homo sapiens
  MAP TO AC008860.5; EXPRESSED IN BRAIN, SIGNAL = 1.6; EXPRESSED IN LUNG, SIGNAL = 2.2
ctagggctttttcccagaggtatattattgtcatgtcttgttacacagaatggattgatatctgtggtctctggtccaacccctccttgaattgatagggccccgaggcccagagaaagccagtctcttgaccatggtcacccacctaattgtgttagagccaagactagaaatctgttcttctgattccaagctcagaataagtgggaagactcagtgtgcctgtgccctctgccattcacttcatctatcaatgttctctgatttcaggattaagcctatcgtatggcccagtctccccgatcataagaagactctggaacatctttgtaagaaaccaagaaaagtgagtgtttttggtgcttaaaaagtgttgtgttggcaacatcccagtggccaagaatgatattccaggacaaggaacagttgaacctcaccttttggtatttgattcatcctgtaactagggtccctcctaagaccctagctgcagtagggaactgaaataagatacacatctcagaacttctgggctccctggggctggagggcacagccagtggtcacttcaag

SEQ ID NO: 13352 - DNA, 592 bp, Homo sapiens
  MAP TO AL138688.11; EXPRESSED IN BRAIN, SIGNAL = 1.8; EXPRESSED IN BONE MARROW, SIGNAL = 2.7; EXPRESSED IN LUNG, SIGNAL = 1.9
aaaaagcagcagccaaaagtttaaattcatttacatgaagtagagtatctcttactgcttaccaggattatgatgagttgcagattctccattctgaaaaacgtctcctgccacattcattctaccaggattaaaaggtcctactccagtcttggtctgtgaagttaaagatggggtgtatgtttgtatattaacaccaaaattacttgactgcagtccgttagagacatctcccaagttggtattctgcagtgatgttacatgtgtaatcattaagttcatatctcgcccgtcagtattttctaattggccatcattcacagagcttacacctgtttctaaagttgtaacattagcaatctgaatttcagagtctggttctgtggtgataccactattacccattcctgcatttaccttacttcttgaaaaactggaagtggagaaatccacatcattggttctgtttttagtctcaggaggtcttcgttcaataaaattggaggaatttttctcttgcccttgatttgtttccatgtcctcttcatcatcaatgacaattgtctcacttacacttcccttctgagatgcc

SEQ ID NO: 13353 - DNA, 538 bp, Homo sapiens
  MAP TO AC008764.4; EXPRESSED IN ADULT LIVER, SIGNAL = 1.4; EXPRESSED IN BRAIN, SIGNAL = 1.8; EXPRESSED IN LUNG, SIGNAL = 1.7
ttctctcagcctcaagctccctcggctgtgcctatgggtgcgggacaggcccctcggagcctggctcctcggtgccttgctgcctggtcttaagcagtgagagaagatgctggacaggctcccaggaggggttcgtctcctggcccttcactgagcccctcccctccagcacttgtcgcctgggagatcctgactggcctgtggtcctgaggcaagtctctgttttgcagaaatggggccccctcaccaccaccctggccaccgcatgcctcatcctggcatcaacgagcacccgccttgggctggaccccagcaccctgacttcggccctcccccccatggcttcaacgggcagcccccacacatgcggcgacagggcccaccccacatcaaccacgatgaccccagcctggtccccaatgtgccctacttcgatctccctgctgggctgatggcccccctcgtgaaggtaatgccccacagtgggctccaagctgagcacgcttaccatactggtccccgtttctccttgtgaaaa

SEQ ID NO: 13354 - DNA, 552 bp, Homo sapiens
  MAP TO AC008850.4; EXPRESSED IN ADULT LIVER, SIGNAL = 2.5; EXPRESSED IN BONE MARROW, SIGNAL =   4; EXPRESSED IN LUNG, SIGNAL =  10; EXPRESSED IN PLACENTA, SIGNAL = 1.7; EXPRESSED IN BRAIN, SIGNAL = 1.3; EXPRESSED IN FETAL LIVER, SIGNAL = 1.9
gtaacgggagctcaggaaagcaagaacatttcagtgctgttcaacatggagctagtcctagagagtagagtattggccgtgaactttgtccttcttgctctgggaagctgattgattgtaaaggaattaggcatctctttcttcactaagggacagtggaacagtgactctaaaagggtttgaacaggtcttcctcagctgacatgtgggtagagagcatacagagctagaataaggaagattccatttattgtgagtataaaaagaattcattgctttcacagtgataaaccattgaataaaatactttgagtagaaaatgcctaagatgagggaaagttgatcacttatttcctgttatgtccagatttggtggctattcctgactttgaagcaggagcaatggaaaattggggtttgctcaccttccgagaggagacacttctgtatgacagtaacacttcttcaatggcggatagaaagctggtgactaaaatcattgctcatgagctggcccaccaggtattagcaaccaaggctgttctgtgtcac

SEQ ID NO: 13355 - DNA, 516 bp, Homo sapiens
  MAP TO AF223391.1; EXPRESSED IN BRAIN, SIGNAL = 1.6
atccctttttccctgagtggatgtgaatactacagggagctccagctcaggcctctccctgacagaattcagattccaaggactctcttaacagagttgcaagtagggatcatgccaagcccaatctaacatgccatgtctctcctgctatacagggcacaggttccctaagtgagagctccatcccctctgtctctgacaccagcaccccaagaagaagtcgtcggcagctcccacccgtcccgccaaagccccggcccctcctttcctacagctccctgattcgacacgcgggcagcatctctccacctgctgatggaagcgaggagggctccccgctgacctcccaagctctggagagcaacaatgcttgcctgaccgagtcttccaactctccgcacccccagcagagccaacatgcctccccacagcgctacatctccgagccctacttggccctgcacgaagactcccacgcctcagactgtggtgaggaggagacgctcactttcgaag

SEQ ID NO: 13356 - DNA, 555 bp, Homo sapiens
  MAP TO AC008397.4; EXPRESSED IN BRAIN, SIGNAL = 1.7; EXPRESSED IN LUNG, SIGNAL = 2.4; EXPRESSED IN ADULT LIVER, SIGNAL = 1.8
gaactaactccgctggatggctagttaacttgtttgcagtatttgattttgataacaagaacagctgcagtgaacagcccttcatgtttcaaattcttgcctgtcttacatggcatacctttttccaagagtgactgcagggtctattctagcagcaagaggtcagaaacaacacaaccccaggcagagctcattaaggatgctgccttttccctggcctcagggggacccctctgagtcccacgggcaggccatgttaagtcctgcccctgtctgtgtgcagctggtggtgcatgtgggggtgtcaggcatggcgaccacagtcacactggagaaatgtggacacaacaagggctacaaggggctggacaactgccgcttttgccccggctcccagtgctgcgtggaggacgggcctgaaagcattgactccatcatcgacatggatgctgtgtgcaagcgagtcaccacgttgggcctggatgtgtcggtgaccatctcgcaggatgccggcaggtagggccctgtggggtgggagtgagtggggatttccct

SEQ ID NO: 13357 - DNA, 569 bp, Homo sapiens
  MAP TO AL117344.12; EXPRESSED IN BRAIN, SIGNAL = 1.6; EXPRESSED IN BONE MARROW, SIGNAL = 1.7; EXPRESSED IN ADULT LIVER, SIGNAL = 1.4; EXPRESSED IN FETAL LIVER, SIGNAL =  12; EXPRESSED IN LUNG, SIGNAL = 3.7
ggttcttgttctggctctgccgctgcctctggcatgcccacggcgaactccctttgcctccctgggctttgctttcttcatctctgaaagatgccgatggcctctaagcttccgcccatcccccagtgatctcaggttctagaaaagtaggctagctggcacccttgattatgaaaaccatggtgccacccttccacttccacctttaaaataaggccaaaatgagcattctgcattggctcatgctgtgcttggaggaaggggagcctgaggaagtgctggtgttgtagtctgaagtttccaagacagtatatgactatgagatgttgaccatctctatgggctgcagctgctgccagagactttcatccaggccaagagacctatgggatgcacatgtgcagggtcatttgtccaggccaccactgggcacagggagcctagtttagggtctttgcaatgtcagaggatattcagtgtccatatcgtacagttgttggtttgtgttttttcctgacagacttacgaaattccttcacatcttctttccatttgaattctgcaccatc

SEQ ID NO: 13358 - DNA, 562 bp, Homo sapiens
  MAP TO AC008764.4; EXPRESSED IN PLACENTA, SIGNAL = 1.6; EXPRESSED IN BRAIN, SIGNAL = 1.6; EXPRESSED IN BONE MARROW, SIGNAL = 1.5; EXPRESSED IN ADULT LIVER, SIGNAL = 1.5
ctgtggagttaggaccagccccgggctgtggccctgagcagaggctcttaatgggggtgacggtatggggatggggctacccacaaataagccctgcccctggcgctctgataaccacctgcccccagccacccaccagagcgtcactggcacagcaaacaccactttcaaagtgttaggtggtatccctttgctgagggaggagaggggctcttccctgggcatctgtggcatgtggcccagctctagtctggcctgtgagcccttcttgatgacctcttcctgcaggtatacttgtcactcatccccatcatcagcggtgtcctgctggccaccgtcaccgagttgtcttttgacatgtggggactcgtcagcgccctcgccgccacgctgtgcttctcgcttcagaacattttctccaaaaaggtatttggtcaccatcagcggacatgcatggggtttcaggggtgtgcgggcagcaaactggtggcattgggaaaacaggcggagtagaaatttctttgctattagagcagaaaaatcttgattgccattctgctga

SEQ ID NO: 13359 - DNA, 503 bp, Homo sapiens
  MAP TO AL109847.3; EXPRESSED IN PLACENTA, SIGNAL = 2.4; EXPRESSED IN BRAIN, SIGNAL = 1.6
ctttcccaaggtctgtcgagttgcttatgaaattatgcaaacactacatcctgatgcctctgcaaacttccattctttagatgacatctactattttgggggccagaatgcccacaatcaaattgccatttatgctcaccaaccccgaactgcagatgaaattcccatggaacctggagatatcattggtgtggctggaaatcattgggatggctattctaaaggtgtcaacaggaaattgggaaggacgggcctatatccctcctacaaagttcgagagaagatagaaacggtcaagtaccccacatatcctgaggctgagaaataaagctcagatggaagagataaacgaccaaactcagttcgaccaaactcagttcaaaccatttcagccaaactgtagatgaagagggctctgatctaacaaaataaggttatatgagtagatactctcagcaccaagagcagctgggaactgacataggcttcaattggtggaattc

SEQ ID NO: 13360 - DNA, 502 bp, Homo sapiens
  MAP TO AC022212.2; EXPRESSED IN BRAIN, SIGNAL = 1.5; EXPRESSED IN PLACENTA, SIGNAL = 1.7; EXPRESSED IN ADULT LIVER, SIGNAL = 1.4
gtctcttctggtgctgcctctgggagaaggcctttagaaatgattgtttctgttcacgtaagtatccttttctcaatggaaaatgtatattattccctactggggtaccactgctttctccactcccaggcccccaaagacagtatttgacaaggattgctaccttctgccttaataccttcatagtctccaacatttcatatggtgctttacttgaaacaaatgagcaaaaattgaaaaatgaaataacaaacaggaaaactgaagtagtatgtaatttaactgacaaaaataatttgaacatgaaaatgtgggtgagttcaatgagtataattataacagaatcttgagatttcataacaacattagcatccagccttagcacactgttattccaaatgaccttttcccccttcccattcactcccttcagtacttggaggatgggtttcataatatcagctgagctcaggggtactgtgggctctcacacagtgatgct

SEQ ID NO: 13361 - DNA, 549 bp, Homo sapiens
  MAP TO AC018500.2; EXPRESSED IN BRAIN, SIGNAL = 1.3; EXPRESSED IN BONE MARROW, SIGNAL = 1.7; EXPRESSED IN LUNG, SIGNAL = 1.8
tgctataagcccaggagcactcagtcctctcctcctcctggccccctgggctgaaacttgacttcacaccaaagccctgcagttagtaaagggagggccccaagcttaccgtgccatttacccttataaacagttccaaaagagcctgacccaatccgagtggacagcatcacttcactggcttctatttcccaataatagcttgaatctctctgtccacgaggcctctgaaacaagtagagatcattattatactccatgcaatggtaataatcttttgataatgagggcatcaaaggatcaacccatgtcatctgtttccatatcttttaaagataaacatattaaccatacttccaatttttgtcttttgagaaataccattttagttatagcactggcaaactgtctgatgcaagtgtgccaaaaatgacagtaacatttataatctccttcattgaatgtattttattagaatcttctcccaaaataagtttaagtattctaatttccaacgaggtttttcttactgaaccctaattggcagga

SEQ ID NO: 13362 - DNA, 518 bp, Homo sapiens
  MAP TO AC008481.4; EXPRESSED IN BRAIN, SIGNAL = 1.3; EXPRESSED IN FETAL LIVER, SIGNAL = 2.2; EXPRESSED IN ADULT LIVER, SIGNAL = 1.7; EXPRESSED IN BONE MARROW, SIGNAL = 2.1; EXPRESSED IN HELA, SIGNAL = 2.7; EXPRESSED IN LUNG, SIGNAL = 5.5; EXPRESSED IN PLACENTA, SIGNAL = 2.8
gactagagggaaaggtggggattaggattcacaaggcacctggcacagacagagaacccgatacagaaaagcagaagagagagtgggcccgattcactgggtggagccaggcaaagtcttggggtggggtgatgggaggggtactgtcacccacgtacttgcaggtgttctcacagatgacgccgctgttgtactcgtctgttccatcgcagcagtctgtggcagaggcagaagccaagatcagacctggcagtgcctcctccctccctccctctaccacctttccagaatcctggtgcatcttcacttaccacaaacaccatcgttgacccggttggaggggatatacaggggcttatagccagtgttggtgcagtggaagctgccattaggacaggcagccgtgcctgtgaggaagaagggagggaaggttttcggagtcagctcagggacagacatgtcccatccatccacagataagagcccctgacccacactgcacacagcacaagaaagga

SEQ ID NO: 13363 - DNA, 554 bp, Homo sapiens
  MAP TO AC023078.2; EXPRESSED IN BRAIN, SIGNAL = 1.7
ccagcagaccttcctcattcaagtccctataggaccctatctatccctatctgtccatgtctgtccctgcaaatctctgctagtctttgcttgtctctacttgtgtacctctttagggcattgaccttatattgctagtctttgctagtctatctatccctatctgtccctatggtacctgttagttcctgcaagttcctgcaagtccctgtctttccctacctatctctacttacttatctctattcgtttctatttatctctatttctgtttatctctatttatccctgcaggcctcttcagatcccttcaggtctcttcaggtctctttgtccctgatattccttgttagtgtgccacttgtggctgactgccacaactactacttgagacggtcactacagcagttactactgttatggcttgagaccatcattcagcaattactcttactgcttgagaccgtcattatgactgaacgaagggacaaatgcagaaatgataaccaaaaaaaaaaaaagaaactgttttaaggaaaggcaacatgaggaga

SEQ ID NO: 13364 - DNA, 515 bp, Homo sapiens
  MAP TO AC002038.1; EXPRESSED IN BRAIN, SIGNAL = 1.6; EXPRESSED IN PLACENTA, SIGNAL = 1.7; EXPRESSED IN ADULT LIVER, SIGNAL = 1.8; EXPRESSED IN FETAL LIVER, SIGNAL = 1.6
tttctatgatctggcccaccaagctcatttttctccctcctttccttgccctgtatgttccagcaacactaaattacttgttgaaccccatttaggtgtattgtttcttatcgccattcctttattcatgctgccttctctacttgcttgtaacctgccctttaccaaaataatgagagacatagtgcattagaaaataaagtaaacatttctgttttctttctcagaaaaatgaactgtcatgtatgtttattttctttcttttaagggatgttactggctggttttacaattaggaatgttccattcatcaatgaacatgtccatgttcctaacgcatggtcttcaattttaagaagcattgcccttaacattattctaatacgagctgggcttggactcgatccacaggtagatttacaattacaaatcgagtaaggttatttcaaatattagaggatggtgagaaagaaaaagaagcaaaaattttatttacctgttccaagtggagtctg

SEQ ID NO: 13365 - DNA, 548 bp, Homo sapiens
  MAP TO AC023078.2; EXPRESSED IN BRAIN, SIGNAL = 1.3; EXPRESSED IN LUNG, SIGNAL = 1.7
tatttggctatggctcctccaggtaattgtattttctttataaaattataagtagtgtatttggatttatcctcaaatcatatataaagtatgtttccacctttattttatttctcatggcaactcagttgtcctaatagcattcattgaatagtgcctgttttacacactacgttgatatacaacctttatcataataagcatacattgaagatattgcaagtcttcttccatcactgtaatacagcaaatattacagtaaagtgaatcacatgaatttttggtgtcccagtacatgtaaaagttatgcttatactatattgtagtctattgagtgcgcaatgacattatgtctaaagcaatctacatgcattacttaaaaaatccttttttactaggaaatggtaaccatcatcagaacctttatcaagccaaacgctttgctgctggagggtcttgcttgatattgatggctgctgaagtggctgctgaaggtaagacaggctgtgccaatatcttaaaacaagacaacagtgaagtttgccacg

SEQ ID NO: 13366 - DNA, 593 bp, Homo sapiens
  MAP TO AC024049.2; EXPRESSED IN BRAIN, SIGNAL = 1.6; EXPRESSED IN PLACENTA, SIGNAL = 1.5; EXPRESSED IN ADULT LIVER, SIGNAL = 1.5; EXPRESSED IN FETAL LIVER, SIGNAL = 1.5
ccagccactcccttactcagtgaggacccagggctgctcactgtgccacccgcccgccgcgcagcaccattccccagctacagggacagctgatggtcacacagaccccacagcgatctctgtcactcccagacgccgcctccccagtaacccctgttgtgggggtgtagacggagaggcgcagacactgtcctgtcaacaagccaggctccatgttgtccgtaagtccagggcccagcacctaagggtgattaactggcaaggacaccaaacagcggaggaggagggacctcagctgagcgagatgagcgacagtgaacaaggccaggcaggagacagaatggatgggcgtcaagggaggagccacccagcacctggagagcagctgtggtcacaggcacgaattcatcacagccacagtcatcagcacgggctgcagtctggggtagaaaaatcagaaggaaggaaacgttaaagttttaagcaataagagacccaggggccgtgttaaaaggtaactcattctctacctcatcccaactcaatgacacaatcctggctccacctgggccagcacaggggcttgtaaaaga

SEQ ID NO: 13367 - DNA, 588 bp, Homo sapiens
  MAP TO AC002059.3; EXPRESSED IN PLACENTA, SIGNAL = 2.3; EXPRESSED IN BRAIN, SIGNAL = 2.3; EXPRESSED IN BONE MARROW, SIGNAL = 2.4; EXPRESSED IN FETAL LIVER, SIGNAL =   2; EXPRESSED IN LUNG, SIGNAL = 2.7
accacagactgttcccttggtctggagcccctatccgcttttgttcagctactgaggtcctgcgactcctctggaaagccttcctaggtacccaccaagcttgacttagctcctcttcctcggtgcccctgtggcccccagcttccctcatcactgctggcctgagccaattccacagccgaggccatttaaaggagcccacatgccagtctccataacttctctctgctcccgccaagacagaagacaagtgacttactgctttgggggccacatatgatcctgacagggtgcccacgccactggtcaggtcaaagaggtcactcaggccactgccgatgggtgctccaagattggctggtactgctgctgttggaggtgccacgaagttggtgcccccaatctggaaagggagggaaagagtcagaggtgggcgtcaagaggcaaagacatcagggtctgggaatgagtagagccacctggctctttagaagacactgggggcagggggcaggacagcctccatatcaactctaaattacagaaacaagacagagagaggtgggtggagaagagaggctgagccct

SEQ ID NO: 13368 - DNA, 582 bp, Homo sapiens
  MAP TO AC000159.6; EXPRESSED IN ADULT LIVER, SIGNAL = 1.5; EXPRESSED IN FETAL LIVER, SIGNAL = 1.8; EXPRESSED IN LUNG, SIGNAL = 2.4; EXPRESSED IN BRAIN, SIGNAL = 2.2; EXPRESSED IN PLACENTA, SIGNAL = 1.7; EXPRESSED IN BONE MARROW, SIGNAL = 1.8
agcttggttattgacagcggcttcttggcagaggcggcacctgagccaggccatggatggtatggggtgtggggcagggcactccaggtctcaggcaagcataagcaaaggtgtggacgtggggcaggcccggaggcattcagtgggtgttgggcagcagcaggtcggggggaaggaagtcgtggactgaggccaagccgatgagtacagggttattctccacgcaggggtcctgcggacaggaaacggggctcacacgccctctcggccggccctcggagcctgggtggcaggtgctcaccatgcggatgatgtctgggtagacgggctcgatgaggacaccccgggtgctccccacacactccaccagctcgttgagggctgcccgcttcacctccttccccttgaggtcggccacacagtccaagaagtcaaacatcaccccacactgggccagcttccggctcagcagctcgtgcagctcggaagccggcacatctggggaggagagggcatcctgggcctgggccccagctcccccagctgccccagctgtgggtggggcagaccctcctaatctcc

SEQ ID NO: 13369 - DNA, 574 bp, Homo sapiens
  MAP TO AL121963.10; EXPRESSED IN PLACENTA, SIGNAL = 2.4; EXPRESSED IN BRAIN, SIGNAL = 1.7; EXPRESSED IN ADULT LIVER, SIGNAL = 1.9; EXPRESSED IN FETAL LIVER, SIGNAL = 1.6; EXPRESSED IN LUNG, SIGNAL = 1.8
ctccaggtaggacttgctgcaacccagctgctggactgatctgaaacgggactttgcatactctccgaagtatggtgagttggtgctgacttcaaagttgcctggtgaaggaagataaggtggatcgcagagactaaggggagagggagaagccctgctcctcttctccccaccaaggcacaatgagcaacatctgtcagaggctctgggagtacctagaaccctatctcccctgtttgtccacggaggcagacaagtcaaccgtgattgaaaatccaggggccctttgctctccccagtcacagaggcatggccactactttgtggctttgtttgattaccaggctcggactgctgaggacttgagcttccgagcaggtgacaaacttcaagttctggacactttgcatgagggctggtggtttgccagacacttggagaaaagacgagatggctccagtcagcaactacaaggctatattccttctaactacgtggctgaggacagaagcctacaggcagagccgtgagtagtacaaacttatacttaatttctgaactctctgagggctgg

SEQ ID NO: 13370 - DNA, 595 bp, Homo sapiens
  MAP TO AF236875.1; EXPRESSED IN BRAIN, SIGNAL = 1.4; EXPRESSED IN PLACENTA, SIGNAL = 1.3
gagtttgagtctgcggtaagctatgattgatccactgcactctagcctgagtgacagagtgaggccctgtttcaaaagagaagaagatgaagaaaaagaagaagaagaagataaagaagtagtagtagtagtagtggtagtagtagaagaggaagaggaagaccacccattgcacaagggaggaaataataaagattagaacaaaaataaataaaataaagaacagaaaagccacataaggaaaaaaaaagtcaatagaactgagaattggttctttgaaaaaaacaagcaaaatcaacaaacccctagatagactaagaaaataaggaaagaagactcaaataaaatcagaaatgaaagtggggacattgtaacagatgtctcagaaataaaaatgatcataagggactattatgaacaattatatgccaacaaattggatgacagagagaaaatggataaattcctagattcaatattgaatcaggaagaaataaaaagcttgaacagaccagtaacaaataaagagattgaagaagtaattaaaaacgttccaacgaagaaaaccccaggaccagatggcttcacagctgaa

SEQ ID NO: 13371 - DNA, 594 bp, Homo sapiens
  MAP TO AC006142.1; EXPRESSED IN PLACENTA, SIGNAL = 1.6; EXPRESSED IN BRAIN, SIGNAL = 1.4; EXPRESSED IN ADULT LIVER, SIGNAL = 1.6; EXPRESSED IN HELA, SIGNAL = 1.7; EXPRESSED IN FETAL LIVER, SIGNAL =   2
ggcctccttcggaaacttacagtggaaaacaaagaaagcagacatcttgtttctctgtcagcttctctctaccttatacccaaatccgcaggattgcaaggggagagaaacaaaagaaaagaaagcaggaaaagacctgcttgatttgctcagtgttgatgctcttggtggtgtgaccaaagctgacttttttcttgagcatatgattgtgaattcttcagaggtccctgatgtatcttctttagctgaccaattgctactcctcatcagctcctgcctctgcaaccaaccccacattctcatacttccagggaccccttgcctttgcagaattcatttcagaggctccagctttcacatcaggcccatgggaaagtacccccttcatgccaaatggtgaaagtgcagccttagctctttccccaccttcatacatggcttcagccaatatttcatttcaagattatcttccatagtacacagacagtaaactactgtgtccctccaaatccaggaacacatcaagattcctgattggttaccttgcagcactttacactagattgaagtgagagtgaagcacccagcactttt

SEQ ID NO: 13372 - DNA, 569 bp, Homo sapiens
  MAP TO AC012535.3; EXPRESSED IN ADULT LIVER, SIGNAL = 1.5; EXPRESSED IN BRAIN, SIGNAL = 1.4; EXPRESSED IN PLACENTA, SIGNAL = 2.4
agagctgttcatccaccctgtgttaaaagacttgcggggaaatgatataacatacctctgtgggagattctttttcatttctttcttgctgttattttcagacatctgttgacctgagattgaaactttgatttcaatttatccaaaaacagcaattcttttaaaaaagaagcaattaataggataaaaacatggccttcaccttccatacctgagtggtgaagtgtccagctctccaagctgtgactggtagcagttactcatcagacagagatgtctaaggtcctcagtttccctccttctaccacaagttctgcataactgctcctttcttgttggacatttggcaaagaggattgtctgaatctataatggagaaaaggaaaataaaggcgtaatcattttatctattgttaactttttaagttaaaattttctgcacataaaatattttatatatacatatatatctgcatttaaaaataaatatagcagatttctttctaagattttctaaatctttttattgcatattttatttaaagactacggtctctccaatcttgagc

SEQ ID NO: 13373 - DNA, 572 bp, Homo sapiens
  MAP TO AC012087.10; EXPRESSED IN BRAIN, SIGNAL = 1.7; EXPRESSED IN PLACENTA, SIGNAL = 1.4; EXPRESSED IN ADULT LIVER, SIGNAL = 1.8; EXPRESSED IN FETAL LIVER, SIGNAL = 2.1; EXPRESSED IN HELA, SIGNAL =   2
ttctggacaactgcacatggttacagtatggaacattctttattcctttggctcagacagttttgttgagcctggcatcaatgcacacatctggagtactttctcctttatggcaaatttctttgagtgctcaaggggcacacttcttaaagcccactccctggatgcccttgtaaatgttgatgatgtattcttgggtcaccaccttgttaaaggcaaaatagctcttcttctcaccattattgtttgtgggagtcattcttctaggacttaattttaatgtagtcaaatttgtcaatttcttcttttatggttagtaatttttcaacttttcttaagaaattctcttctttctagtctatattttctttctttcttttaggacttaaatgtcttttttaaagatttcactgaagtaaatatatacacatataactcactatctttagcattttaggtatagagttcagtggtaataaatttatattctttaaaaatgttgtctttacgtttaagcatatatttcatctggaatggattcttgtgttatatggcatgaggtagggatctga

SEQ ID NO: 13374 - DNA, 593 bp, Homo sapiens
  MAP TO AC011375.3; EXPRESSED IN BRAIN, SIGNAL = 2.8; EXPRESSED IN BONE MARROW, SIGNAL = 4.2; EXPRESSED IN LUNG, SIGNAL = 2.5
ttttgatggagttggtaagaaggataatgtagtttttgcttttacagaatttagactcagaaaaagaaaaggagcttgaaaggcaagcccgcattgaggcaagccttcgagaacgagaaagggaggttcaaaaggcccgttcagaacaaacaaaagaaatagatcgagagagagagcagcacaaacgagaagaagctatccagaatttcaaagctcttctgtctgacatggtatacgttaatcttttactttttttctctaaagtactggatattggaaatttattatgttactgttatgaatattttaatgttctttaattctgagggagataatttgctaaattagaaagcatttaaaaattgaatacttggtattagtactgttagtataggaaaaaacccaagttattcaacaaattcagaagttaggcattttgcatatatggaaagtcataatcatttagtctcacaactttattatttattgttcttgatgaaagtcattgtaaactattacacacttacctgccatagtgataaacaaaacgtgctgaacacaatttaaccttttcgttgatgatttagggccat

SEQ ID NO: 13375 - DNA, 503 bp, Homo sapiens
  MAP TO AC016728.2; EXPRESSED IN BRAIN, SIGNAL = 1.3
caggtgctactccttgaggcactggtgcttcaaatatgtacatgcgtggccctcaaccctgccgcttttctcccagaggatggggatccaatcaagcatgactgccaacaaattatcgtccagacttatgccgcacaagataatctcttagaagtccccttaggtaatcctgaccttagcctatatactgatggaagttcatttgtgaagaatgggatacaaagggcaggttatgccatagttagtgatgtaactatacttaaaagtaagtgttttcccctagagaccagagcccagtaagcagaaatactggcacttacccaagccttagaactgggaaagggaaaaagaataaatgtgtatacagatagcaagtatgctcatctgatcctacatgcccatgctgcaatatggaaagaaagggagttcctaacctctggggaaacccccattaaatgccacaaggaaatcatggagttattgcacacagtgcaaaaacccac

SEQ ID NO: 13376 - DNA, 599 bp, Homo sapiens
  MAP TO AC018711.2; EXPRESSED IN LUNG, SIGNAL = 1.6; EXPRESSED IN BRAIN, SIGNAL =   2; EXPRESSED IN BONE MARROW, SIGNAL = 4.8; EXPRESSED IN FETAL LIVER, SIGNAL = 7.6
ccaaacttgttgcggatgaggctggcaaactcccggggcttggacaccacggcggtgtgggtggcctgtgagaggccagagaggctgcccttgacgccctccaccacgccgcccccaaagccgctgatgcctgcgcgcacgttggcgcccacgtccttcagcccctgctgcatgtcccgcagcacgtccttgggctgccgcgagggcccgttctgctcaatctccttcaggcgccggcggtagtgctccagcttcttgtgcagctgggcgatggtctgggctgacttctggttcttcttctcgaacacttgcttgatgcgtgacacctgctgcttgtccgcgttgttggccagtttcagatactctgccacattgtcgtcgcgagcctcctgctcaatcttgatctgctcggtgatcttcaggatcttctggtgcaggtggtcaatggcggccttggtccgctgggggtccggtgccccatcgggcacgtccaggctgatggggccgtcggtgtcaccatggccggcggggaggctcagggccaccaggtctcccttatcgacctggggaaagaggcaggcagaggaagcatgggtaaa

SEQ ID NO: 13377 - DNA, 507 bp, Homo sapiens
  MAP TO AL139289.4; EXPRESSED IN BONE MARROW, SIGNAL = 2.5; EXPRESSED IN LUNG, SIGNAL = 2.5; EXPRESSED IN PLACENTA, SIGNAL = 2.1; EXPRESSED IN BRAIN, SIGNAL = 2.1; EXPRESSED IN ADULT LIVER, SIGNAL = 1.4; EXPRESSED IN FETAL LIVER, SIGNAL = 2.1; EXPRESSED IN HELA, SIGNAL = 1.7
cacaaccctacctttggtggaaaaagcacatgacagccattcagctggtgaggggcttggcctgacttacctataaccatccccccacattcctagcctggatcctgcctttatccagtctgtctcacctttgaccccatctctccctactcaacgtttgtctctttctctaccccctcttcccctctagtcctctcactattccctctgaccctggtctttctctatcctagatccagtttgtcctggtctcactgcacatctcccagtactactttatgtccagctgtaactaccagtacccagtcattattcacctcatctggatgtatggcaccatcttcttcatgctgttctccaacttctggtatcactcttataccaagggcaagcggctgccccgtgcacttcagcaaaatggagctccaggtattgccaaggtcaaggccaactgagaagcatggcctagataggcgcccacctaagtgcctcaggactgcaccttag

SEQ ID NO: 13378 - DNA, 545 bp, Homo sapiens
  MAP TO AL049831.2; EXPRESSED IN BRAIN, SIGNAL = 1.6; EXPRESSED IN PLACENTA, SIGNAL = 1.7; EXPRESSED IN ADULT LIVER, SIGNAL = 1.7; EXPRESSED IN BONE MARROW, SIGNAL = 1.9; EXPRESSED IN FETAL LIVER, SIGNAL = 1.6
tacgctgtcatgagtccagctttcagctcaattaattccaaaaaataaaaattagcttctgcagtgaattgcagcaaattaatatacctagcaaatcacaataggcattcctcaaaaaaaaaaaaaaagaaagaaaacagtctttctttccttttttggctgtatctgtacaaaacaaaaaatagattctacaataaaaaattacccacttccctaattttatttttaactttccccttagaatgagtatgattccaggaaatggctgaattgtacccatgtttgccaagagagcaatgaagtcaaggatgctggtatttctaagccttctaacattgttctttaaaaaaaatagaaagatatttttaaaacagatcaaaatctttgttgtcagtgcattaagtcgtgttccatcactggtggttcttggagtggctctcaaattttgggtgtctttgagtactttctaaggaacccagtagattaacctatttacacattccagatgaatggtaattgtctctagggtttggtgtgttgactcc

SEQ ID NO: 13379 - DNA, 574 bp, Homo sapiens
  MAP TO AC018500.2; EXPRESSED IN BRAIN, SIGNAL = 1.7; EXPRESSED IN PLACENTA, SIGNAL = 1.7; EXPRESSED IN BONE MARROW, SIGNAL = 1.6; EXPRESSED IN ADULT LIVER, SIGNAL = 2.1
ttcttttctctcctgcccaccagcacacaaaggcttttaaaacaaaacctgatcctcaaagcagttcacctgaagtttcctgtgtgtctgggtatatatgcagaatataaatatatttatagagagaaattagagtagtttttcaaaccttaatcaaaaggctctgctgtaagtatatattcttgctaaaaggacccaaactgtctcacagttgaagtctctggaaaattttcagaagtttagatagaaggaaagtcactgacctattgcaggggagggagactagtcaaacaacgtagcagtaaaaaaataaccacaaaattctagggaagaatcttagacattctaatcaccagattctgatacttggaatccatattatggacactaagcacgggaaaagaaatgtgggaaaaacgggtgaggtacaaaatggaagagccgggcacaagacgatgcgtaaacgagatctgactgagactgctgctgtcaggcacgaggagagctgtcgcccgaccctggtgtgtccctttgtttccaagcattcccacctggtcctcctgtgtggggacta

SEQ ID NO: 13380 - DNA, 500 bp, Homo sapiens
  MAP TO AC009399.5; EXPRESSED IN BRAIN, SIGNAL = 1.3; EXPRESSED IN PLACENTA, SIGNAL = 1.6; EXPRESSED IN BONE MARROW, SIGNAL = 1.5; EXPRESSED IN ADULT LIVER, SIGNAL = 1.5; EXPRESSED IN LUNG, SIGNAL = 2.6
agaaaattcactgcgggatgaataaagccttatgctttaaattttttagattgctttcatttatattttattttaaccacctattaatagggaattttcagcttgtgcttttcatttttcccttttccagcttgctctgttttcataataaaatctggtggaaagattttccagaatagcttcctgtctgaccatactttttctcctcatttcagtgaggctgaactggaggaggtgttgactttttatacccaaaagaacaagtctgctagtgtcttcctggggactcactctaaaatttctaagaacaacaacaattattctgatagtggggcaaaaggtggtaagtatactggttaatgaacgaaaaataagaagaacaagtgaagaaatgagaaatgcaaaggagaatgaggaataatgtgttggctaagcactaatagtccccaaggtaatgagactttgcagcttggggagggagtggagaatgggggacagta

SEQ ID NO: 13381 - DNA, 554 bp, Homo sapiens
  MAP TO AC007954.6; EXPRESSED IN BRAIN, SIGNAL = 1.9; EXPRESSED IN PLACENTA, SIGNAL = 1.8; EXPRESSED IN BONE MARROW, SIGNAL = 1.6; EXPRESSED IN FETAL LIVER, SIGNAL = 1.6; EXPRESSED IN LUNG, SIGNAL = 2.4; EXPRESSED IN ADULT LIVER, SIGNAL = 1.7; EXPRESSED IN HELA, SIGNAL = 1.7
agcagtatcaaccccaccagaatgttctctttggcctgtaccactcagcttagcttgtaatgctgagtttctcaactgcattcaaaggaagaggaggactggtacaacccacaaaatggtcaccagaaatcagattaagccagaaaactgcaaattaggttaaaattaaatttaccttcaatctcttcctcctcttcctcttcttcatcctcatcgtcactggaatcactgacctgcacagttatgtcagtgctagttacaggggtccagtcaaaataaactccaaagccaatgtcatagtcatcggtcgcaaactcccagcagacacgcttcccctctggatgagtaggtacccggatggtcaccacctcaccacgcttcaccaccagacggctgttcttctctttgcccagcttgcttttgaattccttcaccttggcaaaggtccagatgcatggaggagccatcagaggtggggagactgaaaggacaagcagcttagcactgagaaaccatgaggaaacatgagtaccccgggcattttgctaagagag

SEQ ID NO: 13382 - DNA, 558 bp, Homo sapiens
  MAP TO AL034380.25; EXPRESSED IN BRAIN, SIGNAL = 1.9; EXPRESSED IN PLACENTA, SIGNAL = 1.8; EXPRESSED IN LUNG, SIGNAL = 3.2; EXPRESSED IN BONE MARROW, SIGNAL = 6.1
tgttaagccctgtggtagggcaaggcagagcacagatccttggcatatcctgttggataagcctcttattcatatcctgaataagaggccagggcaacaggccctctcagccttggtggggccgctgaccccatccttaccaggagagggaggctggatcttgggctgggacttcttggaatcagcagctgcaaagatgtctgggggagggtcttctccccgttcaatcttgcattcaaaggcatagagacactggatatactgctttttcaaggagctggcagcactgcttgatgtgcccacattgaggttggttgcaagttcccgccattttttgttcttgttgacctgtataaccaaaccaaaggagtcgaggtatatctcccgcctggttttcctgcccataagccccaagccccatcaggctgtaaggtattcatctttgtagaaccacagttcttaggtaattgaaaaagttaatcttgcttggtggatagtccacaagaagtgttaaatctgcagctggcttcattttaccctcaggatgttccactgcaa

SEQ ID NO: 13383 - DNA, 584 bp, Homo sapiens
  MAP TO AC009396.5; EXPRESSED IN FETAL LIVER, SIGNAL = 2.1; EXPRESSED IN LUNG, SIGNAL = 1.9; EXPRESSED IN PLACENTA, SIGNAL = 1.9; EXPRESSED IN BRAIN, SIGNAL = 2.2; EXPRESSED IN ADULT LIVER, SIGNAL = 1.5; EXPRESSED IN BONE MARROW, SIGNAL = 2.1
tttgggctatgtcctgaagcctctttttgggtcatttttccaggtgcccagtgagtgatggatggatactgtttgcaagattgattcacatggcacttttgtttggcttttgacaggttgtttataagaataatgacatccgtctggagctgtctcgcctggcccggattgcggacaccaagatgaaaatctatggcgaagttgtgtttaagtgtgagaatgtggccacactggaccccatcaactttgagaccccagaggcttacatcagcttgcccaagtggaacactaaacgtatgggctccatctcctttgacttccgcaccacagagcccaatggcctgatcctcttcactcatggaaagccccaagagaggaaggatgctcggagccagaagaatacaaaagtagacttctttgccgtggaactcctcgatggcaacctgtacttgctgcttgacatgggctctggcaccatcaaagtgaaagccactcagaagaaagccaatgatggggaatggtaccatgtggacattcagcgagatggcagatcaggtaggaagaggcaggatgtgtgactgaga

SEQ ID NO: 13384 - DNA, 519 bp, Homo sapiens
  MAP TO AC018500.2; EXPRESSED IN BRAIN, SIGNAL = 1.7; EXPRESSED IN PLACENTA, SIGNAL = 1.3; EXPRESSED IN LUNG, SIGNAL = 2.6
acggcataccagaaaaatggggccattttcatgtgcatgtgtgctgtgtgttgttttcagatctctctggcatggctgaaaggaagacccagccgagcatggtgagtaatccaggcagctgcagcgacccccagcccagccccgagatgaagccgcattcctacctggatgccatcaggagtggccttgatgacgtggaggccagcagctcctacagcaacgagcagcagctgtgcccctacgcagctgctggggagtgccggtttggggatgcctgtgtctacctgcacggggaggtgtgtgaaatctgtaggctgcaagtcttgcacccattcgacccagagcagaggaaggctcatgaaaaggtaaagtcacaaacctttgcatgaactcatgttaagaaatctgaaatgtactgaacaggacacggaaggccatccatatacactcaagaaatctgaaatgtactaagtgacagaattgttggtatttccacaggcatccccctgccagtaatac

SEQ ID NO: 13385 - DNA, 571 bp, Homo sapiens
  MAP TO AC010618.4; EXPRESSED IN PLACENTA, SIGNAL = 1.8; EXPRESSED IN BRAIN, SIGNAL = 1.7; EXPRESSED IN BONE MARROW, SIGNAL = 2.4; EXPRESSED IN FETAL LIVER, SIGNAL = 1.6; EXPRESSED IN HELA, SIGNAL = 2.8; EXPRESSED IN LUNG, SIGNAL = 5.6
tctccatttgtatcccctgcacacttacgttttaatctgtccccgctgacttcttcacccccaatttttcctccagctgtcccgtcccctgaagccattgctgcccctcactcccctcctcctccccccaggtccgagtacaaggcccacttctccctccgcaacctgcatgccttctctgtggagccgctgctcatctaccccacacactacacaggagacgatggctatgtgagtgacaccgagacctcagtcgtatggaacaatgagcacgtcaagaccgactgggaccgcgccaagtcccagaagatgcgggagcagcaggcactgagccgtgaggccaagaactcggacgtgctccagtccccactggacagtgctgcccgggatgaactctgaggggtagcagccagaaagccaaagcagccatcggtggcccaggctccacgtgcttactgaggacatcaggtccacctctggaccccttggcaggccacagagggctctcgtgtggggtggtgtccagccagctcttgctaagcaatcacgtgcacacaggcagcattaatgg

SEQ ID NO: 13386 - DNA, 538 bp, Homo sapiens
  MAP TO AC007497.2; EXPRESSED IN PLACENTA, SIGNAL = 1.4; EXPRESSED IN BRAIN, SIGNAL = 1.3; EXPRESSED IN LUNG, SIGNAL = 2.1
caacgtctgtttttgctttggttttgttttagtggcagctgaaatatcctaaactaattctccgagaagccagcagtgtatctgaggagctccataaagaggttcaagaagcctttctcacactgcacaagcatggctgcttatttcgggacctggttaggatccaaggcaaagatctgctcactccggtatctcgcatcctcattggtaatccaggctgcacctacaagtacctgaacaccaggctctttacggtcccctggccagtgaaagggtctaatataaaacacaccgaggctgaaatagccgctgcttgtgagaccttcctcaagctcaatgactacctgcagatagaaaccatccaggctttggaagaacttgctgccaaagagaaggctaatgaggatgctgtgccattgtgtatgtctgcagatttccccagggttgggatgggttcatcctacaacggacaagatgaagtggacattaagagcagagcagcatacaacgtaactttgctgaatttcatggatcctca

SEQ ID NO: 13387 - DNA, 559 bp, Homo sapiens
  MAP TO AL132986.2; EXPRESSED IN PLACENTA, SIGNAL = 2.4; EXPRESSED IN BRAIN, SIGNAL = 1.5; EXPRESSED IN FETAL LIVER, SIGNAL = 1.8; EXPRESSED IN HELA, SIGNAL = 2.1; EXPRESSED IN BONE MARROW, SIGNAL = 3.4; EXPRESSED IN LUNG, SIGNAL = 5.1
tgggatgggaactgagaatcatttgagggcttaataagtgattttggaggccccagtccccaccctatgggagcagagtgaggtggtctgacaaggtgcttccttcccggtgagcaggagatcgggaggatctccattgagatgcatgggaccctggaggaccagctcagccacctgcggcagtatgagaagagcatcgtcaactacaagccaaagattgatcagctggagggcgaccaccagctcatccaggaggcgctcatcttcgacaacaagcacaccaactacaccatggaggtgggtggggctggccttgttcctcttcgggagcccgtggccccttctgctctttctcctgggtggggaagtctccaagggaacaggtcatagttggaggataaattaacttcacccctgaagcctcacatcttcaatttttagtaccttctgctttcccaaggaatgtgttgagaatgcacatttctaggccccatctctagaatttgcttcactaattctggggtggagttcagaataagcacttctggtggttctgggt

SEQ ID NO: 13388 - DNA, 581 bp, Homo sapiens
  MAP TO AC007225.2; EXPRESSED IN PLACENTA, SIGNAL = 1.4; EXPRESSED IN BRAIN, SIGNAL = 1.9; EXPRESSED IN BONE MARROW, SIGNAL = 3.2; EXPRESSED IN FETAL LIVER, SIGNAL = 1.7; EXPRESSED IN HELA, SIGNAL = 2.4; EXPRESSED IN LUNG, SIGNAL =   4
ttgcagtgaagaaacaactggtgacatcagtgattccatggattttgtactgctcaactttgcagaaatgaacaagctctgggtgcgaatgcagcatcagggacatagccgagatagagaaaaaagagaacgagaaagacaagaactgagaattttagtgggaacaaatttggtgcgcctcagtcagttggaaggtgtaaatgtggaacgttacaaacaggtttatatatttttgttacctcttcttatgttcagagataaactgaaatctgatttttaaaatcagaatatttttgttatacaatagtacattgaaaaacatcttaaaatggctgttattgaagaagacttaaacggaaagatatatatgcagtgtttgtggattggaagacttaatattgtcaaaatagcatttaaaaagaattgatttatagatccaatgtaatctcagtcaaaatcccagcagacttttgtagaaattaagaagctgattctaaagtttatatgaagaaacaaagaacctggaacagctacaacgaatttgaaaaggaagaacaagttgaaagacccaagcaacctga

SEQ ID NO: 13389 - DNA, 508 bp, Homo sapiens
  MAP TO AC002523.1; EXPRESSED IN ADULT LIVER, SIGNAL = 1.8; EXPRESSED IN BRAIN, SIGNAL =   2; EXPRESSED IN PLACENTA, SIGNAL = 1.6; EXPRESSED IN FETAL LIVER, SIGNAL = 1.6; EXPRESSED IN BONE MARROW, SIGNAL = 1.6; EXPRESSED IN HELA, SIGNAL = 1.7
tccacccctccaacatactcatacgcctctccactccagcagcacccggctactttccatttccccaaaaatacctagtgaatttctttacccacacggccctctttacttgaagtgcagattccccccttctttgtctggcaaaatcagacttgtttttgtatcccttatctctttagcaattagcacaaggtcttgcctggagttgatgctctgaaaatcgtaacttgaattgttctaccttactctttgcttatttaactcttcccttcccacagccacaccattgttattacttttcaaaggagaaaactgaagcctcaccacaagacttcccaggccaagaggctgtcatgccccatttggacacagaaggatgtcttaaggcctctggcccccagtgccccagatatccctaagaggaagccctataagaagaatgggaagctcagagtttctctgccccctcccctctacaaatcctgagagtgaaggctcagctcaaacc

SEQ ID NO: 13390 - DNA, 510 bp, Homo sapiens
  MAP TO AC012568.3; EXPRESSED IN BRAIN, SIGNAL = 1.4; EXPRESSED IN LUNG, SIGNAL = 1.8
caaatcacccaggaaaggtgacacaactcctgatgtgcagtatcaagtgtgaatgctggaaatgctacttaaaaggttgaccaggaatggcctggaggttgtcttcaacttgagtaaatcacacagacctctgagatttatcctaccctcattcctagaacaaaaaaaaagtatatttaagaaatcctcactcattactatcactgtattcctcactctcttacaatatactgaggaaaaaaaagatttctccttaacctcctactaaaaactaaaattaaggggaccctataaacaagtcaggcagccaacatgataagggcaattttggcaaaatatgactgggctgagtagagaggtatctcagagacagctagcatctttgttggtcaaaccctagtatgaataattcagtgctcttcatcagatgaaaggccttcaatttcatctctgtctcccccgattgccatccagaatgctttggccacctgtggagagaagcatgcaaca

SEQ ID NO: 13391 - DNA, 580 bp, Homo sapiens
  MAP TO AC010489.4; EXPRESSED IN BRAIN, SIGNAL = 2.1
taaatgtgcaccttcctcccaccttgactacagaagatgtcagaaagggaaggggggtgccatagagatgggcttactgtgctggtcgctcctgtcccttgtcccatccactgtgccatccggaaggatcctcaggaagtggcccccgttgctacagtagaggagtttgggcttcttgtaattccctggaggcagattaaacttctcggtcagggctgtgaaggtggtgatttccccttcagccatggctcagcagctgctgcttgtggcgctttcaagactgtaagaaattgaacaaacctgtagtcggttcttccagcaaaggcacaaaatgcactttgaagagaggaaggacagctccagggcacagggttcccgggtagtgagtaagcacagcctgcccaggtgatgcccgcagtccgcgggcctgtgaggtggctggtggttaaggaaggatggtcccaggcctgggaggggtttccagggcatttttctctcttcccaattggacacagctttggaccaaactgcattttttagaacttcaaatttaatcatctgaccatggggaaaagaatca

SEQ ID NO: 13392 - DNA, 581 bp, Homo sapiens
  MAP TO AL133454.2; EXPRESSED IN FETAL LIVER, SIGNAL = 2.2; EXPRESSED IN HELA, SIGNAL =   2; EXPRESSED IN ADULT LIVER, SIGNAL = 1.8; EXPRESSED IN BRAIN, SIGNAL = 1.8
ttcttgccccatgacctatcctagtcactgccccaaatctctgtggataaagacaccctgaatgccactgtggcccattatggtaattacatccaccctagccctaatggtatcaccatctggcctatgccattccaaaatcctatcattgctatggatactagggaacatagctccatggaagcatctcctatcaactccagcctgtgtcccctcaccagtgcattcttaattaccttggtgaatgaagtgttttctttggaccttcctaagaagtatggtcagatagtgtgttctccagtctcatatagtaaatccattctaaaactctctcttctctgtgagttctgatctcaatatactctgccaaagaagttcttgcatatttatctaatgtactataggtcatactcatgtccaagcttcaagaaaccatcccaccagtgtatcctaggaccaagttattaggatgtcaaatcctgagttacgaatagcgttcccatgttaataaattctcccttattcatccttattattccgccagcccactccaggcaagacctgcaagatccacctcccta

SEQ ID NO: 13393 - DNA, 566 bp, Homo sapiens
  MAP TO AL136080.6; EXPRESSED IN BRAIN, SIGNAL = 1.7; EXPRESSED IN PLACENTA, SIGNAL = 1.7; EXPRESSED IN ADULT LIVER, SIGNAL = 2.2; EXPRESSED IN FETAL LIVER, SIGNAL = 1.7; EXPRESSED IN HELA, SIGNAL = 1.7; EXPRESSED IN BONE MARROW, SIGNAL = 1.6
atccttcagggggttgaaagtagtgattatggtcagacaagtctcttcttatgatacatttcatgcacctgagtcataaccactctacaaggggtcaaatttccaagtccaaagccatctgattctatgactcacccttagatccgggaaggccttgttgtcccggtaatccatccttgcctttatctccaggaagcccacggggtccaggaagtcctggtaacccatttcctgggaggccaggtggaccaggatggcctttttcaccaggaagtccaggtaaccccttttcacctgggaagccctgtccaccatcaccctagacaacatataaaacaaagaatgaaaattcaactcagagatttatctggacagtcctctgactacaggaaagaggtagccagtgtgaccaatgctttgtgttttgttaaaattatctatcatcaccatagtttatctatcagtctcctctgactttagttagtggatatgaatcttgtctactctgggtgatctaacaacacaaaagtttctggataggggtgaggagacagggcaagaaatga

SEQ ID NO: 13394 - DNA, 582 bp, Homo sapiens
  MAP TO AL135787.3; EXPRESSED IN BONE MARROW, SIGNAL = 2.6; EXPRESSED IN FETAL LIVER, SIGNAL =   2; EXPRESSED IN LUNG, SIGNAL = 3.3; EXPRESSED IN BRAIN, SIGNAL = 2.2; EXPRESSED IN PLACENTA, SIGNAL = 2.1; EXPRESSED IN ADULT LIVER, SIGNAL =   2; EXPRESSED IN HELA, SIGNAL = 1.7
aagctataccgcctcaaaagcaaggcggaagaactttatcacttgtttggagcagactgaataaggcttcagacttgtaaacattaagacaatttgctcatttggcaaacttggatatattgatgcatgttttatataagtaaaaatttgtaaagggaatgctagaatgagctatttctttacccgttcagtctcaaaactagatttctaaatggatcaaagatacagctttttcttgtcttcgttgaataagcaactaaaccaaaaaatatctaaattgacgttcatggaaattgtaaccttttctctttgtagttcaagtattagaactttcagcagaaagagacttttggaggtcacaaaaagttgatatttaccaagttggatgatcgttttcagaatatccttgactgccgggtggcttggctgtgagcagggtgccatgttgctgtccctttgtttcaggtctctcaggcagctgcagagcttcaacagtactgtatgcagaatgcctgcaaggatgccctgctggtgggtgttccagctggaagtaaccccttccgggagcctagatcctgtgct

SEQ ID NO: 13395 - DNA, 597 bp, Homo sapiens
  MAP TO AL138761.3; EXPRESSED IN ADULT LIVER, SIGNAL = 1.9; EXPRESSED IN BONE MARROW, SIGNAL =   2; EXPRESSED IN BRAIN, SIGNAL = 1.8; EXPRESSED IN PLACENTA, SIGNAL = 3.1; EXPRESSED IN HELA, SIGNAL = 1.6; EXPRESSED IN LUNG, SIGNAL = 2.4
tcccactcgggtacaagaaccctgaagttcacttctggtctctcaggggcattgacaccctgggagagactccctaactcccaagtctttctctccaccgagatctgagctcccactcatgcagcttctcaccctgcaggtcctgatgtgcgcagcttcattgttggccccccaggccctcctgggccgcagggaccccctggggacagccgcctcctgtccacggatgcctcccacagtcggggtagcagctcctcctcacacagctcatctgtcaggcggggcagctcctacagctcttccatgagcacaggaggaggtggtgcaggctccctgggtgcaggcggtgcctttggtgaagctgcaggagacaggggtccctatggcactgacatcggcccaggcggaggctatggggcagcagcagaaggcggcatgtatgctggcaatggcggactattgggagctgactttgctggagatctggattacaatgagctggctgtgagggtgtcagagagcatgcagcgtaagtggggacatttaggccttggtgctggggggaaggagcgtgggagcatctccagactggctttc

SEQ ID NO: 13396 - DNA, 585 bp, Homo sapiens
  MAP TO AC007342.2; EXPRESSED IN PLACENTA, SIGNAL = 1.6; EXPRESSED IN BRAIN, SIGNAL = 1.6; EXPRESSED IN ADULT LIVER, SIGNAL = 1.6; EXPRESSED IN BONE MARROW, SIGNAL = 2.1; EXPRESSED IN FETAL LIVER, SIGNAL = 1.7; EXPRESSED IN LUNG, SIGNAL =   2
cagagacagagactggtggccaggaggacctagaagatttacaggaggaagaggaagtgtcagatatgggtggtgacaatcctgaagtgggcaagaaagctagaaactcaagcaaatttgagctgaggaaaagcccagttttcagtgatgaggattctgaccttgactttgatatcagcaaattggaacagcagagcaaggtgcaaaacacaggacatggaaaaccaagagaaaagtccataatagacgagaaattcttccaactctctgaaatggaggcttatttagaaaacagagaaaaagaagaggaacgaaaagatgataatgatgatgaggtggaagatactgatttttttttgaagatattgattctgatgaagataaaaggggactgtttggaagtaaaaaacttaaggttaagtttgagaaaggagagagcactttcctcctcctcaaattagcttttgttctgtttttctaggagagatgtaattgtagttagaaggtttagagctaagatatattatgctttgttttatcagttataaatgaatctgtacttccattcagtttatgttccagttg

SEQ ID NO: 13397 - DNA, 570 bp, Homo sapiens
  MAP TO AC019055.2; EXPRESSED IN BONE MARROW, SIGNAL = 1.5; EXPRESSED IN FETAL LIVER, SIGNAL = 1.6; EXPRESSED IN BRAIN, SIGNAL = 2.4; EXPRESSED IN PLACENTA, SIGNAL = 1.6; EXPRESSED IN HELA, SIGNAL = 1.6; EXPRESSED IN ADULT LIVER, SIGNAL = 1.6
tgcaagtttccctttccttgttccatatcactctaggaattgaccaagggtcagtggacacagctgacactggcaagagttgggaaaatgagagggaggctcttgggaagaagtagtaaggggatggtggggagagagagaaaaatcagtggaaaaatgatcagtctacaggaaatagggaagttcaggagcccctagggattgacctctatgaggtgggtttctatattcattgaatggggctaacccttagggcacggggtcatggagaagatcagagaagatgatgcatgcatagcaatgcattacaaacttcaaagctccatgcaaatgtgatgggatattggctgatcatcactgttgggggtgtctttacacagagaatctgttgcccctggttgctaccaataaggctgcactcccaaatcaggcactgtggcttactgatggaataacctcaggttcacaccagcagcacacacagttcttgcacactctagtgtaaaccaagataagagacctggatctcgctgagtgatcctgggttagtcacccctcctttctaggtcc

SEQ ID NO: 13398 - DNA, 584 bp, Homo sapiens
  MAP TO AC017079.2; EXPRESSED IN BRAIN, SIGNAL =   2; EXPRESSED IN PLACENTA, SIGNAL =   2; EXPRESSED IN ADULT LIVER, SIGNAL = 1.6; EXPRESSED IN LUNG, SIGNAL = 1.9; EXPRESSED IN BONE MARROW, SIGNAL =   2
agagatgatggcaagcactgctaaatgttaattttctaatttttagttttcatgttaaatgaattaagtcagatacaaaactgcacacattatgtcatcacaatgatgttaaaaagacagagaaaaagatgtaaaggagataagctaaatgcaaatttaaaaagtgatgacatctatgtgatacatattttcatattttctaaatgtaaaataagcatgtccttttccataagtggaaaaaatagcatttaaaaagaagcaatttgttgcttttaatacaaactgtcaaaacttggcctttaagggcctacctgatcagcatccacaaacaggaacttgtcaacaactagtgggaaaagtacatccaggaagaggatcttgtaaccccagatgatacgctgtttttcagtttgttgatgaagccaccggggccatttgtactgaacaagctcatactggaaattgtattcatttgccatgtaaggtataaactcctatttttagacatgggaacaacaaataatcatttcttctgattaagaaaactgctttcataatgtaagccaaccaccatgatacgggac

SEQ ID NO: 13399 - DNA, 536 bp, Homo sapiens
  MAP TO AC018764.3; EXPRESSED IN ADULT LIVER, SIGNAL = 1.7; EXPRESSED IN BRAIN, SIGNAL = 1.5; EXPRESSED IN PLACENTA, SIGNAL = 1.3; EXPRESSED IN BONE MARROW, SIGNAL = 1.6; EXPRESSED IN FETAL LIVER, SIGNAL = 1.7; EXPRESSED IN HELA, SIGNAL = 2.1
ttttccctctggtgctatgcgatctttgattttatttaacccagacattattgtattttgattatgaatttgagaacattgagaccactagtctaaaagaacttctttttactttacctaaagaatctatctcattgacaacaaattatgtttttagtctggcagttgtagaaccatccatgatgctcttggaaaatgtgaagaggcatctgaagcgtcctgtatggattaatgccgatattcttcctggtccaaatggaaatagcaaagtaatagatgcaaaaccatttttagacaccgtgatatccttctttccagacgtgacgttttccctgggttggacaacaggatggcatcctgagaaagtcaatgaaggtaataattctaataatgtatttcttggtcaaattaaaatatcctccaggtataaaaataacatctttaatacaaagaccaaaacccattctacaaaatctaagcctgatggaaaaaaaggcctgacccttcaggtatgtgcagacccttccatctgctct

SEQ ID NO: 13400 - DNA, 566 bp, Homo sapiens
  MAP TO AC004460.1; EXPRESSED IN BRAIN, SIGNAL = 2.3; EXPRESSED IN LUNG, SIGNAL = 2.4
tcaactaccatggcatacacgttaagcattttgaagtaaaaattacattaaagaaaatgtcctgaaatgttgaaaaattataagcatttttcccctcataaacaggtgtatgcttggggtgacaatgaccacggccagcagggcaatggcacgaccacggttaacaggaagcccatgctcgtgcaaggcttagaaggccagaagatcatgtgtgtggcttgcgggtcgtcccacagtgtggcgtggacaactatggatgtggccacgccctctgtccacgagcccgtcctcttccagactgcaagggaccctttaggtgcttcctatttaggtaacacagatttgcatcttctctgagattttccagtaggttacagcaaccttatatttatttaattgtgccaacacattagaggttgtagtgccgtgttaactacattatgaatctaaagacacagaagaattatggtgtgctctcatgcgatttatacatgctggaatgaaagttttagaagaaagtatgttgctgattcttgtgtttatgatcaggtaaactcacagcgctg

SEQ ID NO: 13401 - DNA, 528 bp, Homo sapiens
  MAP TO AL159191.1; EXPRESSED IN BRAIN, SIGNAL = 1.5; EXPRESSED IN PLACENTA, SIGNAL = 1.7; EXPRESSED IN LUNG, SIGNAL = 1.7
gattccaatgagaccaacgggaaacatttttaaaagcataaaagatcgcctcaggcatatgctgagggaataaaggtgcaatggatcactgatacactcctaccatgcctaagctactgagtccgagaactggaagagggtctccgggttattgctgtcggcaggattgctgggctgcagtgtcttggtgggtgtagttttaccgtgagaatgagaggaagaagaatgggaactctcactggaactgctgcgcgtctcggtactggtgctagtctttttcatttttcttctcttagccaaaggggccttatcaacattctgaaggcaaaacccctctctcttgtatttgttaaaggcctggcgggggaaaaaaagggaacccctgtgaaggtaaaagtactgaagctttcctagcagttatgacttacagcagaagacaactttccattggcaactgcagccccaagttgttttaagggaacaaagctcttaaaacctttatatctaagtctattggcagggtggaga

SEQ ID NO: 13402 - DNA, 574 bp, Homo sapiens
  MAP TO AC011510.3; EXPRESSED IN BONE MARROW, SIGNAL = 2.3; EXPRESSED IN LUNG, SIGNAL = 2.4; EXPRESSED IN BRAIN, SIGNAL = 1.3
gctgctcatctctggtttccctccctgcccccagttgttccttcaacccgtctcccacctttgtactaatctccccatattcaattccttctattgaggtacctggcaggggctccattgcctatctggaaacaccagaagttctaagctatggctaacttgcttgctctcttctgtctcaggggcatagggaaggagctgggggtcctacacatgtgcacgtaactcactcttcatcgtcttcacagccaccttgaggatggagtcgtcctggttgagctggccttccatcacagctccaaactctcctgtggggggccagagggagacactgacctcagagggcccgtggggactgtatttcctatagttgggtgggagtgtggaagtgcaggatctcagaagttcagaaggatgtgtgtatgctgccgggggactcaccctctcccagagtcttccccagggccaccttgtgccggtccaccatcacatcccgcagcttctccttcagctcttcactgatgcccaggctgttcactgcatgcaaggttggggtggacagagtcatggagca

SEQ ID NO: 13403 - DNA, 590 bp, Homo sapiens
  MAP TO AL138876.3; EXPRESSED IN BRAIN, SIGNAL = 1.9; EXPRESSED IN PLACENTA, SIGNAL =   2; EXPRESSED IN ADULT LIVER, SIGNAL = 2.9; EXPRESSED IN BONE MARROW, SIGNAL = 1.5; EXPRESSED IN LUNG, SIGNAL = 1.6
taaatccagcacccacttccctttaggacagacggaaagttgcctcctggtaagaaaatttcttaatctcaaaaaggctttcagggagcatggtgatggataagaagacaaacttggatccgaacttaagaaaaaggaaagaagtaaaaaaatgtaaaagagagtgcaaaagcaaaggcgaagctttgtggatattgggaagtaggccgtggtgatgctgcagcacacagggatgacaggacggccaggggacaggaaagaaccgagtccgaggaccacagccctccaggggcctgatgctgcctctcacttgtgcttttacaagcggactttcaaccggggttctgtcatttggcccccagcacacgcatgcacactggcacccgtgctgcgtggctgggggaggggcagaggaagcagaagagacaaaaaaggaatgaaataaagagcagattctgttcctagtatcaaatccatattttgattcttaaaagagaaaaaaaaattgctaagctaatttccataaaatggataaaaattaagtattcacacatctttccaaacatacatcaaagcaagccacaacaatg

SEQ ID NO: 13404 - DNA, 541 bp, Homo sapiens
  MAP TO AL121985.13; EXPRESSED IN PLACENTA, SIGNAL = 1.7; EXPRESSED IN BRAIN, SIGNAL = 1.5
tgtcgggaaactagcaaaggggccagcctcaggccctgcaacaaactggggcattcccaattcagccctttgttcctcagggttttcagggacaacaacccccactgtcccaagtacctcagggaataagccagttaccacagtacaacaattgtcccccgccacaagtggcagtgcagcagtagatttatgtactatacaagcagtctctctgcttccaggggagcccccacaaaaaatccccacaggagtatatggcccgctgcctgaggagactgtaggactaatcttgggaagatcacgtctaaatctaaaaggagttcaaattcatactggtgtggttgattcagactataaaggtgaaattcaattggttattagctcttcaattccttggagtgccagtccaggagacaggattgctcgattattactcctgccatatattaaggttggaaatagtgaaataaaaagaacaggagggtttggaagcactgatccgacaggaaaggctgcatattgggcaagtcaggtctcagag

SEQ ID NO: 13405 - DNA, 519 bp, Homo sapiens
  MAP TO AC008397.4; EXPRESSED IN BRAIN, SIGNAL = 1.6; EXPRESSED IN ADULT LIVER, SIGNAL = 1.5; EXPRESSED IN LUNG, SIGNAL = 1.7
tgaccgaggagtgtgtcatctccccagtgcggatgacgggccttacctctgcagagggcctgtgggtggggtttgcaccacttcgggctgaggcctgggatggttgtctttgcacatactgtaagggcctaaccctggccacagaactttctagcagttctggaacaatcctaccatgcacggatctgtaggaatttttagggcccatggcgtcccagcggctgctcggagccatgtttccagacactgttttctggagtggattggggacagcttctgtctggaagggactggacaatgcccttctagccgaggacggatatagtggcacatgtgagaccatgctggtggtccctgacctctgaagaagactaggattccccatcctgcccacagacactgaaagcaatctgaaagcctcagtactgccacgggccagctggggtgatcctgagactacattagaagccactgtaccctgagagtgatttgggggtatgacgtgagtgacagacccct

SEQ ID NO: 13406 - DNA, 574 bp, Homo sapiens
  MAP TO AL133163.2; EXPRESSED IN BONE MARROW, SIGNAL = 4.1; EXPRESSED IN LUNG, SIGNAL = 2.1; EXPRESSED IN BRAIN, SIGNAL =   2; EXPRESSED IN PLACENTA, SIGNAL = 1.7; EXPRESSED IN FETAL LIVER, SIGNAL =   2; EXPRESSED IN HELA, SIGNAL = 1.9
actgcctggtgcttgttctcccgggccttgtcttcaggggaaacaaatagagaagggagacttggttctaacatccaaaaaccacattgaaagactgacccgtcctggttcctcttacttcaatttgaacccatttgagtttcttcagatagatcctgaagttacagatgaagaaataaaaaagaggtttcggcagttatccatcttggtgcatcctgacaaaaatgaagatgatgctgacagagcacaaaaggcttttgaaactgtggacaaagcttacaagttgctactgatcaggagcaaaagaagagggtcctggatgtaatttaggcaggaaaagaatacgtggaacacactgtgaaagagagaaaaaaaaaaaacaatcaaagaaggaaggaaaacctacgattgtagaggaggatgatcctgagctgttcaaacaagctgtatataaacagaaaatgaaactctttgctcagctggaaattaaaaggaaagagagagaagccaaagagatgcatgaaaggaaacggcaaagggaagaagagattgaagctcaagaaaaagccaaacg

SEQ ID NO: 13407 - DNA, 559 bp, Homo sapiens
  MAP TO AL137190.2; EXPRESSED IN BRAIN, SIGNAL = 2.7; EXPRESSED IN LUNG, SIGNAL = 1.9
tttcaaggatccccaatctgccctctgaaggccttgccccgtcatgcctctaggggcaggaggcccatacttccatgtcttctgactcagcttgaccacaacatgggatatttgaaatcagggctgctggggagaaattccagaaggacggccgccgcccctggtcaaaactcctggttctagaacacaggagaagccaaaggccgacagcaagtcagagctacgtgccaagcctcaccccatggtggtgcagggtgtgccgtcctcagaaggtgaaggcatacaccacgcccaccaccacgatgttccccagcgtagctatgatggcaatccatagcaagacggcgtcgttggaggaccgaggaggatcttccggctggccctggccattggcagccgcgtggacattggcagaggagttaaacagggagtactcggtgctgaagtcctcgttgggcgagtccatgaaagctccccccatcatgggcagctgcaaagaaggagagagagaattatccagggccatgggggcttgggcagatgtaccctgcaaaaggga

SEQ ID NO: 13408 - DNA, 526 bp, Homo sapiens
  MAP TO AC022845.2; EXPRESSED IN BRAIN, SIGNAL = 1.9; EXPRESSED IN FETAL LIVER, SIGNAL = 2.3; EXPRESSED IN HELA, SIGNAL = 2.5; EXPRESSED IN BONE MARROW, SIGNAL = 2.2; EXPRESSED IN LUNG, SIGNAL = 4.8; EXPRESSED IN ADULT LIVER, SIGNAL = 1.4; EXPRESSED IN PLACENTA, SIGNAL = 1.7
tgtaacccctacaacggagcctggcaggaaggaaatcacctaaaaaagaaactgtcagagagatttaatagtcacatgttatcattaggagttggttactgtgtcacattcatgcttttagctaaacactttaagattcaatattactttttttctctcctctgaaatgtgtccggtgaagatgtcccactaaggtaagtttgacatggtgtaagggagttgaaaggggtaaacgcggataaagagcagattacttgaccctacattttaagagaagacgacgccttccgggcgcacgccgagcagaactccaccgacaccttatccttgtccacatggagacagactcctcccgccgagtcgtcctcttccagcaggtcctgcttctgctttcccactggcagagcgtagtcgtggtcaccggcgggcgagtctctgaagagcgaggtggtcagccgcagtcccacgccgctcagccggctcagcaagcgagccagtccagtctcgttggctaagactgcccgta

SEQ ID NO: 13409 - DNA, 553 bp, Homo sapiens
  MAP TO AC008655.3; EXPRESSED IN LUNG, SIGNAL =  40; EXPRESSED IN BRAIN, SIGNAL = 1.3
acgcctccacaaaacttcactgttgcctttgacactggctcctccaatctctgggtcccgtccaggagatgccacttcttcagtgtgccctgctgtgagcttctatgtgggagaataaggctgaatgggggtgaagggaggaggcggggctggacctcagcttctcagaggcttttgaggaactgttcttttatcatgccctcacaggtcagaaagtcaaaggggcagtaggcactggggagattccctcccccatgacacctttctgacctctaacctagggttacaccaccgatttgatcccaaagcctctagctccttccaggccaatgggaccaagtttgccattcaatatggaactgggcgggtagatggaatcctgagcgaggacaagctgactgtgagtggcctttgactctcagaagtcttgagcctgggagaaccccattgtctaagatcatctggcttaggaagaggctcgaggaggagcttcccaagccaatggatggggcttttcaagtggggaggagggcctgcctttcagagtgaaggg

SEQ ID NO: 13410 - DNA, 505 bp, Homo sapiens
  MAP TO AC015971.2; EXPRESSED IN PLACENTA, SIGNAL = 1.5; EXPRESSED IN BRAIN, SIGNAL = 1.4; EXPRESSED IN LUNG, SIGNAL = 1.7
ttaatggtgcaaaggaaggcaacaggagctggtggtgaatggtgctggggttttcagcactagagctgtacaaaccattcctgacttcttgtaacttgagggatataaaccactcgctttgtttaaccaccatagccaactatctcttacatgcaggcaaatgcaattctaacttacacaaatgattaaataatttataaaattcctaagggggagagtgttgtaagattttatagaactgtgacagagtaaacaaaagcatagggtcagaaaaagtcacaaagcaaaggaaatgctggcatatatgctggtgatagggccgtggagagtggtcattgtcacagggagaatgtgaatagtgaggaagagaaaagggccaaggcaaaaacccaaggaaagctgaatcttggaggtgggtagggccagggaagagcgggcagaggaggaaaagaaggaatggcaagacacccaggaagaaaccagcagtagggtcactggctggaga

SEQ ID NO: 13411 - DNA, 546 bp, Homo sapiens
  MAP TO AC013557.3; EXPRESSED IN BRAIN, SIGNAL = 1.3; EXPRESSED IN BONE MARROW, SIGNAL = 3.1; EXPRESSED IN LUNG, SIGNAL =   2; EXPRESSED IN FETAL LIVER, SIGNAL = 2.5; EXPRESSED IN HELA, SIGNAL = 3.3
ctttgattctggctccttgcacttagctgaagagagtgagccagtcaccttgaagaaatcatccaggcggccctgggtgctgccttaatgactcttactcagcctcttgaccccactgtggattcgctcctcagagaactgcttttcaccacacacgaacttgaccagctcttcttcatttggctcgctccacttcagctccacagactctgggcccagcacctcaggttccaagaagagctggtaagcctccttgtggagccgattttctggcaaagggtacttgttggggtcaagtcgctgcacgatctcctcgatgctcttgtgcttctggattagatccacagcccgcttgggcccaatactccagatactcttacagtagtcactgcctagcaggatgcacagatccacaaactgttcctggttctagctcctgcagaatccagctcaggtggaattcctggattggcagctttttggcttcactggcagtcaggtgttgcattagcacagggctgccgaaggtgaagcagtccatgtcct

SEQ ID NO: 13412 - DNA, 585 bp, Homo sapiens
  MAP TO AC023078.2; EXPRESSED IN BRAIN, SIGNAL = 1.5; EXPRESSED IN FETAL LIVER, SIGNAL = 1.7; EXPRESSED IN ADULT LIVER, SIGNAL = 1.5
acatccactccaggatgctctgcaacagggacagggcccagagcaggacacacatgaccgctgacaggtgtgtggggcagtggcagcagtaccagatgggccacaggacggacaggcggtgctcggtgctgatggtgctcagcatgctcaggcctgtaatacaggcggagaacaacaccgtggtgacaaatctagagaaatggatggagagagaactaacaaagtcactgaagaaattaatgaatgttataatctggaagcaggtgcagaggaagtcagccctggccaggttgaggatgtagagagagaaggtgttactgtgcatgcagaagcccaggagccagagcatgactgcatttcctgccagcccgaccaggtcaatgatgaggatcagcactatgaggaccaggacctccatgccacaacgatgaggatgggtctcctctgtatcactaattggtgcaatttctgtatccaaggctgggatggttggattcatgctcagaaaccctagtctggtgcccctgggaacacaaacaagatgtgatcagcagctgtatgatctctgattctcaccaccaccct

SEQ ID NO: 13413 - DNA, 538 bp, Homo sapiens
  MAP TO AP001206.1; EXPRESSED IN ADULT LIVER, SIGNAL = 1.5; EXPRESSED IN BRAIN, SIGNAL = 1.5; EXPRESSED IN BONE MARROW, SIGNAL = 1.5; EXPRESSED IN FETAL LIVER, SIGNAL = 1.7; EXPRESSED IN LUNG, SIGNAL =   2
tgcacatctcagcttccttgtctctaactgggacaaaaatagctattttaatatgttgttgtggggattaaatgagataacccatctgctactccagaaaagtgtaactattttttccctctgttccctttatttttgttaggatggccttgatgagaataacatggctcagaacccacttttcaacctgaagataatttctgcaggaacaatgatgtttgaaagcttaccatgaaatctgccactcagtgaattcaacttctttctagaaggttcattactaagggcatttttgagtatcctcagtgcctggcactgaattggaagttactttttcccaacctaaatacatagtttagaagtagttcaatgtccatcgtggggaaaacatatagttaatattgagataaagccttgaaagatgagtaaacccttctctccctgatgggcaatgctccagttggtgcaattcagctgtcctgagctaggccacactgaaagattatgatcccagagttccccagaactgcatagggta

SEQ ID NO: 13414 - DNA, 524 bp, Homo sapiens
  MAP TO AC018720.2; EXPRESSED IN BRAIN, SIGNAL = 1.5; EXPRESSED IN BONE MARROW, SIGNAL = 8.2; EXPRESSED IN LUNG, SIGNAL = 2.7; EXPRESSED IN FETAL LIVER, SIGNAL = 2.4
accaagtatctgtgcaccccatggtcccttcaagttgacacatgaaattacccatcactccagccttcagccgtgggtttgcgtcatgcatagatttctagaactccctctttgcatagtgccctcctttcttttttctgccccatttctctgccatttcagctgtctcagcctgatctctgcctcctcatctctgcctcttcagcccagcgggatctccctactgtgctcagactccagctctctgcactgcagttgggaaacgatccccaggtagaggaactaggtgactttggggctcatctcacaagtttccttacacttagggatcagtcttttgcttcctgttgtcctctgcctgaaagtagttgccaagttgtactgttttatatatccaccacagcatgagttaaaccaaagtctggatcagcagactgccagatttttttttaacaaatttattaatcaatacattttgtccatgtctacagttgtttatggtgggaggactaacctgcagctgg

SEQ ID NO: 13415 - DNA, 600 bp, Homo sapiens
  MAP TO AL158800.1; EXPRESSED IN ADULT LIVER, SIGNAL = 1.5; EXPRESSED IN BRAIN, SIGNAL = 1.3; EXPRESSED IN PLACENTA, SIGNAL = 1.3
aaggatatttcatggcactggaaactattaatgacatattactaattgaatgtttccatgatagtaaatacattatgatccatattgagtttaaaagaaaaatatgcatagatgcagaaaaaagattgactggaactacaccaaaatattacctgtgatgggactatgagaggttttgattgtctgtataggttttctgtaattggaagcacatgggtaatttttgttgctgccaatgttttcagaaagcacttggcactggtctcctggacagaggtcccgaatggccacctggtagtcacagctacaagctcaggggagcccttcctgcctccctggtggacacattccacccttggggatggcatgcaccagcccagcagaggccaagggcctggcacagaggacacaaattctgattgtgacagagtctgcttttcacataaggtgccttccctgtggaccatttttcctaatgctttccgtcctcaaatgcctggcacctctcaactgtgagctcacatggatgagcagtgcatccaagaatattctggaagctccattccagggcagcccaactgggcaaactcctctcagaag

SEQ ID NO: 13416 - DNA, 586 bp, Homo sapiens
  MAP TO AC023890.3; EXPRESSED IN BONE MARROW, SIGNAL = 2.2; EXPRESSED IN LUNG, SIGNAL = 2.9; EXPRESSED IN PLACENTA, SIGNAL = 2.2; EXPRESSED IN BRAIN, SIGNAL = 1.5; EXPRESSED IN HELA, SIGNAL = 1.8; EXPRESSED IN FETAL LIVER, SIGNAL =   2
actggttgactgggatctgggcctggacatggctagcctatcgaccttgtttcaaataaagcttgctttcagggtttatcagtatgctccataccatactgtaccagaaaaatataaaggataaaggatttgtgctaaaactcccacatgttattaatatatttacatgacggcacacaccgcccccccccgcccaacatacacacaaaacccagaacctaaagctttccacagcttaagaaaacagtagtacttacgatgaatttagttaagttttcatttactttcaccacattcttggccatgtgctgcatgacttccaatacttcattctctgtgtatcctgtgtaatactgctgctttaagttctgaaacacaagaagcagacagacagacatgactgaggggcaagagaaaacctctgcttctttagaagaacacatcttgtacatgatgacattacttatgtaaaagctgtacaagaatattcttaccttctggaaattcaatcaaagccctaaccactctcacagtaccagcaacactaaagcagctggtaaatgcaagatgattctggccctgagac

SEQ ID NO: 13417 - DNA, 561 bp, Homo sapiens
  MAP TO AL133211.1; EXPRESSED IN BONE MARROW, SIGNAL = 1.7; EXPRESSED IN LUNG, SIGNAL =   2; EXPRESSED IN BRAIN, SIGNAL = 1.8
accacggctagccaatactcttttcctcaggttaccaaggcgggcatgagctataagaaggttaattttctttcctgaactgaaattttctcattctcagagaatataccgcaccagtgtatagaaagtgaaattaaagtacacgtggaaaatgcatttcacacaactgagttcctcagaaactctaataaacacacctcatacctgcaagttttgtgttcaatatttcttcatattcttctcgaactttctcttcacgttctttcaacaaacgttcacagatcatcccaacctgccgtagagtaaataagggctgttctttttttaatggtgaggatgctgcagatgaagtccctatgtacaatgaggacaaaaaatagcacctggtttagagccatgatataaagcagtttctaaatgaagaggttttatttggatctcttcaatcttgatataaaagcattttaaaatcagattttaagcacagcatttcacaagtcttaaaacaaccaaaataataattccatcagctggtgacgctggaaaaacacggcaagatgt

SEQ ID NO: 13418 - DNA, 528 bp, Homo sapiens
  MAP TO AC002060.3; EXPRESSED IN BRAIN, SIGNAL = 1.5; EXPRESSED IN PLACENTA, SIGNAL = 1.8; EXPRESSED IN LUNG, SIGNAL = 2.4
ggactttcccattttctcccattttctctcttggttacagaacgcacccttccacatatactgtattagagcctgtgctctacaaacatacctgacactaaattagtgacttttgaaagtgcagataggtacagcaaccagtccctctggagacatttcccataacatgaaccagtgaacccatctctgaaagccctcatgttttaaaagacaagatttttgaatttcaaggaaaactaaacctttgaaaaaaacatgattcaaaagagaaccttgccactttccattcctgcttgggctgcagtgaggacagatgcagcaagtgcttctgatgtctgtgtctgttcccctgtgtggacgcacatatccaggcgagtttcagtgaggtaggagacttcggcagcattggccgggctctggtttgcttctggtgctaacggaacatggaagagaggacaaggtagcgtgtcctgaagatcacatatttcctttttgcaggaagtgcctgggctcctggagtgttctcag

SEQ ID NO: 13419 - DNA, 581 bp, Homo sapiens
  MAP TO AC016289.3; EXPRESSED IN ADULT LIVER, SIGNAL = 1.4; EXPRESSED IN BRAIN, SIGNAL = 1.5; EXPRESSED IN FETAL LIVER, SIGNAL = 1.6; EXPRESSED IN HELA, SIGNAL = 1.8; EXPRESSED IN LUNG, SIGNAL = 2.4
gatgggttgtataacatggcgaatgtactttgtgccactgaattgtacacttcaaaatggtttaaatggtaaatatatgttaagtgtattttattacaatgaaaaaacattgaaaaacagtacttgcatgaaagaagataatgttaataaaaccataaaagtcaaatattttacacagacactcagaatctaaatgagaaaaccatgatttctgcagaatagcataaatataaaaactgccaatacgtaattatgttccatacctgtatgtgaggccaagaggcctcaagcgtgggttcatcctcttctggatcaaaatctggattatcacttggaggaagtgtacggaagatgttagcactgatctgtaaagaaaaaataattttacgttcgttgttgtatgtgtaattgaattggacaattcaaaacgaagtattttaaagatcactttcagaaaaaagttatagctgtaagcttagttcaaaatctgtaaacctcttcaagatacaaagaaagcaggtgtttgtttctctcttttctctatccaataactctgacttcctcagacctaagctcctgaa

SEQ ID NO: 13420 - DNA, 570 bp, Homo sapiens
  MAP TO AC002467.1; EXPRESSED IN BRAIN, SIGNAL = 1.4; EXPRESSED IN BONE MARROW, SIGNAL = 2.2; EXPRESSED IN LUNG, SIGNAL = 2.3
gggaagattaaaggtttgcgtagaataactgtaacttctaattgtggacttttgctatgttttatgtaacagtcaaattttaaaaacaagcatatttttgaaaattacataattttttgtattctcttttagtaaatcacatttctttcccttctaatttagctgtagtgatcctgtgcagcgaattgagcagtgtacacgaggttctctcttcatgtgtagcattgttcaagggtgcaagagaacatatttgtctcagagagacttacaggctcatatcaaccatcgccatatgagagctggaaaacctgttacccgtgcttcacttgaaaatgttcatcctcctattgccccaccaccaactgaaatccctgagcgttttataatgccaccagacaagcaccatatgagccatattccgccaaagcagcacatcatgatgccaccacctcctttgcaacatgtgccacatgagcactataatcagccacatgaggatattcgtgctcctccagcagaattgtccatggctccacctccacctcgatcggtcagtcaggaaacctttcg

SEQ ID NO: 13421 - DNA, 535 bp, Homo sapiens
  MAP TO AC010251.3; EXPRESSED IN BRAIN, SIGNAL = 1.6; EXPRESSED IN HELA, SIGNAL = 1.7; EXPRESSED IN PLACENTA, SIGNAL = 1.6
aacatgtcccagaagcaagctacctacattagtttgcagtgttcaattagggtgggggaaacacagtatgtttcaataggggaggcaaatttggcaatattgaatgttttaaaacatgtttattaggttttcatatgcagttttcctcaaggcaattttgacttgatgcactttcatctatattatgtacttacaaaccacccccttgaaaggtgtatctctacggtacatcataaatgtgatatcctctaacaagcccaaggtaacatcaggcattaaatactcaacgttaactttaattagtaccctcacctgcaagagtgcaagtgattgaagattgcagcaaatgcttatcccattcctttaagtccccagaatgactgtctagaccaatgtccttactcattccttattcttctgaggctttgctaactggagtacaggagcagtcagcaggcccagaggtatgttttacctttctgataactttattggatgatcaaaccactggtttaccttggccatttgaatgtct

SEQ ID NO: 13422 - DNA, 593 bp, Homo sapiens
  MAP TO AC023009.3; EXPRESSED IN BRAIN, SIGNAL = 1.3; EXPRESSED IN ADULT LIVER, SIGNAL =   2; EXPRESSED IN PLACENTA, SIGNAL = 1.4
catcagcccaacacagattgttggagacagagcaaagtgaagagggtgtccatataatgggagggtggtgaaatctgcagcctgggcacaggccaatggagccatgctaggtgggggaggggggcatgatgtgggtgtgaaagtagcaagacaagaaagaaaggcatccccatcacatgctggtggtggcccaggactgggtattagagcccaagctaggagaggaaagtgtctttgcagtgggggaagtgggagccagtactggtgactggtaagtaaatatattgaagatagttacaaataggaaaagagaaaaaacaagaatgatctctgtagtactgaactgaaattggaaatattgatgtgaactcacaactttctatatatagatagatatgaaaataaatctaaatgtatgtatttatgtacgcacctctgtacctaattcccccactaagtcggctgttactgacacccaatagctaagagcacaccttaaatgcactgtggattctaaatgcatttcccagagaaaaataccaagactccttggagaaaagactaattccaaggcagggcagggaaaatacaag

SEQ ID NO: 13423 - DNA, 570 bp, Homo sapiens
  MAP TO AL121716.16; EXPRESSED IN ADULT LIVER, SIGNAL = 1.8; EXPRESSED IN PLACENTA, SIGNAL = 1.9; EXPRESSED IN BRAIN, SIGNAL = 1.4; EXPRESSED IN FETAL LIVER, SIGNAL = 1.8; EXPRESSED IN HELA, SIGNAL = 1.8
aactttccaggggagtagctgatttcatcagactgtgaggtgcatcatgctgaatacaaataagagggcaacttactgattaacacaagaggcatccatctgaaagaaactgggatccataaagaggtcaaaagcttcttttttccaagctctccgtgtgtactgatacccactaagactgctgagcagctggacacaagctcgataactaggggcattatgtgcactacaaggaagaaaaaccaccttaacctacgtgtcctaactttaatcatcctatcaagttatacataaatgttcacatttacctaagacagtgacatgaagatatgaaatagaaagcaccataagaaaaataatatatgaatttttttaaacaattataattcaaggtaaaaatgccattttatgataattctagaaatggcaataagggaacagaacttgtttctaacaggctatgaattaattttaaaaactatttaaataatgatagtacctgtgatttctgaggtagggcacaacataatgcataatatttacaagtaaaggaataacccgctccttttc

SEQ ID NO: 13424 - DNA, 552 bp, Homo sapiens
  MAP TO AL157826.2; EXPRESSED IN BRAIN, SIGNAL = 1.4; EXPRESSED IN FETAL LIVER, SIGNAL = 1.7; EXPRESSED IN HELA, SIGNAL =   2; EXPRESSED IN ADULT LIVER, SIGNAL = 1.5; EXPRESSED IN PLACENTA, SIGNAL = 1.4
aaccaaaccacaacctctgcaattggttcagaatggccaggatgttggggacattttcaggtcactgactaccaacttccttaatttttatccactgcttccaactcggaactaaccagaggaagccaaatatatctcccaaagcaaacacataggttgctctacttctggttagcctgcttccagtttctccatgttaatttatctccaatcagaacacacctcaagccttccctttttattcattgttagattttcctgctcccctacctacctttgagtctctggcaaatgcaaatgatgcatggctgaatcccttgctatagccaactgcaaataaatagtacctacgtattcacatctggatggtctttcttcattttcatgaagacaacagaggtagaattgttgggcttgaaaaatgattggatgaagggctgaaaagaaagggaagaatcagtaatgactagccttttaggtttgtgtgaatgacaagttagaagtgtcactaatagaaagaaaaatccaaggagcaaagtgggttttagcagg

SEQ ID NO: 13425 - DNA, 556 bp, Homo sapiens
  MAP TO AC013533.3; EXPRESSED IN BRAIN, SIGNAL = 1.7; EXPRESSED IN PLACENTA, SIGNAL = 2.9; EXPRESSED IN FETAL LIVER, SIGNAL = 1.9; EXPRESSED IN BONE MARROW, SIGNAL = 1.9; EXPRESSED IN LUNG, SIGNAL = 4.1
cctcactaagctttgggcacacggtttctctggcagcagctaccagcggggatgccaagcccggactcagctcagaagcaatggaggtggcagcgctggggcgcgggctgtggactcactcacctggacgctctgtttctgtacaggtcgcacggggcaggcggttgcagttcgagccaaggcctttggattcagcgtcatattttatgacccctacttgcaggatgggatcgagcggtccctgggcgtgcagagggtctacaccctgcaggatttgctgtatcagagcgactgcgtctccttgcactgcaatctcaacgaacataaccaccacctcatcaatgactttaccataaagcaggtaatttgaaaatagatgccatggaagcttctgtcgaaaggtggtagcacttgcttgtgggcacaagagggacacggagggcaacggaggtggtttctggatacactgttgagcagggaagaggccctgcaacaaaccagtgacaagccacgtgaagccccttcctcgggctgagccaggctaagcagagaagga

SEQ ID NO: 13426 - DNA, 584 bp, Homo sapiens
  MAP TO AC007845.12; EXPRESSED IN PLACENTA, SIGNAL = 1.5; EXPRESSED IN BRAIN, SIGNAL = 1.4
gctaacaaagtctgacgccctcagacggtgatggaagctggagacccccaagtgagatgatggcaggttccagccagtttactacagtccccagggaagggcagactgccatgatgagaagactccagattattatcatgcccagctgccactgccttcttcagggctcagccaggtgccacaagactaagaagaggaacgggacgcagaagcaggagagaaagcagcagcagcacgcacacctgggcttcagagacggcatcggccaaggaggggcagggccacggggaactgtgatgggagaccagcttggaagggatgtattcacgtaagagaaggaacatatttggaaattcttatattcttatggtaggaaccataattcctgaaaattccagagagtttctcaaatgcatcacaacgaaatatcccaacagagctactaaggcccatcttgaaaaacagaacagaaacatctttggatagagatatctgctgaagactcatctaaaggaaggagtttgcactatgacagtggttttcaagcctctgtggaaccctaaggttcttccaaaggcattcca

SEQ ID NO: 13427 - DNA, 550 bp, Homo sapiens
  MAP TO AC023118.2; EXPRESSED IN BRAIN, SIGNAL = 1.4
agattccagcacacaaagccacaaaagttacatagattatttaaaagatgtaaaaatcatctcacatgttgaagtttgatgaggatgtcccactggcagggttgttgctggagaaagcaagctgaaatatctgaagggtaactcggtggatcttgaaaaatttccattcacaaacgcctgtattcagtaacatctcctctgaaaagttcttcctcctagtcgccactcctttaacttaaaagtactctctctctccactgaccacatctaacggtttatctgtctttatctcatttttagtgatacatcattttctacatagaattagaatatagttatttataggaagggttgatatttagaacatttaacagctggtatgaaatgaacaccaactaatcacaatacgtagctgccataaataactgctgtgatatgcacaaatatgttgtaggaatatctcattcccccacgttggatagttaccactttgaaggtggaggggaaaataacccttttattttgtatgcccaggggttttatggacaaa

SEQ ID NO: 13428 - DNA, 530 bp, Homo sapiens
  MAP TO AC017093.2; EXPRESSED IN BRAIN, SIGNAL =   2; EXPRESSED IN PLACENTA, SIGNAL = 1.7; EXPRESSED IN LUNG, SIGNAL = 1.7; EXPRESSED IN ADULT LIVER, SIGNAL = 2.3; EXPRESSED IN BONE MARROW, SIGNAL =   2; EXPRESSED IN FETAL LIVER, SIGNAL = 1.7
acgccaagggtgtttatttgtttggtttaggctcaggtttgcttgtgtgtttttttcagacgtactgtagggcaatatttttccattttgggactaagacttatttgcctattaagagactattacatgcagacttttaatttatgtacttagtgcatataatgttcctaaagtctcagggaagttaatcaagaaaaagtcaagggcaggcttcaggaactagaatgtagtcattcaggaaggccgtctctccctctagaatgacactttgttgggacgtggctgagccacagggtctggggccagtgatggccacctcagtatcagaacaaaaagcagctctaaggaaagatgtggcactcttccaggacatccaagccctgcctcctgcaatccaacaacctcgttttactctctgtgtggacattactaccaaagaggtcatagaagcttcctgacctcatttctctaaagcaaaggaaggatctcacctgctatctagaccagaaacgtccttcctagggatgctt

SEQ ID NO: 13429 - DNA, 513 bp, Homo sapiens
  MAP TO AL133341.9; EXPRESSED IN BRAIN, SIGNAL = 1.6; EXPRESSED IN PLACENTA, SIGNAL = 1.4; EXPRESSED IN ADULT LIVER, SIGNAL = 1.5; EXPRESSED IN HELA, SIGNAL = 1.8
tgctgtctaccaagcaccacatggcctagaagtcaccacctccctggcctcctcacctgtttccctcttccatgctctgctgcccagccatgttggttgcttgaggctccttgaacaaatcaagcccattagtattttatggcctttgcctctgctgtttcctctgcctggaatgctggctccacatgcatccacgtgtaaattaggagaacggcccctaaaagatgtccatgctctaatttctggaacctgggaatataataagattaacctgagttatttcggaggatacaatggaatctcattagccttgaataacagaaaagaatggccaaaaagtcagagagatttgaagctctggaaggattcaatgtgccttctgtttgggccatgtggaaagtgagaaggaaacgaattctactaataccagaagcttggaagaggactccgagctccaggtgagaaccgtatctctagctgacaccttgattttgggccaatgagattctgaga

SEQ ID NO: 13430 - DNA, 590 bp, Homo sapiens
  MAP TO AC023154.3; EXPRESSED IN BRAIN, SIGNAL =  62; EXPRESSED IN ADULT LIVER, SIGNAL = 1.5
tcacagccagaagtgtcaccatatgactcccacactgtactccaattttattggcatttctaaaataaagtataacgttatctctttaaacaaatcaccatgtgaggtgggcctttggcactattttttaaaccagcaaccagactggtcttgggctaagattcagaaaagagcagaaatagtgtacctgatgtcatccttcacagcttccttcttggcctgcacctccaggaagccttccaggtggtcttctttggggagccctggggcctctgctgcagctgcatcaggtagaatccccgtcccacacatacagccacatatcttcgtgatgaaatacagggggagacagcgtggaggataagaaggtacgggacttgttgcaggaagtggcacatcagatatgcttcctggagggcaggagggatcagcctccatcaggtctctaaaggaccatccacagaagatgcatctgggcttccatgtcactctctctgagatgctggactggcccattcattctgaaactatacactggggaaatactatttcctgctaaaatcaaattatggcagtcttttcccaattca

SEQ ID NO: 13431 - DNA, 510 bp, Homo sapiens
  MAP TO AC023314.3; EXPRESSED IN BRAIN, SIGNAL = 2.1
cagcatagcaggcactcatcttactaagtaaacaactggtatactgccactgtttccccacacatcttggtactccttgatggaacaaaccttagagaattatagtaccttcctttaaattttaccttcaagcctggagcttgaaattcacattccttgctcttattttgcctctttatgaacatgtgagctgagcctcagtgtcctcatctgcccaatgatgccaatcctatctaccttccagagttgttgggagatttccataaaatcaagtttgaaaaagtgctcaatgtgatacctggcacaaaaaaaaaaaaaaaaaaaaaaagatgctgaatagtcacaagttggctgcaaggtcttcactgggttcctccaaatcagactaaattctccttaagcattttagacattcactcatggtaagaagtgtctgatctctttcagagaagctgtacttctcccttctaagattttttttttctaggaagctgctaggttctctttggc

SEQ ID NO: 13432 - DNA, 505 bp, Homo sapiens
  MAP TO AC019205.2; EXPRESSED IN LUNG, SIGNAL = 2.2; EXPRESSED IN BRAIN, SIGNAL = 1.3
ggttgagtctggaacaagccaaatgaacagggataaataaagtagcaagtataatctgggaagtagctgaaaaattataggtaatagaataaaatggttttctgggcaagaagtttgtgagaggaataaggagaatctagaattggcctttcatgggtggactaagcttacttaccctgctcttcccgtgcgccctattcggtgtacgtattcttcaatattccgtggaaagtcaaaattatagacatgtgtaacgtcatggacatcaagtcctctagaggctagatcagttgcaattagtattctcactttgcctaaaaagtaaagccaaatgaacactgaaccattctggtataaaccaacccaagatctaaaaataatatttgccctaactaatttaatcaattttatttcttactgtttacattaaaatgcttactttgtgaaaatggaaaagtaactgccggcaagttacaagataccatggttcagcaaatgggtccta

SEQ ID NO: 13433 - DNA, 559 bp, Homo sapiens
  MAP TO AC020714.2; EXPRESSED IN BRAIN, SIGNAL = 2.3; EXPRESSED IN PLACENTA, SIGNAL =   2; EXPRESSED IN HELA, SIGNAL = 1.6; EXPRESSED IN ADULT LIVER, SIGNAL = 2.4; EXPRESSED IN BONE MARROW, SIGNAL = 2.3; EXPRESSED IN FETAL LIVER, SIGNAL =   2; EXPRESSED IN LUNG, SIGNAL = 3.9
ggtcttttgaggtcccttccacctttaaacttatgattatatgtaacaaacagattttttttctttattttagcctgatagactaaagcagtttagtgtggcaccaagacactttgaagagatgataccacctgaaagacccagaatagctttccagacacctctccctcctttatctgccccatctgtcccacccatcccatcagttcatcctgttccttctcaaaatgaagatttgcgcagtggactcagcagcgcccttggtgaaatggtgtctcccaggtgcttgtttaaatgttttgtgtttgggaattaggtaaggtattgctatattttatgtttagaaggatatactgaagcggatgacgttattcttcagagattttgtacagttaacagttttgtgaaataaattctcttgaaatttgtttttttctctgctattataaaaaaagggaaattcttaaaacattttattgtttaaagatgattttgtatctttagaatgaattactaagtacattttagtatttatttagttttgggttgtattttggga

SEQ ID NO: 13434 - DNA, 532 bp, Homo sapiens
  MAP TO AC010849.3; EXPRESSED IN BRAIN, SIGNAL = 2.7; EXPRESSED IN PLACENTA, SIGNAL = 1.4; EXPRESSED IN ADULT LIVER, SIGNAL = 1.6
ggcagagcactcggtaaatcggggtgcctccgcaatgcacataagtattccggtgtatgcagccttaactgaggtctctgataaatctctcttgtttaattggcagaaggtgcgtgaggaaggaatacaccatgaccacatggtttctggaacactcatgagcacaaactgtgctaaccattgtaaccacagcaatgactttgtcataaacacttgttgtgataaaatagagaagtatatcaaaaattctatacaaccaaaaaaaagtacatagaatattatcaagaggatttgtctctgggacaatcagtaaacaaccttagactgtgggaataccttttgtaaaggcatatggtcagagagaaaggatactagacagcatcagccataacccagacaaatacctttccaaaaagtgattctaattacaaaagactaatgtctgtctacgttttaaaaatatttatctgagaaatacagctttttaaaggaattaaattttgcttcctttaccaccttcttggttttcagg

SEQ ID NO: 13435 - DNA, 573 bp, Homo sapiens
  MAP TO AL158801.1; EXPRESSED IN PLACENTA, SIGNAL = 1.8; EXPRESSED IN BRAIN, SIGNAL = 2.4; EXPRESSED IN BONE MARROW, SIGNAL = 2.4; EXPRESSED IN FETAL LIVER, SIGNAL = 2.5; EXPRESSED IN LUNG, SIGNAL = 4.2
ttaccataatgtggtggggcagaaaagccatgtactgctgaggctccaaaagctgctggattttaaacctggtctccaggaagtcatgcgacacctgcttcttccaactggatgcctcaagcactggtaatgtactttccacagaagaggctggcagtacaaatggctcagcagacccacttttttcctcagatgcactgtcacccccagcagcatcttcaagctggctggcctctgaagactcttttgttgtgctttcattcaactgggaatagtctgacaagtgctgaccaggtggcaaaaaaaacaacatccctggaactgggtcttcacaggagtttaaaatggaaggctggtctttgtctaccttggacacagtgatactaatgcacaaagattcttttctttgatcaggatttcggctagtaagggacacaagctctctgctcatacaatcaacagcatctgtgggcaattcagaggcttgggaataggtatgagaggaaaaaggtaacccaacgagttcatctgtcatttccacatcatatctgttgctgtttttcacggcagttt

SEQ ID NO: 13436 - DNA, 593 bp, Homo sapiens
  MAP TO AC018698.3; EXPRESSED IN ADULT LIVER, SIGNAL = 1.6; EXPRESSED IN PLACENTA, SIGNAL = 1.4; EXPRESSED IN BRAIN, SIGNAL = 1.6; EXPRESSED IN BONE MARROW, SIGNAL = 1.7; EXPRESSED IN FETAL LIVER, SIGNAL = 1.9; EXPRESSED IN HELA, SIGNAL =   2
tacccatgtagcaaacctgcatatgtatctccttaatttaaaataaaagttaaaattatattaaaaaaatactaatttttgccccagtagaaatagaaggaaaatagataactgagtttcattcttttcttttaggatccttattcaacaaatattttagtctttgctgagtcagcaactatgctagatgcaaagatggaaaataggaaaaacgtattccctgacatcatggaatattctaaaaggtagaatttacaaggactagcatgcaattaaaagttgccagggttgcaaagaaccagaaatatatagcccataattaggtgaaaaatcagtcaatctgttccagaaatgaaagatatgaatgaatctgtagctgaagctattaaaaagaattctgtgtttcatacattcaagaaactagcagaaagatttaacacatgttgagacatgggacataaaaaacaggctcaacattttatagatgaaagctatgtctgagacgaaatatacatggatggaataagaggcagattaaatcctcaagaaggaaatattagtgaactttaagaaatggcaacagaaactatcca

SEQ ID NO: 13437 - DNA, 530 bp, Homo sapiens
  MAP TO AC005678.1; EXPRESSED IN BRAIN, SIGNAL = 1.3; EXPRESSED IN FETAL LIVER, SIGNAL = 1.9; EXPRESSED IN HELA, SIGNAL = 1.8
ctcaggacctggtggaaatcaaggacagttgggaacccaatatcagagagaacatggcaaggaggcctcctcagggccgctggatagaaaagaaggaccaagaagctggcaaagaaaaaacagaggcagagagactaaaagcctacagaagatcaagtctggcataaaaaaaaaatcctcctcctctaccttttcttgttgcactgaaaccccatacttgttcttataggtacaaatccctgttctcccatcttctcacctgctctcctgggtcatccagctctctctccaaatcctccagcacagtcactgcctcctctccactcacaggacggtgctgtctgacccaggcctggagctcctcaggcaggatagtcaggaactgctccagcaccagcagctctaggatctgctccttggtgtgcatctctggtctcagccactgatggcagagctcctggagtctttgaagagcctcccggggcccaggggactcctgatagcagaactgcctgaagcgtctacgaaag

SEQ ID NO: 13438 - DNA, 572 bp, Homo sapiens
  MAP TO AL034380.25; EXPRESSED IN BRAIN, SIGNAL = 1.7
tttcatctgttcggttcacgccatgataggcggggccctggggggcagagcccgtgctctgcctgttggcataattataggtcatgtcattacgcccctgccacatggtgccttgctgagcaacctcagctgatgcctgtatggggccgcccatcatttgtggtggcatgttttgctgggcattggtgccagggggtgcagagacacggtctcggccaaactggaatggaaattggttctgggggccgcctgctggtcggcgctcagtagcagctgtggcagtggcaggataggcattgccatactggttgtatacatcttgctgaggggaaggctgggcagcttgttgctggctggcaggctggggctgggctgggggcaactgctgctgctgaggctgcccctgcccagtgctgtatggcacgctgtacatctccccttcgtgccgcttggcaggagggccatatgtgccatccattggccgcttgtaattctaaggcagagacaagcagaggggaagttaatactctgcactcagggacataaagcccacagatgccaagatggctaca

SEQ ID NO: 13439 - DNA, 502 bp, Homo sapiens
  MAP TO AC021881.2; EXPRESSED IN BRAIN, SIGNAL = 1.3
gaagaggaggaggcagtgtgatcatggtggcagagattgaagtgatgtggctacaaaccaaggaatgtctggagccaccaaaagctgaaagagggaaagaattggttctcccctagtagccattggcaaggactgtggctttgttagcaacacttggattttgggcttctggcttctagaacttaaaataaatgccgtcgaaaggccatgaagtttgtgggaatttgcagcctaccggtctgtggcctgttaggaaccaggccacacagcagaaggtgagcggccaggcgggtgagcgggcattaccgcctgagctccgtctcttgtcatatcagcagcggcattagattctcataggcgctcgatccctattgtgaactgcacatgtgagggatctaggttgcacatccttatgagaatctgaccatcccctgtcagtggaaaaattgtcttccacaagaatagtccctcgtgccaaaaaggttgggcattgttggtaagg

SEQ ID NO: 13440 - DNA, 585 bp, Homo sapiens
  MAP TO AC023820.2; EXPRESSED IN BRAIN, SIGNAL = 2.3
tacattgtcccctggaggtcctgagcagggttgaaccctgaatgcctccagcaagagcctactcatgaacatgctgtgttggcttccctttcctcctggtttcctggaatcgcctaccaaataagcaacttgcacttaaatagttgcctcagggtttgcttctagggaccccaacctaagacagtaagctggactcctttcaaaaaggaaaatgaaaaaaagaccttgcagctgaccttgccctgcctagcattttctattctagtgccctatgagatgacatttcagctgatacttgagacgacaggtgacaaaccactctttccagtgcagaggtggccttgggcatcactgaattgcatgtggcttgtcttcagggttcttgtaccttgaaattatctctcttaattcccaggttctcagaaggcagtcacatctggacagcattccttgactacgcatcaatattccatcatgtcattgccggctgtgaggaggaaagtgacctcctaaacaaatccgtgcacgtgtaaatgacagctgctggtttgaatctgtttcttctcccaccacttcctcttctga

SEQ ID NO: 13441 - DNA, 598 bp, Homo sapiens
  MAP TO AC019219.2; EXPRESSED IN BRAIN, SIGNAL =  18
aatgttccaattagctcgcctttaaacactgaaatacaacttgtattctccatttattctctagatttataagcaaaatagatttcatttctttttcatttgtgttgtacattaaaattaaacctgtgcagaaatattgtcatcctcatagtttttctctttgatgaacatatgtatttgaggattgtgagttagcttacaaaggttgaggggagttcagcaataacaccactaaaataagcaaaaaacaacaacaaccaaaaaaacatggtcgctatcaccttggaatgtagtgttcagtataaatccctaaaccaacaggttaatttgaagtaattgttttgctttcagaaatggagttcagcagcttcgatctatttatctggtgcaagtgattgagaatgaatgggcttggagaatgaacaggttcacacgtaccaggggatggatggagaatcagttattattcaaacagcatgtaggtgacttatcccagttgatccaagatgtatgtgtgtgtgtgtatatatatatatatatatatatatatgtgaaccaggaacatctaaccagtagttctcctggaaacagaggcatg

SEQ ID NO: 13442 - DNA, 524 bp, Homo sapiens
  MAP TO AC019205.2; EXPRESSED IN BRAIN, SIGNAL = 1.5
cgtcctgaacttcgcttctccgtcggtgtctggtctcttcccgccggcgggctctgcggtggcgggaggagctgtactactcgtgccttagcgcacccttactttcccaggccagaaacgcgaaatgctgtcggccttccagaggctgttccgagtcttatttgtgattgaaacagtctcagaatacggagtcctgatcttcatttatggatggccctttctccagacccttgcgatgctcctgatcgggacagtgtctttccacctttggatccgcagaaatcgaggtgagtggctttaggggccctggtaggaaaagcttccttcacccaggtgcccggaaaggcgagtttcgcttccgggatctttcaggatcactccagctccttagtctgaaggcctaggacagttctgcaaatcaccatgttaaaaaaaaccctgggtgtgcctcctggtttgtgagtagaaagggcaagatgtggttgggaaggaagattgtggctagaagcaaccaaaggtggaaa

SEQ ID NO: 13443 - DNA, 560 bp, Homo sapiens
  MAP TO AC016026.12; EXPRESSED IN BRAIN, SIGNAL = 1.5
ttgttgagggagaaggcatctcgtcagtgaccccagggcccaacaggagcaaagcttaccttggtgttagtgcacgcttttccctttttgtagtctttgtgactgccccgtttgtccaattttgcccagagggctttggctttccagtagttaagcttggacttgagcttgtgatagaaggagcggtagtcctttggctttagttccaggtggtcacagagctcctggaaagccttgagggttcccttgcaggtggtggcctggacaaaccggtcaaagaggacatgagctgggttcatggtctcatgcttcctctcctccatgctgcctcactctcagcactccccagagggggaggtgggatggctgtgggtccacctgacactgtcacgttaatctgacaaaaagaaagaaaaacgtggttagcatttctctgtctacaaacattctccaggagacatattcctcttcaaagcagagttctaaagtgtcgcagtcatccatccataagtgtggactgcacacctgcaatactccaggcactacgaaacactggggct

SEQ ID NO: 13444 - DNA, 572 bp, Homo sapiens
  MAP TO AC002045.1; EXPRESSED IN PLACENTA, SIGNAL = 2.1; EXPRESSED IN BRAIN, SIGNAL = 1.6; EXPRESSED IN ADULT LIVER, SIGNAL = 1.5; EXPRESSED IN LUNG, SIGNAL =   2
caagatgctcaaggtctccccttcagccttccttccaagtaacagaatcatgatttgatgatttgaccccttcttctaccacctcaatattgaaatctgtttccaattcccattaccttagagaacaccatcagatgtccattgtatatctcagattcatttctgtccaaaaacgaatttaacttgccttccaaataattttactcctaatttttagctcactttctccatgaatatcatcgccattcacccagttacccaaaccaagagcccgaacaacatctttgagtccttctccatcacaccctacattcaaccaattgccaccttctcttttatatacctccttaagtcacggccttaatttgggaatgatcgtttctcatttggacttgacttcatggtcaaatatggcatccagagatctagccattgcatcctaattcaagaccaacaacaggaaaaatgggcaaagaaatatatggtcctcattctgagaaaatgtccatattactcttctctttgcattccttggccaaagctaattcacatggcttgggtagcttcatgag

SEQ ID NO: 13445 - DNA, 502 bp, Homo sapiens
  MAP TO AC011462.3; EXPRESSED IN BRAIN, SIGNAL = 1.4; EXPRESSED IN LUNG, SIGNAL = 2.5
cagcaggtaggggacatcagtatctgagcagctggagacttggctgccaccacctccaggcagccactgtgggaagctccggcaggctgctgacagcaagaagcggcggaggtccttggggtaggaggcgaagtcagggatctcggtggcggcggcggccccccaagcctggcagccccccgtttcagtgctgtccccactgggcagggaccccagccgccactgctgctggttccagtaagcaaagggcagcgggatagtctggcccaggcgggtggagaggttggcaggtagggtgggctcagggttggctggcgtggggcttggcggggtgccccgagggctggggtaggccttgctgagccgggactcggatgtccactcgatgtacactttgaggcccaggagtgtgagcagtgctgacaggcagagaaggcacttggggcagcgcatgacccggcccagggaaggggcggccgcgggagctacaagggagccacag

SEQ ID NO: 13446 - DNA, 528 bp, Homo sapiens
  MAP TO AC023392.2; EXPRESSED IN PLACENTA, SIGNAL =   2; EXPRESSED IN FETAL LIVER, SIGNAL = 1.8; EXPRESSED IN BRAIN, SIGNAL = 1.4; EXPRESSED IN BONE MARROW, SIGNAL = 1.5; EXPRESSED IN ADULT LIVER, SIGNAL = 1.5
caggctgagggatagacaggaagttcttgaaacagagcagaatgaagtcaaatatttgtcatccatttaagttacatcagaaacacattactccatcattcgtgtttctcattcagcaaatacttatgcatataacttcctactcttgttatactgactctgattccatcagctaccgttggcctaggaattcagcatgaccttgcaattacaagcatctctttaaacccccatgtttagaaaccattgatttcgtcttgacatttattctcccgattttccatgaaaggtaatgttgatttttctatgtgtttagcaaaaactgcatttccagaatttccttaaatgtagatgtggtcctgagaccaagttgtgtaagatatacataaaaatgttacatgagacttctgggaggtccccttagagggagatgatgggctgttctttctctctttgtctgtcctgctgtggatgtggtcttgagctctggtgtccatcttggatctgaggacaaatgccaaagcctag

SEQ ID NO: 13447 - DNA, 520 bp, Homo sapiens
  MAP TO AL157996.1; EXPRESSED IN BRAIN, SIGNAL = 1.4; EXPRESSED IN PLACENTA, SIGNAL = 1.3
gaagaaccagaacaggcagcccccaccccacccaactggggtcactcaggggttctgggggcccctggacaaagccagttcctgccaagtgccccaggatggaagctagaccctggggccatgggacagaggccagaactgatgttcagagagaagaggaagggttggggcagggtctggggcacaggagagtgagggtccagcccaggacaggggcagggggtcttttgccccaagaggatttgctctccagactctctgctaggccagagcaagagcgcagtcccctcccctcacaagatgcaagctctgatgcccgcactgggccctcccctgctgtggccctgggaggggccgcctcaccttaggatgtatattgaagtatttattggtttcaaagctctttttttcgctctcagagtagtaaagcagaaagctctctttgatgatgaaaaacctatagtgggcggtggggaaggaaaagcaaccaggagagaaggggtgaggtttcttgggacaa

SEQ ID NO: 13448 - DNA, 591 bp, Homo sapiens
  MAP TO AC009396.5; EXPRESSED IN FETAL LIVER, SIGNAL = 1.6; EXPRESSED IN BRAIN, SIGNAL = 1.5; EXPRESSED IN PLACENTA, SIGNAL = 1.8; EXPRESSED IN ADULT LIVER, SIGNAL = 1.6; EXPRESSED IN LUNG, SIGNAL = 1.7
ctgaggaatgagcagcagtgggagggtgtattaatttcctgtggttgctgtaacaaattatcacaaatttggtagcttaaaaatagtaattttattttctcataattctggaggtcataagtcagtttcactgggctaaaataaaggtgttaacagggctgcatgtcctcttaaatgtcaaggagagaatctgttgcttgactcttcccatttctgatagctgcccatattccttggcttgtggcccttaatctctatctccatattcacatcatctctctgtctgtatgtgtgatcttcctttgccttcatcttataaggattcaagtgcttgcatttagggtccacctggagaatacaggatagtctcacctcaagatccctaacttaatcacatctgtaaagactcctttccaaataaaataatatttacagtttccatggattaggatatatctttggggaacattattcagcctactacagagatacctttctctttttgtagattcaaagtgcttgatcttctaagaacattgtttgcttacagacatatttcaggagtaaatgacttccaaactgatggtccgt

SEQ ID NO: 13449 - DNA, 512 bp, Homo sapiens
  MAP TO AC012535.3; EXPRESSED IN ADULT LIVER, SIGNAL = 1.7; EXPRESSED IN BONE MARROW, SIGNAL = 1.8; EXPRESSED IN LUNG, SIGNAL = 3.4; EXPRESSED IN BRAIN, SIGNAL = 1.7
atgggaagtcacgaaaccagggctttgatcctacctttatcacaggctacctggatgaacttagcaagccactgaatctctctggacttctgctgtcacctgttcagttggccaccaaaggatctcattctccactgctgctgctgccagttgttaccttaaagctgaacactcagagaaatctggaacaaatgtcaatgcaaagccacgacaactgttctgggcactgatttctcctggtgttaggtcaagagagactttagcacctacctcagggccagacctccccgagttatttgctccaaaacttgatacagtcctctccttagccatcactcctccccacccaccagctgcaggcagcctgcagagcttaaagaaggcaaaaataattgtcccaaatacattttccagacctaggatttttagcttatgtggggcaccagaatttcaatctaaatcttaaaaaattttagggcaatcatttttcttcctccttgaaagccacagac

SEQ ID NO: 13450 - DNA, 562 bp, Homo sapiens
  MAP TO AC020559.2; EXPRESSED IN BRAIN, SIGNAL = 1.3
tcttgaatgcaacaaggtgggaatttttcctttgaataaacaaagtataaattaaagcagtatcttttagccaagtatccttgtttctatttctttttggcagaagaagtttgaagtcctcatgccacataattgaaagttaactcttacattcatgatgtttaatatctctagtggacatgatgtcattatttgtccagtatagttcctttttcctttgggaatttattctctccacttcgaattgaatgattctggtagggctttgttttgtggttctttgcccaacattcatagggctcaagacaagaccaatcatattggcacattccccagtctaagatgatttagtccagagaaggttaagtgacccaccctgagacagaggtctcccaggaattgttttgtttggaggtgaatatgaaggggtattgtccctggatcatggagctggtagaagacaaatcaggcaacaagatgatattgattttagtgggagagaataagactactggaagaccaacagagatgggagatgggtaggtgcagagagaagagcagg

SEQ ID NO: 13451 - DNA, 597 bp, Homo sapiens
  MAP TO AL121875.9; EXPRESSED IN BRAIN, SIGNAL = 1.6; EXPRESSED IN PLACENTA, SIGNAL = 1.3; EXPRESSED IN ADULT LIVER, SIGNAL = 1.6
atactgccaggaaatgccactagccaccaaaaatggaggaatatagtggggtcacaatctccatctaggcctcaggaaaaataaagtattcattatttaacctatggatgataccttcctaaactacaaatataaaaacaaatgtggtccaaaacatattaagaagaaagaggaggaggaggaggaggacaataacagcaatgacagcaagaacaaggacaagacattgacaactgggagttcaggctctgccaagatcttcttgatgcgaggtggtaggagacagctacttcttcccactctttccttatgtcttctgtcagttcaaagaagcccaggtagtcatgaatctggacctcctcagagcatgaatcctagactgagtccacaagggaagtacctgaaaaatgactttttagatgtgattggggtaattagaataattgacaatgtctcttgacctctgtgaataacttaattatataatcatatattctttgcctggccacccaagagcaaactgggacggccccatatctgtccaacccacaagaaacaggaggttgaattgttggaccaagcagcatttgaaccaga

SEQ ID NO: 13452 - DNA, 561 bp, Homo sapiens
  MAP TO AL121981.8; EXPRESSED IN BRAIN, SIGNAL = 2.1; EXPRESSED IN PLACENTA, SIGNAL = 1.4; EXPRESSED IN ADULT LIVER, SIGNAL = 1.4
tacccaaactctgacggtccctttaagaactcacccggagtcgcgccctccgaagctgagccgccctcggccagcgctgcaggtttgtttcgtgcgcacctccgggcggaattaccggccggctgggaccccgctcccggtctgagccacccaggttatagaaggggaatctcgggaagctttccaagtcactgcccacgtcttcgaacttcctcggggtgacgaggacctccctattaggaggtccagagagaatttgcccaaagttaccccgagtgagtgacagaactggaaacccggagatcctgtctttcaaaaccggaaggctcttcccagtaaacctgacggcctctgactgaggccgtatccattggctaccaaagggaaggccgaggaacctcgtattgtaaccttaacagctactcagaggtatactgaccactggttttacttttggattgcaccttagaatcctaacttactgtaaggacccaccgactttagaacctatctaggacaaggaaccgaggtccggaaaaagggaagcaacttgtccaagga

SEQ ID NO: 13453 - DNA, 514 bp, Homo sapiens
  MAP TO AF223391.1; EXPRESSED IN BRAIN, SIGNAL = 1.7; EXPRESSED IN PLACENTA, SIGNAL = 1.4; EXPRESSED IN ADULT LIVER, SIGNAL = 1.7
gttctgctttctgctgtgcctttcatggacttttgaaccttgggaagttactcagcctctctcagggcctttcaccatttacaaggtgaggccatggactctcagatgacaactagatttaccttgcatgcagttttcagtgtatggacatggtttactggagaaagattctgagaccatgtccaaacccatctatgaaaagtacctggaattgttagtcatgtcagcaaatgcagaggaggaagtataggtagtgtaagtatagacgttctctgaggtccctccgagcagtaaagctctatgaatttatgattcactttctctttcatgaagagaaagcacttcagaaacttatggggctctgtagtcatcaccaagaacatttgctttcattgtactgttaagtaggagtgctcatcagcagagattctggtcaaccaaatgctgggttagtgtagagtatgctacttgatctaaattcaggaaaacatgcccagggcgtaggacttccata

SEQ ID NO: 13454 - DNA, 544 bp, Homo sapiens
  MAP TO AL133551.4; EXPRESSED IN BRAIN, SIGNAL = 1.6; EXPRESSED IN ADULT LIVER, SIGNAL = 1.6
atccatccatccctccattcattcatccatctgtccaatttttagatctaataggaaatacatatacagaacagaaaatgaaaaaggtacaaaagggtgtatggtgaaaagtaactattaatagttggattaattaatatctggattaatttatgagtatcttgttaatagtcaagtctaacatgctgttaattagcactacagtagtaggtcaggtgttaccacatatcaaactttaaatatagaaaatcatataatatcaatttaatttttatatctctgctttacattaatttagtcaatgcactgggttgtcagaggtaaaaaagacctgatgctggaagaatctgacaagactcataccaccaagatggaaaatgaggaatgtaatgagcaaagagaaagaaagaaagaggagctggcttcaaccgcagagaaaacggagcagaaagaacccaagcccctagagaagtcagtctccccgcaaaattcagattcttcaggtaagtcacgttatataactgcagaatggagaaggtctgaa

SEQ ID NO: 13455 - DNA, 535 bp, Homo sapiens
  MAP TO AC006530.4; EXPRESSED IN LUNG, SIGNAL = 1.9; EXPRESSED IN BRAIN, SIGNAL = 1.8; EXPRESSED IN PLACENTA, SIGNAL = 2.2
tacagggctcctgccttatgctcaaagagcttggcagttgtggatagtgaatgaaaaagattcctggcttctcagaaggtatggcatctcaatttccagaaaatatgggactgagagcagtaggttttgcagtttcttgtcccattttacattcattctttccttggaaacctacttttaagctagaacttgtattgagccagggatcccttcacctctaccagtctgtgacccctcacgataccaattctgaggtctaagcatttagctttttgtggccagtggcccttttagggctccacccccaggatggctcacattttttgtcttgtcccaaaggtgatcattggcacgaagaccatcctggccaatggggccctgagagctgtgacaggaactcacactctggcactggcagcaaaacaccattccaccccactcatcgtctgtgcacctatgttcaaactttctccacaggtaagtgtgtctgtctctagctagaagccagcagaaaagaaggaagccaaagggtagg

SEQ ID NO: 13456 - DNA, 536 bp, Homo sapiens
  MAP TO AC008045.5; EXPRESSED IN BRAIN, SIGNAL = 1.6; EXPRESSED IN PLACENTA, SIGNAL = 1.4; EXPRESSED IN ADULT LIVER, SIGNAL = 2.3; EXPRESSED IN LUNG, SIGNAL = 2.4
cacgtcgtttctctgcagtcacccctgctgctagtttccctggtgtttcgatataggacttgcagaagaattgaagggagtgctgtgttggtatcagcacaagaacggggcagtgcccctgcggtgtgttctctttggtatttgcataggtctgactcttgccagacaagtgctgattgctttcctcttttcttttcctatagctcgagaggagaatgtggccactttccgaggctcagagtatctgtgctacgacctgtctcagaacccgatccagagcagcagtgatgaaatcaccctctcctttaagacctggcagcgtaacggcctcatcctgcacacgggcaagtcggctgactatgtcaacctggctctgaaggatggtgcggtctccttggtcattaacctggggtccggggcctttgaggccattgtggagccagtgaatggaaaattcaacgacaacgcctggcatgatgtcaaagtgacacgcaacctccggcaggtaatggctgaggggagagaattcctggaag

SEQ ID NO: 13457 - DNA, 526 bp, Homo sapiens
  MAP TO AC011449.3; EXPRESSED IN PLACENTA, SIGNAL = 1.5; EXPRESSED IN BRAIN, SIGNAL = 1.6; EXPRESSED IN ADULT LIVER, SIGNAL = 1.8; EXPRESSED IN FETAL LIVER, SIGNAL = 1.6
atattcaccatgccctagccatgtaaactaatgggctttttattctaccatttggggtaactctctaggaaatctcaaaagaaaattgaggtcctcaaaaagcaggtggaaaaagccatggggaacgaaatgtctgctcatcagtacctggcaaaccttgttggcctggcagaaaacataacccaggaacgtgacagtcttatgtgtttggtaagtttcctgaaggttacatcaagtaaactgcgagttaatatgcaaatgtgattttaagagtattttaaaaaatgatctattaaaagctttatccaggcattccctgacttacgatggatggttccacctaggaattttcgactttatgatgtatttattgggaagtaatcttattataaattgaggaactccttacaactcataatgaagttaccattgatactgaatgcccattgcttttacaccattataaagcttaaaaaatgtagattgaaccatcataagttgggaaccatctgctgtattgccagga

SEQ ID NO: 13458 - DNA, 587 bp, Homo sapiens
  MAP TO AC007954.6; EXPRESSED IN BRAIN, SIGNAL = 1.6; EXPRESSED IN PLACENTA, SIGNAL = 1.7; EXPRESSED IN LUNG, SIGNAL = 1.6; EXPRESSED IN ADULT LIVER, SIGNAL = 1.8
ccagaccttagctccagcacttctgggaacctcggtccctgagcccacagcccttcatagctggatggcccaacttcagcttcactgcctactccagctgggaaaccaaggccagcacagcgccagccatcagagtgagagctgtcaccgtggccagtggcagggcttgtccactcgagtggggaaatggtgattgtctgtgcggagcctcaggaaacagcagctcatccctaacagctctctcgagacctggctgccacattctcaccagcagccatgcccagtctgtcactcagttgggcgcccatttcataactatggaggccaaggcccagaaagctttgtgtcccctccctgcgcccagaataagatgtttatgtggcctccccacagccctggagcagatcctacagagcacagcgggcatatactgtgtaggagacgaggtaagctgtccccagacctccccaggcccagccacagtggctgcctccctcatgctgacctccctcaagctcagagcttcctgagaaggcgtctgcagggggatctctgtgccatggggcactcctcagctcactcccact

SEQ ID NO: 13459 - DNA, 589 bp, Homo sapiens
  MAP TO AL050303.2; EXPRESSED IN BRAIN, SIGNAL = 1.6
ttggggttcaactgaaaaggaacatgacaaacttcaagaagaaatacagaatttaattaaaattcaggctatagctgtttgtatggaaaatggcaactttaaagaagcagaagtctttgaaagaatatttggtgatccaaattcttatatgcctctcaaaagcaaattgcttatgataatctctcagaaagatacatttcattccttttttcaacacttcagctacaatcacatgatggagaaaattaagagttatgtgaattatgtgctaagtgaaaaatcatcaacctttctaatgaaggcagcagcaaaagtagtagaaagtaaaagaacaagaacaataacttctcaagataaagctaatgaaaattatgttgaaacggaaactgaagctaatttggatacaagaaaaaggtctcacaagaatcttttcttatctaagttacaacatgggacccagcaacaagaccttaataagaaagaaagaagagtaggaactcttcaaagtacaaaaaagaaaaaagaaagcagaagagccactgaaagctgaatacctgtttcaaagagtcaaccggtaactcctgaaaaa

SEQ ID NO: 13460 - DNA, 516 bp, Homo sapiens
  MAP TO AC010450.3; EXPRESSED IN BRAIN, SIGNAL = 1.6; EXPRESSED IN ADULT LIVER, SIGNAL = 1.6
  unsure 213
ttatagcagcccaagccaactgagaaactgaacaattctttaaacccacccagacctacaatctattgatcaaccacctttttaacttttactcgtccaaaacatcttcttcttcccttatccagctcacatcaaacattcaattaccataattactcatctgcgtgcaacttcatgctccgcgtcagcgttgttcctgcgtgtggcatttgntgtgtgcgagccgcaagtgttccgtccgttccagttcgtgttcgttggacccatttccatcatgtttttgcctccacaactttatagaaactgtctttcttcaggtcaccattcatcatcatcatcaccatcatcatcttaaatctaatggtcattacctgccatgacctatcagcagatttcacaggactgatcctcactttttcctccaaagactttgttctcttggcttccaggatgcctaatctgctttgttgtcctcatatctctctcagtctcctttgctggcttttccaatatcca

SEQ ID NO: 13461 - DNA, 548 bp, Homo sapiens
  MAP TO AC012614.3; EXPRESSED IN ADULT LIVER, SIGNAL = 1.5; EXPRESSED IN FETAL LIVER, SIGNAL = 1.6; EXPRESSED IN BRAIN, SIGNAL = 1.6; EXPRESSED IN PLACENTA, SIGNAL = 1.3
tgaggagtgaagggacaagggatatttagataaggtggtcagggagggcttcttggaggaggcagcctttcagcatggagtgagggaacaagctgaagaggatcagagtccagaccgagtgccaagtccctcgggtgggagtgaatttgatgttttcaaggaagagcaagaaggatgattgggatgaaggagagaagaaggacgtgggcaaagatggggttagaggcgagttggggacagagcagcagggctgggtggggagctctggctgtgtcctaagtgtagtaacaagccactggtggattttaagcaggagagtggtacgatatgatctatgttctttcaaatgcatgctggctgctgggtggaggattgacagaaatgtggcaaaaggagaagcagggaggcagcctaggtctgagcaagagagccgggcctggactggggggcactgaggaagagcggagggcttggtgagacagtggagggtagtgtgagtgaaggaggcggggtaagaaggactgtgtaggtttgcagctgaacaatga

SEQ ID NO: 13462 - DNA, 554 bp, Homo sapiens
  MAP TO AL136418.1; EXPRESSED IN PLACENTA, SIGNAL =   2; EXPRESSED IN BRAIN, SIGNAL = 1.8; EXPRESSED IN BONE MARROW, SIGNAL = 2.3; EXPRESSED IN FETAL LIVER, SIGNAL = 1.9; EXPRESSED IN LUNG, SIGNAL = 2.8
tgtttaggttagctcattttgggtttaagaaatatggctaaggaaatgcagtagttctaaataacacattgcttttgcaacaatgaaattttgcatcttattatgtttgtgtgtgaaattttattttgataggaagaagaagagtacgaaactaaaggaggacgccggagaacatgggatgatgattatgtgctaaagagacagttttctgcattggttcctgcttttgatcctagacctggtcgtactaatgtccagcagacaactgatctagaaataccacccccaggtacagaatgttttggttttgtgatttaattttaatacatactaaatcagatatgaaaagtagggtgttgcttttgtatgcacgttattaaaaatttttttttagttttgtgtatgcaggttataaaaaatttttttagtcagccacaaattctttaaaaagtaaaggtttttttaaaggagcaaattacaaattatttcaaattttaaaaaccaacatgtgttttgtatttgtgcaatttttaaggcaaagtcccatttaaagg

SEQ ID NO: 13463 - DNA, 597 bp, Homo sapiens
  MAP TO AL135787.3; EXPRESSED IN BRAIN, SIGNAL = 1.5; EXPRESSED IN PLACENTA, SIGNAL = 2.2; EXPRESSED IN HELA, SIGNAL = 1.7; EXPRESSED IN FETAL LIVER, SIGNAL = 1.9; EXPRESSED IN ADULT LIVER, SIGNAL = 1.5; EXPRESSED IN LUNG, SIGNAL = 1.8
tgacacttaaatcacagcagggtgactactcacctcataattctccttgatccagagctctcgtttaagaaaagtttctttctgatgatcttctagactatcaaattgagactttgacatcttcatagatttacgtataatgtataatctctcttcctctccatattctttgcctttgatgttaaaattatagatccaccgacaataccaaactatatatgagcataggtgaaaaggagctaagataatttgaaacaggagaagatcacagatttggggtttctgatagcccccctttatatctattttactttttataatgttctttatgatgttctcctcctcgtcacgaatttcttctttggactttttgtttttgcctttttctttggcttttttgagcagtccctgctgcttggcaatctctgtagcttggatacggtacttgggcactgtggctaggtagctgattgccttattgtagctattccaccagctgaaaaactagaataattaacagagaacaatgagtcattttcattacccaaattcatctaaattaaaggaatgatagagtctcggtgaataccatctccc

SEQ ID NO: 13464 - DNA, 599 bp, Homo sapiens
  MAP TO AC006530.4; EXPRESSED IN BRAIN, SIGNAL = 1.3; EXPRESSED IN PLACENTA, SIGNAL = 1.5; EXPRESSED IN FETAL LIVER, SIGNAL = 1.8; EXPRESSED IN BONE MARROW, SIGNAL = 2.2; EXPRESSED IN LUNG, SIGNAL =   3
ttcttgggcttgataggtgctttgaaagtacttgctgaatttattcagtggaaacctgtgaaattgggaagggagctaagttgagccagttatctgatggacatttagggaccctgaggactagagaatagtgccttatgtcattgtgtgtgtgtctcatagtgctttgcatattgctgatacccagtagacattcgttacttgattggagctagagtttttgccactaaattttgcttggttgcttctcatttcagacagtgccagtggcatatacttttcttgtttttcagctgctcctgctaaggccaagccggctgaagctcctgctgctgcagccccaaaagcagaacctacagcagcggcagttcctccccctgcagcacccatacccactcagatgccaccggtgccctcgccctcacagcctccttctggcaaacctggtaggcttccaactcccacatgtcatgtgggagaacatctcgtctaatatgttccttcaaagggtaaactctagactgatgatggttctgaacaggccaggttggctgctttgtagaaagaattctagactttgtatccaaaggcctgctttg

SEQ ID NO: 13465 - DNA, 593 bp, Homo sapiens
  MAP TO AC002400.1; EXPRESSED IN PLACENTA, SIGNAL = 2.5; EXPRESSED IN BRAIN, SIGNAL = 1.7; EXPRESSED IN BONE MARROW, SIGNAL = 1.6
catcactgtgggatggacactgaaaggcctgcctccttggatgaacaatggccggaggccccgccctcacattacagctgctcaggccaggcccctgatgggcaactgcagaatcaacttcgtggtcaatgtggctcctccaaagagcactgggaaaattttggaaactgcctaagctgctcattttaccagatgaatgaattttttgctttgttctgcagacctgcacaacacctccaaacattctgtcttgggaaagagtagcctgctctctgcagagtgggttctatgcagaatagacgctccacagagcccgtcttccccacgaggccctcagccactgggcctggaagagcggcatcgttattacagaaaagaggctgtctggtgccctcaccaacaccaaggctaagggcaagttttgttttataagcaagataaaacttataatgaaaatccacaagccattcctcctctttatatttattttcctggtctagaaacaacacacgacaagagggaggcaagagagacttttctaaaagaggtaagagaaaacatatcccctttaaactgatggaaggtgtgtgtgg

SEQ ID NO: 13466 - DNA, 528 bp, Homo sapiens
  MAP TO AL138688.11; EXPRESSED IN ADULT LIVER, SIGNAL = 1.6; EXPRESSED IN BONE MARROW, SIGNAL = 1.5; EXPRESSED IN PLACENTA, SIGNAL = 1.4; EXPRESSED IN BRAIN, SIGNAL = 1.8; EXPRESSED IN HELA, SIGNAL = 2.8; EXPRESSED IN FETAL LIVER, SIGNAL = 2.1
aggcccctaagcagaaagagagaggacagagtttgcttgctggataatgagaagccctggagtgtttcgcagctggaaatccacacagtcagagctgcgctccagaaacataaccctgaggcagtacagtagcatgtagccaaataaatttggtggcagaaatggaaaaatacatattaaatatcttaataacaatcatgggctttgtagctgccaatgcccccaggatcccctgccaccagccatggtcaattctgccatgttttatgacattgctgagcccttaagccacatctcttctgagctagctgcagacaaagttccaaacatagcaggaaacattcatgctgtgaggtctggagagaatggatttggccataagggctcctgctttcacagaattattccagggcttatgtgccagggtggtgacttcacacgccatcatgacactggcagcaagtccatctatgggcagaaatttgatggtgagaacttcatcctgaagcattcaggtcctggcatctt

SEQ ID NO: 13467 - DNA, 531 bp, Homo sapiens
  MAP TO AC006531.1; EXPRESSED IN BRAIN, SIGNAL = 1.9
ttgaagggcattgttctgtgcccagtcctgctggtagacctgctccccggtggctgggttacctgtctcctgaagcatctggtcttcatcgatgtcatagaggttccccatccgcaggcaggcatcgcacttgaagggggacctcatggtgaagtggcctgaataggtgggcatgttggaaaggcagcttctgcagtgcgtggagttctgccggtatcgctcgctggtctcactgtgcggggaacccttgtctttcaaggtgaagtgcttggagtagagtttatactggtcgttgttggaaagcccctcttcattatgcaaggggttccggttcattggcagcgtggagtcccccttgcggaagttttcactgggatcctggtaggggtccgggaagtccacgttctcgggcagggtcacattttcaacaaactggggtggatctaagtggaaaccaggctccttctcaccatctatagtgtagatcttgtctctaggggagcttgatttggttttcaggtaggtgcgctc

SEQ ID NO: 13468 - DNA, 578 bp, Homo sapiens
  MAP TO AL049835.3; EXPRESSED IN BONE MARROW, SIGNAL = 1.5; EXPRESSED IN BRAIN, SIGNAL = 1.5
cagctcatcagtaatgcctcagaactcagaattaacttcagtgacttcaaggaatctatatcaagaaggaaacatagtagtggagtgtcatggacatcccacttatttttttagggttctctgaagaagtattaaatgtagggagggatgcgatgcaaaacagatgaaaccagtacatttacctgtgggtcctttaggcctctgagtaactctcatcaggcttaccttggcagcaatggctgctgcagttatatgtgatgaggaactatcttctgttgaagcaacaccactgtctttcttctcttcttcctcttcctcacattgaactcctttgtcttctgtctgtttatgggggctggtagtaggaggaggggaaagagggggaggtggggaaggcaaatcttcaagttcatcatgcacctcctttacttttacaatggcatcacgtaaaaggtcaatggcatgaggtagagctggcagtatgaattgaaagcattcctgtatgcaagagaaagaaaaaaaaattaagatgaagcacttttgtaattatataagatggtggcaatcaaactgtttcg

SEQ ID NO: 13469 - DNA, 597 bp, Homo sapiens
  MAP TO AL138761.3; EXPRESSED IN BRAIN, SIGNAL = 1.7; EXPRESSED IN HELA, SIGNAL = 1.6; EXPRESSED IN ADULT LIVER, SIGNAL = 1.4; EXPRESSED IN FETAL LIVER, SIGNAL = 1.7
ggaatgtgccagaggttttgcctccacttcaaaaagtaaagtgataatttgtcagttaccagttaacgtcatccacttaggtatctaaactggtaattctcatctcaaagtgaatttttttggcaggaggaaacccaagttgactcgtaagagtatatatacgggaaacaattttcttcctttttttattcctctaagtttgatcctgcaaaatttctgaattaatcagatcatttcaaagatcctacttttctttagattagaggtaattttacagcatggtaaacagcaatgtttaccatgtatggcttaatcagagaggcccagtcagcacagggactgtttctagaaggcccccttacctatactttaacttcacccctgagttgttctcttcgtccagtggagagagagacagagggaagaggagagcaagatagcgagagaggaaactgagattgggagagaaggaattataagcccgtatcatattctaaataaaacaacacaagtcattttacaatgctgaaaacaatgcagaaaggtcttgcctctaaagcccgctatattttaaccagccttcagccttctcctttt

SEQ ID NO: 13470 - DNA, 506 bp, Homo sapiens
  MAP TO AL138717.2; EXPRESSED IN BRAIN, SIGNAL = 1.5; EXPRESSED IN PLACENTA, SIGNAL = 1.8; EXPRESSED IN FETAL LIVER, SIGNAL = 2.1; EXPRESSED IN HELA, SIGNAL = 1.9; EXPRESSED IN ADULT LIVER, SIGNAL = 1.5; EXPRESSED IN BONE MARROW, SIGNAL = 1.7; EXPRESSED IN LUNG, SIGNAL =   3
gcatttaatttttcttgcttggtaatatttctaatattcagataaaatgatcaaacttttcaatattattaattccttgtggattattgtttttgttcaggataacctttttgaatggcacttcacggttagagggcccccagactccgattttgatggaggagtttatcacgggcggatagtactgccaccagagtatcccatgaaaccaccaagcattattctcctaacggtaagaattttggatttttagagtgcttgtggcttcactcttcctggtagctgcaaaatatagtaagcaaatcattttcattaagaaataatagaacagtataattttgcttttggggtccaggccctgggactacaatttttttcctccaaaataattcctaggaagctgatgcatctgagaagtaaaaatgatacaactgaatgcataaatgtcatatcatggttgttaggattcaatgaattaatatatgccaagtgctgggcatacacat

SEQ ID NO: 13471 - DNA, 537 bp, Homo sapiens
  MAP TO AL121809.1; EXPRESSED IN PLACENTA, SIGNAL = 1.8; EXPRESSED IN BRAIN, SIGNAL = 1.7; EXPRESSED IN BONE MARROW, SIGNAL = 1.6; EXPRESSED IN FETAL LIVER, SIGNAL =   2; EXPRESSED IN HELA, SIGNAL = 2.1; EXPRESSED IN ADULT LIVER, SIGNAL =   2
agagaccagaggcgtttcactaatagcagttttgtctgacacaggtaaagattcgcttttactgttcaagggtgaaagactcacatcgtcgaactctgtattaacatcttcaaataacagcaaactttcatcttgatcagtggacaatactgggaggtcactgttatcaacatcatgattgttctctccaactaaattctgtgcagggcttctgtgtatttgaacacgattgttaggtactaaattttcattttgattatgtttatgtacatcacagtcacagagacttggctcatcagaaatattatcattaggtatatcataaaggcaacttttttcagatggataatttatacatttaagtgaattcaattctaaattctgttgagaattcacagctgaatgtgacagcaaacaggtgcatttatcacttcgtaaatgctctgcacagggtaagaaaagcaaattctcaagtgcagtacccttagcaatttcatattccaagtctgagagtccactgagaggcggaggagaata

SEQ ID NO: 13472 - DNA, 515 bp, Homo sapiens
  MAP TO AC011025.4; EXPRESSED IN BRAIN, SIGNAL = 1.7; EXPRESSED IN BONE MARROW, SIGNAL = 7.1; EXPRESSED IN LUNG, SIGNAL = 4.4
ttgcaagttgtccacgtaatgagcatgtagagagcaaatgattctcactaagcactaatgaaagagaaatgtgacaatgacaggtttttggtactgtcttgttagaaagattcagcttggactcctacctcagaaggcatttcataagcctcattgtcaggatccacaggcatatcttccagaattccttcctgtggggctccttcttcattctaatatttaaagtaagaagcacaaaaagaacatgatgaagtagcatttttcacttttaaaaatcagaaccatgttttggaaaaatcttacatatagggatgttggccacggatcttgaaaatggcacaccttaatattactactggcattctaaactccacaatgcctccggggaaacattgcggcaacatgggttatcaaccctcaaagtatgtaaactttttgctcaagtaatttactatttaggaaataatccacagctatagtccaaagatatttttcacaagatcaatgacagcagg

SEQ ID NO: 13473 - DNA, 517 bp, Homo sapiens
  MAP TO AC002523.1; EXPRESSED IN ADULT LIVER, SIGNAL = 1.5; EXPRESSED IN BRAIN, SIGNAL = 1.6; EXPRESSED IN PLACENTA, SIGNAL = 1.3
taggggcatatgaggaccaggtaaccaatgtagccctggcccagacctggctcaacaatatgtcctcaggatccatagacccaaacgataatcactgattcctctagttttcaaacatacaattggaattgacatacttggtagctggcacatgacctgaattagtttcttggcctgacagataagaggtataatagtggatcaggccaaacgaagccccttgtgtcacttgggtttatggtaatccgaaataggataatcacaacaaagacttctagggttgaagaagagcaaggtcatgccatatatggtggagaattatataacttttataaaacaatctctggcatactaccaggcactgataaagatgaggtgtctgatcatgagtcattaaatgaccatggagccagagctgctctacatgagctggatgattttagacccaccaagtcataaggttaggtgtactcagaagcaatccattgtaagaccagctgatggaggagggaaaaca

SEQ ID NO: 13474 - DNA, 566 bp, Homo sapiens
  MAP TO AL159141.1; EXPRESSED IN LUNG, SIGNAL = 3.5; EXPRESSED IN BRAIN, SIGNAL = 1.4; EXPRESSED IN PLACENTA, SIGNAL = 1.5; EXPRESSED IN BONE MARROW, SIGNAL = 2.6; EXPRESSED IN FETAL LIVER, SIGNAL = 1.6
tttttaattccccaaagggccactgactacctcatgctgaataagtaagcgtggctgaatggaatccccaggtgttataaaccttctctgggctggctgcaggatagctgatcattgaattctgtttttcagtccggttccagttgttggcaaaggagaggaagaggaagaggaagatggcatgcggctttgtctgccagccaacccgaaaaactgccttcctcaccgccggggcatcagcatcctggagaagctcatcaaaacatgcccggtgtggctgcagctgagtctgggccaggcagaggtggccaggatcctgcaccgggtggtggctggggtgagtgggggcgtctcccacttggtaggcacacacacctgtgaggaactcaggcgtgctccacacctgccctggctcccacagggaagcagctaccatgcagatgactgcatgtttatttccctttcctacatttgtcagcttttgaccacaattttctcccagaacacaggcatggggggctggtgagaggcctggtttcttctttggggagcaggtgtttgtgact

SEQ ID NO: 13475 - DNA, 506 bp, Homo sapiens
  MAP TO AC016372.2; EXPRESSED IN BRAIN, SIGNAL = 1.4; EXPRESSED IN ADULT LIVER, SIGNAL = 2.9
agtcccccacttcctcattctttctgaatgttgtttactgcgtcatgtattccagttcctcaactctctgtatcttccaggccatctgctgtttattcacctccatactgaacctagacgtcagagtcagctctttgaatcgtgttctcaacgctgctttagaatctctaactgccttaaccatctcccggcttggtaacccttagtcaattttattttaaaatcctagaggattctatgagtgttgttttagtatgttataaaaccgcactgagaagagagactctagattcattcttgctaatcctcaacaggtctataatgctgctgagaaattctcctcctcctcccacctgcctctttctcctgctcctccttccctgactctttctcttcctctaaaaatatattcctcacaacctttgatttccgtagtgtaaataaaagcaagatgcagaactgttacattcaatattatttccatttgcagaattcacacaggcaaa

SEQ ID NO: 13476 - DNA, 501 bp, Homo sapiens
  MAP TO AC009936.4; EXPRESSED IN BRAIN, SIGNAL = 6.4; EXPRESSED IN PLACENTA, SIGNAL =   2; EXPRESSED IN HELA, SIGNAL = 2.1; EXPRESSED IN ADULT LIVER, SIGNAL = 5.1; EXPRESSED IN BONE MARROW, SIGNAL = 2.4; EXPRESSED IN FETAL LIVER, SIGNAL = 2.9; EXPRESSED IN LUNG, SIGNAL =   6
tcttcgcagccagttgtaagcggattcacgtttagagttacggaatagagtagggttaccatctccccagggaaacggcttggtcctgatgctaagatgggggtaggggatgaactcgtgtccctagtgctctccgtggtgcgacttcaggaacacattcagcatgctgtatgctactccggggagcacgacgaagtaggtgagggccttccacatgcgagctgagcccccttcgccatgggcgccactcgacataggccaccccagctgtgggcgggaccgacccagcagccaagaaacccaggacactgcagctgcctccattttcgacctggactctgcaactgttaaagtattattttaaatctctacccaatagtttctatcagtatgtatttataaaatggataagaaaaaaacccactagaaagagctgcataacaacccattgaaccagagttgctccattgccatagctgatgctttgaaactgatgtggca

SEQ ID NO: 13477 - DNA, 507 bp, Homo sapiens
  MAP TO AL117375.12; EXPRESSED IN PLACENTA, SIGNAL = 1.5; EXPRESSED IN BRAIN, SIGNAL = 1.5; EXPRESSED IN BONE MARROW, SIGNAL = 1.6; EXPRESSED IN HELA, SIGNAL = 1.7; EXPRESSED IN ADULT LIVER, SIGNAL = 1.6; EXPRESSED IN FETAL LIVER, SIGNAL = 1.7
tccaacagctatgcctcctcccacatctttttgctaatacaactccagtatgagaggaaagtggctagatgtaggggattttgatttatctaaacctactgttcaatagataaacacatgtagccacttacatttcaattaatgaaaagtcaataaaattaaaattagaaatttagtgcttagtcacctagccacttcttaagtaatagacacatgtggctggtggctgccatatggaacatgtagatatgaagtagttctctcatcatacaaacttctattgcataagactggtctgaactaatcatggtgcctttctctactttgtcagcagaatttttcctagcataaccatggtgcatcaaattctggctaatcgcatgtaagagaatgtaatgagacagaattgtaggaaaggaaagccctttattttctgcttgagaagctgtcaggtaagaacatgatgcataaggatcatgctgacaaagggaggatgtcagtctggaa

SEQ ID NO: 13478 - DNA, 600 bp, Homo sapiens
  MAP TO AL121948.7; EXPRESSED IN BRAIN, SIGNAL = 1.5; EXPRESSED IN PLACENTA, SIGNAL = 1.3; EXPRESSED IN ADULT LIVER, SIGNAL = 1.5
tgggctcataggatagacggaaatctctcagtcactaagcagggccgccctcaggctaggagaggccctttccggccctgcccacccacctggagtccagaaagatgagcttcatgtccaggctggcgcggaacataaacatattgctgtgtagcttgatctccgtgacggcgctgggaggcagcgagtggcccacggccaccaggcccacgttttggtagcagccgtcgaagggggacatgtccaggctgtactggcggatcttcaagtagccgctgcagtggatgacctgaggcagagggatagggagggagactcagccacaggtaggaagagcccccaaaaggtggagaaggggttgaaacatgttgaaactctgcttagccccaaagcagtgctgaccacgcccgtgcactaaggaatccaaagttactggtgctctaaggtgtcttaagaaagtgactgcacagccacactgaactcacctgggagcgcgtacaaaatgcagaagcctggccccaccaaccctaacgcatccgaatagcgaagtaggtccctgaaacctgctaatgacgttcaaggacattcaacgtgagaccc

SEQ ID NO: 13479 - DNA, 574 bp, Homo sapiens; identical to SEQ ID NO: 13406
  MAP TO AL133163.2; EXPRESSED IN BONE MARROW, SIGNAL = 2.1; EXPRESSED IN BRAIN, SIGNAL = 1.3; EXPRESSED IN PLACENTA, SIGNAL = 1.4; EXPRESSED IN FETAL LIVER, SIGNAL = 1.6; EXPRESSED IN HELA, SIGNAL =   2

SEQ ID NO: 13480 - DNA, 506 bp, Homo sapiens
  MAP TO AL122127.3; EXPRESSED IN PLACENTA, SIGNAL = 1.9; EXPRESSED IN BRAIN, SIGNAL =   2; EXPRESSED IN BONE MARROW, SIGNAL = 1.5; EXPRESSED IN HELA, SIGNAL =   2; EXPRESSED IN ADULT LIVER, SIGNAL =   2; EXPRESSED IN FETAL LIVER, SIGNAL = 2.1
atgctaagtggtgaccctggctctctccttgcagggttgcctggaccttattgccttcctcaacagacagcccaaggagcctctgttcctgcagatctcggagcggctctctctcctcctccagtgtgtggggaggtgcttgctcttgtaggggaagaaacatttttcccccttctacccatcttaggttcattagctggggtcttgtcaattagattaacaagatactaacatgagaaaaacaaacagaagtttactaacatgtgcattatgcctctatgtgggagccgtcagagatgaggaattcaaaggggcggttggaacgtgagcttacggagcatcttagcaaatgggcaatcatttttacagaattggcaagacaaaggaaaggggctttcaacctgtagggcagcaaattctgggaagtaaatatataggggaagctaacagaagatagcttgctagtttgttgtgtagattcctctagtgccttctctgggctgata

SEQ ID NO: 13481 - DNA, 590 bp, Homo sapiens
  MAP TO AC009399.5; EXPRESSED IN BRAIN, SIGNAL = 1.9; EXPRESSED IN PLACENTA, SIGNAL = 1.5
tgattgggagggtccactacagggggacttgaggtaactttttgggatgttgaaactgttgtttatcttgattgtggtggtggttacataattgtatgtgtttgtccaaactcatagaattacacattaaaaagggcaaattttactgtatggagattttatcttaatgaaaaaatctgaccaaaaaacccatttgataaaaatgattaataagccttttggattaacagcgatatgtttaggatacaatactatcttcactaaccggtctaggactgtgaactgtaactctttagaatgtgataacacaggaaaattctgagtcatagtttactgaatggaaatacttttttgatttttcaggtcttatgaacttacccggaaggaccgactgtacaaaaacattattcgaatgcagcatacacatggattcaaggcttttcacatcctcccccagaccttcctcctgccagctgagtacgcggaattttgtagtaagtgcttgacagagaatgccccagtccccagcaactgaacctggggaatatttaccccaaaagcctcctcaaggtgtcaaccaatcagggctt

SEQ ID NO: 13482 - DNA, 542 bp, Homo sapiens
  MAP TO AL157789.1; EXPRESSED IN BRAIN, SIGNAL = 1.3; EXPRESSED IN BONE MARROW, SIGNAL = 1.7; EXPRESSED IN LUNG, SIGNAL = 1.8
tttcaaagatgccctggaacacttggaaaagtggcacaattccagctatggggaggaaatagcttgaatttttgtagaggattgtgtttctaagttggctttggccaattcaccaatttccagtggttgggaaaggtgaccaaaacctcagaacatgtggaatcttccccgtccttgccacctgactatgcatgcatttcatagcattctcatttcctgaaaaggggtgagtttctggtttccgccagtgtcgaaggtttcagttaggaaatgtgaagtagagctgatagaacaagtagccagcgattctgtttgaagaagtaaaggtagatcttggtgtaggactcttgatgctggttaatagcaatgagatcaatgtaaacatccacccaactgaatggcaaatgctctgcagcagtgagagcatgtttgatctgaaggtcgacatgatagtttcctaggtgggttttaaaatcaatacccatcttgagagtagaagtagaaaccctttgtttttgttgaggagggtctgaaagtgacca

SEQ ID NO: 13483 - DNA, 546 bp, Homo sapiens
  MAP TO AC007376.8; EXPRESSED IN PLACENTA, SIGNAL = 1.5; EXPRESSED IN BRAIN, SIGNAL = 1.5
ccctgggcatattctgtgtcttgagatattaactaacaatcacggtactaatttatgctttatggataaatagacggaaaaggaggcacatgcatgctcaaaaaaattcttatcgatagaggaattctgtgactgtaaaagtgtgtctggagacatcccaagtgtggggctcttgatgtacgtaactccctggatcctcaattttctctactgtaaaatggtaataattccacctactttgtaaggttgttctaacgactagagacaaagcatctaaagtgcccatcacagagcctggtactggatgtagctgtcatcatcatcacagccatcgtcatcatcattctcatcatcattacaccatcctcatcaccatcatcatcaccaccaccactgatatagtttggaatatgtatctgtgtctcttcccaaatctcatgttgaattgtaacccctcgtattgcaggtggggcctggtgggaggtgactggactttggaggtgaatttctcatgaatggtttagcgccattcctctggtgctgtct

SEQ ID NO: 13484 - DNA, 532 bp, Homo sapiens
  MAP TO AC008962.4; EXPRESSED IN BRAIN, SIGNAL = 1.6; EXPRESSED IN BONE MARROW, SIGNAL = 1.6; EXPRESSED IN LUNG, SIGNAL = 1.7; EXPRESSED IN ADULT LIVER, SIGNAL = 1.7; EXPRESSED IN FETAL LIVER, SIGNAL = 1.6
catggttgagtcggatgttgtacaaattaatggtgttgctgcatgaggtctggtgtgctgcacatcgcgtcttcctgatccattgcactccttaccctcaggcgagccctttgaccccacgtttgtgctgagtcgctcagtgtccaacattatctgttccgtgctcttcggcagccgcttcgactatgatgatgagcgtctgctcaccattatccgccttatcaatgacaacttccaaatcatgagcagcccctggggcgaggtcagccaactgagtccagcaggggcagggtgtggggtccgcaggatctaggaatggagaggaaacagtgggcggggaaagggctgtgaatggcccgcccagggcccgccccctcccatctgaccccacccagagttacacggccacgcccactcccctccactgagcatttatggccgccattgcctccttcccactccccctcagccccaacccccaccccggacctggctgccctttgagaccctgtccctgcctacctaatccaca

SEQ ID NO: 13485 - DNA, 549 bp, Homo sapiens
  MAP TO AC011467.3; EXPRESSED IN BRAIN, SIGNAL = 1.3; EXPRESSED IN PLACENTA, SIGNAL = 1.4; EXPRESSED IN BONE MARROW, SIGNAL = 1.5; EXPRESSED IN HELA, SIGNAL = 1.8; EXPRESSED IN ADULT LIVER, SIGNAL = 1.9; EXPRESSED IN FETAL LIVER, SIGNAL = 1.6
cagacaagtagaaagcccgcaaatggattcccggggcagaagtccaggctaaatctggaaggcgcttcaagctcacaggggaggggtctgcagggccagctggaggattttcctaccctttcctcagcaaccaaaactaccctccccaaagaagccctggcccactaggtccatccatggggcagaaccccatggaggctccttaccatgcagggttgtcctagtggacagcgatggagcagagtttgggggagatgctgcagctctggtgagaagccacccagtctcaccatagggctccacatggaacttgtagggatggggggtgagccggcactcactgccaccccagccaactgccctgagtacccggcaaagcccagcagcatcagcagcagtaacagagtcaggtccagtagtaacagtaacaggtccgacatggctctggacccctgcaccgcaccccaaggcagctgcaacagagaaagaagggagaggaggctggtagccatctccaacaatgtgcccacctgaccaccaaccagttct

SEQ ID NO: 13486 - DNA, 560 bp, Homo sapiens; identical to SEQ ID NO: 8831
  MAP TO AC018505.3; EXPRESSED IN PLACENTA, SIGNAL = 1.7; EXPRESSED IN BRAIN, SIGNAL =   3; EXPRESSED IN ADULT LIVER, SIGNAL = 1.6; EXPRESSED IN BONE MARROW, SIGNAL = 2.4; EXPRESSED IN FETAL LIVER, SIGNAL = 1.7; EXPRESSED IN LUNG, SIGNAL = 4.4

SEQ ID NO: 13487 - DNA, 598 bp, Homo sapiens
  MAP TO AL121933.9; EXPRESSED IN BRAIN, SIGNAL = 1.6; EXPRESSED IN ADULT LIVER, SIGNAL = 1.4
agcccagaaagatttccctcctacctcctgagcgtgttctttatagacttgcagtggccctgcagctttggcagtgtcccagagctgcagcgagccatcgccactacaggtgatgaggacatgttcgttgttctcactccaagtcacatcaaacaaaccatcattccagtcaaagctacactaggaaaaaacaaacaacaaaaaaatacaacacttacataggcagctacacaacaaaaaaaataacaattatggttttttttctttcaatttatcacacattttaacacgtatatctcatgtaatctgcacaactacgggagttaagtagagtaggtacttgacaaatatggcaacagattcagaaaggttaaaaaaaacagtccagtggaatgtagtagtccaaaaatgtaatagtacacagtatactgctccacatttttttatgtttaaattttataatttatgagtggacactaagagacaggcttcagatttgttttgttttttatttgagagaaagagtcttgttctgtcatccaggctggagtgtagtggcccaatcacagctcactacagccttgaactggactcaagc

SEQ ID NO: 13488 - DNA, 588 bp, Homo sapiens
  MAP TO AC022014.2; EXPRESSED IN BRAIN, SIGNAL = 2.7; EXPRESSED IN BONE MARROW, SIGNAL = 1.7; EXPRESSED IN ADULT LIVER, SIGNAL = 1.7; EXPRESSED IN LUNG, SIGNAL = 2.9
attgtgccagaatctccaggttattttctgcagtttaaggtaagtgaggttagtgccttttagcactcttaggcccaaaatttccatggtgttattgcactttttattctaacaagcttctatatcaataatcatgtcggtgtaatataggaccatcatggggcctgaggtagccatttaatgactaatcttgtcaaaaggaaagcaaatggactcatttgcttaggagatatctgttctaagctgagggtttttttatttccccacagtgatggctgggctgacaggtatgatgtgacagatggatatcagcgagaagctgttggtggcatcacaatcaagctccaatctcccgatgtcaagtggtttgatgattattatctgaagctccggccagaaacaaaccaccgaaacccttggtttcaagaattttggcagcatcgttttcagtgccgactggaagggtttccacaggagaacagcaaatacaacaagacttgcaatagtaagcagatttattatttcatttaaaatgcataaggctaaggttccaatttaagtaaaccatgtcatggggatagtggctgt

SEQ ID NO: 13489 - DNA, 573 bp, Homo sapiens
  MAP TO AC011380.2; EXPRESSED IN BRAIN, SIGNAL = 1.3; EXPRESSED IN ADULT LIVER, SIGNAL = 1.6
ggtgaaaggggcctaagaacaatgagcaaggccatctggtctggaagcagcagacttcaaaataccttgtttcccaggccagccaggtctggccaacccagcctgctctcagccctcaagcacgatcacatcccatcagccagctgaataaattggatctgcaaagagcagtgtctttcctcactccattacctctgagtgctaggcaaaccgaggcttttaaaaggcaaaatagaatgttctacataaagtacctgaccaaaacagatttctctatccccaagaagatggaaaaatccaagggcatctttgagtctacgtcccttagtgtcatgaccacactgtcatcacatgacactcagatccacgctggtgcagtcattagggagaccatcattgaagtgctggacctgactggtaggtctgtcaagttaaggacctaagtcagaaggaatgagagcctaagtggtgctgagtccccagtacactcactaaaaaccattctcatctgctttgtgaagagagttgcaattgagtaccaccagagaaaaaccatcttacccgagactcctc

SEQ ID NO: 13490 - DNA, 567 bp, Homo sapiens
  MAP TO AC010358.5; EXPRESSED IN BRAIN, SIGNAL = 1.6
tgcacagacagataccgagcacagcactcaaaatgtatccatttgtttcatcccagcaagaaaggtactgtacctttcttcttcctcccgtttcttcttttcttcctcttcctgtttcttcttttcttcttgctcccttttctctgccagcaattgtctgtaaactctccgagcaatctgacctctgagttgcttctggaaaactatggctgcctttttcaggtgcaaaaatctcctcctcagaaggaatgctctgtaattcttctgtattatcaccacacaataaaggacctttctgtattgttttctgaaaatgaaagaaaacaagagaatcggcattgaagtaatgaggctttgagctattcaaatgagctcacatcaaggctacaagacaaaagaggacccagttttagaatgagactctcattatggaaactggagagaacaaggaggcccctttggtcaaaacaaaacaggagaaaaacaaagaaataataacaaacaaaactaaagtaagaagcctatcactatcttggctaaataaacacataacccctcatgttggct

SEQ ID NO: 13491 - DNA, 589 bp, Homo sapiens
  MAP TO AC011375.3; EXPRESSED IN BRAIN, SIGNAL = 1.4
ctgcagtggacatggaagtgcaaatggacattcagataagtctctttggtgatatatatataattttttctcttcaggtacgttcttcagatgtgtcatggtctgatactcgtaggaccctccgaaaagatcaccgctgggaatctggatccttattggaaagagaggagaaagagaagctttttaatgaacacattgaagcacttaccaaaaaaaagagagagcactttaggcaacttctggatgaaacttctgcagtaagaatctcttatttttctcattttaatctggatgaatcttgttagtaatttcttaaagcaaagcattgatatgatttttagtgtcatggtctttagattcattactggaatgcatcttatgacaattctctgattttaaaaaattatggtattcttatttatttagaaatgcctattctttgcagttttcacattcataactgctcccatagtaattcaaaatgtccttagccatgtggtcagtgatccctcctaataatagatttagcaaatttcttcttttgatccattttcaatttggtactatggcctcttgttcggcagtttgt

SEQ ID NO: 13492 - DNA, 592 bp, Homo sapiens
  MAP TO AC011991.2; EXPRESSED IN BRAIN, SIGNAL = 1.9; EXPRESSED IN PLACENTA, SIGNAL = 1.7; EXPRESSED IN ADULT LIVER, SIGNAL = 1.5
agctgctaagggtctgcttgtatctgagatgactgagtgtgaagctgtgatgtgtaccactactttctgtcaatttaccttctggtatcacttcactcctcatacattgctctcttctcaaattcagagccatggcatatgattgcacttttcttacctgcatacagtttttcaagaaaggagaacgggaaccttccttgtctaatcttgggtaagaatgttcattagtataatctggattaatatttacaacacaacatgctagaaggtggttgcatcgtgattgccttgcttccatttcctgctcatcctagataatcaaaagaagtaaatggtttaacttcattagggaataaagataacgatcgcttgagagaatttccagaccacagcacagggaaggagaacatatgtgaagtttagcagacataatgagtttagatacagaattgagagtccggtaagactaaggcaaccagagttgacagaatacattactagagagtaatcagctacacagagagaaacctgaagagatctttagaggatttttcattgtggggttattaattcagcagattaccaaccagca

SEQ ID NO: 13493 - DNA, 578 bp, Homo sapiens
  MAP TO AC018497.4; EXPRESSED IN BRAIN, SIGNAL = 1.4
ttggaggacaagattcccagttaacagaatcttctccagaatcttcccagtctaagggagtcccgttaacagaatctgcccagtctcagaagctccaagaagggcaaagatacttttctagagtagagagctgtctttgacttcgcaagtctccccaaggtgtaacaagacaagcatcaaaagtaatggtttgaggtgagtttgacttagttacattaataataagatgtagggcagctagaggaaagaaaagaggaaaaagggacagacagattaggcttttctctttaatgttactctggcgagggttggtctgggggtgacagtccatgactttggagatggtgatgccttctcgactcaggtatgatgggtccacccccttctcagcagtccagactggccgctcaattggtaggaagcacaaataagggcccttacaagtaggttcaagtttccctttcttaaatttctgataaggatgtgatctctggattggtgttgctgaattgggaatttgaagggtggagtttgtgctagaaggccttgggtcctgagggaggaatggatggaagaca

SEQ ID NO: 13494 - DNA, 518 bp, Homo sapiens
  MAP TO AC017116.2; EXPRESSED IN ADULT LIVER, SIGNAL =   2; EXPRESSED IN FETAL LIVER, SIGNAL = 1.9; EXPRESSED IN PLACENTA, SIGNAL = 1.6; EXPRESSED IN BRAIN, SIGNAL =   2; EXPRESSED IN BONE MARROW, SIGNAL = 1.8; EXPRESSED IN HELA, SIGNAL = 1.7; EXPRESSED IN LUNG, SIGNAL = 3.4
tgcagattatgaccaggcagcaggctcgccaagccgtgggcactaactcaagctcccctggagcgcagtcactttacaaccacgttcctccccaaatgccagcatggacaaattagatccagaagccctgcacacagccatcctcagggagaaagcacagttggctgggccttgattcacgaagggggcctgccccatgccacggcggtccctcctggcacccgcctcctgataaccctcgtgctgtgtcgataccacagatcctgttccgggccaaagacctggatcccgagcccaggagccacatcgtgcgagggaaccacacgcagtcggccctgctggcaggcctgcgcaagttcgtgctctacgagctccaggtgctggcgttcacccgcatcgggaacggggtccccagcacgcccctcatcctggagcgcaccaaagacgatggtaggtccagggttcgcgccttcgggagccttgctgcctcccaggttggcctttccaatgcaaacaat

SEQ ID NO: 13495 - DNA, 555 bp, Homo sapiens
  MAP TO AC012614.3; EXPRESSED IN BRAIN, SIGNAL = 1.4
aggcgttttggaattttgtggggatgtttttggttgtcacaatgattggagggccttggtagcacttaatgggtggggccaggggtcctagcgatcctgaccttcacggtaccatcctgcacaaaaacttctgctggcctggtgtattagtcggggttctcttagagggccagaactcaaaagagagagagagatatatatatatttatttattaagtattaacttacacacctgtaacaggttctgtttgcagctctcacaaggtcccacaatagactgtctgcaagctgaggagcaaggagagccagtccgagtcccagaactgaagaacttggagtctgatgctcgagggcaggaagcaaccagcctgggaaaaagatgtaggctgggaggccaggcccgtctctccttttcacatttttctgccttctttatattcgctggaagctgactagattgtgcccaccagatcaagggtggatctgccttccccagccccctgactcaaatgttaatctcctttggcaacaccctcacagacacagccaggctta

SEQ ID NO: 13496 - DNA, 539 bp, Homo sapiens
  MAP TO AC018765.4; EXPRESSED IN HELA, SIGNAL = 1.8; EXPRESSED IN FETAL LIVER, SIGNAL = 1.8; EXPRESSED IN ADULT LIVER, SIGNAL = 1.5; EXPRESSED IN BRAIN, SIGNAL = 1.3
cctgttggacaagctcaaggccttttaccattatataatgtccctctttgtttctcttaactggtgttgctttaaagcttgttttttctaatataagaatatcggaaaatgctgctcacttttgatgtccatttgcatgaaatgcctttttccacccctttactttaagtttatgtgagtcattatgtgttaggtgagtctcctgaaggcagtagatggttggtgagttcttatccattccgctgttctgtatcctttacagggagtatttaggccatttatattcaatgttaggtgttgaaatgtgaggtacgattgcattcatcatgcgcttttttgcctctgtactttggttttttgttttttgttttttttgtttgtttgtttgtttttctttttaacttgtatttttcttttataggttctgtatgatttttcctttaaagaggttctgatttgatgtgtttccagaatttgtttcaagatttagagctccttttagcagttctggtagtggtggcgtggtaatggcaaattct

SEQ ID NO: 13497 - DNA, 556 bp, Homo sapiens
  MAP TO AC018764.3; EXPRESSED IN BRAIN, SIGNAL = 2.4
caaaaattgctgagacatttccatatttaccataactttttgttttatgtttttacttatagtacagatcaagctatcgatacagaattctcacaactaatgcttttcatggtacttacattggaatttaattaaacttgaaagcagcaattgttgcattttaaagttacttttaatcatgacttgtttcctaattaaatacatttcaggtgttctactttctaaaggaccaggatttatctattttatcaacttcttatcagtttgcaaaagaaatagccatggcttgtagtgctgcgctgtgccctcacctgaaaactctaaaaagtaatgggatgaataaaattggactcagagtttccattgacactgatatggtgaggcatgtttttgtgatgtatttttgaaatgaatgtattgcatattaacaagtttttcttcaaccttttattttgggatgaaagggaacgaaaatttgttgagcatcaaatgtgtgctacacacttcacatatattatctgtattagtctccacaacaggggtcagcaaactgttt

SEQ ID NO: 13498 - DNA, 509 bp, Homo sapiens
  MAP TO AC008638.4; EXPRESSED IN BRAIN, SIGNAL = 2.5
agaggtcaggtgaatgtggcagatgaggcgcaacttcatagcctaattcattcaacttttgaagcattggttgtgtgatgtgcagtcaggcattgtcctggagaactgtaccctttctgctaaacaatattaactgcaggccttagggtttttgttgcaacttattgatatgctgagcatacttctcagatgtaatggtttcaccaggattcagaaagctacagtggatcagactggcagcagaccaccaaacggtgaccatgaccctttttttggtaaaaatatggctttgggaagtgctttggaggtgctacttggtccaaccactgagctggtcatcgccagttgtcatataaaattcacttttcatcacatgtcacaatctgatcaagaagtggttctttgtttttgcatagaataagatgacacttaaacgatgattttaaaaactttcactcagctcatgaagcacccacttaccaaggttttccaccttttccagttgcttc

SEQ ID NO: 13499 - DNA, 520 bp, Homo sapiens
  MAP TO AC011447.2; EXPRESSED IN BRAIN, SIGNAL = 1.3
tagaacggggtggctatgagtgtccctttcaattcctcaatttgctggatttcttgggaagtccacaagaaattatcagccttccactgggcaagtttctcatatagaagtttactctttcatgcatatgagtcaaatccataaatgacaatatccaattagtcctaaaaatttcctgagttcttgtttagtttgaggcaagggtagggaaacaattctctttcaggtcctgtttttcatttacctgcactaattaggtagcctaagtatttagcttcaggttctacatactgaattttcccttttgagaccagcaacccctcacactgcaagtgattgagaatgtgtgtagagaagtcacctacctcttttatgtctttaccagatataagaagatcatccacatactgaagcagacatatttgtttagggactgtgactttttctagtacttgttctgggacctgaacaaagaggttgggggagtctgtgaaaccctggggcaagactgtccatcaat

SEQ ID NO: 13500 - DNA, 569 bp, Homo sapiens
  MAP TO AC021888.2; EXPRESSED IN BRAIN, SIGNAL = 1.3
ggttcacctgtgttgtggtgtgtatcagtattttgctcctttttatggccaaattatattccattgtacacatgcaccacattttgtttatccattcatcagtaagcatacatttggtttccatttgttagctatcatgactgatgctcctgtgaacatttgtgtatacgtatttgtgtggacatatgccttcctttctcttgagtatataactgggagtgaaattgctgggtcatatggtaactttatgattacccttttaaggtactgccgcgttgttttccaaagaagaaatgcttttacattcccactagcaatgttttgctttctttttatagaccccagaggaactggaggatgtttctgaccttgaagaggaacacgaggtccgcagtcacaccagcattcagaccgaagggaaaactgatagggtatgtcacttcaactggtgggagaaccatgtactgtgtcactgaaggctgtgccctccctttgtcaatctaggcagcctctaatgggtgggactcctggatctggagctagttctgtgaagcacatggagaaaagcc

SEQ ID NO: 13501 - DNA, 551 bp, Homo sapiens
  MAP TO AC011375.3; EXPRESSED IN BRAIN, SIGNAL = 2.6; EXPRESSED IN PLACENTA, SIGNAL = 1.8; EXPRESSED IN HELA, SIGNAL = 2.3; EXPRESSED IN ADULT LIVER, SIGNAL = 2.2; EXPRESSED IN BONE MARROW, SIGNAL = 1.6; EXPRESSED IN FETAL LIVER, SIGNAL = 2.2; EXPRESSED IN LUNG, SIGNAL =   2
ttgtttgggaagccaagttctaattctgaaacaattattacttctaacatggttctctacttaccacattgcacatttggaaagtgtagattgtgaaatatttttataattcctaatggtaataattatatcagtttgtaaagtcagcaatattgataagcagcagtacaagtaaatacaataatcacagtttgttttgctttgaaacttaaatctatttaacaccttcccctgtctcttgatcttcatgttcccaggggatagggtcattgtcctgtacagaagggactgtgtccctctcatgccaaaactgctctacgtcaggaaggatgggaatctctgccttctcagttttccctttgccagaggagggagagctgggtttctctttttctggtatggatgctggggattctggagatggaaccttgtcaggaagaccctctgagttgccagctggtgtttcctgagactctgagacagttggaggttttttggttatcatccatttccatacacctttcaagccttccctgaactcttccgacatc

SEQ ID NO: 13502 - DNA, 502 bp, Homo sapiens
  MAP TO AC017024.3; EXPRESSED IN BRAIN, SIGNAL = 1.4; EXPRESSED IN PLACENTA, SIGNAL = 1.5; EXPRESSED IN FETAL LIVER, SIGNAL = 1.5; EXPRESSED IN BONE MARROW, SIGNAL = 1.5; EXPRESSED IN HELA, SIGNAL =   2
cttacgaaagctgacctggctacagccagtgttgagtgcctagtttgccagcagcagcgaccaacactgagccctcgatatgacaccattcctagggataatcagccagctacttggtggcaggttgattatgacctcttatgttgtggaaagggcagagatttgtcctcatgggaatagacacttactccagatatgggttcgcatatcctgcacacagtgcttctgccaagactatcatccgtgcactcacggaatgccttatccaccatgatggtattcaacacagcattgtcactgaccaagatactcaatttatggctaaagaagtgtggcagtgggctcatgcttatgaaattcactggtcttaccatgttcctcatcatcctgaaacagcgggattgatagaatggtggaatggccttttgaagtcacaattgcaatgccaactagattacaatactttgcagggctggggcaaagttctccagagggccatgta

SEQ ID NO: 13503 - DNA, 592 bp, Homo sapiens
  MAP TO AL121694.3; EXPRESSED IN BRAIN, SIGNAL = 1.8; EXPRESSED IN ADULT LIVER, SIGNAL = 1.5; EXPRESSED IN PLACENTA, SIGNAL =  10
ctgagggctcttctcaccacacagactattcctttcttaggagctgtgcttctcactctgtgagcaattctttcctcccagggagaagcaggaagagctagcaaggaagcatgcaaggtttgtcctgtcactcaaccaaactatggagaaaaaagccaccaccactgtttacataaatgagacttataccaaaataaacttgaagagagaagacatagcattgcaaaaaaaatgtattcaagaggcagaggagctaatggaaaaagaaagggcagaatatctaataagaaaacaagagttgactgcacaggtaagtggcatgatttattctttaaaatacaataatgtatagaatctggagcaggaaatgggaaataatttatttgtcctcaaggctggcaagcagcctctgtggtatcttctgtgaacgcgctgggaaaacgggatgagcgggagactcaaggacacttctgctcttggggaagacatttgattggtagcagcatctcagttcatgggtaaaaatataagtgacaggatttgtaacactggggtgtccccttgcttatatgctgccatacagggacaagga

SEQ ID NO: 13504 - DNA, 503 bp, Homo sapiens
  MAP TO AC003692.1; EXPRESSED IN ADULT LIVER, SIGNAL = 1.6; EXPRESSED IN BONE MARROW, SIGNAL = 1.7; EXPRESSED IN FETAL LIVER, SIGNAL = 1.6; EXPRESSED IN LUNG, SIGNAL = 1.7; EXPRESSED IN BRAIN, SIGNAL = 1.5
gtcctaacacccagtccaggactttccactataccaacatcatggactctgtcagtgtgctatcttattaaatggttcttgaatttaaatggaaatatttatttatcatacaacactgaagggtagggagtgtggctataaatgctctcaatgacatctattagatgttattagactcttcataacatcagccaggtttcctttccattatggattctctaatgatgaaaaagagtgaggtgcttttccacatgatttaccactggttcccaaacttgtctgcatattagaatcacctggagatgggacccaggtaccagtattttttgtatctcttaggtgattccaatatgcagacaagcctggaaaccactgtgatttccacttcaatgctatcactggaagacttgaagcaggaggtggataaccacttactagccatgctggagaaggggttccttcattggaagatagtatctaaggcccttactcaggctctatga

SEQ ID NO: 13505 - DNA, 552 bp, Homo sapiens
  MAP TO AC012177.2; EXPRESSED IN BRAIN, SIGNAL = 1.8; EXPRESSED IN FETAL LIVER, SIGNAL = 1.5; EXPRESSED IN ADULT LIVER, SIGNAL = 1.5
ggagtcctcctttccctcacagtgatagcaacctctaattcattctctagaggccacttctagtcacacttatctattaactaagagaaagtgtcctagaaaaaaggatcctgaaaagaggtagtgagtatttgttttaatggtgaacttagatacatctttttacttcctgtcttaaaggccatctctctctctctctctctctctctctctgtctctctctcatttggaactgatttcatggttttaaattccagctttctgatgcacagtgtttcttattaactcttccctgttgtgcttgctcacctaattatctcaccctctctcctgtgttttagtttctaataggtttccttttcacagctcactggatagccaagagtttttggcaataggagttgggcttattctgaaagtgtactggaactgcaagggattcaagggttctgaattgcaacaacatcattccacagatgatgagactgaggcttaaagatggagaaagctcattttcattgtcattagataacgtgtggctaagggaggata

SEQ ID NO: 13506 - DNA, 558 bp, Homo sapiens
  MAP TO AC006111.2; EXPRESSED IN ADULT LIVER, SIGNAL = 1.5; EXPRESSED IN PLACENTA, SIGNAL = 1.7; EXPRESSED IN BRAIN, SIGNAL = 1.6
ctcactcagactgctctggctagggggccatttccatctacatggaatatggggacctgctgcccaggggtgacatgcacgaatcctgtgtgttgcctccctggggaatggtacgcagagagaactgggaggctcaccccggcacccagcagtcacacatgctccctaaggagctgactgcagacctttcttcccaagcccaggccagctgcatccaccagacccagagaccacacggggggcccttccgcccccaggtgtgtgaaacccagttacttatgggagggaaaagaccactgtgggcaacaagctttgaagaccgccaacctatccagttccttcttcagcaccggcgtctccataatggaatactgtggcatcggcgttatgggcactttggggggcaagttcttcttccgattagcaccttctgggtaaaacaaaagaagcacacgttttagcatgagggacacggatttcccacatctgatcccagtagcgtgaccaagaggaataatgcacttgaagataacccaagcatcgttttgctccatgaaa

SEQ ID NO: 13507 - DNA, 531 bp, Homo sapiens
  MAP TO AC018801.2; EXPRESSED IN BRAIN, SIGNAL = 1.5
cgttattcagttctttggggcaaaaaacagcaccttttctttctaaaatattgacagttcaacagactttatttgcattttatttgatgtaggaaaaaaatctggatgacaaagcatatcgtaatatcaaggaactggaaaattatgctgaaaacacacagagctctcttctttacttaacactagaaatattgggtaagttgtttttctgtttcatacttcttttttccaataaaatacctatgagatttcactttttcataatttggtaatctaaccagtttagcactaaagccttcctttatactatctgtaaaggaacagttttttttgttattattattagcaagaagaagaatttatatctctttctttgtaatgcagagtaatccaagactcaggctctcatacaactactttacctcatgggaatgttgaaattaataatctggtaattgcaagtggctttacttttttactatagcatctcctacaatttggaaggcctatagcctgactcttcctttcgtg

SEQ ID NO: 13508 - DNA, 557 bp, Homo sapiens
  MAP TO AL049776.3; EXPRESSED IN BRAIN, SIGNAL = 1.6; EXPRESSED IN LUNG, SIGNAL =   2; EXPRESSED IN ADULT LIVER, SIGNAL = 1.8
agagagcaggagaagggaaagtatgtcttaattagaccaaactgatttgaacatgacacttttttttttttttttttttaaacataagctgacagtggggaaaacagcactatataccttttggactttcgtatttcaactattcttgatattgctccttttttttaggaagaagaagaagaagaagaaaacaggatgtctgaagaagcagaaaaacaatatcaacagaataaattgcagactgattccattgttcagacagatcaaccagagacagtgatatccagctcatttgtgaatgtcaattttgaaatggagggagacagtgaagtaattatggaaagcaagcaaaatccagtctctgtcccaccataaaatgaaatgactatcaagcttcaaactcttaagttttttttttttaatacaaaaactttcacattctttattcagtgggacttaatacaattatttatattttaaattattaaagtatctggaaagggaaaatgttttcttcatttttaggatctatctagcaaaagccagatctgaaattc

SEQ ID NO: 13509 - DNA, 579 bp, Homo sapiens
  MAP TO AC008430.3; EXPRESSED IN BRAIN, SIGNAL = 1.9; EXPRESSED IN LUNG, SIGNAL = 2.3
tttcaatgccctttggattcttgctgtcatgctttcaaagccaatattaatacaaagtattagaatggatgagagttaagatgcaaatgctctcctaatcaatcaattgacatacacatagtgtgatctggtacagtctcctgcatcaagcttacactagcatctataaaccaacaccagcgtaaaaatagcccacagacatggtttcataaggaatttgtgttttaccaatttagttaaaccgaagatgaaggcacatttaaattagcgtgaaggtaacgactctgacactcacctaatcaacaggaaatcttctaagaaagaggaacagtgggtagtgaaacagttttggaaaactttacctgtaaccattgtgactggtcattgtggccagaggtccaggcattcactttgccttgcttgtccagccgagctttccttggttcccaagtgaacatgtccatgttgagcgttctgaagatgctggaggcagtgatctgatagtcttgtatatgtcctgatttcatacccagaggctcagaacaacctgaaagaaaatgagaagggctccatgagaaa

SEQ ID NO: 13510 - DNA, 506 bp, Homo sapiens
  MAP TO AC008764.4; EXPRESSED IN BRAIN, SIGNAL = 1.3; EXPRESSED IN PLACENTA, SIGNAL = 1.4; EXPRESSED IN BONE MARROW, SIGNAL = 1.8; EXPRESSED IN LUNG, SIGNAL = 3.6
taaccctgccaggtggatacagggaggcagggtcaccgctgcccactgaagtgctgtctttaccttccggtctctgcagacctacgtctaccagtggccctggacgctcctgctcctggctgtcagcggcttctgtaactttgcccagaatgttatcgccttcagcatcctcaacctcgttagccccctgagctactcggtcgccaatgccaccaaaagaatcatggtcatcacggtgtccctgatcatgctgcgcaacccagtcaccagcaccaacgtcctgggcatgatgaccgccatcctgggggtcttcctctataacaaggtgagagtctgagaggctgggcagggaaggaagccggccccccaacacccaggaagtcagaaaaggaagggcctcccgggcgctcaaggctggggttgtatgtcagagctttgccactgactggtttatgatcttggcgtagccccatcccactctggcttcctttttcctgcataggcaa

SEQ ID NO: 13511 - DNA, 549 bp, Homo sapiens
  MAP TO AC023068.3; EXPRESSED IN ADULT LIVER, SIGNAL = 1.6; EXPRESSED IN BRAIN, SIGNAL = 1.6; EXPRESSED IN PLACENTA, SIGNAL = 1.5; EXPRESSED IN BONE MARROW, SIGNAL = 1.5
agttggggtctatgtgggtgttcgtggcatctgtttctcccaatcaataacctttctattatgaaagaagtagagacactgtgtctccttaggtcctcactcattttctctcccggtatgtgtcatagtagtttctctaggtacttacctgttccaagatcctttgggggctcatgtctgaggttcttcgatttgaaccagccctttttcaaagcagctacttcttccacagagtacatagaactccactggcattttaaacactattatccatttcttttctttaatcctttgcttctttgcttgaaagcaaggagctggatccctaatatatgcaaaagttcctggagagtaaaagtcctcttcctatctgaacttagtcaatcagttgcctttgtgttcatcttattgctataaatcttttctttatccttactctgttttttttttattcacaaagactcacataattgtgtatctttatccctttatcccttcaagaacagagtgttactatgaaacaggtagcccgaggcttgagttctctct

SEQ ID NO: 13512 - DNA, 518 bp, Homo sapiens
  MAP TO AC011463.3; EXPRESSED IN PLACENTA, SIGNAL = 1.9; EXPRESSED IN BRAIN, SIGNAL = 1.5; EXPRESSED IN ADULT LIVER, SIGNAL = 1.6
acagaaaccacactccaggcccagtccccggcagtggcctccaggacccactctgagctagatcacatcagtgatgggctggccaatctttaaggagaatgactctactcttaggaagccagcaggttggaggaggaaacacattcaaatcccgagcacaaggagctgggagaagaccggttatgggagcggcattcctggaagctctgaagtcacagccccactgatgaaaggtatgatgtgaagtgggagctatgggggtgaagtcttgtgcagcgacccctggtgtggcagaaagaaactcctcttttttcaaatggtcccctggggtaccatcatgctgcagtgagaaaccagttccccagttgctgccttttttttccctccctcacacttaatagactgttccagcctcagggcctttgcacatgctgcccctctgtccggaacacagtttccctagacctttgcatggccagctccttctggtcccccaagccccaactccaatgtcactt

SEQ ID NO: 13513 - DNA, 567 bp, Homo sapiens
  MAP TO AC010395.3; EXPRESSED IN BRAIN, SIGNAL = 1.7; EXPRESSED IN PLACENTA, SIGNAL = 1.3; EXPRESSED IN FETAL LIVER, SIGNAL = 2.3; EXPRESSED IN BONE MARROW, SIGNAL = 3.4; EXPRESSED IN LUNG, SIGNAL =   2
caagcggtttacttcccatcagaaagccactgaagaacatagtactcggcaaaagagccctgaaatacacaggagaattgacatctcaccaagtaccctgaggaagcatacccatttagcaggggacgagagagtttttaaagaagaaaatcaaaagggagataaaaaaaaattaaggtgtgactctgctgaccttcagcatgacattgatcaccgtagaaaagaaataagtaaagaacggggaaattccaagggccccagggaatccagtggatcaagaaagcaggaaaaaactccaaaagattacaaggaatacaaatcttacaaagatgacagtaaacataaaaatagagagcaagatcattctcgatcttcatcctcttcaccatcaccttcttctcccagttctagagaagaaaaggagagtaagaaggaaagagaagaagaatttaaaactcaccatgaaatgaaagaatactcaggctttgcaggagttagccaaccatgaggaaccttttttcgaattagaggcagaggaagagacagaggagtttttgctgggacaaa

SEQ ID NO: 13514 - DNA, 515 bp, Homo sapiens
  MAP TO AL132796.2; EXPRESSED IN BRAIN, SIGNAL = 1.4; EXPRESSED IN PLACENTA, SIGNAL = 1.5
tttggagctaaagcagaggcctgcagctgatacagctatatctgtggaacacaccattctatatccaagtcaggatgtatttgttgagacctactgtgtaccagacactgttctaggctctggaaaatggcagtgaataaaacagataacaattctcaccctcatagagaagacagataaaaataagttagctgactttagggcacatatcaagatgttaaatgctttgaaagagaacaaaacaaggagcagggtagggaatgctagaagggctgcgaatttaaatacagcaatcagggaaacgctgttctaaaaggacagagagtaaagaaatgaactatcaagccgtgaaaaaacatggaggaacctttcatgcatagcactaagcaaaagaagccagtctgaaaagactacatactgtataattccaactctatgacacacgggaaaaggcaaaactttggagacagtaaaaaaagatcggtggttggcaggggtcgggagagacagagatg

SEQ ID NO: 13515 - DNA, 553 bp, Homo sapiens
  MAP TO AL121716.16; EXPRESSED IN HELA, SIGNAL = 2.2; EXPRESSED IN PLACENTA, SIGNAL = 1.5; EXPRESSED IN BRAIN, SIGNAL = 1.5; EXPRESSED IN ADULT LIVER, SIGNAL = 1.5; EXPRESSED IN BONE MARROW, SIGNAL = 1.6; EXPRESSED IN FETAL LIVER, SIGNAL = 1.9
ttgtaggcttcttgcagtggagatgaatacagatcacttaaggttgactgtgcaaatggcataggggccctgaagctaagggaaatggaacactacttctcacagggcctgtcagttcagctgtttaatgatgggtccaagggcaaactcaatcatttatgtggagctgactttgtgaaaagtcatcagaaacctccacagggtatgtcgtactagcactgcaaaaatttgtttttaatgctctttgaagccaatctcacttataaactaaggtggtaaagtgagttaagaatcttgcagctattcctggctctgccacatttagacattgagaagtcttcccactctcagagccattgaaacatggtctgctctctctgcctgtaaatcacaccattcctcatagtctacaggaaatcaggtggggaaagcaaagtcaggaaatggcattctagagcagtggttctcaaactggcatgtgtcagaatcactttgagggcttgttagcacacagattcctgggctccacttctgagtttctggaggtctggca

SEQ ID NO: 13516 - DNA, 542 bp, Homo sapiens
  MAP TO AC010473.3; EXPRESSED IN LUNG, SIGNAL = 3.6; EXPRESSED IN BRAIN, SIGNAL = 1.4; EXPRESSED IN PLACENTA, SIGNAL =   2
gaccggaaagctgttgactgtctcctttcaggcccacgaagcggttatccatggccaccatccagccccggaagaaaacctccaggttcttgctgccctgcgactccagtatctgcagggggattatactctgcacgctgccatcccacctctcgaagaggtttattccctgcagagactcaaggcccgcatcagccagtcaaccaaaaccttcaccccttgtgaacggctggagaagaggcggacgagcttcctagaggggaccctgaggcggagcttccggacaggatccgtggtccggcagaaggtcgaggaggagcagatgctggacatgtggattaaggaagaagtctcctctgctcgagccagtatcattgacaagtggaggaaatttcagggaatgaaccaggaacaggccatggccaagtacatggccttgatcaaggagtggcctggctatggctcgacgctgtttgatgtggaggtgagaactggctgccgtgtgttggggtgggctgggtgctggcatctgagaacatgga

SEQ ID NO: 13517 - DNA, 593 bp, Homo sapiens
  MAP TO AL158848.1; EXPRESSED IN BRAIN, SIGNAL = 1.5; EXPRESSED IN PLACENTA, SIGNAL = 1.5; EXPRESSED IN ADULT LIVER, SIGNAL = 1.6; EXPRESSED IN LUNG, SIGNAL = 2.3; EXPRESSED IN BONE MARROW, SIGNAL = 1.7
acctgagctgaaatggttcgctgaaaggtttttccagttgatgtttcattagagacattactctgtggtgtccagtaatgttctgacatctgagatgaaaggtcaaaaatgccatcagaggtgacaaataagcccccatgggttcacagtttctaccattagatattgagtcttaaaagcatcccaagtagggtacaagtctacccagaccttccatcacataaagcgattcaagacctcagtcaagtattgcttcttatatcatcatccctaccttttcccctatgaagttaagacatatgtattaggacaaatttaatgcacacaagatataaactgtagcaaagaaatgtttgaaatctgaaaacactttaaggtcagtctccatattcagttccagagatttttcctgacaagatgtgctattattgattcctatgttacagctagaaaaattcaatgttcagttaccttcttctgtagccactgcacagcccagctccagtggtgggaattctccttgaagtactccttagctgcaggacacctgatgaccgaggagatttttattagccaaattctttctttgcttg

SEQ ID NO: 13518 - DNA, 595 bp, Homo sapiens
  MAP TO AC007845.12; EXPRESSED IN BRAIN, SIGNAL = 1.7; EXPRESSED IN BONE MARROW, SIGNAL = 1.8
gcacaggttctctcagaggccagggtcctggaaccgtcttcccggggctgcccggcactctctgcaggtgctcctgtcaacaccaggtcaggccgtgggcttcctccatgtgcagactctgcacacagagcttcaggacaaaccttctaccttctcccagacccaaactatgcaaggaaagggcctttggccaaagcaactgcagcagcctgtggcacagggagggtggacagaggaggaaaaggcaaggagctgcccacacctcggaggctggtgtgcaccatggctctgctctgaagcgcctggcccctgagccactcttgtgtgcatatggccctcgtaggaattctgaaagttgtttctcccatcaaagacaggctcacctctctcttggtgcttcggtgaggcgggcagcttctcctcatcttccgacaccctcagctccagctctgcttccccctcagctgggcacggcaaacgcagctctctgtcagcatccgacgggctgtcagaccagtgctgatctggcagagggaaggggcagaagtgggtgcacaccctaagtgaggccaactccttttccacctgagagcag

SEQ ID NO: 13519 - DNA, 572 bp, Homo sapiens
  MAP TO AC007340.3; EXPRESSED IN BRAIN, SIGNAL = 1.5; EXPRESSED IN FETAL LIVER, SIGNAL = 1.6; EXPRESSED IN HELA, SIGNAL = 1.9; EXPRESSED IN ADULT LIVER, SIGNAL = 1.4
aatgaagcttgcaggattggaagcagttctgtgcaagtcagtagtagtgagtgaatgtgaagacctaggacgttactgtacactactgtaagctttataaactctatacacattaaaattattttcaaagtatttttccttcctcaataataaattaaccttagcttactgtaatttttttactttataaactttttaattttttgacttttgtaataacacctagcttaaaacaaaaatacattttacatctgtaaaagaaactttatatttttattctataagcttttatattttaacgttttttatttctatttttactttcgaagctttttgttaaaaactaagacacaaacatacgttagcctcagtctacacaacgtcagggtcatcaatttcaccatctttcacctccacgtcttctcccactagaaggtcttctgggacaacaacacgcatggagctgtcatctctgacagcaatgccttctggaacacctcctgaaggacctgcttgaggctcttctggagaagtaggtttatttacacaagcctcaccacaaacacatgggt

SEQ ID NO: 13520 - DNA, 512 bp, Homo sapiens; identical to SEQ ID NO: 13449
  MAP TO AC012535.3; EXPRESSED IN BRAIN, SIGNAL = 1.8; EXPRESSED IN PLACENTA, SIGNAL = 1.5; EXPRESSED IN ADULT LIVER, SIGNAL = 1.9; EXPRESSED IN BONE MARROW, SIGNAL = 1.7; EXPRESSED IN FETAL LIVER, SIGNAL = 1.7; EXPRESSED IN HELA, SIGNAL = 1.7; EXPRESSED IN LUNG, SIGNAL = 4.8

SEQ ID NO: 13521 - DNA, 530 bp, Homo sapiens
  MAP TO AC011449.3; EXPRESSED IN BRAIN, SIGNAL = 1.3; EXPRESSED IN PLACENTA, SIGNAL = 1.9; EXPRESSED IN ADULT LIVER, SIGNAL = 1.4
taaaatggagtctgtccggctctctctgctaggagagagtcactcaggttaaaacaaggtagggtatcacaggctctagctatccaggcagatcctttagaaaagagaacatccaacctcttgggctgccccttgggcctttatgctctgcttggtggatctgcaagtcacgtgggtgctggcttccgtctgcagggaagtcccacttgcgcagagccatggctcatcacgaggagtcggtgcgggaggccagcctctgcaagaagctgcggagcattgaggtgctacagaaggtgctgtgtgccgcacaggaacgctcccggctcacgtacgcccagcaccaggaggaggatgacctgctgaacctgatcgacgcccccagtgttgttggtgagtagcctagactgtgttccctctgtgggggtgcctgtgccgcggaaagagtacgcctggcctgtgggggttgagcgagccctcgctgtgtgcttggcacaaggagagctgcacagggtagggactgaggtgctgct

SEQ ID NO: 13522 - DNA, 540 bp, Homo sapiens
  MAP TO AC000056.1; EXPRESSED IN BRAIN, SIGNAL = 1.6; EXPRESSED IN FETAL LIVER, SIGNAL = 1.8
ctgcaagtcactggacaaggtgcggtagagcatagaaagatgagtatgactgtaagtggccctcaggacctttgagatttagaaatctaagataagtaactatctataagatagaaatacataccgtagagaaagaacaaccaaattgttgtgcttaaacaagtagaaatgtatgcaaccatttcacactgagcttcagcagtcccagaattccaagataacaagtactgtcctgactgagaagctgcacatttccatgctgtcggttccatggaaacagcatttggatgtgttccatcaaaactgctttgaaaaatggtccaaagcagaatttacttttgtgagaaaaaaatacaaaaaacataagaggcaccacatgctaatggaagtagcacaagatttggagtcagaagatctgtttgagagccagccttatccttgctacctgtgtgatgctgggtaagccacttaacttctctgggcctcaggattctcattttcaaagtgggaaaaataatccctaccccatatgccccataa

SEQ ID NO: 13523 - DNA, 543 bp, Homo sapiens
  MAP TO AC007954.6; EXPRESSED IN BRAIN, SIGNAL = 1.8
gtgatcatttcctgcccttccctctacctccccgcaacaagtggtggccacgctggctcctgaggcacgtccttgtctgtgtgtctcttccagggacgaggatctgattaacaagtgtggggacgacgcgcgcatctacatcgtgttccagtaccacctcatcatctttgtgctcatcatctgtatcccctccctgggcatcattttgcccatcaactatactggatctgttctgggtaggcaaagctcagctggccctggggcagcagctggacctgagaggcagccaggcaagccagtcagggctggggttgagggtctagacatctattttaatcctgcctctgggagtttgttgttgtgtgaacttgaataagccatgcttcgcttctctcatgtggagactggagacgattcctcctttgtcacaggtttggcccagagcctgacacacagcaggcacatagtattaattcagtttggaactgagtgttcattcgtggccccactctggctgggcgttcctggagacccttttgtgac

SEQ ID NO: 13524 - DNA, 501 bp, Homo sapiens
  MAP TO AL132668.2; EXPRESSED IN BRAIN, SIGNAL = 1.3; EXPRESSED IN PLACENTA, SIGNAL =   2
aaggcacattacttccggtgggccttatggacaggaatggagaaaaaggcatttgccatgtcaatggctgcataccaggtaccaggagatgtgttaatttgctcaagcaatgaaaccacatctggtacagcagctgcaattggagtcaccacttggttaagcctacgataacccactgtcattctccaagatccatctgtcttctgcacaggccaaatgggagagttgaacagggatgtggtgaaaatcaccacccctgcatctttcaagtccttgatggtggcactaatctccacagtccctccagggatacaatatggtttttgatttactatttttctaggtagaggcagctctaattgtttccatttggcctttcccaccataataccagtcagggagccaatgtgggggttctgccagctgctaagtatgtctatgccaattatgcattctggcactggggaaataaccacaggatgagtctggggacccactgta

SEQ ID NO: 13525 - DNA, 560 bp, Homo sapiens; identical to SEQ ID NO: 8831
  MAP TO AC018836.2; EXPRESSED IN BRAIN, SIGNAL = 1.8; EXPRESSED IN LUNG, SIGNAL = 3.3; EXPRESSED IN PLACENTA, SIGNAL = 1.3

SEQ ID NO: 13526 - DNA, 548 bp, Homo sapiens
  MAP TO AC004549.1; EXPRESSED IN BRAIN, SIGNAL = 2.4; EXPRESSED IN PLACENTA, SIGNAL = 3.3; EXPRESSED IN BONE MARROW, SIGNAL = 2.4; EXPRESSED IN ADULT LIVER, SIGNAL = 1.5; EXPRESSED IN FETAL LIVER, SIGNAL = 2.2
caacaatatgcaacatgccctcaattttattttgttttgggggaaatgtgctgaagaacctagagctttttttgtttagcaccttatatcaaagtaatgaaaatgggtatgatgattacatgtgcaaatgtacaaaatcattaactctacaaagatacatcattccaaaattacagaaaaaatttaaagcatgcatttaattctttttctttaaagggttgctgaatgcttcccctgaaaaaaggtggctgttttcaaaatcagcaactgctggtgaggatttcttggcacagttatgaccagcatgttattgctgcatcttcctgataatctcagccgacaccgggggatggaaattgattgtgtggtgccgcaggccctgagctgtcttgtaactcttcccacagcgacacttgaatggtttgcggacacgaatctgtgttctgtgaccattcttagcgtgatactttatgccattcacattctgtggagaagacaaaaatatttattacatggattcacaggatacctgtcaaacttcggaaacc

SEQ ID NO: 13527 - DNA, 583 bp, Homo sapiens
  MAP TO AC019239.3; EXPRESSED IN BRAIN, SIGNAL = 1.5; EXPRESSED IN PLACENTA, SIGNAL = 1.4
tttagagctctggcagtcccagaacatctctatgtcctaggaaaactgggacaattgttcaacctagccctaaagaataatatcttgctgtcaaattaatgctcagaccaaatatctttggtctgagcctcttttgaaaaactacctatttctatatatctacctaaactgattaaggaaggagagataaccaataaagatattagtctccttctatcatggtgctctccaaaaatgtcagctatggcacaggcaggttttctgttgctccaggaaaaagtcgctttacatggcaaatgtaagtataataaatgaaatttcccatggggagaaaaaaaaaaccaacaaaacaaaacaggtagtaccaactgcctgcagaaagtctccctgtgatttctcactgcctactctttcaaactcaagttgaaaggaatgttttgcattcaaagtttcagaaatgccagtacagatctgagcaccttctgatgctggggaacctgcattttcacctgttgaatgtgtaaagtagataattgcaaattttaaaatcaccgctttgcgttgctccctatcctcactgcag

SEQ ID NO: 13528 - DNA, 597 bp, Homo sapiens
  MAP TO AL158052.2; EXPRESSED IN BRAIN, SIGNAL = 2.5
agttgttcctcggtccacaccgctgcattagccgggcgcacacttcttttttttacctctgtttccaggcgagatcctaaaatgtggttagttagttgctcaaagcctctattttaaaatacacttggaattcaactaaagataatttcttttttaaagaaattgtggggtgaggggttgcgagtcattagaaaaggttggtaagagtcgtttgtgaggggctgtgaggctcatggccctccaggttgccaggcacagaagttaagacggacgtcacagttggcagggtggggctagtcaagtctgtcagggtggtgggcgtgctggaggggctgagcgaggcgttggagagctccgaggccgggcccgatggcgtccctgtctgcagcgccgcgtctgtcgacttgtccacgcccgtgttttcctgccgtaagaggttgcgcctgaacttggctcgggcgttctggaaccagacctgcgggggacgacagggaagggctggtgagcggaaggcaggcagagcatccccccgactgcttcactcagagctctgctgcctctggggacgctgatctgtgttttgccaagaggatccaa

SEQ ID NO: 13529 - DNA, 556 bp, Homo sapiens
  MAP TO AC013329.3; EXPRESSED IN BRAIN, SIGNAL = 1.4
attcaacccacagcagttcccattgtcagtttctctatgtgaatgtgctaaaagagttttctgcaaggaaataatcataatggctatattaaatagtaaagatcttttgacacattgggtagatctttcccaatgggaatttaagaaatctacaaatgacttagttactatacctggctatatacagtatatccagctctacttggttggcttgacctgttactcctgaacattgattaacaaattcatttatgcattaatctatttaatttctcattgtgccctcatcacttattgaatgcttattatgtttcatgctctataacagcttctggaaatataagttgaaataaacacaatccctgttttcctatttataagataagaaacatgctctcctgatgtacatatatatcaaagagatcacattcacctggttctacaccagcagtttcctaaatcagattttagctaacaaccagttctacccagtgagtcagacagaggctatgagagataaaagggaccaaagaaatcacatgatctaggctgctgg

SEQ ID NO: 13530 - DNA, 556 bp, Homo sapiens
  MAP TO AC011025.4; EXPRESSED IN PLACENTA, SIGNAL = 1.6; EXPRESSED IN BRAIN, SIGNAL = 1.8; EXPRESSED IN ADULT LIVER, SIGNAL = 1.4; EXPRESSED IN FETAL LIVER, SIGNAL = 1.6; EXPRESSED IN HELA, SIGNAL = 2.1
aaatcacctacccaagcacctattgtttctagatttatcattggcagatatgtgaagtcacccaaaatatcttcttgatactgactaaagtcttcatttcacatgtgtccccttactacacaattcaactatacaaaatcattctggaaatcaagtctatcatgtactaattaactcatatttacatgtatcactatgtactaagaatcttcattatgtcaggtcatgataaggattcaaaaatgagtaagccatagacactgtgttacacaatatatgggggatgttggtaaagaaacactttaacatagctaacaaaaggtagaaaataggaagaaatgacattaatagaaaatggcgataatcatttgaattggaccctgaaggacagccaggatttgaacatgaataacagtggcatggaagaagatgaaacctaagatgagacaatagcttgtttctctttgcagagaggaaaatatattgggtggacttggccaaagctattacattagtaaagcttttcttgggaggtcctggcctcttgttgttgacc

SEQ ID NO: 13531 - DNA, 537 bp, Homo sapiens
  MAP TO AC008469.4; EXPRESSED IN PLACENTA, SIGNAL = 1.5; EXPRESSED IN BRAIN, SIGNAL = 1.5; EXPRESSED IN HELA, SIGNAL = 1.6
atttagctgggtggttttgctgtcagtgctggtgttcctagttcactcagaagcccctttgctctgatcccgacaatttccagtgccatttctactgtcagtaatgaacccacaattgtctgcagactgcacagcctcatctgcagctgaggcagagtcagccctttctccttgtcctgcttttcagcagggttggaaatgcacagtctgggatgcttcttacgggggatagcctgagatgctggaggagtcagtggttgtcattgggcagcaaccactctggccctcttctgtacttcagcagtcctaggatctgggtcccctggtacctgggggttcttagatcttgttccagatccctactccagctctctgaggattgggggactctgcctggcactgtaaatttatagaatgtaccttcttttgacaagatctgtttctctgggggaagatgagggctggacacttttcctaccttgttcctgactattttctgacagatttccttagtgttctattctgcagccagttccc

SEQ ID NO: 13532 - DNA, 597 bp, Homo sapiens
  MAP TO AC000029.17; EXPRESSED IN BRAIN, SIGNAL = 1.7
gccagtactttcctttccccagagtcggatggcagagagcttgcgcctctttgactccatctgcaacaacaactggttcatcaacacctcactcatcctcttcctgaacaagaaggacctgctggcagagaagatccgccgcatcccgctcaccatctgctttcccgagtacaagggccagaacacgtacgaggaggccgctgtctacatccagcggcagtttgaagacctgaaccgcaacaaggagaccaaggagatctactcccacttcacctgcgccaccgacaccagtaacatccagtttgtcttcgacgcggtgacagacgtcatcatacagaacaatctcaagtacattggcctttgctgaggagctgggcccggggcccgcctgcctatggtgaaacccacggggtgtcatgccccaacgcgtgctagagaggcccaatccaggggcagaaaacagggggcctaaagaatgtcccccaccccttggcctctgcctccttggccccacatttctgcaaacataaatatttacggatagattgctaggtagatagacacacacacatgcacacacacacatctggagatggc

SEQ ID NO: 13533 - DNA, 541 bp, Homo sapiens
  MAP TO AC021881.2; EXPRESSED IN HELA, SIGNAL = 1.8; EXPRESSED IN BRAIN, SIGNAL = 1.7; EXPRESSED IN PLACENTA, SIGNAL = 1.6; EXPRESSED IN ADULT LIVER, SIGNAL = 1.8; EXPRESSED IN FETAL LIVER, SIGNAL = 1.8
cagaaagttgacctccagggagacagtgttagataagagcatgaacatacaattaaaatgattaaattaaaatttatttttggaacacttatttccttaaatgtgagaatgaaatctctaagcatatgctttcttttctttttcagtttaaacctttttagaaatgagactgggtagattccattttagctcaacaaatgtccttttaaagctttcttaaaagtaaacataggtcagttttaattaagatttgaatgatacccatagattattcattgtaccttagagttgattccagatcctgtttacattgatttagtcctacttttttttttttttttagtagctttttctttttttagtactgtaagaactcactgttggtgttaaaacacagattagctaactttgaagcttataagtatactcttataaaaagattccaagttccaaatcaagattctcctatgtgggagctaggatgtttctgcctcttgtctcttcactttttctctttctctctttttccctcctttcagca

SEQ ID NO: 13534 - DNA, 547 bp, Homo sapiens
  MAP TO AL122021.3; EXPRESSED IN FETAL LIVER, SIGNAL = 1.6; EXPRESSED IN PLACENTA, SIGNAL = 1.6; EXPRESSED IN BRAIN, SIGNAL = 1.5; EXPRESSED IN ADULT LIVER, SIGNAL = 3.8
tcaaatttcctccaagcagccaatgaccagagaaaggttaaaagtcactgacacagtaccgttttctgtgcatctatatcctgaatccagggtgatgccgctgacttgcctatctttctcctttgctcttcctagaaaaagcaagtgagtaagaccaagatccgggtcatctcaaccatcctgttcatcttggccggctgcattgtgtttgtgacgatccctgctgtcatctttaagtacatcgagggctggacggccttggagtccatttactttgtggtggtcactctgaccacggtgggctttggtgattttgtggcaggtaagcaccctgggcaggccaggcactggggctctggcgggaaaaataatctgttggctgtgcttttcgcaatcgataaaagatgttgcgggagaagcaaatgaagatgactcagtgtcactactgctgtgaagaggctcatttcaaatccctagtcctatgtaatataaataccataggtttttttctgctatgaaaagaaagccaaccctttccttctcagga

SEQ ID NO: 13535 - DNA, 558 bp, Homo sapiens
  MAP TO AC007221.2; EXPRESSED IN BRAIN, SIGNAL = 1.7
ttttgtcccgttttcactgacaagtagaataaggctcagtgagtttaaataatgttttcaaggttagatgatcttagaagtagatttctacctcttcatcaaagtggccacctttccaagagcctgcactacaagactgctgaaggatctctcccaagatacctggctcccaacatttgccattggccccactataagaacaaatgttgctctgagtcctgttgatttgggagctaaagaaccaagccccttgattttcagcataagttgccaagccttggaaagagcccatatggctcctgaggatgggagcacatcccccatcccttctcaattcccagtcacttctcactcggacagctgcggtggaatgatttacagccacttggtgttttccagcaggaagctaaaaaggaccatatactgtgaaataccaattgcagagcctctcacagaaagcagtagctggtgactttttgcagacctgcttgccttcatccccagtcccccatcccctgactttttaatgaagggttcggctggtcttatggcagtcct

SEQ ID NO: 13536 - DNA, 531 bp, Homo sapiens
  MAP TO AC007064.27; EXPRESSED IN BRAIN, SIGNAL = 1.7; EXPRESSED IN LUNG, SIGNAL = 1.9
aggttaaggttggcaaggtgcacagtctttggcacaagtttggcattggccaggctggatgctggcatcatgacagcttgctcctgtatagcattggcagctttaatgatgatgctgctggcactctggacagaggcagcaggtatgaccgtggctttcaccgtggtgttgttagcaagcttcaaattaatgacttgggatcctgctgtcttcacagcagacactgggaggaaagcagtagccacaggcttgattgtgacctgtttaggggtgggctctgcagggaaaactgcattggtcaccactgcagactggagaggcaccctggggggagaggaaagggcagcggctgatgctggagatgacagaagggatgtcacagaggccatcacagacaccatctgctcggaaggtttcttcccagagtcaagatccacttctggaaataccctggtctctgttctcttgatttccccagaagatgtcttaatggtttttatgcggactttggggattgctgttgtggatcct

SEQ ID NO: 13537 - DNA, 502 bp, Homo sapiens
  MAP TO AL159191.1; EXPRESSED IN PLACENTA, SIGNAL =  46; EXPRESSED IN BRAIN, SIGNAL = 1.4
cagtcaggcctctaactggctgtacagaaaagaaaccactttgccaattttttcatgaatgtaaggaaacagtgaagagtgagataaggagagaggacaccaaagaaataagcaggtttaatgactgtattgaaaagaactcaccaaaatgacgcccaagctccacaggtcacaggactcatcgtagccgttctgattcaagagctctggggcggcataatgaagggtgaagcatggagtcttcaggggctgattatccggtggctttagccgtgcaaatccaaaatcaattattttaatttccaaattgtcattttcatcggtgaacaataaattctgcaagatatcaatgcttacattagtttctcactaggcatgtcttgggaattgctggtactatttatgtaacactttgtatattgatagttgattcatgtgcagagaggtctcatggggaggcgcgagggcaggacatcaatacactgctgctctctgcttgatg

SEQ ID NO: 13538 - DNA, 502 bp, Homo sapiens
  MAP TO AC007064.27; EXPRESSED IN BRAIN, SIGNAL = 2.2; EXPRESSED IN LUNG, SIGNAL = 1.8
ttgtgctgagggatgtgttcgtggaactgcagcaggttttcggtggtgaagcaacacaaggcacacttgtgaaccttaaaaacattgattttcagctttttcagtggttgagttattgctcctctgggaggcctgtactccagaaccggttctttcaacttccacttgggactgcggaccttggcgtctacttttatttctgtttcctcctcattggtggtgtctgtcatttctttcaggtcaaggtctttgatgccatgcatcagctggacatgcttctccagcatcaaccctttggtaaaagtacctctggagtctgggcagtgtgagcaggcatacactttcctgatgcctttgtgcttgatccggttgtgccagcacagtctgtgggatgagctgaaaggcttgtcacactggcggcaggggtgtttcttcatttgcttcccatgctccttcctcaggtgggatatgtacacatctctctgcatgaacaggtggtcac

SEQ ID NO: 13539 - DNA, 572 bp, Homo sapiens
  MAP TO AL158148.1; EXPRESSED IN BRAIN, SIGNAL = 1.4; EXPRESSED IN PLACENTA, SIGNAL = 1.3; EXPRESSED IN FETAL LIVER, SIGNAL = 1.7; EXPRESSED IN BONE MARROW, SIGNAL = 1.5
caatgtttgcggattacacgttgaaaggattgcataaagaatgccagatttcttgagcatgaatggcatgtatagctatgaaacaggggcttttctttggagcaagggagacttgtaataaagccttttcatgcttattcttaggatcctagttcagtttctgggaaaacaccagtcatactctattactaaagcatagctaggtcatttggaaactgtaaacagtaatacattgcttaatatgaaataatggttcatttcctccactggcctcctagaggcttagaaaactcttatacagaatatggttctcctactaactagcttcttatcttgtttttcacagttatacactgaagtgtcaaacacagtcagattttgggaaagtgacaatgcaatttgaattagaagtgtgccagcttcaaaaacccgatgtggtgggtatcaggaggcagcggcttaagggcgatgcctgggtttacaaaagattagtggaagacatcctatctagctgcaaggtataattgatggattcttccatcctgccggatgagtgtgggtgtgatacagcc

SEQ ID NO: 13540 - DNA, 576 bp, Homo sapiens
  MAP TO AC011298.2; EXPRESSED IN BRAIN, SIGNAL = 3.1
ttggtttccctgatcaaagccgcagagggcagcccagccccgcgactctccttccgggtccctttctggcctctgtctatatgcccgatagtcttcctcggctaattccagagcatgcctctgtgctacactggccatgtttctgtcatacaccacgcagccccgcagtgcacactggagcatcacatgctcctcctgcaggtggctgtgactcccaagcagctgtgctgccccccagtaggcaccaggccctgggccctctccagcttttgctctgcacacaaagccacatggacaccaccgtgcgggcctcatcctctgaggctgcctcacctcctgcaggaggctcagcttctccagctcccactggtggtccagaatgagactgtcactccggggcctccagcctgccaggttctcctcgccccggacataggccacagatgtgtccaggactcgtcggcgccggcgctgcatccctgcatggggcacgtggacattccacccctacctgatgggtggctgctcctcccacccatcctagaggtccgcccatctgtgaagctgtctcccctc

SEQ ID NO: 13541 - DNA, 567 bp, Homo sapiens
  MAP TO AL133387.8; EXPRESSED IN ADULT LIVER, SIGNAL = 2.3; EXPRESSED IN BRAIN, SIGNAL = 1.5
acaggaaaaagggatctgggggtgtccttacaatactgagctggtggagatgctgcagggcctaatttcattattatggtgatggtggaagttgttgttgtagtgagattgatagtgacagagattgcagtaattatggtaatagcaggaatggggtgatgagtggtcatagtgttgccatggttaatggttgttgccaaggggataaaaggagtaaggatgataactattgttatggggaaggacatggtgatattgaagctagagtaacagaaacaatcattttaggggtgatggcagtatcagtgaatgatagtgacaataattatggtcacaagtgaagaggtgattgtgatggttgtggagaagttgacttgttatccagatgagggagtgataaggtgataaatattacattggtaaatatggactcttcatgtggtatcattgttctttctttaagccacataatatatgagataagcctgatcctttagaggagctcaggaggcatatgtcatgaccctgggtctccctgaacataacacctctgtgatcagacctgca

SEQ ID NO: 13542 - DNA, 502 bp, Homo sapiens
  MAP TO AL158052.2; EXPRESSED IN BRAIN, SIGNAL = 1.7
gacaggctggagaggtgaagaaagagaatgagaaagattaaacacacagagaagcagacacagggtggaaggtccttccaaggcccacggcgaggggtgcagggttccaccccagtccctggtggtcgcagatgccctcacccctggccctggctgacctggaggacccgcttggtgaggcccgtcttttgcgcgagctgcttcaagtccttggcgtcggggttgtggttaatggcaaagtaagacttcatggtccgaagctggtggtgcttgaaggacgtgcgcatgcgcttggtcttctggctgctcgggtatggctggtcacggtccaggtgctctgcgtcgttttcgttgcagcttagcgctagggaggagacacagagccggtgggtgaacttcctgacccgccccccatgccaaatccacactcgccccacccactgccaaacatttcaatccttaaccctgctgcatgtctgcgccacaatgaaagggggacatc

SEQ ID NO: 13543 - DNA, 512 bp, Homo sapiens
  MAP TO AC018506.3; EXPRESSED IN BRAIN, SIGNAL = 2.5; EXPRESSED IN PLACENTA, SIGNAL = 1.5; EXPRESSED IN BONE MARROW, SIGNAL = 3.2; EXPRESSED IN LUNG, SIGNAL = 5.3
cattcttgaaaagttcgccgatataacatgaaacacttacttttttcctctgtggtgggttctggggggcagatgggactccttcacaggccctttcaccaccaggtgacaaggatccacgagagaggtctttcattaagccatgttcatatctgctggaaaatccttctgcaggggaacaatatcccccatccaaatgtaaaggcttcctatcccccactagaggagatcctcgatacagtccatctgctcgaggcatagcattcaaaggggagtaggcatacatcaagttgaactctgtccgaaatgcctggtctgagtttctcacgagggtctgatgtccatctccacttctgcttgggaaaccagtctcagaagtgggtccgagggagggatgaggagccaggtcagaatgacctgagttgagtagggaaggtctatcagcacagctgttagtgttggagtcaaggtatcctacttttgccaaatccaggtcttttcggtgacaaagc

SEQ ID NO: 13544 - DNA, 501 bp, Homo sapiens
  MAP TO AC012576.3; EXPRESSED IN ADULT LIVER, SIGNAL = 1.5; EXPRESSED IN PLACENTA, SIGNAL = 1.4; EXPRESSED IN BRAIN, SIGNAL = 1.4
tctgcgtgacaggatagcactgagttcaatgccaagtccctaagtcactgtgttctccctctcccaagtgcacagattctctctccaagccatgtggccactgccaggagatgggggagaggtgacataggcagttcaagactgtctttgctacactcttcaatgtctctttcagtgatgtggcattaaaccagttactatgattgctcacctgatttttggttgctatgatggtacttttttgtgtgtacatagttcttaaattttggtgttcctgcagggggaattattggttgaggcttctgtttggccatcttgctccacatctctatgagtatgttctctaaatgaaatttaatttatataaaaaagtaatatttgtaaagcacagtaaaatgaggtatgcccatttttttcctttttattgttaagtagtatttcattatggttatactaaaatttgttcatttatttattcctgaacatttgggttgtttccag

SEQ ID NO: 13545 - DNA, 536 bp, Homo sapiens; identical to SEQ ID NO: 7911
  MAP TO AC022011.2; EXPRESSED IN BRAIN, SIGNAL = 1.7; EXPRESSED IN HELA, SIGNAL = 1.7; EXPRESSED IN BONE MARROW, SIGNAL = 1.5; EXPRESSED IN ADULT LIVER, SIGNAL = 1.9

SEQ ID NO: 13546 - DNA, 534 bp, Homo sapiens
  MAP TO AC011449.3; EXPRESSED IN BRAIN, SIGNAL = 1.6
aggttgacgttttcaccagcgaaagggcaggataatgactgatggagccatcacaccctgagaatctaaaatcaggtctccaacttgtatactttgtgatacacttgcctggagtgtgtgacaagctgagctggctgcagaggcagcttccgcatttaaattcctcgaagagattttataaaccaagtcagagaatgacatagattggattgatggttgcttctggagagcagctgagtgtccatgaggacaggactaccacgaaggtgtaggaatcggtactcaccaactggatgacgaggcaggatgcttccatctggctggccactggaagcagcaccattccaaggtccagcacagtaaacttctgtagggctgggaagtattgttcactcatccgggttttttcaacgactacaattcctttaagattattggacttgaaaggaaaaaagacagtaagtcattttgcaaccaaattgcttttcaggttaagaatgctatcacttcgtgcctgacctggccaatgatttt

SEQ ID NO: 13547 - DNA, 572 bp, Homo sapiens
  MAP TO AC011505.2; EXPRESSED IN BRAIN, SIGNAL = 1.4; EXPRESSED IN PLACENTA, SIGNAL = 1.7; EXPRESSED IN BONE MARROW, SIGNAL = 1.6; EXPRESSED IN ADULT LIVER, SIGNAL = 1.7
tcactaagaacaaacggggctgagagggcaaggaggtcaggcagtccaattgcaaacaggcaccagcgagcaggtggctaggtaccaatgtgcagagtcacagttttctcgagggtgtcagaggttcaaatccagcttccttccaggcagggacggccaatgagaagtcagctgaagtcagggacagaactttcgggaaagttctgtcaaagaggagaggggttgattggaggacaggctcctttctctacacccatcactgccagactcaccccccttctcccttgcatcacacagattcatcggagaatcaggaacctgagggtcttgcccaagacaagcagagctgccaggaggagggagacaggatcctccagccagtggagctgcatacagctctggctgctcacagctttcattacctgggaaaaaatacgatgttttcattcttttgtgtgtttttctgttattttgtttatttaagccactaatttccacgtcttaactattcagggctgatagattcctaattgacagaggacccacgtctgcctgctgtgttagtccgctca

SEQ ID NO: 13548 - DNA, 578 bp, Homo sapiens
  MAP TO AC007868.2; EXPRESSED IN BRAIN, SIGNAL = 2.3; EXPRESSED IN LUNG, SIGNAL = 6.7
gttgtcgctctaggggtcaggtgttctcagggtcttctcagcagatacacatgcagcacagggaaggctgcccgtctgggggagcctgggtgtgagggccagagctcttcaatttctcagggttcagttcatcttctcctaagcaggatctcattgctgtccgctcactccttccctccccaggtggtgtttccctacacaagcaagagctgcatgcgggccgtgctggaatacctctacaccggcatgttcacctccagccccgacctggatgacatgaagctcatcattctagccaaccgcctctgcctgccacacctggttgccctcacaggtaactaagcagtgcactcggggacctccccgcggcagaggccagggaaaccccaaggtgcaatgttctcctctcacgtctctcctgggggacaagctgatgtccaagggactaagcgtacatgaaatggaatctgttgacgggcacagagttctggatgaggacacagagtgaagaagggtggtgcggggcatgtttgatggggtcacctgagaggctctctccaaaggcgatttaaacccaa

SEQ ID NO: 13549 - DNA, 600 bp, Homo sapiens
  MAP TO AC009178.4; EXPRESSED IN BRAIN, SIGNAL = 1.3
tatatagcgcattgggggagggagtgatgaaagccaaacttgaaaataaaagtttaatattttgggctcattgggcacaattatagtgttactatctttgttttcaactgaatcataattgtgtgtgcagattttgaaaaaaccaggatggcatacggcacagagtagtatggaaaagagaaaattctttgttggaagagagggttttttttccctccagttgaagagcattttaaatgcacaaaatctgtctcagaaatatccctttgaaagatctttgcatacacaagatttaaaatgctttcattctgtgggtgactagaatgaaatgggagcctacattcccaagaatctctgatatgaccatataaaaaccatgaccaactggtttgtttttaactcttaccatgtacgagcccatttgaagggcatgggcaatacttcgtttctgaaccaagtcaagttgactgctggcatttaactcaccaccttgtgtttgctgttgcctgatgccagtaagaaatacatcgaaagctgtaatataatgataaccattatttgccctcagttaaaaatctagctaatgggtctgatgtgccc

SEQ ID NO: 13550 - DNA, 533 bp, Homo sapiens
  MAP TO AC018719.2; EXPRESSED IN BRAIN, SIGNAL = 1.6; EXPRESSED IN PLACENTA, SIGNAL = 1.6; EXPRESSED IN ADULT LIVER, SIGNAL = 1.4; EXPRESSED IN FETAL LIVER, SIGNAL = 2.3
tggagacataggcacacacactaatgtgtgctaatgcctaggcctacacagggtcaggctcatccatgtcactgtcttccacctccaattcttgtcccactggaagatcttcagggtcaataacacgcatggagctgtcgactcttgtgataacaataccttcttctggatacctcctcaatcacttgcctgaggctgttttacagctaacttttttttttcaataagtagaaagagtacactctaacataacaataaaatcattttatagtatagtaaatccgcaaaccagtaacatagtcatttattatcattatcaagttttaggtacggtacataattgtatgtgctggatttttatacaagtggcagcgcagtaggtgtgtttacagcagcatcgccacaggcatgtgagtaatgcattgtgctatggcatcacgatggctactgcgtcactaggacaataataatttttcagctttattataatcttatgggaccgctgtcatatatgcagtctggcattgactgaa

SEQ ID NO: 13551 - DNA, 565 bp, Homo sapiens
  MAP TO AC024019.2; EXPRESSED IN BRAIN, SIGNAL = 1.5
gtccctggcatggtttactgaattataattgacaaaagaaacagtaaaaatagattaatgctaacctgagtgatcaatttccccctgaagtaccatgcgggattactctgcacatttacttcatttctaaggctttcttctgacactctcaaatcctctactgtaggcactggaattccttgtactacactggggtgatggcaccatgtttcaaagttattcagaacctgattggccgtgttcctgcaatacattttcctaacctcaagataaagatccatgcatctctttaccctttaaacaaaaaagctattgtaatagcatgtagtctcaggcatggtctgaatacaaaaacctgcacatgcactgctaaactgtttaagtatggaagaagtagtgtctaatagcatcaggaaattgaaatttaaaaatttttctcactcacttatttgatgagaactgggtatgctgacaggtgaagcagaaagccatttttcaagttaaatgccaagtggttatatagcataatattcagtcaaaattaaccacctaactgctgcactga

SEQ ID NO: 13552 - DNA, 564 bp, Homo sapiens
  MAP TO AH009158.1; EXPRESSED IN BRAIN, SIGNAL = 1.6
ccctgaagcctgttcttctgcttcctgagctctgctttaggtttcccctaacccctcttcttccccttgcccttcagatgctcaacctgtttgtggccgtcatcatggacaactttgagtacctgactcgggactcctccatcctggggcctcaccacttggacgagtttgtccgcgtctgggcagaatatgaccgagcagcatggtgcgtaggcccctcggccgccccagcggggcccagagcaaaggtctctggagttcccagggaagaggctggaattggagccacccaaatgcctgcctgttacagaaggaaaggagattcctcttgattgtggcccatagaagaggctctggtatcaagccagtcaccaaggacttctgtatcctcctttcccctctctttccttctgtgacaggattttccctttgtgggctggtctcatcatccagtcctcacctcagattatttgggctcagtcccaagagaactttccaataatctttttctgccaatggttagtggactcctttgagttatcagggggtttgacaagggttttt

SEQ ID NO: 13553 - DNA, 600 bp, Homo sapiens
  MAP TO AL138831.2; EXPRESSED IN PLACENTA, SIGNAL = 2.9; EXPRESSED IN BRAIN, SIGNAL = 1.3; EXPRESSED IN LUNG, SIGNAL =   2
cgcaaagttttggctgtctcacttttggtgtagctttggaggaagagggtcgttcagtaactgctggagtacagaaagtcgtttgtagtcttggcctctctttttgaatagtcatatgttgtaatcgttctagttccagtaaacgagttatcaagtgttcaacagaggtttctgcagggtccactgtcactttccaattgtcagatttggagagggctaaattgtgcaagtctagagcactgaaaggaggagggagaaaatcaggatatggaaatacttcatttggctcctcggtgaaaggttcctcaacattttttattgtttctggcttcaagttcaggtccacctttttaaaatagctgagtaaagtatcatttgtcttctcattttctgataaatcactttcatctgtgaaattttcttccacactgctgtttccatgtttcaaattccaatttggagcaggtaatgtttcaccatcattgttttctatagttgaacatgaactaacatgaatctcatttctgttcttaaaaaagtctccatcagcatagggccagcagagacctaatggcattggcagtccagggtaaggaccaa

SEQ ID NO: 13554 - DNA, 588 bp, Homo sapiens; identical to SEQ ID NO: 13367
  MAP TO AC000026.3; EXPRESSED IN BRAIN, SIGNAL = 1.3

SEQ ID NO: 13555 - DNA, 502 bp, Homo sapiens
  MAP TO AL049829.3; EXPRESSED IN BRAIN, SIGNAL = 1.8
cctcctgcttcactttcaggtttctcgaagtgccttcttgctcctgtctgtttccccatcctgccagatttctgtttctcttgctgggcttttggcagtagggggctgtgttggtgggccctacgaagatgctcagtgctcgagatcgccgggaccggcaccctgaggagggggtagttgcagagctccagggcttcgcggtggacaaggccttcctcacctcccacaagggcatcctgctggaaaccgagctggtaacagctgcctcccaacctggtgcctccatctccctgacccccggctcctggccagccttatgccagcccccagctcacccttcagtagcctccttccccaagccctctggacacctctcctgcccgcagctgccccttcttcgtctcctactctgccttcttgctgcctctccacccggagacatttacagcaggtttcagttgcagcaggaaggactgcagttagacagggtgactttttggga

SEQ ID NO: 13556 - DNA, 524 bp, Homo sapiens
  MAP TO AC007342.2; EXPRESSED IN BRAIN, SIGNAL = 1.9; EXPRESSED IN PLACENTA, SIGNAL = 1.7
ttggtcttgcttcaggtttgtcttctctttatatgacctgcctgcccaaaggactttctagtcatcttggtcatggtgttagaatgtgcttgtaaaggagtaattccagcatttaggccatggagctaataatgtactcttgtgatttaagaatcatcctaacagatattcttacaacttcatcttgtatagcgatctgaaggtgaagagaagacattaacaggggacgtgaaaaccagtcctccacgaactgcaccaaagaaacagctgccttctattcccaaaaatgctttgcccataactaagcctacatctcctgccccagcagcacagtcaacaaatggcacgcatgcgtcctatggacccttctacctggaatactctcttcttgcagaattgtaagtccttaacaaactatttggttaaattaggaatgatcctttaaagtgaagaatgaaatttattctgatggatgcagtaaagggcagacatttaatctcaaagctcaaacctgtccctttcca

SEQ ID NO: 13557 - DNA, 520 bp, Homo sapiens
  MAP TO AC009363.4; EXPRESSED IN BRAIN, SIGNAL = 1.5; EXPRESSED IN ADULT LIVER, SIGNAL = 1.4
gcctctgttttcccctaagctgccttctgtgaccccttatcttgtttcctgtggtgttaatgtcatcgttgtattcccatcaaccaacaatcttttagcagccttaagaagggctgtcaagtcttctgtcaatcctaccatcttactttgatgtttccaggtccaccggcaacatggactcagagttgggaaactgagtcctctcctgggtgaggctcatctggctgaacaactatgaagccatttaagtctgttttccttctactgtgcccaaaaggcacaaggcaacctggcctgaggttggagcatggagatctagaggaactcatggatggattcaggcgggatgtgaaagtgctgggagtgagggcctgggcctcctctgggtttagccacccttccaggttgtgtacaacctgccatatgctggggctcattgactgtgctctgctctgtggctacaggatccccttttactgagcgtagtgcatgtgtatgctctgacaaactcctccgtggt

SEQ ID NO: 13558 - DNA, 557 bp, Homo sapiens
  MAP TO AC005137.1; EXPRESSED IN BRAIN, SIGNAL =   2
gcaattctgagtccgtctcccaccctggctggggaccccctgagggcacggtggcatctggcttggctgtgtactcacaggtcccggcgccatcccatgcccccagggattggacaggcagtcggatggatggacccgagtgggagggcattctccagcaaccgtcagcccactccaagtggtcacctgtttgctttccgggagggccccgtctaaccactgtatcatccccaaacctgggtgtggctagtctccactcaccatgccgctcagcagctccccgctcatacacagcagaaacgaccaccttcccaatgggggagtccacaccgccttccagggccaggtctaaggatccctcctggttagaggaaaacaggccttagggagccaagcagacagcagcctgtggacacctgggcaccaaggagtctcttgacagagccacagtaagagtggaagaagccatggggtcaccggcagtgccatctggagaaaacgcagccttggtgccaagtggggcctgggtatgcggccctacaacagaggggcgtctc

SEQ ID NO: 13559 - DNA, 597 bp, Homo sapiens
  MAP TO AL137160.2; EXPRESSED IN BRAIN, SIGNAL = 1.4
actgaatccagttcatgggcttatttcccatttccgggacagttcccttgcttgaccctccacgacaataaaataaatactgaatctagttcatgggcttatttcccatttcccagacagttcccttgcttgaccctccacgacaataaaataaatactgaatccagttcatgggcttatttcccatttcccggacagttcccttgcttgaccctccacgacaataaaataaatactgaatccaattcatgggcttattttccatgtctgggacagttcccttgcttgatcctccacgacaataaaataaaaagaggtaatcttaattaagagtgcctccgttccaaaaaaaaaaaaagagagaacctctgttccaagatgctctgcctgtggtccttacctttcttttctccagtgaagggcacaaagtcctctctgtctttctgttccaaagcctccttctccaggtacatgaggaggtgctcgcggtcaaaggggccggtggctgccttctgtgtctggtctttctgtcgaaatccagctggcagcatggcactctgacaagaaagaggtgtgagcaggaaggaagatgtctgc

SEQ ID NO: 13560 - DNA, 599 bp, Homo sapiens
  MAP TO AC021863.3; EXPRESSED IN BRAIN, SIGNAL =  23
cagagggtggagacaaggagcagtgacaactgtgttcaacagtgtgaagagctgttctaagagattcgattagttttgtatggcccttaaggataggacccatgggtgaaagtgttgaggagggagagtttgagtctgaatggaaataagaaccttcaaactactattaactgaagctttgagtgctaatgactttttcatcacaggaggtgaccaagcaagagttgaacagatacttgtcctggatgttaaagtggaaattcaagcaacacaacagaaggtgaataaatttaaggtcctttatgatctttatattccatgagattctgaaagaaggaatccttgtgcttctcatgtcagttctagggacaactctttctccgtcttctataaaactcatttaattttaataatgtatgtgttattaatcatataatttgttttatctcctaacatttttgctgttatttatattttatgacctaacatttatgctatgccctaacatttttgaagtgtttgattcacttctgtttatcttattttataaataagaaatttgagaacatttgagttaaacaacaatcaaggcagggttt

SEQ ID NO: 13561 - DNA, 506 bp, Homo sapiens
  MAP TO AC012404.4; EXPRESSED IN BRAIN, SIGNAL = 1.8; EXPRESSED IN FETAL LIVER, SIGNAL = 1.6; EXPRESSED IN ADULT LIVER, SIGNAL = 1.6; EXPRESSED IN PLACENTA, SIGNAL = 1.4
ggacttgactttggtgaggcttagcagctctaaaatcacagaaatgctctggaaataaagaggggagctggatacacacagccacttttgaactgttgagaagatggggctatgattcctgcaagaagtaatccgaatggatgacagttggagttgcagccacaataaatatttctagcccaaatctcgtggaaaactggcttatgcccccagatgcctggtgtggtgttgacgtggggaagatactccctgtgttgaggcagcaggaaggtgaaaagaatgaaacaagtgttttttcacacacagattctgtatttcacaattacgcagtttattctttggggtttgctaggggaacctacagagagaagcaggatgccttcttctcagtaggagctttggagggtgtgatggagccacaggagaggggtaggtggtgcagggtgaagggtgctttgggtaaagctgccgatctgtctttgaaaaggttctctgctgtgctgtca

SEQ ID NO: 13562 - DNA, 544 bp, Homo sapiens
  MAP TO AC008557.3; EXPRESSED IN BRAIN, SIGNAL = 1.6; EXPRESSED IN PLACENTA, SIGNAL = 2.6; EXPRESSED IN LUNG, SIGNAL =  44
aaaggggatgggcattttacattttgaaaaaacaacctgttcttcaaaaaaggttcatcccaccatcagaaaaatgccctttttttccatgccctgggtattagtaatgatttacatttttccaaaggtcaattttaggagatattgtccaaattattattttggtaaccattaagttttacttaaaatttgtgtttaataatgctaacaagttaatggttctgtttattacgttttttaatttgattaatttaaaagaatttttataacaagttaatatattctgttttctaggttctcaaattatttctggcattgttaacttagagaagcctgtgatttgctctttggctgccatcataaaatacctcaaagaattcaacttggaaaagatgctctccaaacctgagtaagtgattcctccaaaattaaaaaaagggggagcttatattatgaacatttcttaaattgaatttggtagtactatacttagagaagcttgcctgctattgatagaatactagggtgcaaggatgagctgttt

SEQ ID NO: 13563 - DNA, 524 bp, Homo sapiens
  MAP TO AC004254.1; EXPRESSED IN ADULT LIVER, SIGNAL = 1.5; EXPRESSED IN BRAIN, SIGNAL = 1.3
tcatgagcagtgagacctggcaaaggcaggaaggccccaaccatccaggcaggcccttgacttgcccacaccctgctccagagaggcagaaggcagggctcccaaccgtcttctatccctgatagcctcaaagacctgaagaatccctgatccagctgccttgtagacatttaagcctccaaaaggccagacctggtcccacagattccaagccctgccagcaaagcagcccttctcatactcacatgacttttaagtcccagtctccacaggtgacaaaaattgacttgacgtttggatctaagaggccttccttcgccatccattcatcgaccctctgaaaagtacacaagaacaaatgagattttccttttttttccctgagcctgtgaagagccacaacagcaaaacacagataagctgcttgtaatcagaacaggagaaaattgtaatcttatccagccatggctccactgtgggctctcaggcttggctcagaaccacggaggcatttggaagacaaa

SEQ ID NO: 13564 - DNA, 553 bp, Homo sapiens
  MAP TO AC008015.5; EXPRESSED IN BRAIN, SIGNAL = 3.1
cactgcactagcctgaggtgcctttgaggaccaggcagataaagtaaatctgtgaaatggggttttatttcagaatggtaccttcaatcatattcttgagatacatacacaaattatttgcatgttcgcatttctataaagaaatatactctgccagttttcctaaaacacgctccccactttgtctttttgcctcctcatatttgatagctgcaagacatactttgccagcctcctcactcctattggaaaaccagcagtgcagatcatgtaattcaggactagttctggacccccagtgtttgggagcaatgcggggtcgggggagctcaggttcatccactgcacgtccagtattgccaggctaaaaagttaaactaaaaagttaagagtccagaaatttggatttttatacaaaatctccccattttggcaatgaatttacattaaaacagaacaaaacaaaaaatagacagcagtatggtttagaccaaactcatctgcaggctaggtaaggctgggaagtggccagtgttcggtctgtgacccagat

SEQ ID NO: 13565 - DNA, 599 bp, Homo sapiens
  MAP TO AC020596.2; EXPRESSED IN BRAIN, SIGNAL = 2.7
agtaattgcaggcccatgaccaaccttaaagccaaagtgtaggtccctggctgccgctggctctcccggatgaggtagctcccctcagccacaatcaagagctggtcggctgcttctctggagatcatgccatgaaacctaagaaacaaagtctattcagaaactgtgctttctacatttttcaataaaacaagataaaacaacgtcccaccaccaccaccttctcttgttgttttcaagacaaagtactgccacataatggaagggaagcacttgggtttaactatgcttgtgtttctctggacctggcccccagccagcttctctgtggtgataagaacagcaccaaagtactacccaatccagttaacaaccatggaatcaaaattcacatccatctaagggaagatcaaccacctctctcaagaggacaattcctttcttacgtatccatttaaccatatggcttgctaaagaaaagaaaaaaaaaaaaacgcagaaaatgtatcctattttcctttcttcccattagtagcactgctccaaaattttggctgagtctatgttggcaattttccaggaccctgggttgtccttaa

SEQ ID NO: 13566 - DNA, 521 bp, Homo sapiens
  MAP TO AL049873.2; EXPRESSED IN BRAIN, SIGNAL = 1.5; EXPRESSED IN BONE MARROW, SIGNAL = 1.5
ggttgagttgcttttgcctctgggcattcctgtgttcaactggggcttttgccaaaaaagccagaacgcccttaatctcctctttcctcatgaaactcacagctttggttcgtcacagatcttgcagatcttggcggtgctctcctactccccagttttgtctcagcaccatatggcttttgacaaagtcaggccacagcttcaacctaaacagcttaacattatcgaaagcccagcccactgaggaaataacagttctcgtttatttctgtaagtcatctggctgggagtgggaagagggtagggaagtcagtgtggtgagggatggggaacatgtgaaagatgcaaggaaaataggtggatgtgggagtggggagggggcagttctaacagataagatgtagtggattctgagcaatattttccaagtccaagaaaaatacattgctcatattcattttttccccctaaggataatgaactttcacctggatttaaaaaggaggagccaaagtctggtt

SEQ ID NO: 13567 - DNA, 508 bp, Homo sapiens
  MAP TO AC004417.1; EXPRESSED IN BRAIN, SIGNAL = 2.4
gtctctgtgagcgttaggggaaaaaaaatcacatcaagtgcttagccctgtgcctgggatacactaagtattcaaaaaacgttagctgctattgttatcattccacactgtgcttatttctaacgtggttgtaatccctcattctctcacgggcaggtttggaaaccagaccttaaactacaggctcttccacgacgggaaacactttgtgggtgagaagaggtttgagtcgattcatgatctggtgacagatggcttgataacactgtacatagaaacaaaagctgccgagtacatttcaaaaatgacaactaaccccatctatgaacacattggatatgccaccctactcagagaaaaagtatccagaaggctgagcaggtctaaaaatgaaccaagaaaaacaaacgtcacacatgaagaacacacagcggtggaaaaggtgagctgtgtgtgatggaagcagcctttcgttttaatccatgccgcatcaacaggcgggttaact

SEQ ID NO: 13568 - DNA, 580 bp, Homo sapiens
  MAP TO AC010386.5; EXPRESSED IN BRAIN, SIGNAL = 5.5
cacctttaatcctcgttgtgctttttatttttaagtttaaaaccaactatgagaagagaagctttaaagtgcccatccaggccaacgaaacgcttgtgggtgctgtgataaacaatgtgtctgaggccatggagactcttacccgaatcacagaggagctggtcccagttccaggatctgtgaatggagtcaatgccctgggtctagttgtcttctccatgtgcttcggttttgtgattggaaacatgaaggaacaggggcaggccctgagagagttctttgattctcttaacgaagccatcatgagactggtagcagtaataatgtggtatgtatttccattttctatatatgttatatacgagatggttattgccatcaacatgtgttctgtactgaggaaggtgccacgaggcaggatggccaattgcagttatctcactctggtaagcccaggaaaatcaatgaatctctgggcctctagaggccttgaacctatctgcaagcctcttctaataagtttgcttccttgttttcaaaagctgtcacctccttttaccccagtgctgatggaatctca

SEQ ID NO: 13569 - DNA, 551 bp, Homo sapiens
  MAP TO AC002124.1; EXPRESSED IN BRAIN, SIGNAL = 1.4
aaggaaagctggaagagcaacattttcagtatttagaatagacttatgccagactacctgggtacagagcctggcttcatctccttttacctctgtaaccttgggcaagatacttaccctgtctgtctgttttggtttcctcattgatctaatcaaattataaataggcataggctttccagatgtttttatggttaaacaagttgatattgataaaacatttagaatagtactggaacataaaaaagactatataaatgttaattgttatgagaaatatccttttcatgatgatcattaccaccaccatcaccaccatccacttctgctgcacagagatgcaatccaatgtttccattcttctaaagtataattattttgaaataagtggtattattttaaaaatagtgaagctctgtaataagcttcactgtttagaatatgaaataaatggtaacatacatgtgaataatgtgcatttgtattatggaatatataacctaactcagaaccttcaattcgaagacttagccaccttttctttccagctg

SEQ ID NO: 13570 - DNA, 587 bp, Homo sapiens
  MAP TO AC023066.2; EXPRESSED IN BRAIN, SIGNAL = 1.8
tcctccgatgacataaagcccagatctgaagactatgatgctggagggtctcaggatgatgatgggtcaaatgacagaggtatctctaaatgtggcactatgctgtgccatgattttcttggaagaagtagcagtgataccagtactcctgaagaattaaaaatttatgatagtaatttaagaattgaagtaaaaatgaaaaagcaaagtagtaatgatcttttccaagttaattcaacgagtgatgatgaaatccctaggaaaaggccagaaatttggtctcgatctgcaatagttcactctagggaaagagaaaatattccacgaggcagtgtccagtttgctcaggaaatagatcaggtatcttcttcagcagatgaaacagaagatgaaagatctgaagctgaaaacgttgcagaaaatttctctatatctaacccagctcctcagcagtttcagggaataattaatttagcttttgaagatgcaactgaaaatgaatgtcgtgaattttctgcaaataaaaagtttaaaaggtcagttttactttcagtcgatgaatgtgaagagctgggatcagatgaagg

SEQ ID NO: 13571 - DNA, 570 bp, Homo sapiens
  MAP TO AC010227.5; EXPRESSED IN BRAIN, SIGNAL = 1.3
gctgatgaaaaggctgaaggatatttgaacaaacctttgatattcttagcccctgcaggcatctcaacactgtaaatggagcccccagtctccctccccccagcacctgcttgaactcttcattcacctataccttacctcctggggttgctctcactcattccagggaccccagccaccgtttttctgcaaacaactctgccctcttccaagatgttgttactgatggagatctgatgttggaagttgtagcctttgtactgctgacattggttgaaactttgcctctgaaacttacactctattcgacccaaatcttgactctaaaaagccacatcattccccattgcttccaggtctgattttttttttttttttttcagtctgagtctactcatcttagtggagtttgggtctttaaatatttcttttattcattctccttgttgatatcattcttgaattccctaaacatgatagcagccagcttctaatgaattccacttattctacttttcatatacacaccaagaagagccaggtgtctgctcactggggaggcaaatagaa

SEQ ID NO: 13572 - DNA, 510 bp, Homo sapiens
  MAP TO AL049776.3; EXPRESSED IN BRAIN, SIGNAL = 2.8
tatagcagggctgggatttgaacctctgtagtctgaccctacagcagtggttctcaaccttggctgcacattagaatcacctagggccttaaacaaaaataacaaacaacactatgtttggggtacatgacccatgcaaactcagcggctgcttctggtgggaactgctgcttcagagcctatgtagtaccactctgtagtacggactccattaggcaccaagaaatcctgcatgatttaagtagcacaaatgagaaatggttaacatctaaagcaactttttgctttgttcttacctgtaattcttcattatctaacagttctctgctttttctttgtagaaagacagctcttgattcctctcttaatttctgtagtaagacttcatcttcagcaggcagctgaaaatacaaggtaaatttctacatgtaaattttagactactggatcctataaaatgtatgtggcctcataaaataactgtatgccaccgcctcgaattatttcttg

SEQ ID NO: 13573 - DNA, 518 bp, Homo sapiens
  MAP TO AC020897.3; EXPRESSED IN BRAIN, SIGNAL = 1.3
gcagcagagggaacagtagggcgtgtgtgtagggtacaagactccagggaatgaggtgaacagggccatagaggcctgcactgcccaggaaatgccttacccagggctggaccatgtgggaaatgtggcaactttgttccctggcacactctgtcttgcatattcaggaggccaggttggacagtggcatcaatcctaaggagtgtccttacctagagagagcaaatcaatccatgcaggtcttgggacacctgtgacgcatgccccaggtgcaaatggcggggcagtagtgtcttatcgagttgtctcacctggagggttcagcactgggcctggcagcagatacaccgagcactgtttgctgagtacgttggttcctttctttctgcccatgctccgcacagaggcccacgcagaagggccactggctgcaagctccttccacagcgtcgcagtcatcctggttgtaactgcctggggctgcccaaagggaatgagccccagcagtgagtttctgt

SEQ ID NO: 13574 - DNA, 559 bp, Homo sapiens
  MAP TO AL132655.5; EXPRESSED IN BRAIN, SIGNAL = 1.4
ctgctatctgcagaggggtctgcgtggccaggctgtttgaagcaaatgccagctaaaggaaaaaagcctcaaatggatgaggcaagataccaggttagaggcagatgcaaggctgatattagaggtagtggaaaaagtctttatgaaaatacttgatatgctcagattaaaaagcccccatcgtgagttcagaccccttcactcagctaattagctgtagctcagcaaccttctcaaaaggtgccccaaattctgtttcagccaaggcatgccactgtcctctgaccacctgtgcttgaacagtgggtccagacatttgtggattccttctccagactagctgatgatgcagcaaagaatttcaggggaggagaggccattccagaaaagatgaacagcaccatgggaaagcaactaagagagaggcaaaagtgggggttggaggggaaagagggaatctcggaaggtaaatttggctttagtggaagctctgcttaaaatttctgcaattcatagtgggaattccagccaccctgggggcttctgggcatcattgttt

SEQ ID NO: 13575 - DNA, 559 bp, Homo sapiens
  MAP TO AL135959.1; EXPRESSED IN HELA, SIGNAL = 1.9; EXPRESSED IN BRAIN, SIGNAL = 1.3
ctcccttggagtgcaatgacaaatgatgagcaggtaaagatcttgacattcttaattaaaagcttttatgtggagactaggtaaagctcagtttattgcctgtttaaagctactggggaaatgtggattgcttagtaaatctgaatttgagctttaacggtttttcagggaacaaatataaccttaagtgcttctgctatgtaaacacattataattgacataataaaggatcagaagttttagcaatgatcttattgtaattttttcatcacataggtggaatatattgagtatctgagtcggaaagtgagtactgagatgggtcttcgggagcaacttgatattattaagatcattgatccttctgctcaaatctcccctacagacagtgagtttattattgaacttaactgtctcacagatgaaaaactgaagcaggtatgtaaagaaaatacagattatttacctattaaaaataccaccatcttataaaatgtagactaaaataatcatgtgtaaatacatagataattaaggccaaaatcactgctgcgaaag

SEQ ID NO: 13576 - DNA, 598 bp, Homo sapiens
  MAP TO AC009680.5; EXPRESSED IN BONE MARROW, SIGNAL = 1.5; EXPRESSED IN BRAIN, SIGNAL = 1.5
ttccctgaatttgcatgtccatgtctacctctctggcaagattgggataattttcatgaactacatcctcaagtatgttttccaagttgcttactctctctcctttctcaggaatgccaatgagtcatagatttggtctctttataaaattccatatttattggaggttttgttctttaaacatttttttctttatttttgtctgactgatttgaatgaaagtagtcttcaagctctgacattctttcctcagcttggtctattctgttaatgcttctgattacattgtgaaattcttgtagtgagttctccaattccagaagttcaatttggtactttcttaaaatggctatttcatttttcagctcttggatcattttactggattccttggattccttggattgggtttcaactttttcttggatctcaatgagcttccttgccattcagattctgaattctataactataatgtggttaaaaacatttctgaggggctagtatgttactttagagataaggggactctgtttttttttaattgccagaattcctgtgttgattctttctcatctgagagggctggtgatccttt

SEQ ID NO: 13577 - DNA, 583 bp, Homo sapiens
  MAP TO AC012568.3; EXPRESSED IN BRAIN, SIGNAL = 1.7; EXPRESSED IN BONE MARROW, SIGNAL = 1.5; EXPRESSED IN LUNG, SIGNAL = 3.1
cggggaagttagtgttttcggggatggaatggctgtagtcgtccagtggggggaactcggccgggatctctgtgtggcgtggcaccaacacaggaggtagaactgtccgggggagacagagcagaggtggctcagtgtcgatgccagaccagcaccaaagtccccgcacccccaagtgcaccgcagaccctcggggggatggggagccggggagaggtgatgacccctggcacctgctgtccccacaggcaggccaggcagcatacctggtgtctctactctctggtagtggtagggattcacgcagacctcgtccttcttcatattgaaggcgaactcacacagctccatggcccgtagctcgtggtggctgtgcaggtctggccatcgccacaggcggcagtagatgacatgagggagccccttccgatgggacacctgcaaccggccatccagggacctgccaggacggggaggggcagaaagagagggaaatgtggattgtgcttgctttctgcagagtccggcctcctactttcagacacttggaaagctctctctcccctcatttctcccagatcca

SEQ ID NO: 13578 - DNA, 596 bp, Homo sapiens
  MAP TO AL138894.2; EXPRESSED IN LUNG, SIGNAL =   3; EXPRESSED IN BRAIN, SIGNAL = 1.9
cacagcccaccctctctatcacctctccagcgtgttccccaaaggtccaaatgtttctccatccttcacacacattacagcgtgattgctctcggagtaatgagaagccgaatttgggaagttgacttcctgggaaatggttcctatgttaaaaacaaaggaaaacaaaacccaccaaaaataaatcaacgtatgtaggaacaggagagggtgtttgcagtcataaaaaccatatgcaggaggaggcatgaagatgtggtctatacttttggtttcctgccattaactagctgtgggaccttgggcaagccttgatttcctttttcataaaataaagcagctgcatttcattctctttaaggaccgtttaatttagggtattccagagcacttgaaggaaacatcaccctgacatttctgaggggttttcttttcaatctatacctgacatgtaaatggtgatgccaataacacataataaatgtgcacaccaagagacttttacccatacatgtcagccttagcaataactacctccctggacatcaagcaagtctcaggtggcattcaaaagaagaacatcctgactgcacgaa

SEQ ID NO: 13579 - DNA, 526 bp, Homo sapiens
  MAP TO AC010322.4; EXPRESSED IN BRAIN, SIGNAL = 1.4; EXPRESSED IN BONE MARROW, SIGNAL = 3.1; EXPRESSED IN LUNG, SIGNAL = 4.1
gtcttcatccttgctcctgccacaggcatggatcgcaatggggtgcccccctctgccagagggggccccctgcccctggagatcatgtctggagggggcacccacaggcctccccggggccctccgtccacatccctgggagccagcagacgaccccgggcacgtccgccctcagagcacaacacagaattcctcaacgtgcctgaccagggcatggccgggtaggtggggtgggagggcagctccaggaggtgggcagggggtaggggagtgtctggggctgtgactcaaaccccctgtgcccacagcatgcagaggaagcgcagcgtggggcaacggccagtgcctggtgtgggccgacccaagccccagcctcggacacatggtcccaggtgccgggccctataccagtacgtgggccaagatgtggacgagctgagcttcaacgtgaacgaggtcattgagatcctcatggaaggtgtgtgtaccagggcagaagctggggtgaggggagtggtaagaaccc

SEQ ID NO: 13580 - DNA, 559 bp, Homo sapiens
  MAP TO AC000085.5; EXPRESSED IN BRAIN, SIGNAL = 1.3
ctattgaggagcacttcgccatgagcttagtgacacttgttcaatatttaaggtaacaaagcagttaaaatgaggtaagattcctttctaacaatcccatcgggtttacctttcagagctatcaccttagaggctggattcatgatggcactctctgcagagataggccgtcggatcggagccattgggtcactcatgtcaatgatcgtgacctgtgcctgctcaccaactttctctcggatacatatgaacttgtcagattccatggtcagtgtgctgaatccaatgttagctggattaattccaaggttttggagctaaacagaaaaaaagcatttgattaaatttttttcctctgaaatggactgactgtagccaaaggcaaaagaggagaagttaaataaaatttagaaaaaagttaacattaggtaaacacttgaaggaaacattagcttgcttttctacgcctgtaatagatccacccaagcctgtgaatcaactctcaaggggattaccagcccacagtggagataagacatgtgcaggatgacactaggca

SEQ ID NO: 13581 - DNA, 587 bp, Homo sapiens
  MAP TO AC008723.3; EXPRESSED IN BRAIN, SIGNAL = 2.3
aattggttctaagtggggtccatagtgttgacaggctatagtttaggtatgagtggattgtgttaagtccatcacagctgagaaataaacctcaaatatacattttcaaaatgttgggtcggagttctagattatcctttatgttttaattgaaataaggtagagtcatgggcttactggttttgtttttgattttttaggtacagcccaagcaccttgggtgtgttggactgagctgcttttatttggctgtaaaatcaatagaagaggaaaggaatgtcccattggcaactgacttgatccgaataagtcaatataggtttacggtttcagacttgatgagaatggaaaagattgtattggagaaggtgtgttggaaagtcaaagctactactgcctttcaatttctgcaactgtattattcactccttcaagagaacttgccacttgaaaggtaagtgacctttgttttgaacaagagacatttggaaatcagaatggtattgtatggatattgcataaaatcagtatcctcatagaattctaataaaaataagtaaaatgacagctgtggctccttgaacttt

SEQ ID NO: 13582 - DNA, 538 bp, Homo sapiens
  MAP TO AC010251.3; EXPRESSED IN BRAIN, SIGNAL = 1.3; EXPRESSED IN PLACENTA, SIGNAL = 1.5
tacagcccattccattttgggagtataatcaatttcttcattgctggaaataaaaaacaatataacagtggtggtgtacacaccctgtgatatggccagtaataacctagactctcccccgggatataaggaacaatatcaaaaaagagtgcatactcccagcgatattgggcttaatatcatactcttcccccctggatattaggaacaatatcaaagaaggggtgtccaccccttgccatattgacagtaatatcatcctctccctccctggatattaagaacaataccacagagttggtgtacacccactgcaatattgagagtcatgtcatcctctaccccctggatattaaaaacaacatcacagagggagtgcacaacccccgcgatatggccagtaatatcatagtctcccccactggatattaggaacaatatcacatgggcgtgtacacctccagcgctattgaaagtaatatcattctctcttcccctggatattgggaataatatcacaggtggggtgtacaactcc

SEQ ID NO: 13583 - DNA, 575 bp, Homo sapiens
  MAP TO AC010358.5; EXPRESSED IN BRAIN, SIGNAL = 2.3; EXPRESSED IN LUNG, SIGNAL = 3.4; EXPRESSED IN PLACENTA, SIGNAL =   2
ttacaccaacggtgacttggtccctgaaataaccttgtgtgacttaaaaaggatggcagcattctctaagcttgctcaggcaacccacaagtctgacccagaggtccctgtcctactagaggtgtcttctgttcaaaagcctctttatctgaacgaggacccagtgccccacctgtgtaagcagctctgcccagctcatctcccgtgcccccatgctttaccttttcagatggaacttgagatacttgagaatccctcgactcggcaggaaggtgcagctcaggcatgtcaggatctgccagctgtacaggttgcccacactgccggggtggggcactttgttggtctgtttgataagctggcagtacagctcgtcccgcagaggtcgcaggtcatgccctgtctgtaggatgccctggattattggaattgggtcagacatggactccagttgctgcagggaattgaatatcttgatggcctcatcctgaagggtggtatagcctttgtctttgagcactaggacaagcaaaacaaacacggaactcatctgaggggttcagaatagggcatga

SEQ ID NO: 13584 - DNA, 535 bp, Homo sapiens
  MAP TO AC018716.2; EXPRESSED IN BRAIN, SIGNAL =  12
tccccttctgccatttattgtaagtttcctgaggcttccccagccatgtggaactgtgagtcaattaaacctctttcctgtatatttatgcagtctcaggtagtatcttcatagcagtgtgaaaacagactaatacaatatctcaaactcaacatgtccaaaactcaattcctgtctttcccctataattctgttccacctacatccttctccaactcagttaatggcaactccatctttgcaattgcttagactaacacacctcactgttatctgggactcttctctttttatcacattccacatctattaggaaatgctactgacccaatcttcaaaatgcgcccaggattccaccaatcctcctcacctccgctgctgctacctggtccaagccagtatctcccatctgggttgctgcagttgcctcctcactggtctccataaggcagctaacattctctgttacatcaacctctctgctcaaaaccatccctccaatggctttcatcttggtcagaggaacagtgcccat

SEQ ID NO: 13585 - DNA, 590 bp, Homo sapiens
  MAP TO AC005663.2; EXPRESSED IN BRAIN, SIGNAL = 1.3
gctacctccagttgggacagcgcccaagcgagagggccggggcctggactcccaaaccactcatcctccaagcccctccgatgggaccccaaagctgcaggcacagttcggtgcccaggcgtgggctttgcaggcgtcctcaccgatgaggtctttgttgcgccggtccagcgagaggttgcgcagagcgatggcgacggcgcgcaccaccttgtcggtctcagactgcagcagttccacaagcaccggcagcccgcgctctttgcgcactgtggcgcggatgtacgtggcccactgcggaggcggggagagggttgctcagacatacatgccaggcactctcccacctccagacgctgaccgctctctccagctggaccttcctgctcccgtgcccgacaaagccctaccccaaaagctcaacggcacctccaccgaggttttcccaccgtccagggtgcacgcattgcccgcagcccatacacctcttggatcctggggtggtggtgtggcccctcctttccccgccagccgaggcaggagctgcaccagtgaggtgcctgggattccctctctcaggacttgcccac

SEQ ID NO: 13586 - DNA, 563 bp, Homo sapiens
  MAP TO AC013533.3; EXPRESSED IN BRAIN, SIGNAL = 1.3
attctgtgccctcacctctgaagccgccaagtgcagtgtctgcccaagaagccaccgggctgcagacccagggcgggtccgatgtataccctaggaggcacccccaatttcacctctccttggtgggcctctcacctgtccgcttgccacaggatctacctgccctctggtgccaagcaacaacggatgaatacccactacctccagacagtcagatgggcctcaactcagccccaacaagcagccagaaagcaaagcgaggaagatgacagccaatttcaccatgcggcccaggcccacagactccagaggattttgggaagcttcacagctgcaccagagttctgccccacgaccatcctgatctgcgaaggacacgtccattctgaccacagatgttcactgagcctctgctaggcacagggtgaacaccatacaatgaccattcccaaattcaggagtgtgaaacttcatctacattaaagaattcaaactacgtagacagggagttatataaaccaaaagaaaatgttaatttgcacacataaccccatcccctttct

SEQ ID NO: 13587 - DNA, 571 bp, Homo sapiens
  MAP TO AF236876.1; EXPRESSED IN BRAIN, SIGNAL = 1.5; EXPRESSED IN LUNG, SIGNAL = 2.7
gagcagccagaggtacttgctgaagtggagcgttccactgggacatgtggacgccatcgagtatggcagcagcgcaggcacgggcgagcacagcaggcaccttgccgttcacccgccggagagcctggccgtggttgctaacgcgaaaccaagtaagtgatgctttctctcacgttcgtgccgtggggccagggtaactctcacgttcatgctagccgtggggccagcgtaagctccaccatcagcaggttcagggtttaacatggcaagtctgcagaggtgatccagtctctagaatctgtatgctgtctgactaacatggccaagtcggctgctcatcactgacttgtcccacgtgcagctggggctccttcgggttcgggccgtgcacctggccagtcagaagtggattccgtcttcccggtccagtgagctcagttttgcgtttccagttaaccaaatcaggacttggcagtgctggtctcttgagtgtgtggagctggcgtgcaggaagtcatagagcttgaggcggtggtggttccagctcggctctttgctcacctgctcacac

SEQ ID NO: 13588 - DNA, 582 bp, Homo sapiens
  MAP TO AC010618.4; EXPRESSED IN BRAIN, SIGNAL = 1.6
gctgcatcctagaccctttgcaagagactgaacgagtcctaggagtcaatgtggtccctaatggagtgtggacgattctgcagccatcatcatccttaggctgttccgctcataggattagctccctgggtggggcggtctcggggtctctcctctgatccgggctccccaccgcctgccggtcccatcacccacttcctcaccccgtcccccaggtggttcagtacatcggggagatctgccgctacctgctgaagcagccggtgcgcgaggcggagaggcgacaccgcgtgcgcctggcggtggggaacgggctgcgtcctgccatctgggaggagttcacggagcgcttcggcgtacgccaaatcggggagttctacggcgccaccgagtgcaactgcagcattgccaacatggacggcaaggtgcacaccggcagggccccggggcaggtctcggagttcagggaagaccactgtctcctcttcctggggcccctgggatacataaaacagcctggactggcgcggaaggctccgccaaggcgcacgcagggcggggtgtaaggggagttcctgggac

SEQ ID NO: 13589 - DNA, 600 bp, Homo sapiens
  MAP TO AL157789.1; EXPRESSED IN BRAIN, SIGNAL = 1.4; EXPRESSED IN ADULT LIVER, SIGNAL = 3.4
gagcagaacttgaagtggggataatttcagtactcacccttgggagtcttgaatttctcatagcaccaaaatatggcaatgaggagaagcccttctccaagctggaaaatcatgtagaggaggggaaagaagaaaagtggtccaatgacttcaggtggaaaggccacattgaggatggtggaacagagttggacattttggcatccagtctccatgctgacagtgcgtctgcacctgtgccggtgaagaaaaccccacatacactcagagggaactggagggagcaactttgtcccagtgctgctaccaaagagtttcgcagcagatggaatctagaccctggacaggggtactttgctattgctgctggtgtttggatacctttggtgtctggatttttaacccgttcaataccttcattcaatttttttcaagtctaaagtctcttgtccagttagtgcatctgaacatattgccaggaaagtgtcttgcccagatttcaggttcctagcttcttattcgtttcctgaaagactaggacaagaatgaagcccatgggacagtgggacctaaaataatacctatctccaggcatgcagt

SEQ ID NO: 13590 - DNA, 579 bp, Homo sapiens
  MAP TO AL158052.2; EXPRESSED IN BRAIN, SIGNAL = 5.1
cacgaatggttgaggttgtgttctaataaaactacagtgccattattgacaagacaggcttggtttgccggcctctgacatggaagatagcccaggctttgagaagctccttgggcctcttggtgctatgaaaacagcaggcccagaatccttttgtgagattaacaaaatcataccacctgcttcctcctggcaatgagaattcatctcagactcccttccctgttcagccaccctggcaatgaagggattcaggtggactccaaatgtgaaaggttggccttctccaggggtcattcccatgaccatacagagtgatgactccaaaaaaatgaatgggccccacaccaccaagaccacagatggaattcacatggactccttccgatctctcatgctggtcagtttcctgcatccctcgcttcttctgcagcttcatgatcctaatgcacgtcctcatcactcctttcctggacaactgcagtggccgacgctggttcttcctgtcacctccattcttcctctatgtcaccactggaataatcttccctaaatccagccatgccatacctccaaaac

SEQ ID NO: 13591 - DNA, 507 bp, Homo sapiens
  MAP TO AC008860.5; EXPRESSED IN BRAIN, SIGNAL = 8.6
ggggagaaccttcaaaggaccagggatgccctcccctcacccaaggctacacctagcctcatgtcttcttcaccttcctggccccacgcagccacctggccaccacacccagcagcttcccacaaagccacatagtgcccagagtgagccccagcagaaacacaaagacatcaatgaggtactgctcatgccaaggctgctggaaggcatagggcttgaggtgcgtcgctcccccagtctggaggatgtggtcgatccagcccaccagccgctgtgcggggctcaggggctgagagtgcaggatgacactggctgccaccactgccgacttgtacctgttggtggagacagagagggtgtgttactgacgtagcctcacaagtcttacagactttgtattgcatgagcacacacacaagcatacaaacacttttctaacacatgcaccaaggctgggctgcaaagaaaatttgttggcatggccttgccacggtctcactgaatcct

SEQ ID NO: 13592 - DNA, 577 bp, Homo sapiens
  MAP TO AC008567.3; EXPRESSED IN BRAIN, SIGNAL = 4.3
catattggtgagggtttgccttgaatgtcatcccagtatttcaatattgattaattagtcttccctcatggtcccaactgcatagtttttattttgttgagtgttctgacacatggtaagggacatgaaagtatcctttgagataatctttccattcatcagtgtttatctagcatctgctcaagagtgtgctgcagtggagggaaatcagatgacctcccagtctggttgtgttacatacaatcatgtgtaagaagtgccattcaagccgtgtcactggaggggactgacagtgagtgagtgtggatagagaggacctcctggggtgggcaatgtgagccctcagactctgtaggtattgcattttgcagtgaacactggtagacatgttttgtggctcaagccagcatgtgtgtgatggtttaggattcagtgacttttgatgatctggctgtggacttcaccccagaagaatggactttactggacccaactcagagaaacctctacagagatgtgatgctggagaactacaagaatttggccacagtaggtaagactggcctcatcccttgta

SEQ ID NO: 13593 - DNA, 519 bp, Homo sapiens
  MAP TO AL132819.1; EXPRESSED IN BRAIN, SIGNAL = 1.3
tcacttggtcacttgcttcgggactctagtcccattctctttccaccacactctccccagcgtgaagaattccgctttcagaattccttccagggcggtgtgcttgctgtgtctactgaagatgaaactgctcacctctctttcctgttactaaaaacaaactatttttcaccacccacacgctgcatctagctatatgaaaatactcccttccttgtctatatcctattatgttgtattacttttccaccatctatttatcttgcaaaaagacatcgtaattctaaagacagcttacgctctattacagaaaagaggcacaatgtttattagtcagagtgagtccgctggactgaaatttatggtgtgcccagaaagctcgggggccggtgcaggaacctcaaagaacaggaggaaggagcgattcagaaaagaaacagatccgtaccgcgcattcacactgcgcgcaagcggacctttctcagctttccatccgcacctttctcagctttccatccg

SEQ ID NO: 13594 - DNA, 587 bp, Homo sapiens
  MAP TO AC011298.2; EXPRESSED IN BRAIN, SIGNAL = 1.3; EXPRESSED IN BONE MARROW, SIGNAL =   2
caagctcctagctcctggtggtgctaaccagagcagccatgggcaaggccgggttgctggagttgcccagaaatgactcagggcccttgagggcctggggctacggctgtactgcccaccagctggacccaccttgacggccagctcccgctgcctctcgttgggagcctccaggggtgatgggcggccctcagccgagagcggggaggaggcgctggaggagccatgggactcagagtcctcgctgaaggccggggacagtgcctccgggacaggccgctgggcggtctccagcttctcccgcaggagcaggtagtgcctagtcttctccaccttcagacaggacacaaggccttacctgctgcacctcaggggtgacctccggagttgtgctcagcctcagcagcagcatgaccctctgggcagaccccggagagcccaccctcccctgggctaagactgaagactgacagccctcagctgtgaaatgagggaacagaccctggcgccccggggctgacagccctcagcccccaccccagccctgccaccttcatgggcagcaagcaagctgctcctctcagaca

SEQ ID NO: 13595 - DNA, 587 bp, Homo sapiens
  MAP TO AC004548.1; EXPRESSED IN BRAIN, SIGNAL = 1.3
tgagacaatatcgcctgctgggtgtggtggctcacacctgtttgaacactgtattaatggcattagccaatgcaatgatataagagaaagcaaatagaggcttaagaatataaaaggaagaactaaaactctatttgtatgagatatattatgaatcaagaaaaccaaaacaataaatttaccatgctaacaggatataaaattgacataccaaaataattacctacttatctgtgaatgatgaccagctagacaatgtatgggtaagaagaacctatttacaacagatttttaagtacttatgataaactatacaaaacataaaaatacagatggggataacttgaaccatttctgaaaaacacaaaagtaaaacttgaacaagttgaaagacataccacaatcttggagaaggaaatccgacatcatgaagatatcaattttctcgtattcaatatgaacatttaacacaaactcaataaaaatagcaccagtggttgttgtttcttttctgaaattagacatcttaagtacagcaaatgtaattgttacctacccctcttatacccaaacttcattccttccgt

SEQ ID NO: 13596 - DNA, 530 bp, Homo sapiens
  MAP TO AC011497.3; EXPRESSED IN BRAIN, SIGNAL = 1.4
acagagcacagcagtggatggagagcccacaggaagcccagatgcccgggaggtccacgggggctgtcccctcccggtccccagccccacctgtggggggtgtcccactctgggctcctgacacccaggtgccggttgccagctggtactccagcagctgctggttgaagccattttccggggagtaaccgcccaccaggagcagagacaggcctcggcgggcagtaagggtgtgaccagcaacggctggcagctccacggtctggggggcctgagggatggaggggcaaggtcaccgatggggctagaggtcaggggtcaccttgtgggtagaagcgagcctcagccccccacagtcctccctgaagtactaaggagggaatgacccccccagggccagtcggaccagcctgggtcctggcagaggcacagtgggccccttggcatttccacctgctcaagcctggtgtggctttgggaagcccttgctcccctggcctctctctgctgctgagtgaagctgtgtccca

SEQ ID NO: 13597 - DNA, 514 bp, Homo sapiens
  MAP TO AC012614.3; EXPRESSED IN BRAIN, SIGNAL = 1.4
cccatcacaaaacccaaaaccacagggcaagggccctgttcctacctttgaggaaacagtccttgctgtggatgacggtgatcctctttcccaggaggcaagcagcacggtggagcttacagtggttttcataaaacctcccatcagagccgcacacaggcacgtagctgggcctgcatgcctccaggcactggcattcgggctcccctgtcttcctgctgagcacgcaccggctccctcggctgcagaacttcttcccgcaggaggccagcagctcgttgtggctggaaagccctgccagacacacaaacacagagggtcagctgtaaacactcagagggtctggggtcgagggcttcctttgtagctcacaagcacagactccatttgcctgtgcagccaagctactcaaggtggggcctgggggcttggggtctcctagggagtccctgtccctccatgaggtggtcattggtgccaagaagggtgtcctgccttgcagagctcaggtttc

SEQ ID NO: 13598 - DNA, 502 bp, Homo sapiens
  MAP TO AC011507.2; EXPRESSED IN BRAIN, SIGNAL = 1.5
tcgccttcatgagacacaagtacaggatgctttccttgcctggctgagggagggtctaccggaaaccccctacagactcctccaacccattgaatctccagtagttaaatgaaagcaccagacatttgcagctaagagactatgggtctctggagaagtgctggtcctctctgaacctcagtttctccactgtaaataggtttacctttcttcccccttgcccctgaccttggagacctattgcaaagatgaaataatatgcggaagtaaaaggcctggtacagagcttcatccccagcagctaagcagaggcttaaacgatggagtctatcatcattggtgatatcataaatgaactccttggcagcaccttgttctagagccacagctttgaaacctgctgaattgacagaaacagcaataaaaaattaaaagtcaaaaggctctggagtacatttcttaaagtatcaggctgtgtttttcccccttgtaagtttgctga

SEQ ID NO: 13599 - DNA, 530 bp, Homo sapiens
  MAP TO AC023314.3; EXPRESSED IN BRAIN, SIGNAL = 1.4
catgtgaatccgaccaactgtactctagataggatattctccacccacaaatattcactcttccaaatattcactttgctgaatctgaagcgtgaaattctttcccttcagggcataaatacaaatgagactcatccattcccttccaaaaacacaaaacaacaacagcaacaagttgtcgtcatcgttgtcatcgtcgtcatcatcatcatcatctattctcattcaactctgtccttgtggaaggtcttgcatatacactgtcagctccatttcataatcttactctttgaaaggaataatctatactgtctctatttcatttcattgcttatcatccattcagtagctcattcgtttataaatctattatagtctaactttcatccccacctctgtttcaattctactctgacaaaaatcatgaaaaacctcctttattgcttaatcctaggttgttttttattccataactgacttgatctgattgtagaatttgatgctattaatcacccctttcttcagcattc

SEQ ID NO: 13600 - DNA, 597 bp, Homo sapiens
  MAP TO AC007608.2; EXPRESSED IN BRAIN, SIGNAL = 1.4
tcttcttctctccccttggcatgaagagtgctcccctaccccatggcttttgggcttggccatgtgacttgctttggccaatgggatgggagtgaatgccatgagctcaaccatgtaacttgctttcaccagtgggagaggaatgaatgcaacgagcttggtggtgcggcctgctttggccagtgggatgggagtggatatgatgaacttagccacgtgacttagtttggccaataggatgggagtagataggatgagcttggccatgtgacttgctttggccaatgggatggaagttaatatgatgagcctgggccatgtgacttgctttgaccaatgggatggcagcagataccatgggcttggccacatgacttcctttggccaatggaacaggagtgggtatgatgtccaccatagccccttcttcttgggtgatcaggagatgtgcagagaagaggggtggagagagagaaagagagagagcaggtgagagagtctttggacctaattgggtcaaatgccttagacaacttacacaacttcccagctttaccgtcctctggaataaaatggacgtgatagaaaggctgcctc

SEQ ID NO: 13601 - DNA, 588 bp, Homo sapiens
  MAP TO AL117340.3; EXPRESSED IN BRAIN, SIGNAL = 1.3
actgttggaagtgggtcaggcttcccaaagggaaggatgcctccagcagggctgtgtgaactggcgactccatggcccttggagtagaaactcactgcatgcacctgggccttgtcagtctgattcttttctgtcaagctcttgaggtggacatttccctccaagggcctgggattgtaccaggaagaagtgaggtttccctgagtctccaggggcctagaggtggaggctgcttccccattgctacaggggccccttttattgtcctcctgcccctgggtctctacctggtctttcacctctgttgcttctttgggctcttctgcgctcacctccgtcttcgggagcctggctgggatcacctgatcatctaatgaaggaagttgaaggttaaacttgcctctgagacaagggatccttacggggctgaggtgtccaaacattatggagttgtgaggagacagcacgggtttcttccttgagggggggctccagaccacaggacgcaggaccctctgtggggtgcccgtgttccgagggataagacacagcctcataggggcgccgtcccacctgactggaaaagaa

SEQ ID NO: 13602 - DNA, 512 bp, Homo sapiens
  MAP TO AC004547.1; EXPRESSED IN BRAIN, SIGNAL = 1.4
tagaagctgcgtgaccattgataatttcctcagcatgggaaactgggagcctcagtttcccatgctcagataaccattttgtagggttgtcaggaggaataactaaaacaacaaatccaaagtacctagcataagactatttttcttcctgtccccataggtccaggtctccctaaaaatcattctcagtttttgttagcaaagtcatatagttcttttcagccaaattatacacctacacacctaacacatatgtacaatcatggaaaggtaaataatgctaaagttttcatcttttaaaccaggtggaatcctacagtagcatcgctctcatgagttcttctgtctcccatttgaagtagtcctagaattaaggattttctttctgtctcattaaggaacacagtctaaaaccatgctcaaatgataaatcagagaaactgagttagcagtacacacatacacactcatacacagagactctgagttctagtccccaagctcaactagga

SEQ ID NO: 13603 - DNA, 518 bp, Homo sapiens
  MAP TO AL159141.1; EXPRESSED IN BRAIN, SIGNAL = 2.8
atgaaccgtaaaggcaccaggtggggttagctaagtgctctgtgaaaggcagggcagcgagttacctggagcaggaagagagcacatccaggtggggtgatctgggcagacttcctggaggaggcagacaccaagctgggccatgaagaatggatgggcaggttgggatgggggagctgacagagtctgctggagagtagcaggtgacataacagcaagggccaaggcccagaggtggatgtgagccttgctggggcccttggggatgaaagagagtggagggaatagagcctaccggaaccctggagagcaggaccatgttgcattcatctaccagtgacaccattgactgattcgggtctgggagcacagagtgagcctggctctgattgttcactgggacaaatgaatgaggacagcaggtgtgcaggtctgcttcttccaaactgacaaagccaggctaggttgctcggggcctgtggcaagaggcaaaggccacggggcttagttcattttca

SEQ ID NO: 13604 - DNA, 577 bp, Homo sapiens
  MAP TO AC005137.1; EXPRESSED IN BRAIN, SIGNAL = 1.4; EXPRESSED IN ADULT LIVER, SIGNAL = 1.6
caaagccaggagcaagactcacacccccaagcaaggagattagtttcaattcctaagccaggagctaacctcagatggccctgggcaggtggcatgatctctctctccaggctggggagcaggaaagggctcactccacccttgtatgccatttgaggagaacaactccagctggtcctctgggagcacatggagaacgaccacattgtgtcccagggttgcttgcctggcctgcaggcaggacacatacctcctgggccagccggttgatctttagctgcttttccttctccagcatttcctctttctctttgtaaagcttttgctcaaactccagttctttcttattctttctcaagtcctgcaggctgccatacttggctttcttcttatcttttcctttctgagtagatgtggcattgtttatatgacaaaggttagaaatagtgtcgacagcacagcacacggggcatccagtcctcacataacacaaccatcccatggtgagcccctcccccagctctctcaccactctggacatcagacctcaggtttaggacaggaaggccactgctac

SEQ ID NO: 13605 - DNA, 534 bp, Homo sapiens
  MAP TO AP001347.1; EXPRESSED IN BRAIN, SIGNAL =   3
agtgcagccccatataatgctaccaaccagtacccccaatgcaggcagtgacaccctagatagcacccccaacccaccccacactgtgaaaagtgcagccctgatagcccctgtcctaccactctggtcatgctgcagtctctgttaccaccaccaccagccacagtgaggcaagccactgggccgcaggctctagcctccagcagctgggcagggagcagctcttgctgatggcggcctgctaccactccaaccacgctgctgtctccatggccatcttctttgactacaaaagaataaaactaggtatcaataagaagagtaattttggaaaccatacagtcacatggaagttaaacagtacgctcctgaatgaatgactagtcttagtatcaatgaagatactaagatggaaattgaaaaatttcatgaaacaaatggtaatgaagacacaatataccaaaacttatgatatgccaaaaacagtacaaaggaagagattcatagctgtaagtgcctaccatccaaacagaa

SEQ ID NO: 13606 - DNA, 534 bp, Homo sapiens
  MAP TO AF236875.1; EXPRESSED IN BRAIN, SIGNAL = 1.4
ttaacagccaaaatggaggcctgtacagagtactggggcaacctggaaatctggttttaggatacactgcattcaaagcaatttgcttttttcttcaacatttcttgagcacctgttatgtgcaaagcaaggagtcaggtgcctttctggaaaacgaaataaacacggcactgtctctgtttacaactgcccatttaacaaacatttcttgaacatctactacatgtgatgcattgagctcaaccttaggaattgcagatggttaagcatgcactttaccttcaaagtgcatctggtctattttgtaaaaaataaacttttttttttttttttttacaagcttgtactaatcctgatcttggatcaagttgaaacagacacagttaagggagaggactataaggtactcctggacacagagctgagcttacctttgtgttccctaaacagaacagaggatgtggtgagaatccaggtcctataagaacctgtctcaacaaagggaatcaaagcaggggtcaagctttgacagtc

SEQ ID NO: 13607 - DNA, 557 bp, Homo sapiens
  MAP TO AL133413.5; EXPRESSED IN BRAIN, SIGNAL = 1.6
ctgccttccatcagcatacctattactaattgcagaaaaactatagcttcattctctacctgatagaacttcaccttaagtatgagagtgcttataaaccttccaataccatctaataaatgtcttctacagattttttccatgggagttcattttggttcctcctagcatggctgagcagattctgttctctgtttctttattctttggctgactgcctatgttctgcagaatcagtattctgctctgctgtgtgatggacagggggttatcccacttctttttggcaggaagagggacttcaagtttggctctgagctgaaaatgaataacacactagaaaaaataaggtcaccactattcctcctgtgtaactcgctattaaatattttctttgcatgaattagctcaggaattttagtatttaactattttgagcccagtaccataaaacataaatgtacaatatgccagttaagctctgtgaattctacagcacataaaaaactaagcaactgtcattggaaaaaaacacaaaattacattcctgcagttca

SEQ ID NO: 13608 - DNA, 500 bp, Homo sapiens
  MAP TO AC018388.4; EXPRESSED IN BRAIN, SIGNAL = 1.3; EXPRESSED IN PLACENTA, SIGNAL = 1.7
attttccatttgtcctgtcccttatcttggggtcattctttttaaatgttgtagagtcaaattaatttgcagtcttacaaaaagctttacttgtgaatatttgggagtggtgtcttgttgatcagattcacatgttgatcttttttctcttccccattttcctctcctttactcacactggtattaagggaactttgatcctgaaagaagacagtgctaggcatactttggcatgagtggtgttgggagctgtgtgacttccgggattggctggcatgggaattcattttatttcctccacctctgtttctgtctcttttttccccactgcccactctttttctttttaatacttttagtagtaactgttaaattaacttcttttgtttccttagccactacctattttttttttttttaacatagggctgttgttttgaagaaagtatcatttcttccttcaccataaaatcagataaaggcactcaggaatgaggtgt

SEQ ID NO: 13609 - DNA, 574 bp, Homo sapiens
  MAP TO AC008481.4; EXPRESSED IN BRAIN, SIGNAL = 1.6
catcaggtgctttgtttccccccaatgcttattccaatatatggaatcccatcattattcccatcattagaataataaagtgacccctccccatgacgaagcccctataagacatggctaattcatcaccaccaagccactcattgccgcaggcccctggtgtggggactgggcggtgagcggatgcgacctgttatctccagcagatactgggggccatggagtctcaggtgggggggggcccggccggcccggccctgcccaacgggccactccttggtacaaatggagccactgacgacagcaagaccaacctcatcgtcaactacctgccccagaacatgacccaggatgagttcaagagtctcttcggcagcattggcgacatcgagtcctgcaagttggttcgggacaagatcacaggtgtggctgctggagttgcggggaggaacagaggtggtagcctcagaaatacagaggtgatgggggcaggtgggacccttgctgaggtgtctcgggggtaatcgaggcaggaggtggtctagggatgtgaggtctgatggggagatgggta

SEQ ID NO: 13610 - DNA, 588 bp, Homo sapiens
  MAP TO AL133368.1; EXPRESSED IN BRAIN, SIGNAL =  12
tagtctccaaacaggtcgggtgtacgtgcatgccccatgggggataagattagtgaagaaacaagtcctttaccctgaactgcgagcaggggtatgagaagaggtgcactttgccaaagtcgtcgcctgttgacaggagtttcttctcatgggcccgacagacggcattgatgtcggttccgtccgagccttctggccacactcctaaaacaaagaccacaaacagggcgctggaaacaccaggggccacagggccacatggcgcaggaagcgcccactgaacggtcctgaacatgaaactgcctgaagtccagctttagaaacaagggtcaaaaaagcacaatagcctcagttcctggcctctcgctgtgcgcccagtctcctctcactcaggccagtctcggagaccctctgatgctctgctgtgcaaggggagcaaagacaagctttccgggctgccaggtcttttgaggcctcatcttgaggccaaggcagacagtaccaggaaccccagttccaaagtgacacctctccttgatctctgaagcatcttgtgggaagctgccctgtcctcaagcctgcagtttc

SEQ ID NO: 13611 - DNA, 560 bp, Homo sapiens
  MAP TO AL135961.1; EXPRESSED IN BRAIN, SIGNAL = 1.7
cctcaccagggcaacattaccggcagaatcagaaacttttgaagttaatgttgaattacatgaacctaacgactttagaaaatgggtcagctgcttcactaattgataaattctatgatagttaatatatgtacttagaaacatgcataggcttaactgaacaggatctttactaaagtgaactggcgtatctatacctcaaatgggtgagaaaattttttaaaaaagagatcctgaccgggtgatacatcttgttcttggaaaaggggttgtagagttcctggctcatcttcaaactggggaagcaaaagataacactgatgaagttcaggggttccaacaactcagaactggcaaagaaggagagggtatcagggaatagagagacttaaggaacaagatttccacctgtccataggagaagttatgtttccaggaatgttactggagatatgaatgaagagacctgaaaataagattgccttcggaaagaaaaagtaaagctgagtaagtggaaccttggtagagatgggagaagcagacatccggaaaaacttcca

SEQ ID NO: 13612 - DNA, 589 bp, Homo sapiens
  MAP TO AC011462.3; EXPRESSED IN BRAIN, SIGNAL = 1.5; EXPRESSED IN ADULT LIVER, SIGNAL = 1.4
ctctctgggcctcagttttgtcacctgaaacatgcgaacataagaacactcatctgccagggtccgtgggctctagaactagacggtctgggtctaagtcttggctctgccacttccacggggatcataagggcatgtgctatattacatgagttaatgtgcataaggcacacagaacagtgcctggcacataagtaagcacccaggctgtttgctctccttcttcagtgagctggtacctgtcaagtgtttgaaggctttctggctagcagtgagggtatatgtatccgccaggagggaagcaatcaggagacttcctggaggaggaggcctggcagaaaggatacagagccggcatcgctgacaacctgcagcaccacggtgatggaggtgcgggggtgcaacgtgcccagcaccaccgcctcgcacgtgttcctgatcagccgctcccggctcttctctgcaacacctggggaaattgaagagaggttcagggtcttccccttcatttgactcaccttcctccatacgcctcacccaaattcccagaaagggctcacggtctcagcctgggatggtgcagttacct

SEQ ID NO: 13613 - DNA, 599 bp, Homo sapiens; identical to SEQ ID NO: 6635
  MAP TO AC018716.2; EXPRESSED IN BRAIN, SIGNAL = 1.5

SEQ ID NO: 13614 - DNA, 577 bp, Homo sapiens
  MAP TO AL136369.7; EXPRESSED IN BRAIN, SIGNAL = 1.4
aaacttgatttccccatccctctcgtctcctggttctccccctacatctgtccttgtaattctcctttctcttggtatttctcagctttctgctttgacccactgctcttctttctatatatttactccctggctgagctcatctctcttacgggttcaaccgtcttctacatattgatgattctcagtcccggtctccatgactgaccttgctgtgtccttcaggtgcacatatccagttttctcctctgcctcctcacctggctgctcctggggcacttcaaactcaacgagcctccaactcacaaggtcacgtccactcacacccttcctttttgatctgttcctattctgaaatacacaatatccatgagtggccctcagagagctaccttcctcagaaaacatggggacatggtagattttgcctgtgtcttccctccctacatcatcagcactacaacgaaggcacaacaggatgatcacatgatagatggaaagatgtgaagggagggtcgagatgtttttaatggcaaagaatgtgaaaccctgaggagaatagttaaagcagaaggca

SEQ ID NO: 13615 - DNA, 577 bp, Homo sapiens
  MAP TO AB016897.1; EXPRESSED IN FETAL LIVER, SIGNAL = 1.4; EXPRESSED IN BRAIN, SIGNAL = 1.4; EXPRESSED IN LUNG, SIGNAL = 1.4; EXPRESSED IN BONE MARROW, SIGNAL = 1.4; EXPRESSED IN ADULT LIVER, SIGNAL = 2.1
aaagctgagaacccatgccaaaaaagcaaggacactgagctccatttcacttcagagaaatagacctggggacccccaagcagtagggacggggaggtttttgcatcatatggcagaacgattttggaacaatgtttaaaaatccctgttattgaagccacagtggtcaatagcgttggactcaggcggtcttgaacctgcacccgggctcaacttggacagaggcaccgtctccagcaggaagtattcagtcggtgatggctgccgttggtgattggtatcccccagggataccatccatacttgttctgttgacaggggcttctgaagaccaggatctgtgactctctaaagagacatggaaggtggcagaaaaacctccctgggctccctaaaccaccctcagctaagtccgcatcttcgggagagtctgctgtgtggcacctctttcaagtgagccccaaccatgctccccaggaagcctctgcgtagccacccgttcccaagcctccttttgcttgaagagaaacttccaaagccattaagtattcaggaatgggtgtcctaaagtccgtga

SEQ ID NO: 13616 - DNA, 596 bp, Homo sapiens
  MAP TO AC007719.1; EXPRESSED IN BONE MARROW, SIGNAL = 2.9; EXPRESSED IN LUNG, SIGNAL =   2; EXPRESSED IN ADULT LIVER, SIGNAL = 1.9; EXPRESSED IN FETAL LIVER, SIGNAL = 2.6; EXPRESSED IN PLACENTA, SIGNAL =   3; EXPRESSED IN HELA, SIGNAL = 1.7; EXPRESSED IN BRAIN, SIGNAL = 2.4
ggtagaaacaactcaaatgtccatcaattgatgaatggacacattcatccatacaatggaatattatttagccatataagagaatgaagtactgatgcatgctataacatggataaaatttgaaaacattttgctaagtttaagaagccagatacaaaatgtcacatattgtatgattccatttacgtaaaaaatatgcagaataagcaaacagatttgcagttacctgcagctggatgagggcagtgaggagtgacaacttaataagtacagtttccctttggcatttttggggttccaaaatattttggaaatatacagtagtgatggttgcatggcactctgaatgtactaaatgccactgaatcgtagtctttaaaatggttaaaatgataaggtttatatcatatctattttaccacaatttttaaaaagttgacttaggttgtcctataaataaatttagtgatgattattctttatctattaataaaatctgatattgactagacctaagtagctggtaattcacactcagtacacatttatataatattaaataaatcattcttagatgttgcagattgaccccaaat

SEQ ID NO: 13617 - DNA, 548 bp, Homo sapiens
  MAP TO AL022329.9; EXPRESSED IN BRAIN, SIGNAL = 1.5; EXPRESSED IN BONE MARROW, SIGNAL = 1.3
gactgggcaggaagatgaagggcaggaaagaggggaaaacttttaaaatatattttagcaattttgaactatattattcatttataaaataaaaacaaatcattgtaataaagccagatcatgctctgaaaatggtaagaacccagtgctgtgggggcatagaaggggcagctctgccttgcctcggggagcggacttccaagtgtgctgctttctgtggtgctcgcttgaagccctaaaggtgtagcaggtgttaaccaggtcaagcctgcaggaaaagaggtttgtgagaaaggggctagacaagtggatggcagagaattgccaggggattggtgaagagagggtggctgccgagatggaaggagtccatgtgcagatacagaggcaggatttacggtaaataggttaatacagcatatggagctgtgggtgctggaacctgctggaaccaccatcaccccaaaggcaactacggttactagtttctcccatcttttcagaaaagtggggtgtgtcccctctgggccaaggccattaagaaatca

SEQ ID NO: 13618 - DNA, 581 bp, Homo sapiens
  MAP TO AC007253.2; EXPRESSED IN PLACENTA, SIGNAL = 6.3; EXPRESSED IN LUNG, SIGNAL =   2; EXPRESSED IN BONE MARROW, SIGNAL = 1.7; EXPRESSED IN FETAL LIVER, SIGNAL = 1.3; EXPRESSED IN ADULT LIVER, SIGNAL = 1.9; EXPRESSED IN HELA, SIGNAL = 2.3; EXPRESSED IN BRAIN, SIGNAL = 1.4
ctctgcagcaggtccaggctgctctgccgcttgcgccatatgatccagcagatccaatggtgcttgaggtgtcagtggcagacagggatgctgtttggagcctttggcagcccgccataggtgaatcacagtggaggcctccaggattttggagcaaggccctattttctgcagataactgctctccttttgagaaacagctcttggcctgttactgggctttggtagaaactgaacgtttgattatgggtcaagtcacaaggggaccagaactgcctatcatgaactgggtgctttctgacccattagccataaagtgggtcatgaacagcaatattccatcatcaagtggaaatggtatatatgtggtcaggcaccagcaggtcctgagggcacaagtaagttacataaggaagtggctcaaatgctcatgccaccctgccttctctcccccaacctgcaccgatggcctcatggggaattcctatgaaaagttgacaggggaagagaagacaagggcctggcttacagatgactctgcacaacatgcaggcactatctgaaagtggacaactgcagca

SEQ ID NO: 13619 - DNA, 558 bp, Homo sapiens
  MAP TO AP000350.1; EXPRESSED IN FETAL LIVER, SIGNAL = 1.5; EXPRESSED IN ADULT LIVER, SIGNAL = 1.6; EXPRESSED IN HELA, SIGNAL = 1.8; EXPRESSED IN BRAIN, SIGNAL = 2.2; EXPRESSED IN PLACENTA, SIGNAL = 4.6; EXPRESSED IN LUNG, SIGNAL = 1.5; EXPRESSED IN BONE MARROW, SIGNAL = 1.5
tctcttactggttatgtatgctgcacctgaggagtagcagcactgccaaggacactgagtgtcttgtctgtgcagagcttcacatgaagctggagagaagggactggggcaagagggaaagataaaaaggggcaagtaagtaacagaatgaatccttgttgctaatctcctggcccccatcccagacccttcaggggatcctggcgattcgaagcagcatagcctgataggcctctggtgagggtgttgggagggttttcttggccgcctgttccaggatgctcaagatgatgctgtgggcctcctggcatagctcagcacccaggaaagcctccactcgtccacgccatgctgccagtcgtggccgtccctcaaacagttcatagccgagagccaccggctgtagggacaaggatgaaaaagttgtgggcatacaactttcccagttgtcactgccgacccgaatgctggaaccatgggcagaagtatcagagacatggtccattccccagcccctaagtgaatggaccacaggggcccaggcagtatgttcagcct

SEQ ID NO: 13620 - DNA, 547 bp, Homo sapiens
  MAP TO AC007463.3; EXPRESSED IN BRAIN, SIGNAL = 1.5; EXPRESSED IN PLACENTA, SIGNAL =   2; EXPRESSED IN LUNG, SIGNAL = 1.5; EXPRESSED IN BONE MARROW, SIGNAL = 1.5; EXPRESSED IN FETAL LIVER, SIGNAL = 1.8; EXPRESSED IN ADULT LIVER, SIGNAL = 2.7
aaaacccttcgatgaagcacaaatatttattctgggctgagtcatatctcaggaaagcaggcctgtcatatctgaaaactgcccctgcccaactgtgagttccaggattgcatccacttcattcttgagcaattaagggcaaagactatctgccctgactgtggcctctttccatagtcctcagcacttagaggggctcagcagatctttatggaatgatgaaatgatttcctagtcactgtggtttgattatccttcagcagcaggtcattagggttacaaatatctaaaaggacaagattgaatggacagtctttagcactattatattcctaaaatttctatttttcattattactattcgtaaccatttttaaaagtacaaatgagactcaaatgacagtcaaatgcctgctacttaataatttcttcttagagcccacgattgctccagaaggctctaagataattaatgtacccacttggccatttctccttcagcctcctccttatcccaggcccatctcctccctaccatcacctccct

SEQ ID NO: 13621 - DNA, 551 bp, Homo sapiens
  MAP TO AP000041.1; EXPRESSED IN HELA, SIGNAL = 1.3; EXPRESSED IN PLACENTA, SIGNAL = 1.8; EXPRESSED IN BRAIN, SIGNAL = 1.5; EXPRESSED IN BONE MARROW, SIGNAL = 1.9; EXPRESSED IN LUNG, SIGNAL = 1.5; EXPRESSED IN FETAL LIVER, SIGNAL = 2.6
tccattcctgcaaatgtgacatctgttctcagtttaagttttatttatatttgtcttctttctaaaatctcataagactgttctatctttgcatttcattacatcatgactaagtgaaggttcgtttgtcgtggtgcagcattgattgtatacacagtagcagggaacttactttaattctgtgtctttctttaattctaaaagttctcacctgagttttccacgtatctccatctgaaacacttatgaggtgtgtgttggagcctctcaaccagttttctaagtcgcttaactgttcttgcatattttttattctctttatctttctgagatgcattctgggtgaattcttgagcatcgttaactaattcccttctcagctgcatcaagtatggagcttgattttatgtcttcagtcttgtatttcaataaccatatttttcattccaaggattttttattttgttcatgttcacctgtacttcttccatttctgccactgtttgtttcctaatttctcatccttcatttctgggaggacctaaaccaca

SEQ ID NO: 13622 - DNA, 563 bp, Homo sapiens
  MAP TO Z83840.7; EXPRESSED IN HELA, SIGNAL = 1.3; EXPRESSED IN BRAIN, SIGNAL = 2.4; EXPRESSED IN PLACENTA, SIGNAL = 1.7; EXPRESSED IN LUNG, SIGNAL = 1.4; EXPRESSED IN BONE MARROW, SIGNAL = 1.7; EXPRESSED IN FETAL LIVER, SIGNAL = 1.9; EXPRESSED IN ADULT LIVER, SIGNAL = 9.3
gtaggggaagacactcaccggggggcagctggagataccaccactgccgaagaagaactcatccttgtgcacaactatggatgtgtgcctgtcacacagagagagacacagtaagccagaaaacttaaacttttgagaaaaagcaaacaccataatgcaatgagagtaatttctgcccaaggataggactgtggggaccagtcttataaaaccaacaaaccaaaggtatgaatatgataaataccacagatcagggcttctcaatcttggcactattgacatttgaggctggatacttctttgttgtgtggggctgtcctgtgcattctagtctgttgagcagcgtccctgcctctatccacaagatgccagtagcatcctcctccctgtatgacaaccaaaaatatctctggacatggccaaatgtcccagggtgagagagcaaaagaactgatgagaagcactgctttagggcttgaagatttatagcatggagagctaggtttcatgctggaagccacagactagaacctgaaatgcatagagtgctgccttgtttcaaa

SEQ ID NO: 13623 - DNA, 592 bp, Homo sapiens
  MAP TO AC006427.13; EXPRESSED IN FETAL LIVER, SIGNAL = 2.4; EXPRESSED IN HELA, SIGNAL = 1.6; EXPRESSED IN BRAIN, SIGNAL = 1.9; EXPRESSED IN PLACENTA, SIGNAL = 1.3; EXPRESSED IN LUNG, SIGNAL = 2.2; EXPRESSED IN BONE MARROW, SIGNAL = 2.2; EXPRESSED IN ADULT LIVER, SIGNAL = 2.7
ctccaacaaagaaagctgccatgcaagacaatggcttagcccaattcctggcacaaagtagatgctcaaaaaaatggccatcatgagcatgactctgtggccttttaaaagatgagataactaagttttcattagatcatttatctgccttccatgaacatccattcaacccattgtcctggaaaattcttaatgaagggcaaatacagcaaaaaccagctctctctaatcaaacatcatggactgttccatgatggggttctctactccagtgaacacgagaggggtctggggtctatggcctcctgcatgtcctgtgctgtggtggtagtgacgaaggaaggaagcaagcgggagcttccatggatctccattacagtcttaaaagacatccttggctgtttgcaaaatctctattgttggatgcagataagaaagagggtaaaggtagacccaagtctttgtgaaattccaccaagaaatacaatcctcttctcctagagtttctgatgcagaaaagcaatgttatcccccaaggaggaagaaagtgtgggaagaaacttaagtggtaacaggagcttgcagagatttg

SEQ ID NO: 13624 - DNA, 560 bp, Homo sapiens
  MAP TO AL035682.16; EXPRESSED IN PLACENTA, SIGNAL = 1.5; EXPRESSED IN BRAIN, SIGNAL = 2.3; EXPRESSED IN LUNG, SIGNAL = 1.2; EXPRESSED IN ADULT LIVER, SIGNAL = 2.3; EXPRESSED IN HELA, SIGNAL = 1.5
ggctcagggagcaactctctgttatcaaccaccagaaaagtttgtttttaaacagactgagttaaacagtgatgttggctgtaagtcaaggcactcacaaaagctgagggaaatggatgtttatgatcacaattttataggatgctgctttttcttaagcatttaattggaatgcaggaaaatacttgctatgcaattggctgctttggttccacgaaacgtaatgccctagcctcgagcctaggagacccaaggttaagatgcgctgggtcaccgagcaccttgcctccgggaaacaagttcgggaaaggttagcccagcttgtcaagaacgtcacaactccatccatgcctcttgtaaacttgaaatgaaaacattctttcaattctgagcaatagaaagcacttggaaaggtctttttttttttttttttttgacatgataaattcagcctcactgtagtccagagtgagaattagaacataccaacttccaatctgcctaaatgtgacagcctctgcccaagactggctcactgaggcgtcttggctactggatgt

SEQ ID NO: 13625 - DNA, 593 bp, Homo sapiens
  MAP TO AL022329.9; EXPRESSED IN FETAL LIVER, SIGNAL =   2; EXPRESSED IN ADULT LIVER, SIGNAL = 2.1; EXPRESSED IN PLACENTA, SIGNAL = 1.8; EXPRESSED IN HELA, SIGNAL = 1.2; EXPRESSED IN BRAIN, SIGNAL = 1.6; EXPRESSED IN LUNG, SIGNAL = 1.6; EXPRESSED IN BONE MARROW, SIGNAL = 1.3
tgtaaccatggcagtgtgtgtttcctaatattatgtttctacatttaagtgatgagagtcatcatagggaaaaaatccacttgtatgtttctagttgaatttaaattattccaacttcattattacaacattagaagtagctgtttcctgtggaatagccggttcagtaatttgctttatctcatgtgcaagtggtttctgcctgggccagtaatatattttaataaggcaagtttccaggaagatacaacctaacaatgataactttaaaaaacctagataaaggaatatgaaaaacttgataatgaggaagaccgcctttgcagaagtcgacaaatttatgatgcctacatcatgaaggaacttctttcctgttcacatgtaagtatttcttcttactctgttactttagtactgatgaataagggaccatgttcagcgtttccagaatgaaagttaaacagtagaaaggtgtttaaaattgaaaaatgcacgcccgggatggatcctatttcttctgctttgttgtttcctggtaatattaccacgatgtgtgttgcttcgtgtaagcttagtttatttccaaaagctga

SEQ ID NO: 13626 - DNA, 571 bp, Homo sapiens
  MAP TO AP000356.1; EXPRESSED IN BRAIN, SIGNAL = 1.4; EXPRESSED IN BONE MARROW, SIGNAL = 1.4
tagcacagggcttgtctcagcacagcaggatctgctccggtgttcaccacgtgcacacatcctggttgctgcctgaccctggccaattttgatggccaggatcaggaggaggtggaaggctcctggagcagatctgtttgggaccctgatttgccctctagcttccctcagtgctgtccaggacagtgtccctgccctggcacccttaggagcagacagagaagcagggatgggaggatggggtctggtccgcctgccccacagggacctccttaaccctaggcaggatggagaaggtgcgctttcagggtgtgggttccactagaagctttggccttaatcatttgggcgagctatgccccctcaggaagcagctttctcctctgaccagggagagagttgcttggatgtgctccaggtctccgggctccaccgttctatataatgacatgtgattgctgagggcattgaccaactcgtgttaatgccaaccaaacccgagccttgagttggaccataattgaaacctcaccagagtttgaaatagtgtggaacgtcattgtggggattt

SEQ ID NO: 13627 - DNA, 591 bp, Homo sapiens
  MAP TO AP000346.1; EXPRESSED IN LUNG, SIGNAL = 1.6; EXPRESSED IN FETAL LIVER, SIGNAL = 1.5; EXPRESSED IN ADULT LIVER, SIGNAL = 1.7; EXPRESSED IN HELA, SIGNAL = 1.8; EXPRESSED IN BRAIN, SIGNAL = 2.8; EXPRESSED IN PLACENTA, SIGNAL = 1.3; EXPRESSED IN BONE MARROW, SIGNAL = 5.4
gggaagaaatcaggtgaaggaaataatgtatacagtggtccatgtttaatacaaagtgccttgaaccggtctaggtcagcaaaaaaaccagaataggatatgctaggctcctgcttggattggcaatgcctgcttgttgggccccctctcctgggaaatctcacttttactgtttttcagctgcctgagtccattctttgggattggattggtgagtttgtttctcacatcagaaaaccaacatttccttagaagacaaagaaaggttgtcttacctgggcatcatcatcatcatcatcacagtcatcatcttcacttcgtggtaggcatactaaactcaggttgtcctcagaagaacctggaagcacacagaggaaagatccgtgccctggttgtttgtgactgtgagtcactcagggagctttgctggatgtggtatatggaggtggttgattaacaaacatggactggttaatgctggaagagggatggcagaggaggggagcaggcatgaggcatggaggccttggccttgtactagaggcatcacgcagcaacacaaaacagtcaaccccaaatggaactaaagca

SEQ ID NO: 13628 - DNA, 571 bp, Homo sapiens
  MAP TO AL035682.16; EXPRESSED IN ADULT LIVER, SIGNAL = 1.6; EXPRESSED IN BRAIN, SIGNAL = 1.4; EXPRESSED IN BONE MARROW, SIGNAL =   2; EXPRESSED IN LUNG, SIGNAL = 1.3
ctcatttctctgtggcctccttcaaatggatgcaaacggaatgaactgcaggattcttggacttaaaagcctgttcttcaatgcaggggaccaagtttaggcaaatatttagatccctgaaaacgagaccattttctctatctccacggcagcttcggagttgcaatctggatcgcatctttggagagcagcttcgtgtcccagcaaagctgtgggtaagtgatgggctccagcccggggggccactgacaccagggacatgagtcacagagggcaaaggtccggagagccttagtcatgccccagccctgtctggagtctgacatttcccagagggaagccccatctagagactcccataccaggtctattgtttcagagaacatcacgccgggtacaaccaaacccagggagagaaacaggtgggaagagcaggtgtctgctctaagatggttccgattgttccagggcacaaattcacggaaaaatacttaatttagaaaaaaaaaaattattttaagcatatgcatttatatttattaaacaaagctcaaaatacaacctttgggga

SEQ ID NO: 13629 - DNA, 592 bp, Homo sapiens
  MAP TO AC007567.1; EXPRESSED IN FETAL LIVER, SIGNAL = 2.6; EXPRESSED IN HELA, SIGNAL = 1.4; EXPRESSED IN PLACENTA, SIGNAL = 3.3; EXPRESSED IN BRAIN, SIGNAL =   2; EXPRESSED IN BONE MARROW, SIGNAL = 1.6; EXPRESSED IN LUNG, SIGNAL = 2.3; EXPRESSED IN ADULT LIVER, SIGNAL = 2.1
tgacttttctatttccttcattattcctatattcattaactgggattcttttgtgaggaagatttgaacaagtaaatttttaacctgatttagatgcactaccaatagcaatgagaagagagtcaaggtaccatgaatgttgacataactttacatttaccattactaaaaatgtaatgaaaaccacatttaattaaagtttcagggtctctcatgaaggcaagaagaatggattttaaacaatatacctttaactctaacagaaatggtatggtggatggctcctaatgcgttttttgctatacattggtaatttccagagtctgcttctgaaacatgaatgatctgcaaggttttctcaaagttcttataaactgtcctgtttttgggtagcattccatcttcctttgcccagtaaataattggggtaggcctgataggataaataaataatgatgttacaaaaaaggaatccacctatgactacttttgaggatgaattttcatgcaactttgtaacaaatctttattaaaaaatcataagaaatacatagatattttaattagcaccacacttttataaataatgctc

SEQ ID NO: 13630 - DNA, 588 bp, Homo sapiens
  MAP TO AP000350.1; EXPRESSED IN HELA, SIGNAL = 1.3; EXPRESSED IN PLACENTA, SIGNAL = 1.8; EXPRESSED IN BRAIN, SIGNAL = 1.5; EXPRESSED IN LUNG, SIGNAL = 1.4; EXPRESSED IN BONE MARROW, SIGNAL = 2.3
tgcaagcatcagtagatccgtcctgacgatgcaaattatgtgggccggctggcttgaggggctgtaagagcacagcagctgggagggcaggaagatggggatggagccaggtgtgaggagaactccagcaaggatgggagaggggccccagggcataagcagcgtgtcctgaggggagtggccagcctggggcggactagatgtaccgggaggctcacccagcaggtccacgaggatggagttgcccagcagcagcgagaagcccatgagcgcccaaggcaggaacggtgcctggaaagtgagcaggccgaagaagttgaccctcacccgagggctgcggcggctccacacgtacaccagcatggccatgagggcctggcccaggaagaacaggctgcccaggagtcccagcagctgggccagagtcaaggtgctccggtgcaggcctcagcccaagcccagggcccctctgacttcccaagaccctggaattcttcccctcatctcccctatgtgctattccctcatcaagatgagccagtccaataaaggcgacacactccacgggcttcaggtcccacgaaatct

SEQ ID NO: 13631 - DNA, 581 bp, Homo sapiens
  MAP TO AC008174.2; EXPRESSED IN LUNG, SIGNAL = 1.6; EXPRESSED IN FETAL LIVER, SIGNAL = 1.8; EXPRESSED IN BRAIN, SIGNAL = 1.8; EXPRESSED IN PLACENTA, SIGNAL = 1.4; EXPRESSED IN HELA, SIGNAL = 1.4
tttgaccattacacccccactaaaaaccatcagactattacccaataaataaactacaagttttaaccacagtcttcagggtagtagatttattgccttcttcactgttactccttataccttccctgtaatacaaagttacttatcacctgagtgcaacccttaattgctgcaactttactcccactgctgtcatatttactttattttcattcccttggtactgaattttcctctcaattttataaatcttttgtaacattaaacaaatgatcaggaacaagaagactaagcaataagtgagaaaagaaatgatggaatagatgtgaggcttccacagcaaactcctgtaaaacctgcagttaaacctgagcaagaggaatgtgacatatgtgtctttgctctttatttggatctgtgtgtatgctcttggagcagtggcgaagaagctccaggtaaggtatagagttctttatttttcatcaagctaagatttttaatgaaacaatatccaaaatgcttgctatgaaagattcaagtgatttttgtagttctacattcttgggtaggagaagataaaa

SEQ ID NO: 13632 - DNA, 556 bp, Homo sapiens
  MAP TO AC004032.7; EXPRESSED IN HELA, SIGNAL = 1.3; EXPRESSED IN BONE MARROW, SIGNAL = 1.8; EXPRESSED IN LUNG, SIGNAL = 1.6; EXPRESSED IN FETAL LIVER, SIGNAL = 1.5; EXPRESSED IN ADULT LIVER, SIGNAL = 1.7; EXPRESSED IN PLACENTA, SIGNAL = 1.3; EXPRESSED IN BRAIN, SIGNAL = 1.8
gaatgtgcacagacaggagggggtggaaataagcaggagaggaaatagctgtgcggtcagagtggctgcaccttaggctgttttaaaaagcttatttacaattgtatctcctcattttctatgtaccattattcccattttagagaggaggaaattgacgcccagagaactgaagccatttgcacatagtggctgctgggacaaacctggcagttgactctgagcccctttatgatcctgtttgtcatcccctacctgggcctgcaagttctgcagcccttctgagagctgaaggcaaaacccttgccccgagagccttgtcttcttctcgatgaccgtccctgtgccctcattgtccccacttggagacttggtctcaattctccctatcacagaccaagaaggagacatggccagagatgcctccccgatagacaagaattgcctggaaacattcatgctaccacagcctgacctttgcatgaatctcgggaacaaagaccccttgcacccaccagggcaaccctgccaggcgagccaacagagtgatgtgtgg

SEQ ID NO: 13633 - DNA, 582 bp, Homo sapiens
  MAP TO AC009313.2; EXPRESSED IN PLACENTA, SIGNAL = 1.7; EXPRESSED IN LUNG, SIGNAL = 1.4; EXPRESSED IN BONE MARROW, SIGNAL = 1.5; EXPRESSED IN FETAL LIVER, SIGNAL = 1.9; EXPRESSED IN BRAIN, SIGNAL = 1.7; EXPRESSED IN HELA, SIGNAL = 1.5
agtctggacctcccttgctctgcactcatttaccatgtggtgttacacaagcgaaagagcagccaagtctctcatttagagctaactttcatagccaaacaaaagacaaatctcctattaatcaagagctgcacagtctttgagttgaagatggtaacagctgtgccaatacaaaggaaaatattttctgcattatctgcttaatgtaaaggctgtgtaacatctgtgcacagggccgattgctagagtgcactgcatttttagcaaggcagccagaacttccaacaggaatatgccattcaaccggcaaatgcagcagagctcttacatcatctcgaattttcccaagaagctgacattttcaaatatgtaagaggcgcaccttcagccctttctacttgtcacttttgatgttttgattctggctgcaaaaatcacaattgctatgatctcccttcactttggcttgcctgttctcagcattactagctttaaggctgccagacagaaagctgttgactttccctctgagacagacaatggcttaacatgtaatcactggcccctcttcttcccaactcg

SEQ ID NO: 13634 - DNA, 551 bp, Homo sapiens
  MAP TO AL022319.2; EXPRESSED IN PLACENTA, SIGNAL = 1.6; EXPRESSED IN HELA, SIGNAL = 1.7; EXPRESSED IN LUNG, SIGNAL = 3.2; EXPRESSED IN BONE MARROW, SIGNAL = 1.5; EXPRESSED IN ADULT LIVER, SIGNAL = 1.7; EXPRESSED IN BRAIN, SIGNAL = 1.8
aattggctaaaagtgggctgaaaccacagtcttaactggcctgaagaaccagaaaacaagattcagagctaccacagcactggaaaggggagaaatctggttaaaaaacaaaacaaaacaaaacaaacaaacaaaaaaactcagagaaaaccatacctgttatcatcatagtcaaattgctgataatcaaacataaaaatgaaaatcttgaaagtacccagagaaagatgacccattctatataagggaagaatgagatgaatgatgactgacttctcatcagaaacaacagaggctagaggatagcagaatgacaccattttttttaatgctgaaaaaaaactgtcaatgcagaattctatatccagcaacaatattcttcaaaattgaaggcaaaatcaaaacattgtaagataaacagaaactaagagaatgaattgcccgtaaaactttataacaagaattgttaatggaagtacttcgggttgaagacaaagtacaccagatggaaagttggatctttgggaagaaataaagagttctagaaatgg

SEQ ID NO: 13635 - DNA, 583 bp, Homo sapiens
  MAP TO AL021707.2; EXPRESSED IN BRAIN, SIGNAL = 2.3; EXPRESSED IN HELA, SIGNAL = 1.4; EXPRESSED IN LUNG, SIGNAL = 1.9; EXPRESSED IN BONE MARROW, SIGNAL = 2.8
accattctgaaagggactggttattgttctccaagctgcttattccttgtaacagaacctactattttagaggaaggcagccctcacaacaatcccagagtatattatggtttcttcccctggtcactcctagttagcaacttcaatacaagacctgcttaccttcatcttcattatgggattatctttgctgaaatgacagctggggttgttaacgattatgaattcagcccataccagcacttgtctctgtcatctttgcaggaagcccaggtgggcctggatgcatcattaaagaaacacttttctttgctgaatgtaggctttgtaaagccaggtaataattcttttgtagtttgagttgaagattgaagaaatctcaaaatcattcttaaactattttatacatatctattaagtatcttctaaggcctgccactgttgcaaagctcttttggaaacttaaaatctgatccctgccccaaggaggaaagatggcatatacacaaataacctccatgggaaacagtatttggaaatgttgtaagagtgacataaagaagaaggatttgctctccagatg

SEQ ID NO: 13636 - DNA, 576 bp, Homo sapiens
  MAP TO AC009290.1; EXPRESSED IN PLACENTA, SIGNAL = 2.9; EXPRESSED IN BRAIN, SIGNAL = 1.6; EXPRESSED IN BONE MARROW, SIGNAL = 1.6; EXPRESSED IN ADULT LIVER, SIGNAL = 2.2; EXPRESSED IN FETAL LIVER, SIGNAL = 2.6; EXPRESSED IN HELA, SIGNAL = 1.2
gtagcttccacattttggggtatcttgatagcagcacccactctctgtggtaccgatttactgtattagtccattagtccattctcacattgctatgaagaaatacccgagactgggttatttataaaggaaagaggtttaattgactcacagtttcacatcactaggcaggcctcaggaaacttacaatcatggcagaaggcaaaggagaaacaggcaccttcttcacagggcagcaggacacactgaatgcatgcaggggaaatgtcagatgcttattaaaccatcagatctcgtgagactcactattaagagaacagcatggggaaaaccacccccactattcaattatctccacctgatccaccctcaaaatgtggggattatggggtttataattcgggatgagatttgggtagggacacagtctagtcatatcaaacccccaactaacatgtgatctcctccaaatacaatcaaaaacttattttgtgtccaacacctcaaaaaggcttacaatgggaagccatccaatttctagagattgcactgaggtgcttttatggctgaggcatc

SEQ ID NO: 13637 - DNA, 594 bp, Homo sapiens
  MAP TO AC008022.1; EXPRESSED IN FETAL LIVER, SIGNAL = 1.9; EXPRESSED IN ADULT LIVER, SIGNAL = 2.1; EXPRESSED IN PLACENTA, SIGNAL = 1.8; EXPRESSED IN BRAIN, SIGNAL = 1.5; EXPRESSED IN BONE MARROW, SIGNAL = 1.5
  unsure 388
agtgaggaggcagatgatggagatgatgatgataatggcagcacatcagagcagagcaagtatatctttgcaggcagagtgtccttggtttgaacttaactctgccatttactaattgtatggcacttagcaagttcctcaatttagctgagtaaagtcattttgaggattaaatgaattaacctacattaatatgtgctctattctacagcacacaataatacgtgatctagaaatattcaattctgttttcttctctgcctcccccttacccagtccatgatggttctgagtgtataaagagcttccatcttcaatgtagtagtcaggattctttccctgatggtaacccagctgaaacaaatgaaatgacagaaccttttgttcnatgtaattgcaagagcaaggctaggcttgatccagcatgcaaatgacatgatcagagcccagttatcctctcctcatttattgactgctttctctgtgatttttcagttctcaggtgggctctactcctctctagctgctccagccaaagtcctagaattttatctaactggtttccattggcctggcttagatcacctgcccatc

SEQ ID NO: 13638 - DNA, 552 bp, Homo sapiens
  MAP TO AL022329.9; EXPRESSED IN BRAIN, SIGNAL = 1.4
aagtcttgatatctggtcctgtaagttttccagctttgtttgtattcaagaatattggaactttccttgactgtttacatttacatatattttagaatccaacttgtcaattttcatttcaattaagattgcatggcatctatagcttaattaggggaacactgaaatctttacaattgagttattgagtccttggtcatgataatagttttccactttcaaaagctaatttaattccatttttattctcagtgtttcaaaacaacgccacaaataacattcctccctccctgacccgtgctgtgattccattaacttcagaagcagagattgaaatgggtatttgaatagccagaaacaaaatgttgaccagcaaaaagcctggcaagatggtgatatgtttctgtatctagccttttgaagaggatataattaggatagagacatgattgaatccaagcaagaaaggaccttcaaggtcatctgctccaattattaatgttgtgtctctatgcattttattatgtaaccagctccattttactgtgactt

SEQ ID NO: 13639 - DNA, 581 bp, Homo sapiens
  MAP TO AL079295.1; EXPRESSED IN BRAIN, SIGNAL = 2.5; EXPRESSED IN HELA, SIGNAL = 1.5; EXPRESSED IN LUNG, SIGNAL = 2.1; EXPRESSED IN BONE MARROW, SIGNAL = 2.4; EXPRESSED IN FETAL LIVER, SIGNAL =   2
actttctttctttttcttagtttgatgtaattagaatcatttacttaggagacatagcatgttattgagtctttcacttaaatataaggttttcctaactggataattaggaaaataaaatacatttatttccccttatacactcttcaaacataatttagagctaccttcttttaaatcaaaatatcagtccttaaataattttttgaaatacatatataggggcaataactacttaatagtaacaacaaaactaatatatttgagtgccagatgcataaaactgaatattatggtttgtccattaattgttcttacaagaaaaaaatggtgctccatgaaaaaagcagctagttcagcttgcaactcaatcacacagtacttttccttgaaacaatgaaaatattttggtatgtaacacaagtgctttatgaatacttttcactttgccatgtagaatatgaaaaatatcatatactaatgtgggaaattaataaaattaatactttttactgcttcatcaaggacattcttaagtgaacgtgatttttttgttttcctgtgagtctgtgacagtgaag

SEQ ID NO: 13640 - DNA, 594 bp, Homo sapiens
  MAP TO AC009290.1; EXPRESSED IN BRAIN, SIGNAL = 1.5; EXPRESSED IN PLACENTA, SIGNAL = 1.5; EXPRESSED IN LUNG, SIGNAL = 1.2; EXPRESSED IN BONE MARROW, SIGNAL = 2.5; EXPRESSED IN ADULT LIVER, SIGNAL = 1.7; EXPRESSED IN FETAL LIVER, SIGNAL = 1.6
  unsure 194
  unsure 196
tccagtgatatgttttggttccttgcttttaatcttttgagtatctactataggttttgcattttgcttaccaaaattcttacataaaacagtttacagttattacaggccattttaagcagacaaaaactttgattgcataaaataaatctatgctttcattccaccccccattttatgtttttgatgtcacnanatttacatatttttattttaccccttaaaaattattttagctattattattttaatagttttgtctttcaaccgttatactaaagatacaagtgattcacacagtattattacattattagagtattctgaatttgattgtttacttacttttaccagtgggttttatattttcagggtttttgtgtgactcattagtatcctttcagctccctttagcatttcttggaaaagtctggtgatgatgaactccctcaggttttattcatctgggaatgtatgtatcttgtctcatatgtaaaagacagctttgctggatgtatttgtctgttcttacactgatatgaagaaatacctgagactgggtaatttataaagggaagaggtttaattgactca

SEQ ID NO: 13641 - DNA, 575 bp, Homo sapiens
  MAP TO AL022319.2; EXPRESSED IN BRAIN, SIGNAL = 2.1; EXPRESSED IN PLACENTA, SIGNAL = 1.3; EXPRESSED IN LUNG, SIGNAL = 1.6; EXPRESSED IN BONE MARROW, SIGNAL = 1.8; EXPRESSED IN ADULT LIVER, SIGNAL = 2.3; EXPRESSED IN FETAL LIVER, SIGNAL = 2.2; EXPRESSED IN HELA, SIGNAL = 1.5
tgtactcaaaggtgccccaccagctcttcaccttctttggggccatggactcctgtgtgggccttctctgtagagcccgttagcaggcgcttggctcttctgaagttggctctgggggctctgcctggttccatcatgcagtgggagtggtagttctggctggtactgctgtgtcctgacatggtcaaggggaacagtgactgtctcagagacaaagggtattcaggacacattcattgggcacgtactacaaccactctgcaggtgctgggcatactaaggtgaaccagcctcagtcccaaggcctctgggacaagggggttgtgaaaagacagctagactttgtgtcaagacacctggtttaaatctagaccctgctgcttctgagctgtgtgacctacggcaagcagtttcagttctttgagtctccagttgccttctctataaaatagaaataagagtaccaacctcacagagttgttgtgaagactgaagatcacatttgtgcaagtacgcagaagaacacttggtacataaaaggtgctgcataaatgcttgcttgttcattcacaatc

SEQ ID NO: 13642 - DNA, 554 bp, Homo sapiens
  MAP TO AL034406.1; EXPRESSED IN BRAIN, SIGNAL = 1.5; EXPRESSED IN PLACENTA, SIGNAL = 1.8; EXPRESSED IN BONE MARROW, SIGNAL = 1.9; EXPRESSED IN FETAL LIVER, SIGNAL = 1.7
ctttgaggacaggccttcaggagaacagagcactatgagcatgtttcaaagttgttacttttcctttccccttactagaaacatgaggggaattttatcatatcttcaccctgagaatctggtatggctcctagaaataaaactcatgaaagtgtaggggccccataagacagggcccccatgagtttttgtctctcgagctagatctacagtgagtctcctgcaattactcaattatcttttaaatgcttctaccaggatctagctgtggcttcttctccttatgagctgtgctgcctttctctctagtttccagcatggtggagctctgtgacctcaaactctgatggctttaataagttagattttcagtttgtttatcttttttctagttgcaaggatgggagtaatgacttccaagctctttacatgtcagactagaggccaaagtcttctaaattaccctctttataacctgaatctactttaatcagtccttttttaacttttcataacataatatttataacttttctggcattcctttcatttgc

SEQ ID NO: 13643 - DNA, 585 bp, Homo sapiens
  MAP TO AC006548.19; EXPRESSED IN PLACENTA, SIGNAL = 1.4; EXPRESSED IN BONE MARROW, SIGNAL = 1.6; EXPRESSED IN ADULT LIVER, SIGNAL = 1.9; EXPRESSED IN FETAL LIVER, SIGNAL = 1.4; EXPRESSED IN HELA, SIGNAL = 1.3; EXPRESSED IN BRAIN, SIGNAL = 1.7
taaggctagagtgggcctcctgcagttaacattaacactctctctccttcgctggccaaggtgaagtctgggaccatgaagttctgacgtccactctctcgggggatcaccagttcacccacctcacccggcaagctgggccctagtttggcgacaggcatcttccacccacctgggaggcagggttcaatactctgcctctgaccttgtttccttcttctgccacctgcttaggcagccagaaggggttgtccagccagcacctgggctttggtgctcctcaagaaggtggaggaagtttcaggcacctggctcctcaggtgtctgccatccagctgctcttcaggcctgcccagcagagctctcttgatccagctagaactggccagaactgactcactcaggaatgtgtagactttggcatcaggggctgctttaatttgcacaatttccaaatacctcttttttcttctttttctgatgagtcatctccctagacttgcattttaaagagatagatagttatcaggttccagagaagacatggtagaacatttatatctcaaagacacagagctgagactt

SEQ ID NO: 13644 - DNA, 548 bp, Homo sapiens
  MAP TO AP000356.1; EXPRESSED IN FETAL LIVER, SIGNAL = 1.7; EXPRESSED IN ADULT LIVER, SIGNAL = 1.6; EXPRESSED IN BRAIN, SIGNAL = 1.9; EXPRESSED IN HELA, SIGNAL = 1.3; EXPRESSED IN LUNG, SIGNAL = 1.5
ctaccattcaccaagccctgcccacagtctaacctactctattcacaacactcccagcagcaaggcaagtgaggtgctgccgtcatccaggctggacagttcagtgatttgcctgaggccccacagcaggtgagtggcaagtccagcatcagagcagggcaggctggcggtgccccctgagccccctttgccatgctgaccacatgcacatcctgggcttctgcaggaatgccctgtcccctacctgccctgctccgtgcaaaaccctctttgagctgtgcctgggagacatgctgagagaattcatggaaacaaatgtgttactgacagcctctttgcctccagagttcaactggagacagagaaaccagctagaggcagagggaggtaacacggagtcccccagaaaggtctgggctgcgcgtgcttcaggtaacctcccttgaccttcaggagaacgagaaggctgcctgatcagagagtccctgaagaagattctgtggctacaggcttcagcagagtgtgagggagaccccggttatttcctc

SEQ ID NO: 13645 - DNA, 560 bp, Homo sapiens
  MAP TO AC007841.1; EXPRESSED IN FETAL LIVER, SIGNAL =   2; EXPRESSED IN ADULT LIVER, SIGNAL = 1.9; EXPRESSED IN HELA, SIGNAL = 1.6; EXPRESSED IN BRAIN, SIGNAL = 2.3; EXPRESSED IN PLACENTA, SIGNAL = 2.9; EXPRESSED IN BONE MARROW, SIGNAL = 2.6
gaacagagtctcccaaaatgcattttgtactagaaatggtagggaaaaaccaaaagtggcaaggactttgattatataggggaaggtgatagggaatagggctcatatgttgatcgtatcagtcattatggcaacacctgccatttactgagtaccggttgtcttcttgactctgaagtaaataactcattaataaaagcaaatctctgttaagatgtagaaaggacttaccatgtcaggcactgtgttaagcacttgatgtgcatgtacattgctagcaaataagctgtgtacgctgttggagatttttgttttctctgttctgcttctgaacagatttgtaatacaccgaaatattcttcaagcagtgcagtaggtgaacccatgaactttcaagacagctccacatttcaccaactgtgtgactcaggactagttactctcccttctcgaagctcagtttcctcatctataaaatgagagatgcagttaaattagtgccttcccaaggtgattgagaaaagtaaataagagactacctgaaaagcacctggtatgga

SEQ ID NO: 13646 - DNA, 547 bp, Homo sapiens
  MAP TO AC007567.1; EXPRESSED IN PLACENTA, SIGNAL = 1.6; EXPRESSED IN BRAIN, SIGNAL = 1.4; EXPRESSED IN BONE MARROW, SIGNAL = 1.5; EXPRESSED IN LUNG, SIGNAL = 1.5; EXPRESSED IN FETAL LIVER, SIGNAL = 1.6; EXPRESSED IN HELA, SIGNAL = 1.2
cctcatactgctgggaggtcatgaactacgataactgaagatgggggttctcctcagaagttttaagttaaactgcaccattagccacaaatcgtctctagtgtagattctgttagaggaggacgaagcaatggtccagcccgtcctctggctcctgcccatggaaaatcacccactcttgcaacgtatgcccttatagatgaaaacccaaatgcctaaggacagcattaagtccccagcactcaatcaaactgaaaatcaaatagagctacagaagactgagatttctctcgatgagagtaatgtactctgcacactgcacaaagaaaaaccaccgctttgcactcttgatattgacgtcaattctttgactcagtaggagtccatctgccttgtactttaccttggaaaatgatggtcattcttcattaagtgagaatcatgaactaaaactaaattgttaatgtaattatactacaatgaataaaatcccaatttgaaatagcagcatgatttttaatcaaggctaaggagtatgttagtgcaa

SEQ ID NO: 13647 - DNA, 570 bp, Homo sapiens
  MAP TO AC009290.1; EXPRESSED IN LUNG, SIGNAL = 1.2; EXPRESSED IN FETAL LIVER, SIGNAL = 1.8; EXPRESSED IN BRAIN, SIGNAL = 1.6; EXPRESSED IN PLACENTA, SIGNAL = 1.5; EXPRESSED IN BONE MARROW, SIGNAL = 1.7
tctgaggggtcacaggagtcccagtgattcaggatacacttgaggggagtgcaggctgcaggtggtttgttacccacctgaaaagagagaggggagaaaaggcatgccttagtctctcccttgctaatcttgaatttgaagcatccctcaaatctcagtaactggtactggcaccatggatgggctcttgctgcttatgccatggttgtgagtatgaccttcccccatgaagcagaaaggactagttggcagggatagtcatgcttacctgcactctgtcctagccttctgttgttgacttcctctggttcctcagatctagttttctttttagggctccaaactgaagcatgaaaaatacactggagtaatggtaaggtgaagctatggaaatagatccttctcaaacaaaggaaagaaaaggaaccctgagaactggggacctggcctaataagatgtcttccaaaaggaaaaaatcagtccttcacatagaaaagctccttgtattttcaggattatgttgattcctgacatggtgggaaaagaaacaacttaaatgcagaggaggg

SEQ ID NO: 13648 - DNA, 564 bp, Homo sapiens
  MAP TO AC006427.13; EXPRESSED IN PLACENTA, SIGNAL =   2; EXPRESSED IN BRAIN, SIGNAL = 2.3; EXPRESSED IN BONE MARROW, SIGNAL = 2.1; EXPRESSED IN LUNG, SIGNAL = 2.2; EXPRESSED IN FETAL LIVER, SIGNAL = 2.7; EXPRESSED IN ADULT LIVER, SIGNAL = 3.2; EXPRESSED IN HELA, SIGNAL = 2.3
tcactgctccacattctcttgtagctgtagctgctgacaattcagattcctctagtgtcattctttttgtcttccctcttaactttggccttccctgtatgctcttcctcagagagagtgccttgcagttctttcagctgcaatccaccgtgatactgcatccttgttggtggggtcaccagatatcagcgagagagagcatcttaccatcttctgattaaaactcagacttttcttgtgcctgggtcttgggatcatgaccttcacaagtatttcttccatgatataaatttctgccatgccccttggcatccctctctggcctcagcattccaactctatttccttgaagccctgtcctctgatgactatgagttttcttctcctcaggagggacaggaaagccaatgggatctggagtggggaggaatttcctcattccagctagaataagtttccattaaagttatttttaggagagctgcccttcttcaccaagtaggctctgagcttatttcacaatagttactctccctttccactgccagagcctcaaggaggttt

SEQ ID NO: 13649 - DNA, 566 bp, Homo sapiens
  MAP TO AC007841.1; EXPRESSED IN PLACENTA, SIGNAL = 1.6; EXPRESSED IN HELA, SIGNAL = 1.3; EXPRESSED IN BRAIN, SIGNAL = 1.5; EXPRESSED IN BONE MARROW, SIGNAL = 1.7; EXPRESSED IN LUNG, SIGNAL = 1.8; EXPRESSED IN ADULT LIVER, SIGNAL = 1.7
aagcaaattccatcagcaatgtttaagagttcccatttctgcatatatttcccagcacttgacactggcagacttcacaaactgctattttaaaaaatgtgcatttcctttattactaaggttgctgaatttcttttcatgagttcatgggccttttgaattttctcttctgtgaattgccagaacgtctttcatgatttgtctattgagctgtttcttttatcttaatatttcatatatcatctatcggtgtgatatttattgaaaatatattatctttgtcttcagcttgtcttttaactttgcttgtgatgttttataccatattaaaaattttaattacagtgttggcaaatcaatctgtatgtataagtattttatctgaatgtgtgtgtgcatatgcacatatacacataatatatacagaataaatatacttttcaggctaaggttttaaaatttgaaatctggacttttctatagcttttttcttcatggattctttatggattgtcaaatatcctaacatcatttattttttgagcccatcatccaccccactgatt

SEQ ID NO: 13650 - DNA, 549 bp, Homo sapiens
  MAP TO AP000233.1; EXPRESSED IN BRAIN, SIGNAL = 1.5
cattcaatggttgggataggtaaggtacatctgcttgggtataaagaaacacacattcaaaaggttatgacaactaatgccccattagaaagaaaatatatattatagctcatagtgtctgctgtttatatcctttccccatgtgctctgcaaatcaaattatatcagacatccacagatgagttaaacacttaagtggtttattcacgtaaggctgaacttgatagattttctgtttttaataaaagtgttctggaacattctgaatggcatttggggcactgggatggccatgactatggttttctaattaattttcctgccagcagacataaaccaacggagagtaatttagccttggtcaacacaaatcaaagacataatattggaaattatccaaatattctgaattaattcgtggaactagaatttaacctccaaagatttctccattgttttgtccatagagaaagtgaacttgatgattcgacactaataattgaacttgctattggttaagaaacagctgataaactctgcagctatgtg

SEQ ID NO: 13651 - DNA, 554 bp, Homo sapiens
  MAP TO AP000346.1; EXPRESSED IN BRAIN, SIGNAL = 1.6; EXPRESSED IN PLACENTA, SIGNAL =   2; EXPRESSED IN BONE MARROW, SIGNAL = 1.5
agatgccagcgaccaaaggctggccctccctgggtcctctgcgcctgccctctcattcaactgctgacatggctgtcacccacccacagcctcctgctggcttctcaggcccctggccaggcagcttcgtggggtgatggggaacttacaagttctcctgtcaaacccaccaagttgctctgcaaaatccttcctgcaccctgcaggccaaccagcatgggagggggtgtggccggtccaccctcagtgccctttcctgttgtgcaggggcccacgatgtcatcagcaagggtctgatccgctcactgatgtggaagctgtagagggaggagcgttccgggagctcgtcctggacccgctgtctcctgcctgcaggaggatgcaggagagggtctggcacctccaccccatgaggaaggcgagaacaggagaagcactggtgacgatcctgacacccagtggtcactgagtgtgtcctgtgtgccaggcattgtctccaaacctcacatttagacaaccctccagggaggcgatgtctgccttcacaggtgagg

SEQ ID NO: 13652 - DNA, 565 bp, Homo sapiens
  MAP TO AP000111.1; EXPRESSED IN LUNG, SIGNAL = 1.4; EXPRESSED IN ADULT LIVER, SIGNAL = 1.6; EXPRESSED IN FETAL LIVER, SIGNAL = 1.5; EXPRESSED IN PLACENTA, SIGNAL =   2; EXPRESSED IN BRAIN, SIGNAL = 1.7
gcccaagacatttcttcttccagtgtggcccagggaagccaaaagattggacacccctgctctacaacatctcaatataggcctttttcatgtttcattctagattctctctctagactacaagttcttaaggggaagtggcattgggaaatgtgtgaaggtggctttggttgtcacaacagcagcgtggatgctgtgttactagtgttcagtggatggcggcagagggaccaaacagaaggcagtatcaccaaagaactgtccatcctcgcatgccaatacccacactccatagagaaacactgcaatggcatccactcccacagattcggttaccatttgccagccaaggcctgcccagccagacctctcgtctgagcactggtattccccttagacatctaacaggcacatcagagtcaacgtgtccaaagccaactcatcatcttctctgtaaatctgcttcttctccaagatgtccttcctctatgctcaccatcaccatgaagccaggtatttaagcaaagggagtcatctatataaagccaatcctccgtattcatgg

SEQ ID NO: 13653 - DNA, 589 bp, Homo sapiens
  MAP TO AC006427.13; EXPRESSED IN HELA, SIGNAL = 1.6; EXPRESSED IN BRAIN, SIGNAL = 2.9; EXPRESSED IN PLACENTA, SIGNAL = 1.9; EXPRESSED IN BONE MARROW, SIGNAL = 2.5; EXPRESSED IN LUNG, SIGNAL = 1.8; EXPRESSED IN FETAL LIVER, SIGNAL = 2.7; EXPRESSED IN ADULT LIVER, SIGNAL = 2.6
ttgtctctgcatcgtggaagaaaaagtggatagggtggggttggggcttgagggaaatgagaaaagtttgcaacagccactgtgaagaactggaaactaagttcaccaccaaagagccgtactgacactgcccagtgccaggttgatcagaagccttcagtttctgatggcaccagtcagtctccaggcaaaattgtctcttctgagagtcttgggactgttctttttttcacaagcaggcatttgagcattttgaaaatgcagaagtatatatatatatatcactacacatctctgggtagtgagactatggaggtgttactttgtattactattaggttggtcaaaagtaattgtggttttcatcgttactttcaatggcgaaaactgcaattatttttgcaccaacctaatataaatgtccctaagtcttctcctttccagcttaacatctcaacctacaatcattcctcaaaaagcaatcattttgccatcttggcagttttctcttggaaaaagataaattacaacaaaaagttaataattcttcacattactttatgtgatggttaactttatgtgtcaactt

SEQ ID NO: 13654 - DNA, 560 bp, Homo sapiens
  MAP TO AC007092.4; EXPRESSED IN BONE MARROW, SIGNAL =   3; EXPRESSED IN LUNG, SIGNAL =   2; EXPRESSED IN FETAL LIVER, SIGNAL = 2.1; EXPRESSED IN ADULT LIVER, SIGNAL = 3.2; EXPRESSED IN HELA, SIGNAL = 1.6; EXPRESSED IN PLACENTA, SIGNAL = 2.4; EXPRESSED IN BRAIN, SIGNAL = 2.5
atggacagatcactggaggctcatggtagacaactctgagagtttaaaagctccaaggcaacaaatactgcatgattctacttatgtgaattatctaaaagatcaaactcatagaaacaaagagtaaaatattgattgccaggggttggcagggaggaggaaataggaagttgctgttcaacaggtttaaagtttcaattatgcaagatgagtaagttctaggtctctatagtacaatatcgtgcctagagttaaaaacaacacatcatgcacttacaaatttgttaccagcagcagaagttatctgagctaccagcggtaaatccggtcgggtctgcagcaacctgaattcttgcctcctcagaagaaagaattcagctgaggggcataaggtagaagaagagacccaggcaagtgttagagcaggaatggaagtttattcaaaagctttagagcaggtacaagaggaaggaaagtacatttggaagatgaccaagcggacatcttggaggacaagtgcatggtttgaccttttgacttcgggttttatatgctggcat

SEQ ID NO: 13655 - DNA, 553 bp, Homo sapiens
  MAP TO AC007282.2; EXPRESSED IN HELA, SIGNAL = 1.5; EXPRESSED IN PLACENTA, SIGNAL =  66; EXPRESSED IN BRAIN, SIGNAL = 1.8; EXPRESSED IN LUNG, SIGNAL = 1.6; EXPRESSED IN FETAL LIVER, SIGNAL = 1.4; EXPRESSED IN ADULT LIVER, SIGNAL = 1.8
ggagagactccttctgcctgaggaaaggagagggaagaatgggaaggactttgtcctgtggtttgggtgccagctcagctgcagtagaatagagcacaaagtagattcctaaggttcctgacccatggccctggctcccagaaggcatttctggacccacccagggccaggtggggagctcactgccctgaagagaaggacacagcctggctggattcaacacctggtgactgaagagcccttggtatccttgagtgaacatccagctgggcagtggtggctgcaggcctggggcaagacccagtgctgtgctgagcttcaggtctgacccagtgcagtcctagtggtggtggcaacaggggtaattgtgtcacccctcgcccagctccaggcagctcagcatggaaagagaaactgtttgggggaaaagtaagggaagaaaacgagattccctgcctagtaatccaggtaattctctcagaccttacccaagaccaccaagatggtacctctgtgagtctgcaagagtcacagttttgctgggcttgaagtg

SEQ ID NO: 13656 - DNA, 577 bp, Homo sapiens
  MAP TO AC008166.1; EXPRESSED IN LUNG, SIGNAL = 1.3; EXPRESSED IN BONE MARROW, SIGNAL = 1.9; EXPRESSED IN FETAL LIVER, SIGNAL = 1.7; EXPRESSED IN ADULT LIVER, SIGNAL = 1.7; EXPRESSED IN BRAIN, SIGNAL = 1.8; EXPRESSED IN PLACENTA, SIGNAL = 1.7
ttttatctttcacctttgagagtttgattattaaatgtcttgaggtagtctttttggggctaaatctacttggtgttctataacctttttgtacttgaatactgatatctttttccatgttttggaagttctccgttattatgcttttaaaaactctttctacttctatctctctctctactttctctttaatgccaataactgttagatttgcccttctgaggctattttctagatcctgtaggtgtgcttcaatcttttctattcttcttttctttcgtctgctgtgattgtgtattttcaaatagcctgccttcaagctaattgtttctgctgtttgatcaattctattaagagacgctgatgaattcttcagcatgtcaattacattattcaactccagattttatacttgattctttttaattatttcaatctccttgttaaatttatctcataggattttaaattctttctctttgttatcttgaattgtgtttcctcaaaaaagctcttttaaattctctgtctgaaaaatcacatatttctatctctctgggattggtcactggtgact

SEQ ID NO: 13657 - DNA, 555 bp, Homo sapiens
  MAP TO AC006427.13; EXPRESSED IN HELA, SIGNAL = 1.5; EXPRESSED IN BRAIN, SIGNAL = 1.4; EXPRESSED IN PLACENTA, SIGNAL = 1.6; EXPRESSED IN BONE MARROW, SIGNAL = 1.6; EXPRESSED IN LUNG, SIGNAL = 1.7; EXPRESSED IN ADULT LIVER, SIGNAL = 2.5; EXPRESSED IN FETAL LIVER, SIGNAL = 1.4
tcacacttccacctcaactccttcagagaagactggggccaatgactgaccgacataagggtttaaagaccatactccttaccctaagaggagtccaactctgtcatgcaattcatgctccagagggctctccatgggatctaggctaatttgatccccagccaaaacaacatccacacttgggcttctttcccaccctgttcttctctcactccccttgtcctgagagcactccctcaataagtcacttttacaacaacccctgcctcaggctctacttcctgggaacgcttcctgacacagttggattcagtagctttttcctgaaagacaataataactcaacatagaacagtaacaatttagatgtgagtatccatgctacattgctaaaagaaggagcatcagagtgaacaactgcagagtccacagctctctcctctatacagggttttgtaacccaagtggagaacatcatctctattttcatgtatcagaggcttttattctgtactctctcttgactgcctcccagggagggaagtgagcacaaaa

SEQ ID NO: 13658 - DNA, 558 bp, Homo sapiens
  MAP TO Z83844.5; EXPRESSED IN PLACENTA, SIGNAL = 1.4; EXPRESSED IN BRAIN, SIGNAL = 1.5; EXPRESSED IN BONE MARROW, SIGNAL = 1.6; EXPRESSED IN LUNG, SIGNAL = 1.4; EXPRESSED IN FETAL LIVER, SIGNAL = 1.7; EXPRESSED IN ADULT LIVER, SIGNAL =   2
tggtgaggttggctacagtggttctctcatgtgggagtgagggaaatgaagagctagggatggaactgccagcagggcctcccagttacacagagcagatttaaacttctcttgggctgaagcagtgaaattagcccaaggccaagagccagaaagcctggagtcgagttctggcttggcacctaacttgtgtgcccttctctgagccttaccttattattctcagtagagtaacggtttgagactggataacctcgaagtttggtagctctggtctttgccagtttaataactcacccctgggtccctgaggctgtgctgtctctgacctgccaggatgagttgtggtttcttcattggtgcattcattcattcgagccgtgcttacggaggatgtgctgtgggcttaggccctaggctggtttccaagatgtagacaaaaaacattccagccctggccactggagcccagttaggtaaggacactgacatgtaactgatgagaacagtgtggtcaccactttagtggggaaaggtacagatgtagggagcactggg

SEQ ID NO: 13659 - DNA, 570 bp, Homo sapiens
  MAP TO AC008009.4; EXPRESSED IN BONE MARROW, SIGNAL = 2.1; EXPRESSED IN FETAL LIVER, SIGNAL = 1.7; EXPRESSED IN ADULT LIVER, SIGNAL = 2.4; EXPRESSED IN HELA, SIGNAL = 1.4; EXPRESSED IN PLACENTA, SIGNAL = 1.7; EXPRESSED IN BRAIN, SIGNAL = 2.2
tcaggaggataatgccaagagtttagagtaagctccttactcagggtcgacataaaccaaatcaccaaaaatcaaatagaaaaaagaatgagctagataaagtgactactcacttaactaaccaatctcttcattaatcccctacaaatgaatctctataatcttcatttgatgtatttcttcataggccacaagtgtcagcagtggcacagatagttttctgtttcgccaattctattatttagcataacctttataagagaatttaaagtctgttgtgtaaccacagcctttacagtaaaatctgctatagagcctatcatgaggggtacatttctaattattgcctcttttattctgaaccatgaaaaaaggacctaacaaatgatgtccttctagaagagtgaaggcctcctggcaatgttctcttttacccatgatgtgggttaagaggggttttgactgattgtgaggcaatgtatgtgccgttaaagtttctcacctacattgggtcttcatcttttatctatcaaagtataaagttattcatgtataaggctggctgcaaaa

SEQ ID NO: 13660 - DNA, 581 bp, Homo sapiens
  MAP TO AC008009.4; EXPRESSED IN HELA, SIGNAL = 1.2; EXPRESSED IN PLACENTA, SIGNAL = 1.2; EXPRESSED IN BRAIN, SIGNAL = 1.8; EXPRESSED IN BONE MARROW, SIGNAL = 1.8
aactacccatgcctggtatatgttaaatcaataatatttgttgaataaaacagaccaaaaacttcatatttttggcaaagaattggcataaacagcacaggagatacaaaaggcggatgggattaatcttgctgcaccaccagcccctcactgccaatagaggagaatgagggtgggttgggtggaggcagatgaagagtgagaggtgggaggtgatggtggtagtggagacagatgacacagaaaatcagcttcttcctggtgagtaatggagctttccccgacaacctccccccacccctttctcttcctattctctctagttctaattatcaccagctggagccacttaatcctaacagtttacatgttactaaagcatctgtgagaatgcagtgcaggcttcagctagcaccaaaacaatttttttttctgatttcgcttgctatacctttacctcttagaatttattaatctgagggatgggaaaaacgacacaaattacattatttattagagatacgagtctgtctccttgtggcacatccccgaaactggtctcatctgggctcatcctgaat

SEQ ID NO: 13661 - DNA, 566 bp, Homo sapiens
  MAP TO Z82201.1; EXPRESSED IN BRAIN, SIGNAL = 1.9
aaggaagcgctcaaactcgtcgtctttgagattaagcagtagatgcaggagcagtctgtgaaggtcatgcatgttgattatgccatccctgtcagcatctgttttaaagaaggcagagtaggggtcctaaaaacaaaacacacacgtcaaagcccttccccaagagccccggacggccacacatgcacacccccacgtgtagagcctcatctccacgcgaggaggggcagcttggctgggccccaactattgcttttagagacttggctgttccaggaatatccttgccatgctttgcttttcccaagaaattataaagctctccagctacccaggggatataaatgatcctctttgaatgcaaagagttcagggaaaggaacaggccacttttcttttccttccacactctcggtttgtggagcttgtacttctagtccaggaaggaagggaaggagaaagtactggaggtttctgctcgcaattttttatatcactttcataatgtctggctgcttctgtctacagccaaacaaatactgcactgaatctcacaccaaggagcc

SEQ ID NO: 13662 - DNA, 591 bp, Homo sapiens
  MAP TO AP000350.1; EXPRESSED IN PLACENTA, SIGNAL = 3.2; EXPRESSED IN BRAIN, SIGNAL = 2.7; EXPRESSED IN BONE MARROW, SIGNAL = 2.2; EXPRESSED IN LUNG, SIGNAL = 1.7; EXPRESSED IN FETAL LIVER, SIGNAL = 1.6; EXPRESSED IN ADULT LIVER, SIGNAL = 1.8; EXPRESSED IN HELA, SIGNAL =   2
gaggtctgtgcaggatgagggctgggggcctgctagtcatgtgcttcctccttccactcccagtttccaggaaggccacccccagtgccctggttgtcctctcctgcatccggagatgtttggcttcaaagaagaaggggtgagggaggccggtccatgcccaagcatggtgcaatctcttggcatcccttccctctcctgatttcagagaagttgatgacgcctgagatgttttcagaaatcctctgtgacgatctggatttgaacccgctgacgtttgtgccagccatcgcctctgccatcagacagcagatcgagtcctaccccacggacagcatcctggaggaccagtcagaccagcgcgtcatcatcaaggtaggtgacttctcacccagcactggagccttcctggccctcagggtgggtgtcatcatggagcactgagggtacaccaaggcctcagcagaagcccgtctttgggttccatatcatctggaaagtcataacacctggctttgctccctgcaatcccccaggaagggcataggctgagttctcatagtaaagtgttatattccggacacattcagg

SEQ ID NO: 13663 - DNA, 559 bp, Homo sapiens
  MAP TO AC008272.1; EXPRESSED IN PLACENTA, SIGNAL =   2; EXPRESSED IN BRAIN, SIGNAL = 1.4; EXPRESSED IN BONE MARROW, SIGNAL = 1.4; EXPRESSED IN ADULT LIVER, SIGNAL = 1.6; EXPRESSED IN FETAL LIVER, SIGNAL = 1.3; EXPRESSED IN HELA, SIGNAL = 1.4
ttctttttctctccttcttgctggtctttccctacctctgccagtcactcatgctgctgttctcccctcttcttcccattttgatggctttggcagtgtaagagtgccacctacttgtgtttttgcattgcatgcaataattctataatttccttgtggcatttaacaggggttcccccagaggttaggaactccctctctttccatattgcagcatgggcatgtaggattagataagcatatttgctatctgtatacacatttattctttttccctttcccagttctaaggctcgggtaagtgccactagtgctgctaactgggcactggtccctgggggaagaggcttactttcaagtatggatacatcactaactatggcataacctgcccttcgtatcccattctccataaatgaacttccgtcggtatataggttaaggtcaggattagttaaagggacttctaagagatcatctcaggcggcaaaagtctggactataatttgttggcagtcatgctcgattggttccccatcctctgggagaaaagtggcag

SEQ ID NO: 13664 - DNA, 554 bp, Homo sapiens
  MAP TO AL022312.7; EXPRESSED IN PLACENTA, SIGNAL = 1.2; EXPRESSED IN BRAIN, SIGNAL = 1.9; EXPRESSED IN BONE MARROW, SIGNAL = 1.4; EXPRESSED IN LUNG, SIGNAL = 1.2; EXPRESSED IN FETAL LIVER, SIGNAL = 1.3
aggggaagggaaggttagtgctcctctccctccccagaggaaaacaaaattttagagactgtcagaaatgtgatggagctgtcaggagaacatgaaacagccacgtaccctgggaaacggaagtcacagctctgtttgttctgtgacagtgtgaaaactcacaaccttttcatcgagatgggtaacgaaaacatgagaaaactggaagtgctttggtttggctcagctgaggacattactccaagcccgcccaggctctcccctccggcctggattcgtttctgtgtcaacactcgcccagccttgcacagccgggcacacgggcgtctccctctgcagtggttccccgacttgtcggccatcttcgctggtggtgttttccttggtcactgtggttatttgaaagcgatgtcaaagcaaacactgctctctctccctgaaaacccctggcaggagctgcctttctcaccgtccctgtccttcgtctcctcctgtcccttccttcctgccgcagcctcttccctcaatcctactgaactccttcctgggagagg

SEQ ID NO: 13665 - DNA, 569 bp, Homo sapiens
  MAP TO AP000354.1; EXPRESSED IN BRAIN, SIGNAL = 1.3; EXPRESSED IN LUNG, SIGNAL = 1.4
aacatgcacgcaagtcgtctcaggaaactttttaatgaaagtgtcggccacggtggtgtgtaggtggctgagctcagattgcagctgctaagacaccagccacttaccaagagaaagccaggctgcttcaaacccagggccggaggcaaaaaagcatcacttccagccggggagtctggaagccacgccttgtgggaggtcacactggcatctaggccttcgcctgcactgcagaaggagagccgggtccccctcctggagaacgctgcgttccccagccccacaccggctttgccaccacacaggctgttgaggcaggaggcgggtaagacgtagctgtagacccaaagcaaccaccagccctgggaccctgcgggagaggagcacttttagaacatggaaaaatgtggtcatcccatcattagacagcacacatcctacataaataaaaagtcgtatggggaaggaggttggggagggaataaaaaattggcacagacattgatagactggtttccagtttcaaggtaacagatgcacatcatgagaccagaggaggcagagacaag

SEQ ID NO: 13666 - DNA, 576 bp, Homo sapiens
  MAP TO AB016897.1; EXPRESSED IN BRAIN, SIGNAL = 1.7; EXPRESSED IN PLACENTA, SIGNAL = 2.4; EXPRESSED IN HELA, SIGNAL = 1.7; EXPRESSED IN BONE MARROW, SIGNAL = 1.5; EXPRESSED IN LUNG, SIGNAL = 1.8; EXPRESSED IN FETAL LIVER, SIGNAL = 3.3; EXPRESSED IN ADULT LIVER, SIGNAL = 3.5
tgctactgaatctccaagcagaatttactactgaaaaggtacgcatcatcactgatacagtgtcagagttctacaacacggctagcctgaagagccaatttttatctctcagtgagattgattttccatttttcttgtcatactctattcacagtctactctcctatttcccataaactacaataagaaaacacagtaagttagaatcattgagcattctttagtcttttttcttataagcagacactgtaccgcacaacacagcagagctctgataacattttaatatgcgccgatgccagatattcaggctgcctacccaaaagtgaaagttttagttgcttgtttggaagtatcggaatagccgacttgaactaagaggaaaatgctggaaatgcattaacctttcatctggttgtttgttatgtagatataatcagaccttagtgtcaaaaagaaaaaaaatagcatatttttgacggactgccatctgccaagctgcttggcagatgatacagcctctgcctattctctcagtaactctgaaaggtgggtgccaggactctgaaggctacg

SEQ ID NO: 13667 - DNA, 571 bp, Homo sapiens
  MAP TO AP000354.1; EXPRESSED IN HELA, SIGNAL = 1.3; EXPRESSED IN BRAIN, SIGNAL = 1.3; EXPRESSED IN LUNG, SIGNAL = 1.6; EXPRESSED IN FETAL LIVER, SIGNAL = 4.3
tctcccttctctcctctgcctgccccaagcccctctttctaaaaaagtgatgccatgttcatgggattatttcttgaaaatacttggcggcctccatgcttctgttttctttgagccaggtggtcaggagggcttacaaagaatgcctgggctcccccgcagctgccggcagatggggtagcgaatggtcctgtgcctccacctgctccgggagggagtctcccgtctctaggcctggccccttcctaaccctccacgtatcctgttctccagagacttcagaacccactcctgagaacagcggagccaggcgcttagaggaagaccaaatgctgccaggacacggattgtccagggattacattccagcatcttattaggtatctggatctgttgggaaaaaaattagaaactatgtataaaacttaaaaatattcaagtatcaaaaggttatttaggatgaaagttttaaaacaagtcatcagcaagctgctgccaccaagtggagacttatacaaaagttgagcgagtccactgagctgagaggacagaaatgaagtcacctgtgctg

SEQ ID NO: 13668 - DNA, 553 bp, Homo sapiens
  MAP TO Z82201.1; EXPRESSED IN BRAIN, SIGNAL = 1.4
gggaaagaatatgtgtggggaattcatggtagtgagtaaagagcaggcaaattctctggatatgtgagtttcatcagcagccaaagggaggaagtgctctgcacagaggaagaaggaaagcacatctcgggctaagccaggtgagatgtccctgccgtagagcaggcacaggagaaaggagctgaaatctgggacacagggttgggctgttccagactccagctccctactgcatgtctcaggggccctgagcaagcttgctgatgagctctgcagctctgcgtctgtctccagaggccgaggtggggtctccagaggtggtactaagaacaacagtgagctgaacaatgtccaatgtgttcacagagaatgaagaaatcagacacagacaattacaagaagctgggatgatcaagctgtcctcaaattcctgatagattgtacagctcaattaatctaatgactcaatttaactaatcttagcccatgtgtcgttgggtattttgtcatgttatgttccccgtgggtcactggcccaaagcaacaaaatcat

SEQ ID NO: 13669 - DNA, 562 bp, Homo sapiens
  MAP TO AP000356.1; EXPRESSED IN BRAIN, SIGNAL = 5.3; EXPRESSED IN LUNG, SIGNAL = 1.2; EXPRESSED IN ADULT LIVER, SIGNAL = 1.7
aaaaacaatcaaagcatacaggagtttttctgccactagccaagatgaaagtaattgatttatcattgtgtctgaaaaaacacacacaaaataatatgaaacaatggttttcaagacatcagacattgaaggagactaatccctgagaaacgagaaataaataaggggagttgtacaattgccccagctcactgcttacaagagtctccaagctgtggcacagggaaggggactgaagctgacctaccagcctgcctgcattgagaaacgagagctaagagttcagagaagccaccaaggcagctaggactataggacagaatgtcaagagaagaaagccacacagagaacccaagagatctgcagcgggttgcttttgaacattcagcagaatactgatgagcacaccgatgtgaggaagttaacaggctggggaagacccataaagaattggaacagtgcttggcgtcatgctaggctgagactaaacattttcctatcagtcagacaagaaattcacaggatatggagtacagtgttgttttaagatgtaccatatctg

SEQ ID NO: 13670 - DNA, 590 bp, Homo sapiens
  MAP TO AL022318.2; EXPRESSED IN LUNG, SIGNAL = 1.8; EXPRESSED IN BONE MARROW, SIGNAL = 1.4; EXPRESSED IN ADULT LIVER, SIGNAL = 2.5; EXPRESSED IN FETAL LIVER, SIGNAL = 3.1; EXPRESSED IN BRAIN, SIGNAL = 1.6; EXPRESSED IN HELA, SIGNAL = 2.3; EXPRESSED IN PLACENTA, SIGNAL = 2.4
ggaagattatttcaaggatacaatgtacattcattcctccaaaatatgcttagatgaacttaaataatcagaaagttgtgtgtgtatgtgtttcacattttcttggtccacacggaaccccttgagaggtccctgtgggccgtgagcctgtttgtagacacttgcttccaccgcttgatgtcgcagacatcgcagtccctgatgtagggtctggccctatggggcttagtgggtgttctccccgtgtgtggagatgagaaatcgtaaaaagtaaagacacaagacaaagagataaagcgaaaacagctgggcccgggggaccactaccatcaagacacggagatgggtagtggccccaaatggttgcgtgcactgttatttattgcatacaagacaaggggggcagggtaaggagggtgagtcgtccaagtgattgataaggtcgagcaagtcacgtgatcataggacagggggcccttcccttataggtagccgaagcagagagggaaggcagtatacgtcagcgttttcttctatgcacctatcagaaagatcaaagactttaagactttcactatttcttctaccgc

SEQ ID NO: 13671 - DNA, 558 bp, Homo sapiens
  MAP TO AL049649.4; EXPRESSED IN BRAIN, SIGNAL = 1.4
tccacacgaactctgtgtccaaatcattaacagcagtttttactatgggcacataagacagaaataaatctgttttaattacctgtttggattctgataccacggctgtttgccaaaccttactgatacttcttgtattacctctttgaacatatctggtgtagaaactggtgtatctcttttgcaatctctataggatactatgcacgaatctacagtaatgataggtactgcgtcatttttgtggagtctgtctggtgaagaaagtgtccttggagccggttttattttctttgtcactagatgtcactgcatacacaagtgtgctactgtcgcccagggtaatctgagccctgattgctgggaaagaggcaaaatagattctggaagccttcactgtgatcctacttggaaggtatctgcactttggatctctttgaggctttctcacaatctcatttaattaggctaatcctccctaatactttgtcattttacagattgtgtgaaatctaatttaaatatgtgcaaatcttttgctattcaacgggacctttg

SEQ ID NO: 13672 - DNA, 568 bp, Homo sapiens
  MAP TO AL035682.16; EXPRESSED IN LUNG, SIGNAL = 1.3; EXPRESSED IN BONE MARROW, SIGNAL = 1.4; EXPRESSED IN BRAIN, SIGNAL = 1.4
ttataggatgtctaggatttgcttcaaaatattgctgtgtagctaggcaccatagcaggcacctacagtcccagctatgctggaggctgaggcaggaagattgtttgagcccaggaaatcgacactgcagtgcaccatgattacacctgtgaatagccactatgctccagcctgggcaacatagcaagaccctatgtcttaaaaaaaaaaaaaaacaaaaaaaactaataacaacaaacccccaaaacaaaattaccaggtaatgaatataacaggatgaaggtgtagaagaaatcagattggccatgcattgataacagctgaagcctcgtggtgggtatgtaggggtaccttgtactatgctatagttacatatgttcaaaatatttaattaaaagttttaaaatcttacccccatttaaaaatcttccccagccacaaggaggggaaggaaggtagagggagggaacactttcgaaggccccggccggatgcaggtcctggattaatgagccttggatatgtgtggcacttccgtaatgggggcacaattcaaacgcctaatggg

SEQ ID NO: 13673 - DNA, 982 bp, Homo sapiens
  MAP TO AP000352.2; EXPRESSED IN LUNG, SIGNAL = 1.4; EXPRESSED IN BONE MARROW, SIGNAL = 1.5; EXPRESSED IN ADULT LIVER, SIGNAL = 1.8; EXPRESSED IN FETAL LIVER, SIGNAL = 1.8; EXPRESSED IN BRAIN, SIGNAL = 1.5; EXPRESSED IN PLACENTA, SIGNAL = 1.3; EXPRESSED IN HELA, SIGNAL = 1.5
aacttgtttactatgttgttcacatcctctctgatcctcatttatgttttgtctgagggagattctcttagccctaatgagatttatcatcttatgttataattatttgtttatagtttaactttattctctccactggaatctgaacttctaaaaagcaaggactatacctattttaagaaagtattcagtaaatattcgttgaggaaatcaatgactaaataaatgagtgaagttcccaggaggcaaatatcttcttctggtggctggtagaaattggctaggtgtgctgaaagaaaggcagcttggtaaacccatcaggaggctactgttgggcccagaggtgggaccagaattactcctattaggataacaagacttttccaggaaacaggtgtttttggaatcaagtcatgcaggagcccaacagacatagccacctcaggttaaaagagttgatagagtggtggtttctctggggccctgctgtgacagggaggcagtggctacaggccctcacctcaggccatctcttctgcccaccacaggtgcgagtactccagaaggaactggctgcatccacctctgaagacacgcacccttacaaggaggagctggagacagccttggagcagtgcttctactgcctgtacagcttccccagcaagaagagtaaggccaggtacctggaggaacactcggcccagcaggtgagggtgctgcaataggcccaacaaagagggaagcaggagctgtaagctcttttgaaggatgtcatatttgtcaacagtcatcttggcagtcctgcttggagttgcatcagaaggaggagagaagacggtctgatgagtgtatcaaaggacaagggtttttcttgcaaaaacttattttcataaatgttgactgacattcaactaatgttgactaatatgtagaaccagatatggtggtgcatacctttagttctagctgctctggaggg

SEQ ID NO: 13674 - DNA, 542 bp, Homo sapiens
  MAP TO AP000352.2; EXPRESSED IN HELA, SIGNAL = 1.3; EXPRESSED IN PLACENTA, SIGNAL = 1.2; EXPRESSED IN LUNG, SIGNAL = 1.5; EXPRESSED IN BONE MARROW, SIGNAL = 2.1; EXPRESSED IN FETAL LIVER, SIGNAL = 1.4; EXPRESSED IN BRAIN, SIGNAL = 1.8
tctgcctactctgagggagctctggcctggatcagactgacctgacctgggtccaatcctggcactcctaatgctgtgaattggatgactctggggacattaggagccactccctagcaacggggagagcaacatctgtctcatagggttgtcatgataatgacaaaacatgtagggctagcacagaggcagcacatagcacccactcaggaagggctggctctgatccgtattattatgactggctgtgagtttcagcatgtagaatttcccagaaatatttccatacccgagcaccgagatggccaggaagaaagggctgttcttcaggctgctctaggactcctgtctggtgccctttcttgtattttgtcagctggattagagtccttctcccatctgagtgtgtgctccccaactacagagggttggggttttggaagggccctggggtgcctccctgttacagtgaaggaggaaaaggcctgagaacactagaagggattgtggtgatgtgactggagaacagagggctgggaact

SEQ ID NO: 13675 - DNA, 564 bp, Homo sapiens
  MAP TO AL049758.11; EXPRESSED IN BRAIN, SIGNAL = 2.1
ttgtctattctaattaaggccatgctggctttataaggctgagcaaattgttctagtttcattatcttgtactcaatatataattatactgtttatatcctagaaataatggaactcaataataaaaaaaaacaaggacaggttttatcttatttttaacagaaacagaactctttcataattcataatgttcaagttctaatgggctaatgaataatttgaaagcaataagagctcttcatcgaactaatatatttgctttcagagtccatgtttattttacctcagttgccaaagtacctaatagtatcctcattctactagtggtggtcaccatgccaaggaggactagagaaggcatttatgttcctattagacaatctgcaggtcgtgataaacaatacaccaaggtctctctggaaagagtccaggaggtgtggtctatataaatatgccatctgctcccaggtttcaaaccataagtaacagtttcatagcaacagtggcttctgggtctaactcttttgattaagcctttgaagaaggggaagtctgaaagatccc

SEQ ID NO: 13676 - DNA, 566 bp, Homo sapiens
  MAP TO AC009313.2; EXPRESSED IN BRAIN, SIGNAL = 1.4; EXPRESSED IN PLACENTA, SIGNAL = 1.5; EXPRESSED IN LUNG, SIGNAL =   3; EXPRESSED IN FETAL LIVER, SIGNAL = 2.2
ggagaaattaaggataaagcaacctaaaaaaaacaggaagtaattaagtgaagaatacaacattattgaacattgccaagaaaacagacatacaaaagttgcaagttgtagcttgctttatgcaataatgcactttgctgtaaagtagcataccttgatcttttcaaaatcagacatttgaaacttactaatagatttcactatttagaggcattctgtgtgtatatatgaaaaaaaggtcctttatggtataaataatctatctaatcatgatcccgttgcaggaatttctctttctgttccatggagtagttgcagactttgcagtccagcagacctaggttcaagccaagctctgcttcatattgattatgtgactttgggggagttactttaccttgatgagcctcaatttccataacagtaaaatggcaacaatatatacagaatgtcatagaattctaggcctatagaaaatacttaagagtgcctagatcatagtaaaggcttaaaaaatgttactgactccttcaggaaggggtcagggtgtgcattctcctaagagg

SEQ ID NO: 13677 - DNA, 557 bp, Homo sapiens
  MAP TO AC006548.19; EXPRESSED IN LUNG, SIGNAL = 1.9; EXPRESSED IN FETAL LIVER, SIGNAL = 1.9; EXPRESSED IN ADULT LIVER, SIGNAL = 1.8; EXPRESSED IN PLACENTA, SIGNAL = 1.7; EXPRESSED IN BRAIN, SIGNAL = 3.2; EXPRESSED IN HELA, SIGNAL = 1.8
tccttgggggtcactgtaaggctcctatcagagtcccctgggacccacactcatgtccccgcttcccagcttagctacctcagctgactcaccccagcccagtcaggtgtgatttggtctcctattgcaagctcttcttgagcacaggtgtatcaggcaatcattagggttaggaagatgatggtctcccctcaaggaagtctggaacttgaagagcagaggcagcccacctcgccctcatgacggtgatacaggtggtgccctgccctggaagaggcagagttggaggtgtctgcttcgccatggggagacacacatgtacatgcttcaccctggtgagggctgtgagagacgtggagatgcaggtggaacacaggatgccccttagattggcactgaagagggcatcatgaccaacatttgatagttgctgcatagatattggaagaatgagccagccagcaaagcagccaaaacccagagcccagggcggccacttttctcaccagagccagacttcaggaatgtcccagcaaggtggcagccttctagagagg

SEQ ID NO: 13678 - DNA, 579 bp, Homo sapiens
  MAP TO AC004909.2; EXPRESSED IN LUNG, SIGNAL = 1.4; EXPRESSED IN FETAL LIVER, SIGNAL = 2.2; EXPRESSED IN ADULT LIVER, SIGNAL = 1.8; EXPRESSED IN PLACENTA, SIGNAL = 4.7; EXPRESSED IN HELA, SIGNAL = 1.5; EXPRESSED IN BRAIN, SIGNAL = 1.5
aagacaggtagattatatcagtgccaatatcttgaatttgatattgtaatagtggctttgtaaatgttattgttagggggcggtgggtggggtggtgggtccttgctcccagagctcccaagatggtggcaggccacttccaaaatggcagcgggctgcttccaatacggtggcaagccttgtgttctctgacctggggttcttggcctcacggattccaaggaatggaatcttgggccatgtggtgagtgttatagccctgttagaagccgtgggtcacggaagagaaccgtggaacccagtgactaggattcagcttgatgaggacgaacctgagcacttagccttgcaggaacaatggcaagcctttagccccatcgggaggggcaatgggcccctggctggaataggagcgcagcagacaccctgccagatctggagggatggaagtcagaggcgggtctacgatggcggcaaacagcagtggtgggcggagtgaaagctcagctccagccctaacaaacacagaccaaaagagaatgcagttgcaagatttaacagagtgaagacagagctccc

SEQ ID NO: 13679 - DNA, 580 bp, Homo sapiens
  MAP TO AC009313.2; EXPRESSED IN BRAIN, SIGNAL =   2
ttaccaagtgacagaggcacccatgcattctttaatgaattcattttatgtgtgatacaaggggccctctaaattgtaggacctggacagagactcctctttcctgggctaagagctgtactcattgcagcaatgcagagggacattccaaaaggaattaagtcacttatgtaaatccttcaggagagattttgccagcctccttttcaccttacctcctgttcatcattaattatgcatggttgagaagatgtaagaaaaacaaaatagtatgatttagcacaagcttgtccaacccgcagccttgatcccacgtgcagcccaggacggctttgaatgtggcccaacacaaattcatactttcttaaaacataatgtgattttgggggatttttgttgttgttgttctcagctatcattactattagcgtattttttgtatggcccaagacaattcttccaatgtgacccaggaaagccaaaatattggacacccctgatttagtacatcttacattcttaagcattgatataagcactttatgtgctttaacatatttttatcttcacaaccaaagaa

SEQ ID NO: 13680 - DNA, 581 bp, Homo sapiens
  MAP TO AL022238.1; EXPRESSED IN FETAL LIVER, SIGNAL = 1.3; EXPRESSED IN PLACENTA, SIGNAL =   2; EXPRESSED IN BRAIN, SIGNAL = 1.6; EXPRESSED IN HELA, SIGNAL = 1.7; EXPRESSED IN BONE MARROW, SIGNAL = 1.4; EXPRESSED IN LUNG, SIGNAL = 1.4
cactgaaaattttatgttcgttatgctctaagaacagtgttattttgtattgctgtgcttaaaatgtgtactattactttttagaatataaatgtgcatgtatttatgtgtatgtagataaaactcatgtgtatttgtcaacaaaagtgaaccgtctaaccttattccttccttaattttctcttcttacagcaaagttccctgattacaaatcaacatggtccccagatcccataggacacaaccccactcatctctccaacaagatgtggaaaaaccatatttcctccaggaacactacaccgctgccccgcccacctcctggtctgaccaaccccaaaccatcatctccctggagcagcacagcaccccgatcagtcagggggtgggggacacaggactcacggctcgcctcgggtgaggaggatctgcctaaaggaacaccattgttcatccacaaggggcttatgttaacacagatggtgaagacacaaagaggtcttcccaagagaggaagtcatggttgtctgctttttcttctggtagaggaaaaggtacctcttgagtgagtgaaagtcgca

SEQ ID NO: 13681 - DNA, 559 bp, Homo sapiens
  MAP TO AC009313.2; EXPRESSED IN LUNG, SIGNAL = 1.4; EXPRESSED IN FETAL LIVER, SIGNAL =   2; EXPRESSED IN PLACENTA, SIGNAL = 1.5; EXPRESSED IN HELA, SIGNAL = 1.6; EXPRESSED IN BRAIN, SIGNAL = 2.6; EXPRESSED IN BONE MARROW, SIGNAL = 2.8
catcctctaactggattcttagttccttctaagatactgctagattttgagggtagaggagggggaagagtcacctaatttttcatttgcacctatacactctgagcttctctgctgcttggttaagcagtgtcttgctatgttacgaaagctgatttatttcctgaaagattttttttctttgccagttagtcatctttctatatacttatgctctaagctatatatcttagaatcctaataaaactattgtatagcagtttccacacattctgcattgtcattaacctgtggtttttgtctccctccctgataagtcccttttggaaacaaataattctaagacgagcatcttttattgtctctttcctgttatgtttgtcaatagtagtgtgatttttgcatttaagcttagtttcctctaagtaattccatatttaatggatttactcattgttatttctgctcctaatttctcttgactatttaacattaaagacagcatgtttccctctacattttatcttaataatattatagggagccactgacttgtctg

SEQ ID NO: 13682 - DNA, 569 bp, Homo sapiens
  MAP TO AL008582.11; EXPRESSED IN PLACENTA, SIGNAL = 1.4; EXPRESSED IN HELA, SIGNAL = 1.9; EXPRESSED IN BRAIN, SIGNAL = 1.5
tcgaattcaagaaaaaccattaactaatctatcaagttttctccgatatggtgtgccagagtgctctgtgaagaatccttttccatccctaccacgtgtctgggtgaagggagaggagggggtggcaagctgccagtacactagcaggcactcctggtgatgctctgggctctgctccctttctgctggtagtagtaggcatgttttctggcagctgcagcagactgatgttggggggaggaaggggccacccaccaatcacctcttcttgaagccgtattttttgcgttcatagaagaggtctgtcttagagctccccagattgacaatctttgggcagccatctctctggaaaacagaacagagaagttgttaagtctttgagcctgaaccaagagtgacttaagataaaaaatttaagcccagtgtggtagcatgtgcctttagtcccagctactactcgaaggccgaggcaggaggattgctgaagcccaggagttcgagactagtgggctatgatgatgcctgtgaatagccagctactgtaccccactgtaggcaacatagcg

SEQ ID NO: 13683 - DNA, 577 bp, Homo sapiens
  MAP TO AL021707.2; EXPRESSED IN HELA, SIGNAL = 1.5; EXPRESSED IN PLACENTA, SIGNAL = 1.7; EXPRESSED IN BRAIN, SIGNAL = 1.5; EXPRESSED IN BONE MARROW, SIGNAL = 2.4; EXPRESSED IN LUNG, SIGNAL = 2.1; EXPRESSED IN FETAL LIVER, SIGNAL = 1.4
taggaaccttcccactgtgctcctccggctcaaggaggagctgtgagccggaggggatcggggcaagcctggacttgcggatccaattactggggttatgatggtcgctccacctcactcattcactaactctcacatagatgtatgggttcatctacacgcagggtagcagtggtgggcaacgtggatgctggcaaaagcacgcttctgggggtcctgacacatggggagctggacaatggccgaggctttgcccgccagaaactcttccgccacaaacatgaaattgaatctggtcgcaccagcagtgtgggcaacgacattctgggctttgacagtgaaggcaatgtagtgaacaagcctgacagccacggcggcagcctggagtggaccaagatctgtgagaagtccacgaaagtcattaccttcatcgacttggctggtcatgagaagtacctgaaaaccactgtcttcggcatgacaggccatctgcctgacttctgcatgctcatggtgagtgggaggcgccccaaggaggggaggcgtcagcagggctgcttgggtctggttatgtgca

SEQ ID NO: 13684 - DNA, 544 bp, Homo sapiens
  MAP TO Z98884.11; EXPRESSED IN HELA, SIGNAL = 1.7; EXPRESSED IN BRAIN, SIGNAL = 1.5
aggggctgtcttgttccagtgggtcattcacaagtgagttgtatgaagatcttagaacagttcctgcctcctaataagtgctgtatgtgtttctgatgttaattaatattttggggtgctttctctgagccaggcactttgtcagtgctgggattcaaacagttcttgcctcacgtaccttaaattctgtgaggaggagaccaataataaacacatattcaaatgcctgtgttggctggtgataagttgtgtgtagacagtaaagcaaggagcgggagttctgggaagcgggagattgccgttgtattcagggtgatccaggaactcttaggaagtctaattggaaacagcgaccagaaggagggcagggggtgagccacaccggtatctgaggggtggcaagtgtctgagaaagtgtgttccaggcagagggagcagcaggcgcagaggccctggggtgggccatgcctggcctgtgggaggagtgacacggagctgctgtggcctgagtggaggaaggaacgaggatggaagaagacgggaa

SEQ ID NO: 13685 - DNA, 563 bp, Homo sapiens
  MAP TO AL031588.1; EXPRESSED IN FETAL LIVER, SIGNAL = 1.7; EXPRESSED IN PLACENTA, SIGNAL = 1.5; EXPRESSED IN BRAIN, SIGNAL = 1.5; EXPRESSED IN BONE MARROW, SIGNAL = 1.5; EXPRESSED IN LUNG, SIGNAL = 1.3
tgatgtcactttccaccagccctcaccatggccggcagggacactgtttactacccaatcacaggccctccgggaaaatgtcctcttggtaactgcaccttttcaaatgtgaatcccatacaagctactctggagcacagagggaggggtggcagtgatcctcaggcacaacccactgtcattcctccaaagatttcaatctgttcacaagaatttggctctgacctgggcacatgaacttaccatttctaacttcaaaccgatttctgaaaagcccttcgggcttcttaacgtgcttctgctcaaagacttcttcatcttccagggaagttcttgcatagtgacctgtggcaatggcatctgcccctgtgaggtttttagaacacaaggatcaggttttagactcatacttgcaggccttgatcagcataaaccaaggcacaaaagaagagtatagaccccaagtcttaggctgaggggctgcacaatccaccctgcacccaaacatagagatcccagggaacagacgcacacatccaatttcatcaaacaagcagccttga

SEQ ID NO: 13686 - DNA, 564 bp, Homo sapiens
  MAP TO AL049649.4; EXPRESSED IN PLACENTA, SIGNAL = 1.8; EXPRESSED IN BRAIN, SIGNAL =   2; EXPRESSED IN BONE MARROW, SIGNAL =   2; EXPRESSED IN LUNG, SIGNAL = 1.5; EXPRESSED IN ADULT LIVER, SIGNAL = 1.7; EXPRESSED IN FETAL LIVER, SIGNAL = 2.4; EXPRESSED IN HELA, SIGNAL = 1.3
gtcatagaagtgcaccaggctacatggggccctgaggccctgaggcccaaggatggtggccttttttctgagtgaaatgaagaattcctgtggacttttaagaagaagagctatatgatcgaactcatatgttaaatggatctctctgcctacttggctgggggtacactaaaggggaataagggaagaaatgaagaccacttagaaacctattataatgatccagatgagaaagatgggggttggaccagggaggtgacagcagaggtcatgaaaaatgatggatactggatattttgaaatggaaagcaccaatggttttcatacagactggacgtggtgagctatgagaggaggagggggtttgaggtatttattcttcaagggttttagcctgaataattggaacgatgaagtcatcaatgagatgggaaaattaggagggagcaagtggggtagggatgatcaggtctatttttggacatgtgaaatgtgaaacgtctgttaaatctctgagtgaagtgtcaaggagagagaggtttcagctggaaatgaaaatgtggg

SEQ ID NO: 13687 - DNA, 592 bp, Homo sapiens
  MAP TO AP000356.1; EXPRESSED IN PLACENTA, SIGNAL = 1.6; EXPRESSED IN BRAIN, SIGNAL = 1.8; EXPRESSED IN BONE MARROW, SIGNAL = 2.1; EXPRESSED IN LUNG, SIGNAL = 1.5; EXPRESSED IN FETAL LIVER, SIGNAL = 2.1; EXPRESSED IN ADULT LIVER, SIGNAL = 2.3; EXPRESSED IN HELA, SIGNAL = 1.3
aatgccctgtcccctacctgccctgctccgtgcaaaaccctctttgagctgtgcctgggagacatgctgagagaattcatggaaacaaatgtgttactgacagcctctttgcctccagagttcaactggagacagagaaaccagctagaggcagagggaggtaacacggagtcccccagaaaggtctgggctgcgcgtgcttcaggtaacctcccttgaccttcaggagaacgagaaggctgcctgatcagagagtccctgaagaagattctgtggctacaggcttcagcagagtgtgagggagaccccggttatttcctcagctatttccaccaaatcctcctgtctttcgtggccaacaccccaggcaaggcttggggcccccgtctgctgctggacggtaagtcctggccccgtggcagtgaatctgtggggcgctctgattgtgggcactatggaagctaaaccccatgctccaggtggggtggagggtcttcagaggactcctggacagtgccaggctctaggctggggtgggggacacaggagaaaccaggccaggcccatccctactggagcttctccctaagca

SEQ ID NO: 13688 - DNA, 558 bp, Homo sapiens
  MAP TO AP000053.1; EXPRESSED IN HELA, SIGNAL = 1.4; EXPRESSED IN PLACENTA, SIGNAL = 1.5; EXPRESSED IN BRAIN, SIGNAL = 2.1; EXPRESSED IN BONE MARROW, SIGNAL = 1.7; EXPRESSED IN LUNG, SIGNAL = 1.2; EXPRESSED IN ADULT LIVER, SIGNAL = 1.8; EXPRESSED IN FETAL LIVER, SIGNAL = 2.1
gtcgggatcatggtcagtgtggggccctgcagctgcctgcttccctatgctgtgtggatgacgcccgcctccggtcattcccctgtgcttacataacagtgaaatggaacaacctgtatcagcacgagggccaagaattttcttctgacttgtggatacctccttccttaggcctctgatcagtctggacaaatattgccctgaacgcaaccaagcaaagccactcacctggtaaatatttgtatgagctacagttctggaagaacaaattccaatatcctgcagtccccttgacatcaaagacccaactctcccagagggcaatggcttttttgtccactgagaagccagtcagcttcgaagaaaggtgtctaaattgggagcaaaggtggcaatgatgtggacttgactccaaaagaaattttaaaaagaaaagaagtgcctttgcatttcagggggtcagtattggcatttttaaaatgtcaacaaataaatgttcatatccacacttgacattctttccaaggagaattttctagaggagacagacctcatcgg

SEQ ID NO: 13689 - DNA, 577 bp, Homo sapiens
  MAP TO Z97055.1; EXPRESSED IN FETAL LIVER, SIGNAL = 2.2; EXPRESSED IN ADULT LIVER, SIGNAL = 1.8; EXPRESSED IN HELA, SIGNAL = 1.5; EXPRESSED IN BRAIN, SIGNAL = 2.1; EXPRESSED IN PLACENTA, SIGNAL =   2; EXPRESSED IN BONE MARROW, SIGNAL =   2; EXPRESSED IN LUNG, SIGNAL = 1.7
tgctcagcacgtcaacctccaaaaaatgatgaatgttaagttgaactaaattaagtaattgtgttttgtattagtttacactagcatgaatgtcttgctgccccaaatacagagcctaaagaaaaaagcttatactgttttgtttgtaatactcctttatcatggatataaaagtctaatttcaggagctatctcagaaattcactattacctcatgaatatcatcagacccaccacacctgatgtgatgacagacacagatacggcaaccgagaaaaaacaagtcgtgtcagaaacactgaccacaagtgtgctgtcaaacatctcaaaacagttgcactcgaagccttttaaaatgtaagagctgcagacaattacgctctctcccagctcctataagcagacaaggagggctgagcacatcctatttatagtcaagccaaatccaagcaagtcctcagctcctgcaaagttgcatgttttcccagcttcagggttcaggaactagaagtcttgctgctgctgccacctattgcaggaaatgtgaatctaggttcaagaaaagctggattgtcga

SEQ ID NO: 13690 - DNA, 562 bp, Homo sapiens
  MAP TO Z98884.11; EXPRESSED IN PLACENTA, SIGNAL = 2.1; EXPRESSED IN BONE MARROW, SIGNAL = 1.4; EXPRESSED IN LUNG, SIGNAL = 1.9; EXPRESSED IN FETAL LIVER, SIGNAL = 1.6; EXPRESSED IN ADULT LIVER, SIGNAL =   3; EXPRESSED IN HELA, SIGNAL = 1.4; EXPRESSED IN BRAIN, SIGNAL = 1.5
cgtgggatcagatacttcagggatacaaagtaggtcctattaaagcttaacatttgtccctttagtaggtgggacagtcttggaaattatagagaaattagaagaaatgcaattaaaactttcgttcattgcttcaggaagaatttctttttctgttttagttctaatgtaagagattgttaacagtgagagtcccggagtaacatctttatacttaagaaaatgtatttggaatcgtaatgtactcatgctcatgcctttacatgttccaggtctacaggtccaactgctgccactggcagtaatcgaagacttcagcagacacaaaatcaagtagatgaggtattgctctgaaatgttggaaatatgaattttaaacaaatatgagtactctggaaatctgtttagaaaaagtatcatcaaagtgtgaatgtaaagcaaattctgactgtatcataattgtaacgaaactttgctccctgctgtgctggaagatctaatctaagcaaaagtcagactttctaggtttcacgcttgttttcctgtgatagaaacctgctca

SEQ ID NO: 13691 - DNA, 578 bp, Homo sapiens
  MAP TO AL031588.1; EXPRESSED IN BRAIN, SIGNAL = 1.4; EXPRESSED IN BONE MARROW, SIGNAL = 1.6
cggcagcatggactcatagtaaatagcaacatttgtaactggactgttttacaaagaatgctgcttgcctcgagtattttgagaaagtgcacatatgaaagcctccactacagggcaccgttcatgtggtcccacgctgtgagtgccctcagccctcacctctcctccacggtgacagctggtgtcacagccaatgagcaacaccaccagtgctctcagccaaaaagtgcacaccaccacgtgcctcccagagctgtgtgttcccaacagcgtggctgctcccctggggcctctcttccggccagtgctgagtttgtgggaccagttttgaccctgatgaatgaccaaaggcgtgcaagagacagtcctgttcccagcattgtggagagaggaggaaccgcctgccgaaggtgaaatgcacatctgagaggtgcgtaaggagaccgcagggacacgctctgggaaacagggcaaagccaacagggatttgggattagcagaagtcctgtggcatcaagcagcccgacagccaggagaccagccaacacttgtgccaacgtggtcaggagagacatggc

SEQ ID NO: 13692 - DNA, 577 bp, Homo sapiens
  MAP TO AC007900.1; EXPRESSED IN FETAL LIVER, SIGNAL = 1.8; EXPRESSED IN PLACENTA, SIGNAL = 1.5; EXPRESSED IN BRAIN, SIGNAL = 1.5; EXPRESSED IN BONE MARROW, SIGNAL = 1.5
  unsure 486
gacacttctatcaaggcaggcctatttgatttttaagctaaaccacaattctaacagcatttgtatgaaaaaaatattcataagtataaatcattttagaaagtcaagatatgaaactccattatatggaaaatcaaaattaattaattaagtgactaattacttaaactatgcttgagaataaaggaggtaagagtccagataggcaggaaagggttatatatatatatatatatatatatacctgcaggttctcaatgcaaaattgatgtccatacatgtcaatagctgataggaagatagactctacttggttatggcgaagctcatatgatggcaaatgggaggcaataagaacctagagtgagaacaaaataggaggcacacattcctcggagtgattattctagactcctattaggcagctctgatacaaaagcaataaatataaatctgtaagtgcaggcatcacagataaaacagagnaccaagtaaaacaacttctaggtcctgtaacataaagccagtgccaccaaatactgaatctcagttgactctcaccatgatttgcattgtg

SEQ ID NO: 13693 - DNA, 569 bp, Homo sapiens
  MAP TO AC007286.18; EXPRESSED IN PLACENTA, SIGNAL = 2.1; EXPRESSED IN BRAIN, SIGNAL = 1.4; EXPRESSED IN HELA, SIGNAL = 1.6; EXPRESSED IN LUNG, SIGNAL = 1.2; EXPRESSED IN BONE MARROW, SIGNAL = 1.4; EXPRESSED IN FETAL LIVER, SIGNAL = 1.7
acttcggcagagcttccaggaaacaagacagctgacaagcaccttagtttatcaaaaccaagataaaaatgcaaataatgaacttgaagcaacagcaggacaagtcagatggaaaaacataactcacctccttttctccaccccacgcagtctttctttcagagcaaggcactattaccatgaggactatgctaagaatgtatgagagaaagcaagagagagctgtctcaggtgggtacatttacctggcagatctgcaggaagtgttgcttataaaagcatggttgaagattgtacctgggctgatgatgcatagtgaagatttttgaggttttcccttcatccattagcctggcattcggtcactctcaaaacatgtattcagtgcttgctgtgtgcataagacactttgctctgggggtatgaatcagatacatctctatactcaaggagtttgcaatccaggagggagctgagcagatacacacataaataagatataaagtagaaagtgataggagccctaggaaaggaatttaatgaatagaggtgtcagcaaaggtttctca

SEQ ID NO: 13694 - DNA, 590 bp, Homo sapiens
  MAP TO AC004032.7; EXPRESSED IN BONE MARROW, SIGNAL = 1.5; EXPRESSED IN LUNG, SIGNAL = 1.3; EXPRESSED IN FETAL LIVER, SIGNAL = 1.9; EXPRESSED IN ADULT LIVER, SIGNAL = 2.1; EXPRESSED IN PLACENTA, SIGNAL = 1.5; EXPRESSED IN HELA, SIGNAL = 1.4; EXPRESSED IN BRAIN, SIGNAL = 1.9
tggaaagaacagaagctgccatgagatttgctatcttaaggaagtacccacaaaggggcatgcacagattttgaagcccctctcacctccagacaagccccttcttcagacaaaaacttcccttttcccttctgtgccagatggaatattatcctcccaaaatttgtcaccctggatcctcagaatgtggctctatttggaaatagggtctttgcagctgtaatcaagatgaggtcagactggttacagcaggtccttatgtagtgatttgtgactttctaggagaaaaaggagagagatttggatacagtgacacagactctcaaggagaaggccctatgaccacagagacagagactggagtgacgcatctagaagccaaggaccaccaaggatcgcagaaaccatgagaagctgaaatagacaggcaaggattctcccctagaaacttcagagagagcatagccctgtggacatcttgattttggacttcgagcctccagaaccatgagcgaataaatttctgttgtcttacacccttccatgtgtggtattttattatagcaaccctaagaaaccaatacaccctc

SEQ ID NO: 13695 - DNA, 550 bp, Homo sapiens
  MAP TO AP000356.1; EXPRESSED IN FETAL LIVER, SIGNAL = 2.3; EXPRESSED IN ADULT LIVER, SIGNAL = 1.4; EXPRESSED IN BRAIN, SIGNAL =   2; EXPRESSED IN BONE MARROW, SIGNAL = 1.7
gtcattgaatggccagagctgatgcgtgacgtgaggtccaggctcgggagccctcaccttacttcactctcaccacagccttctgaagcagctgctgctattggttattaaacgctccttgaggtgggcaaagtggctcaggcaggtgttaaccctctgagcccctcagagcctctggggctcagcaacatgcacctggctctgatcaaccagggtacaacttctcccgggagagcgtggagagccccgagcagaagggcctgacgtaccaccgcatcgtagaggctttccggtttgcctacgccaagaggaccctgcttggggaccccaagtttgtggatgtgactgaggtaaggggcaggggctggcccactgtgggtgtggggcctgccatagaggcatcaggtgggctccccagggtggctacagcctcacatatgctttatgaatccattcctgccacagacttcgattgcgggcctactgtgtgctcggatggactcgtgggtgacccccagtcttggcttctgccgcacagaactgacagtgt

SEQ ID NO: 13696 - DNA, 574 bp, Homo sapiens
  MAP TO AC007567.1; EXPRESSED IN BONE MARROW, SIGNAL = 1.4; EXPRESSED IN FETAL LIVER, SIGNAL = 1.2; EXPRESSED IN PLACENTA, SIGNAL = 1.3; EXPRESSED IN HELA, SIGNAL = 1.2; EXPRESSED IN BRAIN, SIGNAL = 1.8
ggacagagctgggtcaacagtacagtacaaagcaagcatttctactctttgtgattacaactatctaaacatttccgacagatttcatgtggtaatgtttttctgaatgccattttacagaacttaaacaataaagaattaaagttaaaacttgaaaaagataatcaaagaaaatgaactgtaatcgttttttagaagctaaattgcatcaacatttgactatccattatgtcttttgtcatttcagcattatgtactatcattatctattctttcagggttctgaaaaggctttagaatctgctgattgtcatcaactcgctactgtagcctcaaagctctgcagcactgctggaccatggcaaatgtaaaaaagatagttaactattgcaaatagggtttctgctgccagataaacagcattacaaagctggagttaagagtgctcacatctgggcactttcagagagaaatctttcagagaaaatgaacaaaaccacttgggattagtcacatttccaatgcgaaaaccggcgagtccagaatctagtcactcagtcgttgacagataaaa

SEQ ID NO: 13697 - DNA, 593 bp, Homo sapiens
  MAP TO AB016897.1; EXPRESSED IN LUNG, SIGNAL = 1.4; EXPRESSED IN BONE MARROW, SIGNAL = 1.7; EXPRESSED IN ADULT LIVER, SIGNAL = 2.3; EXPRESSED IN FETAL LIVER, SIGNAL = 3.3; EXPRESSED IN BRAIN, SIGNAL = 2.3; EXPRESSED IN PLACENTA, SIGNAL = 2.5
ctggctttgtacataattgcctaaaattagaagtaaccaagatgtccttcaatgggtgaataaacaaactggaatacatgcagaccataaaatatttttcagcactaaaaagaaatgagctatcagttcatgaagagacatgaaggaaacttacatgcatattcctaagggaaataagccaatccccaaagactacaaactggaattcatgcagaccataaaatatttttcagcactaaaaagaaatgagctaacagttcatgaagagacatgaaggaaacttacatgcatattcctaagggaaataagccaatccccaaagactacaaactgcatgattccaattgtatgacattctggaaaaggcaaaactatgaagacagtcaaaagtggttgccagggctttcaggggaaggaatgaatcggcaaagcacagacgatttttagggtggtgaaaacaccctgtataatactaaaaagatagatacctgccattatctactcatccaaacccatagaatgtacaaacaccaagaatgagccctaatgtaaactagggacttgggtgagaatgatgtgtcaatggaggctca

SEQ ID NO: 13698 - DNA, 960 bp, Homo sapiens
  MAP TO AC008151.1; EXPRESSED IN LUNG, SIGNAL = 1.5; EXPRESSED IN BONE MARROW, SIGNAL = 1.7; EXPRESSED IN ADULT LIVER, SIGNAL = 2.9; EXPRESSED IN FETAL LIVER, SIGNAL = 1.6; EXPRESSED IN BRAIN, SIGNAL = 1.7; EXPRESSED IN HELA, SIGNAL = 1.5; EXPRESSED IN PLACENTA, SIGNAL = 1.9
aggctatacatggacccagcaacatggacttccactctccaaggctgatctggctatggacaccactgagtgtccaatctgacaggagcagaaaccaacactgaattcccagtatggcacagttccctggaggtgatcagccagctacctagaggcaggttgattacattggaccacttctatcatggaaggggcagcgttttgttcttggtggaatagacatttactctggttatgggtttgccttccttgcacacaacacttttgctgaaactaccacccatggaattacagaatgcttatccactgtcatggtattctacatagcatttgcttctgtccaaggaactcacttcacagcaaaagaagtacagcactgggcctgcgttcatggaatttactgaagttaccatattccccaccatcctaaagcaggtggcatatgtagaacagtgtgatggccttttgcagactaatttacagcatcagctacgttgcaataccttatagggtgggggcaaggttctccagaagcctgtatagctctgagtctgcatccagcatatggtgctctttctcccatagctaggattcaaggatccagaaaccaagaggtggaaatgggggtggcaccactcactattacccttagcaatccactagcaaaggttttacttcctgtacctgtgactttatactctactctcctagaagttttagtttcagagggagaatgcttccaccaggaatcacaacaatgattccactgaattggaagttaagactgccaccttgccactttgggcccgtcatgcccatgaatgaacaggtgaggagggaggtatagtgatagttgggatggttgttccagactatcaaggacaaattggactactactccacaatggaggtaaagaagactgtctggaatacaggagatcccttacggcgtgttttagt

SEQ ID NO: 13699 - DNA, 544 bp, Homo sapiens
  MAP TO AP000111.1; EXPRESSED IN PLACENTA, SIGNAL = 1.6; EXPRESSED IN BRAIN, SIGNAL = 1.4; EXPRESSED IN BONE MARROW, SIGNAL = 1.7; EXPRESSED IN LUNG, SIGNAL = 1.4; EXPRESSED IN FETAL LIVER, SIGNAL =   2; EXPRESSED IN ADULT LIVER, SIGNAL = 1.9
aaagagcaggacacaaccagaaaagtctgtggttctgttatatcattggacagtgtaatgaaatgtaatgtgttttaaaaaataaaaattctatattcctaaatcttgaatagattcctatttcagaaaccatccattctgatgagtctcccttagctctgaaagaaagaggataaaaaccaaatacaagaataataaaaaccacctgtccaagatgaactggagaaagggtgctaatctccctgcgacaactcctacaactgtatttgatcaggatgataagaaaagttttaactcatgcctcaagcagagccacaagacctgccttttttgatgaccttgaattctacaacacaggctccaaacctcacatcttgtcaactctcaccatgagaaaagtaggaaacactctctcacgttcccaagtactcaccataccccccaaaataagtaaaagcttactttaaaaaataatttgttttcagagcagaaatcttctaaaagttgaattctgattccgtacacacctgcggagaggtacttg

SEQ ID NO: 13700 - DNA, 579 bp, Homo sapiens
  MAP TO AL049649.4; EXPRESSED IN FETAL LIVER, SIGNAL = 1.4; EXPRESSED IN HELA, SIGNAL = 2.5; EXPRESSED IN PLACENTA, SIGNAL = 1.3; EXPRESSED IN BRAIN, SIGNAL = 1.7; EXPRESSED IN BONE MARROW, SIGNAL = 1.7
gaagctacaaggcatgggtcataatctccccatgaaaaatcttttgccttatattaaattctcttcctttaaagtacagcacctctcagactggccacatccccctgaaattctctttgtcaacaaagataatggagaagatacaatggactgtctttcagaagtgtttcttttctcttggatttcttcgtctatgagctggaggtcatgaaatttgagagctatataagatcctacatattacctatatgatccttgtattttctaggtaagtaaaattgaggtgcaggagagtgaaagtgacttgaacaaggtcaccagacagcaggcaattgagctgggcttggccttctagttttctgcctccatcacagcacagtccgccaacaagtcagattaaaggaagcctcctcagaaaatatttgtaccaggtttccaaggttgcctcattcccgctatagtgttctcattccatcccttgccagaccatgacgtagctaagaattacaatgaccccattctgtagttaaatctgatggctttttcttaagtgtgtttgactcatcagtagattgttgg

SEQ ID NO: 13701 - DNA, 561 bp, Homo sapiens
  MAP TO AC004624.6; EXPRESSED IN HELA, SIGNAL = 1.6; EXPRESSED IN BRAIN, SIGNAL = 1.8; EXPRESSED IN PLACENTA, SIGNAL = 1.8; EXPRESSED IN LUNG, SIGNAL = 1.6; EXPRESSED IN BONE MARROW, SIGNAL =   2; EXPRESSED IN FETAL LIVER, SIGNAL = 1.9; EXPRESSED IN ADULT LIVER, SIGNAL =   2
gacactggagaaagggttgctcctggaggaatctcagtcccagctgcctaaggaagctttagggagaggtagcagttgatttgaaatcatcagaggtgtggggtgggttacaaatggactgaaaaggcctcctttcctacatacacaaccccaggtagcagtaacaatcaacgccagacaaatcaatagcagcatccacagtgccaatctggtttgcttagagctaagatcaggagcagggtggtctgggcacagtccaagggcttgggggtcatacaggacccaaaggggtttgattctggctttgctgatccctgtatgacttggcaagtgacttgtctgctccaagtttcagtttcaacatctgtgaaatgggaggcaatatcagtttcttggcatcatttagaaattcaatgtgacagcatgtgtgaaaagaccttggaaaatgcccagcacaaagtaagtagtggggatgagggagggaggcttaaataattttactgaaataataataacatcaaatatttagtgaaaacttgctctatgccaggccctgttcta

SEQ ID NO: 13702 - DNA, 569 bp, Homo sapiens
  MAP TO AC006427.13; EXPRESSED IN BRAIN, SIGNAL = 1.4; EXPRESSED IN PLACENTA, SIGNAL = 1.6; EXPRESSED IN LUNG, SIGNAL = 1.4; EXPRESSED IN BONE MARROW, SIGNAL = 1.3; EXPRESSED IN ADULT LIVER, SIGNAL = 2.6; EXPRESSED IN FETAL LIVER, SIGNAL = 2.8
aaatctaaatttgcaacactcttccagtttaaaacaatgtcatttcagattaagtacttagtcagcccaaatttcatatatcaaaaaactgaaacacatgtaatccactcttcccattattaaaacttaatgatggagctgaattaagaaaaaagagaatgttatgtaggggtgtcagatgcccggtccctgcctcctctagactgtggataccagaaggagtcctgggagagaggaaaagacaagaatgagaaacccatcctcacttctggtcccaaggggatatagtggaagtgcgagtagaccagcagccaaagagacagcctgtccttgtttcccctctctgggctctggctgggaaatagggaagggtgcatccctaaaaatccctaaaaatgggaaaggggagggtgcatccaagaaggtataggacgccaaggaaagacggcacttgcctcacttacacatgtggctctgaggggcgatcacctgccagaatgccccatcaccaccattgaagaaatcatctctgagtgcatttgacatgtcaggcactgatccagcacatc

SEQ ID NO: 13703 - DNA, 588 bp, Homo sapiens
  MAP TO AC004032.7; EXPRESSED IN BONE MARROW, SIGNAL = 1.5; EXPRESSED IN FETAL LIVER, SIGNAL = 1.4; EXPRESSED IN ADULT LIVER, SIGNAL = 1.6; EXPRESSED IN HELA, SIGNAL = 1.3; EXPRESSED IN BRAIN, SIGNAL = 1.4; EXPRESSED IN PLACENTA, SIGNAL = 1.7; EXPRESSED IN LUNG, SIGNAL = 1.3
ttaggcagttggtctgggacacatcaggtttcaaaacaaggttgcccgtttcctatacaatgttggttcagctctcgtatttgtttttaaatgaatgctgacatttggggttcacaatagggtgaccaactgttccagttcccccaggaatgtactggttttagcagcaaaagtccagccttccaggaaaccctctatcctgggcaaaccagaatggctggtcaccctcgctgaataacagaccaaccaagaggcaaccccagtgttgcagagatttccacgcatcactgtggccaggcctgtcgcacagccacattctgtgttggtataatgacctcgagttccaccagcaggacactgaggctcagggggactgcgaccacttgggggcctgttgcttggtaagtggaggcagtgggcttggaatgcaggtgttggatgctaaaaccccagcagcaacgtcagtcacgaccaccgagctgcacattcttgagataggttgacaagtaatggaacgaagctcttcccaatcaacagcaatcccactgttccttgcttggccagaggtctcttccctgttcccatgaa

SEQ ID NO: 13704 - DNA, 560 bp, Homo sapiens
  MAP TO AP000127.1; EXPRESSED IN FETAL LIVER, SIGNAL = 1.3; EXPRESSED IN ADULT LIVER, SIGNAL = 1.8; EXPRESSED IN HELA, SIGNAL = 1.4; EXPRESSED IN PLACENTA, SIGNAL =   2; EXPRESSED IN BRAIN, SIGNAL = 1.6; EXPRESSED IN LUNG, SIGNAL = 1.7; EXPRESSED IN BONE MARROW, SIGNAL =   2
cctggaggctcagtgatttgcaccacaaaatggaactgaaattcattttccaatctcttttcaaaaagcatcaatcataagaagggttgaataatttgggctggaaggaactctagggcagaaagcagaaggtgaaagaaacaagcaaagaccagcaaaatagttgctgctttttgaacccgaaaatagcaatcaccagctacatgacttgtgtaaaaataaaccctcagaggacagtgtcaaggttgaaaaattctaaattgaaccattctctctgttgatgcctgttttcagattcatgtggtttttcatgtgtgtcttcaatggagatcaaaatcagggtgctgtcaagaaaggtgagtagaatcccaagtgtttttcagcacaactaactcccatgtggcaaagcccatgtgtcgttggcatgggctccagtcctggccttccaaataaagagagggagacccatttgtaaccagacatgagtaatgtttatgtacagggcctaagagagaaggcaccgagtctcccaagatgtatcatccttccctgatccagaa

SEQ ID NO: 13705 - DNA, 984 bp, Homo sapiens
  MAP TO AC007556.2; EXPRESSED IN FETAL LIVER, SIGNAL = 2.9; EXPRESSED IN ADULT LIVER, SIGNAL =   2; EXPRESSED IN PLACENTA, SIGNAL = 2.3; EXPRESSED IN HELA, SIGNAL = 2.1; EXPRESSED IN BRAIN, SIGNAL =   3; EXPRESSED IN LUNG, SIGNAL = 2.1; EXPRESSED IN BONE MARROW, SIGNAL = 1.7
ctccattgatcagcatgcactttcatttttcccataggaaatctttatttcaccaatgcctttgtttctgaaacactgatagaagttctgcggatcaatactacttaccgccgtgttcttcttaaagtcacagtggacatgcctaggcatattgttgtagatcccaagaacagatacctcttctgggctgactatgggcagagaccaaagattgagcgttctttccttgactgtaccaatcgaacagtgcttgtgtcagagggcattgtcacaccacggggcttggcagtggaccgaagtgatggctacgtttattgggttgatgattctttagatataattgcaaggattcgtatcaatggagagaactctgaagtgattcgttatggcagtcgttacccaactccttatggcatcactgtttttgaaaattctatcatatgggtagataggaatttgaaaaagatcttccaagccagcaaggaaccagagaacacagagccacccacagtgataagagacaatatcaactggctaagagatgtgaccatctttgacaagcaagtccagccccggtcaccagcagaggtcaacaacaacccttgcttggaaaacaatggtgggtgctctcatctctgctttgctctgcctggattgcacaccccaaaatgtgactgtgcctttgggaccctgcaaagtgatggcaagaattgtgccatttcaacagaaaatttcctcatctttgccttgtctaattccttgagaagcttacacttggaccctgaaaaccatagcccacctttccaaacaataaatgtggaaagaactgtcatgtctctagactatgacagtgtaagtgatagaatctacttcacacaaaatttagcctctggagttggacagatttcctatgccaccctgtcttcagggatccatactccaactgtcattgcttcaggtaagtgcactccaggtgctgcttgt

SEQ ID NO: 13706 - DNA, 555 bp, Homo sapiens
  MAP TO AL023553.5; EXPRESSED IN BONE MARROW, SIGNAL = 1.5; EXPRESSED IN BRAIN, SIGNAL = 3.6
attcacaggaagagcactggtttactgttagacagatctgggactctgtcacctgctgtgtgactttgggcaagtcactcaacctctctgagcctcagctatctcatctgtaaaatggaaaaattgtaatttcaactctatagggtaactgggaggttgaaacgtagaaaataatttctgtaaagacttttgcacagtacatggcattcagccaatgaaagcctcattttcacttgccctctttggcagcaatgctctggagagggggtctgaactggagggttgctccgtatctccatcttcccttctctctggtctctcgggctgctgggcattgtacagctcctccaagcccacgccctggcagggcccagagagggaaaggccctgtaccagctcacacagtaggtcaatagcaatacagagcctggacacaggactcctgccttcccactggaaggctccagatcatactgattcaaattctggctcagactttgattggtgtgtgtccttgagtgagtgatttaacctctttgagcctcgattttcttg

SEQ ID NO: 13707 - DNA, 576 bp, Homo sapiens
  MAP TO AL022327.17; EXPRESSED IN FETAL LIVER, SIGNAL = 1.6; EXPRESSED IN ADULT LIVER, SIGNAL = 1.8; EXPRESSED IN PLACENTA, SIGNAL =   2; EXPRESSED IN BRAIN, SIGNAL = 1.4; EXPRESSED IN LUNG, SIGNAL = 1.4
atggcatattctgaggggtgctatccatgagccagcaaaattcatccacagtgatggagaccagagctgtgggagagggggtgtggccggagattggtccaaggaatggtggtagacgtgtcagcggtgtgtgaaccagagcgactccatcttgaataggggctggttaaaatgaggctgagacctacagggctgcattcccagatggtgaaggcattctaagtcacaggatgagataggaggtcggcacaagacacaggtcataaagaccgtgttgataaaacaggttgctgtaaagctggccacgacccaccaaaaccaagatgatgatgagagtgacctccggtcgtcctcactgctacactcccaccagcgccgtctcaaagaacataaataaaataaaattaaattaagaagttctgattatcaaaaggaagcatgaagtgactgacaaggccacatccatctgacaaagagcatgtatccaggacatacagagaattcctgcaagtccatgaggccatagcgcgatttaaccgcggcctgcagtcccggaaccgcactccgagaaggaag

SEQ ID NO: 13708 - DNA, 558 bp, Homo sapiens
  MAP TO AC004832.3; EXPRESSED IN PLACENTA, SIGNAL = 1.6; EXPRESSED IN LUNG, SIGNAL = 1.7; EXPRESSED IN BONE MARROW, SIGNAL = 2.3; EXPRESSED IN FETAL LIVER, SIGNAL = 1.8; EXPRESSED IN HELA, SIGNAL = 1.2; EXPRESSED IN BRAIN, SIGNAL = 1.7
gtgatcagggagcacaaaccccgcacatctgcaggaagagccagccctgcatgggtgcatccctggaacccttgggaatgagctgcatccctggaacgtcctgcatccctggaacccttggaaatgagctgtccaggacagtgggtggggcctgagggccagcctgtgcccagccctaagcccattgctcgctgccatctccatggtggcttgcgctacatgaaggaatcatgatggtcatcagcatatagaacagcacacagccagggagcaggcggcctgggaacgggatctcgagctccacctgcagggaggagctgtggcccacggacacagtatgctcgtactgcgtcctcgcctagttgcggttgcacaggtagctcttgggcctctccatgaaccatggattccatcacacattatagcccctgaatcctcaaagcagccccatgtggaaggcaatgtcatcctcattttacagaggagaaaactgaggcttggagaggtgatatgatctttcagcggtcacagagcaagggaggggaggtactgggattc

SEQ ID NO: 13709 - DNA, 576 bp, Homo sapiens
  MAP TO AP000123.1; EXPRESSED IN PLACENTA, SIGNAL = 1.2; EXPRESSED IN BRAIN, SIGNAL = 1.5
taagcagcaacaaaacctgcacctaaagaaaatagatgcacagaaaaataagcaaaaaattaaacattgacctaatataaaactggtaacaacatattcattgacattaaaacaagatccttcataaagactaaataaatattttctgagtatctcctgtccttgatacgatcacaaacgttaccatgctacatgcaattctcacagcatcctagtaagccaccatctagacctctttacagacacaaagctgaagatgctcagaatctcaggcacagccccgaaggcagccagctgggtccacttcattccaagccacaaatgcaacacagaatgctctgtgctgcctctgcataaccacccctttcactaaatgcaggaagtcacccccacaaccaacaagctctatacccgcaccccatttcaccctgtgtctagtttgaaagatacatcttgaatttagctattctagaaagagataccaatacaaatgaaccctgaatcactttccaaacacctgcaggtgtttccaggcagttcatgaactgtaacacagtgaatttttctgaagggtgg

SEQ ID NO: 13710 - DNA, 569 bp, Homo sapiens
  MAP TO AC007539.8; EXPRESSED IN LUNG, SIGNAL = 1.2; EXPRESSED IN FETAL LIVER, SIGNAL = 1.4; EXPRESSED IN PLACENTA, SIGNAL = 1.2; EXPRESSED IN HELA, SIGNAL = 1.8; EXPRESSED IN BRAIN, SIGNAL = 1.6; EXPRESSED IN BONE MARROW, SIGNAL = 1.5
gatttcaggtttgtgggcaggcctggaagctacgtctatgtattcgatggttaccgcatggaagaggcaagtacagccactggtgtttcatgcctggcaccccaacccagccccattcttatctccagcacagcatggcttcattcgcgcccctgcttctcagagctcccttttgttctaaccggtcctttccttatcttctccctgcagtgtgctccagggggctgtctcatggagctctgcattcagctcagcatcatcatgttggggaagcagttgatccagaacaacatctttgagattggagtcccgtatgtaatgaactcctctaacctctctccttgctgccaggggttagcccagaagtgccagcctttcagcaggttttctatggcctttcctcttcttagacagcttggtgatttaattctctgtcaatttgccaataactttccccatggggcaaactttgcttgccaatctgatttgagatgttggaggctcagaaggatttaccctttgcttaagtacacataactagtaagtagcagagccaggagtcagatgtc

SEQ ID NO: 13711 - DNA, 584 bp, Homo sapiens
  MAP TO AC002472.3; EXPRESSED IN BRAIN, SIGNAL = 1.7; EXPRESSED IN BONE MARROW, SIGNAL =   2
gacagtctcatacccgcaaactagtaagatccaggagagaaggggacaatgggggatgtttagaggcctgctgtatttatttatttagaaatgggatcgtactgtgtcaccaggctggagtgcagtggctcaatcatagctcacttcatccctgagctcctggactcaagctatctatcctcttgcttaagcctccagaatagcagggactacaggtgcccaccaccatgcccggctatgctgtatttccagatctgggggctggttacatagacacctatgctgtttgtgaaaattctccaagctctatgcttaatctttgtgcatttttcagcatagatgttgttcctcaattaaaaacaaaaaaccaaggggttgtgaagaacagaactggcactgatggagtccttctctgtgcaaggcctttcccttaggtctgtcatctcagcttatgttcatgatggccttgcggggtagacgttagccccatttcacaaaaacacaagtctgagcctagggaaagattttccttgaactataagtcttcaaaactatttccctcaaagctcagaataaaatctggg

SEQ ID NO: 13712 - DNA, 955 bp, Homo sapiens
  MAP TO AP000111.1; EXPRESSED IN ADULT LIVER, SIGNAL =   2; EXPRESSED IN PLACENTA, SIGNAL = 1.4; EXPRESSED IN BRAIN, SIGNAL = 1.4; EXPRESSED IN BONE MARROW, SIGNAL =   2; EXPRESSED IN FETAL LIVER, SIGNAL = 1.7
tctgaagtcaaaccttcttcaccaaagatcataagtcttaatcatgaaatatatccagtctcttgaaaccagtaaagcgaatctatgtactcctgcattccaccttatcccttcaaatcctctgatgattggccaaatatgaaaagagatcataacagcactgacctttatgtaggccatcaatcttatttcacatccattgtctattttgatgacgtctttacactgtgtcattcgggtcacaggttaatgatctactttgtattcactggaggtgatcacagtggagtctcaggtgggccacaagttgagacacaaggacatcatctcctgtgtggtggagatgcccaagtttctcagcctctcactctcccacccacttgccttgtcctcaagcattggaacagagtcacttgccatgttgatctagatcaatgaaactttagagcatgagttttaaattttaacttatttctgaaattgttgatgcagaatcaatgcacacaactgtgcaaaccagggttgagtggcccagttctcccctacagctccctgcgtgcggtaacttatagacgtccctaacactgaatggatggagtctggaaaccaccatcagaggtggtctggctacaggtccacatgcatcgttagcccctctccatttctcacatggcttcaatcaagcagagatttcatctccgtctgcttctgccagactatcaatccaaaaagctaatgggacacttgtttgttgctcccctctggtaaaaagaaatgcctgttgcttttgtgcttccatgacaggaaggcagccagttggttttgcccattcataaccaaggttaagttccctgactagctggagggcaccacgtctgtgtctcaggtcagctagcacttttcactgcactgctggcattaatttggcatcttctcctgaccacagcatgactgt

SEQ ID NO: 13713 - DNA, 565 bp, Homo sapiens
  MAP TO AP000346.1; EXPRESSED IN LUNG, SIGNAL = 1.3; EXPRESSED IN BONE MARROW, SIGNAL = 1.4; EXPRESSED IN FETAL LIVER, SIGNAL = 1.9; EXPRESSED IN HELA, SIGNAL = 1.4; EXPRESSED IN BRAIN, SIGNAL = 1.4; EXPRESSED IN PLACENTA, SIGNAL =   2
tgaagttcaagggaacaagatgtatgacaagtgactactcatctgtcagagtggcagggccactgaggatgtgacagtcattcatccactctgaaacaactcttcaggatccctaacatagaaacgaacatctggcctttacatgctttgataaacaggatctattcctgttaaagcagaggcttcgttcatctccaaagcttgtagaggaacctcagacctgggccagagatcctcagagggctgtggtttcagggcctggaggtgacacctcccaatcacacagacattgcaggctcagagggaggagcccctttgaaagaggtgagcagagtctggggcatttgtgcaaatgttgatgaagtccccagacaactcgcaggctcccaggaaaccctaactggggaagaaaagatgaggataagcagagcccaccatgggtgagaagagaggaaagccagggtctccaccacccaggtcctcagtgtccctcctccgtgtgcccggccctgtcctgtgggtggagggtgaggagagggagagaaggaagggttggcagtttcat

SEQ ID NO: 13714 - DNA, 582 bp, Homo sapiens
  MAP TO AC007567.1; EXPRESSED IN FETAL LIVER, SIGNAL = 1.3; EXPRESSED IN PLACENTA, SIGNAL = 1.5; EXPRESSED IN BRAIN, SIGNAL = 1.4
ccatgagtgaaacatctcccactgggccccacctccaacattggggatcacatttcaaaataagatttagagggggcaaaacatacaaaccataccacctaccaaaggccccttgtttttataggtcctgggaagtaagacctacttgcaaagaggcctctacgaccatcactttttgagactgaggctcacaaagatcttaaagtttaatctgatttgatttaagacctagtaattttattgctctatccatttacactttggtctgaccaattttaacataattgcatacaaaatctttcaaaagtttcatgtgtaaaattcttctttcaaacaaacttttatatgcccaattaacttggccgttggtatcaaaactgtagctcatattctagcaggtgttaaaaataataaaccagatgtaaagacaggcataaaaatatagtaaagcagattcaggaacagtgaaggagaatgaatgcatttccttaaaaggaaggcgaggaagacttttttaaaaaattagaattataacttggctgtgcatctttttttgttgctgttggcagtaaataaatctca

SEQ ID NO: 13715 - DNA, 565 bp, Homo sapiens
  MAP TO AC008009.4; EXPRESSED IN BRAIN, SIGNAL =   3; EXPRESSED IN PLACENTA, SIGNAL = 1.3; EXPRESSED IN LUNG, SIGNAL = 1.2
tctgtggctagcctttgatgaagttttaaaatctttctgttcctcagtttcctcatctttaaagtagttgtaatgatcccatttatctcataagcataatcatatactggtataggacatggtgagactcctggaaaagtgttctgagatatgagcagatggatgtggttgttatttccatagtatgttagtaagacaaacatgttacaagaacagcctgggttgctttatggcatcttactgtttacaaaattaaagagcagctgttatattattatttagccccacaaacttgttattaagattagaataactacacaaattaagatgatcatatataaactatatatttgcataaatgataaaataataatggaaatctcttaatgggaaagaaccactcagacatctaaataacaataaactgtcattttctatattcccttccagttctagtccaatacttttgacctttttagattagaatggtagaggaggaaaagtaactttttcctcaaccctcatgggttcttagttggaatgaatccccataacaaaagacaga

SEQ ID NO: 13716 - DNA, 564 bp, Homo sapiens
  MAP TO AC006427.13; EXPRESSED IN PLACENTA, SIGNAL = 1.5; EXPRESSED IN HELA, SIGNAL = 1.5; EXPRESSED IN LUNG, SIGNAL = 1.7; EXPRESSED IN BONE MARROW, SIGNAL = 1.8; EXPRESSED IN ADULT LIVER, SIGNAL = 1.6; EXPRESSED IN BRAIN, SIGNAL = 1.4
ctccatgctcctctgtctcctgtctaaccaagtaggcacctgtgttcactacctcagggagcagatgtggaggatacaaaatgaaagcccctctgtctaacattcactgctcctctcacttcctgccctagggaagtgggggagaaagaagaagaaagcagccactggggtcctgagcactattcctgcagggaggggagacttgtgccaggaatgggcaagtggctgcaacactcgatgcagagggcatcataggcagccttgcacacatctgtgatccaagcaagggaacttggagggaaacagagaaagacccactggatttgaaaaagctatgcagtcaggaacctgtggagtcccacccattccttgcaaaggacaagatcaggaactggtagacacgaagtcagagagagaaagagagtgctggggaacattttattttcccaacagcctgccataatgcagagttcaaagttaatattaaagtggtttacggataattttaatgtagtatttactgcacattttattttttaggaagacacttatgtccaatatctc

SEQ ID NO: 13717 - DNA, 581 bp, Homo sapiens
  MAP TO Z83844.5; EXPRESSED IN BRAIN, SIGNAL = 1.5; EXPRESSED IN BONE MARROW, SIGNAL = 1.4
tctctgcaggcaaccagacaccttggcctggtgaggcctcgatgtaggggctgataggtaggctcagagccatggcaaccggtggccacctcctccctgccggcgccaggagcggagactgcagagggaccgggacttagatgagagaggtctccccagcaggaagggagggtctggtggttggcacccactagatgagcatggtcagaaaaatatcaggatgagcaacttctttatctaggcctgggtgggggtgcctggcacaggtctccatgggacatgctgcagctggtagcccccagaccccggggctgtgcccccctgggcggcacccagaaggtagggcttgccaggactgacccttcccaaagagatctaggcggggaccagagggtttctgaccccagcctgtgactggctccacctcccatagtctcctggagccgaggaaaggacaggactggcgggcccatgggagggtccgtggggcacttggtcctcgtcagagggaggaactggacagttcgcgcagtgctgctggtctggactgccctctgagctctcagggggtctctatgcag

SEQ ID NO: 13718 - DNA, 588 bp, Homo sapiens
  MAP TO AC007281.3; EXPRESSED IN BRAIN, SIGNAL = 1.9
tggaatcaataataccaaaaatatccatcaatagttttcatccatagtaaaatgaggttggtgtcttcctagttgagcttatcatgataatactctaaattattgtcatgactgactcatgcctttgcaattttagcagctgtggttttgtggacataatattagccagtgaatatagcaggaatttctgaagtcaataacattacctgtgctgtctttgatctatacagtcagtagtgcctcagaagcatgttctagcaaggaaacaatctgaatctctttgctcttaaggtagtgcctccattcccatggtcaagaatctgtttcagttaaaaccgtatgcccactccaaggtagtgttaaatttatggcaatgaatgctataacttgctagttatttccagcttttaatccagtgcctaatataccataaatggttgtaaatatatgattacaaaatagatgtaatatccctctatgtaaaacagcttttgtattctcgggaaggagaagtaacacattcatgaaaactagttatatgtgaggtaagctaagtacacttaatacaccatcagtccatctcaccaa

SEQ ID NO: 13719 - DNA, 573 bp, Homo sapiens
  MAP TO AC007462.2; EXPRESSED IN FETAL LIVER, SIGNAL = 1.3; EXPRESSED IN HELA, SIGNAL = 1.5; EXPRESSED IN BRAIN, SIGNAL = 1.6; EXPRESSED IN PLACENTA, SIGNAL = 1.3; EXPRESSED IN LUNG, SIGNAL = 1.3; EXPRESSED IN BONE MARROW, SIGNAL = 1.8
aataattgtctgcctccaaggagttaaccatcaagcagacgaaagagagaaagataattataacacgttggtgctttttaaagacctgtgcattctcctctctttgaaataggtaccatttctgtcaacacgttgcgtactccctacactgctcctggtgagagtgagattctggacctggatgatgagttgtacctgggggggctgccagaaaataaagctggccttgtcttccccaccgaggtgtggactgctctgctcaactatggctacgtgggctgcatcagggatttgttcatcgatggccaaagcaaagatatccggcaaatggctgaagttcaaagtactgctggagtgaagccttcctgctcaaaggaaacagcaaaaccgtgccttagcaacccttgcaaaaacaatggcatgtgcagggatgggtggaacagatatgtctgtgattgttccggaacaggctatcttggcaggtcctgtgagagaggtaggattctaaaaccccagcagccaactccctgagatgaaaagtttattaaatgttgacctcaaacctgcactgac

SEQ ID NO: 13720 - DNA, 586 bp, Homo sapiens
  MAP TO AC007462.2; EXPRESSED IN BRAIN, SIGNAL = 1.4
ttgtggctctttattttcatgcactagagggtacttccagtgctccttaggaaccacattaggtcaatcagcgtcccccattgacatcacatgaatgtggttttctgtgtccattcttaaaagtggcccctttttggcctttgcaattaattattttggttgttcgtaaggacaatacaagaagcatatagcattataattaataatacagtctttgacgtcagaaagacctgggtgaaatagcatctctgccatttcttttgtgtatttccttaggcagggtatatcactatcaccatcatcatcaccatcatcctcatctacctttactaggcattaggtaagacagctacatatattttctctttaatttttgtgacaaactgatgaagttgctgttcttatcaccatgtaacaggtgatgaaactaacatgaggcttggggaggttaagcatctcaccagaacaataatgatagtaatactaaatagaaattattgtaaccatttctaagggttcgtcgtatctcatgtactgttataaagatttgcacatggtatctcatctcaattaattcccagaacaa

SEQ ID NO: 13721 - DNA, 566 bp, Homo sapiens
  MAP TO AC007564.9; EXPRESSED IN FETAL LIVER, SIGNAL = 1.9; EXPRESSED IN BRAIN, SIGNAL = 1.6; EXPRESSED IN LUNG, SIGNAL = 1.5; EXPRESSED IN BONE MARROW, SIGNAL = 1.7
aacagaaaatatttgaaccgagtgataagtaaaatacaataaaaattcatggaaacagctaaatcagtgcttatattatgaaatcagtgtttatattctgaaaaaaagaaaagtccaaaatcaatgatctatgctctctcttaagaaacttagagaacaaattaaacacaaagattacagtacagaacaatgaaattgaacaaagatgaacaatagagaaaaatcaatgaaaccaaaagctgatttttgaaatgattaataaaattgagaaatctctagctagacttaccaataagaaagagaaaacacaaattaccaatatcaagattgaaagagaagccatcaatacaaatccaaaggatatttacaaaaataagggaataggataaacaactccatgtcaataaatttggtcacaactaaaacaaatgaataccttgaaagacaagtattaaaactgacacaagaagcaatagataatatgatagccctatatgtaccataaaaattgaattcaaaattaagaaagccatctcacaaaggaaccccaggatcagatggcttta

SEQ ID NO: 13722 - DNA, 558 bp, Homo sapiens
  MAP TO Z86090.10; EXPRESSED IN BONE MARROW, SIGNAL = 1.6; EXPRESSED IN BRAIN, SIGNAL = 1.4
atccctagacttgcacctcgatatcacctagctcagggggtgtaaaatcaggatgattaaatgagatgttgcaagtgtaacccaagtgctcccagggacaccttaaccggaaataacattcatataaacccacttaagtctccatcctgcgaggcgatgggccagccagtgccttcccaaatatctctgtgtggttacctgctgcctcgggctcaggtcattgcttggctggtcactacctctccaagctgctctacctctctgcaggtgcttccccccaaggcagccagtgctagtgcaagcccgaggctggggctggggattgtcaaagcagggaaggtggggggcgggtgacagtccagaatcggatagcactggagttggctggcagtcctcacaatccctgcagtctgcctgttgcattctgtcattgtggggagaggccatcctgccctcccaggcctggcctgctgtcccaggtccgagccatagacactgggtgagaccccttttcccatttcccatttcctctctcctcccagttccaggatctccaaa

SEQ ID NO: 13723 - DNA, 569 bp, Homo sapiens
  MAP TO AC004624.6; EXPRESSED IN FETAL LIVER, SIGNAL = 1.7; EXPRESSED IN HELA, SIGNAL = 1.5; EXPRESSED IN BRAIN, SIGNAL = 2.1; EXPRESSED IN PLACENTA, SIGNAL = 1.5; EXPRESSED IN LUNG, SIGNAL = 1.7; EXPRESSED IN BONE MARROW, SIGNAL = 1.5
tttcctaagtcctttcataagcaacttcctcttttcctttgtctttctattgcctttacctatttagaaaagttttaaactgttagccaatcgggtttcagtttagattgtgcggtctggctccagccaatggagacaggacacagtagcagggacaaactgcataaggaataaaaattgcttccctcctttgttcggatgtgctctcgccattattacatctgcgatgagcaccctttctgcagaaagtaaagattgccttgctgagagaattaaatttatgttcaagtgctatttctttgtggcactacagaagatacatttacatataacaacgtgggaggtgataacacacatggtgctcttggccagtgcccttggagagaccaccatttcaataaagatgacagccagggaaggtcacaggcttggcctgcaccccatcagaattcccaccgactcactcatggaacctatttaagatgaaaggtggaatattctgaacagtaatgtattattttattctttttattatttgaacaaatagactccctcagtcacctctttcc

SEQ ID NO: 13724 - DNA, 581 bp, Homo sapiens
  MAP TO Z95114.19; EXPRESSED IN LUNG, SIGNAL = 1.7; EXPRESSED IN FETAL LIVER, SIGNAL = 1.4; EXPRESSED IN ADULT LIVER, SIGNAL = 2.1; EXPRESSED IN HELA, SIGNAL = 1.4; EXPRESSED IN PLACENTA, SIGNAL = 1.7; EXPRESSED IN BRAIN, SIGNAL = 1.7
tatccctggcttttctgagcagtactcatgtcctcaatgtgcctggcatcccccgattcagagcagctttgttttaccctctcctgagaataatcttccagacttccgctgtgggggcgcgggggtgtgaggtgggaggggatctaggggtctaagagcttcctaaataacttcccccaccagtctttcttattttagcaccaccatcacccccttcactcgcagagggacctggcgctgccagctctctgtctttggcagagtctgtcctgtcaatcgcatccatgctcagccttcccacggctgcctgggactcatttgtcaggctttcccaggcctgacaaccagtgaccccccgtccctcccctcttgtggccgtgctttcccatcctgcttttctcaacattgtgggtttatgtctctttttaaaaaagtattcctcttccagaagtttcagtgaggtttcaggagggagcaaaattagacgcatatgtgcaatctgtcgttgtaacctgaactctaccctgcaattctgaaatccgatctgctccttaaaatttggtgtgggacttctccataga

SEQ ID NO: 13725 - DNA, 590 bp, Homo sapiens
  MAP TO AL021707.2; EXPRESSED IN LUNG, SIGNAL = 1.6; EXPRESSED IN FETAL LIVER, SIGNAL = 1.9; EXPRESSED IN PLACENTA, SIGNAL = 1.2; EXPRESSED IN HELA, SIGNAL = 1.4; EXPRESSED IN BRAIN, SIGNAL = 1.6
agtggctctggattagacctgaacatctctgagcagagacaccttctaagttctaaaaataaacagacacatgacctctgtcaccttccctattctgaggctggggtcagctctgctgttgtaagggtgttatgagaaattctagattcaggagctctgcgatttttccttcataatcactacccaggcaccaagtattctcctccccaggaataaaatctttatttcatgcctagcagaagccggtcagaaacagacacagcagtagatcccttaccctttttataacagaagatctggcatgtctgagttcggagcctttgcaggaatactgagatttcctttgtctcttgactgcagaaaaatggagaaagagataaatgagtaaccacagggtctgtccacagctgtgcggtgcttacaactgtgctttttcattccacttgagctgccagaggacactcctactactagtctcataggtcccaactgtgttgccgacttatctgattagaccacttgatccagagaagcagcaaggaggagcagacagactgtgactttaggtaagttactcccctccctccaag

SEQ ID NO: 13726 - DNA, 581 bp, Homo sapiens
  MAP TO AL022238.1; EXPRESSED IN PLACENTA, SIGNAL = 1.2; EXPRESSED IN HELA, SIGNAL = 1.5; EXPRESSED IN LUNG, SIGNAL = 1.2; EXPRESSED IN ADULT LIVER, SIGNAL = 1.5; EXPRESSED IN FETAL LIVER, SIGNAL = 1.6; EXPRESSED IN BRAIN, SIGNAL = 1.3
agacagacctgatcgatggcagtcatacacatcttcacgccttcacagagagacatcacttatttagcgagcaagagccaagatcaaagcttggaatcaaaaatacctgtttctgagtggagaaactctgtgaattagtctttgaatgacacttgaaggcattcctggactctgcttcagaactcttgatactgatgctggagacttataaaatgtggtcttctcctttttaggcttcagctctggcggcatggactatggcatggttggtgggaaggaggctggaaccgagtctcgctttaaacagtggacctccatgatggaggggctgccctctgtagccacacaggaagccaatatgcacaaaaatggtaagagaagcactgaaagctagagcccccaacccacagcaggtcttgatgaaacatcttataagactattttgaagtacagaacttggtattcattttccttgtgaatcctatgattgcctgtggaggaaggtcagagtcatgtgtatgttgaattacaagaaatataaagtactagttctaattaaagggagcagaatttttcagcca

SEQ ID NO: 13727 - DNA, 567 bp, Homo sapiens
  MAP TO AL022238.1; EXPRESSED IN FETAL LIVER, SIGNAL = 1.4; EXPRESSED IN PLACENTA, SIGNAL = 1.2; EXPRESSED IN BRAIN, SIGNAL = 1.5; EXPRESSED IN HELA, SIGNAL = 1.8; EXPRESSED IN LUNG, SIGNAL = 1.4; EXPRESSED IN BONE MARROW, SIGNAL = 1.3
tgtgaaagaggaagcaacccgagtttacaaagatggaaagtgaacagagcaaggcctctgttattatttattgttgtatgtccctgtttcttaaagcaacaggcactatcccaagttcatacaacctgtgcatgaggctctcaaactctgtgccttggttctcccaaggctaagcaggaagtcaaagattaagaagtcaagagcctcagcccaattctgcttcagcctggcactccctcccctcctgcatctcagctgcctctcacacagggtggctgggtcctcctcaccaatgatggcttccttcaggctggactcaacaggaaggatgttcttctccaccagctccatggggccaggcctctgtgcaatcttctcattgaggtcatcggctagtctggctctcttcagcttcagctgcttggcctggagggatggctcagccgaggtctctgcccatgggagagaaaggggtgcaggaagatatatgagtggacgtggttctgccccgggaactccagagcagctctccttcctcctgggcaagaggagtgactgtcagaacgg

SEQ ID NO: 13728 - DNA, 574 bp, Homo sapiens
  MAP TO AC006548.19; EXPRESSED IN BRAIN, SIGNAL = 1.3
gaaccttccacaaatttccaaggtatgaacaattattttgtcaaagtgttgccttttaaaatgactaacatgaaactgccagtatttgctctaaagaaaaagcccagcagcttgaaacataaagcgaggtgtttgaacgtctacgttagtttggtgggataggcatctgtactgcagagcagttgtctgatgatgtgtcagagctgtaaatgcattggctgaaacactgtggcaaatatttgtgtgtaaaaattaagttattatttgtactgagactggatatcttgcagttcctgttctttctttgctttgatatcctggtaagcctgcattttgctagcatccaagtaagcccagttagaaaactgtatcatgagaaagtggatcttgaagggaagggtaagcatgatggctagtgagcatatgagaaggcaaagcgaggtgctagttatattagatggacttgactttaaagaggatgagggctactctgtgttaatacttgctctcctagcagagctgtcaaatcattaaagcatgctatactagttagcttcacattaaatggctgatg

SEQ ID NO: 13729 - DNA, 553 bp, Homo sapiens
  MAP TO AC007564.9; EXPRESSED IN BRAIN, SIGNAL = 2.4; EXPRESSED IN PLACENTA, SIGNAL = 2.9; EXPRESSED IN ADULT LIVER, SIGNAL = 1.8; EXPRESSED IN FETAL LIVER, SIGNAL = 1.8
accttctccccagagagttcaagattctaaaaaaaaaataaaatttacataatttcaaataaaatgatagcattaaaaggtaaagtatttctttcaggacctgtattaaagtgagcccacataactttttacaaagtgatatggtttttacactgatatggtttggctctgtgtccccacccaaatctcatctcaaattgtaatcaccacctgtcaaggaagggaactggtgggaggtgattggatcacgggggtggtttcctccatgctgttctcctgatagcgagggagttctcaagagatctgattgctcgataagtgtctggcatttcccctgcttgctctctctcttgcctgctgccatgctctctctcttgcttgattcccctttgccttgcaccatgattgtaagtttcctgccatgcagaactgtgagtcaattaaacctcctttctttacaaattacccagtttcagatagtatctttatagcagtgtgagaatgaactaatatacacacccatgagacctagagactttaagggacttgccca

SEQ ID NO: 13730 - DNA, 569 bp, Homo sapiens
  MAP TO AP000352.2; EXPRESSED IN PLACENTA, SIGNAL = 1.5; EXPRESSED IN BRAIN, SIGNAL = 1.5; EXPRESSED IN FETAL LIVER, SIGNAL = 2.2
agtgggaagtgtgggaagtgtgggcttctcatgtggtgccagagagctcggagagactggggctcaggtgtggtcctctcagtgggcctggactgaccccagtctccctgtggttgtaagtcatctccacagcccagacttctttcactccaggcccaggtcctggtgccgccccatcctcaggggcaagtcctagggagaaagatgggtttggggtgacatggggaatgttgcagctgcccattaacctgatggactcatgctgattcttgtgcttctgagacatgctcagggtcaccacctgccagcttgcccacatgggagccaggggagggctcagctcaccccatctctgagtccgctgcctagctgggcactgtgcgaaattcagctgacccctgcctgactgggcactgtgcggggttcagctgagtgccagagaggcctgcacccaggccctgtgcttgagggctgtctgcttctgaccacagatagcctgtgtgatgttcaccacaggtgagccagctccacagtcggtgtgcccctcaggttatggggaggttcacgtc

SEQ ID NO: 13731 - DNA, 562 bp, Homo sapiens
  MAP TO AC007539.8; EXPRESSED IN HELA, SIGNAL = 1.6; EXPRESSED IN ADULT LIVER, SIGNAL = 1.6; EXPRESSED IN FETAL LIVER, SIGNAL = 2.2; EXPRESSED IN BRAIN, SIGNAL = 2.5
tcttttggccttgtctttgggttttagaaaccacctactgaggccaagcaaactctgaactggatgcaggaggctcttctcccgcttactgccccaggcttgtctcgagacttcaaacaaggcagggaagggcccagaccagaatccatttcggggaaacatttctaagcctttctgcctgcaggcttcatacccttgactgttttctgagttctgtgccacattaatggccccaccatcctccaggcccctggctgagaaatctaacatcactgctcattctctgttccgtctccatgtgcctcccatccagtaggcttgctgtgtcgacgatctttcctctagagctggggtgtccaatcttctggcttccctgggccacattggaagaagaagaagtgtcttgggccacacataaaatatagtaacactaatgatagctgatgagcaaaaaaaaatctcataatgttttaagaaagtttacgaatttgtgttgagccacattcaaagctgtcctgggccgtatgtggcccatgggccaggggttggacaagcttgcaat

SEQ ID NO: 13732 - DNA, 588 bp, Homo sapiens
  MAP TO AC008166.1; EXPRESSED IN BRAIN, SIGNAL = 2.2; EXPRESSED IN HELA, SIGNAL = 1.3; EXPRESSED IN PLACENTA, SIGNAL =   2; EXPRESSED IN LUNG, SIGNAL = 1.2; EXPRESSED IN BONE MARROW, SIGNAL = 3.1; EXPRESSED IN ADULT LIVER, SIGNAL = 2.5; EXPRESSED IN FETAL LIVER, SIGNAL = 3.7
cacctggatctgccctggaagttatatatgatatatatgatatgtgtccttattcttcatttaccggaaattaggttgctccctgctgagggtctccctgtttctgtgcatcaggcatctgaggtcatatatgtccatagactgaaggcttcagcccttaaagcttctgcaaatcataatgtctgctaggaatgatcacttcccaggtggagactggcattcttcatcagggaataggacctaaccatggcacattaagggctagatatcacaaagatattctggtactttaatagttccattcccaaaaagtacccctggcccatgccttctgaagactgctcaactggagcaggattgggttggtaagttattacttcatcataaacaaagagctgaagtggtgaatttgtaagacacctttgaaattaaaaacagaacttgaggcatgccagtgatgcacaatatactattaatgtgttttccagatagtatgaatattgcttgaaaataatatgggtagaaagatttacatgtacatttaggattgaagaatggtaagattgtgaaaatggagaaaggtaagga

SEQ ID NO: 13733 - DNA, 574 bp, Homo sapiens
  MAP TO AC008009.4; EXPRESSED IN FETAL LIVER, SIGNAL = 4.6; EXPRESSED IN HELA, SIGNAL = 1.4; EXPRESSED IN BRAIN, SIGNAL = 1.7; EXPRESSED IN PLACENTA, SIGNAL = 1.6; EXPRESSED IN LUNG, SIGNAL = 2.1
gacttgtagggaaacaaatggtgtcatcagattttactgtcaactagaaaccttacccagccagaaatctttgtattttagatagtaggaaagatgttcctcatttagacaagtggggttctcattcaacctgcaaatcaaaaagattactcttatcttgctttacaaaaaagtactctttaattagtgaaaaaattcaaattcaagccttgcctaatgcttattgcccttccttgcaggtctaaatgctagacctagtgactgtggcaactatctctcactgatgttccagaaagagaagaactccttcctgctagactttcttcgatatttcagttgtgataagcagatttaactagcgtttggaaagttgctcactatcatcaatgcatgttatgccttcacttctctggatttgaagctcttgctgcttgctgccttgtcattctttatttatgctgacttgtccatacacaaaagcctgctgaagtcctgtcttagtgagtttcatttgatccacactgtacttaaaaagcacatcttacatcctttaaagctggttaaatcgctctcc

SEQ ID NO: 13734 - DNA, 573 bp, Homo sapiens
  MAP TO AP000352.2; EXPRESSED IN HELA, SIGNAL = 1.4; EXPRESSED IN PLACENTA, SIGNAL = 1.2; EXPRESSED IN BRAIN, SIGNAL = 1.5; EXPRESSED IN FETAL LIVER, SIGNAL = 1.6
ggtgtgggaagggagtttccatggggtccatctgcctgtccactaggctgtcattatcttccatgcttttcatgtagtgttgtttttagctggtgcttttgttaccaccacaggtttgattcctgggcaggcatggctctggcccgggccagccgcattcaggacaagctgaactccaatgagctgaagagtgatgggcccatttggaagcatgccacgcccgtcttgaactgcttccgtcgggccctggagattgacagctccaacttgtccctatggattgagtatggcaccatgtcctatgccttgcactcattcgcctcacgtcaattgaagcagtggagaggcgagctgccccctgagctcgtgcagcaggtgaggagggggtgctgcagatgggcttgccatccttctgtccagacagagtgccctcaggtcaacgaagctctgtctcattcgtactttattcttgtccacacatccatgctgggagctcactgacgaatctccccatgaggcttaagccataccatggtcagtgacaacttggtccctggtctttggacacccagt

SEQ ID NO: 13735 - DNA, 557 bp, Homo sapiens
  MAP TO AC008166.1; EXPRESSED IN FETAL LIVER, SIGNAL = 1.3; EXPRESSED IN HELA, SIGNAL = 1.8; EXPRESSED IN BRAIN, SIGNAL = 1.5; EXPRESSED IN PLACENTA, SIGNAL =   3; EXPRESSED IN LUNG, SIGNAL = 1.6; EXPRESSED IN BONE MARROW, SIGNAL = 1.3
ctcaccaaggctgacctagctacagtgactgctgagtgcctaatttgccagcagcagagaccaacactgagatttccatatggcaccattacttggggtgatcagccagctacctggtggtgggttgattatattggacctcttccatcatggaaagggcagaggtttgtcctcactagaatagatgcttactccagatatgggtttgcctatcctgcatgcaatgcttctgccaaggctaccatccctggacacatggaatgccttatccaccatcatggtattccacacagcaatgcctctgaccaaggcactcactttatgcctaaaaaattgtggcagtgggctcatgctcaaggaattcactggtcttaccatgtttcccatcatcctgaagcacctggatttatagaacagtggaatggccttttgaagtcacaattacaatgccaactaggtgacaatactttgcagggctgaggcaaagttctccagaaggctgtgtatactctgaatcagcgtccaatatatggtgctctttctcccaaagccaggat

SEQ ID NO: 13736 - DNA, 576 bp, Homo sapiens
  MAP TO AC008272.1; EXPRESSED IN BRAIN, SIGNAL = 1.4; EXPRESSED IN PLACENTA, SIGNAL = 1.2; EXPRESSED IN LUNG, SIGNAL = 2.4; EXPRESSED IN BONE MARROW, SIGNAL = 1.3; EXPRESSED IN ADULT LIVER, SIGNAL = 1.6
taggctcagggcagactctcacctcccagacctggagcctcacataacttgattcacttattaatttatgtaacaaacatggaattcctgttatgttccaagctctgtgctaagctatggatttttttaaaaagtgaattagtcagcatgcctgcccccaaaatgtttctgttctagttgggaatattatcaaagtaaataataaaagctgccacttatggtatacaagtcactgtggaagctgaggatcaacgtttgaggagctagcgcaggtcacagggcacagtcagaattcaaactgcaaaacccaagctctttgcttgctgccaatgaaatcctcataatacctcattgtaccctaaaaagggttcagccaaggtacagagggaatagagtgcaaaagaagatgatcagctctactaagggcaggcagactggggaaggagatgatgtgggagagctatagagtagcctggggtaagttgccgtgtgctgagcagataaggacagaacgccatagaagcagagggctgtgcaaaggcatccagtgtgaatagcttggaacatgcaggaact

SEQ ID NO: 13737 - DNA, 581 bp, Homo sapiens
  MAP TO AP000347.1; EXPRESSED IN LUNG, SIGNAL = 1.8; EXPRESSED IN BONE MARROW, SIGNAL =   2; EXPRESSED IN FETAL LIVER, SIGNAL = 1.7; EXPRESSED IN ADULT LIVER, SIGNAL = 2.1; EXPRESSED IN HELA, SIGNAL = 1.4; EXPRESSED IN BRAIN, SIGNAL = 1.5; EXPRESSED IN PLACENTA, SIGNAL =   2
gagcctgctttttgcaagtgagtaatataaaacagactgaaataccttaagcttctcaggctttgtaccttcctaaagtaaatccatgaggtccagtttttccttcctccttggctatgaaatagacaagaaaaaggcaagctagccatttacatctcactatagcagactctcctgtttgctttttgactgtatttgggaagcaggggcctgactgctttcctacttactaagcacaactcacttttcctaggaaatcctcaacgcaacctgcatggattaaaccagctcctcgctttgtttccaatattcttacaatcaaagtgtccagaatgggcaaggcaacctgaaaaaatgaggacgggtacattatcctatgagccaaactgccgcttacactggttagtcatgaaatcggcaaaattccagatgagctctccaaccacgtattttctgagtttttgatccagacccagatggtactgctctagcagacttttctggtagtcttcactgaacatcagaggtggatcctgggattcaaggcaaagagaatttaagagtcagaactggcagaattg

SEQ ID NO: 13738 - DNA, 571 bp, Homo sapiens
  MAP TO AP000350.1; EXPRESSED IN FETAL LIVER, SIGNAL = 2.2; EXPRESSED IN ADULT LIVER, SIGNAL = 2.2; EXPRESSED IN PLACENTA, SIGNAL = 1.4; EXPRESSED IN BRAIN, SIGNAL = 1.5; EXPRESSED IN HELA, SIGNAL = 1.5; EXPRESSED IN LUNG, SIGNAL = 2.1
cagagagaaggagacattgggacagagagaagaggcaagaaaaaaacatatcttgcagtctgtgaggaacagagtggcccccaggggcctccacctcaggttctggatcaaagctcctcaaagtttaaggtgcatttggatcacctgaggatcttatgaaaataaactctgtctgattcagtaggtctgggtttgggggtgggagcctgttagtatatttctaacaagctcccaggcaaggctgctactgctgctgatctaatgaccacagtttgaggctggacagagtggctcacacctgtaatcccaacactttgggaggacaaggcaggagggtctcttgagggtagaactttgagaccagcctgggcaacacagcaggacctcgtctctaaaaaacaagagagaagaagaaaaaggaaacaacaagaagactcaactagagtaggaagcagttaggccacatatctcttcaatggagaaaagagctttttcttgagtaaattggagtgtacccatgttccttgtcaatgatggtaactttaaatgtcaagaatgtgagagaggccag

SEQ ID NO: 13739 - DNA, 566 bp, Homo sapiens
  MAP TO AC007564.9; EXPRESSED IN BRAIN, SIGNAL = 1.6
cctgaaatttttatctttggcttcttcagatgaaaatacaatagagccatttctaggtaggagtctcttatcaatctaaaatgatatagcactgtacttattaaatagcttcaccatgcataatcattggtatcatttgccaacaatttctgagctgatgaaaggtaaaaactggcaaaaccagcatctgtcacaaacacacaccctcttttcatagcacttttgaccatagatactagcatcttcctccctactaaaattggaagttctggaagagagcttagcactctgccttttcctgtggtggcaacactccatgctataactgccaggaagcctggcatcaagaccattctggaatattctagcacacaagacactaaatcagtgaaggtcagggctggaggaatttgccttgaaaatggaggcccctctctatcctcctacactaattaaaatagaaagaaatacatagagttatgcaatgcagaaagcagtgatttggtatgggttaggtctatgtattcactatcaaatctgtcagctggggatcagtgcacctggat

SEQ ID NO: 13740 - DNA, 558 bp, Homo sapiens
  MAP TO AC008166.1; EXPRESSED IN BRAIN, SIGNAL = 3.9; EXPRESSED IN HELA, SIGNAL = 3.8
ggcagcaaagagatggtttctagaatgatggcagaatctagaatctgtggaccttctccacagcaaaacaaccataagtggtgaaggttataccaaaaaaaaaaaaaaagggtaatatctggaaattgtcctaagagcagacagtaaaggaagaaacatttattttagaaattctgctaaatcttagcaagagcagcaagagtctgtggaatttgagccacaaacacccacagctcacccacagctgagcatgagagaagcgccactccagatgggtgcagccaagaacaatagggctccctatccgtccattcctagtcaagagaggtggtatcttctcttcaagggcagagcaccagtgtttctcagcccccattcccaaatctctgtttcagaatctcttccaggcaacaatggctgagaggtctaggctttattcctttgtctgaccccccacttctatggtgaaagctctactccaggtatggcaagccaagaaaacgaatgggcgggccccgatcacccttgcctctactcactcaaagggcaaaagtttca

SEQ ID NO: 13741 - DNA, 551 bp, Homo sapiens
  MAP TO AL008723.8; EXPRESSED IN BONE MARROW, SIGNAL = 1.4; EXPRESSED IN BRAIN, SIGNAL = 1.6
tcgggtttttgtttgtttttgtttttgacatcaccaggtgattctgtatgttgtcagggctgagaatctgatgatgaagcatctcaattttaggtgccagacagcagctaatccccatgtggaatgaggggccaactgcacaaatgatttttcctggtctggtcttgggaagggggcagggtatacagatgccttaccttggaacttccgcatccttgggttcatctgcagaatcttcttcagcttgggctccagttccttgatgtgggaagccagcctctctagctgccgattgcgcctgattttgttcttccgagagaccatggaagagcaacagcaaagtagatcctccccatggggctccttctgcagtgaattaatgcacttgaggcagacggcgcatccacactccagggacattggtttttccagatagtctgagcagacgggacagctgcttgcttcttggaagagtgcagccatgtccactgccaggggaaaagtacacaaggtaaaaaaatttccatgaggtgaaagcctgttagttgtga

SEQ ID NO: 13742 - DNA, 555 bp, Homo sapiens
  MAP TO AL021392.5; EXPRESSED IN BRAIN, SIGNAL = 2.5
gtgagaatcacccccatttgcaaagtgcagtagagttcacgcaaatgacttgcacaagaacccttggctggtaagtagagtgcaccagctacctattgctgcgtaacaaacacaccattgaaacaacacttcgttattatttctcagggttctgtgggttggctgggctcagctgggtagttcttctgcttgtggtctctcatgcagttgccgtcagatggtggcagaatgtccaagatgacttatcactcacatctctgcaccctcaatgtcctctgggtagcccctctccatcaggctggtcagacttcttaggtggcagcagtctcctgagaacgcacaggccaaagctgctgggtcttgttaagtctcaggcctggaactggcacagtggcacttcactgcattctgttggttaatgtgagggttagggccaatccagattctgtgtgggaggggactaaacaagggtggaaacaccaggaggcatggttccctggggccacctttggagattggctgccacacagtgaaccttgccttcaggctctgtct

SEQ ID NO: 13743 - DNA, 586 bp, Homo sapiens
  MAP TO AC008166.1; EXPRESSED IN BRAIN, SIGNAL = 1.4
ttagtctggagtctggaaaaccagtaatagttatgagctagagggttacattgatgttttgagccaaatcttatatacactataatgaaaagagagtaagatgcaattagctccagtctctttgatcataaaaaaacaaactataagctaaacataaatgtgttccatcataaacataattataaagaattcagaattcttttaaaaatgtttttcacagcctcctatccgcagaatatgcctcacctgcaagtttatcatgttcatgctatcactctttgaaacatgtgggccatgtagcactagtccagaaggatttagcatagcatctttaaaatcctgaataacatgagcataaatttctttggctatccgcatcaaaataatgctattctctacgcttgcctgtcatttcatgaatccacagatttagccacttttccatgttttccatagttttatcatgtggtacagatgttagttttgcactttacgaagcaacttcatatacagctcagcaaatttcctcttcctttttctggatattcgtattgttgattcattaacattgaactcacagccaaaa

SEQ ID NO: 13744 - DNA, 561 bp, Homo sapiens
  MAP TO AL022238.1; EXPRESSED IN FETAL LIVER, SIGNAL = 1.7; EXPRESSED IN BRAIN, SIGNAL = 1.7; EXPRESSED IN PLACENTA, SIGNAL = 1.8; EXPRESSED IN HELA, SIGNAL = 1.2; EXPRESSED IN LUNG, SIGNAL = 1.4; EXPRESSED IN BONE MARROW, SIGNAL = 1.7
tgttctgtttttctgccgtggtcttaaaatagttcatgacattttaggtagtcaactcagttttcaaattttggttactgtgaactcttccaggcactttagggtacaaagatggaaggatatggctgctgcctttcatgagttagcggtctaattttatacaaaattatctgaaagttttgttcctaattatgtaatgaacacaacctgaattcaacctctttctatcacatgatctttcttgtagcttgccagagtgatctctcggcttgccgactttgctaaggaacgagccagtctacccacattaggtttcacacatttccagtaagtgataagattacttcttgtttatgtgcatatggctttcagctgcttcttgagttctctgttttccacagtaaccttgaggtgaagaatctgaaaacatgatttaaatataagtaatttgggatgcttataaggaatgagcctgatatccactgagagagtaaatctaacagttcatttgggaaacattgggaaatacatatcaagagccttgaaaaatattctttatga

SEQ ID NO: 13745 - DNA, 557 bp, Homo sapiens
  MAP TO Z97055.1; EXPRESSED IN PLACENTA, SIGNAL = 1.5; EXPRESSED IN BRAIN, SIGNAL = 1.4; EXPRESSED IN HELA, SIGNAL = 1.4; EXPRESSED IN LUNG, SIGNAL = 1.7
aagatgggagaatcagcagcatgtctgaacactcatgacggcaacctagtagcagggcaaagagaaacgcagcaggagagaaagaagagcctcgctggttcccacggttggccaatggagatgggatcccatggacaagtagcaggatgagccttcatggtgacaaaagagaagctggagaatgtggattcaggtgtggtgatgggagcctgtggcagctcccttctgattctgctttctccttgaactaggaagtcaggtcatcagcagcgagtgaggctggaagaagtgaggctcaggattgagatcacaggacacagaatgaaacactgtctagaagagaaggcaagtcggggagtgggagaggtgaagtgacagccagggaactgtaagagccatctgaggttcatggacacgaacctgtggttgtgtgtttttctccagccatgttcagcagcacaggtaggcaaaaagttgggtttaatttgggccagggtcttgacaggcaagtgtgataccacaagtcaagggtgtgtgcaagggaagtggagatgtgc

SEQ ID NO: 13746 - DNA, 560 bp, Homo sapiens
  MAP TO AC007363.3; EXPRESSED IN BRAIN, SIGNAL = 1.4; EXPRESSED IN BONE MARROW, SIGNAL = 1.3; EXPRESSED IN FETAL LIVER, SIGNAL = 1.5
cctgctctctctcaccatcctagtcttaggtattctgttatagcagcataaaatggactaaggcaatctttctcagcaaatcatagggataagtgagttaatacatatgaagtcctcagaacacggcccagcatatgacaaacactcactgtcaggcattatcccaactttatttctcatgagattgtttgcaattgccagttatgcactttgtgcataattccatgatagcaattgtatgattttaattactcatttgtgtgtggtttctcactggactgtgaattcctcaaaggcattacttgcataaatgtctgttttcaaggtaattgaattcgtgctttcaagcatatttcctacttaccacatttatatattggtaatctaagggaggatcttttcttaggattttgatcggaaaacattattgtttgtaaattcattttgtaagctggaatatccttggacacagaagcattatcttgtcgataaacccatggtggccccttgagactgctgctgggaggcttttgctttatggaggttttgtcctgttcaaa

SEQ ID NO: 13747 - DNA, 559 bp, Homo sapiens
  MAP TO AC008283.3; EXPRESSED IN PLACENTA, SIGNAL = 1.2; EXPRESSED IN HELA, SIGNAL = 1.3; EXPRESSED IN BRAIN, SIGNAL = 1.7; EXPRESSED IN BONE MARROW, SIGNAL = 2.3; EXPRESSED IN LUNG, SIGNAL = 1.3
tctgactctccaagatagggtcttagtaatacctaaaattttatagaaattgtatcctactttcagtaccatgctatgctgataatacatttcctgccactcaactccaaatgcatccttctaccttgccctatgaaaatggatctgggccctttcaatacttttcctttatcagatggcacaatttcaaggtttgcctgcaaatgatgcaagacagacactgaatgagaaaaaggatttttcttccttgttctggtttgtttgctcacaggctcttgcagcatgtgctgctgtctggtgtctgtctcctgcactgtctgtatattctccagagctcagctcctacagtgttgcagtttccccagattgcccacttccagcaacatggccagcttcaccaggctcaggctctaattttgtcacctgtacccctccagccccgccccctgccccagatatttttgtagaggagagcttacaaggaaagacctggaacctcagagggtaaatttccagcaaatcctatcagtgtggcataacagtgacttctccaccttgg

SEQ ID NO: 13748 - DNA, 564 bp, Homo sapiens
  MAP TO AP000356.1; EXPRESSED IN HELA, SIGNAL = 2.2; EXPRESSED IN BRAIN, SIGNAL = 1.8; EXPRESSED IN LUNG, SIGNAL = 1.5
cctctggtctcatgatgtgcatctgttaccttgaaactggaaaccagtctatcaatgtctgtgccaattttttattccctccccaacctccttccccatacgactttttatttatgtaggatgtgtgctgtctaatgatgggatgaccacacttttccatgttctaaaagtgctcctctcccacagggtcccagggctggtggttgctttgggtctacagctacgtcttacccgcctcctgcctcaacagcctgtgtggtggcaaagccggtgtggggctggggaacgcagcgttctccaggaggggacccggctctccttctgcagtgcaggcgaaggcctagatgccagtgtgacctcccacaaggcgtggcttccagactccccggccggaagtgatgcttttttgccgcgggccctgggtttgaagcagcctggctttctcttggtaagtggctggtgtcttagcagctgcaatctgagctcagccacctacacaccaccgtggccgacactttcattaaaaagtttcctgagacgacttgcgtgcatgttgacttcatg

SEQ ID NO: 13749 - DNA, 574 bp, Homo sapiens
  MAP TO AP000347.1; EXPRESSED IN FETAL LIVER, SIGNAL = 3.4; EXPRESSED IN BRAIN, SIGNAL = 1.7; EXPRESSED IN BONE MARROW, SIGNAL = 1.5
gccagatctccacacaaaggctctgctcttaagcaggaggtagcctgagggtcaaaggtttcctgaagcaactcaggtgagacctcacatacaagagccccaaagaggctgcaaaagcaccagctcagccagccaagaacccaggtgtcacacccttctcagaccactgaggatcgctgggattcagcaggaaaaggtggacatgacagctgatggaccaatacttcccaacacccttccagcaagcagctgtgccccgcccctccccacatgagtcactcaacttcagtcctgcacatggatgcctttgaccatggggtcatggctttggtctcctgccataggggcagtgagaggaacaatggtggtctgggaaggaggatcctagactgggtgtcccacaagaccaggctgtgacagatcccagagccaatactcatgcgccagccagtccccaaacccaacagctacccaaagcccaggatataaatagcctgtgcactgctaagcagatacttcagggaatgatctgctggctgtgaagaagatgcggcctcagtagggttccacgagc

SEQ ID NO: 13750 - DNA, 580 bp, Homo sapiens
  MAP TO AP000352.2; EXPRESSED IN PLACENTA, SIGNAL = 1.3; EXPRESSED IN BRAIN, SIGNAL = 1.5; EXPRESSED IN LUNG, SIGNAL = 1.3
gctggagaaggatgacaagggggccaatgctccatttctctgggggcaggatttgctattctcaagaaaggaaaggagacctgcagtgtcccctcctgggtttggtttggatctacagcatgcgtgttgagagaggctgaggatctgagtgtgtgctgtgtctcttacctcctggaaggttcatgtcattactcccagtctcagcactgacacctcgctgcccaccccagagtgttaagcagagatgggaagaactgacccacctgctcctccaatcttcagttctgcagactttccctgttaagatcctctctccccttcttagttaagttaatcaccctgttcccaaacttttactcttgagaatattgagaaaacatactagcagcaaaccccttctcagggaattagtttttgccagctgcttcctgggaggaagcactatgccaaagttttcaggagaggaatgcctttcctggttgtccacatgccatgtggccgtgctcacatgcacctgggctagggaacccaagcactgtcctctgcagctctgcaggctcccactgaggtcacgccacat

SEQ ID NO: 13751 - DNA, 568 bp, Homo sapiens
  MAP TO AL022318.2; EXPRESSED IN BRAIN, SIGNAL = 1.5; EXPRESSED IN LUNG, SIGNAL = 1.3; EXPRESSED IN BONE MARROW, SIGNAL =   2; EXPRESSED IN ADULT LIVER, SIGNAL = 1.6
tggggatgaaaacactcctccctctagtttacaattattagatacactgatgcataggaggatgcaggacctgctggtctcccatcttcacagccagggaagaagatgcaggaccctaacagagagcacaggatgcagcaggtgccagggagcctggaccaggcacatcctgcactggccacaggggaggacacaggggtggctgtcctggagcctgctctctggaccgctgagtgttattcagggtctttctccagggtgtggacacctgtcttctcacctgccccctggtctcctgccttccagattcctgtggcccacagggagcaaagtgtggccagctctacatccccattgtcactccacagtgtctggtggttcagtggtcagagtgggcacatcaaaaccaaagcttgcccagaggcatggcagagaacttccttgttctgacgctaatgagggtggcacactcggcctgagctggagaaggggtggggcagggtatcgctgactcagcagcttccaggttgctctgatgatatattaaggctcctgaatcctaagagaa

SEQ ID NO: 13752 - DNA, 564 bp, Homo sapiens
  MAP TO AL022327.17; EXPRESSED IN HELA, SIGNAL = 1.4; EXPRESSED IN BRAIN, SIGNAL = 1.4; EXPRESSED IN LUNG, SIGNAL =  16
ccatgctcctgctgttacgacacgggagccactcggagctgactgatctcactgaggcacagactagccaacattggcctattttaaaattaaactaccctaggaagtgaaaaccccacctgcagcctggtttgccctcacacaagggaaaagaggtgttagaagcagtagctcagggcgattaggggttgtgcgtttccatgcttggggccaggctgggcgctgccacccggtttccgcgtctgggggtcactgggccatttgcaccacgacggctctccaggctttctccttgtcgaactccttcagggggctcctggccacctgcaaccgagacaggaaaggtgttacttcaccagggccacctgtgcggcgggaaggtggacacgccactcggccacaggcagcgagcagccagcgttcagaagttttcttcgaatgtgaaggaagtggggaaactaacccctgggcctctgtggaaagagataaaagccttcacttcctcagtgtcccagaaacgcctgcatccccccccgcacacacggtttctaccgagcctgggat

SEQ ID NO: 13753 - DNA, 595 bp, Homo sapiens
  MAP TO AL035701.13; EXPRESSED IN BRAIN, SIGNAL = 7.5
cacaggggagtcaaactagaaatcaacaactgaaagataacaggaaaatctctaaacccatgggaactaaacaacatatttaaaaataattcctgggtcaaaaggaaagtctcaaaggaaaaatttaaaactacatagaatttaatgaaaacacaatatataatatcaaaatataagatttgaatcgaaagcagtactgagagggaagtttatagcactaacggcttacataaaatgaggaaaggtcttaaatcaacaaccttagttcatacctcaagggactagaaaagaagagcaagttaaaggaagcaaaaggaagaaaataataaacataacaatagaaaccaatgaaattgaaattagaaaaacagtagagaaaattaataaaacaaaaatctactactttaaaaaattagtaatattgataaacctatatagcaagactgacaaaaaaacagccacaatcacaatatcagaaatgaaatagaggctatccatgctgatattaaaaggtaatggagaactattaggaacaagtttacctcataaattcaacaacttaaacttgaaaaccacaagctactaaacctcaacc

SEQ ID NO: 13754 - DNA, 568 bp, Homo sapiens
  MAP TO AC007463.3; EXPRESSED IN BRAIN, SIGNAL = 1.8; EXPRESSED IN BONE MARROW, SIGNAL = 2.1; EXPRESSED IN FETAL LIVER, SIGNAL = 1.7
ggagtgagggtgaaatgagcaatgcaaacatatgacaggctggacgaaccctcttacctctcctctgccttaagaactattgaactcacactcaaaaaaaaaaaaatccgtaaaccaaaattgtcccaaaagggaaggaggagggattgactgtcagccagtatagaacttcagtcaacttctgaaagatgacacggctggaccacccgttgacaattgaaccatcagaggaaactgatgtggagaatacccacagggagatggtgggatgcaaactcatcctcccagaacatcctcttggagatgccgggctgagggtccacaggaccagggagatggtgagatgcaacctcatcctcccagaacatcctcttggaggtgccgggctgagggtccacaggaccagggagatggtgagatgcaacctcatcctcccagaacatcctcttggaggtgctgggctgagggtccacaggaccaagaggggcatgagaagtggaactggatattaactacagagctcacctccttgcccaacctgccagggagaggctgtcagattgggttc

SEQ ID NO: 13755 - DNA, 554 bp, Homo sapiens
  MAP TO AL031587.3; EXPRESSED IN HELA, SIGNAL = 1.3; EXPRESSED IN BRAIN, SIGNAL = 1.8; EXPRESSED IN LUNG, SIGNAL = 1.2; EXPRESSED IN BONE MARROW, SIGNAL = 1.7
gctcaggctgtgatcgaaaccagggctcatctgtgaactttcgttcattctgggagagggcgaaggctcagtctgaagtcaagatcagggcttaggcttgagccaggttaagggttcggtgtagggttaggatcagggctatgtaggatttggaacagggctcagtttatagacagagtcagagatagggtaagcgttcattctggacttaggataatggttcactctggggtctgcagagtaaatattcatttttggtttcaggatcagggtccagtttgtgaccaagatcaaggctcataagtgtcattttagatttagaatcgagctgaaggaggggtcagggtcagggtcaggcctcaggcttagggtggggtcaaggcctcaggctatcaccgaattctgatggacaatctctaactagtgtcatggctccatctggggctgggctggggtcaggactccgtctgaggctgtgttttgactgtgaggtggcccaggctgggctgactcctgaatgtgcagtttttgcatcttctccctgctgagagtcc

SEQ ID NO: 13756 - DNA, 572 bp, Homo sapiens
  MAP TO AP000350.1; EXPRESSED IN BRAIN, SIGNAL = 1.4
ccccctatcatcttgggaactgtgagtaacaaactgtcttttaaatggctatcacctctgatctgtggcctcgccatacctgaataaagccaaaatcccgggtacattttaaaacaagtctacaagtcaaggaatgccggggtggttgacgtagtggcactcaggaaggcaagggcagtgcccctgaccggccccttctgcagcgcggccatcctttactacctgtgccgcaagtacagcgcaccatcgcactggtgcccgccagacccgcacgcacgtgcccgtgtggatgagttcgtggcttggcaacacacggcctttcagctgcccatgaagaagatagtctggctcaaggtgagcagggccacttctggggcttggggacacgggcacagggaagtcaggaaggctggaggccagttctggccctgctgactgccggcgacctcaagcaagtctccctccctctctgggcctcatttcctcagctccttctcctgcccgccttacagagccgtcaggagtgtggactgaaacaatgggcatgaaagagtcttattagggcgagggga

SEQ ID NO: 13757 - DNA, 579 bp, Homo sapiens
  MAP TO AP000356.1; EXPRESSED IN BRAIN, SIGNAL = 1.4; EXPRESSED IN BONE MARROW, SIGNAL = 1.3
attgtgggcactatggaagctaaaccccatgctccaggtggggtggagggtcttcagaggactcctggacagtgccaggctctaggctggggtgggggacacaggagaaaccaggccaggcccatccctactggagcttctccctaagcagtggaggctcagccactgtaaggaggtaggcaaggccctgcagaaagaggggtgtggaaatctgggggctcccaggaagggccgctgctggagatggggttcttaccaggatgggctctgaagataagcagggaggatttgggagggcagagatgaggcccagagcttctggcagagggcatggcctgcgcaaaggtctgggggccggacagcctgcacgtattctgggaagcgggaaggagacacaggccttgtgtttctgaggcccgactttagactgtgccctgttggggaggggccagggaatgtctgaggctaggcctgaccctgcttcttaccccgtgggtgcagcagagccatgaagaagaagttagtggtgctgggcctgctggccgtggtcctggtgctggtcattgtcggcctctgtct

SEQ ID NO: 13758 - DNA, 555 bp, Homo sapiens
  MAP TO Z95114.19; EXPRESSED IN BRAIN, SIGNAL = 1.5; EXPRESSED IN LUNG, SIGNAL = 1.5; EXPRESSED IN BONE MARROW, SIGNAL = 1.8
cgtgtatctgcattgccttcctgcctagattacaaacattcaatcacaaggacgctatcatacatcatcaataaatattcactgagctttaaagaaatcaatctctcatttcccatagcatacatccctgctgctgccatgttcttttttgccatctgaatcgctctcaacgccttcccaaagctcaacctgccacttttctcctctccttcgccccctttccctcttcccaggtctgtttttccctgctctcacccctcagctctttcccatgccacagatgttgagctctgtggcttttccagctgctcccttgtgctccttctcctgatcactataatcaaaaccaagagccaagaaggtggagggttcatcaagagcccaccatgagccaggcagtgttctaagccaatcatgtagattaatgaatttgcttctcacagctgccctatgggagcagaacaattatacctctcatttttcagatggggaaaccaaggcacagagaggggaagtaacttgctcaagggcttatggcagatgagaggctctgac

SEQ ID NO: 13759 - DNA, 553 bp, Homo sapiens
  MAP TO AC007539.8; EXPRESSED IN BONE MARROW, SIGNAL = 1.4; EXPRESSED IN HELA, SIGNAL =   3; EXPRESSED IN BRAIN, SIGNAL = 1.4; EXPRESSED IN PLACENTA, SIGNAL = 1.3
tgctccacatgtatgaacccgtttcatcctgacaaccactccagggtaggcagtgtttccgctccattttatgggtgaggacaccaaggtagagttatgctcactggttgcgatcactgggctggtaagttgcaaagccaggattgacacagaggcattctgctccagggccgccacctccccaggccgggcctctccaactcagcccctctctccttggctttttgcagaacctcgtgatgttcctgagcgtcctcgtggactggatgattccagacatccccacggacatcagcgaccagatcaagaaagagaagagcttattagtggatttcttcctgaaagaggagcatgagaagctcaagctgatggatgagccggctctgaggagcccaggaggtggggatcgaagcaggagccgggcagccagctcagcaccttcaggccaaagccagctgggcagcatgatgtcgtcaggctctcagcacaccaatgtgtgagcagttcagcctgcagcagaggagggcacggcagcagagacacgcacatgcac

SEQ ID NO: 13760 - DNA, 569 bp, Homo sapiens
  MAP TO Z97055.1; EXPRESSED IN BRAIN, SIGNAL = 3.9
tccgagtgaaacagggctacactcgcaaaatggtcctcccacggctgagcgcctcaggtgcacagaacaaactgaatgataaagacccggggattttagaaatttactattaagcatctgcttgccagcattagtaggctatcacttcaggaaacaaagtaaggctgtggaattcagctcaaattccgagcgcaactcggtcctttggtggccgactctccacccactgcatgcaaatgctcctgactgcattagactcccacctgccagcctcaccaggcagacttccctcagcacatgctccgcgggctcctctgcattgggcctttggagccgcccgctggaagtctctggcagaaggacgtccattctgaagacctagtgaacaatttctgctcatttcaggaaggttctgaagaagtgaactccgtcagaataaacaagtgtccagattccccccaacagacccaactcatcctctgttctcaccactatctcagaaccaagtgagaacagaatggctgtgccttagataataaaactacaaaaataaagagttaaccctgaga

SEQ ID NO: 13761 - DNA, 571 bp, Homo sapiens
  MAP TO AB016897.1; EXPRESSED IN BRAIN, SIGNAL = 1.9
ctctctgctcacacctctgcttaacaaaggcacctcgtccgtgtggggccctcgtccaggaacaagctgtgttgccgtggttgaaggcatcagatgcagttacttgctgcatggcagttcctggcagggggccacatgcacgttttctcttcccgcagacacatggcttcatgtcagttgtgccggcagctgcagttggcagcagcttcctctcctctcatgagcacttgtggtccccatcatagtccccactgcccaacaagtgccccgctcctcgcaggatctgcctttgggttccagactccagcaggacatttccttcagctccttctcaccatcatgcatctccatcccaacactgatcctcagccgtgcccatgctgtttcaagtctcctacagttttacgttttccctctttatttgtcatctaccattggcatatatttagagcaggtatgtgcgtgtggtaagggtgcttcagggtacatgtttatagaaccatcttagcggaagtccttaggccaggtttctcctttctcatagaactactgcaaatgttgaaagcacttg

SEQ ID NO: 13762 - DNA, 580 bp, Homo sapiens
  MAP TO AL034406.1; EXPRESSED IN BRAIN, SIGNAL = 1.4
caaggaaaagtctgcttgcctagacccatatccccaacactcaagcatgccatgcaggacccaggaagtttcccagcctagattattattgctggcatttgattggtgctgccagagtctgaagtcatactgacccaatctaccaataccacaactgatgatacccacccacatgtgctaccagcaggccaggggaactagcctccacaaccaattgcaggcaccagcaacacgagcatgaaccacttgatttcaagtgagttgctccatcatcactactgcattcagtcacaccacaccagcagtccaggggccctgggaacctgcccaaatgcatggcccaccactgccactaccagcatccgaacaagctacctggaggcccacgaactggcccttcaggactcatcaacactggtgcctatgtaagctgctctggggactaagaacaggcagacacagcctattgatgccaccactagagcctgaagaatggtccatctggcatcccagtccccagcaaaatttcagcacagccttaacaaataactgtaccctaaccacggaggaaatcacagat

SEQ ID NO: 13763 - DNA, 569 bp, Homo sapiens
  MAP TO AC007092.4; EXPRESSED IN FETAL LIVER, SIGNAL = 1.4; EXPRESSED IN BRAIN, SIGNAL = 1.6
tagtccaacactggctgctgtatgaagaaaatcatcagtgttgctttcaggagatattcaacagatatgcttactctaagtttggcttcagacttactctggcactgagatctgaatattcttatcctaccgcgactattatggaaagttaaaaaaaaagtgcgtgagttaagcattaggtagaaaggaggaatggtgacttacaaaaatgtacaagttattttgggtctgttctagaagtaaagtacttgttcttaggacaagtgtcataatcattccgtaagtcttcaccaagtttgactgtacctgcatgcaaagcgatttgcttcccttcacggcaaatttgtgtggcatatgcctcacctgtgtaagtgtgagtggcatgacggtttagggagatacaagaagatgattttctaaattcttaggaaaaaaagggaatcaaagacaaaaaatcattaaaacacacttaagttgaagcttaaagaaaagtttcatgagaaaaggcggattcggggttcagcaacaaatattcagctacaatgtgttgttacggactgaatggccac

SEQ ID NO: 13764 - DNA, 564 bp, Homo sapiens
  MAP TO AC005300.10; EXPRESSED IN BRAIN, SIGNAL = 1.3
ttgcaagcaatgaaacttgcaattggatgtttggcttaggaaatctctaaacaaagtattgaaggagttacctagctccttctgactgcttccaataaaattcaagagagacataaatgacttaaagacagaactgttaagcaaaaagtaataagaacttgaaattctgaaaaatgatcagcccatccatatagaaaagaacgagaacccagtttggagagaacactaacggtgttgctctgttgccaagctcctttagtaagagtagtatggatcagccattgcaacagaagctaggagctgttctccaagataatggaagaaggaccctgaaggcaattcagagatcatgagagttggcactcccatcaccagcccagagtgcaaggacccacagtgcagagcagattcaaaggctggccacctctctggtccaggccaaccaaggagcaggaattaggccctcaccagacaccaaatctgctgatgccttgatcttggactgtccagtctccaaaagtatgagaaataaatttctgttttcacaggacacccagtctatgg

SEQ ID NO: 13765 - DNA, 568 bp, Homo sapiens
  MAP TO AC006427.13; EXPRESSED IN BRAIN, SIGNAL = 1.4
aaaccgtaggcacagtctggattgcccacagagacacaggaaaactcactgttcattcaaacaccctcaactttgagagtgatgccctctgcctactcagtcacagcccatctacagttggcttggtctttagtgacaaggctgctgtgattgggaacttgtatggcagggtttttgtcacaatctggagctctagggctttcccagggggacccattgatccccgggcattactctattgtctgctttactccatttttcccctccaccaggagcacctgagaagccagtaggagaaaggagaacagggtgaggctatgggtattcatggctacatctgggtggcacctgtttgacaaaaggcaggtgagtcagtggcaggcagcagttccgctgtgcaggattgcaccttggccttcctccaccctgacaggtgcctgcctaaattaggaatagaccaagaacgcttctgccttctggaatcactagacaagcagcctgtctactcacatttccacttggcttgagtcctgagtgtcacaaaactaccattctttggagcctcatg

SEQ ID NO: 13766 - DNA, 564 bp, Homo sapiens
  MAP TO AL031587.3; EXPRESSED IN FETAL LIVER, SIGNAL = 1.6; EXPRESSED IN BRAIN, SIGNAL = 1.3; EXPRESSED IN PLACENTA, SIGNAL =  14
gcccgtggaactgagaagtcaccatctctgtacccccagaggcctctccagctcccggagggtccacagctgtcagctgggctgtcttagccagtgcccctcaggtcacagatgggaaaatagacttagtgtggggaggtgcctctgcccctgccctcagccccttacccctcaccccagcactctcgcggcccacctcctgcctcctttgtccaggaggtggtgctgctgcccttgcctctgcaggtcctcccttcgtggtggctgcgcaggcgaggggggaggcgtgtacatgcacatttacacacgcatgcacacatgcgcacacactttccctccctggggtggccagcgaaacactcagtccccctcctaccgtcgccagtccgagtttaaaaatagcagcagctctgcagtgtgcctgtggggtagatataaatacttctagaaattgtaggctcagctgggcacactgggctttattggctaaggaagtgggggtggggactgagcttgttccaaatggtgtacaaaagtggcggctgctattttcagcctcctggt

SEQ ID NO: 13767 - DNA, 581 bp, Homo sapiens
  MAP TO AC004624.6; EXPRESSED IN BRAIN, SIGNAL = 1.4
tccaaggacctcacccatacgcctctgatggtgctgtcatgatcttggggcatcccagaaaactgcctgcctgcctgcctcaccttcccctacctggctgcaagctcattccatgcagggaccactgcctttgcaagccggcttagcttcgtaagtgcagcaacacctatgtgggatctggcatgtggcggccctccagaaatgtccaacaaaaaaataactcaatcggtctagcgcgtttccttctttgaaacgggatgaagctgagcaagagagggaagaagacttgcctggggccacagagagaaaattagtgacagaagcagaccagctaggatctgtgcctctccaactgtgagaacaggcaccaagtcaggctgtaggtacagaaggccaaggcagagaaggacaggcccatcctgaggcgtcaaagactgagaacacgtttctctgctcatgtactgacatcctgctatgtgccagggtccagacactccagaggaaggtcatattatcctcctcttaaaagagtgtatggctcagagaggttaatgaactcatctaagaccacacagctggca

SEQ ID NO: 13768 - DNA, 581 bp, Homo sapiens
  MAP TO AC008283.3; EXPRESSED IN BRAIN, SIGNAL = 1.4
tccataccagctaagaggtgtagtactgagattaaatataaaacttaaagtagtccatttgaaatgaatgtgataaatgggttcacctatattaattagcattacccacttgaactcatcattttcatttacctttacctatatttacttatttttaaaaatcagatcactttcaataagtagttaatactcatcctaataataaaaaattctgactttttagcaaatatatatcttcttgcctattttatcttttcatggctagctaaaaattcttaccatggtcttctgcgtacatcataaaggtcaatcttatttggagttctactattatcaacccatggtgaagctaaaaaaaaaaaaaaaagagagatattaaatcaaaatattagatatgctctaaaaataatgagactttaaaaatcacaaaaagcaatagatacataatttcacttacgtacttcaatgttcaaatgagagatatcatttttaagcccttatattgctttaacatggaaaacaacacggcagtacaaaaaggaaatcaatgatagtcgattctctttttacgagttatttca

SEQ ID NO: 13769 - DNA, 571 bp, Homo sapiens
  MAP TO AC009266.1; EXPRESSED IN BRAIN, SIGNAL = 1.7
  unsure 29
  unsure 286
  unsure 321
  unsure 343
  unsure 478
  unsure 545
gctaattcttttcaaataatcacagggtngcagctttaatctaacaggttctgaatgaatttcagaaccctggcactggaaaatgatacaagacacaagtctgtaaactgctctatagacaacagctcaagacaaattagcctagaaaagatagtgaaacacattctttgttgtgctaatttgacagcctaagcatattttgcgtgaacatatgtaaattatattagaattgctcttgaacgattttgtagtcttacatttgtttgttggttaagtaacacttttntatctggcaatgtaaaaaatcttcacagtcttttncaagtagcatcttaatcttttnctgggggacaataaattaaatgaagacttaggtggccatgccgactctgggtacaaacgatggccttaaaagtacacttgcacactatacctatttcctataagaaaattgcacttctaactggatttctagttngaagtttatttctttattcactaactaattcaacaatttcacaaaggtacatagggatttctcaggnccacactgaggcttgtgacaggcagt

SEQ ID NO: 13770 - DNA, 576 bp, Homo sapiens
  MAP TO AC009266.1; EXPRESSED IN BRAIN, SIGNAL = 2.1
  unsure 237
  unsure 396
  unsure 409
cattttcagaaatgatgaaattaggtattaagatctccctgcctgtttcaattcctttgttgtttcttttctcttttctgaaaaccagttgcaaatagttttactcaacttttcacactcaaaaacactttaaattttaaaagctaaaaactatttacaaattatccattttaattttaaaaatgtttgttgttggtttcattgttccatgttaaaaaaaaaaaatcggcctcgtcncaacaaccatacctcagctgctaccaccattaacttctggctgccgtgaagaatacttagaattggccccttacaacttttcagaggtccaacatatattctgttccacggcccatgataccaaatgcacatacataaaatggccatttgacttccccnaaactacacaccntactacagttcatttcatgttgctttcacagagatgccgagtggagcaagatgctgtgaggtgactttgtagtggaatgaagacaatgattgggaaatatgcttttttaatcccaaagtcattttaaagcacaaaaaagaggttgatttttaatctttgtacataca

SEQ ID NO: 13771 - DNA, 591 bp, Homo sapiens
  MAP TO AL031587.3; EXPRESSED IN BRAIN, SIGNAL = 1.4
caacacgatgcttacatggctcctttcctgccgctggccaggtgctaaggctctggggaacccaggcctggaggccaccgggtggccaaagcctccccaagacctctgaattgctcccttccttccccgacagcctgtcgcactgccacctccctgcccagagaggcctgaacacagcctccgctcctcccctcttctgctaaaaaaccctgacccaggtcaacacaggaggctggggagcagagagcacctgactgccccacctctcccctgcagccctcaccatcacactgctgtccatcgcccggccactgggctggcttctctgctgggctttcagccttgagagcaagacttggctcaaagtgagcctgacatggtggctggcacacagtgggtgctcaagaaacactaagccaatgactgatcaccaaggcctcttcccagtgtgagctctctcagccttcctgaatttccccctccctccccaagttgcgttttcccttctgagccatctgtgtgcttgggaggcagagaccatgtccttcctgcgctagaggcctggctgctccatctccattcctatggccc

SEQ ID NO: 13772 - DNA, 477 bp, Homo sapiens
  MAP TO AC007282.2; EXPRESSED IN FETAL LIVER, SIGNAL = 2.2; EXPRESSED IN BONE MARROW, SIGNAL = 2.4; EXPRESSED IN HBL100, SIGNAL = 1.1; EXPRESSED IN ADULT LIVER, SIGNAL = 1.1; EXPRESSED IN PLACENTA, SIGNAL = 0.66
aaaatctaaaaatgctcaagtcccttgtataaaatggcataatattcgcatataagctatgcacatcctcccatatactttaaatcatttctaggttacttataatgcctaatacaatgtaaatgctatgtaaatagttatgctgtgttttatttgtactattttttattgtattatttattttaaaatatatattttctattcacaattggttgaatctgcagatgtggaaccagtggatacagaggcccaactgtgtatcattttcttcatattgttacctgtaaagctttcaggcgttcttcattgcagttttccagatttgtaatttttatagttaccagtgttcctgtgggagtatgccgtgcaagatggacagaagtcaagttgtcaaatcctcttcctgtaatcagacataaaactcatgttagtaaccaaagaagaaaaaaaactgacaatttagacatcatcaaaatt

SEQ ID NO: 13773 - DNA, 466 bp, Homo sapiens
  MAP TO AB000882.1; EXPRESSED IN BONE MARROW, SIGNAL = 2.2; EXPRESSED IN HBL100, SIGNAL = 4.3; EXPRESSED IN ADULT LIVER, SIGNAL = 0.77; EXPRESSED IN FETAL LIVER, SIGNAL = 0.82; EXPRESSED IN LUNG, SIGNAL = 1.3; EXPRESSED IN HELA, SIGNAL = 1.5
tccacccaagtgaggaactcagcccagcggcgacccctccctggccctcctccatgcctccctgtgtgggctgagttccggctcaccaccctgctgagcctccctgaccctattcctcatccccacccccagccagatccagcgggaagagacaggtccctgctctctgtctccaactttcctggagaaggcctcccattactcttgcccctgccgactctcacctcctttctggtccttgatatgagtcagggtcctcctgaggtcttgcccattctctgtcaagtcctcggtctctgtgtcccaggtctcagctcccaggacatcttctgcccactgtccctggggctttgccctgcgtttctgcctgtcatagcgcaggaagggctgaccatccagatgtccctcagcgagaaaccctgactgcacagatccatcctgggacagcaccatgaggttgtaacga

SEQ ID NO: 13774 - DNA, 474 bp, Homo sapiens
  MAP TO AC002470.5; EXPRESSED IN ADULT LIVER, SIGNAL = 4.2; EXPRESSED IN FETAL LIVER, SIGNAL = 7.8
gccttaccatggtcaaacaactagttcgtatcagaccctactccagaaactattccagtccgggtaacctctcgttaacctctcttgttagaaatgcaaatttctgcccaaatcaggcctcaggaatcaagagactgtggggtcggctctgcaggctatctgaatgaggcctccagggaaatcagattcactctcaagggtgagacgatttccctaaaggaaccttctcataacagcctcttcctgtggcctttacaggatcctgggtgaataaattcccagtggaaatgacacacaaccacaacttccggctgaatgagagagaggtagttaaggtttccatgatgcagaccaaggggaacttcctcgcagcaaatgaccaggagctggactgcgacatcctccagctggaatacgtggggggcatcagcatgctaattgtggtcccacacaagatgtctgggatgaagaccc

SEQ ID NO: 13775 - DNA, 467 bp, Homo sapiens
  MAP TO AC005921.3; EXPRESSED IN BT474, SIGNAL = 3.9; EXPRESSED IN HBL100, SIGNAL = 0.76; EXPRESSED IN FETAL LIVER, SIGNAL = 1.2; EXPRESSED IN HELA, SIGNAL = 1.2; EXPRESSED IN PLACENTA, SIGNAL = 0.75; EXPRESSED IN BONE MARROW, SIGNAL = 0.65; EXPRESSED IN LUNG, SIGNAL =   1; EXPRESSED IN ADULT LIVER, SIGNAL = 6.2
ggtttctccctgacactcccagcctctgtcctggggggtgcttgaggccccctccctgggcctgaccagctgcctccacagacagctgagtgccctgtcctcagatggggagggacagggtcggcctgtaccccggaggcacctgggtccatcagagaaggtgcaggtgacagaggcgaaggcagatggggcactgacccaggaggagaaagcagccattggcactgtgagtcggtggggcaagaggggctggaggggatggacaggcaggccccagcagccccagggtttatggagtcccctgtccctgactgccatggctgctccctacaggtggagctcagtgtgttctgggattatgccaaggccgtggggctctgtaccacgctggccatctgtctcctgtatgtgggtcaaagtgcggctgccattggagccaatgtgtggctcagtgcctggacaaatga

SEQ ID NO: 13776 - DNA, 456 bp, Homo sapiens
  MAP TO AC007032.2; EXPRESSED IN HELA, SIGNAL = 1.3; EXPRESSED IN LUNG, SIGNAL = 2.7; EXPRESSED IN ADULT LIVER, SIGNAL = 2.8; EXPRESSED IN BT474, SIGNAL = 1.9; EXPRESSED IN BONE MARROW, SIGNAL = 3.2; EXPRESSED IN HBL100, SIGNAL = 1.8; EXPRESSED IN FETAL LIVER, SIGNAL = 2.5
ggcaatgaattagatgaaagccaactaggttttaaaaacaatcactctcaataatttgatttaaacaaaatctcagaacattctattctactagaagaaaccttaaagattatttagtctgtcattttatagatgaggaaattgaagcctggaaaggttaagtaaattataggagattatatagctttattagtaacaaattctaaactgtaatctcagttcaatggtctttattcaattaatgttaaataagaattaaaaaaacaatttacctcaatccaatttgtaagccagtaacactctggatctgtgttttccaccgtgaagagaacatttcctctgggaatgacaaagccctcaggaacagcttttatttctattggaagatgcccatcatacttctggcaggataaaatgataaatttatttattcaacagatgatactcaattccctg

SEQ ID NO: 13777 - DNA, 456 bp, Homo sapiens; identical to SEQ ID NO: 13776
  MAP TO AC007032.2; EXPRESSED IN PLACENTA, SIGNAL = 0.65; EXPRESSED IN BT474, SIGNAL = 1.4; EXPRESSED IN HBL100, SIGNAL = 1.8; EXPRESSED IN LUNG, SIGNAL = 2.4; EXPRESSED IN ADULT LIVER, SIGNAL = 2.1; EXPRESSED IN BONE MARROW, SIGNAL = 5.5; EXPRESSED IN FETAL LIVER, SIGNAL = 2.4; EXPRESSED IN HELA, SIGNAL =   1

SEQ ID NO: 13778 - DNA, 448 bp, Homo sapiens
  MAP TO AC007463.3; EXPRESSED IN FETAL LIVER, SIGNAL = 1.3; EXPRESSED IN ADULT LIVER, SIGNAL = 1.5; EXPRESSED IN BONE MARROW, SIGNAL = 1.4; EXPRESSED IN LUNG, SIGNAL =   2; EXPRESSED IN HELA, SIGNAL = 0.79; EXPRESSED IN BT474, SIGNAL = 0.93; EXPRESSED IN HBL100, SIGNAL = 0.85
gatgtagcaaagaacgcagctattgtcaaagggtaagcactgtaaaatgaaacaagtagtatcatctccaaaactcttgtgctaattcttccagagcttgttctgtggggagaaacacactgctatggaaaccactaaagagaagcaaaaaattctttgtaactaggagctggggcctttagctttgcaaattagtgccaaaataccacttatccatctgcatccctgacagtacaaagatagtaaaacatagcaccttatcctgtacttgctcatgcagatggagaagtgtctgaatgtgataaagaccatgtctaggtttctcctggacaccaggatctggaaggagaaccccactgtgagaagcagaggtagggagcactgcattcaggcacatgagatgacattcccaaagggcttttgcaaaccagaaagcatggtggatgtg

SEQ ID NO: 13779 - DNA, 441 bp, Homo sapiens; identical to SEQ ID NO: 395
  MAP TO AC007842.1; EXPRESSED IN BT474, SIGNAL = 1.6; EXPRESSED IN BONE MARROW, SIGNAL = 0.65; EXPRESSED IN ADULT LIVER, SIGNAL = 0.65; EXPRESSED IN PLACENTA, SIGNAL = 1.9; EXPRESSED IN FETAL LIVER, SIGNAL = 0.8; EXPRESSED IN LUNG, SIGNAL = 1.2

SEQ ID NO: 13780 - DNA, 474 bp, Homo sapiens
  MAP TO AC008071.1; EXPRESSED IN FETAL LIVER, SIGNAL = 4.6; EXPRESSED IN BONE MARROW, SIGNAL = 0.65; EXPRESSED IN ADULT LIVER, SIGNAL = 3.8; EXPRESSED IN HELA, SIGNAL = 3.5
tctgaaaaccaaccaaaggctgacttaaaattctatagtattttaaatatgctaactaacaattatattaaacagctttctttcaaataatctcacaacaatttaaaatatttctacagcaatggtcctcagatgatatgattataccattttttcatgtttctttgattatgctagttacaaatattttaacatcatcatctttaagacaccagacactaagatgttgagtaacaataaactcctgctcagaaggattgttctgataacattataaatgctgggaatgcacaaaatgtcatggaaatgcagaagcaggactatctctgggctattctgggacagatgaggaagatcccgaagatgaagtcaaatttaatctgggattttgaggatgtagagtttattaagtgagccaaggagtaggtatcctgtgtgacgcacacagtatgtgcaaagatgtagaggtttgtg

SEQ ID NO: 13781 - DNA, 481 bp, Homo sapiens
  MAP TO AC008172.1; EXPRESSED IN PLACENTA, SIGNAL = 0.61; EXPRESSED IN HELA, SIGNAL =  71; EXPRESSED IN FETAL LIVER, SIGNAL =  38; EXPRESSED IN ADULT LIVER, SIGNAL =  39
ttgatcaccattaatcagcaccataaaaagtaaaaagctacacataagcacataggcaagcctagtccaccaaaaatacagtattagtaaatggatgaaatctcatgaagagtaacttaggaaggactgtaaggttttgaagaagtgactgacaatttaattgcaaaagacacagaatattaaggcataacaaagtaaactgaaatgaagtttagttatcaatattcatctctgagaaagttgtgaatcagttcctttagataacatgtggctcaggttgatttaataatggggctggggtgtctgcatctctatgctgcttttccagcactgtactgcctgtagtggaaaagactcttggagtccaccttgcgagatttctgcacagcttcagcaaaaagtttggtcacctgaaaatataatggtaggaatcagcaccctccatgagataaaagtgaatttttaatgaatgaagacaaaa

SEQ ID NO: 13782 - DNA, 451 bp, Homo sapiens
  MAP TO AC008172.1; EXPRESSED IN FETAL LIVER, SIGNAL =  30; EXPRESSED IN HELA, SIGNAL =  13; EXPRESSED IN ADULT LIVER, SIGNAL =  25
gtgtcagctgcacaaaaagcttataattcactcagctaattgattttgaagttatacaattctagatggttttaaaaatttttttgaaatgtacaacagttcacataaagttgcctatagtacaactgcagtacattattgaaaggaaatgtaaatccctagtccaaccctttagttagaaggttttaaaagtaacaagatttttgatgacaaattgttcttttaatttcactagaactcataaaatgactaataaatttttgaaaatgttaccttaattgcaacatagtcagcaggaattatgggatggtccaatgttggaagatgtttctcatcaacattctctccaatcatcaccttggtggccacatcaatgaagtcaaccccaagagtcttggaaacaaaggggaaggatcgagaagctctcaagttacactcaatcacctgaaga

SEQ ID NO: 13783 - DNA, 486 bp, Homo sapiens
  MAP TO AC008172.1; EXPRESSED IN HELA, SIGNAL = 7.3; EXPRESSED IN FETAL LIVER, SIGNAL =   9; EXPRESSED IN ADULT LIVER, SIGNAL = 9.2
cacaggtcaaaaagcagaggagagtttaaatttttgttttgttttgttcagttaggccaagaaaatcaggtactcactcttatctttacatcctagtgtcctttccttctttcccttttaagtaaaaattaatcacttgctgaataaaattggtgacattatgagcatcaaccggatgagtattgtcacttcttaattccactcctctttttattaacaatggccttttgaatgggtgcctacgttttaccacagaaatcctgtcagtgggggatgggggaaaagggaaactcctttacctgtttaacccaagggtggatgtttttctttaacctcagctcccttgtctgggcctcagtgagcccaaggcattttgaaatctgcttatctgagaacccaatctcctttgcccttttcagggtttcttctgtcatggactcactaggatttaatagaaaagagagattcaagtttagaccaaaaaca

SEQ ID NO: 13784 - DNA, 450 bp, Homo sapiens
  MAP TO AC008172.1; EXPRESSED IN ADULT LIVER, SIGNAL =  12; EXPRESSED IN PLACENTA, SIGNAL = 2.9; EXPRESSED IN FETAL LIVER, SIGNAL =  10; EXPRESSED IN HELA, SIGNAL = 8.9
ttcaaatccagcaaaatggccatgtaacatatgtaatatgtaaacaatcacatagagactgttagcatattagtatgctaatattcaggcaactttaacactgtcaattgcacctttaacactgtccatgtgttgatggtatccaggcaactttaacactgtcaatggtgtcacaaatttaacaaaataactgagaacaagaagaaaagcgtaataaaccaaggactcacctctcctacacttttcatagagctaccaattcggctagatgttccatgaaaacggtcaagatcccagcggggaatcttggtgaccatgtaatccaggctaggttcaaaacaggctgatgtcttcccggatacgacgttcttaatttctggaagtgggattcctagggcaatctttgcagcaatgaatgccaatgggtagctataaaaagaagacaaattt

SEQ ID NO: 13785 - DNA, 358 bp, Homo sapiens
  MAP TO AC008172.1; EXPRESSED IN HELA, SIGNAL = 2.6; EXPRESSED IN FETAL LIVER, SIGNAL = 3.8; EXPRESSED IN ADULT LIVER, SIGNAL = 3.6
aagccaagtttcatccaacgcattaaaattcaaagtgccctgagaaatgaaactcaaaatactgtcaagttaaagattattctcatgtacctaggaataagattgaatacatgagcttaatgatttgtactaccgtattgaggaagaaagtttggccatcctaattcttaagaataagtcaactatactccctcaaattgagactttttaaatggccaccactggtactaccttgattccattagactccaaatatttgctaagtcccagttcatccagagcagtagtatcaggagctccaccattcccaataatagggttggccattgtgagaatctgtcctttgtaggcagggtca

SEQ ID NO: 13786 - DNA, 465 bp, Homo sapiens
  MAP TO AL031121.5; EXPRESSED IN HELA, SIGNAL = 1.4; EXPRESSED IN ADULT LIVER, SIGNAL = 2.1; EXPRESSED IN FETAL LIVER, SIGNAL = 1.3
acaaaatgaatcatggggagtcgtgtattcataacaggtgatacagagaaattaagataatttagttatgtgtcatttaaagtacttattaataaaataacatacataggtgtatctaagttcctctacctacatcagataaattgcattaactgatagcttcatctcatctttagctacatattttaaaaatatccgtaattaattatttcaataaattatattataaaataatgttaagacttaacattattctaaatacactctcattttaatcaccatgtaatatgttatagaattagtattcttatgacaaagtaaccatttctgtattaggggatgctaacctatttttattctcataattctaactacatgtctcattataagtatagctttctcttaatttgaattatttcattctcaggaagagaatgatgagatccaagtgtagcgtattctggc

SEQ ID NO: 13787 - DNA, 471 bp, Homo sapiens
  MAP TO AL034553.12; EXPRESSED IN ADULT LIVER, SIGNAL = 1.4; EXPRESSED IN BONE MARROW, SIGNAL = 3.1; EXPRESSED IN PLACENTA, SIGNAL = 1.7; EXPRESSED IN BT474, SIGNAL = 6.2; EXPRESSED IN HBL100, SIGNAL = 3.8; EXPRESSED IN FETAL LIVER, SIGNAL = 1.7; EXPRESSED IN LUNG, SIGNAL = 2.5; EXPRESSED IN HELA, SIGNAL = 1.3
gtgactaccctgctgcaatgtcaaatcaaaactcaaagtagaatctgttttaggtcccatctcttcatcaatgtgaaccatccgcatgtgtgcggccatcttttccacatcattgaaagttgaacggcaatatggacaagacagaccatgaattaacatatggttgagcagagtatctgtgggtaaatagcgattacagtagaggcatttgctagtaaaattgtgtattttcataatgtagttggctactgctgggactttctcagctttatgttctttttcgaagtgcacactatagacattttcaggaaaaagctcattacagattgtacatattttccacttttgagttgaggaagtgttacctgggggagggcctgtggcagctgcagcaggtttggaactggactgacctaacactctggatgcctgtgactgagagagggaaggagactttaactggcccgatga

SEQ ID NO: 13788 - DNA, 422 bp, Homo sapiens
  MAP TO AL049741.7; EXPRESSED IN LUNG, SIGNAL = 0.82; EXPRESSED IN PLACENTA, SIGNAL = 0.82; EXPRESSED IN FETAL LIVER, SIGNAL = 6.5; EXPRESSED IN ADULT LIVER, SIGNAL =  16
cgagacattaatgccgcttcaatatgactttatttagccaacaagtattgtgttctaattcttttactgtattcttgactaatgcccattaataggagcatttattttgctatgtacttatcaagaaatttgtatattcacacaattaaaaaagtaaaactaaataggtccgttggcaaaacaagttgacaaaaacattttgccacagttaatatagacaagtctgagactgtcgtccgtgttacttagaaagacatgaacatgctgggatctcagagcggtgtacttactgacacggatgcatctgggagtaggagaccagcctttctccgtacatgtaactgtggtctgcgcttttggaagaccgtagccaggatggcaggcaacttctgtagagttaccctgtacaaactttcttccat

SEQ ID NO: 13789 - DNA, 463 bp, Homo sapiens
  MAP TO AL049842.5; EXPRESSED IN ADULT LIVER, SIGNAL = 4.9; EXPRESSED IN FETAL LIVER, SIGNAL = 5.2
tttgatgtcttttggggtttgattgtggtatagggtggtttcagtcaactgaatttattcctgaaatattttaggggctcaaggctcaactcaagactcctgagttgcgtgctttaactctggggggctggtattgggccctgagctttgttctcttgcctcttgaggttatgaatttactgccctgcagggaccaaagtgttcctggactgcttataataacactccaataagtggtgccagccaaagtgctttgctgggcagtagcagtaggatccatgcttgttcacatgtgccagcaggagcagcagcacagtggggtgcatactcgttggctgaggtgaggttctggttggcacagatgtgccagtctccatgtgcatgtttgcagtgttggtggtcatagcatagcatgtgctgggggtgagaccattggtgactgtgggcacattcatgtcagtga

SEQ ID NO: 13790 - DNA, 464 bp, Homo sapiens
  MAP TO AL050310.5; EXPRESSED IN PLACENTA, SIGNAL = 2.5; EXPRESSED IN BONE MARROW, SIGNAL = 1.1; EXPRESSED IN FETAL LIVER, SIGNAL = 2.1; EXPRESSED IN ADULT LIVER, SIGNAL = 1.1
  unsure 35
  unsure 167
  unsure 232
  unsure 239
  unsure 241
  unsure 324
tgtcctagaattcaaaggtttccatgtaataatanatcaactctccttatcttaaaatgcccctgctcctttatccatattcttttataaagtgaactcatgcagccaggttttcagtgcaacacacctgactgctctcttcaagtgcacagctctgtagtgtcaantgaacatattagtttgtgtcctaaatcctgttgcaactaatttccccaagtccctgccaggttanttccacntngttgatctttatcggcaattttcaaaatatagctgcgacttacaagtgatgacatttgagcgttttggagcataagctgcatnctgctgggcgaacatggctgcggcagtcttctgttgaatcagattgttccgcccattaatctccagctgcgtttttaagtgtggaggagggtgaaggtacttgcagttctctcgggtacaccgaccctgacaatgaagaa

SEQ ID NO: 13791 - DNA, 467 bp, Homo sapiens
  MAP TO AC007842.1; EXPRESSED IN FETAL LIVER, SIGNAL = 0.95; EXPRESSED IN LUNG, SIGNAL = 1.4; EXPRESSED IN PLACENTA, SIGNAL =   2; EXPRESSED IN ADULT LIVER, SIGNAL = 0.71; EXPRESSED IN BT474, SIGNAL = 2.4; EXPRESSED IN HELA, SIGNAL = 0.59
tccctcactcacgacagaaagtttcagtcctccagggctccacgtggcctccagccgcctggcaagcactcacgtaggcatggatgttgctgcagagaatgctcaggttcccaccacccaggcagagatcaaagatgcaatctttcaagggaccctggggatccaccagcttgtggcaggaggacagtggccctgtggggctggagaggagcccacagaactcctccttctgatacttcttctccagctcgggaggacacttgtggctggggatacagtcctcgctccccggcgggcaaggggtgggcggcaggcagggagagtcgggcaccacctcctcccaggagttgccgaactcattggcgttgcctgcctgtgagccattgggcttctggaagtcatccttggggtcgccgttgtagttcccacacaggccacacatctgctggtagtagtttccggggacg

SEQ ID NO: 13792 - DNA, 453 bp, Homo sapiens
  MAP TO AL031320.6; EXPRESSED IN BT474, SIGNAL = 9.8; EXPRESSED IN BONE MARROW, SIGNAL = 0.8; EXPRESSED IN FETAL LIVER, SIGNAL = 3.1; EXPRESSED IN PLACENTA, SIGNAL = 6.1; EXPRESSED IN HBL100, SIGNAL = 3.9; EXPRESSED IN LUNG, SIGNAL = 2.4; EXPRESSED IN HELA, SIGNAL = 6.6; EXPRESSED IN ADULT LIVER, SIGNAL = 4.9
ctccattagcagtgcaggtgcttaattcataaccatttaaccaaaccagttactctattcttttaaaattttactctcttgaaattttgatttctgagtctcttgaaaggtaagtgattgaaaagcatatatttcagtaattgaagtaaaacccattaatttagaaaaacagccattatgagtgatttctagtaagaagcacttaacaattttagatattcagtacatttttattatcaggtatgtgacagtagatactgtgatgtattctggagatgtaaaatgtgtaagacatgttcattacacctggggaactgaagatacaaattcaattggtgggctgcagcgtatttttgtatcagatcaagtagcagaacatagagctgaaggtcagggcaagattataaagagctttatatgccaagataacgagtctgaactccaatttgtaga

SEQ ID NO: 13793 - DNA, 470 bp, Homo sapiens
  MAP TO AC007847.1; EXPRESSED IN ADULT LIVER, SIGNAL = 0.66; EXPRESSED IN PLACENTA, SIGNAL = 1.4; EXPRESSED IN BONE MARROW, SIGNAL = 0.75; EXPRESSED IN HBL100, SIGNAL =  14; EXPRESSED IN LUNG, SIGNAL = 0.75; EXPRESSED IN HELA, SIGNAL = 0.67; EXPRESSED IN FETAL LIVER, SIGNAL = 0.86
  unsure 25
  unsure 121
  unsure 408
gcactttgctcatttgggtccaggnttgccatggagatcagcgatctccctagatgcctcctgactataggagcaactagcgcattactgccgagggatctacatgagcgccctaagtccntactgtggagagggccttcctgtggaaggctcctaagggtggtcccatccatcttctggcttgagtcaaagacagagttccagcatagtcactgttatgtccggaggtaaaaattctttaaactgaatttcctagatgaagtaaagactttttttttttttagtattacattttatttttactgcttcttccagtattgcacaatcccataattattgctattcagctaaaaacatgcctcgaggcattgcagaagatgagaataataattttaaaaactggagtcnagcaacacgaactcttgaaagcactagtataaaagcattcaagaaataacttcctctggctt

SEQ ID NO: 13794 - DNA, 454 bp, Homo sapiens; identical to SEQ ID NO: 10009
  MAP TO AC007677.2; EXPRESSED IN PLACENTA, SIGNAL = 0.95; EXPRESSED IN HBL100, SIGNAL = 1.1; EXPRESSED IN FETAL LIVER, SIGNAL = 1.6; EXPRESSED IN BONE MARROW, SIGNAL = 0.77; EXPRESSED IN LUNG, SIGNAL = 0.7; EXPRESSED IN ADULT LIVER, SIGNAL = 3.7

SEQ ID NO: 13795 - DNA, 454 bp, Homo sapiens; identical to SEQ ID NO: 10009
  MAP TO AC007677.2; EXPRESSED IN ADULT LIVER, SIGNAL = 2.8; EXPRESSED IN PLACENTA, SIGNAL = 0.77; EXPRESSED IN FETAL LIVER, SIGNAL = 1.7; EXPRESSED IN LUNG, SIGNAL = 0.88; EXPRESSED IN HBL100, SIGNAL = 0.92

SEQ ID NO: 13796 - DNA, 485 bp, Homo sapiens
  MAP TO AC007566.1; EXPRESSED IN PLACENTA, SIGNAL = 0.93; EXPRESSED IN ADULT LIVER, SIGNAL = 0.72; EXPRESSED IN BONE MARROW, SIGNAL = 1.5; EXPRESSED IN HBL100, SIGNAL = 2.4; EXPRESSED IN FETAL LIVER, SIGNAL = 0.89; EXPRESSED IN LUNG, SIGNAL = 0.81; EXPRESSED IN HELA, SIGNAL = 0.93; EXPRESSED IN BT474, SIGNAL = 2.3
gacgatcccaatatacttcttgcaatacagttatcactgcaagagtctgggctggccctcgatgaagaaactagagacttcctcagtaatgaagcatccttaggtgcgataggcacttctttaccttccaggctggactctgtccccagaaatacagatagccctcgggctgcattgagcagctctgagcttttggaacttggtgacagcctcatgagactaggagcagagaatgacccattttcaactgacaccctgagctcacaccctctcagtgaggcaagaagtgatttctgtccctcatctagtgatcctgactcagctggccaggaccccaacatcaatgacaatcttctcggcaacatcatggcttggtttcatgacatgaaccctcagagtattgccctgattcctccagcaactacagaaatcagtgcagattcccagctcccctgtatcaaagatgggtcagaaggtgtgaagga

SEQ ID NO: 13797 - DNA, 471 bp, Homo sapiens
  MAP TO AC005520.2; EXPRESSED IN BT474, SIGNAL = 1.4; EXPRESSED IN BONE MARROW, SIGNAL = 0.94; EXPRESSED IN HBL100, SIGNAL = 2.4; EXPRESSED IN FETAL LIVER, SIGNAL = 0.81; EXPRESSED IN HELA, SIGNAL = 0.75; EXPRESSED IN PLACENTA, SIGNAL = 0.67; EXPRESSED IN LUNG, SIGNAL = 0.78; EXPRESSED IN ADULT LIVER, SIGNAL = 0.73
ctccctgcaggttaggctcctgaaaacagaaatcaacactgtctactctacacacacaggtaaaaatacaataaatgttattataagtgcaacaagtcatttgaaaaagaaatcccatcttcagagttctagcaacaaccccagaccttcatttctattcccacttgagtctttcctaaggagaggcaaacatgcagagccaaggagcagactgcccaaaggaatgttggtgctgcacacacctgtgtggatgcgccggtggttcttcaggtttccagctgtagtaaactgcttaccacagccagactcatggcacataaagggcttctctccattgtgggtcctcatgtgcaccttcagcctctgcagcacatagaagcttttcccacaaccttctgcaggacagatgaaggagcggtcatttctgcaaaaataatcacataaggaaaaatatctgaaaacactctttgc

SEQ ID NO: 13798 - DNA, 457 bp, Homo sapiens
  MAP TO Z95325.2; EXPRESSED IN PLACENTA, SIGNAL = 1.7; EXPRESSED IN BONE MARROW, SIGNAL = 1.9; EXPRESSED IN HBL100, SIGNAL = 1.2; EXPRESSED IN ADULT LIVER, SIGNAL =   1; EXPRESSED IN BT474, SIGNAL = 1.4; EXPRESSED IN FETAL LIVER, SIGNAL = 0.84; EXPRESSED IN LUNG, SIGNAL =   1; EXPRESSED IN HELA, SIGNAL = 1.2
ttttggtccccactcaaaactggcagcctttcgggtcactcaataagtgggctcgagtaatatacccaaatgagaaatgtgttgtctccaaattttaaataggcccactaggcattgtgccttttcttggttgtaggagaggccaaatgcatcacttacccttcactttagaaggaatatctcgacaggccccataccccagtacccctagaaattttactgaggtagaagttccctaaattttagtcagatttatttcccatcctctggcatgcaaatgtctcaccaataagtccagtgtgtctgctacttcttgctcactggattcagtcagcataatgccatcaatataatggaccagtgtgatattttgcagaaggaaaaagcaatagaagtctttttgaagagttgatataaccctgaggtaggacagtaaaggtatattgctggtctcgcc

SEQ ID NO: 13799 - DNA, 449 bp, Homo sapiens
  MAP TO AP000154.1; EXPRESSED IN ADULT LIVER, SIGNAL = 0.85; EXPRESSED IN BONE MARROW, SIGNAL = 1.3; EXPRESSED IN HELA, SIGNAL = 0.85; EXPRESSED IN PLACENTA, SIGNAL = 1.4; EXPRESSED IN BT474, SIGNAL = 0.94; EXPRESSED IN LUNG, SIGNAL = 0.85; EXPRESSED IN HBL100, SIGNAL =   1; EXPRESSED IN FETAL LIVER, SIGNAL = 0.95
cctgtttaattcagcagaagagcaacttagatattcttaactgattgaaaactgctgttattacaaaatgctgatctccaaactttaactgaactctgcgtttgatgtaataatgttatagaacatttgagagtgcatgtgtttgttactctcagtttattggtatatataatttaaaatgaaactgttttctctttcagtgcatttgaaacgccactttatgtttcgaaaccatctctgtttagtttttgaaatgctgtcctacaacctctatgacttgctgagaaacaccaatttccgaggggtctctttgaacctaacacgaaagtttgcgcaacagatgtgcactgcactgcttttccttgcgactccagaacttagtatcattcactgtgatctaaaacctgaaaatatccttctttgtaaccccaaacgcagtgcaatcaaga

SEQ ID NO: 13800 - DNA, 488 bp, Homo sapiens
  MAP TO AL049839.2; EXPRESSED IN FETAL LIVER, SIGNAL = 6.2; EXPRESSED IN ADULT LIVER, SIGNAL = 3.2
ttcacttggagatttggtcttgagtaaaacgttagagaatcagagaacatcaggggtccagggcctctgaagatgtgaaaaccaacctccttgttttgcaaatgtggaaggaaaagtcccacgaaaagtccaagaatgtgcccaatgttataaagagacttgccttcatattcaagaggttcaacagtcactgctctggggctgccataaagatggtctccgctggctatctttactgtcttcactccttttatttgcagctgagaatttctaattctgacacaaaattctttttcatttttcccttttttcatctttagctaagtgggagacaagcttcaaccacaaaggcacccaagagcaagacttctacgtgacctcggagactgtggtgcgggtacccatgatgagccgcgaggatcagtatcactacctcctggaccggaacctctcctgcagggtggtgggggtcccctaccaaggcaatg

SEQ ID NO: 13801 - DNA, 464 bp, Homo sapiens
  MAP TO AL049839.2; EXPRESSED IN HBL100, SIGNAL = 0.7; EXPRESSED IN FETAL LIVER, SIGNAL = 5.2; EXPRESSED IN ADULT LIVER, SIGNAL = 2.3
tcacatattagaaaacgaacatcctctgctatctctcattttaaaatttaaatgaggcctaaaggatccattccccaggcatgtcaggttttgaatggtcaaaatgggacatcttgatgggctcatagggcaggatctggagcgactgtttctgtagctcagaacaccagatggcattccctggctggaggactagctctgtggcctgcagatgtcctgtaccttcttttcatcttcccttcagccctgtgggagaaaccattcatttcctcaaggaccactcccaaagacttctatgttgatgagaacacaacagtccgggtgcccatgatgctgcaggaccaggagcatcactggtatcttcatgacagatacttgccctgctcggtgctacggatggattacaaaggagacgcaaccgtgtttttcattctccctaaccaaggcaaaatgagggagattga

SEQ ID NO: 13802 - DNA, 476 bp, Homo sapiens
  MAP TO AL031965.7; EXPRESSED IN FETAL LIVER, SIGNAL =   9; EXPRESSED IN LUNG, SIGNAL =   1; EXPRESSED IN ADULT LIVER, SIGNAL =  22; EXPRESSED IN PLACENTA, SIGNAL = 2.1
cattgttattctgttccattattttgattttctttaagtacttgaattatatgtatgtttcctataccgagcttatatttcttatgtaatgaattcaaccctcccaaaataaacttttaaagaaatgggcattttcccgctattcataaatgcacagatttagtcttcatccagatgaatattttgcattgtgtagtcacacatgtaaatatgctttctactagtgcttatctgtatgttagttgctgctttggtaattctgagaaaaagtgaattcttatgtccaagaaatgccttggtttagaggtgaccatggaacaggagattcttgtttacctgtggaatttctcttccaggtgtctaagatcgtggatgctatttacaggcaactgtgtgataacaattgtatgaaggatgttatgttgcaggttatcactttgttgacatgcacttcacccaagaaggtcatctttcaa

SEQ ID NO: 13803 - DNA, 466 bp, Homo sapiens
  MAP TO AC008269.1; EXPRESSED IN ADULT LIVER, SIGNAL = 2.3; EXPRESSED IN BONE MARROW, SIGNAL = 0.7
tttgatatatggtttgtataggcagctttagaaaaaatacaattctctacataaatatttgcaagcactcacattatatgtatacagttgacccctgaacaatgtggaggttacggacaccattcctctgtgtgatcagtaatctacacgtaacttttgactcccccaaaacttaactaatagcccactgttgaccagaagtcttgccaataacagttgattaacatatattttgtatgttatatgtatcacatactgcattctaacaataaagtgagctagagaaaagaaaatgttattaagaaaatcataaggaagagaaaatatatttactattcattaagtggaaatggatcatcataaggttctttatcctcattttctttatgttgactaggctggggaggagcaggaggaagaggaggcattggtcttgctgtcttagggatggcagaggtggaagaaa

SEQ ID NO: 13804 - DNA, 463 bp, Homo sapiens
  MAP TO AC008039.1; EXPRESSED IN BONE MARROW, SIGNAL = 1.8; EXPRESSED IN HBL100, SIGNAL = 3.2; EXPRESSED IN HELA, SIGNAL = 2.6; EXPRESSED IN PLACENTA, SIGNAL = 1.5; EXPRESSED IN BT474, SIGNAL = 2.5; EXPRESSED IN FETAL LIVER, SIGNAL = 2.6; EXPRESSED IN LUNG, SIGNAL = 1.3; EXPRESSED IN ADULT LIVER, SIGNAL = 2.4
tggaaaagcgattagagtccagttatactgcgattgttttcatgggaaccactaggtgtgccagcaccaggcccagagtgagctccccatctactgctggaccagcagggcacgttctctccaggcttcacccactggggagcctttgtacattgcaaagtggaaccaagtcatgggatgaacagggtggcccagagttagcattcccagaggcctggccacagagagctgtcctgtgagagagcaagggggcagcgagtatgtgacatgttggcctgctgcttcctctgcagagagaggtcctgccatccacccgcctgggtaccctatcacctgccttcagcactcgggtgctgccagctcaagccacggagtatgccttcgccttcatccaggtgccccaagatgtgagtctggagtcttcctccttccaaaggggactatccactgacacttagccgct

SEQ ID NO: 13805 - DNA, 490 bp, Homo sapiens
  MAP TO AC006559.6; EXPRESSED IN FETAL LIVER, SIGNAL = 1.2; EXPRESSED IN LUNG, SIGNAL = 0.84; EXPRESSED IN ADULT LIVER, SIGNAL = 1.8; EXPRESSED IN PLACENTA, SIGNAL = 0.88
tttcttcaacttcataaaatgtttccttataccagtaacacatcaagtgaggcactgacaatggaatagctagtaagatcagtgctagatcctgatggacttgctattatgaatagactcaaacgaaacatgaagaaatacatataggactttgtaaacttattaaattttaaaaagtacatggagacactgagattttaacaattataatattggattaactttagagattatgactagaatcaatatgtttatagtccagtggaattttttaagtggtctgctgtgtttatctaaacttgcttactctgcctaagtatctccaatccagaagatctgagagcctctcagttctgttcctctggataatcctttggcggcgtgactgtttgcaaaatccatagagaaacttagtcagctgattgcaagaatcatctggagaacggaaccgcctgtcaacgatgtaaatacctgaagaacacaaaagcca

SEQ ID NO: 13806 - DNA, 462 bp, Homo sapiens
  MAP TO AC006474.3; EXPRESSED IN BT474, SIGNAL = 1.2; EXPRESSED IN ADULT LIVER, SIGNAL =   1; EXPRESSED IN PLACENTA, SIGNAL = 1.2; EXPRESSED IN BONE MARROW, SIGNAL = 2.2; EXPRESSED IN FETAL LIVER, SIGNAL = 0.81; EXPRESSED IN LUNG, SIGNAL = 0.63
tggtgctccttgagatttctgtaaggtaggtctgttctaaaatgtgtgaaaggaagagaacctgaaaaggcaaggtctaagaagatcactcatttggaaatggcaagggtcagtcacatcaggggttaactaagtcagtgtgatttaccctttggtaaatcatacacatatttcaaaagttactttatatgctttaattcttgcacacatatttcatggaaaataaattagtattacctcgactatcatccatttcaccatcccttgaatgctctgattggatgtctggaggggtctgaaggacggccacgctattctgatttataatcttcaatttcaattttggttttgaccgttttcttcttggaactgtaactgtgaggctctgtaactgagtcatccctgattcagtcaaacacacaccatcctgggtataagtcttgggtgggtctaaaattacaa

SEQ ID NO: 13807 - DNA, 457 bp, Homo sapiens; identical to SEQ ID NO: 1457
  MAP TO AB023055.1; EXPRESSED IN PLACENTA, SIGNAL = 1.4; EXPRESSED IN ADULT LIVER, SIGNAL = 0.89

SEQ ID NO: 13808 - DNA, 455 bp, Homo sapiens
  MAP TO AC011145.1; EXPRESSED IN FETAL LIVER, SIGNAL = 2.5; EXPRESSED IN ADULT LIVER, SIGNAL = 1.5
tttcagatgcccttacccactgcacccttgagcaagctgtttccaggctaacattgaaatcagtttcctttgtagagggcccacatagctgatttctaagaaaaaattatctcttcaaagcagatccttcaattttcatcttaagtgggggaagaatgagggaggaaaactaagaagccctcttgtcttgatggcagccatatgctaccctaacttggctgtcttgtgttcatgctttgccacactccttcttttgtcatttgcagacaatgtgtccagatgtttttcgtggcccttggggaggaagccactgtcgagattctccagtgcaaacaatcaggaagtgcagctgtgcaccaggtccgactgggcaaggggggtgccagtggagtgttggaagttggaagggacacgaataaaggcagactcatccctgagggaacaattgaatttga

SEQ ID NO: 13809 - DNA, 495 bp, Homo sapiens
  MAP TO AL034582.10; EXPRESSED IN BT474, SIGNAL = 0.98; EXPRESSED IN ADULT LIVER, SIGNAL = 0.93; EXPRESSED IN HELA, SIGNAL = 2.2
ccattaaaacataaaaatccatcttgaatagctagcattccatattttcttgaattttaattcagttacaggtttctttctgatctggaaaaatgatgatggcaacataaataataaaggttatcaaaggtttttgcatttttcatatattctgctcccctctagcacttttgactgtaggtcccagaattttacaagtactcagattatcaaagtaaagtttttaaattcaccatgtctagctgtatgtgcacttttttctgtttagtaaagtccatctctctggctgttttagtcagtggtgattgatgagaaccaaaagcactttgcctacccccaggcagaaatggaggccttgcctttgatattagtggacctgcaggctctggacactggagaaatggaattttctagatcagatttacagaaagacgtagaatataaatctcttgccttaggatgctaaagataatttcactgctgaatggatcaagc

SEQ ID NO: 13810 - DNA, 448 bp, Homo sapiens
  MAP TO AL035689.17; EXPRESSED IN LUNG, SIGNAL = 1.4; EXPRESSED IN ADULT LIVER, SIGNAL = 1.2; EXPRESSED IN BT474, SIGNAL = 1.1; EXPRESSED IN FETAL LIVER, SIGNAL = 1.1
caagccaggacatgaatgccaatggcccaagtggtttatgattaaaacacgatgtcgactttttcatgatttttacagctaattagaaagatttatcagcatccaaaagaagcacccccacccccccaaggaaacagggctgcatacagtgattaatgataaccagttttcactgagagtggaaaactactgcatccaaaggctcacgtgtgggaggagaagaactgttacttctgaaggaaagaactgatcagagttgagggcgtaagaaggccatacatgacactcacttgctcccttcttccacatgttcttcatgaccagctcaggtcccaccaactccgaaaagccttcctcactgaccttttctttcattctcctacaatcaaaatcactgtggcctgccaggcacagcgaatggcgtagtggctgggagtcagaccagtct

SEQ ID NO: 13811 - DNA, 371 bp, Homo sapiens
  MAP TO AL049697.8; EXPRESSED IN BT474, SIGNAL = 1.2; EXPRESSED IN FETAL LIVER, SIGNAL = 0.88; EXPRESSED IN ADULT LIVER, SIGNAL = 1.3
ggtcacttatattttctgtgcttcagttcccagccttataaaaaacaagtaacatcctttctccaagcctgaacagcttttgctatggaagcaaaatacagaatgtgggaaagtactctgaacaggaaaaagcactataaaaaatcccaagaaagctgcacattgcattctgttgtccttactcaaaggatacatcaataacaatttcaaagaacaaataattttactgaagaatagtaacctgatcatacattgttttcagtaggagtcctttactctccagcaactttaagacctcttgagatttttcacgataaaatgattctcctgaatattcatcaaaatatactcccagacgctaaaagagttca

SEQ ID NO: 13812 - DNA, 488 bp, Homo sapiens
  MAP TO AL109983.1; EXPRESSED IN PLACENTA, SIGNAL = 4.3; EXPRESSED IN BONE MARROW, SIGNAL =   1; EXPRESSED IN FETAL LIVER, SIGNAL = 3.4; EXPRESSED IN ADULT LIVER, SIGNAL = 1.3
ttcccattaactccaaactgagtagatggcttagttctctgatattactcattcacataacaatggaaatcgagggacaataaaaggcaattttaaaatcatttccacctcacttaggtgctgctgtaatgtagatttgttcttgttggttttccaacatgttgcttagttgggtcatattttattatggcagatttagtggctatgaaaaatgtcaggatgcatgtaattaagtctaaaacagcattttagaccagcttttgcatttaagatcaagtaaatagaagaacatttggctactcagtcagtcttttgtaggaaaccaaaacactgattgaaatcttcactaaactgattttcatttctatctactgagtggtcacagtgttggctgttgttgacgagctcttgttttttggcagtgacttttgtcagtgttgttttcctaaataacccaagagaaacccagagaaccccaagctgtctca

SEQ ID NO: 13813 - DNA, 466 bp, Homo sapiens
  MAP TO AL109983.1; EXPRESSED IN ADULT LIVER, SIGNAL = 0.99; EXPRESSED IN PLACENTA, SIGNAL = 3.7
agtggtcatggggactgaaggacaggcaaggtgctagtagtaactgagagggcagcgttgatgttttggtttaaacacagatttaaagaaatggatccaaacacatttcatgcttttctctttcgggctttttcttattcttctgcctgctcttcttcctccttttttctttttttttgctaggtcctttacctttgtttgcatctgccagaattccatcctctgttcactttacttctcccactgcacagatctgtttcttttctgttacgtagaaacatggttatcaaatttgagcctgcaccagaatctcctggaggaatggttaaaacagctgattcagaaatgctttgttgcagttctaacaagccccaggtaacattgctgctggtggtccagggaccactctttgagaaccactgctgtatgatgaccttgtaatcactctctcccttctgtctggcac

SEQ ID NO: 13814 - DNA, 419 bp, Homo sapiens
  MAP TO AL117354.2; EXPRESSED IN BONE MARROW, SIGNAL = 0.91; EXPRESSED IN FETAL LIVER, SIGNAL =  18; EXPRESSED IN ADULT LIVER, SIGNAL = 0.92; EXPRESSED IN BT474, SIGNAL =   1; EXPRESSED IN PLACENTA, SIGNAL = 0.94; EXPRESSED IN HBL100, SIGNAL = 1.2; EXPRESSED IN HELA, SIGNAL = 1.1
tctcctcggaagtaatactgagttatctaaatacactgtattcaacagacaacatcataatatgacaagttgaagaaaatcaaattttaatttaaatcatgttcaagagaaatagtagcacctgcctgtttgaatgtccttccagagaacccaggatttagaactgtcttcaaatatgatgaagcagctctgtttcaatatgtttatctgcaatacagagaaatacttaacggtgatctcttaaaattaaaaacatgaagttaaatttaagattattaaatgcttactgcaaaaacagcaaaagatacattaaagtaacttgcctttttgatagtgccaagataaaacaagccatctgaccatctagctaggacatcctgaccctcttcaaatttacatgctggctttttggctttatg

SEQ ID NO: 13815 - DNA, 462 bp, Homo sapiens
  MAP TO AC011004.1; EXPRESSED IN ADULT LIVER, SIGNAL = 1.3
ccgtgacagtgtgtatttggattagactgtggcttaactggacatccagttagcaagtggtggttgttgtctaggtgacagatgatggtggcctgggctcagggaagtgaccacagagatagagaggaagacaggtggattcaagagctacttaggagaaatgcaaatgaaagaaggaagagttgaaggcaatggtaaatttctggatccggtagtcaggttggcagatggtggagtatttctttaaccaccaaggaagaagcattttggagccgtgaggatgctctgttggagacactctggatggtgagctgcaggttggcctgggacgttttctagttgttctctgaaatgtctctttttatcctttgctttgataaacaactgattgcccagggaccagtgaagaatcttgatgataaaactcctacttgtagtgaaagaatcatgggatcttttgca

SEQ ID NO: 13816 - DNA, 500 bp, Homo sapiens
  MAP TO AF162757.1; EXPRESSED IN BONE MARROW, SIGNAL = 0.9; EXPRESSED IN ADULT LIVER, SIGNAL = 0.98; EXPRESSED IN PLACENTA, SIGNAL =   1
caatctcattcagcagggactatcattgagtacaggtttctgctgactaaacaagtaaacaaccgaatttgttcccaactgtctgggctagctcaaagaatccagactctctggaaaatatacctatacctgtgaaattcagttcaatctacaggtgtatacttcccactttgatgtggctcttcacagtacatcttcatatgtgtttgccagatttgtgttaaactaaattacttctttggtgtacaattttttgggggctaagatttggtattctacttggccttccagaacattctgggacctgactctacttaaaaagctaattagatgtctaaaaaagttgtagatgtgggtcgtaaggataatttttgcccagatgaagtagttggggaggttcttccagaagatagcaatagctttgttgcaaaagagaggatggactttccttgtctgcatggagaactcagggggagccaggggatcttcgcactctgagt

SEQ ID NO: 13817 - DNA, 475 bp, Homo sapiens
  MAP TO AL121653.1; EXPRESSED IN PLACENTA, SIGNAL = 1.7; EXPRESSED IN HBL100, SIGNAL = 4.2; EXPRESSED IN BONE MARROW, SIGNAL =   1; EXPRESSED IN LUNG, SIGNAL = 0.92; EXPRESSED IN FETAL LIVER, SIGNAL = 0.9; EXPRESSED IN ADULT LIVER, SIGNAL = 1.1; EXPRESSED IN BT474, SIGNAL = 1.6; EXPRESSED IN HELA, SIGNAL = 1.3
ttcaaagaaaatgccaggaacttaccaaatcataaataaaatgttttatctaatgaattttttgttagtataattctaagcaatctctttgttatgattttgccccttttaggctggatcagtgcatgtaagaattcgacgagatgccaatgaacaaatggttcttgctcatgtgaccaacaggctgtacactctagtgtctactctaactgttcaaattttcaaggatgactggattaggcctgccttattgtctgggcctgttgcagccaatgtcctaaacttttcagatcatcacgtaatcccaatgcctcttttaaagggtactgatgatttgaacccagttacatcaactccagctaaacctagtagtccacctccagaattttcatttaacactcctgggaaaaatgtgaacccagttattcttctaaacacacaaacaaggccttatggttttggtctcaatcatgga

SEQ ID NO: 13818 - DNA, 475 bp, Homo sapiens
  MAP TO AL034343.17; EXPRESSED IN BONE MARROW, SIGNAL = 1.8; EXPRESSED IN FETAL LIVER, SIGNAL = 1.3; EXPRESSED IN ADULT LIVER, SIGNAL = 1.2; EXPRESSED IN BT474, SIGNAL = 3.6; EXPRESSED IN HBL100, SIGNAL = 5.2; EXPRESSED IN PLACENTA, SIGNAL = 1.9; EXPRESSED IN HELA, SIGNAL = 4.9
ttgaggccgaagagagaatctatgaaggaaatttgtgagaagctagttacttaggggtcaaagtgggacaaagagatactattaatatttagattagagctgaaaaggtgacccaccagggtttcctctaagtttctcggagccaacacaccattgccgcattctcacgtgcaaagtgagagattcctaggaaggagattgaaatccttcccttctggcccctataacctagactgtagcacgtatttttaccttctcacttcccaggagagcgccgtctggaagcaggggccatggtcctggctgaccgaggcgtggtttgcattgatgaatttgacaaaatgtctgacatggatcgcacagccatccatgaagtgatggagcagggtcgagtgaccattgccaaggctggcatccatgctcggctgaatgcccgctgcagtgttttggcagctgccaaccctgtctacggcag

SEQ ID NO: 13819 - DNA, 482 bp, Homo sapiens
  MAP TO AL035415.20; EXPRESSED IN HBL100, SIGNAL = 0.9; EXPRESSED IN BONE MARROW, SIGNAL = 1.2; EXPRESSED IN ADULT LIVER, SIGNAL = 1.3
aagtcacatatgccgcttccaaaccagccctggtgcttgtgaggatgagaaaacagtggacgcacagatgcttctggcctgtgcctggcctgaagttgccccatcactgtccattttcttctctcctagtgacttctcattttctaggaatctggaacaggtgctttctccagccactttggcctcttcaccatgattcccgcttggtaccataccacctgagagggttttttcctcccctgccaattattcttctgtagagccaatgctagcctggaatgtggctgcctccaccaggcctgccaggacgactcctatgggaagacatccctcttctgttttttccccaggaactaactctgtaactctcctagtcgtttgttaccagctgcctggaaggagagttatttcagttaaggttgtgtctcttccttcccctttctggaatgaaagctccttgaggggaggaactttacttgccc

SEQ ID NO: 13820 - DNA, 445 bp, Homo sapiens
  MAP TO AL121756.2; EXPRESSED IN BT474, SIGNAL = 1.1; EXPRESSED IN ADULT LIVER, SIGNAL = 1.1; EXPRESSED IN HBL100, SIGNAL = 2.5; EXPRESSED IN PLACENTA, SIGNAL = 0.97; EXPRESSED IN FETAL LIVER, SIGNAL =   1
ttccttgtccaatgctgaaacatcttttcttctttataaagtactttttgggtccaacatagaaaacagctctacttttgtgcattgtactttctgtccaatagagaatagccaaattgtgtattttgtttcttttatttcctgatagacacatcctggcctttgcatgttgtacttcctgtgtccaacgtagaaatcacctatgtcttgagggaccccttatttcaactgaagccaccagtctaaggactggccctgagtgaagtgttctggtttctgtaggtggctgtagcttatcccaagtcaaagcccttgacgacccagatcaagataaagaagcctcccaaggtcactatgaagacaggcaagagcctgctgcacctccacagcaccctggagatgttcgcagctcggtggcggagcaaggctccaatgtccctctttc

SEQ ID NO: 13821 - DNA, 464 bp, Homo sapiens
  MAP TO AC009473.2; EXPRESSED IN BONE MARROW, SIGNAL = 2.3; EXPRESSED IN BT474, SIGNAL = 2.6; EXPRESSED IN FETAL LIVER, SIGNAL = 1.8; EXPRESSED IN ADULT LIVER, SIGNAL = 2.1; EXPRESSED IN HBL100, SIGNAL = 5.5; EXPRESSED IN HELA, SIGNAL = 3.2
taggatctctctagtaggataaattggtatattgttgttgtttttttttttttaccttaagaaaaaccaatagcttaatttttcctcaatatatatttagaaaattggtctgagaagagttttcatgaaacagaccagagaactatgtataaaattaagagttctaacccagtaagaaaaagtgcaaaaatgaagcacacattcccaggggccactgcagcctaggaccctcccatcagagggaaggcaaggtctttgatggcttttgagttcagctgagggatcatgctgatcttcaggaatttgttgcttgcatacttattcttgatggcgatgaatttagttaagttttcgtttactttcagcacatttttggccacgtgctgcatgacttccaatacttcattctgtgtgtatcctgtataacactgctgctttaagttccattttccttggcccagaac

SEQ ID NO: 13822 - DNA, 455 bp, Homo sapiens
  MAP TO AC009973.2; EXPRESSED IN PLACENTA, SIGNAL = 0.97; EXPRESSED IN BONE MARROW, SIGNAL = 0.94; EXPRESSED IN ADULT LIVER, SIGNAL = 1.2
gaagaatttaaaagccaatggtctaaacctggctgtgtacaaaataccattactgtgtgcgggtttttttttctttttctttttttcttttttttttttttttttgccagaagtatgatccagttgtcagtaataagatatacagggagacaggctaggcatcctctaggaatacttttgctttctagataaacaacaataggaacacaacagtatcttttcttcttcctgactcaaatgcaatggacacaatgacttcaagccttgacagccattcagtaaccgtgagaaccacttgctgcttagaatggcagagcagaaacacacagagcctggcccttgctggaaccactgtgcaaacgaaccatgtcgtgcaaggaaaaacaaaccccaatctgtttaaggccttgttggtcaagttttctatttacttgcaggtgaaaatgttcctatca

SEQ ID NO: 13823 - DNA, 472 bp, Homo sapiens
  MAP TO AB026899.1; EXPRESSED IN ADULT LIVER, SIGNAL = 1.4; EXPRESSED IN BT474, SIGNAL = 0.97; EXPRESSED IN BONE MARROW, SIGNAL = 0.95
  unsure 167
tgcacgaaccaactcatctgtgaacatcttcctctagagggtcttggctttggctatttggggaacaaagattccttgagacatgtgggtgttcctacttagcctcagtttcttcatttgactaaatctttgagtgttaccccagatgaatcctctgttaccacgantaccggtgaggcagccctgccttcaaggaggtctctaggttgaactgctcctagggtgtggggcctcatctggtgacgttagtaccccctggaccagtgtagaagctgaggaaaattctacacttcattttttaaaatgcctttcaggtaaaggttgttgctgttgatgcagagttgaatgtcttctatgaggaaagtgtgcattttgacagagatcttccagaatttgggcatgtacttgatgtgcatgtgtgtgtgatgggggtgttggttttggggtcctcccgcaaacttttgtattcgca

SEQ ID NO: 13824 - DNA, 478 bp, Homo sapiens
  MAP TO AB020866.1; EXPRESSED IN BT474, SIGNAL = 1.8; EXPRESSED IN ADULT LIVER, SIGNAL =   3; EXPRESSED IN HBL100, SIGNAL = 1.8; EXPRESSED IN HELA, SIGNAL =   1; EXPRESSED IN PLACENTA, SIGNAL = 1.6; EXPRESSED IN BONE MARROW, SIGNAL =   1; EXPRESSED IN LUNG, SIGNAL = 0.91
gacttaccttgttcatattcgtcagttgaattgtctcagcaaagtgaagtctagaaaatgctaatcaaattttcatattgtagtgaaagactgttacagagccaaagctctttcaggtcttagtgcaaagctctttgtgtgcaccttctgaatcaatatctgatggcgaaactaagaacattggggttaaaacaaaattttgtcataaggttaatgtttgtgtgatttgatttctttttcatatatagagaagcattggaagtgattcccaaggtagagcaacagctgctaacaacaaacgtcagcttagtgaaaaccgaaagcccttcaactttttgcctatgcagattaatactaacaagagcaaagatgcatctacaagtcccccaaacagagaaacgattggatcagcacagtgtaaagagttgtttgcttctgctttaagtaatgacctcttgcaaaactgtcaggtgtctga

SEQ ID NO: 13825 - DNA, 467 bp, Homo sapiens
  MAP TO AC009954.1; EXPRESSED IN ADULT LIVER, SIGNAL = 1.9; EXPRESSED IN BONE MARROW, SIGNAL = 0.92
aggcttacaaaggctttccctagattgtgggtgattgatctgtggcaggctattaagggaagttcaggatggccaggctattttgaggctgatatcttggagaaccctctctctctcctgcaaaccactcccttggcatcactctcagagacaagctgctggcctgtgcagcccacaccctgactcagggtggcatttttctcaagccctctccttttaaggccatcagggatctgagcccccatgggtagggaacaggccaggcagctggagcgtacaagagtcaccactacgaatagcttgactctgaagtttctaaaagggaacctggaccacctgagcctccccagaagacgcctcagtcacatttaccctgctgctgccattagtatcaggcagagccatctgtacacgcgggaacatgaagggcactttgcaagacttcagctggtgggttaaatgtggct

SEQ ID NO: 13826 - DNA, 477 bp, Homo sapiens
  MAP TO AF165147.1; EXPRESSED IN ADULT LIVER, SIGNAL = 1.2; EXPRESSED IN HBL100, SIGNAL =   1
tgttgcaattgagtatgtttgcaaaaagaagaggatttggaaaagatatttcagtaattcaacatagccaaaaacttaacattgtataagtattaacacactactaagacaactaatcttattttatgtaccacaatatacttaatgagtaaatttaactaaacctatcacagtaaagggtaaatgactactccatgccttttacatttgaagcgggcaccagtaatgctcacttcagtgcagggtctctgcggtgtctgcactcattcctcaaggagtagcaggccacaaactggttattgagtttggaaggggaaactgaacaaatgtttcccagcctcttcctagttccttcatctaagaagcgtaaggcttgcaagtagcatgaattttcatatgcgccattttgctccatgttgtaaaggatcttgtctctattgaggaaacttgtggttttccaggactgctgtaattggc

SEQ ID NO: 13827 - DNA, 478 bp, Homo sapiens
  MAP TO AL035425.10; EXPRESSED IN PLACENTA, SIGNAL = 1.3; EXPRESSED IN HBL100, SIGNAL = 2.8; EXPRESSED IN BONE MARROW, SIGNAL =   1; EXPRESSED IN ADULT LIVER, SIGNAL = 2.3; EXPRESSED IN FETAL LIVER, SIGNAL = 0.89; EXPRESSED IN HELA, SIGNAL = 1.7
tggtgatgtatcattgctctgtcttaacacaaaggataccttttaggatgaaagctattattatttctacatttctatatatactctaataaatacttctgctaacaaatgcatatatttaataggaaggatggttttctgggtagatttgggatttggtaggagatagaaatgactcttgtgaattccattaattgccctaatgtatgtgaatagctaaccttataagcaagcttgtaactcggtattatttatcttctaattatactttactttcataggccaaaagggtgatggaggattacctgggattccaggaaatcctggccttccaggtccaaagggcgaaccaggctttcacggtttccctggtgtgcagggtcccccaggccctcctggttctccgggtccagctctggaaggacctaaaggcaaccctgggccccaaggtcctcctgggagaccaggtatgtccgtg

SEQ ID NO: 13828 - DNA, 1465 bp, Homo sapiens
  MAP TO AC011406.1; EXPRESSED IN PLACENTA, SIGNAL = 5.3; EXPRESSED IN BONE MARROW, SIGNAL = 0.97; EXPRESSED IN LUNG, SIGNAL = 1.2; EXPRESSED IN FETAL LIVER, SIGNAL = 1.1; EXPRESSED IN ADULT LIVER, SIGNAL = 0.93; EXPRESSED IN HBL100, SIGNAL = 1.8; EXPRESSED IN HELA, SIGNAL = 1.5
gctctgacattctgtgatgctctgatgatatgtctccatgcaagaaatgtcaggataatataaaatttagaagttcttttccatttatatttaacacttctatatccttccttccaggtagcgatgggcttctttcaagtgggttttgtttctgtctacctctcagatgccttgctgagtggatttgtcactggtgcctccttcactattcttacatctcaggccaagtatcttcttgggctcaaccttcctcggactaatggtgtgggctcactcatcactacctggatacatgtcttcagaaacatccataagaccaatctctgtgatcttatcaccagccttttgtgccttttggttcttttgccaaccaaagaactcaatgaacacttcaaatccaagcttaaggcaccgattcctattgaacttgttgttgttgtagcagccacattagcctctcattttggaaaactacatgaaaattataattctagtattgctggacatattcccactgggtttatgccacccaaagtaccagaatggaacctaattcctagtgtggctgtagatgcaatagctatttccatcattggttttgctatcactgtatcactttctgagatgtttgccaagaaacatggttacacagtcaaagcaaaccaggaaatgtatgccattggcttttgtaatatcatcccttccttcttccactgttttactactagtgcagctcttgcaaagacattggttaaagaatcaacaggctgccatactcagctttctggtgtggtaacagccctggttcttttgttggtcctcctagtaatagctcctttgttctattcccttcaaaaaagtgtccttggtgtgatcacaattgtaaatctacggggagcccttcgtaaatttagggatcttcccaaaatgtggagtattagtagaatggatacagttatctggtttgttactatgctgtcctctgcactgctaagtactgaaataggcctacttgttggggtttgtttttctatattttgtgtcatcctccgcactcagaagccaaagagttcactgcttggcttggtggaagagtctgaggtctttgaatctgtgtctgcttacaagaaccttcagactaagccaggcatcaagattttccgctttgtagcccctctctactacataaacaaagaatgctttaaatctgctttatacaaacaaactgtcaacccaatcttaataaaggtggcttggaagaaggcagcaaagagaaagatcaaagaaaaagtagtgactcttggtggaatccaggatgaaatgtcagtgcaactttcccatgatcccttggagctgcatactatagtgattgactgcagtgcaattcaatttttagatacagcagggatccacacactgaaagaagttcgcagagattatgaagccattggaatccaggttctgc

SEQ ID NO: 13829 - DNA, 449 bp, Homo sapiens
  MAP TO AP000550.1; EXPRESSED IN ADULT LIVER, SIGNAL =   1; EXPRESSED IN PLACENTA, SIGNAL = 1.1
tgtctcttctagtgttcttggggaagatcccgacttagccattttccagtggcacctcttccaccatgagttcctgaggcagtccgatggggctactttattccagaacaatcacagtgagaccttttctctcaataaatgccccttttctctccttaatatattctcttgcttacaaaacactggtgtctccttatcatggtttggttctaccccactgggcccaagaattcttgcccaggagcaactgaattttcttcttgcttgctttttaaaactttggtggggtagagccaattttaaatcttctgatccattttttcattgcttttctcgcccttctgcattttctgcaaattccgttgaatcattgcagttacttaggtttgcttcatctcccccattacaaactacttgctggagttttcaaccctagttccctcattttt

SEQ ID NO: 13830 - DNA, 467 bp, Homo sapiens
  MAP TO AC011342.1; EXPRESSED IN PLACENTA, SIGNAL = 1.9; EXPRESSED IN LUNG, SIGNAL = 1.1; EXPRESSED IN BONE MARROW, SIGNAL = 1.2; EXPRESSED IN ADULT LIVER, SIGNAL = 0.95
aagtgctcacgttctggattcagagagaactaggtgcacatagcaaacctgccacttagcacaagtgactcaacctgtccgaaccacagtctcctcatctgtggtgctagcacatgtctcaaaaggtgatattcggatacagggagataaagcatattaaacacttaacatgggctgagagaggaaggtgggtgacttgtgaaagtccaacaatgagttgctggcagaatggggaggagggaggtagcctactggcctaatgaggtcactctgtccctgtctaggattatgggagccccagccagttctgggagcaggagctggagagcttacactttgtcatcgagatgaagaatgagcgtattcatgagctggacaggcggctgatcctcatggaaacagtggtctgtgactgggagtggctgggggatgcagcctcaggctcccgctttctgggtgtttccttt

SEQ ID NO: 13831 - DNA, 478 bp, Homo sapiens
  MAP TO AL117332.2; EXPRESSED IN PLACENTA, SIGNAL = 1.8; EXPRESSED IN FETAL LIVER, SIGNAL = 4.3; EXPRESSED IN HELA, SIGNAL = 1.4; EXPRESSED IN HBL100, SIGNAL = 3.2; EXPRESSED IN LUNG, SIGNAL = 1.1; EXPRESSED IN BONE MARROW, SIGNAL = 0.99; EXPRESSED IN ADULT LIVER, SIGNAL = 1.2; EXPRESSED IN BT474, SIGNAL = 4.3
tcctcaacttcaccaactgctaacatgatcatctgtactctttgcagattgacataaccactttctgtaaggtaaccctgtaagtgataaaatatatgtaaaatgatcttcttataaaagcaaatacttctgttttgaaatcattcaagaatgaacttaccccagttttgtgtaccacatttttgtatatgttaaccaaacggtcaattgcattttccctgtcagcaagagacaaacattatgcattaggaccagtaggcacagtaaagtcaagaagcctaaaacagtcgtttgaaaagctacacaaatgcacatacctaatctctaacgatggcaaatgagggaggaagtcatttcccacaaagaagcacatgaaaacccagtcatcaatgctcctctcaacatcaaatgtgaatggtaggctggccattgtgagttctctttccaaatactacaaccaaaaaggaatgctgccatt

SEQ ID NO: 13832 - DNA, 475 bp, Homo sapiens
  MAP TO AC010968.1; EXPRESSED IN ADULT LIVER, SIGNAL = 1.3; EXPRESSED IN BT474, SIGNAL = 1.4; EXPRESSED IN HBL100, SIGNAL = 1.4; EXPRESSED IN PLACENTA, SIGNAL = 1.1
ggaatttccaaaatgtggctttataatcccttcaaatacctttagtgtactaaaatatagtgtttaaaaatagcaattcaagtagcagtttactttaaatctggttttcagattctaattcatattgatttttttttaatttcaaaattaggctagaaattgtgaaatttttaaaaatcataaccagattttctagttattccttgtttaatgcaaaaactaatcaattctatctcactgtcacctttgttagcaaggttcatacctgtctacagaacggcctggccccactccgagttctggacgtgcactaggtaagaggtaagacaatctgtccatcactgaggacgccacaggtaaggcagcaacattttgatttattttcttgagttcatttacaatggcactggcaatggacttcaacacatgatgaggaagatgaaatgtaactgtggcccactgaaagaaaatggga

SEQ ID NO: 13833 - DNA, 471 bp, Homo sapiens
  MAP TO AC002472.3; EXPRESSED IN PLACENTA, SIGNAL = 2.4; EXPRESSED IN HELA, SIGNAL = 1.3; EXPRESSED IN FETAL LIVER, SIGNAL = 0.95; EXPRESSED IN ADULT LIVER, SIGNAL = 0.92; EXPRESSED IN HBL100, SIGNAL = 1.6
accaccaccaccctcctacaattttacagataggaaatgcagcccagggagtcctggtctcgttcagggtcaggaacaggccctgcatgggtcacactgggggcaggtggtggggtgaccaggcccagagggcacatgtggctcagttcaggcaagtcctctcagctcatgtgttgcttccacagtgggaccgttgccactgccacaggagagtcccatcacagggcagatggcagtgcttggggctggtgccctcagtctccaaccagcctgcccccatttcatacacgtggtgatcttgctgccccacccaccttcagaatctcctctagccaggaagacagtgtgcctcatagtaactacagctgtgattttgcatgcatttatttccttacccatcacaacagcctgagaaggaaagttctctttgtattatctccatttcacaaacggagaaactgaggttcagtg

SEQ ID NO: 13834 - DNA, 458 bp, Homo sapiens
  MAP TO AC008073.1; EXPRESSED IN ADULT LIVER, SIGNAL = 4.8; EXPRESSED IN FETAL LIVER, SIGNAL = 1.6; EXPRESSED IN PLACENTA, SIGNAL = 1.1; EXPRESSED IN LUNG, SIGNAL =   1
ccagtgatgtgatgaggtttctttgaatggtgggttttcagtctgtcttaacagaaggctagtcacatagttgtctatcatgtataatttaaagtcagttagtagactaaggttatcttaagtcaccacgacacaaaactggtctgctgtttgaacagtaagtatgttatatacacagaaacagaaatcatagttaccattgccttttaaaaatttttggtggttttgtattcatagggacaagtggtagaaaacttaaaagcacaggccctttgttcctggactgcaaagaaagataaccacttgaacttctcaaaacatgacattattactgtcttggagcagcaagaaaattggtggtttggggaggtgcatggaggaagaggatggtttcccaaatcttatgtcaagatcattcctgggagtgaagtaaaacgggaagagtaagcatctttatg

SEQ ID NO: 13835 - DNA, 472 bp, Homo sapiens
  MAP TO AL121572.4; EXPRESSED IN ADULT LIVER, SIGNAL = 1.1; EXPRESSED IN PLACENTA, SIGNAL = 3.3
cttggtcattgcagctaacgttttgtcaaatttgttgatttttttttcaaaaacttttggtttcattgacctttatctatttttttctgtcctctattctatttatgtctgctctactcttcattctttttgtattatttagatttactttgctctttcctagtttcttagaaaagaggaagtttactcttttcacatggctttctaattatgcctgaaagacccactcctttgttgcagagagattctagccaaagcaggggccattatacacctgaacataagagaaggaacacaagtttgttgtcctctgcttgaggaaggaattaatcctgaagtctgggcaacagaaggacaatatggacgagcgaagaatgcccatcccattcaagttaaactacaggattctgcctcctttccctaccaaaggcagtactcccttagacccgaggccgatcaaggactccaaaag

SEQ ID NO: 13836 - DNA, 469 bp, Homo sapiens
  MAP TO AL078463.11; EXPRESSED IN HELA, SIGNAL = 1.1; EXPRESSED IN PLACENTA, SIGNAL = 1.1; EXPRESSED IN BONE MARROW, SIGNAL = 1.1; EXPRESSED IN FETAL LIVER, SIGNAL = 0.97; EXPRESSED IN ADULT LIVER, SIGNAL = 1.2
ttccatcagacgccactttcccaccttaccttctaccctgtgccttaaaaaacaaaactattctctctctcttcaggtagcttttgcttctcctcatagtaacttttactaccaatgcaaaacttttattgtctaagcctggggtcctggatttagctctttgttctcctctttctcttccctgaattcatatactttcatctctcccacaatcacttttactccgaagattctgctagctatccccagtcataacctcttacctcagcagtatgccatctccacctggatacctgatggcctcgtactgctctacacccaaaatgttcaaagtaggatcaccattcaaaacagatcttccctcaacacccccacttctatcgtgaatgccacaattcttctaggtcaccagggtagagacactgggtcacctctgaccattatggttctatgctttatccagtcagtt

SEQ ID NO: 13837 - DNA, 474 bp, Homo sapiens
  MAP TO AC007878.2; EXPRESSED IN PLACENTA, SIGNAL = 1.6; EXPRESSED IN HELA, SIGNAL = 1.4; EXPRESSED IN BONE MARROW, SIGNAL = 0.93; EXPRESSED IN LUNG, SIGNAL = 1.1; EXPRESSED IN ADULT LIVER, SIGNAL = 1.4; EXPRESSED IN BT474, SIGNAL = 1.9; EXPRESSED IN HBL100, SIGNAL = 1.8
ccaaaagtttgaggatcactggtataagggaataaaggaacttcatgtaaaagccttctgagtgcataaaatctagatttttgtattgtctgtgtgctccctgtttagcttgagaatagcactatgtgattatgtcatgagatggctcctaccttaatttttttccaattgaaattatatttatatctttttactagatagaaaaaaagcattagaagatgtagtacaacgatctgggcatgggacagaatttaataaacagaagcatcttgaagctgctgataagggacattcaccagcacaaaagcctaaaactagcagtggaacaaaaccatcagttaaacctacaagcgctacaaagagtgattcaaatctaggaggacattctattcgttgtaaatcaaagaatcttgaagatgacactttgtcagaatgtaaacaggtgtctgataaagctgtttctctccagcgaaa

SEQ ID NO: 13838 - DNA, 455 bp, Homo sapiens
  MAP TO AF107885.2; EXPRESSED IN PLACENTA, SIGNAL =   1; EXPRESSED IN BT474, SIGNAL =   2; EXPRESSED IN ADULT LIVER, SIGNAL = 0.95
cactctacaagtgcttaaaacatggaaatcatggagaggctttgaccaagcctctccaatccaaactattttagcaacactcctcctcacagagttttcctcatttacttcagccagctccttccagagttagcctatggaaaaacagtgggactcccaggaaaacagaaagagatttcacagagaaaatctctgtgagagattttcagtcttcttcctggagatgtttgtgaatagcatcagggaccctctgttgagtgtggcttggctctggggcctgacctagccattgggcagtaggcaggcagtagatgttggttcccatgtgggcccagtctcaccggaagcagtaattggtgtccaaagcccgcttcttcctctgacccccctggcccgggttgtcgagccggtgtgggggaatcatcatgaggattagatgagggttgtggtgatcc

SEQ ID NO: 13839 - DNA, 469 bp, Homo sapiens
  MAP TO AF152365.1; EXPRESSED IN HELA, SIGNAL = 0.95; EXPRESSED IN ADULT LIVER, SIGNAL = 1.3; EXPRESSED IN FETAL LIVER, SIGNAL = 0.97
cacagcaccatggaaatgacatttcgtttccatttgaattctaaagtactgaacttttaaaatcttcatttgaagaaactctgagaaatttgtcaggagggagtaagaaaaatgatatagcctaccacttaagatagggtgccaaaaaacattaacaattgttcaacctaaatggttagtattcaggttgaagggtggcagaatatgccacccctacatatgccactttagcataaggattattttgagctaaaggcacttaaaaaacagcaggtgctagaagggcgctgtgactcacccctttttcttcccgaatgcagggataaaaccccaatacagaagatgtcctctttataccagaaggaaagtcacatttttatcatcaaggatgaaaaggtgagacctggagaatgctgcacaaagataccatgtgaaaataattcttatcttcctttagcctgcctacaga

SEQ ID NO: 13840 - DNA, 471 bp, Homo sapiens
  MAP TO AL035542.7; EXPRESSED IN FETAL LIVER, SIGNAL = 1.7; EXPRESSED IN ADULT LIVER, SIGNAL = 0.94
tgcgcaatattgtgaagaggcaaagtgaggcagaactgtgcactctaaattggttaatttatgttatgtgaatttcacctcagataaaaattaagtggggagggtgggctctcgcctcagaatcagagcaaatacttcaatcccaatgcaaaggctacttggctattttggctgcaccaaactgagcacttccaacagcgctggctccctgaatcccaggatccagcctgttgtatctactccttggggagcctggctcatgacccaacttggaaatgacattcccaagaccacaaatgacatttccaagtaccaggatgtctctatgcccagtgctggggccacaccagatgccgaggcctctccaccccaggagggctgcctcctcctcctaggtgacaatgaagaatgtactgctcagtcactgggctcagtggtcgtctctgggcatgagctgggtttcaatgagct

SEQ ID NO: 13841 - DNA, 446 bp, Homo sapiens
  MAP TO AC009682.2; EXPRESSED IN ADULT LIVER, SIGNAL = 1.2; EXPRESSED IN PLACENTA, SIGNAL = 1.2; EXPRESSED IN HBL100, SIGNAL =   1; EXPRESSED IN BONE MARROW, SIGNAL = 1.4
  unsure 219
  unsure 222
  unsure 330
cagtggcttttgttaacgggaagacatgagtgtggtttgtttttagtagacttccttcttgagcagaagatacaagagagttcccatatgctccctccccccacacatgcacagcctcccccgttatcactgacccccaccagagtggtacaattgatacaactgatgaacctacatagacacatcgtcaccccaaatccatagtttgtattaggatcntgnctgttggtattgtacatgagtgtatttttttttttttaaataatgacattggctttaattacagtacaaaaattgagaaagagaaaagagagcacgcaaaacaacatngggatgatccgcacagagataacaggagctgagattgcggaagaaatggagaaggaaaggcgcctctttcagctccaaatgtgtgaagtaagaatggacttttccaccatttgcct

SEQ ID NO: 13842 - DNA, 450 bp, Homo sapiens
  MAP TO AC009753.3; EXPRESSED IN PLACENTA, SIGNAL = 1.2; EXPRESSED IN FETAL LIVER, SIGNAL = 1.1; EXPRESSED IN ADULT LIVER, SIGNAL = 1.5; EXPRESSED IN HELA, SIGNAL = 1.8
gggagaattcacatgttttggttgttaaatcatagttccagctgtcagaccatactgcttgtgctagaggaatagggaacgatgtgtgtgggtggcaggaaaaaggcagacactaaggggcatttataaccaacataaatatgtaataaaggcaatgtcagtataaattaaatacatacaaaataaaggcaattattaatatgtaagcataggctccagagatgtttcagtttggtctccttcttctcccccaccacagaaaccaaatgaccgtgatcataaagtgagactggcactgggaaatggcttacgaggagatgtgtggagacaatttgtcaagagatttggggacatatgcatctatgagttctatgctgccactgaaggcaatattggatttatgaattatgcgagaaaagttggtgctgttggaagagtaaactacctaca

SEQ ID NO: 13843 - DNA, 426 bp, Homo sapiens
  MAP TO AC010686.1; EXPRESSED IN ADULT LIVER, SIGNAL =   2
tgtgagagttttctccaattttatgaacaaattaatagctaaatctatgtacagatcattaataattttctcataataaattccaagaaataaaatgatgagattgaaggatatccacattttataaatattgccaaattactatactgaaatgtaccaatttacattcctatgttgtaagtgagaaaatccagccaataaatgttaatgacatggggcttctgagtccctaataggaatcctgagatctctaaataaagacatgttgacttgtggatactgatggtacttgcctgctttgcacatgtagaaggtacccgtcaggttggtctcaagcacagcgtgccatcccttagaactgatgtgttcagcaggggaaagaaactggcctcctccattgttcaccaagaaattgatcttaccaaa

SEQ ID NO: 13844 - DNA, 390 bp, Homo sapiens
  MAP TO AL078634.17; EXPRESSED IN LUNG, SIGNAL = 1.2; EXPRESSED IN ADULT LIVER, SIGNAL =   1; EXPRESSED IN BT474, SIGNAL = 0.97; EXPRESSED IN PLACENTA, SIGNAL = 1.6
tttgcactaaatgaaataacttttgcatttataaaatagtcatgttatatatgattattctttgataatcaaatggactttgtctaaatgtaccatttgtgtttcggaatatgttcagtagttaactgaaacacagtttttacattaaatgataagaccattttcctggattagaataaaaagtaacatagcagaacttacctttgctagtttgtaccagagttcatagagatagcagaaaactctggcatggatcttgggtgactggatgttattcacatctccgaggatccccaagacccttcgccataacacagcagcagagtctgggtgccaaccagtgaggctccccccggcgattatactacagtcatctgtgaggcactcgct

SEQ ID NO: 13845 - DNA, 389 bp, Homo sapiens
  MAP TO AP000462.1; EXPRESSED IN PLACENTA, SIGNAL = 1.7; EXPRESSED IN ADULT LIVER, SIGNAL = 0.99
atggggaaacattgaggatgactgagcaggagagagaccatgtgaaggatggactgaatggagacttgtatcaaagagtctgagtatcaaagacttgtattagagagggttgttgtagtaatctagtcagggtatgagaaatggtttgtattagagtgtcaggagtagtcgtggcaaaaatatatagatcaggatgagggatgggcctcatctcacaccctgactccagtcaatggcagtggctccctggagtacactactataggaaggattttgtaaagttttgtctggcctcagtggagggtgaggtaggggaggagttctatgaacagttagtggtgtctgccatggttgaaacaatggagaagggggacaccttttctgtgcag

SEQ ID NO: 13846 - DNA, 463 bp, Homo sapiens
  MAP TO AC011481.1; EXPRESSED IN LUNG, SIGNAL =   1; EXPRESSED IN ADULT LIVER, SIGNAL =  12; EXPRESSED IN FETAL LIVER, SIGNAL = 4.8
tcccggggatagataaggagatccttggggatcatgtggttagaatggggaggatactgaagtgaccgcgtggggctcaagccgctgggaattgccttactcagcactgacctcctcccacagcccatcgccccatcacccactttcaaggctataaaaggaggacagccaatcccagaggtgtggagatccatacgtcatcggttactagggctctcctgggcagatttggcgcctgccggactgagcctgggcgaacctggagacccactcgaccacaatggggcaaccacgaccaagaaggggccccagagctctcagaggtcctctaagccgggaccccaggcctgtagccaccttcactcttccaaatctccaactccgcaattctcccatcccacttttaccttccaagacgatcgacagaaccaccaccaggaccgggagcgacaggaagagcctc

SEQ ID NO: 13847 - DNA, 478 bp, Homo sapiens
  MAP TO AC010136.1; EXPRESSED IN BONE MARROW, SIGNAL = 2.3; EXPRESSED IN ADULT LIVER, SIGNAL =   1; EXPRESSED IN LUNG, SIGNAL = 0.96
cctacgcatcttgcttttccgaaggaccttctacccatccaatgttagcccagtctgctatgaggacatgggcaacaatacagcaaactggtggatgctgttacggatcctgccccagtcctttggcttcatcgtgccgctgcgatcatgctgttctgctacagattcaccctgcatacgctgtttaaggcccatatggggcagaagcactggaccatgtgggtcatctttgctgttgtcctcattttcctgctctgctggctgccctacaacctggtcctgctggcagacaccctcatgggaacccagatgaccaatgagacctgtgagcgccgcaacgacatcaaccaggccctggatgccactgagattctgggcatccttcacagctacctcaatcccctcatctacgccttcattggccagaagttttgccatggacttctcaagattatagccatacacggcttgatcagca

SEQ ID NO: 13848 - DNA, 474 bp, Homo sapiens
  MAP TO AP000500.1; EXPRESSED IN FETAL LIVER, SIGNAL = 1.4; EXPRESSED IN ADULT LIVER, SIGNAL = 1.1
aggcgccactattacctctgttttgttaagaaaaagaatgatagcaagactaatgtaacttattgaagattgcagagctgaatggtagacagaacttgaactctcagctgcctgagactaagttctgtaatgtctcttgactctcttcaaagtgacatgcatgtgaggctgtgagcttgtgtgcttgagtagtgtgtttgtgtgagtgtgtgtgacaggcaaagatagtggttaaagagcccagctatgagtttcaaatctgggctgttgtttaaaaagatcacacacagacacacacatacacacacgaatggacaatgagagttccttactctgtgcccaccttttcctggagacaggttgcagcattccctggggatgtggaggttcgagcactaattgaaggacaattcatggccaagaggattcacgcagaaggcctgggctatcgagtcagtaagtgagccactggca

SEQ ID NO: 13849 - DNA, 477 bp, Homo sapiens
  MAP TO AP000354.1; EXPRESSED IN PLACENTA, SIGNAL = 0.99; EXPRESSED IN HBL100, SIGNAL = 1.3; EXPRESSED IN HELA, SIGNAL = 1.3; EXPRESSED IN ADULT LIVER, SIGNAL = 1.1; EXPRESSED IN BT474, SIGNAL = 1.2
ccaaagtttccttgtaaataatcaggttaagttcaatgatacatcaatataatttcagtcagtgttacagcaacagtttaagtgtattagataaaatcttaccatggagtgctttttcatactttttaacagttattacacaggttgttttagtttatccatagtgcctcatacttagctccccttggaaactgtgtgtacctcaattctggaacgtaccttagaacaactcttaacttttctaaatctgcatcgtcaattttacgtaggtagaggatgaataccgagccttccaagaagaagctaagaaacaaattgaagatttgaatatgacgttagaaaaattaagatcagacctggatgaaaaagaaacagaaaggagtgacatgaaagaaaccatctttgaacttgaagatgaagtagaacaacatcgtgctgtgaaacttcatgacaacctcattatttctgatctagaga

SEQ ID NO: 13850 - DNA, 471 bp, Homo sapiens
  MAP TO AB026899.1; EXPRESSED IN ADULT LIVER, SIGNAL = 0.91; EXPRESSED IN FETAL LIVER, SIGNAL = 1.1
cgccactattacctctgttttgttaagaaaaagaatgatagcaagactaatgtaacttattgaagattgcagagctgaatggtagacagaacttgaactctcagctgcctgagactaagttctgtaatgtctcttgactctcttcaaagtgacatgcatgtgaggctgtgagcttgtgtgcttgagtagtgtgtttgtgtgagtgtgtgtgacaggcaaagatagtggttaaagagcccagctatgagtttcaaatctgggctgttgtttaaaaagatcacacacagacacacacatacacacacgaatggacaatgagagttccttactctgtgcccaccttttcctggagacaggttgcagcattccctggggatgtggaggttcgagcactaattgaaggacaattcatggccaagaggattcacgcagaaggcctgggctatcgagtcagtaagtgagccactggca

SEQ ID NO: 13851 - DNA, 454 bp, Homo sapiens
  MAP TO AL034343.17; EXPRESSED IN BT474, SIGNAL = 3.3; EXPRESSED IN FETAL LIVER, SIGNAL = 2.9; EXPRESSED IN HBL100, SIGNAL = 4.8; EXPRESSED IN HELA, SIGNAL = 6.8; EXPRESSED IN PLACENTA, SIGNAL = 1.1; EXPRESSED IN BONE MARROW, SIGNAL = 1.2; EXPRESSED IN ADULT LIVER, SIGNAL = 1.8
ttggagtcagaaaacttttagtcaacttgagcttctctgagctgtagttttcccacctacaaaatagagcaaataatacctaaactttctgcctaaactacctaacttacaaataatacctgtaataattaaataaaaatatgtgaaagagtcttgtctatgttccatataaatgggagttatgataatgggttctaggctttgttttgaccctggcttttctgagaggcaaagccactaatccaggcaggtggtaaggtgtggcagggagatggaattcactgtgtgtggctccagggagaagatggtgagtgcagcattcatgaagaagtacatccatgtggccaaaatcatcaagcctgtcctgacacaggagtcggccacctacattgcagaagagtattcacgcctgcgcagccaggatagcatgagctcagacaccgccagggtgagt

SEQ ID NO: 13852 - DNA, 490 bp, Homo sapiens
  MAP TO AC011086.1; EXPRESSED IN BT474, SIGNAL = 3.8; EXPRESSED IN ADULT LIVER, SIGNAL =   1; EXPRESSED IN HELA, SIGNAL = 2.2; EXPRESSED IN LUNG, SIGNAL = 5.1; EXPRESSED IN BONE MARROW, SIGNAL = 1.3
gctgggcatagtagcacaagtgttaatattcagtaggtatcagttggtacctgttgaattcatcacattcaatacatagttctgaatgcctactacatgctaggtacttcggcccaccaaaagaacacagggtgcagaccaaggctggtggaaaaattaaggtgatgaagagaaccagaaagtatttgagatggggagctggtatcaaggggaattattcagtgtacagatcaatgaggttaatgcagccctcctcccttcactccccagaaaactcctgacctctggacaccgggattttcccatcaagttttggccctatttgctggatcatccactcgcagaactctttgtcaaataaaatggcaggagcatctccctgttcctgagcccagtcagcaaattcgggcaggcgaggcacccgagtgttctgggaaaagtcgaagaagaaaagctggtcctcgtcgtaggcctcagagagtcccacact

SEQ ID NO: 13853 - DNA, 489 bp, Homo sapiens
  MAP TO AL022156.1; EXPRESSED IN HBL100, SIGNAL = 1.1; EXPRESSED IN HELA, SIGNAL = 2.1; EXPRESSED IN ADULT LIVER, SIGNAL =   1; EXPRESSED IN BT474, SIGNAL = 1.8
cattgtgttcagttatagtatgatgcttcttattcttagtctatggtttcaattaaataacagtaaaaaaaatggataatacagctaataccctgaaaaatcaagaaattcaaagattatattgccaactaaaacactgccatgtacattttttttcctacttggtagcaaatgctaatggaattcaatcctgattacttaaagtcagttcacatcacacattcaatcagggtaataagaacaacataacatgcctactatagagttagattaagacataaaaattttttgcttgaaagtaatgactgtgtagcacatgggacacttgtcaactgcttcagcacattgtttacaagtgactagatgtccacaaggaacaaaaacgatagcaatatttctatccatacagattttgcaaagcttctcctcttgcaggcgccttagctgctcttcagtactaatctctgcaaaaagagaaaataattatgc

SEQ ID NO: 13854 - DNA, 478 bp, Homo sapiens
  MAP TO AC008014.5; EXPRESSED IN FETAL LIVER, SIGNAL =   2; EXPRESSED IN ADULT LIVER, SIGNAL = 5.3; EXPRESSED IN HELA, SIGNAL = 2.6
aacatatgagcagaatttcaaagcaaattagaatgctaaaatgatggctgccttactctttaagttcactgtagatgggaaggacctcagggtggcatacaaaagcaaatactaggataggaattgcataggccgtctgaaaaacaaagacaacaccacgtgtttagcattccaacatagatggtgatctcaggccatctcagtttattgaataaaaacttagaaaacacataactgtactcattagaagcccggaccgctcacttacccgggagttgaatacaaagtatttgggttcacacttgtcatcactatgagcttcatattctactccactgtcatgaagagagcccttggcctggttctcatccagccctgcaggattgcggtgggtgtaatccatcatgaagttcacatcagaactctcagagttgttgggtaacattaccacatgcattggaagcgtgttgttgaatga

SEQ ID NO: 13855 - DNA, 417 bp, Homo sapiens
  MAP TO AL049698.2; EXPRESSED IN HBL100, SIGNAL = 1.1; EXPRESSED IN HELA, SIGNAL =   2; EXPRESSED IN PLACENTA, SIGNAL = 1.5; EXPRESSED IN LUNG, SIGNAL = 1.6; EXPRESSED IN ADULT LIVER, SIGNAL = 1.4; EXPRESSED IN BT474, SIGNAL = 1.9
gctttgaaagtgtttatcttcccatcattactaattaagtaaaaatattttctttattctcagtatatttacttaaaagctgttttatgattctgtaggaagaattgacctttatcaccttatttcttatgctaagaacaattcttatggaattttaatgataatcagggtgttgaaaataaaatcttaagagatactgaatatgctttgattccagtttcagatcgtcgtggctcaggtaaaccccgaccaaagagtgaaggctttgagctctataataattcaactcaaaatgggtctcctgagagtcctcagctgccttgggcagaatatagtgaaccaaagaaattgcctggtgatgacagactgatgaaaaatagagctgatcaccgttccagccccaacgtagcaagtaag

SEQ ID NO: 13856 - DNA, 417 bp, Homo sapiens
  MAP TO AL031427.15; EXPRESSED IN FETAL LIVER, SIGNAL = 1.1; EXPRESSED IN LUNG, SIGNAL = 3.9; EXPRESSED IN ADULT LIVER, SIGNAL = 1.7
gatgtggaatctaccaatccaagaatctctcaaaagctcaggcaaagaattggaaatgataatgattaaaacagacctttgtgcacctggttaggaattttctatctcatgacagaaaggcaaacatcttctgacctgactccttcccctgacccggggttggctgctcctaccctgcaccttcattcagctccgcccagtgttgcctggctgcagcctctctgcccatagaactcagagcttactctggctttgccgagatggggctgccccagccagggctgtggctgaagaggctctgggtgctcttggaggtggctgtgcatgtggtcgtgggtaaagtgcttctgatattgtttccagacagagtcaagcggaacatcctggccatgggcgagaagacgggtatgaccagga

SEQ ID NO: 13857 - DNA, 475 bp, Homo sapiens
  MAP TO AC007690.11; EXPRESSED IN BONE MARROW, SIGNAL = 0.94; EXPRESSED IN ADULT LIVER, SIGNAL =   2
tgaaggaccagtatattgaatagcagtaatatttgaaggactagtcagctgtagaagccttgacttcagatcttcacccaagaaactctgtgtatttgcttttcctgggccactcagatagacaattgtgtttttgatacagtaagagtttgcagcttagcttaactagaaataatccggatcttattttggaattaggaagaaacatgttatgatgtagaaaagcctgctctgttacctacatgatggcatagctttgtgcttttcatgctttgtggccttggaagggggtagatagagtgtaggtggttaggagttgtttcctggctaaaaataggaacagcatactgtgagacaggagcttcttctctcacaagcctctgtgcaaatagcggagggttacgcatttgctgcaggtggtacttaagctccaagaacttacggcacacctgcttgagtggatcatgggtgagct

SEQ ID NO: 13858 - DNA, 467 bp, Homo sapiens
  MAP TO AC010149.1; EXPRESSED IN ADULT LIVER, SIGNAL = 0.99; EXPRESSED IN BT474, SIGNAL = 0.98; EXPRESSED IN FETAL LIVER, SIGNAL = 1.5
cctcaacatccaagaatgccacaataggagcccagtactcctatatcctaaggcaagatgccagtctatctgcaaagaacatggtaggggattgggagcctggttctgccagcatcagccttccccacctccaggccttatgagagaggccacatttctctggagagaattgtcagataccttctctcaagccaaatgaggtttaaagacatctaagcaggagatggacctccgtccctgggaatgtcagggaatgagagactctcagactcacctctgagaagtgtaaaggtgaaggtcatggctagcggggtcaagggtgccagagggctgagctgggagccagcaggggaataatgaagaagcacgattcccatggtctggtgcagaccttgtggatgggagctgtactgggtgtttttaagagatactctcactgagggaacagcagtgggttgtgtatcttc

SEQ ID NO: 13859 - DNA, 477 bp, Homo sapiens
  MAP TO AC009813.2; EXPRESSED IN ADULT LIVER, SIGNAL = 1.4; EXPRESSED IN BT474, SIGNAL = 2.2; EXPRESSED IN FETAL LIVER, SIGNAL = 4.9; EXPRESSED IN LUNG, SIGNAL =   1
  unsure 388
gggaggtttgcttgtgtgtagtgtattaggacaaggcagagagtgtagtcattggctaccatgacattctccttccctcaaaaatgcatctcaggctatgggagaccatcctgctaagcaggtaaaagggactcattttgccagcaggagagagaagtttgggttcctgtaattctgcccaggtgtttcctgtcaatgagtgtgctctagcagggcagcattcaaactctggttttttattgatttttattgtttgttctgtttgtttttgttttgttttccattttctcctccatcctgtttcccagggagccctcgaggagcagctggctctgactggggatggtgcctacaatgcgcactttggagagagcattgccagcctggnacgatctggacaatgatgggttcccaggtgagtgagtgctcctggtgcacggagcccctccaggtgcagcacgctgctctgtttcagag

SEQ ID NO: 13860 - DNA, 469 bp, Homo sapiens
  MAP TO AL080249.11; EXPRESSED IN LUNG, SIGNAL = 1.6; EXPRESSED IN ADULT LIVER, SIGNAL = 0.99; EXPRESSED IN FETAL LIVER, SIGNAL = 1.1
cagatctgcaggtgatgtggcttggggagaggctgccataaatattaaactcccaactccaaagtaccctgcagagattcagaactgaaggaattcataacatcattctctttcaagagtcagtgttctcaggagtgtgggcaccgtcatagaaaactatcgaaaaggagagtgaagcgttagagaactgctgagcttggagggaactcggagctcatttagtcccttgttcccgaagctccaagcacaatccgtggtcagcagcatcaccctcaccagggagcttgttaaaatgcagaggctcagccccaagaggaacatgatggatcaagatttgcatctaaacaagatccctgggggacttgcctgcacgtctttgtttctgaaaagctgtcctagtccccagccctcatctgcatttgggggaaacatgaggaacagagaggggtggagtttgttccaggtcccc

SEQ ID NO: 13861 - DNA, 465 bp, Homo sapiens
  MAP TO AB020873.1; EXPRESSED IN ADULT LIVER, SIGNAL = 1.1; EXPRESSED IN PLACENTA, SIGNAL = 0.98
ggtacagctacaggcagaattgtttttacctttgactggggttctcttcttggcagcgaattaatgaaatgcacggaataaaaagctgtttctcgcccactgaatggatgtaactgtcactcgctctgataaggaacatctatcccacgcaagacagaagtggcagaaatcttacttagttgactattctaatgactctgtttgttttcctaaagctcaggctgtttgaggcagtgtaaataatggattttgtctatgttgctacagggtgaggagaggagggaaagaagagctgctcctaccatgagtttctgaagtggatgaaggctgtagatgcagaggaaattatccacatcactgcagatagtctcgatagcagcgccaatgaagttactgagagttgtattattaaaaacacctatcatttgctgagcacttacatttagaaggtgcaatgaaaagcaa

SEQ ID NO: 13862 - DNA, 452 bp, Homo sapiens
  MAP TO AC011297.1; EXPRESSED IN ADULT LIVER, SIGNAL = 1.5; EXPRESSED IN BT474, SIGNAL = 1.3; EXPRESSED IN HELA, SIGNAL = 1.3
ggaaggggttcctattcctgtcgcaggtagcccctactgcaatgtcattccctgattggctagcgtttcagtttctgatgtccctgaaagctgtgtaatagattgtgaagaagaggcaggagcagagttcaaggaaggaatgggaagttcacattgtaaaaatgtagtagagtctgtaatggctcagtcaaggcaaaatgttgactataatcagttacaggaagtaatatatcctgaaccatcaaaattggggggaaaaggtccagaattatttgggccatcagagtttagacgatgatggccaccaactccttctcccgcggttcagatgcctgtgacattacaacctcaaatgccaatccagacacagtatccacaatatcagctggtggaaaataaaacccaaccaccggcagcttatcaacaccagccgccagccgaatttcagtatc

SEQ ID NO: 13863 - DNA, 474 bp, Homo sapiens
  MAP TO AL096700.6; EXPRESSED IN HBL100, SIGNAL = 1.1; EXPRESSED IN HELA, SIGNAL = 3.1; EXPRESSED IN BONE MARROW, SIGNAL = 1.1; EXPRESSED IN BT474, SIGNAL = 1.4; EXPRESSED IN ADULT LIVER, SIGNAL = 1.1
atcaactttggccctttctgtagacagatgcaactctgctttcttgagatcctcttgtagacatttttctaatactaaagttgcagttagattttttttcaaaattttccagttcaatcttgatttcttcacttttggatttggtacgaaagaggtaagaggtcaaatcattcactacagggataaaactagttagtgaggcatccttcgtttcaagggccaccgcactgccaaccaaagcattcagatacctggaaccagtgctagagagattggcaggggaaaaaattcacactctccatgagaaggtcttggagatacttggcttctgactggtattcacttgctttctgcttcaagtcctctattaccaggtagacatccctgttctggaccctgttgcgttctgaaaggtgatgtaaaatctctgtggtccgtgggttcacctcatactgtggaatgggatgatctcca

SEQ ID NO: 13864 - DNA, 458 bp, Homo sapiens
  MAP TO AL078461.8; EXPRESSED IN ADULT LIVER, SIGNAL = 1.1; EXPRESSED IN BT474, SIGNAL = 1.3; EXPRESSED IN HBL100, SIGNAL = 1.3; EXPRESSED IN HELA, SIGNAL = 2.6; EXPRESSED IN LUNG, SIGNAL = 2.9; EXPRESSED IN BONE MARROW, SIGNAL = 1.1
catgcttcccaacttagattcacttggatatgtacctcacttaaattcagcttcatgaacacaacttgtttccagatcataagacaattcaaaatcagtcacaaaaataaacgattgacgtacacaagttacaaagaaccacaaagggccacagaagaatactctggcattgcccattgcagagcccacttaaaaaactcaccagtaggagctatggaagggggtctgcctcgttttcttttgggttccctcaagttttcttgtggactcttcacaatgtcattttcaggtttcttatccacttgggcatctccagaatactctctgtcattttcggaaatgttttccttgtcttccttctcgttcttgggaagacttttctctgacactttccccttttcagaacagattaactttccttctttatcaggctgcttgggtcgcttttctgtctttaa

SEQ ID NO: 13865 - DNA, 471 bp, Homo sapiens
  MAP TO AC006020.2; EXPRESSED IN LUNG, SIGNAL = 4.6; EXPRESSED IN ADULT LIVER, SIGNAL = 1.5
agtcaggtcctggggaagtcacttgatctccaactctcactaagcctgaagccctgcctgtccccaactcctaatgagtcaattaattatctttttattttgaggtgagtctcctaaaatattcaatcaatcataagattcctgaaaaaatagactccaacttggtttatcatcttaattattttgactactaagaaaaattaagtgtacacatcacttacatcacaactggcaacatgttgaatctaaagtccagctgcttaccttatatctcagtgtcccccgcaacaaagtgtgagcagaagaaatgccataaatctcagcatatttcgtactgtctctgttaggatagccttccaaatttaatcctggaaaaaaatccatggacgtaacggcatcaagaaaggagatgcctcctgcaacattcacaacctgaggaacattgagaaggcacacatggggttacagctg

SEQ ID NO: 13866 - DNA, 484 bp, Homo sapiens
  MAP TO AC007919.18; EXPRESSED IN LUNG, SIGNAL = 9.2; EXPRESSED IN ADULT LIVER, SIGNAL = 1.8; EXPRESSED IN PLACENTA, SIGNAL = 1.3
atgaagagttgcaatggctgatattataaaatacacatacttttaaaaacaaaaaatccctcaggagttttgttgcccacatctgctagtaactagtgaagccagttgtgtaactgcacttagtttacacaatttcttgaacttacagttttgcaaagacctcagttgttatgtgatttagcagttagagtgtacccacagagaaaggaagcaggaaagtcttcagagaggggcaagctgacatgcaaagaagcaggtaaccagacatttgctaagcgcctcgaagactgagtgcactgcactgcactgacctgcttcagctcgttggtaaagtacacgtaagttacagccacacagagagactgcaggagcactgtgaagatcacgatcagcacgcaggtctgtcccaggctgggtcccccctggacctccatcatagccatgatcctgtcagagtctgactgctgtaagtcagccaggcagc

SEQ ID NO: 13867 - DNA, 453 bp, Homo sapiens
  MAP TO AL109658.1; EXPRESSED IN HELA, SIGNAL = 1.4; EXPRESSED IN PLACENTA, SIGNAL = 3.1; EXPRESSED IN LUNG, SIGNAL = 8.7; EXPRESSED IN ADULT LIVER, SIGNAL =   1
ataagcgggtccattgtcagtttttaattgtttaggaatccccatatgagcaaatgatgacagacaatgtggccgtacatgaccagctgtctcacctgtttggcatgtagcaggcagcatatgagaataagtgaaacaaattaagcagttcggggtctagagtacttttaattgtagcagtttctatgcgactggttacattcacaacataggctgaatcacagacaatgttgataggatctgcagctgtgagctgtaaaacctgaatgactgcaatcaactctgagtgttgagctgaaaccccagaggtcattattgtttgagtatgtttaggtccataaatagctgcatgacctttggaagagccatcagtaaaataagtctggccacctggaataagcttgtgatgagtaatcacaggaagaatgaaagaatggactttataaaactgca

SEQ ID NO: 13868 - DNA, 447 bp, Homo sapiens
  MAP TO AP000122.1; EXPRESSED IN ADULT LIVER, SIGNAL = 0.95; EXPRESSED IN PLACENTA, SIGNAL = 0.95
caaagtcaacaagtgagccgtgatggtgtcactgcaatctagcctgggcaacagagtgagaccttgtctgaaaaagaaaagaaaaagctaaggcttgtattccatgtctctttttgttccacttcattcttctagtaattcacttttatcatattatgtttatccgttggcaacaggttggaaatttaaacaaaaaccaggtttccctggtagatagtttgagaagtgctaactaaagacatcacattcctgctgggctttcagggcttggcagtgcacagagggcagcctgctccagctcacactctgtggcaatgtcacctatcctatcccgtgccctcaaatgggggctactgctccactgacacgctggttgggaaggtgagggcgctgcagctgaaacagctgtattacacaggagtacagccataactgaggaagatgctt

SEQ ID NO: 13869 - DNA, 466 bp, Homo sapiens
  MAP TO AC006946.18; EXPRESSED IN BONE MARROW, SIGNAL = 1.4; EXPRESSED IN ADULT LIVER, SIGNAL = 0.91; EXPRESSED IN HBL100, SIGNAL =   1; EXPRESSED IN LUNG, SIGNAL =  14
tgtagtcacaaaattaactgcttgcttttttttcccctcagggtgctaaaaatattaggttgaaggaagtcctttcatgaagaatggtgtgatgagaaggtatcactgtgggttaatatctaaaatgctgaacaagtatttgactgcatgaaatgacggatccttatagcactaaatttgaacccccatgtctgagcacaggactgggagcccaatcctgagcctgactgggagagccacttggaggcagggagaatcccccagggccctgctggcatgcccactcaccgtctgtctgcagtgtccattcgatgtgagccacggggaacaggtctccttgttgggtgtgggcaaagtgcagctggatctgcaggtcctttggggaggagggggtcaggtttcgagggtgaatccagctgtcatccaggcaggtacctggcagccagggaaaagcaacattcagaga

SEQ ID NO: 13870 - DNA, 463 bp, Homo sapiens
  MAP TO AB020866.1; EXPRESSED IN HELA, SIGNAL = 1.1; EXPRESSED IN FETAL LIVER, SIGNAL =  14; EXPRESSED IN ADULT LIVER, SIGNAL =  18
tgcttgtatctcctaagtcatggtatataatccatgctttttatgttttgtctgacataagctcttatcagagccctttgcacacagggattcaataaatattaacacagtctacatttatttggtgaatattgcatatctgctgtactgaaagcacattaagtaacaaaggcaagtgagaagaatgaaaagcactactcacaacagttatcatgattgcgcatggatatgttcagaatgagtatttttcaaatcactttaaacaaagctgaattgcagaaacgaaagcccaacagcagcaattaaattacatttggaataaaatcatttggcctaattttcataaccacagatttcagagaataccaccacccatgccaggtgtaccagacaatcccattgtctgttttagccgtgtaggggccgctgtagtatacaccattcaggtttgcagagtgacacc

SEQ ID NO: 13871 - DNA, 474 bp, Homo sapiens
  MAP TO AC007098.2; EXPRESSED IN LUNG, SIGNAL = 1.4; EXPRESSED IN ADULT LIVER, SIGNAL = 1.3; EXPRESSED IN BT474, SIGNAL = 1.2; EXPRESSED IN HELA, SIGNAL = 0.91; EXPRESSED IN HBL100, SIGNAL = 1.1
cacagcctccccttactgtcgcaggactaaaagtgacacagaaccccagaagtctcagcagagctctggaaggacttcaggatctgatgaccctggaatatgttccaatacagattcaacccaagcacaggttttgttaggcaaaaagagactattgaaagctgagactttagaattgagtgacttatatgttagtgataagaagaaggatatgtctccaccctttatttgtgaggagacagatgaacaaaagcttcaaactctagacatcggtagtaacttggagaaagaaaaattagagaattccagatccttagaatgcagatcagatccagaatctcctatcaaaaaaacaagtttatctcctacttctaaacttggatactcatatagtagagatctagaccttgctaagaaaaaacatgcttccctgaggcagacggagtctgatccagatgctgatagaaccacttt

SEQ ID NO: 13872 - DNA, 497 bp, Homo sapiens
  MAP TO AC009973.2; EXPRESSED IN ADULT LIVER, SIGNAL = 1.1; EXPRESSED IN BT474, SIGNAL = 1.9; EXPRESSED IN PLACENTA, SIGNAL = 1.1; EXPRESSED IN HBL100, SIGNAL = 1.9; EXPRESSED IN HELA, SIGNAL = 1.2; EXPRESSED IN BONE MARROW, SIGNAL =   1
ttctggctattccgtgaaatctaagttaattttatatactgagtccgggaccacatggcttgaatatgttacacgtaccctgacattttgttaacacgttgatcagtcagacttcacagttcagtgagacattgcagcatgggtgaaggctgtaaaatcagatagtttgcagaaaatttccatgtcaccgtaagttcccctcatttcttttccatattgtattttgtacatctgataaattttgtttatttttttttcttttagtgaatggtagtgtctagaaagggtatgtcccttcaagagagaggtgccaatgtccaaccggcctaataacaatccaggggggtcactgcgacgttcacagaggaacactgccggggcccaaccacaagacgactcaataggaggaaggtatgtatttcatggtaatttgaaaaggaattgggaataaaagaaaaaatatttttaagcctccttgcgaggtccaaaacttgaat

SEQ ID NO: 13873 - DNA, 451 bp, Homo sapiens
  MAP TO AC010966.1; EXPRESSED IN ADULT LIVER, SIGNAL = 1.5
  unsure 79
  unsure 109
  unsure 412
  unsure 418
cctttttccccaatatgcagttacactggtaaaaagccctaagtcctttggggaaggattaacaaaatataaatttttnggtagcataccaggatccttccttaagggnaattcagcctccctacattcaatggattctgggtctggaaatggctcaagtatgggaattgactgagggtcatgactctctgtttttattaatcaagtttgagttttgtttacctaacctataactttcctgcttatacaaatcaagtaagaatttactacgtttcccatttcacttctagaaatgccatgatcaaataaccaaagccattggtctttgtgagttggactattatgactgctgctttaactctgctgttcattttggtaatcatgtctgccttgcctttggtgactgagtgcncaccantttggctcctgccaccctgggatccaattactt

SEQ ID NO: 13874 - DNA, 490 bp, Homo sapiens
  MAP TO AF186194.1; EXPRESSED IN PLACENTA, SIGNAL = 0.97; EXPRESSED IN HELA, SIGNAL = 1.7; EXPRESSED IN BONE MARROW, SIGNAL =   1; EXPRESSED IN LUNG, SIGNAL = 1.2; EXPRESSED IN ADULT LIVER, SIGNAL = 0.96; EXPRESSED IN FETAL LIVER, SIGNAL = 0.93
ttcatgctagttgtatcattgggagttcaattaggaaacataaactacacaggaatttgaacagagaaagtctaatgtaaacagtccttaactgtaacgtagaattagagtaatgggagaattggctaagaggtagaaagaactctgaagactgtggtaacagcagatagggtagtagtcactacctctaaggctatgcagagcatggaaggaaggacagatctgacattcaaacctcattggaggggcatggctgaggcctactggatgtcagagacattaactaaggggctgaaatgggctggacagctgccctctttgtgctcagcttctatggtgtgtgtgtggcctgagaactccatgaaaagcaacctgaaggagtgctgggggcagatggccatagaggggtgctgagtgctgatgaagctgtcatgccctgtgccctaccaaggtagaaaggtttcagtctcacttgaaggacagtgaaggg

SEQ ID NO: 13875 - DNA, 417 bp, Homo sapiens
  MAP TO AC011356.1; EXPRESSED IN PLACENTA, SIGNAL =   1; EXPRESSED IN HBL100, SIGNAL = 1.2; EXPRESSED IN HELA, SIGNAL = 1.3; EXPRESSED IN BONE MARROW, SIGNAL = 0.92; EXPRESSED IN LUNG, SIGNAL = 5.2; EXPRESSED IN ADULT LIVER, SIGNAL = 0.92; EXPRESSED IN BT474, SIGNAL = 1.2
tcacttgttgatgtccctgcttttaggatatattaataaagagaggagtatgaaatatggatagctagataagtttaattcaacattctcatgttttctatgtgagaaaataaatatagtttaagaacatgaaatatctgatctctttgttttctgtttttaattttgtctccaagtagagcacagggaaagatcgaagtttaagagtgaaaggaatgacctggagagttcctatgtgcctgtgtctgcaccacctccaaactcttctgagcagtattcctctggggcacagtctattcccagcactgttactgtgatcgcacctgctcaccactctgaaaacacaactgagagttggtctaattactataacaatcatagctcttccaattcttttggtcgaaacctaccaccaaa

SEQ ID NO: 13876 - DNA, 458 bp, Homo sapiens
  MAP TO AL049870.1; EXPRESSED IN ADULT LIVER, SIGNAL = 0.92; EXPRESSED IN PLACENTA, SIGNAL = 1.1; EXPRESSED IN LUNG, SIGNAL = 6.6
catggagcagattaagtttcccaaatgccggaagttcattcatacacacaaattgtttaaaactcagaaatcattgctaatgagacttttaaaaatccataaacatatgcaatttaattattaagttaaatacctgttcatgtgggcaggaccatacccaccaatggcatatatcattccatccaataccgctgcagcaaaacaacttcttgttgtcgtcattggtgccacaggttgccattttcttattttgggaatgtacttctctacagattgtaaataagattgtccatcataaccacctaaggcataaagttctcctgcaagtactactactccaagagtacttcggctttcattcattctctctagagaagtccaagtatttgtatcaggattccagcattccactgaattttcatgttttctgatagtgacgccaggacgcacattagttg

SEQ ID NO: 13877 - DNA, 483 bp, Homo sapiens
  MAP TO AC005674.9; EXPRESSED IN PLACENTA, SIGNAL = 0.71; EXPRESSED IN BT474, SIGNAL = 0.74; EXPRESSED IN LUNG, SIGNAL = 0.77; EXPRESSED IN HELA, SIGNAL = 0.77; EXPRESSED IN ADULT LIVER, SIGNAL = 0.76; EXPRESSED IN HBL100, SIGNAL = 0.89
catggaggagggaatgaatgaatgtccatctgtgctcaacagcagatagtgcaagatgggacgtgaagggccagaggaaactggaaggtatgcaaaagccatttccaacaaaacctgtagtttcccatgaagtgaacacttcttttcccccacctcctcgtcctccgctattctctatcttcatgaacaataacatcaaacacctccctcctgcttatgctaggtgacgcctaaataacttgcctcatcctcctcgctgccttccttctcctggatccccacattcagggggttctatctctgaagatggttctaacttggtcccctccatccccactgtcatcctcctggtccaagcccttgtcttctccagcaggctggacatcagcctgctgactggtctcaccatggcccatctccactctccagtccaattctctacagcatccctggagtcatctttctcaaaagcaggcagtgtca

SEQ ID NO: 13878 - DNA, 474 bp, Homo sapiens
  MAP TO AC007556.2; EXPRESSED IN ADULT LIVER, SIGNAL = 0.8; EXPRESSED IN BONE MARROW, SIGNAL = 0.63; EXPRESSED IN HELA, SIGNAL = 1.4; EXPRESSED IN PLACENTA, SIGNAL = 0.77; EXPRESSED IN BT474, SIGNAL = 0.82; EXPRESSED IN HBL100, SIGNAL = 0.85; EXPRESSED IN LUNG, SIGNAL = 0.63; EXPRESSED IN FETAL LIVER, SIGNAL = 0.71
ttggcactgtttagtagaaatgttgactttgaaccattatagtgagttggtcgttgatattttaggatctctaagaactgctttttacctacaggcattaatgaatgccatgacccttcaatcagtggctgcgatcacaactgcacagacaccttaaccagtttctattgttcctgtcgtcctggttacaagctcatgtctgacaagcggacttgtgttgatattgatgaatgcacagagatgccttttgtctgtagccagaagtgtgagaatgtaataggctcctacatctgtaagtgtgccccaggctacctccgagaaccagatggaaagacctgccggcaaaacagtaacatcgaaccctatctcatttttagcaaccgttactatttgagaaatttaactatagatggctatttttactccctcatcttggaaggactggacaatgttgtggcattagattttgaccga

SEQ ID NO: 13879 - DNA, 469 bp, Homo sapiens
  MAP TO AC007721.7; EXPRESSED IN HBL100, SIGNAL = 0.91; EXPRESSED IN ADULT LIVER, SIGNAL = 0.92
ccccttcaacttctttgctgtcactttccttagcactaatctttctaagtaaaccaactggaaggtctaatgagaagaagggctggcctcacccctccccactcatagttcactgtccatctttgtttctggttagcttttctcttggtggcctctattatcagattattgtttcttggttttctttttaataaaagattgttttatgtttttatattatttcttatttttctttttaataaaaaattgtttttattttatttctagaatatcttcttgaacctcaaactgtcctcaatgggttagcaggaattacacgccgggttctgggcagaaatggagtcataactaagcatgaatcaggctgcactttggcccacttccttgtaactggaagtcttgtagccctggatactgatcatttgcacccccattattctcatagataggaccactgacgttagaacca

SEQ ID NO: 13880 - DNA, 403 bp, Homo sapiens
  MAP TO AP000315.1; EXPRESSED IN HELA, SIGNAL = 1.1; EXPRESSED IN ADULT LIVER, SIGNAL = 0.96; EXPRESSED IN BT474, SIGNAL = 0.68; EXPRESSED IN BONE MARROW, SIGNAL = 0.79; EXPRESSED IN FETAL LIVER, SIGNAL = 1.1; EXPRESSED IN LUNG, SIGNAL = 0.97; EXPRESSED IN HBL100, SIGNAL = 1.2
gaaaggtttaggctgcgttgtctttatggtcctttccagcacttccagtctatgattctgtaacccatttggtcccaaagctatctgtggtttcttgtgtcctggagtcaaaagacctgctctgtttgaatcctggcagtgaccacttcatagctgagtgaccttgggctaatgacttaacctttttgagtctctcttcttaactacattaaattgtacgactcaaaggaggcaacgtgtaggaaaccactttgaagactcctagaggagtattgttgctggggagagggctgctggaccccaaccaacactcggcaccactttctcttcttccctttcctcaattgccacacggagtggagctgccacttctctttcatcctcttcctcaaaagttgtctga

SEQ ID NO: 13881 - DNA, 469 bp, Homo sapiens
  MAP TO AL050309.4; EXPRESSED IN PLACENTA, SIGNAL = 0.64; EXPRESSED IN BT474, SIGNAL = 1.3; EXPRESSED IN ADULT LIVER, SIGNAL = 0.74
caggaagttgtttgatatgtcactgatagatatgcatacttgtacttgtttgagaagcatggtctaatcaagactcattgtacattcttaagcattaaaaagacataaaaaacagtacttttgaaagattactcttgaagcagtgtgcaagaataattggaggaagtgaaaagagacaggagataggatgactctaaaagggaatagattcaggaaggccaggaaagaggcaatattgttacttacctgatccagcatttttaccatctcctccaatgagtgggactgtaatggctgcagggcccccatctgcaggcaaagtagtatacaccatgggcagagactgcactaccactgggatggtcttcaggccacccatcttatttggcagactgactgaggggatagtgtgaatgacatgtaagatctgctggctaccagtgctctgagaggaggtcaggacagagcc

SEQ ID NO: 13882 - DNA, 474 bp, Homo sapiens
  MAP TO AL078471.2; EXPRESSED IN BT474, SIGNAL = 0.7; EXPRESSED IN ADULT LIVER, SIGNAL = 0.68; EXPRESSED IN BONE MARROW, SIGNAL = 0.76; EXPRESSED IN LUNG, SIGNAL = 0.71; EXPRESSED IN HELA, SIGNAL = 0.79
ttgaaagtaagccatttagtaagcctatgatggtctctgagtgtcctagtgaagggaagagtcacatgtctctcactttaaaccaaaagctagaaatgattgtgaggaaggctagacttcttgcaccacttcagccaagttgtgaatgtaaaacaaaaacaaaaacaaaacaaaacagaaaagtcaaaaaacttcttgaagaaaattaagactgctactccagtgaacatacaaatgttgagaaagcaaaacagtctgattgctaatatggagaatgttgtagtggtctggataaaggatcaaaccggccacagcattcccttaagccaaagcgtaatccaggacaaggccctcactctctttgattcagtgaagcctgggagaggtaaggaagctacagaagaaaagcttgacgctaaaaggtttgttcatgaggtttaaggaaagaagccatctccatcacataaaagtgca

SEQ ID NO: 13883 - DNA, 1956 bp, Homo sapiens
  MAP TO AC004614.1; EXPRESSED IN ADULT LIVER, SIGNAL =   1; EXPRESSED IN PLACENTA, SIGNAL = 1.9
tgacacagttccccttttgcaaaaatacttagcgaggatcattactttccaacagtcgtgtccagagacctactttgtaacaccgcagggaagttaatgtactaggtcttgaaaggtctttctggaatgtgcagtaacttgtagttttcttctagtagcactgctaatttttgtgttataatttttgtaggtccatggggccgatgtatgggagatgaatgtggtcccggaggcatccaaacgagggctgtgtggtgtgctcatgtggagggatggactacactgcatactaactgtaagcaggccgagagacccaataaccagcagaattgtttcaaagtttgcgattggcacaaagagttgtacgactggagactgggaccttggaatcagtgtcagcccgtgatttcaaaaagcctagagaaacctcttgagtgcattaagggggaagaaggtattcaggtgagggagatagcgtgcatccagaaagacaaagacattcctgcggaggatatcatctgtgagtactttgagcccaagcctctcctggagcaggcttgcctcattccttgccagcaagattgcatcgtgtctgaattttctgcctggtccgaatgctccaagacctgcggcagcgggctccagcaccggacgcgtcatgtggtggcgcccccgcagttcggaggctctggctgtccaaacctgacggagttccaggtgtgccaatccagtccatgcgaggccgaggagctcaggtacagcctgcatgtggggccctggagcacctgctcaatgccccactcccgacaagtaagacaagcaaggagacgcgggaagaataaagaacgggaaaaggaccgcagcaaaggagtaaaggatccagaagcccgcgagcttattaagaaaaagagaaacagaaacaggcagaacagacaagagaacaaatattgggacatccagattggatatcagaccagagaggttatgtgcattaacaagacggggaaagctgctgatttaaggtaacattttaattactgttaactacacaggcttgtctgtcaagaatcatgagtacctaagatatccggtactatctaataacttctggattacgtaggggcacaacctaggatgagctacccccaaatttaaggcttctgagcttgtgtgagtttctcggtgttgtttctattgtgtccacatttaggccctgtattacttgagttattttgattttcctttcaaagtctggagcatgagcaattcttcatgaaaagatactgcttcttctctatgtgtagacagtgtcgtttccctataatagaaaaaaaaattgcttaggggctgaaatattgggattttaaattcagatacttattttagtgagctaatagaaaaaggcatagttgtaatctctccaagacagcattttcagaattaccctataaacaaaatctgctctaaacaacaacccagggagctatacctaagaataattttcttgcacattgtatataatggaataactccctccagagaaggaaacagcaaccagccaaaaataaggtaagtagagggtattgaatcatgagtagcctcattcaggaaacatgtaactaattagcttcattttctagacagaaattatttaacaaattatctttgggtacataatgactatattatgaaaaactatctcatgtatgatttacttattgtgaaaataattttcattgaggattatctgaaagacatgatgttctctgggtattttgaattttgctcttggataaaccagaccatctgggagtggcttatctggatatttgcataattgctttttcagaaatatttatgcagttatgatttggattgaactgaaaaaaatatagtaacatcagtaagaattgtatatcagatttactgtagaaatgatattgaaagtgtcatcaa

SEQ ID NO: 13884 - DNA, 475 bp, Homo sapiens; identical to SEQ ID NO: 311
  MAP TO AP000117.1; EXPRESSED IN LUNG, SIGNAL = 0.7; EXPRESSED IN HELA, SIGNAL = 2.4; EXPRESSED IN PLACENTA, SIGNAL = 1.2; EXPRESSED IN BT474, SIGNAL = 0.76; EXPRESSED IN HBL100, SIGNAL = 1.3; EXPRESSED IN FETAL LIVER, SIGNAL = 1.5; EXPRESSED IN ADULT LIVER, SIGNAL =   1; EXPRESSED IN BONE MARROW, SIGNAL = 0.95

SEQ ID NO: 13885 - DNA, 469 bp, Homo sapiens
  MAP TO AF165424.1; EXPRESSED IN ADULT LIVER, SIGNAL =  12
ttggacatggaaagaccagcttagctctcagtgagctatttaaaacttgctctggattctcaggcagcaccagctcttctgattacatatttacaagccaacccttgaagatctgtgcagccctccacaccacagccaggacacccaatgctattcacctttaaagtgaagtccagatataacaggattatatccacaaataactatgcatgtaggtgaatatagttaactccatttaagacacaagccaataagctccttgtctagtatcttcataagaatacacattaaatctgcttctgtatcttatactcttccaacttcgtcacagctcccaggacaaacctgatatactggagaaaaaaaaattgaagaactatccgatacaacttgaggagtatgagaaggtagtggttaagttcatagatctcagagcctgactagctatgacctttcgcactttgcttaa

SEQ ID NO: 13886 - DNA, 460 bp, Homo sapiens
  MAP TO AC007685.1; EXPRESSED IN PLACENTA, SIGNAL = 0.74; EXPRESSED IN BONE MARROW, SIGNAL = 0.73; EXPRESSED IN ADULT LIVER, SIGNAL = 0.67; EXPRESSED IN BT474, SIGNAL = 0.78; EXPRESSED IN LUNG, SIGNAL = 0.81
tccaaattagaattttatctgatggataaaatttattttattctcttattcacagcactcttatttattcttattcacaacattgctgaagggaaaactcaacagctattgtttgttgcctgacttagctatagatcaaaaatacctgttttgcaataagaaaagaaaaagttgtcaaaacaactggatgggaaaacaatagaaaaaattcacattactgtttccttttgaagatatggttgtggacgtattcctctttaaggataagaaatttgaaactacagtaatgctaactgatagacgcgttaaattcagatgtactggcttctgtttcatggaacctacgtttatttcttctgctgtcccacatttaattgataacgacatcactacaagtataagaaaaggaagcagagtgaggtttacggatgagcacttgggagggatttcagaggtcgtg

SEQ ID NO: 13887 - DNA, 466 bp, Homo sapiens; identical to SEQ ID NO: 332
  MAP TO AP000113.1; EXPRESSED IN LUNG, SIGNAL = 0.75; EXPRESSED IN HELA, SIGNAL = 0.76; EXPRESSED IN FETAL LIVER, SIGNAL = 0.73; EXPRESSED IN ADULT LIVER, SIGNAL = 0.85

SEQ ID NO: 13888 - DNA, 494 bp, Homo sapiens; identical to SEQ ID NO: 1258
  MAP TO AC005089.2; EXPRESSED IN BT474, SIGNAL = 1.5; EXPRESSED IN BONE MARROW, SIGNAL = 0.88; EXPRESSED IN HBL100, SIGNAL = 1.3; EXPRESSED IN FETAL LIVER, SIGNAL = 0.85; EXPRESSED IN HELA, SIGNAL = 1.1; EXPRESSED IN ADULT LIVER, SIGNAL = 0.67

SEQ ID NO: 13889 - DNA, 459 bp, Homo sapiens
  MAP TO AP000037.1; EXPRESSED IN PLACENTA, SIGNAL = 0.67; EXPRESSED IN FETAL LIVER, SIGNAL = 0.77; EXPRESSED IN ADULT LIVER, SIGNAL = 1.2; EXPRESSED IN LUNG, SIGNAL = 0.64
tgaagtttttaaagtctggtgccttctcctggattagaggagaaaagctggaatgttaatattttctttaactccctgccctgcctcccatccaccaagagatacggttgcagagggggaaagagccacatgccccttggagaggaagtacagaatcagtgtcccggggtggtgcattcctacaggggtccagcaagggaaagtccaatgacgggcctcagggacaggaatcagggtcccgcctggtgggactaactctgtccccacagagctcaactcactggcatctccccagtgttgcagtcctccgtgagaacctcggctgccacagctgtcttctccatgacagccccagctcctgggcacgggtcctctgggtgggtgccctctttggggtccctggcctcgagttgacctgccagcatcctggttgggaagggaagggctatggggacactt

SEQ ID NO: 13890 - DNA, 427 bp, Homo sapiens
  MAP TO AL022150.1; EXPRESSED IN FETAL LIVER, SIGNAL =   1; EXPRESSED IN ADULT LIVER, SIGNAL = 1.3; EXPRESSED IN BONE MARROW, SIGNAL = 0.95; EXPRESSED IN PLACENTA, SIGNAL =   1
atccccattacccctttttgcttctaggtctacaactagactcaagtcccagcaggtcccaaaggatgaggtaaaaagtgtgacacataaagagttgtgctatgctcagaaagaactgcattattttccaaatgatagagacagaaatctgagaaaatatgtagtaattgatattaagagtgtcagataaacatgaaaagaacacaagttgtatcagggctgaatcaggcttagagaggttggaatattagagtggatttttttaggtaagtactgctcagccacataggaagggtcagaagacacctctgtcaccatgactgtgagaaataaattcatgagagaagccacagaatccttgaagggctctgtggtcactctttgtaggtcaggaattacagtgggaactgctgccactgaactgaga

SEQ ID NO: 13891 - DNA, 496 bp, Homo sapiens
  MAP TO AC007952.1; EXPRESSED IN BONE MARROW, SIGNAL =   1; EXPRESSED IN ADULT LIVER, SIGNAL = 0.73; EXPRESSED IN LUNG, SIGNAL = 0.76
  unsure 244
  unsure 260
  unsure 269
  unsure 349
  unsure 461
ggctcttcctccatccagagctggcccaagacccttagaaccctgagtgctggcaaatctcactgctcctgacccagcctgtgtattcaaaacgaaaacagtaaaaccaacatcaggatgtccgtcagaaatctaattttccttccaatgctgactgctttggtgctgtttttgaaatgtcacattattttctcccatttcccccctaatttttcagggctcccgctttgctggcttggccagnttcttgggcaccgagnctgctgtgncagctgtgaggggaatctgcccctcttggggcttcgggatccccatgagggaaatgggtggacctgaggactcagagctncctgcctttctgtccaggatggcagtgtcaggcgaagtaggcataaaagaatatgttgacacacatgaggaggatggcattgaagccacagacacgggcccagaaggcgtgntttctggggtgtttggccatcacctggagggggtt

SEQ ID NO: 13892 - DNA, 455 bp, Homo sapiens
  MAP TO AC007253.2; EXPRESSED IN PLACENTA, SIGNAL = 0.59; EXPRESSED IN HELA, SIGNAL = 0.79; EXPRESSED IN ADULT LIVER, SIGNAL = 0.74
ctgtccaccacctgtttccctggtacaggaactcctgcctgtgtgcaaatctgtattcctattgatgcccttttacttgcttcatgtatttggatgttgaacccaggtctcctactcagattctttgcctgcttcctttgatttatgctaactcattcagatctcactgttgctgtcggtattcacaggattcacacaccttcagttccatagctccccagggatcccctggctgtgatatttgccagcgtgcagcagcatcaaccacagcaaaagtgccttggcctggcttttcctgggtcacttgaacttaaggcctctgaagccttagtactgaacatccacatgctcttcattctcacgaagcagcatgctctatttttgctgtatctaggtaccactgttatctacaactccatggtggtgctatgggaagctttctcacaactcccagg

SEQ ID NO: 13893 - DNA, 462 bp, Homo sapiens
  MAP TO AL034345.3; EXPRESSED IN FETAL LIVER, SIGNAL = 1.2; EXPRESSED IN PLACENTA, SIGNAL = 0.94; EXPRESSED IN BT474, SIGNAL =   1; EXPRESSED IN ADULT LIVER, SIGNAL = 1.4; EXPRESSED IN LUNG, SIGNAL = 1.1; EXPRESSED IN BONE MARROW, SIGNAL = 1.3; EXPRESSED IN HELA, SIGNAL = 0.97; EXPRESSED IN HBL100, SIGNAL = 0.93
ccaagatgacagtgggtgtgaagcctatcacatggggaacagcaaagagcactggagacatgatcattgtcttgagacatgtgaagacccaatcaaatgggtcttttgctttttgcagatgtttaggcagagcaggggatagtctgtcagcaggaatgttcagaaggcttcaggtattgggtggtagttggactagaagctttttggtgtcttaagattctactgtaccagtagtcttcctgactttggagacatcaagttgaaagctaacagcgttttttttttttcagaagagatgtatcttgctttgcaagtttcccgtcttgtgtactacggttttcctgttttgaatttcaggctcattggtagatgacgaatctctcattggtgtacttcgaactaccaagcagacagcagctgaggtaagtgaaaagttgcatgtggctgcagaaactgagatca

SEQ ID NO: 13894 - DNA, 410 bp, Homo sapiens
  MAP TO AL132708.1; EXPRESSED IN FETAL LIVER, SIGNAL =  38; EXPRESSED IN BONE MARROW, SIGNAL = 2.2; EXPRESSED IN LUNG, SIGNAL = 6.7; EXPRESSED IN ADULT LIVER, SIGNAL =  15
acacaatctttttcggcagcttggatggtcagtttcagcaccttttacagatgatgaagctgagcctcgagggatgtgtgtcgtcaagggggctcagggcttctcagggaggggactcatggtttctttattctgctacactcttccaaaccttcactcacccctggtgatgcccaccttcccctctctccaggcaaatgggagagaccctttgaagtcaaggacaccgaggaagaggacttccacgtggaccaggtgaccaccgtgaaggtgcctatgatgaagcgtttaggcatgtttaacatccagcactgtaagaagctgtccagctgggtgctgctgatgaaatacctgggcaatgccaccgccatcttcttcctgcctgatgaggggaaactacagcacctgga

SEQ ID NO: 13895 - DNA, 361 bp, Homo sapiens
  MAP TO AL109805.3; EXPRESSED IN HELA, SIGNAL = 1.1; EXPRESSED IN PLACENTA, SIGNAL = 0.9; EXPRESSED IN HBL100, SIGNAL = 1.4; EXPRESSED IN ADULT LIVER, SIGNAL = 0.99; EXPRESSED IN BT474, SIGNAL =   1
aggccacatttggagaagacacgggggatcaaagaagggttttttttgatttttttcccccagagagctaataatctgcagataattattagaatcaataaaatactttaggaaaggtgcaaaaagtccactgcatttcctttaaccagcagcaaacaactaatcataaaatttttaagagaggctgcggctaaaggaagatggagacaatactggagcagcagcggcgctatcatgaggagaaggaaaggctcatggacgtcatggccaaagagatgctcactaagaagtccacgctcaattctgatcaccgcactcaggccatgcaagataggtatatggaggtcagtgggaacctgag

SEQ ID NO: 13896 - DNA, 479 bp, Homo sapiens
  MAP TO AC004961.2; EXPRESSED IN HBL100, SIGNAL = 0.8; EXPRESSED IN FETAL LIVER, SIGNAL = 0.68; EXPRESSED IN ADULT LIVER, SIGNAL = 0.65; EXPRESSED IN BONE MARROW, SIGNAL =   1; EXPRESSED IN PLACENTA, SIGNAL = 0.64; EXPRESSED IN LUNG, SIGNAL = 0.71; EXPRESSED IN HELA, SIGNAL = 0.7
tgatttcaccagcatcttcggcattttgtactgagaggaattttcgtcataactagtctcccacattatcttgattttgatatttttatacctcaaaactgatctgaaaaagcagtttcctctacctctgggaactttttctaaaatgtgcatgccacatttactattcgcatctcccagctatatgttctcaagctgagggacctgtgtctgcttggctggtgggattttcagtctgctgctgtttttcttctgtaggatcctgtgctctgagtcagccagtacctttcactctcattgtctgaactttaacgccatgacttacggtgctacccaggctcgccgcctctccacggcctcctctgtcaccaaacctccacacttcatcctcaccactgactggatttggtactggagtgatgagtttggttcttggcaggaatatggaagacaggtaagtgtgatggaaagagggtgaa

SEQ ID NO: 13897 - DNA, 403 bp, Homo sapiens
  MAP TO AC010680.3; EXPRESSED IN FETAL LIVER, SIGNAL =   1; EXPRESSED IN ADULT LIVER, SIGNAL = 1.2
gacttttggtccatgttttcctagttttaaattttttttttaaagtaattaaaaaatacttgtctccatttggaaggtccttgatccacttgatccattttcatcactagaccctggtcctaaacatagctctctctcaagcacacccaccctcctatattttaagatactgaaaatgtaaaagagatcttgctccttcactctaacaagtaccttgtacacccagctgagcagaacaagagtcttttccagcgatgttgcttgcatagcaggtgtactgcccggcatcgcctttgcctactttgagaactgtcagagtggcagtattttctaccaaagtcatcttgtagttgcctccagggcgaatctctcggttatctttggcccaagtgattttgattgg

SEQ ID NO: 13898 - DNA, 489 bp, Homo sapiens
  MAP TO AC006160.9; EXPRESSED IN BONE MARROW, SIGNAL = 1.5; EXPRESSED IN PLACENTA, SIGNAL = 0.79; EXPRESSED IN HBL100, SIGNAL = 0.92; EXPRESSED IN FETAL LIVER, SIGNAL = 0.65; EXPRESSED IN LUNG, SIGNAL = 0.85; EXPRESSED IN ADULT LIVER, SIGNAL = 0.79
aggcatcagggtggcattacaaaaaatctatacactacaggttctgggaaaacacagctctaatatgacaagagcgaacaaatggtagtaaaacacccaaatgagatatagatatattaaaaataaaattccattagctaaccttctgtatttatcataaggccaaccatattcagcaagaggaactgaatttttgttaagatgaattatttctgtgtgaacgtggtaaggggtggcaactggtaaaaggacaaaaaggggaaagagaggtcatcaaaaagagtggatcctcaggattctttaaacttaaaaagtgaaataacctgcaacagcagctctgatgttttctttgccttcatgccagttttcctgttcgtcgattccagctgcctttttgccgaggccaactagcaccacgctggggaagtcctgtcccacagatacaccaaatcaaccactttatttctttcaagcattcatttccagcaa

SEQ ID NO: 13899 - DNA, 414 bp, Homo sapiens
  MAP TO AC011895.2; EXPRESSED IN BT474, SIGNAL =   1; EXPRESSED IN LUNG, SIGNAL = 1.1; EXPRESSED IN BONE MARROW, SIGNAL = 0.94; EXPRESSED IN PLACENTA, SIGNAL = 0.99; EXPRESSED IN HBL100, SIGNAL = 0.95; EXPRESSED IN HELA, SIGNAL =   1; EXPRESSED IN ADULT LIVER, SIGNAL = 1.3
ttagaaaagaggctatatggcagaaaataagtacatctgtcataaattaggactgtgtggaaataaatgtaaatactggtcttgtgtcatttaagccacttaaattaaaaaaaaataaaaaggacccagtccaccttcagaaaggaaaaaatggcccttcctgtactaaaggacaatgtaaccctttagagctagtaataaccaatccccttgatcctcgctagaaaaaagaggagcgtgtgaccttaggaatcaacggggctggactggatcctcgagtaaatatcttagttcgaggagaagtttataaacgctctcctgagccagtatttcaaaacttctatgataaactaaaagtgccagtaccagaaattccaggaaaaacaagaaatttgtttttgcaattagccgagc

SEQ ID NO: 13900 - DNA, 464 bp, Homo sapiens
  MAP TO AL049835.3; EXPRESSED IN FETAL LIVER, SIGNAL = 0.61; EXPRESSED IN LUNG, SIGNAL = 0.59; EXPRESSED IN HELA, SIGNAL = 0.62; EXPRESSED IN ADULT LIVER, SIGNAL = 0.74
cagaaaggacatcatacagactcagagttaactactttcctcactcagtgctgagaaccctttctttagtttgcagtattggtattttcatggacagcagaaacacagctgattttcttcctttttttttttttttcctttttttaatgaaaaggcagtttcatggattttactctgtatactgttaaggctgaacccttagcctttttcttattgagtagaaataagaaaaaaaaagaatgatgataactgtaataatggttaataatctttctttttcaggaaaactgtgcattaatgttacatgaatcttatttggaaaaaaatgaagaaaagaaagggcaatggtcaaatataatagtacctcggtaattgatgatttctgtcccaagcaccggagtcatctccaggactgtgataaaggctttgtccatagatgtcagaggaaaaggagacatgcgatg

SEQ ID NO: 13901 - DNA, 1945 bp, Homo sapiens
  MAP TO AF095725.1; EXPRESSED IN ADULT LIVER, SIGNAL = 1.4
cccccacatctgttttacttactcagaaattatgtaatattacatttaaacaaaaagtttcatgtgcagaaaaaaagagatctgaaataatattgaaatattaatgtccatgtatctattagataaaattatataagactcccaagtattactgtcatagaaggaagggatttttccttttacaaatgaccctttccagggctcccttcatgtctctgttcctcaggctgtagatgaagggggtcagcataggggtcaccacagtgtacatcatagccatgacagtgtcctttagagtagaactattagctgatgggcataagtagagaccaataacggtcccatagaacagtgacaccacagagaggtgggagccacaagtagagaaggccttgcagatacccttagaagaagggaccttgaggatggaggagacaattcttgcataggacccaaggatgagtaggaatgggatgacaagaatgagccctcccatgataaatatcacccattcattaactcgagtgtcagagcaggccagcttcagcagagcagacatatcacagaaaaagtgggggatcacattgtctgcacaaaaacacaacctggccatgagtaaagtgtgtaacatggcatggaaggtggtcagcacccaggacagcgccaccacggagagacagagcatggggctcatgatggcggtgtagtgcaggaggaagcagatggcggtgtagtgcatggggaagcagatggccacatagcggtcataggccatggccacaaggaggaagctctctagatccgaaaaatacaagaagaagtacatttgggtcaggcagtctgcataggggatggatgggtcttggttctgcatgttctgcagcaatttgggcattgtgactgaggaaaagcagaggtcagagaaggacaagttgctgagaaacaaatacacaggcgtgtggagatgggagtccagtcgaatgaggacaatgatgaggaggttccccaggagggtggtaagatacatggccaagaacagggcatagcacaggttttgctgctctggttggatgggcaggcccaggagcaggaagtctgagatgctggtttgattttgtcccatcatgctctgtctccagtatctttaagagaatataatagggtccctcaaaaccgtgaataaaaataaatatattcctatgatacatggtcaacaggtgttcaatcactgatttcaccctcattttccctaacaacaatctctatattcagagatttctataattatttctataatcagaaatgtgccacatcacaaaatccacgctacttttcacactgatccatctcactttgcataacatgtagcaagattgactcctcctttctttctaaaacactcttatctattagcttccgtgcaatcacactggtttcctgacacatattggccattccttcttaacaactgtaaatggtttcttctctaacagtatcttatacgttgctgttttctgggaatttttcctaaattctgttctaattctacagatcaagccctgaaagagttcacctgtccccgtgacactgattaccatctgaacttcctgggtaaacctatcatcattagtactgcattagcagttgcttcctgattatctccctatggatcatgaccatcctcagcttaacagatcccagatgaaactcgttatctcaccctgccactcttccaatttgctcctccagtctctcatatctcagtaaaaggaatccaggctcaagtcagaaacctgggagttttctttcatttatttatttctctcaagatcaacatctaatcctagcaagttatatagattctgtacttcattctatttctaattcacccactgcttatcccagttgccacaatctggaacaggctgacatcttttcttgtctg

SEQ ID NO: 13902 - DNA, 462 bp, Homo sapiens
  MAP TO AP000496.1; EXPRESSED IN ADULT LIVER, SIGNAL =   1
gatttttcccctgatgatcgtcactcttggtgcttggtttccttgtgcaactagtggtttgttggtttgttattgttagctgcttattttccttgcaaattacttgtggtaattctttgaggtccaggatgaaatatgttctatagagagcctttgctttcacctctgccaggcaccagtctggggccataccttgaggttttatggaccacccaaataacatgaatttgaacaacacagtcatatgaaggccagcttgtggttgccacttctcagcatccctgtcaactcctgtgatctgctctgcaccatggcaactttcctcaaagttttccttggtcctccaggagtactagtaggaatagcgtttctccatgtggttgaatcttatgttgaggttgcagcccttggagatgctgctttatgggtccctgaacccttcgaggccatgaaaaccaaact

SEQ ID NO: 13903 - DNA, 447 bp, Homo sapiens
  MAP TO AC009239.2; EXPRESSED IN ADULT LIVER, SIGNAL = 1.1; EXPRESSED IN HELA, SIGNAL = 0.92; EXPRESSED IN PLACENTA, SIGNAL = 0.84; EXPRESSED IN BONE MARROW, SIGNAL = 1.7; EXPRESSED IN HBL100, SIGNAL = 1.9; EXPRESSED IN FETAL LIVER, SIGNAL = 1.2; EXPRESSED IN LUNG, SIGNAL = 0.97; EXPRESSED IN BT474, SIGNAL = 1.9
cttctgtcttccttgtgtggctatggaggccttaagaaaatatactgccctgtcacccgactcactcaattgtcaattgatgctaaaagatgagtttattacccaatcagctgcagatatgagaagaaagctccaaaagtgacccctgggccctcaacaaaatctggaggcattattaaacctggcaaccttggtgttttataatagggaccaagaggaaaaggccaaaaaggaaaagcaagtttacagaaagtccgcagccttagtcatggccctcagacaaactttggtggttcagagaggacagaaaatggagcaggccaatcacctggtagtgcttgttaccagtgtggtttgcaaggacaccttaaaaaaggtttccaacaagaaacaagcagccccctcagccatgtccactatgccaaggcaatcactggaaggtgcact

SEQ ID NO: 13904 - DNA, 436 bp, Homo sapiens
  MAP TO AC012668.1; EXPRESSED IN ADULT LIVER, SIGNAL =   2; EXPRESSED IN FETAL LIVER, SIGNAL = 1.4; EXPRESSED IN LUNG, SIGNAL = 2.7; EXPRESSED IN PLACENTA, SIGNAL = 9.9
cgtgtgtgcgtgatctatccatggtaagttttatgatgctagcattctttaaaactcagttttatcttttggagataaatctggcttttttccccctaaggtttatttgtatgtcatttttctttttttctgaaaaatttaaaacttgacattaaaaaaagttttaacaaccaataatgtgtaaattatcttaggttattagctgaaacactgcaaattatcctcaaatggcatgtcaaaggaaagatggatttgcggaaatatttcttgacctgcttccccatttcccgcccctgctcgtcctgtgcctcaccgctcgatgtggtctgcacagaggtgtgcctctcacacttccactctcctcggccgttgcctgtgcagatgcactggagcaggtttcctcgattatccttcttgctccaggtgtctccaattc

SEQ ID NO: 13905 - DNA, 458 bp, Homo sapiens
  MAP TO AL049868.10; EXPRESSED IN ADULT LIVER, SIGNAL = 1.1; EXPRESSED IN HELA, SIGNAL = 1.7; EXPRESSED IN HBL100, SIGNAL = 1.3
tgtactctgctgatcaaaaattcagttgaaaaatgcttcttgtaccatctgttaaactgacaatgccactgtaaattaattgtaacctattttcaaagaagatttcagagagccctttttaaaaatattaagacatagttgctaaacaaaagcacttattggattcaagtagctatttaatgacaccaatatttgatctttgtgtccagggtcccatgagcctacgtggcatattgcaaatataataaaaccctccttttctctccccagccattacaacacaagctagcatggagtttcgacggaaagggtcacaaatgtccacagacaccatggtttccaatcctatgtttgatgcaagtgaatttcctgataactatgaagcaggaagagctgaggcttgtgggacactgtgtaggattttttgtagcaagaagactggagaagagattctgcca

SEQ ID NO: 13906 - DNA, 477 bp, Homo sapiens
  MAP TO AC012275.1; EXPRESSED IN LUNG, SIGNAL = 1.3; EXPRESSED IN HELA, SIGNAL = 0.97; EXPRESSED IN PLACENTA, SIGNAL = 0.93; EXPRESSED IN HBL100, SIGNAL = 1.6; EXPRESSED IN BT474, SIGNAL =   1; EXPRESSED IN ADULT LIVER, SIGNAL = 1.3
tggtatgcctcaattataggagcagattcattatggtaaatactgagatcagaaagcatgtgtaactgtgtcatagagtgattacatccaggcattattgctagccaagattgataaaaatgcccaataagtataattgttctctatgtcagcccttgttgaaggaatactcatggcaaaggtgatcaccactatcatagctatcattaaattactcactgtgactggttgtcctgctttcctcaggttttcttctgccatctatgacagcttcttgatctgtccccaggtgggtggctgtgtttgacaggtgttgctcatgacagttggggtcctcctcagcatcagtctcgacatgactgcaactggtgggtcctcaggatcctcccggaatctcttctttggcatctggctcatgataaggtttcaggtgtcttgatggtatccaaattggctgcttgttttggcctggagaaa

SEQ ID NO: 13907 - DNA, 450 bp, Homo sapiens
  MAP TO AL031667.17; EXPRESSED IN LUNG, SIGNAL = 2.3; EXPRESSED IN ADULT LIVER, SIGNAL =   1; EXPRESSED IN HELA, SIGNAL =   1
ccccatgtagctagtggctcctctgttggacagtgcagggatagaactcagctccaaagtagaaggaagtgcgtgatctccctgttagtcacaaggtaccgcagtgcaacccagacttggtttaacctagttttggaaggaccccagaagacagtaggctgctaaaggcagccagattccagagcatctgaatttggtttgtgggggaaggcctagtgaccctgagtctcatttcagtggtggttttagggcacattgccaagtccctgcatggcaacaacatgctgagaaaagagaacacatctgaagtcccagaagtatggcaggtagaatttacatgctgctacttcttcctcccccaccccaacacacccaccatagacatacagaaaaccaaggtggatcaggacttggaagaaataagggaagtccccaaatgcagaagtcatt

SEQ ID NO: 13908 - DNA, 388 bp, Homo sapiens
  MAP TO AL078590.5; EXPRESSED IN ADULT LIVER, SIGNAL = 0.98
cagatgttgccagaatttgctctaatttactatgaggtttgcaaataaaagtgctcttgacatgaaaacttgctatttttaatggaaagacatgtacagccctttctcaggaagtggagattaatgcataaaattttattttcctaacataaagcatgttttttcaaaaaatggcttctccatcttgtggccctttgattatgatagctctgaaagctttgaaaagcttgcaaatactcaacttcaggaataaaaccacctatgagaccctcacctgaaggcaggatctttcctgcagccttgagtcttcctaatcagaaccattgtttcgtaaactggactccgaagacaacacttaaagtcactcaagttcgctacaaaattcttg

SEQ ID NO: 13909 - DNA, 478 bp, Homo sapiens
  MAP TO AC006559.6; EXPRESSED IN BT474, SIGNAL = 1.1; EXPRESSED IN HBL100, SIGNAL = 0.98; EXPRESSED IN HELA, SIGNAL = 0.63; EXPRESSED IN ADULT LIVER, SIGNAL = 0.66; EXPRESSED IN FETAL LIVER, SIGNAL = 0.61; EXPRESSED IN LUNG, SIGNAL = 0.85; EXPRESSED IN PLACENTA, SIGNAL = 1.2
ttgccattagattatgcgtgtctttccttatacaatttccacagtatgctccttatgttagacagattcgttttattaaattgtttttatattttttttaacttgtggacagttttttaaacatgtgggaggagtgaaggaagataagtttgttttactggatatgattccgatgggaagaaggcagctctatgcaaggcttttgatagccagagggcttatgaatgcatacggatagggaaaagggggatcctggaggtgagaaaaaggcacaatgaggccaatttgagacttttgaccagtgtggatcaggagctacttggcaatgtcattgccagtaccagttgtggcaaagatgttttgggcaatgtctcccgctggactgtactggataaagtagtggaatattttggttcccatgttgtagttgtaggaccattgtctgtggagtgagaagactggttgaatgctgacttca

SEQ ID NO: 13910 - DNA, 491 bp, Homo sapiens
  MAP TO AC007750.2; EXPRESSED IN ADULT LIVER, SIGNAL = 0.89; EXPRESSED IN BONE MARROW, SIGNAL = 8.8; EXPRESSED IN FETAL LIVER, SIGNAL = 0.85; EXPRESSED IN LUNG, SIGNAL = 0.91; EXPRESSED IN HELA, SIGNAL = 0.61; EXPRESSED IN PLACENTA, SIGNAL = 0.86; EXPRESSED IN BT474, SIGNAL = 1.2
tttcatgttttggggttttgattctttttcttttttcttttttaaaaatattattcttgtctactgattcttatttttgttgcagattaagaatgaggtgagactggagagatcccggtatacagttggtgggtttaaggataaaggtcagaaagccattaaactggaggactggattgactttgatgcactgactcccatacatgctcctaggataaatgcttagttgcagattttttttttttttttttttttttttttgcacccagaggtgaagagtccatgtatggatttccaaccagttctcttttttcagccccatctccctttcttaccctcagtggtaaatgccatctcaaatatggaactgtttcatgcttctgccaggcaaaatgattcctttctaggtatggtccaggcggctgctatttctattctgctttatccattgatgatacttcttcagtctcttcattgtcatgtgagaatcc

SEQ ID NO: 13911 - DNA, 420 bp, Homo sapiens
  MAP TO AJ006997.1; EXPRESSED IN HBL100, SIGNAL = 0.68; EXPRESSED IN ADULT LIVER, SIGNAL = 0.71; EXPRESSED IN BT474, SIGNAL = 0.62; EXPRESSED IN BONE MARROW, SIGNAL = 0.76; EXPRESSED IN FETAL LIVER, SIGNAL = 0.64; EXPRESSED IN LUNG, SIGNAL = 1.1; EXPRESSED IN PLACENTA, SIGNAL = 0.81
aaatgcattccctccttgcatggaatttttctgctcatgaaaacactttcaaagcctccagctgttcctgattattttcccccatcagctccacactatcatcttaaaaaggcacaataggactttcccaaataatcacaatgcatgatgaaactacttctacagatctaagaactccagcaaagaatttgtaggggattactatctcattttccaaaagtgtcttattcagatgtagctacaaccaccctacagttagagcaataatttttttcttgtcacacttcagggggtctccagttatgttaacaactgtcatgaaactctaaaagaaaaaaaaaattaatgtatacttgctctcataaacaaaagactaaaatgtattctattatccttaggagtagaaaggagaaagagttc

SEQ ID NO: 13912 - DNA, 447 bp, Homo sapiens
  MAP TO AC009306.1; EXPRESSED IN PLACENTA, SIGNAL = 0.81; EXPRESSED IN BT474, SIGNAL = 0.61; EXPRESSED IN BONE MARROW, SIGNAL = 0.82; EXPRESSED IN FETAL LIVER, SIGNAL = 1.1; EXPRESSED IN LUNG, SIGNAL = 0.9; EXPRESSED IN HELA, SIGNAL = 0.67; EXPRESSED IN ADULT LIVER, SIGNAL = 0.78
tgtcttataaatagtttgggaaaatgaatcggggttaatagcaaatgcagtctttataaatctatattacctattcaaatgttcttgaataatttctatatttatcagatattttatttttatcaaggaatttgtggtcaaatgggagttagttgggatattgataggtgtgtaccatatttgtgaatttgttttttccagcctgcaaagcctactgctaccactgcttgtgcacatgcctaacatccagaggcctgaggtccagcctgctgctgctattgcaacttgcagtgctatgcataccatccagcagcctaagaactgtctcaccagttcactgctgccactgccatgcaacctggaggcccaaacgacacattctggtttcccacagtcacagccagtgcaactgtatgacaccctgagtcctgagaatcagcacacagc

SEQ ID NO: 13913 - DNA, 444 bp, Homo sapiens
  MAP TO AC007716.1; EXPRESSED IN HBL100, SIGNAL = 0.68; EXPRESSED IN ADULT LIVER, SIGNAL = 0.99; EXPRESSED IN BONE MARROW, SIGNAL = 0.82; EXPRESSED IN LUNG, SIGNAL =   1; EXPRESSED IN HELA, SIGNAL = 0.8; EXPRESSED IN PLACENTA, SIGNAL = 0.77; EXPRESSED IN BT474, SIGNAL = 0.63; EXPRESSED IN FETAL LIVER, SIGNAL = 0.71
  unsure 160
  unsure 409
ttatgtcttggcattcttcattctgtgtgacttttacagtatactctatttgtatattattttcatgtatagttttcttgtatgtcattaggtacattttcttgttctaccatttctgttctttaggtacactaactaggtaaatgctggatctccattnttgttttcttctatgttggttgtttgctcttacagtttttacttgctcataatgttatttctttcccttaatcaatctcatccatagattgctttgtgcaaaaatggtttgtgtgatttttttcattcagcataatctttcttgcttctttttcgtgccagattatgttgaaagaagctacagttggaatgtatgcatctgttattattgaaccagcgatgttatttgcatgccacttagtttgtacanagtgtgttctgatgacattttcaggatttccagcc

SEQ ID NO: 13914 - DNA, 460 bp, Homo sapiens
  MAP TO AC007132.2; EXPRESSED IN ADULT LIVER, SIGNAL = 0.73
aagaaccctcccggactaagccccaattttagagcttgcctgcctgtgctgtgtcacttgcattagtcctttgttaaaatatcattcagtatatttatattattaattttaaaaatagatttattttttctgttttcattcaattttaatattttacttttaattttatcttttgaagattaaaaattcaattaattacatttaattttatcttttgaatattaaaacattagcacatgtctaaaaatcaaaattatatacaaaagcacactgagagaagtttcatctgctcttattcctttaacccaaacttttattaggttggtgcaaaagtccttgcagtctttgccattaaaagtaatggcaaaaaccacaatgacttttgcagcagtcttacctgtgtaggttaccagttttattgtttcctgttttatcttttctgtgtttttgttttgaaaaa

SEQ ID NO: 13915 - DNA, 473 bp, Homo sapiens
  MAP TO AC007681.2; EXPRESSED IN ADULT LIVER, SIGNAL = 0.82
tcagcctgagatttttatcagatgagtatcatagaaggaggaaagagtaagggaattggaggtgacttgtataggagtgattagattgatggacaaggaaggaaagaaaacatgaagagtctgaggaataggaagaaaatgtcaggttcagtgaatgtgagtttccacagagagaattgtaacagcagaggtactcaggcaagtgacttgggaggatggacatggtatttatggacaggatgttttaaaaagtcatgcatatcccaggtgtggccaggatgcagataactgatgcaaaagagagaaggagctcactggagatgaggagtctcagcactgagatgccagagtgctgggtggtcctcctcaaggaggatgaagtcactggggtgagacagaggctgggatagtgagggaggctccgagccagagctgaggtcctcagtgatcagggaagagtgaccaggaggctg

SEQ ID NO: 13916 - DNA, 461 bp, Homo sapiens
  MAP TO AC007041.3; EXPRESSED IN ADULT LIVER, SIGNAL = 0.8; EXPRESSED IN HELA, SIGNAL = 0.62
gagaggagtctggagccaagcctccaagggcagatgcagcctgtggcaacacagctatgtggagcagcatgaacaatccagacaccaaaaagggcaaggcatgtctgcgccacaaggaaatatgtcagtgagtgagagcagcctcatcgctggggctgatcacagggacctgaagtgagtcctgagattactattcaatgccaccatgacttcccttccatacccagctctgaagttttctgtgggcagatctcagccctggcagaaagatctgaacattgctttttatatcatgctgaagaggggaaggcatgctaatcagaagcagatgcttaaatgtggggagggccttatctggtgggtgagaggaggcctgtttgggaccttggtgcagcccccatgggggttgctctgtgccaagctctgcaagatatctacctgcatcttggtaaagaatcgcc

SEQ ID NO: 13917 - DNA, 449 bp, Homo sapiens
  MAP TO AL035669.28; EXPRESSED IN BONE MARROW, SIGNAL = 0.93; EXPRESSED IN LUNG, SIGNAL = 0.95; EXPRESSED IN HELA, SIGNAL =   1; EXPRESSED IN PLACENTA, SIGNAL = 0.93; EXPRESSED IN FETAL LIVER, SIGNAL = 0.98; EXPRESSED IN ADULT LIVER, SIGNAL =   1
gaggggttccatcaggggcggccacggcggctgggggcgggacgcgcccgaggcacccccggggggaacggcgcccacacacgatggggcccgggaggctcagctccgctgtcacccacgcgcggcccccgcacttccccgccgggccctggggctgggggtcggccggtctgggggggggtccccggggctgcgggagctccaggaggctccaggtgtctccgcccgggatgggggggtctcccgtccacgcagccgggcggggggcgccggggaccccaggcctcttccgcgccgcggggccgcacctggaacgagctgggccgcgccgcccgcggctcctccgactcctcgtcctcgtcccctgcgtccgcgtccctcgcgccggcggcctcgccgtcctcgcagtcctcgtcctccgcgtcctccgcatcctcctcgtcctcctc

SEQ ID NO: 13918 - DNA, 1991 bp, Homo sapiens
  MAP TO AC002080.1; EXPRESSED IN FETAL LIVER, SIGNAL =   1; EXPRESSED IN ADULT LIVER, SIGNAL = 1.2; EXPRESSED IN LUNG, SIGNAL = 1.6; EXPRESSED IN PLACENTA, SIGNAL = 1.8; EXPRESSED IN HBL100, SIGNAL = 1.1; EXPRESSED IN HELA, SIGNAL = 2.1
cagcagcaaagccaatttatcaggaggtgtttggaaagataacatcaacatggctctagttgtcgacacctactatgatgatcaactcattagctgtggcagcgtcaacagagggacctgccagcgacatgtctttccccacaatcatactgctgacatacagtcggaggttcactgcatattctccccacagatagaagagcccagccagtgtcctgactgtgtggtgagcgccctgggagccaaagtcctttcatctgtaaaggaccggttcatcaacttctttgtaggcaataccataaattcttcttatttcccagatcatccattgcattcgatatcagtgagaaggctaaaggaaacgaaagatggttttatgtttttgacggaccagtcctacattgatgttttacctgagttcagagattcttaccccattaagtatgtccatgcctttgaaagcaacaattttatttacttcttgacggtccaaagggaaactctagatgctcagacttttcacacaagaataatcaggttctgttccataaactctggattgcattcctacatggaaatgcctctggagtgtattctcacagaaaagagaaaaaagagatccacaaagaaggaagtgtttaatatacttcaggctgcgtatgtcagcaagcctggggcccagcttgctagacaaataggagccagcctgaatgatgacattcttttcggggtgttcgcacaaagcaagccagattctgccgaaccaatggatcgatctgccatgtgtgcattccctatcaaatatgtcaacgacttcttcaacaagatcgtcaacaaaaacaatgtgagatgtctccagcatttttacggacccaatcatgagcactgctttaatagggtaagtcacatcagttccccacttataaactgtgaggtataaattagaaataagtatcagtctcaaaaagaatatccagggcttcttttgtgctttgtaaatggtgtttatccaaaatagttgcagattttttccaagaaaattgaggaattgaatcttcatttacacctaaaattatatctttaaaatgtaaatggtaactaaaagaaaaatgtttttacaattcagatttgcatgttcgtgacatttcagattatattaaagttatttcccatataagcttttttatatttacacagattttatcagatttacacagattttatcagatttacacagatttttatcacagcagcaattcccataaaacataattattgacatttctatataatctctgcaacatttacaagatgttcaagctaatttgtatgccttaaagaattgttccttatgagattatattctctcactgatacacaactgattaatctatattcttgacattacttaaaggaacttaactttaaaaaacctcttctgaaatgctggtaaataaaacatttttaaatgagctcgtatacttctctaaataacctgtaagagtagagaggaaatgtttgttcccaagtccttcctttagagcttgactttaatcatggacttccttctggaaaagacttgtgtctaccaagttctagcttggcactttacctggttggtatttgttatttataagcataaatattttggttgatgattatttatacttatatgaaatggtattttcttaggagctgttagagatattcttggtgctgtgatttaaatatagtaacagctaccagctatacctggagatttatcctgctagtcagttgatcacctggtctgagtgtttattgtggctttgagtttcttgatctgggccagatttggaatacggacctgactatgaccatcattgaatgaacaaatagtatagcttttctaaagacagtttgactttggcatggtatgtttcacttactttaacaggtttcaatctaagatataaaggttataattgcaatcaggtagaacattaaacatg

SEQ ID NO: 13919 - DNA, 1997 bp, Homo sapiens
  MAP TO AC003079.1; EXPRESSED IN FETAL LIVER, SIGNAL = 1.1; EXPRESSED IN ADULT LIVER, SIGNAL = 0.97
caagctaatttcaaagcaggctgagtcatctttagatcagtcattctgtttaaaagatggcaaatgtatgcctgtctaacactattcacctttctggcagacttacctcagtccctcaggaagccaccagtgcactggtgttcacacaaggcaaaacaaattatttgctactctttttctcattctagctctcacacccaatttcaagcaaacctagactaggatgagatgaggagacagctaggattaggtatgtaatggaaggtcaaagaggatcagaggtagttagcccaggactcaagcctcaagcaagcttgagttacttggagatttcagacaaggctgccatttgaatcttcctcaacctgctgaccactgggcagagcctcaccttatggaactgtggagggtatattcgggcagccccatggttcaacaggagctggtagcagatctcaggctgggcagcagggcgcacggaggtgaccttcagcacgtactggatggcagcacagccgttgatatccatgagattggcttcggcgccagcttccagcatcatgtgcatgagcacgtggtcacagttccaggctgccttgtggaggggagatttaaagtcgtcatctcgggcattgacttcggctttgtagtcaagcagcatgcggcagaccaggtggtgctccgtgctgtactcctgctccttaaagcggagggcccagtaggcggcgatggccaggggggtctccatgtgggcattcacgctgtccactatggccccgtgttccacgtagaaggccaccagctccgaaaggccgaagtgggcagccgtgtgcaagggcgtctcctcatcttggttgttggtcttcatgttcacattcgcccctataaagggaaattgaggaagacaattatttaaacatgttttgtcattattcctaaggttcattaaacaagacttttctcactgcttctcttttaacttctgactgccgtatattatccccaaccctcaacccctttgcccccaggctctcttcctgggcctcgtggaagccattcccttgaagcaacagtgccatctcctggacaaccagcaaaggtacccaggggaggagaaggaaggatttgtgccagaatgctggagcgttgctgaatttcacttcttactcccaggtggatttggaaataccaagagatttctacaactaaatcttcttaatcaacataacaatgatatttgctaatatcattaaaaacaaatgttatgtcacaacacttgactctttaaaaatcaactgtttagaatattccacaaaataatacttttcttctctttcatagcagataaacctaaaagtttgatgcaagtaaactttagtggtatggaaacttcccatccctttgactgaaattgcagtattagggctgcccaagtctgtgaggctttcttggaacgcagcaccaccaccaccacatatgcctgtgcatgcacacacacacatacacatgcacacacacacacgactttagtcaccaaactagcctaaaggttatatttttcatcaaaaggggcagaagctggtatagtagaaatattcattgaaagagagaaaatgattcagagactgcaaaatgttttatttatggttgacaaaggatgttagaaataggaattttttgtacttggaaagctccttagaattacttaatccaacccatttatttaacagactagaaaacttaagtgaattttgtttttctaattagaaatgttaaatgtgagagtggtcaactcaagaagctgaaattttccttctctgcctaatttaatgaggtgaaccaaatgacccttagggggccaactctaatatcagcgctgctggaattttttatagctacttcaagtattagtctgtacagacttattattattattgttattattatgctagtaactagtatttattaagcacttaaccatgtgaaacattctgggc

SEQ ID NO: 13920 - DNA, 449 bp, Homo sapiens
  MAP TO AL049775.2; EXPRESSED IN FETAL LIVER, SIGNAL = 0.59; EXPRESSED IN HBL100, SIGNAL = 1.3; EXPRESSED IN ADULT LIVER, SIGNAL = 0.82; EXPRESSED IN LUNG, SIGNAL = 0.7; EXPRESSED IN HELA, SIGNAL = 0.7; EXPRESSED IN PLACENTA, SIGNAL = 0.71; EXPRESSED IN BT474, SIGNAL = 0.63
ttgaacctgtattggtggtgtctgaaaattacaggacatggactacatcctcaactacagttttgcacttgatccccaggtaacctaaaaaaaaaaaattagcagattaccacccccttttgctaagaaaatatcacaaaacactgcctaccaaggcaagtggatgggtgtcatcatcgtaataagcaaagaagaaatcatttgtagaagtagcaaaaggattatgaagccgtagaaaaaagttagggatttttaaataaacaggaatactttgaactggattcagacattagtaaagtttcaataatcggcatcattttatcagatatcttgaccattctctttatgcacagcatttttttaaaagtgcagaagatcataggacaatatatggtgctaaacttgtttgattacacttcccaggtgttgctgggtccaattaccctggt

SEQ ID NO: 13921 - DNA, 1971 bp, Homo sapiens
  MAP TO AL033403.1; EXPRESSED IN ADULT LIVER, SIGNAL = 3.5; EXPRESSED IN FETAL LIVER, SIGNAL = 2.5
tcactcatttcagtgaggtacaattagttcttgatgtagccatttccataccagaaggccttcccaaaaatcagtgtcatgtcaccgatccttttatctctggtgcttggcacaacctgtagcaggtcctcagaaaacaaacatttgaattaatggccaaatgagtttgtgctcaaaaaaggggtgaggatacttgaaatttggaaaatctaggataattcatgactagtggattcattatcaccaatgaaaggcttataacagcatgagtgaacagaaccatctctatgatagtcctgaatggctttttggtctgaaaaatatgcattggctctcattacatttaaccaaaattatcacaatataagaatgagatctttaacattgccaattaggtcagtggtcccaagtagtcacttagaaaatctgtgtatgtgaaatactgtttgtgacttaaaatgaaatttatttttaataggtgaacataatattgaggagacagaacatacagagcaaaagcgaaatgtgattcgaattattcctcaccacaactacaatgcagctattaataagtacaaccatgacattgcccttctggaactggacgaacccttagtgctaaacagctacgttacacctatttgcattgctgacaaggaatacacgaacatcttcctcaaatttggatctggctatgtaagtggctggggaagagtcttccacaaagggagatcagctttagttcttcagtaccttagagttccacttgttgaccgagccacatgtcttcgatctacaaagttcaccatctataacaacatgttctgtgctggcttccatgaaggaggtagagattcatgtcaaggagatagtgggggaccccatgttactgaagtggaagggaccagtttcttaactggaattattagctggggtgaagagtgtgcaatgaaaggcaaatatggaatatataccaaggtatcccggtatgtcaactggattaaggaaaaaacaaagctcacttaatgaaagatggatttccaaggttaattcattggaattgaaaattaacagggcctctcactaactaatcactttcccatcttttgttagatttgaatatatacattctatgatcattgctttttctctttacaggggagaatttcatattttacctgagcaaattgattagaaaatggaaccactagaggaatataatgtgttaggaaattacagtcatttctaagggcccagcccttgacaaaattgtgaagttaaattctccactctgtccatcagatactatggttctccactatggcaactaactcactcaattttccctccttagcagcattccatcttcccgatcttctttgcttctccaaccaaaacatcaatgtttattagttctgtatacagtacaggatctttggtctactctatcacaaggccagtaccacactcatgaagaaagaacacaggagtagctgagaggctaaaactcatcaaaaacactactccttttcctctaccctattcctcaatcttttaccttttccaaatcccaatccccaaatcagtttttctctttcttactccctctctcccttttaccctccatggtcgttaaaggagagatggggagcatcattctgttatacttctgtacacagttatacatgtctatcaaacccagacttgcttccgtagtggagacttgcttttcagaacatagggatgaagtaaggtgcctgaaaagtttgggggaaaagtttctttcagagagttaagttattttatatatataatatatatataaaatatataatatacaatataaatatatagtgtgtgtgtatgcgtgtgtgtagacacacacgcatacacacatataatggaagcaataagccattctaagagcttgtatggttatggaggtctgactaggcatgatttcacgaaggc

SEQ ID NO: 13922 - DNA, 456 bp, Homo sapiens
  MAP TO AP000201.1; EXPRESSED IN ADULT LIVER, SIGNAL = 0.7; EXPRESSED IN BONE MARROW, SIGNAL = 1.2; EXPRESSED IN HBL100, SIGNAL = 1.1; EXPRESSED IN FETAL LIVER, SIGNAL = 1.6; EXPRESSED IN LUNG, SIGNAL = 1.1; EXPRESSED IN HELA, SIGNAL =   2; EXPRESSED IN PLACENTA, SIGNAL = 0.8; EXPRESSED IN BT474, SIGNAL = 1.5
tccatgagggtctatggaagaattgtgggggaaaggagtcacttctgatttttcagttgggcactgagaagcaggatctttcttcgtttcttcaggttccattgctaatttactttcgtcacattttaacatcacctgcaaatctctacactccgggactcctcccaggcattcattttcagacctttcatttggctgaacagaagcatgaatgtctttgacactagattccccagtacggactctgtcagttccaaatgctttttggaattttctgtatttggggcataaagaaggcaaggccagagcagcatccttctctaagcacatggactcatatgtctgactggcactgtcttgtagaggaggtgaggcttttgcatttccttgatacctgcggagtttacactgaggagtctgaacatttttattttccagaaattcctccacttcatc

SEQ ID NO: 13923 - DNA, 451 bp, Homo sapiens
  MAP TO AL035461.11; EXPRESSED IN ADULT LIVER, SIGNAL = 0.96; EXPRESSED IN BT474, SIGNAL = 0.77; EXPRESSED IN BONE MARROW, SIGNAL = 0.92; EXPRESSED IN HELA, SIGNAL = 0.61; EXPRESSED IN PLACENTA, SIGNAL = 0.6; EXPRESSED IN HBL100, SIGNAL = 1.5
ttgcaaatacacaagaaagcctatatactataaaaaccatgattaagctatctatgcaacgcttctgtatcctaaagctccatcccgaagaccgaatcacacgtttgtatacatgtacacacactcgttctctgttttgatagttatcatcttgggagctaatacaccaaagccaaactaaatctcatgacttaactgaagttaactgagggactgagattatgggggtggtggggactcttggcatccttacataatcttttttgcttcctctctctttaggccccttatgttctggatcttgagaaattgtttccattgtttcctggtcttctgggtggttgctctctggggcctctgccatgctgtcttcattctcttgttcagaagcctgtttttcctccagtgtgccattactttcttcaaccaaagcactgtcttttggctctga

SEQ ID NO: 13924 - DNA, 364 bp, Homo sapiens
  MAP TO AF131217.2; EXPRESSED IN BONE MARROW, SIGNAL = 0.96; EXPRESSED IN ADULT LIVER, SIGNAL = 0.94
cttggtttttgacagagccagctgtgtggtcaggccagggcagctcacagagcacacagattccttccatactttcccagaaaaaaatatttcctggaagcaagaactacatggcttgctctctgcatgacatcaatagaaaagctgggccttgataaggagaatcccatcactgtggcaaaagtaaagatataagaaataagacacttccagacatgccttagaacctcctatttctgtattgtttcttctaaccattgggattcccatcccttacctgttcaagtgcatccgctgtgaaaatcctcctacccacacctccttcacaggacagagccagcaatcatcttcttctggcccaatg

SEQ ID NO: 13925 - DNA, 489 bp, Homo sapiens
  MAP TO AB020868.1; EXPRESSED IN ADULT LIVER, SIGNAL = 0.98; EXPRESSED IN FETAL LIVER, SIGNAL = 0.91; EXPRESSED IN HBL100, SIGNAL = 1.3; EXPRESSED IN BONE MARROW, SIGNAL = 0.9
tgctcctaaaccattagaaattgtaggatgaagacattgacttaatatttacataacaaaccttatctttgtgtaagatatttttcctggcaagcttgtcttgactgggcctttacctgtgtccttctttgcctcagcaaataatggttttaaacctaagttctgtgcctttgagatacaaactttaatctgcgagtcatgtctatggaagtacaaatttagggttacctagctaacaattattttggggaactgaacgggcaatcaagagattgatcgtctaaagcgcgaagggaaactatttgaaaactgtcaaatgaagacccttataaagctattgtgtccggaatttattccttctggtaggttcttggtctcactgacttcaagaatgaagctgcggacctttgcggtgagtgttacagctattaaagatggtgtgtctggagtttgttcctccagatgttcagatgtggcctctggagtttc

SEQ ID NO: 13926 - DNA, 475 bp, Homo sapiens
  MAP TO AC008074.1; EXPRESSED IN HELA, SIGNAL = 0.9; EXPRESSED IN ADULT LIVER, SIGNAL = 0.88; EXPRESSED IN BT474, SIGNAL = 2.1; EXPRESSED IN BONE MARROW, SIGNAL = 1.3; EXPRESSED IN HBL100, SIGNAL = 1.5; EXPRESSED IN FETAL LIVER, SIGNAL = 1.1; EXPRESSED IN LUNG, SIGNAL = 0.91
aagtggctttgggtagaagcttggataacaaaggagacactgatggagaggatcaggtttgtgtttcagaaataagcatagtgactaacagaggtttcagtgttgaaaaacaaggccttccaacactgcaacaggatgaatttttacagtcaggtgttcagtcaaaggcttggagtttggtagactcagctgataattcagaagccattaggagagaacaatgtaaaactgaagaaaaacttgacttacttacttctaaatgtgctcacctatgcatggattctgttaaaacttctgatgatgaagttggttctcccaaagaagaaagtagaaagtttactaatttccaaagcccaaacattgaccccacagaagaaaatgatttggatgattctttaagtgtaaaaaatggtgatagtagtaatgactttgtgacttgcaatgatatcaatgaagatgattttggtgattttgg

SEQ ID NO: 13927 - DNA, 388 bp, Homo sapiens
  MAP TO AC007738.2; EXPRESSED IN ADULT LIVER, SIGNAL =   1
ccctcactgctctgttaccgatgttatttctttaaatgttatacacgtgaaatttaaaaaataaatttatggtaaaatgttggctttattttttcttttgggtttccacttgagatttcatttaaaataatgggtcaagggcaggatctattgctaatggattacatgaccaaagctactctttagttttaaaaactaaaaaagaatactagtaaattgctgcaatataagttagtaacaatgcaacagtaagtagaaaactcaccttgcaaaggcaggatctttaccccaaattcttcaagacatccaacggcttggataagatctagctcctcttgaatggcagggggtctgtctgttatcagttgtaagcagcacctagaagaaa

SEQ ID NO: 13928 - DNA, 477 bp, Homo sapiens
  MAP TO AJ229041.1; EXPRESSED IN ADULT LIVER, SIGNAL = 1.3; EXPRESSED IN BONE MARROW, SIGNAL = 0.97; EXPRESSED IN LUNG, SIGNAL = 0.94
aaatttccttgcttttgcccaaagtaatcactatcctggctattatattgataaatcctttgcatctttttgtattaattaaaaacacgtagctctaaatgctgtagtttttcccattaaaaaagcctatatgtgtgtgtgtaaaattttaatacataattttatatatgtctttctgtctgtctgctgtctcttagcttacaggttttcctccatctatttttcttacagtttatgtattgaagaacctgggccgtttgacccacggagtggttctcaatctggatttggctgattgggcactcatgttgcaggttaacatgctcctcggttttctgacctcctagaagttggcagctggatccagaagcttcaacagcctcaggttcagcctcctgggctggcggattgtaggtgagtctgtgttctttcacatgcctgttggctccttgtttttgatgttggcagatgtgatgc

SEQ ID NO: 13929 - DNA, 472 bp, Homo sapiens
  MAP TO AL035427.17; EXPRESSED IN ADULT LIVER, SIGNAL = 1.2
ggattgcaatgggtgtccataatgttcacccatttgcccaagagtttattaacgaagtaggtgtagtgacacttattgaaagcttgctcagttttccttcccctgaaatgagaaaaaagactgtaattactctgaatcctccttctggggatgaaagacaacgcaaaattgaattacatgttaagcatatgtgtaaagaaaccatgtcatttcctttgaactcaccgggacagcaatctggattaaagatactaggacaactgactactgattttgtccatcactacattgttgccaattacttttcagagcttttccatttgctgtcctcaggaaattgcaaaaccagaaatcttgttttgaaactacttttaaatatgtctgaaaatccaactgcagccagagacatgatcaatatgaaggcattggcagcattaaaactcatctttaaccagaaagaggcaaaagccaa

SEQ ID NO: 13930 - DNA, 477 bp, Homo sapiens
  MAP TO AC007773.1; EXPRESSED IN BT474, SIGNAL = 0.93; EXPRESSED IN BONE MARROW, SIGNAL = 1.2; EXPRESSED IN HELA, SIGNAL = 0.7; EXPRESSED IN ADULT LIVER, SIGNAL = 0.69; EXPRESSED IN PLACENTA, SIGNAL = 0.88; EXPRESSED IN FETAL LIVER, SIGNAL = 1.2; EXPRESSED IN LUNG, SIGNAL = 0.71; EXPRESSED IN HBL100, SIGNAL =   8
tccagatgctctctgtgtgggtatgtgtgtagccatcctccttctttgaagtctcatatgtggaaacatgcaagtgaccaaaattacaactacgaacaagtaaacaaggctattaacgacgcgatttcacaaagtggcaggtatttcatcctaccccctccctttattgctatatgtaaattaaagccaggattaaatctactagtcctacattgtagcctcctcacggtgtgctgtgtttgttttgtttttaagagttctggggaaatcccctggaaagactcaattaaagagcagtgaagagagtgcagatcccgtcactggaagttcagaaaatgcagtgtcatcttcagaactgatgtcccagactcccagtgaagttctgggtaccaacgagaatgagaaactgagccctacaagtaatacctcatatagtttagaaaaaatctccagtctggcccctcctagcatggagta

SEQ ID NO: 13931 - DNA, 480 bp, Homo sapiens
  MAP TO AP000407.1; EXPRESSED IN ADULT LIVER, SIGNAL =   1
gcattctcaaataataaaatttctgcttattaatatgaagctcttagagctatctggataatacttctgttcaatggagaaatatgtctacaatttcttaatggggaataactgactatgaatttgctgcatctaaaatgaccccatcaattatacatgtaaaaataaatttttgaaattttttaaataaaaaattaaaagatgttgcccccatactccctccatcaaaaatgtttttaaaaaatgagtgtcccctctccaagtgtttttatgttcagcaggtacagcagcagacatctgcagaagtttcagaactcagtggagcttggcttaagctctcatgagttgcatgtaaaggaatatgtatgtataagaggcggatttgaagtggcagagggtccacaaaaggcacaagtactaaccactgaatgggaggagatagaaaaatgtgtaagtcacaattaagtcacagaatcacca

SEQ ID NO: 13932 - DNA, 442 bp, Homo sapiens
  MAP TO AL080239.11; EXPRESSED IN PLACENTA, SIGNAL = 0.63; EXPRESSED IN ADULT LIVER, SIGNAL = 0.66; EXPRESSED IN BONE MARROW, SIGNAL = 0.86; EXPRESSED IN FETAL LIVER, SIGNAL = 0.65; EXPRESSED IN LUNG, SIGNAL = 0.65; EXPRESSED IN HELA, SIGNAL = 0.6
cagcacggtatcattggaagatcttggtctccaaaggacggtgtcctattctggggcccacattgctcctgccactgctgagttaaacaaacaaacaaacaaacaaaaaaggcagaaggagaccaggcacattcacatatcccgagaacaaattccaccaccaccactgtagcttgctgtgggtctcagacacaagtaaactgtgccccccacagcactgcacccactgagagtgaccccaccctcttcctcagtagcagacccaaagtgggcaccagtctcagagccaaacccccgaagaactgcatcctgccctggggctgatgctgtggctgccaccaccaggccaaggatggtagagagaggagggtgggcattttcatgcacccttacctcttctggaaagaggctgctgtgggactgatgctggagaagatatgga

SEQ ID NO: 13933 - DNA, 454 bp, Homo sapiens; identical to SEQ ID NO: 2876
  MAP TO AC007632.4; EXPRESSED IN ADULT LIVER, SIGNAL = 0.74

SEQ ID NO: 13934 - DNA, 467 bp, Homo sapiens
  MAP TO AL078598.4; EXPRESSED IN FETAL LIVER, SIGNAL = 0.63; EXPRESSED IN HELA, SIGNAL = 0.66; EXPRESSED IN ADULT LIVER, SIGNAL = 0.8; EXPRESSED IN LUNG, SIGNAL = 0.66
gggggtaatatatgcaaagtgcttagaacagtgtctgacattttataagagctagattagtttatggtatttttaaccattattgtcattatcattactatctatcctactgttcttgcccactcttgcttctcgggagcaagtcagacactgtcctgtcctggatcccaacttcagagctcttatttcaaactttccaactcatcctgtggaaactttcctcactatgtttaaagaggaggagggacccccccccccaccccaattcagcaatgctttctccttatgggcataaagactcaccattactcctttcaaagaagtcttcacaaacctcctcttttccaaaatctgaccatctttgatatctttgatgtagtcaaaagttgtgacattaatttttgttattgtttcttcataaaatctgtctatggggagatgtctctcactcacattggtatctgcaa

SEQ ID NO: 13935 - DNA, 354 bp, Homo sapiens
  MAP TO AL035669.28; EXPRESSED IN HBL100, SIGNAL = 0.93; EXPRESSED IN HELA, SIGNAL =   1; EXPRESSED IN PLACENTA, SIGNAL = 0.99; EXPRESSED IN ADULT LIVER, SIGNAL = 1.2
aacctcctaaaagcaaccgcacgtaagcttaaacacgcagaagggccagaatgatttcctgccctgcctttagagtattgctttcggctttgtgtgagaaacaccagtgtgccggctgggtttctcacagagcctttcctcgccttcttcaggccaggttccctccgcagaagatgagccagctccgaaaaaacaaaaattgtcagcttctgttaagaaagaagacttaaaatcaaagcatgacagctctgcacctgacccagctccggattcagctgatgaggtgatgccggaggctgtgcctgaagttgcctctgagccaggcctagaaagtgcttctcatccaaatgtgga

SEQ ID NO: 13936 - DNA, 477 bp, Homo sapiens
  MAP TO AP000311.1; EXPRESSED IN ADULT LIVER, SIGNAL = 0.84; EXPRESSED IN PLACENTA, SIGNAL = 0.61; EXPRESSED IN BONE MARROW, SIGNAL = 0.98; EXPRESSED IN FETAL LIVER, SIGNAL =   1; EXPRESSED IN HELA, SIGNAL = 0.63; EXPRESSED IN HBL100, SIGNAL = 0.82
tggctttgtttgtttgttttgtcagtttaataccagctttattattaagaagtatttttcttattcttgtaaccactttgtaaaatacatcagaaattttctgtgttttcctaaatcatgtgatttcttctcattcagaactggagccctgattcagttgccccatctgaacaacaatgttcccttgatgttcccatcccatttactggatggagctttttttgtgaaaagaggcaacagtagtgttaacttagagttgctttcttgctgtaatcaagcgtgtttgttggcagacgagctcaggaaagggacaagcagtggctggagcatgtgcagcaggaggacgagcatcagagaccaagaaaactccacgaagaggaaaaactgaaaagggaggagagtgtcaaaaagaaggatggcgaggaaaaaggcaaacaggaagcacaagacaagctgggtcggcttttccatcaacac

SEQ ID NO: 13937 - DNA, 461 bp, Homo sapiens
  MAP TO AL035633.15; EXPRESSED IN ADULT LIVER, SIGNAL =   1; EXPRESSED IN HBL100, SIGNAL = 1.3; EXPRESSED IN LUNG, SIGNAL =   5
tgcagaagaatcttgataaacgtctgttagataggtgaatgtgatgtttgcttagtcaaaacataatgctcaaatggtaattaattgatcaaatcatggtataatatttcatttaacattgtgacaagcaagctcttcttagtgggtaaatttttcttctatgtttggtttgttattcttaggaaataaaaacatgttttttaagttgtaacaagtacagttgactcttaaacaatgcagtttgagcttcgcaggcccgcttatacacaaatttttttgtcaaacaaatgcaaatccaaaataaagtattcatgggaaatattatagaaacctgcatatgcggagggatagctttgattttggtatacatggtggtcatcctggagtcaatccccaacgtttactgtcggacgactgtagaagtgatttgtctattactttgcaacctcccttttcctttc

SEQ ID NO: 13938 - DNA, 481 bp, Homo sapiens
  MAP TO AC007876.1; EXPRESSED IN ADULT LIVER, SIGNAL = 0.66; EXPRESSED IN HBL100, SIGNAL = 1.5; EXPRESSED IN HELA, SIGNAL = 0.61; EXPRESSED IN PLACENTA, SIGNAL = 0.62
ccctaacaacaaaaaggattgtgaagtatctctgcagcaattacacaggtgatataattcttctcatcttcttcctggtcccttcttacatggagaattctgacatattaaatgggaccaataattagctgatgtgaatcttctctttctaggttctgcccaaaggaaaattgtgacatattgctgggcccaagaacaaggaagagttactgttttcctttgacctttccttagtaaagaattatggtatattgctaggcttagtgccaaagttatgtgaatctcctacctgggccgttctctcagagggtattgctggattaagaacctgagtgatgtggctcttctttatttcatggttcacacccacaacagggattgtaatatattgataggtccagctcataggtaaacttactctcccctcctgccagggatctgcatacattggatattatgacatttcactgggttcaacacc

SEQ ID NO: 13939 - DNA, 351 bp, Homo sapiens
  MAP TO AC007428.1; EXPRESSED IN ADULT LIVER, SIGNAL = 1.1; EXPRESSED IN PLACENTA, SIGNAL = 1.1
  unsure 167
tgcacatttgaatctagacagtgtagtaataggtattattgcaggctaataaaccaacgagagggcaggatttgtcagccaaagttgaaattattttatctaatttcttcaaagtaagaagatttcttccaccaaaaatattttttaaaaattattcctcaaagtcncctcaagccattatcacaggaaggatcaataataagagactggcattgacagtgaaagagggaaggatcaataataagaaactggcattgacagtgaaagataacaacaaagataaaggcattgcttcaaaagaccagtcagtggctatacacacagacgtacacacgttcctgcacagagaaa

SEQ ID NO: 13940 - DNA, 482 bp, Homo sapiens
  MAP TO AC009802.8; EXPRESSED IN BONE MARROW, SIGNAL = 0.92; EXPRESSED IN PLACENTA, SIGNAL = 8.9; EXPRESSED IN ADULT LIVER, SIGNAL = 1.7
tgggtagcagaagttgttcagaagagcagaaatatgtagaaaacatctctaaatttttggcaatttgaaatagcaattctgaggcacacagctcatctacaaaaatcttttgcagaagcagcacgcttagttttagggtgaggaaaatctgccgaaaaataaaatgcagttggttatcttatgcataataagaaaaagaaaaggatgatctgccacaaactgtgggcctccatgtccagttctccctgtcataacacctcctgtgccagcggctgcttcagtgccctcctcattcacatccaccatggcttggtggaacacttcagaaagaaacaggtcattcctctccgacatccctgagaaattggcccgtcccttgttgaaggcgtcctccatgcccatgcttctcagaatggatctgagttcataatgctcttctaatttgaactggggtatgtatacctcaacttcatcttcagcca

SEQ ID NO: 13941 - DNA, 431 bp, Homo sapiens
  MAP TO AL109933.8; EXPRESSED IN FETAL LIVER, SIGNAL = 1.5; EXPRESSED IN ADULT LIVER, SIGNAL = 1.7
gcttgcacatgagcatagtttctggtgagaagaattctgatatgttaacttcctctaaacttttaaataaaatatttctaagaattaaataaagttctagaatgatatgaatctattcctttggttttttgcacgtctgtctgcctgctaatcaagagaagagaatggtcgtaattctcagagactttttcctgtttgtgtcataaatgacttcacatttttttctgttctaagaactattcagcttgatttcttctgttttaattttagcagcacctgagcaaagccatgtggtccaggattgctaccatggtgatggacagagttatcgaggcacgtactccaccactgtcacaggaaggacctgccaagcttggtcatctatgacaccacatcaacataataggaccacagaaaactacccaaatgcg

SEQ ID NO: 13942 - DNA, 452 bp, Homo sapiens
  MAP TO AC009307.1; EXPRESSED IN HBL100, SIGNAL = 0.73; EXPRESSED IN ADULT LIVER, SIGNAL = 1.5; EXPRESSED IN BONE MARROW, SIGNAL = 0.78; EXPRESSED IN FETAL LIVER, SIGNAL = 0.71; EXPRESSED IN LUNG, SIGNAL = 0.75; EXPRESSED IN HELA, SIGNAL = 0.73; EXPRESSED IN PLACENTA, SIGNAL = 0.82
aagggctagtaaaccctcggtaccagtattgggcaatatctggctattactgactataatcctgaaaagacatcttgatgacaagttaaaatcacccaactctggaaatgctacatcactgagagtttgatggaatctagacactaataaccatcaaatatacaaaactaaactaacggatataaaaactcaaccccaaaaacctctgacgaaacagaaggtaacggggttccggagtgagagctgggaaatgacagcatagagcagagatgtgggtacatgaatgagacagagaccttcctacgtgtgccctttactctcccaactttgtcctgtaagtaccgatgccacagcagccccagctggaggccagttaccaagacagcacgagagcctggaattgaacaagcacagaccaccaagctggtcactgactcacctctcccctaccc

SEQ ID NO: 13943 - DNA, 454 bp, Homo sapiens
  MAP TO X97051.1; EXPRESSED IN ADULT LIVER, SIGNAL = 1.2
cacggttccgtgaagagtctattgctctcccctctctccttttgtgtctctatttttaattgacaaaaaagcaaatgtgaagattcctggggtacaatgcaaagtgacaatgcctgtctatattgtgggatgattaaaacaaggtaagtggcatatccatcacctcacacacttatcattttgtggtgagaacatttaaaatctcatcttttagcaattttgaaatagtcattattgttaactatagtcaccatgctgtgcaacagatcaaaagaactgactcctcccatcagcagaaacttcatgccctttgaccagcatctctcctttccccgtccacgactaacccccagcccaagagaacagccaacacccacctcgctgctgccacacgacatgtcgggctttgatgggatggaggtgagggtggggaagacaattccaaagctggagc

SEQ ID NO: 13944 - DNA, 480 bp, Homo sapiens
  MAP TO AC006378.2; EXPRESSED IN FETAL LIVER, SIGNAL = 0.83; EXPRESSED IN LUNG, SIGNAL = 0.82; EXPRESSED IN ADULT LIVER, SIGNAL = 0.99; EXPRESSED IN PLACENTA, SIGNAL = 1.1; EXPRESSED IN HBL100, SIGNAL = 0.92; EXPRESSED IN HELA, SIGNAL =   1; EXPRESSED IN BT474, SIGNAL = 0.93
ctacttgggggtggaagatggacagctctgtttgagacattacagcagacagcatacagtatacaaaaaagagctggagatttttcttaagtattaaaaaaaatctatcttttgatgtgccacattttttaacttactcaaagcacagtctaaattttgagtgtactttgacctcacaaaaccacagtatctgagtaaatgaattccttaggatgacgtcaataagaatatatagtttataattatatgtatagaaatatatgaattaaaacacatataatatttgttatatacttacagattttatagcagttactttgcttctcagactttcagtgagcctctcattttcttcttcacaggcactatacccactattagcatagccatagttcccatagttgccaggaggtactccttcacctgcaaggatcagagtcacaaaggtggttctagagaagccacttttgaaacactgtt

SEQ ID NO: 13945 - DNA, 387 bp, Homo sapiens
  MAP TO AL034379.8; EXPRESSED IN HBL100, SIGNAL = 0.91; EXPRESSED IN HELA, SIGNAL = 1.1; EXPRESSED IN ADULT LIVER, SIGNAL = 0.92
aacagttaatgctttgttcttctgtcttataaatacaaaacaatattccaaaaaatgtcttcattgttactaaatgcaattaatggagcataatgtgaagcaggcagtggcctcagaagccgtctcctggtgcctctgcccactatcaatgagcacactttcgtgtttccaatgagagcactcccattactacaatctcagccggacaacactttagcctaaaagccctacaactgacttactaacagatgtcttaatagtctattctggtttagtagttgtacttactgttgcccaggttggaacaaggtcacatttgttaagtacaaaaatgaggtgtttccaaggtttttccttcttcaggtaagtttcaatgtgaggggaacg

SEQ ID NO: 13946 - DNA, 399 bp, Homo sapiens
  MAP TO AC009961.3; EXPRESSED IN ADULT LIVER, SIGNAL = 3.7; EXPRESSED IN FETAL LIVER, SIGNAL = 0.92
tgcgtgatttccactatggggtcttcagtagagtggagaagtgcacaacttcctagaaaatttgagtactattcttcaggctaagaaatataaatcttgttagtaacaaatgcgaaatttttggttttctcatcagtgtgggaaattctcaacacagagaaatgtttacacaaaactacagttgtgctcatcaaaatatacttgcaacttgtgtaccctaatttcccaaatactcttttgtcttttccttttcagataaccacattttaatatcagcattggtgattgctagcacggtaattttgacagttttgggagcaatcatttggttcctgtacaaaaaacattctgattctcgtttcaccacagttttttcaaccgcaccccaatcaccttata

SEQ ID NO: 13947 - DNA, 418 bp, Homo sapiens
  MAP TO AC007681.2; EXPRESSED IN ADULT LIVER, SIGNAL = 0.92
ggtcagtcaagggctcagacagagatgtacaaggggattaatgttgttttcatgcctgctaacataacatccattctgtggcccatggagcaagaagttattttgacttttaagtcctgttattgaagaaatacattttgtaggctacagctgctattgatagtgattcctctgatggatctgatcaaagtaaattgaaaatcttttggaaatgattcaccattcaagatgccattaagaacattcatgatttataggaggatgtcaaaattacaacattaacaggagtttggaagaaattgattccaattctcacggatgacgatggggggttcaagacttcagtggaagaagtaactgcagatgtgatggaaatagcaaaagaactagaattagaaggggaacctgaagatgtgac

SEQ ID NO: 13948 - DNA, 471 bp, Homo sapiens
  MAP TO AC007028.2; EXPRESSED IN ADULT LIVER, SIGNAL = 1.5
gcatgttttcatttctgtgggctttaagccatgtagttctctctgtgaagatacttttcggcatgacctttgaatagagaatcgtaagagaaataagaggctcctatgaattatctgaaagtttctggactcaccatggatcttgactgtgtcattgcatctgacagtcccagggaagtgactctctgctggtttcatgaatctgtgcttgggctctccctgcagtttactgggtatagtgatgacaaatcactgtttcaagagacaatttcaaaagcatgagatgctgctgaaagaggattgtgaaccaggggacagctctttcattctgggagagcaacattgggagaatatgctctgtgagcccaaacagcatcctccccagcagggtgagggcagagctgcagggcaggcccagaacccactcaacacagacgtcagccctggagctggtgcaaaggagtctgagga

SEQ ID NO: 13949 - DNA, 466 bp, Homo sapiens
  MAP TO AL049733.3; EXPRESSED IN HELA, SIGNAL = 1.1; EXPRESSED IN PLACENTA, SIGNAL = 0.71; EXPRESSED IN BT474, SIGNAL =   2; EXPRESSED IN BONE MARROW, SIGNAL = 0.86; EXPRESSED IN HBL100, SIGNAL = 1.3; EXPRESSED IN FETAL LIVER, SIGNAL = 0.8; EXPRESSED IN LUNG, SIGNAL = 0.61; EXPRESSED IN ADULT LIVER, SIGNAL = 0.9
tctaagtcagttctcttcctgtctccatgtttatttgcctcctctatgaaatctataaaattacacacgctttgtaattccttgccaaaatcctgttgccttgtatttcaaagagctgtttaaagcttcaatgaccctagcctgcattggatatacacccagcatgtccaaagtgcaaaacggagtatactagtaactactggccacccagactataaagctcatattacaaaaatgcacactctaggcagaatctggtaaatgtcaacttcaaaataagttgtgtcatactgctatatttataaccacatggtcaataaaaataagcacttgcgaggtgattaaaaataacataccaggtaaaattggttgtccggcaattcccagcggtgccattccaagattattcattgctgtggcccatgcagttggatcagacataggtagtgtcattgcagtggaatcc

SEQ ID NO: 13950 - DNA, 486 bp, Homo sapiens
  MAP TO AC008177.1; EXPRESSED IN FETAL LIVER, SIGNAL =   1; EXPRESSED IN ADULT LIVER, SIGNAL = 0.82
ggccaatggtgttaaattaagtgaactttatttacatcatttatgtttccacaatgaattgttctgcagctatacttgatttcaattacatgttatcatccttatataaagaaccacatttcaagaggaattgtttccattagaatcttattggcctctattttttctgcccattggtcaagtatgacataatattatgattcagaaccctgaaagattccaaaagttgtgatgttgtgcccatgctctctaggtgaccgtggatggccatgacattcgctctcttaacattcagtggcttagagatcagattgggatagtggagcaagagccagttctgttctctaccaccattgcagaaaatattcgctatggcagagaagatgcaacaatggaagacatagtccaagctgccaaggaggccaatgcctacaacttcatcatggacctgccacaggtacccctagccatacattcctgggagaa

SEQ ID NO: 13951 - DNA, 467 bp, Homo sapiens
  MAP TO AC007966.2; EXPRESSED IN ADULT LIVER, SIGNAL = 0.86
ttttgtctccacaataagggcattaagagagttaaatagtgtctagttaactttctaactgttctttaagagcagaaattggcttatatacgtactttgtggtatccacctcattattttatgtaacaacttgtatattatagctatgaagaaaatttaatggtaacaaattattttgaactgaaatgacttcaagcagcacaatgtacagttaaaattatttacaaatgcaacaactgtacacaatttttctgttaatattttaaagttgttgtctctcacctcttctatttttctacgaagagtaagttttcttcttgtgtgttcccgctgtcgtctttcttctctatccattaggaataggcgttgttcttctgctgtgcgttcaagttgttctagttttctacttatcatatccaaatatctgagtaagagtgcaaatattgctaaaggtgaattggctgttt

SEQ ID NO: 13952 - DNA, 1956 bp, Homo sapiens
  MAP TO AC005255.1; EXPRESSED IN LUNG, SIGNAL = 1.1; EXPRESSED IN BONE MARROW, SIGNAL = 0.91; EXPRESSED IN HBL100, SIGNAL = 1.2; EXPRESSED IN HELA, SIGNAL = 1.2; EXPRESSED IN PLACENTA, SIGNAL =   1; EXPRESSED IN ADULT LIVER, SIGNAL = 1.5
agctcctgtatcaaagacacgataagatatggtaattccagaactaaaagagaatacattgatgtttggatacattcaagaaccaccaaaagtgcctcccaatggtccaagccttgctacttatgaaagtcctgcagtgatgtcaccattaaaaaatgttgccctactgaggagtctccccagggccctcttcatgtccgtgttcctcaggctgtagatgaaggggttcagcatgggggtgaccatggtgtacatcactgaggccaccagacttgtcctagaagatggtgtggctgcagaactgagatagaccccaaagcccgtgccatagaacaaggtgaccactgagaggtgggaaccacaggtggaaaacgctttgtgctttctcccagctgaggaaatcctcagtatagagaaaacaattttatagtaagagaaaaatattccagtgaaggaaatcacacccaggacgccagttgcaaagtatatcaccacgttattaatgaaggtgtcagaacaggcgagcttcaggacttcaagtagatcacaaaaaaagtgtggaatttccatttcggtgcagaaggacagcctcaaaacagtcaaggtctcgagcagggaacccatgacactgatgcaccaggaccccagaaccagcagtccacagagctgggggttcatgatgaccgtatagtgcagggggtgacagacggccacgaagcggtcataggccatcacggtcaagagtaaattgtccaggcatccaaatgaagtgaaaaaaaaaatctgactgagacagcctgcatatgttatgaatttgttctgtgtcagtatattcagtaacatctttgggacagtcgtggaggtaaaacagaggtcagcaaaagacaggttggagaggaagaagtacatgggggtgtggaggtgggagtctgagcatatggccaggatgatgagcaggttcccggtgaaagtgactaggtacatggagaggaacagcccaaagagaatgaactgaatctctgacgttgctgaaaatcccaggaggagaaattcttgggcatgtgtttgatttcctgtttccatggggataaaataactgccacaagagagaaaaaagcaacagtcaattatcaacacactggcaacatggaaatttggttacatttaattttaagtgaaggaatcaattaacaaaagattgcctttttcttgctgtctttttctggggcatctgaaattcttccatccttttctttgctaccatcgggatctggaaatgtagtgttagttccataatacttgtaccctctatagcctggcttctcaaagtgttgtccatgaaccaacaagatcaacaagagtttctttaaatgcagaatccctggtcagacctacggattcagaatctacattttaacaatatcaccaagggtttcacatgcatattagtgatataggagttaagaaaaaatcacttacgcagatagtaaggttatgggagtcctcagtgaggcttttctttttaatgaaaagcagccccaaatcattttctaacaaagagcatcctgtaaaggcgagctgcagacacaaacaagctgggagcttgcacgggtgaatgccggcaggaactaaggactagaagttttcaagatggtggctccatcttcccttctctttgtcagccacgagcagacaagatggcgcagatcaactggaaagtccaattgcaaagtaagattagggtggggccaccagccttccctgagcactatgaaaatgtcatacctgatggaaccaatctgtgagcctgatgtaaatcagacactgcctcctcaaaggggactattaaactctgcgcattcaccaccagcctgtcctttcctctcggagacccttttctctatggagagaggtgtttctctttttcttctcttctccctattaaacctccgcctc

SEQ ID NO: 13953 - DNA, 412 bp, Homo sapiens
  MAP TO AL109941.9; EXPRESSED IN ADULT LIVER, SIGNAL =   1
tttgttctcaaactcagctttcctgttccttcctgcccctagttactaaaaaacagcctacccctttcccttcagcactaatcaataactcacatctgttcccttggttacctgtacccattgttcccctgaaactgcacatctcacacgctccacctttgtacttcacgtccccctccccttctatatttagaaaaatatgtataagtagccaatcgtgtcagctcagattgttcagtctgaccccagcccatgggggagtggcacagaagtagggactgcgttaaggataaaaaccccctggtcttctttgtttggtgtgctcttgcaatcttgattgacacaggtagcacccttctgcagaagtaagttgccttgctgaaagaattaatcttttgcctgagtgctggtt

SEQ ID NO: 13954 - DNA, 435 bp, Homo sapiens
  MAP TO AC007558.3; EXPRESSED IN LUNG, SIGNAL = 0.99; EXPRESSED IN HBL100, SIGNAL = 1.1; EXPRESSED IN ADULT LIVER, SIGNAL = 1.1; EXPRESSED IN FETAL LIVER, SIGNAL = 0.94
gcagaaaccctttttgcttggagaaggtcagtctttgttctactaaggcttccaaaaaattggatgatgctcacccacattaggaatttgctttactcaaagtccaccaatttaaataataatctcatccaaaaaacaccatcacagaaacatccagaataatgcctgaccaaatacctgggcaccatggcccaactaggtagacacataaagttaaccatcacagcagtcatttttgttctggggagaagaatagagagtgggatggggctgtcaggcggtgggatgattggaggaaatgacagttccagggcaaggaggagaccacaggcaatgtgggaaaggacactctgtccaaaggcaaccattacatcatgagtcatctgaaaagccacagaatacatgagaggaaaaaggtggaagagaagctggaaa

SEQ ID NO: 13955 - DNA, 489 bp, Homo sapiens
  MAP TO AC007219.1; EXPRESSED IN BT474, SIGNAL = 0.7; EXPRESSED IN FETAL LIVER, SIGNAL = 0.68; EXPRESSED IN LUNG, SIGNAL = 0.66; EXPRESSED IN ADULT LIVER, SIGNAL = 0.64; EXPRESSED IN PLACENTA, SIGNAL = 1.1; EXPRESSED IN BONE MARROW, SIGNAL = 0.7; EXPRESSED IN HBL100, SIGNAL = 1.1; EXPRESSED IN HELA, SIGNAL =   1
ttaaggcagacagacaaagaaatagataaattatatgatacgaatgggggtaaatataacagataaggacaatttttggtaggtatttactattgattttcgtagaagcaaattatttagtacttcccctggaacagagcaaacactgataaataaatggtaggccatgttgttgttaatatcactatcatcactactggaaaataaatagttggccaattaatttggatttttttaataaaacaaaatgtgggcactattgtcattgttgcattttacagagggaacctgtagacgatgtgattgagcggctccactgtacaatgatttgcagtaaagattcgaaatttaagcagagacactctagctcccaacatctccctctagctgtgggcctcagaacccataagctggtcattagtctggccctctcagcctccacgcaaattaattctgactctacctctaacccctaggatccagtccttg

SEQ ID NO: 13956 - DNA, 368 bp, Homo sapiens
  MAP TO AF130350.1; EXPRESSED IN HELA, SIGNAL = 1.1; EXPRESSED IN PLACENTA, SIGNAL =   1; EXPRESSED IN ADULT LIVER, SIGNAL = 1.3
gatatatctattccattctgtccctctagagaacctgactaatacagattttggtaccaggagtggttctagaggaacaaaatattaaggttggagttctttcattggttttagggtttctggacttggctgcttaatatgattagacccaaaaatgttaaggactctacttctaatagtgtggagaacacttataatccttggcatgaactgtatagaaagttatgcaaaataaatgcatttgacattcctgatgcattggtgattagaggcaaggaacttagcaactgtatacttaatacctttgatcatatgtggggaaccaaggaaaataatgaagcttgttggttgctcctaagtttggtgga

SEQ ID NO: 13957 - DNA, 360 bp, Homo sapiens
  MAP TO AC007880.1; EXPRESSED IN LUNG, SIGNAL = 0.65; EXPRESSED IN ADULT LIVER, SIGNAL = 0.69; EXPRESSED IN PLACENTA, SIGNAL = 0.71; EXPRESSED IN BT474, SIGNAL = 0.63; EXPRESSED IN BONE MARROW, SIGNAL =   2
tgatacccccgagaaaactgtagacacttttatagttaatgtgagatgttgctttgtaattacttctcacttatttagtcctgttttgaatctttcagtctcttccagtgcacaaccaaattttcaggaatttggaaatgtgtcatgagcacacaaaagacactggatttaaacaaatgtgagttatcatatggtgtggactaaaaccatgtgaaaccaagagcaatagcattaagatggatgatgaggagcaagggaaaatggaaatggcgagactgtggccagtgttaggccgacattgcagcagatctacattccgccgtgagaacagacatggggacaaaagcccagacctggtaa

SEQ ID NO: 13958 - DNA, 375 bp, Homo sapiens
  MAP TO AC010872.3; EXPRESSED IN ADULT LIVER, SIGNAL = 2.5; EXPRESSED IN FETAL LIVER, SIGNAL = 1.7
tggaacttttctcgattgggcttcttctgtgggtaatattcctaaggaaagcatcatggttctgagctccaagttgggttttgaagttagatttgaatagtgaatgaggtgattaagggctctcctggcagaggacacaccatgagcaatattttatgtgccctgaaggtggtctgtataactttatccatgtctttcttctcagccccatcactttacaagccttggttcagtgtggacagcctcagtgctccactcacatcctccagtggctgaaacgtgtgcatgccaacccccttctgatagatgtggtcacctacctggtggccctgatccccgagccctcagcacagcagctgcgagagatcttcaaca

SEQ ID NO: 13959 - DNA, 473 bp, Homo sapiens; identical to SEQ ID NO: 3944
  MAP TO AC010127.3; EXPRESSED IN ADULT LIVER, SIGNAL = 1.5; EXPRESSED IN FETAL LIVER, SIGNAL = 1.4; EXPRESSED IN LUNG, SIGNAL = 1.2; EXPRESSED IN BONE MARROW, SIGNAL = 0.93

SEQ ID NO: 13960 - DNA, 483 bp, Homo sapiens
  MAP TO AC011739.2; EXPRESSED IN ADULT LIVER, SIGNAL =   1
caatcaggacgtttcaccagaagaaggtgttcttgaagacaaaagaatagaggctcctgaaatgtttatcttcaaatgtgtgtatccacagtcacaaaacatagaatgcacatatatagaatgcactcatttataactatatatagaatgctccaaactgtgatgcgtacgcataattaatagcataacttaaagtcagttaacctatagattctaaacagataatgacccaggctctctcttttccaaagaacagcaatttcccaggcagaggtgaaggacctgactaagcgtataaggactgttttgatggccacagctcagatgaaggagcacgagaaggaccccgagatgctggtggatctccagtacagcctggcaaactcctacgcaagcactcctgaactacgcaggacctggctggaaagtatggccaagattcatgccagaaacggagatttatctgaggtgattagccaaggc

SEQ ID NO: 13961 - DNA, 471 bp, Homo sapiens
  MAP TO AC004882.2; EXPRESSED IN FETAL LIVER, SIGNAL = 0.9; EXPRESSED IN HELA, SIGNAL = 0.98; EXPRESSED IN ADULT LIVER, SIGNAL = 0.79; EXPRESSED IN BT474, SIGNAL = 0.76; EXPRESSED IN BONE MARROW, SIGNAL = 1.1; EXPRESSED IN HBL100, SIGNAL = 1.3
tggctcaatgaataacgcacaagtgaacatgtcaaactgaaataaatgaggactctgaatccttattccccagttctttccactactctataaatgaagctcccagagagaaatccaagccagctgaaaatgctctaaacctgtgtgatgggacataatagttgctcactgtgctggaggaaggggccctgggcagggaagaggccactgggtcctctactggggcaatcttcccagcctctgggtagctaggccctggttggagggacccggcaggaaagagactgggccgaagggcaaccttaccaggagaggcatgtcactgggggtcaatcggcccctctcctcaagcttctggggtgtggtattggccccgtccccttgcaaaccacagtgctggaggatattgctgaagacctgtgaaagacaagaacgggctctctcacatcatactgaaccagggctaggacc

SEQ ID NO: 13962 - DNA, 471 bp, Homo sapiens
  MAP TO AC010686.1; EXPRESSED IN HBL100, SIGNAL = 0.93; EXPRESSED IN BONE MARROW, SIGNAL = 0.92; EXPRESSED IN ADULT LIVER, SIGNAL = 0.99
tcaaattttccacaatgctcacatacttcttttataatcagaacagaaactttaaaatccctaagaatgattatttttaaagcttcctttgtaaacctaatctagcatctaattagctcaaaaatggaaaagtctaggtctgagtatgactataacttaaatttattttaaaaggtatttgctatgtttcagatggcaactcacaggccataactcatctgatttcaaagaattttgttaaattgaaaatcctattgatacatttgcaggttcctgtgcatgtcccagtattcagctgaaaacactgttgcttctgtggggcattgactctgtattccaggatctcgccagcctcaaaggggagaaggcagacagggagcatggcgacagcaagaacaaggtgacgacaaggacaggagccccagcagagttgaggtcatcttgtgggataggggagaacattcagcagag

SEQ ID NO: 13963 - DNA, 1957 bp, Homo sapiens
  MAP TO AC004889.1; EXPRESSED IN HELA, SIGNAL =   1; EXPRESSED IN PLACENTA, SIGNAL = 1.1; EXPRESSED IN BT474, SIGNAL = 0.93; EXPRESSED IN FETAL LIVER, SIGNAL = 1.1; EXPRESSED IN ADULT LIVER, SIGNAL =   1; EXPRESSED IN LUNG, SIGNAL = 1.3
tgctttgcagagtctcttggttcattcagtctcagatataaagagagtagtgaacttaggtggtatttggtaccaagattccaggagatgactgaggagggagagtcaaatgtcacaccagttaggaatgactttccttgcccagtgctctcctcagggcacccttgacctctccgttcctcaggctgtaaatcagggggttaagtgttgggttgaaaaaactgtaaaatagaaaaaagaccttttgctgctcctcaggatggcgggacttgggggccatgtacatgatgatggcactgccaaagaagagtcccaccacgcagaggtgggaggagcaggtggagaaggcctttctgcggccctccccagactggatcctcaggatggccgccaggatgtgcgagtaggagacaagcaccaggctgggtggccccaccaggaagaacacgcaggctgcaaagatgaccacctggttgagccaggtgtcagcacaggccagcctgaggacagacaggatttcacagaagaagtggttgatttcatgaggcccagagaagggcagtcttaggatgagaaccacatgggccagagccaggagggagccacacgtccaggaagtgacggccagggtgatgcagactctccaggtcatgatgacggagtatcggagagggtggcagatggccacgtaacgatcgtaggacatcagcaccagcaggagacattcgctgtgtccaaaactcaaacagagaaaggtctgcgtcatgcaaccagcaaaggagatgggcttggctggatgcaggaggttcgccagcatctggggcaccgtgttgcgggtgtaggcgatgtcgacgacagccaggtgtgagaggaagaagtacatgggggtgtggagtctggagtccagtgagatgagccccaggatggccccgttccccagcagggtgaagatatagaacagggagaagagcccaaagaggagcatctgaatccttgggcccaggagaaatcccagtaggaggaactctgtgaccattgtctgattttcccccatttccctgtgaaaaagaaaaagatcacttaggaccagattgtcaaaaaacacctagacattattttatgaatttagtcatttttaaaagataaacttttaacattagtgattgagctacacattaagttaattactgattgtaagtatccagtgttatagaagggattgtgtcaccaatgataggatacatagagccattgacacatcatgggaagaaagaatgtcgtaccaaaagtggaagtaaaatgaccatctaataaggattgtcttgaagctgcacatataaaaattactaagagaattcctgaagtgtagaaataatcagtaatggaagaactccaaatatgggaattagagtagtcctagaaaaaaagatgatgtaatcccagtttctcagtagaaatatcaactattttgctttcaacatctgaaatcaacctttgcactctggagcagtttatataataacagaagaagtagaaagacaaaaaacaattttaatgacattgtgattgtttgggttcctgagaaggaactaatggatgtgctacaaatgggttctaattgcaatctttattttacaatgggtcataaataggaaccgataattggtgatttggcagttaatctactgattgatgcacagttactgatttaccaaaaactggttttgaataacaactcacacaatttgtagaaattagatttttctgggcgagtttgtacatacgtatcatttaaaacattcacaatgcctgaatgttatgtttgccactgcattatatatcatttcttttctagtctctcctttcacttttgccaaccctttggtaaatttaatccatttgtgtttaagtaagatgttctttttacatgtagaatgaaagaaactatggagaaaaa

SEQ ID NO: 13964 - DNA, 453 bp, Homo sapiens
  MAP TO AC012135.1; EXPRESSED IN ADULT LIVER, SIGNAL = 1.2
tttgctcatgtattgttttcttatgatatacttttgcttctatatattttcaataatagtaggttcttctcaatttattgtatattttaaaaatgtatagacaattactgtgcgcaggaaggggtatatccggtcctccatgccaaagcactctttcaccatgctgggaaactttctagagaatgagtagaatgtacagtgaagatcaagttccttcctctaacttttgtttcattttctctccacaggaactttttacccctgaatgcaagtttaaagaatctgtttttgaaaattattatgtaatctactcatccatgttgtacagacaacaggaatctggtagagcctggtttttgggattaaataaggaagggcaagctatgaaagggaacagagtaaagaaaaccaaaccagcagctcattttctacccaagccattggaaggtgagt

SEQ ID NO: 13965 - DNA, 381 bp, Homo sapiens
  MAP TO AC012667.1; EXPRESSED IN HELA, SIGNAL =  10; EXPRESSED IN ADULT LIVER, SIGNAL = 1.2
ttgtagtgaccacattcatctgctttattataatgaagcaaggagaaatcaggaatttaaattaatgacttacattcttacattttctcttttgagcaatataagttatcaggcttttttttttttaaaaaaagtgaggccttgggtgattcattcagaaaaaataaaaaaggccattccactcgctattgagaatagacgtgaatttttgaactttgctccatcctcagccacctgctcttggcattcagtacttattgcattttcactgttgcacaggagccacattctcttcaaaggggtgcatttcctgttgcctttcatgatgccaatcttcattatggtccctaaatcacctagagtggacaatttaacgtggcc

SEQ ID NO: 13966 - DNA, 370 bp, Homo sapiens
  MAP TO AF152365.1; EXPRESSED IN ADULT LIVER, SIGNAL = 1.1
ttgtattttagaaaagcaaattctgtcagttaatgactatacaatttaaaccataattccaagattttctaaagctagcctacatgtagtactgtggtatgtcttcatgaggggtattaaagcgtaaaagtctaagacatatcactgttgtgaaggaaaacaaataggagaattttattaactccagattcttttgactttgtctgacttttgattagaactagagtacgcaaaactcagcagactatggtaaagaggatttacgtcaactcaacttcccaagaagttaaaattaaaaacatatctcccctaagtcaatacatcccgcattatttcactggtgactttagtcccaatttgtttgaggaaa

SEQ ID NO: 13967 - DNA, 422 bp, Homo sapiens
  MAP TO AE000660.1; EXPRESSED IN ADULT LIVER, SIGNAL = 1.4; EXPRESSED IN BT474, SIGNAL = 0.99; EXPRESSED IN BONE MARROW, SIGNAL = 0.98; EXPRESSED IN HELA, SIGNAL = 1.1; EXPRESSED IN PLACENTA, SIGNAL = 2.6
gcaaaggattggcttcattgtttacaggtagtggtggcagtagcagtcttagtgtctgaagtggttaaaatgatacagggaagagatcttactgtgtggacatctcatgatgtgaatgccatactcactgctaaaggagacttgtggctgtcagacaaccgtttacttaaatatcaggctctattacttgaagggccagtgctgcaactgcgcacttgtgtaactcttaacccagtcacatttcttccagacaatgaagaaaagatagaacataactgccaacaagtaattgctcaaacctatgccgctcgaggggactttttagaggttcccttgactgatccccacctcaacttgtatactgatggaagttcctttgtagaaaaaggacttcaaaaagtggggtatgcagtggtcagtga

SEQ ID NO: 13968 - DNA, 424 bp, Homo sapiens
  MAP TO AC010085.1; EXPRESSED IN ADULT LIVER, SIGNAL = 1.2
gtgtcccagctgagagttccagctgagctcagcctcacagtcctccatgcccaggagccaaaatgtgagcaatgtagcctctcagttaattccagcctttccagacatttgagtcttagtagcagaggtccctgaaatcatggacataaaccagccccgtaaagcctgcccaaattctggacttgcagaatctatatatgcataataaaatgggtgttgtttataccactaagtttacagtgtaagtttattatgctagataagtttattatgttacaacagataactggacaatattacagaaagacacttaccttcacagctttcaataggactgagtcctctccctctgtaaccgtccaacatatcttggtttgaataccaatcaagtccattattttggtataaatccggtaccaactgg

SEQ ID NO: 13969 - DNA, 450 bp, Homo sapiens
  MAP TO AP000191.1; EXPRESSED IN ADULT LIVER, SIGNAL = 0.75
tagtgtctctcacggcaacgagcagatgcaccgaaatcgtgcaacaaaatctccataaaccacgataggcaacctcagaccataaatctcctgttacgcctacatggggaggagggggagagtgctaatcctgcccccacacagcccctgctgattggctcattcggcttgtcactctgttgtcttacatttctttggctcaccctctttgggttcgcacggtgggcggggccagtggtagggggtggtgagaaggtgcgggccccttcttccaattggctggcggtttccccacccacttatgggcggagatggatggtggatggggggcgggggaggcagcggagggagatgaggagataggcgggagcgagggagcgagggagggagcgaaggaggtagagaagagtggaggcgccaggggagggagcgtagcttggttgctccgta

SEQ ID NO: 13970 - DNA, 445 bp, Homo sapiens
  MAP TO AC008174.1; EXPRESSED IN ADULT LIVER, SIGNAL = 0.8; EXPRESSED IN PLACENTA, SIGNAL = 0.74; EXPRESSED IN LUNG, SIGNAL = 0.72
tttgttgagtagaaaattgccagtctctggggcttgcctgtctattgattttgttgcaaaggggtacactattatttctatgcatagaaaatgatttgtttcttacattgctttcaaagtgataatctacttctatttctttggacagtacatgaatcactcctactaagagatcctgaaagaggtcatcaaagccaccagaaactattcctggacagtaagtgtattttgtaggtatggcaaccattttctgtgcaatgtcagcctgtataattttattattaaaaagaattttaataatgatttcagaaatacataaagcaagttctccaatggaaattgacctgctctcaaacacttgagaatgaattgaaataatcttgctaaatgttgcttcttgaatttcccatgctttctctttttctctaccctttttggtgccatc

SEQ ID NO: 13971 - DNA, 455 bp, Homo sapiens
  MAP TO AC007270.2; EXPRESSED IN ADULT LIVER, SIGNAL = 7.6
tcataggccctttatcctttttctgttgcatattaaatgttttagaaagattttgggtttggggtactgattcccgagttcatttgattatcacctcccttaggccctgtgtattttcctggtgagttgtgttgttattgtcccagcgggggtcttgggcagggaatttctggtccatggtaggaacgttttgactgggtgaatgctcacgttctcaaactactatagcagccctatgaatcatactcctttcttctcctgaaaagaggatgtccaaaatggacattaactcaacccaagtgtataactgaggtcctaaaaattgatcaatttgatctgccactccgtaagggtcatctagtaatggcttaagctccttttttaaactctggaattctgaactggttaagggagtatccatgaagtcaatggttcctcctccttgtggcacctat

SEQ ID NO: 13972 - DNA, 846 bp, Homo sapiens
  MAP TO AC007314.3; EXPRESSED IN HELA, SIGNAL = 0.66; EXPRESSED IN ADULT LIVER, SIGNAL = 0.72; EXPRESSED IN PLACENTA, SIGNAL = 0.73; EXPRESSED IN BONE MARROW, SIGNAL = 0.64; EXPRESSED IN LUNG, SIGNAL = 0.78
ctgtgtattggggtgtttcgggggatcctgtgtattggggtgttttgggggatcctgtgtattggggcgtttcagtgggtcctgtgtattggggtgtttcgggggatcctgtgtattggggtgttttgggggatcctgtgtattggggtgtttcgggggatcctgtgtattggggtgtttcgggggatcctgtgtattggggtgtttcggggggttctgtgtattggggtgtttggtgggtcctgtgtattggggtgctcgggcgggtcctgtgtattggggtgctcgggcgggtcctgtgtattggggtgttttgaggggtcctgtgtattggggtgtttcggcgggtcctgtgtattggggtgtttcggcgggtcctgtgtattggggtgtttcggcgggtcctgtgtattggggtgtttgggcgggtcctgtgtattggggtgttttggggggtcctgtgtattggggtgttttggggggtcctgtgtattggggtgtttgggtagatcctgtgtattggggtgtttcagcagatcctgtgtattggggtgttttttagtctccccaggtgagttgaatatgcagccaggatgggaatgctgacaccacagggaggagaaagggggctgagtaaggttttccccagaatccccatgaacaagatgatttcagaacaaacagtgctggtggaggatgcagggatgcgtctgctgaaacccggcctcgcctgggacattgtcagcttggaaaccgctgagtgaaacgaagcttacatgtgtgtggtcaaggctgttgacaaagacaaaagaacaaaatatttacacaggaaacaacaaccaaaaa

SEQ ID NO: 13973 - DNA, 488 bp, Homo sapiens
  MAP TO AC007600.2; EXPRESSED IN ADULT LIVER, SIGNAL = 0.66; EXPRESSED IN BT474, SIGNAL = 1.3; EXPRESSED IN HBL100, SIGNAL = 0.73
gaggttctcccccagaattgcccatcgcagctgcagctaaactcagaagtgggctgaggaggcaccaggggcctctgctccattcttgctaggaaaattatcttagtttcaggggtcactcaggggcaatggcaatcagtggttatcaggagcgttgaagagcctgagcacaccccagcagcctcttgacccccgatacttctccttccttctagctggcgtccagcttccaggccactgcccggattggcttggagacagaggcacagttcacggctgtagagaggatactgcagtacatgaaggtggggttcaggtctgggtctggtgtggggagccatgcaagttggggcatgacttctgtgacctctacaagccccactggcctcagagccctgagaccatcccaggaaacaccaggctcctggcctttcctccctgtcttccccagacttttgttgaccatctcgctgaagctcttccatacc

SEQ ID NO: 13974 - DNA, 456 bp, Homo sapiens
  MAP TO AC007106.6; EXPRESSED IN ADULT LIVER, SIGNAL = 0.72
ccacatattgaacacacactaggcaagggacaagataggaactgggagtagaaatcactaggttaaattcttcctactatttggtttatttaaaactgagagttgtctctttccatagttacatttttcttttttttgataaaatatctctgccaattaaaatgcaaagatcaataagtaagagaagacatgattaacagtaaaaaaaaaaaaaaagcacttttaattttacatagtaaaagtccagaggaaggtagtttcaaagatagttcaagagctcaaagacatcatcaagctgggggttctcacattactgctgtaccatattcattatgttgatttccctttcttagattacttgtcccccgatcaaaggatggctataccagatccaggagtggtcatgagtttcaaaagtaggaggcactaacacctgtttcaaatcaaatattcttg

SEQ ID NO: 13975 - DNA, 459 bp, Homo sapiens
  MAP TO AL035091.2; EXPRESSED IN PLACENTA, SIGNAL = 0.98; EXPRESSED IN ADULT LIVER, SIGNAL = 2.8; EXPRESSED IN BT474, SIGNAL = 0.96; EXPRESSED IN FETAL LIVER, SIGNAL =   1; EXPRESSED IN LUNG, SIGNAL = 1.2; EXPRESSED IN BONE MARROW, SIGNAL = 1.2
aatagttgtttcagataattgtggctatttatctttgatactacacttaaactcaataaatggtagtttcttaaagattatttacaatgtggaatttgaaaccatatcgacgaacattttacacttgattttatgtactgtatgaaatgcatgaaaatacactggtggttttacagcttccaatgattcctttatccatgtgtaaatcatgcattggacatttggaaagtattatttcactgagttatgaagatcttccaaatgttgacacatttcattatacaaatttttttttaaaaagccaagacagatttgttactattaccactgacctcatcaggaaagatcttaagtattgggatgctatcaagttcatggtggtgaacacaaattttccaaaattctaattttcatgtgagagctcaaatgttatcgttggccacaaatctgtcaatcgtt

SEQ ID NO: 13976 - DNA, 457 bp, Homo sapiens
  MAP TO AL049739.1; EXPRESSED IN ADULT LIVER, SIGNAL = 1.2; EXPRESSED IN BONE MARROW, SIGNAL = 0.99
aacagcaaggggttgttttgaaagtccatgaaagctgaacttgattagaataaagcattgatttgatgcagcagccttatgatgcagaacaggctgggttactatgtgtacaattccccagctcagatgtgggaaattatgtttccacatcgaccctgtgctccctgggaagaaggttctccacatgctgagtagagtgtggttgctccattgggtcgatgccagctgcctttttgttcctccccacctctggcttatctgctaacgcccgttggagaatcactctgagagattccttcagccttttctttctgaggctccccacaaagaaataaatgatagggttggcgctgctgtttataatgaggaacaaggaaattaaataggaggtggtgacaaacattttgaaatctgttatgaggggtgccacgctcaggggtagggcccagagtaggaa

SEQ ID NO: 13977 - DNA, 495 bp, Homo sapiens
  MAP TO AC007750.2; EXPRESSED IN LUNG, SIGNAL = 0.62; EXPRESSED IN HELA, SIGNAL = 0.67; EXPRESSED IN ADULT LIVER, SIGNAL = 0.65; EXPRESSED IN PLACENTA, SIGNAL = 0.68; EXPRESSED IN FETAL LIVER, SIGNAL = 0.62; EXPRESSED IN BONE MARROW, SIGNAL = 0.65
acctgaaactgccctgaaagaaaaaattaattagtgccaacatgtttattatttatttaaaaaattacatttctgattaatgtcattttctaacaaggctaattgatgtttgatatagagtgaaagggtaaactattcctcttaactcagattatgtaattttttaataaccaaagtatgacatatgtcacatccacattaaataaattatttcagttgataaatagctatttagaagtatttacaatgattttaagagtaagatgtaattatagttaatatcctagtacttatttttcagaggaaatgcttgctacaaaatatgctctctggtggtctcctaatggaaaatttttggcatatgcggaatttaatgatacggatataccagttattgcctattcctattatggcgatgaacaatatcctagaacaataaatattccatacccaaaggtatgttgaatactttcagcgatgctttcattttcctgg

SEQ ID NO: 13978 - DNA, 480 bp, Homo sapiens
  MAP TO AC009307.1; EXPRESSED IN LUNG, SIGNAL = 0.76; EXPRESSED IN ADULT LIVER, SIGNAL = 0.73; EXPRESSED IN PLACENTA, SIGNAL = 0.79; EXPRESSED IN BT474, SIGNAL = 0.7; EXPRESSED IN FETAL LIVER, SIGNAL = 0.78; EXPRESSED IN HELA, SIGNAL = 0.89; EXPRESSED IN BONE MARROW, SIGNAL = 0.75; EXPRESSED IN HBL100, SIGNAL = 0.68
cacaagagatctcaacaatctgtctttaaaaaatagtattttatctttacatcctagcaactaaatacacatttcacaagtttaagtaaaacttaatccttttgtgtcaactccacaactactctgttcaatttcattatgaaatatacaatattcatttgttcacccaaggtttaattagtttaagaaaaaactacttaaaattcttcacatttaagcaaacttctgagaactgtctaaactttttattcatttagcacaaaacatcccctgcaacttagtatagcatcacacatacctgatgcgatgaccggatctttcataagttctctagttattggacatataaattcatcaggaattcctgaagaaagggatttaaccttggtcctgagctcttcaattttcctcagcactttactacgcagtcctagagattctgaaaagaaattactgttagggctggataactactagtaa

SEQ ID NO: 13979 - DNA, 459 bp, Homo sapiens
  MAP TO AL031280.6; EXPRESSED IN PLACENTA, SIGNAL = 1.2; EXPRESSED IN ADULT LIVER, SIGNAL = 0.98
ctttcagtggcaaaattgggaaggatttcccaagggaatgatggacgtaggctagttgcctcaggcgagctcatggatttatgattacatttcttgaaaataggggccatgcatggagcagggacaagtgtcatgagtcaaggattgttgtctttccggttctgtgcacctgcagtccaaaaagaccaggatcattcaaacaataagccctggttcttgattctctgctattcctgggccaagcaaggcctttatgcataaacatttgcataatttggggaaaagaaacaacaaatgttcttagctctgtattgccatgcagatgatggtaagaagccaaacgggagactcctcaaagaattccaaggactcaaggaacttaggcccctccgtcttcctcctcactcccccttcactctgggggctggtcagtagctcagacagcagggttttggatgt

SEQ ID NO: 13980 - DNA, 468 bp, Homo sapiens; identical to SEQ ID NO: 620
  MAP TO AC007527.6; EXPRESSED IN FETAL LIVER, SIGNAL = 1.6; EXPRESSED IN ADULT LIVER, SIGNAL = 0.77; EXPRESSED IN PLACENTA, SIGNAL = 0.88; EXPRESSED IN BT474, SIGNAL = 0.77; EXPRESSED IN BONE MARROW, SIGNAL = 7.1; EXPRESSED IN HBL100, SIGNAL = 1.7; EXPRESSED IN HELA, SIGNAL = 0.9

SEQ ID NO: 13981 - DNA, 476 bp, Homo sapiens
  MAP TO AP000194.1; EXPRESSED IN ADULT LIVER, SIGNAL = 0.81; EXPRESSED IN PLACENTA, SIGNAL = 0.85; EXPRESSED IN HBL100, SIGNAL = 0.72
gcttggagcagatccgtaactctgatatcaaagtcctttttcttttggggctagggcagttcagggagaagttatgccactaaatgggtgccttgttggggaagacggtaatgactgtaggaatgaacaaatgataaacagcagaacattcttctgttcattgatttgaatcaaaacagactgtaaattgagatgaggaatgaatgtattaatagtaaactggacctgcttggtgcccttttttgatgtcatgaagcactctgcagttccagctgcggccaagccttggggcctgggggacctgggtcactggagtctggttatgatcctgttgttcctgcagaggcagcgtcaggttctgcagccccagggcctgggttggaattgcagcccttcccttcaccagctgtgtgacttgggcaagttgcctaacctcctgcctcatttccttacctggagaatggagatagtgatgg

SEQ ID NO: 13982 - DNA, 1965 bp, Homo sapiens
  MAP TO AF001905.1; EXPRESSED IN BT474, SIGNAL = 5.4; EXPRESSED IN LUNG, SIGNAL = 0.97; EXPRESSED IN ADULT LIVER, SIGNAL = 1.4
tgcacataaagcaactagagaaaagaatataccaacctcaaatttggcagaagaaaagaaataactaaaattacagaagaatgtaatgaatttgtgatgttaaaattcatatgaaaaacaaattgtgtgatgaattgcatgttggtagttctaaaaatcaaataagattgaccactagctagattaacaaagaaaaaaaaaagtcaagattcatataagtacaatcagaatttgttcgtcaaaaaaaataagtaagattgatagattccctagctagattaatgaagaaaaataagatccaaataattacaatcagaaacaacaaatgctatattataactgatcccacagaaatacaaaagattctcagagactacattgaacaaatctatgcacacaaattagaaaagctaaagaaaatggagaaattcctggaggcatacaatctcacaagattgaatttggcagaaattaaaaatctgaataaaccaatatcaacttttgaaattgaatcagtaataaagaacctactagccataaacagccttggaccagttggattcacagctaaattctaccatacatacaaagaaaagcagataccaatagtactgcaactatttttaaaaatcaaagtgaaggaactcctccctaacttattcaatgaatccagcatcaacctgatactaaaatctggcagagacacaaggaaaaataaaaacttcagaccaatgtcactcataaacatagatgaaaaaatcctcaacaaaatattagcaaataaaatccagcagcacatcaaaaatttaatataccaagagcaagtaggctttattcctgggatggaaggatggttgaacatatttaaatcaataaatatcattcactatataaacagaattaaaagaataaccatatgttcatcttaatagatgtagaaaaatatttcattaaaattcaaaataccttcttaataagaatacttaacagactaggcatagtaaacaccatctatgacaaatccacagccaagatcatatcatatgggaaaaagttcaaatcattccccttgagaatgaaaaaaagacaatgatgtccgttcttcaatctccttttcaatatagtactggaagtcctagccagagaaatcaggcaagataaagtaaaaaatcacatccatgtagaataaaaagaagtcaaactatctctcttcactcaaaatatgatgttatagctagaaaatcctaaagactacgtgaagacttctagaattgataaatgactttaatttaaaaaagttttcagatacaaaattagtgcataaaaatcagtagcatttctaataagcaacaatgtttaggctgaaattgaaattaagaacgtaatcccacttacaatagccatgaagaaaataaaataactaggaatacacctaaccaaagaggtgaaacatatccacaaggagaactacaaaacactgcttaagtaaatcagagattacccaaatacaaaaaaaatccatgcttatggaatgaaagaatcaatatcataaaaatggctgtactgcacaaatctatttacagattcaatgctatttatatcaaactacaaacatcatttttcacagaattagaaaaacgtattctaaaattcatgtagaaccaaaaagaagcctgaatagccagagatatcctaagaaaagagaataaagccaaaattatcacactgttggacttcaaactataatgtaaagctacagtaaccaaaatagcatggtactagtacaaaaacagacacataaaccaatggaatataataaaaaactcagatataaatctacatgcctacaactatttgatttttgacaaggccaacaaaaacaagcattagacaaaggattctctactcaataaatgatgttcgaataacttactgaccaggcatagaagattggaggtggaccct

SEQ ID NO: 13983 - DNA, 395 bp, Homo sapiens
  MAP TO AC012354.2; EXPRESSED IN ADULT LIVER, SIGNAL = 1.1
tgtttttgcctcgtcagttgctctcaacggagtcctccctttcttctctgtgtcagaagtaacataatggcagatatgcatgagttctctggagaacaaagagggacttcacagagctcaatttgggagaatacacaagtgttgtcatagagtgatagtctcatcacacttgcaagtagaaaatgaactggataccagatgaagtgagggaatttggggggagataaactttcctccaaagtgaacaaaatgaaaaggcctgcagccaggcagaactgggcagagaattctatagatgcggtgtgcaagttaattaaccatccacccccaacttctgccactgccaccttggccaccactgtagatgattactctgaactcctgagggcaaggtt

SEQ ID NO: 13984 - DNA, 367 bp, Homo sapiens
  MAP TO AC012367.2; EXPRESSED IN ADULT LIVER, SIGNAL =   1
cacaccatgccaaaactcagtggcttaaaacagcaaacatttcttattgctcacagatctgtaagccaactggagagatttagtgaaaggctcagcagctgagccggctctgcaccgcatgcctctcatcctcctcctgggaccagcaggctagccagggtaagaccttcctagggtgacgtcagagaagcaaaagaagatgcctaactttacaaccacagccatgcaagcgcattacaagctgctggtggcatcatggctgtgaacatcccattggccaaagcaactcacagggctgagcccaaaatcaaagacaagacaatatgcttcacctttagcagaagagacaacaaatgcgtgacaaagg

SEQ ID NO: 13985 - DNA, 1972 bp, Homo sapiens
  MAP TO AC006345.2; EXPRESSED IN PLACENTA, SIGNAL = 0.98; EXPRESSED IN HBL100, SIGNAL = 0.98; EXPRESSED IN FETAL LIVER, SIGNAL = 1.1; EXPRESSED IN ADULT LIVER, SIGNAL = 1.1; EXPRESSED IN BONE MARROW, SIGNAL = 1.2
caaaggttaattactttgttttcctctaagagttttacggttttagctccttttttttgtttttttcttttcttttcttttctttttctttttatagttttagctcttttggccactaagttatttccctgactaaagcttcagaggttcctttgagctgtttgctaagggtggaggtggggagctattatcctgtgacttcctttctttgacaattcaatcaagttccttgtccttgggaagcacttcttcttgtaggtgtttctagtgcttttacagtttctgtatttcatggtcttttttttttttttttgcaggtaacaaatgaagaagactttattagaaaattggactgcaaacctgatcagcatctgaaagtggtttccatttttggaaatactggtgatggaaagtctcatactctcaaccacactttcttttatggtcgtgaagtctttaaaacctccccgacccaggagtcctgcactgtgggagtgtgggcagcctatgacccagttcacaaagtagcagtgatcgatacggaagggctcctgggggccaccgtgaatctaagccagagaacacggctgctgcttaaggtcctggccatctcagacctcgtcatctatcgaactcatgcagaccggctgcataacgacctcttcaaattccttggggatgcctcagaagcttatctgaagcacttcaccaaggagctcaaggccaccactgctcgctgtggcctggatgtccctttatccacactgggccctgcagttatcatcttccatgagaccgtgcacacccagctactgggctctggtgagagatggggtacagtgtcacagctcaacctttatgggtacaaggaggcagctatttggtctgcaatagcaacttgttggtagtggattgcccagaaagatttctgtccaaagaagacatagaaagtgtttcaaggaggatggagtgatcaaacatgtcaatctgcttataggtcaactagcataaggattgagaattgccaattggctttggcaatatataagtccttagtgatctggataagacctgttccctgagatggtggggggtaaaagcttgatcagagtgagatcaagagaaaataggaggaagccaggtacagtggcaagtgcctgtaattctagctacctgggaggctcatgtgggagaatcccttgagcccaagagttagagatcagcctgggcaacatagtgaggctatgtctctaaaaaaaaaataagattaggagaagaattactttattcaattctttgacagagttctgtaaagcaaagaagaacaatgagattgtagctggaggctgatgtgggatttcaagggatttttcttttttaaaatttaagatgtgacgtattgcagatatttatgtactgatgagaatgattcattagagagggaagaatgtagatgtaagagagcaggaacagttggagtgatgcatgagtggaagggtcggccttaggaccacggacagttcatccataacaatgggaaagaaagtagacaatatggacacggtcgcagataagaagatggatgtggacatgggacgtgtgtgtgtaagttcttatttgttttcttagagaaataggaagcaagattgtcacctgagtggtaggaggatgggggaaaggtgcaataacagattagataggaggggagcagtaaatttggctcctgaaacaattgcaatcttcacttgttcattcggtcatcaaagtttattgagtgcatatgtcatgtgctgagcactgaggcacagagcagaaaaaacacttcctgtctttgaagagctcacagtctagttggggcgactgcacggtgttctgtgcatacctccgtacttacaggtacggtgctgtgggagtccagagcaaggacactacaccttatggaatctaggaaagaagaggcgacatttgagct

SEQ ID NO: 13986 - DNA, 456 bp, Homo sapiens
  MAP TO AF117829.1; EXPRESSED IN ADULT LIVER, SIGNAL = 0.98
gacactgtcaggattaggtcccatcctaataaccttatcctaatttgatcagctgtaaagattctatttcaaaatatggttggtcacggtcatcggtattgagggttaggacttcaacatctttttgggaaacatggttcaaacaataacactgggtctaaaagaatcaattgtacaagagggaaaacctgttttaaaggcacttcattaagagaaaaggatgaagaaagaagaggaagggggtgagagggagggggaggaggagaagaaggaaaaaaaggaggagaaggaaacggagaaaagaaagaaagaaagaaaaaagaaaagaaagagaaaaagagagagaaagagagagagaaggaaagacaagaaagaaagaaagaaaaaaaaagaaagaaagaaagaaaagaaaagaaaagagaaaagaaaagaaaagaaaagaatttaggcccaacc

SEQ ID NO: 13987 - DNA, 378 bp, Homo sapiens
  MAP TO AF047825.1; EXPRESSED IN ADULT LIVER, SIGNAL =   1
atcggtctcatcagagggcaataaaatcttacatcttgttgtgcagaggaaaagttttacttcgaaatagctcagcatgattatcatctctctttaacgactcagattcctgccccaccctgactttatgacgtgtatattacaaggagagctggtctcaaaagtatgggaaaagccaattaaaataaaaagaagaggaaaaaaaaagaagaaaagaaaaagcaaagaacgcattttccaccaaccttgatttttcacttcagcaaattccttgttgtattcttccagagtttccctaagtttctggttctctgtttcaatatcgtgcaggcgctgcactttgagctggagttgctgtccgagatccaaagctggtac

SEQ ID NO: 13988 - DNA, 473 bp, Homo sapiens
  MAP TO AF121782.1; EXPRESSED IN ADULT LIVER, SIGNAL = 0.98; EXPRESSED IN FETAL LIVER, SIGNAL = 0.99
ggcacgctgttttctctgtcattctgggtcccagtgattgaattatttgaatattttggcattatattattattttttgaacagggaacacatctgcatgattcaaaattgaaacaatataaaaggtgcacaacctcaatgtccaatctccgccctcatgccctgctcagcccaggaagctgcccccatacagtgcaccggccccgcttcttgggctttgtttagccagtgggagatgcagacagggcatggggttgagccagacgagggaacccagcgggttccataacctccccctcctgttccctctctgcctcaccattgttggtgtcagctacattctcacattcaccccattctctggggtggcctcctgggtgaatccccttctcatgggactccggtaactgtttctgttcctcaggcaagggggcgatgggaggaggatggggtgatggaaacggctttctgaa

SEQ ID NO: 13989 - DNA, 464 bp, Homo sapiens
  MAP TO AL049767.9; EXPRESSED IN FETAL LIVER, SIGNAL = 0.57; EXPRESSED IN ADULT LIVER, SIGNAL = 0.75; EXPRESSED IN PLACENTA, SIGNAL = 0.64; EXPRESSED IN BONE MARROW, SIGNAL = 0.86; EXPRESSED IN LUNG, SIGNAL = 1.2; EXPRESSED IN HELA, SIGNAL = 0.59
ttttccttatggccatgctcttgatcttgactaggaattgttacctggttttgagacttgccatgtattttctcttcagtttggatagaaatactgcctttggatacacctttctgtacatccttttctccactgttgagacgtctttcttctgtactcgaagattggtatgatattttattttccttatggccatactcttgagcttgactaggaattcttacctggttttgagacttgccatgtatttgctcttcagtttggatcgaaatactgcctttggatacacctttctggatgcccttttctccacagttgagatgtctttcttctgtacttgaagattggtatgatattttattttccttatggccatgctcttgatcttgactatgaattgttacctggttttgagacttgccatgtattttctcttcagtttggatagaaatgctgcctttgga

SEQ ID NO: 13990 - DNA, 455 bp, Homo sapiens
  MAP TO AL049595.5; EXPRESSED IN BT474, SIGNAL = 0.62; EXPRESSED IN HBL100, SIGNAL = 0.91; EXPRESSED IN FETAL LIVER, SIGNAL = 0.62; EXPRESSED IN HELA, SIGNAL = 0.75; EXPRESSED IN ADULT LIVER, SIGNAL = 0.68; EXPRESSED IN PLACENTA, SIGNAL = 0.6; EXPRESSED IN BONE MARROW, SIGNAL = 0.67
gcaaaactcggaggactcaccaccatattgtcccttaagtctcaaggtccctagcaagtctatgttttctttaccttttgcaatcttatgtttgttttacacatactctccaaacgttttagttgcagttagtgggaagtataagaaacaataatctactctatcttctctgaagtggcactcctggtggtagtttccaatacagtatctgctttctccttctcactgggaaaaccccattttggtgggggaggcaatatgccaagttagaaatactcatgtccctggatttccttgcctttaaagatggccatgaaatcaagctttggcccatgataaaatacccacaatctactgggtaagacatctggaaaaactattattcttctagtaaaaacagaaagatggagggccatgtttcttttctcttcttcacctttccctgcttctttctg

SEQ ID NO: 13991 - DNA, 473 bp, Homo sapiens
  MAP TO AC009227.1; EXPRESSED IN FETAL LIVER, SIGNAL = 0.65; EXPRESSED IN LUNG, SIGNAL = 0.64; EXPRESSED IN ADULT LIVER, SIGNAL = 0.66; EXPRESSED IN BONE MARROW, SIGNAL = 0.65
aaataatccacaaacatggaggttaagcataaaatagtgacgttgtttatctatttgaaatgttaaccatttattttccaaaaaggcaatatataccaaaggaaaactaaattggcatattttaactctacaaaaatgtatgaatatttaaatttacagcaaaagaacaattatatcatctaataatgcttacagtatttaaaatctgtcattatgcacaatctacttttataaatgttaaagaaccatgtgccaagcatatatctaaaacatttttgaaattactcctttctagctgtggctacactgaccaaaacaacaacaacaacaacaacaaaacaaaacaaaacaaaaaaagctgaaatacaaaaaaaaaaaaacaaaaaaagacatgtaatcatcaagttcttttttcccccttgtgctatttttagcagaaatttcagcacaactggaaccaagcagcagcttac

SEQ ID NO: 13992 - DNA, 474 bp, Homo sapiens
  MAP TO AL035417.15; EXPRESSED IN PLACENTA, SIGNAL = 0.71; EXPRESSED IN BT474, SIGNAL = 0.77; EXPRESSED IN HBL100, SIGNAL = 1.2; EXPRESSED IN HELA, SIGNAL = 0.85; EXPRESSED IN BONE MARROW, SIGNAL = 0.86; EXPRESSED IN FETAL LIVER, SIGNAL = 0.62; EXPRESSED IN ADULT LIVER, SIGNAL = 0.75
catcccaccaactctcagactgttacaatgtcttgatctctccccaacaatatcttgcaaaaatcacacttgcctggtcctctcagctcttagaggtgtcataccctcttggtcccaccatctcccacgatgtcccatctcctccctcccatcaaggatgacacatattccctgtcctgttatgtcaccccttttatcgcccaactcactgtaagtgtagcacccatcccttgcccgttgtcactcctccccatcttcactcccctaccctcccctagtcaacgctttcaggtgcccctgctaccttgtccgggttgataatgtccttcttgctgatggtcccagaggctgcatccccttctggacccccgagttctagaatgtcccgtacatccgcgcccgtagccatcgcgcctgagagatgggggagccaccggaggtcaagggtcagtgcctgaagaaggaccaggctca

SEQ ID NO: 13993 - DNA, 441 bp, Homo sapiens
  MAP TO AJ010770.1; EXPRESSED IN HBL100, SIGNAL =   1; EXPRESSED IN ADULT LIVER, SIGNAL = 1.1
cagaaatgtttctttgcattccagtagttacattaaagactgtaataattgttctttattttttcatttttatttagtgatagtttgatctttaaaagagagactcccaaagctgcttttttcttggtggcaataaagaaaaattatctttgacaataacggttattttcttttttcttagcttgcccagtttcgacaaagaaaagctcagtcggatgggcagagtccttccaagaagcagaaaaaaaagagaaaaacgtcaagcagtaaacatgatgtgtcagcacaccatgatttgaatattgatcaatcacagtgtaatgaaatgtacataaatagttctcagagagtagaatcaactgtgattcctgaatctacaataatgagaactctacatagtggagaaataaccagtcatgagcagggcttctctgtggaagt

SEQ ID NO: 13994 - DNA, 476 bp, Homo sapiens
  MAP TO AL033397.7; EXPRESSED IN ADULT LIVER, SIGNAL = 0.98; EXPRESSED IN PLACENTA, SIGNAL = 1.3
cacattttaggtgcttttccttcttacataataaaatagcaaagcacataggcctggggtccctggggaaagccaagtctgcctggctgccttgagaactctggactggatttgacatggaggagttggggattgttgctcagggatcagaacagtgaaactcaggttaatgagtaaagagtgagaatatgtgtttgtatgtttcttaatcccatctactaggtgattacaaaactcattcaaagttgaacacagtagaggtatttcaagttgctttagagagagaattacacacacacaaaaaatctttaggagccagacaaccactgtggacaccaataagagagctccaacattggtgaggtatagacccgtcaaagttgttggtaataacagcaaggtccatctggcaagattggtcacctgtggtggaagtggtggtgacagcagggatgcaactgcagcaatcaatgatg

SEQ ID NO: 13995 - DNA, 474 bp, Homo sapiens
  MAP TO AC007366.2; EXPRESSED IN ADULT LIVER, SIGNAL = 1.3
tgccaaatgccatataatgagaatttattctccacttggtaagaattggaagcagtctgtatgtttagagacagaaatttgagggtttcagagggcactgcccaggcgtccgggggagtgctgtttctcagacacacacacacactgtctctgctttttctttcaggcaagatcatcagttagtgctcacttattatttatctttttccgcttattaatacctttcccatgatcttatgtaatgtctactgtccaagagcacttcgtttaatattctccataaatgtttttaggtatgtatggcacatttcctcctggagtttaatgctccattcctgtatttgtgcattattcacacagctgagtcgccacccaaacccagagagaaacaggaatacaactcccccaactactgttacagagaacgctgcgggcaggtgagggaggacgggctcgggaggttgttaacgtctg

SEQ ID NO: 13996 - DNA, 476 bp, Homo sapiens
  MAP TO AC007656.2; EXPRESSED IN ADULT LIVER, SIGNAL = 0.87
agcaaccaaccaaccaaaaccttctttttcctttgtcacaggcagacagaaaatacagatcaccgagagctcagagaataggcaggcaggaagtccccagacgtcatgaactgagagataaacaatgtattttgggacttagcacagaaggtaggcagccagcctgttacagaggatattggaagaaaacaaagtgccctcagcaatatgattgataattaaagtggagaaagtgaactctgaagtacattaagacagatgtaataaaaaggcactgattagaaatgcagctactccactgtggaccagaggggaataagaataaggtggtcaagatggaggaaaaggagcaattcgggtactatcagaaggccagtcccccaccccaatggctaagggttttcagcaagtactgcataaaaaagaacaacgtgtttcttttagaaacttacctctctttcctttatatttgtgtg

SEQ ID NO: 13997 - DNA, 479 bp, Homo sapiens
  MAP TO AC009490.4; EXPRESSED IN BONE MARROW, SIGNAL = 1.3; EXPRESSED IN LUNG, SIGNAL = 0.97; EXPRESSED IN PLACENTA, SIGNAL =   1; EXPRESSED IN ADULT LIVER, SIGNAL =   1
ccccttggacacctacagtcctcaccatggaggattcctgcagtcctcaaaggcactatgcctagctgagaaagctgactagagtccacacagctgtgcttcccccagagaaggagctgtgactatgtcccaccccctgtggcacatcagctactgtactatgccttcttggaactgaaactactgctagagtatgttctgctctggaggtgagtagctatgacatccttccatccctgagacttagccactgctaaagtacccctgccaggtaccctgccatcctccagttgagctgctgctacaccctagctcacaaggccaagcagccatggaggtgctccatctacccctcccagttgctgctccaccttgctcccactgtgcctgagctgaagcagtgccctgcctcctgggaaaatagtacctttgccactgagagcaatcacagccgtcccccaacccctgacaagctccta

SEQ ID NO: 13998 - DNA, 477 bp, Homo sapiens
  MAP TO AC007406.1; EXPRESSED IN HELA, SIGNAL = 0.64; EXPRESSED IN PLACENTA, SIGNAL = 0.64; EXPRESSED IN FETAL LIVER, SIGNAL = 0.63; EXPRESSED IN ADULT LIVER, SIGNAL = 1.4; EXPRESSED IN BT474, SIGNAL = 0.76; EXPRESSED IN BONE MARROW, SIGNAL = 0.8; EXPRESSED IN HBL100, SIGNAL = 0.68
aaaggatgctgacacatgaccttgattcagaggtccatgtgaataatggacatttcaattatccccacaatgatcaaaataagtcagtgctctctaggatacttctaaatagcttcactgagttcaattttactacccaaagaaataggccaaggctagaaattattgaaaccttaaatatacttctgtctataaaccttaaagatcaaaaacctagcatcattaatccactagactttagtagagttcatgcatgctgtattttagactgtacataccagtgcaagtagttgatggaataactccagtgatcctcaatgtgccagcaaaaagaagagaagcacattcccacatagagccacggcactttcataccagagatgtccacattaatatgtgcaagaacagactgttccaggacaggcatgttattcaaattccaaccagaaagtgcatattcctataagagaagaaaaa

SEQ ID NO: 13999 - DNA, 1986 bp, Homo sapiens
  MAP TO AC000113.1; EXPRESSED IN LUNG, SIGNAL = 1.1; EXPRESSED IN PLACENTA, SIGNAL = 1.1; EXPRESSED IN HELA, SIGNAL = 1.1; EXPRESSED IN BT474, SIGNAL = 0.99; EXPRESSED IN FETAL LIVER, SIGNAL = 1.1; EXPRESSED IN ADULT LIVER, SIGNAL = 1.3
gggtctccttagtggtgtggacatagttccagaggctggagctcttactagtggtgaggacacccctccagaggctggggctcgcactggtagtgtgcacatgtctccagaagctgtgggcatcatttgtgatgtggatgtcactctagagtctggggctctcatcagtggcatggacatccctccagaggctgtggatcttgttagtggcatggacattgctccagagatgggagccttcacttgtggcatggatgacatcattccagaggctgtggctgtcatttgtggagcagacatggctccataagctggggatctcagaggcgtggctatctctccagaagctggagctctcattagtggtagggacatctctccagaggatgaagctcttgtgagcagtgagggcctctctccagggtctgaggttctcattagtggtgtggacattgtttcagaggtccaggctctcactgttggtgtggacatcacatcagaggttggggaattcatctgcatccctccagcggtcatggacttcatgggcgacatggacatccctccaggatcttgggtgctcattggctgactgagcatctttccagacactttggctctcattagtgaggcaggcattactcctgggtcttgagctctcattagtggcatggacatccctccagagactgtggctgtcatttgtgatgtggacattgctccagaagctgtgtctctcattagcgatgcagacaaccctccagaggctgtgtctgtcatttgcggcatggacagagctccagaaactgtgtctctcattagcagtgtgggcattgcttcagaagctgtggttgtcattttctccgtgaacatcgttcctgaggctttgggtgtcattagtggcttggacaatgctccagaggccagagatctcatttgtggacaggacatcactcctgaggctgtgtctctcattaacagcgtggatgttgatccagaggtttgggctgtcattagtggggtggacattgctccagaagtcatggctttcatctgtgctgcagatgtcaatcctgaggccatggttctcatttgtggcatggacattgcttcagagacaggggctctcatttgcagcatggacattgatccagaggctgggactgtcaattgtggcatggacattgtttcagaggctgttgccgtaactggttgggtggacattgctccagaagttggagctctcctcagtggcgtggacatctttccagaggctgtggctctcttgtattgttttgccacggctttcatagagcctgtgggcattgctccagaagttttggccattgttaactgtgcggacattactctagaggctgtggctgacatttgctctgtggacatcactccagagcttgggactgtcatcagtgaggtggtcatggctccagaggctggaactgtcttttgcaatgtagacatatttccagaggctggggctcccattagcggtgtggacattgctccagaatctaaagctcttactggtggtgcagacatcaccccagaggctgttgctctcactggcggattagacatcatttcagagtctacattttgtgttgaccatggggacatcgccccagagcctggggctggcatcgtttgggtgggcatcactccagagggtagggccgtcattagtgctggggacattgcttcagcatctggagctggctttggtaatgtggacatttctccagcatctgggactgacagtagcggtgtggacattacttcagagcctggagatgacattaaaagcgatgacattattccagagtctagatctgacatgagcggggtaggtattcccccagagttttgggtgcttgttggctggggtgatgtacctccagaagctacagctgacattatcagtgaggatattgcttcagagtccgtgcctgacattagcagcgaaga

SEQ ID NO: 14000 - DNA, 493 bp, Homo sapiens
  MAP TO AC006560.8; EXPRESSED IN LUNG, SIGNAL = 0.61; EXPRESSED IN HELA, SIGNAL = 2.4; EXPRESSED IN ADULT LIVER, SIGNAL = 0.73; EXPRESSED IN PLACENTA, SIGNAL = 0.71; EXPRESSED IN HBL100, SIGNAL =   1
ttctgaagggactttatgaggcatcatttaatgctcaatgtctctgacagatctcactaactttccagggcacttgtagtgacagggagctccatatcccatcttttcattgttgtttttgaacaaagtatgagtaacactctccaggtgaagaatacaatgctaacttctttaacattccttacttatggagttgaaaaactcaaccatagatttggaaatgggagctatttgggggatgtatttttcttggagtggaccatgcttgagctccacctgacccaacaacctccatctattgcagcagagagatgtgtgaccagcagaatgccttcaccatgtgtcccctgtgtgacaagtcctgtgattactggaacctcagctcagcctgtgggaccgcgcaggccagccacctgtttgacaaccctgccaccgtcttcttctctatcttcatggctctgtggggtatgtggccatcaccaggcttgcttat

SEQ ID NO: 14001 - DNA, 1947 bp, Homo sapiens
  MAP TO AC005365.1; EXPRESSED IN PLACENTA, SIGNAL = 1.2; EXPRESSED IN HBL100, SIGNAL = 1.3; EXPRESSED IN HELA, SIGNAL = 1.4; EXPRESSED IN BT474, SIGNAL = 1.2; EXPRESSED IN FETAL LIVER, SIGNAL =   1; EXPRESSED IN ADULT LIVER, SIGNAL =   1; EXPRESSED IN LUNG, SIGNAL = 2.7
aaaactagtcgcgcaagagcacagattaagaaatcaaaagcaaagcttgctaatccctctatagttactaagaaaaggaacaaacgaaatcagacaaataaactagtagatgatggaaaaaagaaaccaagagcaaaacaaaaaacaaatgagaaaggtacatcgagaaagcatataacacttaaggatgaaaaaataaaatctcagtctggtgctgaggttaagtttgtactgaaacaccagaatgtgtctgaatttgcaagtagttctggaggctctcaactactttttaaacagaaagatatgccactaatgggctctgctgtagatcatcccctttctgcttccctacccactggaattaatgcacaacagaagttatctggctgcttttcttctttcttagaaagcaagaagtctgtagatttgcagacattccccagttcacgagatgatttgcatccatcagttgtttgtaattctataggacctggagtctcaaaaattaatgttcaaaggcctcataatcaaagtgctatgtttactctaaaggaatcaacgttaattcaaaaaaatatatttgacctttccaatcatttatctcaggtagcacagaatacacagatatcttctggtatgtcctcaaagatagaagataatgcaaataatatacaaagaaactatttgtcatcaatcggaaagttaagtgaatatcgcaattccctagaatcaaagctggaccaagcatatacccctaattttttgcattgcaaagacagtcagcagcagattgtatgcatagcggaacagtcaaagcacagtgaaacttgttctccgggaaatacagcttcagaggaaagccaaatgcctaataattgctttgtaacttccttgagaagtccaatcaaacaaatagcatgggagcaaaagcaaaggggctttattttagatatgtcaaattttaaacctgaaagagtaaaaccgaggtcattatcagaagcaatttcacaaaccaaagcactttctcagtgtaaaaatcgaaatgtgtcaacaccttcagcatttggtgaaggacagtctggactggcagttctaaaagaattgttacaaaaaagacagcagaaagcacaaaatgcaaatactacacaagacccattatccaataaacatcaaccaaataaaaatatttctggttcccttgagcataacaaagcaaataaacggacacgatcggtaacgtccccaagaaaacctcgaactcccagaagtacaaaacaaaaagaaaaaatccccaaacttctcaaagtagactctttaaatttacaaaactctagccagttggataactctgtatcagatgatagtcccatctttttttcagatccaggctttgaaagttgttactcacttgaagatagtttatctcctgaacataattataattttgatattaacacaataggtcagactggattttgtagcttttattctggaagtcagtttgtcccagctgatcagaatttgcctcagaagttcctaagtgatgctgttcaggatctttttccaggacaagctatagaaaaaaatgagtttttaagtcatgacaaccagaaatgtgatgaagacaagcatcataccacagactcagcctcatggattagatctggtactttaagtcctgaaatttttgagaagtcaaccatagatagcaatgagaatcgtcgccacaaccagtggaaaaatagctttcatcctctaacaactcggtctaactcaataatggattctttctgtgttcagcaggcagaagactgtctaagtgaaaaatctagattgaataggagttcagtaagcaaagaagtgtttcttagcctcccacagccaaacaattcagactggattcaaggtcacaccagaaaagaaatgggacagtctcttgactcagcc

SEQ ID NO: 14002 - DNA, 418 bp, Homo sapiens
  MAP TO AF019413.1; EXPRESSED IN FETAL LIVER, SIGNAL = 2.6; EXPRESSED IN ADULT LIVER, SIGNAL = 2.3
tgccaggtatttccaaggtccggcctcggtggtctggggaaatgggggaagttggcagcctgtcctgctgtccacatcccccaccacctgtacccacttaggaaaccaatggctggaggtagagggtcactcacccaaggggttgagttcatagaccagctcctctctatggatggccccttccttctgtctcagggaaaacatggttgtgaggtcacacaggactacagcctgccctgctagcgcagactcccccagaactttgagtttcaactccagggacagagttggatcagaattgtagaagatgggaacagaccaaggcattggttcgggtgttgggcccctggcctggccagcagagagagtgctgagggtggaggacaaagctaggggcccggggacttatattcagggg

SEQ ID NO: 14003 - DNA, 361 bp, Homo sapiens
  MAP TO AC007124.1; EXPRESSED IN ADULT LIVER, SIGNAL = 1.1
tcagtttacacacagaaacacgcaaatgcatgaaaattactttttaaggtaacatacaactccagaggacctgactccctgaggacagccatggctattagaaccaccacagaactccaattaatcagttcagatgccttctccatggaatgcttttccagaaccccctctaagtatccagaccttttaaatccccctgtcttttcctttggctgccaactctaggatggggcacacaacctgagaaagatctcaaagatgatgagaaaagaggaagaaagagtgggtgaagaaaagctgcagatcagagctcaatatgcagccctcaatggtgcactttcccctcacctagaagcagtgc

SEQ ID NO: 14004 - DNA, 440 bp, Homo sapiens
  MAP TO AC007156.2; EXPRESSED IN ADULT LIVER, SIGNAL = 1.4
gtcctctgcatttagccagcaaaagagggaaagagagaacatagaagatcacattctagaagctttttagagtttaggcccgcaggtggtgggacattgatcaaacttggcaacacggcctacccaactacagggaaggctggaagcgttgtcttgtctctaagtgtatgaggaaaagcacatggagctggaaaagcacgtagtcggagacaaatcaaagcagctcagagagagcagatgtagtcagagaacgcaagagaataaaggccctgatgtgggaagaggcatcgcggagcaggaacaggtcaaagagcttgaagcaggagggctctgttggtgcagggctaatggtggtgtccaagatgttcttgaaggacccagtaagcatgaaataaaaatcaagagagaacaacaaacagaggacaggttatagtccccgg

SEQ ID NO: 14005 - DNA, 465 bp, Homo sapiens
  MAP TO AC008024.1; EXPRESSED IN ADULT LIVER, SIGNAL = 1.1; EXPRESSED IN FETAL LIVER, SIGNAL = 1.4; EXPRESSED IN HBL100, SIGNAL = 0.9; EXPRESSED IN HELA, SIGNAL = 2.9; EXPRESSED IN LUNG, SIGNAL = 0.88
tccactgagctgtatgctccaaagcagaaatttataaaagcaactctcagcaaatatgaataacatatttggaagagccaatataataaatttgaaaactctgagctatgttgcagtgtactgctcatcaaagagtatttttacattagtcagccctaaatgtatttccttattctgtgtaatagattcatattaagcagacagatatgcaatagataaagcaggaacgaacacctccccattgacaagccgtcagaagggcaagggaaatatcccagatgagagggaagaacaacaacaaaaaagtcaacaacaacaaaaatgtcaacaacaacaaagtagcctctgaaataaatgtcttcgttaatccctttccaacaataaatcgcgttctgagtgttcaggctaacacttaaagcctgaatcaagcgaaaagctattcttgcagccaccatagtctgcaaa

SEQ ID NO: 14006 - DNA, 368 bp, Homo sapiens
  MAP TO AJ009614.1; EXPRESSED IN BONE MARROW, SIGNAL = 1.1; EXPRESSED IN LUNG, SIGNAL = 1.4; EXPRESSED IN HELA, SIGNAL = 1.2; EXPRESSED IN PLACENTA, SIGNAL = 1.2; EXPRESSED IN HBL100, SIGNAL = 0.95; EXPRESSED IN FETAL LIVER, SIGNAL = 1.2; EXPRESSED IN ADULT LIVER, SIGNAL = 1.2
gcaagagtttccagaggaggcctgagcttctgtacttgcagaagggcctaagaacacagttttgtgatgtgccaaatagcacggcaggattggtcgagcgtaaggttaatggatacatcactatctactgggcaggcctccaaaatattaattcctttccaatgaagtttataaaagagtctctgcaatcttgttccttatttccaatttctccgctgcctctccagtgactatcatcacagcttttgaatgcacccccattggaggacgctcggtgtctccctcagtttcctgccttgcatccaacttcaaacaggcaggttccctggagaacaagcccatcgccatcaaatccatgtctgggctct

SEQ ID NO: 14007 - DNA, 442 bp, Homo sapiens
  MAP TO AL021326.1; EXPRESSED IN ADULT LIVER, SIGNAL = 0.96
tacacctgccctccatatcccaattgctggcactgccaccttagtccctaagatggaagccgtaagttgaggatgtcagagctatctcaccagactgtaacagctccttttgaacaagcatgtgagtgaaaaataaaattccatgttgttgaacctttggattttgggtttttgcttttttttttcttttttaaacagcatctcagcttttatccaaagtaatgtaacaaaggccatgcaatgaagttgtgaagtctgtttcattggaaaggctgacttaatggaatttaatcttcaatgtaattgagtttaatctcatgtttacctcgaaataacatggtataaatgtatatcacctcgatcagtgctgtataggctaaagtggacagattccaatctttattgtccttattatttgagatggcacgaagtagagcaggat

SEQ ID NO: 14008 - DNA, 405 bp, Homo sapiens
  MAP TO AC007981.31; EXPRESSED IN ADULT LIVER, SIGNAL = 2.2; EXPRESSED IN PLACENTA, SIGNAL = 1.2
aaaccctttggagattgctgcctactttgcattttggtctgagaagtaagtgagcatgttgcgtgtgtttctctccctcgtaggtgtggtgtcagcacagcggcaggtcaccgttcaggaaggacccttgtaccgcacggagggctcccacatcactatctggtgcaatgtgagtggctaccagggaccttctgaacagaatttccagtggtccatttacctgccttcgtcgccagagcgagaggtgcagatcgtcagcaccatggactcttccttcccctatgccatctacacccagcgcgtccgcggagggaagatcttcatagaaagagtccaggggaacccaaccctattgcacatcacagatcttcaggcccgggatgccggggaatatgaatgccacac

SEQ ID NO: 14009 - DNA, 450 bp, Homo sapiens
  MAP TO AC007455.7; EXPRESSED IN LUNG, SIGNAL = 0.59; EXPRESSED IN PLACENTA, SIGNAL = 0.75; EXPRESSED IN BT474, SIGNAL = 0.66; EXPRESSED IN BONE MARROW, SIGNAL = 0.75; EXPRESSED IN HBL100, SIGNAL = 1.1; EXPRESSED IN FETAL LIVER, SIGNAL = 0.6; EXPRESSED IN ADULT LIVER, SIGNAL = 0.71
cactggcaatgtgaatagtcctaatttgacaacaaaacaacctaaatctcttttatgaggtgagcagtgtatcttaggtaataaacacttaagtaattaggcattttttatggaaataactataaactgaaacatgggggaaaaaccctcagtaataggctgacgcccagggagatgggtatataagagccagagcagaagagaggagcatcgagacaccaacagacttctctcaactcaacaaaaacccacctcccattgccatgtattgctgtgctctccgctcctgcagcgtccccaccggccctgccaccaccttctgctcatttgataaaagctgccgctgtggagtctgcctacccagcacctgcccacatgagatcagcctccttcagcccatctgctgtgacacctgccccccaccctgctgcaagcctgatacctatgtgc

SEQ ID NO: 14010 - DNA, 493 bp, Homo sapiens
  MAP TO AB026898.1; EXPRESSED IN ADULT LIVER, SIGNAL = 1.1; EXPRESSED IN LUNG, SIGNAL =   1
tacccttcccaagtcacacctagggggctgaggagtgacaggtggagcagggcaaggctggattaaacattaatgcagctatcaccactgcccagaggagcaagttcccagagccaagctacagagctaccctagtgtccccaggctgaggaggtagtgactggcatacatggctcagtttgtccaggtcctggctgaaataggtgactttggtcgcttccagatacagctattgatcctgctgtgtgttctcaacttcctgtctcccttctacttttttgcccatgtcttcatggtcctagatgagccccaccactgtgcagtggcttgggtgaagaaccacactttcaacctgagtgctgctgaacagctggtactgagcgtgcccctggacactgcaggtcacccagagccctgcctcatgttccggccaccccccgccaatgccagcctgcaggacatcctcagccaccgcttcaatgagacgcagcct

SEQ ID NO: 14011 - DNA, 414 bp, Homo sapiens
  MAP TO AC006559.6; EXPRESSED IN PLACENTA, SIGNAL = 0.94; EXPRESSED IN LUNG, SIGNAL = 0.59; EXPRESSED IN HELA, SIGNAL = 1.1; EXPRESSED IN BT474, SIGNAL = 0.98; EXPRESSED IN FETAL LIVER, SIGNAL = 0.64; EXPRESSED IN ADULT LIVER, SIGNAL = 0.79
ttgaacattttctaatgatgtacactgtaatgaaattttacttgatattcagtacatgtatttgtcacttaaaggttctttctgtaaactgcttcagattcttttactattcaatttttaattcttaacatctgtaaagaacgttaatattcctctttataatcaatctttcccagttagccttaaaaatgtattccctacttttgcttcaggagatcattatttgcaaatgcaaagattttttacttagacttttgaaatcactcttagtaactttaacattgtttttaggtatgaaattgaaggctgtgaagtgatttgggccattaaagataaagctatagggaatactttcttcgatgcaggagcagctgaattcttgacttcaaagctcattgctgaaaaatcagaggc

SEQ ID NO: 14012 - DNA, 459 bp, Homo sapiens
  MAP TO AC009637.2; EXPRESSED IN ADULT LIVER, SIGNAL = 1.1; EXPRESSED IN HBL100, SIGNAL = 2.4
  unsure 85
aacccttgggattcttctccaatgtgacaggcccctccatgttggttcagcgttgactgccatgacaggctccaggctccacagnaaaaaaggcagagaaatcagggggtccagccaggcgccaagacgttggggtgccttgcatttctaagtgccaagtgatgaatagctcagttgaaagtaacccagggcacattctggaggaaattctctgggtatgattgtgcatgactgttttctctgctcattaaaccctcatctgcctccagggcaattccgggagagactgagtcactcaagactcatggtctgcactgggcagccaaaggcgattcggccaccaagtgtgattctggcctcattcagaagtggatgctaaacaatacaccctttcaccagcagcccatcacatgggcatcaggagatgggggcgagtgatgtgccagccttctagactgg

SEQ ID NO: 14013 - DNA, 487 bp, Homo sapiens
  MAP TO AC009430.1; EXPRESSED IN ADULT LIVER, SIGNAL =   1; EXPRESSED IN LUNG, SIGNAL = 1.2
  unsure 389
  unsure 395
tgttaacggtttccatttactgagaataaagagcaaacttttaaagccacagatttgacattgaaattatttaaaattaaaattcaagaaaatatttagtgataaaaaactatgggattaataatttaaacttcttttttattacaacaaaatgctaagttttcaagcaaaatcctcaggtaatggctgccattccaatccacattaaaacatggccaaatttaccatccaaaaaaggagtcctgacttttaataaattttcatgaactacacctagaaaatgttacagcgtgttaatccagctactcattcatgctgttgccacatttctgttagtgacaccatcatttctacacagaaacacaaactcattcatgctgttgccacantttctngttagcgacaccatcacacttctacacagaaacacattttatttcaaagctaatatcaaattaataactgcaagtgttatattgctctaaaa

SEQ ID NO: 14014 - DNA, 494 bp, Homo sapiens
  MAP TO AC007968.2; EXPRESSED IN ADULT LIVER, SIGNAL = 1.1; EXPRESSED IN HELA, SIGNAL = 1.5
cggacaacacagggtctatgtctgtagagctgaataacaaatctaagtagctttttccatactgagaatttaatggtgtgcaagaaggatgggctctattgaagagggagaaaaggagctcagccagcttgtgaaatgaagaggaataaagaatgatccatttatagatttaggattttaaagctttggagaggtaagtataatattttaacttcacttctgtcaaactttcctcttaaacagaattcctattggaaacttaaaaacaactataacagtcatttatctcaacagctgcaggtacttgaacctcagcttccacagtgtccacagcctcttgaacaatgaaagtggaaattatcagagaaacaaaccatggctgaatgcagttgagtgctctgtaattacatgccagtgttgccatttggctgctggtgtagtctcctgtgggcacaggtgccataaatgctcacacacacccaatcaaatccaca

SEQ ID NO: 14015 - DNA, 452 bp, Homo sapiens; identical to SEQ ID NO: 3303
  MAP TO AL022397.1; EXPRESSED IN PLACENTA, SIGNAL = 0.65; EXPRESSED IN BT474, SIGNAL = 0.6; EXPRESSED IN LUNG, SIGNAL = 1.4; EXPRESSED IN ADULT LIVER, SIGNAL = 0.97

SEQ ID NO: 14016 - DNA, 445 bp, Homo sapiens
  MAP TO AL021395.14; EXPRESSED IN ADULT LIVER, SIGNAL = 1.1
taggccacccactggataacttagggcagagctttggcagcatctctgcttctccaggaagtcagatcctaattttcttttctggtttatggattccctctggaccgtgggggtcattcattgtccctgggtgcctgaagtggcagctctgactcacttccttatttctaatggagggaaagtggatttaataagtctagaaggagggacaccccagtaaacaacatggatttagccacactctaggaaggcttctagatgcacttgggcaaggcgatggttcccagacagcactccacatcagcactggacagcagcttgaggagctggatggggtctgggctccagaatgcagctggaatgagacagctgaggaggattttggagcatggcacccggaagttcataccccagcagagtggccacgtatccactcatgccttca

SEQ ID NO: 14017 - DNA, 460 bp, Homo sapiens
  MAP TO AC007217.2; EXPRESSED IN PLACENTA, SIGNAL = 0.68; EXPRESSED IN ADULT LIVER, SIGNAL = 0.67; EXPRESSED IN LUNG, SIGNAL = 0.62
ccctttcatgacaaaatacaccctcacaaccgaggaatagaaagaacttccttaactttataaagggcatctacaaaatactacagctggtatcacactaaatggtgaaacccaactacgctgctcccaaattctcaacccacagaaactatgaaagataatgtgttttgatcttgatacactaagttttggcctaattttccttataccaatagatgtataaatattaacaataacaacaataataataggaaagggtggggaaagaagaggagaaggagaggcagcagcaggtgctgttgggtgttctggttcttgttgctgtaggcatccatgctgatgggattgataacactagtgggctgcggaccacagtctctgagcccagtagggctccaagccaggacttcagactgtgagatgagggtgatgctacagcccagcccccagaagatgatct

SEQ ID NO: 14018 - DNA, 475 bp, Homo sapiens
  MAP TO AC007556.2; EXPRESSED IN PLACENTA, SIGNAL = 0.71; EXPRESSED IN BT474, SIGNAL = 0.64; EXPRESSED IN HELA, SIGNAL = 1.4; EXPRESSED IN ADULT LIVER, SIGNAL = 0.88
tgtactagagtgtgggagaagactctatatcatttagccttaaatattaatttggtcatagttgttactataaacctactattggatccaaaatcatttcctctgagtctagactataaaagggatcacaaattacattcacaagccgatttaccccatgttttccttctagcaaccaggcctcctggtatgtgccactcagatgaatttcagtgccaagaagatggtatctgcatcccgaacttctgggaatgtgatgggcatccagactgcctctatggatctgatgagcacaatgcctgtgtccccaagacttgcccttcatcatatttccactgtgacaacggaaactgcatccacagggcatggctctgtgatcgggacaatgactgcggggatatgagtgatgagaaggactgccctactcagccctttcgctgtcctagttggcaatggcagtgtcttggccataaca

SEQ ID NO: 14019 - DNA, 476 bp, Homo sapiens
  MAP TO AB016897.1; EXPRESSED IN PLACENTA, SIGNAL = 0.96; EXPRESSED IN BT474, SIGNAL =   1; EXPRESSED IN FETAL LIVER, SIGNAL = 0.84; EXPRESSED IN HELA, SIGNAL = 0.64; EXPRESSED IN ADULT LIVER, SIGNAL = 0.78; EXPRESSED IN HBL100, SIGNAL = 0.82; EXPRESSED IN LUNG, SIGNAL = 0.95
cagtatgccttaagtcactgggtactaaaaataaaaggtctgattggtttgacttttttttgacagtttaattatttttatacgattgagggaaatccactttaaaaggcactaaaaatccagagcttattaggttatatttgtcataaaaggggtactcacggttttaacattctgtgtttaaatgctgtgaacttcatgatgggagtttctttggtttccttcggtttccagttgtttggcccaggaattcagccccatcactgtgaccttaccaacatggatggagtggtcactgtgacgcccagaagtatggacgcagaaacctacgtggaaggccagcgcatctcagaaaccaccatgctgcagagtggcatgaaagtgcagtttggggcgtcccatgtatttaagtttgtggaccccagtcaggatcatgctcttgcaaaaagatctgtggatggaggcctgatggttaa

SEQ ID NO: 14020 - DNA, 487 bp, Homo sapiens
  MAP TO AC007344.2; EXPRESSED IN ADULT LIVER, SIGNAL = 0.74; EXPRESSED IN PLACENTA, SIGNAL = 0.59; EXPRESSED IN LUNG, SIGNAL = 0.64; EXPRESSED IN HELA, SIGNAL = 0.81; EXPRESSED IN FETAL LIVER, SIGNAL = 0.6
tgtaggtgtgagtaggtgctgcagatctgagatctgggtttctggcactctgtttgcatatccatggtatggcagtgtccgctgagtgggacatagctttgagggagttagaaccattggaatggtcccttgccaatttcacacttatcccactcagtcatggcaaagagaagacactactggcactggtaggtgtggcgcactaatgactaacctcccctcttggccccctccttgctctccttcaaataccacttacctttttccccatgtgcatagaaagacttgtagctgtttatctctaagcatgccttctcctgtatctctcgcatcctcagcaacttctccccgtgattcaagatctatttgttgctttgctctcattctcatggcttcaaaaaaaaaaaaagcaccttcctgggcttcattgcctgctagtccccagaacctcagatggaacagtaagtcagggggaagacatagatgc

SEQ ID NO: 14021 - DNA, 464 bp, Homo sapiens
  MAP TO AC000029.14; EXPRESSED IN PLACENTA, SIGNAL = 0.72; EXPRESSED IN HELA, SIGNAL = 1.2; EXPRESSED IN ADULT LIVER, SIGNAL = 0.78
cctcctgacctttgcctattccctctgttctagatgtaggcaaggagaccaagagctgcacctggatgatctgggacatgttctgtggactggagtcaggagggccccaaagtggccccagcaaaggcaacagaggaggtagagcatggtgacacgttgcaaagtgcaaaggcgctggccctgggagaggcaactgagaaagtagaggttgctgagaagacggaaggtacagagtggggcaacatgtcagacaatccctactggaggagagttgtgggcatcagtgggatcatcctgatcatgctcaaggtccttggcgtcatctactttgcctgaagcagctgggctggggccgtccaggaggaggcagagctgctgcttctccaggatcatcatgaacagggacaaagcgtttcctactgggagacccatgggcctgggaccaaggattacattaataaaaa

SEQ ID NO: 14022 - DNA, 479 bp, Homo sapiens
  MAP TO AC005076.2; EXPRESSED IN ADULT LIVER, SIGNAL = 0.65
cggattctcttttgttggatgttgcaaaaacgttttttaaagtattacaaatgttgtaggtttttaaaatttatcagagcaaacagattctttgagatatctaattctaaataatgggtataaatttgtgaaaggcagtttttgaaatctgaactctcattgcagttttacatgaagaacactgtaggcagatacccaaataaatgtgtgtggtatttcaggggattataagggaatacttcatatttgggaataatttttgaaatcctgatctggaatctgttcttgtacagatttgagtatgagcacagtggaagaggattctgacacagtaacagtagaaactgtgaactctgtgactttgactcaggacacagaagggaatctcattcttcactgccctcagaatggtaggagaacttgctgacatataattctgactctctgaatttatgaattccatgtcacttttgacccct

SEQ ID NO: 14023 - DNA, 470 bp, Homo sapiens
  MAP TO AC005520.2; EXPRESSED IN FETAL LIVER, SIGNAL = 0.63; EXPRESSED IN ADULT LIVER, SIGNAL =   1
ggttagattacgctgcttttaatgaaaagtaatttgaaactaaaagaactgagggcagacaatgtcatcctaaaaaaaaattattaaaattgaacaaaggtagacttatgttcctcaacttatgatagggatatgtcccaataaaaccatcattagttgaaaatatcctaagcaaaaaatgcatttaatatacctaacctactgaacatcatagcttagcctagcctacctaaaacatgctcagaacacttatggctgggcaaaatcatctggcaacacagtacaccgtagagtaccagttgtttacccttatggtcattgtcaaaataaacatccactccagctgggcatgattcacggagttgttcagccacatacggtggctgaccaggagctacagcttgttgccgctgcccagcatctcgagagagtgtcatactgatatcgctagcctgggaaaagaccaaaat

SEQ ID NO: 14024 - DNA, 470 bp, Homo sapiens
  MAP TO AC005060.2; EXPRESSED IN ADULT LIVER, SIGNAL = 0.73
gatggaaggcaaataacaaaatgtgaaagttaatccagtgaatattaatacattttggtcgtaggaaaatcgtcacacgaaaatctcaaacttggtttttcgcatctgacttcatgttttacatctaactttagattctggcaataaatacattgtataatccaaggaatacataaaaacaactgcataggcccagtagctacttagccttacttggcagctttataattcaagatttcagaaattttcttacctcagggagaccttcaataaaagaatggatatttgctgcatttgcggcttctttgatctcatctaatggcaccacacggctgttgtcaccataggcgatgttctcagcaatgctgcagttgaagagcacaggctcttgaggaacgattgctatttgggaacggagccactgtacattcaattcttttgcatccacaccatcaaacagctgccaaaag

SEQ ID NO: 14025 - DNA, 476 bp, Homo sapiens
  MAP TO AL096769.7; EXPRESSED IN ADULT LIVER, SIGNAL = 0.83
ttatcaaaattatgctgcctctcataaaaagctgagatgtatttttctctttttctttccttttaaaatatttgtaaaagattgatattatttcttccttaaatgtctgggaaaattaatctcttattccccctgggcctgaaatttctttgtataaggtttggataacaaatattatttttaaaatggctacaagcacattaaaaattgttttccattttttattgtatcagctttgttaatttgtcttcttcaagtaatttatatacttcatcttaattgtcaaagttattggtataattgtttctaatacctataattatgtttttgttgtcaataagaactgtagtgttgtccctcttttcagttataatagcaatttctattctgtcagtctctctcataaacagtctgattcagattttttcaacttcattactctttacagagaaacaatttttgatttgttgcctttt

SEQ ID NO: 14026 - DNA, 475 bp, Homo sapiens
  MAP TO AC007955.3; EXPRESSED IN PLACENTA, SIGNAL =   2; EXPRESSED IN ADULT LIVER, SIGNAL = 1.9; EXPRESSED IN FETAL LIVER, SIGNAL = 1.1; EXPRESSED IN LUNG, SIGNAL = 1.2; EXPRESSED IN HELA, SIGNAL = 0.94
agactggctcctgctttgtctttctgtactctaatttctcaggaggtcagacccaccgctgcctccctcaccacctctggagcctttcatgactccctgtcttgagtggtaaaggccaactcacttttcagctctcagttctgatgtcgctgctccagagatggcctcctgacctcccattccaaaggaggtggcttaataattctccctccatttttctcctgactaacccttcttgcatttatgggtaggccattattgcatttatggatattactttatattatttgtatatttctttatctctctctgtcactagactgtaaatatcacatctgccttgttcatccactgcttccccagcgctttgggagaggcaatgtgcttctcagtcattctttgctgaatgaaaaaatggatgaatgaatacagagttggttcttagagaatcaatagggctttgatggaagacagt

SEQ ID NO: 14027 - DNA, 432 bp, Homo sapiens
  MAP TO AC008278.1; EXPRESSED IN FETAL LIVER, SIGNAL = 0.76; EXPRESSED IN BT474, SIGNAL = 0.74; EXPRESSED IN HELA, SIGNAL = 0.6; EXPRESSED IN ADULT LIVER, SIGNAL = 0.66
tgttgtgacagaccactgacttctttctgtcactagagctttatcacaactttctgtacctatatttagtgtttacttactaccacgtggtttacatctggatagtgtattacaaaatacaaggaataactattgcatgcatacagatttctaactagattctgggcgtcttaagtccacagcttattattctgatttatatttgtattatcccccccttcacactcttttattcaagtacctatacatacatgacattgaaaaaactatgttttcaatttaagctatgtacataccggggaaatgacaaagagttcacttcccatgagatcaaacaccctcacagttcctgtgctttcggcataggccagtagggtacaatcgtaactccatgctacccgtctccactggggtttcgggtctttcggaact

SEQ ID NO: 14028 - DNA, 457 bp, Homo sapiens
  MAP TO AC009491.2; EXPRESSED IN ADULT LIVER, SIGNAL = 0.94
catgagctactggtggcaatcagcccaagtggggttatgggtctagataatagtttggagcaaataaattagagcttgtagcttttcagtataggatggggtattgtctttccagttgagaaggttggcagaggtgaagggctggtacacaaaaacatacctctccaccatgtgaccatcctcatctatcccagtataccactgctctctcaggggcatttgtatcccagttttgggtcttaaacgagctgccaatgtaggggtttctctcgaggcttcacctcctctcttgtctactccgggtggcctagggatatgtttgtcttgtggaggcacaaggactgtgggctcaagagtggggagcatctttccctggtaaggggagggcaccactgggatcactggttccatctcctgcaagggatcttctgatgttgggtcaaacagaacttcagga

SEQ ID NO: 14029 - DNA, 472 bp, Homo sapiens
  MAP TO AC008124.8; EXPRESSED IN ADULT LIVER, SIGNAL = 1.7; EXPRESSED IN LUNG, SIGNAL = 1.1
aggatttttgaggatcgacgtaagaaagaacacggtctccagggcagagagtaaagaaatacacagtgtattgagcacaggctccccaagccccgtcaaaatgtcagtaaaggaattacaaaatgtgtaagcccataaggacaaagagaacagaagaggcgacaagagcagatcagagttatcaataaaagtttagagtttgaaaagtaagtaggtatgttgtaactaatttagcagatgagggataactgaaacctacctttctctagaggcggataactaaaagaaatgggcagttcacatcatagaaccagggcaagtcttagaaccggaggcaccagataccatggaaatggaggtgaagggtaagactgaaccaggaggagtggtgaatgtttacctaagaagtaatgagacccctgttcctgttttctacctgggtcagctggtcagctacctgttccctaccctg

SEQ ID NO: 14030 - DNA, 426 bp, Homo sapiens
  MAP TO AL022067.1; EXPRESSED IN BT474, SIGNAL = 0.95; EXPRESSED IN FETAL LIVER, SIGNAL = 1.1; EXPRESSED IN LUNG, SIGNAL = 1.3; EXPRESSED IN BONE MARROW, SIGNAL = 1.2; EXPRESSED IN PLACENTA, SIGNAL = 7.1; EXPRESSED IN ADULT LIVER, SIGNAL = 1.6; EXPRESSED IN HELA, SIGNAL = 1.2; EXPRESSED IN HBL100, SIGNAL = 1.1
gactccctggtcaccttgcaagatcaacttaacttcctagcatcagtagtccttcaaaattgaagagctttagacttgctaacctctgaaagagggggaagctgtttatttttaggggaagaatgttgttattatgttattttagcggaagaatgttgttattatgttaatcaatcctgaattgtcacagagaaagttgaagaaattcgagattgaatacaacgtagaacagaggagcttcaaaaacaccagaccctggggcctcctcagccaatggatgccctggattctccccttcttaggatctctagcagctctaatattgatactcctctttggaccctgtatctttaacctccttgttaagtttgtctcttccagaatcaaagttgtaaagctacaaatcgttcttcaaatggaacccca

SEQ ID NO: 14031 - DNA, 397 bp, Homo sapiens
  MAP TO AL009175.1; EXPRESSED IN PLACENTA, SIGNAL = 0.89; EXPRESSED IN BT474, SIGNAL = 0.9; EXPRESSED IN ADULT LIVER, SIGNAL = 1.5; EXPRESSED IN FETAL LIVER, SIGNAL = 0.93; EXPRESSED IN LUNG, SIGNAL = 0.94
cagctgaaagtgtgctctgcagcaataaagctttaagcttttttctgacattctaattttgctatttttcctattaatgaaaatagagtttaattttcccttccaagacaaaggaagggttaaatttaaggaaccatgaatattctgaagtagaggatagggagaaaggaagagggaatcagcagtccttaaccctttgatctgtcatttctgtcctctcatctgtgtccccattcttgtttctgtttgtcttcttccttcccagggttgtcagtgaatgtagcaatgcctgactggcactggactgtgttaattgcttgcagaagtgtgctggctgtgggtacgttcttctgtgttcacattttgcaaggagcggaggatggtgatgatgctgttg

SEQ ID NO: 14032 - DNA, 460 bp, Homo sapiens
  MAP TO AC007245.3; EXPRESSED IN HELA, SIGNAL = 0.67; EXPRESSED IN PLACENTA, SIGNAL = 0.69; EXPRESSED IN BT474, SIGNAL = 0.75; EXPRESSED IN HBL100, SIGNAL = 0.81; EXPRESSED IN FETAL LIVER, SIGNAL = 0.58; EXPRESSED IN LUNG, SIGNAL = 0.73; EXPRESSED IN BONE MARROW, SIGNAL = 0.88; EXPRESSED IN ADULT LIVER, SIGNAL = 0.68
tgaactttctgccttacatgaacataaatctcttctgtttgcatctcttcccagagaataattaaggtcagtcctagactgagcttctacttcaagttttattgataaaacagcctgatttttatccctgtcacctacaagagcatttaacacagtctcacactgaatttcttcagcatctgtactgtcttgtgctgggtaaaatatcatatcatggttgggagtgtctattgcatttttctttatgtcttttctagtcaaatcccatccctcagggctgccatcttcaatattagatacagagtaggtctggagagatggattcaagatatctgggtgattggcaggtttggctccaaagccttctatcattccacaattattgattaccttttgaattccatcatgtagaccttggtctctgtcactaagttcttttgccatatctcctccttccatg

SEQ ID NO: 14033 - DNA, 461 bp, Homo sapiens
  MAP TO AC010087.2; EXPRESSED IN ADULT LIVER, SIGNAL =   1
acatatcttttgggtggggggaaaaatttaacccacaacaccctcttttgccctctctagtggttccacagctggttaaggagatgattttcagattgacctgtcttctgtgtcctgcagtgacctttaccctcctgggctaatggaaacttctcccattgggagatctattcttctttttccttatttccttctggtcttgccattggcccaggaggctctggcttccatctaattcactcagggagctgtcactctgcacaatggagataaaggtctcatcactgggcctttggctgctcctacattgggcatatgggtcatctttgcagttgtcacattcctgctgccctctggggaaagcctggtggctcttgctgaggtgctggaagcacctccaggtacaagctgcaacaccctcctccaccctgccaacagcccctgaggacatattggccctg

SEQ ID NO: 14034 - DNA, 448 bp, Homo sapiens
  MAP TO AJ006997.1; EXPRESSED IN LUNG, SIGNAL = 0.64; EXPRESSED IN ADULT LIVER, SIGNAL = 0.88
ccccaggaatatatgcaactactatgtacccacaaaaattaaaaattttaaaaatgacttaaatgtcaggagtagaagtgctctattctctccccttgagtgggaaagtctaatttgacattttaaaattaccgtttatttactgaaaataaaaataaaagttcaaactaaaaaaatagttagattaagtaaaatatttcatattaactaaaataggtacttaccaaataatgcaactgtatattacaatgtgcagttcatagtttttcactgttttaatatttaaatacaagtaaaactgtaagttgtcacaaagaatgatagaattgaagtaagtcaagttctgtttcttcgtgtttacaatgtgctgccattatttattttgatccactgtttaaatagaagaatatgtgttaccatggtagttagagagagaactgcacccacc

SEQ ID NO: 14035 - DNA, 481 bp, Homo sapiens; identical to SEQ ID NO: 847
  MAP TO AP000175.1; EXPRESSED IN ADULT LIVER, SIGNAL = 6.1

SEQ ID NO: 14036 - DNA, 468 bp, Homo sapiens
  MAP TO AL096755.1; EXPRESSED IN PLACENTA, SIGNAL = 1.9; EXPRESSED IN ADULT LIVER, SIGNAL = 0.66
gtcccgtgctaggtctgtggggtcccagaggggtgggggggcggtcctcatctctagaagcttataccccagcaaagtggttctccagctccacctcacctgggaatcatcttgggagcctgtgaaagatgaagattccggggcttgccacccattcatgctaggaaaggccagcatccgccagctcatgtctccacccggcacacactgagctgggcaggaatgacaaggatataggcacaggagacccagtcccagcccagggagcgctcagacagacggggcgtcttggaggtgcatagacatttctgcctggatgccactccagggtggatgtgctcgtcccctactgccactctgccccgtgttccagcagccgagtaacttcgggaaatcccagtcagtgctgtcagaaacgcaacatgcatgccctttactgtcctgtttagaaaatgagcacctgtgtcc

SEQ ID NO: 14037 - DNA, 484 bp, Homo sapiens
  MAP TO AP000159.1; EXPRESSED IN ADULT LIVER, SIGNAL = 0.67
tttccctaattggtaagttggcaatttatttatatgttcccaaagacagcttaaagtgaattcatgtatttatttctaagtaaaacttctctgttgctgagggaaaacccacccatctgggccaaaataacacgccgccttggcaggaaaataaacctgctgaaaatcgttagagcactttctccctcacctgcctgataggctctgctgcacagacaaagagcctgttctccgataaaacaaggcagctaaggggcaggtctgggctttaaatcagccctctgagggggtaggctgcatcgctgggccccacgtccataccaagttgtgctcctgtgcaccgcagaatggctcgtacgaggccgtggggaaccaggatggcaacaacaaaaaatgggttctccgcctccaggagaggcaaggcaagacctggtgacagcagccttgtctgcattctgtaattggcagcctcagacatgtgcct

SEQ ID NO: 14038 - DNA, 386 bp, Homo sapiens
  MAP TO AC010876.1; EXPRESSED IN LUNG, SIGNAL = 0.95; EXPRESSED IN ADULT LIVER, SIGNAL = 0.9; EXPRESSED IN HELA, SIGNAL = 1.1
ttggttggatgaaaaatggtctttgatcagttgatattttcccaggcatcaatttcctcatttgttaaggtgataaaatagatgatctatcacatatgttccactcttaaaattttgattctaaaaatcttggtgtttagcattgtgtctttctgctttattgaattctcaatcactaggcagaatttgaagaatcttcctcagtaaaattacaaatacctgcattgctttctgagcaatcagagcctgttaactcttggacaagttcattgtttcctgtttgacgaagaacattcagaaatgcagagaaccagttttctttctgcacaatcctttttagtagctctcttacacctgattcatttccattgttttctgcagcagca

SEQ ID NO: 14039 - DNA, 470 bp, Homo sapiens
  MAP TO AF130342.1; EXPRESSED IN ADULT LIVER, SIGNAL = 0.87
gcttacatgctggtgtggcaaacaggcaataatcagataattaatacatgtatagcatagtagatactgataaatatcaagaaaaaagtgaatcagggaagggggattaaaaatgctgagaagggggatactaatattttaagtatattagaattggagcaaagacctgaaaaaggaagggtatgagtaatatagccatctaaaggacaatcactccagacaagtgctgtccaacagactggccatgagtctcatgtaaacaccacattggacaacacaggtgtgaaaattctccatcatcgcagaaagttctaatggacagtgctgctcccaacagaaagaatggcaaatacacaggtcctgaagaggcggacaacagaagaagtaacaaggaggtcagtatacctgtaactgggtacaagtgggagagggaaataggagacagaaagtcaatgaggggccagagtatg

SEQ ID NO: 14040 - DNA, 465 bp, Homo sapiens
  MAP TO AC010879.1; EXPRESSED IN ADULT LIVER, SIGNAL = 0.9
ttgaagtggccatttgtttgagaagggattcaacttccacaagaaaaaaatttttggatcagaagcgaaaggaaaagaatgataataaaacaataagatggtcatgttgcatgaaggtaataaaaggaaaaaacatacctgataacataaagtaaataccgtaaagtggaattaaccaggaactgtaataacgggattcaaatccatgagtcccatcaaaataagaagtggaactttcatgtttcctcttgcttagtcattcacatgatgaaatcacttacctagtattcccagacggtagttaatggtgataacgatgacgttcccatagctggccaaaatgctgccatcaatcatgttaccggttccctccatgtaagatcccccatggatatagaccataacaggcttcttactgttctgttcatgaatatctggaaaaaaagccaagtaaggaaacgcagt

SEQ ID NO: 14041 - DNA, 364 bp, Homo sapiens
  MAP TO AC009298.1; EXPRESSED IN BONE MARROW, SIGNAL = 0.73; EXPRESSED IN ADULT LIVER, SIGNAL = 0.7
cttgggaagagctgaaaaggataggggtatagtttttggtgttttttatagtgttttttcttaaagaatattaaatttagtcattactttcatatcagtgaaatacatatctagcaaaaaggtcacgtttttgcttctaaaaagttatttcatattgaacatgagtactgccaaagagtgtctgggatgataattcttttctgtgttcaacaccataggtatctatgccagcagctcatgcaacatcatctgctcccaccgtaactctagtacagctgcccaatgggcagacagttcaagtccatggagtcattcaggcggcccagccatcagttattcagtctccacaagtccaaacagttca

SEQ ID NO: 14042 - DNA, 381 bp, Homo sapiens
  MAP TO AC009299.1; EXPRESSED IN BONE MARROW, SIGNAL = 0.72; EXPRESSED IN FETAL LIVER, SIGNAL = 0.68; EXPRESSED IN ADULT LIVER, SIGNAL = 0.68
ttaaggtgggatgtctcattaagataattagtaattatgtctttcaatttaatctatatagtaccatatacaacaaagagaaaaaaaccaacaattacacatgtaatacattacagaacttacacagcatgtacacattcaaacatacgtggatgaggggtaaattacagatgctacacacttaataggcattcaggaatattttcacattcaaaaggaaatcaatttcaatcaagcaaatcaatattactgtaaattaaattaaatcttaccagttgcagtgtctggtatattaagtttgcttaagtggtctttctgtgcttttgctagcatgcatattttatgaaattcttctttcagatcccagaaagtcttctctat

SEQ ID NO: 14043 - DNA, 467 bp, Homo sapiens
  MAP TO AL034424.9; EXPRESSED IN PLACENTA, SIGNAL = 0.7; EXPRESSED IN ADULT LIVER, SIGNAL = 0.87
tcagattttctacttcttcttcatccaaaattggtaatttacctgttctagaaaactctccatgtcaccatgggttaattttcccagaagagagaattgggagcactttgaaaatatttactctatgtatacattttttgaaggaaaacatccagtatttaaaaaaattgtactgtggttctgatacgttcatgtattttggaagacagcaatggcaactgtggcccccagtgaaggtcccttggcgggggaagatttctgaatgtgtgttgggggaggggtgctcccctcttccccagaaggaccctcaccagctctgccaggaccggcaggaagatgatgatggtcgccgtgttgctggcaaactcagtgaagaaggcgatgaccacagtgatgagcagcacagccagggcggggggcacattctccagggggtgcagctgcccaccaatccatacagacagccc

SEQ ID NO: 14044 - DNA, 470 bp, Homo sapiens
  MAP TO AF064863.1; EXPRESSED IN LUNG, SIGNAL =   1; EXPRESSED IN BONE MARROW, SIGNAL =   1; EXPRESSED IN HBL100, SIGNAL =   1; EXPRESSED IN PLACENTA, SIGNAL = 0.91; EXPRESSED IN ADULT LIVER, SIGNAL =   1
cgaggttccatcctagtcccaagttttgttctatgaaagtctctgtctgggtttcttttcatcctctaaaggacacgtttttctcttcattttacgagttgattttcctttgtgctgtttcatcctctactacttgacctcatgaaggaaagacggaacccagagaactaggtattgcccttcattgtgtctgagaccccgaataataaattagagcagaaatgtatcattgtctttcttctctcctccttcccctcccttgtgctccatgttccccagtctcatcaagcaattctacctgagaggccttaagatctgatttgaacaccacggccttgatgactttattagcaggcggttcaaggaccacactgggaggaaagaaaaacaaaacacaacagaaaattaaaataaagtaaaataataccattgctccagaattcattgtatggcaaacacagaaagcacaa

SEQ ID NO: 14045 - DNA, 455 bp, Homo sapiens
  MAP TO AC009492.2; EXPRESSED IN ADULT LIVER, SIGNAL =  13; EXPRESSED IN FETAL LIVER, SIGNAL =   1; EXPRESSED IN HBL100, SIGNAL = 0.98
attgggcagggtgtcagtagactgaagcacacaacatccagcccagaacaggccacatttggtagccattggctaatgaatgaatggatgaatgagtgaacttaggtatgaatcccagcccatcaactaaccagtcgtgtgcccttagataaactacttctattttctggacctcagagattatctagttcaacagaggaaaccagccttagcatctagctcagatactcctcttactgtcccatcagcctggagtctgtatattcctggggggctgtcttgacatttcctttttctgaaaagaccatttgaaaccattcctgttctacatctacatcttgggctggatgaaccttgaacatgcatctctcaattccaacttgagcccaccgaacagcttaactgaaattttctctgggttccagtgctccaagtccagaggcttccatatctgc

SEQ ID NO: 14046 - DNA, 422 bp, Homo sapiens
  MAP TO AL030996.1; EXPRESSED IN BT474, SIGNAL = 0.96; EXPRESSED IN FETAL LIVER, SIGNAL = 0.95; EXPRESSED IN ADULT LIVER, SIGNAL = 1.2; EXPRESSED IN LUNG, SIGNAL =   1; EXPRESSED IN BONE MARROW, SIGNAL = 1.1; EXPRESSED IN HELA, SIGNAL = 1.3; EXPRESSED IN HBL100, SIGNAL = 1.1
tgtggaggaatgtgatggagaagggtgagtatcaattttgcggcgtttttgttctgttaagacaaaaagaaatagtcagaataaggtacatttctagttttccaaacacttaaaaaaaaacaccaacttgtatgacaagttcccctagcaaaacccctatataacttaccaaaacaaggagacaataaccaactatacattaaaataacaaaacgtaagaacgtataaagaaaggtaaacttgcccctttcaggctctggaatatctgatctgggaacaggtgatttcaaggacccagaaactggtgttttttctcctcctttaacattttcctttgatttcatttcctttgctatatctctttctctggatggctccttctctctttccctttcttgagttgattttgattctgcgttggg

SEQ ID NO: 14047 - DNA, 379 bp, Homo sapiens
  MAP TO AL031585.1; EXPRESSED IN PLACENTA, SIGNAL =  19; EXPRESSED IN ADULT LIVER, SIGNAL = 2.7; EXPRESSED IN BT474, SIGNAL =  15; EXPRESSED IN FETAL LIVER, SIGNAL =   3; EXPRESSED IN LUNG, SIGNAL = 4.2; EXPRESSED IN HBL100, SIGNAL =   5; EXPRESSED IN HELA, SIGNAL =  10
ctcctcgatttgctgagaccagtacttgtccagctcctctcggttcttccgagcaagcttgtcatattgggcccgggagtctgccatgttcttggcaaggtctgagatttgggggcatctacctccacggtcaacccagagctggcaatctgggcttgtaggccttttgcttcctcttcgttgttcttcttcatgaagagcagctccttcttgagagcctcgatctctgtctccagctacagccgagtgacatttgtgccatcaattatcttgcagagcccatggatgtcgctctccacagactggtgcatggccagctctgtctcatacttaactctaaagtcatcagcagcaagacgggcattgtcgatctgtcaaa

SEQ ID NO: 14048 - DNA, 491 bp, Homo sapiens
  MAP TO AL035106.25; EXPRESSED IN BONE MARROW, SIGNAL = 1.2; EXPRESSED IN ADULT LIVER, SIGNAL = 0.97
gtttctttgccttaccatgaacatattagaattaagtagcacagggttttaaaagtaggacttttttttgcaaaaatatggctttccaatttctgtagggaaacagaaatccggctgtacttttgcctggcgacatttgattggaacacagtcacagcttaccctttagatggatgtctgctctccagtttgccacagtccccacccttcccttttgtactactcctggccagcttcactcagtcactttccttgcatggcttctgttggcattggtgtttgtagcccctggtgtagacgtcttgggcacctctggctgtgggatctgaaatactgataatcccgataatgatgctgctgctgctgatgatgatgatagcaaccccacttccagtcagagctgtgtttttggcattgttcttagttcttgatccacagcctctccgcaggtctttgtcactacagagtactgctgtcgttatgcccatttt

SEQ ID NO: 14049 - DNA, 455 bp, Homo sapiens
  MAP TO AL035689.17; EXPRESSED IN FETAL LIVER, SIGNAL = 0.87; EXPRESSED IN ADULT LIVER, SIGNAL = 0.99
gaagagggtgtctgtgctgcaaagtcaagtctagcacactgccgaagttctctgaactctcaccactcacagcaaactggaaaccactataggaaccaactcgtctcttgatcctgatatgggagtcccagaaagaaagccaaaaagtgaaaattccttggttctctgatgggaagcacacctcaagcactgtctccagatacttatctctttcctgcatttagtttctaaccagagaaatcagaaaaggaaaggtagcccatggctactatttaatgtgtcatttgtatgtttggttttattttgattcatgtcattctgctttcacaggaccctctaactgctccaaaccctccccgggagaccagttggaaagtagccatatcttaactcttctatgtgactcttcaaaagtaagggtgattttaaaggacatttctgctgacagattctca

SEQ ID NO: 14050 - DNA, 488 bp, Homo sapiens
  MAP TO AL035662.21; EXPRESSED IN BT474, SIGNAL = 1.4; EXPRESSED IN ADULT LIVER, SIGNAL = 0.9
tctccaaaatctctcggcaggggtgagcttttttgttgtttttttccctgacaaatgcgggagatggggggactaatattcacccagggcaagcagttggtcattcagtggccatgtacccacttcctacttatgccaggcccttgggaggcactgaggacgtgcaaataagctgaaccagaagctagacattcctggattcaaatcttagcttaaccttgttctcactgtgtgaccttgagcaagttacttaacctctctgaagccaggtctctacgtttgtgaaacagttccaacctcatagggtagctctatgataagaatgaaatgagatatggcgggctgaacagtgtccagcaccacagccatgaaactggccgaggtcagggagtcataatgggccttgaatgccatctggagaagcgggaccttcatgtcgagggaggagtaaacagtaactactatctgatcatgtttatttctgctca

SEQ ID NO: 14051 - DNA, 461 bp, Homo sapiens
  MAP TO AC007055.3; EXPRESSED IN PLACENTA, SIGNAL = 0.69; EXPRESSED IN BT474, SIGNAL = 0.74; EXPRESSED IN BONE MARROW, SIGNAL = 0.66; EXPRESSED IN HBL100, SIGNAL = 0.9; EXPRESSED IN FETAL LIVER, SIGNAL = 0.62; EXPRESSED IN ADULT LIVER, SIGNAL = 1.1
tggataatgaggatcttactccttgtccagcattcccatcttcaaaagcatctcatgcacatgaatactacgtacttaccattctcaagtacaacatccacagccacagttgtcaggtctttagtacaagcagcctgaatgtcctcagttggggcaatgaatgtgctgagtccagtcattttgttgacataaaccattcttcccagggctacatcgaaatgccgctgccaatctgaacaacacgtgtttgactcttcagtttcagaacaagctcttgctttagattcctcactctgaaaacaaattccattttggtcacctgtggcatcttctaccggattcattaacattccactgggagagtcaagacttcctatctgttgttctgaggctctgataagaacatctgaatctttaccggtaactttagaattattatagggcaataccaaaggagtttc

SEQ ID NO: 14052 - DNA, 460 bp, Homo sapiens
  MAP TO AC006979.2; EXPRESSED IN PLACENTA, SIGNAL = 0.93; EXPRESSED IN LUNG, SIGNAL = 0.65; EXPRESSED IN ADULT LIVER, SIGNAL = 0.66
cagcattggtgccagttaagtagtctctgctgacaaatggcaggcttcatgagacatagctgaaggccctgaaacatcaggcattcgcgggtcttgccctgtgtatccaaagacatcagcagtagaaggttggctttaaagagagaatcaggggcagcagaatgttggcagatgtgggtggcattgactgaaactatcagcaggaaaataacaggcactactgagtcaccaaaagaactagttggtggagaacatgtgaaatcagacataaaaaatcaatttaaggagaaagttggtatgcccttggaagtggtggtgacagagccagagatgttctcttctgcaactttttttgtgacattatttttaacattagtctgggacaacctagggggaaaaaagtctacctgttgtattgtatatttgtcgtatacattgagaagtcatgttttaacttttt

SEQ ID NO: 14053 - DNA, 1967 bp, Homo sapiens
  MAP TO AL031276.1; EXPRESSED IN BT474, SIGNAL = 1.1; EXPRESSED IN ADULT LIVER, SIGNAL = 1.1; EXPRESSED IN LUNG, SIGNAL =   2; EXPRESSED IN BONE MARROW, SIGNAL =   1; EXPRESSED IN PLACENTA, SIGNAL = 1.1
ctcaaagcttcagtgagggctgcatcttccattctgacaaacacagattcaaagtagccaatatcactgatgatattttcatagcctacagaattcccaatgctgacaacatactggtttttaacgttatcttgtgtcaaatccataagctgtaaacagccaagagaaccattcatgtcaaacgtgctacccattgagacattaactttggtgccacctatacttgcagttgcaatttttctgccatatttctctctatttgccatgcccactgtccgaagaagcagtaagttcagcctatggatttccactgcaacctcagtgttttgttcatatgtagactggtaagttccttgttctctgaagcttctttcaaaatcagtcattaaaggttgaggacttaaatcatctttttccttgggaaaggatttttgaagaaaaccaattagctccacaatcgtctctggattgaggataatatctaaattattcacctgtagggaaatcacctgaagagtactgtctaaattcatcgatgggcactctgaactcacaaactgatattccaacttaataagggactcttgctctttggtaagaattttgtcaagtgaaacactagtagctgatcggtcgttcagtgtagctccatcagttaagtgggccacattcggtccagagacaggagactgggccctgctatcccgaaggcttcccgttggaatatcaaagctcaagttcttatgtgaagccatcaaaaggtcaaaatcagcaccatatgtctgcatggtatccaccaggagcaaaccatgaacagttagggagacttcagcatcataaggcctcttcacaaagtgagcattggtaccaaacaccttgagcacagaaatgtaccggccattgctctcaacaccaagctgcatacagttcactttaaattccgccaggaggagctgcgactccaccagaacctcgcgggtatgctgctccaacaacacaatgctctgggttaaattcattacggagtcttgcaaacttccccgctgctcctcctggggaaaaatcttttctttaatctgagtgtcagaagttttcatttctggggtggtgaggagagcaaagcaattctttagtgcagatattttatcttcattaatgtggatttttaagtctggtaagttgcctgagagcacggctcctggatatttgggatctgaagtataaatcaatcgacgctctaactgtaggtgaacgttgaacttctctaccacatgtgttggtcccacgtcaatatcctggacatgcttccaattgtctttcactcgtccaaccatgatctggaggtccataaatgacagcgagtacctctcatacatctttgtgctcattaaatgtgcttgaagctgttcttcactgaactcaactccagaaaagggaggtgttttctctccgttgctgctgcttgactcgggaggtggggtgttaggaggtgtggccaggggggtcttatattcatcatcactaaactgggtctcttcagatgctgacccatccctacttttcctcctggagttatctgaagataaaaaaaagaagattcaaatatatgtctgctatttccctcctctttcccttaatgtaataattatgaaaggtagagaatcaaccaaccccagtttgtttaagaaaactgaggaaaactcttaagcataatatctttgtttaccattttctaagtgtgaatttacctataaatttggaaatcaaaacacaaatataaaaaagtatggacacgaaaaaagctggaggccccctgacatgagcgccacctgctgacccaatgctgcctccccacttctcccctgccttgccatgggcgtgagctgctttcaccaaccctttcttacgtccctctctagagtcttttatttcttttcctttttctgtgtgttcatttgtttccccca

SEQ ID NO: 14054 - DNA, 477 bp, Homo sapiens
  MAP TO AC012113.1; EXPRESSED IN HELA, SIGNAL = 0.95; EXPRESSED IN ADULT LIVER, SIGNAL = 1.1; EXPRESSED IN BT474, SIGNAL = 0.98; EXPRESSED IN FETAL LIVER, SIGNAL = 1.1; EXPRESSED IN LUNG, SIGNAL =   1
aaaccccataattgcttgtttgtttgttttacttaaatgatcctgacttcctagcataacacccttgaattctgaaaatatctcgaacagcagttcacctggcacacatgcaagatttcacgttgtttgcaggaagcgatccaagccaaggtttcaggggaaaaaaaatcagttcaggggatggacaaaaatgaccagctgctccctggcatagaaggctctgcagaagcccagcctactctatggagctcaaccacagtgcttctccaccttctcttctccctcagttctgctgcaagccactagaaacctacacactccaggttctgctgaatgatgggcaaagggggtgggcgggaagccaaatcaacaagagtttcttttactacatcctcatgcttaagaggaaacaaggtgactttctttactagcatgacatactgaccatactcaacaggcagggggattttatgtggt

SEQ ID NO: 14055 - DNA, 471 bp, Homo sapiens
  MAP TO AL049756.16; EXPRESSED IN FETAL LIVER, SIGNAL =   1; EXPRESSED IN ADULT LIVER, SIGNAL = 1.4
cttgctggtgatgtagcctctttttagtgacttctgaataataattttccattgagaaatccttgcatccatgatggagggttttcaccttccctgaagcatttatcacagtttgattttggtccttgaagatgagaaactcttgtctctccttgtttaatctctccatctgctcagcatctcgggcagggccatacacagagttggcagtgggttatttactgttgcaagaataaatccttccccacctatggaacccccatgtgctctcagagtcgggattttagctgtatggcactaccgttctggatgccaagtgtgagtaacaggatttagactaagagatggttatgatgaaaaccctgaccagctactcagagaagaacctactgatgtctcagctgaagtgccaggttggccacgtttttacagctggggagatcctttcctagtttggagtctgagaagggc

SEQ ID NO: 14056 - DNA, 348 bp, Homo sapiens
  MAP TO AC012072.1; EXPRESSED IN ADULT LIVER, SIGNAL = 0.97; EXPRESSED IN FETAL LIVER, SIGNAL = 1.2; EXPRESSED IN HELA, SIGNAL = 0.96
caatagaaaaacgggcaaaagactagaacaggcacttcatcaaaagagaaaagctgaatggctactcaataggtatgtcaggatttatttcaattattctacatacgctgtaatattcttttgtataatcagtacttaacaaaacagttttttaacatacgtttttaaattaaaaaaaaaaaaaaagaaacaaagttgatctctgtaaataaagccagtacctttaacgtcaggcctaatgtacgatagcagactgagctcccctggtttctcaagcagtgccctggctgctccttctaagcccaactgtcttgctctctgggctttagtccctttgcttccagtttt

SEQ ID NO: 14057 - DNA, 426 bp, Homo sapiens
  MAP TO AC009497.2; EXPRESSED IN LUNG, SIGNAL =  15; EXPRESSED IN ADULT LIVER, SIGNAL = 0.92; EXPRESSED IN BT474, SIGNAL = 1.3
aattcccaagcctaaagaagcttgagagcaatatcaatgtctgagtctattgtgaaaccaattaaatatttaacatatgtgtcctatggcttagggtggattcttataccaaaaagtggctcatgccactttgttttgagaagcagcaagatttatgaatacagggacaacgggagcatggcagccagggttggggggtagccaagacacagtcatggaagctgtagctgagtcaagctgcagaagggacatcatacatcactcaagatctcctgggcgtttcggacgcgtataacattgggttcttccagaagagacgtccactggtggaaatagtgtcgatactccaggtcactgaggatgtactggcaccttttagccagcacgtgattcatcatgtcattggggatatgaacatttgctttg

SEQ ID NO: 14058 - DNA, 484 bp, Homo sapiens
  MAP TO AL096708.11; EXPRESSED IN ADULT LIVER, SIGNAL = 1.7; EXPRESSED IN LUNG, SIGNAL = 1.1
accttggcaggttgcttaacctctctgagtctcagttttgtgaactgtaagatggagattgtcataaaacctacttccacaggctgggagaagataaaatgagatgctgtgtgtaaagtggccatggggtacagtaaggatgtggatgccagctattattattactcttgtagaaacataaagccaggggaaggtgtgcccctgcccccggggggcagtcagtatgggagaggacactggggacctggaagcagcccccgggagggtaaggagatgagaggagcagccgtctggaacctgtggtcacggctgttgctgctgcacagggcacacgtgaggaaatcgcgtggaatcagactatagcagaagagatgggctcaggcgtgaaagccaatgaatgccagggctctggacttttctacagtgagatgggaatttttcaaagctgtgataggcagacttttcctggaaagggccagatagt

SEQ ID NO: 14059 - DNA, 474 bp, Homo sapiens
  MAP TO AC006348.2; EXPRESSED IN LUNG, SIGNAL = 2.7; EXPRESSED IN ADULT LIVER, SIGNAL = 0.99
gcatcagatactggatgagaagacatctcaggactatcctaaccaattttacttttttatttttcagacctgcacagagtgataattttttaaatttgtctaagtaaggctaaaatatgtctttcaataaatacaaaatttctagtaaagaattatgttgtttaattggcacattacttttttagtgagacaaaaaataaaaagctccttatagcataaaatgacctgatttcagtgaaagatcacacatgcaaacagagacacatggaaatgaaactctgtctttattccagtcacaaaatttggggtagggatttgtttgtatgtgtgaagtagtttgtctttagtcaaaatagtaatagtcagtatcatactccacgtaatcactggattttggagaaaattcatgtttatataggaaatcagattctccattggatgatggagttgacaccacagaggatattcaaaggc

SEQ ID NO: 14060 - DNA, 454 bp, Homo sapiens
  MAP TO AL022100.13; EXPRESSED IN BT474, SIGNAL = 1.2; EXPRESSED IN ADULT LIVER, SIGNAL = 0.97
aaccttcacatcagcatggagcagccctggctctgaactcctacatccctagtttctctgtaattttcctggaaggcagcttggaagagttaagtctaatagaaacatttaaaagattcaaaatacataagggatggggaagatgaaagttctacatagatctaaccatccgaaatcaggtgtcagttcagcattgctggtttcctctctcctctcaccacaggcctgcttactcccaatggctaccctacctgttacaagctgcaggcagcatcagcagcttgtttttttttttttcttccttcttgttattattatattttaaggttggcttgttgtgagctggcactggataaggtgtgaccttgttacaggtggtgtagaacttaggagaatttgatgccggctccgaaagcccctgctcaaagctggctccttgggactgttttctcca

SEQ ID NO: 14061 - DNA, 471 bp, Homo sapiens; identical to SEQ ID NO: 907
  MAP TO AL049834.2; EXPRESSED IN PLACENTA, SIGNAL = 1.2; EXPRESSED IN HBL100, SIGNAL = 0.83; EXPRESSED IN LUNG, SIGNAL =   1; EXPRESSED IN ADULT LIVER, SIGNAL = 0.75

SEQ ID NO: 14062 - DNA, 491 bp, Homo sapiens
  MAP TO AF179296.1; EXPRESSED IN ADULT LIVER, SIGNAL = 0.91
tgacaattacgagtgagcacaagtagaaccacagagaatgtgatgtctatgagcctaggctgtgccacacagaaatagagtgctgagaagcagtccaggagggcattttatcaaggccactgccttcctctaggaaaacttctcactcaggggtccccaggagtctccccttaacccccccaccacctgaggcaattaacatatcaaacacatcattcataattatctgtttgtgtggctgtttcccccactaatctgtaagctccatgggcagagacaggtttttttttttttttttttttttccatttctagatcctcagtgcattgcacatggactctcgatcctaaagggtccttggtggcttcaagttggttctgcccactctctacctcttctgcaaaggagtaaaggagtgctctgcaagacccagagacaactgttctgtagtttcatacaagaatggacttcgggagggtaggttaagtctg

SEQ ID NO: 14063 - DNA, 400 bp, Homo sapiens
  MAP TO AP000427.1; EXPRESSED IN ADULT LIVER, SIGNAL = 0.91
tgtgtcataattgcctcttggtttatttcacaataatgatcaagtttaaaaaatctattaccaattaccccacaactcagaaaaatcaaaaatctaaaataataaaaattttaggaaaagcaacaaaaaatgtaagctactttagatttattatggtcacagctcagttatttttttggagacattaaagtaaaacaacaattaccaattagcccacctcccataatgctggttttctattgctgtgattactatacccaacagcactattaccagtttggccatgccgacacctctgatgtggacacaaactggagcccaccctgatagagtatgggcatctgtcatgcagatgatgtgtgtcttgttggaatactcaacatcacatttggcttcagct

SEQ ID NO: 14064 - DNA, 475 bp, Homo sapiens
  MAP TO AC007603.1; EXPRESSED IN ADULT LIVER, SIGNAL = 0.74
taagtagccctcttggggtgaataagaagttggcagaaaaggtttatatggcttactgcaaaaaaaaaaaaaagacaaaattacacttcagaagaaattatttcccatagttcctacattagtttccacagttctggtacactcaggggtgattaaatcctcagttaaactggattttaaaatctcaaacaatggcctttctcaaggtttgtttttttttttttcagaagctctaactctattttgtaatgcctatttctatttctgcctagcttgtttgttcaactacttttgcagagttgacaactgaacgcacagcgctggctcagggagaggcaggaaactcaccagcagaaaagggcttccacacaatgcatctgatttgcccaactgaacgaaactcaacccgaaagtaaataggtaaatgccggtagtaattggcagttataaaaaacaagcatcactggttttgttt

SEQ ID NO: 14065 - DNA, 457 bp, Homo sapiens
  MAP TO AC004624.6; EXPRESSED IN LUNG, SIGNAL = 0.77; EXPRESSED IN HELA, SIGNAL = 0.65; EXPRESSED IN ADULT LIVER, SIGNAL = 0.71; EXPRESSED IN PLACENTA, SIGNAL = 0.63; EXPRESSED IN BONE MARROW, SIGNAL = 0.65
ctggaaacctctcccttcagcccgcggttggcgtggccagcatctgggctctgccctggagctggcttcccttttactgaaggtgcgtcttctggcgcactcctgttcttgggactctgcagcagacgggtccacaggaagccgtggagttgctagggcgggtgtgttagaggaaaggggagtgcgtggggagagaattggtgctttttccttggactggaggaagccctgaaaatggatgccgacgaggtggcttttgcctaagcccacgcacaggggctggtgtgtctgcagcttcacgccaccatggaatatgtcctctttgtgctgtacttctctttcttcctgtgtctctgtgccctggtgtgcctgtacttctctggctgccaggagatgacctataagcatgaaggtaggcagctggttcggggttttgcgttttgaggttctctggcgg

SEQ ID NO: 14066 - DNA, 442 bp, Homo sapiens
  MAP TO AF064861.1; EXPRESSED IN BT474, SIGNAL = 0.92; EXPRESSED IN ADULT LIVER, SIGNAL = 1.1; EXPRESSED IN FETAL LIVER, SIGNAL = 0.93; EXPRESSED IN BONE MARROW, SIGNAL = 1.1; EXPRESSED IN LUNG, SIGNAL = 1.5; EXPRESSED IN HELA, SIGNAL =   1; EXPRESSED IN PLACENTA, SIGNAL = 1.4
caagacatagcctgatccaaagagttcttccatgagactgcttttcttatctctgaaagttgtatccttcacttttattctggaagacttaccaaatgagggctcatacccactgtcagaatgctctagctccatttcctctctgttactgagatgcttgcctgtactatgactgtacctcatgttgccggcattggctggcccccctgaagcaggaagcccatgatgcaggttttcagttgcttctgtgaatgagtaatgtcttctttgtctgagggggcctttcgtgtagggagcagtgcctttgccaagtgtgtcatccacaccatttctctgcatgcttcttttaaacttttctcttactagaacatcttcttgattgctttctctttcaggatgaataacttcaattatttttggtggtagttcttgctcttctttc

SEQ ID NO: 14067 - DNA, 467 bp, Homo sapiens
  MAP TO AC007347.2; EXPRESSED IN LUNG, SIGNAL = 1.1; EXPRESSED IN HBL100, SIGNAL = 0.99; EXPRESSED IN ADULT LIVER, SIGNAL =   1
ttcaccttacccaaatcatggaataatcatctccttttaaaaaaggaaagaaaagaaaagtcagagtttaaaagaaaaatccaactatttgtgaagaaatcctggtgctaatgagctttctgcatctgcctcaagtcttttccccaggctagcccagtctccctctctagacattttcaatcagcctcgcccgcaaattgtactaagcagctgaataatgcagggtagaaatttcaaatataaatattatttcctatttaggaaatttggaaaagaaagcaggaaaaaaataactcaccccctggtcccccaccatgacactacctctgtgaacattttggtagatattctttgggctctgacacgtacacacatgttgacttttatcatcatcatcatcatcatcattattctagtactctctttttcactttgctaaagtttgaatcatcttttgtaatggatgc

SEQ ID NO: 14068 - DNA, 373 bp, Homo sapiens
  MAP TO AL021579.1; EXPRESSED IN HBL100, SIGNAL = 1.2; EXPRESSED IN HELA, SIGNAL = 0.99; EXPRESSED IN PLACENTA, SIGNAL = 1.3; EXPRESSED IN ADULT LIVER, SIGNAL = 1.1; EXPRESSED IN BT474, SIGNAL = 1.2; EXPRESSED IN LUNG, SIGNAL = 1.1; EXPRESSED IN BONE MARROW, SIGNAL = 0.96
gatatttttgtggggtttttccttctccatgcctgatacccagtgttagtcagaaatagagttgtcataactcatctgataccttaatgtttcagcatccacctccagatcgacaggcagtacctggaagaccaggcccctttccctccaagcagcaagtagctgatgaagatgaaatatggaagcaaagacgaagacaacaatcagaaatttctgcagcagtagaacgtgctcgtaaacggcgtgaagaggaagagcgaagaatggaagaacaaaggaaggcagcttgtgcggagaaactgaaacgattggatgagaagcttggcatcctggaaaaacaaccatctccagaggaaattagggaaagggagcg

SEQ ID NO: 14069 - DNA, 449 bp, Homo sapiens
  MAP TO AC010000.1; EXPRESSED IN LUNG, SIGNAL = 3.4; EXPRESSED IN ADULT LIVER, SIGNAL = 0.9
tcccttacagggtaggtcccttacaggtccttgtaggaccttactggaccttacaggtaatgaggtcccttacaggacttcagggataagactttgatgggagacacttgaggaatcactgcattgtggctactgaacagactggcagaaagtgggtgtgggtagacggttagatgatttacattcaggatgcagtagagcggaggagacctgatgattggctgaaacctggggagggaagttttctggtggagaagctaagggagtcaagagataatctgttttgggaaataaaattggggagactcagtaacagattggctatggagtatgagggagaggaagagttcaaggatgaccagattttccagtctggcaaccgaatccataacggtcacatctactgaatggggagtaacaaaaaaaagagtcaagtttgggatgtgggt

SEQ ID NO: 14070 - DNA, 487 bp, Homo sapiens
  MAP TO AP000162.1; EXPRESSED IN BONE MARROW, SIGNAL =   1; EXPRESSED IN FETAL LIVER, SIGNAL = 0.77; EXPRESSED IN ADULT LIVER, SIGNAL = 0.86; EXPRESSED IN PLACENTA, SIGNAL = 0.81; EXPRESSED IN LUNG, SIGNAL = 1.3
gccagacttacagaattggggtctgtatcttaacaagaaccccagatgatttgtgtacaaatgaaagttcgaaagctgtgctctggacagtgttctcaaagcaactttctgaagccgtgtggaaaactgactctgtgtgggtcccgtatccctgtggcatccagacctggcctctcttcatttcattattattggccaatatttctttcagccatttcatttcttatctattaaaatggcttgcccataaaggaactgcataggattatcccctgacattccaagagcaaaataaagctcttgagagtaattgttgtctcagtcatgcttgctgattacagttagcacaaaagaaaaattcagctgcctgacaatacaggaaatgttctcagatgctgatgtttgtaaggtccggtggggccatgaggaagaagaggagctgaaggtaagaaactcataaacaagatgactctttgatgcatgaaca

SEQ ID NO: 14071 - DNA, 462 bp, Homo sapiens
  MAP TO AC005484.2; EXPRESSED IN BONE MARROW, SIGNAL = 0.81; EXPRESSED IN LUNG, SIGNAL = 0.71; EXPRESSED IN ADULT LIVER, SIGNAL = 1.1
tgcttcagacaagaaaacatgcaacaaggattgaaaataaaagagagccgataacagtaaaaccattctgaaaaagtgtcttgcttcaaacagagttaaggtcaattgaaatgtcttaagtatatgttaagatttcaaggaattaaaaatctttgaaatacataaccacatcagcatcaccatagaggtagttaatgaggccaaggaggctttctacctacctaccatattatctttctcctgatcctgcttcttcaggtaacttaatactgacattatgtctttctccattttacattgctttttctttaagtcctcattactttttgccagtatccgtgaagtatcacgatacttaatcctagagagttctgtgacttccaacctggcctcccaaagggaggcattggccttggctctgtccaccacagattcatctgtttttattaacttcctgcatgg

SEQ ID NO: 14072 - DNA, 400 bp, Homo sapiens
  MAP TO AL034412.1; EXPRESSED IN LUNG, SIGNAL = 1.2; EXPRESSED IN BONE MARROW, SIGNAL = 0.99; EXPRESSED IN PLACENTA, SIGNAL = 1.1; EXPRESSED IN HBL100, SIGNAL =   1; EXPRESSED IN FETAL LIVER, SIGNAL =   1; EXPRESSED IN ADULT LIVER, SIGNAL = 1.2
ttagcttgccaaatgcacagatttcttcattttgaagggttgaaggaggtctttctaaatcctgaaaatctggtggtcttccacttaaagtatatgaagcggtggttttagtgccagaggtttaaagggagttgactgaataaagtcaaaatccactggtcttcaaaacagaatgtctccgttgttctctgctgtaacaatcctctctagaacctgcatcatcacattagcatttagaactcctttttggaattcttgttccaggtcaccatttgatggtgctgacttaatttttctgggaccctcatttgctgactaatatctttattgtattccatttcatactgaaattgactaatttcttccatctagagaaggaagtgcttccctactcaccaaa

SEQ ID NO: 14073 - DNA, 454 bp, Homo sapiens
  MAP TO AL035696.14; EXPRESSED IN BT474, SIGNAL = 0.63; EXPRESSED IN BONE MARROW, SIGNAL = 0.71; EXPRESSED IN ADULT LIVER, SIGNAL = 0.92; EXPRESSED IN PLACENTA, SIGNAL = 0.69; EXPRESSED IN FETAL LIVER, SIGNAL = 0.57
gcgtaagaccaattcaaaagtaccatataattttaaatcagagttttctttttctaatagtcttatgctaactggttttaataaccaaatgactgtatagtgaaactcactactctgaaagatcaacttagttataatcatgatggaaatttaaatatttaaaataagaaacaggtgccacctttttttctaaaactctacaaagcaaattcctataagagaggcagacaaaacactgtatgtctatattataatttgcagtgaaataaatgaaagcacattacagataaacctacctgattaaaaaaactaacctgtaaattgatttcttctaatttttctatttcctgtcctgctctttcttccaactgcaatttacattcttctacgtcaccaaattctaccatatttttttcatgtgtcttaagattcactacttcttgttccaaaattt

SEQ ID NO: 14074 - DNA, 498 bp, Homo sapiens
  MAP TO AL109855.8; EXPRESSED IN BONE MARROW, SIGNAL =   1; EXPRESSED IN PLACENTA, SIGNAL =   1; EXPRESSED IN HBL100, SIGNAL = 0.93; EXPRESSED IN FETAL LIVER, SIGNAL = 1.1; EXPRESSED IN ADULT LIVER, SIGNAL = 0.97; EXPRESSED IN BT474, SIGNAL = 0.94
gggctcacataaaggttttgctattaatccaaaggaaggaatccatattctggcaaagctactgtttagtttccggagttgtcacatttaaaacgagatcttttcaagcactagagaagctctttgtaccaggggttaaaataagactgagaggtgcttgttcttgcccttgcccttgccctagtccttgtactgtaggatccctttgttgggtaggttggcaaggttgtggctgtgacagcacagaaggaagagatgtcccccttctcatgagggagagaggggcactcactcttccaatgaccctcttgtttgcaatgaggacagggtctaggggacagcttgtaacccagaggtttgggacattctttactccagtgtcctggatttctacagcaatgccaggcccccattcttttagtattatagggacgagccttggggttattagctaacaaaaaagaatgtgccaatgctgttgccgtgtatttagcttgg

SEQ ID NO: 14075 - DNA, 480 bp, Homo sapiens
  MAP TO AC004832.2; EXPRESSED IN BONE MARROW, SIGNAL = 1.7; EXPRESSED IN FETAL LIVER, SIGNAL = 1.1; EXPRESSED IN ADULT LIVER, SIGNAL = 0.66
ggagggagagatcatcatggacaggagaaataagggaggatccctgggagagctgggactggagctgccttctcttgcagtaaggccaaccctagaagttaccatttattgagaacttactctatgccaggcattctaagtgatttgcatacagccaagaaaccaacctgcctcacaacaatcctgggacaaagacagtgttatcaccctcagcgtacagatgaggaaacagaggcacaagtaagtgaagtcatttgtcacatacctttcacgatgagcatgaacttcagggtctctgggtaattctcttcaaggaggccaaagaactgtggaaccaagagagatcccttcagagagcacatcacatcttctcctacctccatctcctgtgcaatctcctgttgggaggtttcagatggctctggagggtttcccttcatgccatcacctcccctggcctctggagggaaccttctcacc

SEQ ID NO: 14076 - DNA, 461 bp, Homo sapiens
  MAP TO AL033531.7; EXPRESSED IN HBL100, SIGNAL = 1.7; EXPRESSED IN HELA, SIGNAL = 1.2; EXPRESSED IN BONE MARROW, SIGNAL = 1.1; EXPRESSED IN FETAL LIVER, SIGNAL = 0.91; EXPRESSED IN ADULT LIVER, SIGNAL = 0.97; EXPRESSED IN BT474, SIGNAL =   1
gctttggttgaagagatggctccagaggcagaactccacctggtcatcctcccccagcaagggcccctgacactctccagggaactaaggcagtcagagggacactgcaccagatgagcgcccgtcagtaatccctcaattctctaagtctgaggcatgcttaccggtcgatggcaatgaccccgagggttagcatgctggcagagctgatcagcaggtagaggagggcagagaagttgcaccacactacaccaaagatccattccctgcggatggagctcgtcaccacaaaaggcagcaccaacacggacagcaggaagttggacagagtcaggctgaagacgaacttgttgctgagggtgaggaggtaggacttcttgtacaaggtgaccacgatgaccaggtttcccaggcagacaaaaatggtgatgacaatgatggcgatgaactgggtgatgatg

SEQ ID NO: 14077 - DNA, 449 bp, Homo sapiens
  MAP TO AC007861.1; EXPRESSED IN BT474, SIGNAL = 2.5; EXPRESSED IN ADULT LIVER, SIGNAL = 0.73
caaaggggactctgctcaacaagttttctgcacattggcttcgtgaattgacctagttcccctcctgggttggagtgttgactcttctgtcttctcatcctcatggaaaaacctgcatgggcctttatttctctttctctctctctctctctctctctctctgggccctctctccctcttttttccctctctgagggaggctcgggggcccatctccctggcccctaaggcctccacctccagcatctggccttgtggacctgggatcctgacaccttctccttcttccagctgacagcctcctttctgcagtccctgagccctgacatacaggatctggctcatttgaacaactgcaaggaggggctgagtgttacaggcacctacaagaggcagaaaaacaagatagaattgggccaggcctggacactgtctgaagctccctggag

SEQ ID NO: 14078 - DNA, 426 bp, Homo sapiens
  MAP TO AC011592.2; EXPRESSED IN BONE MARROW, SIGNAL = 0.94; EXPRESSED IN ADULT LIVER, SIGNAL = 0.97
agaaccatggcattactgggctaagtgtgcctcctaaagcagatacagcttagatcacaaccctcaaattcttttaaatatctgggaagtcttcccaagaagaattggtacaaacaagctcaaacagtgaagactgcaattaatgcctaactcttctgtgcccagacaccaaagaacatctactagcatcaacaccatccaggaaaatgtgacttcaccaaatgaactgaataagtcatgagggaccgatcctggaggaaaaaaacaaaaaatatgtgacttttcagatggagaattcaaaatagctgtgttgaggaagctcaaagaaattcaagataacaaagagaaggatttcagaattctatcagataaatttaatgaagagattgaaataattaaaaagaatcaatcagaaattcaggggct

SEQ ID NO: 14079 - DNA, 406 bp, Homo sapiens
  MAP TO AL035670.16; EXPRESSED IN HBL100, SIGNAL =   1; EXPRESSED IN ADULT LIVER, SIGNAL = 1.1
caattgaggtgaggatccaagacattagaagaacaaacaggtgtatatatatttaagtaaggaaattaggcaaatcacaatctctatagcactgatttcatcatttggaaaatgaaggagttgcacaaaaatatgcttgacagtaattaaactctaggattctacctgatcaatttatatcctgatatataacaaattatgttgaattttggattatgttgaatttttataaaattataggtatttagctttgccaataatgtgtgacaaacatgcattattagctgtgtcttcctatataataaggtttagtacctgctttgccaaacacagaagatatgccttccataatggccttgtggatatcaggatgagaaaggacgtatgcaagtgtccaaaatgcaac

SEQ ID NO: 14080 - DNA, 433 bp, Homo sapiens
  MAP TO AC008248.1; EXPRESSED IN FETAL LIVER, SIGNAL =   8; EXPRESSED IN ADULT LIVER, SIGNAL = 0.96
  unsure 237
  unsure 266
  unsure 279
  unsure 293
tgtttgatagtacaacagggtgactacagtcaacaataatttattatgccttttaaagtaacaaagacactataattggattgtttgtaacagaaagaaaagatacatgcctgaggtgatggatagcccatttactgtgatgtaattatgactcattgtatggctgtatcaaaatatctcatgtaccccataaatatttataccactatgtacccataaaaattgaaaattaaaaanttaaaaaatataaatccttgtaggctgcntttagggataaanccattggctcaaantaggtaaaacagatgaaatacgcttccataccgtggcacagcagacacaggctgagaagcagtttgaataacaagcacaacttctaatgcagagaagatgtacttgtcttgtataacagtttctgccagtttaatgtgga

SEQ ID NO: 14081 - DNA, 468 bp, Homo sapiens
  MAP TO AC007397.21; EXPRESSED IN HELA, SIGNAL = 4.9; EXPRESSED IN ADULT LIVER, SIGNAL = 0.69; EXPRESSED IN HBL100, SIGNAL = 2.6
aaacagcatttcaattcctctgtacatagattataaacccaaaagaaacagaactttgaagtttcaaatttgatgtgtcggctggccttgatgagaaattgatgctttgctaaattttggagtacacaagtggttttaaaaatgaaagttattagcactagaaagtgatgttctttgtattactacactgttattatatttaatgaaatggctttctgaagtactgcagataaaaggaaaagcagtgtttagaataagacacacagggtaagtgccaaggtaagaaaagaaatggtgggttgtctttatcttacagtgtttctcctggaggctgggagagtcctccttcaggggaaccagttgagatggaaagggtttgtaggtggatgtgtaatgtgtggcatttttgtggttctgaccgagcccaatcttggcaatgtctactgtggacaagcaaggccaaggtat

SEQ ID NO: 14082 - DNA, 408 bp, Homo sapiens
  MAP TO AL031073.1; EXPRESSED IN ADULT LIVER, SIGNAL = 0.98; EXPRESSED IN BT474, SIGNAL = 1.1; EXPRESSED IN FETAL LIVER, SIGNAL = 0.98
tgggacagaaatgcaaagaacactacgttcctcgagccccacctggccctccactacctagaacctaaactgccctgttcaaacacaaggggaagaaactatcctagacttcactcagaaaaggagacgttgctggacatgacactgaggctttcactggccatgacagtggcatcatctgcggtatcaattgtggcctggactctctcttccacatctttcaaagcatccttgtaccaggatggaaaggaactaggaacagtgttgttcagcttggctaaaaactctagtactttcttcttgatgctttctgaatgggctctcggaccccacaggaattcataatatggaggagaactgtggggcacctcccgatactccaggtaatgtccctgcacccaaacttta

SEQ ID NO: 14083 - DNA, 381 bp, Homo sapiens
  MAP TO AC010974.3; EXPRESSED IN HELA, SIGNAL = 0.95; EXPRESSED IN ADULT LIVER, SIGNAL = 1.1
attgccaaaatgaaaaaggctgtcaagattcttacttcggtttttgaatcatcatttgaggagactggattaagtgctctatgtgccttataatacatagaagagggagacaaagccagaaaaacattgcccttggaagtctgcctatcaccaagctagaggtgtattaggccattgttacattgctataaagaaatacctgacgctaggtaatttataagaaaagaggtgtaactggttcatggttctgcaggctgtataggaagcatggtgctggcattagctgctggtgagggcctcaggaagcttccaatcatgatggaaggtgaaggaggagcaggtgtctcaaatgcaagagcaggagcaagagagaaggtggga

SEQ ID NO: 14084 - DNA, 394 bp, Homo sapiens
  MAP TO AC010809.2; EXPRESSED IN ADULT LIVER, SIGNAL = 0.98; EXPRESSED IN LUNG, SIGNAL = 1.1; EXPRESSED IN BONE MARROW, SIGNAL = 0.92
aagcaaaggatgacagggtgagctcaggccacacgccaccaccaaatattttctagctctggggtcttcagagctttgctgccctatgggcaatcttccaaggggtagatgaagacatagttcaaaatgcagaaaaaagagaaaacccagagaaaaaagcaatgaagacaattaaatgataactgttttttaagctgatactgatatcttgatttgcaggggagaaaacatctactatgcagaaaacaatgaggactgtgttaacttgtttaaggcagatgagtatatgaatgaagccaaaaacctacatatgttcatatccaaccccttctgtgacttactcttcttgagatattatcataaaagtagcatcacatttactcatgtttgtatg

SEQ ID NO: 14085 - DNA, 480 bp, Homo sapiens
  MAP TO D83253.1; EXPRESSED IN ADULT LIVER, SIGNAL = 0.95
ggggtttggatcattttctctcttttttttttttttacccatgtacatagtgtaattttgagcctattttacaagttgattctttttctcttttagattatttacctggcttatgtttccccaaatgaaattattaggcctctggtatgaatattttttgttatataattactaggtaatctccagattcaatgttaaaccaatttttaatgatactgatgccataaacatctatgtttaccttaagcccattgttaactttaatttttgaagttactttagacattagaagtacaaataacatttctgtgaattcttgatccttcatggagatcactgcactgagtgcccatttgcccagccacatcttcctcttgttctttatctccttattcttctgtttgccacagaccacgtaaaatatgtagttcctttggagaactttaatctataaatttaaccttggggtaaggatggaag

SEQ ID NO: 14086 - DNA, 355 bp, Homo sapiens
  MAP TO AL096771.11; EXPRESSED IN HBL100, SIGNAL = 1.2; EXPRESSED IN HELA, SIGNAL = 1.3; EXPRESSED IN ADULT LIVER, SIGNAL = 1.1; EXPRESSED IN BT474, SIGNAL = 1.1
tgggtgggatacattctgtgtcaaatggtcacctcaccgggcagccacctcctacaggctaaaactaagccctgcagatggtatgtgtgtaaaaaagaaaaaaatgatctggagcatgtagtggaaacattttaaatttcagtaaagaagatgccattttgtttataacaatgcgatataaaattttcttgaaatataattggtgatgacactggcattttcctttgttgtcataatcaggaacaaggggacaagaaattacagtgcgtggatcagaaaccagtcactgcttcactggcctttcaccagacactgattatggtgtcactgtttttgtgcagacaccaaatctcga

SEQ ID NO: 14087 - DNA, 473 bp, Homo sapiens
  MAP TO AL109614.15; EXPRESSED IN ADULT LIVER, SIGNAL =   1
aaggacccaaggtgacacagaacatcacagggagaaggggctgagcatgctagctcagatctccttcttcttataaagccaccagtccctctcccatgataacccattaatccattagcccatcaatccattaatccataaatggattaatccatttatgaaggcagagcactcacgacccgatcacctcttaaaggccccacctctcaatactgccacatttggaattaaatttcaacatgagttttaagggggcaaatacttaaaacatagcaccttctaaccagctacaatactgcccagctgcccactcaggattactgagaaccccagaatcttgtccagcccagtactgtcctccatgttgactctcatcagcaaagaggaaatccagatatcacctaggtctcccggaactatactcctagtaatgctgccaaagatggcacttatgtccaggtgagcatacggtc

SEQ ID NO: 14088 - DNA, 462 bp, Homo sapiens
  MAP TO AJ239320.2; EXPRESSED IN LUNG, SIGNAL = 2.8; EXPRESSED IN BONE MARROW, SIGNAL = 8.4; EXPRESSED IN ADULT LIVER, SIGNAL =   1; EXPRESSED IN BT474, SIGNAL = 0.99; EXPRESSED IN HBL100, SIGNAL = 0.95
aacccaggcagtgtgacttcagagttcctgcttttaacccctgtgctatgttgtatgctgaaggctaactggctatgtccttgtgtagtccatacttggttttggttgacccaggtattggcagactctggagtgttgatggtttcagtaactagccagggcaatagtgggctagaaacgattgatgccttgaagggaagaggcctggatggaggggtatagtgagttaagaaatgcattctgaggagtctggggaggagaaccaatgtgttatgtgttagagtagcagtagcattctccgccagtacgtggttaatgcatatggctgtggctggagagcaggtggccgtgggacttgtgaaagggaagaccttttagatgaacaaggcaccagtagctggtgtgaattgggccaagagggtaagagggatcaatcactgatttgaaggtgttctagatgtg

SEQ ID NO: 14089 - DNA, 460 bp, Homo sapiens
  MAP TO AL049829.2; EXPRESSED IN FETAL LIVER, SIGNAL = 0.64; EXPRESSED IN ADULT LIVER, SIGNAL = 0.66; EXPRESSED IN BT474, SIGNAL = 1.3; EXPRESSED IN BONE MARROW, SIGNAL = 0.69; EXPRESSED IN HBL100, SIGNAL = 1.1; EXPRESSED IN HELA, SIGNAL = 0.64
ttgagaggccactgctttgaagatgttgccaaaaatctgattggtaggggaatgctccactgccaggtgtcatcagggactcctttaatttctggtgactctgtggcagtggtggcatctgagagggctcctcaggctctaccttcaatcctttcgtctgggtaggcttgctaagagttggaggacctattccaataccaacttgctctggagctggcactggaggaggaggcacctcctctgggggccgtcccgcatgatgagtaaaagagagaagggatttgaaatggagttggtcccgacggtagactactcgggctcgagtctcttctatttcttcagatgaccagctaataccacagcggaggcgctgggccataaaccaagtcttgactttctccatctgcaacccataacgtaggcagagaagggcaatgtctgctaggctgggatagggaaa

SEQ ID NO: 14090 - DNA, 1961 bp, Homo sapiens
  MAP TO AC004889.1; EXPRESSED IN LUNG, SIGNAL = 1.5; EXPRESSED IN PLACENTA, SIGNAL = 1.8; EXPRESSED IN HELA, SIGNAL = 1.3; EXPRESSED IN BT474, SIGNAL = 1.6; EXPRESSED IN FETAL LIVER, SIGNAL = 1.3; EXPRESSED IN ADULT LIVER, SIGNAL = 1.6
aaatggagcatgtggtggacctgggaaatcccttggtggaaaataacctcgagaagctccaaacatggttcctggaggaggtggggggaaaggaggtcctcttctcatgaacgggccccttgtatccactggaaacaatggtcctctgactggagcaagaggtggaggaataaagccagggccagttgcttcattttcagcagggagagatgaatcaggcacatttaaattaccaagatcatctttggcatcatttctactggattccatttctgaaggcattgacctatccattttatccaaagaagtcattttaaaacttctgggttctgctggtccagacagtctttcagaattagaataaaatctgtcttccctttgtggaggaagagttgaatcaggatatgattgccctggtggaggaaacatcatcctacggtcctgttccaccggagatgacagggacccagtgtcagaaggagccctgtgaggatcgattaacctgtcatagcttggttctcctctttcattggtaatctgatggtccaggggattccctgggctgcttgggcctcttcctcctccccctggaagcacaggtgagagtctgagtggatcctccaacaaagtttgaggagagggaaaagctctcgtttcagatgaaggccgacccaatggtgagggactacatggggaatgctctctgccaaatgctgtatttgaaacatcgagtgcattaggatctttttctaaaagttcaaatttcaactctgtttcagttaatttttgtttgttgtgagcattttctttccttaaatcactgaggtttctttcagcagtccgagctgccaaccaattatcatgtcctcttttctcgtaggaaataacctgcttttgataaaaatgaacagttctctccaattcttcttcaagatctttggctagctttctataggtctccagcccttcagtggcacggctgatcttttcttccactctagaaagcttctcttcttcctctattcggtaattttcctccactgttaatttcctgtagagtttcatttcattttcttgatagaattcagtcattattttaagtttctgttgaagcttctgattctcactttcaaaatatatgttttctgattgcaaagatgcttgttgagtctgaagatttttaatatgctctgtaagctcttcctttgttttgtccacttcagataactgaataataatgtggtttctttctccttctaagctttttaaagaaacatttaacttagcagcatgaatcagtttcttcaaagctcctttcagaggatcatctaagttagcaccattttcccattgactgttcacttctaattccaggttatcatcatccgttgtgtcttcttcaagcacagcagcctgatctttcatcattggcaagtgtccagtcagggtcttgatgtgattttctttatcattcagaacttgttctgcgtgcactttggagtcttcaaatgttattttctgtttattaagttcactcacttgtcctttccatacttcagcttcttgctgaaaaagctgtttatggcttgtctgaagttgagaattttcattcaaagcatcttttattgctatagcccgtcgttcttcactcattttaaatgtcttgcagatgattttggcttcagctatttgtgatttgagggattttgactcatcttctagagactgtatactttttgaaatatccgccatcaattcatcttgttgagaatgtttagatttctcttcttttaagtctttttctagacagaggatttcatcctcaagttcagaattggacctgttcagcttttcacaggttgcctccaaacttcgtgcttcttctgctgccgccttctcaaagctggcatcctctaaagatgactctacttcatagccttcatactctttttgaataaggc

SEQ ID NO: 14091 - DNA, 477 bp, Homo sapiens
  MAP TO AC011193.1; EXPRESSED IN LUNG, SIGNAL =  17; EXPRESSED IN BT474, SIGNAL = 4.9; EXPRESSED IN ADULT LIVER, SIGNAL = 0.99
caggccaacatcccagagttttttgttgttgttgttgttttgctttattttttttccctccaactttctgtattttttatagaagcttcttcaacattgagtgacttgacttccattatctttgatacatttccatttccattatttgctcaatccatttttgtgtcttcatactcctagttatgtggctaacttggccccagccctgttgctcctgatttgtgggctgtcctcttgaacccaaacctaccaagcacgtcgactgagtctgcaatgtcagccccagtcctggctccaaagatcatgctgggtaagtccccagtcctagtcttatccccaaccctggagaacacaccaaccaagtacccaactgagttcctggccctgactctagtgagcttgccttttgagatccaggtattgaccaaagagaagggaaagaaatattaactgtataaaacaatgaattaggcactt

SEQ ID NO: 14092 - DNA, 489 bp, Homo sapiens
  MAP TO AC004895.2; EXPRESSED IN FETAL LIVER, SIGNAL = 0.93; EXPRESSED IN LUNG, SIGNAL = 0.9; EXPRESSED IN ADULT LIVER, SIGNAL = 0.74; EXPRESSED IN PLACENTA, SIGNAL = 0.63; EXPRESSED IN BONE MARROW, SIGNAL = 0.98; EXPRESSED IN HBL100, SIGNAL = 0.88; EXPRESSED IN BT474, SIGNAL = 1.1; EXPRESSED IN HELA, SIGNAL = 0.77
ttcagaaatgccaaaagctgataaaatgtttctttttaaataccttcacaggtctaattaggtgcaaaatgtttttcatgcaacctgaatcccaatcctgagtcctcctccttggtttctaaaagaataaaccaacttcttagtaatcatagcactcttggattaattcttcactttcatttcagaggaaaaaatgaaagtaggttagcgcactacaatactacaaacacaacacggaacacttacatgttttggagtgttcatgtgatagcatgtaattggcaagaggtggtgtgtaggttaaacactgcagtgctgcattggcaaaacaggtattgcccaaattctggagcccagctccaactctatgagtttgttgccacttaagacaaatcttctcagatgggaaaagaactttctgtggaggagcgatgccatcacctagggctagaaaaataaacaagaaagagtcagaaaccaagctttgca

SEQ ID NO: 14093 - DNA, 357 bp, Homo sapiens
  MAP TO AJ011929.1; EXPRESSED IN PLACENTA, SIGNAL = 1.2; EXPRESSED IN ADULT LIVER, SIGNAL =   1
ggaaacgaaaagcgatcaaggtctctccaaataagattatgacataaagccggagagtttactgtcctacccctgaggtaggacagtaaaggtgtattgccggccttgccagcggaaggcaaattgcttctggtgggccttatggacaggaatggggaaaaagtcatttgccaagtcaatggctgcataccaggtaccaggaggtgtgttaatttgctcaagcaatgaaaccacatctggtacagcagctgcaattggagtcaccacttggttaagcttacagtaacccactgtcattctccaagatccgtctgtcttctgcacaggccagatgggagagttgaatggggatgtggt

SEQ ID NO: 14094 - DNA, 456 bp, Homo sapiens
  MAP TO AP000039.1; EXPRESSED IN HELA, SIGNAL =  16; EXPRESSED IN ADULT LIVER, SIGNAL =   1
tttttgatttggtatggtgtgcaaatctaatgtgaagttttcaagtgaccactgttaaaaggatcaagtaggaaagtcctctgaatattagcatgtcattttcccagacatttgcactggagccattttgggcaatcggtttgaagatattttccttttaataagtattttctatcaaatagagtcttatggaagagaaaataagtgttttggctatatttttacaatacttttttgaatttaggtagtggaaaatatgttactgaagtactgaacaatatttctgtgctggaccaacactatgataattatttcaatattattgatttctattgtgaactccacctactctatagagaatatttaatcaggcaaactagtacttatgccaaaaatgcttcttattctccctcttccgctagaaaatttcgcaggattagagctattatattatct

SEQ ID NO: 14095 - DNA, 471 bp, Homo sapiens
  MAP TO AC007036.3; EXPRESSED IN ADULT LIVER, SIGNAL = 0.99; EXPRESSED IN FETAL LIVER, SIGNAL = 0.79; EXPRESSED IN LUNG, SIGNAL = 0.74
tcaaagacgggaatgtctctctcttttgtcttgacactatgtactatttatggctctttgttaaaacattatttaagcaaagcctctaagccactgcctcgagagagaaatacttttgaggcctctcccacatgacaggtacagcacttgttaataaacttctgcttctttttcttttattattgtgacttttgtttttaggagagtgtctcaactaagaacataaaaatgcaaagaaataaattatgttttctcccttccatagtcgttaccatactgactaatacagaactgaagctgaaaagccatgatgtagagagaggggccaagattatctatttccttcttgaaagtttttccctgaactttccagaagtacaaataagagtaaaaacatatccctggacacaggagctggcgacctaactggcttgttttgagtttaaatttcttcttaatgccctgaatgga

SEQ ID NO: 14096 - DNA, 430 bp, Homo sapiens
  MAP TO AC012140.1; EXPRESSED IN BONE MARROW, SIGNAL = 1.1; EXPRESSED IN HELA, SIGNAL = 0.97; EXPRESSED IN ADULT LIVER, SIGNAL = 1.1; EXPRESSED IN FETAL LIVER, SIGNAL =   1; EXPRESSED IN LUNG, SIGNAL = 0.99
acttgttccctgggcatatctaacttactcaaaaacttactctttcataaaagacatcaactcctagacgtctgcgcgagagaagcggaaacacaagtgccgtgacgtgttcagccacttgattcccaatagccacaacgtgggcaccccagcatccatcagctgctgggcagatgcacaggacacgcatacgatgaaacctgttcggccatggaaaggagggaggctctgactcacgccacagcacagacaagcctcaggacatgctgctcagtgagaggccacatcctgtgactctgctgctgggaaatattcagagcaggcgcatccacagggacaggagctatgccagggctgccagggcctgggacaggaacgggatgagccgtgaaggggcacacagggtctatctggaaggatgcaatgttcc

SEQ ID NO: 14097 - DNA, 352 bp, Homo sapiens
  MAP TO AL034400.2; EXPRESSED IN ADULT LIVER, SIGNAL =   1; EXPRESSED IN LUNG, SIGNAL = 0.93; EXPRESSED IN BONE MARROW, SIGNAL = 0.93; EXPRESSED IN PLACENTA, SIGNAL = 1.4
agaaaaggctgccattgaaccaacagaattttggtgatttatttttctacctttcccaaacattcttttaacatgaaagaaaacaaaacaaaaacaaaacagagaagacaaggagtacttaccacggagaccttgctcacgacatctcccgcaaccgctaagccttgagcgaaagtacgggctgctacaaaagcacgagtaacctggagcttcaatttgcgagggacatctccgaagggcttcagctgctccgtatacttgctcacacattccagatactcatctgtaaagtggtactgggagttcaccaggcggaacatccgctccaggaggcgagcccagaagtcattta

SEQ ID NO: 14098 - DNA, 395 bp, Homo sapiens
  MAP TO AL008631.1; EXPRESSED IN ADULT LIVER, SIGNAL =   1
ctgttgcttccttcctgatggagggttattgataaacatcgtgcataataagatttccaagtaagcctgtttcctctcaattattaatgattacctggagttctgttaaggagaatcagagatctctggacatgagtttgggtcataagaaagcggtggtgagctgtggctggcaagcctgtgctcacagggaggatgtgtgagttcaatgctagcttctcttggggcagacgtaaggcatttgagctcagtctttctttgagctcgactgtatcgcttgatttaggtttgctgttctggtttttaaaatttagtaatagagaagagagtacataagtagaagaccaaaactgtattgttaccagagttccaaccgctgctgacttttctggctc

SEQ ID NO: 14099 - DNA, 459 bp, Homo sapiens
  MAP TO AL049796.17; EXPRESSED IN LUNG, SIGNAL = 4.8; EXPRESSED IN BT474, SIGNAL =   1; EXPRESSED IN ADULT LIVER, SIGNAL =   1
tgttctcactgttgctagactggattacttctcatggatatggattggtttccagggagtgggttgtaataaagacaggatgctcctcaggtttttctcccccttcacacatgtccacttcccttttgatctcctttgccatgttgtgatgcagcacaaaagcccttgcgggaagcagggccatgcccttgaacttctcagcctgcagaactgtgagctaagcaaacctcttttctttatgaattacccagtctccagtattcttttatagcaatacaaaacagactaaggccaggagcataaagagagaaagaaaggggccatcccttcccccatttctctggatgatcttacttgctggccaagcgtttgtcatttctaagcctgtggcgaacaataatgatacatggaaagaccctgtagatactgtcctaacaagagtccatgctagagccttga

SEQ ID NO: 14100 - DNA, 480 bp, Homo sapiens
  MAP TO AC000353.21; EXPRESSED IN HBL100, SIGNAL = 1.9; EXPRESSED IN FETAL LIVER, SIGNAL = 0.79; EXPRESSED IN LUNG, SIGNAL = 0.65; EXPRESSED IN HELA, SIGNAL = 1.1; EXPRESSED IN ADULT LIVER, SIGNAL = 0.68; EXPRESSED IN PLACENTA, SIGNAL = 0.66; EXPRESSED IN BT474, SIGNAL = 0.96; EXPRESSED IN BONE MARROW, SIGNAL = 0.99
tgaggacagggtggggtaggcatccaggggcaagttcccctacactagagatgctcacacttaggcagcctcctaggaaggctcaagtgctgggtggatgggtggacaagatgccctttcagagttcttccatcctgagagtcagtgatgacgcggtagtcacctcagggtcaaagcaatgccctgccaagaaatgtatttgttgtttgcagtttgttttgctattcaccctatcgacttcagattttgagctcctgctccaaagactgtcattcttatgctgtgaccttcctttggtaggagcctgtcactctgctgggccagattggctgtgatagcaacgggaagctgaacaacaagtcagtgattctcgagggagaccgggaacattcctcgggtgctcaaattccagtggatttatctgagcttaaggaatattctctgtttcctggacaggtgagattggaggagttccaccag

SEQ ID NO: 14101 - DNA, 471 bp, Homo sapiens
  MAP TO AC005037.2; EXPRESSED IN LUNG, SIGNAL = 0.63; EXPRESSED IN ADULT LIVER, SIGNAL = 0.67; EXPRESSED IN BONE MARROW, SIGNAL = 0.79
tatctctacatagttcataacccaggttttcatgaacgcattgaaaagattactctaaatatcagcatgtaataaaaaccaatttatgtgaagaaacatttgtaaacataatatttaaaatctgttttgtttttataaccaaaagtgggatagtttataaatgaaatgacgtaacacttggtatgaaagttttgcttcacaaccaaaatagcaggacttggaacaatttaaaaagttgtgctgaagattagatatttgctcaagagtataaatgatctgcttcttcataggtataatggacagtgggaccttggccaggaagttcttgatgatatcatttatagagcccagctagagcttttttctcaaccactattggtaagttattatcttaactctttattaaatatactggtacctaaaaaaggtactaggttaaaaatgtaagacaatccaaataattaggggaaa

SEQ ID NO: 14102 - DNA, 477 bp, Homo sapiens
  MAP TO AC007279.3; EXPRESSED IN BT474, SIGNAL = 1.3; EXPRESSED IN ADULT LIVER, SIGNAL = 0.98
cgtggcataatacattttagcagaaatgaaagagtgtattgtgcattgcttaacctctctgtgccttatttccttatctgcaaattgaggacaattaatgtacctgcctcatagaattattgtgaagatcggattaattcatataaaatgcttcgcactgtgtctggcatgtctgtattggtgtttgttgttgttgctgtgtcttagatagtattgagttactatcttctagaggggtttggcccatgtgtgacatttgctcaccttttccttccctgtgcccaggccttgctcagtgcccatgacacgatagctcagaaagattttgaaccccttctccctccactgccagacaatatccctgagagtgaggaagcaatgaggattgtttgtttagtgaaaaaccaacagcccctggtaaggaaatcattttttatctttccatttagggtaagcttaggttaattgtgaaccaaa

SEQ ID NO: 14103 - DNA, 446 bp, Homo sapiens
  MAP TO AC007389.2; EXPRESSED IN PLACENTA, SIGNAL = 1.1; EXPRESSED IN BONE MARROW, SIGNAL = 1.3; EXPRESSED IN FETAL LIVER, SIGNAL = 1.1; EXPRESSED IN BT474, SIGNAL = 1.1; EXPRESSED IN HBL100, SIGNAL = 1.5; EXPRESSED IN LUNG, SIGNAL = 0.84; EXPRESSED IN HELA, SIGNAL =   1; EXPRESSED IN ADULT LIVER, SIGNAL = 1.2
aaggcaaaaaggaaagggagaagcagaacttttcaccttcatctacttacttcatctactatactctgttattagaacaacaacaacaaaaacacttcttaaaagtcaacagcaggttccatgctctggttctgccatgtaatccaataaggatgaagccgagctctgtatcagcatcaccctcaagccatccagtgcaaccagcccaaccaggcgctcctcatcctggagaaggcacagtggctgtacccaatgccgcgagtgtgtggcctgatggagtctctcaactaggaaccacaaactgctggtgaccaaccccaacccacagacacaacccatgccacccacaggaaagcaggtgggaccgatgctccctaggccaacggtgaagctggaggaggagagagcaccaaaggctacactgcagaaggagttgcagctgtgaa

SEQ ID NO: 14104 - DNA, 469 bp, Homo sapiens
  MAP TO AL049834.2; EXPRESSED IN HBL100, SIGNAL = 0.86; EXPRESSED IN ADULT LIVER, SIGNAL = 0.77; EXPRESSED IN BT474, SIGNAL = 0.7
ccttcaaacaatacattaaaagcaagtgctttttttttcccttgaacttttttgagggtggtggtgggagaagtgaaaggaaaagtattaatcctgtgagattttcagcactgcagtcaaaatttaatttgactcaattaatgtaattagtctcatcttttcttaatcctaggaaaaaatgcgccacctgctgcatgtcctgaaagtagacttaggctgcacatcggaggaaaactcggtaaagcaaaatgatgttgatatgttgaatgtatttgattttgaaaaggctgggaattcagaaccaaatgaattaaaaaatgaaagtgaagtaacaattcagcaggaacgtcaacaataccaaaaggctttggatatgttattgtcggcaccaaaggatgagaacgagatattcccttcaccaactgaatttttcatgcctatttataaatcaaagcattcagaaggggtt

SEQ ID NO: 14105 - DNA, 469 bp, Homo sapiens
  MAP TO AC006020.2; EXPRESSED IN ADULT LIVER, SIGNAL = 1.2; EXPRESSED IN BT474, SIGNAL = 2.3e+02
agtaacgcacaggaaatggcttagcgctattgggcacatgtagacctgaagcagaaatggagacagtgaaacaaagagtgtatccacagaaaccaccaaaagcactaagcgagactactccaaataccataaaagatgatagctccaaaggccaaatcatgatacccaaaggactcacaacaggaaaactgaaagccattgtacaattcataatttctctccttgaaaatagcctacctacactgtatcataagcaaccaacttaaaaggtgaatatgatactcacatcagtattaaaacgacttatgtagcgctccggatgtttgtcatactctgcaggatcatacacagcatctgttttcctgacaagatgatgatgacgacttaacaccgtcccatacacttttctgaggtcttgaaaaggagaaagaaattagtaaagtgggtgacaaataataaaaatttatgg

SEQ ID NO: 14106 - DNA, 471 bp, Homo sapiens
  MAP TO AC009230.2; EXPRESSED IN ADULT LIVER, SIGNAL = 1.1
ccagaattggacttccaaagttactagctactttaggtcttaaatacaaacattgctccaggcatttctatgatgtgatggcagatagatgagtctgaggggtttctaatcttggctaaagactacatctggaaagagcccttcttctcctacctctttgtctaagctcttgagatcaaatttggtccctggctctccagtctcaagacctgacattgttttcttgccccaggtaaacggcataactttcaaggtaaaccataatcttctcacagctttctgtgtctcacagagatgcatcaaaaaagaagtacaatgaagttaactacataccttccaagaccaattcttactattccttctgcatggaatgtttttccctttacccaagaaagttccaagactatgagagagcctggaagttacgggtgagggtgggaatgggggaataaatgaggagacatataaaga

SEQ ID NO: 14107 - DNA, 495 bp, Homo sapiens
  MAP TO AP000425.1; EXPRESSED IN FETAL LIVER, SIGNAL = 1.1; EXPRESSED IN ADULT LIVER, SIGNAL = 0.96
tgccaactcatgtcttcatagcagctcattttgttgtggtcactaatgacttccttactatcagatctaatagaagctacttaattcttatcttagttgaactccagtgaggcatgctaggaaagaagggggacgccactccttctgttggattcagagataccagtctcttctagtatcccacccacctttgtcagtttcttttcagtttcccctgttagctcttctttctgcttctgtccttcagccgtcttttatgactctgtgttatgatggtaggagaagtaaaccatttccgtggcttcatttacctgtagtttgacacctttaaatactttatctccagtctcagtctcttttctgaattttccttctccatttccaatttcctgttgcatatcttctcttggatcatccacagtcatttcaagcttaatgtatttatcatggaatttattaggcttgtgttaacttgttctgttttgggtaatggca

SEQ ID NO: 14108 - DNA, 407 bp, Homo sapiens
  MAP TO AL031132.1; EXPRESSED IN BT474, SIGNAL = 1.1; EXPRESSED IN ADULT LIVER, SIGNAL = 1.2; EXPRESSED IN LUNG, SIGNAL =   1; EXPRESSED IN HELA, SIGNAL = 1.3; EXPRESSED IN PLACENTA, SIGNAL =   1; EXPRESSED IN HBL100, SIGNAL = 1.1; EXPRESSED IN FETAL LIVER, SIGNAL = 1.1
tcacctttgctagctttccactataacaggcttcaagcctataaaaataatggtactcctaaatcaaacagcaactgaagttagtatgatcagagaagaatccggaagccagggccttaggaccaaaacataaccagactggatgcatcttcatgaagcctcagatataattctaaaattactgggttaatttgctcttctatagcaaatggtccctgaaaatgatagtgtaatttatcacccaggcatgtggatgaaaagttgctggtgggtagccaggccctgcctgatctcataaattctggtgctgtgagatttcctccatcttcatagtgagtttaatgatgcagtagatttccatgttaccacttttaatttccagttctggcgacccaagcctttctatt

SEQ ID NO: 14109 - DNA, 437 bp, Homo sapiens
  MAP TO AL023280.1; EXPRESSED IN BT474, SIGNAL = 1.9; EXPRESSED IN HELA, SIGNAL = 1.1; EXPRESSED IN HBL100, SIGNAL = 1.6; EXPRESSED IN ADULT LIVER, SIGNAL = 1.1; EXPRESSED IN FETAL LIVER, SIGNAL = 1.2; EXPRESSED IN LUNG, SIGNAL = 1.1; EXPRESSED IN BONE MARROW, SIGNAL = 1.1; EXPRESSED IN PLACENTA, SIGNAL = 1.2
ttcatctgctccacctttccggaactctgaggccggtaggcagcatgcagtttccatgtgatccccaatacctttgccatcttctgtaccaagtcagccacaaatgccggcccgttatctgagccgatccataaaggcagtccaaatctaggaataagatctcaaagaagcacacgagttacttcacgagctttctcagttcgtgttggataagcctccacccacccagagtaggtacacacaagaactagtaaatacttgttacctccacactttggcatctctgtgaagtccacctggatccagatcttcaaagggggcttctccataagcttgtatgccaggtggaacagctagaccttgcctcgcattatgctgtcggcaggtaacacaccgctgggtcaccgttttggcaagggctgacaaatgcgagatgt

SEQ ID NO: 14110 - DNA, 478 bp, Homo sapiens
  MAP TO AL049692.13; EXPRESSED IN ADULT LIVER, SIGNAL = 1.1
agcatttcttttgcagaggctctgggacagccatttcatgtaggtttcatctcaacagccacttctggttgctcagtagtgatgatcttagagcactgcattgtagaatgtcctgatctagcatccattactgatgtctgccatggggatctggagtgtgaatgggagtggttttaggtctgcacctgccaccccttctttggatatactccagtgctcactctccctcaagacctacgtgaatgttcacatgtggcttaaagcctcccttcctcttactctctgcctgcaggatgtgcgacgtgtgcctggagtagccccgactcttgtacggtcggcatctgagaccagtgagaaacgccccttcatgtgtgcttacccaggctgcaataagagatattttaagctgtcccacttacagatgcacagcaggaagcacactggtaagtgtgcccgctgtccagtcttgggcaaacat

SEQ ID NO: 14111 - DNA, 444 bp, Homo sapiens
  MAP TO AC010099.3; EXPRESSED IN ADULT LIVER, SIGNAL =   1; EXPRESSED IN BT474, SIGNAL = 0.91; EXPRESSED IN HELA, SIGNAL = 3.6
tgcaaatcatgaaagaagaaatgtaacttctaaagttttagacatctaaattaccatcctgacaatagaaactttttcctttaaattaaaacaaaacaaaaaaaaggtggtgtgaatgatcacagcaatattgagaatgtttaaaatggctatttccttacattttaaaacaacatatgaatggaaaatttttattttgggacaattattatacactattttattaacactttcaaataaaaagatgttcaccctttcacttcttccaccatgtgaggatgcagcaacaatgtacccctctgaagctgacaatgagccctcagcagacagcaaatctgctggcacattgatcttggacttcccagcctcctcaattgttatgaactcattttctggtacagctaagttaagagacatctgggctggtgcaaatacacacgagga

SEQ ID NO: 14112 - DNA, 382 bp, Homo sapiens
  MAP TO AL021937.1; EXPRESSED IN BONE MARROW, SIGNAL = 0.94; EXPRESSED IN HBL100, SIGNAL = 0.91; EXPRESSED IN ADULT LIVER, SIGNAL = 0.99
catgagatggtgtcacagggatgttgactgctgaggacggaggatagtgttttttggtaaagtgttaggcacacactattattgttattagactcctcagtgcttatataatgcgaatagtgtattttgtgaatatggagggtgaagttaggtggctgcagcatgcagtattttccacacttattccgtgtgcaccaccttttttcctaagaacatctaaggcacaattgagggaaatgctgtttatgttggggaggtactggtgaattttaagctgcgacatagtacatgatcagatttttaattgtcaagaaaattctggcagcagggactggggtgtattggaagacaagaaagttgaagaagggatacttgcaacgga

SEQ ID NO: 14113 - DNA, 451 bp, Homo sapiens
  MAP TO AD000685.1; EXPRESSED IN ADULT LIVER, SIGNAL = 0.98; EXPRESSED IN FETAL LIVER, SIGNAL = 1.1
gcaaactatcctctgggtgcctagctgcatggaggcatctcacagagatgggatgcagggagagataagagagcctggagagtcgatttcatgctgatccccatcctgcatctgaggggccatctgttcctggataccccgtttactgataggaggtagctcctagctgctggtgggaggtgatcctggggcttcaggtgtattaaattgttgcctccctttctgcccttatcctgcaggaagcccagtgaatatattgccgccatcttggagctcagtgcccttgtgacaaaaagacaccagcagatcctcctgtacatagacttcctgtattatctcacccctgatgggcagcgtttccgcagggcctgccgcctggtgcacgacttcacagatgccgtcatccaggagcggcgccgcaccctccctagccagggtgttgatgacttcc

SEQ ID NO: 14114 - DNA, 459 bp, Homo sapiens
  MAP TO AL117258.1; EXPRESSED IN FETAL LIVER, SIGNAL = 1.4; EXPRESSED IN ADULT LIVER, SIGNAL = 1.1
ggccttggtgattaaggttgaaggagtcaaggactgcatggtcttgttggggatacaggtgaagtaaatcaaggacaacactgggtcgtattgtctgtacgtattgttgtatcatctgaattggtgtggttcagactggtcaagttgacccctctgtccttgtcaccctttctactcactcttcaacacttaagacttgctgggacttgagaaagcatcccctgtgcttttggactcttatgtctacaatggcagagtaagtaagttacctgagaagtcagccttcttcttcgtttcaatgtgcttcaactgctggcccagatcacctcctctttcctgattcccatagtgtctcttctgctcttcagcttctactctcagacagaagttctgctgttcagagagtgtgtgtgcccacaccctggaaatggaggaatgaggggcttgttctgggaatat

SEQ ID NO: 14115 - DNA, 466 bp, Homo sapiens
  MAP TO AC011413.1; EXPRESSED IN ADULT LIVER, SIGNAL = 0.94
cccttaaatctctccgagccaattaaaatttccccacaggagccccaggtacaactgacagtggggaacaagctaatcaatttcctggtcaatacagatgccacttactcagttcttaacacaacagaagcacaaagcaccaaatggcagtacctataacaggagttgtaagaacaataaaactttctcacaacctctagagtgaaaactgggaggcctggaactaaagaaacagctttctctatatgtcagaatgcccaatccctccactgggatatgacctgctataaattaaatgctcaagtaactttctgcctgagaagcagcaattacacttacaggtcctgctggaacaagcactacagctacaaatactactcactcaccctgagaagaaggaagataaagcctttcctttggaaatctacaaaagggtaagtaattgcatttgggtagacagaacctt

SEQ ID NO: 14116 - DNA, 461 bp, Homo sapiens
  MAP TO AC011423.1; EXPRESSED IN HELA, SIGNAL =   1; EXPRESSED IN ADULT LIVER, SIGNAL =   1
tctcaaagtgtaagctagattttaggcccaggaccatttccctactattaagcagaagttatctcttgagggcaaatacagtgaaatataatttaacatagctgagtttagtgtactatcaagggaaaagtaatattagcgatgtcagagtcaagtgataccattgtactatgacttcctgtgctcccaaagcttttgccaaaataaatacacagtattggacctaaaatattgcatagggctatgaatcacttctagcctcctttttctgagaaggtagttgtgatgagcattcttggtatacttgcaattcaaggcagagcagatggtgaaggctgcatgcccatactgcatcctctgatcctgtctgcagatgctcaaggccatgaggtaaacagcccctttgggcttccaatcctaactgctgaaggagtcctctctcttgtactaaatgacacttt

SEQ ID NO: 14117 - DNA, 396 bp, Homo sapiens
  MAP TO AL078590.12; EXPRESSED IN ADULT LIVER, SIGNAL = 1.9; EXPRESSED IN BT474, SIGNAL = 1.1; EXPRESSED IN LUNG, SIGNAL =   1; EXPRESSED IN BONE MARROW, SIGNAL =   1; EXPRESSED IN PLACENTA, SIGNAL = 0.89; EXPRESSED IN HELA, SIGNAL = 1.7; EXPRESSED IN HBL100, SIGNAL = 1.2; EXPRESSED IN FETAL LIVER, SIGNAL = 1.2
tgacagacaccttctggctgtgcactcacatggcttttccctgacacctatacaggaagattgagagagaaatttctctcttcctcttctttaacccttttcccatttagaaaaaaaaaaaatgcagcttgctgccagtgctcattgaattttacataaacatgctctttgggactgaagcaaatctgattttcaatgtgaaaataaaatagaaaactgttcttggagttatttctaaacagaactaacatcagaatcatctgaatcatcagaattatctatttcggaaaaatcagtttcatcaaatgaatctacggccaacaactgcttgagaatgatgttaacatcacgcgtaggaatgctacgttttctaggatttgacattttcagcaatcg

SEQ ID NO: 14118 - DNA, 465 bp, Homo sapiens
  MAP TO AL034351.1; EXPRESSED IN HBL100, SIGNAL = 1.7; EXPRESSED IN ADULT LIVER, SIGNAL = 0.69
cctaaaagggacaggggttctggtgggagaaaaaagtagtcaggcatctctcaactggaagagaagggtctggtacctacccagaatatatactctagcacagaagtgctactggtcacatctagaaagacatgggtatgtgaaagaacagtggccactctgcctgctaccaaagtagacaaaatgagctgctgctgaagacaagcgagccagccacctggcaccgccctaccagagggacgagggatgtgaattcccagcatgctctgcagcagcatggacagccagggacactcagaggccagaaggaagatgttcctgcagctgccggcagttggtataggagcgtccaggggccgcatgtgattctgatggatctggctaggtcaagtaggaagtttctgagctttacaaaagtgaaaactgtcctaactgataaggttagtcacatttctggtatcttca

SEQ ID NO: 14119 - DNA, 418 bp, Homo sapiens
  MAP TO AL096792.5; EXPRESSED IN HBL100, SIGNAL = 0.86; EXPRESSED IN ADULT LIVER, SIGNAL = 0.69
cacatatagtcccatctcttgcactacattacattacaaaaatatcctgaacacattaagtcacgtatatattttgagttttgggctctactcgtatcttgatctgaaagtctatgcagatagaagagacattgtttactctgagagtagcactgggaggtctggtttatcctttcactttcctccttaagtgtaatgaaaacttcccagatgagtgacaaatactcatataaccagacataaatttagaaacaagtgggggaaaaatgactttaaacccacttcgaactgtcccaagacattaaggggtgtgcagtgcattcactggaattagtaaaatttgaaccgggaatatttacttacactcaagaaatatggtggtgaaccccttgatcaaaagagatgaccttgaacactg

SEQ ID NO: 14120 - DNA, 475 bp, Homo sapiens; identical to SEQ ID NO: 806
  MAP TO AP000099.1; EXPRESSED IN BONE MARROW, SIGNAL = 2.4; EXPRESSED IN ADULT LIVER, SIGNAL = 1.3

SEQ ID NO: 14121 - DNA, 458 bp, Homo sapiens; identical to SEQ ID NO: 10264
  MAP TO AC007910.1; EXPRESSED IN HELA, SIGNAL = 0.65; EXPRESSED IN BT474, SIGNAL = 0.85; EXPRESSED IN BONE MARROW, SIGNAL = 0.93; EXPRESSED IN HBL100, SIGNAL = 0.83; EXPRESSED IN ADULT LIVER, SIGNAL = 0.69; EXPRESSED IN PLACENTA, SIGNAL = 0.75; EXPRESSED IN FETAL LIVER, SIGNAL = 0.86; EXPRESSED IN LUNG, SIGNAL = 0.83

SEQ ID NO: 14122 - DNA, 468 bp, Homo sapiens
  MAP TO AC004885.2; EXPRESSED IN ADULT LIVER, SIGNAL = 0.81
atgggggaattcctaaggtgacttgggacataagtaggagtgaggaaagtatttaagcttagagagaaaagcgaagagaagccttctgatgaggtgtgagcccatggaaaacggcacagggaaaatgaatcggaaatgcagcctgtggggtaacactgctgcagaaggaaacaaacgaggagagccagcgcctccacggtgccttctcctcctggaagcaggagttgaagcctatgacccctaggactgatcccatactgacatcttgtggttacaagtgtcatgacacttacgttgtcctacggcaggcatggacatgcatattcgtacaacaaccatgtcttcatttctcagcatttcaaaagcatcaaacgttttctcaaccccaagctccctgttctcagtagaggtagaagtgagcgaaggaactgctgatgaatgtgacactggcatttgtccctcccaact

SEQ ID NO: 14123 - DNA, 487 bp, Homo sapiens
  MAP TO AC006448.4; EXPRESSED IN ADULT LIVER, SIGNAL = 0.66
gcttggctaaaataacacaaatcctatagcttactaatttttcaggccaatatttgggtataatttgtgtgctttataggcctggaaaacccacaagaggccacaaattgctgacgtaactgtctttgaatttaacaaagcccattaccgtgtcagtgaggaggacgggtggaaactcaaggggctacgttttctaggcacccagaggggcttttcattgcagctactgaaataataaactcccttgatttttggcgctgaccagagtagttttaacagttcacttctaatcgcagataattctttttttattatgtcattttagatgctgttattacacatacagcaaatgttgctatgttactgaaaaccgtaaactgcacaaatgatatcagtcttaacaaaaatgaaactgtctgtagactagggtttaagggtaagggtgtgtgtgtttatgtttcaatctacccaccattcatttccagaa

SEQ ID NO: 14124 - DNA, 464 bp, Homo sapiens
  MAP TO AC006499.11; EXPRESSED IN PLACENTA, SIGNAL = 0.7; EXPRESSED IN ADULT LIVER, SIGNAL = 1.7; EXPRESSED IN BONE MARROW, SIGNAL = 5.1
agctctgtctcttggatgggggtggggcacacaaaaagatgagagccctggaaaccctctgtggtccagagacttgagcttccacacagcagcatacgaggcccggagacctccccgtaatcctttgagttgaccttgtcaccgacttgaagcttagcacactagagaaaatggggacaacacaagctaaatgtgccataccccacttctcaccattcttttccagggcatagctgtggaagatttaaatattctatatggtcacatttctcttggtcccccacaggagcacagaagtccatactcacttctacctagatcttccagctcaagccatccccaaatacatggcaatcttgactcagatgatctccaggtacagcgaggtgagtgtttcatatgcaggccatgttttcacaggtgagtagacgcacacaactaaatcggactaaagggaactggaa

SEQ ID NO: 14125 - DNA, 449 bp, Homo sapiens
  MAP TO AC007364.2; EXPRESSED IN ADULT LIVER, SIGNAL = 0.74; EXPRESSED IN FETAL LIVER, SIGNAL = 0.71
tgtttatggggattccatgagataatgcaggcaaagcatttagctgagtatctggcacatgacaatttttcagtaaacgcagtaaacggtagccctactcagagcttaaatatgtgcacaagcaactataacacaagctagcaggcagtatgcaccgtaagatgcagaggaaaaaatgctgcttgaattcagaggaaggagcctctgaaaagaggatggggagccccttcaggaaggaggtgccatttgacctgggttattccagtgctgctttgacactggctttcctttcagtagtggttcaccttctgtgggggcctaccctccaggttgtcaggggcaggctcaatctcgatgaggagcaggtcttctttgtttcctgttcacaccactgactcaaagaagtcactccctgaaaaccagcccttggcactgagcagagatggaaa

SEQ ID NO: 14126 - DNA, 423 bp, Homo sapiens
  MAP TO AF121898.1; EXPRESSED IN PLACENTA, SIGNAL = 0.9; EXPRESSED IN ADULT LIVER, SIGNAL =   1; EXPRESSED IN FETAL LIVER, SIGNAL = 0.93
ggttgaaagaggctggtctgtactgtcggatgcagaaggaaaggcaaaggatggaaggagcaaagcttttaagctgccagtaagagactgtattatcaccacaggcaagaggagtgctgagtaaggtctgcagcaagaggtgcggttggatttctgaggagcccaccgtactccaaggagcagaagaactggccctgtggcatcagctgcaccatttcagattataacattccagtctaacattccatttgattctttgttctctttcccagcttcaagcttgaagagctggagacagcagagagagtggaagagtgggaggaacaggagatcagtaaagtagataaacaggaaagaaagaaaccctacttctttctccagtgcagacttctgagactgatcagcctctatgtggggctacaa

SEQ ID NO: 14127 - DNA, 438 bp, Homo sapiens
  MAP TO AC007935.1; EXPRESSED IN ADULT LIVER, SIGNAL = 0.83
gaattatatggtttagagaacccattgaaatataacaaagtagttctccctccaaatttttaaagaagtgactattgctaccagatttacaaagaataataaaattcccaagcctggctgtgtactcgaagactggttgtctggatgctcaccaatcccatttcctcttctggggcacacagggagactccattttccaggctccttcaggatgggccatgtgattaagtcctggccaattggaagtggatggaaatgatgtacaacagttctaggactggctataaaactgtgtgatttttcgtaatctttcttctccttcaatagcaacaatggaggccatgtattgaaatcgtatgacacgaagagcctgagttttataggtatcacctgaaagaagaattcagaaaaactctctgattttgggggaagcaaaaa

SEQ ID NO: 14128 - DNA, 474 bp, Homo sapiens
  MAP TO AC007455.7; EXPRESSED IN ADULT LIVER, SIGNAL = 0.67
ggtgaccacagacctggaacaaactaaagccagacacatactatggacaccaagggctgtacaacaaccaattctccttcaaccccatgtcaaaactgctctaggattacaaatgttagtaccatctcttctaacaacggctgccatcctggtggccttacagtcaacaactgtcaaccagctggccacgttctcagaattccctgggaccagggctgccaacccactcctcgcttttgtcgcaagcccatctacctaatgaacaacttcaatgcccgtttttctctggatgactgcagctggtatggtgaaggcatcaacagtaatgagaaggagaccatgcaaatcttgaacgagcgccttgctaactacctgcaaaaggtgcgaatgctagaacgagagaatgctgaactggaatctaaaatccaggaagaaagtaacaaagagctccctgttctatgtcctgattacctg

SEQ ID NO: 14129 - DNA, 464 bp, Homo sapiens
  MAP TO AC007939.1; EXPRESSED IN HELA, SIGNAL = 0.71; EXPRESSED IN ADULT LIVER, SIGNAL = 0.71
  unsure 149
tccttaactcctaagaagaaggaatctacttagaaatccaaaatttgaatttaatgtttgagatggggcttatacacaagattatattcttccaaaacaaaggcttaaagcaatgatggttagtattacagaatctttaaagccatttngaacctagctatctaattacaataaaatgaccagccacttattttttaaattaaacctttagtgttatctgaatcttttcttgaatttgcttatttttctaggtatttccaagatgactaaattaactcgcctcagcataaataataatcttctcactggttgggaagagcatacctttgataacatgcttcatcttcactcgctttctcttgagaacaacagaatcacttcattgagtggtttacaaaaatcttttactcttgttgagttatacataagcaataactatattgctgtcaatcaggagatgcaca

SEQ ID NO: 14130 - DNA, 463 bp, Homo sapiens
  MAP TO AB023056.1; EXPRESSED IN HELA, SIGNAL = 0.85; EXPRESSED IN ADULT LIVER, SIGNAL = 0.71; EXPRESSED IN BONE MARROW, SIGNAL = 0.8; EXPRESSED IN HBL100, SIGNAL = 1.3; EXPRESSED IN PLACENTA, SIGNAL = 0.64; EXPRESSED IN FETAL LIVER, SIGNAL = 0.67; EXPRESSED IN LUNG, SIGNAL = 1.2
ggcttgccaaagcagagtcttattataataaaataatagtggaaatgatgaaagaagagacaggcaatgaaatctagaaaaaaatggaggagaaaacaacccagagcgtagaaggactaaaacagtactgtttggtacctgagagagagatgaaacacatagaaaggcacatacatcaaacaggaaaggctggagaatttaagaacaaaccatttagacaagtactacaaccccccaatgaaacaaaattaccaaaaattatgccagaagggcatggcatccagaacgcacagagaagaaagcaggtaaatgagagggaacagatgcagactaaggatcaccaggaacgcatgattcgagggagagaacttgcagaacaaagactcaaggagagaatcttgagaagaagccagagccagctacttacatatgagaagcatgagagagtaaaagagataaagga

SEQ ID NO: 14131 - DNA, 438 bp, Homo sapiens
  MAP TO AC012444.1; EXPRESSED IN FETAL LIVER, SIGNAL = 0.98; EXPRESSED IN ADULT LIVER, SIGNAL = 0.95; EXPRESSED IN LUNG, SIGNAL =   1
tgcagcaaatgtaatcttccacatagaaaacccaaaagcatctacaaataaattgttggaatttataagtgaatttaggaagattttcagacatagagttaacaccaagtaaattgtattcttctatattggcagaaataattagaaaataaaaattttttaaaaagcatttacatttttattcatttaatttcattataataaaatcatttattcctaggtatacaaataaaccgaaggtatacaagacttctacacaaaaagtactttaaaatactgagagaaattttaagagatcttagatatattaaggaatatacaaaaatggccagtaatgataagactgttttaaagaaaaggaacagagttgcagaattgatagtgccagatatcaagattgattaggaagtaacatcaactgaaacagcatgcaattgg

SEQ ID NO: 14132 - DNA, 484 bp, Homo sapiens
  MAP TO AC006548.19; EXPRESSED IN ADULT LIVER, SIGNAL = 0.79
tgcctcagtttttcatttttgttatgtgcaaaataaaatcatatcctgctatagatttaaacctgtgagcagatcctactcaaaacctgattcaaactttgcgtagatctttgtctctctatggcataagaataaattcttctgatttccttccctcagaaaaatggacttagacttcccacaagccttccagaaagaactcgcctgcctcatctgcctgaattacctcatagaccccatcactataggctgcgggcacagtttctgtaggccctgcctctgcctttgctgggaagaagcacatattcctgccctgcatgcagggaactgtcacagcaggaagatttcaaccaatattcctctgaagaatctagtgtccattgccagaaaagccagtctctggcaattcctgagctctaatgaacaaatgtgtgggatccacagggagacaaagatgttctgtgatgtggacaagagcttgctc

SEQ ID NO: 14133 - DNA, 491 bp, Homo sapiens
  MAP TO AC005399.14; EXPRESSED IN ADULT LIVER, SIGNAL = 0.92
ggagacataaataattgaaatgaacgattaagcgttctcaatattaaggtaagtggagggcatgatgtgatcccaggaaatgagcttgataagtaacatagacatttcactaaggtaagattttgccaccagctcggcccagttgcacactgtttggaaatacagagtctttccatcctagagtggtattgcggttggtgatatgatatagaaacaaatgcctccacacctcctgatctgcttttgcagacctccagcctcagtccctgaagtcgccgactctcctgcattgctgcgtctagaaaggaatgccttccaggtgatccaggctctgatacggtggaatataaacaggttaatcaataatagcccagaaatggacaaactctctgagctgcagcggacctccagtcagtccctcctgttgttgatgacaaacggggggtttgcactggagaggcacaggtggcccagtcattcgtgcaggctct

SEQ ID NO: 14134 - DNA, 470 bp, Homo sapiens
  MAP TO AC006499.11; EXPRESSED IN ADULT LIVER, SIGNAL =   1
ctgggatgctaggaaaatgacactaattttactgccttcaaatttttcctgatgagttttctcagggaaggatgagttatgggtacttagatagaacggaaatatctatgacttattctggttaccttcaaagtaggttataaaataagtattctggacaggacttgcatcaacttcctatttctgtggtaacaaatgagcaccaagttacgtgcttaaattagagtggtagagatccaaagatagaagttgatttcacttagacaaattaaggtgtagtcatagttggatcttatctggccttccagtggacagtctgtttccttggctcttctccaccttttagcagcccttgattcttggcttttggctccatttttggcttcagaagctgggacatcccgtcagcttcagagatgctctgcgtcttgaaatcggattctcattctgctgcttcctccatcttctgc

SEQ ID NO: 14135 - DNA, 479 bp, Homo sapiens
  MAP TO AC006390.8; EXPRESSED IN BONE MARROW, SIGNAL = 1.3; EXPRESSED IN BT474, SIGNAL = 0.67; EXPRESSED IN ADULT LIVER, SIGNAL = 0.65
ccttgggtagtttccttgagctctatatgctttaattttctcctttatcagatggcaataacaagaatagtatctaccgcacacggctatgtgagagttaaatgaggtcatctacagcaaaatgtccagcacagcagccggcacttggtaagagtgagcactcaatgacaccggctgcgattgctatgatctgtcctcctgcgactgttttaagaaggcatgtaaggcagatggctatgacactgtctaccccgcacccctctacatggtggtgggaggagctgcctttcatcagtggcatgcctgatcatgcccatctgaccctgaaacaggccattggcctgagcctggaacttgggagcagccttcttccagcggccaaaggtgtaggggctccatcccagctgcagttggcagtcacgcttccgcttctgaggaggaagcaggcgcagaaaaggagatgagagctgaggagaggc

SEQ ID NO: 14136 - DNA, 389 bp, Homo sapiens
  MAP TO AC007200.1; EXPRESSED IN ADULT LIVER, SIGNAL = 1.1
ccacccccaaatcagagtaagaatctcttgggggttttttgtttgttttttgttagttttcatcactgtaactatgctgaaattcaaagcagggtgggcagatattacacaacttcatgaaatatactaaatataccagtggaaatcaaatgtgaggcatggttagtttctgctggcagacttacttgagattttctgaagaattcttcaggtttcctccagccccatttgttcctgatgctgatcagtgttgatgattccattatcttctttatgttacagattcctccctcccccaatgttcactctattgttttattatgtgttgacatcagcctgcggacgatggtgttctggcagagtccccttccgtggctttctgaatacca

SEQ ID NO: 14137 - DNA, 494 bp, Homo sapiens
  MAP TO AL096794.3; EXPRESSED IN PLACENTA, SIGNAL = 0.65; EXPRESSED IN ADULT LIVER, SIGNAL = 0.67; EXPRESSED IN LUNG, SIGNAL = 0.63
gaaggctcagcaggacacagggttggtttaatgaaccatgcaaatctcaaaagtggagcccactcctggaatagaaaaacgcacctgattcttagactgccttatcatatggccaaaaggaaggatgatcttctctatggttttgtgaatttttaggtgctttctgtcaggccactctgactcccaaaggaaataatttttaaaaccattgccaagccaaaatggaaggtggaattgcctaatattttagagaaaagaatcacacaactctatagaatatgaggtataacttacaggcttggctttgatcctttgccatctttagaaataaatgtttctggagccagaggccagaaataaacaccatgttttatccacagggagaaccatattctgccctgtcccttatacacagtaaaatgctttgaacttttctggacatcattagggatgtgtaaagccaacattctgactctgtaagagcatcacgggac

SEQ ID NO: 14138 - DNA, 451 bp, Homo sapiens
  MAP TO AL049874.2; EXPRESSED IN PLACENTA, SIGNAL = 0.59; EXPRESSED IN ADULT LIVER, SIGNAL =  11
aacaactaacagaccataaccaaggtgtacaattcctacattgcaaacaaagcccaaaaaggttgagttgtcactgatttccacatatggagccttactttttctgtacctatattttgaaaataagcatctttcctgggcaggccacataacaggatttaggagaaaaataaaagagactttaaaataaaaactataaaaattattacaaccttgagcaagctacagagagtcctaggacatttgcttatacacctgggcatttatgaaaactagaggaaaagaaaagatgcatttgttatgacagtaacactccactttgctttgcaagaggagagagtcctaccgtggtttctctgcccacacctgacattcaagggcattttgcaaaggaaatcagtgaggatgaaaatccaagtcacttgatggctgcgtgattcaaaaggcaaaa

SEQ ID NO: 14139 - DNA, 454 bp, Homo sapiens
  MAP TO AC000052.8; EXPRESSED IN ADULT LIVER, SIGNAL = 0.65
caatataatgtgccctaaaggtgaattaaactcatagattacccaggttgcatcttctatttattagaattgtcttttgtgacctatagttctgtttctatagtttctataaactatagtttctataaacaatttctgtaaactatacctagaagtcaatcctcctgtcttcctatagagtataccaagatgtctgataatttagagaggtgtttccatcgggcaatgatgaaacattttcctggagaagatggagacacagatgaagaattttggattcgagaggatgaaaagcgggagaaaagacggagtcgggctgggcgaagtggtgggagccatgtttggacccgctccagggacccagaagggtccagcaggaaacagcagcccatggagaatggaggaaagtcgttgccccccacacgccgagcgccctcttctggggacgatcaga

SEQ ID NO: 14140 - DNA, 450 bp, Homo sapiens
  MAP TO AL049835.3; EXPRESSED IN HELA, SIGNAL = 0.69; EXPRESSED IN ADULT LIVER, SIGNAL = 0.88; EXPRESSED IN HBL100, SIGNAL = 2.5
tgtccacaaaaatgacatctccaaagagttctaaaatgtcacgttgtttatcattgtagctattacttcaataggcaacagctcatcagtaatgcctcagaactcagaattaacttcagtgacttcaaggaatctatatcaagaaggaaacatagtagtggagtgtcatggacatcccacttatttttttagggttctctgaagaagtattaaatgtagggagggatgcgatgcaaaacagatgaaaccagtacatttacctgtgggtcctttaggcctctgagtaactctcatcaggcttaccttggcagcaatggctgctgcagttatatgtgatgaggaactatcttctgttgaagcaacaccactgtctttcttctcttcttcctcttcctcacattgaactcctttgtcttctgtctgtttatgggggctggtagtaggaggagg

SEQ ID NO: 14141 - DNA, 496 bp, Homo sapiens
  MAP TO AC007158.5; EXPRESSED IN ADULT LIVER, SIGNAL = 2.1
cattgtcaagtgagataaccaacacttaaaaaagaaatgcctggtgttaattatttgtttcactatagtaaccatttctctatctttctctctctctcttccctctttctctttcactccatatatatgtgtgtgtgtataatagatatgcatacatatttacatatttatatatgtaaataataacatgttatatgccttaaatatacacattacaacttatttaaaataaaataaaataaaataaaattacctggaaactcttgtcatcataaaaacaacttaatgctgctggaagcaggttaacttaccctagctgcataatcttgaaaaccccaggtaagttttgggtacttggagacattgatcttttgcaaatctgagaagccagcacagcccgtgtctcctttaagtgaatcctacgatgatacaaaataagatgtggcagtcaaaaagatgtttgttgaatactctcattattcaccttccactagaa

SEQ ID NO: 14142 - DNA, 471 bp, Homo sapiens
  MAP TO AB020875.1; EXPRESSED IN ADULT LIVER, SIGNAL = 1.6; EXPRESSED IN HBL100, SIGNAL = 1.2
catcattttctagatgcccttgaatatgttggagtcttttaaagccccctgtaaatgtttcatttttcagctttttcctttaagggtcttagctagcctcttatttgccctaattgatacaacttgtatcactgcttcaggcagcttcaatttaaatgatggacactgttcatttttcacaaacaccctggggatacagcatttccccagtgaatgagctctgagtcagttaaaataaagccagtctccatgaatggggctttccagggagttgtcaggcaggtcaaatagtgatagttctctaggaatggacttttgggagatctctaaacactttctatcccatccagtagctgtaagactgctggttttcacaattaccatgctcgtgaggctgttggttttcactgctactgtgcaggaaaacagaaatagaaatagtgtgtgttaaaatgctacaaagctctttgc

SEQ ID NO: 14143 - DNA, 490 bp, Homo sapiens
  MAP TO AC007115.1; EXPRESSED IN ADULT LIVER, SIGNAL = 4.1
caagtcggtgaattattctcaatgtttgcaaaatgctttgcatatggtgcctactaactaatgtatattaattaagatctgtgtatgaaatgttgacatattttcacctcttccctgaagaagcaatgtttactgatcattttgatgtataaaattatctaaaggtcaagatcttcaaatatctaacagttgtgttcctttttctgtaggtgctataatggcaggcacaatctgtttcatcatgtgggtgttattcataacagacactgtgtggtctagaagtgtgaggcaggtctatgaagtacatgattcagatgattggactattcatgacttcgagtgtcccatggaatgtttctgcccacccagttttcctactgctttatattgtgaaaatagaggtctcaaagaaattcctgctattccttcaagaatttggtatctttatcttcaaaacaacctgatagaaaccattcctgaaaagccattt

SEQ ID NO: 14144 - DNA, 472 bp, Homo sapiens
  MAP TO AC007739.1; EXPRESSED IN HELA, SIGNAL = 0.76; EXPRESSED IN ADULT LIVER, SIGNAL = 0.68; EXPRESSED IN PLACENTA, SIGNAL = 0.92; EXPRESSED IN BONE MARROW, SIGNAL = 0.65; EXPRESSED IN LUNG, SIGNAL = 0.73; EXPRESSED IN FETAL LIVER, SIGNAL = 0.58
tcaacttgtttattgaattttgttcagaataatcatttcactctgactttgggcaaacctgtttcaaagtacctttataagctttcattagatgttaatgtctgaagcatgttcagagtgctttctctgccatctgacagtggtgtcctctcaattatccaagccctcatgatcagctttgggagttgtgttcctccctcctgctgtctgcttttcatacccttctccattcattagcgcctccaccagaggggggcaaggaaatggaaaagaggtgaaatacgactcccaaactgacaaagagatcaatggaacaggagggtccagaaaccagttctcaaaatggtcatttttccttatgttagggatgctggaagaaacttcagtaataatacctcccaagttacctgtggatttgagagggagaatggtatctactgtctactcttgatttgtaagttcgtttgtccca

SEQ ID NO: 14145 - DNA, 447 bp, Homo sapiens
  MAP TO AP000177.1; EXPRESSED IN ADULT LIVER, SIGNAL = 0.76
aaagaggaggcgacaaatagcatgtccaaatgccaccttctgaatcacttataattctgccaccaaactgaatagaaaatgccagacccaggttacatgggctcctcctttaggaaataggccatttgaaattttttcacaatctctgttcttacatgggctgtggaaaggtcatctgagacatcccaattatcacccttaatggtttccagtctgcactcatctgacctgatatccgtgatatgtgacacctccccacctccttcggcttcctgcatcccttttcagttgcacaaccccctcctgtgtcccagtctcatacgaccaacagatgtcccacttgcacttcatgctggagatgcacaaatgcgcgctcatccccgcccactacaggttgggctccctccgctgacaccttagttgctgtccctgtagcatcatgcactg

SEQ ID NO: 14146 - DNA, 391 bp, Homo sapiens
  MAP TO AP000236.1; EXPRESSED IN ADULT LIVER, SIGNAL = 0.94; EXPRESSED IN PLACENTA, SIGNAL = 0.62
tgcatatggtctaataacccagcaggtatgctatctttttaggtacgaaaccaaacatactaatttttaaagcaacggggagatctttttccagatggaatcttctactttggtttcaggtaactagattgtcctctcatagtctaagaccaagcttattagtcagtgtctctggcatgacttactggatgcattagggctgaactaaccccctcacctgacctgtgcccatagaaccttttgccctgtcatcccttctgtcagcctttcctggtgtatttcctcacccacaatgttaggaggggacttgttcccagactgtgtcgagggcatcgtagcacttaggaatgttggctgagtgaattgcaccacaatatcagcttcatggggc

SEQ ID NO: 14147 - DNA, 426 bp, Homo sapiens
  MAP TO AL031586.2; EXPRESSED IN PLACENTA, SIGNAL = 0.92; EXPRESSED IN ADULT LIVER, SIGNAL =   1; EXPRESSED IN LUNG, SIGNAL =   1
caaaaatccttgctttactggcacttacattttagtgaggaataaatgttaattatcagcattattattgttgccatcattgttatcaccatcatcatgaatattatcaatgaatgtccaaaaactctctagagatcttagagtctccgaaaataatgatattcctcaaggaagtactgtgggtgggtcactaggcttagtggaaaaattcaggttgtggccaatcaactctttattacacatcaggctcttactccatcaaagggtatcatgccaacttgtttagctccaaggattatataatggatcaattcatgtgcagtgataatgctgggaaagaaaatagtcaaaaggtggcagatctacagaaccctaagtcacagctgcaattcctggggcagagtgtccctttgatcccatctttca

SEQ ID NO: 14148 - DNA, 457 bp, Homo sapiens
  MAP TO AC007971.2; EXPRESSED IN FETAL LIVER, SIGNAL =  62; EXPRESSED IN ADULT LIVER, SIGNAL = 3.7
ttgcttgaccttgcattagcagtgagctttattctctattcctacttgtagagtgcatgcagttaagtccataaaggtcctttctactcccaacctcagcaccctaagccatctaagttaaagctggaaatatagtgtagtggtatttatcatgttctttgaccacccagaatattctattttgtaaatttggatataatgcattaagaaaaagtacacaaatagtaagtatacagctcaatacattattttgtgaaaatacctatgtaagaactaatgttggcaattaaagtaaacatgaataaaaccttcaagaagccctcaacatcccacttccaagtcaccaaacccactattccattagcaatgtgtgagattgtcagttgctctgcaactgtgttattgtcacctgtggtaacaacatatatggtcttgtcagtctttttcacgttagcca

SEQ ID NO: 14149 - DNA, 450 bp, Homo sapiens
  MAP TO AF155238.1; EXPRESSED IN HBL100, SIGNAL =   4; EXPRESSED IN BONE MARROW, SIGNAL = 0.91; EXPRESSED IN ADULT LIVER, SIGNAL =   1; EXPRESSED IN FETAL LIVER, SIGNAL =  10
aaaacaactattttattgtgctcacgaattctgtgggtcaggaactgggacagtgcatggcaggggtggctcgcctctgctccagggtgtctgggacctcaactgggaagactcaaccaattggggtgactcaatagcaggcacctcgggcctgctattttcggtttttacagatggcacttttggtttttacagatggggcttcattcagggctggtgaccagagcatctgtcacaacctctccaggtgatcaagacttcctcacagtactgtggctcaggggagtcgaacctctcacctgtcagctcaggtttccaaaagcagcgtccagtggaggaggtggaagctgctttgcagggaacataattactctctccatgccctgctggggtggagccgtcgcaggctgagtagtccaggggcgaggcagaaactgccactctggttgg

SEQ ID NO: 14150 - DNA, 459 bp, Homo sapiens
  MAP TO AL049610.9; EXPRESSED IN ADULT LIVER, SIGNAL = 0.94
ccccagaggtcattatgctcttgcctctctggctttagagcctccagattagacagaaaacatggagtcagagctgaagacagaccagaactctgtgtctctaatggttaagcaaccagtatgtagctcagttaagcctttcagctttgctcataattggacacttgcttctgtgaggctggcccaggcacctctgttgtcatgacaacttacctagcacctattgtctgggcaattgggggtaaactgcctctgttgtcatgacgacaagatttcttttatatttccccaggtgatcactttactgtagaagaaatgaggttaacagaaaagagtgagggagaacaacaactcaagcccaacaactctaatgcacccaatgaagatcaagaagaagaaatccaacagtcagaacaggcaagtggtggtttctcaattccaacttagttatgggggtcc

SEQ ID NO: 14151 - DNA, 476 bp, Homo sapiens
  MAP TO AF152365.1; EXPRESSED IN ADULT LIVER, SIGNAL = 0.93; EXPRESSED IN BONE MARROW, SIGNAL = 0.97
agctcgcacttaaacaaggctggttggatagataatccagacaaatgcagggttccataacagagcatttttaaatgtcttaggctatcacctaagccacaaacaaaattgatttttccagacatgttccagtgtctgcttaccctttcctgctaccaactgtcatctcactcccctgataaaactcttgacatgttttgcagtatcctctactcccttcccattccaaacagctgtcttcccttcctggcagaaactccctgacatctggatactcaggatggctactgttatgatggacagattccattttatccaactacccagctccgagaatataaaaatgagcaaaaggaggagaagtgtgatagtttcaccagctacacaaatactagttcaagtaatggctatattaaagcattagcatgttgaataattttcttttaaaagtccaattttgtgacatctgtaaaatg

SEQ ID NO: 14152 - DNA, 451 bp, Homo sapiens
  MAP TO AL031121.5; EXPRESSED IN FETAL LIVER, SIGNAL = 4.1; EXPRESSED IN ADULT LIVER, SIGNAL = 1.2; EXPRESSED IN HBL100, SIGNAL = 1.8; EXPRESSED IN HELA, SIGNAL =   1
tcccccactgctttgtactgcctgttttactgtatattccattctgactcaaaattcagtctatttgcattagtttaacaaacacatgctgagtcccaccacgtgcggggcactattctgggtgctgaagatgcaacagtgaacagcttggctgtcacatctgtacttacagaggattctcgttggaggagacaagataaacaaggaaataaactatcatctatcacatggtgatcaatttcatgaagaaaaataaaacaaagaaggggaatagaaaattccagccaggtggtgaggtgcaacctaaagccaggtggttagggaaggccttaccaagaaggggacattgacaaagacccccagggatgatggatccgtgaggaaaacgttccagcccacagaaagcacatgcaaaggccccaagaagggacacgtcggtgccttgaaggag

SEQ ID NO: 14153 - DNA, 469 bp, Homo sapiens
  MAP TO AC009236.1; EXPRESSED IN ADULT LIVER, SIGNAL = 0.66
aggtcaactcaagtaattgctaaacttctaccatgagtccaggttcatgctaaggactcccgtaaacagaaaagaagccagagtatggtccttgctgtttaaggagtttacagctggaaaaaattataattccatattggaaaaatgatgatttgtaaaattcacccaagtctagcattcaatgtaaaaatgggtagaatagtgagtgaagcaggagttcaaagggtcagaggactgagtggccagggcagactttacagagaaggtggaacttgaccctgctccacgtctctgacaggaaggcctgtcttccttcccgtctgcccccaggcatgcaaggaccaagccagggtcaaggagtggaagagcagcttatcctccagaagcctagaggtgaggctctaagtgggaactttctcctggcctatctttttcagtgctgtttgtttggcaagggaacagattttcc

SEQ ID NO: 14154 - DNA, 451 bp, Homo sapiens
  MAP TO AL031591.18; EXPRESSED IN HBL100, SIGNAL = 0.72; EXPRESSED IN FETAL LIVER, SIGNAL = 0.6; EXPRESSED IN HELA, SIGNAL = 0.76; EXPRESSED IN ADULT LIVER, SIGNAL = 0.67
agaacaccaggtcctcttggggacgtgctgtatggggaaagggttctctacagaagcgctgggcaaaccataaggtaagcactttgaacaaaaagctgctgtgcttgtctccaaagaaagtcccttaaaacctctgctgccatctgtctttgctgctttgaggtataaagaagggctgaaatgaattatgtagggacaataattttcatatcataaaggaggaaaaaaagtaataacagagaagatatcccattaatagctagctccgatctcatcctaaatctaagtcaccacattttgagcagattttaccttttgaatgaagttttctactttgctttgcagtccccaccacttgaatttgatggtcaccagcttataggcacacatctggggacagtcagggctgtttgccagctccttctagatgagaaaaattgaaaaggagaaa

SEQ ID NO: 14155 - DNA, 445 bp, Homo sapiens; identical to SEQ ID NO: 13820
  MAP TO AL121756.6; EXPRESSED IN ADULT LIVER, SIGNAL = 1.1

SEQ ID NO: 14156 - DNA, 439 bp, Homo sapiens
  MAP TO AL021327.1; EXPRESSED IN LUNG, SIGNAL =   1; EXPRESSED IN HBL100, SIGNAL = 0.98; EXPRESSED IN FETAL LIVER, SIGNAL = 0.92; EXPRESSED IN ADULT LIVER, SIGNAL = 1.1
ctgaacactgcttctgctgctctgggacttacactagtggccatggtattcccaaggccataaaatacatgaccacaattagtgggcagaagcaaatctccctggaaaaatctttgtacgcacaatgccttcccaaaggctttgaccagagtgtgttatctgtcatcatctactctattgcataaaccacctaggcccctctgtggaagccattcaatcaagataaagtccctttactttgataaagagaaatagcaaagtacaaagctgatatttcctacctaatgccccttccaagccctgtcttaattgacttctaagctctcgtgtctgactttttatggtgattttcttctgtctctctcttcttcaacacttctttctgccaaaaaaaaaaaaaaacaaaaattacataggacatgaaaaccttctaaatcaa

SEQ ID NO: 14157 - DNA, 396 bp, Homo sapiens
  MAP TO AL021393.1; EXPRESSED IN LUNG, SIGNAL = 0.98; EXPRESSED IN ADULT LIVER, SIGNAL = 0.97
ctctgcgataacacggaaggtgcaaagttgtgtttatttttcagatctctagcagagaatactctaatcccatgagttcttgttcctattttttgctctttaacttgggccatttcttgagtacaggctcctcgtggacacctggctgcttcctgccagggaaccggtccctctgagcaccttcagagatggcaccctgactgcaaagagcctcccagagcttttgtttaatggccttgcccagctccaggctgtacctcttgggggtccctgaaggattccacagcattggctccaccacagcgtggtacagagcctggtaaccctctgtggggagaccatggatggttagcgtgtcctccgacaactgctgtctcttttgggtttcaggaagca

SEQ ID NO: 14158 - DNA, 382 bp, Homo sapiens
  MAP TO AP000136.1; EXPRESSED IN ADULT LIVER, SIGNAL = 0.66
tgtggagaataaagggaagggataagagctaactcaaaagtttcaggctttggaactagatacaagtttgaaacactgaaaaagaacaagatgtgtgataggaggccttggagattgtgatattttgggggacatgttgaaaatgggatgtttctgagacatacaagtggaagaatcaaccaggcacctaattattcatgtctggagctcagtaggaaagccagcactacaaagacaaattgtgaattctatgatgtctttgtattaactcaggctgtacatgaaagtgtaaagagatttcctagcagggagagcatagagtgtgaagaggagagacaaagattgagctcgacccaggaaaggacggaatgtgcaaaggagt

SEQ ID NO: 14159 - DNA, 472 bp, Homo sapiens; identical to SEQ ID NO: 310
  MAP TO AP000117.1; EXPRESSED IN FETAL LIVER, SIGNAL = 0.94; EXPRESSED IN HELA, SIGNAL = 0.78; EXPRESSED IN ADULT LIVER, SIGNAL = 0.7

SEQ ID NO: 14160 - DNA, 466 bp, Homo sapiens
  MAP TO AC009309.1; EXPRESSED IN HELA, SIGNAL = 0.67; EXPRESSED IN ADULT LIVER, SIGNAL = 0.76; EXPRESSED IN HBL100, SIGNAL = 0.75; EXPRESSED IN FETAL LIVER, SIGNAL = 0.63
ggaagagaaagatgtgtatagagaggtagtgaaggaaacttcagtcatagaattaaagacctaagagcatggtgtcacaaaaatcaaatggggaaaatattaagatgaagagcaaataaatacagaaagaattttaaagttagtcttgtgatcaaagctaactccacactttaaaaggcttatcatccaaatattgagggtattcaaatagctactgaaatattagccatgaaagcctggtttaatttacatttaaaatagtattatgtaaataatgtaactacctctccttaccggtatatgaggttcagctatgtccttctgaaaatatttggggtatgaattaataataaacttggccacattctccccggatttctttgccagtaaaaatgaacgctatataaagaaaaagatttaaatacatgtaatttaaactcaagcaagattatagttacactctcag

SEQ ID NO: 14161 - DNA, 454 bp, Homo sapiens
  MAP TO AL034431.13; EXPRESSED IN BONE MARROW, SIGNAL =   1; EXPRESSED IN ADULT LIVER, SIGNAL = 0.94
ggagacagtcaagctggaaaccagaagtttcttggagccagggcaagctgaatctcagatggggggtgaagagggggatgctcctcttttatccaatatctctctggtgtcatttatttactcagcaaatgtttgctgaggacctactatgtattagagcctgagctgggcactgggatgacaaagttatgcttcctaccctcaaggtgctcactgttgaggaagtgagtcaagcaggcagacggtgacagtggagtcaggagtggttattaaaaaatgttgaggaagagcacctcacccagactgagggcatctgtggcgacttcctggaaaaggtgatgtctcaactgagtcccgaagacaagtgagagaggtggcagccagggaaggaagggcagtccatgcagaagaggcagcaggatggggtaagagctggtctcccttccaggatcag

SEQ ID NO: 14162 - DNA, 474 bp, Homo sapiens
  MAP TO AP000167.1; EXPRESSED IN FETAL LIVER, SIGNAL = 0.57; EXPRESSED IN HELA, SIGNAL = 0.6; EXPRESSED IN ADULT LIVER, SIGNAL = 0.67
gagaggggaagggacgtgggttgggtcgggggaggccaagtgaccccaccatgttgcagaagaacctcagctgggtcacaggaagtggcatgcgggagtcaccatggaagccacagtttaaaatgtcaggccaccttcctcacagctgaggagggggcagataggctgatgggggaaaagtgcatgaatttttctggttccatcaatgcctctgagaatcagcaaagagcaaaaagagcaaagcccagagacgtgacctggttgaggaccctacgctccttgaaggcaggaatcaagccttgttcatgtttgcatttcaacaccaagcgcagctccaggctccaagtcgaggcccaggaagcgctggctgtcctgaaggtgctcagtctgaaggtgtcgggcccaggtgtaggaagcagagccagaggaccaggatgggaaggcactgggcccgcggtggtgagtttctgtaga

SEQ ID NO: 14163 - DNA, 365 bp, Homo sapiens
  MAP TO AC008166.1; EXPRESSED IN FETAL LIVER, SIGNAL = 0.58; EXPRESSED IN LUNG, SIGNAL = 0.71; EXPRESSED IN HELA, SIGNAL = 0.9; EXPRESSED IN ADULT LIVER, SIGNAL = 0.7
aacaaactcacttaacagtgaccggtagtagcttccttttagaatcacctacgctttcaaatacatattaatgatcatgttgattgaatcaaagcctttaaacaggaattaaattttgttacagcttgctttttatttctatctttatgctgcctctgaatctatgaatagctaattatttcacttctctgtgtctttggtatgaccaacaccagtagattaataaaaaattaaagaaaacaaataaaagaacttctatgaacacttacaattcaagcatgaactcttctgtttctctcttgaaatataatttgaactctttatgttgtatgtagccaaaaatcacagatgatgcagccttaagc

SEQ ID NO: 14164 - DNA, 454 bp, Homo sapiens
  MAP TO AL021307.1; EXPRESSED IN ADULT LIVER, SIGNAL = 1.1
acatcttattcttccacttaaaatagcatacacataatttatatggatatatggtcatattttaatggagtaattatacatatacctttttgatatatactagcatactgtacatgatattctacaccttgctttttccacattacaattatgtttttcactcgttattcagtactctattgtttgtattattacactttctcaatctttgtgttatattttttctgcagtcctaatcatgcgatacgtaaacaaaatggtcaatgtgtacgtaattttgctagataatgccgtatttttatttacagaaaatatacatattatgtttccaacagcagtttgtgagaatgtatttgcctccacaatctcagccatgtatgtagcaaaatagtaaacatttgtcagcctaataggtgaaaaacagtatcatgcatgcagttttggtgtgctgttc

SEQ ID NO: 14165 - DNA, 481 bp, Homo sapiens
  MAP TO AC006346.1; EXPRESSED IN FETAL LIVER, SIGNAL = 2.5; EXPRESSED IN ADULT LIVER, SIGNAL = 4.4; EXPRESSED IN HBL100, SIGNAL = 1.6
tcatcccagagtgttcaaataaagagattttaataaaggagttatttgcataaattgtagacagacttaaggagcaaacaagatggcagggcacccaaaggatagcaatggtgagaatataatactacccttagggataaacagtcaaggaaaaggagcagtgtttccttaggagccctgcatcagaagaggtacagaggagaacagggtgaagggagttatatcctgaaaggacatgatcacggccagcgcacaggaccgaagtaggacatgaagaagaaatatcctgacctctttctcttcctgccctccaatatcctgctagagccttccataggccccacccaagataaacacagagagcagagagtcccagtcatgcaaatgacaagggtcagcttcgcagagcacagggaagacatggaatagtgttgagtgcatgggggcatggcaaatggagaacaatttgcacagtctgagc

SEQ ID NO: 14166 - DNA, 360 bp, Homo sapiens
  MAP TO AC004852.2; EXPRESSED IN ADULT LIVER, SIGNAL = 0.91
agctgccctacaatagtgtttctttatatccttattttgtgagcttttttctatttctaatttttaaaaatgtttttaaaaattaaaatttctaaaaaatttaaaaaattaaaaataaaaaaaaatttttaaatgtttttttaaaatgttatgtttttactttttaaacctttttgttaaaaactacacagaaacatacaccttagcctagacctacccagtcaggattatcaatatcactgtctgccaccctcacaccttgtcccatcgaaaggttttcatgggcaataacatacatggagctgttatctcctgtgataacaatgccttctcctggaatgcctcctaaggaacttgcct

SEQ ID NO: 14167 - DNA, 422 bp, Homo sapiens
  MAP TO AC007103.4; EXPRESSED IN ADULT LIVER, SIGNAL = 0.78; EXPRESSED IN PLACENTA, SIGNAL = 0.6
ttccattgcagagatactccacttttatttaaactttcattggttgatagatacttggtttgtttcgactttctgacttataaataatgctgctatgcataccttgtgcaaatttttgcttgaatatatgttttctatttattttgtttgtatgcccgggagtggaatttctaggtcatacagtttaaccatttgaggactgccagaatgtcttccaacatggcagtcccaactgggatgaggtatgcaggttccaatttctccacatacttgccaacaaatgtaattatcagttttttattattaaagccatccttgtgggcgtaaagaacctcattggggtttccaataaggtttccctgactgctaatgatatcgagcaccttttcatgtgtctttttagacacttgtgtgtcttcttt

SEQ ID NO: 14168 - DNA, 471 bp, Homo sapiens
  MAP TO AC007130.2; EXPRESSED IN BT474, SIGNAL = 0.74; EXPRESSED IN LUNG, SIGNAL = 0.8; EXPRESSED IN FETAL LIVER, SIGNAL = 0.58; EXPRESSED IN HELA, SIGNAL = 0.59; EXPRESSED IN ADULT LIVER, SIGNAL = 0.84
cagaaaagtgtttcttgtatttcaacataatagaagaaatgggggtcccacataaaaaggataatatagcttcaaatgcacaacttcaaatgcacaggcaatacattttatggctatggcaaagagtattcatgctctcctgggtcctattgcttgtccaataagcaaagtctattaaagttcaataatgaagtactttcaaaatgttcttggatcaactcatttatctctcatgaatatcatttttttaacatcagaaaatcaaataggaaagcctataaaaatgttagtataaaaacgtactattcaacaaacctgattccaagattcatagcttcagcagttccaatcatactaatagctaacagcatgttgttgcagatctttgccgcctgaaaataaattgagtacatattaaatatctgtattttcaaggtaaaactcacaggacgtttttccttgcccaattcc

SEQ ID NO: 14169 - DNA, 393 bp, Homo sapiens
  MAP TO AL121575.6; EXPRESSED IN FETAL LIVER, SIGNAL = 1.7; EXPRESSED IN ADULT LIVER, SIGNAL = 1.3; EXPRESSED IN BONE MARROW, SIGNAL = 1.4
ttggctacgctctaatcgtggttttcttacaaggtggattttgggaaaaaaaatcacagtttttttagtaatgcaatcgatgtaaatataactagttagtgagcattaagtgtaagttatgctttctctattgttttaactaattggcatctccaattcagaacctatcagaaatatcagacactgtgactcaaaggaaaaccaagtgggagcattgagtgaataatatgatgtatgtagtgacactgcaaacctgatgttcacacaaaattttttccccaaaagtttggcaattggaagcatctctggccatgccagggtccaccctgatcttggagtcatctgggtggatgctcacactgatatcaacactccactgacaaccacaagtgg

SEQ ID NO: 14170 - DNA, 374 bp, Homo sapiens
  MAP TO AP000076.1; EXPRESSED IN HBL100, SIGNAL = 0.91; EXPRESSED IN ADULT LIVER, SIGNAL = 1.2; EXPRESSED IN LUNG, SIGNAL = 0.93; EXPRESSED IN BONE MARROW, SIGNAL = 1.5
ccattaatgactgaaccttgacactttctcaatctgactattcaggacataatggtatattcagtgctgtttgtgttaaagaagagagaaaaatgtgacttgaaacagttagggaaaggtttctttgagaatttgaactgcctctttaacctacatgtaataccagtaggtagaaaggaagattaggaatttatgcatcaatttggaataaataatgccattaaagaaagatttctttaatattctgctgaggaatttgttacttacctctgaagggcatattactccatctgtcaggatatgccttctcttggtagcattacaactcaaaggcaagtcgatgggaaatttaatcctttccccaggcatagtgt

SEQ ID NO: 14171 - DNA, 464 bp, Homo sapiens
  MAP TO AC007539.8; EXPRESSED IN HELA, SIGNAL = 3.9; EXPRESSED IN ADULT LIVER, SIGNAL =   1; EXPRESSED IN PLACENTA, SIGNAL = 0.6
ccaaaccctgagttagatcagtaggattagtgactggcagtaaagggtaaaggaagcaattaagacttttttttcttgtatctccccaccatgcctaatccagagctttgctcccaagtgatggcattgaccaacaggcctgcaggtacttagaaagaaataccgtgtatgtgacacaggaggaaaagggagactaaaaattaccccatatgggaaagatacccaaggcagaaaggacaaggggctgtagctgcaagccagaagggacctgagtcctgcttgttcctgctgaagccctcatgctgtgctctctcgcagtcatccagtttggttttgtcaccctcttcgtggcctcctttcccctggcacctgtgtttgccctcctcaacaacgtcattgaagtgcggctcgatgcaaagaagtttgttacagagctgagacggccggatgctgtaagaaccaaa

SEQ ID NO: 14172 - DNA, 401 bp, Homo sapiens
  MAP TO AC006430.15; EXPRESSED IN FETAL LIVER, SIGNAL = 1.3; EXPRESSED IN ADULT LIVER, SIGNAL = 1.6
atgcattgctcaaaaagcagacataacttctgtttagaattttctgtttctgttagaattttcacttacattatcattagtgactgacatcatctaataatcccacagtggatgtaaatgattaaatctatatgttatcaatattcaaactttgtacacatttttattgagaatattctgtatatatatataaagaaaataaaggataaatacatactgttaagattgcagagttttggaatttattctctgaggataaatgaacatggcctgaggagtaactaaattttttatcaggataacttttaatagagattgttgcatcaaatgcttcagtgtatccataaacttgaatcacaatattttcagatgctccaacacggaatatttttggtgctgaa

SEQ ID NO: 14173 - DNA, 386 bp, Homo sapiens
  MAP TO AC010766.2; EXPRESSED IN PLACENTA, SIGNAL = 1.6; EXPRESSED IN ADULT LIVER, SIGNAL = 0.97
agcatttggggtcactcaacaaatgggctggagtaacacacccaaatgaggaatgtgctgcctccaaaatccaaataggcccactaggcatcgtgcttctttcttggttgcaggaggggccaaatgaagcaacttatccttcaccttagaaggactatcttgacaggctgcacaccactggacccctagaaattttactgaggtagaagttccctgaattttagtcagatttatttcccatcctctggcatgcaaatgtctcaccaataagtccagtgcatttgctacttcttgctcactggatccaatcagcataatgtcatcaacataatggaccagcagtgtgatattttgcagaagcaaaaagccatcaaggtctcttcgaa

SEQ ID NO: 14174 - DNA, 476 bp, Homo sapiens
  MAP TO AP000118.1; EXPRESSED IN PLACENTA, SIGNAL = 0.65; EXPRESSED IN HELA, SIGNAL = 0.85; EXPRESSED IN BT474, SIGNAL = 0.62; EXPRESSED IN FETAL LIVER, SIGNAL = 0.67; EXPRESSED IN LUNG, SIGNAL = 0.73; EXPRESSED IN ADULT LIVER, SIGNAL = 0.87
gctcatgccaaaggctctactcttatggctggcttcttaaagctcctgccaatgtttatcatagttgtcccaggaatgatttccaggatactgtttactgatgatatagcttgcatcaacccagagcactgcatgctggtgtgtggaagcagagctggttgctccaatattgcttacccacgcctggtgatgaagctggttcctgtgggccttcggggtttaatgatggcagtgatgattgcagctctgatgagtgacttagactctatctttaacagtgccagtaccatattcaccctcgatgtgtacaaacttatccgcaagagcgcaagctcccgggagttaatgattgtggggaggatatttgtggcatttatggtggtgatcagcatagcatgggtgccaatcatcgtggagatgcaaggaggccagatgtacctttacattcaggaggtagcagattacctgacaccccc

SEQ ID NO: 14175 - DNA, 459 bp, Homo sapiens; identical to SEQ ID NO: 14150
  MAP TO AL049610.9; EXPRESSED IN FETAL LIVER, SIGNAL = 0.63; EXPRESSED IN PLACENTA, SIGNAL = 0.68; EXPRESSED IN HELA, SIGNAL = 0.75; EXPRESSED IN ADULT LIVER, SIGNAL = 0.76

SEQ ID NO: 14176 - DNA, 464 bp, Homo sapiens
  MAP TO AC008039.1; EXPRESSED IN BONE MARROW, SIGNAL = 0.78; EXPRESSED IN ADULT LIVER, SIGNAL = 0.66; EXPRESSED IN BT474, SIGNAL = 0.65
gccacacagtcaaggacaggaagatctggtgtgatttcccagatggggagttgtgcctattactagcatcccccagaagtagtgagagatagcattagctaatgggtaaataactggcttaaaagtgtaaactcctaggttttcacactccagtttttatgtggtcctggatatgtgattcttttctgccttggcattcctgtctaaaacactgatctagcaatcccaagccaccctttcctttttgcggcccttgttctgaataaaacagtgatttcatgtctcttctcactttcttccagaaggcagctagccagcacatactcactgaccagttgctgcctgcacagcagtgttttcactgctgtgttggagaaacccgaagtcttaaagggccataaggtattatttaaagagatcagtgtcatagtttaactgtcttcacagttccaggctgtaggagg

SEQ ID NO: 14177 - DNA, 402 bp, Homo sapiens
  MAP TO AC010872.3; EXPRESSED IN FETAL LIVER, SIGNAL = 1.8; EXPRESSED IN ADULT LIVER, SIGNAL = 1.3
ccgaacattgttttccagatgaataaattaatgctcttaaaaatacagctaacattatgaatagcttaatttctaaatgttaacatttccatgtgatccaagagtcatcttcagtgaaattcaaggcaaacctccatctctgaagaaagtacaagcatcttttcgggcttgtgcagctgggatcgtaagggagtctgggcgatctaaaaaaaaaccaacgtctggtctcatgggcccccagtggggcctgctgacttaccatctgggggatcccctgcagagtgcgggcacccatcagaagcagctttcccaggagctggaggtcatggagactggcaaaaccaagctcctctcccaagatgcggaggtaggctctggcttccgggacttctttggatttca

SEQ ID NO: 14178 - DNA, 461 bp, Homo sapiens; identical to SEQ ID NO: 13916
  MAP TO AC007041.3; EXPRESSED IN HELA, SIGNAL = 0.63; EXPRESSED IN ADULT LIVER, SIGNAL = 0.75; EXPRESSED IN PLACENTA, SIGNAL = 2.3; EXPRESSED IN LUNG, SIGNAL = 0.69

SEQ ID NO: 14179 - DNA, 385 bp, Homo sapiens
  MAP TO AC012666.1; EXPRESSED IN ADULT LIVER, SIGNAL = 1.6
gcaggatgagtaatgttcagggtctatactgagacaaggatgatgagggcattggttcttcagtcagaacagcaactgtctatgcaatgtctgaggtctgactgtgcgaccttgggcccagccatgaaatactgtcacccaaacccaacccctcctcattaacagtaacaacacacagcgatttagtgctttatggtttcagagctcttttgcatgtattatctcatctctggtccaattttaggatggtgttagccttacctcatgccccagcatttcatcatgtctttgggaacattgcagcttagctgataggtctgatttttctcctcatgctttgggcaacctctggaaggggtaaaggtgatgtttcggcttgctgttt

SEQ ID NO: 14180 - DNA, 475 bp, Homo sapiens
  MAP TO AL035409.15; EXPRESSED IN LUNG, SIGNAL = 0.61; EXPRESSED IN ADULT LIVER, SIGNAL = 0.69; EXPRESSED IN PLACENTA, SIGNAL = 0.63
tgtgccaacaccttgatttcatacttttaacctccagaactgtgagagagtaaatttctgtggtttttacacagccgatttgtgataatttattctggtagccctaagaaactaatactttgccaccaacaaggtcgctaccctctgcctaacaccctcccaccagtgcctcgactttgcagttctcctcctttgtcttgcagctttcacctttcaggtcattctctgcgcagctgccagagtggggtttcaaagcatagctcacaccactcccttcccctgcttatagagtaaaactgagttaattacctggttggaatcttgtctgcctcatggccctcactcatttcactccccaccctactctctattctccggcctggctgatttccctctcctttctgttcctgggaaacagtaagcattccttctctggtctccagcctttgctttcccagttgttcataagcttggc

SEQ ID NO: 14181 - DNA, 471 bp, Homo sapiens
  MAP TO AC007739.1; EXPRESSED IN LUNG, SIGNAL = 0.62; EXPRESSED IN HELA, SIGNAL = 0.66; EXPRESSED IN ADULT LIVER, SIGNAL = 0.68; EXPRESSED IN PLACENTA, SIGNAL = 0.61
aatttgcaatattgtatttctttcctagagctgctgtaacaaaagttaatatatgtcaaacctgggaggtttgtgtgtattttctgtatttctctccatattttaaatacccgaggaagaggtttgcaggtgcaaaccttcagtaaaatgccctttaatgtctctcagctgcttttggctccagatatacgggtacacttgatagtggaaactgaagtcagttctctgttccattttctcctttgcctaactctggccatttaccaaagagttgctagcgtcttggcttttggtgttctctatagcatgttcaaaagttctgacatcaagcccagaatcaacattttccagaatgattatgtaactgtagtaggtctgttgcctgatgaattggggcaggtcaatacgccaagacaccaggttgcagaaaagaaagcagtttaattgtacagctgttgaacaaggagacgg

SEQ ID NO: 14182 - DNA, 402 bp, Homo sapiens
  MAP TO AE000658.1; EXPRESSED IN ADULT LIVER, SIGNAL =   1
gatggatgggctctttgttgtatatgtagattttccaatgcttcatcgccagtaaagacgtctaggtcatcagcatgtttcatcaccctccttttgaacttgaccacccacttttgttgagttttttttttcatggatgaataatttattggtagaataatacagagtttaccttcaattctatatctgttttgttgagttgttaatggcagtacaggaagggatggtaaacggagattctttattttggacatatcctggttttgtatacctggtaccacagtctgctatgtaggctgtcagctgtcaggtcatctttcctccttttatcctgctgctgctgctgcagcggctgccacttgctccatgctggtaggggccagaaattggcagtgggagatg

SEQ ID NO: 14183 - DNA, 414 bp, Homo sapiens
  MAP TO AF127577.1; EXPRESSED IN ADULT LIVER, SIGNAL = 0.99
caatgaagtttgccacatcggctgattcttcctttcacagaataattctctgtagcatgtaatgctgtttgatagcattttacccacagtagaatatctttctagatgggagtcaatcctctcaaaccctgccactgttttatcaattatgtttacatgatattctaaatccttcgttgttatttcaacaatgttcacagtatcttcaatcaggagtagattccatctctagtaactactttctttgctcatctataaggagtaactcctcatccgtccatgttttctcatgagattatacaaattcagtcacatcttcaggctccacttctaattctagttttcttgcaatttccaccacatctgcagttacttcctccactgatgtcttcaacccgccaaagttatccataa

SEQ ID NO: 14184 - DNA, 499 bp, Homo sapiens
  MAP TO AC006325.3; EXPRESSED IN ADULT LIVER, SIGNAL = 1.8; EXPRESSED IN BT474, SIGNAL = 2.2
tacccgtttcattgatgcaggagaatagaagggcttgaagaccatcaatgcagagccaactggggaaggcatcaagcctgttatggagtgaagtggaagaaagaatactgactcggagaagagggacctttattctagtcactcccttgctcttactagctatgtggcattggcaagggaccttggtctctgaaaatcaggttttacacctgtaacataaagtgagaacatatacctcatggggttgtgatgagcattagccagaatatagttaggagaacacagtgggaatttaacggaaggtagctgggtcagagtaactgtggccctttggatcagaatggtgctcaaagtcagtgtgactatggcccctttggtcacagtgacacttagggacctcatggtctgagtctccattcgacaagacaaaccagtatagaccaggacccagaggctggacaaaaaatacacctggatagggcaaaccctagaagtcagc

SEQ ID NO: 14185 - DNA, 480 bp, Homo sapiens
  MAP TO AC008269.1; EXPRESSED IN HELA, SIGNAL = 1.1; EXPRESSED IN ADULT LIVER, SIGNAL =   1; EXPRESSED IN BT474, SIGNAL = 1.3; EXPRESSED IN HBL100, SIGNAL = 0.92; EXPRESSED IN FETAL LIVER, SIGNAL = 0.6
agccatttggaagtgtttcagtggagagcaaaatgaataacaaagcgggctcctttttctggaaccttagacaattcagtacattagtttcaacaagcagaactatgaggctatgttgtttgggactttgcaaaccaaaaatagttcattcaaactggaacattttaaataactttcataacagaatgcaatcaactgatatcattagatatctctttcaggatgcattcatttttaaatcagatgttggctttcaaacaaagggcataagcactctaacagcccttagaattgaaagactactttatgctaaaagactgttttttgactcaaagcagtctcttgtccctgttgataaatctgatgatgaattgaagaaagtaaaccttaatcatgaagtctccaatgaagatgttcttaccaaggaaacaaaaccaaaccgtatcagcagtagaaaactgtctgaggaatgtaattccc

SEQ ID NO: 14186 - DNA, 463 bp, Homo sapiens
  MAP TO AP000239.1; EXPRESSED IN LUNG, SIGNAL = 0.61; EXPRESSED IN ADULT LIVER, SIGNAL = 0.66; EXPRESSED IN HELA, SIGNAL = 0.86
gcattttcagaatcctttctccagaattttttttttctcttactggcttttttattccaaggtgtttgagtttcctattgctttttaggtgaattaccacaagcattgtcgttcaaagcaacacaaattaattctcctactgctttggcagtcagaactctaacacaagtctcattgggctaaagtcaagatgttggtaaggccgattctttctggatgctgtagagggaaatcagttcccttgcctttcacaaggtccagggattcctgtaatccttggcttatggaccctttcctccatcctcaaagccagcaatctttcaattgaaagtagcatctttcaatttttcagtctctttctctctgtcttctatttctgtcatcacatcatcttctgtctctctgacccttcctgggtcccttttataaggaccctgtggttacattaggcccacccagataa

SEQ ID NO: 14187 - DNA, 476 bp, Homo sapiens
  MAP TO AC007655.1; EXPRESSED IN ADULT LIVER, SIGNAL = 0.78
tggtgacttagaggtgattttgctttcagtctctttggatctctattttctctctactaatcaatgcaggaaaaaacccacacttaatcactacaggaagatataattacatatgcctttaatatgataaaatacaacatctctaatttcaaataatgtgatttattatgtcctacttcttgctttgctatctcctaaccatagttgttttccttatttatctctgcttcctagccccatctcccttttcctagtgtcctggaggtgtgtatgcaataggatattcccattcttgccttaccttcccctggaagagcttggctgccttctggtatctgtgcatgttctcttcatactctggggaggccttgttcattatcaggaggagatgaatctgaattacgctgttgaataacccaatcacagtctggcaagtcgaaatgtgttacagtagagtgaaagcgagaaagaatgca

SEQ ID NO: 14188 - DNA, 463 bp, Homo sapiens; identical to SEQ ID NO: 10400
  MAP TO AP000221.1; EXPRESSED IN ADULT LIVER, SIGNAL = 5.1

SEQ ID NO: 14189 - DNA, 388 bp, Homo sapiens
  MAP TO AL031073.1; EXPRESSED IN BT474, SIGNAL = 0.94; EXPRESSED IN PLACENTA, SIGNAL = 1.1; EXPRESSED IN ADULT LIVER, SIGNAL = 1.3
tggcctatctctcaaaacagctagacggagtttcaaaaggctggcctccatgtctgagagccctggcagctacagccctgttagcacaagatgcagacatgctaatccttgagcaaaacttaagtataaaggcaccccatgcggtggtaactttaatgaataccaaaggacaccattggctaacaaatgctagattaaccaagtaccaaagcttggtatgtgaaaacccccgcataaccattgaagtctgtaacactctgaatcctgctaccttactcccagtgtcagacagccctgtcgaacatgactgtgtggaagcgttggactcagtctattctagcagacccgatcttcgagaccagccacgggcatcagtggactgggagtt

SEQ ID NO: 14190 - DNA, 488 bp, Homo sapiens
  MAP TO AC007686.3; EXPRESSED IN LUNG, SIGNAL = 0.64; EXPRESSED IN BT474, SIGNAL = 0.62; EXPRESSED IN FETAL LIVER, SIGNAL = 0.6; EXPRESSED IN PLACENTA, SIGNAL = 0.72; EXPRESSED IN BONE MARROW, SIGNAL = 0.74; EXPRESSED IN ADULT LIVER, SIGNAL = 0.7
tttgaacagtgccctgaaagataaggaagactaaagagggaaaggagagaaataagctggggctgctctatgtctattctcttccaccttctcctccttgaactcaggctctgccccagatccctctgcagccttcagggaacaaagggctgtaggagtggcctgaggagcaagcagagggtccctgcctctcactgccccacctgagtgaaatcagccccacagctggtccacctctgaacctgttgggcccacccctctgtatgtcacagctccaggtcatccagggggaaatgcccacgggccttttcctcaggggtcaagctctcaatctgtaattgtctcagaaagacccggagagctttaaaatatccagagtccacgtcccgcccctgcacctccagagggagaccatcctggggcagggccttgctcagtgaaagctccaacagggacgctgatgggcttgatgggccaagactgagaac

SEQ ID NO: 14191 - DNA, 483 bp, Homo sapiens
  MAP TO AL049837.3; EXPRESSED IN PLACENTA, SIGNAL =   3; EXPRESSED IN ADULT LIVER, SIGNAL = 0.71
tcagttgctcataatggtctcctagattattataattgttgcctgttatcattgcctcaggtctctttcattcctccttctactgattttaggactcttaattggttttatcacactgcagtgtaaaaactttcagtgttaaccccattgctgaataaatgtatttaaatgtatcaacatagcatatagattagtcccagcctacttttccagcccatgcacactattttctttttgaacattactatttaaaactatagttttaaaacaaaaagtatattgttattttataactctataccttaattttttttcatactctcagtaatagcctcatctttcttcactactggataaagataagcttcaaatgtcatcacctttaagtagtcatctgaatcttcatcaggctgatagttgtcttctcaccttacttccacagattattatatttgaactgtattatttgcttagacctcccca

SEQ ID NO: 14192 - DNA, 1948 bp, Homo sapiens
  MAP TO AC010872.3; EXPRESSED IN ADULT LIVER, SIGNAL = 5.7; EXPRESSED IN FETAL LIVER, SIGNAL =  26
tatatgcgttggagtgtggcttctccagcaaaattttcttttacttcaaggttccagatatcatcaattttggaagtgccctgcagcttcactgaagaccgtgtgctcttggaattcaagtaagtgttggcctcactagcaatagttcctgaatattcccgagaaagaaccgaacccttgacatctcctttggtagatgactcaatggaaaagtaagaggtgaggctttccaagctaagcttgtggtcaactgctcctttagcggtagagtacagcattgaagaattgaaatcatacttaaattccatggaggaagagacagtaggttttgacttggtatttccattaagttcttgcttgaaattcattctcaaaattggaatttgggcttttgtggttgttgccactgacacttccatatttttcgtggttaagctcacagtactgttatgactaccctccacaaatttgttgctcagagacagagctgtggctaacttcaatcccctttttcttgtcaatcttgtggtgccctctaatttgtactgcagtgcatcaatgacagatgaagatgaagaaaggagatgagcaacaatatctgactggttaaaaagttcagcattggtattcagtgtgatgacacttgatttaaaggagaaatcataggtaatattgcccatggcaggaataaaaatatggcttatggtacacaattccttgaaatctggaagagaaagcttgagatttctagggacatgaaggactggcagctctaatgatggcaggattaatgtgtatgaaggcacacggacgtcagaacctaggatggagaaactaggcatgctgactgcttttgggaacacatagccgaatgccgacatctctatggtgaatggagacacttcaacattgacaactggaacagtgtatccaggaatttgaaaggtcctggggagctcgtcgtgagatttttcagctttgtacttatcaaacttaatttttgtttcattataggatttggtgacaaaatctaatgcattgtttctgtttttttcaaaatgcctgtcaaaggatttgatgctctgactgataaactcacaaagcacagccaaaggatttgtgatggaatgcctgtgtttgtttttcttatactgagcttttacacttaaatcaaatgattgctttgtcgttttcaagaattccttcaagcctgttttttcccatagagagaaatctttcagtggaggagttgtgattattgtgtaaggtagacgcatttcaggaattgttaaaggaatgtttaagaaatccagattgcttctccatttattcctacatgggcctccataatgttctcgttgtttccagcagagaaattttggttgtacttatactgattgaacctagcacttacttgccaacttgcttgctgggcactgggactcagaaacagtgcatagttattcaggaagtctatcttccctgttaaccttaatggaaaacgaactttcaaattcccttcattgtttgtggatgccgtgatctcaaatggctgggctgaaaagaaaagagaatttttcaaagttccaataacctttccatttaaatgagcatcatgcctcccagtaaactctgccttcccttctccaaacagtgccatgcctttagcagttagaacactgtggcccacatgctgggaatcgacttgtgattgaatttcaagtttagaaaagttgagggagccagattcataaaccaagttttggtttactcttaggtgtttgctattgatcttattggacagtccaaaggaagtgaggggtccttctatggtgaaactaatttgtgattcatgtgttccctcatctgagaatctggggcaggcccatttccatgacccttttccagaagaagtccatgctatgtggccagctttcaacagtgtctt

SEQ ID NO: 14193 - DNA, 467 bp, Homo sapiens
  MAP TO AP000039.1; EXPRESSED IN LUNG, SIGNAL = 0.65; EXPRESSED IN ADULT LIVER, SIGNAL = 0.65
ggcaaactatggagtaggtggagtagctctccgatccccagttccccttgatgtgccttcctcttaactccctgatcatccattcttttctttccaggagccagtgctgaaaacccgctcacagattggtatctgataccagttggttaggccttaatcggaatttaaactgacacattcttgtccaagggtatttgcactgtaagccttatggctaccttgttccttattagagagatagcaaggatcaaacagaaagtatgggaggagtgtggggtggagacccacgctgggctccagaaacaagtggtcacctgttctcaggtccagtgcccacttgtccagggctgtgcaacccctcttcccgttgaggtcaaggaggggtgttggctattctgttatgtggatgagatgcccacacaggcagtgtgagggctttagctgtaggaccttgaaatgctcttgaa

SEQ ID NO: 14194 - DNA, 454 bp, Homo sapiens
  MAP TO AC005076.2; EXPRESSED IN BT474, SIGNAL = 0.65; EXPRESSED IN LUNG, SIGNAL = 0.61; EXPRESSED IN PLACENTA, SIGNAL = 0.66; EXPRESSED IN ADULT LIVER, SIGNAL = 0.68
tttgatgtgcaaaagttttaatttggacacaatttattaatctttccctttatggtttgttccttgcatgtcttgtttaaaaagcattactctattcaaggttataaatatactcttctatacttcatgctagatgttttaattctgctttccacatttagatctttaatccatctggaatccatgtacgtgtttgatgtgaaataggaacgtaattttactgtatgctgtgtaggtaaccaagaacccgtcctttcccagttaatttagtaatataatgtcaatgaagacaaggaagatgatgattcagaaactcactaagaaccaggacatttatcagaatgtggcagaaatgtttattaagtccactagaactgaactgaacacataattggcagacaatctgttctatgcttcggaaactgagcaaactggcctgctttcaatagaggga

SEQ ID NO: 14195 - DNA, 419 bp, Homo sapiens
  MAP TO AL078477.5; EXPRESSED IN ADULT LIVER, SIGNAL = 0.72; EXPRESSED IN HELA, SIGNAL = 0.72; EXPRESSED IN PLACENTA, SIGNAL = 0.66
gctggatcgtgctacatttcatacttttcagtgctgtactttatattaccttttcagcacattaaaacttatgcagtgaaactgaataatggcaatgtttttatactcttttatagccatttctttatcaaaacctccccctattttctgttagctaaactataagcacctttccattaatttatgaaaattattgttgagatagcacattatcactgatctgtatggcactttcagcatgttagaagcaaaggtccaagcaacataaaacacatcagaattcattaatgtggtattgattattttttggataattaattttattgcagacccttgaaagagataatgagctgcaaagggagaaggtaaaagaaaatgaagaaaagtttcttaatcttcaaaatgagcatgaaaaagca

SEQ ID NO: 14196 - DNA, 469 bp, Homo sapiens
  MAP TO AC007981.24; EXPRESSED IN ADULT LIVER, SIGNAL = 1.1; EXPRESSED IN HELA, SIGNAL = 1.4
catcgataatgcacactggcagatgttcatgtctacatctgattggaaagaagccaggaaagtaacatttctgttcaagacaaagaaaagtgtcttacattggcagcatcttcttttttacagatgtcttgtacagtgtcctcattagcaatgtcatatacagcgtgcttattagcgaattcgtatacagcatcctcattagcgatgccatatacagcgtcctcattagcgatgttgtatacagcgtcctcattagtgatgtcgtatagagcgtcctcattagcgatgtcatatacaatgtcctcattagcgatgtcatatacagcaacctcattcgctatgtcttgtaaagcatcctcattagcgatgtcatatacaacgtcctcattagcgatgtcgtatacagcgtcctcgctagtgatgtcttgtacggtgtccttataagcaatgtcgtctacagcgtcctcgt

SEQ ID NO: 14197 - DNA, 449 bp, Homo sapiens
  MAP TO Z83845.14; EXPRESSED IN ADULT LIVER, SIGNAL = 0.71
tctcccacttaaatgagtccctacccttacaagataaagccaattgcttctgttgcacccatatccctccctgatttgttctcctcagctcggccacagtcaatttctgcctttgccagttcccccctcactttgaccatgcgatcccttggcctgagatgcgctttctatcttctctgctcaatccctctgccctcccagacccagctggaaggtcacctcccctgtgaagtcttccctgactcccccagcagaattaactgccccctctcttgggcttctggctccactcagtttgtcacaggcctgatgagcaaggatatcttgataaaggtgataactggccgaaaagcagttggggcgcccaatggcgcagccttcagaagcaccttctgtgtttttggaactgttggcagcatcccaaggtgaaatggtagaagcatatggca

SEQ ID NO: 14198 - DNA, 355 bp, Homo sapiens
  MAP TO AC005060.2; EXPRESSED IN FETAL LIVER, SIGNAL = 1.2; EXPRESSED IN BONE MARROW, SIGNAL = 0.63; EXPRESSED IN LUNG, SIGNAL = 0.59; EXPRESSED IN ADULT LIVER, SIGNAL = 1.6
tttccccaataaagaagggcctctgatataaatgcagccttattaggcagccttacctagagtgacacactgatgctagagtgaaatttgggaaagacatgttttgtgagcttagtgctacagtaagtaatattttactataaataaattttaaattttgtaaggattaaatcaaaattagaaaacatgcaggaaaaactggttgatcgctgagccattacctctttagattgggtggattcctcagccttgtcaatgaagtctgacttgatgctcttcacagagtgcagaggaagtgagttggtctttctttcagtagaatatgtcattgactccatctgttcatcagcttttt

SEQ ID NO: 14199 - DNA, 484 bp, Homo sapiens
  MAP TO AC004964.2; EXPRESSED IN PLACENTA, SIGNAL = 0.66; EXPRESSED IN ADULT LIVER, SIGNAL = 2.5
atggggccagaggctatcctgagttttccatatccctaaaggggtgtgtcagccattagaaaacacccaaggctcctgcgtgaggacacacagaagatacttgggagacagcaagcctgtgaggcctggaaaccaggatgaagggaccctatgtggggaaggcgcagttcaccgtcaggactgcaggaagcctgggaggacgccatggagacctgcaggtctctgaggcagggtgatggtgtgtcagaagcagcaggccagcagagcaccaagaagggggtgccctctccccacgccctcacgcagccctcaacactgtgtgggcaagtgggaattcagccagacatcagtgtcaatctcagagatacaaggaaagaggatgaagaaaatctgaactgtaactcagttctaaaaccagatgcccgggaagttgctggatctgactcggtctacctgaaaatagcgaatttgagctttccgcaat

SEQ ID NO: 14200 - DNA, 465 bp, Homo sapiens
  MAP TO AC010896.1; EXPRESSED IN ADULT LIVER, SIGNAL = 0.9; EXPRESSED IN BONE MARROW, SIGNAL = 0.99
caaaaatctgcagtaaagaagcctaattcattgggtttactaagggtgtaaatgaccatataaaatcaacacatttccttactctttcatttcatattaactaaacaactttctgttattaactagttcctaatcacttctatttcaggaatgggccctcttgcacatgggagaagaagatattcatcaatagagaagcatttcacaaattgcaaatttaaagttaacttttggttccatagcaggtctcaagagcatttgtatgccattcacctccaggacggacagcaagaggataaataaactgaccaacgaggtttatggaacctccatgactccagcaggttcaaatcccagaaaacagcctcccattaacatcctcaagcctaatcctaaataatgtagtatcattattgattggacctataattttttaatttgaaggcaacagagatgttcatgtgc

SEQ ID NO: 14201 - DNA, 453 bp, Homo sapiens
  MAP TO AL079305.2; EXPRESSED IN ADULT LIVER, SIGNAL = 1.5
tctcctgcagcattttcttgaaacctgtactataatttgcatttcactcactataacttgtaaactccttgaagacaatgattatgtgtggcttacctttgcttccttccctacctggggcatagcaggcacttctttagtagtgaatggagtaaaactgttcagatcaacatttatttgtcctctccaatgtgccaagcagtgacttagtacttgagataaaagattaaattaacatagatgccatcctcaggggttcaatatgccaagttctgtatttcatctaaataacctgatgtgcatcaatgtatgtatacatgtgcatctacatgcagacatcctctggaaagtgctgcctgatggttttgcctgcttccccatctgctgctgagagtaaatgttataccaggtctagagatcacttcaggacagaggtagttgatgcagggaaaa

SEQ ID NO: 14202 - DNA, 1955 bp, Homo sapiens
  MAP TO AC010872.3; EXPRESSED IN FETAL LIVER, SIGNAL = 9.4; EXPRESSED IN ADULT LIVER, SIGNAL = 6.2
tggtgtcctgtaggctttccagatacactgcaactgtggccttggtttcctctaaaaacagttttaatgcttcagctttttgtggtagttccagagcctgaatttcaccattgagtctctgagtcacctcacggattttgtcattggtttcatctacaaactggtggtaatcaaatgactttaatttctttatcaacatgtcaaggaatttgttaacatcttcaatgaatgttttaaaagataattcattaagcttcttgacagcatcatcaataaatccaaccaatttctcaaagtaatcttttatcttaacttgttgtaggacattgcttagcttctgaatagtctccttcaacttgtattggtgggccaactctactaatttatccattaaaacctggatttgttggtctacttcatacctctcgattaactcatggactttggctctgaaggcattgattttctcagctacttcaaaatccccaataagatttataacaaagtgtttgacatgctcaagaatgtcatttattctttcaaatgaaattgtagttcccaattgatctaaaagcactctaacatcaatagcctcaatgtgttgttttaactttccagctaggtgctggatgtctatattctgtatgtgtctcttaagctgctgcagtttttcttgtatctggattctgatttggtacttagtatccacattttgaatccaggatgcagtactacttccacttttgttaaaatcaatattttcaataaacaaatgtagatcatggattgtttttactaaatttacacggatatgatagtgctcatcaagactttttaatttttcaatgatttcatcaataatattagcaatagctattttcaaatcatgtaaatcataactatctttaatatactgatcaaattgtatcatatatgtctgcagttgagatagtttttcattaaagttgattttggcatcatctaatgcaatttgtatatcattttctgtaattctatacttttttgtgagagcagtcagtttctccttggcatgtgaaacttgtctctcccaattgaatgaattcagataatcattagcttgctgtgggagttttcccagggctgctctgtattttcttacaaattgatcaatattgatgtgcttcaggtttctctgtacgttttccagtacaactataatggtttgtcgattcctctcaaaatattcttgcaaggtctcaaaaaatgggaggttaatggagtgaacatcttggtttttatcatactttacaaaagcaacaattgtaaattcttggggcttctcaacggcatctctcatctctaaagcatcaatgatattgatgggctcactgagtaaaagtggcactttaattggggagtctagtagagttaggtcagccagagttcgtccagtaagctccacgccaattttatctttagtgttgtaagcatccaagtcctggctgtattcattgttgttaaattgggtcttgagtttccaggtgcctgtctgctcagctggagtaagcagggcactgactttgtgttcaagagctgcactgatgcttttcctagacacgagatgatgacttgtggagcctttgtaatcatgagagaaagtaaatgccagaggttctgctttcaacaggaatttgctatacagctgcccagtatgttctccccagagagcgagtttcccattgccatttgtatgtgcatcgatggtcatggtaaacggggccattacagaacggaagacattgctgaaatgcagtgagtctgaattatagtttgtgctcatgtcaatggctgaagccagcccagcgatgtctgtgttgagccgatggctaaactccacaccctgaaccttagcaacagtgtctgctttatagcttgctgataaggcagcagaagagatggcatagatgtgtttt

SEQ ID NO: 14203 - DNA, 480 bp, Homo sapiens
  MAP TO AC009497.2; EXPRESSED IN BT474, SIGNAL = 1.5; EXPRESSED IN ADULT LIVER, SIGNAL = 1.2
aaaaacagaggtacattctagactcagaaggctttgtggaatgaggagcaaaggcattatgcaaagaggctcaggggagccacagaaacatgtgtacacagagccctgcttccagagacagctctgaagtcaagttggacaaatggacatatagggaagagatagtggaaaaaggctaaggtaaagaaatgggtgagtttgctgccttctgggtggggccgtggggcggggccgtggaggggtacttcttaagtcacaggcttacatcgctgatctgatctgtgactttcctgacgtgatcattgacttgcaagtcggggtggcaaatccattcgtggaggcgcaggcggtaatcaatctcactgactttcttctgggaatccttggcagtaaccatctctaccatgtcgggcacgatgtggattttcatcttgttcttttcataaactgatctgtacaggcgctgtaaagttaaaatca

SEQ ID NO: 14204 - DNA, 346 bp, Homo sapiens
  MAP TO AL031117.1; EXPRESSED IN ADULT LIVER, SIGNAL = 1.3
tggggcagattcatttattgagcaagcagccataacctcaagatctagaagcagagacaagaggaataatttagcagaggctactgacacaagcctggatgctgcattggttccatgtggaatgactggtacaaaaggataaaaaactaaagcacctcagcttccacaccagggcaaaatgtgtattttagctttccaagtcccattaatagtttttcatgggtcttcgggttaagggcgaatttccctaccaaactttgtagtctcttctgccaggaatgagtatacagtggttgtttttcatgagtacaaacctcaatggaacagcagatcagaccacctttgg

SEQ ID NO: 14205 - DNA, 435 bp, Homo sapiens
  MAP TO AL031282.1; EXPRESSED IN ADULT LIVER, SIGNAL = 3.5
ccctgaccagtaaggctctgtaaccactggtggcctgagttatcttactgtctttcccctccaggatcccaaccactgctcagctgtagaggtgggaacggggactggcatacaacaccctgtgagtatctgtgagacaagtggtcaacacagagaagtttcccatcgggagttttctgtatccccatctgtacatgaggttgtataaggatcagaaaggagaacatctaatccagaaaagtttaaaatttagcaatctgaacggctagcagagacggcagaggacccgaccccacacctccacccagactcacgcaaatggcattgatgtcagactcgtggccagtgaaggtctgccggcacatgccttctcgcacatcccagagtttggctgaagcatcacaagcaccagagacgaacagtctggtgtcagga

SEQ ID NO: 14206 - DNA, 434 bp, Homo sapiens
  MAP TO AC007037.2; EXPRESSED IN ADULT LIVER, SIGNAL = 0.96
ctgagatgcaggtttcctgggtgggttgtaaacccaggaaatagaggattgaatggatgtagtgccagacttgggtaagtcataaagtttgcgattacgtttgttagaattctagagctaaaaccagttacaaaaaataagcccaccttctgtcctcctgccaagattaaagcagcccttgactgtcagtccctgatcaaaatgactgtcctcacagctgtaggtctagtttacccttcttttgttctcggttcaggcagaggggaaacagctgatgagaattccccacgagatagttctttcctcttgcacaaaggggctggctggtgtctggaaagcttgggagatgtcctttgtagacctggtccttgagggatgcctcatgctgggaggacaggtccccggggcctggcaggtgatcgtgcatgggtctg

SEQ ID NO: 14207 - DNA, 466 bp, Homo sapiens
  MAP TO AC007364.2; EXPRESSED IN FETAL LIVER, SIGNAL = 0.61; EXPRESSED IN ADULT LIVER, SIGNAL = 2.6
tagggcaggaacatctttggggaaggggcattactctgccttcacactgatcttttcaccttaagggaagcactttacgatgagaccttttactatttcatcttggagtactccttttctatttcattttttatccccagagcatccaacattttgacagatctttgtttccatgcagcaatctttatagctgacttctcttttcatgcatgaatgccttttctttatttcaacttttcctttcctttcccttcaaaccaataattttcatacttacctaatctgtgattagagatatcatttccatatgtgttatatttagcttttgtttctacttttcctccaatgggttttgttacttgcctttttttttccattttcattagtgtgtggcttctgcattttaggctcttgaaaataatcattattttaagttatacagaaatggattaagaagaagagaaga

SEQ ID NO: 14208 - DNA, 426 bp, Homo sapiens
  MAP TO AL049812.4; EXPRESSED IN ADULT LIVER, SIGNAL = 1.4
gctccctggctcacatagacatggaacagagatcacatctgtgagtggaggagccagacttttcatataagcacgtaagcatctgcgatttatacaactcctggggagggaaagcttatggtttcttaaggctcaggaaatgggaattctaggaagcctacttgcctctttaagatcacgaggacgtagctgacctaaaggccacacttaccctgaatgcaaccttgacattttcttccttagatgtaaaacttttgaagttggctgatccaagaatagattcaaattcttcagccaagagtctagaccaactgactttttccacttcattgcctagtaagtactctctcctaccctttcttttccagtggtctgagggtgaaaggtgatactgcctgaagggagggctttgccactgcagataca

SEQ ID NO: 14209 - DNA, 440 bp, Homo sapiens
  MAP TO AL049833.3; EXPRESSED IN ADULT LIVER, SIGNAL = 1.2
agtgcaaccactatggcctgggtggtcaatcacacaccaactgatatgatcaccatggtctgaattctcccaggggaccagccttctggtcttagcacccttccctgcaccctcacacagggtctgatggctccacttcctgtttatcagggaacctcagtgagctcaaggactgtccttattcagcttactctgtgccagaggcccgtggtcaccaaacctctctaatgaagaagctgaggaagaagctgacctcaattacatgtcgtgaacagccaccatcttgttttgttctctcatctctccctgctgtgccctcagtgtaaagtgagtgtgcactcactcataaggcagtggtgtggtcatggccatcgtcatcatcgtactggcttgccagggctgctatcaccaagtcctgctcattgggtggcctaaacaac

SEQ ID NO: 14210 - DNA, 405 bp, Homo sapiens
  MAP TO AL096708.14; EXPRESSED IN ADULT LIVER, SIGNAL = 1.1
catctctctgaaccccaagcctgggtttgccactttctatctatacgaccttggcaggttgcttaacctctctgagtctcagttttgtgaactgtaagatggagattgtcataaaacctacttccacaggctgggagaagataaaatgagatgctgtgtgtaaagtggccatggggtacagtaaggatgtggatgccagctattattattactcttgtagaaacataaagccaggggaaggtgtgcccctgcccccggggggcagtcagtatgggagaggacactggggacctggaagcagcccccgggagggtaaggagatgagaggagcagccgtctggaacctgtggtcacggctgttgctgctgcacagggcacacgtgaggaaatcgcgtggaatcagac

SEQ ID NO: 14211 - DNA, 374 bp, Homo sapiens
  MAP TO AL031542.1; EXPRESSED IN FETAL LIVER, SIGNAL =   1; EXPRESSED IN ADULT LIVER, SIGNAL = 1.1; EXPRESSED IN BT474, SIGNAL = 0.94
gagggcagttctctccacagtgaggtatatggctcaggttatggacttggcaattcgaatgaacatgaaatgacggaaatgatggcacttgcccaataatacaatctaattataataaataaggaaaagaaagtagaagaaaaattcacagaactagagatgtcaggtggtaaattctgttttgaagaggaaaacaggaaggtaattttacatttcttaggtttgagataatgtttattatggaatttttccctgtcgataatagatgactaccatctccatcactacctccaccaccatcatcatcatctctactatcgttacctctcccaccatcacttctactcctcctacccaccacaatcttcctccat

SEQ ID NO: 14212 - DNA, 401 bp, Homo sapiens
  MAP TO AL109933.8; EXPRESSED IN FETAL LIVER, SIGNAL = 3.3; EXPRESSED IN BONE MARROW, SIGNAL = 1.1; EXPRESSED IN HBL100, SIGNAL =   1; EXPRESSED IN ADULT LIVER, SIGNAL = 1.9
cacatcagctgaggatctggttattattcaaatcagattcagagggtgtgacattctggatttctaacaaactctcagaaaacatccctgctgctgacccgtggaccatattttgagcagcaagaatgcgtatttcacttgcaatattgtgggaggaggttagctttgaaattaaaaacatcaggcgttcacttcttgaggaatgctaaaatatctaaatgacagcaaatgtctgatagagctgcagagccttaattaaacatggaatgtttttcccagtgagacttacttggaaggaatgtatccatgagcgtgtgggctctgagagtcccaggcctggcattccagtccagacatggtcttggaaattttgccgtcatagttttctccactgcaatgca

SEQ ID NO: 14213 - DNA, 464 bp, Homo sapiens
  MAP TO AL050335.17; EXPRESSED IN ADULT LIVER, SIGNAL = 0.91
gcatcaaccttcttgccttcaggtttcacctccttggtatcgggcttctcatctttttcttgcaagatgggagagagagctaaggtcctggcttccagtctataatcaatccagcatatttttatgtacttatttcccattgttacgccttcttttgtgaaatatctgtccaactcttctttaatatttagtcctgagtcccataggcaagccctgatccccggccacatctaagtcctcatttcaggtcctttggacccaaggtgagcattgcggtgggcttccaaaacaaatcaagagctcttactaaaagtagggtgaatggatctgggtgtcccaaaacagtaaatgaccaccacattgtctttctctcccaagcctccactctgctccatcttgatctatcaagaccccacccatcctctcaaggccaaatctaaactcagcctcttccaaagaatttg

SEQ ID NO: 14214 - DNA, 463 bp, Homo sapiens
  MAP TO AF188024.1; EXPRESSED IN HBL100, SIGNAL = 0.97; EXPRESSED IN ADULT LIVER, SIGNAL = 1.1
ggcaagggctacagtctaggctccaaatatatagtacacttcactctgtgtttgtttgttaagaagtgagaattgatcaccaagttcagtgggaactgttgtatggggattcagtaggcttgtatttttttctccaaagctcactgcatgttttttcttgcctttcctgtgacccttacttagccatgtctccagatgatctcctagagcaaatctttaaattttaaaaacatccttgtgaagttatgtagacattaccatatgctgaacctatcattactgttggactttgcttcccagacacggagaataaagcaggtgtctacttcttcctcttttgtggtgtcttcccatttaaatggcttattgatgcaagtactgcagcacaaatgaatgctgatgccagctctgcccatgtacatgcccacagaagaagcactgaagggatagcaagaatgcatca

SEQ ID NO: 14215 - DNA, 454 bp, Homo sapiens
  MAP TO AL049708.6; EXPRESSED IN BONE MARROW, SIGNAL = 0.9; EXPRESSED IN ADULT LIVER, SIGNAL = 0.96
ttctcaggaattgctctcaggaattcagcatctctttacagtagatgcagcattcttgctcagattcctaaaatcaagtcttggtaagtaaaagagtgagaaagggaaagactgaatgaggttgcacaagaatttgttccaatgttgctagttcgaagattacttcttgttgatttgtctatgttgcagaatattttaaaatcaccataaggataaggatttttggacttcatgttcctatcctgagaattgcctgtgcccttgttttattcaggccctacacttccattcccatcaacacattgattaacttaaaaggaaacgctgtcgacatcaggaggataatagtcggaaagatgagttcgattgtagctcaaaacgggcaagcactgtacttcatgagttttcaggatcacggctttcttggggactgaggcaccatgactgtagggat

SEQ ID NO: 14216 - DNA, 484 bp, Homo sapiens
  MAP TO AP000228.1; EXPRESSED IN HELA, SIGNAL = 1.3; EXPRESSED IN ADULT LIVER, SIGNAL = 0.72
gcatagtgatgctcaaaacccaaattagggtctgtgtagactgggaagcagcacttggacagagacagatgagtgagctgaagatccaggactgtggttgtgggtcggagttgggctctgtcgggataaatcgctccgcagaagacgggctagagtctgctcaccattgaaggaaaggccagtgcggtttttctgcccctgaaatgttattcagaactcctgctgctgacactttaccactcaggtttctgcgacagttgggtttctgtggacctgaagaagagggaggacacagactcacaagccggaacggcatgcgacgagccccccagaggcccataactgaactgcagtgtctccagccgcgccctgtgcaatgatttggttctgcattgcgccccctagaggtgagtggaagcaatgtccaagctgtgggcaagtaggattgagtacccgaagggagtgaaagcaaaaagcaaaacgc

SEQ ID NO: 14217 - DNA, 472 bp, Homo sapiens
  MAP TO AC012528.1; EXPRESSED IN ADULT LIVER, SIGNAL = 0.98
ttttgaatttgacaagagccacatgtggttattgcctattggctattgtattcaacagtaaagctctagatctgtatgtttccaactaatccctccccaaccccaaataatttaccgtttcattgtttacatctaaattcagtagcactttgaagagttataagacttaccagcttatgccaaagcacttgagtttttcatgggaaaaataccaaccattttttcactctcttttttcttttggttcatgcaataattaatatgtttacctaatttctatagaaagttcttatggtgtaaaagatggtggcacaatgtttctaactcatggaaaagaggcaactccactggtagaagcaaaagtacatgtagcaggggcagtgcaatggctacagatatgaagtgttgctgtgagcatttgtaagtatattttacaggaggaaaaaagtgtgcctgatattgggttaatgga

SEQ ID NO: 14218 - DNA, 479 bp, Homo sapiens
  MAP TO AC009336.2; EXPRESSED IN HBL100, SIGNAL = 1.3; EXPRESSED IN ADULT LIVER, SIGNAL =   1
ccctaggcaagaacaaaaccaataataaacaagtaaaaatcagaactacaaagtcaggttgggcagcagaaggttttagagccagataaggggaagagagaaaaacaattcacaaaatttgccaccattggcagggggtggggggaattaaatacatattcaagtctttccaaaggccttttggagacaaccgaatggcttctaagctgtctgtggccaacctggaccacatcaggagacagtatctttgagcttggagacaattttcttgtccttcactcttcggttctgaaaccaaatggtcacttgtctctcagataggttcgtagcagccgagatacgccgccgcttgtccttgttaatgaatttgttaatggcatactcgttctccagttctttaagctgcagtttggtgtaaggcactctcttcttcctccctcttcggtagacgcacatgtccggctgatttagagccacat

SEQ ID NO: 14219 - DNA, 1997 bp, Homo sapiens
  MAP TO AC010872.3; EXPRESSED IN ADULT LIVER, SIGNAL = 5.9; EXPRESSED IN FETAL LIVER, SIGNAL = 8.1
ccattgccatttgtatgtgcatcgatggtcatggtaaacggggccattacagaacggaagacattgctgaaatgcagtgagtctgaattatagtttgtgctcatgtcaatggctgaagccagcccagcgatgtctgtgttgagccgatggctaaactccacaccctgaaccttagcaacagtgtctgctttatagcttgctgataaggcagcagaagagatggcatagatgtgttttatttcattattttggtaggctccttttaggttaccagccacatgcagcttcaggggttctagccgtagtttcccattgttggtgagatccagagcattgtatttcaggtcactgtttaaagtagttaccagagaatagggctgtagctgtaaattaacagtttgcttataaaacttgtcagagctgtaaatgttgtcaagttttgaagagaagtccagtgataagcctgcaatgttcagactgtttgtgtggtcaaatttcatttcagcatatgagcccatcatgtcatttgagagcttaagtccttcttgactgaccttgaagttgaaaatgtttttgctgtcgacacccagaatcatggcctgataagcacttcccagtgatagctctgtgagggcggctttcccatccagactgaattttgcattgtgttccctgaagcggccatttgttgttaatttcatagatgccccagagaggccaagctctgcattcagctcattctccagcaccaggagactacacttcaagttggtcgttgcactggtagatattccatcttggccaatccttagtgtcgccttgtgagcaccactattaattttgtcagtgcctaagatgtcagcatttaactcaagaccatgggaatttagtgatccagaaagcaggctgaagaacctcaatgactcgtaatcagcctgatattcagaacgcagcagtgcattttgcttagagaaggtcatatccatcttgttagaagtggcaaagttcttatacttcccattggtgtcagattttaaagtcagctcgtagttctcatactttagggaagcagtatttttaatgatgccactttgcagatcagaggtggaggtgagggagagggttccatcttcatatcttcctgttatctggttggtgccttggaggtaggaggagttaaacctcaggttggactctccattgagccggccagtgttaggatccctctgacaagacaggccatatgtgcctttagcatagaacgaagagactctgaactgcccatcaatcttgacttctttgacaaacaaatgctgtttctttttggagtccaaatgaactgaagcagacatctgtggtccccaggaactagatgcatcgaatattagtaaaccttttgagactgggttgtttccaagtttttctacatgactgaatttgatattcgaatctagaaatttgtggcgtagagacccatcatatgatagtgtgaacgtattcttgtggtcatatgttgtttctccagatcctaacataaaaatgaaaagacattggttaaattaagcagtacatttccagagcaatctctatgttgaaagtctttcaataataaagccccatttttctgggccaattgtgcaatagactcctccatctgtaatgcaaagataaaatctgatagcaaaaggcattcctccaggaagccttgcctgaccaccacaggctttgtttaggttcccttgttgagtgcttccactctaccttatacttatatactacactttatcatagcacctctcacactgaattataattgctggcttatctgtctactttctgttactgcctactagaatatttaatacacgtgatatgtttaataaatatttctatttgttgaataaaataaaagacttccaagtagcaaggaagattatctgctagaaagccaaagtcctttcctccctggaggaggctctcctcttagagcctgccat

SEQ ID NO: 14220 - DNA, 489 bp, Homo sapiens
  MAP TO AL008723.8; EXPRESSED IN ADULT LIVER, SIGNAL = 1.1
cactagcagttactcttagctgactcagaaatttacatatcctcaaacaacctgattccaaagcactgaaaattgattcagttctccagttttctcagagggaccaagaccttctcagtcagagatgtcaccaaactcagacagtacggctcactcaactcaaattaacccaattctacctcatcctgcagtgtccttttgccatattctctggacttccttaaatctaagcaactcatgaagacggaactcacagactcaaatgtctacgagataggcagatggtatgaagaggataaaggaacagagcgtccaatatgccaaattttcctgcctttgaccactgtgcaggctgctccctccacctggaagtctgcttttacttccttccagaatggattttctcaaggttttatgacattttaaaaacacttatcagaatacaagcataaaaaaagagagaacatacggattcagggcttacctgtg

SEQ ID NO: 14221 - DNA, 474 bp, Homo sapiens
  MAP TO AF064863.1; EXPRESSED IN ADULT LIVER, SIGNAL = 1.2
ctttccctgtcttcaccctgctctgagccccaggaggctggctgcctcaatgggctcccaggtcatgggcttcctaccaggttccacaatgggaggcatcagcaggagactatagggcagaagagcagtatcgttagagagttgattttgtttcacctgctccttcccattcaggttgctctgaaaccactcctgcccactaaccctccatgcctagggaagatgacagttttgagctgctcttagcccctgggtactgcactggctttgtaaattgcccctttattaatgattgagcttgaaggtgccatctcttcccttctggagctttaatatgctgaagaatatgatgtagatctccaaggtcaagagtaccgtctgcatccatgaagctgtgaattagaaaaagaaaagtaagatttggaaagaaaatagttaagttgacattcaatagtgaggtcttgctggtcactt

SEQ ID NO: 14222 - DNA, 385 bp, Homo sapiens
  MAP TO AF130417.2; EXPRESSED IN ADULT LIVER, SIGNAL = 0.97
tggaacagattcttcctcgcagccctttgaaagaaccaatcctgaaacagccctttgaaagaacaccttgatttttgacttctagtcgttagactatgaaacaatcagtttcttctgtttaagccactcagtttgtggtacttagttacagcagttctagggaaccaatacttgccttagttcctttttccttcatatttgagaaataaggatgcctgaatcctaactggcaatcatagagtgtttataaggttctctgagcattacttaccattgctattccaaacaatttttctcctctcttttgttctacttgtgatattatcacgcaacagtctagccagaaaggtcatttgtgatggattccccagcttgtatttctcca

SEQ ID NO: 14223 - DNA, 383 bp, Homo sapiens
  MAP TO AF070718.1; EXPRESSED IN LUNG, SIGNAL = 1.1; EXPRESSED IN PLACENTA, SIGNAL =   1; EXPRESSED IN ADULT LIVER, SIGNAL =   1
tggaaggaaaaagtgctcaagatctctctgaacaagattatgacacaaagccagagtgttgatatacccctgaggtaggacagtaaaagtatattgctagtcttgccagctgaaggcaaattgcttctggtggaccttatggacaggaatggagaaaaaggcatttgccaaataaatggctgcataccaggtaccaggagatgtgttaatttgctcaagcaatgaaaccacatctggtacagcagctgcaattggagtcaccactttgttaagtttacaataatccactgtcattctccaagatccatctgccttctgcacaggctgaataggagagttgatgaaggatgtgatgggaatcaccacccttgcgtctttcaagt

SEQ ID NO: 14224 - DNA, 467 bp, Homo sapiens
  MAP TO AL031905.7; EXPRESSED IN LUNG, SIGNAL = 2.1; EXPRESSED IN ADULT LIVER, SIGNAL = 0.91; EXPRESSED IN HBL100, SIGNAL = 2.2
taaatcccttggtgtgaggggcttcacctgactatcacaaacattccctacatagcaaatctgaatgaattactaaaatattttcaattctttagcactagtacaacatttacattcattcttttaagttcattggaattactatattgaatacttctaaaaaatgtaagccattccctatgtcacctagcaataaggcatttaaatcaaccagagtccttagaactgattaagataagttaagagagtaacaaagtatttgaagataaaatatccaaatatacatacaaaaatctaatggtaatacttacctatcagccccttctcaagagtgaaggttttgtttgtaaacatacattcaaaagccacaatgtgaaaaatcttgttcactgtgttgtgagtcccaacaattcgaatatacctgacggtaaaaagaaaagaaaatgtgttgaaaatgagctcccacc

SEQ ID NO: 14225 - DNA, 405 bp, Homo sapiens
  MAP TO AC008854.2; EXPRESSED IN ADULT LIVER, SIGNAL = 1.3
agcagcaaagcaggaaagagtataaaataaatctgagcctccataaggacagctgcagaagaaaaagaaagtgagcacatgactacagtgctttttccagactaaattgctcagtatatctctctggaataggggttgtaaacaggaaacttagagcaggcacagggccaaaaacaggcagggtacccaggtacccattggagatggcaaactctcacacctagaagaaatgcttttgacacatattatccagccctttttgacacacccccttctccatcatcatcagaaggaggacactgttattaatagacagacagaggtcctgaaaaacaaatttgaacagacatccaggaatgacaagatttttaaggaaaacaaacactataaaaaggagataccaaa

SEQ ID NO: 14226 - DNA, 447 bp, Homo sapiens
  MAP TO AL023807.6; EXPRESSED IN BONE MARROW, SIGNAL = 0.97; EXPRESSED IN ADULT LIVER, SIGNAL = 0.73
tccttctgatttgctgctctcctagccaagtatcctcttcattaataactaatttccagagctaactgacattttagtgtccttactcctgaaaaacccttccaacagataacactgtttgccttcgtcattactctggtagccccccaattctcacagaataactgctgctaattagacatgttctttattaagtgttgaggtgataaactttgtttaaatgcagtgcacatacactgaagcacatactgttgattatcagctcctgcccacggactgttgtttgtgttctctcccagtaaagtgtccaggaaatcttttgctttctcttgtgagttgtctgctagatttgtgccttcaaagtgatgatggagaaaccatgtgtgtttactccacacaagacagtgaataatctcacacaggtccctagcttgaagtgtcatcttt

SEQ ID NO: 14227 - DNA, 448 bp, Homo sapiens; identical to SEQ ID NO: 570
  MAP TO AC007786.1; EXPRESSED IN ADULT LIVER, SIGNAL = 0.7; EXPRESSED IN FETAL LIVER, SIGNAL = 0.59

SEQ ID NO: 14228 - DNA, 479 bp, Homo sapiens
  MAP TO AC004998.2; EXPRESSED IN ADULT LIVER, SIGNAL = 1.5
cctctgggtgcctttttcacctgtaggttagcgttaatatttccctgtggaacattggtgcctgccttgtggtacccttggcagtgaacaattgctatttctttgggcatttttatggcctctaataattcaagaattggaggaccatgctttatttctttgttattggaagtacagagccccctttctttccaaattaccccataagcataggctattaagaaagtatatttagagtctgtaaacacttactctctttcccttacccagatgtacagctctagtcaaagcaatgaactcggccttttgggcagatgtccctgggggtatggcacatgccttgattacctgctgggttgtaactacagcatacctgacctttctgactccttgttccatgaaactgcttccatcagtgaagaattctttgtcacattccattcatggaaaatctgtgaggtctggtctactagaataca

SEQ ID NO: 14229 - DNA, 471 bp, Homo sapiens
  MAP TO AC009813.2; EXPRESSED IN ADULT LIVER, SIGNAL = 1.1; EXPRESSED IN HELA, SIGNAL = 1.1
  unsure 219
  unsure 302
  unsure 349
  unsure 409
agcatggacagacaaactgctgtgcagatactgaaaccaaatgttcccagtaagcagccactccagactagagcagattggtctcctggctacattttatcagtctgaggacccacgtctgccctctgtacctactgggacttgtctacagagtgtatctataattgcaaaactgaaacatagcttaacaagtctatagtgtagtgtcccaaaaattcnataaaattatgccattgaaaaaaaatatgacttttttttctgtgataggccacagcactcagtaatcaccaagaaaaccaggnatcccaacagaacaggtagctacaaagaaacctactacacacttaanaagccgtcaacccctcctctgactaataagcctgtgaccttcatcaagctccctgggccntcagttttctcatctgtataacaaggataagaatacttatctgagaatgatgtgattactca

SEQ ID NO: 14230 - DNA, 414 bp, Homo sapiens
  MAP TO AL121716.2; EXPRESSED IN ADULT LIVER, SIGNAL = 0.96
cgcagaatatgggtttttacggagtgttttagaggatgttgtgcatactagattttggagtcaggaaataaagaagagtgcaagtgtctggtttgtgcccctagctctcggtgcaaagcgttcctgcagaattgcttccacgtaaagggaccttcgggaaatttcgctggataccggctggcattgacaaacccagcgtccctgagccttgtgaggtttccaggcaggctgattgcgaggcaacatgtctgcttcggtgaaagaaagccttcagcttcagctactggagatggaaatgctgttttctatgtttcctaaccaaggagaagtaaaacttgaagatgtaaatgccctgacgaatataaagaggtatttggaaggcacaagggaggcgctgccaccaaaaatcgaatt

SEQ ID NO: 14231 - DNA, 434 bp, Homo sapiens
  MAP TO AC011632.2; EXPRESSED IN ADULT LIVER, SIGNAL = 0.99
agaggggtcaacaccacaagcatttgctttttctctttgagtggtcctagtcatgagaatgatgaactcatcagaatggcgggacatacagatgaaaccaattcttttgtaatcacattaaactgagtttgaatctggggctcaacacaagttattaaacttctaagcttcattttctttacttgtaaaattatctactttatgggttctgtgaaagatagcaaagtaaggcagaaaatgttagcattatgtctaccacataataactcttaaaaatcttagcaatcaccaccaccatcatcattatcatcattaaccttgtcaatatttttactattttcagtgtgaaagaagaatacctggtacctaaaaaactacaaaaacaaaagctctatgcctttcataaagtaatctttttcaggtgtttcaccaaa

SEQ ID NO: 14232 - DNA, 496 bp, Homo sapiens
  MAP TO AL078623.21; EXPRESSED IN ADULT LIVER, SIGNAL =   1; EXPRESSED IN FETAL LIVER, SIGNAL = 0.93
ggagcaaaatgagaagaagagcagaggctctattttcaagaaaaagtatccaatttaactatttttaacggaaataaagtgctttcttaagtgccagaaatgaacattgatcttgatcatgcttggtttgttgactccatatgtgctttatgattggcacgtgataagactaatatttaattctagcaactgaattctgtgggagaaatagatgcagctactacagtagtaattttatgatcaataatataactctttaaaaatgtagttcactctttccttaataatgtcaaataatcacccattacatgaagaaagaactaacatactctggattggcaccttttggaaggttaatcagttcttgtgagtcatcaagctgaccccaacatattactgtgtgctcttcaatgacattttcaccccataagacactaagttcctggaagacaaacacaggaactatttactgtgtttttgtatcttccatacattc

SEQ ID NO: 14233 - DNA, 419 bp, Homo sapiens
  MAP TO AC012528.1; EXPRESSED IN HBL100, SIGNAL =   1; EXPRESSED IN ADULT LIVER, SIGNAL = 1.1
ctgcttcacttggagtttgctttagtttggacttttctgggttagagttttagtcatcatgctaattaattttatgcaaagaacaaataatctccaaaaccttagtggcttaactccacaaaggtttattttttgctaatgtaaagtttggtggagtctctcctctattgtgtgtgtagggagtgtggttacaatcatcttgtagcacttccatcttaaaacatgacttccaagatctggctgaccaggaaaaagagggatgaagaaaacatatcatctctacagtgctacagacctgctgcggcatatctccattcacatttccactggccagaaccaaatcacatgactctacgtcaacttcaagaaatgtagggaggtcactaatatttgttgatccctaattctctctggcacag

SEQ ID NO: 14234 - DNA, 1963 bp, Homo sapiens
  MAP TO AC010872.3; EXPRESSED IN ADULT LIVER, SIGNAL = 0.99
ttttgccaagcattctaaacctttttcaatactttccattgataaaaaaggggattttttttcttctttcgtaattaatactattaaatctgataaaatttttttatttttggataacttcacataaaatcttccactttttgaaacattaagcatttcagctttttcaagttgtccaagtttgaattcttccaaaggaattttaaacagctgttggtttgaattcatagaaccttcagactcatttgattttcctttcttcatttcattatcacctggcctcaccttttgagagagaacctgaggcatctgcaatgctgacttctgcagttttgaacatgctttccatttcagtagttcattaatgacacatttttcatcacaaatcatatttacttcccatttctgatcatgctttttcaaaaattcacaataaactgttttgttatgtactttcgaagtaaaataatccacagttttgtcatcccatatttcatcaggctcattccattttactccactaagaaaagcatggattcctagctgaggaacagttaaaaattccctctgaagttcgtaaattttagatgtgtttactattgcagagttaccatagtcaataaattctacttcaaaagaatttcctggcaaaattttcttaataactgccctgtaaatggcattgtcaccagaatattctgcaactacaagatctcccactagaggtttaactgattttctctctctcaatctccttgctgttgcatttagagcatcagcaagtctgataattacactttcattctcagcaagctgaatatggaaattcgctggattactgatattagatacataccctttaactttggcattcaaataaatttgcggttgaggaaggtctttgatctgtggcctaataaggtcatatgggttttgtgaggttgtttgatttaatgctctgataaaagactgtgatacaacctttactgatttttggcccacacgcctgttctcaagaatatgtgcagctccagggacaatttttatacctttaagcccatcattcaaagaagtcttcattttgttttttgacacaggttccattttataacaaactgatggcttcaaaaacctggcatgtatatttttgggatgcatcaattggtctatttttctttcggaatatgttactggactaggtttatttatcacattatggcgatagttgtttcctgttttgcctttcaaagaagtagtaaatctcttattctcatttattttattactcttttccatgcagcatgcttggtcacaatgtctttttccataagcatgaagcaacactttaattttctcatttatatattgagatccatcatacaattctataccaagctgtccatctgactcctgggacaatattatcgcctttaatgatcttcccaagaaattgtctttaaaccaactactgatttctgctggaatatctacatccctaagatctgacaaaaaacacttaatagcttgcataggtgtaaacaacaactctggaaactgagctgaaatggccctcaacatattttctcctactaattgcttatttccaaagtctacaaaatagacttgaaactcagatgatgaatctgttggtattgctaaagctctgtatgagagaccatcctctacatacttagatatgcacactctcattttattagaatcatattttggaaaattttggaggttaacactctctgtgatttttgtttctatcatctctagatctttattatttctgccaagctggcaataaaacttttggggactatatatgtgagatatatatacttcttcttcacttccaatttgtatattaaaggaagaataacagtaactgtaaagactaaataaagatgggaatgtctctgataatgtgatatactgagcagagccacgattcata

SEQ ID NO: 14235 - DNA, 458 bp, Homo sapiens
  MAP TO Z99716.4; EXPRESSED IN ADULT LIVER, SIGNAL = 0.97; EXPRESSED IN HELA, SIGNAL = 0.95
tcaaagaatcttatagttcttcaatggagttcaagaattgggacaggtgggggaatgtaaaggcaaaaagctgagacagtcctcccaaagtgcacttgccgtccagaaaggatggaagaaaatgaagccccagggagttgttgattctcaacatctgttaactcccttgctgggtgcagtcatttgctgattagcttccctttcccccaccctggcacccagagtaataaaacaatttgtactcgttccctcagaaattgatgcagcccttatgggatgttcttgttgtctaagccaccttgtaaatggctgtgcacatcatcttcagcagtaggtggggagttggaatcattatgagatactccatcctcaggtttctgctgcagctgcagtgacagaatgcattcctcatctctgtgccttctttctcctcttctcccaagtccttcagcctcaag

SEQ ID NO: 14236 - DNA, 468 bp, Homo sapiens
  MAP TO AC007690.11; EXPRESSED IN ADULT LIVER, SIGNAL = 0.97
catggctgtgagattaggggtgggagggcaggggagggttacaccaagggccttgaagctctcaggacagacttgaacaacctttttctcctccatgttcccttcccctttttctttgtagggggtccatttggccttggacgggttctagcaatgacgtcagtttgttaagacgagcgaggtaaacagttgttgccttggtgactttaaggagaggtagttgcacttcagtgattctggcaattagaaaatgtcaaggaacactggctcagacttcctcctgcccagattgataacacgaaaaccacgacggacatggttggaaagaacggccgcctggcgcgatccccagccctggaattcctggaggacatgatatttaagaagacattagtagacattgtcctcactaaagacagagttaaagtggagtttgaataatcagacccacgttagtaggatttcaga

SEQ ID NO: 14237 - DNA, 410 bp, Homo sapiens
  MAP TO AC008269.1; EXPRESSED IN BONE MARROW, SIGNAL = 0.65; EXPRESSED IN ADULT LIVER, SIGNAL = 0.92
tcattgtatgccctggttctcagcttaaaaaagattgcttattaacttgatacccaattcaagaattaatagaacagattttgtgagagaaagatgattgttccttttcatggaaatattctgtttcaggatatattctgttgatcaggacagttgaattgctgcttagattttttgagatctaaaaaattactattagcatactgtaattattatagagttttccctcaattttctctttttaaggttctttttatcctcattttatttgaaaaccttggctttcgacctgttggtttaatggacctgtttatgaagagaatagtagaggatcctgaatccctaaacatgaaaaacattctatctattcttcatacttactcttctctcaatcatgtctacaaatgcca

SEQ ID NO: 14238 - DNA, 475 bp, Homo sapiens
  MAP TO AC007395.2; EXPRESSED IN ADULT LIVER, SIGNAL = 0.71
agcgggtatgctctcaaaagaagaggagtgagctcagcatgaacatgaacacaccttgcagcccatctgcccatagtaccaagtttatgccattccctcttcctttactatgaactgcactgctggtggagcactgactctttggggcatatgcctgtttagatttgccactcagacaaggaggcagtggaaacaacccccttctgtagcttggggagatgtctatacaaattggcttctctgtgtgttactgtgcctttttgttttctagataaaaaatctcaaccgtggttttgccagattgaaggcacttgtgccatttcttccccaaagcaggaagcccagcaaagttgatatccttaaaggtgcgactgaatatatacaggttctcagtgatcttttggaaggagccaaagactcaaaggtaaaggtgtaagattttagaataatgatagccaccatttattaggccttt

SEQ ID NO: 14239 - DNA, 384 bp, Homo sapiens
  MAP TO AC009786.1; EXPRESSED IN ADULT LIVER, SIGNAL = 1.2; EXPRESSED IN LUNG, SIGNAL =  14
  unsure 357
cacagaccctggaagaatccaacatataaaacctccaagtcaagaatcaaacctcgtaccctcgtacttgatctctcaagtcatctgattggccctctttcaagcatactttacttccttttatttcccactctaaagctttttaataaactttccctcctgctctaaaacttgcctcagtctctcactcagtcttaggcccctcagtcaaactctttcttctgaggagtcaagaattgaggttgctgcagacccatgtggatttgccactactattaataacatgatcaaactgaacagaacgacaacatttgtagtacctacgcagcactgctaccacagagcagtagactttangagaatggcctttccagaactgattga

SEQ ID NO: 14240 - DNA, 422 bp, Homo sapiens
  MAP TO AC010135.1; EXPRESSED IN HELA, SIGNAL = 0.97; EXPRESSED IN ADULT LIVER, SIGNAL =   1
cagtttgccatttcctttgcttttccctgatattgttaaattctgactcagtcttttactgacattcactcctttcatacagtgggatgccattgaatgtcatctacatatcagaaagactcattttttaatccctctgctacaaacttattttccaaactcaattttacatgactaagttcacccttgaaaagcatcggtttgaaccacatgagttcacacatgcatgaattttcttctacttctgacacccctgagacagcaagaacaacctcttctcctttttctcttcctaatcttcctcttcctcagcctactcaatgtgaaaacaatgaagatgaagacctttatgatgatccacttccacttaataaatagtaaatatattttctcttccttatgattttcttaataccattttc

SEQ ID NO: 14241 - DNA, 448 bp, Homo sapiens
  MAP TO AC010937.2; EXPRESSED IN ADULT LIVER, SIGNAL = 1.4
accatgaatctgaaaacgggttgaagatataagtgtaagttattatctgaacacattgttaaaagcttaaaaaatgaacaaaacaaaaaacctctcagcttttcagagcctatttggggctcaagacattccaatcaagtatgaaaacaaagtcagtaagtaccaggaaacattcagggacccctacaagttactcaaatctacacttgtcccgaaattcaggatatccatttgtgttggtgacatcctattttttttcattcaacacagaagccagagtggtcagctatttttgaggtgaaagttaaagcaggcataactgtgctgttgacaatgttggcgactggccccagtgaagggggttatgcagacaatacccctaagtacagtggcagattgggagggtggaggtctctcctcagtcacatcactccagatgagccatcag

SEQ ID NO: 14242 - DNA, 396 bp, Homo sapiens
  MAP TO AC010686.2; EXPRESSED IN ADULT LIVER, SIGNAL = 0.96
tgtgagagttttctccaattttatgaacaaattaatagctaaatctatgtacagatcattaataattttctcataataaattccaagaaataaaatgatgagattgaaggatatccacattttataaatattgccaaattactatactgaaatgtaccaatttacattcctatgttgtaagtgagaaaatccagccaataaatgttaatgacatggggcttctgagtccctaataggaatcctgagatctctaaataaagacatgttgacttgtggatactgatggtacttgcctgctttgcacatgtagaaggtacccgtcaggttggtctcaagcacagcgtgccatcccttagaactgatgtgttcagcaggggaaagaaactggcctcctcc

SEQ ID NO: 14243 - DNA, 491 bp, Homo sapiens
  MAP TO AC009893.1; EXPRESSED IN ADULT LIVER, SIGNAL = 0.92
gggatctgattaatgagggattgtaggaagtaaagagaactctaaaaatatagaaatagatgtaataatcagccactactcaaacctagcactgacacagaacacccaaggaagagctgtttctgccctctgccccaggtctgctatccagacctccaggacttaatgaattgcagagaagttgctgtgatggaagtcctggaaatacactctccagagtgcaggggaaagctgttcacagggaggtatcttgctgaatgcactctgctaggaaataacccaagcccgtgctagaggaagatgctggctgctccttgtgctggctgccctgtgttggagaagctgcctgagctgccagtacctggtgtgggagaggctgcccacagtgcaggaggtgggtgcctgggaagccatgtgcccaggagaagcctggtgctggaaaagctgcacatgctgcagaagcttgctgcaggagcacactgggaacaaga

SEQ ID NO: 14244 - DNA, 408 bp, Homo sapiens
  MAP TO AC011504.2; EXPRESSED IN ADULT LIVER, SIGNAL =   1
gggaggaattagttaaggcagaaaaaaaaaagcaagaatcttggacaactacaattatgtttgtcttagagttctcaaaatcctaggtgtgtgaggctaggtaggttggggtcacagtgatgggacaatggttaggagcacagagaaggaataaaacagaccggctcaaatccagactccagcacttcctgtgtgacattggggaagttacttaacatttcagaacctcagatccccattttctactgcaggataaaatcagtatctacctcagaaagctgttacctgttacgagaactagtacaaccactgtggaaaacagaagattccttaaagaactgaaagtggatctaccattcgacctagcagtcccaatactggatatctacccaaaggaaaagacgtcat

SEQ ID NO: 14245 - DNA, 442 bp, Homo sapiens
  MAP TO AC012130.1; EXPRESSED IN ADULT LIVER, SIGNAL = 1.1
aagccaggtggagtgaattgtaatatttccaatgacaatttaaaacttgatgaagagagaaatgtaatccaatcttgagatatttatagaaaaatagtagctaactatacagatgaaataaattcttcaatatattaataatactacttcttatacccatgttgtcagatggctccaaaatgatttctaaatcatgtatctgtttccaatttattatcttccttttaatgcacagggtgtaagaagtttgaaatattcctattttgagcctcgttatatcctggtggtgcccatgaacaaggaaaaatatgagggatatttgcggagaaaaggattattcagtcgtgcagaaattgaatttgctgtctccagagtggacctttatattaaaattaatcagaattttccgggatattttgatgaggtaatcaatgcaggttgg

SEQ ID NO: 14246 - DNA, 473 bp, Homo sapiens
  MAP TO AL049756.16; EXPRESSED IN ADULT LIVER, SIGNAL = 0.91
agaaagctgccaaaaaccacatgagcttggactctcccagccgagcctcagatgagaccccagccctggttgacgctggattctagcttcacagaggaccttgctgggccttgcctgactcaacccacaggaacacaacgtgtgctgttggaagaggacatgtctctgcaacactgctgtgcagccctagataactaacacagtgacctggtcacacaaagcaatggtcaggatcctgggattggggattcccagctccaacatatccctttctgttaacagcacctgctctgcctgggtcagccccactggggtgagtctccttccagctcagggatagccctttctctctggtcagcagccactttacacatggcccctgccgaggccccaaccatctctgcagctgctgtggctgctgcgtctgtctgtggagctcatgtaaaccctgggcagaagccttgggctatgag

SEQ ID NO: 14247 - DNA, 469 bp, Homo sapiens
  MAP TO AL031768.9; EXPRESSED IN ADULT LIVER, SIGNAL = 0.96
atggcgtgctagtgcaaagttgcttttcagtgaaccatgatcttgccaaagctgcatgtcctcccactacatcatggctgtgaaagggaacttttaaagcaggtggtgcctgaggtttaaggctggctggagacaaaaacaaatggaggaggcaactgttttgaaaaactacaactcccgtgtggaagccccatttgggaatcaacgttttaacctacagtggttgaaatacttaattagattcaaagtagaagctggctgccacaagacaccatctcaccattcctttatgagccctttaaagttgtaactcaaacttttgcaagtcagttttaaggcagatttgttgacacacttgtggatggccaaagtcaggctgttggtttgcttattcaaaagaatggaaattgtctctatgtacacggtaacagggctgtgattcataatcactgcctctcaatgttatgct

SEQ ID NO: 14248 - DNA, 461 bp, Homo sapiens
  MAP TO AP000494.1; EXPRESSED IN LUNG, SIGNAL = 7.1; EXPRESSED IN ADULT LIVER, SIGNAL = 1.2
cttcaacagaggtgccacagctccatactaggtcaatccatgcaataaagaccaagttccagaacccctgtccttcagaccatttggtatatataatttccaggcccttcttcactgttctgtttatcactccctgtgctgtctctagtttggcatcttcctttttaaaatagaacccaggcttgaactgcaattcaaccagcccagcatagttattattgtcccgagtctaaacatgatatttctgttaatgtggtagccacagcacaattctatttattcttgaggcattccctcttttattttcttggtctttttgtgttatttggaagtgtaatcatgtcatttatacccttgctactcgaatatggtccatgaaccagcatggtgacgtcacctgggagtgtgttagaaatgcagaatctcaggccgcagccctccggggtcaggatatgcatttt

SEQ ID NO: 14249 - DNA, 401 bp, Homo sapiens
  MAP TO AL008638.1; EXPRESSED IN HBL100, SIGNAL =   1; EXPRESSED IN ADULT LIVER, SIGNAL = 1.2
cattctcaggcagaatgctctaagtttgggaagctgcagactgctgtctaagctagatcaacctggctgagacaagatggggctggggactgagatgctgtcacagaggacaggggtggtgaggtcctttataacaaaaaggcccatttggcccccatccttgcctgtttctccagcctctttttctttcatccatctttctctcatcagccagcagcatccccaaaacaggccaatctgatcacatcagagtcttctgtgttaacctgttctggctcccagtgggccgaagattagagtcttttgattcatttgaaaatgcttccaatttgggtctgggtcaacctaaaataatcaaaagaaggactgtaaccaaagtatgcaaaggaagcaatccatgt

SEQ ID NO: 14250 - DNA, 459 bp, Homo sapiens
  MAP TO AP000465.1; EXPRESSED IN HELA, SIGNAL = 1.9; EXPRESSED IN LUNG, SIGNAL = 1.4; EXPRESSED IN ADULT LIVER, SIGNAL = 0.91
agtggccatttgtggttctgtcaaagataaaaataaatgccatgttcagctgtattaaatactgtacttgagcataagggagagtgtgcatttgtcttatttcatttgtcttcccagtctatgcccatttagcactgcaatagcagtgaacttcacgggcagtcaggcccagtctttcatgtttccttccagttctaaattgaaaatatttttttgaaaagaactatgacaaaagcaatttgagttagtgatatcttgaaagagaacccaatttaagattacctttatggttggtcattgttacctacagtaggcagatgtcatggtgatcttcttgatattagtattccgagagagtctgacctggcagtgttcaggtaacatcagagagtgggctataatattgagatttcaagtggtggtgcaaagggctgctcacggaaagctagtgcagagaga

SEQ ID NO: 14251 - DNA, 445 bp, Homo sapiens
  MAP TO AL031123.9; EXPRESSED IN ADULT LIVER, SIGNAL = 0.92; EXPRESSED IN LUNG, SIGNAL =  10
ttagactcgctgggaaccacagtcagaagtaaaaggctgagagcagaggcatttgaatactgttcccccaggaccttgaatctacaggtgtggctggtctggtctggggtaggatgcgtgctgactttctgctttcacagggagagggtcagtagtgatgcgtgaacttacctcttgggggcccctcagaacagcctccacccccaggtgaggctgtaaacttgggaaagacaaagcgcaggccaccatctgtttcccatctccagcccccgagtctctgcaggctcttgatgcaggctgtgtatggacccagggacctggctgcagccagcaggcagcagttgatagcacgagggctacagaatgacatttggaatctggaatgaggctttggccctattgtcactttcctctcctctggctttggctctgctcttaggtttgg

SEQ ID NO: 14252 - DNA, 376 bp, Homo sapiens
  MAP TO AL121574.4; EXPRESSED IN LUNG, SIGNAL = 6.6; EXPRESSED IN ADULT LIVER, SIGNAL =   1
ggaactgtctcagactggtggagactgagaatatgtagcaactaaatgcagtgtggcatcttggattggatcctgggccagaataaagatattggtggattgattggcagaatttacataaggtttataaattccttgatagtattgtatcaacattaatttcttggtttctatagccatattagggttatttaagatactaacattagagaaaaccaagtgaaggtagcttaaaaaaatccttctctaattacacattcaggttatcatagtgttggtctgcatagatcaccttttctctttgagtatgggtcatgttttcctgtttctttaaatgtctagtaattttgaaatgcatcctagacattgtggacaa

SEQ ID NO: 14253 - DNA, 474 bp, Homo sapiens
  MAP TO AC007098.2; EXPRESSED IN ADULT LIVER, SIGNAL = 1.1
tttgggagtaccattcctggagaaattgacagagattttagatatcacatcttctgaacattaagactacttagcccctctaaaatatattattgttttattattgctttgctctttctcagccccatagagcttattaattcaataatgcatatatttgagaacactaaacaatattagaaaatatcatatggtattcatgtgatttaattcatctgctattattttatagaacctatcactgaaacagcttcacctagaaaaacagaagactctttttataataacagctataatccctttaaagaggtgcagactccacagtatttgaacccattcgatgagccagaagcatttgtgaccataaaggattctcctccccagtctacaaaaagaaaaaatataagacctgtggatatgagcaagtacctctatgctgatagttctaaaactgaagaagaagaattggatgag

SEQ ID NO: 14254 - DNA, 385 bp, Homo sapiens
  MAP TO AC008169.1; EXPRESSED IN ADULT LIVER, SIGNAL = 0.68; EXPRESSED IN PLACENTA, SIGNAL = 0.66
gcatggcactgctaacaaacctatgctatctagattagtacacattatcacctatattatttctgactttaaatatatgaatataattctttcatatgacatgctatacgtaatgataaaatatatcttaatgtaatgtaatataatgtaatattaagaacagacatttacgtagaaatacatacatttaaggagaaacaaaatagtttcagaacaaatattaatgttattggcttagtcagaaacattagacaaaaatgatcctacctgatgaatcaaaattcacctcattgccaggacttggacctatatcgatggacacaattggtaacagcttccgaaagtcccacagctttgtaaccccacaggcatcacaggatgctat

SEQ ID NO: 14255 - DNA, 449 bp, Homo sapiens
  MAP TO AC010906.2; EXPRESSED IN ADULT LIVER, SIGNAL = 1.1
ctctaagccacaaaaacgggggcaagagagccaagaaagtttcaaataaatactgaaatgtctttttttgtgccatgccacatgaaggaccctgatgaaaactaaattttgtcacgtgcctcagaaactggtgaggccaggcaggattttttttttttaatagaacagaaaaggagaggacaatggttttctgtctctactcagtttccaaaaacctctattgactactcttaccacaacacagcacccctccccgcagctgtctgccacttgcttcacttgtggcacctggttccatccaagcaaactcgagtccgcacacctgtgggaaggcaaccggcaggagcaaggcagagccctcgagggaaaggtcctggctgagctgtcttgcaaggccacccacagccgggccagctcccttgtgccaggccacaacagagatcccctgt

SEQ ID NO: 14256 - DNA, 385 bp, Homo sapiens
  MAP TO AC012130.1; EXPRESSED IN ADULT LIVER, SIGNAL = 1.1
tcctttcaagggcctatgtgcatctaacaggggaaagatgtttttcttattaatttctaagcagttagttaacttctgtttatagttaatttctttttatattaaagcaggagctcccgctagcaagaagactgtctctggggtgccagcacacctggttccatctcccaggtgcttggcgaaactgcaagcagatggccagatgacagagcatctctctggaatgcaaattcatgccaagcacctagaaaatcagagcgtaactcctgcccagaaccaagagctggctcaggatggagaaacccatcaaaaagagctttctcctgacagccatctcaatcctgagctccctcaacacctcagttcatcagcactgggtcttcct

SEQ ID NO: 14257 - DNA, 428 bp, Homo sapiens
  MAP TO AL080312.8; EXPRESSED IN ADULT LIVER, SIGNAL = 1.2
gcaaggtggcaggatacaagagtaataggcaaagttaagtgctgtcttatatagcaccaatgagtaaatgggatttcaaattaaaaatataacacatttacattagcacaaataaatgaaatatttatacctaaatgaaatgtttaggtataaatctcagaaaatgtgtacagaatctatatgaggaaaactataaaactttgatgaaagaaatcaaatatctaaataaatggagagatatccatgttcatgaatatgaagactaaatattgttaagatgtcaattcttcctaacttaatctatagattcaaaactatcccaatcaaaatcccagcaagttgctttgtggatatcaacgaagtaattctaaagtttgtgtgggaaggtaaaagactcataaaagccaacacagttgcattggctgaaa

SEQ ID NO: 14258 - DNA, 382 bp, Homo sapiens
  MAP TO AL118499.5; EXPRESSED IN ADULT LIVER, SIGNAL = 0.98; EXPRESSED IN LUNG, SIGNAL = 0.96
gcagcttgtgactgcaagagtaagggaaccctgtaatgagatctgaatccaagattgatttttgtaatgaggaaatcgatttcccaaggaaattgtgtgacagtatgatgtttggatgagtgtacttcttggttggtctgttgtagacactttgacagattgccttgttgtctagattgttgctgtttgctcctcattgctgatagtgcccctttccttctaatgatgtcttgttttccctcctaggttcatggaatccgagctggacctaaatgacatcattcaggagatgcacgtggtggccaccatgccagacctgtaccaccttctggtggagctgaatgctgtacagtcgcttctcggcttgctcggacacgataat

SEQ ID NO: 14259 - DNA, 411 bp, Homo sapiens
  MAP TO AL118519.5; EXPRESSED IN ADULT LIVER, SIGNAL = 0.98
cagctgttgacattgctagggaataacattaagtcattgaaagcttgtgaaaagaattaattgatgggttaaaaatttttaacaaataatatttttatattatcttctgaattttaaagatatgatatcccatgagtagtactaggtactccaacaaaaattgattttatagtctacccgcttttataattctagttataatactgctcttcagcttttgtcttgcctttagataacggtttctgcctccacattacatgtagaatcaactactgtgcttttgggaatctttatgtacatgaatttgattgaaaaccttcataacagataccgatcttactcaatatttaattcagagtctattccatttggctctttatgcctatggtgagtgctgtgtcctttctccct

SEQ ID NO: 14260 - DNA, 490 bp, Homo sapiens
  MAP TO AC006296.8; EXPRESSED IN ADULT LIVER, SIGNAL = 1.1
tatgcccctctttgttccagttggccttagtcacagaccactactcctttgcctagatttccccccaaacacgattcacagaaggcattcacacaggagaattttacaagagatttggatgcagtggcagatgtgaggtagaaggaaataacgcataactcataattgaatatcaaatattaagtagttctgctatttaaaaatgctcttgattacacctgccataggtaattctcaattgccactttcttttataattttttttgttccctggctttaaactttcaccttcatttttctctagaccgctgcacctcctttcttattggacacttctttaataccaggaatcttctatagccctgatacaggacggtttaatgatctccgtgtcactctggcacattttgactttgtctccaaacacgtctattatggtgagctcttgtgtaagacagatttttttttttctcctgaaatcggctttgaa

SEQ ID NO: 14261 - DNA, 399 bp, Homo sapiens
  MAP TO AL109941.9; EXPRESSED IN ADULT LIVER, SIGNAL = 1.9
aggggccagatttacctttcttgctgaaacaattaaaaaatcagacaaaatatattaaacaacacttttcaagatattggacataaagcaaggaaggtgaatgattaatttgggacaggaaacaagtaaggtaagcctcatgcttgccctggctttcaggcttgagggagtttccaggctgtgatccaaaaagagggaatataagcagaacccagcaaactccctgagttgggaaaattgatatgagaatttggagagacagagggctgcagttcacagtgcagagtaatggaagacggagaagattggcaagagcctcagagggctgcccttgagtattcagcgagtgctgatcagcaggtgcgtgcaaggaaactgaccaaggccaggtaaaaagaa

SEQ ID NO: 14262 - DNA, 362 bp, Homo sapiens
  MAP TO D84394.1; EXPRESSED IN BT474, SIGNAL = 1.2; EXPRESSED IN ADULT LIVER, SIGNAL = 1.1
agctacaacactttccccttggaattctccggtttttgtaattaagaaaaaatcaggtaaatggagaatgttaactgatttaggagccattaattcagttatacaagctataggagcattacagccaggaaggactctttctttactatacccttagctaagcaagacagtgaacggtttgcatttacaattcctgtggtaaacaatctgcagcctgctaagcattttcattatttcacagatgggtctagcaatggtaaagcttcttattctggatcaaaaggtaaagctttccaggcaacctatacttcagctcagaaagcagagcttgtagctgtaattgaggtgctgactgcttttga

SEQ ID NO: 14263 - DNA, 358 bp, Homo sapiens
  MAP TO AL008726.1; EXPRESSED IN PLACENTA, SIGNAL = 1.6; EXPRESSED IN ADULT LIVER, SIGNAL =  36
acttggcaaagaagcatgagtatgcacaatatatgtaaacagtagctgttgttactgcctctagctttcaaggcccactcagatgtcacctcttccctgaaacctttcctgaccctccctcctccagtctgacgggctcgccccctggtagcaggtgtcctccttccaatgccttttaagagatgtgcttgtgaatcctccaagaacagcagctgggttcccaccatccccccacagtgcctagcacggggctgggagacacctgctgtcagtccaggtgccaggccagtctgccttgaccctgactgtgaatgccccaccccagggggccttcttccccctgactgagaggaactgg

SEQ ID NO: 14264 - DNA, 436 bp, Homo sapiens
  MAP TO AL033521.2; EXPRESSED IN ADULT LIVER, SIGNAL =   1; EXPRESSED IN LUNG, SIGNAL = 1.4
ggtcttgctgagctattccctctacttgtgggtacgtttgaactttttcatactgaacaaacataactcttaaatatgagagaaggaatacaaatacatttagtaagttagcttttggtagatgcattcgaattaaaggagaaaagataaattaataaatggtatcaggagaaatggctagtcatccaggggaaggagagctggaaccatcaatgatgcataaatcaaaataaatttcatgtaactcaaagatttaaatgtaagaaaatgaaaccattaaagtaacagcagaaacaatcagagaattaccatcatcaccttggagtaaaagaaaacactgataaagtgaactatgtaaaaagtaattattttcttcatggcaagagcaaccataaacaacataaaaatatagcaaagggggaaaaatctggaaatc

SEQ ID NO: 14265 - DNA, 480 bp, Homo sapiens
  MAP TO AC007421.11; EXPRESSED IN ADULT LIVER, SIGNAL = 2.5
gagatctcggcctgtttgtccagccaggaatcccggcgcaggcagccatccagggcaggaaccagctggagtgtgacagagataagatacggggatgtagaaatcagggcatcggagccgcagtcccgacctccctgccctcagttgactcccctctgagcatttggcctcccccttgcagctctcaacccttcccttctccctaaaagtgtggacttagattcccacggccagccacccagcagtgctttaccaagtcttggctagggttccacccctggggtgtagttaccggcaaccgaaggttggaagcggggaagagcagccccccaagcgcaatcctcatgatgggatggcgtttgctggtcaggggcccagagacctgtctcaggcgcagcacctcctccccatccacctccagcagcacagagtccccctccatcttgacttccacctgcaggaaggtgggaagcaaaatca

SEQ ID NO: 14266 - DNA, 414 bp, Homo sapiens
  MAP TO AL035457.13; EXPRESSED IN ADULT LIVER, SIGNAL = 1.3; EXPRESSED IN BT474, SIGNAL = 0.96
ggctttttcccctgaatctctggtggaaccgatcctcctgagctgagataaccatttacactattgattgactgattgatttctaaaggtgaaaagcatatttgttagggtctgtttggctccaaaacccctgagtaacagcagctaaaaggataagaatatcactcctgtcttaacaaggtgtctgggcagaagtaccaagataccgcacgtcataaaaatgtcatcagggaattaggccctttcccagtctcctttctgggttgaccctctgtccttgaatttgttatctccaaccctaagatggttgccacagctccaggtgttgtgtctctgatcctcttctgcatcctagggaggaggcagggcataggtgagaggctctctttgtaagccgaagccttttgatctgaa

SEQ ID NO: 14267 - DNA, 451 bp, Homo sapiens; identical to SEQ ID NO: 920
  MAP TO AL049759.10; EXPRESSED IN HBL100, SIGNAL = 0.67; EXPRESSED IN ADULT LIVER, SIGNAL = 0.94; EXPRESSED IN HELA, SIGNAL = 0.75

SEQ ID NO: 14268 - DNA, 412 bp, Homo sapiens
  MAP TO AC007163.2; EXPRESSED IN ADULT LIVER, SIGNAL = 1.2
tcagtctcccaatttccagcaagaatgtttttgaccaaccatgggcatgtgagcagaggagctctggtctcctctggagtaaagctagcttaattactttgactttggtggcttttgtgaaatttaacaattgggcattgcaaccatatggctaatatgacttaaggagaagtttcctcaacacctcttgctttgtcagggctgcttccaggcagcatcctcatgtgcatttggagaactcacctgaccagcagcacgtgagccaaggccaacaggaaacttcagggggaccatggccagtcctttcttcttccaataattctctgcattgaacttttccacagcaactttcctcaaggagtaggaagacatggccatacattctctccaacactggattaggttcttggca

SEQ ID NO: 14269 - DNA, 440 bp, Homo sapiens
  MAP TO AC007157.6; EXPRESSED IN ADULT LIVER, SIGNAL =   1
tttgggatttctggagttggctgcttaatacaattagacccaaaaatgttaaggattctacttctaatagtatggaaaaccctgatagtccttggcataaactgtttagaattatgcaaaataaatgcatttgactctcctgattcagcactcatgagagacaaggagtttagtgactctatgcttaatacctttgatcatatgtggagagccaaggtacgtaatgaagctggttggttgctcctaagttcagtggacaaagtgataaaagaaaatgatgaactcagggattctgtctcctggcttcagaagcagatactgagcctcaaatctgccaagattgccctgagtgagaatcttatctcctgtagagaaagagctgaaattggaaaaacagacacagctcttatcatgcaagtggctgacctgcaatgaaaggt

SEQ ID NO: 14270 - DNA, 408 bp, Homo sapiens
  MAP TO AL035552.9; EXPRESSED IN ADULT LIVER, SIGNAL = 0.72
catgttcttagagtcagaaagtcaagagaataagatttcatgatattctaatttctaatttctagtggggagattacaaatcaaagaagcattattatttatttctttgttactgcattataagtagttgagtaaaatgagtgcagtaaaaaatataaaaattttaatatctgaggcagcatagggcacaactaatacatgtggtccactttaaaattcttctttcaatatcttactagatttgcaactgaaaaaaatctttggattataacaattgttggaactgcctttttcacagatactaacgtgaatacgattaactttctttattacaaatgtttcataaatgacaactatcctcagggtctgacctacggtcatttttcccaagagattaaagcattttcc

SEQ ID NO: 14271 - DNA, 465 bp, Homo sapiens
  MAP TO AC007446.8; EXPRESSED IN ADULT LIVER, SIGNAL = 0.91
gtccagctagcctatataatttgctgactactttaaaaagaacttgcctgtatcctcttttgtagatacttcactatgataagaacatcctattttaatatacattcctcttctttgtgcactcttttacagataaaacaaggttagcactagcttatctgagtagctttaacattgattatatatatatagatatatatatataaaattgattgaattaatgtttctatgctgtagaactcataaaatactatattctcctcagcagaaagtcacctttactttcttggtgtgagcaaggtttgcagttcctgctgcatggcccagggtaccacagccctgaggttgtgaggtccagatgtttatttgactggccctgcccattcttgtattcaaagtcacaaacctctgcagatacaatatgaaaacatagaatggcaaatgcaaactgctctattccctaga

SEQ ID NO: 14272 - DNA, 423 bp, Homo sapiens
  MAP TO L10641.1; EXPRESSED IN FETAL LIVER, SIGNAL = 8.5; EXPRESSED IN ADULT LIVER, SIGNAL = 1.1
gccttatagttgttgtcgttttatctacaattattttctgagtataaattcttaaaaatagaattgtacatttttaagacttttagtacatattgacaaactgcctttccaaatattgtaccaattttctttctgagagtcttcatactgactttcataaatgtgatgccaaagcttgtaagcctatgtaattcttatttttaattagactatcaggaaactaacaatgcacaaactaaccattcgttttgtagctgcctgaacacacagtaaaactctgtgacaatttatccacaaagaattctaagtttgaagactgttgtcaagaaaaaacagccatggacgtttttgtgtgcacttacttcatgccagctgcccaactccccgagcttccagatgtagagttgcccacaaacaaagatg

SEQ ID NO: 14273 - DNA, 456 bp, Homo sapiens; identical to SEQ ID NO: 3486
  MAP TO AC008268.1; EXPRESSED IN ADULT LIVER, SIGNAL = 0.65

SEQ ID NO: 14274 - DNA, 470 bp, Homo sapiens
  MAP TO AC009501.2; EXPRESSED IN ADULT LIVER, SIGNAL = 0.98
gagcacagccacattgttatgttaccatagctatggctatcttttgtaggccacagtgacactgctgaccctgtagggcatctgctttgtttttccagctgcagagatgggtttgtactgattcacccacatttttcacctatcctgcatatgactaatggaacactaactatagactttgttatgggagccaagattaaaaatacaatttgtgtccatgaaattgtttacagatttacccttcatctagctatccctggttatgtctgtctccatactagattatgcggcctttgagggcagggaccacatcttggttatcttgtatctccagttcctgcctcagggctatatacaccatcatcacccccttcattattatcatcatagcttgtagtcttgggttctgcactaagtactttatgtggattttctcaattcttacaacaatcgtgaagtaagtaatacca

SEQ ID NO: 14275 - DNA, 381 bp, Homo sapiens
  MAP TO AC007690.11; EXPRESSED IN ADULT LIVER, SIGNAL = 1.1
tgcagaggtaccctcctttggaaattttgcatatggcaatggcagaagagcttcccttttctggttctctaaatgcagacaccttttctctttttgtcagagctcacccatgtactcagtgtgcaactcatacttagtttcagctctttgctggaatctcttggcctagcactaaagggaagataaagaaaagcccctgggaggcagctctgggaggcagctttgtgtgtggaactctggcttagtcacttacctgctttgtgcccgtgctgtcaccaaagctcttgtcacctcatctgaaaatggagaagacactcctcgcttcataggcttgtgtgaagaataaatgaataacttagtacataaagcacctggcacaca

SEQ ID NO: 14276 - DNA, 374 bp, Homo sapiens
  MAP TO AC009856.1; EXPRESSED IN ADULT LIVER, SIGNAL = 1.6
  unsure 70
  unsure 84
  unsure 260
  unsure 283
  unsure 312
caaaatgaaacacttttgccactcaaaagacactgttaagatattgttatgaaaaggaataaagccaaangataaaaatatttngcaaaacatcacatatatccaacataagatatgcagctagaatataaaagaacacatatttcagttacaagacagcacaatgaaaaaatgagcaaaattactgagcagcaacttcaccaaaaactgtgtaaatgtcagtgagcacatgaaaatatgttcaataccattgtcatcangggaagtataaatttaaaccacntgttggatgtcgctatgcatacgccaacnatagctgaagttaaaagtatgaccatacaaagtgttgcagctggaactctcatgaacggctc

SEQ ID NO: 14277 - DNA, 443 bp, Homo sapiens
  MAP TO AC009234.2; EXPRESSED IN ADULT LIVER, SIGNAL = 0.76
cagcaacagcatttcacttgtgtggatggaagtacttagaaggaaatgtcaaaatgaggttgaagctgcaactgattttctgagacttcatttatctcctttatttcccactgaattattcaagaaaaacattgtatgtgggaggttggaaataatccaactgcattggtcaggagattatccagtaatctaaaattatgaaagtcaagatatatcttattcatagtgccagatcacttctttgtgattagttataaagcagcatgttactcacataattgtggagcacttactgtataccaggcacttgctaagtgcttccgtggattatcacatttaacttctaccacaaagccctcaaatactttgataggtttaacataattattgataccatcagtctgattcagttttatctattgaaagcaatagaatcgtaccca

SEQ ID NO: 14278 - DNA, 450 bp, Homo sapiens
  MAP TO AC009224.1; EXPRESSED IN ADULT LIVER, SIGNAL = 0.85
gtttcccatttggggctccatggatccccagattaaaaaaactaattcaacgggcagactaagatcttatcagggacctgagggtatgtggttacttacagagcacctaaaagcagacacagaaggctgaaattggcatttccatgccagttttcccaggtgccaatccttgtgtcctctggtggccacctcttatctttgcatgattcttcctcaataggtgaaggaagcaacctccagccaacaatctcctgagagggctgtcagaaagtcaccagccaagacagagctgacacctggtgtgcagcgtgtgctccacggatgctgcctttacatttgtactgggtacatttcttatattttgaggattgagaggcagcttcaggaccctggaatgtccaaactgtgttatcagaaggcatttctgagtcaccatccagtgggaaaaag

SEQ ID NO: 14279 - DNA, 468 bp, Homo sapiens
  MAP TO AC006499.11; EXPRESSED IN ADULT LIVER, SIGNAL = 1.1
ggcaggttcactttcagctcaggttttcagactcaggctaaattacgctaccagctttacaggtactccagcttgtaaatggcatgtctttgggcctcttggcccccataattacataggccaatatttgtaactcatgtattctattggtttggtgtcactggagaaccttgactaacagttttttctgactgaaacgtctcaccattccaatgtagactttgacctatggatcaccttgaatattcatgaccataacctatgttcatgaatgtttatgtttgagagctccaaggagaccaactggtacttgggacagagcccaaacaatgtcatagtgacctataaaaacagctatttctataagagacccatgctcccagggggctgttttgacagcagttctgggtcccacagtgttttggtctaagtgtttctgagaaattcagatgccagaacttaacccca

SEQ ID NO: 14280 - DNA, 453 bp, Homo sapiens
  MAP TO AC006464.3; EXPRESSED IN LUNG, SIGNAL = 0.63; EXPRESSED IN PLACENTA, SIGNAL = 0.6; EXPRESSED IN BONE MARROW, SIGNAL = 0.52; EXPRESSED IN ADULT LIVER, SIGNAL = 0.51
tttttggaagttcatatatcgctgtatttttgtgagcttttacaaatatctcttttgttctatattagaatttaatagatcccttaaaagtcaggtgtaccactccaaaatcataccacagcattgcgggatccagaattatgtaagctgaattccaggtagatgttgtacttgttactggtaatagcatttataaaatttgaattcctgtcaagttatagttttactgtggtgggagtcaataaacaaaaattgtttttctttatcaggatgctgccaataatgggcccagcaaaggtgtgtcagctcagtgcctgtttgacttgctgcagtccctagagggagagaccaccgacatattagacatcttagagctggtcaaagctgagaagcctctcaagtcattaggtaaaagcaaaacttgctttgacattctttttctcactgcagttg

SEQ ID NO: 14281 - DNA, 487 bp, Homo sapiens
  MAP TO AC004949.1; EXPRESSED IN ADULT LIVER, SIGNAL = 0.52; EXPRESSED IN PLACENTA, SIGNAL = 0.59; EXPRESSED IN LUNG, SIGNAL = 0.78; EXPRESSED IN BONE MARROW, SIGNAL = 0.49
ttcctgaaggactgaaacttttgattataaaatgtccctgtttatctctagtaccacttattgttctcaactctattttgtctgatattagtatcacaattcatttccagcttgcttgtggttgaatttgcatgatatttctttattcattcttttaatttacttatgtcattaaatctagaatgtgtttcctatagacagaatatagttgggtcattttttttttttgtagtcttacaacccctgcgtttttattgagttgtgtaatgtattcatacttaatgttgtttattattattgtagttgtatttacatctacccttttacttttcatttctatatgtctcatgccttttttgttgatctgctcttctttttcattaagtaaatgttttttatctggcattttaatttctttaatgatttttttcactatattttttgatatttttattttagcggttattctcgggcttgccatatacat

SEQ ID NO: 14282 - DNA, 476 bp, Homo sapiens
  MAP TO AC003026.1; EXPRESSED IN PLACENTA, SIGNAL = 1.6; EXPRESSED IN BONE MARROW, SIGNAL = 0.53; EXPRESSED IN ADULT LIVER, SIGNAL = 0.46; EXPRESSED IN LUNG, SIGNAL = 0.61
gcccctctaggacatctctgagaaagttgatgggagaggccggctctttgggctcccggtcgttgatttatccagttcattcccagagtgtttagtgagcacctgccatgtgccagatactgccccaggtttttccacgagctccagcagctggtcagttgtggccacctggggagggcccaagcgcgtctccagggcctgtcactgctcctaggatgatgactctcactcggggcacagcagtcagcactgggcgttctgcttgcaggtggccttgtgcacatttgccgtctacgtgaccattgacgagaacaacatcctggatgcccagacagccttcgtgtctttggccttgttcaacatcctccggtttcccctgaacattctccccatggtcatcagcagcatcgtgcaggtacagggggaagctggggcgacttccgagagggggccttggggttctaggccacgaaagc

SEQ ID NO: 14283 - DNA, 490 bp, Homo sapiens
  MAP TO AC005019.1; EXPRESSED IN LUNG, SIGNAL = 0.57; EXPRESSED IN ADULT LIVER, SIGNAL = 0.45
accagggcatccacaaaacagttttaatactaccaaaatgaaaagcttctaacagtactttcatctctagagttatcaccagtcacctaggccagcaattcttacccatggaattgtgattttttgctgaatcagttgtgttactagttgtgtttatcggcaaaagaaaatccagttgctggatcgacttaataatctcagtggattaatgcaatggatgagttctctattgctgattactcagccactccaagttcagtgagttaccagagaaatttgttatttttcatgattcagcaggtctgctgggcagtaatctggtctgcagtggcatggctgatttctgcagcaagctgcgtgtcaaggtcaaaatcagagtcacgtataggaaggacaagtccagagttaccattaagagcagcatagcttccaactggtaatcaatactctcctgtaatgtaggtattccacctaaaggtttcttcacaca

SEQ ID NO: 14284 - DNA, 449 bp, Homo sapiens
  MAP TO AC003080.1; EXPRESSED IN PLACENTA, SIGNAL = 0.86; EXPRESSED IN ADULT LIVER, SIGNAL = 0.58; EXPRESSED IN LUNG, SIGNAL = 0.48; EXPRESSED IN BONE MARROW, SIGNAL = 0.54
ttaatttaaaccgggcatggtatgactaatatcaaagctggctttctgcaattaaaaactgcttattccaagttcctttaacaaacatgttttatatcttggtttccttgtaaaattaaggtaacctcatatgattttgaaatgctgatgggttactctcctaaggccacattttccagattataacatcaagccacctgcaacgtgactgaagcataaccaggccctgttccacgtgccatctgctctatgatcttacagtgacatcctggaactggaaccgcattgctgagctggatggctgaggtcggctggtgatctccaatatggtcctcagcagaatatccagcaagctggccactatcacatctatttcctccagcacagatttttccttaagagaaaaaaaataatatgttcaggaaactggggtttaacatgcatttcaa

SEQ ID NO: 14285 - DNA, 489 bp, Homo sapiens
  MAP TO AC002480.1; EXPRESSED IN LUNG, SIGNAL = 0.67; EXPRESSED IN PLACENTA, SIGNAL = 0.61; EXPRESSED IN BONE MARROW, SIGNAL = 0.64; EXPRESSED IN ADULT LIVER, SIGNAL = 0.56
tcaccaaaagcaaatactctctggatccactaacatgaggtatctaaaatagtcaaattcatggaaacagaaagtagaattgtggttaccaggctaaagggagggggcctaggaggttatcgttcaatgggtatagactttcagttttgcaagataaaaaagttctaaagatctgttccacaacaatgtgaatatatttaccgctattgaacagtacaatttaaaatttgggggatattaaattttatgttatgtgcttcctaccagtttttaaaaagacaagtataatggcagaagatttggcaatgacagtactcaagccacctcctgagtcacgatgttccaatctgtactgactgccctcttcaattaatgtgtaatcgtcatcctgggatctcccttcaccactctccaggagattccctttcccttctccacagcgatggatcttctgctttctgtattccatgccttcctctttcttggctt

SEQ ID NO: 14286 - DNA, 343 bp, Homo sapiens
  MAP TO AC006477.2; EXPRESSED IN FETAL LIVER, SIGNAL = 0.75; EXPRESSED IN ADULT LIVER, SIGNAL = 0.81; EXPRESSED IN PLACENTA, SIGNAL = 0.94; EXPRESSED IN LUNG, SIGNAL =   1; EXPRESSED IN BONE MARROW, SIGNAL = 0.75
cctaagtcaatgggggaatgtattggatctgttccatattctgcagagaatgcactattgctcagaatctcgtaattagaggtagggaatcagagtcaataaagtgattgtgtactaggtagtaacattttatgtagttatccactgattccacaggtagcattttggctttttaccagtctttgttttataatgaactgattagtctttctcttactaggctgtgaccatagataaactgcagggaagttctgttactgtatctaccgaagatggtttgctgaaagccaagtatctttatacagaatcatcatttctgtcttctgctgctggggatattaca

SEQ ID NO: 14287 - DNA, 477 bp, Homo sapiens
  MAP TO AC005022.1; EXPRESSED IN PLACENTA, SIGNAL = 0.73; EXPRESSED IN LUNG, SIGNAL = 0.62; EXPRESSED IN ADULT LIVER, SIGNAL = 0.63
gccctccactcactagatgccagcagcactcccttctctagtggcagcaataaaaaatgtcgctttggctgagtgcagtagctcatgcctgtaatcccagcgatttgggaggctggggccaggagtttaagaccaccctgtgtaacgtggccaagacccctatctctacaaaaaaaaagtttccagatgtgggattggtaaatgtcccctggatggtaaagtaaaatcgtgccccagttgagaactattgtttttaaaaaatccatctcttttttgtctgtttttgtttttgtttttgtttatagaggaaaaaggtttaatcgactcacagttcagcctggctggggaggccccaggaaacttacaattatggcaaaaggtgaaggaggcccgaggaaacttacagttgtggcaaaaggtgaagcaaacatccttcttcacatggtggcagaaaggagaagaatgagcaaaatgggg

SEQ ID NO: 14288 - DNA, 465 bp, Homo sapiens
  MAP TO AC004558.1; EXPRESSED IN LUNG, SIGNAL = 0.6; EXPRESSED IN BONE MARROW, SIGNAL = 0.51; EXPRESSED IN ADULT LIVER, SIGNAL = 0.5
ctccttccactacattgggcttggggctgatgaagcctccttcctacgtttctcaggctggacctgagttcatccgtgagaaatcagtaaaacaaaaggaagagtctgtagagatgaattgggaggggtcaggagaaaaatttgggatttgcttgtgcccatgggacacaggctgggaataaaaatgttttcctggttcttctcagaaagccaaatagacttcacctgaaaacctgttgccagtgctccccttaccagtgactgtgatcttcttgatcgtgaaacacctgctgtcagtggctgagttgcgaacgaaacagatgtagattccactattctttttagtgattttggagataaagagctcttgtgctgatttttggaacttcccattaatctgccaagaatactgtgggggtgggttagaggctgtgttgcaggagaggttgaggttttcccctggat

SEQ ID NO: 14289 - DNA, 449 bp, Homo sapiens
  MAP TO AC005273.1; EXPRESSED IN PLACENTA, SIGNAL = 0.67; EXPRESSED IN LUNG, SIGNAL = 0.57; EXPRESSED IN BONE MARROW, SIGNAL = 0.59; EXPRESSED IN ADULT LIVER, SIGNAL = 0.64
gcctcgagaggcagaagttacacacttcactttttttccattctacttgtttctgtattcattcaatcaatatttgaacaccaatttgtgctgaccacagctctagttacttggaacacattccattagtaaaaatttagtcacatggcaacctgcagccaccggagggtttagaataaaatgaagcctccaaggaaggctatgtggccagcttaagctcattataattagctttccactttgcaactgtaaattgttacctggcaataggattatgtgattaagaaaaaagtagggaacagatagccctggaagagaaccaggatgaaaagcaagacatcgaaagattttcatatgattaagatttcgtaattgaagactggatttctcaactaacagatgtttatcgagcttcttccataagccagacttagagaatacagtgttga

SEQ ID NO: 14290 - DNA, 447 bp, Homo sapiens
  MAP TO AC005350.1; EXPRESSED IN PLACENTA, SIGNAL = 0.64; EXPRESSED IN LUNG, SIGNAL = 0.69; EXPRESSED IN BONE MARROW, SIGNAL = 0.56; EXPRESSED IN ADULT LIVER, SIGNAL = 0.48
taattgtttggagctgagcgcctttcattatgttcaatggaccctccatagccatgctgggagggccgccatgagcacagtgggttgggccatgaatcaggaaaacagctgtcttttgtctgagaagagaaagccgtgagttaggaaatactctctgatcagacaaaatcagcatggatggtgtcaatgtgagtttaaaagattcttctatgtggaactttcaggaacaaaggcaacaccccacacacaaattgacccttttctttttccagatcaattataccttccagaagaatgatacctatatccataataattccattttgcaaagaaggaaatgttcaaacaacttactaatatctgatttaaatgcaacagatatttatgaggtctttgttaagtgccaaggtgtgtagctaggcattgaggtacaaagcagaccaaggc

SEQ ID NO: 14291 - DNA, 401 bp, Homo sapiens
  MAP TO AC005906.1; EXPRESSED IN FETAL LIVER, SIGNAL = 0.68; EXPRESSED IN BONE MARROW, SIGNAL = 0.69; EXPRESSED IN PLACENTA, SIGNAL = 0.67; EXPRESSED IN LUNG, SIGNAL = 1.1; EXPRESSED IN ADULT LIVER, SIGNAL = 0.68
aaagacctggtcggaaaaccttcatcatcaaggctccttctgaggtgataaagaagccttcttctttctcttcccaatgaatacagtacacccagattgtcaaacactttggaaatcacctgtatagcccccgagtttccaaagctctcccatgaatctatgcggtgatgctcacgccaatctatggaggcaatgtgtcctctgggggccctaagcttgtccctcatttcatcacagaaggcactccagccaaacatagaagaagggccttgtctgcttctctaggatgtaccactgggactccagctcccacggagtctccatcctcgtctcccctgaaatctgcatgctgacccccatttctctccaagcagatctgatgcagttgattcgctttgtga

SEQ ID NO: 14292 - DNA, 438 bp, Homo sapiens
  MAP TO AC005832.1; EXPRESSED IN LUNG, SIGNAL = 0.5; EXPRESSED IN ADULT LIVER, SIGNAL = 0.49
ttcctaacatgtgagtagagtgtacctatgttatttttaattccaaattatgttttactttaagaaagactatattttattggctttaagttttgtatatttatataatgttttttgcagatagattaaactgaaaaagtcattaaaatgggaagttgcaaggcccatttttaattattttgtggtacagatttatctggattcttgccatagagatttgcatcttgttatactggactttctgtagctgcttaagtatctttcctggactattgcctacccccaggagcccagttgaagaccatgcataatttgagattgctgagagcagatatgctggacttctgtaagcataaaagaaatcatcgaagtggtgtgaaacttcatcggctccaaacagctctgtcactttattctacatctctctgtggcctggtt

SEQ ID NO: 14293 - DNA, 482 bp, Homo sapiens
  MAP TO AC002094.1; EXPRESSED IN PLACENTA, SIGNAL = 0.58; EXPRESSED IN LUNG, SIGNAL = 0.65; EXPRESSED IN FETAL LIVER, SIGNAL = 0.74; EXPRESSED IN ADULT LIVER, SIGNAL = 0.63; EXPRESSED IN BONE MARROW, SIGNAL = 0.61
ttggggaacaaaacaaaagggaacaagctcattgtttaagtggtctcaggcttcatgtgtatgcaagggatttccagacgactgaggcagccgtgcaggcctgctgaccacagacatgagcctgagccacactaatgtccctttacaagatctaccctggctatttaccccagatcctgtagcattctcccacaaactatggggaccatccccttccctttggagatactttcccaaaagatttctgggacctgatttctgagtaaaaatgggattttcccaccatttaccaacctttgaggaaggcatacgttgcaatgggaaagaaaggcagctgaaacacaagctcgcaaaacagaaaggacttaaaccaggctgggggctcctgtagcagtgggtctttgaactccttagcataccacttcagcaggtttctaaactgaaaaagaaaacgatcatgatgaattacagccacttgccct

SEQ ID NO: 14294 - DNA, 498 bp, Homo sapiens
  MAP TO AC005553.1; EXPRESSED IN LUNG, SIGNAL = 0.44; EXPRESSED IN ADULT LIVER, SIGNAL = 0.43
aatcccaaagcccaagctacagatggggaaacagacatgatgaggttgccaggctacatctccgggtatacagagagggtggggaagaagccccttaggccaggcccagggagaaactgatgacatttggacacctggacatgaggtgcctgggttggagggtgccctgaacagcttcaggaagggagggtcggagcaggcagctgtccagcattcctgaactgggctgagtacacaccttctccatcagccacacccaagtcatctccaccttctggcatacatggaacaagggtctcggagtctgtggctcttgagacaaaactggcttcgaggagtcctcactggctgaacctgctttcttgggcccaaggagcctcctgagaatttctggcaagttaatggcctcagagtgggtacggctatttattttgctgagaagagatgtcttcatcttcactttctctatttcctcttctggcaattctttcactcacc

SEQ ID NO: 14295 - DNA, 475 bp, Homo sapiens
  MAP TO AC003670.1; EXPRESSED IN LUNG, SIGNAL = 0.59; EXPRESSED IN BONE MARROW, SIGNAL = 0.61; EXPRESSED IN PLACENTA, SIGNAL = 0.6; EXPRESSED IN ADULT LIVER, SIGNAL = 0.55
gcagagctgctactatgtgggatatatagggcccctggaaaattgtttattgttatttaatttttatttcataattaataaacttaactgtgcaatccagctagatgtgaaggggataggaaaaatatagaacccaaagaactgcagtgagagcacaaagattataggatattgcaagtaaatggggtggaagggtgctttcctgagctacagaaaaaatggtctggtggttaagataaaacaagtcaaatttactagcattttccacaattggcaatggtgatattcttgctggtcttgccattcctggatccaaagtgctccatggtttccacaatattcatgccctcttttatcttcccaaagacaacaggcttgctatgtaaccactcagtcttggccgtgcagatgaaaaactgggaattgtttgtgctgagtcctgcatttaccatgaacatcacgccaggacctgtat

SEQ ID NO: 14296 - DNA, 382 bp, Homo sapiens
  MAP TO AC005815.1; EXPRESSED IN PLACENTA, SIGNAL = 0.59; EXPRESSED IN LUNG, SIGNAL = 4.2; EXPRESSED IN BONE MARROW, SIGNAL = 0.57; EXPRESSED IN ADULT LIVER, SIGNAL = 0.47
tgcataaaacagtatacttaaatgggaaacaccagagggagtggaagcttggggacgtggaccctcacctggtcgcatgactgtcagagctgtctgcccagcggtgtcctctgcccgcttataccacatgccactggggctgggcagccactcctccacatggcagctgtaggtcccgctgtcctgcacagccacgttctggatgaagagacggtacacgccgggggaaggactctccaaatgcagccgccccttcagattgttcttggctgcctgctctccatagtggaaggtggcgtcacggctcaagcgggccacagtctcccgctcagggtggttgggcttccatacaaaccattccaccatgagctgggaggttatg

SEQ ID NO: 14297 - DNA, 454 bp, Homo sapiens
  MAP TO AC006398.1; EXPRESSED IN LUNG, SIGNAL = 0.47; EXPRESSED IN ADULT LIVER, SIGNAL = 0.44
actcataagcgccatgctgcaatgagggacccattgtgctttgtttctaaaggaaaaaacaaaacacaaattacacctgaaagaagagagaagaactctttgtttcacctccactatatgtgatatttagctgaaaaacacatgaactgtaccaaccagaaaactagccagctagtccttcactaagccatgttttttaggacaaccagatggtaatttttcatttcactcacccccacctcaaacctatctacatccagagactgcaactcttcagaaaacacctgagcaagacttaggctgtgggctaccagcatagtagtctccataaataaagcactatgggtctgggaggagatagaaatagaagcagtaaaaaccagggctagagttttccatgtagtccatctgttccatgtactagtgagccggcagtggacgtaggagtggatcc

SEQ ID NO: 14298 - DNA, 475 bp, Homo sapiens
  MAP TO AC005026.1; EXPRESSED IN BONE MARROW, SIGNAL = 0.55; EXPRESSED IN LUNG, SIGNAL = 0.76; EXPRESSED IN ADULT LIVER, SIGNAL = 0.97
ctcccccttttcacctttcctagaacatacatttattgagttcctgctgggtatacacggataagtgggcctcttctgccctcacaccccagacctcctgggagggaaagaagacagttctgacctgtgggtgtgtgcaccctggcagggactcatccccatactgcccagcaggaaaggcagtgtggtgtgctcacccccatggctgtgttggtataagctctgtattcagtaaatgtgtgcttgtctgaggaagcgcactgaggatgagcacagggccgtcagagggcaaggcagtggggaggacatgatgcgggtccaagtagaattcctcgggtcgtccctactggttctggccaacctgaattatggagaagggaggaaggagcactcgatcccatggagccccctgggaagcctgatggagggggtggtgtttgtattgagtcttgaagagggggtaagacttgggtaa

SEQ ID NO: 14299 - DNA, 473 bp, Homo sapiens
  MAP TO AC004662.1; EXPRESSED IN PLACENTA, SIGNAL = 0.72; EXPRESSED IN ADULT LIVER, SIGNAL = 0.58; EXPRESSED IN LUNG, SIGNAL = 0.61; EXPRESSED IN BONE MARROW, SIGNAL = 0.61
gctatttgagccagaagaaaatgttagtctcttttaagaccaatctccccccaaaaaagatgaacacttctgtaaataactttgataaataagaaaccaaaaaatagaaaaaaaaattctagtgtaagtaaatatgaatggctggatttgtataattggagagaaaaaagctaagcaacctcactcacctattctgttcttccagtttagccaggagttctaagtcgtctggactcaactgtgatggggaagatggtgaaagggctggtgttgatagtgtggtagatgaggatgtggtatgtaatgaagtagatggacttgccacctgactggccatctgactgactgtatgcgatactgtgttcttcacccatgagagagtagagctcagcttttctgcaactttgtctgtcgccacctaaggacaaaaataaaagttgcatatactttagttacactgtattcattaccga

SEQ ID NO: 14300 - DNA, 472 bp, Homo sapiens
  MAP TO AC005035.1; EXPRESSED IN BONE MARROW, SIGNAL = 0.54; EXPRESSED IN ADULT LIVER, SIGNAL = 0.51
gcagctgattgcccagtaacagaggagacaggaaaaccattaaggcaggtgcgagaaccaaagcacacagccatttcgggattttaagcgcagacaccagcagtcccttccatgttactgtgccctactgagtatatcaggacattaaagcacaaaacaattgatgctcctaatgatttccttgaatcacaaagaacagtttaaattttgttcaaactcctctttctctaggatgggacagtacatgcaacacagacgcaatgaaggtaatattgcaattacctcccaatgtgttttcctccttgatattctggattcttctgccactacagccccaggaaagggagagagcaaaggcctcctcagaaagaggaaaggaagtgaatatgatgcaggggaagttccttcctggtaggaagtgtcagtagaagaaaaagaccctttgggctccagggctaaaggagggaaggta

SEQ ID NO: 14301 - DNA, 489 bp, Homo sapiens
  MAP TO AC006377.3; EXPRESSED IN LUNG, SIGNAL = 0.52; EXPRESSED IN BONE MARROW, SIGNAL = 0.5; EXPRESSED IN ADULT LIVER, SIGNAL = 0.47
tttgttcctttgcacttcttatcaaatgcagtactttagaaaggagctccctaacagtcattcttggccttataaataagtgtttcttaaaaaccagtttatcccctgtttttattgccaatcaactcacacattttgttaaaaggacatagcggatttttttttagagtaagattccaaattatgctaagaaaatctttcgtgaaggtaaacattctctctccaaagtttgtaggcgagcagaccttattgggaaaggatgttattatgaaaacccacttgttcttctgggtgaagaaataaaaaagaatgaaaaatacaacccagagcatcattcagaatccaccccaggccatgctggggactggggagagggaagcagttaagatcctgacagactaccaagaggtaagttccagaagccagtgttcatttgcagctattcatgtggaaagaatcactgtcacttctgcctgctgataaacatgc

SEQ ID NO: 14302 - DNA, 457 bp, Homo sapiens
  MAP TO AC000134.14; EXPRESSED IN PLACENTA, SIGNAL = 0.59; EXPRESSED IN BONE MARROW, SIGNAL = 0.64; EXPRESSED IN ADULT LIVER, SIGNAL = 0.58; EXPRESSED IN LUNG, SIGNAL = 0.59
gctgctcccaacaatctgagcccagtccttcccctgccctcaggttcctgcccagggacagttctggagcctcctcagctcagctccctggtctctgaagcctgccagccactgcagccttatgtcgggaccctcacagccccaactcctgttcttctccagaaccacacctcactgcccagccctgatccctccaccacaagctcccggcagccccctctcccaacccccattctaccccaggtatagctaatccctggccttcttctcactcctcctacctggcgcaggtttcgggtgacccggacgtcgtgccaggcgttgtcgttgaacttgccattgacgggttccacaagggcctcgaaggcacctgagcctaggttgatgaccagccagacagccccagacttgagggacaggttgacgtagtcggccgacttgcctgtatgcagcatca

SEQ ID NO: 14303 - DNA, 457 bp, Homo sapiens
  MAP TO AC005348.1; EXPRESSED IN LUNG, SIGNAL = 0.66; EXPRESSED IN ADULT LIVER, SIGNAL = 0.51; EXPRESSED IN PLACENTA, SIGNAL = 0.63; EXPRESSED IN BONE MARROW, SIGNAL = 0.51
tcttatcacggtccatctaagaatcattaaagaataattatgacagatagaaattaataatgatgatgatgacaaaacccctgccatgtgccagacatcatgccaagcattctgtgtgcattgtcttattcggttctcataccagcctaattattcctttcacagagatgagaaaactgaggcattagagaagttaggtcacatggccaaggtcagacagctggaaatgggcagagtccagacaggaactcccacggtctgtctccagagcccaagcacttaaccactaaccacatgatcaataagtcattgtgatgacgatgatgacaatgacgacaatgatgatgctgacgatgataaaggtgagatgttgtgggcagctgggcaggtgaatcaccggaaggaagaacttgccctgagtcagaaagaaaatgaaactgggaacagccttctgatt

SEQ ID NO: 14304 - DNA, 469 bp, Homo sapiens
  MAP TO AC006460.3; EXPRESSED IN LUNG, SIGNAL = 0.61; EXPRESSED IN BONE MARROW, SIGNAL = 0.61; EXPRESSED IN ADULT LIVER, SIGNAL = 0.49
tttctcaatgggatgggaaggttttgagtctaagattctaaggttgggggactggaagaatggtggcactattaattaaaattgagttgtaagaaagacagtgttgggtaagaggtgaggcggggagtgacttaggtcaggttttctgagatgatggagatttgcatgcaggcagtttgttggggagttagatgattctgtaggaggactcagaggactcagcatatagttgtactcacagctataatttattatagcaaaagggttttgagagaaacagcaaagaaatcaagaggaaatcaagcacaagcttccaagagttctttcccactggggtcacccaggacatgtgtgacaacatgtatgaaatgctgtctatcggggaagctcagccgagactctatgcccagggtttttattcagggctgcccctgtaagtatccttggcctagcatgtaacaaaattcca

SEQ ID NO: 14305 - DNA, 500 bp, Homo sapiens
  MAP TO AC005296.1; EXPRESSED IN PLACENTA, SIGNAL = 0.59; EXPRESSED IN LUNG, SIGNAL = 0.63; EXPRESSED IN FETAL LIVER, SIGNAL = 0.77; EXPRESSED IN BONE MARROW, SIGNAL = 0.58; EXPRESSED IN ADULT LIVER, SIGNAL = 0.63
tggtggatgttttgttcagcatccacagtaaatttgactttttagtttgattaaataatgaaccccaatctaattacacatggcttcttaagcatgcactgtagtcagtaagaattcaagtcttacagacaataatctagttaaattctgtccagagttgttcttatattggtaagtgatatgtgtaccaagatttgttttacccccagaacagatccccaatgggattagtcctcaaaaatagcaatttaaaagcatatccaaggcacacatattattagaagctgcttttctttgtgcaggatgtgttgttgacgtgtgctgacgtgagatgtttctttccacagaagtgggtggacggaggcctcaccaacgctcttcccatcctgcccgtcggccggacagtaaccatctcccccttcagtggacgactggacatctccccgcaggacaaagggcagctagatctgtatgttaatatcgccaagcaggatatcatg

SEQ ID NO: 14306 - DNA, 377 bp, Homo sapiens
  MAP TO AC000015.2; EXPRESSED IN LUNG, SIGNAL = 0.62; EXPRESSED IN FETAL LIVER, SIGNAL = 0.86; EXPRESSED IN BONE MARROW, SIGNAL = 0.82; EXPRESSED IN PLACENTA, SIGNAL = 0.64; EXPRESSED IN ADULT LIVER, SIGNAL = 0.62
gccttagtacaaaacgtccttcagattatcagagatctaatacattttgtggtatactacaaggtgatcattatggatatgccctctttagggggcaaatgaataaaaggttcagaatttaagtatattagttgaaaggtataaatttatcatgctaaggaggattaaaataacatattaaaccttaagttgaacaattttcaaatatacacaaactggaaatcaaagtcaaacagcttcaattaatttttatataattcatgttgcagaataaaaagacttaccttaacataaccttccaatgcactgaatttaaacactgcctgaaaaggtttacggtcaataggacatgaagccagtgtctgaaaagtgattaa

SEQ ID NO: 14307 - DNA, 367 bp, Homo sapiens
  MAP TO AC004925.1; EXPRESSED IN LUNG, SIGNAL = 0.45; EXPRESSED IN BONE MARROW, SIGNAL = 0.71; EXPRESSED IN ADULT LIVER, SIGNAL = 0.49
tgctcattgtcttttcaatcattctttacatatttctcaccacgcaagaaaactaatgagacatgtctctacccccttaacgtatttattttgaatctctcgttctctcctgtaagttactgtcttctttcatgaccttttcttagacaagagagactatttgattaaaatgaatcagattaaaactcagtgtgagaaactgtaataatcttttccaattcttattcattgtttaggtgtgaaattcctcaggtatttgtccttgaagtggttatttgtaacatggaaactttagtaaagaaatcaactgagaatatgtacaacttttctcaaaattattataaagaagggaaaggtgtattcatgt

SEQ ID NO: 14308 - DNA, 473 bp, Homo sapiens
  MAP TO AC003682.1; EXPRESSED IN BONE MARROW, SIGNAL = 0.53; EXPRESSED IN ADULT LIVER, SIGNAL = 0.6
cctgacattctttgcattcgaaggacttcttcctacagtgtgggtcccattatgaatgataaaataacagtgggtaaaggccttgctgtattcattgcagcaatagggttctctcatgtatggaccctttggtgctgcagaaggtgtgacctgcgtttgaaggccttcccacactcgatacacttgtagggcatctccccagtgtggatgacagagtgctgaatgaggtacgtgctccggtgaaaggctttcccacactgggtgcattcatagggcttctccccagtgtgaatccgctggtgctgtatgagttctgagctgcatctgaaggcctttccacatgccatgcaatcatagggcttctctccagtgtggatgatgtaatgttgaattaggtgggctctattgctaaaggctttctcacattctttgcactcaaagggcttttctccagtgtgggtcctattatggcg

SEQ ID NO: 14309 - DNA, 469 bp, Homo sapiens
  MAP TO AC005877.2; EXPRESSED IN PLACENTA, SIGNAL = 0.66; EXPRESSED IN LUNG, SIGNAL = 0.53; EXPRESSED IN BONE MARROW, SIGNAL = 0.49; EXPRESSED IN ADULT LIVER, SIGNAL = 0.44
gcaaaataattaagtcaagatggaaagggtcttacctgaacaaaatactgagttacctctaaagtaacgttcatatgtggtttttaatctcaggaatgaccagataactcaaataaataatcattttcacttttataaggctgcagatatagcactgtttagtacattcttttaactttcaaatatattaaaatccttgccttccattgagggctgagttgtcaaaatctggaaagttagtgaactctcagtcattgcacttacttgatctcttcctgatttatgtgatgtcatgtgacgttcaagttgggttctgtatgcaaaggtgtaactgcacagggagcaactaaagttatcttcattcttttcatgacgatatttaatgtgttctttcagagaggtaaagcgtttatagcctctatcacaatatggacaggtgagtaattgtgaaaatgcatctggtgttcct

SEQ ID NO: 14310 - DNA, 406 bp, Homo sapiens
  MAP TO AC004531.1; EXPRESSED IN PLACENTA, SIGNAL = 0.58; EXPRESSED IN LUNG, SIGNAL = 1.3; EXPRESSED IN FETAL LIVER, SIGNAL = 0.72; EXPRESSED IN BONE MARROW, SIGNAL = 0.55; EXPRESSED IN ADULT LIVER, SIGNAL = 0.47
tgtggtcaagagaggttgtctgtagttcacagagctacctagtcaaactatcatgagaaaccattttctaattccaagatcagtactcttccacccaaacatgttagctcatttccacatgagaaaatcaaaccagcaacccagattgtatgcctcagtttgcacttcagacgcatacattacattataagtaaaacagaaaataagctattatacacaagatcttaaaacatcatcacaagctcacttacagcactcaacgggtatagaggctatctgcagagaaaggacttttccactgggctgtgggatgtgtacacgaaacacaagtcgtactctagtattctttctgccaatatcagtttctccttttcgaagttctatatctgaattgcggagtttcaaa

SEQ ID NO: 14311 - DNA, 460 bp, Homo sapiens
  MAP TO AC002115.1; EXPRESSED IN LUNG, SIGNAL = 0.56; EXPRESSED IN FETAL LIVER, SIGNAL = 0.69; EXPRESSED IN ADULT LIVER, SIGNAL = 0.66; EXPRESSED IN PLACENTA, SIGNAL = 0.65
gatggaccaagcatctcctctgtgccagtccactgctccagcctttccacgtggcatccccttttatccccgaagaaactggcagctggggcgtgggggtcggttgtctggctgggctgtctcttctctcctggcctctgctcaccctcatcgctgctcatggaaggcgaggtctttgcccactttactgagagggcagtggaggctccaaatggggagggaacttgctcgtggagatgcctggtgccagggctgctggccccgagcagaccttcctaacccaccgctctgtccagctgtcaggcctgtccctgtttgctgagaccatatgggtgacagccgaccagtaccgtgtatacccactgatgggagtctcaggcaaggatgacgtcttcgctggtgcctggattgccatcttctgcggcttctccttcttcatggtagccagttttggtgtggg

SEQ ID NO: 14312 - DNA, 449 bp, Homo sapiens
  MAP TO AC005690.7; EXPRESSED IN LUNG, SIGNAL = 0.54; EXPRESSED IN BONE MARROW, SIGNAL = 0.58; EXPRESSED IN PLACENTA, SIGNAL = 0.71; EXPRESSED IN ADULT LIVER, SIGNAL = 0.52
gaccctaacctttctgagtgcattgaatccccaaggcaagcagggtaccttgaatatctattggccacatccagtctgtaattcatgtgggtctttgcaaggccacataatgcgggtaaagaagaaaagtgctccttttcttctaattctagactctaattctattcatatagggagatggagggaaccacaatcattgcatgtaagtgaggccactcttttttttttaaactgagcccaggtttacaatgtttccaatagccaaaccagtcaataggtgggacttcatgaaatgacatcatttggcctctctagtgaaacagaaaaacatccagagcacggcctgggaattctgggcaatgggcttcactctctgcttcatgaggttgttactgaacataggaattaaatgatatatgagatacaatacacaggcaaattctttccca

SEQ ID NO: 14313 - DNA, 441 bp, Homo sapiens
  MAP TO AC003043.1; EXPRESSED IN BONE MARROW, SIGNAL = 0.57; EXPRESSED IN PLACENTA, SIGNAL = 0.6; EXPRESSED IN LUNG, SIGNAL = 0.54; EXPRESSED IN FETAL LIVER, SIGNAL = 0.72; EXPRESSED IN ADULT LIVER, SIGNAL = 0.53
cttccagctcccgtttctcgcgctggttctgcgccgccgcctcctccagctgcagctgaagccgccggttctccgcctccaggtccttcagctgcgactcgcgcagacgcaccagctcctccaggtagccctgcggggcgccggctcagcccgggcggctgggaggacgtcccggccgcggcccccatccccgccccgccccgggatgcccggatcccccgcccggcccgcccgccccccgggcccgccggcgtcgcgcaccttctgcgcgtagacgatgcggaacttctgctccatcttgtgccacttgctgtaccagctgtcctcatcggtgacgagcgggaggtacgggtgctcgggcgagttgtcctcgctcgtgctgctctcggcgctgtgccgctcctcctcgtccgtcaggtagtcgtagcttgggagagggag

SEQ ID NO: 14314 - DNA, 466 bp, Homo sapiens
  MAP TO AC003687.1; EXPRESSED IN LUNG, SIGNAL = 0.61; EXPRESSED IN ADULT LIVER, SIGNAL = 0.48; EXPRESSED IN BONE MARROW, SIGNAL = 0.64
ggtgcactgtgatccaaggctcccttcgaactgcccactggcaggccgctgccccttcaactgccaggaggcacccctttccctaagcccaaagcagaggaggtgttgctgacatgaatgttcctgcctgagtaactctgtctggtgtttcttctttgcaggggatgcccctttttgtacccctgagcagcacaaggagtgtgcagagcctgccctaggtcagtactcaggggacagatggaatcatgggggccgggggcctgagactgagatcatggaaatcatctgggtttggggaaagatcaagtggaagaaggaatggagagaggatgagaagaaaggggctggtcgggtggagttgctgcagggatgggagagggagatggagaggaggaagaagagaaggttgggaagggaactggtgcaagaggatgagggctggaaatgggactggggagagaaagag

SEQ ID NO: 14315 - DNA, 467 bp, Homo sapiens
  MAP TO AC004137.1; EXPRESSED IN PLACENTA, SIGNAL = 0.74; EXPRESSED IN LUNG, SIGNAL = 0.71; EXPRESSED IN ADULT LIVER, SIGNAL = 0.53; EXPRESSED IN BONE MARROW, SIGNAL = 0.95
cagttcacacaaacacctcccatgtttaacagaagacgaatgtggaccttagatgagtcaagtaacttgtcacttattgcactgctactaaggacagactcatgaaaaaagcaagttgagtcatgctattgactcaactaggagccaaagacagagattttctcaatattaaaatctcattacaaacctggggaacatccattgaaaccaacattaataaaaatcaagacatctctggaatcctgtgctgtaggtagaattggtccttcctgctgcttttgctgccttagaacaagtgctacaaatggcagtatcttttggatatgaagaattgcatccgtaagactgagatagaatcaatctcgttgatagactatcagggaggtcagacaagccagtatgggttgtttctctctgagttcatgatctggatcattttgatgacagattttggaaattaccagagg

SEQ ID NO: 14316 - DNA, 493 bp, Homo sapiens
  MAP TO AC004942.1; EXPRESSED IN PLACENTA, SIGNAL = 0.66; EXPRESSED IN LUNG, SIGNAL = 0.64; EXPRESSED IN BONE MARROW, SIGNAL = 0.65; EXPRESSED IN ADULT LIVER, SIGNAL = 0.72
tcagcaaataatccagcgtgccttattttttcagatagatattattttttagagcagttttaagttcacagcaaaattgaaaggaaggtacagagatattccgcatacaccctgcccccacaaaggcacaacttactcctctatcagcatcttgcaccagagtggtccatttgttacaattggtgaaccttcattgacatatcattatcacttctgttagtctgttttgtgttgctgtaaatgaaaacctgaggctaggtaatttatgaagaaaagttgactgtggcttacggttctgcaggctgtgcaagaagcacagagtcagcttctgcttttagtgagggcttcgggaagcttacaatcgtgatggaaggtgaagagggagcaggcctgtcacatgacaagaaagtgagcaagagagcggccaggctcttttaaacaaccagctctcacatgaataaatagagaactcactcattacctcagggatggc

SEQ ID NO: 14317 - DNA, 459 bp, Homo sapiens
  MAP TO AC005857.1; EXPRESSED IN BONE MARROW, SIGNAL = 0.57; EXPRESSED IN ADULT LIVER, SIGNAL = 0.51; EXPRESSED IN PLACENTA, SIGNAL = 0.65; EXPRESSED IN LUNG, SIGNAL = 0.6
tctgctctgtgagagttttctctgtagtgttcagagagagttcttttttacaattaatcacagaattttaaggcatattggtgtcgtgagcaatgaagtcatccctatgcttgaagagagctgctcttacatgagcccaggaacaaagtttttaccgctttccatcaagaagaccacagaaatggaggctgtgtcgcaacacagggtgatgcacatgacagaatgatagcaaagaaatattcaaaattgtatgcagtttaatgcagttatacaaagatgtgaatgcaacgaaacaatgactgaagggaatacccaaaatgaagagagttgttgaggtacaatagtgggattattggtaattttttcttctcccgtattttcattgatgatgatgatgatgatgatgatgataactgctatagttagcacctatggggcacactgtaaggcaccatgcat

SEQ ID NO: 14318 - DNA, 365 bp, Homo sapiens
  MAP TO AC005859.1; EXPRESSED IN LUNG, SIGNAL = 0.79; EXPRESSED IN PLACENTA, SIGNAL = 0.96; EXPRESSED IN FETAL LIVER, SIGNAL = 0.84; EXPRESSED IN ADULT LIVER, SIGNAL = 0.76; EXPRESSED IN BONE MARROW, SIGNAL = 0.73
ctgcagtttgctgacctctgctcttggttacaccttttgaggcccttgctctccgagcataaaatggaatccatttatcagactaaatcgggaagattaaattttccagcctcacgaatgctcagccattgactcactcgttcatacaatgaacactcattgagcttatactacatgccaggtgctggaggaggcatggggcgcccaggagaaagatgctcgctttgcggccacagcccagtgggagggagacccatacctaccggtgctgtctcagaaacttgtggaacaaagatgaagcaatgttcatgttattcgcctacatctgtgaattacacaaggaagacgagtttgagaaatccgaa

SEQ ID NO: 14319 - DNA, 483 bp, Homo sapiens
  MAP TO AC005342.1; EXPRESSED IN BONE MARROW, SIGNAL = 0.54; EXPRESSED IN LUNG, SIGNAL = 0.49; EXPRESSED IN ADULT LIVER, SIGNAL = 0.47
gagcacaggaaacttagcggccaaggctggccggttagaggcatgcagctgctgctcctgctgtacaatctgaagcttcttcagtaactcttgaggggagatcactccagagctgccagtctgactaccagagatggggagtgtttgtcttgggagtgtggactgttctcttccatgagcctgatgtcctactgtctgaggtggaagggagccattgaaataggcctgtggtggctgagccagaccctttcctggagccacaggggtgacagaagtgggagctctgctgcggttcagggcagctgagctggcaggtgctggtgtactagggtcacacttgtttgctgcccctggggtactctgaagtttctcgaacaggttctgagttctggaagcattttgtacaccacgagaagttccaatgttgtgaggagaccctggctggacaggtcctgtaaaaaattctcccgcagaatgggtact

SEQ ID NO: 14320 - DNA, 474 bp, Homo sapiens
  MAP TO AC006529.1; EXPRESSED IN LUNG, SIGNAL = 0.74; EXPRESSED IN FETAL LIVER, SIGNAL = 0.73; EXPRESSED IN PLACENTA, SIGNAL = 0.6; EXPRESSED IN BONE MARROW, SIGNAL = 0.65; EXPRESSED IN ADULT LIVER, SIGNAL = 0.63
acagtttatgcctctatgtctgtgttaaagaccatttgtttccagtttgggtaattacaaacacttcatttcttatttgtgagcctgttatgtgaaaaaggtagccctattctcagtaaagcatttcaaccaaatacttttaatcatttattatgtgtcttaacacatttaatatttgcgatactaagagataaccaatttcagacacattcctatatcttgtgctgttgtacatgttcatttgatattgttcattcctgatgtcatgttttattttacttttaggataagaacaagaaactgcgtcccctgtatgacattccttacatgtttgaggcccgggaatttcttcgaaaaaagcttattgggaagaaggtaagtaattgatgacagaagcatatttgcaagtggttgggcttaagctaatcttttggaggcaattgttataagctgggccctttaccagcagatgac

SEQ ID NO: 14321 - DNA, 470 bp, Homo sapiens
  MAP TO AC005079.1; EXPRESSED IN ADULT LIVER, SIGNAL = 0.49; EXPRESSED IN PLACENTA, SIGNAL = 0.64; EXPRESSED IN LUNG, SIGNAL = 0.53
aaaaagtttgtaagcagcatattgagttcagaagaaaggaagtagaggaaggactcctacaggtaatattagtctatgaatcagcaagtatctaataatttttgcaagaattgtaagagaaataagtgaatcaaaagatgacctgtcacttagaaaataagagagaatacaaatatttatcttcaaaaataatttccatccagactgtaacatcctctagaaaatcaagtgtattttcatctgatagcttaataaaataatgatgctgtgccttcaagacataatactaacctgataacataattcccatgtccagtaggagttgccagactcctatggccatagatctgcactggacgaaaggacagtgttctagaagccagtctaccagctctgacccaacgcagctcctcctgaacaaaagcaaagccattcacagtaagatattgctgacatccgtttgccaaaaa

SEQ ID NO: 14322 - DNA, 368 bp, Homo sapiens
  MAP TO AC005042.1; EXPRESSED IN LUNG, SIGNAL = 0.47; EXPRESSED IN BONE MARROW, SIGNAL = 0.49; EXPRESSED IN ADULT LIVER, SIGNAL = 0.49
atttgggagtttggttgtccttctcagtacacaggaaagaaacgtgaaattttggttgagagaagtagcaccatagggcatgagccaaaaaatgtagcagtaggcagcccaagagaggtgtcaaattcaaactaatttcacttttgagaacaagatttcctctcagacagtgcagctcagaggatagaagataagcatagaaaaacagcatgggatctttgaggtgggcacaggttaaggataaagagcaaggggatgtgatttacagacatagagacagtacgaaaccaggcctggtgcattgcagaaatgctgaaatctcaaagttgagagaagaaaaggtcagaggattggcttcacagagaggc

SEQ ID NO: 14323 - DNA, 465 bp, Homo sapiens
  MAP TO AC005856.1; EXPRESSED IN ADULT LIVER, SIGNAL = 0.75; EXPRESSED IN BONE MARROW, SIGNAL = 0.69; EXPRESSED IN LUNG, SIGNAL = 0.86; EXPRESSED IN PLACENTA, SIGNAL = 0.67; EXPRESSED IN FETAL LIVER, SIGNAL = 0.8
gtaggaacaacatttcctctggtaaatgtattctaggcactcactattatgacatataataggtgctcaacaaatatttgctgaacgaatgtgaatagaatgttgccttgatcttttcccaaagtaagactaaacttccaggattacctataaaacttaagcaagatatatatgtatataatttattaagtaaaaagctctaacgtcatgttggtcctcttgagtgtcccaaataacaacaaaaggcaaaacattaagaatgtaaataatacacttttctttctcatattccatcaggagtggttcctcgggttgcagcctcggctggagacgttgctcctccccaaggagggcattatgacatggaatcagtttcagaaagagaagtatatccctgaactggtttacttattatttttgttttcaacaactaaaagctgaaaactgcaaaatgttattggggaa

SEQ ID NO: 14324 - DNA, 470 bp, Homo sapiens
  MAP TO AC005664.1; EXPRESSED IN BONE MARROW, SIGNAL = 0.82; EXPRESSED IN LUNG, SIGNAL = 0.58; EXPRESSED IN FETAL LIVER, SIGNAL = 0.98; EXPRESSED IN ADULT LIVER, SIGNAL = 0.53
ggccagagccactctatgtgactgttcttcacagcctcagctttctccagggatccggcagccctcatgccatcacaggaagccttgggcttcacccccaaatacccgagttggtacatctgtgacaggctcagtcctcagaatgtttgccaagtcacgaggagcaacgtccctggagaggctgccacagcccccagtggaaccccacttcctgatgagcctgaggcctgcccccgaggcagtgctgggcagagccgccatccccctctggcagacccacctcaggtcggctgctatgaggttgaagccattgtacagatggccctccatagagaccttcttcaggtaggacaagctgtccacgtcagtggtcagaaagtgggtgacaagttcacctgtaggcaggggacagatgctgtgtccacagctgcaggcatgtgctcttctcccaggaacactgatatggggcc

SEQ ID NO: 14325 - DNA, 476 bp, Homo sapiens
  MAP TO AC006478.2; EXPRESSED IN LUNG, SIGNAL = 0.56; EXPRESSED IN BONE MARROW, SIGNAL = 0.56; EXPRESSED IN ADULT LIVER, SIGNAL = 0.51
gcagagagttcaagattattgggactatgagcatatcatttttgttccatttaaattgctatgaaatggaacattaagcttggcatagatcacgtttcaatatcattcttagctgtctgaaacttgcataattaaccatcgtaaaatttggtcagctatataatcagtcagctgcaaaaggacaccacgagcaagggagcatcattggagccatggcatatattgtatgctgtggacaaatactacttaacataagaaagcacacatatgtgcaggacaatcttacttcattgtctcacaggacaaacccaactgctcttcaaaacgggtcaaggaaagcaagatggaggagtgccacaagattatacttatgggaagagactgggcatgttcagggtggtatgggtatggacaagactatatttttcatgagttagtgttgatgatgcatgtgctgccaatctttctctccctcc

SEQ ID NO: 14326 - DNA, 431 bp, Homo sapiens
  MAP TO AC004063.1; EXPRESSED IN PLACENTA, SIGNAL = 0.82; EXPRESSED IN ADULT LIVER, SIGNAL = 0.57; EXPRESSED IN LUNG, SIGNAL = 0.78; EXPRESSED IN BONE MARROW, SIGNAL = 0.79
ccctttagcaagaaacaaatacagaatatttatctcatctacttttgaaaattaacagcaagaaatttaagtaatcatttatttaaaatatttatttgtgatttatatttctggataggaattagagataaaaagtctagatctggttaataaggggtaaataaaaaagaagataaaagtggagaaattgattaaaaagtagacaatacaaaggaaagacggaatacaagaagctttagagtaatgtttcttcatagcacttctgttttaatcctaaattctaaatatccccctctgggcattaggagaagaaaggtctacctgattctaaagtattctctaatactgaggaagaggactggaatgatatccctctggagtttgacaaaaatctaactgaaattaaaatacggttatcaaaccagcaattc

SEQ ID NO: 14327 - DNA, 488 bp, Homo sapiens
  MAP TO AC006484.2; EXPRESSED IN LUNG, SIGNAL = 0.57; EXPRESSED IN FETAL LIVER, SIGNAL = 1.5; EXPRESSED IN BONE MARROW, SIGNAL = 0.53; EXPRESSED IN ADULT LIVER, SIGNAL = 0.53
gttttggcttccctcctttgtcatagaaccccctttctagggtcaaaatacccatttcaagtgctttgaaaggagctttgaaagatttaaatggtgttgcaacagggagaagactagcccagtctgggtcaacagctgtgttttctgttctaggagtctctctcgaccagacttacctttgttgttgttttattgttttctgatataaagccttggtcttggctttggcccatcagtgactggaaatctgatgatggagaaggtacacaggatctttgccacctgccgggcagatgatgctaagaaccacgtggctgccattactgtagggcctgatttgtgttttaaaagaatcagtctggctgttgtatcaagaatagacccaggagacctggtagaagccagttataagctttttgcaatattccagtatgagattatgatagtttgcatcaaagatatctcagtgcagatatttagaattgctc

SEQ ID NO: 14328 - DNA, 463 bp, Homo sapiens
  MAP TO AC005669.1; EXPRESSED IN BONE MARROW, SIGNAL = 0.53; EXPRESSED IN LUNG, SIGNAL = 0.44; EXPRESSED IN ADULT LIVER, SIGNAL = 0.5
cgttgttttctgccctcttccccagtctttttgatcctctgtgctggttcagggtggggagggagacattgacaacactctgggaggcaggcatccctgaagcagcaatccctgctgtgtccccggaaaggccagggtcccgtgccatgctgagggatctcccatgatccatcaggacataagttaaacaaagccaaattgatgtctttcccgtaggacttctcagaatcttaaagacagttgtggatcccaaagagagggttagaattgcagcatttccagacttacttggtcaaggaatgccttttcaccctcctctcacccgactcccacccttagctactaacattttgaggacactagtgttaaggggaccaactctccctgtttccccaggattgaggggttttctgggacgtggaactttcagtactaaaattgggaaaatccctggtcacctagg

SEQ ID NO: 14329 - DNA, 418 bp, Homo sapiens
  MAP TO AC003090.1; EXPRESSED IN BONE MARROW, SIGNAL = 0.52; EXPRESSED IN PLACENTA, SIGNAL = 0.59; EXPRESSED IN LUNG, SIGNAL = 0.51; EXPRESSED IN ADULT LIVER, SIGNAL = 0.45
ttgtggaaaccctagttggcagagcagaaggctactgatcagagatgggtgattgttgagagttccccatctgcctccccatgctgtttggtgagtatcattctctttaggtttttgctgtgctggctgctgggagctccctaagctcattttctgttcctcaagtggaacagagaattcctacgcttccttctctaaggaagtgtagtttcatactgtgatttcagcagaaaccactaattttggccagcattgccccctgaaggagaggagcaggcttcactcctgcgacagctgactttctgttcctttctgctgttgtctctgtgcccagtgctgaagtccctggagatgatcatgaaattcagggtgaccaggttgggcagtgaggaagcggagaagtctcccagcctcctct

SEQ ID NO: 14330 - DNA, 483 bp, Homo sapiens
  MAP TO AC005703.1; EXPRESSED IN LUNG, SIGNAL = 0.61; EXPRESSED IN BONE MARROW, SIGNAL = 0.57; EXPRESSED IN ADULT LIVER, SIGNAL = 0.46
ccttccttcccttttaactttctatctatttctatggcaccaatagaggtttggaggccattctctctttctgctgctggaatatatacaaaactctcattaagcaacagagaaacactttcactttatcactcaggattgcgataactggcctgcttcaggaagccactgtaaacaccagaaaaggtgggtggcacatgagcactggctctgactccatggccctgtttgcctgtagaaccaatgaatgtcaagttttgatgagttgcacagtcccttctgctgcccgagagaggaccctggaggaggaaagagagggaaaggctgcatatgttctcttcaccattcctctagatgggagagagagcaaaatctactcttctatgggccaaaatatgaaaagacagagaaaagtatttcttctagtagacactagtgttagtgactcagaagacagtggcagcagtgaacagcttggacgtg

SEQ ID NO: 14331 - DNA, 472 bp, Homo sapiens
  MAP TO AC004687.1; EXPRESSED IN LUNG, SIGNAL = 0.79; EXPRESSED IN FETAL LIVER, SIGNAL = 0.69; EXPRESSED IN BONE MARROW, SIGNAL = 0.57; EXPRESSED IN PLACENTA, SIGNAL = 0.66; EXPRESSED IN ADULT LIVER, SIGNAL = 0.54
aaattttccaagcctttccggaacctgtttgtagattatctagctttccttccttgagcagattaacaacaacataaacaagaattaggggaaaaaaatgatggatagggcaaatttaggcagaattatgccttgggcaaagtacattcttgttattttatcttggttctgtggttatgaactgaagagagcatttgctctagaagatttccaatctcttcctatcccttcatcacaaccacagagtagtggttagaaatagattccaggaacaccagaaatgttcagtatttccaatggtgacagctaacagtgccctcacagggatcctttgagcactcttcctctgagccttcttgtggtgtccttgtggtcaggagacacatcatcaatcacaaagacttgccctggagacaaacctggtaaaaataatcaattgtctatctttgccactagaaacaatccttttgtt

SEQ ID NO: 14332 - DNA, 456 bp, Homo sapiens
  MAP TO AC002044.1; EXPRESSED IN LUNG, SIGNAL = 0.51; EXPRESSED IN BONE MARROW, SIGNAL = 0.62; EXPRESSED IN ADULT LIVER, SIGNAL = 0.48
agtggggctgatcgagttccctgctgggattcccacttgggcgatggccttgtgagcaaatcgtttgtccgataagctcttttcaagtcccgtttatgtggttggctttgggaagaaatctccagataaatgctgttttctctctaatactccagagcgaaaaatcaatgggagggataattccttccgtcgtccaacacacacttcttgtgtgtttctacctgtggcatcactcacaaaaagtttttaaataaaatatccagtcctgaggtctcagcttttctccagcatttcagggaagggagctttaggaggctcttgtgtcccctttagtagaaggagcagcatggaccctgtgaccaaggagcgtttctcattttcctctttttcactctccttacctgtcaagaggctgaaggtgatggcgaacccaggtgaggaaatgtgggaaacacg

SEQ ID NO: 14333 - DNA, 398 bp, Homo sapiens
  MAP TO AC004701.1; EXPRESSED IN ADULT LIVER, SIGNAL = 0.54; EXPRESSED IN LUNG, SIGNAL = 0.52
tgcatgttataatgcatacgatatttttatatttattctctcatacactataaactatgtggaaaactttctcctttttgtttagataccaaactttaaatgagcatccaaactgtgcacaaatctgtaaatgttactttagacttaaagaggaaaggaaggctgtctgattgcatttcctttcaacactgcaatggtgattgcctgaggtctcgtctccccgtaatggatgtacattatctttatttggctcatcccagccacttgtgtacagcgcacagagaactttgcattaggcatggagcatgactccaagaccactacactagcaaagtacaacatttactctttggtcaattaccttcttcgcttctgttgctatttcaggggcaggacaa

SEQ ID NO: 14334 - DNA, 404 bp, Homo sapiens
  MAP TO AC005884.1; EXPRESSED IN PLACENTA, SIGNAL = 0.61; EXPRESSED IN LUNG, SIGNAL = 0.56; EXPRESSED IN ADULT LIVER, SIGNAL = 0.52; EXPRESSED IN FETAL LIVER, SIGNAL = 1.1; EXPRESSED IN BONE MARROW, SIGNAL = 0.56
aaacagggagttaaaatagcatggtaaagatcaccattactatactggctccaatttattaaattatttaataattaagaatttcatataagcctaagatcttctttttacatgaacagactataacaagtttagttttatcccagatctgtaaaaataaggacaaagggaaggaagattcaagataacagtggagacagagaaaattaccatgcaagggtgacccagaagggctgcttgatagacctggaacagggctacagcgacctccttgcttagacgtcagttcttgttcaatctcttccagtccagcacttttctggaaacggctcatgcgattcactactcgtggtgacatatgtgtacgaacacaaggctggccaccataagggttgatggggaaa

SEQ ID NO: 14335 - DNA, 422 bp, Homo sapiens
  MAP TO AC000121.1; EXPRESSED IN LUNG, SIGNAL = 0.42; EXPRESSED IN ADULT LIVER, SIGNAL = 0.48
cgtcatgacaacatgaggtggatactagtattattcctgttataggcaaggacactgagaggttaaatagcttacccaagaccacatggctaacaaatggttaagccaagatttgaacccagacaagttttaacaattatgttatatccagtccctttcataacattttcagtgtctttaagtcatcactgaattaaaaattaatcttcctgccttataaactagaccctcttgatatttttccagcttttctaggttgtctgagatcctgtcccagtgggatcacgaaggggcaaggagccctcagcacaaaaatgttgtattcattagccagagatgcaatgctaagagaggaagcatgcatgatctgcctgagagatgctttggggtgagtgagccccagctttggtgaagagtgggag

SEQ ID NO: 14336 - DNA, 433 bp, Homo sapiens
  MAP TO AC002115.1; EXPRESSED IN PLACENTA, SIGNAL = 0.58; EXPRESSED IN LUNG, SIGNAL = 0.61; EXPRESSED IN BONE MARROW, SIGNAL = 0.53; EXPRESSED IN ADULT LIVER, SIGNAL = 0.54
tggcaaaatctgttctctccttttgtgaagggagtacagagagaaacatgctattggaatatttctcttttgattgttactgatgttcttgtctgtggctgtctctctctgcctgtgtttctccttctctgtgtttgtctggctggagactctctgcttgggtgtctcttggctgctctctggcccccaggccctttctttgttggatggaatggagatgacagtaaagtctgagcctgtgagccggcccccctcatgctctcctcttacccacaggaagagccagcagcaccccgagagctgggcctaggcctggggttgggcctgaaagagaaggaagaggcagtggtggcggcggcggctgggctggaggaggctagcgcggctgtggccgtgggggcaggaggtgccccagctggccctgcagtcattg

SEQ ID NO: 14337 - DNA, 479 bp, Homo sapiens
  MAP TO AC000380.1; EXPRESSED IN ADULT LIVER, SIGNAL = 0.44; EXPRESSED IN BONE MARROW, SIGNAL = 0.59
atctgggtacctggtaggggattaggagataattgtttctataccctgctggatagctcagtgacttccgagaaagacacacaaggtggctgacaggatcctgtaaaggccacctctcccagatcctggtgatgtttctggagtgtgtattcatgcatttaataactacccactgagcaactcccatgggccatggcatagtatcaacactggggaccacagaatgaatggacatacggcttgccgttgacaagacccagagcccaccctcctacctgccccttccctctccaggttgatcgacatcgcccgcaaactggacaaggctgagcgcgagcccctgctgctgtgcgctacctacctcaagaagctggacagccctggctatgctgctgagacctacctgaagatgggtgacctcaagtccctggtgcagctgcacgtggagacccagcgctgggatgaggtgaggggaaagc

SEQ ID NO: 14338 - DNA, 373 bp, Homo sapiens
  MAP TO AC004676.1; EXPRESSED IN PLACENTA, SIGNAL = 0.61; EXPRESSED IN LUNG, SIGNAL = 0.65; EXPRESSED IN BONE MARROW, SIGNAL = 0.71; EXPRESSED IN ADULT LIVER, SIGNAL = 0.6
gcaatcaaaaatcagcatttgagatttaatcactaaatccaaaatgagatcagcaaaaccagatactagtaaggtcactaggctcacaaaattgaactttggagaagagagatgccaaagagtaataatagcatcagaatgtgtgaaatctgtaaaactttaatcctcattatggatcaaagttctctgcgttccccactaaacattttatgtaggaaacagcagttaaaacgttgaatcagaaatggttaagtcacttgggtgagagatcatccatcaagatgaacgaagagcatgaattggagcatgctactggagactctgcggtagcgctgcctttagccagcgggtctgaggataagccactgctgct

SEQ ID NO: 14339 - DNA, 468 bp, Homo sapiens; identical to SEQ ID NO: 11097
  MAP TO AC002453.1; EXPRESSED IN PLACENTA, SIGNAL = 0.74; EXPRESSED IN LUNG, SIGNAL = 0.71; EXPRESSED IN FETAL LIVER, SIGNAL = 0.88; EXPRESSED IN ADULT LIVER, SIGNAL = 0.74; EXPRESSED IN BONE MARROW, SIGNAL = 0.92

SEQ ID NO: 14340 - DNA, 461 bp, Homo sapiens
  MAP TO AC005281.2; EXPRESSED IN PLACENTA, SIGNAL = 0.67; EXPRESSED IN LUNG, SIGNAL = 0.64; EXPRESSED IN BONE MARROW, SIGNAL = 0.75; EXPRESSED IN ADULT LIVER, SIGNAL = 0.67
ttgcagcagcgttttatacactgaaggttctcagtaaatacttgcagttgtcaattgaatggttaaaacagaaagaataaagagaccaaacaaacacaatctgttgattaccaaggggttctctcttgttttatggaataggtggctattttaacttggcctgacaggtacagttttggcacaaacaccagcagtattattgtgctttgctttgtctaggcagacacctcatcagttttctctttgttttttgtgtgtctgtcttccctcattcatcaggctggaggcgtggcatctggattaaatcatgttcttacgaacgacctgacagccaagaggctcctacatgtgaagggtcgtagagtggtgagagccacagaagttccccttagctgggacagtttcaacaagggtgactgcttcatcattgaccttggcaccgtaagtttcatatatacaca

SEQ ID NO: 14341 - DNA, 484 bp, Homo sapiens
  MAP TO AC005670.1; EXPRESSED IN PLACENTA, SIGNAL = 0.74; EXPRESSED IN LUNG, SIGNAL = 0.51; EXPRESSED IN BONE MARROW, SIGNAL = 0.61; EXPRESSED IN ADULT LIVER, SIGNAL = 0.59
cgggttcagtttgaggtttatcacttgctgtgtgatcttgaacaagttacataacctttctgggcttcagtttttataaaatgaggatgataatggtactttcctcatagggttattgatttggcagagtatcttggatatggtaagcacccataatctgcctatcagtgttattgttagtagttaagatattagaaaccatgccaaaacgtgggacctaaagtgccacatacaaattttacagttcagtgatgctgtcgatttaaatcagttacatgttggcatcagaaaaattgtctttcctgactgaagcgctgttgattactcctgtctcactcatttcctccctcttcctttgataggcaggtccacgagatccagtcttgcatgggacgcctggagacggcagacaagcagtctgtgcacagtgagtaattaactgtggagaccagagtcctttctctgatgacagggtgctaatggg

SEQ ID NO: 14342 - DNA, 460 bp, Homo sapiens
  MAP TO AC003098.1; EXPRESSED IN LUNG, SIGNAL = 0.91; EXPRESSED IN FETAL LIVER, SIGNAL = 0.98; EXPRESSED IN PLACENTA, SIGNAL = 0.92; EXPRESSED IN BONE MARROW, SIGNAL = 0.94; EXPRESSED IN ADULT LIVER, SIGNAL = 0.89
ccttgggctgtagtttgtccatttctggcttaaagcatgatcagggtcaccctgtacaattgtgcaggttattaactacacaaagggtgttggccacagttgagaggggctgtatccacctagagaaaggggtgccctgcacacagaggcaccacagggatgagcagcagcgcaggcaaagctgccgtcactcactctgaagacttcggggaggatcttgtccagtgttctgggtgggggtgagaggcaggggaagagtgggttagagaggggcaggcagcagcacctaccaggggttccttgttcttcaccaagcggacgatcttcaccgattcctcatcaaaatcctcatcgatattgtcaggcagaggcgggagaacggggtcaaaattcttctgggcaaccgtgtcatgtaccatgagcacagcctgccgggaaagccagagaaaaggaaggctgg

SEQ ID NO: 14343 - DNA, 466 bp, Homo sapiens
  MAP TO AC005600.1; EXPRESSED IN BONE MARROW, SIGNAL = 0.54; EXPRESSED IN LUNG, SIGNAL = 0.45; EXPRESSED IN ADULT LIVER, SIGNAL = 0.41
ccgtgaagcaaaaggaactcttccttcctgatatcacacaaagcccaggtcacgcctgcactgggcagaagttcgagcacgaggccctaaaccactggtgtcctgacctgctgagtggctacagtgatgcaggcgatgctctggggcaccgggtgtccatcctcccaaggtgctgtctgcaggggagggtgccagccaaaagccaccgggtagaaagaaaacaaggaccttgctaagatggggggtcatctgggcagatggggcccctgcctacctttgggggggcactggagtcatagcagtgctcagtccccagatggtccacaggtgcatcctttttgttcctcatggcacggatgttgaccagctgttgctgccagtcctggggctcccagactggcaccttgaggggctcagccccctcacctttctcactgtccgagccctcataggccacacgcagtct

SEQ ID NO: 14344 - DNA, 462 bp, Homo sapiens
  MAP TO AC004862.1; EXPRESSED IN ADULT LIVER, SIGNAL = 0.56; EXPRESSED IN LUNG, SIGNAL = 0.65; EXPRESSED IN FETAL LIVER, SIGNAL = 0.68; EXPRESSED IN BONE MARROW, SIGNAL = 0.6
ttggaattcttgattctgttccttgattgccggacctaactccatgggggtgatttgtgaagctattgagacttgaactttctagttgcccttgtcatcagcaatttttcaatctctttaacctctacctacaaatgcttcccaattttttctagtgataacagtagtctacttttagacttgaactttttgattgccctctctaacaacaaacttgcagcttctttgatcctggactgcaactgtccaatacttttcacctgtgagggagtctcttcttggtctctactcaccttaccttcctgctggccctgagtttcagaagtctttgtgggctttctagtgagcctgtgaactcacggaagccatctaaaaacttgacctgtgtaaatgttgtaaaatagtgactaagtgtaataggataaatccaaatttgctgtatatttttccttttatgtgttt

SEQ ID NO: 14345 - DNA, 472 bp, Homo sapiens
  MAP TO AC004862.1; EXPRESSED IN LUNG, SIGNAL = 0.61; EXPRESSED IN ADULT LIVER, SIGNAL = 0.58
gaagacaattcaggttccaatgtcatttgataaagtctatagagtagcaaccctggtccatctaaccccttccagtttattttattagggttttgctttaatgtacacaatgtagagagggttcttctttatttgtaagattttttttccagtttggatcataaagataactcaaaaatgatcataagcctcatcctcataagtattaaatgtcaagatccagataggaaatatatatttatacaaaaatttatttctatggaactaaaagaaaaaaatcttaccagtgtattctggaaagcagatactaagatgcaccttggttaccttttcttgaaagatatcttttttgttgaggaacaggacaatggaggttgttgaaaaatacttgtgattacagatactgttgaacaggtgaaggctttcatgcattctattctgttaggtatcagaaatgagaatgggtaggatt

SEQ ID NO: 14346 - DNA, 473 bp, Homo sapiens
  MAP TO AC006337.2; EXPRESSED IN PLACENTA, SIGNAL = 1.1; EXPRESSED IN FETAL LIVER, SIGNAL = 0.71; EXPRESSED IN BONE MARROW, SIGNAL =   3; EXPRESSED IN ADULT LIVER, SIGNAL = 1.1; EXPRESSED IN LUNG, SIGNAL = 0.73
tgtccaagaaatgtctgcccagcaatgataacccacattgtgcttttgaatactgctgctctaactgggagggactaaggtagagggaaattggcttttctcaggtcccatctgtcaggtttgcctttgttttatcagggggcaggaactggctcaggcgggatgcctctcaaaagcagcctgagatgagaaagaccctggccagtattcccagttagaagcatacatataattagcccctttttcttattttgttatttccttcttctcatttgtagactgtcactacagatgaggattttcagaccattccttgcccaattcttgatgagtcccaatggtctcctaatacctgtgctgactctctcatcccagggtgacagactgggccttctgcctgcttgtggatttctggcgttggcctgaatatttcgggttttcatgtcttttcagcccaaactacaccaggtcca

SEQ ID NO: 14347 - DNA, 451 bp, Homo sapiens
  MAP TO AC006204.1; EXPRESSED IN FETAL LIVER, SIGNAL = 0.83; EXPRESSED IN BONE MARROW, SIGNAL = 0.73; EXPRESSED IN ADULT LIVER, SIGNAL = 0.55; EXPRESSED IN PLACENTA, SIGNAL = 1.1; EXPRESSED IN LUNG, SIGNAL = 0.65
gggagagcattgagaatacaggagatatgatgagactatttctcttctgccccttttgcaacatattaggcactagtttggcttcaactcttccattacaaaagttctgaagagaaatccaggactgctttaaaattattcagaaaatatctgtaaattattaaaagatatagtttgaggctgtggcagaggacagtatgaattcatctgggccattcaaatgattattgtcacatttgactcaacttttcttcccacttgctccaatcatgatctcccaatttccaatttcattcatttctacagtgacaaattatgaagaaacagagaaaaagaatgaatacaagaataccatgacaaagcagaaagaaaagaaagtcagaactgggaaagagtgataatttacccatctttgttttttttcagaaaggcccaattgaccaaagcaaga

SEQ ID NO: 14348 - DNA, 498 bp, Homo sapiens
  MAP TO AC005913.1; EXPRESSED IN LUNG, SIGNAL = 0.71; EXPRESSED IN HELA, SIGNAL = 2.7; EXPRESSED IN FETAL LIVER, SIGNAL = 1.7; EXPRESSED IN BONE MARROW, SIGNAL = 1.3; EXPRESSED IN ADULT LIVER, SIGNAL = 0.82; EXPRESSED IN PLACENTA, SIGNAL = 0.62
caagattatcaacagaaacatcccagatcttatataggaagatgagaccgtttccagggcagcagagaagtgaaaaaactctgagccgacggtaagagaatcaaacttcaacatccacagtgcagtgcccttgccccattctgcctggcaccaagtgcatagaaaattttcccccaactggaggccaaagtgggtgagagcacatgctgttgggagttgcttggaggttggcggtgcagggctgaaggctagcaaaccaagcaatcatgttgcacaaacaaatttactattcggacaaatacgacgacgaggagtttgagtatcgacatgtcatgctgcccaaggacatagccaagctggtccctgaaacccatttgatgtctgaatctgaatggaggaatcttggcattcagcagagtcagggatgggtccattatatgatccatgaaccagaaccgcacgtcttgctcttccggcgcccgctacccaagaagccaa

SEQ ID NO: 14349 - DNA, 472 bp, Homo sapiens
  MAP TO AC004031.1; EXPRESSED IN PLACENTA, SIGNAL = 0.66; EXPRESSED IN BONE MARROW, SIGNAL = 0.89; EXPRESSED IN ADULT LIVER, SIGNAL = 0.76; EXPRESSED IN LUNG, SIGNAL = 0.73; EXPRESSED IN FETAL LIVER, SIGNAL = 0.85
atttcgtagacctgggcctctgtgtagattttattttaggcaacagtttcacagctgaaaagaaagcaaaagtatgaagcccattgatctcctgggtccccctccaccatcctggtgcagaggatctgattgccggcatctgttatccaggacatcatatccaggataaccctcccatctggggtttctggatgggttattcattttctgttacttagactctcacagctactggctgctttgattcttgtcaacttctgtttcctttccgtccccagacggcaccatcagctccagctcgatcctcctggcgcagtctttacagcattgcatccattcccagaactgctccgccacggacctcttttaccagggcaactcccagacagtgagagagtggctcaacgtggccatcacccggaccctgcaccagggcgaggagagccttttagagctgacgaaacagatctgc

SEQ ID NO: 14350 - DNA, 488 bp, Homo sapiens
  MAP TO AC002486.1; EXPRESSED IN BONE MARROW, SIGNAL = 0.57; EXPRESSED IN ADULT LIVER, SIGNAL = 0.52; EXPRESSED IN PLACENTA, SIGNAL = 0.59; EXPRESSED IN LUNG, SIGNAL = 0.52
aggatgggacagggtttagggatgagaaattacctaatgggtacaatgtacactatttgggtgatggtcacagtgaaagctcagacttaaccactacgcaatatgtccatgtaaccaaactgcacttgtatcccctaaaatctatttaaataaacaaatcacatataattaatattattagtaaaaataatcaacacaaatattctactcatgggaaatttttttatagtttaaaactgtcaaaacctatatttcatcaatataatagataccgtggaggacggtggatctccccagggcggagccccagaatcatcgtcctcctccagccgcccaagctcctccgccactcgtcagagtcctccttcagccgttcccagcccggggcctcccaggtgatgagggccaagtaccctccggcaggagccacacagcagtgacttccagaccctctggggcagcggactggctcgcactgcagattcttc

SEQ ID NO: 14351 - DNA, 474 bp, Homo sapiens
  MAP TO AC005678.1; EXPRESSED IN LUNG, SIGNAL = 0.62; EXPRESSED IN ADULT LIVER, SIGNAL = 0.57; EXPRESSED IN PLACENTA, SIGNAL = 0.71; EXPRESSED IN BONE MARROW, SIGNAL = 0.61
ggctaaaaatagcaaggaggtcagtataaagagagataaatatcagaaggactaaattaagtggtaaagccagaatttagaagaatatgaatatacaaaaaagtaagggttgaagagtgacaaactaggctgtctgagagtctatatatgagccatcagattctgagacggcctttttgactttaatgatcagaaacagtagcaagtacaaaaaagccccaatgtcctatgttacccatcttccccttcctcccaagatgggtctttcttctttaccttgctcctgttgggattcaagttctggagattcatactttggctgggctttcatggactggagggacatactgggttctccttcttttcgtagacgtaccgtctcctgcaagaacatttcctgttccccagtgtggactgagacctgaggaaaatgagatgtagctgacagactcactctgataacagaaaacaaaa

SEQ ID NO: 14352 - DNA, 474 bp, Homo sapiens
  MAP TO AC005249.1; EXPRESSED IN FETAL LIVER, SIGNAL = 0.68; EXPRESSED IN LUNG, SIGNAL = 0.67; EXPRESSED IN BONE MARROW, SIGNAL = 0.63; EXPRESSED IN ADULT LIVER, SIGNAL = 0.62
ctgacctaaagtctaagtgttgtccataaattgtggaaacacaaagcaagtgaaacttaagtctttgtggctagggagtgttcccagagtcggtgatgacaagctgacttctacaggaggaacagaaagatgtcattcaaaatacatttttacaataaacatacagtatcacaaggtctttctacttcattcctcagacctcagggagtttgaaacttcaaggtggttagaagaaaaggtacagggaacagaatgtgtgactgtgcaagcaaaaaaagaggatgatccagaaactgctagcacagtgactgagatgatggctggagaggagatggaaagagaaaaggcagagagtgaggctaaggaagagatggaaagaagaaacttatcagggcagatcacgaaaaggagagcagagaggctttcagaggcttaaacaagagtacaacatcatagggttaacttttagggaaa

SEQ ID NO: 14353 - DNA, 471 bp, Homo sapiens
  MAP TO AC005906.1; EXPRESSED IN LUNG, SIGNAL = 0.45; EXPRESSED IN ADULT LIVER, SIGNAL = 0.44
cggattggacctaatgagtgagaactagcaacttctctagacctattgataagacatttgcatgtagaaggatgggaaattaatccaacaaaaattcaggggccttctacttcagtgaaatttctggagatcctgtggtacagtacatgtcaagatatcttctctaagttgaaaaattaagttgttgcatctgaccccttctataatcaagaaagaggaacaatggtaagtagacctctttggatttggaggcaacacattccttatttgagtatactactccaggccatttactgagctgcctgaaaagctgttagttttgaatgggacccagagagaggctctccagcaggtccagattaccatggaaatatccctgctatttgggccatatgatccagcagatcccatggtgtttgcagtggcagtggtagagagagagatctctttggagtctttaaaaagcttctg

SEQ ID NO: 14354 - DNA, 469 bp, Homo sapiens
  MAP TO AC004417.1; EXPRESSED IN ADULT LIVER, SIGNAL = 0.94; EXPRESSED IN LUNG, SIGNAL = 0.53; EXPRESSED IN FETAL LIVER, SIGNAL = 0.7; EXPRESSED IN BONE MARROW, SIGNAL = 0.56
agcatcagttacctttgcggtaagacaggcataaccattataccgtctcaaagggtctctgtgagcgttaggggaaaaaaaatcacatcaagtgcttagccctgtgcctgggatacactaagtattcaaaaaacgttagctgctattgttatcattccacactgtgcttatttctaacgtggttgtaatccctcattctctcacgggcaggtttggaaaccagaccttaaactacaggctcttccacgacgggaaacactttgtgggtgagaagaggtttgagtcgattcatgatctggtgacagatggcttgataacactgtacatagaaacaaaagctgccgagtacatttcaaaaatgacaactaaccccatctatgaacacattggatatgccaccctactcagagaaaaagtatccagaaggctgagcaggtctaaaaatgaaccaagaaaaacaaacgtcaca

SEQ ID NO: 14355 - DNA, 475 bp, Homo sapiens; identical to SEQ ID NO: 11120
  MAP TO AC005281.2; EXPRESSED IN LUNG, SIGNAL = 0.63; EXPRESSED IN FETAL LIVER, SIGNAL = 0.68; EXPRESSED IN BONE MARROW, SIGNAL = 0.68; EXPRESSED IN PLACENTA, SIGNAL = 0.81; EXPRESSED IN ADULT LIVER, SIGNAL = 0.71

SEQ ID NO: 14356 - DNA, 379 bp, Homo sapiens
  MAP TO AC004452.1; EXPRESSED IN PLACENTA, SIGNAL = 0.59; EXPRESSED IN LUNG, SIGNAL = 0.59; EXPRESSED IN ADULT LIVER, SIGNAL = 1.5; EXPRESSED IN FETAL LIVER, SIGNAL = 0.79; EXPRESSED IN BONE MARROW, SIGNAL = 0.69
tgaagcactcatttcaaagggatatcaacagagtcaagataaataatgtttgcggtgattttttaaataagtgcaaaaaatcaatgaagaacaaaatatcaaaattttaaataatgacatgaactgaattttttgggaaaatttgtgtaaataaactaattctcccatgcattgggttcctttgcccctcatacttaggcaatttcagtttttatgctcagcgttgttgaccatctaactcaccttggaagtcgagacagaacaccagctgagattgacgttaaagcatcatccaggcgacctggtggctttcctttgagaatccagctgacaacaagttcaagcagcatcaaagaaatgaaaaatggagttgcctgga

SEQ ID NO: 14357 - DNA, 404 bp, Homo sapiens
  MAP TO AC002042.1; EXPRESSED IN BONE MARROW, SIGNAL = 0.49; EXPRESSED IN ADULT LIVER, SIGNAL = 0.52; EXPRESSED IN LUNG, SIGNAL = 0.49
gtttggctggctggcttggctgcctggctggctggcttggctgactgtgtggcttggctgtcttggctgtcttggctggctggctggcttgtctggctggctggctgtcttggcttgcttggctgggtggcttggctggctgggtcgcttggctggcttggctggctggctggcttatctggcttggctggctggctggctttgactgggtggcttggctggcttgcctggctgggttggttggctggcttggatggcttggccggctgggtggcttggctggcttggctggctgggccggcctagctggcttggctggctggctggcttgtttggcttggcttggcttggcgtgtgcggcagccgaggctggggctgtgacttctacagaggttggtgcgaca

SEQ ID NO: 14358 - DNA, 475 bp, Homo sapiens
  MAP TO AC005969.4; EXPRESSED IN LUNG, SIGNAL = 0.59; EXPRESSED IN ADULT LIVER, SIGNAL = 0.52
catatgatgggactattttatgagaagttcattttacaatactctaattttgatacatcactaattaaagatagtttggctaagattcatgagtcactactatgttctatttcctttaagtgttgtaatgaggtgcttatttgcatttttaaaatttcttttattattgcctgttagaaatagtctttttttggatgcaggaaaaaaatacatagagctgttttggcctttgagaacaactagccagttaaacttctagttcaccttaaacttcattttggttctgtgtttacagattagaaaacgtcattgctttggaacagaagtacacaatttggatgcaaaagttgattcaggaaagactgtaaaactcaactctccactggaaaagataaactccttttcgccacagaaagtatgtattaatgccattgttcagttttaaagaaggaagatatggaattttctaaaccaa

SEQ ID NO: 14359 - DNA, 409 bp, Homo sapiens
  MAP TO AC005939.1; EXPRESSED IN LUNG, SIGNAL = 0.63; EXPRESSED IN BONE MARROW, SIGNAL = 0.55; EXPRESSED IN PLACENTA, SIGNAL = 0.62; EXPRESSED IN ADULT LIVER, SIGNAL = 0.5
tttaggaggccacaagatgcaacaatttgttatgtacaaaagggagagaagtaatgttctggattgattcagacaactggactgataaatcagttctctgagtatttgtgggtttaccatccatcaaatggaacatgtgttttaccaaggccacttaccacttcatgctaattagatttaattggtgtgtcattgtcaatacaattggctagtgcgatgttctacaaaatgtcaagatggtgaaggtcattgaggatggtatcacagagaatggaatcaccatgggaattgagaaaaacatatttaccaaattggaagctggataccaagtgtttattgtgctaaaagaaaaactgttgataaattaaatgtaacagagtttaactgagcaaaatacagctcaccatca

SEQ ID NO: 14360 - DNA, 481 bp, Homo sapiens
  MAP TO AC004962.1; EXPRESSED IN BONE MARROW, SIGNAL = 0.69; EXPRESSED IN ADULT LIVER, SIGNAL = 0.7; EXPRESSED IN LUNG, SIGNAL = 0.67; EXPRESSED IN FETAL LIVER, SIGNAL = 0.71
tctgctgaatgagtaagggactcttacttcatcctactcactcattgcacagacagggaaactaaggaccagaaagagggtatggctaacccaagttggtccaaggctaggacctaggactcctgggtcctggcctcagggtctttctactgcaacacataacctccctggttgctgttgaaaaaaagactgggttcatttagagcagagaggaaggcagaggcccttgcctgaatcatctttcctaagctggctctctgttggcagatccacatcagagcctacctgcatgacctcaagcgggccaagatgggtctcgggggcatgcctgacaggaaccacctggcctgtgccaaggctgaccttgaggaagtggtcagggtgtgcccaggcttcaaggcgtacctggacatcggccaggtaaggcagtctcttggcttagccaatagctgagcaagaatctgtttactccttgccaggc

SEQ ID NO: 14361 - DNA, 456 bp, Homo sapiens
  MAP TO AC001231.1; EXPRESSED IN ADULT LIVER, SIGNAL = 0.51
tcccttcaaaatgaaaatcccagaggtatgcaggcttcaggcacagtttgatccagtagttcatggtggctcaggactctggtcctgttttctctgccatgttctgggctgagtttcatcctcaagctggcttcccttggggctgcagcaatctggtgggtctctcgtccacacagtggcccattcagaagaagagaggatgtcattgtcccaacatccccaagaggagtactatttgctctgattgggctggctccggtcaggcactcacccctgaactgtgaccagcagcatggaatccattgataagcgtagaccagtcatgggcccccatcatagctggcagagcagtcaacttcccctgaaccacatggacccccaaacagaaattcagcttctagaaagaaaaaagtggatgttggggaaagaaaaaagtggatgttgggaaggttacca

SEQ ID NO: 14362 - DNA, 469 bp, Homo sapiens
  MAP TO AC005166.1; EXPRESSED IN LUNG, SIGNAL = 0.59; EXPRESSED IN BONE MARROW, SIGNAL = 0.59; EXPRESSED IN ADULT LIVER, SIGNAL = 0.61
cctgggtaccctaaattacattgatcaaagctataagaacaaaggagctcaaatgcataggaaacagcttatcaaaaggaactgaaaagcattctggcagataaaaagggggaaaaaaggatatataccttatatcatttatctactgctacaaaacaaaccactccaaaacttaaaacaaaaatcatttattggttcatgattccacaatttaggctatgcttagctatgcaattagccagcttgtctggctgtgatcactcaggcagctgcagccatggaggcagcagtgttccaggagcaaaaactccctcgtgtaagcatctaccaagcctctgtttgcgtatttgctgatattccaccagccaaaatgagtcataaggccaagtcaagaatcagcataggtgaggatgacatagagctcagtaccgaggagcatgactcatgggggatggggtagacagggaat

SEQ ID NO: 14363 - DNA, 484 bp, Homo sapiens
  MAP TO AC003071.1; EXPRESSED IN LUNG, SIGNAL = 0.67; EXPRESSED IN PLACENTA, SIGNAL = 0.64; EXPRESSED IN BONE MARROW, SIGNAL = 0.66; EXPRESSED IN ADULT LIVER, SIGNAL = 0.56; EXPRESSED IN FETAL LIVER, SIGNAL = 0.68
gaaaacccatgatttcacacctataccatcaatgccaatccaatgctgtagaattcattctagctttatcactttctatatttgtaatttttctccatcagtgagagaactggctgccattatcattagcttattaatttatttgatcagttcccttaaatgtaaccaaactcccatctttgccaccttccttgtacacatatagacacccatatcacacctctaggactcttgactctactccccagactgcctcctcaccctgctcaagctttgacactctgccttgggccttttccccatgtagatgaccctgcttaccctgctcaggctccaactctggcattcccactgtgggtcacccacacttgtgatgccctcgttactccatttggcactgactccccaagccatgctcgccctccacatggttgccctcctcacactgcacaggctctgatacagatgcttagcttgctctgcc

SEQ ID NO: 14364 - DNA, 493 bp, Homo sapiens
  MAP TO AC004465.1; EXPRESSED IN LUNG, SIGNAL = 0.42; EXPRESSED IN ADULT LIVER, SIGNAL = 0.47
gggatagtgtactggagatatagtggtaaatagaacagtcaaattatcctgttctggtggcgctgacattctagtggggggaaatagatgatggacaaagtaaataattaaagtagatagcaggtacacggtgccaagtgccagggaggaaaatggagaaggaggaggcagagttctggggagggaggtaaaattttaaataagatgacatttgaagaaagatctggaagaggtgggtagtggacagaaggtgcaaaggactaacaggaccttttccagaacatcaagctcagagatttcatcatcatcatcaaaataagagtgactaatgtttactgagcacctacaaagtgccaagctttggtccaagcaaacataatatattgacttggtaaattcccaaaacaacccaataaggtagttgttattgttatcttcatttcccacatgaagaaactgagatgcagagagatttggtaactcgttcaagacc

SEQ ID NO: 14365 - DNA, 479 bp, Homo sapiens
  MAP TO AC006329.2; EXPRESSED IN ADULT LIVER, SIGNAL = 0.99; EXPRESSED IN LUNG, SIGNAL = 0.65
cagccctggcaaatgaatacatgtacattcttctgttcggtcttctcaacaatgtgacatgcaggaattttacagataagaaactccagagaagaccacaagtcacagaatgagtatgtagtaaatttatgccttgaaactcagtcttctcattcccaaccccatgctccatccactttgctaatgagaacaggtggataatcagagagcaaataaaatatcccctcataggtccttcttacccatatccctcaaggaccaggaaaaatagcaaggaggaggaactatccctactcctgtttgaaaccagtgagatgagagttgagtgtggttcagaccccagccaagcgcatggagtggtttctcttcccctcctcattctgctacctaagcaaggtgtcctgatcatcttcacccaaatctgggtggtaagtactgttattattctacttttacagagaaggaaactgaggcacagg

SEQ ID NO: 14366 - DNA, 363 bp, Homo sapiens
  MAP TO AC006143.1; EXPRESSED IN LUNG, SIGNAL = 0.55; EXPRESSED IN BONE MARROW, SIGNAL = 0.54; EXPRESSED IN ADULT LIVER, SIGNAL = 0.51
ctttgtggtcctctgaaggctagaaaatttactgcagtaaatcatggatttattagtgtcttttcactactaaccgtaatgagctccaaaatatacttaagggctctatcctcaaaggtgtttttctctcaactagtttgaaaactcatttcagttatacttttataaagtgtggagatgaaaggcagagaagaagtagggacatcctcattgactatagagtgacacaagtggtatcatttcctcacctcacgtaaactgcttcattgatgaagtgttttggattgtcttgtatttttgcaaagtgttgctgatcgatactggctaagagcacagatccatagcaatcagtctgctgtgagg

SEQ ID NO: 14367 - DNA, 413 bp, Homo sapiens
  MAP TO AC005317.1; EXPRESSED IN LUNG, SIGNAL = 0.77; EXPRESSED IN BONE MARROW, SIGNAL = 0.64; EXPRESSED IN ADULT LIVER, SIGNAL = 0.59; EXPRESSED IN PLACENTA, SIGNAL = 0.68
tcactcctgcctcctttttggctttacttacttatttaaaacataactttattttttttataagaatgactttgcttaggtaaggttattggttcccttaaaggttcttcattagagaaaaatcaaaagggacagttataataatctattatctctttaattctctgctcccaagtttcatttcttaaaatatgtttaatggaattttaaccactgtaaagccctgaattgaatttctgaaaacaaggcagttagacactgtctatagcctttagaatctttgatccacagggatgtccctctgactgcagaagaggtggaatttgtggtggaaaaagcattgagcatgttctccaagatgaatcttcaagaaataccacctttggtctatcagcttctggttctctcctcca

SEQ ID NO: 14368 - DNA, 482 bp, Homo sapiens
  MAP TO AC004039.1; EXPRESSED IN BONE MARROW, SIGNAL = 0.57; EXPRESSED IN LUNG, SIGNAL = 0.59; EXPRESSED IN FETAL LIVER, SIGNAL = 0.8; EXPRESSED IN ADULT LIVER, SIGNAL = 0.73
tagcacgtatcactgctggccatcattttacatgtttgtttttctaactctcccattagaacattccatgagaacagggactcggcctgcgtgtctttagtgacacgtcctcagcacctagaaccacacccagcacttgtggaacttcagcaaatacttattgaatgagtgaatgaatgaatgggttgaccaagggtgctgcagctcctaaggagtgtttagaagtgaggctgctgtccaccaggagccacgcggccggcttgccaggaatacagtgcagcttaccaagcccgccaggccccagaggttcctgtcgagccgtttcaggaatcggatcagctgcttgtgcctgtggaactgctgtgcagtcgcacccaggcagcgagtgtccttctcatggtggctgtagaactgccggagcacagtcgcagccctgcagaaggtttccttctcagttgtgttctggaaagacaaatgccaca

SEQ ID NO: 14369 - DNA, 481 bp, Homo sapiens
  MAP TO AC004860.1; EXPRESSED IN ADULT LIVER, SIGNAL = 0.49; EXPRESSED IN LUNG, SIGNAL = 0.51
tttatgcatttgcttgaaaagagaattatataagaatccttctgatagaatatttgttttctgaacaattaatgattcagtatattcataacaaaaggatatcaggtaatatatgactataaatattgtctttatttccacaattttaagtctatatcattatacttacagcattagactcaaaaattactatttagctttttattatgttccctgtaatcatcctcaaactcttatttatatgcatatgtacatctcatttagagttataaacttttcacatgtcaggcacttttggaatcattctatcaaatctattctttttagtgatgataaaacagacactgaaaaacaggatgacctactgaaagtcaaacagttctattgattcatagtactatgacctgatccctttaccaagaaaatgagaaaagtagaaaaagagtagcttaacaacaataaaaccaacagtaaaatcacc

SEQ ID NO: 14370 - DNA, 444 bp, Homo sapiens
  MAP TO AC004147.1; EXPRESSED IN PLACENTA, SIGNAL = 0.71; EXPRESSED IN LUNG, SIGNAL = 0.52; EXPRESSED IN ADULT LIVER, SIGNAL = 0.58; EXPRESSED IN BONE MARROW, SIGNAL = 1.2
gccacatcttcgtgtatgggccgctgaccatccggcgtgtgctgtgggcagtggccttcgtgggctctctgggcctgctgctggtggagagctctgagagggtgtcctactacttctcctaccagcatgtcactaaggtggacgaagtggtggctcaaagcctggtcttcccagctgtgaccctctgtaacctgaatggcttccggttctccaggctcaccaccaatgacctgtaccatgctggggagctgctggccctgctggatgtcaacctgcagatcccggacccccatctggctgacccctccgtgctggaggccctgcggcagaaggccaacttcaagcactacaaacccaagcagttcagcatgctggagttcctgcaccgtgtgggccatgacctgaaggatatgatgctctactgcaagttcaaagggcaggagt

SEQ ID NO: 14371 - DNA, 473 bp, Homo sapiens
  MAP TO AC005969.4; EXPRESSED IN BONE MARROW, SIGNAL = 0.54; EXPRESSED IN ADULT LIVER, SIGNAL = 0.51; EXPRESSED IN LUNG, SIGNAL = 0.63; EXPRESSED IN PLACENTA, SIGNAL = 0.7
aggttctgattccatgtgaggtttgataacgttttttatggtagtttagatattagttatcgtttctttcctttcttacagccccctggccactgttctaggtgctgttgttctactaaacaaggaaacagtcaagagtcatcgaataccattaagaaggatcatacagggaaatccaagatacccaaaatatattttgggacacgcacacacaagcagattgctcagattactagagagctccggaggacggcatattcaggggttccaatgactattctttccagcagggatcatacttgtgtccatcctgaggtagtcggtaacttcaacagaaatgagaagtgcatggaattgctagatgggaaaaacgtgagtaaagttattttgtgttagagaaaaaataaggctgaaaatatttaaattactcagtatgtgttttatatgtacattttagtgataatcaacttcgg

SEQ ID NO: 14372 - DNA, 466 bp, Homo sapiens
  MAP TO AC004692.1; EXPRESSED IN PLACENTA, SIGNAL = 0.87; EXPRESSED IN LUNG, SIGNAL = 0.67; EXPRESSED IN BONE MARROW, SIGNAL = 0.69; EXPRESSED IN ADULT LIVER, SIGNAL = 0.56
gaaatgtggggaagcttacatctaccattactatgtgatcttaggcagtttatttaatcattcactacaaaatagggataaatactataagcacctacctcaaaatcttgttgaaaggattccttgagctaatacagctagtggtcttagaccaggctcttgggcctgtggctgctacaagcatggccttgagaaatggagcttttctgcagcagcatcctgtgtctactctctagcttcctggacaccaacaggcagtgggggtgggggcaggcagtgacctactccgcttgccactggctggtcactgtcttcgccggtggagagacagccgccatggcctggacagcagcctcctgccctccagattgcagtgactgtactgagttttcatattcagcaggtcccagggcagcccttgcgagtgaggcaaaggcatcagcctcgttggagagccagttaggca

SEQ ID NO: 14373 - DNA, 493 bp, Homo sapiens
  MAP TO AC005868.1; EXPRESSED IN LUNG, SIGNAL = 0.53; EXPRESSED IN BONE MARROW, SIGNAL = 0.59; EXPRESSED IN ADULT LIVER, SIGNAL = 0.63
gaaagcaaaggaaacacaaatcaaaattttaatttataatctttaccaatcgaaggtgtatatttcactgtccattatgttgccctattcagtggaagatacttgaatcaaattactttactgttagagtaagattaattagcacaatgaatttatccacaattatcagtgttacttttcagaaatctttcactttttgttgcagctggttgaggctttattcaattcaaattcaagctgttaaatcgaggctctcagactcctgctgcctggccagtggagaaattaactttcacatatggctttgggatttctctctgtcatcctggtcgacgtgttctctcatttttctgaagtctgggacctcaacacagacatctgggtgaaggccttgacagcagcgctggtgcaaaatgaattgtcacatcacacccaacgttctcaacctttagaatctgaaagtaagaaaaacacctcaaacgtaagtactgca

SEQ ID NO: 14374 - DNA, 458 bp, Homo sapiens
  MAP TO AC004051.1; EXPRESSED IN LUNG, SIGNAL = 0.47; EXPRESSED IN ADULT LIVER, SIGNAL = 0.68; EXPRESSED IN BONE MARROW, SIGNAL = 0.49
agcacagacttatatgtatcttcacacttattttaaaatacttctcttttatcttttcacaatgactgtgaggctgattattgttcttatattaggtgaaatctgtaacttcacatgttggctcaccagagcaatattaagagagataatcatcagcaatatccacacaaattgcattccttaaagcaaaccaattgctttgaaggtaagcgaaatgattcttcacggagaagtaccaaaatgtccactatgtggtgctgctgtacctgaattacacaaggagggtaaaacagtacactgtaccctgaattacacaaaagaaggtaaagaagtacactgtacccttaattacacaaaagagggtaaagaagcacaaagtaataataatttcacccacaaattcattatcatcattgttcaagcaattgttattgggaagacaaagaagaaaatatgtg

SEQ ID NO: 14375 - DNA, 488 bp, Homo sapiens
  MAP TO AC005919.1; EXPRESSED IN LUNG, SIGNAL = 1.8; EXPRESSED IN PLACENTA, SIGNAL = 1.1; EXPRESSED IN BONE MARROW, SIGNAL = 0.68; EXPRESSED IN ADULT LIVER, SIGNAL =   1
acatcacataaatttgttaggcacattttatattttctcttctttaaattatcaacacacaaagtctgtagtaaaagtatgcaaatccctatttcttacctgccttttaagatcttctatgactgagaagtatctgctatagtcatgatcgtgttcccgggaagagccaggctcacatttctcgtaccagcccttgatcttctgctccaggtctgcgttggcctcctctagagcatgcacatggtccaggtaggatgccaggcggtcgttgagattctgcatggtcaccttttcattcccagagaggaggctgtgctcattgccaagaaaaccagcacaggcaccacttcccaaccctccaccgctattgcagaagcttcctccagaagagatgccctcaagagtacaagaaaagctgcttcttgctcccgatccaacacacacattcccagccacgaagcctgttcctccaccggacagcctaccag

SEQ ID NO: 14376 - DNA, 469 bp, Homo sapiens
  MAP TO AC004601.1; EXPRESSED IN LUNG, SIGNAL = 0.44; EXPRESSED IN ADULT LIVER, SIGNAL = 0.5
tcacaacccacttcactgttgaggaaactgaagcacagagaagctaaaattgcaatttgccctaaattacagagagttttgaaccttcatcgaaacatctggcctcctttcattgccttaagctgctatccatccatcctcctaggccacactgaagctgagccatgtccctgttcaggatgataccccacagtgggaaggtggatcaggctgggaacttgaaggccatgtctcctggaggacatgaaggaagtgcctgccctcacctctctgctgatgtccaagtcatagtcttgaggctccaggtccaactcagtgacaggcatggcctgcactttcaaccagccattctcctccttgtcctttttttccccttgcacgacccgttccagcaactgcaggtcaaagtcctgctcacgcttccactggcaacagaacaagaggttaaacgtagtcgcttcctgattgc

SEQ ID NO: 14377 - DNA, 489 bp, Homo sapiens
  MAP TO AC002093.1; EXPRESSED IN ADULT LIVER, SIGNAL = 0.43
  unsure 210
  unsure 221
  unsure 399
  unsure 418
  unsure 433
  unsure 439
cctatagcacttctgtcccccatgatactgtgaatcctacacggacttcagagaccgaggcagacagaacaggctgggagaggaggccatgataagtaacaacaaaaaaggaatagtatattcccatctatataaatgtgagtataacatttatacagtcagtatataactattaattgttaggatataacaattagtataatcccatcntatataaaacnaataaaggaaataacactcattcacacacacacaaaagccagcatccggccccgctgctcatgccgcatacctctgcaggtggtagatcttgtgtgtgtactggcctttctcaccgtccttctcgtagggctcattcaccaggacctccacgccttcgccaccacccgtttcattttntactggcctcagccacagnaatacagctgccccnacttgnatactaaaggacagagacagatgttattctcaacacggacccttctcaac

SEQ ID NO: 14378 - DNA, 456 bp, Homo sapiens
  MAP TO AC004613.1; EXPRESSED IN ADULT LIVER, SIGNAL = 0.41
tgtcatcaccccacttatggtttctattacttatgtaatcatccaatgtataatttaaaatatatatcttttaattttatgaagaaagagtcatgtcaggatgacatttgtaaaacagttttctgaaacaaagcagtatcttgtttactgaatatgcaatgaacgaatccactggcaagccctgattgattaggacactcatgatgatctgtcactcctggaacatgctggggcagaccagttacattcttgtggatcatttcctcaagctgcatgtcatgaaagtgctcatgatgttagaatgcaatccactctttcctaagtgcaggtgcgtggtggtctctgagattcagatgcccctatgtgcattggttgagttgtcccttgacacccatgtcagggatgcttgtaaaagcaacatgactgtctttagggaaaatgaatttttgaagtctc

SEQ ID NO: 14379 - DNA, 478 bp, Homo sapiens
  MAP TO AC005562.1; EXPRESSED IN LUNG, SIGNAL = 0.42; EXPRESSED IN PLACENTA, SIGNAL = 1.1; EXPRESSED IN BONE MARROW, SIGNAL = 0.71; EXPRESSED IN ADULT LIVER, SIGNAL = 0.53
gaatcaatattgttaccgttcactgaacagctattttcaaatgtacaagatggagataggctcctgagtattttgaaaaacaatagaaagagcccctcacagtccagccttctaggtaacaaatttaaaaacaaaatatttgaaaaaaaaattagaaactgcgcaaccacaggaaaaccgcctggcaaagattcaaagtgtaggcaaaaacctgcagagagtgaacagagtcctcatgggcccaaggagcatccaggaaaggcacttcaaaaaggtgggaaagcacagcactaggaaagaacaggatgcccaggcatttgtggacaatgctgccaaaggaaaaaggcttgagggtccagccccaagggagctggaacagcctcacatagtgcaggggcctgagaaggtagtgggaaacaccatctacaccaagccttcattcacccaagagcataaggcagcagtctcctctgtgctg

SEQ ID NO: 14380 - DNA, 493 bp, Homo sapiens
  MAP TO AC004027.1; EXPRESSED IN LUNG, SIGNAL = 0.52; EXPRESSED IN BONE MARROW, SIGNAL = 0.61; EXPRESSED IN ADULT LIVER, SIGNAL = 0.47
ttctaccaccccatcagagctggtactggtatctgctgctgggagagttgaggacagggaacatcactggattccttgcagtcactccccagcatgactctggagtatgtcagccccactgagtgactagacccagaggagcaacaacattcacagtattctgggtctcagggactcctactcctaggagaaggaggagtgcactaaatcaagggaacaccccatgggacaaagagcctagacagcaggcattgagtcccagatctttccactggtaggaagtttctttcaacagcggcacagttgaagtcctggcccacgaggaaaagtctacaggtacaggcaacagtcaggcagccctggtgctcatgaaggatcttggagaaggggacttcttttccttctcatccaccactgaaaacagctggagcttttcccatgagatctcggcatgagtgcacctatctatatacagcctttctggaacacttca

SEQ ID NO: 14381 - DNA, 455 bp, Homo sapiens
  MAP TO AC006478.2; EXPRESSED IN LUNG, SIGNAL = 0.61; EXPRESSED IN FETAL LIVER, SIGNAL = 0.67; EXPRESSED IN ADULT LIVER, SIGNAL = 0.51
ttgttaaccatagtctccctactctgttactgaatactagatcttattctttctgttttactgcatttttggacagaaaaattgttctcagtgactactttgctgaacgataataatcttgacctttcaaaccatgcttttttcagctaatttttctttatttttcactcggtagtttgggcaattgtgttacagtaaccttttttggtgctactgttttataattaagataatttctctgtggtgaggtttctaatgaaatcattcaagaagcagttatcgagtgctcgctgtgttccgagtgctgcttcctcccaattagctgcgctgaagacgaggattgtaggaaatgagggagcatctggcaccggagatgctgactcccaggcccacctccaggccatgctggcaggtgagcagctccatttgagatggccaaggggaaaaggttttca

SEQ ID NO: 14382 - DNA, 445 bp, Homo sapiens
  MAP TO AC006484.2; EXPRESSED IN BONE MARROW, SIGNAL = 0.69; EXPRESSED IN ADULT LIVER, SIGNAL = 0.57; EXPRESSED IN PLACENTA, SIGNAL = 0.82; EXPRESSED IN LUNG, SIGNAL = 0.6
taccccagggcttgaaaactagtgatggggaaaacatctgaaagttgggcccatggaagtggtagaaaagtactggagaaacttaaatacaatactggaagagactatatagtagacattttctcatatggaactttcagaacaactgtagagaccatttgtaaagaatctggctttccagagaaaagctggttatcaagggactcagactgaatctgcacacaacactagtcaaggattcgctctatcacttcctcatggggaacttctattaagaaaaatacagatttcagagccttacatctaaagcttgtagatcttggaacttgtaatctatatttttaaacatgattttctggagattctgatgaacatccaggcttgggaagtagttcctagacaattcataaggtgtagaaaaagctgctaatggctggtaacaggg

SEQ ID NO: 14383 - DNA, 471 bp, Homo sapiens
  MAP TO AC004686.1; EXPRESSED IN LUNG, SIGNAL = 0.5; EXPRESSED IN BONE MARROW, SIGNAL = 0.66; EXPRESSED IN ADULT LIVER, SIGNAL = 0.61; EXPRESSED IN PLACENTA, SIGNAL = 0.66
ggttgagatgctaagccaaacatcattttaagtctgtggcctaaaaaaaaaagggaatcatactttccaaagatttgtacattcccactctaattgctaaaataaaatgttggattatgaaaataaattttgtaggcatcaataagttataaaggcatggcttatttaaaaaaaaaaaaaaaagtgggccaggttacctacatgaactgcaaagcaagcaaactgaattttctttgaagagcccatcctcacactaaaatttcccatgactacatggaaattctttcacttaccagaaagacctgattggcactttcactgagagttgagtcatctgggctgtcgacaggtgtctgacgtgtaaacttggaatcaaactgacttacatcctcttcagattgctttatacaaacaaaataatttagaaaataataaatagtccatgttacatcaatcaaatgcactgtaagc

SEQ ID NO: 14384 - DNA, 475 bp, Homo sapiens
  MAP TO AC006500.4; EXPRESSED IN LUNG, SIGNAL = 0.45; EXPRESSED IN BONE MARROW, SIGNAL = 0.64; EXPRESSED IN ADULT LIVER, SIGNAL = 0.49
tgtatgtacttccggatattgagcaagttttcaacatggtaattcttgccttctatgtctcccttattctgaaggttaatactcaatactttctacttcaggaataatttgaagtgccctagttaagtgagtatagtgactaaacttcaagtagtctaactgataattctgcaatggcagtacacctcctctctaaagactagggtttgttgttgttgttgttgttgttttaactttactcttaggaaaaaaaatcctcaccttatactcagatacaagcctctggatccctctggaccaaatttcctaactggacttggttgatgacctcctcctccctgctgttcagaatgagccctgaggcttctatggcctgtcctgctccgccatagcttcctgtcagacaatggaaaggcagtctagcctcacttaccaatggccattaccaatagtcttaagtaacatagctggcaga

SEQ ID NO: 14385 - DNA, 478 bp, Homo sapiens
  MAP TO AC004457.1; EXPRESSED IN ADULT LIVER, SIGNAL = 0.55; EXPRESSED IN PLACENTA, SIGNAL = 0.7; EXPRESSED IN LUNG, SIGNAL = 0.77; EXPRESSED IN FETAL LIVER, SIGNAL = 0.67; EXPRESSED IN BONE MARROW, SIGNAL = 0.6
ggggagtttagaaattgcctggtgcttttatcagctcaagcagctactatagataatttaggtcctacaaccttttgcctctgtgagaattagatattcttggcctgaatagcttatatatagctttaagttcatatatctcttgatttggttgtactgtgctaaagaggccaagatgggtggattggtgaacattttactcccccacatttcacccttgggtcttaagaaaaaagcatactattaattttgccagaataacttctgttgtaaggcatactgatggttgttcagacgcatcacgttgacataatactatgataatagatgccatcagagggtgacattctagttctgggtcctgtgcttcattaagagacttcacctggaaagtttttcctactaagacatgttctaagatataataattaaattattattgaatttaattcaatccaatactgaaaaactaattgaa

SEQ ID NO: 14386 - DNA, 370 bp, Homo sapiens
  MAP TO AC004960.1; EXPRESSED IN LUNG, SIGNAL = 0.53; EXPRESSED IN BONE MARROW, SIGNAL = 0.73; EXPRESSED IN ADULT LIVER, SIGNAL = 0.56
aggtagcagtttttgcgctctcccttactcaagctatgtttccataaactgagagctaagtcttcgtttgtagtgagttaaatctagagtcaaacttacaattttatgatcaaatcacattgactacaacacaaaagacacatgattataatacatgcatgctatatttggaaaattattctaagaagaaaatgaagtaacttacttgcaagtgaatggaagtcctttattcctagtacatctattagcacattggtctgcagtattcacttttttggtttttatcttcagtgctggatctattttgattagggtagtctttgctgattttttgaattcatgaattgtatttcttcttttcctttgtccc

SEQ ID NO: 14387 - DNA, 475 bp, Homo sapiens
  MAP TO AC004057.1; EXPRESSED IN BONE MARROW, SIGNAL = 0.53; EXPRESSED IN LUNG, SIGNAL = 0.8; EXPRESSED IN ADULT LIVER, SIGNAL = 0.41
aaagcggggatgtagagatgaatgaaactgacttgcatagaaaagtcaagaagccaaagtgttgccatacagagagtctctctcccttgcttccttatggttttctaatctctcataaggcttgactcccttcctgtccttggggtctgtaagatatccctgtttctttttaatacattgctcctttttgttccaaactgtctgcgattggttcctgtttacatgcatccaaaacactcttgattgatgcaagaaaggacagaataccttagttgacatgtggatattggctcccttatccagaagcaaggtaaccatatctgtgtgcccctcctgcgaggccagatggagtggagttactccttgctttgtcacaatgtttgtctctgctccatagttcaggagtgtggaagctatctgcatttgattcttcttggcagcaatatgtaacggagtatagccattctaaaaagaa

SEQ ID NO: 14388 - DNA, 469 bp, Homo sapiens
  MAP TO AC004583.1; EXPRESSED IN ADULT LIVER, SIGNAL = 0.67; EXPRESSED IN PLACENTA, SIGNAL = 0.8; EXPRESSED IN LUNG, SIGNAL = 0.76; EXPRESSED IN BONE MARROW, SIGNAL = 0.73
agtctctgtcatgtgccgcactcctctgtgtggcctcggacaagttgcttaaccacttggtgcctcagtttcttcatccataaaatggatggacagcactgcttgacagtgctgggtgtgagggttgcctgagctcatgtgtgtaaagtggttaaaaccattattgccacatatcatgccttcgagtactacctgtcgtcatcatccattttctcaacattgcaacaaactgtggccacattgtccacaggtgagatgttttcttgtcttattttctagatgtgaatgaactgaaggagtgtctttctgtgctggttaaagagcagcaggccctggccgtccagtcagccaccaccaccctctcagccctgcgactcaagcagaggctggtgatcttggagcgctatttcattgccttgaatagaaccgtttttcaggagaatgtcaaagttaagtggaaaagcagcgg

SEQ ID NO: 14389 - DNA, 463 bp, Homo sapiens
  MAP TO AC002452.1; EXPRESSED IN BONE MARROW, SIGNAL = 0.51; EXPRESSED IN PLACENTA, SIGNAL = 0.59; EXPRESSED IN LUNG, SIGNAL = 0.68; EXPRESSED IN ADULT LIVER, SIGNAL = 0.71
ctgtcccatagggaaaggtgtgaacgcataacgttttgctctttgcaaaaaagggtcgttaattgtccgagagcagccaccgtttagggatgaagggagattaagtgatttttggccaatgcatctgccaattcccttcagggtagtcaagaatgggggccggcagccctgctgcagttggaaggtctgtccaaaaaaggccgttttggagaaagagggagagactgcgagtggccgactgcgcccccctcccagccctccggcccgggcgcctgagccgccgctcacctcggtgtcattgttgaggttccagaggtccaagcgccccatcccgtccacgcaggcaaaaagcgcaggatgcacgggggaccacatgacatcgtacacatagtctgcattgtcttcaaaggagtagagcggcttgttgtgctgtaaagcagagagaccgtgaagactttgtggc

SEQ ID NO: 14390 - DNA, 465 bp, Homo sapiens
  MAP TO AC004893.1; EXPRESSED IN PLACENTA, SIGNAL = 0.61; EXPRESSED IN LUNG, SIGNAL = 0.75; EXPRESSED IN BONE MARROW, SIGNAL = 0.54; EXPRESSED IN ADULT LIVER, SIGNAL = 0.44
aaaatcctgttttggaaaattgtagttttagcttttggtaagtattcataaaagaacacagtctcgaacaagtttcagaaaatgagggaaccgctggctgtcactcgagcgaattaggaaaggtattcttgcatcgagagagacagcaagacttgccgatttttgaatgaaggcctaaatgacatgtgctttggtttcaggcactcgcgggtgagataagtccatttctgtgcagcggcagtcaccaggtgcagcgggactgccagcccagcgcgctgaactgctttgtggaagccatgtcccagtgcgtgccgccaatccccatccgaccctgcgtcctgaagtacctggggaagacacacaacctctggttccggtccacgctgatgttggagcaccaggcttttgaaaagggtctgagtcttcagattaagccgaagcaaacaacggagttttatgagcagg

SEQ ID NO: 14391 - DNA, 438 bp, Homo sapiens
  MAP TO AC005600.1; EXPRESSED IN PLACENTA, SIGNAL = 0.64; EXPRESSED IN BONE MARROW, SIGNAL = 0.64; EXPRESSED IN ADULT LIVER, SIGNAL = 0.47; EXPRESSED IN LUNG, SIGNAL = 0.47
tacgagtgcaacctggtgtccctgcagtgcaggaaaggtagggccgggtggggccctgcagtgcaggaaaggtagggccgggtggggccctgcagtgtggcgccaagagccctgggcctggcgtgaccaccaagtctccccagacatggagggccttgtggacaccagcgtggccaagatcgtgtctgaccgcaacctgcccttcgtggcccgccagatggccctgcacgcaaatgtgagtgggggtgggtccaggcgtgagctggtgggacaggcccaggtgccacctgatagtgagctcaccccctgcctacgtccccagatggcctcacaggtgcatcatagccgctccaaccccaccgatatctacccctccaagtggattgcccggctccgccacatcaagcggctccgccagcgggtagggaatatggggct

SEQ ID NO: 14392 - DNA, 441 bp, Homo sapiens
  MAP TO AC005510.3; EXPRESSED IN LUNG, SIGNAL = 0.78; EXPRESSED IN ADULT LIVER, SIGNAL = 0.89; EXPRESSED IN PLACENTA, SIGNAL = 0.73; EXPRESSED IN FETAL LIVER, SIGNAL = 0.89; EXPRESSED IN BONE MARROW, SIGNAL = 0.83
aagggatgtgctattaatgtggtagtaaaagaagctttctctgatatggtgacatttgaggtgaggtttgaaggaagagaagattaagccttgaagatatcttgggaaagagcacaccaggcagagggagcaggcaatgttaagaccctgagaatggaacattcttgatatgttcagggaatccaaggagactggtatggttgaagaagaatgaccaatcagtgggaaaaatgctaggaaatgaagtcaggatagagccttgagccagatcatggggggcttcataggctactgcacagaatgctgtgagaattacttgaattgattcacataaactgtttaggaatgtgcctgcgatatagttctccatgaaattgctatcatcatcatcatcatcatcatcatcatcatcatcatcatctctctttgtatgagggtggc

SEQ ID NO: 14393 - DNA, 459 bp, Homo sapiens
  MAP TO AC004864.1; EXPRESSED IN ADULT LIVER, SIGNAL = 0.64; EXPRESSED IN PLACENTA, SIGNAL = 0.6; EXPRESSED IN LUNG, SIGNAL = 0.68; EXPRESSED IN BONE MARROW, SIGNAL = 0.55
tcaggcaagaatgagttcccagttttgattacttgacacacggtccagttcacccattttattaccatgccactgtaagatgtttacatttgtgttccctggtttaagtgcacatgttaatgttttggcagctaagtgcagacttatctgctctacaggggaaaaaaaacctgacagcaatttaaaaaaaaagaaaaagcacaaaagtaaatatccatttcagctgagtgaaaaaataaacacaaattgttttcacatccttggaataaccaccaaatacatgtatatattacctttaagtctttttcttctatcttcttttggagcattttaaggcacttagtaaagtcagtgtggtcttgatcaggagttgaaatgagctcacatccctatgtattaaagtaaaagaaaaggtaagaataagtagtaaattcacctttatgaacaagatcaagagtt

SEQ ID NO: 14394 - DNA, 367 bp, Homo sapiens
  MAP TO AC004870.2; EXPRESSED IN ADULT LIVER, SIGNAL = 0.53; EXPRESSED IN LUNG, SIGNAL = 0.64; EXPRESSED IN PLACENTA, SIGNAL = 0.67; EXPRESSED IN BONE MARROW, SIGNAL = 0.59
ctcaagcaaactcatgctcgaaaattagatggctaacaaatgaggccagggccattggcttgccttctccccaaaggactagttatcttcactcacaaaatgtagcctcagtgtttacctctaatcccgggaagacagccaggcagctcttgtgtctgatattattacgatgctggaacagcacaacaaacaaaacaccccaacaacagcaaaaccttggaacctgctcgaggcagggacagcaggtgcccttgttaagagcctggctctggagcagaagctgcagcttttgctccactccaccgtaacctgttttgtgaccttgctcacaccattggacctctctgcacctgttttcacaggcatg

SEQ ID NO: 14395 - DNA, 458 bp, Homo sapiens
  MAP TO AC005702.1; EXPRESSED IN LUNG, SIGNAL = 0.64; EXPRESSED IN PLACENTA, SIGNAL = 0.74; EXPRESSED IN BONE MARROW, SIGNAL = 0.59; EXPRESSED IN ADULT LIVER, SIGNAL = 0.74
caatttgatggctctgcatcacttaggtattcgtttttctgttaagtgagtgattacaaaggaattaaaataaaattttacagatgagggaaaaaaatctttagtttcctccatatttgtctgccaatagaaacatttggtcacatctgaattttgtacttcagtgtactcatcaattttaagcactatttgatcataatgggaaaaagtattcttccattgaaaaataacattttgacccagtttctggagcaaatgcaaataattacaccaaactctgtgtactgaccactgagatactcaaggatgaggtagagttttccaccagtctgaaaggcataaattaaatccacgatgaagggatgctttacttcctccagaatattccgttctgcttttgtatgagctgtatctttagcatttcttactatcattgcctaaaggaaaagagatcatct

SEQ ID NO: 14396 - DNA, 375 bp, Homo sapiens
  MAP TO AC006145.2; EXPRESSED IN PLACENTA, SIGNAL = 0.66; EXPRESSED IN ADULT LIVER, SIGNAL = 0.41
agattggatggaatattttagggtaaaattctaatgtggtttccataattcacaaatacatcagaatccagagcatttgactagcctatatctccagttttatagcattatgtaataaataaaagtgtccaaattcacctttcacactttattttataaagcccaaggatctgaaagttacttgcagcctgcaaagttttggtgatccaccttagcctatgaaagctgtaaggagcagatccctgtggggaagtcttgctgtctgacttgaaggcaggctcctgggtgggcaaattatgattagcatagccacagagctgctcagagaaagacacagacaaatggccagtcaggcgcattctgcatgaggttacg

SEQ ID NO: 14397 - DNA, 474 bp, Homo sapiens
  MAP TO AC005959.1; EXPRESSED IN PLACENTA, SIGNAL = 0.85; EXPRESSED IN LUNG, SIGNAL = 0.71; EXPRESSED IN ADULT LIVER, SIGNAL = 0.61; EXPRESSED IN BONE MARROW, SIGNAL = 8.7
tcttctttagtcgagtcttatggcaatataacagccaagcaatggcaatcacacctgatgcccacttctgctggcgataaaagaggaagaattttcttgctttgtagcatttccatgtggcttggatcttcatggcggcctccgaatttccatcttggcccttgtacctttgccctggaagatttatcagcatttggacatgagctgggtcctctaacactgagagaaggtcatatctggtaagtttattcgtcagctcaaactctggaaggagggccaccaaattattcccttttattttgacttctggtatagcatagttcctgagaaacttctcgacgtgttccaagagagaaaaaatacctccccaagctaagctaaaatgttccttgaatgctaagaagtctggggctgtattgtctatgacaccatcataaattaaaaagtcataatcccacagtgatttcagggctc

SEQ ID NO: 14398 - DNA, 447 bp, Homo sapiens
  MAP TO AC003081.1; EXPRESSED IN LUNG, SIGNAL = 0.42; EXPRESSED IN ADULT LIVER, SIGNAL = 0.47
gagatggaggcattaggaagtgattaggccatgaggactgtatcctcatggatgggattagtgctttatgaaagacgtagatgaaattagctaggccttccattccttcagccctgtgaggacacagtatccactgcctccagaggatgcaggaagaaggtactattttggaagcagagagcagttctcactagacaccaaatctgccagctccttaatcttgcacttcccagccaccagaactgtgatatatatatacacacatatatttataaacttcccagtgtcaggtgttttgttatagcagtatgaatctaataagacaaatctcaacatggtggatgaagaaactgaggatcagaatgaatgcaagaaataaggttcaaacccacagcttttcattattgcttagtgatgcctggctaggaggaggtagatccaaaaatc

SEQ ID NO: 14399 - DNA, 477 bp, Homo sapiens
  MAP TO AC005589.1; EXPRESSED IN PLACENTA, SIGNAL = 0.68; EXPRESSED IN LUNG, SIGNAL = 0.8; EXPRESSED IN FETAL LIVER, SIGNAL = 0.83; EXPRESSED IN BONE MARROW, SIGNAL = 0.78; EXPRESSED IN ADULT LIVER, SIGNAL = 0.79
cctggccacaatttcaaaagacagcaacatttttgactgacctggaaaaaagtcagatggcacgtcagctactaagtctttttgtagtcaatactagagagggaacgatgaggtgacttttaggaaggcaaaaaaaaaaaaattaatgtaacaatgtccaattttgaacattttccaggtgcgaagacagaggcccagatagtgtgagtgaaattacttttagtgaaagccagtgaggcagtgataaatccgtttctatttacagttgtacgatttctccacctggtgcatagtgggtttggggagcgtctccactccaccctcatccgtctctagtattttccccccccttctttggaatccaggttttcgttccaggaagtgcattaacttgcgggataatttgctgatcacactggtacagaaaccattgagaggctttagactcctactcatagggatcaagacctggagaca

SEQ ID NO: 14400 - DNA, 386 bp, Homo sapiens
  MAP TO AC004551.1; EXPRESSED IN PLACENTA, SIGNAL = 0.82; EXPRESSED IN LUNG, SIGNAL = 0.67; EXPRESSED IN BONE MARROW, SIGNAL = 0.79; EXPRESSED IN ADULT LIVER, SIGNAL = 0.72; EXPRESSED IN FETAL LIVER, SIGNAL = 0.78
ttggggtcttgcgttttatctggcaaccctattcctgggtgaccagaaaattgaccgtttgtccctcaggtactacaaatataacttctaggaaggaatccgttctaggaagagtgttttcccatctctgctctgcaatctagaaagtggggagagtgagtgatcccaggtttgaaattctggaacattgggggtagacctgaacctgggcttctgaagctgctgtttcaggaagtctccaacagtcttgtccttggcgttgtagttgatggtccagtagatacagagctggcggtactgggtgaccagctccaggaccgtgcggaagccctcagccatgttgaactgggagtccttcccgccctgctcccaggcatacacagtca

SEQ ID NO: 14401 - DNA, 455 bp, Homo sapiens
  MAP TO AC003959.1; EXPRESSED IN PLACENTA, SIGNAL = 0.64; EXPRESSED IN LUNG, SIGNAL = 0.77; EXPRESSED IN FETAL LIVER, SIGNAL = 0.72; EXPRESSED IN ADULT LIVER, SIGNAL = 0.55; EXPRESSED IN BONE MARROW, SIGNAL = 0.65
tgtaagttatttagagcagtgtctggtaaccacagccctgtgtaagagtttgctgctgttgttaagaaatgcttgacttcttgatatcttagagtttttgctgactctgctgcctgtgttgggatcccaagcagaaactgtttgtggcccagcaggtgttggcactgggtgagtgcttctggctcttgtcccacgacgggcatccaggtcttccagcggcctgaggatataggaggggcttcaggcggatgattgtggccgttgcttatgttttttccttgtttggcctgcaggtggcagcacaccctgggccccccactccccgccgcaagtcctgaggatggccagcagagaaacaagaaaatggactccctggctgctggagagttgaatgccagccaccagccatgggtgagtggagagcctgactggagtttttctctaatttgttctgc

SEQ ID NO: 14402 - DNA, 466 bp, Homo sapiens; identical to SEQ ID NO: 11302
  MAP TO AC004505.1; EXPRESSED IN PLACENTA, SIGNAL = 0.62; EXPRESSED IN LUNG, SIGNAL = 0.52; EXPRESSED IN ADULT LIVER, SIGNAL = 0.53

SEQ ID NO: 14403 - DNA, 454 bp, Homo sapiens
  MAP TO AC006011.2; EXPRESSED IN LUNG, SIGNAL = 0.96; EXPRESSED IN FETAL LIVER, SIGNAL = 1.4; EXPRESSED IN BONE MARROW, SIGNAL = 0.87; EXPRESSED IN PLACENTA, SIGNAL = 0.98; EXPRESSED IN ADULT LIVER, SIGNAL = 1.1
gagaaaaccagtgcaaaatgcggcagacagtacatctctaacatattgcaaaggctgataccgggacaacactacttcagaaaggtgccagcaaaatggtgaatgtgtgaaaacaaagaaaaatattgtgtttatagggtgcagaaagtttcccagaaactgacagagcccatgcatctctgcacccagaatacacttagagaataatttaaccatgacaatagggactacagaaaatggtatattgtgtataaacctggcctctctaatcgcctccttatgtgcctggaacatcttgacgttgttcatgttcgactgccaatatttcacatatcctccgtggtctgctgtcaacatccacatgtcattatgtgaccacgtcatggccctcactgggctgtcgtgagcctgtgaaagcagaaaacattaattagtaaggtgctgcttcaaagaa

SEQ ID NO: 14404 - DNA, 459 bp, Homo sapiens
  MAP TO AC003046.1; EXPRESSED IN PLACENTA, SIGNAL = 0.59; EXPRESSED IN LUNG, SIGNAL = 0.48; EXPRESSED IN ADULT LIVER, SIGNAL = 0.48
aacttagtcaaggccacacagtttgttaatagcccaatctgaatttgaactcacacggtgtgataaggaaagccaacctctgtctgctaacctgaaagacctttttgccaaaaaaaatctagatttttgagcatttatccaatgagatatccaagaagtctcttcagtttttcactgtatctcacatgtgtgaacctagccacagtatgacttatctgcagaaggataagggcaagttatcatgtctcctgtcaaggtaaaaatgttgtttcacaattccctggccgaccttccaggcaaatttgctgcaaaaacagtttttgtggggtttgtagcaaaattatatgataagaaggacacgaaccgaattccttttttaaaggactatgctggtttttgtagcccctggctgtgtagtgacaacaaatgcatgctaaggggcagtccctggtgagtact

SEQ ID NO: 14405 - DNA, 416 bp, Homo sapiens
  MAP TO AC005886.1; EXPRESSED IN LUNG, SIGNAL = 0.71; EXPRESSED IN BONE MARROW, SIGNAL = 0.56; EXPRESSED IN ADULT LIVER, SIGNAL = 0.51
tgggagatttttggatttgggatgttcaacttggttctaaataaacttttagattttaagaccaatggaacaaatctatgctaatcacagtaagtcctaacatctgcatatcttttcatttggttcaagaggaaaaatagtcatgatgttaattttagaatagccagaaattgaggaggaggtgcagtacagaggttaagcatggcctctgtagtctctctaggttctggtcccaggtccaccccttcctagctatgtaacctgaacagtttacccaatgatgagaattaggtgggctaagttttgtaaagtacttgagagagtacctggcacaaagtaagtttgtgctcggtaaactgagtccatcactcttctaaacccatcctgaccggtgttcactgctgttccagtttcca

SEQ ID NO: 14406 - DNA, 470 bp, Homo sapiens
  MAP TO AC006484.2; EXPRESSED IN PLACENTA, SIGNAL = 0.93; EXPRESSED IN FETAL LIVER, SIGNAL = 0.71; EXPRESSED IN BONE MARROW, SIGNAL = 0.95; EXPRESSED IN ADULT LIVER, SIGNAL = 0.71; EXPRESSED IN LUNG, SIGNAL = 0.83
tttacctcttattatttcatggagttctactctaccatgtttatttactgagattttatgaaaactggatattaactaacaatccaaactgagagtgagacaaagttaactcctaattaaacattcaagtacattttccatggcagtatgtttacatttacacattagaaataacattcattactagagctaattaaaatttcatgtggaaatcttaaccagacattttcatttcatatttagcttttggtttattcaatcacttaattgtccttccatgtatgttactgtcctgattctctaacccacattttggcgaggtgcttcgcaaatactatgatccttaaaatttctttgaaggttgttttgccattaacttctgtgaattttatgtttccctgtaaggttgggaagaggaaatacgtataacaacactatggaaatatttcctacttcctctggtcttttca

SEQ ID NO: 14407 - DNA, 472 bp, Homo sapiens
  MAP TO AC006321.1; EXPRESSED IN PLACENTA, SIGNAL = 0.59; EXPRESSED IN LUNG, SIGNAL = 0.5; EXPRESSED IN BONE MARROW, SIGNAL = 0.57; EXPRESSED IN ADULT LIVER, SIGNAL = 0.59
cactccaactcagcctgttgacttcgtcatcaccaacttcgcatttcaaatccacctttgtccttaaaaatacacgttaccgtgggtttggaaaagttctgccttccgtgggaggttttaaagacaggtgttcttcctctgcctgcgttctgctaagccagagagggcaaagagaaccctaactttgaatttttaagaatgtcaatcttggggcttactggtaagtattcaatgaagaacaacgcctgagagatgctgacattctaaaacacacggtttagaggcctcccaggcaaatgtgactgtgctaggaagcaactctcctccatcctgctctgtgtggatttatggcatcgatggtgggcagctcctgtgttctgcacagagggatccccaggttgaaggatgacgtggaagcaatgacgtcgtggtcagggacgtctgcagggagcaaaatgaagcgagtttcttt

SEQ ID NO: 14408 - DNA, 495 bp, Homo sapiens
  MAP TO AC003957.1; EXPRESSED IN LUNG, SIGNAL = 0.53; EXPRESSED IN ADULT LIVER, SIGNAL = 0.52
caattgcattgattttctcaaagaatcagctttttagcttttttctggtttttgttttctatttcattgatttatgctttaatctttttttttgaatgttgaattcagttctttatataacatcccttgtaaaaacaaaacagaataaaaacaaaccgaaaaggaggggcagggtaaaatttgaaaaggaaaggaaagggaggaaaaggaaataaaataagatgatttattgcttctcctcagcatcctccttggtttcctcctccaccaaaagagcttctagcttttccgccactttttttggcatgatcgtttttgcccgatcctttcttttctctccgatctctttcttgcattcttcaaactttgttttgaatttctgtgcattctcaatattcaggaagtggatggccagcagctctggcttggggcactcgttggcgaagtcggcgtgggtgttccagacccaggcatggtcactacccatgttgggct

SEQ ID NO: 14409 - DNA, 459 bp, Homo sapiens
  MAP TO AC002086.1; EXPRESSED IN PLACENTA, SIGNAL = 0.59; EXPRESSED IN ADULT LIVER, SIGNAL = 0.51; EXPRESSED IN LUNG, SIGNAL = 0.7
atgtgagagaggagaggggcgaacaaggagctgtcgtggatagattgcagaaaaggatgaaaatgggcgcggtgaaggtagaaggagcgaaatgcaaatggtcagaagcgggctgaaagatgaagcggactcgctgaaggcaagtgggctccttagagcgaaggtgcagccatgatctcactcacctctgccacggattcacctccctctcctcgtcccgtaggagcgtgagtagttgccgcaataggcgcaagagcaggcagaagcgaaagtgatggtccacggcgcagtcagccgctcttgagaatgcgaccacaactgggagcggcagggctggtttcgggagccttggctgagcccattccattccccagtcagagaacaagagttccagtgagagttgcgccccagcggggaacgggcggctttgctgggcttggggctcttggacaaactgca

SEQ ID NO: 14410 - DNA, 490 bp, Homo sapiens
  MAP TO AC002091.1; EXPRESSED IN PLACENTA, SIGNAL = 0.82; EXPRESSED IN ADULT LIVER, SIGNAL = 0.48; EXPRESSED IN LUNG, SIGNAL = 0.8; EXPRESSED IN BONE MARROW, SIGNAL = 0.71
tcctcaatccattgtaagtgctatataggtttttgttaaatagtcacaagtatttggcaatcaatcttggctattcttgtcattattcccattgtcaagctcagtgtccagcgagcagttggagccttgtgcaagtgtgtagatgtccaactctcaagatgttcttacatttaggcaggatccctgaattggggtcttgcagcctgtctatgtgcagggggtcctgccagccctagaggcatcctcacccatgagaagggccttccccactcggcagcaggctcactagacccctttccccccaccacactgacctgagctctccatgggagcctttgggtgtaggaggaggaggatgtggttgtctcgggcagcagaatagagaacaaggtggttgcttttctgcacagaggtggttctgcaaaataagaggtagttaattagtggaagcagtgggaaggtgcagaaagcaccttgggaaatggagaag

SEQ ID NO: 14411 - DNA, 395 bp, Homo sapiens
  MAP TO AC005045.2; EXPRESSED IN LUNG, SIGNAL = 0.5; EXPRESSED IN ADULT LIVER, SIGNAL = 0.48
gaaaaatgcagtcctttgcccatctccctggctccctcccgacttgctaatcccattctctcaagcaaggatttccaaatcttttgtttcttttccgccactttcatgttgtcaactcttaattttattgttctgctctgctatttaatacagtactgtgttttacatatctgagtcttaagatttgcataagttagtaataatagaggtgagttggtggtacttggtctaaataccttaatacgtatttttcctttctagtgaaaccatttgcaaatcaagaagaatataagaaaactgaagaaatagttcaaaaatttcaaagtgggattggagaaaaattgcaccagaaattgcttgaaagagcaaaaggaaaaagaaattgggtatttgtt

SEQ ID NO: 14412 - DNA, 469 bp, Homo sapiens
  MAP TO AC004104.1; EXPRESSED IN BONE MARROW, SIGNAL =  52; EXPRESSED IN ADULT LIVER, SIGNAL = 0.67; EXPRESSED IN LUNG, SIGNAL = 0.54
cggagctgtcctctcctatgataacaatcccttcttctggaatccctcctgaaggacctggctgaggctcttgaggagatgtcactcttttcagaaacacgtcctggggggtttgcttggtttgtttccttttgtcatcatagatgtgcttgtaagcagataatacaccatgaacattcccctctattaatgaaagcctttcagtgttggggtccttattgctttcaaactctttaaggagctttttgaggtctgcagaagcatctactaaacctgtccctgtgaattttcttggggattcttttccttcttctgcagttttcttttctcttgcctttttttttcactatgcattcctgctccagttccaacttctcattagttaattcctcaggaaccacctctaggagctcctcagtgtcatcttcatccacacccgggttaaagttgtttgccgtctcaaccagag

SEQ ID NO: 14413 - DNA, 454 bp, Homo sapiens
  MAP TO AC004125.1; EXPRESSED IN LUNG, SIGNAL = 0.54; EXPRESSED IN ADULT LIVER, SIGNAL = 0.57; EXPRESSED IN BONE MARROW, SIGNAL = 0.81
gggaggtctgagatggagagagacggaccccagaagctatagatatctacctttggacttttaagttacatatattaattgattacttctgtttgtcttatatactttaagttggatttctgttaactgtaactagaagcttatgaccaataggctacctctctaatttcatgtctccttgcctgaataaattaggaattgtgctcacctgctaaacttgaaaaggggtgaaatacgtgaaagagtctgttttcatcatgtaatgagaattgttgagataaaagcttttggcctgtagtagtagcgccataatgctatcaaggactctggcttctttcagtatatctctgttgccaaggctggagtgcaatgatatgggattatagctgactgcagcctccatgtccagggctccagtgatcttcccaccttggcctcccaagtaatcaggatt

SEQ ID NO: 14414 - DNA, 373 bp, Homo sapiens
  MAP TO AC006451.1; EXPRESSED IN PLACENTA, SIGNAL = 0.99; EXPRESSED IN LUNG, SIGNAL = 0.48; EXPRESSED IN BONE MARROW, SIGNAL = 0.6; EXPRESSED IN ADULT LIVER, SIGNAL = 0.53
tgatttttgacatgagatctttcctaactttatttcatttagaacataatttaccttatatcggagtcattaaatagccatcataatacagatacgaataagaaggaaatgagtttaagtaaaaatgttaagtgtcctggatattcttctcatgttagacaaaacacaagacaacaaaaaaaaggctaaatattacatcttaacaaagagtaaaagtttcctaaaattaatagaccaagaacacctaccactccatcagcaattttctgagctccatgaatttcatatagttgtagctgtttttcaaacagttgggcaatagctctatgaacaagttcatattgctcctatgaaggagaaaaatgattaaaaa

SEQ ID NO: 14415 - DNA, 472 bp, Homo sapiens
  MAP TO AC005703.1; EXPRESSED IN LUNG, SIGNAL = 0.46; EXPRESSED IN PLACENTA, SIGNAL = 0.65; EXPRESSED IN BONE MARROW, SIGNAL = 0.51; EXPRESSED IN ADULT LIVER, SIGNAL = 0.51
ggcagaagaaccagcttacgctttagataaatagaaaactgattagcagtaaaataaggaataattaaggaaagttgaaaataagcctcattctgatattcacatttatataatgaagctaggatcagcgacctgggggtttctctctctcaggataaatgattgcctagcgatcctgtaggctgattcatcactctcactgttgtctgcttctgcttctctttttcagtgtctcagtgcctgagtcctgggccaaatttacagatgacaatattctccgctcccagagtgaacgggcagcttccgctaagctaagagacgacattgaaaacctcttggttgtgactgccaatgagatgtggaatcaattcaacaaagtgaacttgtctttcaccaatcgcattgctgagactgcagatgctaagaataagattcagacgcacttagcaaaggtaaatcaaccgccagtggt

SEQ ID NO: 14416 - DNA, 357 bp, Homo sapiens
  MAP TO AC002092.1; EXPRESSED IN LUNG, SIGNAL = 0.49; EXPRESSED IN ADULT LIVER, SIGNAL = 0.5; EXPRESSED IN PLACENTA, SIGNAL = 0.58; EXPRESSED IN BONE MARROW, SIGNAL = 0.5
ttgggttatgctgtgcagtgttcgctgggtgtgaagaggggacagggctgggtttgtcgtgactctgctgctttctagctactggagtgtggaccagccatgtgcgctccctgagtgctggcgtcctgggctggactccctcccagcactgactgcctggcgctgggccttggtgtcaggcctccatccctccctgcctgttagctgaggtctaggctgacccctgccctcggctcttggttggctcccaggtctgatgtcactttcttctcaccacctgcccttgcctgtttgcgtccagtatgcctgggtggagaagtactttggccctgactttctggagcagattgtgctgac

SEQ ID NO: 14417 - DNA, 455 bp, Homo sapiens
  MAP TO AC004226.1; EXPRESSED IN BONE MARROW, SIGNAL = 0.61; EXPRESSED IN LUNG, SIGNAL = 0.44; EXPRESSED IN ADULT LIVER, SIGNAL = 0.43
tttttctccctcaggaatgccaattatttttaggtttggctcttttacagaatcccatattccttagtgattttgctcatttctattgattcttatttctttatatttgtctgattgggttaattcaaaagccttatctttgagctctgaaattttttcttctacttgttctaatctattgttgaatctttccacttcattttgtatttccctaagtgtatctttcatttccatgtctgatttgtttttctttatgatatcaattgcaggggtctggctcgcagaccctgacccagtgacagatgagagacatacactgacacagatattctgcctgtcggtctggctaaggggctctgccctaagtctggagcatcgcctcaataagccggtgaagtttgcattatttagtacagattaaatgacaaaggctttgagtcagcacacttgtgggt

SEQ ID NO: 14418 - DNA, 485 bp, Homo sapiens
  MAP TO AC005562.1; EXPRESSED IN PLACENTA, SIGNAL = 0.65; EXPRESSED IN LUNG, SIGNAL = 0.64; EXPRESSED IN ADULT LIVER, SIGNAL = 0.68; EXPRESSED IN BONE MARROW, SIGNAL = 0.58
tactcacccctaggccacagggcaagcaaagtggcaagccgcaaattgaattgtggggctggagggggatgtttcattgatgtcacaaatgagcatggaccccatatctgcagcagggatggttcagggccagtcaaggagatgatcggggcccacggaccctcaaacgcgtcaggaagccaggttggtccctgagtgtgtgtgatggggtgtgtgtttgttggggggactgccgccgcccgccccattagcaccgtcattatcccagatttacgtatgtataatttttcttcctccccctccccaaaccgctccaacatctctcctggctgcaaacccgcctcccccagaaacagccacggagccgcctgccaccgggccattagcacgcagggaagggggtgtggagggagggggcaggcagcagggaaggggaaagggggagccaggagaggacgagggaggcaggagctgtaaggatggga

SEQ ID NO: 14419 - DNA, 457 bp, Homo sapiens
  MAP TO AC002081.1; EXPRESSED IN LUNG, SIGNAL = 0.55; EXPRESSED IN BONE MARROW, SIGNAL = 0.52; EXPRESSED IN ADULT LIVER, SIGNAL = 0.49
ttgcttctctaacagctttattgcatttttgcatacagtgtctattatatcctgagggcaatgattttaacctcatgaaaactcattgcaatgaccgtccaaaaaacatgattctttgcaattagcttatctatcaccacaaacagtaccaagattatcctcatcttctttctggaaaagagcaactactttcttctcaaatattcagttaagagccaaaggctgctttggattcttacttgttacagccgtctggcctgctgtcagaagggcccaccacagtgtccatgaatgttgcgatgttagaaaatcctgccggcaattcatcccattcatcaaatttgatgccactgcccaaggaataggtgccttcaccacacttactgcatacctggttcttcatttctagatactctccagaagcacaggagaaagctggaaggcagaagaatggaca

SEQ ID NO: 14420 - DNA, 455 bp, Homo sapiens
  MAP TO AC004833.1; EXPRESSED IN LUNG, SIGNAL = 0.41; EXPRESSED IN ADULT LIVER, SIGNAL = 0.55
ggcaactgagcatctatccccttagggacaattcatcctaaagacaattagatctcgctatatcttacactgtgaataatgaaagaaagcattcatgcaaattcacttacattttagtggaaaatattaacaggaaaacaaacttatataggtagtagatacctaacttctgttaacttttaatataattttctccaatgtaacatgtatgctttcaaattgaatcaggatgcttacttctaagaaggcccatgccaaaaatacacctggtattcatgctgagatgactaaaataattataacttttggtcatataatgcactcgtttttgaaacttgctgaaatgtactttttgacgctgcaattaaaagcccatctcacttttcctgaggtgcctgttgccatggtgcctgggcattctgaagaggaacttactgaggatgacacttcacaga

SEQ ID NO: 14421 - DNA, 471 bp, Homo sapiens
  MAP TO AC003677.1; EXPRESSED IN LUNG, SIGNAL = 0.56; EXPRESSED IN ADULT LIVER, SIGNAL = 0.42; EXPRESSED IN BONE MARROW, SIGNAL = 0.49
tcctagacactgccccaaacagacatgaggagaaataccctgcttcttccttcctcccaccctccagtctcccattggtgcctcctattggcccaacatagacagaaatcagaggcaagggggcctgagaaatgttagctcgagcagtcagccaccccatggggcagagagagcagggcctgacatggatctgagcagcagcagtccaaggaccaatactcttctttcatttctcccacaataagcacctccctccctctgcgtgatcctgggctctccttttttcacagatgggctcctttctccccaggctcccacctcctgtgccaagccaggccataagtggggctacttctatgggtctgttgcaagaaggcaaccagcaggccaaggtgggtggctggctggaccctggatggtcagtcactgatcaaggagcatcggaaggtctggcctggacaatctgggact

SEQ ID NO: 14422 - DNA, 473 bp, Homo sapiens
  MAP TO AC006473.2; EXPRESSED IN PLACENTA, SIGNAL = 0.69; EXPRESSED IN LUNG, SIGNAL = 0.8; EXPRESSED IN FETAL LIVER, SIGNAL = 0.9; EXPRESSED IN BONE MARROW, SIGNAL = 0.7; EXPRESSED IN ADULT LIVER, SIGNAL = 1.1
tgatatgccgatgttaatagtttcctatagaaacaattatttttgaatattcaggtgataaaaataaaagatcaccttagaagcgacacactatatatatgcccatttaattttctcctatacaactcccatcttcatcacaaaaaaattttaaaactgccacattacttaggtttatatatatttaaaataaaactaacaactcactgagaaaatataatttcaccttagtaaagtatgaaattttattagacattattaaagctgcaatggccaaaacaaggaattaaattttcctctgtaatgttaatatctccagcatgaacgtggaggtaataatacaaatcactggactgaaaatattgctgattaaaacttctgagaacaaggctgatagattggcagttttcacaaacaccttcacgtattaagacaataaattgccataatgtgttttgacgttgataatgtga

SEQ ID NO: 14423 - DNA, 458 bp, Homo sapiens
  MAP TO AC005323.1; EXPRESSED IN PLACENTA, SIGNAL = 0.69; EXPRESSED IN LUNG, SIGNAL = 0.53; EXPRESSED IN ADULT LIVER, SIGNAL = 0.4; EXPRESSED IN BONE MARROW, SIGNAL = 0.52
tttatttgtagatggtcttctgtgctttttaaataaaagtttctagaattccagattatttcaactcaacatgattatgccagcccataaatatactcgtgaaccagctaggtcccagtaaatccttacagcaccctgtacattttccagagctccaggaagggacgaagattactttttactttataaacaagcttatcttctcaaattatcttcagcttcagggagtacattttctaaaccatagtcttgaacctcacctgagtgtgcagaagttgcacacgttcactggcatccagaagctcttgctctgccattttcctgcctctctcagtccgttccagggatgccctgagctcttcaacttcagcctgcatcaggttagctctgcgctcaaccattgccagttgttccttaaggtcatcttggcctctgatggcatcatccaaatgtagctg

SEQ ID NO: 14424 - DNA, 424 bp, Homo sapiens
  MAP TO AC003078.1; EXPRESSED IN LUNG, SIGNAL = 0.54; EXPRESSED IN BONE MARROW, SIGNAL = 0.54; EXPRESSED IN ADULT LIVER, SIGNAL = 0.5; EXPRESSED IN PLACENTA, SIGNAL = 0.58
tcctggaactttcacctttagtgagttagaagaatgccatttgaagtaaatagagattcattgtttctctgtatttctcaaagaatcagtagagatattgagaggaaaaaggtaggtttcacatgtcttgctgttcttgatagtcttttaaataaagactcttattatatttatcatcatttaactggaataaaaaaaccttttttttcttatttacacagttctttctcatataaatttggaatattggaaagaaattactggaagaaaagaaaatattagaaacatgggtagtgatgaagcaaagaatctgaaatgcttcactcaaaacctcttgaactgtggaaacgatggggaagagagtatgtcaaatgagatcccggggaaggaatgcgagcttgatagcttgaccaacagcaacaaa

SEQ ID NO: 14425 - DNA, 451 bp, Homo sapiens
  MAP TO AC003959.1; EXPRESSED IN LUNG, SIGNAL = 0.42; EXPRESSED IN BONE MARROW, SIGNAL = 0.58; EXPRESSED IN ADULT LIVER, SIGNAL = 0.45
tttacaaggtacataatgatgtttcaatacatattatgtatagtgatcacatcagggtaattagcatatccaccatctcaaatgtttgtcatctctttgtgttgggaacagtcactatcctcctcctagctattagcagtggttagggattttggaagttgtgtagtgtgaagaagcctgtgggccagaggttcttatcacagactctttcttcttcaggagctatgaaccatccttccccaaagtgttatcaaactgtgcctttggtggaggcatagctctcgtcggattcttttttgccagaaagatctgtgaacgaaactgctactatgttaactcagagaacagcctccctaataaagaagaggatgtgttcctacaagagccaggttttagttggattgttagtgtgagtgatgaagacctcagaatggctctagaaagaagccca

SEQ ID NO: 14426 - DNA, 464 bp, Homo sapiens
  MAP TO AC006525.1; EXPRESSED IN BONE MARROW, SIGNAL = 0.66; EXPRESSED IN ADULT LIVER, SIGNAL = 0.7; EXPRESSED IN PLACENTA, SIGNAL = 0.79; EXPRESSED IN LUNG, SIGNAL = 0.72
aagtaaatgtggtgttaaaatggcagtcttgctccttgagaggaaaaggcattggaacagccatttttaatgtgtcttttacttaaatgttgccaaaaattcttccatccaagtacatgtccttttgcaaatgattaagcaattaattactcttctctaccatatctgctaagttaaatgtcacattgattgagagattttgaattgttttatgcagctttctcaatcagatcatatgtggtttttataaaatggtgtattctttttgacattgtacttaccttttagaaaagtcataaaagcggaaaaaactgatgaggtttgaggcttttggttcattgtatctttgtggagtcttgacccatattctcatggagctagaggataattaatgtttcctgtgatttatgatatccacctctaggaaactacaagaaattattcttccctgctaccactctctg

SEQ ID NO: 14427 - DNA, 477 bp, Homo sapiens
  MAP TO AC003686.1; EXPRESSED IN PLACENTA, SIGNAL = 0.59; EXPRESSED IN LUNG, SIGNAL = 0.57; EXPRESSED IN BONE MARROW, SIGNAL = 0.61; EXPRESSED IN ADULT LIVER, SIGNAL = 0.49
tctcccttcactaagctgggtgctggatgttagtaatactaagagacatgagacattatctcccccttcagatcatgactcagtggaagatttagatacataaacagaaagtgacacattggagtatgcactatgaactatgagagcacaaatgagaaacatgttttgtaagaaatgcatagagggagaactacatggatatgagatatttaagctggaccctcaaagatgacaaacacatcactaagtcttgatgatcttagctcctaaatacgtctctaatctctctgcttttttccatctctgctgctagaccctcatcagagctgacaacatgtccagcctgcactactgcaagaacttctttgtctatggtagtgtggtcaactgaagaagccggcttagttgctccagtcaggtgctcacactaagaaaggatgggtgaaggttataaagtggctgtgaatgagaactcgg

SEQ ID NO: 14428 - DNA, 488 bp, Homo sapiens
  MAP TO AC006484.2; EXPRESSED IN PLACENTA, SIGNAL = 0.77; EXPRESSED IN LUNG, SIGNAL = 0.72; EXPRESSED IN BONE MARROW, SIGNAL = 0.78; EXPRESSED IN ADULT LIVER, SIGNAL = 0.82
aatggtttggagtctaaatactgtcatttttttcagatgaaataaggagaaaatgccaactgatttctatttaaaaaagtaagtagatggtgactgtttcatgctgaaaggggctcgcttagttttaactaattatattaataaatcctgtcagatatataagcctgtctcaatccacctttttaagttttctttaattcctatattagacagaaatggcaacgttaatgctggagtaagaagcacctccaaaaattttagaaacttgacttacgattttttgctcacactacatgcccaacatgggccagcagggagctctgctcatctctcaaccaggctcagagcaactccattgcaacaaagcttccgtgatcatcttagctggaagacggggtgagacttacactggatcttagagctactgcctggaattgacacttctgttaccatttcaatgaaaatacatggctgggcctaagttcaaa

SEQ ID NO: 14429 - DNA, 488 bp, Homo sapiens
  MAP TO AC004465.1; EXPRESSED IN LUNG, SIGNAL = 0.92; EXPRESSED IN FETAL LIVER, SIGNAL = 0.77; EXPRESSED IN BONE MARROW, SIGNAL = 0.86; EXPRESSED IN PLACENTA, SIGNAL = 0.8; EXPRESSED IN ADULT LIVER, SIGNAL = 0.81
aacagagcccaagaatttgcatttctagtaagttccaggcaataccggtactgctggtctgtggattgcattctgagaaccgccactttatgcaatgctagaaaatcaaacccaggagaccaaatgttctggttcatggtttcccttctagcaacactgtcttgtcctgaatcacagctagtaattcaggcatgctgctcaacctctaccagaaactggggaaagccaggggaggctgagggcttgttgcctttcccttttcttgtttctttccttttaaaaaataatccaccacttaagagactgcccctgagcacttactgcttgctcttccaccagcggcccaaacccttgcctgcaatgcaggtcttcttaaatattgaataagcctgccgctccaccagctgccgcggctggggctgaggtaatgttgatattgacaaaggcttaatgtgattaatcaggttagaaagatcaggctgcagagc

SEQ ID NO: 14430 - DNA, 493 bp, Homo sapiens
  MAP TO AC004529.1; EXPRESSED IN PLACENTA, SIGNAL =  11; EXPRESSED IN BONE MARROW, SIGNAL =  48; EXPRESSED IN ADULT LIVER, SIGNAL = 4.1; EXPRESSED IN LUNG, SIGNAL = 1.7
tcccaggtgtttccattcagtgatcaggactgaacacacaggaatcaccatggagtttgtgctgagctgggttttccttgttgctatattaaaaggtgattcatggagaactagagatattgagtgtgaatgggcatgaatgagagaaacagtgggtatgtgatgtgtggcaatttctgacctttgtgtctctctgtttgcaggtgtccagtgtgaggttcagctggtgcagtctgggggaggcttggtacatcctggggggtccctgagactctcctgtgcaggctctggattcaccttcagtagctatgctatgcactgggttcgccaggctccaggaaaaggtctggagtgggtatcagctattggtactggtggtggcacatactatgcagactccgtgaagggccgattcaccatctccagagacaatgccaagaactccttgtatcttcaaatgaacagcctgagagccgaggacatggctgtgtat

SEQ ID NO: 14431 - DNA, 475 bp, Homo sapiens
  MAP TO AC006406.1; EXPRESSED IN PLACENTA, SIGNAL = 0.7; EXPRESSED IN ADULT LIVER, SIGNAL = 0.55; EXPRESSED IN BONE MARROW, SIGNAL =   1
gaagacctgtgaaagccaggtgtgagacagccatgggaatgcagaaagggaatgactttatatgatattgcaggagtagaaatgaaagagttgttgaccatgtggccacaatggggagaaagacttaggcatttcacatcatgtcagtttttagaattgagcgatcgagtgccattaacttaaagaagagagggaaatggtatttgttcctgttcaacatctgcttgatttccatctgggttttgtctctccctccccactttcagtccatgagaaggtatccaagacccctgaaaagggtgaggccaggcctaaggagaacagagcagcccattggattcctctggccaatgtgattggctcagtgttagacatgggacctaggccagtccagtcgaatgtctctcagagctgctgaggatgctgggaaaatcacctccatcatagcagcacagctttgccctagattttctgc

SEQ ID NO: 14432 - DNA, 450 bp, Homo sapiens
  MAP TO AC004132.1; EXPRESSED IN BONE MARROW, SIGNAL = 0.58; EXPRESSED IN ADULT LIVER, SIGNAL = 0.43; EXPRESSED IN LUNG, SIGNAL = 0.54
ccagggccgctctaaatgcagcctgtggacacgctttttgcttcctgttctgctcagcagtgctttaactgggcagtgtgttactggattgatgattgaccaagactgcacacctcaacgttagcaaacacctggaagcttgtttgcagggcctggcttttctcttgtctccaacaccctagtgcatgtgctgtgtcactatcatcagaggtccaaattcaagagtctgttttcttgttaatataataacatgtccatcacggatcttggtcccccaaggcaagagtggagtatggttaaaaaggaatgcagggaagggaaccagtatgtgcaagtcttggctcggtcattcaccagcagtagtgtggacaaattgcttaacctcagtttcttcatctgtaaaatgggggataatgatgcctacgtcatagggttggtgtgaagattgct

SEQ ID NO: 14433 - DNA, 454 bp, Homo sapiens
  MAP TO AC005666.1; EXPRESSED IN PLACENTA, SIGNAL = 0.74; EXPRESSED IN ADULT LIVER, SIGNAL = 0.53; EXPRESSED IN LUNG, SIGNAL = 0.75; EXPRESSED IN BONE MARROW, SIGNAL = 0.71
caatgctcaattagacaacctctctttagaggttgacttcagaccatgcataatatagtgagatgatgcttaagggttaaggtaacttctttctgaatcttttgtgcagaaccactgggacatgatcctcctggaaaccataatgaactggtattaaacccaaataaaatctgaacaaactctccactagaatagtctttagcagaagtactaggtactttgagctttataagcatttttttctttgcccccttacctggtgtgtgctgaatggtggcccttcctgcacaaatactactgaagatggagatggattatgatttaggtgctccttcagtttgacatgagcttgctggatggctgcagattcctgtattgtgctattttcaacaggctgagctgtgtggatggtatagatgtactcaggtgactgtggtagagagcaggcaactgc

SEQ ID NO: 14434 - DNA, 491 bp, Homo sapiens
  MAP TO AC006359.3; EXPRESSED IN LUNG, SIGNAL = 0.49; EXPRESSED IN BONE MARROW, SIGNAL = 0.57; EXPRESSED IN ADULT LIVER, SIGNAL = 0.57
actggatgtcaccatttggcccgcaaatcaaccagtcccttagctcccacccagaagctgactcaatgcaggagggcattttccacacccctgtgatttcatccccaacaatcagcaccgcccaagccctagccccctccccaccaaactgtctttgaaaaaacccttacctccaagccttcagtgagatcgttttgagtaataactccgtcccccacatgtcgtggctggcctgtgtcaattaaactctttactgcaatgccatggtctccatgaattgattttgtatgtacaatgggcaggaagaacccatcaggcagttgcacctgcaggatggtgccagttctttccacgaaggctggtcagatacccagaaagtatttctccactactacctggacgatgtgtctctctgtcagtctccagggaatggggtctgaatcaagtatttagtattcagcagttactataccgtcacctaatccctcatt

SEQ ID NO: 14435 - DNA, 474 bp, Homo sapiens
  MAP TO AC005016.1; EXPRESSED IN PLACENTA, SIGNAL = 0.66; EXPRESSED IN ADULT LIVER, SIGNAL = 0.54; EXPRESSED IN LUNG, SIGNAL = 0.65
ctgaattcccacctaccgtgggagcacaatactagatataagagctgttctggaattccaaagatgaacaagcataggaagaatacagaatgccagctataaaacaattgaacaaacacatttccccttttcccaaaacaatttacatgcagttattttgtggcatctatgactattaatacatagatactttacataattaagttagaatatacaaaattcaattatttatgtttctataactaaatgattgttccttgttgtaaaactactttcctgaaaacccataatcatatcagtttaaatctaacaataacatttattgatctttactataatttcaaacttcctacagaattaattttagcctacaatataaatgacagccatattcgaagtaaagcacatgtatgtaaagaagcaaacttggtaagaggaggcaataaactgaaagatatcctgaaaaataatgtt

SEQ ID NO: 14436 - DNA, 462 bp, Homo sapiens
  MAP TO AC004033.3; EXPRESSED IN LUNG, SIGNAL = 0.51; EXPRESSED IN ADULT LIVER, SIGNAL = 0.45
gagcagagcctgggagtgctgtgcgctgcggtaggtgttgttcacgcagtgtgggtgtgagggctgtgcaggcaacttgcagagctgggtgaactcctgctcctctgccatcctgacagccacaagatcccttacaactgtggcctgacagttggcaaaacaggggacaggggtgagcaggcaggcatcagccccaccacacacagactggccagctctgttgctccccttgctcctgtgcctccctcaggctcacctgttttccctctatttccaaatcccctaattccttctcccctcccacctctagtccaacttcctgatggccttcttcctgatgacctgtgtgccatcatgcccaagactcttcatctcattgtatcttcttcagcggcaaagtcaaacagaagggttttgggaaacagactgacctgggttggagcccaactccacagggactta

SEQ ID NO: 14437 - DNA, 496 bp, Homo sapiens
  MAP TO AC005589.1; EXPRESSED IN ADULT LIVER, SIGNAL = 0.46; EXPRESSED IN LUNG, SIGNAL = 0.45; EXPRESSED IN BONE MARROW, SIGNAL = 0.52
ggaaacagaagagaagggagactctccaactcattttataggtcatcattactctgataccaaaaccaaacaaagacagcacaaagagaaaaacaaccacaagctaatgtctttcatgtacatagatgtaaatacctaaataaagtgttagcaaattgaatatagcaaaatataaacaaacaggtagggtttatgcttggaatgcaaggatggttcagtattagaaaatcaatcaatgaatttcaccatgttaacagcctaaaaagaaaagccatatgatcatatcagttgatgcagaaaaggcttttgacaaaattaaacatctgttcatgatgaaaactttcagcaaactaggaacagaaaggtgcatccttaccctgataaaggcaatcaacaaaaaacctacagctaaaatcatacttaaagagtgaaagacaatgttttcccttattcccaataagggaattcccaataagggaataaaggaaaatgtcca

SEQ ID NO: 14438 - DNA, 489 bp, Homo sapiens
  MAP TO AC005668.1; EXPRESSED IN LUNG, SIGNAL = 0.6; EXPRESSED IN BONE MARROW, SIGNAL = 0.64; EXPRESSED IN ADULT LIVER, SIGNAL = 0.56
aacctaagcaaacgccagtggttggaatcatctaaagaaagacctgatgattatccagtcaactggaaggtcctcagagtcagcctcaacagctctctcttctttgtaccaacacctgcttgttttcaagatctgtccattctacatcccaaatgcttcccctgtgaattccttctctccatcttcacccaattcttccttggtacaagctggcacccacagcctccttactaactggaattcctacttccagtctcaccttctcctccctgaccctcaccccaatccgtcaccaagtgtacttgcaaaaaatcaaatacatgctcattaatgcccttctgctcacaacttgtctgtggcttcccactgccctccaggtagattccagcttcctgggcatggcattccaggcccttcacgatcgggtctaaagcgtgaatctaaggaagaagagagcttatttctcatgcagaccatttgtccccaagt

SEQ ID NO: 14439 - DNA, 366 bp, Homo sapiens; identical to SEQ ID NO: 10662
  MAP TO AC005681.1; EXPRESSED IN PLACENTA, SIGNAL = 0.71; EXPRESSED IN LUNG, SIGNAL = 0.55; EXPRESSED IN BONE MARROW, SIGNAL = 0.58; EXPRESSED IN ADULT LIVER, SIGNAL = 0.59

SEQ ID NO: 14440 - DNA, 392 bp, Homo sapiens
  MAP TO AC003098.1; EXPRESSED IN LUNG, SIGNAL = 0.62; EXPRESSED IN BONE MARROW, SIGNAL = 2.6; EXPRESSED IN ADULT LIVER, SIGNAL = 0.49
ctgggttgcaggcatttacaatgaaatataaacaatcaaaccacgcgcagaggacagaaatgtggggcgcgggttcagggccggggcgcccgccggtggggaggggcgcgggcgggctctagtaggcgttctccagctcggcctggttggctttggcgctccgggcgcggggccgcggcttccggcccttctgcggccgagcggcctcggtcccgaagtccttgagctccgactggttgtggaagcgggtgaggcgcttgcacttgcacgaggccaccaggcgcaccttgcgcgcgcgcggcgcctcaccaccgggacacagcagctgcacgcgctgcgcgcggtagcggtcggggatgcagcggaagtcgggcccactaggtcgccaccac

SEQ ID NO: 14441 - DNA, 461 bp, Homo sapiens
  MAP TO AC004912.1; EXPRESSED IN LUNG, SIGNAL = 0.57; EXPRESSED IN BONE MARROW, SIGNAL = 0.5; EXPRESSED IN ADULT LIVER, SIGNAL = 0.48
cttgccgactatcccatgtcttactgaccttttatcatttcctggccctacagtatcttttatcatatgagaaagtttagacatccggaaacaaccaagtctgacattttccctaggaaaaagaaggagcatctcccccagcctcatcttgaactcaagctgagttgtctaatggtctagtttgtgtgtgtgtgaggccttcacagaataaggtaagtgggccaggaggtgctgccagcaaggaatctaaatggatgtgttctgggaagaaaatgccccatgaattatatgcctcaggggacccgtggacaccatggagtgccagaatgacctcccctcccatgtcagcaaccacaccagggcttcccgctactgcatggctgaattgctgcaaaaacacttccagataaatcttccccaaatgccatcagtccctcttctgcgtaagaatggacaatggc

SEQ ID NO: 14442 - DNA, 475 bp, Homo sapiens
  MAP TO AC005229.1; EXPRESSED IN ADULT LIVER, SIGNAL = 0.54; EXPRESSED IN LUNG, SIGNAL = 0.52
acgctgcagttgctacctctatgagaccttagagttctctttttatcctgttacaactttataatgaacacatttttacctagttaacactttttatattaaattcttactgttcagctaacttgtgtgtatactatctcttggccagaccctgactacactggtgaacttaaatagaaaactaacttcttgaaatgatcctgggtggtttataggataaacagaatggcctgagaacgaggcttaaacagatggaagcccagccatgttcatcctgcaggaatcatctgggcaagacaagctcctaatgcctttcacattgctgcacccaccatcaccaccacaaatcccaacatgcagaagattatgaacagacagataaggctcgctctgcagataggtagggacaggacagtaaagaaattcggaggcaagtttttagacagttacacttttcttagattcatctctccaa

SEQ ID NO: 14443 - DNA, 479 bp, Homo sapiens
  MAP TO AC005192.1; EXPRESSED IN LUNG, SIGNAL = 0.59; EXPRESSED IN BONE MARROW, SIGNAL = 1.2; EXPRESSED IN ADULT LIVER, SIGNAL = 0.63; EXPRESSED IN PLACENTA, SIGNAL = 1.4
tgtcttatatatggtgggaacacaagaaatatttgttggatgcatttacttggaagggaaatgttaattgttttgctgtagtacatcatcttgtagtcagcatttctgggttcgatttttgcatgaaaacatgtgtttatgtgtgcctagtccctaaataccatgaagatttacattgccttatgcaactggatattttccaaatgtagactgttctttgttagctctatatgaggtcagaaaagaaaaataataataaaggaaacaaaattgcttttcttgtccaggactttttttatgaagacatggagtccttgacgcagatgcttagggccttggcaacagatggaaataaacaccgggccaaagtggacaagagaaagcagcggtcagttttcagagatgtcctgagggcagtggaggtaggcttcttaaatgctgtaatagcttctcattttgaaattggattgtttcaggct

SEQ ID NO: 14444 - DNA, 496 bp, Homo sapiens
  MAP TO AC006322.2; EXPRESSED IN LUNG, SIGNAL = 0.73; EXPRESSED IN ADULT LIVER, SIGNAL = 0.55
cctaatgggaaaatgctatcacttctcttaaattaaaaatttttattaactgttaaaatgtgcctcaacacataatctaaagttttacagacacggagtttcagagcttctatttcttttaaatatgtatattttacactgccttttttttaacctgctagatcagagtggatgatcatatcatcaggacagatcaaggccttctgctacgtagtctacaacagaaggattcaggcaattacctctgccatgcggtggaacatgggttcatacaaactcttcttaaggtaaccctggaagtcattgacacagagcatttggaagaacttcttcataaagatgatgatggagatggctctaagaccaaagaaatgtccaatagcatgacacctagccagaaggtctggtacagagacttcatgcagctcatcaaccaccccaatctcaacacaatggatgagttctgtgaacaagtttggaaaagggaccgaaaaca

SEQ ID NO: 14445 - DNA, 475 bp, Homo sapiens
  MAP TO AC005384.1; EXPRESSED IN PLACENTA, SIGNAL = 0.69; EXPRESSED IN LUNG, SIGNAL = 0.77; EXPRESSED IN FETAL LIVER, SIGNAL = 0.78; EXPRESSED IN BONE MARROW, SIGNAL = 0.88; EXPRESSED IN ADULT LIVER, SIGNAL = 0.79
aatgcaaattgctggtttccctagtaaacccagtctccctaggcccacatatggctgcatgccccgccatgctcaggatgtaagtcttcctacgtgggcggcttccctcattgactcttcctgtctcctgacctccatcctgcaaacatggactgggaacttctaaactgcagtctggttattcactcacccatccctttgctccaggtactccttggtcctctgcctaactgtctttgaagatgtcctactctgcgggtgaaatctcttcctggctgtttcccaccacctgcccttccccttctctatgctttcctgcagctctgccttgggggtgaggttgctgttgctgcccatggcttggccccttggccagatgttgagggcagacacacagtacccagaccagtgcccagcatcatggagaaggtctcagtcactccttcagaatccatcgcagttgcacaaataggaa

SEQ ID NO: 14446 - DNA, 476 bp, Homo sapiens
  MAP TO AC005165.1; EXPRESSED IN LUNG, SIGNAL = 0.61; EXPRESSED IN FETAL LIVER, SIGNAL = 0.67; EXPRESSED IN BONE MARROW, SIGNAL = 0.62; EXPRESSED IN ADULT LIVER, SIGNAL = 0.6
aggcaagctctaaacaacctgtaaggacaaagtacacaataggaacgcaaaaaattgggagggaaagcaggcattcagaagattgtgtcaaataagcagatttctgtaatagtggaaagatagagtcagaagtaggagaatgtatgatgaaggggtaggggtgtgtgttgcaagagaaaaatgatattctctcttaaccttttcttttgtccctcccccaactgttctgcaacctgccaaaggggaattagcaaagaaatagacctgctcctatcacacaggtaatgccaagaagcccatggagagaaaaggggaagaccaggaggccaggcccacctttccaccatatttgagcatcaccaccaccactgtcaatcactactaccaaagtttctttctctacaccttttaggggataggacaagttttgtctgagagcaaagttttaaatctgagggaaagacaatcactatgga

SEQ ID NO: 14447 - DNA, 459 bp, Homo sapiens
  MAP TO AC006457.2; EXPRESSED IN PLACENTA, SIGNAL = 0.69; EXPRESSED IN ADULT LIVER, SIGNAL = 0.55; EXPRESSED IN LUNG, SIGNAL = 0.61
tgtgatggcttcagagatggcaggtgtcagcccactggctccgtccctgaggatgctggccaagtgggaagtgggggacactaggagggccccgcagaagccatcgaaggcttcgtggcaaacgagcccagagagtcctgtgctggaggggcagggcctggcagggcgtgggctgcagcccagcttctctgcctggccctgcaggtgatcgctctgactgtgctggcttcagtgctgatctactaccagtaccaccgggtgaacccggtgacccgggagatcgtcatccgagacccacccctacaccctccagcctctgcgccggctcatcgacgcctatgctttccgaatctatggcccctgggcgaggaaggggcagcagcagaactgggcagcccttttcaagaacacacccaaggccgtgctcctctccctggccgaggaggactactgaggggc

SEQ ID NO: 14448 - DNA, 365 bp, Homo sapiens; identical to SEQ ID NO: 5348
  MAP TO AC000379.1; EXPRESSED IN PLACENTA, SIGNAL = 0.66; EXPRESSED IN LUNG, SIGNAL = 0.72; EXPRESSED IN BONE MARROW, SIGNAL = 0.61; EXPRESSED IN ADULT LIVER, SIGNAL = 0.59; EXPRESSED IN FETAL LIVER, SIGNAL = 0.75

SEQ ID NO: 14449 - DNA, 454 bp, Homo sapiens
  MAP TO AC003657.1; EXPRESSED IN LUNG, SIGNAL = 0.64; EXPRESSED IN BONE MARROW, SIGNAL = 0.52; EXPRESSED IN ADULT LIVER, SIGNAL = 0.42
gatcattttatgatttctagtttcagctggatttttttaaaagtatgatttgacattgttcaggccaagcattgccttagaacagcattttggatcttgctgcctttccccttccacctctctcccttttgtggtttccccagcaagatgcttttcaagcttttgtgtactatgtatcagaatcccctagagggcttgttaaaacgcagatggctgggcccccacccagaattcctgatcctgtatgcctggggcggctgagaattcttgtttctaacgagctcccaggagatgctgatgctgctgggccagggggcccaatttgagcttcactttcctctggcatcttttgaatcctttgagcttccatccacccccatctttgtgatgcatttacagttgcctcatagtcacatagccgtgggtcgaagttcccatgcagaagatgcaaaag

SEQ ID NO: 14450 - DNA, 478 bp, Homo sapiens
  MAP TO AC005832.1; EXPRESSED IN BONE MARROW, SIGNAL = 0.7; EXPRESSED IN ADULT LIVER, SIGNAL = 0.41
tggacacttcctatcccttcctccacattagtacctccttctcatttctgcttccgggtaacttatattaagaacttagtctgtatctctccacattttttttttctgtgcttagacaatcctgtataatacacacacatatatttacacacacatatatatataagagggtctttctgtcattgaagtgcaaaaatggaatcatacatacttttctagtagtgtgttaaataaaaatactagatcatgatttaagattgtctgtatattatcttgtagaccacgttagagcatgcaaggcctgaagaacccagctgggatgaagattttgcagatgtgtaccatgacttaattcattctcctgcctctgaaactctcttaaatttggaacataattactttgttagtatctcagaactgattggtgaaagagatgtggagctgaaaaaattacgagagaggtatttcaaatttcttg

SEQ ID NO: 14451 - DNA, 395 bp, Homo sapiens
  MAP TO AC004041.1; EXPRESSED IN BONE MARROW, SIGNAL = 0.49; EXPRESSED IN ADULT LIVER, SIGNAL = 0.41; EXPRESSED IN LUNG, SIGNAL = 0.43
tatgtgcggcagagatatggaaggaagagaggggttttctttagtaccaaagccctaaataataagcaaggagagactctgttataatatactgattgctaaggagaatgatacttaacctatctaaagaaatctatgacttttccacttcaggttgttaaaagctaaaaaatggtcctcatttgtcatttttcttttttacagtgaacatcagaagttggaagagaacatagacaatataaaaagaaatcataatttggcattagggcgacagaaaggttatgaagaagaaattattcattttaagaaagaacttcgagaaccacaatttcgggatgctgaggaaaagtatagagaaatgatgattgttatgaggacaacagaacttgtgaaca

SEQ ID NO: 14452 - DNA, 477 bp, Homo sapiens
  MAP TO AC006412.1; EXPRESSED IN BONE MARROW, SIGNAL = 0.5; EXPRESSED IN ADULT LIVER, SIGNAL = 0.46; EXPRESSED IN LUNG, SIGNAL = 0.59
aaaccgtggcttgaactgagaattaaggaacctaagcttgttattttctgttcgtaatcactcaaggaccctcaactgaatccattccaccccacagtccttacagttatcttgactgccataacattcagtgcagcagtcactcgggctcccaaggcacgtgtttcagttggcactttgccacaatcaaccacaggtcattgcttgattaattgtgataccactgcatgtcataggttgctagtatcccattgcacattgacaaggagctgcggaatgtgcccaaacataaaggaatgaccaacacaacctcccagattcatctctgtggaaatatctcttggaacaatgccagcattaattctttcagtgagggtccaatcaggaggcagacaaaacacaagaatttgaggagggaatgtttgaagtggacatttatttactataagtggattgcaatccagagcttgttagagg

SEQ ID NO: 14453 - DNA, 441 bp, Homo sapiens
  MAP TO AC004049.1; EXPRESSED IN ADULT LIVER, SIGNAL = 0.46
ggagacaagagaggagcctgtgccatagggattctagaagagaacagcgttgtgtcccagtgtgcatgctcgcatcacttaccaagagcggctgagagcctgagatgtttggagtgtttttttctcacagacccgaatagcctgcccctcagccaccctctgtgccctcctgagaacaggctgatatgcccaagatagtcctgaatggtgtgaccgtagacttcccttcccagccctacaaatgccaacaggagtacatgaccaaggtcctggaatgtctgcagatgaatggcatcctggagagccccgcgggcacaggcaagacgctgtgcctcctgtgcaccaccctggcctggcgagaacacctccaagacaccatctttgcctgcaattttgccgatagggtgcaaggggagcttctctcagatcaggcctttgtca

SEQ ID NO: 14454 - DNA, 479 bp, Homo sapiens
  MAP TO AC004080.1; EXPRESSED IN PLACENTA, SIGNAL = 0.62; EXPRESSED IN ADULT LIVER, SIGNAL = 0.42; EXPRESSED IN LUNG, SIGNAL = 0.43
cgcacatacccacatctcaccgcagcccgggtcagatgggggctcccctcccgaggcccccttcccctgagcctctccctcctgaccccgaccctcgaacccaggcccagccccggcccacctcccgcgcctcccaagcggcgccacgtaccggcgctgacatggatcttcttcatccaggggtacaccacgggctccttgcccttcaggcccagcgggctcttgtcggccaagagcagcgggcacgcgggggcgctgccccctgccgggacgcctggggtggcgggggccgcctcgcagcgccgcggggccgctgggggcacggcgcgaggctgcaggggcggcggcagctggggctgcaggacgtggctcgcatgcaggccgtgcgctgggcccttggcttgcgccgggggctgctcgggctggggcggccgcccggggctggcgccgccgcggtagccataggggtaggcggtgtc

SEQ ID NO: 14455 - DNA, 460 bp, Homo sapiens
  MAP TO AC006313.1; EXPRESSED IN PLACENTA, SIGNAL = 0.61; EXPRESSED IN BONE MARROW, SIGNAL = 0.58; EXPRESSED IN ADULT LIVER, SIGNAL = 0.56; EXPRESSED IN LUNG, SIGNAL = 0.63
attgcctgctcatgctattgggttcttgcagcatctcccacctacattccctgttccgcgtgctacttatgtctcgcttgtctttctgtgcctctcacatcattaagcactttttctgtgacacccagcctgtgctaaagctctcctgctctgacacatcctccagccagatggtggtgatgactgagaccttagctgtcattgtgacccccttcctgtgtatcatcttctcctacctgcgaatcatggtcactgtgctcagaatcccctctgcagccgggaagtggaaggccttctctacctgtggctcccacctcactgcagtagcccttttctatgggagtattatttatgtctattttaggcccctgtccatgtactcagtggttagggaccgggtagccacagttatgtacacagtagtgacacccatgctgaaccctttcatctacagcctgag

SEQ ID NO: 14456 - DNA, 471 bp, Homo sapiens
  MAP TO AC005030.1; EXPRESSED IN ADULT LIVER, SIGNAL = 0.57; EXPRESSED IN LUNG, SIGNAL = 0.46
cttcctggcgaactcttgacctgactgcatcttacctcctccggctgcatttttctctgtgctccatgctgacctagacgtggaactcaatcctttttccttaacacgcaacccccttcatccccacttcactcccacagagaactgttcgtgaagattttcagggcagtaggtgaaggtttatatcccagcaaaacatttaaatagggtatcaggatccatgttcttaaaaattctgaagccactctgccactggaaggttcttcttgactgcattattacgccttaccaagttgggcacccctcactccctcacctcctcttcctcctcttccttctcctcctctttctttttctccttgccatccatcagttcaaaattcgtcttcatttcttcagtgaggctttgattgctgcttccttcttacccatgcctccttgagcctcacctcttttaccccaggcaactca

SEQ ID NO: 14457 - DNA, 456 bp, Homo sapiens
  MAP TO AC006321.1; EXPRESSED IN LUNG, SIGNAL = 0.52; EXPRESSED IN ADULT LIVER, SIGNAL = 0.52; EXPRESSED IN PLACENTA, SIGNAL = 0.58; EXPRESSED IN BONE MARROW, SIGNAL = 0.6
gatgtccgcaatgtcacaacaaaggcctgtctcatctgtgtcatcaggctgaggaggggatgttgacctgcagatgacatcacggcggccacacacgtgcctggggctgctggagatgctggttggggaggagtttggccttctgaggaggaagtcccagagcagactttggctcaactctaaggtacatttgagcttgtagagggatccccgccgctctcctgcctgtgagctcgcccttgggcttggcagccgtggtgcctcctgcctgtgaacgcccctctcctcctttctgtgaacgtccctctccttcctgtgaacgtcccagactctcctcctgcctgtgaacgtccctctcctgcccgtgaacgtccctctcctgcccgtgaacgcccctgtcctcctgctccgctctctcgacctttccttccttttgttggagaataaagacctgcg

SEQ ID NO: 14458 - DNA, 491 bp, Homo sapiens
  MAP TO AC006461.2; EXPRESSED IN PLACENTA, SIGNAL = 0.67; EXPRESSED IN LUNG, SIGNAL = 0.68; EXPRESSED IN ADULT LIVER, SIGNAL = 0.62; EXPRESSED IN BONE MARROW, SIGNAL = 0.71
aaaaaggacttcgtatttttacagcaattttaattttaccacaaaattaagaggaatatacagagatatcctaggtacttcttgccccctctacatgcatagcctccctcattattcgtattccccccagagtggtatgttacatgtgataaacctacactgacatatcattatcacccaaaattgataatttgcatgagggctcactcttgatgttgtatattctatggatttgaacaaatatctaatgacaagtatccatcattatagtatcatacgtagtaattttgatgccctaaaatcctctgtactccacctcttcattcccttcttgccccaacccctggcagccactgatctttttcttgtccccctcattgtgccttttctggaatgtcatgtagttggaatcatgtagtatgtaacctttattagactggcttctttaacttagtaatatgcatttaagtttcctccataatttttcatgg

SEQ ID NO: 14459 - DNA, 467 bp, Homo sapiens
  MAP TO AC004099.1; EXPRESSED IN ADULT LIVER, SIGNAL = 0.71; EXPRESSED IN BONE MARROW, SIGNAL = 0.59; EXPRESSED IN LUNG, SIGNAL = 0.55
ttttggattccttggtggaggaaaataaaacactctggtcttgccgccaacgatgcaagtgtgactgctggcgtcttcatgagctccagaggtcacagcacgctaccaaggactctcatggcccctcggatgatttccgagggagacataggaggcattgctcaaatcacctcctctctattcctgggcagaggcagtgtggcctccaatcggcacctcctccaggctcgtggcatcacctgcattgttaatgctaccattgagatccctaatttcaactggccccaatttgagtatgttaaagtgcctctggctgacatgccgcatgcccccattggactgtactttgacaccgtggctgacaagatccacagtgtgagcaggaagcacggggccaccttggtgcactgtgctgcaggggtgagccgctcagccacgctgtgtatcgcgtacctgatgaaattcca

SEQ ID NO: 14460 - DNA, 470 bp, Homo sapiens
  MAP TO AC005495.1; EXPRESSED IN ADULT LIVER, SIGNAL = 0.97; EXPRESSED IN PLACENTA, SIGNAL = 0.74; EXPRESSED IN LUNG, SIGNAL = 0.72; EXPRESSED IN BONE MARROW, SIGNAL = 0.59; EXPRESSED IN FETAL LIVER, SIGNAL = 0.73
gggcctgtcagtcttggttactcatgtgtcctttgacacatgcatctgcatgctcaacacatatatgttggatgactctacaatttttgcagtcatcctgtagtaggaacatacgattgaccttgaaataagttcagcaatgaaatgggctttccctgttttctcatgtgtcattgaaagcatctctgttgcccaacctcctctgttctttatgttgaaaacatgaaaaattccataatgatatttgatatggaaagtcacctgagaaatcttctttccaaagtggactgttatatccctggaaaaatattaacttataagagaaagtttcattaaagatgattcccatagcatatggtaaattttccagaagtatttcgtccatgtgtgttttatttggtgccccaatgacacttgttcctgtgaattacaaggtaaaaatagacatagaaaattgtaagagttttgcc

SEQ ID NO: 14461 - DNA, 401 bp, Homo sapiens
  MAP TO AC005691.1; EXPRESSED IN LUNG, SIGNAL = 0.59; EXPRESSED IN BONE MARROW, SIGNAL = 0.59; EXPRESSED IN ADULT LIVER, SIGNAL = 0.55
ttcagctagtctgagctttttgtcagagcagggcctgagcaacactgaatgtccccggggtaagcccccactacctgcagaggcatgagtccctatcatttttccagttctcctgggaacccttgtggagtccattctccacccccatcttcagcttcccctcactgcaaacttccacttttgtgtgaggctgtgaggtgtttctcttgccgccacatccattccctgaggagacaaagcggccagcagcaggtgcaggcagataactcttgtcatcttcctccatttcctgcaccaggggcttcagagacttggcagtatggtgggaccacggactccggtacatggacctgagcttaagtcccagctggctgccatcctgcgggattgctgtgtaatct

SEQ ID NO: 14462 - DNA, 452 bp, Homo sapiens
  MAP TO AC005701.1; EXPRESSED IN PLACENTA, SIGNAL = 0.78; EXPRESSED IN BONE MARROW, SIGNAL = 0.68; EXPRESSED IN ADULT LIVER, SIGNAL = 0.56; EXPRESSED IN LUNG, SIGNAL = 0.62
aaggatcctccaactttcccttgtattccctaccatgcattccacattgtgggtccccagttaagagtggttgaaatgaattgagttattactaactagatacatatttgtacatctaaaacaaccctttggattatggatgaaggataacccattatcctggacaataagtaagagatagagaaatcctgggaggaaaaaccacatgtaccttgagcacaaagttgtcctcagcctggagcttcagatccactatcgccttcctaaccaaagcttcgaagttggggtctctcctccgggggacatccagggcgggaaagaggtccccgatcaggcccatgaagatgggcatgtcatcagtcacaatcttggggatgttgaaatcccgcaaggagcgcatcaggacctggtcctcaggccggtcagggtctcctctcttcagggatcctgcc

SEQ ID NO: 14463 - DNA, 364 bp, Homo sapiens
  MAP TO AC004746.1; EXPRESSED IN ADULT LIVER, SIGNAL = 0.63; EXPRESSED IN BONE MARROW, SIGNAL = 0.52; EXPRESSED IN PLACENTA, SIGNAL = 0.64; EXPRESSED IN LUNG, SIGNAL = 0.63
tccataactttacagtgtggattttactttgtttttaaaaagcaaattgtatttgaaacaatgattccaaatattgtgcgcattaatattgatttgtgattgattaaataaatcaaaaattctaataggagtgttacatggaacaactaaagaaaactagaaaaggaaagagtagtatttacaagatattttcttttagaagcaaccttttgcatttagattgttttcgatgttatcaaaacattagataaggtttttcgaaatgtcaacataggtagcttcctggtcaacaaagccagcattactcctttatttacacaaaagaagtgggttcacagactggcaaagagtgatatctagtggg

SEQ ID NO: 14464 - DNA, 481 bp, Homo sapiens
  MAP TO AC006206.3; EXPRESSED IN PLACENTA, SIGNAL = 0.64; EXPRESSED IN BONE MARROW, SIGNAL = 0.67; EXPRESSED IN ADULT LIVER, SIGNAL = 0.71; EXPRESSED IN LUNG, SIGNAL = 0.42
atgtgcaaatctgggtgttgtactgaagaggctgaattgaatgcatgggactctcacgagcttggttctgaaacttggctcactggggtcggcttattactgagaaggtgttgagaagcctgacagaacatctgcctgataatttttaagtccatgcttaaactttcgatcacccagttgactatgaactccttgagggagaaaatggaggacatgtctgtttattttgtcctcagtgcttagcttgatatcttgaacatggtagaagctcaaggcagggcgagtgctacttaccaaatatttgctcttagctgcccacgtttcccagcctccatgttgttaggtggtgccatgtgactcatccgatcgaccagctggggagcagaagggatgagtgtcacttctaggttgaagcctaacagagctgatgagagaccctccaccaccagctcttcccttgcacaccagaaggtcgtgtgct

SEQ ID NO: 14465 - DNA, 484 bp, Homo sapiens
  MAP TO AC005036.1; EXPRESSED IN ADULT LIVER, SIGNAL = 0.47; EXPRESSED IN LUNG, SIGNAL = 0.5
tttacagtgaaagaaaggaaggcctttatttgcagggcaaggagaattgggcagctaacacttaagtcttgacctccccaatggcttgcaagtaagagttttttaaaggcaggggtaaattccagcaggagctatatgcaaaatcataaatcaatacacagaggtcacacattggtttggccaggtcataggtagattccaagattttctgtttgcaattggttaagaaaggtttgtttaaaaatttggggtcaccagaaaagaatgttagctctggctcttgagtatgatttcctccaggcccctcaggaagaaatttaggacaaggaacagtggtcagagttgtctttggttccccattttcctgagatctatgtgcctgtggatccattgggcaggagtccagctttatgagaaacaactcagggacatatgctgagatgtcatctttagttttgtaaccacttgatgggttcatcttgcc

SEQ ID NO: 14466 - DNA, 455 bp, Homo sapiens
  MAP TO AC004958.1; EXPRESSED IN PLACENTA, SIGNAL = 0.75; EXPRESSED IN BONE MARROW, SIGNAL = 0.65; EXPRESSED IN ADULT LIVER, SIGNAL = 0.65; EXPRESSED IN LUNG, SIGNAL = 0.61
gaggttgatactgtttttcgcagttaataaatagtgaaactgaggcacagagagcttaaataatgcccaggatcattcagtttaggaaggggtggagctaggatttgaacataggaaatttgtctcgaagatctggagttttaaccactatcctatgcaacttttcataagcaactgctcacagttttaaaacagagggaaaactcttggacaaagcaattgagcatagcattatattattgtcttgtaagataataacatgtctttccagataataaaaatctgttggtagggccatatcttcctcagagtcccttttggttctcctggaggtacctgtgtacacagtaggggttcaggacttggtggtggtggtggagacggtgaggcatgcagggaaggccagggaaggacaaaaaggacagcctgaaagcagtttgctaaggatggccctt

SEQ ID NO: 14467 - DNA, 531 bp, Homo sapiens
  MAP TO AC002300.1; EXPRESSED IN PLACENTA, SIGNAL = 0.77; EXPRESSED IN LUNG, SIGNAL = 0.7; EXPRESSED IN BONE MARROW, SIGNAL = 0.61; EXPRESSED IN ADULT LIVER, SIGNAL = 0.67
  unsure 213
  unsure 214
  unsure 215
  unsure 216
  unsure 217
  unsure 218
  unsure 219
  unsure 220
  unsure 221
  unsure 222
  unsure 223
  unsure 224
  unsure 225
  unsure 226
  unsure 227
  unsure 228
  unsure 229
  unsure 230
  unsure 231
  unsure 232
  unsure 233
  unsure 234
  unsure 235
  unsure 236
  unsure 237
  unsure 238
  unsure 239
  unsure 240
  unsure 241
  unsure 242
  unsure 243
  unsure 244
  unsure 245
  unsure 246
  unsure 247
  unsure 248
  unsure 249
  unsure 250
  unsure 251
  unsure 252
  unsure 253
  unsure 254
  unsure 255
  unsure 256
  unsure 257
  unsure 258
  unsure 259
  unsure 260
  unsure 261
  unsure 262
ccatcaccatcctcaccatcatcgccatcatcatcatcaccaccatcatccccatcatcaccatcaccatcgccaccatcaccatcaccatcctcaccatcaccaccatcaggatcaccatcaccaccatcatcacaaccattatcaccatcaccaccatcactatcctcaccaccatcaccatcatcaccatcaccaccatcatcatcatcnnnnnnnnnnnnnnnnnnnnnnnnnnnnnnnnnnnnnnnnnnnnnnnnnnatcaacaccatcactatcaccaccatcaccctcaccatctcctccatcatcaccatcatcatcctcagcaccatcaccattatcatcaccatcatcagcatcatgaccaccatcaccctcaccatcacctccattatcaccatcaccatcaccattctcaccatcatcaccatcaccaccagagcaacattatggtcacccacatggtttcccagacccaagaagcagcccacagatggggtaacagacccaaaggacatgatgacacg

SEQ ID NO: 14468 - DNA, 455 bp, Homo sapiens
  MAP TO AC004918.1; EXPRESSED IN PLACENTA, SIGNAL = 0.6; EXPRESSED IN LUNG, SIGNAL = 0.76; EXPRESSED IN BONE MARROW, SIGNAL = 0.57; EXPRESSED IN ADULT LIVER, SIGNAL = 0.55
ttctgctttaaaactaaggcaatagactagttagccagccagctccaaaatatgattaaaaacaaatcaaaggtgtggacaactggtgctaccagacatggacaatcctcctgccccaggtggagctcagttttcatttctttcctctgcacaaagcagaagcaatgtcttacaaaatccaccaggagaagctgggttggagttggcttgaatgggaagatttttcccaatagtgaagcttctgtttctttcctcttggtcctatatcatcagaacatgatccaacctgatgccgaacagagaccttctgcagcagctctggccagaaatacagttctccggccttccctgggaaaaacagaagagctccaacagcagctgaatttggaaaagttcaagactgccacactggaaaggtatatttttggatgatggggggtcaagaaagaatctga

SEQ ID NO: 14469 - DNA, 461 bp, Homo sapiens
  MAP TO AC006285.9; EXPRESSED IN PLACENTA, SIGNAL = 0.59; EXPRESSED IN BONE MARROW, SIGNAL = 0.59; EXPRESSED IN ADULT LIVER, SIGNAL = 0.56; EXPRESSED IN LUNG, SIGNAL = 0.42
ggaatccctttctgcagagtcggggctcgctccctgccatctacgggcagtgctgcttaaagctgtggctgcagaccttgcctctgcctgttgagacctcctgcagggccctccagcccacagggtccctcagctctctgggacctgtgaggctctttgggccagctgcaactggagctctttgcaggaggggcctctggcctggctgaagtcccggcttcctgactcccctttcccctcaggtcaacaacggttccagcctcagggatgagtgcatcacaaacctactggtgtttggcttcctccaaagctgttctgacaacagcttccgcagagagctggacgcactgggccacgagctgccagtgctggctccccagtgggagggctacgatgagctgcagactgatggcaaccgcagcagccactcccgcttgggaagaatagaggcaggtaggcgg

SEQ ID NO: 14470 - DNA, 471 bp, Homo sapiens
  MAP TO AC006197.1; EXPRESSED IN PLACENTA, SIGNAL = 0.68; EXPRESSED IN LUNG, SIGNAL = 0.63; EXPRESSED IN ADULT LIVER, SIGNAL = 0.57
tgctgcttataggcataaactatttctaacacagacatttactttaaaatgtaaatgattggtagtagcttccagcattattttgcaagcttataacataccattctttaacataagttagtgagtatttattgagccctttttaagggcgagactctgttctagacaccgaaggaatgaatatctggaattgaaatttctggattcagtagatcaatgggatagatatttgggaaagacaaaggaacactgctgctatctcaatatcacataattgacaatgttcacttaggacataaagagttggtgcatgctgtgccctatatttggctgcatgctgaaaagcacaagacttcatccagcacaaccattccacttacacatccaggtaaaggtgatgccactacagcaagttttgtccatttttctttttgtatatgaactcttactgtgactttgacaccttctacg

SEQ ID NO: 14471 - DNA, 460 bp, Homo sapiens
  MAP TO AC005078.1; EXPRESSED IN BONE MARROW, SIGNAL = 0.76; EXPRESSED IN ADULT LIVER, SIGNAL = 0.76; EXPRESSED IN LUNG, SIGNAL = 0.7; EXPRESSED IN FETAL LIVER, SIGNAL = 0.77; EXPRESSED IN PLACENTA, SIGNAL = 0.79
gcgtatgaatgtcagaggtcactacttactccaacaccaactgggtattgggactaaagttagatgagggtatgagagaagtgcacaagggcttacctttttgcaatggctgtgaatccagaatacacttggtctatgcttgggaacattccacccacctacccatgtgtgggtctgcaagcttttcccttgctaggccatgctgcctgcagctggacctctatggatggttgacatgccatatttttctctttctcatcctgcagggtatagatagtcacatgctgcttcaacagcccctcatttattgccactttgctgatagagggaaggacccacattacatgccagtgaaggactgggaagtgctgaagacgattcttacagaaacgttagacaactacaatgaactaaatgctgccatgcacctagttttgtttgaagatgccatgcaacatgt

SEQ ID NO: 14472 - DNA, 498 bp, Homo sapiens
  MAP TO AC005181.1; EXPRESSED IN LUNG, SIGNAL = 0.44; EXPRESSED IN BONE MARROW, SIGNAL = 0.54; EXPRESSED IN ADULT LIVER, SIGNAL = 0.47
gtttgccgaagaacgctaactacctaataccccatggtaatctctggcctgtgaaacatgccaaactctgcctgtttctctcaacctggtggtgacagcttccagctggtcacctgatcaatcatacctgtcattggcctccgtgtctagagcgcgattgcttttgtttgtttgttttcttagtttgcttcactgctttactggcaggctttcttgcttgtccattaaaagccaaatgtgaaagtcgcaaaccacaccatctgggagaaaggaaaaaggcctggcacatctcactggtcttgattctatcaaagctcctagaggctgcaggtattttcctcactgcgatgttttggctgcagttggtagcgatgaaggaagaaaggagggttttgttgttgttctgtttggttttcttttgtttttcagttctctttataactttagcatgaattggagaacaggagaaaatagaggatatatttgagaaggtccccc

SEQ ID NO: 14473 - DNA, 487 bp, Homo sapiens
  MAP TO AC003658.1; EXPRESSED IN LUNG, SIGNAL = 0.62; EXPRESSED IN ADULT LIVER, SIGNAL = 0.62
agcaggaaagttagcccctctctgatagcattgatgtcaagaaacagcagttttcccatatctcttaagtgctactatccaggaagaagtcacacaagaatgactcccacgtttaactttaatgaagatcctaaattggatgaaactattaattaatctaactaatttgcagcactcagggcattgattctaatggccggatagaagtataaaaggtaattccaccatgatgatgagagttaacatgtttgagcatttacaaggtaccaggcccagttctaaagcactacctacttgttatttcacagatatctcaatacttacagcaaacctattaggtgggctccattattatcctcatttttcagctgagaaaactgaagcacagagtcattaagtattgtgtccaaactgtacagctaggaagaggcaagacaggatttagaccctcaaagtccaatactagtgcttacagggtttatcacca

SEQ ID NO: 14474 - DNA, 469 bp, Homo sapiens
  MAP TO AC005224.1; EXPRESSED IN BONE MARROW, SIGNAL = 0.63; EXPRESSED IN LUNG, SIGNAL = 0.76; EXPRESSED IN FETAL LIVER, SIGNAL = 0.71; EXPRESSED IN ADULT LIVER, SIGNAL = 0.67; EXPRESSED IN PLACENTA, SIGNAL = 0.67
tcagggactgccctaatgacaatttcctctgggaggagggtacacggtgcctgtcctctcaatacactcttattgagtaaagagaagccaaaggattttataatggagacaaaacagcaccaaatccaaaccagaatgtaattgacaagctgctagaaaactgtttacggagggaatgtgtgagacagaatctaagtccaccactatacttgagcttgcaatcacttaggaggcacctttacctgcagcccagaccgctgctgtctgctagtgcctctctccgcacctgagcttctgggacttacgatccatccatctgccacatctggaggctgatcaaccacaaacaactcacagccctcactgatgtgcttttgcacttcccatcccccaaacccacatccccaaaagacaccatctgggtaaaatgaggtggcttccatcaaagtcctcaaaaccaacgaaagct

SEQ ID NO: 14475 - DNA, 452 bp, Homo sapiens
  MAP TO AC005612.1; EXPRESSED IN BONE MARROW, SIGNAL = 0.57; EXPRESSED IN PLACENTA, SIGNAL = 0.59; EXPRESSED IN LUNG, SIGNAL = 0.72; EXPRESSED IN ADULT LIVER, SIGNAL = 0.59
gcccatctgtggctcaagcctcctgggaagctctgaccctcagccagggctagaaacctgccttagatacaccagggcgcggcccagagggctgttccaggaaacgtgctgtttcactcacgttgggtaacctggtatttacggacttcttacctactttcctgtgactcaggaatttgtgtcttgagggaaactgtatttatttattttttactgtagtccaaaattgaagacattagagcagaacaagagagagaaggtgagaagctgatccgcctccacttccagatggaacagattgtctactgccaggaccaggtatacaggggtgcattgcagaaggtcagagagaaggagctggaagaagaaaagaagaagaaatcctgggattttggggctttccaatccagctcggcaacagactcttccatggaggagatctttcagcacct

SEQ ID NO: 14476 - DNA, 478 bp, Homo sapiens
  MAP TO AC004013.1; EXPRESSED IN ADULT LIVER, SIGNAL = 0.47; EXPRESSED IN LUNG, SIGNAL = 0.51; EXPRESSED IN PLACENTA, SIGNAL = 0.64
tgatgcccagttgtcagaagaacaaggtcgaaacttagagcttcaggtacttcttgaatctgagaaagttcgaattcgggaaatgagtagtaccctagatagggagcgggaattgcacgcacagctgcagagcagtgatggtactggacagtctcggccacccttgccctcagaggacctactgaaagagctgcagaaacagctagaggaaaaacacagtcgcatagtagaattgttaaatgagactgaaaaatataaactggattctttgcaaacacgacagcaaatggaaaaagataggcaggttcacaggaaaacactgcagacagaacaggaggccaacactgagggacagaaaaaaatgcatgagctccagtccaaagtggaagatcttcagcgccagctggaagagaaaagacaacaagtttataagttagaccttgaaggacagcgactacaaggaatcatgcaggaattc

SEQ ID NO: 14477 - DNA, 485 bp, Homo sapiens
  MAP TO AC006425.9; EXPRESSED IN BONE MARROW, SIGNAL = 0.66; EXPRESSED IN ADULT LIVER, SIGNAL = 0.56
tggaactgataactcacctgagaccatggtctgtgatctgataacatccagataaactgagaaacagaagtacacgtccagtctcttgatcagatttttcactcccaaagtaaattaagtcttttcccctaggcaatctagtccttgctgcttttctacacattgcagaagattctgggagtgatgacatagttcttaaagctgttcctgtacaacaaaatgagtgaccacaatacgcaaaggctggagaagcacaatgctgctgccaacagacactagtccttagtccaacaatgtccttactaaaacaaccagaggtggaacaactaaagttggatgctgtttccattacacaaagactttcaacatttctatgtctccattccacagtatcttcaatatcagccaaatcttcagcatctaacatccacacataaggagaagtgaaattctcagaagaaacaggcttagtccaggggtgttca

SEQ ID NO: 14478 - DNA, 480 bp, Homo sapiens
  MAP TO AC005083.1; EXPRESSED IN PLACENTA, SIGNAL = 0.7; EXPRESSED IN LUNG, SIGNAL = 0.49; EXPRESSED IN BONE MARROW, SIGNAL = 0.5; EXPRESSED IN ADULT LIVER, SIGNAL = 0.48
ccaaggtcctataattagccactgaattagttctaaatctcccctaactctggcttagttatgtctactgtagtttgcttatagaatttgcttaaatgtgaatcaactccttgagctttagaaaactcgattatacgtgtagtgaaaaaaaaggactcccatttgtagaatatgtaataaaaattccaatttatagagagaaaagcccaagttagttgcttttaattgtgacatgtaattgttgctgcaggctcttctgaaaatggattgccaagagttagtcgcacgtctcatccaagaagctgctgttctgacttcagctgtcaagcttggaaaaggctggagggaactagctgaaaagttagtacgactcacaaagcaacaaatggaggcatatgaaattcctcatcgaggaaacactggagatgttgctgttgaggtaagacttctgtttgtgtaattcaatagtgaaaagttgca

SEQ ID NO: 14479 - DNA, 468 bp, Homo sapiens
  MAP TO AC005741.1; EXPRESSED IN LUNG, SIGNAL = 0.84; EXPRESSED IN PLACENTA, SIGNAL = 0.73; EXPRESSED IN BONE MARROW, SIGNAL = 0.6; EXPRESSED IN ADULT LIVER, SIGNAL = 0.77
tgtaccttgggaatggtcaccttgtatagtatctcatgggtgttctacatatttcttgaatttgcatattgacctctagcaagactagggaaattttcatggactatatcctcaaaagtgttttccaacttgttggctgtctctctggactacagataagttgtagatttggtctccttacataatgccatatttctcagaggtttggttcattttttaaaaattctctttacctttgtctggctgagttgatttgaagaacctgtctttgagctctgagagtttttccttggcttgtttatcctgctgttaatgcttctgactgcattatgaaattcctgcagtgaattttgtacttctagaagttcgggttggttctttcttaaaatggctattttgtctttcagctcttggattattttactggattccttggattctttgcattgggtttcaactttctcctgg

SEQ ID NO: 14480 - DNA, 452 bp, Homo sapiens
  MAP TO AC006355.3; EXPRESSED IN PLACENTA, SIGNAL = 0.61; EXPRESSED IN LUNG, SIGNAL = 0.52; EXPRESSED IN BONE MARROW, SIGNAL = 0.57; EXPRESSED IN ADULT LIVER, SIGNAL =   2
ctcctttgcttttgctcctccataaatgttggtattcctcagggttcttcctgtgagctggaccgttttcagttacggttggtactcattaaatatcttgagaaagggaaatttggaatgtgcattttaatagaattagaaaaaaatcatttctccattgccattttaaggtttatttcagcattcagggcaactgatctccaaaattaccaaccatatggttagttctttggaatgtcatagttctaaatatttaactatatagattttcaaggactgcttttactaccatgaagactttaaagcagcatttaacatttgtatcaacacagaagatggagaagacatagtctcactggcagcgcaaaaccttgtcctgtgcatggtcacacgctcagccaccagggcaggctcagctggctttcaatatgtgtgaatgccttgctgaggta

SEQ ID NO: 14481 - DNA, 441 bp, Homo sapiens
  MAP TO AC004806.1; EXPRESSED IN PLACENTA, SIGNAL = 0.62; EXPRESSED IN LUNG, SIGNAL = 0.61; EXPRESSED IN ADULT LIVER, SIGNAL = 0.68
gcatgcgaagaggtgaaatgctgaccgagttactcatccagtgaaagacagcctgctttctgcaacacggagccctagagacggatcgtcagcctattctgaggtgtgggctgctgatgggcagctgtgaattaggctccgacaacactgccgtgtgagttgttgaacttggcagtcattcttttggttgacaaataagaatgtggcaatttattacattcttgacattttgctgagtctgaggttttaaatggaaccttaatatgtgtttgttttccagggtaaatggatccttctatgagatcttgcaagtggactttggaattgataatagcagtgacctggctggggcccagcagattacctggcaggtggagtacccgattgaggactccatgagtgagctggtcgtctccgagatcttcgtcagccagacaacct

SEQ ID NO: 14482 - DNA, 449 bp, Homo sapiens
  MAP TO AC004817.1; EXPRESSED IN ADULT LIVER, SIGNAL = 0.45; EXPRESSED IN LUNG, SIGNAL = 0.54
tgaggaaattgaagctcaaagacctcttcttttggtcaggatgctgttctctgcctagaatataggctactgatgatcatgctacaaattttattctgaaaggcaattttctctactggttttagacataatacaactaaaggaaaaaagtgtttttgaagatgcttacaagttggtcaggcttggtagccattcaatgagaaaagcagaaaaagacctcacagctacctctgtcttaagaaggagttcatgagtccaactacctgaggtcagagctgatgatcataatttatcgatgcttcagtgggcccaggtggacctggccatggaggccgatctgcctgtctgggccctcatgttcctgttcagtacacatacaggtggtgatagggaggtggaaaccctggcaaggcagataaaagagctccggttttagagtgagtcagacc

SEQ ID NO: 14483 - DNA, 484 bp, Homo sapiens
  MAP TO AC004381.1; EXPRESSED IN LUNG, SIGNAL = 0.68; EXPRESSED IN BONE MARROW, SIGNAL = 0.66; EXPRESSED IN PLACENTA, SIGNAL = 0.68; EXPRESSED IN ADULT LIVER, SIGNAL = 0.44
ggaggcaggaaactgaagagaatatgtttacatgaaaatatgtatttatcaattaagtctctaacataattctgtgaggccattatctttagtttccttttacagaaaagaaaagaaacggaaaattttaggaaactgaaaaatgaagttattagtaatggcaacaacttgctagtatccaataggcctgaggattaaattgattttctaccactaacaccaactttccttggttaggtgcagaggcctgtgacagagctcacgcttgattgtgacaccctcgtgaatgagctggaaggagattctgaaaaccaaggctctatatatctgtctggagtgagtgaaaccttcaaagaacagctattgcaggagccccgcctctttcttggcctggaagctgtgatcttgcctaaagatcttaaaagtggaaagcagaaaaaatactgtttcctgagtaagtctatgctactgaatgtagctttgg

SEQ ID NO: 14484 - DNA, 475 bp, Homo sapiens
  MAP TO AC005799.1; EXPRESSED IN LUNG, SIGNAL = 0.42; EXPRESSED IN PLACENTA, SIGNAL = 0.73; EXPRESSED IN ADULT LIVER, SIGNAL = 1.7
aatgtcgcctgcttcaaaagcaacactcaataaatggtagcgatcaccttcctttaggtgtaccaaacaacagcatacctccttatggggtcaggatgagattatcgctataggatctcttccagagggaaaaagatcaatgcatatgttcctcttctctcaggtgtccatgtcaagcctctaatgttccactctggagcctagcctgggatgctttacccagactctctgggagaaagtcagtccccccttgcttgatcccatgaaccttaccagcactgatggtgggaaagtgcctcatgtcttgcagaagtttgctgacaacagggctggaccgggagtagagcccatggcggttaatacccaggtggaactggacccagctggcctcgagtcggagctgcagtggggggtccagggaggtaaggttcatctgctctctgtacatcttgtgtcgcctgaaagagccagatag

SEQ ID NO: 14485 - DNA, 386 bp, Homo sapiens
  MAP TO AC004636.1; EXPRESSED IN PLACENTA, SIGNAL = 0.71; EXPRESSED IN LUNG, SIGNAL = 0.64; EXPRESSED IN ADULT LIVER, SIGNAL = 0.49
tgactgttgcttttctcctgtgtattgcaaaaagcatattttcagtcaaaatttagaattacaatattttaacagagtttttggacggtaaaaattagtgtttccaaatgagtttgatataaattattgatgatgagttattaaagttttaaaatgagcaaacatgttctagacagagaaacatcattcatgttttatgttcattctgcctttgaatttttttccctagtgcctgtttttgtcttttcttataggtgccacttgtgtgttaaagaagaaattttcagcaagccagttttggagtgactgcaagaagtatgatgtgactgtgtttcagtatattggagaactttgtcgctacctttgcaaacaatctaaggtaggcg

SEQ ID NO: 14486 - DNA, 463 bp, Homo sapiens
  MAP TO AC004595.1; EXPRESSED IN BONE MARROW, SIGNAL = 0.52; EXPRESSED IN LUNG, SIGNAL = 0.53; EXPRESSED IN ADULT LIVER, SIGNAL = 0.5
aagtttcaagtgttttgaaaggcttagagagatttttttcccaagggaagagcccactatgaccaggaacgtgagtccataatagagcataaactctttgagattaacacattttcatagcaatttggtacacagacctgttttattttgtctttaactgaaaattttctgatttgaactacagttatggcatcatgatcaaacctattcagagaagcatcatttaattaccttgattctttttaatttttctataattgtaaacctactatttggcagtgtaattaatgttcggtttttgtttttgctagaggcagtaatgaaccaggaaaaaagaagcagcatatctgtcatattgaaggatgtggtaaagtttatggcaaaacatctcatttacgagcacatcttcgctggcatactggagaaagaccttttatatgcaactggatgttttgtggcaaaa

SEQ ID NO: 14487 - DNA, 483 bp, Homo sapiens
  MAP TO AC006375.2; EXPRESSED IN FETAL LIVER, SIGNAL = 0.68; EXPRESSED IN ADULT LIVER, SIGNAL = 0.54
gcgtatgaaagttcctgtttttccacattctcatcaacagttagcaaggtcgtagtttttttttttttttcagtagttctaataactgtgtagtgatacctcattatgattttaattcacatttacctaatgactaatgacattgaacatcttttcaggccaggtatagaccttcttagttcaaatcttttcctggtttttaaaaattggattctctttcttattattcagttttgacagtttatttatcctagatctaaatcctttaatatatacatgagatgcaagtattttctcccagcctgaatcttaccttttcattcttttatccatatcttttaaagggcagaagtttttaattttgataaagtccaattttttctttgttgattgcatttttgtcattgttctaaggaatctctgcccaacccagagaaactctgggatgtaatgaatatgttcatcatcttgattgcagtaatg

SEQ ID NO: 14488 - DNA, 479 bp, Homo sapiens
  MAP TO AC005873.2; EXPRESSED IN LUNG, SIGNAL = 0.58; EXPRESSED IN BONE MARROW, SIGNAL = 0.54; EXPRESSED IN ADULT LIVER, SIGNAL = 0.52
tggaatatcttgtgccagaaagtaaagaaatgctcaaagaatatagagacttttcaaaaggacacagaagccatcttaaaggggcctctcagatctgggacaatttgagcatcaaaataatgatagtaacagattattattcagtgaataaaataggaaggtgtcatataaataaggaaatattaaattgaaagtttgataaggaatgggaggtttacatagtttaatagtgtttcccataaagaacttattaattgtacaaaggaaaataataattttatattgaagaaaacactaccttatgcaaatgattaaagcaaacatcatcagcaatgcacaagatgacattgtgcacatcccaataggatgcaatgaaaagaatatagaatcacttttgctgaagtgaatatcaccactaaagattacattacctggatgtaatcatgaggaaacactgaacaaatccaaattgagggaca

SEQ ID NO: 14489 - DNA, 467 bp, Homo sapiens
  MAP TO AC004219.1; EXPRESSED IN LUNG, SIGNAL = 0.62; EXPRESSED IN BONE MARROW, SIGNAL = 0.7; EXPRESSED IN PLACENTA, SIGNAL = 0.67; EXPRESSED IN FETAL LIVER, SIGNAL = 0.78; EXPRESSED IN ADULT LIVER, SIGNAL = 0.66
aggtatcaaatccacctgcacctagaagatcacttttgtaaatacaggtgatgccatatccatagtctctccaaaatccagtcttttttgagaatatgaagtaatcatcagtgggaggatttcccccgtttgttacctttgggtcatactggctaaagatgatgggatagtacacctgttgtccctgaattgtattgtctctacatcgttggagaaaatcttctctgaagatcaagtcaacatcacaaaatagcagcaaagtgtcattgtcaaactgggcagaagccatttcaagaccaagacctctggaaaactctcccttcattgggatcagggtcatttctgctttggggtacttgttctggtacccttttatcagctcaatatgcttgctggagtcttggccagaatccctactgaaaaggataatgaccaactttacattctgctttgggataagacacatg

SEQ ID NO: 14490 - DNA, 492 bp, Homo sapiens
  MAP TO AC005833.1; EXPRESSED IN LUNG, SIGNAL = 0.55; EXPRESSED IN BONE MARROW, SIGNAL = 0.61; EXPRESSED IN ADULT LIVER, SIGNAL = 0.51
ccctcctttggtccatgtaggaggacttcctgaaagaagtatgattcaggagttgtttgaatgacagaagagaagcagttcagtagacttctaaggaaagatgatttagataagaaagttagaggaggcaatataaaggcaggagtgggaggactgagcttacattctttaaaaacggctctaaaatgtagtcttcttgtgtcaataagctatgcaattcattggctgtgaagcacgggtgattttttggtcttcttctgcaggtgtggcagtgtggagggaaggtcgagattttgccctgttcccggattgcccacctagagagacaccacaagccctacgccttggatctcaccgctgccttgaagcgcaatgctctgcgagtggccgaaatctggatggatgagcacaaacacatggtctacttggcctggaacatacctctccaggtgagtcatggaattgaacagcagcacggaagaatgaaagagg

SEQ ID NO: 14491 - DNA, 485 bp, Homo sapiens
  MAP TO AC004050.1; EXPRESSED IN PLACENTA, SIGNAL = 0.93; EXPRESSED IN LUNG, SIGNAL = 0.72; EXPRESSED IN BONE MARROW, SIGNAL = 0.95; EXPRESSED IN ADULT LIVER, SIGNAL = 0.54
ttttgtacttcaatgctatgttgttgaaatttcagtcctagagcctacaaaggaaatatatctatcctgacatgatacttaatatgttggttaaactactggaagacctgatttgtcaagggagatttcaacagaacactagtttgccgtgtagactagactccctcttcagtgaagcaggaatattctcaagaatattttttcagtgcttacaaagaggagaactggtacaaaatttggtgtttcctaatgactaaaaatatcttaaagattttgtttgcttgtttgcaggaagaaatctttcctgttttctgctctgtatgctgcctttatattcggtggtcggcacctaatgaataaacgagcaaagtttgaactgaggaagccattagtgctctggtctctgacccttgcagtcttcaggtaggtttttttcatttttctaataaaacgtatccattttatcacttgctgaaagaatgcaa

SEQ ID NO: 14492 - DNA, 474 bp, Homo sapiens
  MAP TO AC004057.1; EXPRESSED IN PLACENTA, SIGNAL = 0.96; EXPRESSED IN BONE MARROW, SIGNAL = 1.1; EXPRESSED IN ADULT LIVER, SIGNAL = 0.56; EXPRESSED IN LUNG, SIGNAL = 0.65
gaataattcatatttcacagatgtcactgtcattctgaaaaaaatcactttatattcttttgaaaaatacttagagacaatgatagacttacatttttccagtgttaagttacattaaaagggagattatatgttgaaaaaataagcttcatcataaaggttaataaaattatttggctaaaataaataacaaagcacttataataaatttatcagtagaacagctagctaaacacattaaatcaatttcacaaaactgttctaatttaaatgtatgtacatcagggaaaatctgaatggaatacctgagactgtgcattaatattggctccttccttaacaagaactttgacaacttctgcttgtccagccaaagatgcaatgtgaagagcggtatttcccttctgttttggagaaacaaaatagaaaatgttcaaggtttctgaattttgcagaaatcaaaatgtgcaggca

SEQ ID NO: 14493 - DNA, 493 bp, Homo sapiens
  MAP TO AC004917.2; EXPRESSED IN LUNG, SIGNAL = 0.6; EXPRESSED IN PLACENTA, SIGNAL = 0.59; EXPRESSED IN BONE MARROW, SIGNAL = 0.58; EXPRESSED IN ADULT LIVER, SIGNAL = 0.56
tcctttcctctttttagatgcactgactagagagagaaatgttcttctcaatgcactcatgatataaggtctcttaccctgtccttcatttgcccttagaaaagttagagagcgccaaacaaccacgaattttatgactccactctttcatcaaacattatggaaggagtttaggtaaacttgatatcctttactacccgtctacgagattcttgtttttcaaaataaaccccttttcacagataaagtctgaagtttatgtaaccagtctagctattctgggaagcaaccttgctgtctaggttagatacaccctgaccagtgtggatggatgcacagagaatgtccacctgcgaggaggggaaagcctggagtgtgagggaacaccagctctggggacaagtaagtgcacattctggctctgtcacttacgaaccagttgattttgtttgcatgcatgaatttacatgtcctttcaacagaaacagaaagc

SEQ ID NO: 14494 - DNA, 452 bp, Homo sapiens
  MAP TO AC004527.2; EXPRESSED IN ADULT LIVER, SIGNAL = 0.49; EXPRESSED IN LUNG, SIGNAL = 0.57; EXPRESSED IN BONE MARROW, SIGNAL = 0.5
agatgtatggtttatttgaagtttttcttctgtttggatggtaggcacttatagctatgaaactctgcctttgtactgtttttggcatatcaaaagttttggtatattgtgtcttcattaccatttgtttcatgaaatttttcaatttccatcttatatcttcattgacccactagtcattcattcaggagtgtattatttaacttccatgtgactgtatggtttccaaaattcttcttcttattgatacctagttttattcttttgtagtcaaagaagatgaccatggagacagcagcgtggtcggagtggtagcaggcagccatcagcaagagctgctccgtgccaggctgctggaggctagagcctgtggcccagtggcttgcctcactgtggttggtggtggtggtgacagagactgcagcatgaccagagtgataggataggggcca

SEQ ID NO: 14495 - DNA, 420 bp, Homo sapiens
  MAP TO AC003078.1; EXPRESSED IN PLACENTA, SIGNAL = 0.8; EXPRESSED IN LUNG, SIGNAL = 0.83; EXPRESSED IN BONE MARROW, SIGNAL = 0.7; EXPRESSED IN ADULT LIVER, SIGNAL = 0.74
tttgtttaaatctggctttcttcccaaaagtaacattctgaattctctttttatatggctgacaaccaaccaagagattttcttgctctagttggaaattcatggaaaccataggcaaatagtatgtccgaggataacaagtagaaaaccctatgcttgtattttcaattatatttttatttgctttaatgcagttttaacatcagtaacagtggaaatacgacaatctgtatacgagtagttataattcatgctgatgaaagtagcttccatcttatcattcttgcaatattgaaacaaactccagtgaacttgtttgaagctggttcagtagagattgtttcaacactgaaggaatgaaaaattagaacctctgttgtcagatgagcagtaataatctgcatcagttcctggtctggt

SEQ ID NO: 14496 - DNA, 392 bp, Homo sapiens
  MAP TO AC000113.1; EXPRESSED IN ADULT LIVER, SIGNAL = 0.46
ttgcctgctcaatctctcagagatgagcagaataactattcaattagagtagtgatctttagtcttaagtgtcataacaaaatagtaaaaaaccgcagagcaataccacatctacagtattatatacatgaaagaatgatgcatataagttaacaatgacaaatcataaaaagttaatagactttataactatgatgaaataaatcaaagagtatcaaaaccaagggcaaaagaaaaaagtactgctatatagtcagtggtcttaaagttcaggcttgatacagcagatacagagtcaagagttacctcagtagactctggtgccaggcaggtccctgcagactgaagttccaggacaaccccctcaagacccaggttccaactaaaataaa

SEQ ID NO: 14497 - DNA, 499 bp, Homo sapiens
  MAP TO AC000121.1; EXPRESSED IN ADULT LIVER, SIGNAL = 0.62
ttcagcccagtacacagcacagtgagttctcaaaaatacttgttaaatgaatgaataagtgaatgttttatactaatgactttccatccttaaaaggtagggtaatataaataagtatattatctggtcctttaatagtggttttggtaaaatagctatctttatacaatttggtttattgagcttcacttttagaaaggagatgaaggattaaaacaacccaaaaactaaaaagagctctaaccttaactgtagctcctgggaagaaaagccagttgcctgtgtccactgggtcgagactatcttctaaaacgacttgtctgtgagctgaattgatgatcaagatgttatctaaggcccagcaggcttcatacacttcacctacacgaagattttcctgcttccactgaaattggacattctcccctttggcgtcctcaggaaggtagaggatatggatgattgtgctgacattggaaggggctctggaacatacaga

SEQ ID NO: 14498 - DNA, 463 bp, Homo sapiens
  MAP TO AC004614.1; EXPRESSED IN ADULT LIVER, SIGNAL = 0.44; EXPRESSED IN PLACENTA, SIGNAL = 1.5; EXPRESSED IN LUNG, SIGNAL = 0.85; EXPRESSED IN BONE MARROW, SIGNAL = 0.54
tgcagtagtaagctaaaaccaaaggttctcattttttttcattccattcgttaatccactcactcatttaatggatggttcatgacctcacattagctacagtttggggatacaccagtgactcaaaacagaaatgacttctacctccactcttatccaacttttactctgaggttttattcaactttctgaaatactaaacctttgatagtaacaatagatttttccttcccccataattcaggcttcaaactgaggaagcggcgcattaccaatgagcccactggaggctctggggtaaccggaaactgccctcacttactggaagccattccctgtgaagagcctgcctgttatgactggaaagcagtgagactgggaaactgcgagccagataacggaaaggagtgtggtccaggcacgcaagttcaagaggttgtgtgcatcaacagtgatggtaaga

SEQ ID NO: 14499 - DNA, 456 bp, Homo sapiens
  MAP TO AC003693.1; EXPRESSED IN PLACENTA, SIGNAL = 0.69; EXPRESSED IN ADULT LIVER, SIGNAL = 0.6; EXPRESSED IN LUNG, SIGNAL = 0.68; EXPRESSED IN BONE MARROW, SIGNAL = 0.57
cagtccgtgatacaggtcagggttcagactctgacgagggagaccatggtcatgctcagtctggagcagggctcagggctcggtctttgaccaggatcatggccgctggtgactgggaagatgggaggcccccatgctgttcttgttttacagttggggagccccaccctgcgagggcaggacccagcttaggttgcccaacctgaagctgcagagtggaggggacctaggctagtgtggccaccgacctgccggatttcctccagcaccagcgtaaagacccagaagtagagggtgacctcgggccctgaggggccctgggggggcggcctgaagtccaccagcaggacgtaggtgaacaggaagaggaaggcgaagtacatgaccacgttccccaggaacacagtcacgggagcgccccagaatttccgccagcgtgtgagcaggaagacagca

SEQ ID NO: 14500 - DNA, 494 bp, Homo sapiens
  MAP TO AC002300.1; EXPRESSED IN LUNG, SIGNAL = 0.43; EXPRESSED IN ADULT LIVER, SIGNAL = 0.42
ctccccaaggtccttaccctaagtgcatgtaaggacaactaagacaccagccctacttgagagtggctcgccgtctattccaatggtattggaggcagacaggcaggaggcttagtacagtgcaggctgatcaattcagggcataggtgagtgctgaaaattactgtggttattgatctgggatatgggcagtggggtaaaggggaaggtttatgatacaacctagatcaccaggatatagatacataggtgatagatagattatatatagttgacccttaaacaacatgggtttgaactgtgtgggtccacttacatacaaattttttttcaataaaagttacatggagtgtgcgtgcctctcctgcctccacttccacctcctccacctctttcacctctgccacctgtgagacagcaaaaccaacccctcctcttcctcttcagccttctcaatgtgaagatgacaaagatgaagacctttgtgatgatcc

SEQ ID NO: 14501 - DNA, 488 bp, Homo sapiens
  MAP TO AC004540.1; EXPRESSED IN LUNG, SIGNAL = 0.44; EXPRESSED IN BONE MARROW, SIGNAL = 0.57; EXPRESSED IN ADULT LIVER, SIGNAL = 0.64
cggcatagcctactaaacactctggctacagcctagtgctcttaggctacaaacctctatagcatgttactgtactgaacgctgcaggcagttgtaacacaatggtgaatatatgtggtctaaacatagaaaaggtacatttaaaatactgtataaaagataaaaaatggtacacctgtagagggcagctccatgatactcatgggacaacagtcgcacatgcagtctgttgttgactgagatgttactatgcagcacataacaacgtatctctctctatcccattcctcttcagcttctttcaaactcctgacaactttagcctctttctgattttccagacccagcccacactggctcttgtctttctcccccttttctttaaccctccagatctgttcctcactgttctcccagtagctctcagagtaaatctgacacggcagtccctggccctctcggctcctccccactcgaattccaacttt

SEQ ID NO: 14502 - DNA, 473 bp, Homo sapiens
  MAP TO AC004543.1; EXPRESSED IN PLACENTA, SIGNAL = 0.65; EXPRESSED IN ADULT LIVER, SIGNAL = 0.7; EXPRESSED IN LUNG, SIGNAL = 0.72; EXPRESSED IN BONE MARROW, SIGNAL = 0.55
ttttaagcactgtgtttttgaatagacagactacaaaatgttgttgaaaataggtgtacccatgaattgcagagaaaaataaaataaaatttctattcttaacccaatagagccaaatgtataaaatctgattcctcaaattgtgatctaaagtttcaagttgattcacccagagtggacttcagtcttcatcatgtgctagcagtgagaggaaaaggtacaaaactcactttctcagccatttcatgagagtgatgcagggaatgctccctttctgagaacatcctcctctgttcataactggctagtcgacaagtgagccaggaagagagagtgcagcccccgatcccaatgcacgcgagagacatggaggcaaggtgcagtgggtatagggaggaagttttctttgtgactgcccggaggaactgaaaattcaggatgcccccaataagtccacagatacagcaggctga

SEQ ID NO: 14503 - DNA, 498 bp, Homo sapiens
  MAP TO AC004388.1; EXPRESSED IN PLACENTA, SIGNAL = 0.71; EXPRESSED IN LUNG, SIGNAL = 0.69; EXPRESSED IN BONE MARROW, SIGNAL = 0.61; EXPRESSED IN ADULT LIVER, SIGNAL = 0.57
gtgggtgtgggagaagaaagtttgctagtcaaacttggtttaaattgactgcctttgtaatagcatgtggctgaatgttttgatctatttataatgaatattttaaggatttgctaatttttgaaaattggcaagaaatactcatttttttcctgtcttgaggtatgccaaaaataaaacttgctagaataaaaaaaaatgaaagtgaaggaatgtcttgtgtgtgctaaaacacctccacttaaagagtttgatatccactagaaaatgttgtttctttaaaaaggggacaaagggcatttgatgcttctcacctttcacggttgtgacaattctcttagacatcttaaattctctaagtggagatttcttatattcttcacagtacacctgtttaaaaattgtagtccacagaaatctgaaactacaaaagaaacttttctcaagatgataactcacaaggagtgtaaattacagttacttcatttgtgggagttt

SEQ ID NO: 14504 - DNA, 486 bp, Homo sapiens
  MAP TO AC002996.1; EXPRESSED IN ADULT LIVER, SIGNAL = 0.53; EXPRESSED IN LUNG, SIGNAL = 0.6; EXPRESSED IN BONE MARROW, SIGNAL = 0.68
ctacaggttcatgccagcacacccaggcttttttttggggggggatggggggtagaaacagggtcttgctgcattgcctaggctggtcttgacctcttgggctcaatgatcctcttgcctcggtctcccaaggcactgggattataggtgtgacccaccaagcctggcccataattgtagttttaaatgtcttggggtatttttatggagtgctgacttttcagtttagggctgagcttgtgcacagtggaggctagtgggcaagtgctcccctggccctgaaaacttacctgaactccctctctatggcatgggcagatggaaggagtgtccctgggggcttcttcctcagaactagatcacgattagccagcctgatgtagtaagttggatttgactgcccgtgatcaaactgaagtagttccaatgggcctgcaagtttgaaaacaaagaaaactcaaaccagccctggaggacagatctgag

SEQ ID NO: 14505 - DNA, 448 bp, Homo sapiens
  MAP TO AC002461.1; EXPRESSED IN BONE MARROW, SIGNAL = 0.52; EXPRESSED IN PLACENTA, SIGNAL = 0.61; EXPRESSED IN LUNG, SIGNAL = 0.55; EXPRESSED IN ADULT LIVER, SIGNAL = 0.45
catcaagtaccttcagcgacctcacaactacagagtttttgttttgatattgtcacccttagcctttggacagaattcaccacctgtttagcaaccagctcttctttgaggctttttctcccccttggagcctatgataatgtgcttttctggttctcttcctgcttccctatttttttctttttgatgtctgtcatggaccctactttctagatttatgccctaaaggtaggaatactccaaggatctgtcttcaccttcttctggtcttgatctacaccttgttgttgggttagttcgtccacttccgtagtttcaactacaacctttctgctgatgactgtaactaccattttcatgctgatgattgaaactaccacttttatggtgttgcaagtcaaactgtcttcagtttctgtctttctccctcagctctaaacactctagc

SEQ ID NO: 14506 - DNA, 416 bp, Homo sapiens
  MAP TO AC006121.1; EXPRESSED IN PLACENTA, SIGNAL = 0.59; EXPRESSED IN LUNG, SIGNAL = 0.54; EXPRESSED IN HELA, SIGNAL =  10; EXPRESSED IN FETAL LIVER, SIGNAL = 0.68; EXPRESSED IN ADULT LIVER, SIGNAL = 0.44; EXPRESSED IN BONE MARROW, SIGNAL = 0.52
catccagcaaccaagagaccaatgagaaaaaaacttcataaactctccaagagggaaactgaacatacaattttacttcggaaacaacccaactagggtcatcatcattaatgtgaaatttttactaacactgtcactccctttcatttattaaatctattaagaatcatgggttataaagcacttggcagtgacgaagctataaagactattaaggaggcagtggggttactttcctgtctgctctctttcttgggtgttacacaccaactcacctgttgatcatgtcatccaacttggccaagtcagtatgtggaaatgcaggttcctcatcttcaagctgtggtggggcatcaccttgaccttgctcatctgggggagttgccggggaattttcattggaagaatcaggcgat

SEQ ID NO: 14507 - DNA, 485 bp, Homo sapiens
  MAP TO AC004827.1; EXPRESSED IN LUNG, SIGNAL = 0.89; EXPRESSED IN FETAL LIVER, SIGNAL = 0.72; EXPRESSED IN BONE MARROW, SIGNAL = 0.84; EXPRESSED IN ADULT LIVER, SIGNAL = 0.82; EXPRESSED IN PLACENTA, SIGNAL =   1
cagctggattttattaatgatggaatatttatgcttgctgtacaattcgtggctcatttccatgtgtatgtcagaacttaaatacccccaaaagaaacattaagataacatgaaatataaatgtggccaagctagaaagggtggatttggtggagagtctcccttcttcttattggtgtcacatcagatcacaataactgtgccgcccccctatcaaccttaggcattgatactgatctttttttccccttatatataccccatagcaaacttcacatttcaatctttttgatatggacaaacgatctgctctcctctttataatgcagataaaactgatgtatgtgttttttaagagcatattttccctgcacatgcttctcattatccgagaggcctggactcaatcagtaaaggagcagagaaaccacataattgaaaggagaatgacggtggtgcatacttggaatatttgtgggaagggg

SEQ ID NO: 14508 - DNA, 476 bp, Homo sapiens
  MAP TO AC004829.2; EXPRESSED IN PLACENTA, SIGNAL = 1.1; EXPRESSED IN BONE MARROW, SIGNAL = 0.76; EXPRESSED IN LUNG, SIGNAL = 0.7; EXPRESSED IN ADULT LIVER, SIGNAL = 0.84
tgtggctccatctatcaacatctaagcaggtaactgctagtgctctacctctaatcatgttcccaaattccaagttcacatttccaaatgcctgtcaatttctcgtgtcttttaatgggactctcattttcttatacatccaggaacatgaccttggaaagccaaaagaatttctgcctgcatatcttgagtccacaaatccaattggttccatttccaaatggcattttgaatccactcctcttttcaatcctcatattcaccatcttgctttagaacttgatttcttcttgactgttgtattactagagtctgactgatttccttttgtgtttttcatcttaatcgtcttgtacatatcaatcagatcaatcttcctaggcttccactctaattttgtttttcccctgcttaaaaccttcatagttgccaatttattattcaggcttttaagttccttcactgggtggctctaa

SEQ ID NO: 14509 - DNA, 451 bp, Homo sapiens
  MAP TO AC002477.1; EXPRESSED IN ADULT LIVER, SIGNAL = 0.43; EXPRESSED IN LUNG, SIGNAL = 0.42
ccttgccgtcacctttttctgacactttaaaattaatttgtagaaattgcaaaagcaatgaaattgtacttccaattctgaacctctgatcagattcctgctttgacacaagacttactcctctgcagtgtaccccaccagcacagcggctccctttctctctattctttgccctgaaggcacctctggattgcttaacgtgtgctctttggctgcctagacagtcaggacacctaaggccatctggacttatcactcctctcctccttcttttctatggctaataccactttcctgcttcctttctgctgctgaatctccagacttggtgctgtcatcagggggacagagtcgatttcggcttcgagctcctggttggtaaagctgcatcgctggacgatcctgaagtacaataaaatatgttaccattacaacaatgctactaagcttt

SEQ ID NO: 14510 - DNA, 443 bp, Homo sapiens
  MAP TO AC005209.1; EXPRESSED IN PLACENTA, SIGNAL = 0.63; EXPRESSED IN BONE MARROW, SIGNAL = 0.55; EXPRESSED IN ADULT LIVER, SIGNAL = 0.57; EXPRESSED IN LUNG, SIGNAL = 0.62
ccgaaaaacaaagaatcagtcacacgagttgaatttctgcagttattcatccatggaggggaaaaaaaaaagctatcaggactttaatagaacctgcttccagaaataatcacacagccagaaaggcattcttcagtgggatgttgatcttgcttttaaaggagttgtgtcatttggtgagtaactgcattcatcccagctgagaatgtctgcttctgttctgagcgtggggtggtgtttcttcttcaccagactcccattccagtcaccccagccctggatcccctgaggatgctgatggatgatgctgacgtggctgcctggcagaacgagggcctcccagccgaccgcatgtccgtggagaatgccaccattctcatcaactgtgagcgctggccactcatggttgaccctcagctacaaggcatcaaatggatcaagaa

SEQ ID NO: 14511 - DNA, 466 bp, Homo sapiens
  MAP TO AC003658.1; EXPRESSED IN ADULT LIVER, SIGNAL = 0.51; EXPRESSED IN LUNG, SIGNAL = 0.54
tgtcactagccaaatcccatcattttacagaaatggaaactaaggctcagaagagctaagtgacttgcccaggaccatggcagtgtcattttagaacgaagggctcctgactcctacactaaggttcttccacaacatctcttgatagtgtatagaagacaggaagatcagaaaggctggagaaccctgaatgtataaagtatgacttaagcagggcttgaaacaatgggtagggttagggaaggcatttcacataaggagtctatatgacagaaagaacagtgatgggactgtgtctcatgtgaggggtaccaaaaaacaaaatctccatgattcagtcagtcatcctgaagctcatatgaaaagcaaggatgaagaggccttggagcgaaatggtacctacaaggagcagggtaaggaggacaaattttggtagacaaacaaaccaaggaacatttgtgtgaga

SEQ ID NO: 14512 - DNA, 402 bp, Homo sapiens
  MAP TO AC006083.1; EXPRESSED IN LUNG, SIGNAL = 0.44; EXPRESSED IN BONE MARROW, SIGNAL = 0.51; EXPRESSED IN ADULT LIVER, SIGNAL = 0.47
gactgccatttctggcaaagatgaacagattttgcagatgtgaataacgttcttaatccgttgactttcagttaataaaaaggcatgttatactgaataggcttgacctttaaaagagagtctaggccttctcaggatagggagatttaaagtaagtaaggcactttcctgccaaccttgaagatgcaaactgtgttgtgaactgcttattcagcagtggcaggccataggagacaagggtctcagccctacaactgcatggaattgaattctgccaaggacccacatgagcttgacttcagatgagaatgcagccagaatgacacctttttcagccttatgggactcagtagaggatccatttaagccatgtccagacttctgacccaaggaaactgtgaa

SEQ ID NO: 14513 - DNA, 467 bp, Homo sapiens
  MAP TO AC004739.1; EXPRESSED IN PLACENTA, SIGNAL = 0.63; EXPRESSED IN LUNG, SIGNAL = 0.51; EXPRESSED IN ADULT LIVER, SIGNAL = 0.5
gagcacccaggactttagatgaattgagggctatatgtatctgcgaaatgcggacaaaaacagtgtctgaatggatgatgggggtattggtgaacatagccaagagatcataattaactggttgctaaggaagattttgctctcaagtgcctttgccaaatacaaaatctcctcaagttatgagctcaatttaattattttgttaaatcctttttaatgttttttggactccaggagtgatagagtggtgatagtccagaattctggattctgtcctacagaacattgacaaaatgctttcagtcatcatctttcatgacaaaggactgttactgagacttcagatgttattcagtggtccaattacctctcgctctggtgctatgcaggttgccattacaataaacagtaagaatgacattagcagagcctctcagagatagaaagctccaatttttaggtcacca

SEQ ID NO: 14514 - DNA, 455 bp, Homo sapiens
  MAP TO AC002529.1; EXPRESSED IN BONE MARROW, SIGNAL = 0.61; EXPRESSED IN ADULT LIVER, SIGNAL = 0.58; EXPRESSED IN LUNG, SIGNAL = 0.62; EXPRESSED IN PLACENTA, SIGNAL = 0.63
cctatccaaaatgttcccccaaaaaaggagagaatgcttccaaaatcaccatatcaggtcaggatcgccctgatgccaaaaccagataaatacacaacagaaaaacaaaactacaggcctgtatctctgatgaacagtgacccaaaaatcctcaacaaaatagtaacaaactgaattcagtaatgtgttataaagattgtttatcatgaccaagagggattcatctcaaggatgcaaagatggttcagcatttgcaaatcaatcaacatgatacatcacatcaacagaataaagggtaacaatgatgtgatcatttcaattgatattgaaaaagcatttgataaaattcaacattccttcaggatgaaaaccctcaaaaacctgggtataaaaggaacatacatcaacacagttaagagccatatgtgacagacccacagccagtatgacactga

SEQ ID NO: 14515 - DNA, 496 bp, Homo sapiens
  MAP TO AC002537.1; EXPRESSED IN ADULT LIVER, SIGNAL = 0.5; EXPRESSED IN PLACENTA, SIGNAL = 0.66; EXPRESSED IN LUNG, SIGNAL = 0.54; EXPRESSED IN BONE MARROW, SIGNAL = 0.53
taagagctgggatgctgaggcctgctctgcctcaggtgagagagcagtcagtaatggagacctgcgtgcagagcactgcgggcaaaatctggaattcaagataggagcaaaactgctgcgggctctgggggcaacagctggagcttagggcagggcccactggaaaaagctgtggtgccctaagaggtccagaaggcaggctgaatattaattagtatttttatttttcaaggagaagactggagtgaggcctcttaggtacacaagactagggctgacccgaggtggaaggagagaaagcccacaccacgggatcttacctcgtctgcgtcctctgagtgggtggagagctggtcatgctgaataatctcagcatcctcctctgtcggtccgttgcccaccctgatcccaccaaagttgagagttccctacacagatgaacagaaagagtagaatttgcctgggctttaacatgacattctgtgaggtgggaagg

SEQ ID NO: 14516 - DNA, 495 bp, Homo sapiens
  MAP TO AC006120.1; EXPRESSED IN LUNG, SIGNAL = 0.74; EXPRESSED IN FETAL LIVER, SIGNAL = 0.75; EXPRESSED IN BONE MARROW, SIGNAL = 0.59; EXPRESSED IN PLACENTA, SIGNAL = 0.88; EXPRESSED IN ADULT LIVER, SIGNAL = 0.67
cttgactactgtggctttggagtacatcttaaaatctggtaatgtgagttctccaactttgtactttctcaaaattgtttgggctctttagttcctttactttttcatgtaaattttagaattaagcttatctctacaaataatacggctgggttttgatgggagttgcattaaatctacaggtcaatttggggagaactgatatctaacacttaagagttttttttatctttctcatcagagttttgtagttttcagcatacaaatccttaatattttgatttaaaatcttttacagattggattatggaagtgggaagtgaagaagaaaaatgggagaagctggatgcagaatttgatcactttgtggttgatatgaagccctttgttctaaaattacctcataggacaggtaagattatgtttgaagattagattcttaagattaatttttttctttatattatttagtcaaaccaatgaactatcaacatg

SEQ ID NO: 14517 - DNA, 380 bp, Homo sapiens
  MAP TO AC004741.1; EXPRESSED IN LUNG, SIGNAL = 0.62; EXPRESSED IN BONE MARROW, SIGNAL = 0.51; EXPRESSED IN ADULT LIVER, SIGNAL = 0.41; EXPRESSED IN PLACENTA, SIGNAL = 0.67
acaatggctggttcttcacccacaaagtgttcaatggataggtttatggacttgggtagtaaactgaatcaaggccatctcagtgtgtacacagattactccacttggcctgaaatcaaaacctccctattcttggtcaacagctaagaacatcaggtaagtttatgtttcagcatcctagggccttgttacatgttttgtttgaaacttaaaactttttttttttaatttcagagagaatttcccaagagatttgtgtagttatggatacagaagaagataacaaacatgtaggtcatcttcttgaagaagtgctgaaaagtgaattaaatgtaagtattcaaagactgagtttgataaactttgattgccaaaaactt

SEQ ID NO: 14518 - DNA, 387 bp, Homo sapiens
  MAP TO AC004982.1; EXPRESSED IN LUNG, SIGNAL = 0.55; EXPRESSED IN BONE MARROW, SIGNAL = 0.66; EXPRESSED IN ADULT LIVER, SIGNAL = 0.59
acccacccaaaggtcaaatcattaatcagtgagggactaaaatttaggtctttgtgcatcaaagtggccatctttcattatctctaaatgccctagaaaatttttaggcctttgcgctatccaggcttgtgcttgagcaggagaaaaaggaagctgtatggctaataatttatatttataaggatttaactttagtggcaaatggctcagaacaaatcatcatgggctaagtcccagcacattaaagagtctcacctctcactgtgtaaatcttagtgcctgggccattaaaggcaatgaacaccacctcttcgaaccctgggttgaaaaactttctcctccaggtttggacaggtttatctgagtagctggggattgttacagcta

SEQ ID NO: 14519 - DNA, 425 bp, Homo sapiens
  MAP TO AC004888.1; EXPRESSED IN BONE MARROW, SIGNAL = 0.74; EXPRESSED IN LUNG, SIGNAL = 0.51; EXPRESSED IN ADULT LIVER, SIGNAL = 0.54
ctgctatttttattttgacagaattgaaagaaacaataatgaaataacttgatcttattgtaaagacttaattataattcttaaaggcataagccagctccaaggtagttcattgattttactgataaatattaactgaaataaagcacttaaaaaggtagagaggtaattttcaatagttgcatttgaaaagctggcttacttttaaaaatatgtaggctgacaataggattatacaagggttcattcactgttttaaggaaacgatttataaatgttaatgggatgtttattttttctcctatagaaagctagactggccaggatccgggcagccaaaagcggaagcgcaaatgcttacatgcagagcaaacggaatggtttactcagtaatcagctgcaggtacaatcaattacatctcttt

SEQ ID NO: 14520 - DNA, 455 bp, Homo sapiens
  MAP TO AC004626.1; EXPRESSED IN PLACENTA, SIGNAL = 0.59; EXPRESSED IN LUNG, SIGNAL = 0.67; EXPRESSED IN BONE MARROW, SIGNAL = 0.56; EXPRESSED IN ADULT LIVER, SIGNAL = 0.48
gaaatcgaggatggatcgtgattttaagctccttgttaattctgtcaataattagtggtcaaaatggaaaatattcatgaatggccagtacatggaatacagaaaaccccatgaaaagcctgaaagagaaaacaaatgaaaagcagagttctgtgagagttctgtgctgggggtaccttatctgattttcctcatcattcaccaagaagaaccagcgaaacttcacaaccaacggactgcagttggtgatggtaacgtagcgaatgagctcagtatcgttcaggatgcagccaaaatccagctcctttgtctcaaagctgaggttggggtaatgcacttctccgcgcaggtccaggctgtctatctgagggtgttccacatacttaattgctagaatttcttctgccacccagttgttcagatcgtttctgtaggaagggtcaaacttgatcagc

SEQ ID NO: 14521 - DNA, 477 bp, Homo sapiens
  MAP TO AC004080.1; EXPRESSED IN LUNG, SIGNAL = 0.51; EXPRESSED IN ADULT LIVER, SIGNAL = 0.43
aggctcctcctgggttagactggggaagccagggcacccactaggatcggccggcagcggtggcaccttaggcatgacagccaagcagagggctgcatgagtagaggtgggagaggtgggagaggctgcagtcacttcccaggtactgtctggtgcactgatttccccggaggagccctgagagggcagtgcaggcaggaccggagggtagtttctgcagcacggcctttatttcaggaatcaccagagcctttctcagtgttccaaaatgccttggctgacaaggcttcttacttcctggggtaggccagggtgccctgcagggactggttgcccaaaaacctctcactgaagaaaaaaaccgcagctaggtttttctgggtggggaactggatgccagcctggtccacgcggctctgggctcccagcattggagaagaaaaggaaaaagggaaaccaggttttaatcgagcttga

SEQ ID NO: 14522 - DNA, 467 bp, Homo sapiens
  MAP TO AC000113.1; EXPRESSED IN LUNG, SIGNAL = 0.64; EXPRESSED IN BONE MARROW, SIGNAL = 0.51; EXPRESSED IN ADULT LIVER, SIGNAL = 0.62
gacctgttgtttttctgagcctcccaagtgagagaatcagtaatgcaggctagccgcacaatgagattatattaatcatttatttgtaagtgaaccaggtcgcctttcacatcagctctcctaacatgtcaatttgtatcacatctaatatgagacagcccgaaaaaatcagttccatctaagtaaggaactgtgaacaaatctttttaagaaaattagtaagaacaaaaatgattttttcactccagtttagtcttaatcaaagcagtgggaccagggtcatctccacctgctgtgagcgcaaattcaacattgtgtttgcaggaagtgagaccacagggtttaggctttggagccagaccagcgtaggtttaaattccagttttaccacttgctcactgtggaccttaggtaagtttttaaaattcactgagcctaggcttctgcatttctaagtttggggttga

SEQ ID NO: 14523 - DNA, 472 bp, Homo sapiens
  MAP TO AC005007.1; EXPRESSED IN BONE MARROW, SIGNAL = 0.55; EXPRESSED IN LUNG, SIGNAL = 0.57; EXPRESSED IN ADULT LIVER, SIGNAL = 0.62; EXPRESSED IN PLACENTA, SIGNAL = 0.66; EXPRESSED IN FETAL LIVER, SIGNAL = 0.72
ttgcactgatagagtaatttcctcacagtcacatttttcaatgtgaaaatttactttataaaggactgctctgtttgactaaatgaggagtactgtattcagccaaaaattatactcactatttaccttaatcacaatccatttcctaggtaactaaccaaacttcctattatacgtcacatgtcactggaagccacacgagacgtaaaatccttacataaccttaaaacaaaaacatacgggttttgacatgaatcccatacctgtgcttctggtgatagttgcttctctctctcttgcaaagacattttacaataggactgtagagccaagtagttttttctcttccactttctgtctaacctatctgcatgttgcttacaataagcaaagaatggatctgctatatcctatacaaagaaagcacagaaaaatagtgaacatttgtactcccaagagtcataaaagacct

SEQ ID NO: 14524 - DNA, 463 bp, Homo sapiens
  MAP TO AC003093.1; EXPRESSED IN BONE MARROW, SIGNAL = 0.67; EXPRESSED IN ADULT LIVER, SIGNAL = 0.54; EXPRESSED IN PLACENTA, SIGNAL = 0.65; EXPRESSED IN LUNG, SIGNAL = 0.71; EXPRESSED IN FETAL LIVER, SIGNAL = 0.67
agaatttagtgtggcctgggggtctcaggaaagacatcttttaaaaagagtggatttcgtggggccttgagcttcacagctttgcttcccatagagaatatggtgagcaggacaaggcccatgaaggtcttactgacattgctcaagggctccatacacctttacttaagaatcaaatcaacatctcctgccacaaacaaaacatgtacaaagaacagcctgtgtgctatgcagacttctccgtagcccagctacacgtctggatcagcacttattttggggaacacgggttgcatgcaagaaccagagccccgccgactttcactggaggtggtcagtcgctccacggtggagttcagaatggtgaccacgcaggtgcctacctcctccacgggagaggaaaacaagagctcaaacaaaacatcatgctgcacgtggaaacgccaaggacttcgcctccttc

SEQ ID NO: 14525 - DNA, 497 bp, Homo sapiens
  MAP TO AC004739.1; EXPRESSED IN LUNG, SIGNAL = 0.57; EXPRESSED IN ADULT LIVER, SIGNAL = 0.58; EXPRESSED IN BONE MARROW, SIGNAL = 0.54
gatttgccaatagcttcttagatactttactaaaacataagcaaaaaaagaaaatatgtaagtgaacaggacttcaaaattttaaagttctgtgcttcaaagaacatcatcaaaaaaactgaagcacaaactactgaatggataaagtatttgtaaattatttacctgataaaggaattctataaagatcatgtaaagaacccttacaactcaataataaaagactgatcatttttaaatgggagaaagctcttaacagacatttctcctaataatatatacaaatggctgataagcacataaaacaatgctcaaaatatctggtcatcaggaaaatgcaaatcaaatccacaatgagatatcacttcccacacacgaggatgattataataaagacaggtaataacaggtgttgacataaatggagatattagaaaactcatacactgctgatgggaacatgtaacagtgcagccacactggaaaacattttggca

SEQ ID NO: 14526 - DNA, 467 bp, Homo sapiens
  MAP TO AC006352.3; EXPRESSED IN PLACENTA, SIGNAL = 1.7; EXPRESSED IN BONE MARROW, SIGNAL = 4.1; EXPRESSED IN ADULT LIVER, SIGNAL = 0.92
tccctttcttatcacggattgggctttgagttaagaaaggctttgtcttatgaatatgcaaatatactgatatccactgaggtaaatatgttctgtgccctgagagaatcccctgagagcacatctcaccatgggctggacctgcaagatcctcttcttggtggcagcagccacaggtaaggggttcccaggtcccagtaatgaggaggggattgagtccagtcaagggggctttcatccatcctgtgtcctccccacaggtgcccacttcctggtgcagctggtgcagtctggggctgaggtgaagaagcctggggcctcagtgaaggtctcctgcaaggcttctggatacaccttcacctactgctacttgcactgggtgcgatgggtccctggacaagggcttgagtggacaggattttagttatttgagatatttttcatacaacatttattctgcaagcaaa

SEQ ID NO: 14527 - DNA, 458 bp, Homo sapiens
  MAP TO AC004129.1; EXPRESSED IN LUNG, SIGNAL = 0.44; EXPRESSED IN ADULT LIVER, SIGNAL = 0.53
gctgtccctctaggatgctgttggcgccagccgtggtagtaggacagagtctgggtaaaggtcgcctgctgacaagatggtagctaggagacctctaggtgcgccaaaattagggcgtcttttcctggaccggcaaaacgccctgctcaaagctcattacatcaccacgcccaagaactgatactttagcagggcaacgcaccaaccaagcgactccgccccaccctccccgctcctccagcacacgcaagcgcacagaggcccgcgagtgacgtcacctctcccgacaccacctcgttgtcgtacgaccaaaggcctgtcgtaacggccgggaaaagcctcgagaagaagggcacgcacgccgtacaccctaacatgctcgccagcatgcgcgcgcaggtccttggcgcaggcattgggactggagccaatgaggtgcggcgacgttactgcgtagc

SEQ ID NO: 14528 - DNA, 480 bp, Homo sapiens
  MAP TO AC005304.1; EXPRESSED IN BONE MARROW, SIGNAL = 0.61; EXPRESSED IN ADULT LIVER, SIGNAL = 0.68; EXPRESSED IN PLACENTA, SIGNAL = 0.73; EXPRESSED IN LUNG, SIGNAL = 0.62
tgtggctcaatgtaatataagggagagaccagcatggtctgcagacctcagaaaacaacattacatcatcatgatacaagaaagtgagatgatggtgtgatttttcaaactcagttccaaggaataaacatcaaagaattatgcaggttattaagtcccatcaaggaaaagcatccttcactagctccctgccagctcatccccttttacttacctaaaatgcatgttccataaaattactatcgggagaactaggagaagcaaagctgcaaactctccattaagccccagtttctgagagcgtatccataagcaattctattaaggatatcagaggccctcaacgtgtactggagagtcagcacttgaaaaccaacatctaagcaaggttcttccagattctcagcttgagcaataacaagaatagctacaagcagctgagcaaagtctagcatcattgggaaaaacctacacagcaaa

SEQ ID NO: 14529 - DNA, 452 bp, Homo sapiens
  MAP TO AC002529.1; EXPRESSED IN PLACENTA, SIGNAL = 0.63; EXPRESSED IN BONE MARROW, SIGNAL = 0.52; EXPRESSED IN ADULT LIVER, SIGNAL = 0.43; EXPRESSED IN LUNG, SIGNAL = 0.5
tgctgaaaactctgtgtggggctccacctccacatttcccctcagcactgccctagcagagactctctgtgagagctcttcccctgaagcatgcttttgcctgggcacccaggctttcggatacaacctctgaaatctaggtggaagcgccaaacttccttcagtcttgcattctgcatgccagcaggcttaacatcatgtggaatcaccaaggcctgtggcttgtgctttctggagtggcaacccaagcttcacctgaaatcctttgagccacagctgaagctggagcagccaggatgccggcagcagtgtctcaaggataagcaggacaacggagcccttgacttggcccatgaaacctttctttcctcttaggccttggtttggaagggggattgtgatggcagagcctgactccaagatctctgagatgccctgaagtctttttccca

SEQ ID NO: 14530 - DNA, 476 bp, Homo sapiens
  MAP TO AC004981.1; EXPRESSED IN ADULT LIVER, SIGNAL = 0.43; EXPRESSED IN PLACENTA, SIGNAL = 0.63
aaattaaactgggcaaagtagtaaccaattccccaaatttaaattacgtaaatgttttttacaagggtgtttctctgtgttagcaagcatgttcttgagggggccaagtccgaattctaggattcagagctttctgggtttaaacggtggtttgagatattagtttgttttggattgggggaaaaaaaacttagttgacatgggaatttgctttaacatttttaaatgaaaaaaatagttttctcttttagaaatgcaaatttgctgttttagatggtggtagagaggagggcactaatgtcctaaataaaggccaagaaactgaggtttgctgtgaaaatggatttctctttagtaagaccattaaaaatgaggttcattcatttaacaggtattcaaagaatgattaacatatggttaacactgcgttgtttgctaaaaggaatagtaacaaaattcaagatatggctactacc

SEQ ID NO: 14531 - DNA, 446 bp, Homo sapiens
  MAP TO AC000001.1; EXPRESSED IN LUNG, SIGNAL = 0.42; EXPRESSED IN ADULT LIVER, SIGNAL = 0.44
aaagcgctggcagaacagttgccgggcattccgattgcaggcggcgatgactttggctccgtcaccgccgggctggcacgctgggcggaagtggtgtttcgttaattgaaaaatggctcagcagcggcttaaatctgcctgcgcctgagccagtttttctgctgcctgacgtaacggttccatcaacggcatggtccgtgctggagcatgaaggcggaatcgctgcaactctgtcgcgccgactgtcaacgccgattccagccgatgtcgtttggcggtcattttcgccattaccgcttgtctgtctgctggcgttatcgcttcattcggcctgaacacaaaacggcgttcacagctcgctttccagtcgataaccgcctgggtcagatggtcgccaaaccctttcacttgcttaacgccacgacgggtaacatctgcggctgttt

SEQ ID NO: 14532 - DNA, 482 bp, Homo sapiens
  MAP TO AC005221.1; EXPRESSED IN PLACENTA, SIGNAL = 2.3; EXPRESSED IN ADULT LIVER, SIGNAL = 0.45; EXPRESSED IN LUNG, SIGNAL = 0.59; EXPRESSED IN BONE MARROW, SIGNAL = 0.65
tccttgttgtctctgtgattttgactactctacctcattttggtggaatcatacagtatttgtcttttgtagccaacattacagttggtataatgtcctgaaggtttactcatgttttagtatatgtcagaatttcctacctttttaaggctgaataatattcctcagtggaaaaagtattttgacagtatttttagtctttattccatctccagcttaaatacagagcatagattttcatgcttgatccagggatagtgtgttgggaaagggattggaagctcggctctcacagacattccttcagaatgaacattctggcagtaagaggcctgttggcttccaattggagaaaatgcaagagatgtgacagttgggcctggatgtgccactgtggcctggttctcgaccctcacaaaagtgagctggtttgtgggccatgtagggttagctcattttctaggcttctgtcagggaatgtg

SEQ ID NO: 14533 - DNA, 449 bp, Homo sapiens
  MAP TO AC004894.1; EXPRESSED IN ADULT LIVER, SIGNAL = 0.44; EXPRESSED IN PLACENTA, SIGNAL = 0.6; EXPRESSED IN LUNG, SIGNAL = 0.49
ttctggatacaaccttctttgcaaaacttatccctctctttatgcgttcatggatttaacacttagcagaattaaattgtatgatatttatttgtttttttagacaaaaatacatttaactattttaattataattcatcttatttaatagtaacttttaaagtttttgatgatgttatggacttataagttatcacatagtcctttttaattggtacatattttttgattactaagaaattttgatctgagctcagaaagttgtcacttacttgatatgacgtaagtggcaaagtcagaaatagaatctccatcttctgatatttagtccattgggtttggtttccagtggctttggtttctttcatattaccaagctgcttcaatatcaggttatcattcagcaacatcaatattattgttactacataaaaagcaaagcaaagcaa

SEQ ID NO: 14534 - DNA, 474 bp, Homo sapiens
  MAP TO AC004869.1; EXPRESSED IN PLACENTA, SIGNAL = 0.68; EXPRESSED IN BONE MARROW, SIGNAL = 0.59; EXPRESSED IN ADULT LIVER, SIGNAL = 0.55; EXPRESSED IN LUNG, SIGNAL = 0.59
caaactacaaacacaaataaaccagaatacactgcaacaaaacaaacaaaaatggaaattcagggaatattattaaattagcaagtaagaaaaaaatacgtcgtaaaataattttttcttcactctatctctattttacaaatgaagaaacaaagactgaagagaaataatttgcctaaggccatctagtgggtgaatggcagaagccagattctaacccatccggtttgatttcatagccatagctcattagttgtctggctcccattgggatatgaacaaaataaaccaccattcccattacgatcctcacagccttgttccccaaagtgctcattttcatcttatatttcttcttccattttctagacatcattggcattctagttttccaaatcagaaatgttatgatcctcattgctcttttaccttacatatgcaatttgtcagaaaagcaccgattcttctccttgt

SEQ ID NO: 14535 - DNA, 476 bp, Homo sapiens
  MAP TO AC005772.1; EXPRESSED IN LUNG, SIGNAL = 0.46; EXPRESSED IN PLACENTA, SIGNAL = 0.67; EXPRESSED IN ADULT LIVER, SIGNAL = 0.61
ggcaattgcattccttatgcactcagtgacctaccagtctgccctgggtcccacggactaaattctcaaactctcccctgaggatcagttttctttcatttttaatttttaaatctcttcatccagctgtattacttttgaccatcaggtctaggtgagattgacagatgctgacagtggttacagctgctgctagccactggttaccttagaaatggaggtaaaacaaacacaggaattccaaggaaccatacctcacctctaggtttctgaaaacattgtagagtaaataaatcacaaccctttatctatcagactgattctgtggctgaatttacaagaagaagcagaggaaagagagacggtagcaggggaggaacaaaagtcaattgttaccaatagttcggagacagaaagctctgagcttccattaagcagtttgatttatagcttcggatattatgtgcaagagcgcc

SEQ ID NO: 14536 - DNA, 461 bp, Homo sapiens
  MAP TO AB019440.1; EXPRESSED IN PLACENTA, SIGNAL = 0.67; EXPRESSED IN LUNG, SIGNAL = 0.73; EXPRESSED IN HELA, SIGNAL = 2.2; EXPRESSED IN ADULT LIVER, SIGNAL = 0.62
ggtatattggtgccctgagagcatcactcaacaaccacatctgtcctctagagaaaaccctgtgagcacagctcctcaccatggactggacctggaggatcctcttcttggtggcagcagctacaagtaaggggcttcctagtctcaaagctgaggaacggatcctggttcagtcaaagaggattttattctctcctgtgttctctccacaggtgcccactcccaggtgcagctggtgcagtctggggctgaggtgaagaagcctggggcctcagtgaaggtctcctgcaaggcttctggatacaccttcaccagttatgatatcaactgggtgcgacaggccactggacaagggcttgagtggatgggatggatgaaccctaacagtggtaacacaggctatgcacagaagttccagggcagagtcaccatgaccaggaacacctccataagcacagcct

SEQ ID NO: 14537 - DNA, 490 bp, Homo sapiens
  MAP TO AC003083.1; EXPRESSED IN LUNG, SIGNAL = 0.67; EXPRESSED IN PLACENTA, SIGNAL = 0.63; EXPRESSED IN ADULT LIVER, SIGNAL = 0.56
gtggtttttatgggcacaggatgagggtggggcaggtcataggtagttttggaaaaggcaacattcaagtgggaaaacagggatctaagttctcactttgggctgcaattccaggcttgagggtggggtcctcactggggatctgccctcttatgcccagaatttatctgcctcttgtccctatcatcatcagataaagctagtgaagaaagcagagtctgctttagtggacatcacagtcttttataagttaatcttgaaagtgacgttttatcatttttgtcctttgcttcagaaggccaacaacagaaaaaataggcaaattgagctttgtctagacttaaaacttttgtatgttgaagaacactatgaagaaagtgaaaagacagcccacaaaataagctattttgcatctaatatatctggtaaggatctagtatccaaaaaatatgaagaattattataactcaataagaagatgacccaattt

SEQ ID NO: 14538 - DNA, 485 bp, Homo sapiens
  MAP TO AC005681.1; EXPRESSED IN LUNG, SIGNAL = 0.58; EXPRESSED IN ADULT LIVER, SIGNAL = 0.65; EXPRESSED IN PLACENTA, SIGNAL = 0.64; EXPRESSED IN FETAL LIVER, SIGNAL = 0.68; EXPRESSED IN BONE MARROW, SIGNAL = 0.79
aaaccaaatattttcttacttgctgtactgtgtaacactctatttgtccatcatgtttattagcgcacttgaatctcccttttccactagtttgaaagccgtagaatggagagacttctggtaaagcctagctggggcttataatctgccatcatcttgtcctgactatgtactcagatactgaacaaattcaaagtcaggggtttacttggggcacgtttatcggagatgagaaaatgccctttgtgaagacctaaatattttaatgtcttctttatagctactttccattttcatttctcagaatcaggcagattgatagaaacaagagtaattttgaagaaaatgtcagaataacacactgggaagatataggtatgtattagtagagtgtcttttcttggttcatatagatgttaactagagagattcttgaaatgaatctggtttattgtaagtttgattgcctacacacccctagcaca

SEQ ID NO: 14539 - DNA, 481 bp, Homo sapiens
  MAP TO AC005324.1; EXPRESSED IN LUNG, SIGNAL = 0.64; EXPRESSED IN ADULT LIVER, SIGNAL = 0.41
ggtctttaagcacctctccaactgtaacattgcacttcttgttttgttttagggttttttggtcccagggaacctcgttttcagagcagtggctcacgcagatcctgagcccagttaatggtcatacctttccctgagtttatgttcattctatcctctgagattatctttgaagtctcattacatagatgtctgtaaaatccttcaagctatggacagccaaggtcagaggcacattttctcataagtggctgtttctaaattcataggtttgagatacataaagataaaccaggttcctttatgtcaatttccttccagttctgccctctgaggaccctgccctttcccaaaaggggtatcttaagaaggaaaatatggctgctctttgccggacagcagagtcccaggtgagttggggattttcctctcttcttggaaattttattttaattgagttggggattttcctctcttctca

SEQ ID NO: 14540 - DNA, 460 bp, Homo sapiens
  MAP TO AC005690.7; EXPRESSED IN PLACENTA, SIGNAL = 0.78; EXPRESSED IN LUNG, SIGNAL = 0.6; EXPRESSED IN BONE MARROW, SIGNAL = 0.75; EXPRESSED IN ADULT LIVER, SIGNAL = 0.54
cttggctaacttcccagtcgttctgcaggcctcaactgagcagtaacgttttccagaaacccctccctgatgcgtttttcctttatgctgatttacgtgttttttacttgtctgtttgctcacccctttatccctaaacctagtccaatgtctcctagatgatgaatatgtgtaataaaagttctcaggttgttgaattatttaattttgtgcaacctacacaaccaagcattaagatagcaaaggtaaatacttgttgaaagtggcccatttctctacgtgagagtctcttgtgtttcttttaggctgctgtcagcatatgaggcaataagagaggtaagcaatcacaaaaatcttccctccttccagattgttactctggacccagtgacaaaggtaaggacaggttctctgatttaaatggactaacgggccttgaattccatgattttccagctgg

SEQ ID NO: 14541 - DNA, 446 bp, Homo sapiens
  MAP TO AC004664.1; EXPRESSED IN LUNG, SIGNAL = 0.65; EXPRESSED IN BONE MARROW, SIGNAL = 0.62; EXPRESSED IN ADULT LIVER, SIGNAL = 0.68
ggctgtgtttttcggaagtgccctctaacaagctaggatgtgccaaattgcaaagtcatgacggtttgattgctttggggaatgggggtcacttcaaatattaaggttatattttgcacgtaaaaatgattttataaatatcaaaggtttttcatgtttcctacctaattgggttctccccataatcttgtaatttgaagtggggcagaagtgtttaacccctttggcagatgcagaaaacggaggcacagagagggcgtgacttgtctgaggtcacacgtgaatcagtcatggagatgggaccagaacccaggcttcccagctccaagtccagggctttttctgcatctgatgttttcaggggtgagacagggaccatcagggcacaaagaggggctctgggtgggcagggcagagacgagtgcagtcctgttgagcagcaacaa

SEQ ID NO: 14542 - DNA, 482 bp, Homo sapiens; identical to SEQ ID NO: 14532
  MAP TO AC005221.1; EXPRESSED IN PLACENTA, SIGNAL = 0.61; EXPRESSED IN LUNG, SIGNAL = 0.59; EXPRESSED IN BONE MARROW, SIGNAL = 0.58; EXPRESSED IN ADULT LIVER, SIGNAL = 0.54

SEQ ID NO: 14543 - DNA, 474 bp, Homo sapiens
  MAP TO AC003070.1; EXPRESSED IN LUNG, SIGNAL = 0.57; EXPRESSED IN ADULT LIVER, SIGNAL = 0.45
agggcctggtgagtaaacggccctgcctgccccagacagggagcatctggtggtggccacgcctcctgcagcagaggggtggggggagggccaggggacaccacggggacttcctgggctttctctgggaggccggtgctctggccacatctgagggtcttcctgacaaggggacacagctgtgacacggtgagtatcctgggctgatggcaaacccagccgggatggctgagccacactcacccccggctttcagagcggggtcagcagatgggcatcaggcgaaaatgttctgttcctggtacttgcgccggcgggcacagcgggggcagcccttcttcaccacagcctggcagctctggtggaagacggtcttgcactcggcacacctggggagagagcagtaggcctgctggtgccggctgggctggaggttgccctgtggccacgctggccagcccttttgaccagaac

SEQ ID NO: 14544 - DNA, 466 bp, Homo sapiens
  MAP TO AC002990.1; EXPRESSED IN LUNG, SIGNAL = 0.55; EXPRESSED IN BONE MARROW, SIGNAL = 0.51; EXPRESSED IN ADULT LIVER, SIGNAL =   4
tctagggagatcccactcatccgattagagcaaatatgcaacacatactcactaatccagcccactaaacaatagatcccagttcaaacttctaaagctgaagcttccctggtgaataatttattcaattttcctttcaagcccttatttgttatttcattatgtttaagagagggcagatgctttacataaaactcgtgtcatatccattttaagttgtattaatcaatgatcacaagagaaaaccattcccatctttggaagtgacagtaatcattgaagtgaatgctgtggttccagggagattgggagcctcgacctacctgcagttaatactgaggttagaatgtccgcgccttgtcatcctctcctacttcataatcctgggctctaccaggtgagtgcacaagaaggaaggtggttgttaccatctggcttaatattttcctttttgcacctgcctcag

SEQ ID NO: 14545 - DNA, 462 bp, Homo sapiens
  MAP TO AC005728.1; EXPRESSED IN LUNG, SIGNAL = 0.44; EXPRESSED IN ADULT LIVER, SIGNAL = 0.57
tccaaggctcttgtcattttccatgttgttatacagtaatttgcatatcatctattttccctattagactactaaactctctgactggaagaattggaaagaaaacaatttctcaatgtatctgattcatatttgcaactatgcaaaatccttatatacaacatactctagatacttgttatgaaaggaagatgtgttacagacagaaggctccttgtgggcttcaaattatctagctgcttacttctgtgacttgttaccataatggggctgatctttccctgaagaaaatgaaggcgtgaagaagatatactgtacctcatcttctcctttgcatcttcaaaactttcagatacaaagtagacatcttgaaaagttgtgataagacattcctgtttgcaggtaatcttgggatcaaagggctttactttggcatgtccagaaagtgcatgctagaagaca

SEQ ID NO: 14546 - DNA, 367 bp, Homo sapiens
  MAP TO AC005045.2; EXPRESSED IN ADULT LIVER, SIGNAL = 0.94; EXPRESSED IN LUNG, SIGNAL = 0.67; EXPRESSED IN BONE MARROW, SIGNAL = 0.51
aaaaactgacacatgctgtataaaattttatattaatcatctaccatgctataatcctttaacccctaactgagtcattcaggggacttatctagcaaagttggacaatcttgcatctcaaacattattagctaaacctttgaagaataaactcagtcctatgaggtgaaattctaatttcaaggacaactactttatcagaggctttacctgtggtaatttcatgataaactcataggcgttggcctctttgacagctttctttatctcatccatggttacatttccacggccataacaaatattttcagcaattgtggtggaaaacagcaccggctcctgactcaccacaccaatgatttccctc

SEQ ID NO: 14547 - DNA, 455 bp, Homo sapiens
  MAP TO AC004922.2; EXPRESSED IN LUNG, SIGNAL = 0.95; EXPRESSED IN BONE MARROW, SIGNAL =   1; EXPRESSED IN PLACENTA, SIGNAL = 1.6; EXPRESSED IN FETAL LIVER, SIGNAL = 0.75; EXPRESSED IN ADULT LIVER, SIGNAL = 0.87
tgtgtgcagggcttagtgaggtgcccccagatgtgtttctggtgtggtgggtgtcactggcagtgagaacatccggacgctgcagagaggcccttgcctcatgaatgaggcccagagaggagaggatggactcccccagggtgatgggaacaggggtcctgacatcccatttggtgcttcccggggacactctagtcctgcccccggtccctaacagcccactctggccctgcctaggtacccaccagtcattctcctgctcgaaataacagatggagatcacacgagagccgctgcccacagcaaacttgttctcgttgggggcccagcgcacgcagcgggcagcccggttgatccgcaggatgaccagcgtgggcttccatgtgcggcccttcagcgtccacacgtaggcgttgcggtctgtgccgcaggtcacaatacggttactctcgggg

SEQ ID NO: 14548 - DNA, 472 bp, Homo sapiens
  MAP TO AC005184.1; EXPRESSED IN ADULT LIVER, SIGNAL = 0.47; EXPRESSED IN PLACENTA, SIGNAL = 0.59; EXPRESSED IN LUNG, SIGNAL = 0.56
gggagactgttgaacttgaattgctattaacttgccattctcaggatgtagaattttcctctgactcttgtgttgccactgttgccagtggctttcacatgttattctgatgtgtgacaatgactaacctgatgatttgggacagtcttaggcatggtaattttgaggtttagagctatcattggacacttagattcctcttcagcatggtaattttgaggtttattggacacttagatttctcctccaaccccattctttgcttttcctttctcctcagacattagtggaaattctaagttccccactatatgctcatttccatgatgtggtttgtgtcatcgtcttggtcctgcccttgagtattatggaattcagtaatatgtgtgtgatcttccttcttcacactcaggcaggatggtccctgcattgtgtttttctcttctggttttgatgttttcctttggcatgg

SEQ ID NO: 14549 - DNA, 466 bp, Homo sapiens
  MAP TO AC006287.1; EXPRESSED IN LUNG, SIGNAL = 0.57; EXPRESSED IN BONE MARROW, SIGNAL = 0.57; EXPRESSED IN ADULT LIVER, SIGNAL = 0.56
cgacagcatcatatggcttacattttataagcttttttttgccttatacattcttaggtaattaagtgcatttttggcttagaagcccttgggttttcattgagatggtcagtcagaggcaaagtgatattctgtgttcttcatgaaacagtgaagcttcttggtcatgacttgatattttgaagagtattttgctatggagtttggctcaagtcgaacaagggtggtggtagataatatatcaggagaaggctttaatgttaatgcactttcttttgtttgattgtagctctctacttggcttcttatgagagtgaaggacctgaaaatcatatagagaaagacagatggaagtctttaaggtgggtctcattcttctcattgctgcacaagtctgaaggaaattggctttccttgaagaaagccacatgcgttctataggaagctgctgtctatctgttccaag

SEQ ID NO: 14550 - DNA, 470 bp, Homo sapiens
  MAP TO AC004893.1; EXPRESSED IN BONE MARROW, SIGNAL = 0.49; EXPRESSED IN ADULT LIVER, SIGNAL = 0.53; EXPRESSED IN LUNG, SIGNAL = 0.62
gagcagcctttgtcattttatgatttggttagccaagatggtaacactccactcaagaattagcaccttttaaaagttgcttatggcataaaatacaaagtaacgagggtttatcacagagctgcccattttcataagccatgtgtgtgtgtgtttcattttttatttaagccttgttgtgaagtgctttgaaagaggatcggtgtgggctaatgattcctttctttgccctctagcgattgtaactgcctatgagaatagctctcagcatgatcccagttcaaataacgctatgcttggggttcatgcatcagcttcagcgatcatccagtatggaaaaatcgcccggaaacaaggactggtcaatgtagctctggatatattaagtcggattcatactattccaactgttcctatcgtggattgcttccagaagattcgacagcaagttaaatgctacctccagctgg

SEQ ID NO: 14551 - DNA, 447 bp, Homo sapiens
  MAP TO AC006411.1; EXPRESSED IN PLACENTA, SIGNAL = 0.92; EXPRESSED IN LUNG, SIGNAL = 0.75; EXPRESSED IN BONE MARROW, SIGNAL = 0.85; EXPRESSED IN ADULT LIVER, SIGNAL = 0.44
atgacaacatctccactgcgacagagagctctgggtgggtgagattatgctgtacagaaagggacagaagggaaaacagtgaggaaagacattctccaagacccagggagttataagtttaataaaactgtaagaaaaccaagtttatgcaaaaaagttctacctaaccacaggaagaagtgggtattacactcacgtccacccaactttgctcacaaacaggacaggtttagtgaactcacttcaggactttgtcgctgcagggtagccagctccttctgatagagatcggcggcaaatggatacacctggggcagctgggcttcgggattcatcagttccaaaacagtcttctcagcaacacccttctggattgcagcattaatcagtgctactgctgccaatcctgtgtaaaaaacaggagtcagaaacgcagtgggcttagag

SEQ ID NO: 14552 - DNA, 487 bp, Homo sapiens
  MAP TO AC004126.1; EXPRESSED IN ADULT LIVER, SIGNAL = 0.47; EXPRESSED IN LUNG, SIGNAL = 0.5
actgactgccctaccacccaggacttcctcccgggcttctccccaaggcccgcttctggtcctccccctccgtccctgtccctgaggctctttcagcagcccaggctaaactgtatggtcccctgggcctccctgccctgtagtcccagattgcacttctgcttctggccaggtgcccttcctccctccggccttcagattcaagaacgttttttaaccaagtcggcctcccccaggcacccgtggaggccctcgcctcaggtctgtaccagtagacactagcttagtcctctgagccccagcctcagcctggctggcccctcacctggcggcgcctctccttctcctcctccaggtgacgggcaaagtccttggccagcttcctctcctgtcgttccttcatcttccgctgccacgatgtgcgcaggggcttgtcctgaagcatctgggagaatctgaaagggggagagtgggtgcatacagggtc

SEQ ID NO: 14553 - DNA, 444 bp, Homo sapiens
  MAP TO AC005725.1; EXPRESSED IN BONE MARROW, SIGNAL = 0.61; EXPRESSED IN ADULT LIVER, SIGNAL = 0.72; EXPRESSED IN PLACENTA, SIGNAL = 0.61; EXPRESSED IN LUNG, SIGNAL = 0.78
tcaacaacattttgagtcctttctacatactgtgaattcctgtagctgctaaggatagaaaagcgaacaagatggattcttttctctgttctagtaaaggtattctagggacatgatatccagaaacgagtaatcagacagacaaaattattgcaaattggaagcaaactatgaaggtgggagctatacatggaagctaaactagaaattaaaaggggcatctcttttaaccgttaccttttgggaagccctccctggggaggcggcatttaagcagggatttgaagggtatggaggagtcagccaggtcaacagggtgagctgacaactgggaaattgaggtggtgttgctaagccttccaaacagcagcaacaatctctgcaatctttctgagaactcagggagattagggaagaccagcaagtcaagagcctggtgatgct

SEQ ID NO: 14554 - DNA, 495 bp, Homo sapiens
  MAP TO AC005209.1; EXPRESSED IN BONE MARROW, SIGNAL = 0.64; EXPRESSED IN ADULT LIVER, SIGNAL = 0.46; EXPRESSED IN LUNG, SIGNAL = 0.42
ttcagatttggactcagattctctgagtccaagtttagttctcttcctactgccccaggctgccatctttaactgaaggtgctttgcctgttattcccctagtcattttaggttcaacctaaatttgggcatagtgtgagagatgggaccaaaatatagattcgaaggctgtataagaattttctgttatctccaaattcagaagcggtgatttctactccgtggtaacggatgttgagctcatgcctttgtttcctgtacagcgtcacttcagcgtgtttgtcctctccttcccgggggcagatgccctgtcctctatctacagcatcatcctcactcagcatctgaagctcggaaacttcccggcgtccctgcagaaatccatccccccactgatcgatctggccctcgccttccaccagaaaattgctaccaccttcctacccacaggaatcaaattccactacatcttcaacctcagagattttgccaaca

SEQ ID NO: 14555 - DNA, 461 bp, Homo sapiens; identical to SEQ ID NO: 6483
  MAP TO AC006460.3; EXPRESSED IN FETAL LIVER, SIGNAL = 1.2; EXPRESSED IN BONE MARROW, SIGNAL = 0.63; EXPRESSED IN ADULT LIVER, SIGNAL = 0.82; EXPRESSED IN PLACENTA, SIGNAL = 1.1; EXPRESSED IN LUNG, SIGNAL = 0.65

SEQ ID NO: 14556 - DNA, 395 bp, Homo sapiens
  MAP TO AC005040.2; EXPRESSED IN BONE MARROW, SIGNAL = 0.52; EXPRESSED IN ADULT LIVER, SIGNAL = 0.47; EXPRESSED IN PLACENTA, SIGNAL = 0.81; EXPRESSED IN LUNG, SIGNAL = 0.61
gcttcttgccttcagctttgactttctcttttgggccccactgaaaggtggcaacctttgatgttacctggtatgctggttaattttacgtttaacatggctggccatggtatccaaatatttggtcaaacattattctgaatgtgtctgtgagagtgtttcttcagatgagtttaacatttacattggtggacttgagtcaggcatgttgcctctgtaatgtgggtgggtctcgcccaattagatgaggtcctgaatagaacaaacattgaccttgctggaacaagaaggaattcggctagcaggtggccatcagactcgactgccatcaaaaaaattgcaacagcagcatttttcttggtctctaattttcctgcctaccctgagatcatgga

SEQ ID NO: 14557 - DNA, 472 bp, Homo sapiens
  MAP TO AC000120.1; EXPRESSED IN ADULT LIVER, SIGNAL = 0.46
ttagggaagagacagaccagcacaaaacgattttgattacaaaagactccattacagttcattagcaaacttttaccatacccagtcactgggattacagtaagacacaggatgccaatagtttatgtctcaacaatttaaagagtccaaagatcacagctaccaacttattttgccagcatcactgttttttaactggaaatactatttaactgtgttttaatgtgtaatttcctgcttcagcttaatatgttatctgaatagctcttacttgtatgtagcatctagtaaagtttggagaatgtcatcaattttttcttgagactgtctgcgtttctggattgccttatagaaaatatccttgatttcccgatgagctctgtccctgcgtctgtaattaaaagataaagatgattttcttaaataaagaaataaccttctaggatcaaattcattttgagaaccaggaccg

SEQ ID NO: 14558 - DNA, 452 bp, Homo sapiens
  MAP TO AC002978.1; EXPRESSED IN BONE MARROW, SIGNAL = 0.57; EXPRESSED IN LUNG, SIGNAL = 0.55; EXPRESSED IN ADULT LIVER, SIGNAL = 0.57
gaagcaggagacttgggatgtgggatgattcacccaggagcactaaaggccacacagaatacagttcttggggtccttcccccctgccaacctctaccatccctgacaccctccagtatatgacaccatcataaataatgagcacccccagaggaaaaatatcaaacagaagatgggaccctgaatcccaaggccaggaacaaaggcaggtcaccacctgagtccccttccaatgcttcacctctgccaggcccggcctttgaattagatagccaggaagccaccggaaattcagccctttcagaagcagcacagaaaaccacagtttctgggcagccttgtctaccatcatccaggaccatatatttagcactagccaaggtgctcacgtttgaaatcccatctgccggaagaaaggttaccatgacagaatgtcaagttcgaagatagaa

SEQ ID NO: 14559 - DNA, 456 bp, Homo sapiens
  MAP TO AC006071.1; EXPRESSED IN ADULT LIVER, SIGNAL = 0.51; EXPRESSED IN LUNG, SIGNAL = 0.49
aatgtggattcagagtgtgggccaggcccactgtttcaggtcgagcagtgatcccaaagtgagtcctgagaccagagtcagcatcccttggagactccttaggagtggacatttttcagccccaccctacaccttctgaatcagacactctgggagtagcaatgtgggtctgacgagcccgccaggtgattctcatacaccctcaagtttaaggattgcgggactggagtcactatttcagctggagtttcactgggtggccatggtggttgaccagcagttgtgggagtgagatgaacgacatggcctcattcatccgttcctggggatttagatactgtctttgtgccagctgtcccacctgcgttgcctcggcccgggactgccctctgagctccagacactcagacccgatgtatctgtccctggggtgctggtttccttgtgcatggcagt

SEQ ID NO: 14560 - DNA, 473 bp, Homo sapiens
  MAP TO AC005961.1; EXPRESSED IN BONE MARROW, SIGNAL = 0.54; EXPRESSED IN ADULT LIVER, SIGNAL = 0.52; EXPRESSED IN LUNG, SIGNAL = 0.6
ccagctacgcttgctaaaccaactgcctctgaaatgaaaggagagtttagtgaattacagaaagaacttttaggctgaaagcatgtgaggccagtactgaagtctggctctctaccactaagacagccagactggaagctaaagacaacatttcccagatgccttaagagatctggtccaccacaaggacctagcactggcttgagatctaggaggcacactcatcacacctatgttctaatacaggttagctgtcacttttttaatcttttaagaacataaatgaaacttacagaggaggaggcccatcttctgctgcttgtgctgcctctgaaggaaagtgggcccaaggaggcatttggttttctgtggcagctgtagcagaggcccccttgactcatgcctcaattccattagtaatctatttcattaatatgtcatcatatagagtcagggttaggttgaaggcaaca

SEQ ID NO: 14561 - DNA, 452 bp, Homo sapiens
  MAP TO AC006079.1; EXPRESSED IN PLACENTA, SIGNAL = 0.74; EXPRESSED IN LUNG, SIGNAL = 0.64; EXPRESSED IN BONE MARROW, SIGNAL = 0.84; EXPRESSED IN ADULT LIVER, SIGNAL = 0.78
gctttaggaagctccgtgtggactttctctaatgcagaagtgtgtttttttatttgcttggtgacagggtttggtggtgggaagaataaggggaaaattatctggcaccactgactgtaagagaactcagtgtctgttattttttatgatacatttgtaaaaatttctatgctaatattccctctatctagttagggagacagctcatgtccatcaatggtacccttatgcctgggaattttttccccaatttagcaaatgccatcaagtcttcatctctgatagaaagaatcctgagcatatcctctatcagtttattgcctcttctcataactggagccacttccactcccttaagaggcaaatggcagaaaaggtgggagacgtcttggtgttgacttgcactgctaatgaacaggttaacttgcagggggctgtgcaaatgctttttc

SEQ ID NO: 14562 - DNA, 479 bp, Homo sapiens
  MAP TO AC005969.4; EXPRESSED IN ADULT LIVER, SIGNAL = 0.64; EXPRESSED IN BONE MARROW, SIGNAL = 0.76; EXPRESSED IN PLACENTA, SIGNAL = 0.64; EXPRESSED IN LUNG, SIGNAL = 0.61
ttttgcaaagctattaagtaaacagagacaggtacaacctgttttgctttcaaagaattttcactctaagagaatttagtgatctgcctaaagcaaaacatttataaattaaatctgtatacagttaattgaaggtaatagaaaaccccctgacaatttaaaaataaattgttaaacttgttgcttgatcttttatgtacatacttccaaataaatactaatttccatgcctttttcaggcataactctaataatgacatattcatattctaggtttgggttggtaccattgggtcaggccccaagggtcggaatctctgtgctaccttccagaatactgaaacatttgagttccaagatgaagtgggagcacttttgttatctgtgtgccagactgtgagccaaggaattttgtgtttcttgccatcttacaaggtaagggaatatttattgtttcttttgcctttaaataatcattt

SEQ ID NO: 14563 - DNA, 416 bp, Homo sapiens; identical to SEQ ID NO: 14506
  MAP TO AC006121.1; EXPRESSED IN BONE MARROW, SIGNAL = 0.67; EXPRESSED IN ADULT LIVER, SIGNAL = 0.49; EXPRESSED IN FETAL LIVER, SIGNAL = 0.75; EXPRESSED IN PLACENTA, SIGNAL = 0.72; EXPRESSED IN LUNG, SIGNAL = 0.73

SEQ ID NO: 14564 - DNA, 366 bp, Homo sapiens
  MAP TO AC005201.1; EXPRESSED IN ADULT LIVER, SIGNAL = 0.43; EXPRESSED IN LUNG, SIGNAL = 0.41
tgtgtgtgggtcactgtgatagaaaaatattcaaccatatttttcacatcttttatttttaataaaaataatttactcatagtaattttttattcttatgattgatatatttggtttcaatttgatgtattattccaggttaattttctgtatttattattttatattttcctgttttactaggatatatcttggaattggccattctaggttaactccattctttgatttttcttctttcaaggattccaattatacctatgttgctcttctttgcgattcttttatatttatcactatttctggccctgtttacctctgtgttcatttttgcttcattttcttgacttttctcatcttcctctg

SEQ ID NO: 14565 - DNA, 460 bp, Homo sapiens
  MAP TO AC005774.1; EXPRESSED IN PLACENTA, SIGNAL = 0.68; EXPRESSED IN ADULT LIVER, SIGNAL = 0.62; EXPRESSED IN LUNG, SIGNAL = 0.61; EXPRESSED IN BONE MARROW, SIGNAL = 0.54
gagccaagttagatgggaagcacatgggcatttgaatcagactgcagcatcctcaatcaacagtgcagtgcctttgcacatattacttgagacatctgaacctcacttactcatctgttaaaaagggaaaataggtaagtgcctacctcaagaaagggtttcgtaagataatgcttgcaaagggatgggtggcatcatgcttaacactgtagctctaacgaggtcaccatgtttgagacccggtgcccacctgcagctgggtgacttttcccattatgaacaccagcatcatttttcagactcttatcagagccactcgtcaatttctgcctcacattaaaggtctgtgtgcatgtgactcgttgcaccttaaaagctacaccctgtggcttaactaacattctattctcagttcctgacacactgcttgttacctagaagatggacaataactgggtga

SEQ ID NO: 14566 - DNA, 485 bp, Homo sapiens
  MAP TO AC005342.1; EXPRESSED IN PLACENTA, SIGNAL = 0.62; EXPRESSED IN LUNG, SIGNAL = 0.74; EXPRESSED IN BONE MARROW, SIGNAL = 0.62; EXPRESSED IN ADULT LIVER, SIGNAL = 0.64
cctgagagaaccaaagagggctgttactcaatagttgagatttcttgaggtggaaacgcactttcagattttcacccttctcattcaagaggaagaaagcaggtctttctgtcctttctgggtctgaaaagggcaggcaggctgctggtgtctgagggaagaacaaacttaccaaatgcaacagatctgtgatttccagggcaatccttcagcatgcgatattttgttgttgttgttgttttgtttttgtttgttggcccagggcttacctcttaaaagggctggcagaagccagtacaagggggctatgtgtatcagtagggctgggtatgcacaccagacagttctagaagatgctaacaaaggtttctctcactctgcaattatcaccatgtctggccttctgaagggggagaccgagcagagtgtttcttttcagaagatccaggaagtacaaatcctatcaaatagcactgccttctccc

SEQ ID NO: 14567 - DNA, 461 bp, Homo sapiens
  MAP TO AC005216.1; EXPRESSED IN ADULT LIVER, SIGNAL = 0.44; EXPRESSED IN HELA, SIGNAL = 6.8; EXPRESSED IN LUNG, SIGNAL = 0.43
aatcccattcatgaggaagccaccctcatgacctaatcacctcctacaggccccacctcttaataccaacaccgtgaagattaagtttcaacatataaattctggggggacatgaacactcagatcataacagcaggatattcatataagcctcaaagtatcagctcacagactacttaattacaaaaaggaagagtagcttttcaaccgagaaatatgatgctaatcaaatccacaatacattaatcctgacatgatccagtgggaaacatcacctatgtagtaatcttgccaagaattttaaatctgattacaaccatgagaaaatacagaaatccagattgtaagcatcatgctaacgaccagcttgatgtcttcaaagatgttactgtcatgaaagatcaaaaaaagaacagagaaactaccctagtttaaaggagattaacagacctaaccacaaa

SEQ ID NO: 14568 - DNA, 472 bp, Homo sapiens
  MAP TO AC003688.1; EXPRESSED IN LUNG, SIGNAL = 0.72; EXPRESSED IN BONE MARROW, SIGNAL = 0.72; EXPRESSED IN ADULT LIVER, SIGNAL = 0.65; EXPRESSED IN PLACENTA, SIGNAL = 0.72; EXPRESSED IN FETAL LIVER, SIGNAL = 0.7
gcaggtggactgaatgtggcctttgggactaatatgtatgcaactgagctaaagttttggctccagcaaccaagtccaacacaaaataggacatagccaggcctccttagccctcagggcctgaggggaagtggtggctgtagcctctaatagtctagtggtcgtcattcctccctggtgcataaggagcgaaggagcagtttttcccccagtgacaacctgttgaacacacctctgctttcccacactgccctgacacagtgggccccctgagaagaagatgggcatcaaggcttcaaacacagcagaggtgttctttgatggagtacgggtgccatcggagaacgtgctgggtgaggttgggagtggcttcaaggttgccatgcacatcctcaacaatggaaggtttggcatggctgcggccctggcaggtaccatgagaggcatcattgctaaggcggtgagtaccctg

SEQ ID NO: 14569 - DNA, 457 bp, Homo sapiens
  MAP TO AC004976.1; EXPRESSED IN BONE MARROW, SIGNAL = 0.55; EXPRESSED IN LUNG, SIGNAL = 0.53; EXPRESSED IN FETAL LIVER, SIGNAL = 0.72; EXPRESSED IN ADULT LIVER, SIGNAL = 0.61
gtcaggactcaccttctggccttggctcttggtcccatatttgttccccctatagctgtatcagatggaggtatgagtgaagatttggattcccgcaagggatttattaaactttagggatatttctttctcttgcaactcaacttgttgctttcttgtcttggtcccatttataagtctcctgagcttgtaagacagtagttagataacactgggcttaactccattgttttatttttaatttactttgtttattttggatagcggaagccctgaccaggcatggagtatctcacaaagtagacgattcctctgggtcaatcggaaggcgctatgccaggactgatgagattggcgtggcttttggtgtcaccattgactttgacacagtgaacaagaccccccacactgcaactctgagggaccgtgactcaatgcggcagataagagcagaggt

SEQ ID NO: 14570 - DNA, 452 bp, Homo sapiens
  MAP TO AC005325.1; EXPRESSED IN LUNG, SIGNAL = 0.51; EXPRESSED IN BONE MARROW, SIGNAL = 0.53; EXPRESSED IN ADULT LIVER, SIGNAL = 0.53
tctagggtttctccactccgaatgatcgtgtctctagccaaaaatatttattgacctggttggtctcttggcttcctctctttgtccaacgtagaagagacaatggaacccctctaccaggctgggtccattctcatgacggtgaataccctacaggggaaaaaaatgatagagagtggcctccagtctggagacttttccctgtcccagtcatggccctcctgcctcccaccacccgctgacttggagatcctgcagcagaaggtggccggggtgcaacgggaactggaggactttaagaaagaggcattgaagtccattcattaccttgaagacgccttctgcgagatgaatggagccctggtgcaacaggaggagcaggcggctcgcgtgaggcagcggctaagggaggaggaggaccgtggcatcgtgcgcaacaaggttctcacctt

SEQ ID NO: 14571 - DNA, 477 bp, Homo sapiens
  MAP TO AC004982.1; EXPRESSED IN LUNG, SIGNAL = 0.63; EXPRESSED IN BONE MARROW, SIGNAL = 0.53; EXPRESSED IN ADULT LIVER, SIGNAL = 0.66; EXPRESSED IN PLACENTA, SIGNAL = 0.6
tctgagcatttgctcttatttcagtagttctttgctaactcaaggagctactgtacttaaaaacatgcaaaatatgttgtatttgtggcatagttcatatttacactatcataaaattatggccgagaagttaaatattctaaatgtgtcaacatagttctctgtaaaactgacttactttccaaatatattttgaaataaaacaatataaaaatgttttctgtttttaggaatggtggaaagcagcagacataattggagtgggttggataagcaaagtgatattcaaaatttaaatgaagagagaatcttagctttacagctttgtgggtggataaagaaaggaacggatgtagacgtggggccatttttgaactcccttgtacaagaaggggaatgggaaagagctgctgctgtggcattgttcaacttggatattcgccgagcaatccaaatcctgaatgaaggggcatcttc

SEQ ID NO: 14572 - DNA, 473 bp, Homo sapiens
  MAP TO AC000061.1; EXPRESSED IN ADULT LIVER, SIGNAL = 0.42
gagcccatttatataagtcctggttatttctcttcagttaaacttttaattatatccaattatttcctgttagttcattgaaaagcccgacaaataaccaagtgacaaatagcaagtgttgcattttacaagttattttttaggaagcatcaaactaattgtgaaattgtctgccattcttaaaaacaaaaatgttgttatttttatttcagatgcgatctgtgagccgagtctttaagttcattgacatgccaacagaaggtaaacctaccaagtcaaccaaaccatacaagaatggccaactctcgaaagttatgattattgagaattcacacgtgaagaaagatgacatctggccctcagggggccaaatgactgtcaaagatctcacagcaaaatacacagaaggtggaaatgccatattagagaacatttccttctcaataagtcctggccagagggtgagatttgaa

SEQ ID NO: 14573 - DNA, 466 bp, Homo sapiens
  MAP TO AC005053.1; EXPRESSED IN LUNG, SIGNAL = 1.5; EXPRESSED IN FETAL LIVER, SIGNAL = 0.87; EXPRESSED IN ADULT LIVER, SIGNAL = 0.57; EXPRESSED IN BONE MARROW, SIGNAL = 0.59
aaagacaaaagtctttcagtgccacatagactatgctatcttcaactaaccagtattcaaaagcaagattctgaatgcccttattcaatgagaagcacaatgattgagcaataagtaattagttcaagagatatcccattgttttgttcaattttaagatgttaattttctttcctttgtagcataaggacacgggagagaccagcatgctaaaaagacctgtgcttttgcatttgcaccaaacagcccatgctgatgaatttgactgcccttcagaacttcagcacacacaggaactctttccacagtggcacttgccaattaaaatagctgctattatagcatctctgacttttctttacactcttctgagggaagtaattcaccctttagcaacttcccatcaacaatatttttataaaattccaatcctggtcatcaacaaagtcttgccaatggtttccat

SEQ ID NO: 14574 - DNA, 459 bp, Homo sapiens
  MAP TO AC004066.1; EXPRESSED IN LUNG, SIGNAL = 0.63; EXPRESSED IN ADULT LIVER, SIGNAL = 0.57; EXPRESSED IN PLACENTA, SIGNAL = 0.6
atgacctcatgtgggtggagctctgggacttcgtagaggtggtggcagtcacagccaggtaaccctggagtgaagcggtttagttagaagggagcagataaactcgtcactctagtagctttaaccctcaccctgaggcaccttagcaatcagccattgcctgcaagcctccaaagcttgtctttgcctaatatggagcccaaagaagccactgggaaagaaaacatggtcaccaagaaaaagaatctggccttcttgaggtctagactctatatgctggagagaaggaagactgacactgtggttgagagcagtgtttctggggaccactctggcaccttgaggaggagccaatctgacaggactgaatacaaccagaaattacaaggtaaccaaaaagaaatcaattgtcccagttactgcactcccagctccatttctgctacgtttccaattgca

SEQ ID NO: 14575 - DNA, 474 bp, Homo sapiens
  MAP TO AC003049.1; EXPRESSED IN PLACENTA, SIGNAL = 0.73; EXPRESSED IN LUNG, SIGNAL = 0.87; EXPRESSED IN FETAL LIVER, SIGNAL = 0.76; EXPRESSED IN BONE MARROW, SIGNAL = 0.66; EXPRESSED IN ADULT LIVER, SIGNAL = 0.63
tgaactgactgactacccaggagatcactgtggaagtggtggggtttctctaggagagtgagcacaaggctttttgctccatgtaaatttcaggagcccatcagggctttgtctgaagaggaaatattttctcctacagaatggaaaaagcaatggagtagaattcagttcctagcacactccctgccccaactctttcactatcctgctgtgagattggtacaaccatttaacttctttgagcctcagtaaacaaagatggtaatatggaggaggaagaggaggaagaggaagaagaagaggaggaagaggaacagaaggaggaggaggaaaaggaggaggaggaggatactctcaccatgcgttttctctgtgaccccagaatactctcagcatgtgaaaggctggcttcccattgccttttgccatgattggacgcttcctgaggcctcagcggaagcagatgccagcacc

SEQ ID NO: 14576 - DNA, 463 bp, Homo sapiens
  MAP TO AC004227.1; EXPRESSED IN LUNG, SIGNAL = 0.47; EXPRESSED IN ADULT LIVER, SIGNAL = 0.47
aaggccatttgaatagctatcttggacacagattctacagctcagcccagggaagacctggatggctgcagccctgtgtcaattctgacaacaacctcatgggagataccaagccagaaccactcagctaaggtgctcctaaatttgactcacaaaaactctaagataatggcttaacacaacacacatttattaagttttagaataatttgttatgcagaaataggtaaccatataaattaagttacaaattcttattgtgaacacatatatttcttaccaatgtcatcatcagttttgtctgcaggttctttttcaagacattctcgaacaagatctcgcccctgcaatggatctgttcgatcaatctcttcatcttcctcttcgtcatcctcagaatcaacaggtccttctggaagacgtgtcaaatctacatctcctacctcactctccgtagcctatg

SEQ ID NO: 14577 - DNA, 473 bp, Homo sapiens
  MAP TO AC005207.1; EXPRESSED IN LUNG, SIGNAL = 0.67; EXPRESSED IN BONE MARROW, SIGNAL = 0.5; EXPRESSED IN PLACENTA, SIGNAL = 0.71; EXPRESSED IN ADULT LIVER, SIGNAL = 0.45
cctggccaaaggttttctcctcatgacataagaatatttagtggcagctgcaggctgatgattttccactagataggttgtgattttctctcttcagaagcagcatttcatttttcttgagaaggatgaatttcttctatgaaggaggaacttgactaaggtgacctacttctgtctttaccaagcagagaagtgaaaagcagttttacaaggctcttcattgggggtttctgtgtttctttcacagagattgagacagtgaaattggcccgttctgtcttcagcaaactacacgagatttgctgcagctgggtgaaagacttccccctccgcaggagaccccagctttattatgagacatcaatccatgccatcaaaaacatgcgcaggaaaatggaggacaaacatgtctgcattcctgactttaatatgctcttcaacctagaggtaaagggcactttcggagagtcagt

SEQ ID NO: 14578 - DNA, 474 bp, Homo sapiens
  MAP TO AC006115.1; EXPRESSED IN LUNG, SIGNAL = 0.58; EXPRESSED IN ADULT LIVER, SIGNAL = 0.49
gcaaatgcacccctgaacttaaaataaaaattttaaaataacccaaacaccaaatttctttcatctcacatgagattaggcagatcagactgaatgtataaaatgcattctttcattcattcactcaacaaaatttctatttagctcctattacgtgccaggcatacagcagatattcaataaacagaagcagccagttgcttcctccttctcaccttccttctcacatgcctgaataaagtttgccaccatggttcctgcctctttgctgttcttgggctgttttgacctcacccatgtctgaatctcctctggcagggtgctcagaaactgtgtcagcactagttgctctatcatctgctccttggtgaggatctctggctgcagccattgcaaacagagctcctggatttggctcacagcttgatgaggcccattcactgacaggtactgaaaatccccaaacttttgatg

SEQ ID NO: 14579 - DNA, 486 bp, Homo sapiens
  MAP TO AC005066.1; EXPRESSED IN PLACENTA, SIGNAL = 0.64; EXPRESSED IN FETAL LIVER, SIGNAL = 0.7; EXPRESSED IN BONE MARROW, SIGNAL = 0.79; EXPRESSED IN ADULT LIVER, SIGNAL = 0.72; EXPRESSED IN LUNG, SIGNAL = 0.71
gcatgcatgttgttagtggggtggggctaggaacaagtggttggagttacactgtaactaccatttagctatttaaacatagcggatatacgacaattgagttaaagataaattcccagatgataatgaaaattgcctcaaggtggtaggataattaaaaactttatttactctcttcttttttttcaaatgtactgtaacatggccatgttgcttttataattttataatgtaaattattttaaaaagaattacttctcagtcacctacccacatgaggagaatacagaggaggaggcaattaattctgccagaataaatcagattgaaaatgagcctctgagcgagttattcaatcatggaaagaacatgagaagaaaagacagaaataagaggggaaatgccaagactggaagtgcaggtgcccagggcagagtcggctgtggtacctgaggcagtgttgagtggtatcaagggctcagctga

SEQ ID NO: 14580 - DNA, 486 bp, Homo sapiens
  MAP TO AC006083.1; EXPRESSED IN BONE MARROW, SIGNAL = 0.6; EXPRESSED IN FETAL LIVER, SIGNAL = 0.68; EXPRESSED IN ADULT LIVER, SIGNAL = 0.61; EXPRESSED IN PLACENTA, SIGNAL = 0.88; EXPRESSED IN LUNG, SIGNAL = 0.69
gcccatggtttaaatcttcccagtgtggccctcttatatttctccagcctaatttcctatctcatatttcaggatacacaaaactttccttaattccctaaacatgccctcttctttaaattatctgtagctcacagcatgtacttttctctacttggtaagaatttcttcctgactccatcttcttcataaaaatgcttattcagttgatcagaaatcatgcccacttggcctttttgacacccaccttgtaaagggctaacagatggctacacccaaccacagcagggtaccccaaatgagagcaaaaacttaccttgtaaataacagctgaggaccccactccagccaaacacaaaacaatcacaggtgataaaaacgtcaccaagagaacttctgtaatatgcacaacaatttcccccagatctaaagatgttaataaatttctgaaaatatctaactttctcacagccaacagatgtaggc

SEQ ID NO: 14581 - DNA, 489 bp, Homo sapiens
  MAP TO AC005326.1; EXPRESSED IN LUNG, SIGNAL = 0.47; EXPRESSED IN ADULT LIVER, SIGNAL = 0.41
tcatccataacactcaacatgaacatattctagttgtaatgttgtaccttaaggatgaagaacactctaagcatccaggcacaacaatcaaatcatctacaaagagaaaaaaaagttgattatcagatttctcaattgaatattgcaaattttagaggcactggagaaatctctattctgagggaagtaaggtgtaactcaaggatattataccagccaacatgtttttcaagcagaaatgcaatacccagatattctcaagcattgttagtaaaggatcctgaaggagctgggatttgcgaacatcctgatgatgggcaatcgacaggcttggaggagagtaaggagtctttctaaggaagaaaagagatcattggcaaagatgtggagggtgattcttgaagatagcaggaagacaatgatggctagaattgagagcatgtcttggtaagtgagggagacatagttacacaggtaaggtaggcccaa

SEQ ID NO: 14582 - DNA, 497 bp, Homo sapiens
  MAP TO AC004629.1; EXPRESSED IN LUNG, SIGNAL = 0.47; EXPRESSED IN ADULT LIVER, SIGNAL = 0.41
tgtggttccctatttaccccattacacaaatatatcaaacctgagactgcctctgaatgtcttcacaatgaatgttatttggctgaagctgctatgttttctgttatgaactgcagagtgcatttgtctgaaaatatgaatgatcacgctgacatggatatggagattaaggctggtatctgcaccaggctgtttgacctttgtccttggatacaccagaaacactgtattactcaatttatacaaaatgaagtgcccatcctccccagaagcccaccttttctacaccatttgaaagtatttcctgtttcattcactgtagcaaggaacctgggtagtatcatagatcccaccctatcaataatcctcatcaaattctgagggttctgcttccggaattcctcttgaatgtgatttctgctcattccacctgtcactatcattgttgagataattataatcatgtttattttctctccaaatcctgtctcacacag

SEQ ID NO: 14583 - DNA, 466 bp, Homo sapiens
  MAP TO AC005741.1; EXPRESSED IN BONE MARROW, SIGNAL = 0.55; EXPRESSED IN ADULT LIVER, SIGNAL = 1.1; EXPRESSED IN LUNG, SIGNAL = 0.54
tcccaaggttacaataaaggcctaactcttcaatccccagatgtagacaaacatctacaagcattaaggtcatccacaaaaacatggcctcaccaaatgaataaagcatcagggaccagtcctggagaaacacagatatgtggcctttcagacagagaattcaaaatagctctcaaggggaaattcaaaacacagaggaggaattcagaattctatcagataatgtttttaaaatagattgaaataatgaaaaagaatcaagtagaaattctggaggtggaaaatgcaattgacatgctgaagaatgcattagagtctcttcatagcagaattgatcaagcagaagagagaattagtgagcttaaagataggctatttgaaaatatacagtcagaggagacaaaggaaaaagaagaaagaaagaatgaagcatgcctacaagacctggaaaatagcctcagaaggg

SEQ ID NO: 14584 - DNA, 487 bp, Homo sapiens
  MAP TO AC002303.1; EXPRESSED IN BONE MARROW, SIGNAL = 0.53; EXPRESSED IN ADULT LIVER, SIGNAL = 0.46; EXPRESSED IN PLACENTA, SIGNAL = 0.62; EXPRESSED IN LUNG, SIGNAL = 0.57
gtcctcccttctcttccctgcccctcccctgccccgctgtgctgcgtccttctctttggctgattcccataacacctgggaggcaccagcagaggacaccttagacaccggcctataatccccagtcactcatctgcaactcccatcccacaagctcccagaaggcactgctgacccctgcccgtctgtatctggccaatgcctagcacgtggccagacctgatgctgcggatgccggactcttaccttttgatgacctcattctccaccattgagctgtctaccacgatgatctgctccgggatcctgacatccacagaaatgaggcccagagagaagagggtcaggacggccacacaatttcctccagggccgtccagtgaaaaggccaccatgtcgtttgtgggctcgttattatcctggtctttgaaagagaaacgatcaggctggtccaacttgccggcagcccgcattctgtccaaaaact

SEQ ID NO: 14585 - DNA, 456 bp, Homo sapiens
  MAP TO AC004033.3; EXPRESSED IN LUNG, SIGNAL = 0.64; EXPRESSED IN BONE MARROW, SIGNAL = 0.53; EXPRESSED IN ADULT LIVER, SIGNAL = 0.58
agagaagaggaggcaaagcccaagaaacaggatcactgaatgaaaaatgaactctaagacccccttctgtctctcacacttgttgactaagtcatagccacaaggagtaggggaggctctgaggtgagcaggagaccagccactgtcaccgccagtacctttactagcagagccaggattacctttgttattcttcttacaaacagctctagtgaactcacctgaagtaatcgcaggacgcagccagcaggatgcgatgggcctcgatgtgtctgccctccaccaccagcacaacatcgaagaggattccgctgtcccggagagccagcagccctcggagcagagcctgggagtgctgtgcgctgcggtaggtgttgttcacgcagtgtgggtgtgagggctgtgcaggcaacttgcagagctgggtgaactcctgctcctctgccatcctgacag

SEQ ID NO: 14586 - DNA, 472 bp, Homo sapiens
  MAP TO AC006151.3; EXPRESSED IN ADULT LIVER, SIGNAL = 0.52; EXPRESSED IN LUNG, SIGNAL = 0.51
cgttggttgatcatggtgtcagtgtagacttattggtgtaacaaacgcaccagtgtggagctaaatgttgattgtgggagaatctgtggggacagtgtgtatatgtacttcctgctcaattttgctgtaaaagtagaactgctttaaaaataaaatttgttcttttttaaaaaaatgatgctttgctattctagatcttaagctagatgatatatttcttaaagctactgatattgtattaaaagaggttgctgagatactcagtagtgtatacctgaaatctgtttttattggctacttcttggtttctttcatcttaggtgaagatgacaacacaatgcagaaggagaaacatgacatcataaattttgacaccaaattttgatttaaaattgtagtaatagccacaacaaatactgcataaacctcagatgtagcaaataaaaatgaggtcctttcctaccctatgctt

SEQ ID NO: 14587 - DNA, 456 bp, Homo sapiens
  MAP TO AC004049.1; EXPRESSED IN BONE MARROW, SIGNAL = 0.51; EXPRESSED IN LUNG, SIGNAL = 0.47; EXPRESSED IN ADULT LIVER, SIGNAL = 0.43
aaattcttggtcacactctcagctggacccttggtgctacctggagatccctctacttgttgatgggcagcttcccgggccactcctctcaggtactctactgaaggtttttcattctcctcaagctccagttctgccacctcacttcttactctcagcccaaaagcaggtaactccatcaacttccttcctccccctcccctgccctctacttaaaaacctcacgcaaccagagcacctctgcctttttcctgtctgtttcagtaaaaagtgtgtcctgcctccccaaggcaaggcaaaccaatccttacaactggagtctgtccccttcctttttcctctttcaggaggacgctgccttctcagccctctgctgcggcagtaagcatgcttaagtgtgagtatcctgaaaaaagcaagcaaacaaacaaacaaacaaacccctttttgcagcta

SEQ ID NO: 14588 - DNA, 485 bp, Homo sapiens
  MAP TO AC006368.2; EXPRESSED IN ADULT LIVER, SIGNAL = 0.53; EXPRESSED IN LUNG, SIGNAL = 0.57; EXPRESSED IN BONE MARROW, SIGNAL = 0.49
ttggacagtgccagcattagtctaagtaatttgttttggaggcaatatccctgctaaatagagtgaagataatttgtagtcttcactcaaaagaaagagctcagcaattttcttgtaacatattagtaaagatgtctccgtttcatacacctgaggtccatgtcactaagcttgaccatgtgacataaagaagacagctttaggattaaagctctgactcatggacacattataggtcttggcttaagcttttgaattattggtctttcccttctagtggttgagctagatgataataatataaatctctctaaagaggatcagacagataacatcaaaagcaccagggtcctacatactcagagctttcagaaattcaagactggcttctatctccttgggaggaaaaacatcatgcatatgtttggtcagaaaagaaaataatttctgaaccatgtctcttaacccctcactaaggatccctg

SEQ ID NO: 14589 - DNA, 444 bp, Homo sapiens
  MAP TO AC005209.1; EXPRESSED IN PLACENTA, SIGNAL = 0.59; EXPRESSED IN LUNG, SIGNAL = 0.52; EXPRESSED IN ADULT LIVER, SIGNAL = 0.67; EXPRESSED IN BONE MARROW, SIGNAL = 0.81
cccacttcccatcctcagtccttaaggaataacaaacatcacctgagacttcatggagctggtagatggatgttaagcatccacttaaaagggcttctcaagagaagggcatgttggaagtagcactgatgcctaatttccagggaatgtgcagagcaaatcaggtgtctctgctctgtggaaccagccccagaagtcaataatgagggcccttattcctgtgtctcatcaccaggatattgaagaccctgtggagcagacccaaagcccgaacctgtattgtcactttgcaaatggtattggggagcccaaatacatgcctgtacagtcttgggaacttttgacccagactctggtggaggccttggagaaccacaatgaagtcaacacagtgatggacctagttctctttgaggatgccatgcgccatgtgtaagtgtgctt

SEQ ID NO: 14590 - DNA, 460 bp, Homo sapiens
  MAP TO AC004169.3; EXPRESSED IN LUNG, SIGNAL = 0.51; EXPRESSED IN BONE MARROW, SIGNAL = 0.52; EXPRESSED IN PLACENTA, SIGNAL = 0.67; EXPRESSED IN ADULT LIVER, SIGNAL = 0.49
gcttgcaagaaaacaggattctttggagaccaaaaccccaagtggaggcagaaatccagagagctgagctagccctgggccagtgtcctctccctgcacccctggagtagcaggtggcaggtgccccccaacacctatcctttcctcgaagaacagaactcccaatacagccatgtggaatagagactgcaccgtctaacctcccccgaaactcagggtgaacatacactcaatatgaccaaagaatgcaagcaggagttctgtgtgaaacacctgagaagtgtcctcaaaaccaccaccatgcctttcttcaccccttttcctcctttccaacgactgggatatgcagacaatggctggcacagctgcagctactctggaccttgttggaagtggaagccaggcagagtgaggtataaagaagaaacatggatccctcacacgaaggaacatcaaacca

SEQ ID NO: 14591 - DNA, 474 bp, Homo sapiens
  MAP TO AC005078.1; EXPRESSED IN LUNG, SIGNAL = 0.56; EXPRESSED IN ADULT LIVER, SIGNAL = 0.47; EXPRESSED IN BONE MARROW, SIGNAL = 0.54
tgaggtgtattgctttcttagtctgtttatggatgagaaggccttcagtgaagtaaatgttattcttacacgtacgggtgtagagggtgtgttcaccatggctcgtcttcaacgtgttgtatgtctcgtaaataaaaaagaaacatgacgtttctgattttaaactcttaccatttatgctgaactttgtcttgtaaaacatttcaaacgtttaaaagttatatgtaaaatttaaattgcaatgatcttttagtaattctactcattctttggggcaggagaaatcccagatctgttcagcgatgaagatgtggacaagataatttctggaattcataatgaagttcatgctctgggcatggtagactccagggaaaactgttggaaattctttatggccagggtgcgactacagctcaaagtaagaaatacttgcttaatttgcatgttagttaaaacctgctattgcaactc

SEQ ID NO: 14592 - DNA, 456 bp, Homo sapiens
  MAP TO AC004460.1; EXPRESSED IN LUNG, SIGNAL = 0.43; EXPRESSED IN BONE MARROW, SIGNAL = 0.7; EXPRESSED IN ADULT LIVER, SIGNAL = 0.54
aactcagccaggtgcaaaagcagccacagatgctatgcaaatgagtgggtatggctgtgttcccataaaacttcatttacaaaaatgggtggcagaccacatgtggcccatagtctataacttgcagacctcttatctacacaaacacaaggatgcatttacactccaccggcaaagattgagcacccactggggccccagcaccattcactagtgtaagttactctcacttgtaatgtcacagttgcttttccccagcaatcagctgctacagtcagcctgggtcaacctgctgcatatccgttgtatttctctggctgggatcatgctgcctgggaaatctgacattcttaagaatgttgttggattgatggcagctcttagagggatggtagatagttcagtagccatcttcagcaagtatggtatttccgtcaactgtggattaaccttggc

SEQ ID NO: 14593 - DNA, 471 bp, Homo sapiens
  MAP TO AC004134.1; EXPRESSED IN LUNG, SIGNAL = 0.42; EXPRESSED IN BONE MARROW, SIGNAL = 0.54; EXPRESSED IN PLACENTA, SIGNAL = 0.59; EXPRESSED IN ADULT LIVER, SIGNAL = 0.4
gggcaaatatgagcataagtacaatacaaagatttgctttaagatccctgcattttagtacttggttctcacctcaaaaacacctaggatatgaaatatacaatctgtgagacacacaaagtcatgtttcccatagctaccccataacccagtattccaaagacaaggttcatattaaacacgctttaacaagggactcattttaaatactgctctctttgtaaaagcagaagcttattaccattggatttgaatctgctatgagatcccgtagagaatccagaaatccctgatcttccaccatttgggcattgatatcatggagttttgccacgcagactgctgctgttttccgaacatagggatcctcatccttcaagcacttgcggagcggctcacagagatattctgtaattttgtctacccggatgcaccccatggttctgactgccaaggctcgaatcaaaggat

SEQ ID NO: 14594 - DNA, 457 bp, Homo sapiens
  MAP TO AC005881.2; EXPRESSED IN LUNG, SIGNAL = 0.63; EXPRESSED IN BONE MARROW, SIGNAL = 0.49; EXPRESSED IN ADULT LIVER, SIGNAL = 0.45
tcctcttagctgatgaagaagaatcctctcatgagaccataggcatggactgaaggagaggcagcaagacctcaggagtaagtgttgtaagatattgagtcacttgctcatgcaacttgtacattctgaacctacttgagcctaatttcttatatgctgtttccactgaatgaaggattgctgttatccatattcaacattatgctttggtgggtcagataccagtgttcatgatggcagcttgggttgcacgattacttaatgtcccatatttaggcctagtggtaatacaggagctttttctcaaaataggaatcattatagtagaagagggtgtgactttgctccagagacctgtggaccttcctactggggtttgtcatagactccatataacatccctgtatgccacagacactgagcatcactggctctgttgagtcatcaagcccaatgg

SEQ ID NO: 14595 - DNA, 463 bp, Homo sapiens
  MAP TO AC006084.1; EXPRESSED IN FETAL LIVER, SIGNAL = 0.67; EXPRESSED IN PLACENTA, SIGNAL = 0.64; EXPRESSED IN LUNG, SIGNAL =   1; EXPRESSED IN BONE MARROW, SIGNAL = 0.74; EXPRESSED IN ADULT LIVER, SIGNAL = 0.5
cacccttccaggaacaaatcattatagtaataatttgccttcatcttccatataccaactaagcatgtttaactacgaacgtccaaaacacttcatccagtcccaaaacccatgtggctccagattgcagcctcctggaccagaaacctccagcttctctagccagaccaaacagtcttccattatcatccagccccgccagtgtacagagcaaagattttctgcctcctcaacactgagctctcacatcaccatgtcctcctctgctttccctgcttctccccagcagcatgctggctccaacccaggccaaagggttacaaccacctataaccagtccccagccagcttcctcagctccatattaccatcacagcctgattacaatagcagtaaaatcccttccgctatggattccaagtaagtgaatttttatataccgcatgtacagtgaacttatatc

SEQ ID NO: 14596 - DNA, 470 bp, Homo sapiens
  MAP TO AC006150.2; EXPRESSED IN PLACENTA, SIGNAL = 0.7; EXPRESSED IN LUNG, SIGNAL = 0.54; EXPRESSED IN BONE MARROW, SIGNAL = 0.61; EXPRESSED IN ADULT LIVER, SIGNAL = 0.54
cctttgaaactggtcttttcagataatatacatgaagcatttattagtgttcctggctcataatatgtactctataattaatgtgagtgatagtattcgctattaccatcacatctatcttcatgttctaagtccctatatgtgtttaacccttttctctgcttctactttataatatcatccaactaattcctgatacacatctcttatatcccacaacatctttctgcataagttgaccagatgccttaatttttacctcgttcactatcacgtgctgtttggttctttttctcctttccacttcttgcattttattctccctgtcaccatgttattctttccattcttatcattcttattgcattctctatatattgctttttctgtactcatcattttccaagtcttttggtgcctgctattaattagttgtttctttttctctcttcaacacctgacccaactgc

SEQ ID NO: 14597 - DNA, 476 bp, Homo sapiens
  MAP TO AC002310.1; EXPRESSED IN PLACENTA, SIGNAL =  13; EXPRESSED IN LUNG, SIGNAL = 0.52; EXPRESSED IN ADULT LIVER, SIGNAL = 0.53; EXPRESSED IN BONE MARROW, SIGNAL = 2.1
cccttatggttgggagcagctgtccaaggcaccgcaccggggacgcccctccctctgtgcccacccccctgtcccccgagctgaccagcgtcatggctgctacgtgtgcgggaagagctttgcctggcgctccacactggtggagcacgtctacagtcacactggcgagaagcccttccactgcactgactgcggcaagggcttcggccacgcttcctccctgagcaaacaccgggccatccatcgtggggagcggccccaccgctgtctggagtgtggccgggccttcacgcagcgctcggcgctgacttcgcacctgcgcgtccacaccggcgagaaaccctatggctgcgccgactgtggccgccgcttcagccagagctctgccctctaccagcaccggcgcgtgcacagcggcgagacccccttcccctgcccggactgtggccgcgccttcgcctacccctcggacctgc

SEQ ID NO: 14598 - DNA, 467 bp, Homo sapiens
  MAP TO AC006254.10; EXPRESSED IN LUNG, SIGNAL = 0.48; EXPRESSED IN FETAL LIVER, SIGNAL = 5.1; EXPRESSED IN ADULT LIVER, SIGNAL = 7.8
cacggaccaccgtaattgtagtgcacaggtttcctcttctaagcacttcccccagggggtaactccatgaccctgcagacaccattgtcattcccattttttgccattgaggagaggtgaatgcacttcctcacgactgcacagtgaggaagcgatgctgattccagagatgctaaccactgggatttcctgttaaatcactctgcctctgaccaggaggataaatcccaaaccagactctggcagcaaaactggcatgtggtgagtgatggggctgtggaagcttctgctgggtgagctgtttcaagctgcagcctacctgcttcactttctggcctctcatggagccactgatgtcaatcacaaaaaccacgttcttgttcatgtttgtcaggttttggggggcaaagaagtgggcaaagtggttattggccacctgaaatagaggagaacgagtgaggccactc

SEQ ID NO: 14599 - DNA, 454 bp, Homo sapiens
  MAP TO AC000004.1; EXPRESSED IN PLACENTA, SIGNAL = 0.73; EXPRESSED IN ADULT LIVER, SIGNAL =  18; EXPRESSED IN LUNG, SIGNAL = 0.7; EXPRESSED IN FETAL LIVER, SIGNAL = 0.79; EXPRESSED IN BONE MARROW, SIGNAL = 0.79
cgtctgctagcacaatatccgttcttcagccatggatcaaggagtaagttcacctttcaagtcttattgtttaagaaatacattttgtaaggctttagatgtcataggtagtggttgttctgatggatctgggcaaagtaaactgaaaaacttctgggaaagatttgccattgtagatgacattaagaccattaatgattcatgggagaaggttaaaatatcaacatgaacagaagtttggaagaagttggtttcaactcttatggatgactctcagggattcaagacttcagtggaggaagtaactgtagatgtggtggaaatagcaagagaattagaattagaagtggagcctgaagatggagctgacttgctgcaatctcatgatcaaacttgaagggttaaagagttgctttttatagatgagcaaagacagtggtgtcttgagatggaa

SEQ ID NO: 14600 - DNA, 445 bp, Homo sapiens
  MAP TO AC001228.1; EXPRESSED IN LUNG, SIGNAL = 0.41; EXPRESSED IN BONE MARROW, SIGNAL = 0.54; EXPRESSED IN ADULT LIVER, SIGNAL = 0.51
gggaacagaccagtgggtagagagagctgtgtttgctccaaaggctgggcgggtggcagggggtgggggactggaggttagaagctggcaggtggaaaggatgggtgttcaggggagtatttcaccagactatgcaaggtgcggactgcgccgtgaggtcagggtgggtcaggagagatgggaggccatggctgtgttcaggaagtgggcagttggcccagggagctgcccagggcctgactacccccatgcaccccccagggaccatgctgggcctctgcgcctctgtacaaccactgctccgaactctgggacccacggtcggcggcctcctgtaccgcagctttggcgtccccgtcttcggccacgtgcaggttgctatcaatacccttgtcctcctggtcctctggaggaaacctatgccccagaggaaggacaaagtccg

SEQ ID NO: 14601 - DNA, 465 bp, Homo sapiens
  MAP TO AC002123.1; EXPRESSED IN ADULT LIVER, SIGNAL = 0.45; EXPRESSED IN LUNG, SIGNAL = 0.5
tgagatctgcttgtcgttataaaagactaaaggttgtctttcagtgtattttgttgtacaacaggatgttattttattgctgatatcatatatgaattcttaccacttgcttttcacatggcagtttgagtgtcggaaacctgagagttccatcagcctaaattatttttccttttaccgtgtctgtgctgctttcccactccctctcctgcattcatccctgcccactctgcagctgtgcaaagctctaagctcttgagaatctgcctccttgtcttcacagagctgagcacagagccctctttaccctagcggctgcgcagctcaggcttcatcactgtggtgataacagagacctgctcgatgctgatgatgttatgatcctgagtcaaggatttgacttttaaaacgtgatgtttttccatcggcttctggaataagtactccagcccagatttcagtgtc

SEQ ID NO: 14602 - DNA, 486 bp, Homo sapiens
  MAP TO AC004540.1; EXPRESSED IN PLACENTA, SIGNAL = 0.71; EXPRESSED IN ADULT LIVER, SIGNAL = 0.46; EXPRESSED IN LUNG, SIGNAL = 0.62; EXPRESSED IN FETAL LIVER, SIGNAL = 0.7; EXPRESSED IN BONE MARROW, SIGNAL = 0.52
ttagccaggttaccccagtgtgctaccaatgggtatttcagagttcctcagcagggactgcgtctccaggccctgggacaccttgcaaacctgttgtttctattgaaagggcccaggcccaccccactgctggcctgtggttctcttctgctctttcactctagcttgttctcttaggacaccatctctaggaagaggggtggccaaccaagacagatgggtcgccagggcacccgctcccactctggttaataatgatctcccttcccctctgcttcccagtaccagagatgtctccaagagcaccagcaaccccagctatctggatctgaagtggatatgctcagagacatcctggcccaccccaaagaagatgctgctgcactcagaagacgccagagctagccaccacccacactgcaagtctggaagctctgcaaggacccagcaaggcagcctgctcagcgaaggctttgtctcctgtgg

SEQ ID NO: 14603 - DNA, 444 bp, Homo sapiens
  MAP TO AC004920.1; EXPRESSED IN PLACENTA, SIGNAL = 0.71; EXPRESSED IN LUNG, SIGNAL = 0.71; EXPRESSED IN BONE MARROW, SIGNAL = 0.63; EXPRESSED IN ADULT LIVER, SIGNAL = 0.64
ttatcacctagaccctggtgcgtatgtcgggctccttcaacttacccatccttccctatttgaaagcgggctgtctctgatagacttggtcttggctcattcctttagtgtctgatgtgtttggaagtaacttcatacggtcttcctgttcccagaagacatcaaatcctgacccactccaagttccacctgtaagacaagtctcatctcttccttctctgctctgcctgcacagaggagctagtggactcatcttatataacctctcctttgccttcttcacagggaacataagaatgaaccccttagcgagcacttctcaagtgccaagcacatgcctaagtactttacctggattgcctcactcaatcccaagctcagccctacgagagaagaaccctcacttctccattatgggtaaggaaatggagtcccagagaaatg

SEQ ID NO: 14604 - DNA, 475 bp, Homo sapiens
  MAP TO AC004925.1; EXPRESSED IN BONE MARROW, SIGNAL = 0.55; EXPRESSED IN PLACENTA, SIGNAL = 0.65; EXPRESSED IN LUNG, SIGNAL = 0.67; EXPRESSED IN ADULT LIVER, SIGNAL = 0.6
ggaaatttagcattctttacagaggagaaaaaaattgatgctagaaataattatgagtaactttgtatcacaaaaccaggcatagaaatcactggtagttaatgtaaatatgatttggatatacttacccacaaaatatcaaataattatctattgaaaaaaagttatttgttctgcaaagtgaattatctccataatttacataatttaagaaaaagtaactgactcatctacatgtaagaatgatactttttaatttgataacttgttaaatggaaatcttcacgcttacaccaaaatcgatttctatcatttcattgccaataattttaggcaagaagttccacatgagggcgatttggatataatttttcaggatggtgcaactaaaaccccagatgtcaagctacaaaatacatcattatatgattcaaaaatctggaccactaaaaatcaaaaaggacgaaaagtagca

SEQ ID NO: 14605 - DNA, 375 bp, Homo sapiens
  MAP TO AC005023.1; EXPRESSED IN PLACENTA, SIGNAL = 0.59; EXPRESSED IN LUNG, SIGNAL = 0.54; EXPRESSED IN ADULT LIVER, SIGNAL = 0.46
agatggcgacaaaagctacctctagttggcttcactgcccattagcatcaagacactcccagtgtaaagataatttacaactgccatagccaggggccatggcaatagccaggaagttaccttgaattttctggatactcctcactcgttttcttgaaagttctcaataacctgcctgttgattagcacataattaaaagtggtataaatacagctgccaacagcccatcagctgctggctctgggtgcactgcctatgggttagtgctgttctgcaagaagcaataccagttcaataaaagttgctctatctcactacctgctcatcctccatccgggcaaaatcccaatttggcagcttgcctgtcctacgtc

SEQ ID NO: 14606 - DNA, 496 bp, Homo sapiens
  MAP TO AC006327.3; EXPRESSED IN LUNG, SIGNAL = 0.44; EXPRESSED IN ADULT LIVER, SIGNAL = 0.47
ctcccagacactgtcgactcttcagtcaacaggaatgtgtgtaggtcctccaattccaatgtttttcatgtctgtgtgcctttacatgtgctgacctggccctactgcccctaatcccttcccttcctgattcccctctatattccatctcctcctcagagcctcactcagcgcagtcatttctgttttggccaggcttcctcctctgtgcccctcctattagcattatttaaatttatttgcttatgtgtttgttcctctcctggaaggtgaacccctccattgacttcctcattagcatagtccctggcatgtggtatctgcctaataaatgtttacagagtggatgcatgcgtgaatatctgtggatttggtttcttgaccatggtttcatggggaaagcaactgagggatatacgaagtaggtgcattcctaataatttaggtaaggccaaaggtcaatctaatataaaactaagccaaccaaggatacctg

SEQ ID NO: 14607 - DNA, 489 bp, Homo sapiens
  MAP TO AC006464.3; EXPRESSED IN LUNG, SIGNAL = 0.45; EXPRESSED IN ADULT LIVER, SIGNAL = 0.47
ttactccttggtcgcaaagcaattttgtggtgaaaacgtcataaaattagtgtatttttttctaattatgcttcagttataaggtataaagcttatctatcatatgccatgtcaactaaatatgctcccattttagaaagcattttaaggtcacttaaggcaagcagagagaggggacgtggcttttaagtttcaagagaagtgcagtattcactgtcttaaaagattttaaaacatgatttccatcttttcccaggtgatgagcttgtcgcctgctcccttatctctgttaatcaaggcagcaccaattctgacagaggagatgtacggagacatccagccagctgcctgggagctcctgctcagcatggatgagcacatggcaggggcagcaggtaaagaaagaccacctggaaccctgtgcctgctgccactgctgttactgatccaagtgtttaaataagagaggtgtttccattctatttttgc

SEQ ID NO: 14608 - DNA, 491 bp, Homo sapiens
  MAP TO AC005028.1; EXPRESSED IN PLACENTA, SIGNAL = 0.61; EXPRESSED IN FETAL LIVER, SIGNAL = 0.72; EXPRESSED IN LUNG, SIGNAL = 0.57; EXPRESSED IN ADULT LIVER, SIGNAL = 0.68
ctttccattgcctcctgttgcccatcagcctggtggtccatccgtcattctggccaaaagtggccagcttccattcaccagaacatagtttttcttctcattcaaccaactgatgatcttgaagatctcgatatgcatgagctctcattattggctccctttccttgaccctccctggtgacatttctttcctttccacttgaccccaacagacatctcagccaagccctggtggtcagtcttcatgcagcagccaacagtcccccatcagcaactattccaacagtgggctcgagcttcctctgaccgatggaggtagtataggagacctcagtgccatcgatgaaaccccaatcatggactcaaccatttccactgcaaccacagcccttgctttgcaagccaggagaaacccggcagggaccaaatggatggagcacgtaaaactagaaaggctaaaacaagtgaatggaatgtttccgcgactgaac

SEQ ID NO: 14609 - DNA, 414 bp, Homo sapiens
  MAP TO AC005886.1; EXPRESSED IN LUNG, SIGNAL = 0.59; EXPRESSED IN ADULT LIVER, SIGNAL = 0.42
gagcgacctttttctcaagctaatgaaaggaaagacgttccttattcaaatatttattaaggaacttggggttacctctgatcgttaacattttctaatcaaggagcagtgaaaataaaaacaagattaattgatgctgtcttaggtttgcaaggctccaatcttggctgaaggacaaagaaagaattatagaagatccccaaggaatggtctcttctaaaaagaaggaacctattttacagcctgaatcttagctgggaagcaagactcacttcaacattgacaatgtcatgttccaagtgaggcagagtagaggtcagagttttcgctggctgaaaactgatcattttcatgccaagctgttgaatgattctggccatttcaatatggctgggttccttggagaagacgctg

SEQ ID NO: 14610 - DNA, 447 bp, Homo sapiens
  MAP TO AC004241.1; EXPRESSED IN PLACENTA, SIGNAL = 0.63; EXPRESSED IN BONE MARROW, SIGNAL = 0.58; EXPRESSED IN ADULT LIVER, SIGNAL = 0.58; EXPRESSED IN LUNG, SIGNAL = 0.66; EXPRESSED IN FETAL LIVER, SIGNAL = 0.67
agcgttttgtgctttcatctcttaaacatgaccatggccttatatatttacgtatacatgtctctctcccttgtttcgacctacctgggataagtgctttgtatagctttttatttttgtattctcagacttctaagtctgtctagccaccaaattgaatttactaatcactgggatattagctgtaagatcattgcagccttttaacttgtgaccctaaaataggaaacctttaatattttgatttaaggaattgattttaattgttttagaaaccactcaagaaggttattattgaagaaactggtaatttgatacagactattgatgtgccagatagcactactgctgctgctccagagaataatcctattaatctagcaaatgtaatagcagccacaggcaccacaagtaagaagaattcaagccaagatgacctttttccca

SEQ ID NO: 14611 - DNA, 474 bp, Homo sapiens
  MAP TO AC002287.1; EXPRESSED IN LUNG, SIGNAL = 0.48; EXPRESSED IN ADULT LIVER, SIGNAL = 0.41; EXPRESSED IN BONE MARROW, SIGNAL = 0.51
tccatgttttctatttcctgcactgttaaaaagttgaacttctaaaaaaaatgaagcaaaaaactcaggtagctgatatgaagaaaatcactaaggggctacatgaatgacagaagtttaagacatcataatgtacacaataaattctaaatatatttgagcagtgcacttggacctttccagatctggtactagttgttatcttagacactctcctttgcacagcctggactctgataatacaggaatatttaaggtttctcccagcacttaacacagttttacacatcttggtccagaacgtgcttcccagcattgtcttgtgggtgggctcctgcttgtccttcaggtatcagcaccagcatcacttcctccaagaagccctcattatccccctctatgcaagaaagaattcatcctttgcttctctctgcctcctgaataccttgtaatacccgtattgttgcactcatt

SEQ ID NO: 14612 - DNA, 471 bp, Homo sapiens
  MAP TO AC004765.2; EXPRESSED IN LUNG, SIGNAL = 0.59; EXPRESSED IN BONE MARROW, SIGNAL = 0.71; EXPRESSED IN ADULT LIVER, SIGNAL = 0.48; EXPRESSED IN PLACENTA, SIGNAL = 0.6; EXPRESSED IN FETAL LIVER, SIGNAL = 0.8
gccaacttgatctcccatttctttaagaaaaaactagttacctaatactatcattgtttagatgaaaaagcatttggaagacttatttttctgggtctcttaatagaatttttattttaaactatcatagccctgcttactaaaagtattattaacctttagtgttactgaatcttagtatgctaaatttgatattcccatctccagtcatgttagaatttaatggaattcttcaaagcaacaaactcctatcattgataacttgtttggtatactttgctttttctaggtatctgaaaaggtttaaagtgatgaagatcaaagttctaagaagctggtgccgtcagatccttaaaggtcttcagtttcttcatactcgaactccacctatcattcaccgcgatcttaaatgtgacaacatctttatcaccggccctactggctcagtcaagattggagacctcggtctgg

SEQ ID NO: 14613 - DNA, 478 bp, Homo sapiens
  MAP TO AC002289.1; EXPRESSED IN LUNG, SIGNAL = 0.56; EXPRESSED IN FETAL LIVER, SIGNAL = 0.68; EXPRESSED IN ADULT LIVER, SIGNAL = 0.45; EXPRESSED IN BONE MARROW, SIGNAL = 0.51
cacatgtaccccttgagcctaaaataaaaattgagaagaaaaataataaaaataaactcattgcacatttaaaaagagagttatcatggttggattttcttttttccttagtaaataaaacttccattatttcacactaaaaaaatgtaaagagatacttggcagttggactctgtgaaataaagcggtattgctcagtgacttcaccactttctggacctcaaattaacttttcattattgcaagtgtatccagtgcagccacaagccccagcaaataatttcctaggacatcactgacattcggacttgaagtgtcctcactgtcagatctgaggccacagcagtgaagcccgacttcagcatcatctgggtctggggctctgagagcaactgaacctttctccttcctctgttgtgctgtgggctccaaggcaggtgacaaatggaaaccaagttgaggggaaagttcgggtaga

SEQ ID NO: 14614 - DNA, 489 bp, Homo sapiens
  MAP TO AC006312.8; EXPRESSED IN ADULT LIVER, SIGNAL = 0.43
agagaaccaagctgtcctgctgagagtatatgatctaatggcaaggaaaccagggaccacatcattggagcacagagcccaagggcaagagcagccaaggagttaagagcttgggctctggagccagcttgcctgggtttcctgactctaccaggcacctggtgatgaaggagggcaggaaaggtggctggaggagccacggtggcagggcacacaaagcaagtgaggagcttccagagaggcacctcatgtgggggaaagggtaggtgggccacccagctgcagcccccttcctgatctgcaggtactccaacctcgacctgaagacccaggaggcctatgagatggccgtgagaggcctgatccggcccatgaacaagtccccgatgctgataactggcatccgatgcctctactttgcacctccggaattcctcttaggtaggttggccaaggaagttggagcagtgagatgggacccgtaggttt

SEQ ID NO: 14615 - DNA, 441 bp, Homo sapiens
  MAP TO AC006313.1; EXPRESSED IN ADULT LIVER, SIGNAL = 0.47
gcaaaagtaattgtggtttttagcagtacttttaataatgatgatgttaatgaaaaatccatattatcttggaaaagtcataagcacttaatccctttatcagcacagtgtgtagtttacactggggcacaacagtgactatatgtccaagtctatagaactaattctttttgttcttatggcaacagatggacaacagcaactggaccagtgtgtcccattttgttctcttgggcatttccacccacccagaagagcaaatcccactcttccttgttttctcactcatgtacgcaatcaatatttctggcaacttggccatcatcacactgattctctctgctccacgcctccacatccccatgtacatcttcctcagtaacttggccttgacagacatctgcttcacctccaccacggtccccaagatgctgcagatta

SEQ ID NO: 14616 - DNA, 431 bp, Homo sapiens
  MAP TO AC005069.2; EXPRESSED IN ADULT LIVER, SIGNAL = 0.48
aacttgtcaaagatgtaaattatccctaaattaatttgcaaatttaacataaattcaatatattatgcatatactacctattcagaaataaaatttaattttaaaatctcaatttcaataatccaagctgacattaaaaagatcatctaagattcttgatgcccttgaatgaggaagagagagtaaaatgatcactagcttgagtctttgacccttctatcagaaggtgttttctttgctcaagaggaagacaccccctcaggaactcactttcctcaaaggatcacttgtcaacctcaagttgccctatgagcctccagaaaagggccagaatctccacaaagactcacttgacatactcacaaagctctgctatgaacactattttcccaaccttaaatctcaggaggactaccaaatgcaggccagtt

SEQ ID NO: 14617 - DNA, 472 bp, Homo sapiens
  MAP TO AC005034.1; EXPRESSED IN ADULT LIVER, SIGNAL = 0.42
tgtgactcaacatatttctagaagccatttttttcttttttagactatcattccaattcagactttctaactttatatttaaatggattttagcttatttctatttctttcagtaatctttatcttaaaaatttcaaattaacggcacattttctacatgcaaaactttgtgctaattcctttatgaaatgcttttactgcagtatgaaacatgtataggaacgtggacttagattgtaagaatatgttttctgttctatttaggtgtcgagatttgctttgaactttataatcctcgggtccaggagattcaggtggtcaaattagagaaacggctggatgatagcttgctatacttacgagatgcccttcctgaatatagcacttttgatgtgaatatgaagccagtagtacaagagcctaaccaaaaagttcctgttaatgaggtatgggttatacatttgaaactaga

SEQ ID NO: 14618 - DNA, 454 bp, Homo sapiens
  MAP TO AC006484.2; EXPRESSED IN PLACENTA, SIGNAL = 0.61; EXPRESSED IN ADULT LIVER, SIGNAL = 0.48; EXPRESSED IN LUNG, SIGNAL = 0.46
aaataaacactttcaggccctacatactagtatttcctgtaaagtagggtatactttaaagagaaataaaaacagactgaattcaagaggcataaactagatctcatttagcagattgtatgcttcctagatgaggccagtcaggtcaaccaagcaaactgtaattgaaataaaaacaaaaataccaatcggttgtttaatatgaaagtttatccaaagcagtggaattatgattgagtgaggcagaagattttacatattcgctcaacagatgttcattactaaattccaggctctgtgtcaggctctgggacttggtggtgaacaggagaggagagacacagtacatgcctgtccagaacttacattgcagaggggaagaccagcaggtaggtgaccaagtgcagtcatgtgtactcaaagttaatgacagtggagtgttgaatgctctgga

SEQ ID NO: 14619 - DNA, 494 bp, Homo sapiens
  MAP TO AC005191.1; EXPRESSED IN PLACENTA, SIGNAL = 0.58; EXPRESSED IN ADULT LIVER, SIGNAL = 0.45; EXPRESSED IN LUNG, SIGNAL = 0.42
caaaggacccatgcaaaaagcttaagctggggtccttagtctttatatagggtgagccacttctgtgactactttgtgaattacttcagcagctcaggatgaacctttgctgcaaatttgaaattgacctgatatgatagagggaactgtcccggagctgtttcatgcagatgcctggacaaatctcatccaaaatctctatgtatcccccaaggccgaccatgggttcccaggagaatggacagatcttggcagggggaaggtggcggcggggggcaggggttggtcaaagcctgaacgtcagttcccagagctgcttccctctgaaacccagttggcaaatgtgctgcttcctctccatgtctgcctctgcagcttctgctggcccatcaagttgctcccacactagcagagagcaaaaagagggaggtggtgaacacagctcaacaacatgcaaattataatcatctccatccagaggatggtggttgaga

SEQ ID NO: 14620 - DNA, 477 bp, Homo sapiens
  MAP TO AB019441.1; EXPRESSED IN ADULT LIVER, SIGNAL = 0.63; EXPRESSED IN LUNG, SIGNAL = 0.49
caccagagctccagacaatgtctgtctccttcctcatcttcctgcccgtgctgggcctcccatggggtcagtgtcagggagatgccgtattcacagcagcattcacagactgaggggtgtttcactttgctgtttccttttgtctccaggtgtcctgtcacaggtacagctgcagcagtcaggtccaggactggtgaagccctcgcagaccctctcactcacctgtgccatctccggggacagtgtctctagcaacagtgctgcttggaactggatcaggcagtccccatcgagaggccttgagtggctgggaaggacatactacaggtccaagtggtataatgattatgcagtatctgtgaaaagtcgaataaccatcaacccagacacatccaagaaccagttctccctgcagctgaactctgtgactcccgaggacacggctgtgtattactgtgcaagagacacagtgagggg

SEQ ID NO: 14621 - DNA, 459 bp, Homo sapiens
  MAP TO AC006518.17; EXPRESSED IN PLACENTA, SIGNAL = 0.84; EXPRESSED IN ADULT LIVER, SIGNAL = 0.55; EXPRESSED IN LUNG, SIGNAL = 0.57; EXPRESSED IN BONE MARROW, SIGNAL = 0.57
tgtgggaagcagaagagttctagctgtgctttagggttttatgggtgagagagagtagttgtttgggcctacagacccagctgtgttactaggattgctgcctctgatttcaccagacactgtttaacatgggaagtggagataagtagttctgcctaggtggcttatggtagaccatcaggtaggaaaggaaggtcagcgagaaggagcagaggggcgtgccatgcagacatgattcactgtgtgggtggctgaggaaactgcagtcctggtggaaggcaggcttctccttggctggtgagtgcaggaagacaacaggtgatgcctgcaaatatcactcagctcagacccttaccctgacattctccagtgtaagcaatgagagaaagagattaatgtatcaggaaataataaacatcagctatgatctcaccacacacaaccacaacagaggtgacg

SEQ ID NO: 14622 - DNA, 478 bp, Homo sapiens
  MAP TO AC006530.4; EXPRESSED IN PLACENTA, SIGNAL = 0.61; EXPRESSED IN LUNG, SIGNAL = 0.52; EXPRESSED IN BONE MARROW, SIGNAL = 0.52; EXPRESSED IN ADULT LIVER, SIGNAL = 0.52
ctggcagccctctcactaagcttcagaatgaagactggctgttgactcagtttgctgcttccacctgttgcccaagtgaagatgttgaggctgtaatctttgtggatgatacagagattggcccaggctgccctggctctcagtaacttaaggagacacagaagagggatctttcctaaaactcgaatcatatagggaagacactcatcagatctcatgggaacccagtacatggtcttacctcaaagtcatttcccttgttgtagtgcatattgagagcttgaaaaagttctgaattgcggagaaccaccagcattttgggatttgtgacaccatctgaaattgcttgccgggcagatttttccatttggatgtaataaaactcacgaaagttgctgaaccacttgatcatctgggaggtaatgcagcggttgaactgtacaaacaagaggtccatccagtcagacatttgccacga

SEQ ID NO: 14623 - DNA, 480 bp, Homo sapiens
  MAP TO AC005216.1; EXPRESSED IN ADULT LIVER, SIGNAL = 0.56; EXPRESSED IN LUNG, SIGNAL = 0.51
ggatgcatcgataaaagatggaagctgttactgtgctcaccaaggaatgagcatctgagccagtgactgaggaggtggcacctgacctggcttcagatgtacatgggtaggaactggctactcacattagatcaggaagacaaacttctcattggaccttttgtcttttcagccaaacctcaccgcaagacaccttttagagaagaacaaaggtcgccagtcatcccgcacaaaaaacctgtccctggtgtcctcgtcctccagaggcaacacgtctaccctccgtaggggcccagggtccaggaggaaggtgcctgggcagttttccatcacaacagccttgaacactctcaaccggatggtccattctccttcagggcgccatatggtagagatcagcaccccagtgctcatcagctccagcaacccctctgtgatcacccagcccatggagaaagcagacgttccttccagctgtgt

SEQ ID NO: 14624 - DNA, 479 bp, Homo sapiens
  MAP TO AC006406.1; EXPRESSED IN LUNG, SIGNAL = 0.54; EXPRESSED IN BONE MARROW, SIGNAL = 0.53; EXPRESSED IN ADULT LIVER, SIGNAL = 0.55
atgagaaggcagacgctctctagaatctggaaaagcaaggaacagagtctctcctagagtctcgaggaagaacgaagctctgctgacaccttgattttagctccataaggctcatttgaaacttctgtcatccagaattgtcagaggataagtttgtgctgtttcaagccactaagtttatagtaatttactacagcaggaacaggaaacaaatacagtgggaattagcttgtctcaactgctggtgagaaatggtagaaagcagggagctaggaaagaaagatattctaggagagaaaacaggcgctgctatggagaaaggcataggagacaatgtcctgtttggggcactcaaaatcagccaatgtacctgtaacaaagtgtatgtgaaggaatctgatcaaagtggtgctgcaaaactggatgaggacacgcaccctgaagggaagcactgaggcgctgcacttgtctggaaagca

SEQ ID NO: 14625 - DNA, 470 bp, Homo sapiens
  MAP TO AC006305.1; EXPRESSED IN LUNG, SIGNAL = 0.6; EXPRESSED IN BONE MARROW, SIGNAL = 0.54; EXPRESSED IN ADULT LIVER, SIGNAL = 0.52
cctcaactgaccatgctacgtgatgaatatgctcttgaaatgaatgctttcagatggtttccttttatgaaacgtgcacaaagatgtgtactgtggtggtggagttggccttgtaagacatctggctacaacatgtgcctcattaagttacacctgtaagtgtggggtcattttttatgccagtaatattaataataaagggttcattgaataggattattaatggtgccaggtggaggatgtagtattacttacagcctggtaggggattggctaacgtctcctcccaccaacgtttctggtttcatgtttatagacagagccctccagatgatggctggcaatgtagccattgagaaaatgaattctccgtttcccatcagcaagagcatgtacaacagttggtagagaatttgaatgaatctattttctaattttgaatgtataatcttgtggaagagcacgtaaga

SEQ ID NO: 14626 - DNA, 397 bp, Homo sapiens
  MAP TO AC006411.1; EXPRESSED IN LUNG, SIGNAL = 0.71; EXPRESSED IN BONE MARROW, SIGNAL = 0.64; EXPRESSED IN ADULT LIVER, SIGNAL = 0.52; EXPRESSED IN FETAL LIVER, SIGNAL = 0.68
cgggctttccagataaattctaaaagagatgtaataatatttgcctagtacatattgcctttgcacaaatttctccattctgccaggcattttaaaggctataatttgttgcaacaaacacaccttacacagacttctcaataactcttacacaaaataaaacatgctaactttctcaagttgacagaaatctaagcacaaagcaaggaaggactcaccttgtatctggtctgttctcgatcatagatttttttcagggacactactttgggagagaagaagttccccagtttggcaaggtagaccccattcctaagcccctcctccagttctgtggtgggaggcagatcttcccctaggcatgcttccatccacctgcaccaaaggagagaggatg

SEQ ID NO: 14627 - DNA, 476 bp, Homo sapiens
  MAP TO AB019440.1; EXPRESSED IN ADULT LIVER, SIGNAL = 0.42; EXPRESSED IN FETAL LIVER, SIGNAL = 0.8
catgaatatgcaaataactgaggtgaatatagatatctgtgtgccctgagagcatcacccaaaaaccacacccctccttgggagaatcccctagatcacagctcctcaccatggactggacctggagcatccttttcttggtggcagcagcaacaggtaacggactccccagtcccagggctgagagagaaaccaggccagtcatgtgagacttcacccactcctgtgtcctctccacaggtgcccactcccaggttcagctggtgcagtctggagctgaggtgaagaagcctggggcctcagtgaaggtctcctgcaaggcttctggttacacctttaccagctatggtatcagctgggtgcgacaggcccctggacaagggcttgagtggatgggatggatcagcgcttacaatggtaacacaaactatgcacagaagctccagggcagagtcaccatgaccacagacacatcc

SEQ ID NO: 14628 - DNA, 463 bp, Homo sapiens
  MAP TO AC004502.1; EXPRESSED IN LUNG, SIGNAL = 0.56; EXPRESSED IN BONE MARROW, SIGNAL = 0.49; EXPRESSED IN ADULT LIVER, SIGNAL = 0.57
aaaatagaagcattgaactgacgtaataaaaatacttccctgatatcaatgtaattttcaaagtagaaattattaggtctttctttattcactttgattaaatgctcacatcttatttctatcgcttccaaagtataagaaaaaaatgcacaaaccttttcttagaaaatccttcttttatatattggggtgcttttgatccacaaaccctaaaataatgttaccttctcctaccaatcaatacttctaaacaatgaatgaacgcacaaaatccccacctggatctttacctgcatctcctgacaaaaagaagccaatggcccaaaaaggatctggcattgttcatcagcagtgtatgtcatccctggcagcttggagggaaccatcacagaattgacactctgcggatttgtttgtagcaagcagttactggcctttgacctggcaataggcaggtatgtgt

SEQ ID NO: 14629 - DNA, 472 bp, Homo sapiens
  MAP TO AC006464.3; EXPRESSED IN BONE MARROW, SIGNAL = 0.57; EXPRESSED IN LUNG, SIGNAL = 0.68; EXPRESSED IN ADULT LIVER, SIGNAL = 0.5
aagtgacatgatgcctgggtggggggaggggggaatgatctgcttttttcttaagaattcgccattttaatgatatataaaaatgtacagcagcctgtgtggtcagttttccagttatgccctctcctggtaacattgaaagtgttagagaagcatctgaacagagaatatgaaggcacagaagaaggtcgagtttaaaacaagaaaagctaaggaaatgagaatgtgagctcgggattattgtagctttgtgaactcttcttatactgacttctaggtaggattaatcatgtactttgtgcggaccccctgcgagtgggggatggatgccatttcagccaccctgacattcctgtgggaggtggtgggttacgtggagggcctcttcttcaaggatctcaagcagacgatgaagaaggagcagtgtgaggtgaagctcctggtgaccgcttcaatgccaggtaagccacta

SEQ ID NO: 14630 - DNA, 486 bp, Homo sapiens
  MAP TO AC005702.1; EXPRESSED IN LUNG, SIGNAL = 0.44; EXPRESSED IN BONE MARROW, SIGNAL = 0.54; EXPRESSED IN ADULT LIVER, SIGNAL = 0.53
ggaggagtccagtgataaataacctgaaaattcatctgttgtgattatttgctactcctttagtgaataaaggatacccagtgaggaatatactgctggtatttaactgcctgtttacttagaatatcttttatttgattttttaggagacagaggcctgaagcaaagacatctgggtcagagaaaaagtatttaagggccatgcaagccaatcgtagccaactgcacagtcctccaggaactggaagcagtgaggatgcctcaacccctcagtgtgtccacacaagattgacaggagagggttcttgccctcattctggagatgttcatatccagataaactccatacctaaagaatgtgcagaaaatgcaagctccagaaatataaggtcaggtgtccatagctgtgcccatggatgtgtacacagtcgcttacggggtcactcccacagtgaagcaaggctgactgatgatactgccgcagaa

SEQ ID NO: 14631 - DNA, 477 bp, Homo sapiens
  MAP TO AC002476.1; EXPRESSED IN LUNG, SIGNAL = 0.55; EXPRESSED IN FETAL LIVER, SIGNAL = 0.72; EXPRESSED IN ADULT LIVER, SIGNAL = 0.48
tcaataaaggtaaatagtgtccaacgtactgtctttgaaagaaagcacattatgtttgacatgtgggctttcagtacttacatccaggtttttagaaacactcttcaaacttgatataccagctaagcaacctcaaacaaatcaggaattagtaatactacaacctggtaaaaatttcagattgagattttatgactcaaagaacatcattaaacaactggaaaaaggactggaaaacatacctataagttcagctggtttatttggtcttttgttaatgaacgtttcaaatgcttctttcatggcattgataaatttctcattcttcagaaagcagatatcaattatatggtcaaccttatctttaaaatccagcaattcttgaaccatggttttatctttttcaggattaattacaatagtgctgccaaatgcctaaaacaaaaaattaccactttttactgtaatcgaattgtc

SEQ ID NO: 14632 - DNA, 480 bp, Homo sapiens
  MAP TO AC004142.1; EXPRESSED IN ADULT LIVER, SIGNAL = 0.42; EXPRESSED IN LUNG, SIGNAL = 0.41
tcaggcctccttatttgctgagacacaacaatattgaaattaggccaactaatgaccctacaatggcctctaagtgtccaagagaaagaacgagttatgagtctctcactttaagtgaaaatctagaaatgattaattttagtgaggaaagcatgtaaaaaattgagatagttcataagctaggcctcttgtaccagttagtgaagttgtaaattcaaaggataagttcttgaaggaaattaaaagtgctactctggtgaacacacaaatgctaacaaactaaagcagtcttattgctgatatggagaaagtttgggagttctggatagatcaaaccagccccaacattctcttaagccaaatcctaatccacagcaaagccctaactctcttcaattctgtgaagcccgaaagaggtgaggaagtttcagaagaaaagttggaagctagcaaaagttagttcattcctgacagcttcag

SEQ ID NO: 14633 - DNA, 487 bp, Homo sapiens
  MAP TO AC005020.1; EXPRESSED IN LUNG, SIGNAL = 0.8; EXPRESSED IN ADULT LIVER, SIGNAL = 0.47
tgggaggaattatatgcagcttcctatcaattacagtaataggctgcaaagggcgtggcggaggaaaaagaattactcagagggtcacaacaactgccttctagtccaagtccctctcatttaccaaagacaccatgcttttagtccccctcatgctgttcaggcagcccaacttgcccatttctatctacaaaattccacttgtccttcaaggctcagatcaaatatcatgttcttcatgaagcctccagtgccctaggccaggagagggtcttctttcccctccagagttctccagaatgcaaattctgtgacagtccttttcatgctctgcttggcatcagtcaagtgcaccccaaatgctaccccaaacaggactgtttgttcttaagttgtataaaagatcctgtttatccaaataaccccatccacagaagaatctatcacagcacctggtgtaaaacaatgactcagtacaagtgtgctg

SEQ ID NO: 14634 - DNA, 466 bp, Homo sapiens
  MAP TO AC002549.1; EXPRESSED IN LUNG, SIGNAL = 0.55; EXPRESSED IN PLACENTA, SIGNAL = 1.3; EXPRESSED IN BONE MARROW, SIGNAL = 3.8; EXPRESSED IN ADULT LIVER, SIGNAL = 0.88
aacagtataatcgttattgtgtgtgacatcactagctaattattctaaaaacaaaggtggtgggtgggtttcagatcaataaaagagatcccggaacaatggcttagcctggacccgagggacctgtgtcaccaaaccacagaatggatgtgaaaccattactataatgagctctttctccactcccagtaatgagtcctcctgaagaattaattaaaaattctgccatggcttctcttaaaggagaaggatacacttctggaaaggatcagggaagcttgaatccaagagccagccactcacctgctttgatgctcaccttccaggatgtctgaaaagtaaacaaatcttcctttactctgagacttctccaatgtatcattcaatgatttatgcactggggcttctcgttcacaacgactgctcccaggtggatgaagacaagcatttcaacatttaatcaaga

SEQ ID NO: 14635 - DNA, 488 bp, Homo sapiens
  MAP TO AC004690.1; EXPRESSED IN ADULT LIVER, SIGNAL = 0.45; EXPRESSED IN LUNG, SIGNAL = 0.46
ttccaaaaatgatctttcaacaagagctgttcttttcaaagatttaattagtcgaaaaagcacactttaagatggacatattgttcatttcagctaacctgcgcaattacaaactcgctacagaagaaatgataagaaacaaaatactaacaatgaacattgtggcagatagtgtggagggtgaagcattgtagaaaatttgaggttcttctgtctccatgggaggttttagaaaagcatctatacagacaccatcagcaatacacacatcaacagcatcagtgtcttttacatcagctttctccttacaactcaaggtgctataacagctgcaataaaatttttcagaaaattgctccaggtcttcaagtgtcggttttccacgtactgtgaactttccacctttctcaagttgaatagcaaaattatctgggttgaggtgaagatagtcacttgaattccagtttttccttatacacactccttgc

SEQ ID NO: 14636 - DNA, 478 bp, Homo sapiens
  MAP TO AC005040.2; EXPRESSED IN ADULT LIVER, SIGNAL = 0.44
actgcaccatggaaagctgtgggagggaggagagctttggaactctgcagagaggtgatgaggtcttttaaagagggaggtgacatcgccccttttgtggaatgttttacaagggtgactgtgcctgctgtgcaggaagcagttggagagaagatggtaagactcgagatggagaaggctgttgaaatcactgaacacctgaagcactgtccacgggccagaggagatgggcacatatgtggaaggaccccactgagctcggccacctgggtgaggaagcggaggattctaagttggccccaggtgccagatttggccttgaggagggtgaaagcacatttgctgagaaggggacagatttagctgtggagtttgagatgctcatgggctgcaggactgcatactgcaagtccgtagttaagaatgcagagttagagtctgaaaatggaagggatctagatattgcagtgtggggaca

SEQ ID NO: 14637 - DNA, 488 bp, Homo sapiens
  MAP TO AC000120.1; EXPRESSED IN LUNG, SIGNAL = 0.47; EXPRESSED IN ADULT LIVER, SIGNAL = 0.41
gggtgaataagtgaccttgtactctacagtgacatttactagtcattaagtatcctactatatgacctggcaatgcctaaggacactaacagtacgttccccatagggcagaccttacaattctgaacattggcacatatacaatcatctaagatcaaaacagaaaactcctaaggcaaacaggtagagaaaaagtatttggaatgagaacagtcttgaaaagaaggactaacatttataataaaaaatgtattctttctaaaaagaaaagaataaatattccatttaccagcatgcataatgaatgggtgcccagtggtcactatctaactggttgactgaaaatctttcactgagaagacggcttagtaattctgaatctccttcacaggcgcttcggtggagaggaaaatcatctacccactgtcgttccctaatcattaaaaagaaattttgaaaaatacaacaggactgtaaaaattgtttca

SEQ ID NO: 14638 - DNA, 475 bp, Homo sapiens
  MAP TO AC004537.1; EXPRESSED IN ADULT LIVER, SIGNAL = 0.45; EXPRESSED IN LUNG, SIGNAL = 0.48
tgattgctttgtttgtttgtgttagagtaaggggaaataaagtgtttcaggattaatgaatcatacagtttctttacctggttaaagtatacatatggagaaagaagaaaaaggaaaaccaaatacattattcagttgacttaatgtacaagtgacattaaaaattttaatgattatatgtctgtgctgggaaataatgtaatttagactcactaacattatgttctctgcaaccatttttatttcttttttacatctacacaggttgtcgaaataataattccacagcctcttctaacaatgcctacaatgtgaattcctcccaacctctgggatcctataacattggctcgttatcttcaggaactggtgcaggggcaattaccatggcagctgctcaagcagttcaggctacagctcaggtaaaaagtaaagggtttagagacaaaatgttacattttgtcggaatcattgg

SEQ ID NO: 14639 - DNA, 466 bp, Homo sapiens
  MAP TO AC002460.1; EXPRESSED IN BONE MARROW, SIGNAL = 0.65; EXPRESSED IN LUNG, SIGNAL = 0.56; EXPRESSED IN ADULT LIVER, SIGNAL = 0.63
gggcgaggtgtttcctttacacaaggtgcaaaaaacccattaggactaggcgtgtcatttgtataagacgtgaattcccagcagcccccaccctgtccttctagtgcgcatgcgggctcttggctgaagttactccatgttgtttaatctcccttcctgcacatgtgttaggggatgggattctccattgcggacgtgcctggtccagtgtagctcctcttatctgtgcagctgcagacatgttccaagcaaaccttccacctctgtaagcttccttaccttggtacatccgaaaaaggagaagactgtgtccactgaggcccattgtgtatatgtgaagcttgctggttatacagaagacctccttttatgctggaccttgctttcttatctgtgcttacagcttggtctttcaggctgccccttctgtcagaaaagaaattcaactcaggactttgccctagct

SEQ ID NO: 14640 - DNA, 473 bp, Homo sapiens
  MAP TO AC004740.1; EXPRESSED IN LUNG, SIGNAL = 0.46; EXPRESSED IN BONE MARROW, SIGNAL = 0.51; EXPRESSED IN ADULT LIVER, SIGNAL = 0.46
ttatccttttaatgtgctgttaaatcagtttgctagtattttgttgaggatttttgcatatttgctatttgcatatttgcatatagcctgtaatttttttctttactgtcctagtctggctttagtatctgaataatactggccttgtaaaataagtttgacagtgtttgagaaggattagcagtaattctttttagaatttagtaatttttttagaaaccactatagtccctttttatagctgctgcactattttatattctcaccaacagcaaacaaagcttctagttactccacatcctcatcaacattttctgtcttttgatagtagccatccaaatgagcgtgaagtggtatctcattgtagttttgatttgcatttacctaatgattatcaatagtgagtattttttaatgtgcctttggcatttgtgtatattctttggagaaatggctatgcaactcctttgcct

SEQ ID NO: 14641 - DNA, 479 bp, Homo sapiens
  MAP TO AC002465.1; EXPRESSED IN ADULT LIVER, SIGNAL = 0.59; EXPRESSED IN LUNG, SIGNAL = 0.64; EXPRESSED IN BONE MARROW, SIGNAL = 0.63
aaaaaccactgtcaccccagggtcactatatatgcccaagactgctctctctgagaagaaacatcaaagacttcacaatttggggtaagtagacttcactaatatagtgcagccaaatcactaaacaaagaaacaagcaaacaattccttatggggagggaaagaagaatcggtatctagaattgctagaatatataacctaaaatatccagttctcaacaaaaattatgagacatgcaaagaaataggaaagactgatccacacataagaaaaagagtaggcaacagaaactaactgtgagaggggctaaatgtcatatttaacagacaaagacttcaatgaagccattataaatatgttcaaagaactaaaagaaaccatggttaaggaagtaaagaaaggtatgaacaaaatgtcttatcatagagaatatcaataaaaagaaatcataaaaaaaacccaaaagggaattctgaaa

SEQ ID NO: 14642 - DNA, 496 bp, Homo sapiens
  MAP TO AC004674.1; EXPRESSED IN BONE MARROW, SIGNAL = 0.51; EXPRESSED IN ADULT LIVER, SIGNAL = 0.51; EXPRESSED IN LUNG, SIGNAL = 0.54
gcagcaagggtgtattattaaataggaattatgggaacactataatttcttacctgaatatctgcaaaaacccaaaaaaacacggtaacacaaatgttagaggtatcatcatcacttatgtaaacttctgaaggtcacaatgtctaccgtgtgataagacccacatcatcacttgcctggataccagcaaagctccatgttaatccccgttgttagggttaccttgatctttagactgaaacctgaaaaaacatattgtgacagatgtgtttaagaatgcaactttttctagcagaacatctgcaaataacttttgtcacttccatctttacaaacccattaatgctacctggatattggcagaacctgaaggtcaacacattggtacaggcaccgtcatttattgtctgggcatctataaaaatctcaaggtcattactgtggtgaagaaagttatgatcacttgcctagatacctgaaaatccctcattcactc

SEQ ID NO: 14643 - DNA, 474 bp, Homo sapiens
  MAP TO AC002543.1; EXPRESSED IN LUNG, SIGNAL = 0.51; EXPRESSED IN ADULT LIVER, SIGNAL = 0.44; EXPRESSED IN BONE MARROW, SIGNAL = 0.62
agcccagcttagactccaccttaagtgtcaagtccatgcaatgtgttgtggacttagctgtgtccacagcctcccgtttttcctaatgatcccttgcctatgaatgtgatccctttctattcaaactgtggtggcacatcaacaggatgggcatcacctggggacttggtagaaatgcatcatctctagccccacctaagacctactgaatcaaaatctgcattataccacattctcttcccctatctagccccagattgaggagatcacatcccaaccagggcctgcgcacagggcttcaaggaaatgaccagcagcaaagtgaccgaggtgcacagcgaagccagaatcaatgcagaagattgggagacatctactttcagcttccaagtaaccaccttactgggggtgaaagacagaaacatctgctttctccctatgtcctagataaaggggagacgggtgctagttcat

SEQ ID NO: 14644 - DNA, 455 bp, Homo sapiens
  MAP TO AC002488.1; EXPRESSED IN LUNG, SIGNAL = 0.55; EXPRESSED IN BONE MARROW, SIGNAL = 0.67; EXPRESSED IN ADULT LIVER, SIGNAL = 0.67
tggtaagcaggttactgcattgaatgctgtaggcaattgtaatgtaatggtatttgtgtatgcaagatatctaaacagaataaatctaaacagaataagcccattgtgttgggctacaatgttatgaaagctaccacatcagtctgaccttgatgaaaatgttgtcatatggcacatggctgtatatggctaaacagtatatatatatatatatatatatacacacacacacacacacacacacacacaatttttgttacctccaatttttctagatgtcaggtaatttaccagaaagagttgttttctgatcataactctcctgatgaaaatggaatctggtccagccagaatgaagaaactgacagacgatgatgatgaaagcaatccccagctgtccacattgctcattagcataagacactcccaccagtgccatcacagtttgcaagtgc

SEQ ID NO: 14645 - DNA, 447 bp, Homo sapiens
  MAP TO AC002546.1; EXPRESSED IN LUNG, SIGNAL = 0.54; EXPRESSED IN ADULT LIVER, SIGNAL = 0.56; EXPRESSED IN PLACENTA, SIGNAL = 0.67; EXPRESSED IN BONE MARROW, SIGNAL = 0.81
tgccacagtgggttttagtgagggtccccattttagataggcttaagtggctgtgtctagtaagtaatatttaaaaatccctagcactaggaatttggggaaaattgctagagaacaaattattagtttatttcctgcccccctacccctggacttatacttgaactttgccttgtgtttcctgctgtctatccacaaatgaaacgtgggtgattccctaaagcagccctgttgaaactgttgtctccttttttcttcttttctccagattgagttggccatccttcgatttccctatgattcatggggaactccatttcagcagctcaaacaggtggtagaggagccatcgccacaactcccagcagacaagttctctgcagagtttgttgactttacctcacagtggtaagacagcctcacctcccaagtgtcagtgtgaaagaa

SEQ ID NO: 14646 - DNA, 396 bp, Homo sapiens
  MAP TO AC006120.1; EXPRESSED IN LUNG, SIGNAL = 0.52; EXPRESSED IN ADULT LIVER, SIGNAL = 0.43
tgtatttcttagacagtagagtgcaactaaaatgtaaatatgttatcacttaatgtattttaatatctcataattcaatgtacatttaattttttaaatgtttgaatgtaattgaatttgagtatttgaaaggctgttttcaaacttgaaacttgatggaaattttagtggtttattatagtacattttgaaagaataatttttctaattttaaaaaatcagtccatctattttgatgaaccaaatccagcacgagcaaaaggttcaagcccagagggattaccagcctgggtactgggtgagctggagacaagtgaacacaaattaaatgaatcatggaaactctcttctggagaagataacactttagtacagtcgccaactgatgtctacagg

SEQ ID NO: 14647 - DNA, 489 bp, Homo sapiens
  MAP TO AC002064.1; EXPRESSED IN ADULT LIVER, SIGNAL = 0.57; EXPRESSED IN PLACENTA, SIGNAL = 0.68; EXPRESSED IN LUNG, SIGNAL = 0.65; EXPRESSED IN BONE MARROW, SIGNAL = 0.69
gatgatggcagggaactaggcataggagagccttatccatgaataacataccattgaaaaacatttgataaattcctactgagtactcaaatgtagctggtaccctcaatcattcccaatgcacttattcccaggaagtaatttaggaaaagtttaagtgttaacaggagtgactaaccatataaaaaattgtataattgtacaattgcatgatttgtttttggttaatttaactttgttaaactttgttataacagattggagaaatatggaatgaaatatatgaagaaataaaattagaaaaattaagaccagtcactacagataaaaaagctttggaagctattacaacagcatcagaaaatattggaaagatggttgcttctctgcaaagtgatataattgaaagccaagcatgccaagacatgcaaaatgaacaaaaagtatatgcaaaagtaagctacataggtagtgaggagggagaatgaa

SEQ ID NO: 14648 - DNA, 492 bp, Homo sapiens
  MAP TO AC003036.1; EXPRESSED IN LUNG, SIGNAL = 0.6; EXPRESSED IN BONE MARROW, SIGNAL = 0.52; EXPRESSED IN ADULT LIVER, SIGNAL = 0.64; EXPRESSED IN PLACENTA, SIGNAL = 0.69
gacaacctaaaatggctccagatattgtctaatgtccttagaggtgcagaatcaccctggttgagaaccaccaatttgactgagaaaatgttgactagaaggacactctggaagggacaaggagaaggccattcccagatgtggtaccaactccgatgggatccagcccagaagcttcctttggcactgggctaggcccttcaggacacgaatgctgcacacgccctggaagctcacttaggcatcagctgcccccaacaccccactccccagcaaaccagaggtgttgcttacagagccgtcggacgcgctggcacccactttgtctcctcgggcgttccagcacacctcgaagatgccgccagtgcctcggtagctgtggacaagatttccactctgcaaagcaaagcagctgtcacttacaacgcaaggggcgcctgcgacagatgcaggtgtggaatgtgcgctcctccggccctgacgtttcgtcat

SEQ ID NO: 14649 - DNA, 470 bp, Homo sapiens
  MAP TO AC001231.1; EXPRESSED IN LUNG, SIGNAL = 0.45; EXPRESSED IN ADULT LIVER, SIGNAL = 0.41
ttcaaaatacttcaatggcccaaggaagcaaggattagaaacctattgcagcttttcttttgggaaagaaaagaaaagatgggtttaataaatagacctgtgaaaatctattcataaggatagactcctccctccgggtcctaccagcgtttgctcattttcccctctgcctccaatgcctctcccgcttcctgctcacaagtcaacagccttctcgcttcccctcctttgggaaaccttcccagtccactcaccactttgcagaatccgtggtgctctcccatggcccccaccagagctggccacctctcacggaatgaccacactgactttttattacagggtgtggtgttcctgtctgctaccctgtagaacataataacttccagaaagaaggatttgggtgaggaagggtactgcggaggatgatgatcagaaggaaatcctggtggatagaagggccaaaggat

SEQ ID NO: 14650 - DNA, 470 bp, Homo sapiens
  MAP TO AC003958.1; EXPRESSED IN PLACENTA, SIGNAL = 0.63; EXPRESSED IN LUNG, SIGNAL = 0.47; EXPRESSED IN BONE MARROW, SIGNAL = 0.52; EXPRESSED IN ADULT LIVER, SIGNAL = 0.43
gttttcttgcaccaacacccactaaggcttatataaggtctacaggagaaggaagattttggtgtcaagcagatccaactgtgggcaaagcaggatcttgccttttagcaccatgacttctgaccattgcagttccctcctcagcgggcaggtttcagaggccaacgctgcctctctgtgcctcttggctaatgtggcacatgccaatcgagtccgtgtggggtcgactcccctgggccgcctcagcctctgtctgcccccaacctgccacaccacttgtcccttgccagggacctgccacattcctggcaacatcggaatctgtggggcctaccgcgaaaacaccctgaacggccacgagaaggagaccatgcagttcctaaacgaccgcctggccaactacctggagaaggtgcgccagctggagtgggacaatgcagaactggagaccaaactccatgagaggagca

SEQ ID NO: 14651 - DNA, 466 bp, Homo sapiens
  MAP TO AC002429.1; EXPRESSED IN ADULT LIVER, SIGNAL = 0.51; EXPRESSED IN LUNG, SIGNAL = 0.53; EXPRESSED IN BONE MARROW, SIGNAL = 0.56
ggttgttatcagagaagtgcaaagtaaaatcacaattttatcttactctacatccattaggatggcaagcatgtggaacaactggaaattatatatatcgctgaagtaaatgtaaaacagtaaacagtttggcaattgcttgaagcattaaacatcccccctcgcccaaaccagccattccactcctagttatttatacaagagaaatgaaaacatgtgcccatacagaaatttgtacatgaatgttgatagcagtttcatttgcaatagccaaaactggaaacaacccaatatccatcaacaggtgaatggagaaacaaactgtatcatacccaaacagtggactcagcagtcaaaaggaacaaatggctatatcattatcatcatcatcatcatcatcatcatcattgatgaatttcaaaataattacccttaaagaagccagaccaatagagaaatatttatt

SEQ ID NO: 14652 - DNA, 493 bp, Homo sapiens
  MAP TO AC006313.1; EXPRESSED IN ADULT LIVER, SIGNAL = 0.48; EXPRESSED IN LUNG, SIGNAL = 0.53
tactgctcggaatgtggatgcaatggcaagaactccagcagtgatctgtactatgaagcagctttgggaatgggagctacatatggtagaggaaaaagacagagacagcctgagtccctgatatcatgtctcttccttaccagccttgaacttcctcctccagccagagagagacagagagcaaaagagggaataagagagcaccacaatgatggggaagattgagaagacagtctgggaggaattggttttcaaatctgtcctgaacctctaaactttattcatagaagtcagagccagacttgattgtaaaagtagcagttaatgtaactgtagcctctgtcagagatttcttcaaacccctcagcagaggagcagcttatattgaagatcaagcctgcctttatgtggaattgctttctctccctttcttggtagttttcaggacccagtgcaaaatgaaaatgtgagacccattccctggttcaaagag

SEQ ID NO: 14653 - DNA, 464 bp, Homo sapiens
  MAP TO AC004636.1; EXPRESSED IN LUNG, SIGNAL = 0.53; EXPRESSED IN ADULT LIVER, SIGNAL = 0.48
cattagctgaatgtatcccccacttggtctcggaagtacagaaacttatcttgggccttcaagaacagggatccagaattctaacaccgatctcctttcacaaaagcattgtttaggagtttgcttttagcagccttttcatttccaagaatagattgcttgtaatagtttagaaataggttgcttgtaatcacttgggatgtaaaaaggcaaaaaattttacccctgagggatacaaagggaagaaacatgataattgtcctcattatttattccatgacctagacacttacatacatactgacacttcggagatttatttttttcattattcttaaaggaatcatcatcagtgtttactgatagacaatattcctcgtttaaattgtgctaaaatgtaggattacaatcaatcccaggttatttaataaggtagttatagacagaaaaccagttgtttcaca

SEQ ID NO: 14654 - DNA, 485 bp, Homo sapiens
  MAP TO AC005803.1; EXPRESSED IN PLACENTA, SIGNAL = 0.58; EXPRESSED IN ADULT LIVER, SIGNAL = 0.75; EXPRESSED IN LUNG, SIGNAL = 0.44; EXPRESSED IN BONE MARROW, SIGNAL = 0.49
cctcccatccatgatttttatgtaatatttaataactctgaagtgttaatgggtgcccctcagctcttgtattctgaggtttccaaatgaaacagtcttggctctgaatattcctcatggcttcagagactgccctgtctttggcctcccgtgcagggcctgctacactgcaacagcaccagaacacgaaggccacggccgccctctccttccccgagctcccaactcacgtcagcttgctcttggcctctgtctccttggggaacgggtacttccactttgtgatgcgccccacctccccagacatgaaggtcagatagcgcagggtctccacagcgacattgatgtgcatcaccttcctcagaccctcccgctgccagacataaaaggccaccacaggggaggcgtagttttggatccacaggacgtccccagattcactgtccacagtcaccaccagcccatcaccattggacacaaagtgg

SEQ ID NO: 14655 - DNA, 471 bp, Homo sapiens
  MAP TO AC005755.1; EXPRESSED IN ADULT LIVER, SIGNAL = 0.53; EXPRESSED IN PLACENTA, SIGNAL = 0.59; EXPRESSED IN LUNG, SIGNAL = 0.6; EXPRESSED IN BONE MARROW, SIGNAL = 0.69
aaccagcttttctttaatgcagaatcggtatttatttattttgatgcagaggctgctgagttctagctgcaacagcatattttaaaacataaacatgtaaggtgtttgccagtatggaataaatacataaggcttttacatttcttttctcagaagaagaaagtcaaacaaaatcaaagcagcaggacagtgataaactgaactccctcagcgttccttccgtttcaaagcgagtagtgctgggtgattcagtcagtacaggaacaactgaccagcagggtggtgtggccgaggtaaaggggacccaactgggagacaaattggactcgttcattaaaccacctgagtgcagtagtgatgtcaaccttgagctccggcagcggaacagaggggacctgacagcggactcggtccagaggggttcccgccatggcctagagcagtacctttccagattcgaagaagcaatga

SEQ ID NO: 14656 - DNA, 461 bp, Homo sapiens
  MAP TO AC004079.1; EXPRESSED IN LUNG, SIGNAL = 0.61; EXPRESSED IN PLACENTA, SIGNAL = 0.57; EXPRESSED IN BONE MARROW, SIGNAL = 0.52; EXPRESSED IN ADULT LIVER, SIGNAL = 0.43
agtagcttggggaccaggagccaggccagaggaccctcttccagaaggcactcctttacctgagctggagctgctggttttctgctttgtgttttgtcgagactctttcatccaggggaagatttgtttggccactgtgggtgagttgagcagggggctcttggccgcgttggcaggggtagggttgttgctggcattctgaggaggggaggcagaagagggaggcgggggcgcggcaggggtaggtgcagggggctgaggtgcgggctgaggcggctgtggggcagggggcgcggcctggggcggcggcgggtgcaggggcggctctcccaggcttggaggctggctaggtggggcgctcagggtgcgcaggcacgcctcactcagttcgtgtgccttggggtggcccccggcgctggagggagactggagggagcaggcgggtcggtggtactcgccgt

SEQ ID NO: 14657 - DNA, 464 bp, Homo sapiens
  MAP TO AC005940.3; EXPRESSED IN PLACENTA, SIGNAL = 1.3; EXPRESSED IN ADULT LIVER, SIGNAL = 0.81; EXPRESSED IN LUNG, SIGNAL = 0.59; EXPRESSED IN FETAL LIVER, SIGNAL = 0.68; EXPRESSED IN BONE MARROW, SIGNAL = 0.76
atgtggggagaggtatcgtgtattttatcaacaccctttgtttaatctttctgagcctgataggcctgttctgaattaatgctgtcgttgagtgataaaaattaagatagtttaccttactgttatgtctcgtgctcttttgaaataattatagtttctctcagcatgtttctttctaaactcgtgttgtctgaactattaggaaggagtgtggatgggatgtgcagttgcggacaggaaaattctatcatcttttctgtgtcttgtctttctagcaatccccaaggtgagactggagacaatctatatttgcggagtagatgagatgagcacccaagatgtcttttcctattttaaagaatatcctccagctcacatcgaatggttggatgatacctcctgtaagtacacccgagtttcctgtgaatatgcttttgttgatgatttttcaagagttcttgcca

SEQ ID NO: 14658 - DNA, 467 bp, Homo sapiens
  MAP TO AC004033.3; EXPRESSED IN PLACENTA, SIGNAL = 0.89; EXPRESSED IN LUNG, SIGNAL = 0.74; EXPRESSED IN FETAL LIVER, SIGNAL = 0.85; EXPRESSED IN ADULT LIVER, SIGNAL = 0.73; EXPRESSED IN BONE MARROW, SIGNAL = 0.85
aaggtgtgagataccccgtggtggtttctgtcagtgaatctgtagttgtcatatattttgaatacttcaatatcatcgaacagttgctgtgtctttaagcactagattttattgaagctaccttcttccctttttagtcccatttcccctagatgcatccacgactgcaggaacccccctgcccccaccaggagcccaaagataaccatgttcccacctggagtggcctcccacctccaatgccatcagggctggtgcagcttccccacctggtcagcaacatcatggccaaggagtagagggcgtagcccagggtgaacagcagtgcacaggtgaggggcctgatgcagaacagagaggccatgaagaaagccagcagtagccagggcagtgtcaggtagctgcctaggaagtgcaggttgagcctgtggccgctggccagcgtgggctctgtgaggtggtagcaa

SEQ ID NO: 14659 - DNA, 464 bp, Homo sapiens
  MAP TO AC005999.1; EXPRESSED IN PLACENTA, SIGNAL = 0.63; EXPRESSED IN BONE MARROW, SIGNAL = 0.66; EXPRESSED IN ADULT LIVER, SIGNAL = 0.52; EXPRESSED IN LUNG, SIGNAL = 0.54
ggcataggcctcacattttctctaggaatcctgcttcctcaggagatcagtgagaggctggattaggtgtgaatctagattttgtcattagtatcagaagagaggcagttgcagacgaaaggaaaagccctgattatactggaaaaaaaaagaggggctcccttagaaggatgtgaattttgaggcagcctccagacacatagaaaaggggtacacaggggcacttcaccccacctgcccctgctatttcaggatcaccgaggaacaaaatccagttaccatgacatcctcagcatcactgctgcccacagaaatccacccagaggccgcagtagtggcctggctgcggctcctctcaaaatgagaaggcagaggttgcaggattgatttggacagcaaatggttttggtagacccagaaatcgtttatttcacatttctcatcctgggggatccataacatga

SEQ ID NO: 14660 - DNA, 462 bp, Homo sapiens
  MAP TO AC002554.1; EXPRESSED IN ADULT LIVER, SIGNAL = 0.48; EXPRESSED IN LUNG, SIGNAL = 0.48; EXPRESSED IN BONE MARROW, SIGNAL = 0.51
tggcacgtactaggtccttaacagatttttcttgttgaagtcgttgcacatatggttacagctaagggacacaggaagtgatgagtgcataaacctaaaggaaggggcagataagagaaaggggactcccatgactccaactcctttctgatgcttggtgctatggaaatcccttgagcaggcctgtgcattttgtctttttgcagatgttcacccttcctcaaaaggacttcagggctcccaccacctgtctgggccccacctgcatgcaggacctgggcagtagccatggggaagatctggaaggagaatgctccagaaaactggaccagaagctgccagagctccgtggagtgggtgatcctgccatgatctcctctgatacctcctacctgtcctctagaggaagaatgattaaatggttctgggattcagctgaggagggctacaggacctaccaca

SEQ ID NO: 14661 - DNA, 446 bp, Homo sapiens
  MAP TO AC005737.1; EXPRESSED IN LUNG, SIGNAL = 0.64; EXPRESSED IN FETAL LIVER, SIGNAL =  24; EXPRESSED IN BONE MARROW, SIGNAL = 0.5; EXPRESSED IN ADULT LIVER, SIGNAL = 0.49
tgccctgtgtgtctttgttcaagctttgcaggcagatgaaatgggagtgcatttgtacctctttctcatctcacaggtacagtgtaacccttgagaaggtcgaagtggaaatggaatttaatagcttgttggaaagcgaaaatagccctacactttgactttgccagcagtatgaattaggaggaggtgctgttgaagcctccatttgactctctgtttgtctttggaagtactttgcacactgacaatgatttgttttaaagcatgtgcaattgtagattaggtagatctcctgcatgtctctagattgtgagctctgaggaagaaggatggtcactgtgtctgtcttgttcaccacaatgtcagccactttcacagtgttggacttgtagtacgtgctcgttaaaagcttgtggaaagattgactgggattacttttctggagt

SEQ ID NO: 14662 - DNA, 477 bp, Homo sapiens
  MAP TO AC002112.1; EXPRESSED IN PLACENTA, SIGNAL = 0.64; EXPRESSED IN BONE MARROW, SIGNAL = 0.54; EXPRESSED IN ADULT LIVER, SIGNAL = 0.48; EXPRESSED IN LUNG, SIGNAL = 0.68
ggtgagagagagggggtctcacggagggctggacttctccgcgggtggtcgcccggcctcggcgccctggggcgggggtctcccctcggagggccggcctcgccgggtgtgcggctgcgggcggggaagggactgctcctgcagccgggacgggactttgcgcgcggccgggtgccgggcggggggcgcagaggggtggcctcggggaccgcgcgggggtagcgggtgtgcgggtgcctggagcgcggctggagtggcggtgacggccctggccgccgccgccaccgccgccctgttggtgcggccgcttcctgatcatgtgcagcggcagccgccgcccggagccgggagcccgcgagcgccccagtccgggccggcgcccccgccagcacccgcggcaggagacgaggagccgcggcaggcgctgccctgagccgggagtgaacggctgcgcggctgctgggagggtgaatgaag

SEQ ID NO: 14663 - DNA, 466 bp, Homo sapiens
  MAP TO AC004051.1; EXPRESSED IN ADULT LIVER, SIGNAL = 0.6; EXPRESSED IN LUNG, SIGNAL = 0.63; EXPRESSED IN BONE MARROW, SIGNAL = 0.53
tggagaattacaaaagaagaaggcacacattaaattgtaaactcctcaagaggaattcaaccagagaaacataaataaatagatacctgtaaatgtgagtgacaaaataaaaatcagttctattcccttgagtgtactcggtgcctttagtaatagatgtgttactcccataccatgggcactaggaacagatacttttaggagttcaggaaataaaaatcttgtgttttttctctcttgtccccagaatggtaactgtaatgccatagtttcacagttcgtaattagtaaagtatgcaacacagttttgactgaaaaacagcaatgttctcaagtatcagaaatgatgcttgaatttggcaaagtagtcagtcccaattatgtagtgaacatgctcttttttggaactaaatggctaggaaagcatgtgtggggttctgaggatagactttgtgatgccacggat

SEQ ID NO: 14664 - DNA, 476 bp, Homo sapiens
  MAP TO AC004049.1; EXPRESSED IN LUNG, SIGNAL = 0.48; EXPRESSED IN BONE MARROW, SIGNAL = 0.68; EXPRESSED IN ADULT LIVER, SIGNAL = 0.42
ctcgcttctgcactctgaggccttcggaggtgctgcccatctagccaggccctgcagtaatttcacacactcctctaataaagtcctcgggggctgtcatgtattttcctctgtttgccctattatccctccctgcttgagtctcacagataattgatgatgcttcagttaatcatctttccctctcttttgttcaccaggtacttcggccttcaaggggctcctttattgagaatcaatgtcttctcctaggtaattgatcaccctagacccagggacacccaattcatcgtaatcatcatgaataatcaaaaagtggtagctgtgctactgcaagagtgcaagcaagtgctggatcagctcttgttggaagcgccagatgtgtcggaagaggacaagagcgaggaccagcgctgcagaggtgaggttctgatgggaggcaccaggggtgaaccagcaggttcactctcctgtcc

SEQ ID NO: 14665 - DNA, 431 bp, Homo sapiens
  MAP TO AC003026.1; EXPRESSED IN ADULT LIVER, SIGNAL = 0.42
agttgtcatgggctttttgcaggcccccagagatcatcacagattgcgtttcccatgggtctcattcctgcctgagacactgcctttctctgggtacctataaacctggagagtgacatggtgggggtgtggtgcatatattcatatatatgtttacatgtgtgcatgtggaaacactccgtctcttatgccatggttcagacccacaatagcagtcccagcagggagccctccgaccctgcccaaggcatctgtacggttgacacccttgtgctttgcttctccagacagctcagcagctcctcctcctatagtggggacatcagcaggcaccacaacagcaccgcagaactgcagaaagctgaggccaagaaggaggagacctggaagctgatggaggctgacaaggcgcagacagggcaggtgagatt

SEQ ID NO: 14666 - DNA, 489 bp, Homo sapiens
  MAP TO AC004831.1; EXPRESSED IN ADULT LIVER, SIGNAL = 0.44; EXPRESSED IN LUNG, SIGNAL = 0.46
tttcattttgtttactatggattttgaaaatgtactaattgatatactatcagtaagatattatgttgcataggtggtcaagccatcttttatatgttaagaattaccttgatacctgctgaatgattaggcaaattacttttattcattgtgccttcatttcttcaccttataaatgaagttaagaattctgaaaatactcctacatatgccccatagttttaccaagacataaaataccacatacaaagtgctcatcacattgtctgccatatataaagcacacagatattagcaaatgttacctgcaaaaaaatatttacttgagtgacccatccttaaaatcattctttggcatcttccgattcttggagtttttccatgtctttttattttcctgaaagcaaaggactgctgtacagaaataaaaattgacacaactagagatattgaactcataatagttgcaagtttaatagaggggaagat

SEQ ID NO: 14667 - DNA, 480 bp, Homo sapiens
  MAP TO AC005863.1; EXPRESSED IN ADULT LIVER, SIGNAL = 0.44; EXPRESSED IN LUNG, SIGNAL = 0.47
ttcattccttcaaccctatacagtctagtctttttgtcagcttatagtcctcaggagggagggatgagaaactttatgattggactgagatacactgaatttaatttaaaaatggattctctgaggccatctgagacttcttttaagtcttctcaccttggatcacttgaggcttgcaagattcttggccccactgatctctatcacacacatcagatgggttctagtcttgaacttgtgtctcctctgtcctcttccttcctggctcaaattttataagcctgtcttgtttgggatcttcttttcccaccttcctggtgcttctctttgtcttgtccttctcctcagcctccttacattcactttgccctggatagaatccacagtatttatcatcatttagtgtcattttgtccacctataggatgacccaatataaatttttgtttgaaataacatagcttttctctgttacccaca

SEQ ID NO: 14668 - DNA, 469 bp, Homo sapiens
  MAP TO AC000097.1; EXPRESSED IN FETAL LIVER, SIGNAL = 1.5; EXPRESSED IN ADULT LIVER, SIGNAL = 5.2
cctgacctggcttctccagggtggcccagtgtccccttctgcccttcccctggctcccaccgtccacatccctctatctgcccaccctggacaacaaccagcacagtgcagtgtggccctgcagtgacaccacctgcagagaggtcaggcccagcctcccccgtctcctaaaaggccagcaggtcccaggagctgggggtggggcctggctgtggggcctccatgccccaggggccagggcagaccctccttagccggcaaccactgcagattcctcccctggccagcactcggggacctccctgcccctgccccgtccccctaccttgcctgctgagacatagggctccacgggtctctctcctggggccgggctgactgtggcctgcgaggggcagtcatcgtgttgggttttcctgctagaggcagaaaccacaaaattacctggaacatacacgccccaagtgac

SEQ ID NO: 14669 - DNA, 481 bp, Homo sapiens
  MAP TO AC005746.1; EXPRESSED IN ADULT LIVER, SIGNAL = 0.44; EXPRESSED IN LUNG, SIGNAL = 0.47
tggttgtaagcaggtcaatgtccttgtctataagcagagggcagaggatgagataacctttaaggcccttttcacctctgccactctacatgaggaaccatgttccataaggactcaaggactcagcaactgtttaattcccaggctttttttttttttaagtccttcacttctattttaaaaacttgcatgttcccgtggccctggaatgcctgcctccggcccctctggagccctgggttatgtgaaagcagccgtgccaagctggcccatgggcggggctgagtcttcctggctggcttgtgacatgttcttgacgtactgtgtggtcaagaagctggaactgggggggctgaacaagggccaagccttgcacttcagcttcctgacctggcagccattcagagagaccctgctaagtgctatttcctaaatacactctcttttcataacaatcttaccacattgctttcctttacaa

SEQ ID NO: 14670 - DNA, 467 bp, Homo sapiens
  MAP TO AC003074.1; EXPRESSED IN ADULT LIVER, SIGNAL = 0.42
ccagccagggagataaacagagttttgaatatgggtctattggactcaaaagcacatgtttccccatgctcctgaccgtggcaataccagtgccgtggaagacccatgactgtgcctgagactggcagaatcatctacaggagttagctaatgctcagtctatctgtttacagtgtcaaacacttcatcccctcatgtgtaagaaaactatagcatcacagagaagtgatggccctgtctccaacatttggttgctctatatttggcttcttagcttgcaggaagaccactattccctgcccaaatgcaattcaacttccagatttgttccatttcctgaggggacagttggctttgcctgtgagcttttcttggaggaagacttcatttctggaacttctacacagaacctggccctcagagttcctgaagcttccatgtaagtgtctcagtgtgcatttcctccc

SEQ ID NO: 14671 - DNA, 358 bp, Homo sapiens
  MAP TO AC004535.1; EXPRESSED IN LUNG, SIGNAL = 0.64; EXPRESSED IN ADULT LIVER, SIGNAL = 0.48; EXPRESSED IN PLACENTA, SIGNAL = 0.74; EXPRESSED IN BONE MARROW, SIGNAL = 0.6
tgaaagaagcagagaggttagaatcttctgttttttttttgttacctaagagttttaaatttctttactggtgtggtgaaggagatgtaatgttggtaccggttggtggcaagggaatggtgcttggctattggctggggaggagctgcgggttccagaggcagagccctgtgggctggaattttagagtaaccattttgtagatatcagatccaaatgaagctggatatacagagaagtgtgccgcagagagaggaagaaaatgcaccactttttgatggctacgatgtgccatattttgtgacatggactttcatatacattttctacttaatatgcacagcgatcctcaaagaca

SEQ ID NO: 14672 - DNA, 474 bp, Homo sapiens
  MAP TO AC005016.1; EXPRESSED IN LUNG, SIGNAL = 0.47; EXPRESSED IN ADULT LIVER, SIGNAL = 0.4
aaaatagcatgattgatcatttgacttaatgagttaatataacagagattatagatccaaatgaagattgcagttttgccaataacttctaaagaatttttgaagtgatcttcaaatcatgtcaaatatcctttatccatctttattggtggtaaattttgcttttggaaagagttgcactaaattaggggtcaaactagtgaataagtaaacaattaaataattacatttcagtgaaaaaaatagattataagctaagaggtgtatttccatatctgttgcaggtctgtattctgtcgctgaagagagtgaggataattcagatgaccctgagcgccaaacaactcaacggtgtaaaaataaggcacaacccctggaactttataatacaagtcataacacaaatgagacctgggtcataaagacccaaaaggaaatcaaagagtagtcacagccctgtgtttgttgccaaat

SEQ ID NO: 14673 - DNA, 461 bp, Homo sapiens
  MAP TO AC005969.4; EXPRESSED IN LUNG, SIGNAL = 0.6; EXPRESSED IN BONE MARROW, SIGNAL = 0.49; EXPRESSED IN ADULT LIVER, SIGNAL = 0.47
gttgctgtcgataggtttgcaaagtattttaagagtaaaaaaatggcaaacacaataatgtagagctgatatttggttggccatagtgcttcagaagttttatttaagacctagaatctctgttgcttatgtaattgcatttgcaatattggcctatagtgtgaattttaaaatgaaatatcttgcctgctgttgttaaatctattttgccaaatgttttacaagaaaattcttttatcttatagatggatttaaatctgaaagaacaggttgtcattttagatgaagctcataacatcgaggactgtgctcgggaatcagcaagttacagtgtaacagaagttcagcttcggtttgctcgggatgaactagatagtatggtcaacaataatataaggaagaaagatcatgaacccctacgagctgtgtgctgtagcctcattaagtaagaagatttgtct

SEQ ID NO: 14674 - DNA, 464 bp, Homo sapiens
  MAP TO AC006350.2; EXPRESSED IN LUNG, SIGNAL = 0.61; EXPRESSED IN ADULT LIVER, SIGNAL = 1.4
aaataatcagaacccttctaccagattgtctaacgtcagttttgttttctggcactgcttatttgatgtcttcttcctcatcatctagctgtggttcagaagccttaatttccctcatcatcttttgttaattcctttagtgtggtgtctattggctctactttttctaagatccatatcttgtaaccttgcaccccaactgttttattgttgtggttgatttagttttgtttttggtttttgccacatccacaatctcttttatgatttccttgattggctctgttgtaaatcctgtgatgtcacgcataatacctgggtacagttttctccagcagtaatttattgtttcagacttgatgactttcacagctttttctataacaatgatggcatcttcaatggtataatccttccagactttcatgatgtattctctatcagggttctcttctattgcattg

SEQ ID NO: 14675 - DNA, 477 bp, Homo sapiens
  MAP TO AC005026.1; EXPRESSED IN LUNG, SIGNAL = 0.42; EXPRESSED IN ADULT LIVER, SIGNAL = 0.46
ttggagtgcaatgaagtttctcagagatcaatttattttcccaaacaattgcatagcgatgctctgcctgcattatatcatgctgattttaaaataatagtactaatatgtatttgcctgcagttttttccacaaggctcctttgaattcacttaaaatcttacttattttctttcagagacagcctctgcctgtggagatatttgtctcatgcataccccttgtatctggttttctttgtacccaggacttccgccttatctagtagccctacgtatccggacctgcccttcattaggatctccccacaccggaaccccactgctgcttccgagtctcccttcagccctccacatccctacattaatccctacatggactatatccgctccttgcacagcagcccatcgctctccatgatctcagcaacccgtgggctgagccctacagatggtaagtccaggatggattctgctt

SEQ ID NO: 14676 - DNA, 459 bp, Homo sapiens
  MAP TO AB003151.1; EXPRESSED IN BONE MARROW, SIGNAL = 4.4; EXPRESSED IN FETAL LIVER, SIGNAL = 0.9; EXPRESSED IN LUNG, SIGNAL = 0.43; EXPRESSED IN ADULT LIVER, SIGNAL = 0.53
gggttctgcaaagtcaggctagctggctctccgcctgctccgcaccccggcgaggttccggtggggaggggtagggatggttcagccccgccccgctagggcggggcctgcgcctgcgcgctcagcggccgggcgtgtaacccacgggtgcgcgcccacgaccgccagactcgagcagtctctggaacacgctgcggggctcccgggcctgagccaggtctgttctccacgcaggtgttccgcgcgccccgttcagccatgtcgtccggcatccatgtagcgctggtgactggaggcaacaagggcatcggcttggccatcgtgcgcgacctgtgccggctgttctcgggggacgtggtgctcacggcgcgggacgtgacgcggggccaggcggccgtacagcagctgcaggcggagggcctgagcccgcgcttccaccagctggacatcgacgatctg

SEQ ID NO: 14677 - DNA, 456 bp, Homo sapiens
  MAP TO AC002094.1; EXPRESSED IN LUNG, SIGNAL = 0.53; EXPRESSED IN BONE MARROW, SIGNAL = 0.75; EXPRESSED IN ADULT LIVER, SIGNAL = 0.46
tgatatggtggagggaaagcacagggggaagggaattggactgagagtcaaaggcctggctctgccattcgctgctgtgtgtctttgggcaaggtgcagcagatgaactctaatggccccgctggaaggggcaagattcggacccccaagacctctcattcaccccttccctgccacagctggtaccagacagccccagttcattagccgggactggcacggtgtgccagggcaagtggacgcagccatggctggccgcatctacatctcaggcatggcaccccgcccctccttggccaagaaacaaaggtttaggcatcgcaaccgcaaaggctaccgttcacaacgaggccacagccgtggccgcaaccagaactcccgccggccatcccgcgccacgtggctgtccttgttctccagtgaggagagcaacttgggagccaacaactatgatga

SEQ ID NO: 14678 - DNA, 464 bp, Homo sapiens
  MAP TO AC002067.1; EXPRESSED IN LUNG, SIGNAL = 0.54; EXPRESSED IN BONE MARROW, SIGNAL = 0.6; EXPRESSED IN ADULT LIVER, SIGNAL = 0.47
gaactgtgatcaagccatgccactctagcctgggtaacagaacgagaccatatctctaagaaaaaaaaaaaaaacaaaactaggactctgacaactagtcttggttgttagactggaaaacatatgtacaaatttgtatttacagattgcaaagtagtcattttctttgcagacgttttttgtgattcagttatgtatctttatcagactataagatgtttcagaaacaaaagtattacataatcttattaaaacagtttcttataaaaatgttctcttttagattacctctctagtgacccttcagctgttaaccctggttggccatgacgatcagcttgatggaccaaaatacaaatgcacagtgtctctagacttcatcagagctattgcaaggtaaaatgtcttgaattatgtaatgatatactaaatataaaaattagtgttttccaaatgtgatgtca

SEQ ID NO: 14679 - DNA, 491 bp, Homo sapiens
  MAP TO AC000061.1; EXPRESSED IN BONE MARROW, SIGNAL = 0.57; EXPRESSED IN ADULT LIVER, SIGNAL = 0.48
tcagttctactaaacctccctgaagaatcttccagctgctgagtagaaaatcacaactaatttcacagatggtagaacctccttagagcaaaaggacacagcagttaaatgtgacatacctgattgttcaaaatgcaaggctctggacattgcattctttgacttttattttcctttgagcctgtgccagtttctgtccctgctctggtctgacctgccttctgtcccagatctcactaacagccatttccctaggtcatagaagagaacaaagtgcggcagtacgattccatccagaaactgctgaacgagaggagcctcttccggcaagccatcagcccctccgacagggtgaagctctttccccaccggaactcaagcaagtgcaagtctaagccccagattgctgctctgaaagaggagacagaagaagaggtgcaagatacaaggctttagagagcagcataaatgttgacatgggacatttgctc

SEQ ID NO: 14680 - DNA, 404 bp, Homo sapiens
  MAP TO AC006186.1; EXPRESSED IN ADULT LIVER, SIGNAL = 0.53
gctctcggtggttggcacgggttcgcacacccattcaagcggcaggacgcacttgtcttagcagttctcgctgaccgcgctagctggtgagtgtcccttctgtgtgtgggtcctagagctcgcggtctggtctggtctggtccccagactgacgcctggtcggtccccctcttgtcttacagcggcttctacgctccggcactctgagttcatcagcaaacgccctggcgtctgtcctcaccatgcctagcctttgggaccgcttctcgtcgtcgtccacctcctcttcgccctcgtccttgccccgaactcccaccccagatcggccgccgcgctcagcctgggggtcggcgacccgggaggaggggtttgaccgctccacgagcctggagagctcggactgc

SEQ ID NO: 14681 - DNA, 460 bp, Homo sapiens
  MAP TO AC005031.1; EXPRESSED IN PLACENTA, SIGNAL = 0.59; EXPRESSED IN ADULT LIVER, SIGNAL = 0.45; EXPRESSED IN LUNG, SIGNAL = 0.53; EXPRESSED IN BONE MARROW, SIGNAL = 0.55
caaaagctccatcctatatttactgtaaatcagtctctttgattgtattgcatgttttatttcaagaaaaaagttaacctgaagatttaattttaaataactacacgttgtcactaatagaaataacaaataattatatgagaataatggtaattctcctaagttttgtggtaaattttttggcaattttattgaagtataataaaattcaacaattcaatacgtctttataaatgttcattgtgatataggacagctctatcacagtactggggtaaattttaattatatttattaattacagatgtgaatttcttcggagtaagaaatcctcagaggaaattacccagtatattcaaagctacaagggatttgttgacataacggtaatgtataacagcaatttttttctcaagtttttggattacctgtaagtgtctgactcagaagggcataggca

SEQ ID NO: 14682 - DNA, 461 bp, Homo sapiens
  MAP TO AC004552.1; EXPRESSED IN LUNG, SIGNAL = 0.55; EXPRESSED IN ADULT LIVER, SIGNAL = 0.42
gccaggaagacaagcttcagcttgagagccagctgatcttagcgacagctgaaccactgtgtcttgatccttctgtagcagttgcctgcactgcaaacaggctgctgtacaacaagcaaaagatgaataccgacccgatgaaacggtgcctccagaggtattcgtggccctctgtaaagccacagcaggagcagtctgactgtccacctcctcctgagctgagagtgtcgacttctggccaaaaagaagaaagaaaagtaggtcagccttgtgagctgaacattgctaaagcaggaagttgtgtagacacgtggaaaggcagaccctgtgatttggccgtgccttcagaagtggatgtggagaaacttgctaaagggtatcagtccgtcacagctgctgacccacagctcccagtctggccagcccaggaggtagaagacccttttggatttgcgttggaa

SEQ ID NO: 14683 - DNA, 494 bp, Homo sapiens
  MAP TO AC003034.1; EXPRESSED IN LUNG, SIGNAL = 0.6; EXPRESSED IN PLACENTA, SIGNAL = 0.62; EXPRESSED IN BONE MARROW, SIGNAL = 1.6; EXPRESSED IN ADULT LIVER, SIGNAL = 0.55
tttttctcttttctccccctgtatcttctttctccttatctgtctctattgttattggagtatgaggtgagcctagtctcaatcttttgtccacctgctcctccaataaatgacttcagagagagctgtaacctcattcatgtccccagttttctccttttcccttgacctggatcaccgggggtgcaaatgaggagatacaagggtgatggaagtcttaatgccaatttcacattattccaggagatgactacacactctaatcccttctctctggccttcatcttttttgcaggtggtgaaggcatttgtggtcctggccttgcagttcctgtcccatgacccagaacagctcaccaaggagctgcagcagcatgtgaagtcagtgacagccccatacaagtacccaagaaaggtaaggcctttgagctcccaagtcactcaaacttgagaaatagattgttttcctgttatatttatcttcttcaggagga

SEQ ID NO: 14684 - DNA, 478 bp, Homo sapiens
  MAP TO AC005873.2; EXPRESSED IN LUNG, SIGNAL = 0.46; EXPRESSED IN ADULT LIVER, SIGNAL = 0.47
ttggatatgctacccatcagtgagagaagcctgctcaacttgcatgggctatgctcatttgcaaatttgcaaattataaagtggataaaaggaaatgaattactctcttttcagagggccattaactttttccctacaagctcttagagaaagatcactgtggtcttaaggagttaatataattgtaatcaacatttaccttttatagaattacatttttactgctggcacttgctcctccaccaggacttccattaagagtaaggggacatccatactcaaaaatgcctttggtagatactatggcaccattaaacagtctgtgggaggacccgagattaaaccagctatcagtataacatggagttttgatcaaaacttgaacatacttctggatttgctgacggaccactggccctatgaggtgacccccagaaaaatgtttctgtgactagaaggaatttgcagggccacttac

SEQ ID NO: 14685 - DNA, 359 bp, Homo sapiens
  MAP TO AC004027.1; EXPRESSED IN LUNG, SIGNAL = 0.44; EXPRESSED IN ADULT LIVER, SIGNAL = 0.46
aaagaaaatccaatcaacttctggaaatcaaaggcacacttagagaattacaaaacgcagtggaaagtttcaacaatagactataacaaatagaagaaggaatttcaaagcttgaagacaaggctttttaatggactgaatcaggaaaaataagaaaaataaataaataaacaaaataaactgattatataaaagagccaaaccttagaataattgatgttcctgggggagaagagaaagcaaaaagtttgaaaaacttatttgaggtaataattgaggaaaacttccctggccttgctagagatttagatattcaaatacaagaagttcaaagaactcctgcgagagtcattgcaaaa

SEQ ID NO: 14686 - DNA, 466 bp, Homo sapiens
  MAP TO AC006095.1; EXPRESSED IN ADULT LIVER, SIGNAL = 0.46
gcttttgtgctgccgtagactcctggtatttgtactcctagcactttctcttgtcatgaagtcattaagttattagcttcaaaactcattaagttctagagccgctggcaatgccagataaatggcaggatctcaattaaaacagagtaggtgagaacacagagccgagcactgtgaccatgcctgtctttctctgcatttgcagtggagcacattcccaaaggaacaactgcctggatgcagcgaaggcctgcaacctcgacgacatttgcaagaagtacaggtcggcgtacatcaccccgtgcaccaccagcgtgtccaatgatgtctgcaaccgccgcaagtgccacaaggccctccggcagttctttgacaaggtcccggccaagcacagctacggaatgctcttctgctcctgccgggacatcgcctgcacagagcggaggcgacagaccatcgtgcctgt

SEQ ID NO: 14687 - DNA, 490 bp, Homo sapiens
  MAP TO AC005926.1; EXPRESSED IN ADULT LIVER, SIGNAL = 0.48; EXPRESSED IN LUNG, SIGNAL = 0.73; EXPRESSED IN BONE MARROW, SIGNAL = 0.57
gaccatggagtaataagggggttgagaagtaataagaagatagaaactttatattagaagtagataactgtatttttttttgagcttaagacatttggaaattcacagaaaggcagagaatatgcagcttgtgggtggggggaggcgggtacagagaaatgatgaaattagattttttctgtcaattaagaagtatagggacatttaagtttttttctgattccctccagtctcatttccagttctggtttaatatatagttctcaattttggttacccatttagaatcacctgagggggcttgtgaaaatcgtgatatccaggcttctctccagcccaattaaatcagactcttcaggagcagtatccaagattctatagtttgtaagactgccaaggtggttccaatatgcagccatgatttagaaccatttgattatattaataaagtatttaataagttccactttaatactgtacatcaattcac

SEQ ID NO: 14688 - DNA, 492 bp, Homo sapiens
  MAP TO AC002485.1; EXPRESSED IN LUNG, SIGNAL = 0.62; EXPRESSED IN BONE MARROW, SIGNAL = 0.59; EXPRESSED IN ADULT LIVER, SIGNAL = 0.61
aaaccagtgattccacggtcacaggatccttcgggtgttgctttgccagccggaaacctctgtgtctggtgctgcctctgcttcagtttcactcagactcactgagctagttccacccacttggctcagcaggctgtgctcagttcacaataccagcccaaatcccacacccacctagggtgagccaggtgcagagtggcaagaagtgtgtgagtcaacaagcatgagggccagccactatgcacagccaggggtgccaactgctatggcgggggcaggcagctcaaggcacaggcacgggtaccagctccatgcacagctatggctgggccagaagtagcacagcagcttccgctatgggcaccgacatctggacaaggaaaatgtggttgtgccagaaaactcagaggccagcaactgtggagccccaaggggtgagggaggacgtgttacaactctctcattcccactgcccacagcacagtgaattga

SEQ ID NO: 14689 - DNA, 455 bp, Homo sapiens
  MAP TO AC005040.2; EXPRESSED IN LUNG, SIGNAL = 0.6; EXPRESSED IN ADULT LIVER, SIGNAL = 0.53
cagaatccccacattggttccctgagctatggtgtgagggttattacgatggaaaaggccaagtggaagccactaaaacaacctctgcctagagaaatagtaaaccaaaagcaatatcacattcctggagggtctgtggagattagtgccaccatcaaggacttgaaagatgcaggggtggtgatttccaccacatccccatgtaattctcctatttggcctatgcagaagacagatggatcttggagaatgacagtggattattgtaagcttaaccaggtggtgactccaattgcagctgctacgccagatgtggttacattgtttgagcaaattaacacatttcctggtgccggatatgtagctattgatctggcaaatccctttttcttcatccctgtccataagatccaccataagcagttagccttaggggtttatcagctcgctagccc

SEQ ID NO: 14690 - DNA, 379 bp, Homo sapiens; identical to SEQ ID NO: 11147
  MAP TO AC002543.1; EXPRESSED IN LUNG, SIGNAL = 0.63; EXPRESSED IN BONE MARROW, SIGNAL = 0.77; EXPRESSED IN ADULT LIVER, SIGNAL = 0.47

SEQ ID NO: 14691 - DNA, 390 bp, Homo sapiens
  MAP TO AC005013.1; EXPRESSED IN BONE MARROW, SIGNAL = 0.66; EXPRESSED IN ADULT LIVER, SIGNAL = 0.49
aggaaacattaacaatagcatcgtaaaatatagaattgaaaatgtgagtcattttgcttttaaatctctatcatgtacatgactgacttcagttgttctctctcctcccttttgttctgtttcagaggttgaaggctgcattgactcaccaccctgctgccatgtcaaatgggaacatgaacaccatgggacacatgatggagatgatgggctcccggcaggaccagacgccacaccatcacatgcactcgcacccgcatcagcaccagacactgccaccccatcacccttacccacaccagcaccagcacccagcacaccatcctcaccctcaaccccatcaccagcagaaccatccacatcaccactcccattcccaccttcatgcac

SEQ ID NO: 14692 - DNA, 353 bp, Homo sapiens
  MAP TO AC003953.1; EXPRESSED IN PLACENTA, SIGNAL = 0.58; EXPRESSED IN LUNG, SIGNAL = 0.63; EXPRESSED IN ADULT LIVER, SIGNAL = 0.6; EXPRESSED IN BONE MARROW, SIGNAL = 0.58
tcatagaaaacctttcatcgaccatataacatccttaacttattttctcttcttctctcctcagccaagattcttgaaagtattgtttacaatacagtaatctttttgtttaatggaattaaattccttctgaaactggattctgcttttaacatcacactgaatttgctccagaaaaaaatcatcagtaacctctgtacataccatgtatatcaaatctggtctttctggacatttctccatcgttggaccctggagatgattttttttttcgacagctcccttttccactgcttctatgatgaatttccttggtcttattcctaaaatttccactcctttcaaactgcatt

SEQ ID NO: 14693 - DNA, 460 bp, Homo sapiens
  MAP TO AC004141.1; EXPRESSED IN LUNG, SIGNAL = 0.45; EXPRESSED IN ADULT LIVER, SIGNAL = 0.46
cagagagtaggcaccagatagaaagatttctacagaatttatggttccccagtataaaactcaaagctgttatagctttatcagtggctgactttcaaaacaaacaaatcttgctcttgaggacaggtatgacaagcatcaaaatgttccatttcatgaagccagtgaagcctgagccaatcctctgcacaggtggctacacgatttactgttgtcattctaaagctcttactttttgggtcccacttggcccacattgactcgcacacagatgacttttcttgtctgcatgccgacagagcaggaggcctccccattccaagtcgtagttgtgttgaaggacgatactgaggtgtcctcaatgcactggccccagggaccagtttgccagtggtacactgtgcaaggatgctcattacagcttcgtacttcttgcaaagcactgctatttggacagcga

SEQ ID NO: 14694 - DNA, 478 bp, Homo sapiens
  MAP TO AC003695.1; EXPRESSED IN BONE MARROW, SIGNAL = 0.52; EXPRESSED IN LUNG, SIGNAL = 0.68; EXPRESSED IN ADULT LIVER, SIGNAL = 0.56
gtgtgagtctctgtgcatgttcatatgtgtgtctttatgtgtctgtctgtgtttctgtgtgtgtgtatcctctgaagaggactggctgaaatcagaaacgtagccctgccagcctcacgtgtcctcaccgcccttgttcccccaccccagggaaggaactggtgctcttcctccgcccaagatcccagctgcgcctcagtgctgacttggaggtcttggatctgcagggcctccggccggaccgggagttggcccgggtttctgtgctgtccactgacagcggcattgagcgggaccttcccacgggggctgatgagctgcctgcacccggcagccctgagatggagcgagccgggctgcagcgcaaagggggcatcaagaagcgtgcatggcccctggacttcttgatgcctggcagctgggacgggcccccagggctgcaccggaggacaggccggcccagtggggatggggaaat

SEQ ID NO: 14695 - DNA, 469 bp, Homo sapiens
  MAP TO AC003082.1; EXPRESSED IN BONE MARROW, SIGNAL = 0.59; EXPRESSED IN LUNG, SIGNAL = 0.66; EXPRESSED IN ADULT LIVER, SIGNAL = 0.56
gctggctgtggtagtcaatgggccaggtgataaccaggtctctggtggtatgtcagatggggggccacagtggctgtactgtgaccatgttactggaggaggtgaagtagctttcagtggaagcctccataggcaggaagctagggacacaaactttgctaatgctttagccccagaggctacaacccagcacagcagcagctatgagcagtgaaatttacccttgaggtacacaaaaaaatgccccattatccctttgctgtgggagcagtgctgatgctagtggctcgctctttggtcctggctctgactccaccagcagtaacaaccagcagtggtggaggctgtgggtgcaatagacttttatcatggccactcttctggaagatgtcactgccagcaactcctgactcagctttggcagcagctgccgcatcgaagactgttgtgagtggggaaaggtaatggg

SEQ ID NO: 14696 - DNA, 492 bp, Homo sapiens
  MAP TO AC003029.1; EXPRESSED IN LUNG, SIGNAL = 0.56; EXPRESSED IN BONE MARROW, SIGNAL = 0.59; EXPRESSED IN ADULT LIVER, SIGNAL = 0.49
gctgtaccagtctgtcatccttctaacagtatatgtaacggtctcttgctatcagtgtattttcttcctaaactttttggtaatcttatagttgaaaagtaaagattgatttgatgtccttttctccggtaggctgaggaagttgggccttttttgtgttttctgctattggccctgtgtgtttcctcttctgatcttgctttcttatgaccttggtccatttcccagttgtcttgttgcctgcataattctaagcctgaagcctaggagaggtctgaatccgatgtctccataactctgggttccttctcccacaggtggatgaaactcagtttaagaagatcctcggctacatcaacacggggaagcaagagggggcgaagctgctgtgtggtgggggcattgctgctgaccgtggttacttcatccagcccactgtgtttggagatgtgcaggatggcatgaccatcgccaaggaggaggtgagcactt

SEQ ID NO: 14697 - DNA, 474 bp, Homo sapiens
  MAP TO AC004057.1; EXPRESSED IN ADULT LIVER, SIGNAL = 0.42; EXPRESSED IN LUNG, SIGNAL = 0.45; EXPRESSED IN FETAL LIVER, SIGNAL = 0.74
caaaggtttcatatctatctgtttgcaactcactagtttcagaaatgttacattggtgttctcttaaatacatctttgctcaccagcatttgctaacaaactatgaatgtatgaagtacacaggctgattgtgaaggatgacaaatttagcaggattaactacatatctgtaaccttgcattgctggtgtatgcatgttggtcaatgaatgtgggtttgtttgtctcaatctgtattcagttaatgtggactgggccaagtttaccagggctctggcgttcggattggctctcttgtctaaaaggagtttggttacacggtagtggccacagtgcgcagcaacgtggagggctgtcaggtagtctagggtgacatcatcaacaggtgccttgtgctgtaacaggtgcttcacacattccacgtggtctccctgggcagccatgtgtagtggagacagcccattctgcacattaa

SEQ ID NO: 14698 - DNA, 490 bp, Homo sapiens
  MAP TO AC005571.1; EXPRESSED IN LUNG, SIGNAL = 0.58; EXPRESSED IN ADULT LIVER, SIGNAL = 0.46
tcctgggagtctggaatttgggtacatgctaggcagagggtgcttgtgtgaccagcctatgattaaaaccttgggctctaatgagcttccctgggcagaaatgttgcatgcatgttgctgagggaagagtgagctctgtgtgtcctctcctgagagggagagggcatagggaagcctgcacacagattcctccaggttctgtctgtgtcttccctgctcatgatccagtgatatagccttgctatgttgctgagcagatttttatacctcttttgctgtgaaatgagatccctgatcgacagcaatgtggtgtggaacaacgtgatgatgcagaaggattctctgtccgtatcctgccacgcccaccctcccacttctctcagcctcctttgctggctcctgctcttcttcccagcctcaaaatactgacttctccaggccttaatcctgggctctgttttctcctagatctgcactcccttccctaggt

SEQ ID NO: 14699 - DNA, 477 bp, Homo sapiens
  MAP TO AC004062.1; EXPRESSED IN PLACENTA, SIGNAL = 0.79; EXPRESSED IN LUNG, SIGNAL = 0.53; EXPRESSED IN ADULT LIVER, SIGNAL = 0.48
aggctcagagttgagttgagggtctagtctcctaaatatcattttataaagatcttttcagtaataaaagaatccctgaggctgtagctcctgggctaggccttccgatgggaaatacagaaggccatcagctcagctgagtacaaagagtagtgattctgcggggagagggttatggcagcggggcagggtggctgaaaggatcaacagccattatttttaaatctccctggatctcttttgtgatacttaaattgtagagtaaagaacaagatgtagtaggaaaacaacactttggagagaaagcacactttactgtcccctacacagtattctctggagtggttaacatagaagttgcaccgcaggattatccactgcccactgcctttgctggcaagttgttaaggaatctgattaatggaggaaatatggttttggcataacaatcaagatgggctctttagacaaagcagg

SEQ ID NO: 14700 - DNA, 462 bp, Homo sapiens
  MAP TO AC000111.1; EXPRESSED IN ADULT LIVER, SIGNAL = 0.44; EXPRESSED IN PLACENTA, SIGNAL = 0.73; EXPRESSED IN LUNG, SIGNAL = 0.5
agctcaaaactcatgggatgtgattctttcgaccaatttagtgcagaaagaagaaattcaatcctaactgagaccttacaccgtttctcattagaaggagatgctcctgtctcctggacagaaacaaaaaaacaatcttttaaacagactggagagtttggggaaaaaaggaagaattctattctcaatccaatcaactctatacgaaaattttccattgtgcaaaagactcccttacaaatgaatggcatcgaagaggattctgatgagcctttagagagaaggctgtccttagtaccagattctgagcagggagaggcgatactgcctcgcatcagcgtgatcagcactggccccacgcttcaggcacgaaggaggcagtctgtcctgaacctgatgacacactcagttaaccaaggtcagaacattcaccgaaagacaacagcatccacacgaaaagtg

SEQ ID NO: 14701 - DNA, 393 bp, Homo sapiens
  MAP TO AC006451.1; EXPRESSED IN ADULT LIVER, SIGNAL = 0.4
ttagagcactaatccttttctgctttttataagttgtttgatagctgtatcattacttactgacttaggacaagatttaaattattatcacaccttcttaaaatatttagcctagtttgtaaaaatttaatgagacatcctaaaaatgggtccatctttttagtaaacatcagcaataagtaaacataattatggattttttaaaaatcccctcattccttattcagtaaaatagcctatgttattacataagtatttctcaaaatttattgtgaaaagtaaattacttaccacaacattatactcccatatcatcctccaaaaatctattactgtatttgctaaaggtccttgagttgctacatatgcttttggcccatagacgccctaaaa

SEQ ID NO: 14702 - DNA, 479 bp, Homo sapiens
  MAP TO AB019439.1; EXPRESSED IN LUNG, SIGNAL = 0.42; EXPRESSED IN ADULT LIVER, SIGNAL = 0.51
aaaaccaaccgaaccctgaccctgcagctctgagagaggagccttagccctggattccaaggcctatccacttggtgatcagcactgagcaccgaggattcaccatggaactggggctccgctgggttttccttgttgctattttagaaggtgaatcatggaaaagtagagagatttagtgtgtgtggatatgagtgagagaaacggtggatgtgtgtgacagtttctgaccaatgtctctctgtttgcaggtgtccagtgtgaggtgcagctggtggagtctgggggaggcctggtcaagcctggggggtccctgagactctcctgtgcagcctctggattcaccttcagtagctatagcatgaactgggtccgccaggctccagggaaggggctggagtgggtctcatccattagtagtagtagtagttacatatactacgcagactcagtgaagggccgattcaccatctccagag

SEQ ID NO: 14703 - DNA, 495 bp, Homo sapiens
  MAP TO AC000403.1; EXPRESSED IN PLACENTA, SIGNAL = 0.72; EXPRESSED IN BONE MARROW, SIGNAL = 0.57; EXPRESSED IN ADULT LIVER, SIGNAL = 0.61; EXPRESSED IN LUNG, SIGNAL = 0.84
tgtccttgagactttgatgtaaaaagacagagttgtgaaattcaaattgcaccaataatcattttgtttttatttcccatgctcctttatctattagcagacatcccacatgcacacacacctaggccaggcccaggccaatcactgtatcccaccccttggctcttgggattattccaaggttgctcaaccaaagtgcagcttccagcaatgctatctttaccagaactggcagggaagtcccttctttcccctttggtgggcggcggttaggggtgatgctcattctctgcagcaataagtgtgtaataacaaggtccctaaccttctggttcctgttgctcttccccagtgttctccccataagcctccttaagataaaatctactttgagatatgtttttgcagcctaaagaggactgactcatgttgcatttttaaaataaggcatagttctgatcatgctataatatcaccctggtcagaaaatcctca

SEQ ID NO: 14704 - DNA, 447 bp, Homo sapiens
  MAP TO AC004130.1; EXPRESSED IN BONE MARROW, SIGNAL = 0.54; EXPRESSED IN ADULT LIVER, SIGNAL = 0.5; EXPRESSED IN LUNG, SIGNAL = 0.57
tgcgtactactgaatctttgtggttttaatttgtgcttccctaatgactaaaggtgctgagcttcttttacgtgcttttttgttatctgcagcagccagcctccaaaatgaaccctcaaatgatccctagatactgatattcacagtcctatgtagttttttcctaaatttagtaggctgtgtaacaaacagaatatgcaggaatgatggtgtgtcacttctgaggtcagtcataaaagccattggtgcttcctccttgatctctcttggctcacccaccttgttggaagccagctgccatgttttgaggatgttcaaaaactctatagagagatccatgtgacaaagcacacaggccacctgacaatagccagcacccagctgcaagtgagccattttgaaagcagatcctcaagccccagttaaggtacaaatgacttcctgccc

SEQ ID NO: 14705 - DNA, 465 bp, Homo sapiens
  MAP TO AC002523.1; EXPRESSED IN BONE MARROW, SIGNAL = 0.53; EXPRESSED IN ADULT LIVER, SIGNAL = 0.44; EXPRESSED IN LUNG, SIGNAL = 0.51
acccggctactttccatttccccaaaaatacctagtgaatttctttacccacacggccctctttacttgaagtgcagattccccccttctttgtctggcaaaatcagacttgtttttgtatcccttatctctttagcaattagcacaaggtcttgcctggagttgatgctctgaaaatcgtaacttgaattgttctaccttactctttgcttatttaactcttcccttcccacagccacaccattgttattacttttcaaaggagaaaactgaagcctcaccacaagacttcccaggccaagaggctgtcatgccccatttggacacagaaggatgtcttaaggcctctggcccccagtgccccagatatccctaagaggaagccctataagaagaatgggaagctcagagtttctctgccccctcccctctacaaatcctgagagtgaaggctcagctcaaacc

SEQ ID NO: 14706 - DNA, 448 bp, Homo sapiens
  MAP TO AC005191.1; EXPRESSED IN ADULT LIVER, SIGNAL = 0.55
cacatgacaataaggcaagggctcaggcatagctaccaaaatacaagattcagaagggaccagcatcttgtgtgatttgatgctgcactgctgagctattgccctagttctaagagtctctatggctagaaacaggatgaatctcagattatggactagaaaagtcatctcttagtaatggatagaagagtcaatccatgggaatgaagtgtcttcatccggggctgtggaggactgaagggctactctgacagggaactgggcaggtcattatggagactgcctctccatggcatggtgctattactcttagctacactaaaaagaagtcagtggacatgtatctcatggcaacaccacaggcccttgattatcatcagaataaaaattccgtaagttatggatattctaggcaaacatgaggcaaacctacaatgactactattaa

SEQ ID NO: 14707 - DNA, 451 bp, Homo sapiens
  MAP TO AC005045.2; EXPRESSED IN LUNG, SIGNAL = 0.48; EXPRESSED IN ADULT LIVER, SIGNAL =   1
actatgttaagtgctttctataggctcaacgttttatgttaatcaccttatatttaagttctagacattaatacagtaaaatatttcatacacaattgacaattattagttgtagtgggcacaaacatttaattattaaagcctgcatatcatgataaataattcaaataaaacacatgtctaaaaacaacacttaacaccaattgaaatcttatttgacctacctttccagcagcttccagttcttttttatctcttttggcatttccagccaacaatttcatttcaacaattcctgacacagcaataattggaacaactgctaatagcaatagggttaactgccaaccgtagataaatgatatgataataccagttccaaggttagctatattctgtgcaattaaagccaacctggttcctgtggcctgggagagaaaaagcacaaagc

SEQ ID NO: 14708 - DNA, 456 bp, Homo sapiens; identical to SEQ ID NO: 10901
  MAP TO AC005723.1; EXPRESSED IN ADULT LIVER, SIGNAL = 0.53

SEQ ID NO: 14709 - DNA, 489 bp, Homo sapiens
  MAP TO AC004944.1; EXPRESSED IN ADULT LIVER, SIGNAL = 0.61; EXPRESSED IN LUNG, SIGNAL = 0.48
acgggaaccacacgatattcttcaaatgcattggaagatgttgtaaaaatataaaagggtacagtaaattgatgggaaatgacatctcttgagtgaacccagcacctgtacaggtagtacagaaaacaaacaaacaaagaaggaaaggtcaggcaagaccagagaaggaaaccattgatgaagtcaacttaaggcctttagcattcatagctgctctaggggtctgagcatcatcacacaacctccgtgggaactgtgagctttggagaaagacccaggaggccagctggaattggactcttacctaaagtatccaatgggctgtatggacaggaagatgcccagcaaggtgtgggcccagggtctcggcccttctttgtgttgaggcaccatcaccaacattattattgtcatctgcctgatgcatattggagatgagtatgcatatttaaaaatggttttgttactggctttatgaattctggttcc

SEQ ID NO: 14710 - DNA, 473 bp, Homo sapiens
  MAP TO AC005873.2; EXPRESSED IN LUNG, SIGNAL = 0.54; EXPRESSED IN ADULT LIVER, SIGNAL = 0.41
catggcagatttcagttctctaagttaatccttaagaaaataattcataagtactgattattttttaaatactgagttctatattactgtgttgtttcttctcacattaaatgactggttccatcaatgaattcttaatattgaacttttcagtattttctaggatgtactagattttctgcattaaattaatctgacctttctatatacttttagccatcatggatgaggtcatccaaatcctagcaaatctgccaaaagaccaggcaggctttctgaagaagtcatcagtgcagtctgagccaggaggaataaaactttcaggcttactgacatatctattaatagtttttgaaacagaagaaagaaggaaacttagtgttttgaattcctttttccaagcagcaaagagccttctgctggggctggggcatgccagctacttctcatattccccagagttcatgtgtgag

SEQ ID NO: 14711 - DNA, 356 bp, Homo sapiens
  MAP TO AC004216.1; EXPRESSED IN LUNG, SIGNAL = 0.41; EXPRESSED IN ADULT LIVER, SIGNAL = 0.43
tgtaatggtgtttgtcctcttccagcagaaaaatcacccaaagatttgggtcaccagacccaacgtggtgaaaccccatctgtaggtgatagagcaagaccctgtctcaaataaataaataaataaataaataaataaaagacaatctgactttgaatgtaatggtgtctgtcttctgtcagcagaaaaatcacccaaaggtaacatcttgccagacccatttttcaactggagatttacctgacagcgaatcataacatgggtcactttagacttgccgtcattgctctcccctttgtcatcaccagtgcgcacagaaagaacaaaatctccagggtggctctggctctctcgta

SEQ ID NO: 14712 - DNA, 394 bp, Homo sapiens
  MAP TO AC000382.1; EXPRESSED IN LUNG, SIGNAL = 0.52; EXPRESSED IN ADULT LIVER, SIGNAL = 0.46
cagattcaggggcttacacctgtaatcccagtattttgggaggccaaggtgagcaggtctcttgagccccatattttgagaccaggctggacaacatggcacatttgtttagaagtgtttgaccataactaccattccagaaaaagatctactcattagaactacaaatcataaaattataagttctacaaaaacaaatcaaccttatctaccacgcagttctacccaattatatcatgttaaaaccgaaggtctcaccgtggactcgatagctgatatgagcaatgtcaccaccatcctgctctccacggaatcatcttcaacagactcctcatcttcaatggactcctcatcttccatgggcagagtggaaactgcaacttgtgccatgatc

SEQ ID NO: 14713 - DNA, 473 bp, Homo sapiens
  MAP TO AC006252.4; EXPRESSED IN ADULT LIVER, SIGNAL = 2.8
ctcaggcttctggagctttctagatacaagctctgtgtttaccctgttaaggtcagtgctccggagagggaacttctgccccagcctgctgggttcaaaggctttcttctcttggtgaagtcagccaatggcggaaacatgacagagggtggctggctacaacccctgccctggcagtcaccccgctcaagcccaacttcaggaaggtatgaagcagaacatccgtacatcatgtgtagaggcacaccccacggcaagtccaatcagagacaggccattacccgcacagggatgatgtggctggggcagtggacaacagggaggccggcatccattagcatctgtctcatgagtttgacgttgcgctggtgctggcggcgaagcacccgtccctcagcgctcttcaggatccgcacagactccagggctccagccagcagcatgggtggcagagaggtggtgaagatgaagcc

SEQ ID NO: 14714 - DNA, 453 bp, Homo sapiens
  MAP TO AC000113.1; EXPRESSED IN ADULT LIVER, SIGNAL = 0.48; EXPRESSED IN LUNG, SIGNAL = 0.51
ttctactccccagtgttgacagtctgtctatccttccagtcttttcctgtatgtgtaacatataatacccttaacaaaaatcagatcctactatacttactcttctgcaacttgcttttatcacaatactatattggagatatcattgcacatcagtatttaaagatctagcttgtctttatttgtggctacatcgtcattgtcatcattatactagtagttggaatagtaatgtgtagcaattattaaatgctctgtgccaggtcctatctgaatatttcatatgaattatctcatttactcttcacaacttcatgaattgttacttttcccattttacagatgagaaacggcacagagaggttagaaacttggtcgaagtcacacagctcataaaagctagaggaggaagtcaaacctaggcagtctaaccaaggctcaaactcttaatca

SEQ ID NO: 14715 - DNA, 482 bp, Homo sapiens
  MAP TO AB019439.1; EXPRESSED IN ADULT LIVER, SIGNAL = 0.44
ttaggcacccacagaaaaccaccacacatttccttaaattcagggtcctgctcacatgggaaatactttctgagagtcctggacctcctgtgcaagaacatgaaacacctgtggttcttcctcctgctggtggcagctcccagatgtgagtgtctcaaggctgcagacatggagatatgggaggtgcctctgatcccagggctcactgtgtgtctctctgttcacaggggtcctgccccaggtgcagctgcaggagtcgggcccaggactggtgaagccttcacagaccctgtccctcacctgtactgtctctggtggctccatcagcagtggtggttactactggagctggatccgccagcacccagggaagggcctggagtggattgggtacatctattacagtgggagcacctactacaacccgtccctcaagagtcgagttaccatatcagtagacacgtctaagaaccagttctccc

SEQ ID NO: 14716 - DNA, 473 bp, Homo sapiens
  MAP TO AC005034.1; EXPRESSED IN ADULT LIVER, SIGNAL = 0.41
gaaatacagaagcaggtctacataggtaggaaatgttaatttagtttagaacattgtgaatttgaggtcgctgtggggagattgtatggggatgcccagcaaaccaagagtttctgcacatgtaagaaacaggtatggaaaaaattcacacatgagagacagggaacaggcaggcttagaaaccactcatggcctacatgttcagatggattagtagcatctgagggaaatgctccagcaacacacacagacccctggttcctaagccagccatggttccccaaggcagcttacctgggaccttgagaatccagcatgtggagagtctgggctgatcttgactctccatgtgggccctccctgatatggagctgaaccaaaccttggcaagccgagtaaaaattcagtaacactggagccttcacaacccatgtctctcctggggaaaacagcagagattaggaaagacagtg

SEQ ID NO: 14717 - DNA, 541 bp, Homo sapiens
  MAP TO AL137225.7; EXPRESSED IN ADULT LIVER, SIGNAL = 0.57; EXPRESSED IN PLACENTA, SIGNAL = 0.59; EXPRESSED IN FETAL LIVER, SIGNAL = 0.54; EXPRESSED IN BONE MARROW, SIGNAL = 0.45
aaagtgcccgtggtttagtgactgactcccttatcctcccaggcctcagtctacccacctgtacactgggaggtttggcccactgtagcccattgtggttctcttaataagatttaatgatttgctgactttgggtttggctggagccccatttgcttggaggactgagacactcctggccaacatccctctcggccaaggctgagtgtctccctcctgctgccccatagcctgtggtgcagcagcaaaagggcaaaaccatcaagcttgctgatgccggggaggccctcacgttccctgagggttatgccaaaggctcgtcgcagctgctgctcccagccaccttcctctctgcagagcttgcccttctgcagaagtcctttcatgtgaatatccaggatacaatggtgagctgtccagttccccatttccatctgcctctgtccattacaatgcagtccctgcctagtttttctatcatgaaaattatcctggccttgtgggcaacactaggactggaagatgcaggaccgatttgagt

SEQ ID NO: 14718 - DNA, 598 bp, Homo sapiens
  MAP TO AC015842.4; EXPRESSED IN BONE MARROW, SIGNAL = 0.55; EXPRESSED IN ADULT LIVER, SIGNAL = 0.7; EXPRESSED IN PLACENTA, SIGNAL = 0.69; EXPRESSED IN FETAL LIVER, SIGNAL = 0.51
aaccactttgagacttttctttatgttaacttatttgtattttcatgtactttttatattaatttttaatatttatgtatacactactatacaatatactagatatacagtaaatgattatgcattctattttaattatctagatccagaatgtgggtaaaactgagcactataatgagagtttagtaatctggcctctagttttgtgtctgccagtaacttactttctgagggagtcttatctgggcctcagttcactcatttacaaactttgcgaatttgaactggaaccagatgccctgtggcagtctcagaattctctccagaactctgctggctggaggatgcatactaggagaaagacatctcaggatgagattgtgctctattatatgtcacgtttgctttgcactgagaggcctattgttaatactgccaatacctacagcatctcagacacagcgagaagcagcaatcacttccttctgaaggacagagaccacatgtatcaaaatccctgtctctggaccatctggctgctgattgtatgatactaacatccacactcaattaaactgggctccccttaggaaaacaa

SEQ ID NO: 14719 - DNA, 546 bp, Homo sapiens
  MAP TO AC016057.3; EXPRESSED IN BONE MARROW, SIGNAL = 0.44; EXPRESSED IN ADULT LIVER, SIGNAL = 0.55; EXPRESSED IN PLACENTA, SIGNAL = 0.69; EXPRESSED IN FETAL LIVER, SIGNAL = 0.46
cacctgagaaacaatgcaccttttttcagaagaagctgaactactttatcatgtccattctttgctgccagatggagaggagtcattccatgaaggtcaccttcattcagaagcctcgtatcacttatgtcttgtaggagcctctgacaggtattgatacgcccataacttggaaaaaattaggtttcatattttcaaggcaaatattaaacagaaagaagacatgttcatacattgctagactgacccttacctggctgcaaaatgcagaggtgatttcttatctttgcttttggaatgaatggacacattaaagccaagtaggttatttacagaaccagggcccccctgtctacatgcataatgtagaggagtacacccatcgttgtcttcatccattaccagctctttgatctgttgcatctataggaaaaaattaatatcatacaaataactctgctattatgctaatatgatggttttcaaactattctgtaggaaaatattttccaacaagggtcaatatgtattccttggggccaaaat

SEQ ID NO: 14720 - DNA, 584 bp, Homo sapiens
  MAP TO AC021786.2; EXPRESSED IN ADULT LIVER, SIGNAL = 0.65; EXPRESSED IN PLACENTA, SIGNAL = 0.54
gggtaccacaccatttccagctgaaaatccagtgaaaagcacttttgtgatgggtataagcacttgattcagggatgctcaccaggcaaacccaaaaattgtaaaataaaacacggtaacattttcaccaagatgtcaaacataagtagttttgttttaggcctttcctgaagtatctttccctaaatgttcatttcagaaagcttttatgtcctgattttcatatcattcatattataagaaattgcaaagctatacataagctacttctagagcagtcaccgtatccgtggcttacggggagagaataaccgaaattctgtgactcatcactgcaccttttttctaatataaaagcatgattttgtcacagataatgagcaccaccttggctatggctactgattatataaccgtgagcatttatgtcttcaatagtatgttagtaatctttgaagacacaaatctcaaatttgcagaagctggcttcacttgttcagaggaagacattgatgatgagtgcttttttcgccaataggaaaaagatttgattattattattaccgttaaaaggctgatgcctc

SEQ ID NO: 14721 - DNA, 556 bp, Homo sapiens
  MAP TO AL161646.3; EXPRESSED IN PLACENTA, SIGNAL = 0.5; EXPRESSED IN ADULT LIVER, SIGNAL = 0.63; EXPRESSED IN FETAL LIVER, SIGNAL = 0.48
ggctccagcatttaagcaagatgtagcccagggccaggcacaaagcaggcgctccttaagtattagttgaaagcaggaagggagaaaagcagggagggagtgatgtggaagggagaggatttggaatcacacagagtaaatgtgagtggccagatgagcccacattttgaaagggtttaatgttctgctgacctgtctaacaggccccttggaagagcaagatgatgtacagattgtcctacctgaagactgtggaggagaggaaggtgtctcatctccccagtctccaaatcgtcagcattaagaagtgtttgttgaataaactgaataaacaaatgaagagatgagtggaccaaatttttaaatgtcttgggaaggggtcataatcatattgagaatataaatataatgaaaactatgacttcttattccgaaattacacttatgaaaacacattttatgtgtcatttcaggatgtttacagatactgatgaccatccctagaattcatattgagaatttccgtgccacattaacttccagatgtccttgggaa

SEQ ID NO: 14722 - DNA, 572 bp, Homo sapiens
  MAP TO AC021239.3; EXPRESSED IN PLACENTA, SIGNAL = 0.57; EXPRESSED IN ADULT LIVER, SIGNAL = 0.53; EXPRESSED IN BONE MARROW, SIGNAL = 0.42; EXPRESSED IN FETAL LIVER, SIGNAL = 0.51
gccagtggctttcaaaattcagtgtacaaaaaaatcatctgaggattttagtaaaatattgattctttgcaactagatttccatccctgcattactccaagagaatctgatttatcagattgataatgggaccaggaagaactctgtatttctaacaggatctcagatgattccatggtgagtgttggggatcatgtttttatgtgcaatagtgatctagagatattaccaggctgtgctctcctggatctgcctgtcttcactggctatctctgttcaccaccccaaccatataataaatcacctgattccacctgcaggacttagttgagctatgctgagatttgttcctgaccattaaaacgcagaaaatttacctagattcaagtttcctggctttttgctttctatgttattatttttattagtattattatttcagatttttttttgtcttgcctagggccttggcctcctcttcgatacccatgtgtgtggtcgatattatcctgactactggcttccttagatcagctaaaatatacttcctgcccactttatcccatgccatc

SEQ ID NO: 14723 - DNA, 600 bp, Homo sapiens
  MAP TO AL133414.3; EXPRESSED IN FETAL LIVER, SIGNAL = 0.52; EXPRESSED IN PLACENTA, SIGNAL = 0.59; EXPRESSED IN ADULT LIVER, SIGNAL = 0.53; EXPRESSED IN BONE MARROW, SIGNAL = 0.49
acctgcaccaggagttatgggcacagaaaagaacatgaagacacagagaggaaggagagagataagacaccaggaaggggaagcctgactcaatccaggtgccatggatgggatgataaagagagacaccttctaaactcacaacctctcttcctaggagtccacagaaaaccttccctcctggcccacccaggtcgcctggtgaaatcagaagagacagtcatcctgcaatgttggtcagatgtcatgtttgaacacttccttctgcacagagaggggatgtttaacgacactttgcgcctcattggagaacaccatgatggggtctccaaggccaacttctccatcagtcgcatgaagcaagacctggcagggacctacagatgctacggttctgttactcactccccctatcagttgtcagctcccagtgaccctctggacatcgtgatcataggtgagagtgtccagactttcttctcattgtcattgggatgcagagtgaatgatccaggacttggaggcccaggtggctgtaaggaagatgagcttggtattcttatggagagagactgacttggtgaggtctgtgccaacaga

SEQ ID NO: 14724 - DNA, 570 bp, Homo sapiens
  MAP TO AL157377.1; EXPRESSED IN ADULT LIVER, SIGNAL = 0.56; EXPRESSED IN FETAL LIVER, SIGNAL = 0.49; EXPRESSED IN PLACENTA, SIGNAL = 0.52
tatcattgcaacggcaaaactaataactagggggatctgactacattgataataggtttaatattcctattgtattagccaagctgaaatccccttacttttaaaaggtgcttcataaattgatgtagaagatgaccttttaaaattaatttgcatatcttatgtatcataaagaaatatttacttgcttttcagtgccgaaaacctgatcagcatttcaagccctatttgactcctgatttgccaaagcgactgcactatgccaagaacgtcagaatcgacaaagttcatctctttgtggatcaacagtggctggctgttaggttcgtgtatctgtttacttatctcataatgcctttaataaccatttgtcattataagtctacttaaccttaccctgctattatcatcactgtgaattttcctgagcattgacattttctggcctttttgtatgctatttagcagttctgcatttgaagtgatcgttattagattgctgattttagcatccttatcttaacaatatagatgagaatgaggagtaaggctaagagtgtgcccagggac

SEQ ID NO: 14725 - DNA, 565 bp, Homo sapiens
  MAP TO AC022268.3; EXPRESSED IN PLACENTA, SIGNAL = 0.5; EXPRESSED IN ADULT LIVER, SIGNAL = 0.56; EXPRESSED IN BONE MARROW, SIGNAL = 0.51
cgtttttaggagcaaattggacttacctaataagtcagtgtaaagtgcctgttctagatcacccagcatggtaaggatcacctcctcatccagatgagctgtcccttcccgcaaacagctttctccctcctcttcagcccagcttctgctgatgctgcttggcttggaggacacgttttcatcttcagacctactatcttcatcactctcaccttccaagcctcttcttgcagacaattcctctaagtcttcactgtctgactggctgcccccagcaggcaggaggttccaggctgagctgctggtgtgatacagggactgcacagaccgcgagagaaacttggacagtgagcgccgctctgcatagttggcttctctctggctggccttggcagcatttccaaaccagttggaaatgcgcaccgtgggtctcctctccccatcactggtgagggaaagattggtcagagacttttgtttctgaaggcaagctccctttctccttacttctttgctccggaacacagagagttcagcaggccgctgcatgattcttccagtggct

SEQ ID NO: 14726 - DNA, 597 bp, Homo sapiens
  MAP TO AC019058.3; EXPRESSED IN PLACENTA, SIGNAL = 0.56; EXPRESSED IN ADULT LIVER, SIGNAL = 0.58
accctgaatcatcaacgtcctttgttgtagtctataattaaaaatattccaattatttatctgaacttcttatataaatattacttgaaagtttgtgactatttttttgaattctagtaaatactggtaaactgagtgaatatttttaaaaaagtcgtaatatatttctagtttagataacacagttatattccaagaagtacattctagtaacataatgccacaatgtgaaggggaggggaatataaaccattaaatatataagaagaggtatatttatgtataatgatacaaaactgataatatttaatttggcaaaatatcaagtatgaaattcacatccatttatttatttaccttttattttatctgttttggagttagaataatcacattgttgaagaatgtctttaaaattattatttggatggtactcactggttttcctgctggaagaaaatgacattaataagcatttttaatgaacaagaatcaggctttagtcaagtttactatgcttagtaaggtcatacagatatgtatgatgcaaaagaaatgttcattcagtagaaattatccttggagtacccacacagc

SEQ ID NO: 14727 - DNA, 572 bp, Homo sapiens
  MAP TO AL161722.2; EXPRESSED IN ADULT LIVER, SIGNAL = 0.57; EXPRESSED IN FETAL LIVER, SIGNAL = 0.59; EXPRESSED IN PLACENTA, SIGNAL = 0.56; EXPRESSED IN BONE MARROW, SIGNAL = 0.43
ttccctgaagcaagcataatcattcaaaattatttcactgatattatgtttttacttaaataataggtggatggtaacaaacacttcttttggatggtgatagtgctggtagaggagtacacagcggaaaacattttcaaagaggtgatgtaacatcttttcatttttctgtttctaagtgtatttagtacaataaaaagcattgtggcacttcaatccaaagcagtgttagcactgaactctttgttaaccatgtacagccactcccagttttgcagacataatttcaggtttagttgcctcatggagaaagtttagatacacaattctattaagactagagatacctgctcttagaaaccgtaacctagcactctgccttctcctcttgttttaaccctgttgctatgaattaaagcacattcaatcaaattccttttcgaacactagatctgttaaaaatatgtttaggaaccttatgaaccttagttaagaccagaaagaaagaaataatattacaatcttactgtacgtgatatattgtctatagaccttcacagcacttcagatgc

SEQ ID NO: 14728 - DNA, 512 bp, Homo sapiens
  MAP TO AC019214.2; EXPRESSED IN ADULT LIVER, SIGNAL = 0.55; EXPRESSED IN PLACENTA, SIGNAL = 0.51; EXPRESSED IN BONE MARROW, SIGNAL = 0.47
ctcctgctgtggcctctaagctgggctgcttctagaagggagacgtgctgatgggctacaggtgtcttaactattctaactctgggactatccctctccctccctatctgctggcctccctgctctcctagtcatgattactcctccaaaggacactcagcttctccaccatctcatgctgcttgtccctttggatcctacaggtttgtcgcccattggaatattgccaagtctatggctgggtactaccaggagtctggccgggctggcagggatgggaagccttcctggtgccgtctctattactccaggaatgaccgggaccaagtcagcttcctgatcaggaaggaagtagcaaaactccaggtaaggcttgggcagtagaaggtctttcagtctgacccaccactctccagttttgtgaagctgatttctgaactctgatgatgcttgtgtaagctagaggaggctgctcccaacctgtaagtatagcaaagggaaatggcgtattg

SEQ ID NO: 14729 - DNA, 571 bp, Homo sapiens
  MAP TO AC019083.5; EXPRESSED IN PLACENTA, SIGNAL = 0.5; EXPRESSED IN ADULT LIVER, SIGNAL = 0.54; EXPRESSED IN BONE MARROW, SIGNAL = 0.48
agacaggatcgcttttgaggaaacttccaactttaatgaaagaatttaaaaaaaaaaaggaaaaaaaacctgatagtgtaaagagcagagaaatggcagggaaatgaaaattaagttaaaaaacagaaacttttatataattctaatcctttgcagagataaaaaaatacattgcatacctaaaacaagtacaagttgccatggaaacagattcattagtgaagaggaaagagatcttggaaattaaagacataaaagacaaaataaaaattaaaaaaattaaacagaatttagaacataatgttgaaatgagagaactttagatctcaaaaacaacagagaatcaacccaggagattgtgtgtgactaaagaagtctcagaaagagaatagaggaaaggaaggaatattataagaaaagtttcaagaataaaaggtcatgggcctccagactgataaaaatccatcttgtacccagaaaaaattgacttttcaagaactgaatcagaacctatcctgtgaaatgttaggacaagtagatcctaaaatcttccagagggaatccattcaaa

SEQ ID NO: 14730 - DNA, 547 bp, Homo sapiens
  MAP TO AC007989.2; EXPRESSED IN PLACENTA, SIGNAL = 0.64; EXPRESSED IN ADULT LIVER, SIGNAL = 0.67; EXPRESSED IN BONE MARROW, SIGNAL = 0.7
cttttccagctgcctcaaagtactgtttgctggaaagtttgccggaatctagatagaatctttcaaaagaaaataaacaagcaaaaaatccctgcagtcatgaactgtagccacagctggaactattggaacattccaggagatgaaaacaaagattccctcctccttcccttccatcttactgaggacccatcagtcacccttgtgagtgcactttagccatagcaagagcaagatcagagagaaataaggacttatgaccattagaccaggagacaggaagcgatggttctggaaggggctctgttactaactttgggtaagtcagctgaatctttgatcctgaggttcagaatctgcaaaatagataaactcctctctgttttacctacttccagtggtgtgggaagcatcatgagaacacggtctttgatggggataattactctgaatctaccaggctgattaagccacagcagatcagcaggtgaggtattggagagatttatttttaagccattagcaaaggtaggcaagaagagagggg

SEQ ID NO: 14731 - DNA, 600 bp, Homo sapiens
  MAP TO AC021973.2; EXPRESSED IN PLACENTA, SIGNAL = 1.5; EXPRESSED IN FETAL LIVER, SIGNAL = 0.71; EXPRESSED IN LUNG, SIGNAL = 1.3; EXPRESSED IN ADULT LIVER, SIGNAL = 0.66
tgtgccaagaatgtgaggagcactattttcctcccaagtcaggtctttatggtaaccttaaaatggtgcaaaattccagcatctcaactccctttccctgccgttatttttatctcttctcactctgtcatgttcataggatgctgcctcttgctgtggcaacagacacaaggctgggttgggagcaatcagagacagatgggaaagacctgctggaagaatcccggaacatagaagctggaatccatgtccgctccctccgctgcttcccacagcctcctccaaagccctgagagagaagtgcagggggaggtcacaccctcccctgcatctgggttgggggacctaagaggaccacccagaaaagtaaattatttttaagcagagtatgctgttatttgaaaaacacatacatatttgatatttcactcaaaatatatcaaccttcatttggcatatccaggtaatatttttaaatcacttaatttttttttcaccaaaatccacacataaaattgacgctcacgtataaatccacactgggtatttgttctgttagtgtcaagcgctgctgagaacacgaccctatttcccagtgaa

SEQ ID NO: 14732 - DNA, 507 bp, Homo sapiens
  MAP TO AC025516.2; EXPRESSED IN ADULT LIVER, SIGNAL = 0.72; EXPRESSED IN PLACENTA, SIGNAL = 0.74; EXPRESSED IN BONE MARROW, SIGNAL = 0.58
agcccccagcatagttttgtgtcttctgtgtatctagccactactgaccctcagtgtgctccagaaatacctggtctaagaaaaggagacttggattttatggccttaagattcataatatagtttgccttcaaattttactcttttcacagtgctcagtgacttgtggaattgggataatgaagagacaagtgaaatgcattaccaaacatggtttgtccagtgacttatgtttaaaccatttaaaaccaggtgctcaaaagaaatgttatgccaatgactgtaagtagtagacttcaaaaatctaatacctaagggtttctaataagtttcagttaaaataaatatctgtagtagtttcacactccacaaaacaaagtgtcagatattcagagtgtagcaatatttctatgattaagttcttgctgtgtttgtaatttgctctgtgttaagttgtgttaatttgtctttgaaggtaaatcatttaccacctgcaaagaaattcaa

SEQ ID NO: 14733 - DNA, 556 bp, Homo sapiens
  MAP TO AC007489.3; EXPRESSED IN FETAL LIVER, SIGNAL = 0.47; EXPRESSED IN BONE MARROW, SIGNAL = 0.43; EXPRESSED IN ADULT LIVER, SIGNAL = 0.51
ccccatttttcttcctttctgtgcttcagtcaatattttctattgacttgttttctatttgactaattcttttcctaacatgttttattttccatttaacctgtctgttgaggtcttaatttcaattatttttcagtaatataatttctatttgattatttttatactttcaattctctaatgatattcttcatcttgttatctaattgactgaacttattaatcacaataatcttagtctgcatctgcatatacctatgtctggattgcctacacttctgttttatttccatttttttttcctcttgacctttctttatttagttctgtgtctttgtagtctggcaatattttattgagttgcagttactgtgtaaggaatctgtggtggctctaggtgatagtgtctatatctaaagatgttctattttgcctgtcaggcagttagaggagggataaatcatcttagttcagtctagaatgaagcatatgtaaaactgagtctacttctgaatttcccttactcccaagacatggctattcagtggtgccccta

SEQ ID NO: 14734 - DNA, 553 bp, Homo sapiens
  MAP TO AC015493.4; EXPRESSED IN PLACENTA, SIGNAL = 0.46; EXPRESSED IN ADULT LIVER, SIGNAL = 0.53; EXPRESSED IN FETAL LIVER, SIGNAL = 0.49
gcctgccctgtagacttcacagctggcaagtggtccctagttttcatgacccaatgcggccccacatctggtgcctggcacttacgaggtatggatgctcctgaggcggcccttgtggaaagtgatgatggtattgcggcagcagcggctctcatagtagtagcagttgagattgctgctggctgtgcagcagcacttacagttgggatcattggcccaagagcagcaacaccaatggcagttggggctctcagaacaggtgcagtggcagaactggcagttccgctcatctttgtaagggcaggggaagcaggtgcagttccgctctgaggtgaagatgaacttgcagcacagacaggagcataactgaggacaacatctctgccatgtacaacatggacagcaaacgcacatagcagtttccatggtgcctacatgattaccaccggcctcccaggactcttgatgcctcctctaccagaatactgctatcagttctccagtggaggagtccttcctcccattcctgaggccgtcagcttgaaagttgcaa

SEQ ID NO: 14735 - DNA, 593 bp, Homo sapiens
  MAP TO AC025011.2; EXPRESSED IN ADULT LIVER, SIGNAL = 0.52
gttgttggaacacaaccacgttcattcatttctgtattgtctgtggcagagattgaccatcacgatagagaccatatgagttgaaaagcctaaaacatttattacctggctctgaacagaaaatacttgctgacttctggtctggaacagcactgtgtatatacctcaggtttaatactggaagtctccattagtccttcttcagaggtgactagagtgcacagtcataatgacagggccccaaggacttctctaactcacactccctgtccagtcaccttcactgcaacaaccatcttaccaaggggtgctgtcactgctcctgtccactttctggccgtcagatgcctcgagagttcttcttgcccttgataaggaataaacttgtcagttgcatgtggcagtttttcaactgatttgggagatgatgcagattttgctatttcttaactttcaattgttgtgttttctggttctcagtagggagacatgaagaaaattgctgattcccttcagttaaataacagtttagattaaaccagcaagaacttttgctctttaataaaatgcaaagttaccatgcctttctccgg

SEQ ID NO: 14736 - DNA, 535 bp, Homo sapiens
  MAP TO AL034344.24; EXPRESSED IN PLACENTA, SIGNAL = 0.53; EXPRESSED IN ADULT LIVER, SIGNAL = 0.6; EXPRESSED IN BONE MARROW, SIGNAL = 0.43; EXPRESSED IN FETAL LIVER, SIGNAL = 0.55
tagctgccgtgaagatgatggccctgaactgccacactccccagcgaggtgacaggctagggactgaggctcgggcaatcccgccaagtatccccccactctccccacattctgacaccctactgggggctttcatgcaggtgaaatctggttaaaagaaacagttgggaagagactaaaacactcaccagaaagcccctgcagccaggaggaaagtgtctgtagaaggaggtggtgcatttccttggccaccgtgggttccccgactagctcaaggagaaagggtctttcatggatgcagcagcaaaggtaactctgccgacccggcaggggaccatggctactgctcagcgcccacagggcagggcctctcgtgcagccgattgagccattctctgcatcctcagtccccacccggaggacaggtcgggcactggctccctggagggtcggcacagcctctgaattcccgatgaacacccggttgttccagccaggttctccctggaacaagccaagccaacctcagcatttt

SEQ ID NO: 14737 - DNA, 577 bp, Homo sapiens
  MAP TO AC015493.4; EXPRESSED IN ADULT LIVER, SIGNAL = 0.55; EXPRESSED IN PLACENTA, SIGNAL = 0.5
atggccttacccacattttgacttcagattcctggcctccagaactgtgagaaaataaacttgtataacatagtaaacattaaattaatattttcaaattaataaatgaaaaaatttgcctcctttgtgttctcaagaaacaatcataaaattctgccttacttttttatgccttagctctcagacttttctctgactctcccccaaccacaccccaccttacctatttcaactacccatcttcctacccctggagacaataataacatgtttggtcctaatagtgagaggagtgtgatccaagaaggtatagctacactcatgttgcacatatttaattttcatagtagccctgtgaggcagatattgtaacaccattttacaaatgggggaattgaggctcataaaattaagtgatatgcctgtagcatcctgtgcttaaaatgttgaccttagcacagcagcttctcagaagaaggagtggcatcttcacttgtgtattgcgagctcccaggccaggctgggcatgcagtaggtgctctgtgaacactgctaacctctccattgtgtcacccct

SEQ ID NO: 14738 - DNA, 547 bp, Homo sapiens
  MAP TO AC025129.2; EXPRESSED IN PLACENTA, SIGNAL = 0.48; EXPRESSED IN ADULT LIVER, SIGNAL = 0.54
tgggaggcttaacttgcatcctggatgggaaagcactttgggcctgcagaagctcacagacacaggagctcatcagagacacattcggcatggcgcagctcttctgcagcagcatccgaatcgaaggcacattgaggaggcaccgagccctccagggaggcttgtgtgtgttccagtcattgctatcaggctggagggctttgggccacaggggttctcccagggaaagctgagttagctagtggacctggagagtgcgccttggtggttactctgttgtgcatcccatggccctcggcacagcacttgggggtgcctgggtatgttgtaaatgagtgatttaggacataatatccaggtagagaaacataagaaggggggaggaatcggaagaacaacgaaagggaaaaatataaagggtacaaaagagtcctgttcccagctccgcctccacctggtggctgcagggccctgggccattgagcttccctggttctcagtctctccatctgtacagcaggaaaagtgaacccattgacctttgtgg

SEQ ID NO: 14739 - DNA, 590 bp, Homo sapiens
  MAP TO AC010492.4; EXPRESSED IN PLACENTA, SIGNAL = 0.5; EXPRESSED IN ADULT LIVER, SIGNAL = 0.65; EXPRESSED IN FETAL LIVER, SIGNAL = 0.62; EXPRESSED IN BONE MARROW, SIGNAL = 0.6
gttctgcatgggagtatgggaacttggcagagtgggaaacggacctggctgagctgggagtgagagcaatgcagggtccgtcctgcacaacccactccctctcccaggccctgctgtgctggggaagggaggatcctaagaaggacaccagccccagatggagacactaggacaggcccctcctgtcaaataggaaacaggtgtgcacctggtggggcagcaggaggacagctggggaaaacacaaagtccctggttcccttcccagacctgcttcttccaggctgaggagcctggggcaggcgattcccctctctgagcctcagtttgctcctctgtgaattggggggttggcaatcccatgttgcacaactgctgtgagggttggagctcatgaaggaaagacctagctcgcgcctgcacacagaaggtgctcacatcaatgacgtcatccccattcccaacgtcatcacgctcaaggtctgggaaggcacctgggggttgtgactggggtctcagtggccttcgtcctgctgctgttcctcctcctcttcctcctcctccgacatcggcatcagagcaaacacagga

SEQ ID NO: 14740 - DNA, 516 bp, Homo sapiens
  MAP TO AC013618.3; EXPRESSED IN PLACENTA, SIGNAL = 0.59; EXPRESSED IN BONE MARROW, SIGNAL = 0.48; EXPRESSED IN ADULT LIVER, SIGNAL = 0.66; EXPRESSED IN FETAL LIVER, SIGNAL = 0.54
tgcaaaaatcctcaccaaacactagcaaaccaaatttaacaacacattaaaaggattattcattataaccaagtgagatttatttataaaatgcaaagatgtttcagtatactgaaaccaatcaataaaatacacattaaaataatgaagaatataaccacattatactttcaattgattcagaaaaagcatttggcaaaattcaaatatgtttcataataaaacactcaatgaagtagaaacagaaggaaattacgtcaatataatcaaggccaaaatatattcacatctttaacattattctcaatggtaaaaactatttacctctaagatcagaaacaataaatgtatgtctaatatcaccatttctattcaacatagtagtagaagtctcaaccacagcaatcatgcaagaaaaagaaataaaagtcatctaaataagaaagaaagaagtagaattatctctatttgctaattacataattctgtgtgtagacaaccccctttcagtggaat

SEQ ID NO: 14741 - DNA, 589 bp, Homo sapiens
  MAP TO AC025747.3; EXPRESSED IN BONE MARROW, SIGNAL = 0.55; EXPRESSED IN ADULT LIVER, SIGNAL = 0.51; EXPRESSED IN FETAL LIVER, SIGNAL = 0.64; EXPRESSED IN PLACENTA, SIGNAL = 0.54
tgggagggatttgaaacttggcggttaaagctccggctgggacagggcggcgggagaccccgggtgaacggggaagggacatttagtttgagacggtgctgagataggatcatgaaggaagaggtgaagggaattcctgtaagagtggcactgcgttgtcgccctctggtccccaaagagattagcgagggctgccagatgtgcctttccttcgtgcccggggagactcaggtggtggttggtactgataaatccttcacctacgattttgtgtttgacccctgtactgagcaggaagaagtcttcaataaagcagtagcgccgctcataaaaggcatatttaaaggatataatgcaacggtcctggcctatgggcagactggctctggaaaaacctattcaatgggaggtgcatacactgcggagcaggagaatgaaccaacagttggcattattcctagggtaatacaactgctcttcaaagaaattgataaaaagagtgactttgaatttactctgaaagtgtcttacttagagatttacaatgaagaaattttggatcttctatgcccatctcgtgagaaagctc

SEQ ID NO: 14742 - DNA, 569 bp, Homo sapiens
  MAP TO AC011255.3; EXPRESSED IN PLACENTA, SIGNAL = 0.55; EXPRESSED IN ADULT LIVER, SIGNAL = 0.55
tgatcagacagaggtcgtggctgcaactagattcaaagataatgtggcgcacagctatgagctaggtagtgggtatcctggcttcctctgtctcttcgtgtcttctctgcagtggtgatcatatatctaattgtccaaagtcatttgttcccctaggtctcagaactttgtccccttgaaatagtctttccttccaggtcctagcccatctgcttcttccaccaaaattgaaatgccccattccctaggctctacttgataatctgatacagtagtttatgagtagctcttaattgttaatgttaaacaaaaacttattataatgcccctctattccatttgcattctaatcagggacatccacaaccacaaaacacaaacacattatcattatcactaatgatagcattaccagtaccaaattgttgttgggaaaagtgtttgggggctgggtcaacagtcattccaacggtcagcataaggctgatgaagaaagtaaaactatagggtaatgcagaacactacagtattaatgacattcaaaatgccctccttagccctcacaggtg

SEQ ID NO: 14743 - DNA, 577 bp, Homo sapiens
  MAP TO AC021356.5; EXPRESSED IN PLACENTA, SIGNAL = 0.62; EXPRESSED IN ADULT LIVER, SIGNAL = 0.6
taccatgttccccatcatcctgaagtagctgaattgatagaacggtggaatgaccttttaaattattacaatgccaactaggtgacaatactttgcaggactggggcaaggttctccagaaggctgtgtatgccctgaatcagcatccaatatatggtactgtttctcccatagccagtattcagggatcttggaatcaaggggtggaagtggaagtggcaccactcaccaacacccctagtgatctactagcaaaattcttgcttcctgttcccataacattacattctgctggcctagacatcctagttccagagagaggaatgctgccaccaagagacacaacaatgattccactaaactggaagttaagattgccacctggccactttgggctcctcttatctctaaatcgacaggctaagaagggagttacagtgtgggctagggtgattgacccaaattatcaagacaaaatcagtctactattccacaatggaggtaaggaagagtatgcatggaatacaggagatccattaggacgtctcttggtattaccatgccctgtgattaaggt

SEQ ID NO: 14744 - DNA, 592 bp, Homo sapiens
  MAP TO AC011660.4; EXPRESSED IN ADULT LIVER, SIGNAL = 0.55; EXPRESSED IN BONE MARROW, SIGNAL = 0.45; EXPRESSED IN PLACENTA, SIGNAL = 0.59
gcccggtagttcataaaaatgacaatctctttacagtatgttaaaaataaatttcatgttcaagttcctcaatgtagctaaaggactgatactaatgttcggtttagtaggagcaattctgtgccatgtgattgcttatgagtgcgtgtttatgagtgtgtttggggtagaaagaggtgttcggatagagctggggttttaggagatgattctgatttttaacagagatttctctggaaaaattagaaaaaattttaaaaaattagaaacttcatgatatctagaggtcactaaaatctcaacctttgcttatacctatgtttatatttcatctttaatgtcaggtgatgacatcaagtgatttatttttcatttttcttttttgtacttttggctttgttcttatatttctttaacactttagtaagagtcatctatgcatgcatttttatatttattctctcttgaacacacctacacaaaaagttacataaatgagattaaatattatgtgtttttatctggtagtatttgtggttttgttgttcttctttcttttttcttttttcatcccatcagcatcccttctctt

SEQ ID NO: 14745 - DNA, 593 bp, Homo sapiens
  MAP TO AC019083.5; EXPRESSED IN ADULT LIVER, SIGNAL = 0.56; EXPRESSED IN FETAL LIVER, SIGNAL = 0.54; EXPRESSED IN BONE MARROW, SIGNAL = 0.53
actgatccgatgaaggttgctaggtaaataatgggtcgtacagcctttttgttttcagagacatgaaactcctcacctcatagctcggctgagcttttcataggtcatgctgctgttgttcttctttttaccccatagctgagccactgcctctgatttcaagaacctgaagacgccctcagatcggtcttcccattttattaatcctgggttcttgtctgggttcaagaggatgtcgcggatgaattcccataagtgagtccctctcgggtctgatgaaaagcagaaaggcaggttactaatgatctaagtcacagcaaagatagggcagagagcattgagttaggtcatcttcctgcaagtaggagatactcatttctcccctacttgtcagggaagatggatcgcagaatcaccagatgttggacattaaaaaggtatttaagaataaactagcacaatattttattttacaaatcaggaaaccgaggcacagagaacttaagtgacttgatcaggatcacacagctaactagtgacatagccaagactaagcaataggtcttaggtctcctaagccagggggaagtttc

SEQ ID NO: 14746 - DNA, 580 bp, Homo sapiens
  MAP TO AC015873.2; EXPRESSED IN BONE MARROW, SIGNAL = 0.46; EXPRESSED IN ADULT LIVER, SIGNAL = 0.58; EXPRESSED IN PLACENTA, SIGNAL = 0.53
cacagtggcatcatttgacccagcctgggatccaagtggctctcaagagtggagctacctggaatgcttctgacaaccagttgcagctttatttgcaacctgggcacccacaccgtttgtagtgcctcaaaactatgtaatgtgggatttacgggctttagctcttgactgtgcctgatacccagaaccttcctaacatgcacacttctgaattgcaaagcacttgtgctctcagtgttgcaggcaggatttgtggaactggatggcatacttctcacattaagacttaacacttgcaccccccacccccgtgttccacatgagcagctctgccaacaggctctcttggcatggggagcagaccttctatttcatcaggctgaccttggccaacatctccctggatgagctctggcagtctgcctttaaccacagcgagatgttctttgctgaccaggtccacaaatgctgcaagtgcatcgtcaagcagggccagaccctcttcatcccctcaggtgagtgcaggcagctttggggaccgtgtcctagggcttgccggccctcatcaaggttacgcctc

SEQ ID NO: 14747 - DNA, 553 bp, Homo sapiens
  MAP TO AC021308.3; EXPRESSED IN ADULT LIVER, SIGNAL = 0.55; EXPRESSED IN BONE MARROW, SIGNAL = 0.43
agcccatctttggagtgttggctaggattacacgctgcagctgtcagccagcagtaactgcataacagacctctggcatgtcagtgacttttgtgttcaaaaaagggcaatatttgcagtttacaaagcattctggaaagtgtaaaatctaaaaatcttactagtatctcccatctagatgaggagacaagaatgttaccccaggattcatcagtcacatactctctatgcacaaacaaccgtgaataattcagctgcaactaatgttttgcgttttttctatgcattctctacttcctacctagaacacctgaaggataaattggaagaatacatggcccgattttccaaagtgaggattgttcgcaccaagaaaagagaaggactcatccggacccgtctcctgggggcatctatggccagaggagaagtcctgacattcctggactcccactgcgaggtcaatgtgaactggctgcccccactcctcagtgagtacaggttgctaagcaccatcctgggatgcctcaggggaactgagcggtttgcttct

SEQ ID NO: 14748 - DNA, 598 bp, Homo sapiens
  MAP TO AC018525.4; EXPRESSED IN PLACENTA, SIGNAL = 0.73; EXPRESSED IN ADULT LIVER, SIGNAL = 0.62; EXPRESSED IN FETAL LIVER, SIGNAL = 0.48; EXPRESSED IN BONE MARROW, SIGNAL = 0.66
tgtgaaaggaaacaatgagccgttgtatcacccccctccctttccccaattgttgtagcccctgtcagaaggctccgaggatgatgcaggtctgtatcagcctgataagggaaaagaggattcaaaatggctttggagagactccgtgggagtggagtgtgctgttttggactagatgagctagggaatatggcagaggcccttaatgggatcctaaggcttcagtgccaaaccttctgctgcttcttgaagattttctaatgaaatattttaatggtaaaattctgtgactgtcataggggcataggttcaagatgctgttttaagtcatttgctccataatctgtgattagtcaatccaggtcaaaaagacagaaaaagaaaaaaaatatccaaactcaagaaacctgtcagagtatgtattaggtcacttttattctgttgacaatgagtgttcaattcactgtcatcatgagctctgtacaagtggcctgtacattttatatactgtgggttcctattttatggctagatgaaatatgaagctatctttcataatgctgattccattttggcaggcctttggatccacatatgg

SEQ ID NO: 14749 - DNA, 511 bp, Homo sapiens
  MAP TO AC022609.2; EXPRESSED IN PLACENTA, SIGNAL = 0.54; EXPRESSED IN ADULT LIVER, SIGNAL = 0.51; EXPRESSED IN BONE MARROW, SIGNAL = 0.47
catgacttggtttcatttgtgagagtaaaagaagatctgaaggcaacttgtttctttagataaaattctttagtttcagagagtaaaagcaggcactgacattctgaattcaaattccagaccaagtggaggattgttgtataccccaaagggcagtacaaaccctctttaagtccttgctcatggcagtaaaaatattaatggtcatttcacatggtgatgtattcctcaagaaggtagaatcactgaagtaatagaaactgcagaggcgtttggatttgatagccaggaaggtttcatctggggagatgacatgtgactggagagagctgaatgacaagaacagagcagccacgtggaggctcaatggagtttcgagggtgtgtgaagtgggagatgggactacagtagtaagaagattgaaatagacttaagataaggagtttgaatgtcattctgagttcagtgggaaatccttgagatgtttaaagcaggaagaaagcctgaggtg

SEQ ID NO: 14750 - DNA, 543 bp, Homo sapiens
  MAP TO AC018377.4; EXPRESSED IN PLACENTA, SIGNAL = 0.51; EXPRESSED IN FETAL LIVER, SIGNAL = 0.49; EXPRESSED IN BONE MARROW, SIGNAL = 0.48; EXPRESSED IN ADULT LIVER, SIGNAL = 0.53
cccaggaagttgcttctcactgcattcaattaacactttagggcaacaggtgtgaaccatcatgaataatctctccctgattctggctaccaatttattacttttagagaggcaatgtgataattgctgaaccatcacccaacattcctagtggatgggggagagccctctcctaccccatttatgcttgtctaactacctgtaatagatctacagaaggagctggaggagaaggaggaagtggggaggaagaggagaattagggtaatgaaggtaacctttaccttggagaacatcccagctgtcagtgatggccagcatctctgcctattcttctcacctagttacctcactacagacgacctctagcttggtgacatgtgtgattttcttgggcatctttaccttctcccagcttccttcatcatgaaagacatccttagagagaggcagtcacgcctcaccttactcatgagctaatatggtcaataccaccagtctcttctcttggatatggactagacaaactcacagatcctgcca

SEQ ID NO: 14751 - DNA, 515 bp, Homo sapiens
  MAP TO AC015999.3; EXPRESSED IN PLACENTA, SIGNAL =   1; EXPRESSED IN BONE MARROW, SIGNAL = 0.43; EXPRESSED IN ADULT LIVER, SIGNAL = 0.52
acacccactctctgtccgtctccacccatccccaccctgctctctgcccagggaagttgacttctttctcctacaaaacaaaattttcatgtcctctgtcttcttgttggcatttagtcagtgaagagccgggagattgggaaggtgggaggacagtgaggtcagagtagctatttccctgtctcaatccctctcaagacagccaacctccgtgactctattcttctggattcttgttttaattcatatatttctctttaggactgactaatagactaaggggtatttgtcttttgtcccacactcacagatttataagcattctggatcttcttccgttttgaaggtgtcatcgagtttctattggtaccctgactgtaggaggtcccttcctcatgcacactcaggcattgcatgactagcccttccttgtgctcatgctccacattcagaatctcagttccactgatatatgcctctgcatctccctaacaggaaaaaggaagcaaggggac

SEQ ID NO: 14752 - DNA, 502 bp, Homo sapiens
  MAP TO AC016786.4; EXPRESSED IN ADULT LIVER, SIGNAL = 0.62; EXPRESSED IN PLACENTA, SIGNAL = 0.73
ttgattccttaatgtggtcctgaaactctaacttaacagtagtactatttttcataatgatacacttaccttgttcatcttcacagagagagatccttgagggggttaagacagattccctgagagactgcagatttttatcaaatccagacaaaagtgagggctgaaacttctgattcacttcctatagctactgataaaataaaatttgcatccactactttccacagcctactatttgtgcttcttctcttcatggacatgatatttacattcttccagggtctccttcctcttactcccagggaagtgactctggggagttaagacttgagaaacgtcaagatgggactagtcccatctcacctgtatctataaatcactcttagttattcaaatatgtcactgtttctctttctattatcatgcacaattttctttgtattcatttattttctagtgatatttttaatgacagtttagcaagatttgaggcaaagga

SEQ ID NO: 14753 - DNA, 506 bp, Homo sapiens
  MAP TO AL161634.1; EXPRESSED IN FETAL LIVER, SIGNAL = 0.57; EXPRESSED IN PLACENTA, SIGNAL = 0.52; EXPRESSED IN ADULT LIVER, SIGNAL = 0.57; EXPRESSED IN BONE MARROW, SIGNAL = 0.51
gcccaatatggcattcagtctgttcaattacactttggctcagattttgcaaatttaaatagaggaccaaaacaaaaacaatttccctaggtatttgccttaaactagtgtgctatactaggattgtaagatcatttattttgatgataatcagtgtttgtgattaagctttgtccttttttgtctaaagcgagttttattccctaataaaaagtagacattctttgaagacaataacttgcttgtctaggttttgagtttctcaagcttgagttctcaaaaacaaaaagggtaggagtgctatgagagaagagagaacagcccacgagtttctttctattgttccagagcagtggctgaatctgatggggatgaggaggaaaacgctgtgcaacgcaccgctatactcttgacttcaagatgctcaggcttcatagacatttttctggccagtttggcagagaaatattgaagacacagaaattccaacggactcatgtttgtgg

SEQ ID NO: 14754 - DNA, 500 bp, Homo sapiens
  MAP TO AP001421.1; EXPRESSED IN PLACENTA, SIGNAL = 0.48; EXPRESSED IN FETAL LIVER, SIGNAL =   1; EXPRESSED IN BONE MARROW, SIGNAL = 0.47; EXPRESSED IN ADULT LIVER, SIGNAL = 0.6
ttgctgcccagtgtagtcagtgggctgacgacattagcatcacctgggtgcttgctagcaatgcaaaatctcaggccccagcccagaccactggatgagaatctgcatttgaacaaggtccccaggtcattcatgcacattcaaagtcagagacactgccccaacacctcactttagagtgagaaaacttaacaggtttaagcaacttgcagaagatgacacaactgaccagcgacagtctgtcttctagtcaggcctctttccagttctccacgctgaccttgactttcgagatcacataccaagaccttcagctggatggtccctgtagctgctgtgaccactagaagcagggttaggggcgagactaatttaatatcaattaatgtagacactaggcttagggctagggaaaatgtagtgaaggatgcctgtattgtcctaatgaaccacactggtgcctacaaaatttttattttggcaaaaccgtccatgaattt

SEQ ID NO: 14755 - DNA, 531 bp, Homo sapiens
  MAP TO AC019281.4; EXPRESSED IN ADULT LIVER, SIGNAL = 0.57
aaaagcacaaaccccctaccttaagttacaaccagggactttgacaagtctttaccacaaggaccacccacactggagccatccctccctcctgtcactgtgtactctccacttaatcatttgtccctcaaacattttcctaatcacgtaaccctctcctgagaaacattccattgtgcttagtgatctctgggatgaaaataggagtcttcatgatctgaccccaacttacataaaacaggagtcttcataatctgaccccaacttacatacacaaacacattcttcccaaatactgaaggaaaacattactgcatcaatggaaatatcttcaatgatgtagtccccacaaactctaagaggatctacaaataaaaagtttttgtctgaaattatctctcccatctattccctctacaacaatgtacattttacgtggtttccaaagctcaaacccacctgtttcaaagagcttttcatgatgcgtatttattttttcctgaaatgttacctcccttggtatttgttggg

SEQ ID NO: 14756 - DNA, 578 bp, Homo sapiens
  MAP TO AC022939.2; EXPRESSED IN BONE MARROW, SIGNAL = 0.5; EXPRESSED IN ADULT LIVER, SIGNAL = 0.54; EXPRESSED IN FETAL LIVER, SIGNAL = 0.5
ttgacaagtgctgaataacaaatctacctcattcttatggatttccattcgtaggcggtcaatgttattcatggtctctgctaatttaggctgcaaactccctggatcccccatttgtggattcttctcatatacatctttcattttgttgagtgcatctctaaaaaagagaaggaaccacagaattaaatattaacttcatatgcttccagataaaagagttttattggactctggggactcgtacgcagcttaatcttaagtagagtcatatctttttaagtttgtctaacatgacctgattaaagacaatttgcataaaggtgataacatatagagttactaatttatgaagacaatcagaataccaaaagagaacagagttcatttcttacttcctgctttctaaacaaggaattttatttatatgtacatatacacacacacacaaaatcaagggctggaagaatattcttcagctcatcatgtcccaaatcaaactcattatattccaactcagccacactattccacagtgttccttagctcatacatcatcattgtcctcccactcacct

SEQ ID NO: 14757 - DNA, 548 bp, Homo sapiens
  MAP TO AC025498.2; EXPRESSED IN PLACENTA, SIGNAL = 0.48; EXPRESSED IN ADULT LIVER, SIGNAL = 0.57; EXPRESSED IN BONE MARROW, SIGNAL = 0.53
cggcatgttttgtgtcactcacgcgtttgagagtacttcccctgaatgactttttatgacccagctagggagaaaaaggatgccccaagcattgtcactactaagtctagagcaatgctggcaactaatgctatcgtcatggccagctgtgaaaaatcaagcaaacaaacaaaaccctacatctggattacttctattaaattaaattgtattcaaggaaaaagtactagaatgaaaaaggaagataaacaggattgttaagcttgaagttacattggacatttatttacaaggtagtggtcttggacacatatttaagggtgaagaacagaatgaaaaactctctgaattcaagggtttcactattaagtcaggcagaaagtaactatgatcaggaaaaaaaaaggtaagatatttttgtgcaaactataaagtgagttttaaaaaagaacaaaataacaacaacaacaaaaaataaaaataagaaagacacagactgtttggaattttccacaattatttttcctacttttcacagccctctccct

SEQ ID NO: 14758 - DNA, 596 bp, Homo sapiens
  MAP TO AL031661.28; EXPRESSED IN PLACENTA, SIGNAL = 0.51; EXPRESSED IN ADULT LIVER, SIGNAL = 0.56; EXPRESSED IN BONE MARROW, SIGNAL = 0.44
ggaggataagaggcccaaagtgcacatggactcatggttgcccattaggacatgaccgggctttctagtgggtgtgcaaaatttgtctctcatgaaagacattactactttaaatagatcaatccaaagttcagttcaaaatgtttatcacaatcatatgaatcatttatgaaatatttaatagctgatagttaccacgtgccagggattgtgaaaattatatcacatgcatttctcattgaatcctcataataacacactaagctaaggactattcatatctctactttgaagatggggaatcagaaggctaaagatgaagatgcaaaatccatcatcaaagcagttagcagcaaaaccaggtttcaaatccttgtttttctggttccaaaatttatgctcttgaccatgaggcaattgtgagaggcctgggaatctataaataaattcacattcctttctttgtagaagctcattgtattatggaaataataaatagacagtaaattattataccatgtggtaaattctgggatttagaaaggcatagactataacaagaaaccaaaagagggtcatttaacccaactggtggg

SEQ ID NO: 14759 - DNA, 584 bp, Homo sapiens
  MAP TO AL161756.1; EXPRESSED IN ADULT LIVER, SIGNAL = 0.65; EXPRESSED IN BONE MARROW, SIGNAL = 0.47
tggaaaatctacacccgagccaggtgcagaggagctcaccctgagtctccgcaggacggctgtgacccgcctctgaaggttgtcccagcgctggttgccctcgtggaccatctgcttcagcctgctggccgtgtctgtgcggttctcccgggccagccgccggtactgcttgttgatgagctccagctgagtgagccgctcatgaatctgccgctgaaaggcctgcatcacatgggaggggtcagagccaaagcatgcagagtgccaggacgccctccttcccttctacatcccaagcgacctgctgccaggggttcatccccaaactgcaatggcagcagagggcctaattcaccagtcctgatgccagctacagaacaggctttcaagttcattacatagcagctggagtacatcagcaatgtcttgcaaagctgtctcagcagctgggggcaggctgtggtttaggcagcccttgccagaggtgaggggaagctggctacttagaggaagtcatttcagcagcccccaggctcgctgcaggcttggttatgatcaggagaccgggatggagaaggtgttta

SEQ ID NO: 14760 - DNA, 583 bp, Homo sapiens
  MAP TO AC015570.5; EXPRESSED IN ADULT LIVER, SIGNAL = 0.57; EXPRESSED IN PLACENTA, SIGNAL = 0.55
aggatgcaggggaggattagcaagatgcatttgctaatcttgtatttgctaattcttcttggcctctctgtaatatttcttttgtccaaatgtaagtcaggatacctgtaacatgaggatcttcaggggagaaagaagggagaatgtcagagggatcttcctaggtgctatggcctacttcaggaaagaaaaagaagaggggaatttcaatttcaatggcctgttctaggagagagggaggtggaagacggtcctcaattaatttcagcttaagatactcagaacgccaaagggccatgttttggggtatcatttcgtacaggaatgctagcatttcctgccgcatttctatggcctgtttcaggagagagggaggtggaagaaggtcctcaattaatttcagcttaaaatactcagaacaccaaagggccatgtttgggggtagcatttctacaccccattaaaagttacttaattaccatatgatttattactttatgaatttgattaattaattggttgataggttctttttctattaaaattacatattataattggaacagcattgatttgagagcca

SEQ ID NO: 14761 - DNA, 594 bp, Homo sapiens
  MAP TO AL139824.7; EXPRESSED IN ADULT LIVER, SIGNAL = 0.52
tcagtcgcaatgttttgcagtttttagtacaagtcttgctacgcgttcttaaatttattacaaagtgtttcatatttttgatgccattttagtttgtacttttacattttcagtttgcaattgtttagtcctagtacatagaaatttaagtgacttttgaacattggccttgaattctgaaaacttggtatcctaaactcaccattattagttctagtagctatttctggtagattccttaggattactactacgtagtttgccaataaacagatttttacttcctccatacacattttatttgtttttgttgttaggattgtcatcaacattaggatgacaagaatctccagtaaaatattgaataagggtgatgacagaagaccttcttgccttgttcctgaaatagaagttaaatgttcagtctgtcaacatttcagtatgatgtttgttgtacgtttttcacatgtgccttttatcaggttaaagaaattccctttctcaatggactgaatgtgttccttccttcctcaaattcatatggtgaaaccctaatgccaatgtgatggtatttggggatgatgtttttggaag

SEQ ID NO: 14762 - DNA, 509 bp, Homo sapiens
  MAP TO AL121881.25; EXPRESSED IN ADULT LIVER, SIGNAL = 0.59; EXPRESSED IN PLACENTA, SIGNAL = 0.48
tcaaactgaaccccaaatcagtagaagaaaagaaataataaaagaccagagcagaaataaatgaaagtaaaatgaagaaagtcaaaacactatcaaggaaacaaaaagttgggtttttttttaaagctgtacaaaattgagaaacctgtagccaatctaaggaagaaaaaggagagaagatcgagataaataaactccaaaattgaaaggagacattacaggctaaagctgcaaaaattcaaagggctcttgtggtgaccgtgggaaactgtatgtgaataaattggaagatctccctgaaatgaaaattacttcctgctgacgaggggacggagagttttttgggttgacagtaggagcaatgccgtctgtagatgtttttgggtagttgtctgtgaaatggccgtgatcctgttagttaaaattttccgagaaaggttaattaggcagggtaagaaaattagtcccaggcatattattaggagagggcccagaaatacgatgaccca

SEQ ID NO: 14763 - DNA, 546 bp, Homo sapiens
  MAP TO AC016113.4; EXPRESSED IN PLACENTA, SIGNAL = 0.5; EXPRESSED IN ADULT LIVER, SIGNAL = 0.52; EXPRESSED IN FETAL LIVER, SIGNAL = 0.5; EXPRESSED IN BONE MARROW, SIGNAL = 0.42
tgctgactcttgtctgctggggcctcctactgacaaaacctagaagccagaagtcaaggatcccagtgaggagctcaggcagaagctgaaagagaaggatagagaaggtcagcaaacaagtgagggcaaccaggccaaacaggacagttcctcctttgcgcctcagtgtctgctcctgtcttttgatggggatgtcaaaggcctttaaatgggtgaaaatattgagtcccgaatgcagggaccacacaaatctcagcattatctgatgtactatcatgggctgatgtctattcaaatatattttctcctgaaacctgaaactttaacaaccacccatgatactcatgaaataaggtggcaaaggagaacacaattaatgtaaggttttaccaccttgtccctgattttgtagttcatcatgagactgatgtgtgtcatcatgactgctgttttcctccactgcatcttcccattactctctgccaggacctgagctgaaaggaattctttagtttgtgaggtaacccaagcctttcttcatggctt

SEQ ID NO: 14764 - DNA, 579 bp, Homo sapiens
  MAP TO AC020693.3; EXPRESSED IN ADULT LIVER, SIGNAL = 0.65; EXPRESSED IN PLACENTA, SIGNAL = 0.51; EXPRESSED IN FETAL LIVER, SIGNAL = 0.48
aaaacagccttgggtattgcattaataattagttaggagaccattttacatttttttaatctttgctattctttctataggaaaatcaggaaaaaaagtataaaaatcttactcatttttccacaccacagactaaggctggcaaagtagtgctgcaagcagtgctaaccatctccaatgaccaggtagctacataacccatgtaacctgctcacattatattttccttatatgtatgaagtggtttattgtctccacagtgttttctcaaccatttcattctcacaacagcactgaaaagtaggaagaaataagtcaatatttttcagataaggaactggcaagagaagccacatggatagtgagcaatgaaagacagagggagagacaggaacaggaaagagagagaagggtggaagaggtgaagggagaaaaaaacactaactggtgttatggttctttgcttttccctcagcatcaccatctccttagcagtatgcaaaggagagaaaataagtggaaaaagagacaaagaggaatgaagagagaaagggaaaaagaaagggagggaaacaggaa

SEQ ID NO: 14765 - DNA, 600 bp, Homo sapiens
  MAP TO AC008269.3; EXPRESSED IN BONE MARROW, SIGNAL = 0.47; EXPRESSED IN ADULT LIVER, SIGNAL = 0.51
gctccaactaagaccccattcagagtcatatggtagctagtggtagtgcagaattggtcacaattggtgaccaattctgcactaacatcctacctgatgtcagcagctcactgatgatgtctttttgcagaagctgattaaaaggagccaggggaaagtaattcatcaagcaaaatgaatatactgcatccaataagttttcagaagaaatagtgtgaagataaccagtcagagcactagccataacttccacgaactgtctggggaacaaagaaaagtcagtttcccaacatatacagaaggccaatatctgtaacgattccaaagaaaagagataagaaaatcagccttgcaagtaagtatccacacatcattctggacagttggttatctcataataagtgtatacattcaataaatgttggctattgctgtatgtcttgcacgagacaaacattttatagactttaactcatttaactcacactaaaaaactccatgggtattactattattctcctcatttaaaaaaatgggtaaacaggcttagagattgagtaacttgtctaagaacacacagacaaggaagtagcaaaggca

SEQ ID NO: 14766 - DNA, 534 bp, Homo sapiens
  MAP TO AC020704.3; EXPRESSED IN ADULT LIVER, SIGNAL = 0.66; EXPRESSED IN PLACENTA, SIGNAL = 0.82
agtgaaagcagggctgtgagggaaattgatagaataaactgtttatgttagaaccgaagaaaagtctaaaaccaataataggagcttccacttcaagaaactaaaaaaaggtagatatacatgtcaagtaaatagaattaaaaaattagattgtattagaaatcaataaaattcaaaatagaaaaataatagagaaaataaattaaacaaaaagctgataactcaaaatatcagtaaaataattaatttctggcaagtatgactaagaaaaagagaaggaatacacatatgacaaatatctggaaggaaatatcggatatcatcacagaacctaagacattaacagggtaagagattatggtaacaattccatgcatatgaatgagaaaacttatatgacatggatagattcctgaaaaaccataaattattataattcaaccaacatgaaatactcctatgactaataaagtaattgaatttatcaacaaccttccaaataagaaatcttctggcccagatgatttcacttgt

SEQ ID NO: 14767 - DNA, 587 bp, Homo sapiens
  MAP TO AL157836.3; EXPRESSED IN PLACENTA, SIGNAL = 0.51; EXPRESSED IN ADULT LIVER, SIGNAL = 0.53; EXPRESSED IN FETAL LIVER, SIGNAL = 0.52
gcccttttgactattggctgatgtaattacagagctctcaactttctaccacaggagcccctgatgatgcctaagaagaactacagcaaaacataatgggctatgagttgaagaggagggtatcctggtgcctcactggtgatggcttggccagccaggttgacattccacaccactgttaaagacaggtgcccatcagaagcagcaggccttctgggaaactgaggaacaacagctgcagaggctgcagcagggcagcagccacaatgacacagtgttgttcaaagagtgtggtgatgttgggagtgatagagggaaggcagcacgaagtggcttacaggagggaagtcaaaaggggtggaaagccaaatgctgctgaccaaaagctggtggtggcactgtggtaacgcagcaatgccaagcacatcatctgtagcaaccttgtggcccataaaggtgatctgcagaagaacaagatcccaaagctattgggtggcaggagcacaaaaaagacaaagctaagtaaccaaacttcatcttcaccagaagcttcagactgcagctagggcatgttggaggaaatggaa

SEQ ID NO: 14768 - DNA, 528 bp, Homo sapiens
  MAP TO AC012629.4; EXPRESSED IN PLACENTA, SIGNAL = 0.55; EXPRESSED IN FETAL LIVER, SIGNAL = 0.52; EXPRESSED IN ADULT LIVER, SIGNAL = 0.54; EXPRESSED IN BONE MARROW, SIGNAL = 0.48
aggcatgtttgttgaggaccgcctctgagaaatcatgccagagtagaaattgcagttgtctaaagtgaagtcaactactagaaagaaaagaagaaggaattcacaagaaccacagcaaagcagttatttatggagagcaatttgatattaagaggattaaccctgggctcttccaggaagattcagttattaaggtccatctcacctcccaacaaagcccaacacaaggagcttcaggttgttaaactgattgaatgagatgacacctaccaagtgcttagtaccacacctagtgcagagtacgtgcccagcaagtgttagctaacatcctgtcatgcattacattttggggacctcctcggtgagttacatggagcagagggtgcagccattcttggtcactgccccacagctcttccccctattacttgccaacagaaccccagctgtgtccagggactggaaggccttgagcttctgggggctgagctccccctctagccctagagtgaattgggattggtctcg

SEQ ID NO: 14769 - DNA, 547 bp, Homo sapiens
  MAP TO AC022174.2; EXPRESSED IN ADULT LIVER, SIGNAL = 0.58
gtttttccagggctagttgcttagtttataaatcataggaatttctcttcatagttagaaaaaattatagaaataattttatctctacgaatatatgtttacaaaacaaatcatttctggtatcttaaattatcaatgaagtattctcttttataattacttcaaatgttattaaattttacagagaatatcaattaatgtataactctgtgcaacatctctttaagcaaatctgaattttctaacctggtaggatgtctttaaaaatgataatattagtggcaatatcattagtgatagcagtagtgatgatgtctgtggtagtcatagttgtagaagtacccagcacataaactgcttttaccatatgtaagtcaaatacaaatgttaatacatttattccttctaataatcctttaaggtggcattctgatcttgatttcacaaagaaattgaccttaaatatatactcccaatcataaagttaggaatcagtgaatcagcattcaaacacaaatagcctgattgcagattgggttttgaacct

SEQ ID NO: 14770 - DNA, 592 bp, Homo sapiens
  MAP TO AL121579.2; EXPRESSED IN ADULT LIVER, SIGNAL = 0.65; EXPRESSED IN PLACENTA, SIGNAL = 0.45
tgtcccaaaccaactccttcctgactttcagttgcaaatgattgattatccatatacttcagaaaaccttttgtggtttctgtgatctcttctacaatgggctgaaagttagtgcttgtaaggagttcctccttttcatcaacagtcagagaaggagtcgcagtgatagcaatggttaacatggccttggcaagtccactttcaggagatattctctctggctggctggaaccaaatacttcttcagctgaggggacacctgactcagtaggtgtggaaacaccagggcgttctgtttgcatgagcccagcttgtccaggctgggtttctttgttaatcgagaatgctttatttaatgatgttgccgatggtactgctgacatcatcattggatcttcagagaccaccagttggggagtctgctttgaggtaacagagctattttctaggtcatcggtgttcatcttatcggactgccctttttccgcatgaacatgtgctatctccctcctcctttctattttggggaaggccagacattgtgtggcaacgctgaaaagcagaaggctacagaaagccagacaaatgtgca

SEQ ID NO: 14771 - DNA, 566 bp, Homo sapiens
  MAP TO AC010829.5; EXPRESSED IN PLACENTA, SIGNAL = 0.64; EXPRESSED IN ADULT LIVER, SIGNAL = 0.61; EXPRESSED IN FETAL LIVER, SIGNAL = 0.55; EXPRESSED IN BONE MARROW, SIGNAL = 0.51
gtcagctgcttctgtgatggaataccacataggaccagtgaatctcaggaacatcatttcattgacttatattatttcatcatcaagtgaattccttgatcagaagtaataatgtatgtcctcccataacagcaaataaagcatttagcaagtccgcagatggtatggctgcaagaagccttgccatagggatgataaatccaaatccattcaagaatctactgctgcagaggcaaatcactgtatcttccatgataggaacccaagtgattggctggcctcccttggatatggtaccaagatggatgttggtagatataaatgccagctttcttaatccacaggtaggcaatctctgaggcatgttctacactctctacctgaggttccttaaggggtttagcttcagtaaaccacaaaggtaacttgctcgccaatgtaaactgtatttattttcttctctcccatttttacatccttattcctttaatggtgtattctaggatctcataaatttcataaagttcttcccaaggactgcatcttggtgggctaaggcaagttct

SEQ ID NO: 14772 - DNA, 599 bp, Homo sapiens
  MAP TO AC019342.4; EXPRESSED IN PLACENTA, SIGNAL = 0.51; EXPRESSED IN ADULT LIVER, SIGNAL = 0.53; EXPRESSED IN BONE MARROW, SIGNAL = 0.44
gacaatcctgcctcctgatgggcagctccactcacatggtcacttaagtactgtggttagttctcaacctctaataggtcctagtaacacatgaggaactgcttttttaaatggcaaatagtttcctgacataggaggcatggtcttgctcaagaaccttagtggtctgagctatgattcttgaactggggcttccaagagacttcaaattatataccctggaaatgtctagtgccattgagtctgctggatcacatggcctaataagaaatcttactcaatagcctggaactgttacaccacttgaaactaggagcctcggagccaggcatggcactcctcacaagtgcggtcactgctgcctcccagtttcaatgagggctccataggctgggttttgctcttagtggttgtaatacaagatgaacatattgccttaccttagaagggatgtgctggaataccgcagaccactgacacccagaaaacttcaccgatatggcagacccctgaaacttggtaggtttacctcccaccatctggcgatcatgcatcctgtcaggggatccaggtgagttgctcattactgctcaccaagc

SEQ ID NO: 14773 - DNA, 559 bp, Homo sapiens
  MAP TO AC011957.2; EXPRESSED IN ADULT LIVER, SIGNAL = 0.54
ccctgcttgacctttgagaggcagcttagaagcatctcctccaggggcctgtggaccacatgggctgcctggatggacacctgtgtcctgtgcttccatctcacactgttcaccctcattctggtcacagaactgatcattgtctgtctgtgtgccggtcccctcttgtctgtgacctcctcaaaggccatggccatctgtgtgtccccagcacccaccaccagtgcctggctcaaagtaagtattcagtaaatatttattgactaaattattccctccacctggagctctccccatgcctccatatgtccaatttcaacccatctgtctgggcccattaagccggcttctcgaagaaatgtctttgccgagttgcaatttaatttaatattacaccctcaccttttgtcaagagcccacttctggggctgaggctgccaagtgaagcatgattcagcatctactacgaaggatgttgttcagtttgtgtccccgagataaagatccacaggttaggtcctcgtggaactgagtaccaggaaatgggctgtgctctctc

SEQ ID NO: 14774 - DNA, 514 bp, Homo sapiens
  MAP TO AL139825.9; EXPRESSED IN PLACENTA, SIGNAL = 0.48; EXPRESSED IN FETAL LIVER, SIGNAL = 0.47; EXPRESSED IN BONE MARROW, SIGNAL = 0.44; EXPRESSED IN ADULT LIVER, SIGNAL = 0.52
caggtcagcaataatgttgggataaattcataaatagttattctttgaatggtgaaaataaaatgtgttttattcatgagtaagtatagtgtttgcttgttgctgatattgtatttgggttgaaatacatattttctttttactattatctattttaaataattctggaaatacagtatgacagattttaatcagtaaagcctagcattgtatgagggtttttttctcttttcaagatagtgtatgtgaaagcatacatcaataataataaaagttgaattcagatgaaaatgctttgaaaatggtcaacatatgcaaatgtaaggtatttttattattgttattgttattctttgtcattattaaggtatactcgataatgatgttagcttggtttataattcaagcattaggtaataaagacaaggtacagttaattctgcattggagactcatattaacaaacgtttttggtaagtctattttagtcatttcatagagggctttgctggaa

SEQ ID NO: 14775 - DNA, 531 bp, Homo sapiens
  MAP TO AL158012.2; EXPRESSED IN PLACENTA, SIGNAL = 0.83; EXPRESSED IN ADULT LIVER, SIGNAL = 0.62
gagaagctgccatgaagacctctgacatgccctggagacattttccccattgtctttgggattaacatttgactcttcattatttatgcaaatttctgcagccagcttgaatttctccttagaaaatgggattttcttttctatcgcattttcaggctgcaaatttccaaacttttgtgctctgcttcccttagaaaactgaatgcccttaacagcacccaagtcacctcttgaatgctctgctgcttagaaatttctttcgccagataccctaaatcatctccctcaagttcaaagttccacacatctctatggcaggggaaaaatgccactactctctttgctaagacataacaagagtcacctttgttccagttcccaacaagtttctcatttccatctgagaccacctcagcctggactttattatccacaccactctcagcatttttgtcaaagccattcaacaagtctttaggaagtttcaaaatttctcacatttttttgtcttcttctgagccctccaaactg

SEQ ID NO: 14776 - DNA, 566 bp, Homo sapiens
  MAP TO AC007989.2; EXPRESSED IN BONE MARROW, SIGNAL = 0.56; EXPRESSED IN ADULT LIVER, SIGNAL = 0.58; EXPRESSED IN PLACENTA, SIGNAL = 0.55; EXPRESSED IN FETAL LIVER, SIGNAL = 0.58
agagatttgtggcctgatgggctggaggggaagcggaggttgcccctctgttgcccttgaagcaggatttggatatgtagggaagaaaagcaggaagaacatgagaaaggtgattatggtacaggtcaggatggccatagagatggtatgtgtccatggcattgttggaaggatggtcagtgtggatggaacggtgtgtaagatggtaataatggacaattatttaggaaagggcatcatgtccaggctccgaaagccttgaaatcagatgaaagaattgatcgtaaaggaaagggaacccactggagaccctggagcaaaggagctgattgaccaagtgttacttaagaagatggatgcaagggcagatgctgaatcaacaggagagggtgatgcttccacaaaatactcagagaagaggagctcagggatacaggggtgacagtcaggtggttatagaagaaatgaaaaacaatagggaacaactggcaggcctttgtacctaattacatgtggggaatgaaggatgaggtggagcaaaggtatccctcttgtcttgatcccaa

SEQ ID NO: 14777 - DNA, 592 bp, Homo sapiens
  MAP TO AL138702.3; EXPRESSED IN ADULT LIVER, SIGNAL = 0.57; EXPRESSED IN FETAL LIVER, SIGNAL = 0.49; EXPRESSED IN BONE MARROW, SIGNAL = 0.45
tgtcctgcctgatagttggacttagatgatagaataagaatctggtattcaacaactaagtatttgcattaaatatcctgacataggcactaatctgatgcaaatgtaaatgttcaataattttctcctttcctctctccctccattctttccttccttcctttcttcctctttttctttttcgttcattcatttattcttttgtttatttatttctgtcaaaaaatagttgtgccaagcgctgctgctgtagtagtgaccacatcagatgtgactcctgttgtcatgaaagttacagtagagcaggaggcaactttaaacaagtaatttcacaaagtaattttattacaattgtattacatttgtattctattacaaagtaattttattacaattgtaataaaatacataaaagtgaagtttacagtgagtatgaatgacagatgagttacttggtttaaaggatcagagagcacttccatagaaactgacgtttcaaataagacctgaaggataagaagaattgctttcctaaatgctttacaaaaagtactataaatgctttataaaacgcgttgcctaaatgctttgt

SEQ ID NO: 14778 - DNA, 558 bp, Homo sapiens
  MAP TO AC013818.3; EXPRESSED IN PLACENTA, SIGNAL = 0.55; EXPRESSED IN ADULT LIVER, SIGNAL = 0.65
ttagaaaacgatgaagcccgaagttagacacaggtgcatctaatattaagctctgtgctttttctccccccagtcaaggctgtctccctgaaaggcgcagctgctttatttgaagacagcccataatgtttctgaaagaagcttatgattgatgtttgctttgacattttctaaaaatctttgtaaagttccataaggattatcaactttgctgcacctttgctgaatcaaagttttgtgctttgttccaaatatggcttaacctcaaacactttattacctaatgtgaacacaagttttattatctccgccaaagtgttcatgttcagcacagactttatgatcatggtcttctgattactttacttaatatattcttcaaggtcatcttcagtctactctccacttcttcgtttgacatctctttaatatttgataagcaataaccagttatataatttgtatattcatcacctgtctagagtaagtgggatcaaaatccactaaatgtaaaatgcactaaaatgaacaattcacacgtatcttgggaaggcagtc

SEQ ID NO: 14779 - DNA, 534 bp, Homo sapiens
  MAP TO AL157377.1; EXPRESSED IN PLACENTA, SIGNAL = 0.45; EXPRESSED IN FETAL LIVER, SIGNAL = 0.49; EXPRESSED IN ADULT LIVER, SIGNAL = 0.53
gacagaaatcaaccgttgccatttatatacattcagtgggttattatgattatttttttattcaggaatggaccagacttattgtaacaagatggaatacatgactgattattttcccagaataaacttcttctacatgtacgaagggcctgccccccgcatccgagctcataatatacctcatgacttttttagttgtaagtatgaagacacctatatgaaaaaaagggtaaacctgaaagtgaataaccatagtccactaattctgagaggaagttggggttatcagaccctctactgacttcttgagaagaccacagagaaacaagtgggaaattcccatgcttaagtacagtctataaagtctatggtaatatctaatattgttaggttgaaatatatcctactcagttctaaatgctaaaataattctttgcttgaaataatttttaatataattttaccagatcacagttattaataagtgaatgtatcaaattcacctgagtggttcacattctttgcatttgttcg

SEQ ID NO: 14780 - DNA, 537 bp, Homo sapiens
  MAP TO AC018516.3; EXPRESSED IN BONE MARROW, SIGNAL = 0.49; EXPRESSED IN ADULT LIVER, SIGNAL = 0.74; EXPRESSED IN FETAL LIVER, SIGNAL = 0.48
aggcatgaggagttcaatgccgggatgagatctaattcaaaattcctgacacggatatccaggcatgttccctccaatatggtataatttctgtaaaaccacctggaccttttttttttttctctcttcagcatgttattattatttttcttaaaagtagccagaaagcaattttaaattatcaaattttatttctgaagatcggactttgaacaacatagctagtttgtgctctcgttactctacagacaaaaaagaagaagaagaagaagaagaagaagaagaagaagaagaagatccagagaagagaaaagatagccaacgtcagggagcctgtttatgaaaagtcaaaactctatatctactcaaccaatgctccatttcctccatgtttccacagagcatgttcctttttcctggtgacataaaaagaacaaaaccaaaaaatgctagaatttgtaaatttaggtcaatgaaaaaactccttagctgtttacccatctttaagtcttactctcagctttgccatggaattct

SEQ ID NO: 14781 - DNA, 524 bp, Homo sapiens
  MAP TO AL132857.3; EXPRESSED IN PLACENTA, SIGNAL = 0.51; EXPRESSED IN ADULT LIVER, SIGNAL = 0.52; EXPRESSED IN BONE MARROW, SIGNAL = 0.44
ttctacacgtcagtgtgggcttaggatgttaaatagattaaaaggctaagagaggtcaatcactcaaggaaagactcttcttttgcttctcctgacttggttctcttccctaaattgttatccaccccaccctactcctgtggaggatccttgggaaactcaaaagatgacacctcctctcctagaacatcctggagacggagtcagtcctggggctaagaattcgagaacctgagggaggagggagtctaaatatccggctggtaaatgctacaatgaagataggtttagaaaaattcctgagatacagaatcataaaactggtagggtccttagaaattaccaaatctattctcctactatcttctgtatcagattaatttaaaaaaaaaaaaggaaggaaggaagcttagagaaatgaggtggttagagataggtaggggcagagcgaggatgcgaaccgatttccaggccagagctccttctaccttacacaatctcatagttcaagaccgaatttggga

SEQ ID NO: 14782 - DNA, 526 bp, Homo sapiens
  MAP TO AC018425.3; EXPRESSED IN PLACENTA, SIGNAL = 0.61; EXPRESSED IN ADULT LIVER, SIGNAL = 1.1
ctgcaggaaatagcgagtccatacccgataattatgacgtgatgaatcatagaagaatttaggagcattgagactgagtgttgaagatttacattccaaatatatttttattgcacctataacataacttacggattcaaggagaaaaatgtcaaagacctacgttttatacatgcacatgtacacatttatgtctgtctacatagatctagacatgcacaaatgtggggtaagcaaggagcaggaagtggacatggaggatgaggtggtgagagaagatagtgatttttcattaatagtgatgaatacctctaatgtggaagtcaagtgacagttattcatttattctatcattgaaataaccctgagaagtaggcactagtgacaccactttatagatgaagagaatgagactcaatagtaagtagcagagcccagttttgaaccaagataagcctggttccaaagcagataggacacatcataagacctttcctgttgttcctgaactgcaactaggacccca

SEQ ID NO: 14783 - DNA, 556 bp, Homo sapiens
  MAP TO AC012241.4; EXPRESSED IN ADULT LIVER, SIGNAL = 0.71; EXPRESSED IN PLACENTA, SIGNAL = 0.5; EXPRESSED IN FETAL LIVER, SIGNAL = 0.5
ttgcaaagaacatttgcctgggtcctaaacttaatttttgaataaaacagataattaattccatttacagggtcatggatgaataacaaaagttggtattcctgtaaattaagatgaaatggaagagaagaaagagctttcacttacttgctcgaaggactgaaggtgtgacctcaatttcacttgttgcttggtaaggctgaaaggctgagacattgttggtgccaagctcactaccaaatatctctgggctctgggtacccgtggaactggcactggtgccatcacctccgtgatgtggatcctgctcatcaaacactgctaccagctagaaatgaaaggtaaatgtgcacttataaataaaggcacttaattaactaccaaaattttgtactattttgacataattctacagtgcaaaaatactgatataaatgaccctagaatggtaagttttacgaagaaaaacctcaaagaaacagtgtttccctaaattttgatgctttacttgtataattctaagtcgtacatttcacattcaaaagtctatgggtga

SEQ ID NO: 14784 - DNA, 570 bp, Homo sapiens
  MAP TO AC018578.3; EXPRESSED IN BONE MARROW, SIGNAL = 0.46; EXPRESSED IN PLACENTA, SIGNAL = 0.61; EXPRESSED IN ADULT LIVER, SIGNAL = 0.52
aaacgtggagaaacaatggcagcagatggacaaaaacctggcatgcagcaggcagggagaagcagctcatttatagcaaaaagtcctgggtggctcagggagggacaaaaatccagacccataccaagcctgtaaatagcaacaggccctgtaagcggccttcatccttttcaaatatttattgactgcttgctatgggtcacatacttggctatgggtcacatacttggcgaggtgctgcacgaatgcagggatgaagacaggcttattgagttcaaggagtttagaatccaatggacacgcagcaggtttctgtttatatgagaccatttgggaattatgttgtggttcctggcattccaggcatttaacattcttcacaatttggttcttctttttctagatcttgggtggcataacttcaaaaccaagggagatggaggagttttagaggagtagaaggctgcaagcaagaactgatgcattacatctccagtcacctcactctaagattgtcctgtagctaagactgttgaatgagactgttgttcttcagtttgcagccacaaa

SEQ ID NO: 14785 - DNA, 587 bp, Homo sapiens
  MAP TO AC008739.5; EXPRESSED IN PLACENTA, SIGNAL = 4.4; EXPRESSED IN FETAL LIVER, SIGNAL = 5.2; EXPRESSED IN BONE MARROW, SIGNAL = 0.56; EXPRESSED IN LUNG, SIGNAL = 1.9; EXPRESSED IN ADULT LIVER, SIGNAL = 1.4; EXPRESSED IN HELA, SIGNAL = 4.5
ggttgctttaagtggcatggacattttaattatattaaatcttcaaattcataagcatgaaatgcttctccatttatttgtgttttgtctgatttctttcagcagtgtgttttctttgtagcgatattttacctccttcgtttaatgtattcctaagtatgttattttttgtttttggctattgtaaatagaattctgttcttttattttttacctctgaactttttattggcctcctgctccccaaagggtaccctgcttctgctggcttaatgtctgagaactttggtgttgttggtctcagacaccattttgccatccaccatctggcgggttgtggtcttttggatggtttgcttggagttgctgctgtccaggacatcaccaagattgaagtcctcgccatcttccagcaggcggtggtaggtggcgatctcagcctcctgcttgactttgatgttcagcggggccttgtactcctgggcctggtactgcccctctgccagggtctgtaccagctctgactccaggtgcagcaggatcctgttgatctgctccatctgcagggcttaacatgcctccacctc

SEQ ID NO: 14786 - DNA, 527 bp, Homo sapiens
  MAP TO AC018516.3; EXPRESSED IN ADULT LIVER, SIGNAL = 0.78; EXPRESSED IN BONE MARROW, SIGNAL = 0.54; EXPRESSED IN PLACENTA, SIGNAL = 0.57; EXPRESSED IN FETAL LIVER, SIGNAL = 0.46
tcatgggaccagactgagtggggtagtggtgtggtattaggtatttctcagcccctctctcttctgagttgatcaaacttcactgttttctgtgctaggagagatgtgaaggtcattgcttttaacttaggctgtgtcatcaatttttatttgctatgatgattcctataggatagaccactggaacaatgagaaggagagaattctactggtcacagacaagactctcttgatctgcaaatacgacttcatcatgctgagttgtgtgcagctgcagcggattcctctgagcgctgtctatcgcatctgcctgggcaagttcaccttccctgggatgtccctggacaagtgagtatatatcttatacttgaagaagtggtgcagcagggatggacctgcagggaaaacaagccgaaaattcagtttggccctgtaaactgggagaacccaagggaggatagtgaaatcatgaaagttgaaatcattaaactagagttcctactctatgtcagcctccagggatacaa

SEQ ID NO: 14787 - DNA, 521 bp, Homo sapiens
  MAP TO AL118505.13; EXPRESSED IN PLACENTA, SIGNAL = 0.52; EXPRESSED IN ADULT LIVER, SIGNAL = 0.6; EXPRESSED IN BONE MARROW, SIGNAL = 0.48
tgtaaaaggccatgaggagctggagatcagttgttggtttccattttcgcacacaatgaaattgactctgcagctccaggaccctccaagctgggccctctctcattttacttaattgtgctttcatttttgcagatatatcccaagactggtcagactttgctctttggtgggaacagaagcattgctggcttctgaaaacccactggaccctggacaaatatggggtccaggcagatgcaaagcttctcttcacccctcagcataaaatgctgcgccttcgtctgccgaatttgaagatggtgaggttgcgagtcagcttctcagctgtggtttttaaagctgtcagtgatatctgcaaaatcctgagtaagtacccaggaaaggcccctgtgccctgtagactcttgcaaagctagacaggaaaattatgtgtgcattctgcctacttcaagtaattgctacagaacactcacctattaggaagcacatgtttaagcccttctgggtattgcagccat

SEQ ID NO: 14788 - DNA, 512 bp, Homo sapiens
  MAP TO AL133414.3; EXPRESSED IN BONE MARROW, SIGNAL = 0.44; EXPRESSED IN PLACENTA, SIGNAL = 0.52; EXPRESSED IN ADULT LIVER, SIGNAL = 0.61; EXPRESSED IN FETAL LIVER, SIGNAL = 1.2
acctgcaccaggagttatgggcacagaaaagaacatgaagacacagagaggaaggagagagacagacaccagcaaggggaagcctcactcattctaggtgccatggatgggatgataaagagagacaccttctaaactcacaacctctcttcttaggagtccacagaaaaccttccctcctggcccacccaggtcccctggtgaaatcagaagagacagtcatcctgcaatgttggtcagatgtcaggtttgagcacttccttctgcacagagaggggaagtataaggacactttgcacctcattggagagcaccatgatggggtctccaaggccaacttctccatcggtcccatgatgcaagaccttgcagggacctacagatgctacggttctgttactcactccccctatcagttgtcagctcccagtgaccctctggacatcgtcatcacaggtgagagtgtccggacattctcattgtcattgggctgcagagtgaatgatccacga

SEQ ID NO: 14789 - DNA, 596 bp, Homo sapiens
  MAP TO AL137225.7; EXPRESSED IN PLACENTA, SIGNAL = 0.51; EXPRESSED IN ADULT LIVER, SIGNAL = 0.52
agccccagaatgcatatcacgatcagatgtcccttctccaagttgaacatttcctcctgatgatcttgccccaggttgaacagagccatcagacagtcccaccccaagctgaccattcattgattcaaccctagactgacccagcacaccagatgacctaactctgggctgaccattcaatgatacagtctcagattgactaaaatgactaggtgacccatacctaggttggccatatcctccagatgctcctagtgcaaactgactgtcaccagcatatgttcctggcccaggctgaccattcattgaccctaccccagattgatcaatactaccagttgtcccatctccaggatgaacattcattaaccttgccccagactgaccatagcttacagatgtctttgtcccaagatgtccataaccactagatgacctatccccagtctgaccactcattgaccctgccccagactgaccaagaccaccagataacccagccccagactgatcatttagtggccctggcccagtttgaccataaccactagatgacctgtctccaatctgaccactcattgaccctgtcccagact

SEQ ID NO: 14790 - DNA, 503 bp, Homo sapiens
  MAP TO AL138811.1; EXPRESSED IN ADULT LIVER, SIGNAL = 0.59
tttgatagtttgtaccccacaacatacttaaattttacctgaaactttttgtcttcctcaaatgttttttgattgcataatttgttataatgttcttgtaacttaatatgagtttctttaagggatgataattcatttttaatcttattaatttctccattaagttcttcagcctattataaaaaaggaaccagaataaacaagtatatcaagtatataaatatgttttgtctgaaaatatttcattaacaaaagtttcaggaaatagtcaaagaatcaaaacaatcacaaagtcattactaatattaagagctaccatttattgaattgggctgactacttaataagcataactgcatactcagcaaaaccctatgaggtattattatgcccaatttacaggtaagaaatacgaggctcacagaagttaagtaacttgtcccagatcaagtagatacaaaatggcagtgaggatttaattccaaagctaaatctgaggaccg

SEQ ID NO: 14791 - DNA, 557 bp, Homo sapiens
  MAP TO AL121881.25; EXPRESSED IN ADULT LIVER, SIGNAL = 0.51
tttgctgccttcaacaactggaagaaaaacagagtgagccaaaagagacattaatttggagaagtggatggggaatgtgtggaaagggagattttgtgatgatgtgtacaggttgaggaaagattttgtgccagataaggacaaggtaggaatcttgggttaggtatcaatggggaggaagagtcacataattagggatatctgacctcgtcagtttcaccttctttagcttcacaagtagttttctttctccatttcatgctgggattttcttggcttgtgcttgtggatggttcaggcatgtctgaactagcttctcctacttcttcggtaacctttgggataatgtagcaatggtggcctatattcccttctggctccttgttaatctccgccatcttagagcaaaagtaggctatagcctcttttatttcttcaggaacatcttctattgtagaacaacagtagcgtacagtgtcttcctcttcttcactaaactctgccatcctagatgaacagtagcctacagcctctcctgatttttccctaacccctgc

SEQ ID NO: 14792 - DNA, 550 bp, Homo sapiens
  MAP TO AL139186.3; EXPRESSED IN ADULT LIVER, SIGNAL = 0.53
tcctgaaccaaagtcttccgaaagctttacaattacgtatgtacaggattttcctaagacattcaaattccactaggatgaggattaagaacatccaggagagtgggagtattattattatcttgatagtggattctaacattctagactcactttgataatctaaatgtgaaatgatttttgatggaaaataaagaaatagagtagaagagaaaaagctggactttgctgccttagagtccaaactccagcatgcaaatccatttttatgcctctaaacacagcttactagttccaccttaccaatatctaagaaggcaatattacaatcattgtttccagggatgcaggcggggctgaatcgccaacctactgacttacaactccgtgaactagatcacctcctgttatataacgtattggctgcagaaacttaaaactaattattacaacatggccttcattaatttgaagaatatagccttcaatgccaagatggcaaaaaacaaaataaacgtgcaacctaattggtaaggcatctttgggttgc

SEQ ID NO: 14793 - DNA, 544 bp, Homo sapiens
  MAP TO AL133173.13; EXPRESSED IN ADULT LIVER, SIGNAL = 0.52
aagcaggcagatgatgacaggtaaactttttaatgatgttctaatgttgacaattgcagttttattttgcttggatcataatggcgtgtaagcattttaggccccagaatgcccataagtagagctccatttggagctgtgatcgagatggctaaaaatgctactgacatcacatccttcgcatatggttccaagtggggtgcagagactcttgctgtttctagagccagaggacctaacacagcctacatttaggggtaaaaatgggggataaagaaaaatattaaactgagttaatatataatgtaaatggctctgttaaaataaacaagatctagtactagactattagaaaaaaaaagtactcagtaattatcataagttactcatcagttccatgttcttcctagcaaatatatgtggaggaagagtacaatagtgacaaatcaacatgcaaacatttttgggctgattttgcactcttgtcctctcagtgttcctctattcaaatatctcttttgagtgttgccctcataacaccagg

SEQ ID NO: 14794 - DNA, 523 bp, Homo sapiens
  MAP TO AC007989.2; EXPRESSED IN ADULT LIVER, SIGNAL = 0.59
ttcctgagtttcccgacatcagaaatcaagctggcaccaggctgggcccttggaatgttttgagtaattgatttcttgggaaagactccaagtcctgggctacaaagtcctatttgaacccattctcctagccgacgctgcccacctttcagtcttaccctcctctgatcaccccaggccaacccttttgctctttgggccctcatagactttctcattatctgtctgctgtgcagcccttctgttctccaaagtctctttctataaaaacgtcttcctgggccagatcaatactgggcttcaacttcatttcttaactacaattccttacagttatgtaagtattttaccagccaccttcatgaagatcatctcatttcatcatctcctagacattatcattcccattttaaaggtgagcagaccaagggtcaaggagactaaatgagcccaagatcacaaggcggtcatcagaaggcccacaaggggctggccgggactcagatacagttcccaggtccca

SEQ ID NO: 14795 - DNA, 554 bp, Homo sapiens
  MAP TO AC022474.3; EXPRESSED IN ADULT LIVER, SIGNAL = 0.52; EXPRESSED IN BONE MARROW, SIGNAL = 0.46; EXPRESSED IN FETAL LIVER, SIGNAL = 0.5
accaaggccctacgttattgaaaaatttctgtgagagaaacttatcattgtacaaaaaactgttaagatttgggggtaaattaatcactgcagcataacttagaacacttctatgaatataatatctaaaaattaatgtctgaaataactttttttcttaaaaatatttattcttcaaactatctataattgtaaatgacatcatctttatccagttaacagatcaaacatgtaggaatcattcttcatatcaacatacagtctctcaggaaatcctattagttctaacttcaaaatattccctgaatcccaccagttttcatcactgccaccacagccacagccacactcatcaaagccataatcacccatgcctggaggtttgcaaaaacctcccaagtaatcacccttttcagtttgatctctcaaactacatttcctataaaacctctcccaatcaaaatataactgctcccacatacaatccctcatctattatcttctctacctaccaggatgatgtaatttcctttggatttcactcttgatcagcg

SEQ ID NO: 14796 - DNA, 546 bp, Homo sapiens
  MAP TO AC012571.3; EXPRESSED IN ADULT LIVER, SIGNAL = 0.55; EXPRESSED IN FETAL LIVER, SIGNAL = 0.46; EXPRESSED IN BONE MARROW, SIGNAL = 0.48
accctgtggcaggtattttgtcactaaaatgtgaggatgagtaaaagaaaagtggagatgagaactatctggatagaaattccttcattacagtgttgtcacgaacctccacaataagcacgacttctatgtggtggctcaactgctttggtcagagcagctatcaactgcttacactttccaaaccatctagttttgttcagccagatcaatcactcacagccacttctttaatcaagtttaataagagctaacattgaatgagtacttccaatcttttctttctcataatgccactgtagatatcatctgtattttacagattaataaactcaggctccagtatgtgatgccaggccatataacttgtgagtgccgaggaattctgtctgaaacagtccaggctttttctaccatacatgcaacctctattcggagagttggtgaggctgctgtgaccaaactcttaaaaggtaaatgtgggagaaatattgtttattttccgttcagtaatgtgagatatgcagaactggctggaagaggtga

SEQ ID NO: 14797 - DNA, 569 bp, Homo sapiens
  MAP TO AC015999.3; EXPRESSED IN ADULT LIVER, SIGNAL = 0.57; EXPRESSED IN BONE MARROW, SIGNAL = 0.45; EXPRESSED IN PLACENTA, SIGNAL = 0.53
tctttgggggtaaaaactgtgtaaatgggataagctatattgtaattaacaagcaagagggagaataacaaatcactcatgctctcaaagcccatacttacaaagagaaaacaggcaccgatcattgctgctttgactgttacatctagatctgcaggaacatgaattccgaaattgtcagcatttgtgaagacatcatttacaaatcctgaccagtactttgaaatcttcccaattgtaagcttttcattaatggttttcacctttagaaagaaaataaggagtattaaatttgaaagtgaaaaaagttggttttatacttctgagggtgtttacttcatgagagatttgaattattttatttgtcatcttcaaaatgacaattccatgttattcattccatcatataagcataggtttgtaaatttagcttttcagtttactttttagaaactttgcttttttgacagttttctagtccatcataattctttttcttttttgtatgcagatggagaatatcaggataaataattaaggctcagccaccacaagatggcagcaggtac

SEQ ID NO: 14798 - DNA, 568 bp, Homo sapiens
  MAP TO AC013396.4; EXPRESSED IN ADULT LIVER, SIGNAL = 0.94; EXPRESSED IN PLACENTA, SIGNAL = 0.55; EXPRESSED IN FETAL LIVER, SIGNAL = 0.6; EXPRESSED IN BONE MARROW, SIGNAL = 0.48
tccaacattccctctggttccctggtgtagaggctgggcagagaagagggcccagggtagacaagcagtacccctttgctgcccgggggtcagctggggatgcccaggatgttgggggcgctaaggtctccatgagggattgcagcctcactgtgcaccttatctctaccactgcagatattcctcctgcctgccagggtgccccactcaccacagaggtttgccaacaccgtggggctggtggttgagcgaaggcggctggagaccgagctagatgggctcaggtaaattctgtctggagggctggggcagagaaagggcaaacagcagaggagcacagctccaaactgcagctgaagggatcctagatagactcaagaaagcacgtcctggccactgagtgggcaggagggcctcacagcagaggcagtggagatcctgtctttgttggctgatggtggaggggtagagtggggtggattctgttctctgtgaccccctggaagctcactcagcctgatgaactttggctggaatcagaatctgtgctttctgcgtgaggttgtga

SEQ ID NO: 14799 - DNA, 520 bp, Homo sapiens
  MAP TO AC009467.3; EXPRESSED IN BONE MARROW, SIGNAL = 0.44; EXPRESSED IN ADULT LIVER, SIGNAL = 0.51
tgcagtgaggatgaagttcgacttcaccctcatcattctaccaaactcttcaggtcaaggtcatcggtgactttccacactagcaaatccagaattaaagctcagtgctcatctttatctatcagcatatccatgacatacttgatcatttcccctttatgaaacactttctttactttgattctagaacactgtttcttatttattcttctttcttactatttgtattctctcagtctcctttgctggttcctcttcatcttctcaacctctaaatgttgaaatgcctactttcaaaccttatttttttatccactgcactcactttctacgggatctagaaataccatttttaagttggctcacaacaaatacttcagtgtctttaatatgccagtcactgttctgcatgtaagggatacattagtgaataaaaactctctgccttagtggcttatagtaatagccattttattatatctagtgttttataggtgaggcatttgatacgggctcagct

SEQ ID NO: 14800 - DNA, 558 bp, Homo sapiens
  MAP TO AC019342.4; EXPRESSED IN ADULT LIVER, SIGNAL = 0.52; EXPRESSED IN BONE MARROW, SIGNAL = 0.7
tgagatactcccgtggtgtgttttcttttgcaggccacctcctaagactctctactttctcatgctgctttgctttcagactcttcattttcatccctcttgttagttctgggataaccttgtcccactctgccacgaggagtgtgagcctctgtccaggcttgagctgcagtggctgcacccctgcctccactgtgacatcctttggttgcagctgcagaagcatccttagcagattcctcagctggagatgcaggttaggcttctgaagttctgaacctacaggcctggggagttttggtgcctctgccatggcctcatgcccagagctttgcttttccctagctctgtaattgttcaggtctgggtaattggtatgacttcagtagcagctaaatatgccctctctcatgcattccctgcagttatggcatgtgcctctgatggtccactttctccttgtttctaaactcgcttcaaaattgattggctgaacttttaacatatttaatcttaaatggattcctttccttttatgccttcttggctgaaattctt

SEQ ID NO: 14801 - DNA, 572 bp, Homo sapiens
  MAP TO AC022796.3; EXPRESSED IN PLACENTA, SIGNAL = 0.48; EXPRESSED IN ADULT LIVER, SIGNAL = 0.56; EXPRESSED IN BONE MARROW, SIGNAL = 0.48
aagagcaatgggtgttgtcctggggagtaaggtgcctgagagcattagtgtcagttaagaatgatagccccgcagttcctgaaaaaggtcaaagagagaaaggtgacactgactcaggttgagaataggaggatgtattctgtcatgctccaagcagccttgtccctgaggagacaggtaatgagagagcatcattcacagtgtgttaccaagcccccaatggggattagtttcatctatgagaaacacctgagaagattaaagatattgaagcatttcctactgaagagtatttaagacgttttcttaaatataaattatgtccaaatttttgtcttgtcctctcagaaaaaaacaattctgaggttgctgtctctattcttttaacgtatcttcctgttattttttctgtattctcatgttttactggcaagccatgattttttaagacttgaggtagcctcttccaacatgaagtggcagaattctagcaaggcctttctaatatttttaaaccgtctaaaaattgcgagatgactccagtttttgctagaatatcaaaatggccccaa

SEQ ID NO: 14802 - DNA, 503 bp, Homo sapiens
  MAP TO AL161743.2; EXPRESSED IN ADULT LIVER, SIGNAL = 0.54
acccctccctggattgttagttagaaggtgatgagattaaggcaattaaccgatgacaatccccttcatagttataggaaatataaattaggtaaaaccattctttccaaaactcaacctgccagacaacaagggacattttgcagaaaggcagtgcagctactcatcatcatcctcatcatcctcatccccatccccactcccagcaccaccatcatcaccattgttaataatttttggtcaggtgctgttctaagggttgtacatatattacttcatttagtcttcaagacaacctcatgaggtaagatggtattgctacattgtagtgttttaaaaacataacctttactcttttgacattcctataataaagagctggtatctatatcctcctctcttgaatctgggctgaccttggtgccttccttggagtaatcaatagaacagagagggagtaatgccatctaacttccaaggcaaggtagggaaaggccctgtag

SEQ ID NO: 14803 - DNA, 543 bp, Homo sapiens
  MAP TO AC023084.2; EXPRESSED IN ADULT LIVER, SIGNAL = 1.6; EXPRESSED IN FETAL LIVER, SIGNAL = 1.8; EXPRESSED IN PLACENTA, SIGNAL = 1.5; EXPRESSED IN HELA, SIGNAL = 1.9; EXPRESSED IN LUNG, SIGNAL = 2.3
catcgaaccacccagttaggcttttgctatgaaacatacattcctaaaatgagaaagcatttctgtttagtaaattctaattactagcgttaccaaaacgtttttaaatagaccacacagttgcaggttcagagacagcgctgaggggcctgggtgtactataggcttccatcagccaagggtccagcacttggggcgtgggccagtgactcacctccacacgtctcctgtattcgcaccacatcgccgatctgcagggagagctggggggctccgctgccttggaagttgtatatggctgtgaaacagaaagaaagacagctaggtgagacctctagatctcattagtctctgctccttcctgctttccctgcctcaagtccatcccatgcccacgcagcccacctgggctaaacaaaaccaacacagaaacctattgcctgccacaagagttatttcagactcagcctggctcccaagaccttctattaaccaaagttgacctttcctcaacacaggccctgcattgagcctgagtgacaa

SEQ ID NO: 14804 - DNA, 581 bp, Homo sapiens
  MAP TO AC022311.3; EXPRESSED IN ADULT LIVER, SIGNAL = 1.6
acctcccaaacagcaaagtgcaaaagagctggcgaagtttagataaaatcacctttaaaaatatgtacaatcatagctattttgagaaagtttggtatgtttagcaatatttgctgaagtagtcccagtgttcaactaaatagagtgaccaacaaaacattttgaaatatgtttgtatgaataattatattgctatatttacatatgtaaattttactataccagaaaatgcctcatttacttcctctcaatatttctaccgtagttttactttggctaattcatggtcaaggaaaagtaaaatgtggcaaattccatgaaatacagaattgttcaatgatcattattaatttttttaatgaactgaactttataattctttttgtctcaaccagagaagttagaacacttgaaattagctaagcgagaatgccatcagcagtgcatcgatctcagctgcatccaggtgtatcagttgaatggcagagggactagaaattacatttcacgaagaaaatttacagaactaaagatatttaggctgcaaaagaaaagactaaggtaagcctgtgggcaggtta

SEQ ID NO: 14805 - DNA, 557 bp, Homo sapiens
  MAP TO AC002060.3; EXPRESSED IN ADULT LIVER, SIGNAL = 3.8; EXPRESSED IN BONE MARROW, SIGNAL = 1e+02; EXPRESSED IN FETAL LIVER, SIGNAL =   2; EXPRESSED IN LUNG, SIGNAL =  78
ggatggggaaagaagaggagagaaccccgggtggaccggatggccacactgtgaaccctcccagagactttagacagagagaggggctccacaacaccccggtattctgtctgccctctctcacccccttccctgtccacacaggtcagcccaaggccaaccccactgtcactctgttcccgccctcctctgaggagctccaagccaacaaggccacactagtgtgtctgatcagtgacttctacccgggagctgtgacagtggcctggaaggcagatggcagccccgtcaaggcgggagtggagaccaccaaaccctccaaacagagcaacaacaagtacgcggccagcagctacctgagcctgacgcccgagcagtggaagtcccacagaagctacagctgccaggtcacgcatgaagggagcaccgtggagaagacagtggcccctacagaatgttcataggttcccaactctaaccccacccacgggagcctggagctgcaggatcccaggggaggggtctctctccccatcccaagtcatccagcccttctc

SEQ ID NO: 14806 - DNA, 503 bp, Homo sapiens
  MAP TO AC018553.2; EXPRESSED IN ADULT LIVER, SIGNAL = 1.6
ccccatgataaagcatcctgctttgtggtgtaatcaacttgccatacatgcattacctcctaatgagcgccgtgtttaaacaagtgtatagaacacatctgtccgggccttgggactcgaggctgtgtgaccaatttcagcatctgaaagttaaattaatggtaaagggtttaattgtgagtaaacaataccacattaaggagcagtaaacacagcagtggggacccaccgacccgctctgccatcacagatgcggcggcctccatgtgaccgttaatagtccccgccgcctggaagttctgacagcgccctgaagcccatttgtcatctaaatggtccgtccccttcttaaacatcattttggcccaaggtccattcatggggcctgccgggtgttcctgggaagatgggcagaaaatcccaaggcaagtgggaaaagcctggtaaagttccagcttctccatggaggggcgggaggggggtgagggggacacatattccct

SEQ ID NO: 14807 - DNA, 600 bp, Homo sapiens; identical to SEQ ID NO: 13203
  MAP TO AC018505.3; EXPRESSED IN FETAL LIVER, SIGNAL = 1.6; EXPRESSED IN ADULT LIVER, SIGNAL = 2.5

SEQ ID NO: 14808 - DNA, 556 bp, Homo sapiens
  MAP TO AC010322.4; EXPRESSED IN ADULT LIVER, SIGNAL =   4
gtgatccacaatacgggaggcacagtagggaaaatgcagggtgatggaggtctggatggaggcgttgagcacacctaccacccaggaggagcccatcatcagcagacatacctggcgtctcataagtacaggatactgcaggggctggcacacagcaacataacggtcataagacatgaggaccaacaggacgccctcagccacacccatcagtgtgaggaagaatatttgagctgcaccacctccataggaggtggcaccttctccccgcagaaagtctgatgccatcttggggatggtgaccatgggacagccaatgtcaaacagggagagctggctgagcaggaagtacatgggtgtgtggagccgggagtccacacggatcaagaagagaagaacggtgttgcccagaaggcctatgacaaacatgacagccaccagggagaagaggagctggcgtgatcctgagtgactgaagaggcccaccagaatgaagtctgaggccaccgactgattcacatcccccatgttttacacaatgcactttagctgcagg

SEQ ID NO: 14809 - DNA, 500 bp, Homo sapiens
  MAP TO AL109925.11; EXPRESSED IN ADULT LIVER, SIGNAL = 1.7
ggcaacgtccttctcatagctatcgatgtacagccgaatggtggccccggcactcccagtgccgctcagtcggaagacgattcgagaaccatctgtgaaaatgaggcgcaagccctggaaaagataagcagagatttttttccccaaatgctgggagactgaaggctggcaaattatgaggggtctatttggggatgtaatttcatccatacttgttcattggagggttaaatccttgataaatggcagcagctgcaccttgtgagcctgccttccgtcaccctctctgcatccagctgatgggggcttagctacggtgggagaagcatttccagggtcaggggagacctgacctcagtgatgctgggtgatgtgagggcttccctcctctccccacttccctgtgatttatggactaaccattccagtttgaagcttaataatgaagcacataaagctgctagatgcaaaaattcagcccccagatcaagagggaaaca

SEQ ID NO: 14810 - DNA, 504 bp, Homo sapiens
  MAP TO AL135787.3; EXPRESSED IN ADULT LIVER, SIGNAL = 4.8; EXPRESSED IN FETAL LIVER, SIGNAL = 3.4
aggttgatctgccatcttggtcctgccctcttctctgatcagcccctgagcctatcatgcatcaaatatcttcctgttgaccaagttctgaacaaaccattttggaaaatcagagtgtcagacattcaaacaaatggaatatatccatgaaactcaccctggcatgccaactgtccccagagccaaagacagtggtattgtgtctggccactctgtcagcagcttttccagatctttcccatcagaaatggagtgcgttgtccagcctggagaagccagtacaatagttccttttggtagggctacatttttactttccacaactctgaaagataaagcacattaaggcattaaggcatgtgacatgtcttccctttcaagggagtcaggatgctgtgtggttagtgttgacaaaagtgcactgaggttgatattccacaactgatagtccaccacccctctccatcttaattcttagccatcggcataggggtcaccagagaa

SEQ ID NO: 14811 - DNA, 577 bp, Homo sapiens
  MAP TO AL133454.2; EXPRESSED IN PLACENTA, SIGNAL = 1.4; EXPRESSED IN ADULT LIVER, SIGNAL = 1.5; EXPRESSED IN LUNG, SIGNAL = 1.6
tatgctaagtgctctggggcacaccaaaatcatgacactatagatcataagttaacttcagattcaactgggcacataaaatcagtataaagaaatgtaaaggtaacatatctatatgccatatgatagaaatgaaaatttaccacataaacatcactttgtctatcctcattttaaaaaattatcgtttacatcagcctaaccgcagaaatgtgatcagttcctttgagaaaacaatgcatttattttattttgtcaaatcttacctagatatctcagcttgggaatttttttctccatcaacagtgaaaggagatgctccagttagtaattcatacattagaacacccaaactccaccagtcaactgcctataaaacaacaataatttcattttatagaattatcaactaaaatattttataagaaagaaaaaatgaataaaagctatctattaggaaaatgttttaaaaaatgattttgtacacctccttctatgtaaggagtattaaattaacacatgcaagaaagacatttagagaacaaatatccaagtatcctcagcacagaaagcatgt

SEQ ID NO: 14812 - DNA, 540 bp, Homo sapiens
  MAP TO AC019230.2; EXPRESSED IN ADULT LIVER, SIGNAL = 1.6; EXPRESSED IN LUNG, SIGNAL = 2.7; EXPRESSED IN BONE MARROW, SIGNAL = 1.9
gcagccagaggtgttgaaagataatcaggacaatgcattggcttgaaaaccaagtgaaagaaaagtatctcaggaagaagaaagtgagcaacagtatcaaatattgttgataaatcaagtattatgaggaagagaactgacagcaaatttggtgacgatgataaaagtagtgttccagttatctattactgtataacaaatcaccctaacatttaatggcttaaagcaacagaacttattggattattatctcttacaggtgtcacgtttgactgggctctgctcagtgtttctcacactggtctctcatgtagctgcagtcagatggtggctgaggtggaaatcatctcagaggctgcctcggccatgtctggaaacaaatgctgattgtctgctggagctgtcagctgcaactcccacaagtgggctttcaatgtgtcctggctttcttgctgcatggtggctggattccaagaatcagcatcgtaagaaagaaagccaggtagaagcagtattacctcctttgatcagccttggaac

SEQ ID NO: 14813 - DNA, 561 bp, Homo sapiens
  MAP TO AC022325.3; EXPRESSED IN LUNG, SIGNAL = 8.1; EXPRESSED IN ADULT LIVER, SIGNAL = 1.4
acaaatcagtgttgccagccatactagatttctcatttgcacaaatacgtggtaataaatttgtactattaggtaaaactttttattgtatttttatataagctatgtaaatgttttttcatatatgacataaatacttttggaggtcaatctcaggagctggtgactttatcgtcttaaaactgcaagggacattgatgcctttgttccagcataatattaccttccccaaagccttcctccccctttttggggttcattaatttccttttcatttctgaaggcagtttgttttgtcttcagcattttcacatctctgaccgttactttcctggcttgttttatttccttttcatttttcatagccaaaggctttgaaaagagttatttttattaagggtataactaaatatatacatctttgagtaatatctatctatggacacatggtactacctcatttaattccactatttttttattgtgttattccacaaaggtatccactacagtaaatactactatttttgaagagcaactgatgctttgtaatttgacagg

SEQ ID NO: 14814 - DNA, 519 bp, Homo sapiens
  MAP TO AL132800.2; EXPRESSED IN PLACENTA, SIGNAL =   2; EXPRESSED IN LUNG, SIGNAL = 2.5; EXPRESSED IN ADULT LIVER, SIGNAL = 4.4
gcctctggatcagagtgagcagcagagggactctcacagaaagggctgagctggaggcggctggagctgacagggcggcagccactcaagcaggtgaggctcaaaagttaagactgagcagggcctcagacagttggttgatgtcccggcagtatggctcccgctgcaggatgaagtccactttgtgatcctgaccccaaaacacctccagcagctgccgccggagccgctctgtttcccgggtcttccgaatgccaccactacctttttcctcttctctcccctgctgctgtttaccatgttctgcaaagcccctggaaggatgctgagccttagaagacccctgtgtcctgggaagaaacagaccaaaaagagctgatgagcatcctgggggggaaattagatcttagtgggcacccctctcgtaattgtcctgcctattcctggctttgggggagaaatcctgaagttcctgaagctgaccactgagtggcagtatcaacccacttctgaagggaa

SEQ ID NO: 14815 - DNA, 545 bp, Homo sapiens
  MAP TO AL121652.2; EXPRESSED IN PLACENTA, SIGNAL = 1.4; EXPRESSED IN BONE MARROW, SIGNAL = 2.8; EXPRESSED IN ADULT LIVER, SIGNAL =   2; EXPRESSED IN FETAL LIVER, SIGNAL =   2; EXPRESSED IN HELA, SIGNAL = 2.2; EXPRESSED IN LUNG, SIGNAL = 3.6
aggtcatcgagcatttctgcctgcctcacagtccgagggaagccatccagaagaaaaacatttttgcacaaggggggtctccaaattcttctcaatgagctccactaccatttcatcactcaccagtttcccagcatccatagttgcgttcagctttttttctagctctgagccagaagccaccatggccctcagcctgtccccagtagccgaatggcagacacagaagttttcagccaatatgggtgcctgggtgcctttaccgtccccgggaggccccagcagcacggcctggatgcctttaggatactcgggttctgccgctggcacgctgggagccatgtccgctgaagtccttgtatagttttacaaagttcctctcgttattcttagttttatttcattgtggtcagagaagattcttgatattatttcaattttttttaatgttttgttttgtaacctaacatatcgcctgtccttcagaatgatttatgtgctgaggagaagaatgtgtattctgcagccattggatgaaatgttcc

SEQ ID NO: 14816 - DNA, 517 bp, Homo sapiens
  MAP TO AC011455.3; EXPRESSED IN ADULT LIVER, SIGNAL =   2; EXPRESSED IN LUNG, SIGNAL = 2.1
cttgaatccatgagtggctgcctctagaggcgcaaaggccagcatcggaggaccctgtggcagccaggagcggaaggttcatgttctgcaggggcgcccagcccactgtgcccccagccgtcacttcttctgcacgtggccacagtcgtacttgccacgcacaacggtgagcttgacgcctggcaggtcctgggtgcggccgccctccacaaggacaatctggtgctcctgcagggtgtggccctccccagggatgaagcagacggcctcgcggccagtgctgagccgcactcgacagcacttgcgattggctgagttgggcttcttcggcttgcgggtaaacgtgcacaggaccacacccttcagctgcggccggccttccgtggggcccagcttccgaggcggccgcttggggggccccaggcggtgcatctggttcagggtagccatggagcaggtagcccagagccggggaaccagagctgggcctggagagggccgaaaggggttattatcc

SEQ ID NO: 14817 - DNA, 588 bp, Homo sapiens
  MAP TO AP001243.1; EXPRESSED IN ADULT LIVER, SIGNAL = 1.7; EXPRESSED IN BONE MARROW, SIGNAL =  75; EXPRESSED IN LUNG, SIGNAL =  37
ggtggttttgcacatcagtgaaaactcctgccacctctgctcagcaagaaatataattaaaattcaatgtagatcaacaattttggctctacttaaagacagtgggtttgattttgattacatgagtgcatttctgttttatttccaatttcagataccactggagaaatagtgatgacgcagtctccagccaccctgtctgtgtctccaggggaaagagccaccctctcctgcagggccagtcagagtgttagcagcaacttagcctggtaccagcagaaacctggccaggctcccaggctcctcatctatggtgcatccaccagggccactggtatcccagccaggttcagtggcagtgggtctgggacagagttcactctcaccatcagcagcctgcagtctgaagattttgcagtttattactgtcagcagtataataactggcctcccacagtgattcaacatgaaacaaaaacctcaagaagaccatcagtgtttactagattataccagctgcttcctttacagacagctagtgtggtggccactcagttttagcatctctgctctatttggccattttgg

SEQ ID NO: 14818 - DNA, 583 bp, Homo sapiens
  MAP TO AC016950.8; EXPRESSED IN ADULT LIVER, SIGNAL = 4.3
ttgcatgacttggctttcagcttaatttcttccttttggcctagtgaattggggtcctgaggttttattttcctttcacggttacatcctctaactatccattaagtcttatacttcaagtcatttatgattgatctttatgacttgcactgggaatctaactactacctggatgattgttctttggaataaatatatttgaagtcaaaacgagactccaaatcagtttttggagcacaaataattattattaggcggaactgatatacagtcatgttttccataccttcttctgcagagaacactgttgtcactgggctaaatggtccttcacctttgttattataaacacccactttaacttcatatggtgaatatggcacgatgctttcattcctaaagacatatcttggggtgtcaggggatgtcaccactgtctggatccaggtggtaaccccaagagggcggaaagcaacaacatacccaaaaccttcaccattctgtagttcttcagggactggctataaaggaaagacatactgaatcacccttacacataagggcaaggcaaaaatgaatgcag

SEQ ID NO: 14819 - DNA, 563 bp, Homo sapiens
  MAP TO AL157791.1; EXPRESSED IN FETAL LIVER, SIGNAL = 2.9; EXPRESSED IN LUNG, SIGNAL = 3.4; EXPRESSED IN ADULT LIVER, SIGNAL = 1.6
agtccacttatggctggctgccttcccaattcggaaaagtaatgagaattttcagattcacagaatgctagaaaaaactttcctccactgtgttactacattaacagatagtaaaattaaatctccgattaataaaccacatattgagctttaaaaaaaaagtttaaaaaagcatacttgcaaatggagcaggtggtggacctgggaaatcccctggtggaaaataatctcgagaagctccaaacatggctcctggaggaggtggggggaaaggaggtcctcttctcaagaatgggcctcttgcatccactggaaacaatggacctctgattggagcaagaggtggaggaacaaagccagggccagtggcttcattttcagcagggagagatgaatcaggcacatttaaattctacaacaaattgacatatggcagtcactaaaacagtaaatttgcaatcattttcccgaaaatctcaggcttagaagaaatcatctagacagaaagcattccatgatagtcttagaaagctctagagaaagattcaaacagctttccacag

SEQ ID NO: 14820 - DNA, 559 bp, Homo sapiens
  MAP TO AC007345.2; EXPRESSED IN ADULT LIVER, SIGNAL = 1.5; EXPRESSED IN BONE MARROW, SIGNAL = 2.3
atattgagttggccttgcccttcccttttcttttttaaaaaatcagacatctaatgggtggtatccttattttggagctatagaaatctttgtgcctttgcaggtttataataaaattgtaatcttaagcctaccctgcacttaagcaacttttacatttttataaatgcaactattttatttgatctttgattatttttgtatatttatctttaaagtatagaaaaaaaacccaatgtatgcatggataatgtatttgtttatttcagacgaaactgcatcttagcagatgaaatgggtcttggcaaaactattcaatcaattacattcctctatgaaatccttctgactggtataagaggacctttcctgattattgctccactttctactattgcaaactgggagagagaatttcgtacgtggactgatattaacgttgtggtttatcatgggagcctgattagcagacaaatgatacagcaatacgagatgtacttcagggattcacaggtgtgttattgattattttgtttgttgtttgaaaggtcagggctga

SEQ ID NO: 14821 - DNA, 541 bp, Homo sapiens
  MAP TO AL135792.3; EXPRESSED IN HELA, SIGNAL = 1.7; EXPRESSED IN ADULT LIVER, SIGNAL = 1.4; EXPRESSED IN FETAL LIVER, SIGNAL = 1.8; EXPRESSED IN PLACENTA, SIGNAL = 1.4
cctgtagtcccagctgcttcagagactgagttgggaggatcactgaccccaggagttcgaggctggcctaagcaacatagcaagatatcatttctttaaaaaaataagtgagcaaataaacaataaaaatcctaccatcgtccaaatgtcacctcaaagtttactctttcttcaaagcctgttttgatgctgtacttcatgcccccaaccactgacttataccaattggatataactgtctcttcatttgagccccctaccatggcacgtgctttgtatttgagctattgtgtacatctttacccctccctctcgactctgcagggcctgggagcaaggactccaaatcatgattgcctcctcactcagtccagcacacagctgagtgcgccctatgagtgttttccacctgagttggccacactcaggctctatggctaaaagggtcattgcctggagagtctaaacatctatattaaccatcctaggcatctcagtgcatcttgtcctgcagggaactaggctgaagagacgtagctcg

SEQ ID NO: 14822 - DNA, 551 bp, Homo sapiens
  MAP TO AC012568.3; EXPRESSED IN ADULT LIVER, SIGNAL = 1.5; EXPRESSED IN LUNG, SIGNAL = 3.1
ctccctatttttggaagccctctttgcagacttctccctgctctgggagtcggagcttgtgggccagccttccatctccccttgcaggtatgtcagtggcacctcccagtgaggagatgggttcaaggggagggactgggttggccttccctttgcatggtactgagtgtggagtgtgtggcaaatgcatcacacaccatgtgtccctggagctgtataaatgaggctggtctagggggtccaggacttgctttatccaggaggggagcaacggacctggccacttccatccccacagccctgtttctgtgtttttggcaggatgcaacctgaagatcttcaacaaccaggagttcgctgccctcctggcccagtcggtcaaccagggctttgaggctgtctaccagttgacccgaatgtgcaccatccgcatgagcttcgtcaaaggctggggagcggagtacaggtcagttatgggtgctgcctacatcaggggacccaactccaggtgactctggacagcagagcaggcagggctcctcagagatgag

SEQ ID NO: 14823 - DNA, 512 bp, Homo sapiens
  MAP TO AC007869.2; EXPRESSED IN FETAL LIVER, SIGNAL = 1.6; EXPRESSED IN PLACENTA, SIGNAL = 5.7; EXPRESSED IN ADULT LIVER, SIGNAL = 1.6; EXPRESSED IN HELA, SIGNAL = 1.7; EXPRESSED IN LUNG, SIGNAL = 2.5
ggcagccttgaagagtgaaggagggaagaaatgaatgaatcagcgagtgggtggggtaggccggctgggccgtgcaggccagcccagcccccgacagtctcgtgtcccttacagatgtgctggtggacggacagccatgtgaccgcgaggctgtggcggcctgccaggtgggcgaccccgtgcgcctggaggtgcggctgaccaaccggagcccgcgcagcgtagggcccttcgccctcactgtggtccccttccaggaccaccagaacggcgtgcacaactacgacctgcacgacaccgtctccttcgtgggctccagcaccttctacctcgacgcggtgcgtggtggtgtgcaaggcggtctgggagcctctggccatgtggtcatcatccccccttccctgggtggtgggctttggggtcagcatatgtccagcagacgatagcagcaggggttctgtggtcacgtgtgcacactgagtctgagtctgccccattcactgcaggaactt

SEQ ID NO: 14824 - DNA, 580 bp, Homo sapiens
  MAP TO AL158845.1; EXPRESSED IN PLACENTA, SIGNAL = 2.1; EXPRESSED IN ADULT LIVER, SIGNAL = 3.3
cctcagggagactgatcctgagtagccttaaaaaaaactgcaagcaacatcacctcccccagcttcctcatgctcttttccttgtctgctttcctacttggcaccatgtaatatttatgattattatatattatctctccctgctccacagcatgggaattaagtttattagggcactgatgttttgtctgtgcaatttcctgatatgtatctagtaggcttaaaacaatgcctggcacacagtagggaataaatatttgtcatattgatgtatttgtgaagatcatctgtaaataaaaaagatacaaacctgaaaatggataaaataagttagctctaatgttacaaaattagaaattcctatatgaatctataggcaacttaatgaggagtctaggaagttctattttaaaatgacaatgatgagatgacgcttcatactaaccagattggcaaaaaacaaatagtgttacaaatgttatgccaggagtaaagaagacacatatattttatatattatcatatatggtgatgatatttcataaattataattttggatccagaagaaaatgggcttca

SEQ ID NO: 14825 - DNA, 555 bp, Homo sapiens
  MAP TO AC023820.2; EXPRESSED IN PLACENTA, SIGNAL = 1.8; EXPRESSED IN ADULT LIVER, SIGNAL = 1.6
caagctcaaagtcagaggggcaggaaagcagactccgtagtacagattcacaaggcagaggtcatgggcatgcaatttcatcataggaaggaagtgaagaattggggacaacaatccaacccactccactgctgagtaccacctctgagtgtcaggctttatggccttggcctagttgcttgtcttcccactaggttctcagtgccttcaggacaggaccctggccaacttacttattacggtatctccagttatgaccacagtgcctgctctagtgagtcatggtgatccatatacatctactgaatgaaaaattggatgtgaggggtctcagagccaagatggaagagtgtttcagaaaaaacagggagtgatcaacacccgaaggacctcaagactggagagtactgttcagattgaataactttatgttcattgttaaccctggaaaatacagcttcagggaagtgccagggctggggagtcagaagtcagactgcagtgggatgggcagtgaatgagtggtgaggaagtacaggtggtgagtgaagacca

SEQ ID NO: 14826 - DNA, 592 bp, Homo sapiens
  MAP TO AC008962.4; EXPRESSED IN ADULT LIVER, SIGNAL =  14
aattgaggccgtgattgaacctccttcaagagctgttgtgagtgctataggggatactatcttaaagcacttaatgcagtgcctggcacatggtagttctgtagaagtgcttgctattttaattcacgtgcacaggtcctgcctgtgggtgagggctcagtagatggaacagcgatggttgatatagttgggattgtgaggattattatgacaggggctaatttgaatgggcctgtgttgtctgccctccccactgccagcctgatttccctctgcctggctttgcagctcctcccattggctgctggggtgtaccccttgcatgcggatgagaaacgagtcaatgaagtcccgtggggaattgggatccagcgtgcactggttgtgctccactttcttggcaatgaagtcctccagcccttgcagctccttaaaggcctgttgctgtggtcctggcaggtgtttcatcaccgaagagaacatctcatagagctggggttgcagagagaggatgggaagggaaggaccgctgtcaggaggcaggaactgatgggaatgggacctgtgtcagagcaagaaaggcactgggtta

SEQ ID NO: 14827 - DNA, 503 bp, Homo sapiens
  MAP TO AL138970.2; EXPRESSED IN ADULT LIVER, SIGNAL = 1.7; EXPRESSED IN PLACENTA, SIGNAL = 1.3
cacgaacatgttgctgttcccaaatgaaagaaatccattcaaatggaaggttatctgatgtcatcaaaaccatgcctgtgttgctcttaaacaccaccaaagatgctggcaagaccacaccagccagaaccatcactcccaaatctggtggccaagcaacttcctttcctctgtaattagtcctcatgtgaattagggtggtccttgacctactgtctctttaaaccagtggccttttttccaaggaatcccatttctaactcacttttctttcctttatttccccatctgattgcttacctgtttctgttccctaaaaatcatctttgtgctctgagagtagtcagtgcacattcctctccactaggacttttaatcatttcttccagagcccaaccccaaggctctgagtctttttggtttatttccttatcctaactgagcaaggacccagtgtggcaatcaagtcttcaattctctaatgacttcagggagagctgtgg

SEQ ID NO: 14828 - DNA, 558 bp, Homo sapiens
  MAP TO AC010745.2; EXPRESSED IN ADULT LIVER, SIGNAL = 1.6
tggaagacaggctttggaacacagagtgaagatgaaatatgcaagcatctgtaggcttgtccttggcattcagagaatgggctttgggccacagactcattctgccacctaccagctggtggggttggatagtcacataccatcaggtcttgttctcattggccatgggagtaggtaaggtggagcccatggcaacctgctggagtgaaaagagcagaaaccagaaagattgcaattcaaattctggttcttccattttcttgttgtgtatacttggaaaatcactttccctctttgagccttaagttccacatttgtaaaataggaaaaataaactccaccttgtatggttcttgtcatatctattaaatgtctagcacagtggttggcacacattaggcaattagtagataacagctttcttttccccccttgcaagtggctaagatgagagcaagaagagactttgcaggctgctcctatagtttgttctccaaatatattctttcttgtaggggtgtttattttttaccagtgaggacttcagctctcctggag

SEQ ID NO: 14829 - DNA, 518 bp, Homo sapiens
  MAP TO AC021881.2; EXPRESSED IN LUNG, SIGNAL = 1.8; EXPRESSED IN ADULT LIVER, SIGNAL = 1.4
tgctgttgagactctgtgggatacgttgataagagaaaagctttattgctgccatctgccataagcaaacttattcttctgttgatgccccaggtccagtatctgtaccgagtgttttgccggctacgtcctggtgtttctatccttgcactccatggtcgacagcagcaaatgagaagaatggaagtctataatgagtttgtccgtaagagagctgcagtactctttgctactgatattgcagccaggggtctgggtaagaaaacttcctatcatgaaatttctgtgattgtgtgaaatgtaatttgcttataaagtatattttgggaaatctgatagactcaaacacttgggtttcttttcttattttgtaagagaaaagtaagtagtaaattggtagcagttgactaacattaaggatgtatcagtgaaaatttccacagtatttgcatcttttttactatttcatgataatcacaccatagaatcctgaggaacctacaaaatcaaagggggtt

SEQ ID NO: 14830 - DNA, 509 bp, Homo sapiens
  MAP TO AC023075.2; EXPRESSED IN ADULT LIVER, SIGNAL = 1.5
ttgtcaaagaagcctctgccacactggaattgactctttcaattcttttcaattctttttttttttttcagtcaggaatgctggcggggaagataacaacttaatggcagaatcaacagatttaagtggaatcaagagcttcttgggccagcagaagcaagtaaatggcacatgtaaagtggatgtgatcacttaccgtcaagatagcaatgatacagtaatcttggttcagggagtggccagacatgcagagatttctggcactcccatttggactatagtattatcagtggtaaaaactacattaagtagagttatactctaaggtttatggtttgttttatcttttttttttcaatgagaaattttccaggcttgaaaacaggtcctctgattcaagtcaggatgctagtcactgagtcctcatcgtttctggataaaagttaatgtattgtcctagaatccttggatacaagccaatctcgagagccgttgtgaaagtaatggca

SEQ ID NO: 14831 - DNA, 559 bp, Homo sapiens
  MAP TO AL158823.1; EXPRESSED IN ADULT LIVER, SIGNAL = 1.6; EXPRESSED IN LUNG, SIGNAL = 2.3
aacaggctgcctcgtaagtgggtcatatgttatatccaaaaggaaagggaacagtgaaaaggaaaatgtttcatacagaggatttcccagattaacctcagctgaaattcccttacttacatttgaaagcatgcaagcagctgcagatggtttcaggctggcccacagaagccagctgtgtttcccctccagagaggccgtgggaaatgacagcaacagctgcccaatgatgtccagtgaaaaaaggcggccgctgtttgcacctgaaagcacgtggctttctttgtctgccttggcctgggttatccatggagatgcgctgatacatttccctaacctctacttgtctttcagcccctgaaagcgtgtgactacctttgtctgccttgacctgggccatccatggagacttactgatattaatatatttccctaacctctatttgtctttcaagcagatcagaaagtaatgagggagagagattaactcccagcaaaggttctggctacactgatgggagtaggtggctaaatttctggacatccacccttggacact

SEQ ID NO: 14832 - DNA, 584 bp, Homo sapiens
  MAP TO AC015620.3; EXPRESSED IN PLACENTA, SIGNAL = 1.8; EXPRESSED IN ADULT LIVER, SIGNAL = 1.6; EXPRESSED IN BONE MARROW, SIGNAL = 1.7; EXPRESSED IN FETAL LIVER, SIGNAL = 1.8; EXPRESSED IN HELA, SIGNAL = 1.8
agcactcacatgactggctgacaagagtattgtgacattagaccaattcttgttccaacccaccctcagtgtcagctagttcagtaactggctagcagtcaggatccaagctctggtcagctgccaaactgtctgtctgaacaccgataaaaataagagcatttcattccaacttggctgccttcacacgttggataattacgttgtctcattctatcagaatttcttctaggtcagattgacattaaattgtctttttaattactgtgtttttgacagaatagctattgactaatctataaaatatgatccaaaaaggtggagaaaagtagtcagcatgtataggaacagaattggttaccttctcactagccgagatggttacttggttctgggcttcttggttctcagatatccagttcctccgagccatttcttcccattctgcttgcatcttatcccaaaactctgtatctgactgggagacaggaaaaatgaatggagatggatttaagaacatgccacatcatctgtgtttttcttccccccctaatagataaaagaggcttctggggaggaataaa

SEQ ID NO: 14833 - DNA, 506 bp, Homo sapiens
  MAP TO AL158841.1; EXPRESSED IN BONE MARROW, SIGNAL = 1.6; EXPRESSED IN LUNG, SIGNAL = 1.6; EXPRESSED IN ADULT LIVER, SIGNAL = 1.4
agccctggcatatcatcaagtatccccaagaaaattagaatcccagtttaagaagctttggcaagcacttgagaacactgattatgaaattagcctgacctaaaagggcattctacataatctctttacattttagtttctttttgtataaaatggagattctggtgaatgaaaatgagatcatatatatcaagcacattaagaacctgttacaatataccactcaattcatgaatggcgattacatgaacttcttgaagttaggaaacatgttcagcttcttcctccttgtgtttttggcacaatgcccagtacccagggggtacacaatagttattaaataaataaagccagaactcatgatttatttatgccaggatagtttattttattttaatgtaaatttagaaagaagctaaaaataatgcctggaatacactagttctttatagatatttcctagttgcctgatttgatgaaaaacttcacttggtgctcatcctcag

SEQ ID NO: 14834 - DNA, 554 bp, Homo sapiens
  MAP TO AL138828.4; EXPRESSED IN PLACENTA, SIGNAL = 1.5; EXPRESSED IN ADULT LIVER, SIGNAL = 1.5
ggctttcccactgagtgaagctcatggtcactccagcctgtgtccactttgctattgataataaagggttcttttaggtaataatgataataataacttatatttataagctctttactgtttataagtattttcataaacgcagcctcgtttgtcttcttaattgcagtatgaagttttaggtagaaccatacaaatatgtgacactttttgactaaaaaaagaggcaacttaaaaaggttcaactaaatcatggcgggaggtgaagaaggggcaggtgctaatgaccaactccatctccatactgcaactcagagactccatctccatactgcaactcagagactccatctccatactgcaactcagagactccatctccatactgcaactcagagactccatctccatactgcaactcagagactccatctccatactgcaactcagagagttaagtgacacactgaaggctgcatgcattgtcctgtgacagcgtggtctgaaagctgggccttgcttctgattccagagcttctgctcctacacagggc

SEQ ID NO: 14835 - DNA, 501 bp, Homo sapiens
  MAP TO AL160008.1; EXPRESSED IN ADULT LIVER, SIGNAL = 1.5; EXPRESSED IN LUNG, SIGNAL = 9.1; EXPRESSED IN PLACENTA, SIGNAL = 1.5
tgccttccaaaatccaaatccatgtaaatgtgatagaaaaattaccgctaatttcttttgaaacagatggtccacatccttgaaagagttcttcatatagacttcagtggcctccctctcactaaccctgtgcaggtccagcagctcctggagggtttctgcgggcagctgcaccttctggcccatctgctggtcatagtgggcaatagccttttgcactgcggctgagttctctatctgggccaaggccaggactgcgttctccatgcagggcagatcccctctgctgatagcattgatataggtcagcactaggctctctagacctacatacaaagaagaaatgataatgtttcttgtactaaagaaaactctctattctgtgtaattctgaacatgtcaatttccacctattttcctcacagcatcaaggtcctcagaatcatctggaagcttgctggaaatgcctattgttagcctctgtcccagatctactgaatt

SEQ ID NO: 14836 - DNA, 584 bp, Homo sapiens
  MAP TO AL158845.1; EXPRESSED IN ADULT LIVER, SIGNAL = 1.7; EXPRESSED IN LUNG, SIGNAL =   2; EXPRESSED IN PLACENTA, SIGNAL = 1.3
tggtcactttgtgccaatttcagttattcctctttgaagcatatttcactgaaaatattgttttccttataagataaagaatgttgtatttgttgtatcatttattctggaatttatactttggttaagacaatctaagataggactgttattcatttattttgtttttaaaagttgttgtcatttgttttattttcttggaagtcatatcacattattattaacttatttttggtttttaggcaaagaaattccaaatgattttgcttttcggtactgatacttcattgtatattggtatagttgatgtgatggatttattgaaatggtaaatgtatctcatcagtgtagccccattctccttgcaaaatccactcattctgtgaatattcatgatagtattttgtatctgtcactgagggaggcatgttatagataagaaagaaacaattacaaactttgactcacactaaattgaggagatagaacctcatgtggtataaaaccatgaaaaaagaagaaacaatgtcgtacgtcatgtagtagacttgtaagaagattccactgggaaaacaatgagggaa

SEQ ID NO: 14837 - DNA, 594 bp, Homo sapiens
  MAP TO AC020559.2; EXPRESSED IN ADULT LIVER, SIGNAL = 1.5; EXPRESSED IN LUNG, SIGNAL = 1.6
ctacatccccaccctgaatgtccttgcctgttagttccttgcaggtgaaaggtaaaaaacctttgcaacttcatgctataattgtgcctttgaattttcagaggaaaagacagtgagagagcaagagcagattgagaagcagaagagtgagtcgcaaaaagagaaaatgacagaaatggagcaccctggtgagtcccaaccacatccattcttgatgataacaaccaaagctcagaaaatgatttcttacagaatgttgtatcaaaaggagcatattgtatgtgcaaagttgctgcagctttcctaagttggcttcaaactatccaactatgatgttaacatattaccttcagccagtatgatacacatattggaatgttttgtatcattgactacttttcctgtgtctgtccactctactgtttcaaacccctggtactgggacagtgattgaacccaggtattcttgtcaataatagttggaggggcttagcaatagatcaaggtatagaagaattaaacctgctatagcttgatctactttgagattagagtgtacagggtcctctccaacctgacacacttggccctttt

SEQ ID NO: 14838 - DNA, 578 bp, Homo sapiens
  MAP TO AL136170.2; EXPRESSED IN ADULT LIVER, SIGNAL =  30; EXPRESSED IN FETAL LIVER, SIGNAL =  12
acctttttgtgcatatcccgccagtcttttttccgaataattatatattaatgtaacactataatatggatatgtcttgtgtcaataactatcctcctatgaatgtttgtgttcttactttgtgattctcttccagggcctgtggaagtcaaagttcagccctgagaacacaaggaaggaactgttctacaaggctgatggagagtcgtgttcagcatctatgatgtaccaggaaggcaagttccgttatcggcgcgtggctgaaggcacccaggtgcttgagttgcccttcaaaggtgatgacatcaccatggtcctcatcttgcccaagcctgagaagagcctggccaaggtagagaaggaactcaccccagaggtgctgcaagagtggctggatgaattggaggagatgatgctggtggtccacatgccccgcttccgcattgaggacggcttcagtttgaaggagcagctgcaagacatgggccttgtcgatctgttcagccctgaaaagtccaaactcccaggtttgtctaggaaggagtttcctcccttctccacccgcaaggtagtctgac

SEQ ID NO: 14839 - DNA, 600 bp, Homo sapiens
  MAP TO AC022267.2; EXPRESSED IN ADULT LIVER, SIGNAL = 1.6; EXPRESSED IN FETAL LIVER, SIGNAL = 1.7
ggttgcagaagcaaggactctgatagttatgagtgtttcttccttattttgttatgaatgtgtttgcatatatattaacccaacatttttgttttcttccctttgttatccacttatcatctaacataagatacgataatgatagttaactttctctctccgtatttaagttgcagaatatcagagaagtgtgaacgccacccagggactttgcatcctcttctgggggaacgggttagtgtgatttcagatgtaggtgggatacttgtatcttgttagtgaaaggatgactttcttattgactttattaaaaacttggagattaagtatcgtttaaggacatgtgtatagatgccaagttgacaaagggtggagtgtgatgatcttttcgatgtgtcaacttggctaggatatagtccccagttatttaatgaaactgtaatgttgtttaattgagctcttgtgaatgtattttataggtgtaatgaaagtccacagtcagttgactttaagtaagggagattacttgagataatctgggtgggcctgattcaatacattgaaagattttaaaagcagagcagaggctttcctgagaga

SEQ ID NO: 14840 - DNA, 573 bp, Homo sapiens
  MAP TO AC018388.4; EXPRESSED IN PLACENTA, SIGNAL = 1.4; EXPRESSED IN ADULT LIVER, SIGNAL = 1.7; EXPRESSED IN HELA, SIGNAL = 1.7
tcacaaatgcccccatttaccccttctgatgctcatggaagatgttattatatttaatttgttctaagtcagctacagcttcattatcactctgaaaacactgttctaggtagtctctgccagctgatttgaattgacccatgaagtgaaattcatttgttaatctctacaggaaattagttttaaatgttatagccttctattagaactgaagaacttctttttttgggagtattccagtattttcatatgttctttaaaatatttgatttcaattctgctaggtgccgtgaaagggacaactatattatttaaagtaaattatagcagagtctctgcctttaagagctaacaacttgtgtgcactaccatacctattagattggacaattatttctttctaaattaaccttgcctttgcctaaggtgctttgctttgcccctgtaactcaataatgaaatgacaaacaacccaattaaaaaatggataaaggtctgaatagacagttctccatagtagatgtaaaatggctaatgagcacatgaaaatgaacacattagccatcagcgaaa

SEQ ID NO: 14841 - DNA, 539 bp, Homo sapiens
  MAP TO AC008962.4; EXPRESSED IN ADULT LIVER, SIGNAL = 9.9
tcggactatcatccctgctctaagacccctagacacctaaacacattcccctcctcccccagccaaggtccatgaggagattgacagagtgatcggcaagaaccggcagcccaagtttgaggaccgggccaagatgccctacacagaggcagtgatccacgagatccaaagatttggagacatgctccccatgggtttggcccacagggtcaacaaggacaccaagtttcgggatttcttcctccctaaggtgctgtctcccctccaccaccaccactcagactacggggacttccagcctctctctgtgtccccagaatcctgcccccattagtgttctagactctgtcccactccctcaatcagtcaaaaaagacttccccaaccaccacatctgttccacctttccacttagacagtcctgagtcctgcatctcgccagactctttgtgtcaggagaatacaccccatgttcccaaacttcctgtcttaagaaacagaagccccctttccattaggccttttgccttagggacaca

SEQ ID NO: 14842 - DNA, 518 bp, Homo sapiens
  MAP TO AL121985.13; EXPRESSED IN BONE MARROW, SIGNAL = 2.4; EXPRESSED IN LUNG, SIGNAL = 2.8; EXPRESSED IN ADULT LIVER, SIGNAL = 1.6
caggaagccctacagtggtccatctggggccactggagtggggatttgctctttggctcccctgactcaccaagcacttgcagcttgatcttccattcttgctcattcccagtctttttcaacaccctcatgatgtaggtgctgttgtcctctttctggaccttagagatgtacagtgcgccactctgaggatcaagtctgaccctgcctttaaatttggattcaaagtacttagattttctggaatcccattctacaatcttctggtcgaaagtataaaaccaggttagttgtttgtagttctcaggcaggctctcagagatgttcagagtcacgttgctgccggagaccacggtcatatgtaccaagtgacctgccaatgagattcagagtgagacctgcgctagaggaggcagtgttgctgacaggcccagggtatagcctgggctggtggaacaggtgagaaggaagggatttctgcttaggagcagtgagtatggttttcactggaggtccag

SEQ ID NO: 14843 - DNA, 595 bp, Homo sapiens
  MAP TO AL137190.2; EXPRESSED IN ADULT LIVER, SIGNAL = 1.4; EXPRESSED IN PLACENTA, SIGNAL =   3; EXPRESSED IN LUNG, SIGNAL = 1.7
cacagtggctctgttaccccaggctgatctctcagctcaccctgacaggtggctcatgggagtaggaaggaccttggcatctgcaacaagcagacctgaggcactgatagctctcctggacaagaggctcatgagagtggtagggctaaggcctgagaccatggaatgtctggggtttcctctgctattttaactaaaatcttttctttctcaaaaaacctgcacatcctgttctcctgttttctctaagtgtgttttgaaatagccttgtgcacccactgcactgtctgcctcaggggcaggtctgcctcttctctggtttcaccttgcatgctgtctgacttccttctctgccttaaaacacacactccctgtgatttgtgcacccgcggctcttgctgtatttgtgcagcagcaaagacatgggctccctgcaaatgtctgtaggctcattgccaggacagacactaattgcaaccacactctgccagctccttgtaaattaccatacacttttcatccctgttacactcaagggccaagattttttggtggcttttgaaacagcttgtcacctgcatagggcctcactctc

SEQ ID NO: 14844 - DNA, 590 bp, Homo sapiens
  MAP TO AC009575.4; EXPRESSED IN ADULT LIVER, SIGNAL = 3.2
attctttcgttgagcaaaatgttaattataagttattttattatagaatgcattcattgttataaattatatttgttgaataaaagcataatctgattttttttcccttggcagcaacttgagttggtggaaccaagtggctggattcatgttcccttaactgacaatcataagaagccaactcgtacattcatgatacagattgctgttctagccaatcaccagaatggaagagacacccatatgagacaaattaaaatatacacaccagtagaagagagctccattggtaaatttcctagatgtacaactatagatttcatgatgtatcgttcaataaggtgactttaaaatgagacgaaaatcattaaacgtatctttgttttatcctgtatttaaataatatatcatgtacctttattgaacaaggcatccgttatatctaattttgtatatgtttaaaaatattttattgtaactttgacaaataaatttggggtcatattatctttattttctttaacatgtaataaagctcacatattttacattactaaaaatggatttgaagccaatcattttattttccc

SEQ ID NO: 14845 - DNA, 596 bp, Homo sapiens
  MAP TO AC024581.1; EXPRESSED IN ADULT LIVER, SIGNAL = 1.4
ctttcccactgagcatggagcagtcttagaagccttctcaagctgacattctggacagctgtgctatagcaactgatcagagtaggcagtagatgtgggacttacttgtcatcccggtccttagggttatgctcactgctgcctatattgatcctttcatctgtccttccagaacactcttcatcagcttttattaacatcttacatgaaaatccaagacattttttagctgggtccattttctcagaattctctccttctccttcctcccctctgttgctactaagccaacatgttcctatccgactgactctatccctgagcctgcaaaaggccagcagaggagaataaattaaatagctaaatggaagagaagagtgagatgggaaaaaatatccagaccatcttgtgtcttttgtcatgtgctttctaattttctgattttattggcatttttcatttgaggagtttggtctagtgacagtattcattgaaatagccaaatcccttagtctgaaggttagcagttatacatgtacttataaatatatataaaagaggtgctaataatatgttcagggtcacctaatgaggca

SEQ ID NO: 14846 - DNA, 565 bp, Homo sapiens
  MAP TO AL136418.1; EXPRESSED IN ADULT LIVER, SIGNAL =   5
tggagtgaccatattcacttggtaaaagaattctaggaagtagaataaaattgttagcactctgaatattctgtggtttaaggaattttgacttgtaggtagaagttaagattatccaaattactttttatgaggaaaaaatgtctaaattgctaattctagaattgtacttaatataattctgtatttaaaaccttgtgcaaatgcaattatcttaacgttgttatttgctaatttttctttatttttgtatagaactgcttatgaatgggtaaatccagctgcctatggacttgtagtagtaacgtcatcagaaggaagaaatctaccttatggccgcttagaagacatactaagtcgtgataattcagctttaaattgtcatagcaatgatgataagaatgcctggtttgccatagatctgggtctctgggtgataccatcagcatatacacttcgtcatgctcgtggttatggaaggtctgcactgagaaattgggttttccaggtatccaaagatggacagaactggacttctttgtatacccatgttgatgactgcagt

SEQ ID NO: 14847 - DNA, 560 bp, Homo sapiens
  MAP TO AL157789.1; EXPRESSED IN ADULT LIVER, SIGNAL = 2.2
taaatgccagacttcccctgccctagcctccacccagcctgcattcactccttttcctggctttagcccagctcttcccctcaattgtgacatatctaatgtagctcctgtcccaggctgttccctcctcacccccaggcctacctgaggttcatgtcccccttcatggccagactgaagacattggacaggttccctccaggtgagcagccacagaccaagatggccagtgcctcaatgttcttcagccggaagaccttgcccagcacaaaggccgtgaggggcatgatgccatactgtgccaccagggcgatggccagccctttaggcttccataagtgagccttgatcttgctgaactccatggtgcagcccagcgagagcatgatgaagaacaacatgaacaccaggatgacgctcagtgccaggtctgtggggcgcttgccaaagttgggtggcagggtgaagttgaatggggcagacgcgttgtgggcctccatcctcctgtgaggcagtggaagaccactccttgttctccggctgactccgtttcttgtgca

SEQ ID NO: 14848 - DNA, 543 bp, Homo sapiens
  MAP TO AL138734.2; EXPRESSED IN FETAL LIVER, SIGNAL = 1.5; EXPRESSED IN ADULT LIVER, SIGNAL = 1.8
tgtggtacagcctattgctcctagactacaaacctgtactgcatgttactgtactgaatactgtaggcaattgtgacatagggtaagtatttgtaaatatttgtgtttttaaacatagaaaaggtagagtaaaaatacggtattataatcttatggggtccatcattgactgaaacattgttatgtggtacatgagtataatctacccacacctgtaatattacaaaataacattactttaggtaattatttgctgttttttagtgtagactttttattctataacagctttagaattacaggaaaattatgaagatagaacagagagctcccattccctccacacccagtttcttctattgttaacattttacactagaatgatataattggtccaactactacaccagtatagatatattgttatcaactaatgtccatacttcattgaaatttccttagtttttacctgattactctttcttttccacagtcccatataggatgccacaacacatttaatcgtcacatctccgtaggctc

SEQ ID NO: 14849 - DNA, 541 bp, Homo sapiens
  MAP TO AC021993.2; EXPRESSED IN ADULT LIVER, SIGNAL = 2.2
aatctcagaccacgctcaggtctagccagggctggcagacacacatttactttctgggatctgtatgagctctaatttaagaaaaaaaaaaaaagttacattaaaaaagaaatacattgcatttcctcttaagagaagccaatcagaataacaaaaatttgatttcatcataggcctttaaagttatcacccaagaccataaaaatttaacactgggtaaagaaaaacagagactcacggaggatatgtagtcagcgttgagtttacaggagttctcaagtaaaaatgctgcttttgatgtgtaaaaggagatgtcctataaaatagttggcattcagagtcaaggaaaatagcaagggtttttgtaactataaataaggcttattttattttttagaaggctggttggtctcatacatcttgtggatacaacagactattttggcctttcctggccacctcccagccctgacttcagaagaagcttgaagacactgggaaatttctgagcaacgtactgagccatacaaatccaaccacc

SEQ ID NO: 14850 - DNA, 558 bp, Homo sapiens
  MAP TO AL136039.1; EXPRESSED IN PLACENTA, SIGNAL = 1.7; EXPRESSED IN BONE MARROW, SIGNAL = 1.5; EXPRESSED IN LUNG, SIGNAL = 2.3; EXPRESSED IN ADULT LIVER, SIGNAL = 1.4
gcaatcactggatgcaagagggcactactttgtgaaacatgttgtatctatagaaccagtcatgagactactgagtcactcttctacagtgttgggaaaatggcatttttgtatccactgtattttgaaaaatacatttatgcaaagtgcttaattttaaaatgaatgtcaaatccatttctacagtcaactcgttataaaactaactttgatggctaaagtaaaatattaataacttaagcctgtgtgttcagttccagttacaataataaagaatgtttcctagtagcttttctttttgaatacattaaacagtttactggtgtgaactcgtacattctaaacctaaggcaggactaaaatgaaccttactctgatcaagaataaaggctgcattgctttgtgccacttcatagccctgttcagccaggaggaggtactggatcactgcagcattgtaatcgccatctttatagctgttataggcagtcataagcctttcagaccaacggcctcgttcacatacattcttaaacaactgtgtgaggtggggaaaaa

SEQ ID NO: 14851 - DNA, 596 bp, Homo sapiens
  MAP TO AL117355.2; EXPRESSED IN ADULT LIVER, SIGNAL = 6.3
tgggaattggggaagaatatcctattaatctttttttcccctcgtcttgttttattggctatataactgctgtttcacataaagtactttaaagtacttatctctatatttaaattcatgttttataggcaaggcagcaaatttagaagaaatgtatcaacactattaatagagttaggattccaaattaaaaaaaaaactaaaagattgtatatcaacaaagccaatatctggaatagtgccttagatgcattcagaaatcgaaactttaatccttcatatgcaattgaagtagcatatgttattgaaaatgataattttggaagtgagcatcctggatcaaagcaagaatttctgagtctcttaatgcaacatcttgagaactcatcattgtttgaagggtccttgtcaaagaacttgtctctaaattctcaaggtaattattttatttattgttgtatataccaaatatcacatgtatagaaaaagagatagatagctggttagaattgatatttaatacctgtgctctaaatatactgttcactttgttaataaactactgatagaatcacaggaaagtgggaagggggagt

SEQ ID NO: 14852 - DNA, 505 bp, Homo sapiens
  MAP TO AC007345.2; EXPRESSED IN ADULT LIVER, SIGNAL = 1.5; EXPRESSED IN HELA, SIGNAL =   2
ataatgaaagccatcgggtgccattggcatggtcaacgctgtcttgacccaaattaatcagattaaaaggcattttaatgtagtgattccagctacttccaacatcaccgtgaagattgacatagcctttgtggacaggtctgatatcaagcagtatatcagtctgcgctctgcagcagccatcttcaaaatttacgttttctgtttggaagaactggtcaagtgccaggtcatataccctcctcagcagctattaaccctccaaaagctggagatgattggcttcattgaaaacaatgtgtcaaaattgagcttccttttgagtgacatttcaaagaatatcgagggcctccatggccagttcctgaggaaactcctttttctggtgcatacactgtgtgtccaggctacaccaggctttctctctggtcgtggacaagcaggttgaagagaaaaaagaagctttcagcttacatttggtcctgggcttcccattccatagctt

SEQ ID NO: 14853 - DNA, 541 bp, Homo sapiens
  MAP TO AL133475.14; EXPRESSED IN ADULT LIVER, SIGNAL = 1.8
gcaaaagcagtgaggtttccatagtattaaaattaacatgttagaaaagaaaaaaaaggtggaaaattattaagcttcaccttaggaaactggagaaagaagagcagtgtaaacccaaaggaagcagaagaaaagaaataataaaaatcagagcagaaatcagtgaaactgaaaactggaaaacaacagagaaagtcaatataaccaaaagctgcttctttgaaaacatcaataaaattgaaatctctatctaggctaagaaaaaaagaaagaagatgcaaattactaacatcagaaatgaaagaatggccatcactactactcccatgaatgttaaaagaatactatatgaatgctctgaacaaatttatgcccaccaatataataaagtaggtaaaatgggctaatttcctaaaatatacttattaccaaaattcatacaaggaagattagaaaatatgaatagaattatatctattaaagaaactgaatccataattcattaacttctaaaatgtaatgcaccttgtccagatggttt

SEQ ID NO: 14854 - DNA, 547 bp, Homo sapiens
  MAP TO AL137160.2; EXPRESSED IN PLACENTA, SIGNAL = 1.4; EXPRESSED IN BONE MARROW, SIGNAL = 1.5; EXPRESSED IN ADULT LIVER, SIGNAL = 1.9; EXPRESSED IN FETAL LIVER, SIGNAL = 1.6
ctgatgccctaaaatgctgggtaatattatagcaatgaattaggaaaaattatttttgactttagaaaatgtgttttaaaattaaaaaaaaaagttaaaggaaagtattgagttaagttaaattctaaatttctaggtacagagtgaagtcatatatgcagaaaaagcatttcttgctctaaacaatagatagtaccctttataagaatctgggaatagaaaaacttaggcataaaagctgtggattataaagtccttacctttgaataaatgcaaccatcagttccaaacacccacttctgagagtcatctccactatgtctgtaacgaaaatgtaatttagagattgacatcttctctccacagaaacacttgtaggttttaaataaaatgatcattttccagatagcctggcaggaggactgcccacactctaccaaagattctgccaccatcacttttatctcagcagctaaagctttccctaagacaaccaatttccctgctacaatgctctggtaccctaagcggggtaagtatgtgcata

SEQ ID NO: 14855 - DNA, 537 bp, Homo sapiens
  MAP TO AC025488.1; EXPRESSED IN ADULT LIVER, SIGNAL = 5.9; EXPRESSED IN FETAL LIVER, SIGNAL = 3.8
agtttctcccctgaccttccatttctactttaaaaatatttgtcaattagaaaagtccaatttaaaagccaaactatctatgatgactcaaattaaaatatacaaattctctgtcaattctttgacatttactttgaattatttgacactttaaaagccttacatagacttgatatctacaggcaaattaacttgctttctgtgttcgtatctttatttttatccttcagatataaagagagtgttatgaaattatcaagaattcaacatgatcaaccagtgaagcccctggatcgagcagtcttctggattgaatttgtcatgcgccacaaaggagccaaacaccttcgagttgcagcccgtgacctcacctggttccagtaccactctttggatgtgattgggtttctgctggcctgtgtggcaactgtgacatttatcatcacaaagtgttgtctgttttgtttctggaagtttactagaaaagtgaagaaggaaaaaagggattagttatgtccgacatttgaagctggaaaa

SEQ ID NO: 14856 - DNA, 564 bp, Homo sapiens
  MAP TO AC002523.1; EXPRESSED IN ADULT LIVER, SIGNAL = 5.6; EXPRESSED IN PLACENTA, SIGNAL = 1.3; EXPRESSED IN FETAL LIVER, SIGNAL = 2.4
tgaggaattatctgccctgggaacttgccaacaagaattatttaaaaaaaaaaaaaaaaagatttgcattagctgaagctcaaagaggagagccaatgaggaagaaggaagaatatattcccactgtttgcttctcttaccctccagagattgcagaatggtttctgacatctctcacatcccagagagccccaacgtcctgatgggtgaggtgcagattgactccttttcttttgactatagctgcagctgccctaagatgacgtaaggtttcctggccagggggcttgccaaggacaacttccttttctggtccctgctttccaagcactcctggaagacctaagccctgctccccacgtagcatcagactcttgatggggccaagttttatttctctcagccttcatctatagtccctgcctacttccaccacttccccttgagctgtgcatattctcctgagctttttccttgcaatcgaccctgcccttgttggtcatgggggaatctcttatctacaggcagatcctttatcttttcaggaaacccctagcctgtctc

SEQ ID NO: 14857 - DNA, 580 bp, Homo sapiens
  MAP TO AL157791.1; EXPRESSED IN ADULT LIVER, SIGNAL = 5.8; EXPRESSED IN FETAL LIVER, SIGNAL = 7.1
cactgtggcatgtgttttccttatagaattcagcaactgtttgaagaaatcctgagtaatagtaggcaactgaaatggctgtcctgtgggtttatgctggaaatagtaaccccaacatcactgtcatctctctctaatgctgttgccaacaccatggagcacctcagtttactggacaataatattcctggtaacagcactcttattactgcagttgaactggagcgatttgtgaatctgcactcacttgccttggatttttgtgactttacagctgagatggcaagagtcttaactgatagcaaccatgtgcctttgcaacgactgtctcttctggttcacaatgtttctgtaatgcacaagtctctggacaacatgccaaatgatgagcattggaaagccctgtcacgaaagagcaccagctttcgggtctatataatggcttttgatatcaagagtgaagatatgttaaagattctgaaacccagtataccactagagaggattcattttgatagctatatcacttgtgtttcaggggctattgttgatcttatatccaggcaatatgacaagttcc

SEQ ID NO: 14858 - DNA, 595 bp, Homo sapiens
  MAP TO AL133485.1; EXPRESSED IN PLACENTA, SIGNAL = 1.7; EXPRESSED IN ADULT LIVER, SIGNAL =   3
tttcacatggggtaacctgcctagcacagtgagcttacaatagctgggtaagtgtcagctcttgtcagtttttctttttcacaacacaacaagagctcctcagtgacagaatcttcatgaatgacttcttaggaaaaaagaaaatggagcctaacaagctgcagagagccacactacagctgttcctagcatgtggtcaactacacttttaccatcattatcattcctgaattatactgcgaggcttacctctccatccacattctgtaaaccatactgctcacagatggagaccagcttcttccggttcaggtgaccatcacgggtgatccccaaatcttcacaaacttcttgcagtttctcttctatccagtcttggggaggggaagatccactctgtgaagcattcaagtcatctgggttccaaaaccttaactggcctgagagagaagcatatgttgcacggtttccaaaggaattgcaaagagagagttcctattcttaaagaaaactgtgctttttgaaaataaatactgtaagaaaaaggcaataaatgtcaattccattttgatttggtcctgaagctcccatgaaa

SEQ ID NO: 14859 - DNA, 589 bp, Homo sapiens
  MAP TO AC025488.1; EXPRESSED IN ADULT LIVER, SIGNAL =  10; EXPRESSED IN FETAL LIVER, SIGNAL =   4
aaaaggatgaaactcatgctcactattgacaagagaagctgtctacaaataccacctagtgaaaaacattgttctactcacaaaggatcattaattactgtcttcagtgcattcagcaggtctgtactcgacattgtgtggaagtccagtctaacagctgctcccttggccttcatgtgagcaatgttatcaggttgatcccaaaacaatggaatgcccaccatagggatcccatgatagattgcctcatagatgccacttgctccaccatgagttataaaagctctggtttttggatgacctaggattggatgaattttagcaaaattattcataggaataaaatgagatgcacaatgaaaggctctgaaagtgacagtgttttctagataacacattgaactaatttgctattacttttcagacttcagatgaaaaagcacgtacttgtttaggagatgtaactgaaagctatatggtgtgtgtgacttcagactgcaaaacttaatacaagattttcagttgcactaatgaaaagtgcattctagattttttaaatgtgcacaaaagaggacagcaaagagatggg

SEQ ID NO: 14860 - DNA, 540 bp, Homo sapiens
  MAP TO AC023128.2; EXPRESSED IN ADULT LIVER, SIGNAL = 1.5; EXPRESSED IN FETAL LIVER, SIGNAL = 1.6
tgaaatgcaggacaccactctaggcattgagtgacaagataaggttcctgtcttcttggtgtctcaaagacactgaaagttaaatttgtccaaaaccaaactcataatgcccatcgcccaaatgcagttctatcccgtaactgagaatggcaccaccaagaatataggccagggacctggagtcatctttgacactgctcctttccttaccacccaaatcaatgccatcaagtcctgttgacttactctcctaaacatttcttgactgtgttcccctttatttctattaccaacacctgaacctcagcaattactgtctctctccagaccatgacaataacactcccagcactaactgtcatgtcttcaggcaggtcgtctatgggtaacaaatgtgatcctctctgaaaggaaactttttaaggattcctcatcattcaggccttaatgcaaatatcattcccttgtggaagaaatttatgactattcataggctcttacaatatcatgtactattcccgcttgtctcttggctcagct

SEQ ID NO: 14861 - DNA, 532 bp, Homo sapiens
  MAP TO AL136338.1; EXPRESSED IN HELA, SIGNAL = 4.3; EXPRESSED IN ADULT LIVER, SIGNAL = 8.3
tgtcgagaaagaatggtcccttaaattcttaaagatacctcacaaatgcatcttgccattcttcctcatcccaaatcaacatcaaagcagcacatcatccaagatacagttactaaattcatttagctatattaattaaaataaggagagatgttcctcctctgcagacactgataatacccacatggctaaggcagcacttctccccaagtcctcctctctaacaaggtgtgagctgtaggcctccacttaccctggcaaattccatgggtttaggaagaaggcacatgaccatgacatcgaagcgaacatcacatacggtcttcagccatttggtgacaaactgaggcttcagcttttccaccagacttcccacttcatcatccatcatatacgcagtggagtgaaaccactgaaacaccatggccaccagccgggccaagctttctgtaggcgtgttctcactgggtgtgcagaggctcacctagaagtaggtagattagaaccttgttcggcttccatccatctttac

SEQ ID NO: 14862 - DNA, 594 bp, Homo sapiens
  MAP TO AC020714.2; EXPRESSED IN ADULT LIVER, SIGNAL = 1.9; EXPRESSED IN BONE MARROW, SIGNAL = 1.7
attctcaccactcagggcagtcagttaagtggtaaagatagtcttgaacttcgtatctgttggatgtcagaacctgtaacaacctttaagaggaagtgcattacatctagatgttggtgtatttttggtacagctaagaataattgaaaaattatagtaatatatatttttctctattttagcccttgtatttgaaaaacactttccagcgaccattgattctttccaggatgcagtgaagtgtttgtctgaatttgcgtgcaatgcagctttcccagacacaagtatggaagcaattcgacttattcgccattgtgcaaaatatgtgtctgatagacctcaggtatagcgtcatttagtaaacaaaattttgcagagtattctttccaatttgaaatcttaagtttgtttgggaattgagggtatatgaagcatttatttttcagtaatttgaaaaataatctgagcagcctgattccaagttaggatggttagtgattataactaaccattattgaaagtgtcaggtatttttctgagtgtttttcattaacttgtattaacttgtttaatcttctaatggctttatggggt

SEQ ID NO: 14863 - DNA, 567 bp, Homo sapiens
  MAP TO AL158153.2; EXPRESSED IN ADULT LIVER, SIGNAL = 1.6; EXPRESSED IN LUNG, SIGNAL = 6.7
ttgttggtctcatttttggaagttattcattctccttagataatatgcattcttcaaaattataaaaccctttatcagtacttttagtcagatcatcttgacttgacactctgaaagaacattatgaaaggagaaaatgtaatttgtgtcctttttaacaatacctgcttttgcattcacctcaaggctactacatgtacattgaggcctcccatatggtgtatggacaaaaagcacgcctcttgtccaggcctctgcgaggagtctctggaaaacactgcttgacctttttctaccacatgtatggagggggcactggcctgctgagtgtttatctgaaaaaggaagaagacagtgaagagtccctcttatggaggagaagaggtgaacagagcatttcctggctacgagcactgattgaatacagctgtgagaggcaacaccaggtaagccaacagagataagaactaagcaatggaaaacgtgtaggagcttctgatgttctttcttattcttgctaccaaagagaatattttgttctttttcagggtcatagacaaaggcagg

SEQ ID NO: 14864 - DNA, 534 bp, Homo sapiens
  MAP TO AL133445.2; EXPRESSED IN ADULT LIVER, SIGNAL = 1.5
gaaaggcaaagaaagtccccttcagcaggtggctctggaatctcgagggacggggtcaaaatatttcccactcaatctcaccaggatccttgggaagggagggactggctgggggtaaggatgcagtcggaaccccacccttcctggccctgccgccacagggttctttgaggagtgcatccggaatgccgagctggaggccaagatgcctgtgatcatgaagaactccgtgtacatccataaggcagccactcgccgcatcaagagctgccgcttccaccgacgccggtccagcacctcctggaatgacagtgagtgtggctgtctgcgtgccctggtgggatggtgacaaggcaggaagagggcaacatggggagccagaagggttggcccagctctgaggctggagagtgtggccttgaacctggccccaccatccttgggcaaacgggtgaattctcagggccctgggtttctcaaaggatatggaagcccgtgtgtgtgggaaggggctggaagaagcttggcacacat

SEQ ID NO: 14865 - DNA, 574 bp, Homo sapiens
  MAP TO AC010322.4; EXPRESSED IN ADULT LIVER, SIGNAL =   2; EXPRESSED IN BONE MARROW, SIGNAL = 3.3; EXPRESSED IN LUNG, SIGNAL = 1.8
aagggcagagctaaagagggctggagggaaactggcatgaggggacatcacccatgaagttggctaggcgtgtgtctaaggagtggtgggcaggggcttcagatctgaccgatgcccactgacttcctgtccccacccacaccgcaggccatcaaccgtgctatgcagaaaccccaggaagagtacagcatcggtgtgctggacatttacggcttcgagatcttccaggtacggccccctgcctccagcccacatcctgtcctcccctggggcagcccagggtggccacaagaacttccagcaccaggacattgagggaaggacccttttcctccttctgcagaaaaatggcttcgagcagttttgcatcaacttcgtcaatgagaagctgcagcaaatctttatcgaacttaccctgaaggccgagcaggtgggcggccaagcagtcagggatgggggatcctggggtgggggtggggtggaaggaccatgaggatcccttagcaactaggggacaccccagccctccccaccgcgttcccacctctctgtgccaacctacccaggctccata

SEQ ID NO: 14866 - DNA, 519 bp, Homo sapiens
  MAP TO AC017089.2; EXPRESSED IN FETAL LIVER, SIGNAL = 1.8; EXPRESSED IN ADULT LIVER, SIGNAL = 3.6
actgggggatctttttcacccctgttcagcttgggctctccaaagcctgcagcctggaatggataagttgctcaaacaataaagataatggctcacccattcccctgggagctctgtaccaggaagatgcaacactgctactggtggctggctggaattccaagccagtgggtcttatcttgtgaggtgccatggaagtgggtaccacagaccgttgctgcactcaaccccttgaattcagcctctttcctagggttgtgtaaagaagtctaacttccctctttgctggtgttgcagttccttttcctggaagtccagggccagaatatctaaagctctggagttttcatgtgtgcctgagcagatgctctgctgatactccatgtagttctgtgtgtcagactgaaggtcctggagatgtttgttcacgagggaacctcctgactcaagggttgcaaatatccatgggataagagtagtttcctagattgcacattcactcatcacttcctgggatgg

SEQ ID NO: 14867 - DNA, 572 bp, Homo sapiens
  MAP TO AC018686.3; EXPRESSED IN ADULT LIVER, SIGNAL = 1.4
tacgtgccatttcccttctctggaatgcccttcctattgagtttctaattatcctttctgactaagctccagctagatgttctttgggaaggcttctcttaacccttcatacatgtcctataagcatgttttgaatgagtgaataaatggatcagtctatgacatgtggaccccgggaactttgtgtttgtaggcagtcatgccacctgccacacccaagcttaacatcatctttaccctattggttaaagctctctgaagttacctgtctggcccttatctccaccgttaggcttcagaaaattgaaaaggctacttctccagctccttcctctcagctctgaaaccatggggcccaagagagctgtaccagctgtaagatgactggttagatcagcaactgtaagggaaagaaacatctgttggtactctctgtcacgaatcattctcacggtttccatcctggctgctgacacctgcagctgagcccagagttctgtgatctgaggttggtgattggtaaaatgccacttcaagtctatgcctgtcagaccactcaatgtctgctgcat

SEQ ID NO: 14868 - DNA, 561 bp, Homo sapiens
  MAP TO AC022205.2; EXPRESSED IN ADULT LIVER, SIGNAL = 1.7
aaacacagcgtaacaggatagcttcttgtgtttattttatgctaagatagtgccaattttctattagatactttttctaagatatagttgacacatatgaacaccaaagttatgtattctaactggtcactttaataaaaataccttttctttcttcttcctctcacattcttcagcattttttttctttaaccattcttgatatttttcttttgctttttcttgcaagtattctttctccagttcctttgctgctttttcctccatttctttattaattttttgttctctttcttttcttttcttaaataaaaatagataaagtttaattgtaataccagtaattatactcatctaaggaaagactgctgcattcagcaattttctaaacttcaattatttttaaaaatagacatgatatcatggcagttggcacaacatggtttatgaaaatatataacatacctgcaattaacagtacaatgtcagtctacctgctgggctataagtttcatgaggtcagtgacaaagatcttgctcaccaatgtccactcagagcct

SEQ ID NO: 14869 - DNA, 589 bp, Homo sapiens
  MAP TO AC009499.2; EXPRESSED IN ADULT LIVER, SIGNAL = 1.4
gcctaacatttcttggcagccactcagctgcaaccttcagtagtattccctacatactctctttctgcttgggtctccctttttcagacagccttttgggcaggacctaacataactactatccttagtatctactcctcctatggaaacttacccactcttgtccagggtattttctgaatatagcttatgggctcaggaatcatcccttccttcttgcctgcagaaagaggaagctccagccatttcctgacttcagatgtcctcaggccagagtccagcaccagttgatctccctgcaaactaaaggggtcaatctccagttctcccacaaaaaaatgtatcactttcccttcttcagacattcccctgcatttcagggcctcttccatttgtcatttctcttccatgtgtcccttccccaaactgtccacttcagggggatataaacccagtcagttttattgcaaaaaaaaaaaaaaaatccttattgcacttcagcaattcagcaaacatctggcaatgtttgtatgccacattccacttctagaaaataccccttaatctttccaagtgttctcccacacct

SEQ ID NO: 14870 - DNA, 502 bp, Homo sapiens
  MAP TO AC008044.4; EXPRESSED IN ADULT LIVER, SIGNAL = 1.8
ctaccctttagcacaacctgcagagctctccagcacatggtggactgcagtacaaccaggatcacaagcccggtttctcagcccagcttcttggcatttgaaatcaatgtgagaaaagagcagaggaaagagctgacacgtttccccttccttgtagcaccaaccggcgtctcacagctgaagcccttggtaagacaatggagagggtgccgcaaaagtcaccactggccccactgccctgtagggagagcttagggagaggtgatgaagcatatcagagtgtgccagaccccaggaccttctctggcctcttcctacttctcacaagctctcccctcacgctagtaagaacattcagtaaaccgctattgttttaaaccacttgcaaacctgatacactataaattaggctatgggtttctttaacagcttatgtgtcaccacaatccatttcttacttatgtctgtaacattattttagggagctagtttttgtcaacca

SEQ ID NO: 14871 - DNA, 570 bp, Homo sapiens
  MAP TO AL121933.9; EXPRESSED IN ADULT LIVER, SIGNAL = 1.4
gcttccacaggatgaagaccccagccctgcatgttcttcaaattattctcagacacaagctgctttttccaaatctcccagccaaggtaatgatggaaattttacaaatggcatggagtagaatcagacagcttttaaactccagccctcgctcttcacagtaaattgcatttcatcttgctgcaatttttcgtcttttctttggtcatttcttgtttgtgtgggagtgtgcacagcggggctggggacgggggaggtgaagtgtttttcccttctttttaccttccccctctttcacctttaatcttggttttccttttttggaatctacatcttcctccaagggctgatctttgtcttcttgaatttctgctgtttacttatgatttcttactgaaaatattcatgtcacgtcaagtttcttttagacatcaacaagccagagctggttttataatgcagaccacgtgtcccctgagtcctggactaaaagtcccaaatactctttggaaactggcttaaaccaggtcgtcatatctgaaagacttctccccagctctttctacctcc

SEQ ID NO: 14872 - DNA, 588 bp, Homo sapiens
  MAP TO AL121981.8; EXPRESSED IN ADULT LIVER, SIGNAL = 1.4; EXPRESSED IN FETAL LIVER, SIGNAL = 1.7
agcatttctagcatggcagcgtttctgattattgttcatacacttatatacatttttatgtactttaatcagcttggttacagtattttgtgcttttccacataatgtctaagagagatttatttttgtgtttgtaagttcttgtgttcttagctagctgctttgcaaacatgtccgttgaggtggagttaatattgttagaggccaggcagtgaagtgtcatttttgtcaggctcgtaatcactgtaggaaaattaactcagagcataaaaggcccaacaagagtgatttaggattattgttatatatggtatattttcttatgttagcaataaagcactctgcttaaaccgcagctgagggcatttcgtgttctttagcatggaggtttcccagctgtcaagtaacttctgagagtaactttagtaccagaatttcttgtaataggatcatgtctttctttaagttcaggtgtttcattaaggcaagctggagataggaataaaaggattatgaaagagaaggagcttgaaagatgcttttacccatacctgtttctgctttgtcagcctctttttgctgccttta

SEQ ID NO: 14873 - DNA, 590 bp, Homo sapiens
  MAP TO AL157883.2; EXPRESSED IN ADULT LIVER, SIGNAL = 1.4
gcataaaagaggggaacaggagatcacatgcaaatatatatgtatatacacacactcacatacacatatatatatacacacacacacatatatatttacctttttagtaattatggtattggtattattatgttgagactgtcctatgtgtgtaaataaactaaattataggatactcaaattttattatcctctgtcatattaagaacccaaattctcagtgttaaagaaagaagatgcaagtttaaaacaaaagatgttaagtaaaatccctgcagtcgtgaatttgagttggaagtgttagtataaacccaagagataatcctgtcgctgtctactgaaaaggattagaaaaaaaggattaatttcatagcctgggctttcctgaagtccagatggtggtgttggaaatactacttcccatggaaagaaaagagaacttcttgagcaaaaatctgattccaggccaggtgcaggaaatgtccaagatgagtgtggagcatcttatcatactagagagcaaggattctaccaaagactactgtggtcacgacaaaaggattgagaatccaacctgaaaaagctcccat

SEQ ID NO: 14874 - DNA, 521 bp, Homo sapiens
  MAP TO AC016910.2; EXPRESSED IN ADULT LIVER, SIGNAL = 1.5
aaaagtaaccgtcacacccggccatgccaattctacatgacctcagctttactcaaagactgatgcctcctgagggcctgggtctctgacgtgtcctggagacagagtcacttgacagagagacagagacatgagcacagtgtatgtgatccccaagcctgtttccaaggcatatgaatgtgaggcatcagggtaggcaatggcaaggagcagcgttcctacaagagcagggacggagaacctcacgaggatagtgacaatcaagaaaggacaactgcaaaccctggctgtgaggagaccgggggagaaaggggtgatccctttcctcactcccctaagggtcacggccaacactcctatgataaagacaggttcacgagagaaaagcatagcaaatttattttatcaaagttttacatgatgcaggagccttcagaatgaagacccaagacccagggaaaagtgtcaatttttaatcttagattccatgaagagtggacagccatgttgaaatgcaattg

SEQ ID NO: 14875 - DNA, 527 bp, Homo sapiens
  MAP TO AL138849.5; EXPRESSED IN ADULT LIVER, SIGNAL = 1.7
ttcccctcaatttcgttgaccaaattttggttgctcctgaattaatatcagcttaaatgttaccttcaattgcaatgcacttggaagtccactgcttctcaaaagttgtcaacagctttttctgccgaatgctaattacatattccttgaaatcaaactcttcagtatagaaacgaagcagtcccagccaaagctcccctaatgattctgtgttctttccaagtgaaggtaaacgctttttctacatataaaaaaaaaaagaaaagaacaatgtctatacagtactatccaaaacatggacagcaaatttaagtaaaattattaaattatacagatgctaacatatatcagtgagcattctagaacataaagactattttaaaattaccagttcttctgttttatcaaagaagaaagcattccatccatcaaccattctctgtggaatctgttttccatcaaagatctgcataaaaaaattaattgtattattagatttcaagtgatccaacccaaaggtccaaata

SEQ ID NO: 14876 - DNA, 529 bp, Homo sapiens
  MAP TO AL138806.5; EXPRESSED IN ADULT LIVER, SIGNAL = 1.6
atgtggccttcttctgttgctttattatgtgtctagaataggggtgatagtcccatggctctccatacaaatcttgtctcatcaggaatttatgtccattttataagaaacattgatatcctggaagggccagaagggcagacagatggctggttagatgttcaaatttctgagctcattcgtcttggtaaactctttgacgtgctgcaagaggcaccagtgcatgggggcataagcaggaactctgagggccagatggcctggaattaagtcccggttctacctacttatcagttgtgcaacttgacaagttatttaacctttctgagttcctgatctttcttaactgtaaagtaaaaaaataataataatacctttctcataggtaatgatgattgaatgagttatcacctataaagagcatccctagaacaaaataagtatgttttaaataaatacaaataaaaattccaatcctcactgtacaaatttcagagtaaaccattaccttcaataaatgacaagtgcc

SEQ ID NO: 14877 - DNA, 523 bp, Homo sapiens
  MAP TO AC011458.2; EXPRESSED IN ADULT LIVER, SIGNAL = 1.4
ttggaaactgctatggggagctgggtagcagaatcatcaatacacttcctttctataattctgacccaggagaaaacctccacttttcctgattttggtagcacataagtcttaagacatgtcaattagtagaaaagcattaataaaccaagattgataatgcgtttgtcatttttcatagaagtctggtggagagactcttggacgtaaagaagggaatgaacacagagaaactttcagccagattcctattgtcacctgaacaagaaaagtcaaactggagtgaaaccatgcaaatgagcgtgtgtgggaaagtcttcctccgtcattcattcctggacaggcacagagagctcatgctggacacaaacgatctgagtgtggtggggaatggagaagacgccccgtaaacagaaacaacatgggaaagcctccatttcccccagagtggtgcacggcgcacagtaacaccaactcgaaagagaccttatgaatcaaggtgtgcgggaaagcctttaattct

SEQ ID NO: 14878 - DNA, 558 bp, Homo sapiens
  MAP TO AL109914.16; EXPRESSED IN ADULT LIVER, SIGNAL = 1.5
gtgctggtctgcctctctgggtccagcctgcagctggcacagagccacagctgccacagagtcaatgaaaagggtgtcaaggctgcaggatggagcctgtgtttgtttaagaaggagcctgatgacatcacgtcggcctcctgctccagaaggctcaggagctgtgaaacggcacagcctcctagcccagttgttgcagacctccggcagggatttctgtcttcaggtcaggtttcaaggtgaaccaggttggaacattcaaggagagacttgggacattatagatttttatactgcccgaattggctgattagccccatacgtggtatttgattaatgtctgagagctctaattagcaatgtctaataggctccacatacaccgggatatcgattcttgcctccacaaaactaatctaattgtgctccttatcattagcaagtggttggtgtacggagatgatgaacccacctggatactggaaaagccgccccgttaaggcagctttggaaaagggtagagcggtttctggaggtaggtccagaagtgaccttcca

SEQ ID NO: 14879 - DNA, 560 bp, Homo sapiens
  MAP TO AC011366.3; EXPRESSED IN ADULT LIVER, SIGNAL = 2.5
gcacaatacctatttcatagatgcattcaattaatgtttgaataaattatgcattaattaataaatgattcatcaaagaattatgttttctaaacatttgcatataatattacccatttaggctagaaaaataattatttagatgtctcttgacttctagaatacatcccatgagaaaaaacaaattataactggtagcaacatgaaagaactgtcaataatgcataaaattagggatttaaattttgaaaggtaagtcaaagttttgttttgtcactgtgcaaaactcaaaatcttttcatctacagggaaagaaaccatgagcactttgatgtaactgaatatgacacttcaatcatgccatctccaactagatgtattgttgaaaaaggaaaaaatcatttgaatttcctataaaatcctgctttaaaaaataatttgtccattcacgtctttattcaaaaaatgttttgaatgttagccccagggattgcaaggaaacaagccaaatggagcttatagtctcatagataagagatacaaaacgaaaacagcaagca

SEQ ID NO: 14880 - DNA, 586 bp, Homo sapiens
  MAP TO AC010436.4; EXPRESSED IN ADULT LIVER, SIGNAL =  46
aaggtgggtaggggtgattccataagccaacagcccaggcaggggcggcagatttctggcagcttcagcactgatcctgaagatgcagacctgacacaacagcatctccagcatggcaagcttgtgagctccagtgtgggagtgcatgcagcttctgacctctgggtattgttccttcttcctttattacttccagacctcctccattttcccttttgcacttccagctcttccaacacctatgaaacttcccggtattgaaatgcacagtgttgttgttgttgttgttgttgttgttgttgttgttgttgttgttgctgctgctgctgttgttgtttctgaccaggcctgactggcatgggggtggaaaattaggacttcagttttggacatggtaattttgagaagtctgttagaaatccaaaatttaatatcaggtgagcagttggatgcatgagtctggaggatgtgaggttatcctcttttcttgggaaagaagtctgggctggaaatacactttggttgcatatagatggtatttaaagtcatgaggttaggtggagtgaccaagggagttagtgtgcgt

SEQ ID NO: 14881 - DNA, 557 bp, Homo sapiens
  MAP TO AC010447.2; EXPRESSED IN ADULT LIVER, SIGNAL = 1.4
ttggccctgatagtccaaaccatttgaaataccttcaggatccattcatttcacttccataacttcacagggtctgctgctctgcttttctcattgtccctgagggattcttttctggcttgtgtttctcttcccaccacctaaacatgaaaatcttccaagatgcctttttcaaccacttagcatgcctccaagtatctttcctttgctaaatttccacataatgactatcacttcagcattgatgactttcccatctatacctttagctctaatcatttttgtaaacttcaggtctacatttttagctgtctattggaaaagcccaacattttgaagtcctattggcttctcaaaaagacaaataaaatgtcaaaaactaaactgaatttaaaagttccactatcattagaaaactttataggaagaactagtgtagttatgttaaaggtgccaacgtacatgagtttcagatctcatgagtatgcacagtaaaataattaaaaggaagagatgagcaaggttgttgtgagatgactggagagatgcccactagc

SEQ ID NO: 14882 - DNA, 599 bp, Homo sapiens
  MAP TO AC020741.2; EXPRESSED IN ADULT LIVER, SIGNAL = 1.8
tcatttacttttgtggtttagggttatatttcaccatgtctttattagcaacccaaccatgagccttacagagtttgaaatgtacactaatatagctatgactctaacctacatattacactctgtcattcaccatggtagtatctcttggaaagagaatacttaccctcctgaacatacccgcctaatcctttgtacaaagtatccttcctagtaggaaatcctttcccctactgctcaggctttccaaatctcaccactttctaatatcactctttccataattttaccaaacagttctctatctctatataaaatgataatcacatttcataatatttcctttccattctctactaaaacatactcaaaatcttgttcctttttatttccaagatttaaacaaacacagtattgctgtcttccctaattgaagattttaaaaatttacttattttattttattatattctagctcaatctcaatatgctactttggtttgtttatttataatttaaatcatagatctataaaataaggcaaatgctcagtaggttataaaaatgcctatggacgaagcctccacaagatggctaag

SEQ ID NO: 14883 - DNA, 597 bp, Homo sapiens
  MAP TO AC010322.4; EXPRESSED IN ADULT LIVER, SIGNAL = 1.4
atacataaggcaggtccccctaccaagggattctagtctggggcctgaatctcttgaggggtccccacccacttctgcacctcagcgagcttccacagtagccccacacacccttgcccccctatcccttccatccctgacccctgcaacgccttttgtgcttgtatttgaagcccctggtgccctccccacccccaaagctctagctccctccactcctccaccccctccctcccctaatctctgcactgacgagctgtggggaggcaaggcagaccaaactgagccgctgctggctcccgctcgccccgcagagccccccaggcatcatgagcgtcttggacgacgtgtgcgccaccatgcacgccacgggcgggggagcagaccagacactgctgcagaagctgcaggcggctgtggggacccacgagcatttcaacagctggagcgccggcttcgtcatccaccactacgctggcaaggtgcgccccctgcccctaccctaccctgtgcctcctcgcagacccccagggctccaggctgtagcccccaccctccagcacccaggctggaaagagcctgctaggacccttatcc

SEQ ID NO: 14884 - DNA, 579 bp, Homo sapiens
  MAP TO AC008543.4; EXPRESSED IN ADULT LIVER, SIGNAL = 1.7
caagaactgcagacccactgtagaaatagaaatgaggagtgattcaggcaataagactcactttcttaacttaccaacaagaggcgtgttcctattcaactgttactttacaaaacatgttcatttctaggatcagaattgtgtgggataaaatgagtgtaaagagagaataagagtgggtttaccatgttcttgaataaatgcttggaaaccacagcatcatgtgaaggttatgaagtgaatttacattcccagtgccttcagttttaatattcctcctctgcacatgtgaaatatttcaggactcagtggcatttgaggatgtggctataaacttcacctgtgaggagtgggctttgctgggtccatcacagaagagtctctacagagatgtgatgcaggaaaccatcagaaacctggactgtataggtaaggatgtcatcatgtcttcacttagtcaattagagacatttgtttcttggtcatcaatgctgttcaattatttgaaatatggaagggtatataattggcccttgaaccagccacccaagcagtcatacatcttctcccgcacaactt

SEQ ID NO: 14885 - DNA, 589 bp, Homo sapiens
  MAP TO Z97055.1; EXPRESSED IN ADULT LIVER, SIGNAL = 1.8
ggaatcatactccctgggttcaaatcctgacataccacttaaaaccttgtaacttttaggcaaatagcttaatcaatctgtgtcccaatttccccatatagaaaacagggataaaaacagagcctaattcatagagttattgtgaggattaaatgtcatatgagtcctttgaactaagcttggtacatattaaatacatataagtgatatctacagttagtgttcttatttgctcatgaatacttacttgaagaagatctgaacttatttggggaaccattccttgaatatactctacacggtgaagaatggggtcttgaatgtgtaaattttcgtgtgtgaggatgcgacctaagccagtctggtataatcgccattttgcacattaaatccctgtgatataaaagaaaacagattacgttaccttaaagagcatacattccaaatgtggccaatttcctatctattccttttctgaagggacagctgcagagtgtaaaaatgatgctagtcataatctgctttgctgatgtttcagactattcttaaagtgaacacaaaaatcatcattttggactccttgttttca

SEQ ID NO: 14886 - DNA, 587 bp, Homo sapiens
  MAP TO AC007564.9; EXPRESSED IN FETAL LIVER, SIGNAL = 1.3; EXPRESSED IN ADULT LIVER, SIGNAL = 1.8; EXPRESSED IN HELA, SIGNAL = 1.7; EXPRESSED IN PLACENTA, SIGNAL = 1.9; EXPRESSED IN LUNG, SIGNAL = 1.2; EXPRESSED IN BONE MARROW, SIGNAL = 2.5
ttgttgaatgaagcaatagtttgttcattcttattgatacgtagttttcattgtatgaatgtaatacaatttattcatttttccagttgatggccagttgagttacttccaattttttggtgttatgaataaaaatatcttttgatgcatatatgtcacatttctattaggcatatacaccaggtacatgtatattcctctttaagctgatatctaaaaataattggatatctaaaaataatgtacctcaacaattttctaatttatattttccaccagctccagttattccacatcttcacaaactctgacaatttctgtttaaaacagtggctgttccggtatgttttgcatgtgtcatataccaccatactatgtttttaatgtcacatccctgaaaactagtaacactgaacttaagtataggactctgttgaagtacaggtctttggtccaatttatattgaggtgtctttttctcattcatatatacaggaattcttaatataatctagaaacaggtcctttgttggggtatatataaaaatttctcccactctgtggcttgccattttgccctctttatg

SEQ ID NO: 14887 - DNA, 599 bp, Homo sapiens
  MAP TO AP000359.1; EXPRESSED IN ADULT LIVER, SIGNAL = 2.1; EXPRESSED IN FETAL LIVER, SIGNAL = 1.8; EXPRESSED IN PLACENTA, SIGNAL = 1.4
tttgtgtatccattgcatatttttgaagttaccataaggtttgcaaatactgtcttataaccccttcttttaaggtgccgacaacactgcttgcaaacaaacaagcaaaaagaaaatgaataaactctattttaaatttgtcgtttgctttttaaaacatttttcttctgtttttttaaattttatttcaataggtttttgtggaacaggtagttacgtggataagttctagtggtgatatttgtacttttggtgcatccatcacctgagcagtgtacactgtactgaacatgtagtatttgatccatcaccccctcccatccttccccgcagtccccaaagtccattgcatcattcttacgcctttgcatcctcatagttcagctcccacttatgagtgagaagataacaatgtttggttttccattcctgagttacttcatttagaataatggtctccaactccaggttgctgcaaaccctttttatggctgagtagtattccatggtatgaatatacacattttctttatctactcattgactgaacatttgggatggttctatatttttgtgatcgcaaactgtgctgctataaa

SEQ ID NO: 14888 - DNA, 556 bp, Homo sapiens
  MAP TO AP000359.1; EXPRESSED IN PLACENTA, SIGNAL = 1.5; EXPRESSED IN BONE MARROW, SIGNAL = 1.8; EXPRESSED IN FETAL LIVER, SIGNAL = 1.5; EXPRESSED IN ADULT LIVER, SIGNAL = 2.7
caaagccgaggaaacaagacaacagaaatagaaccataggtgctcaagtcatgtgagttatcaacagtattccaagaggtaaaatttaaatgttgagcaaactgtagaaaagaaccagtttggagattccaaaactgaaaaacataacaaataactcaggatgggtatagcagcatgtttgacaccgcttaaggagagaatgaaacagaaggtaggtcacgggagaggcttcttggcctgggctgtgattatatgggtggttatttggtgattaactgatgcattcacgtattggtacgttcttctgttgtagtgtagcatgcttcacaataactataaacaggaaaactgagctctgtgcctgctttgacacaaatttatgatgtaaactcatttttatgtaaatatgtacctagatatcctggtacacaagagggtggggtagtggcttccaaaagattgttttgatctcagagtgcatttgacaatgtatggacatatttttggttcacaacttgggtggggagatgctagtggtgtctagtgggtagaggcc

SEQ ID NO: 14889 - DNA, 597 bp, Homo sapiens
  MAP TO AP000129.1; EXPRESSED IN ADULT LIVER, SIGNAL = 1.7; EXPRESSED IN FETAL LIVER, SIGNAL = 1.3; EXPRESSED IN PLACENTA, SIGNAL = 1.6; EXPRESSED IN HELA, SIGNAL = 1.3; EXPRESSED IN BONE MARROW, SIGNAL = 1.7; EXPRESSED IN LUNG, SIGNAL = 1.5
gagccaccaaaacaggctaccgtgctgagatgtggctccagcagtacaggatacagaggtattgttgcctcccttgattgaaattattataatcatcactgtcattattactaagctatagtaccattagtacaatcaagggttaaaataatttttaagcagccatattattttgtctatagatattaagtaactcatcaaccaaacccccaggatatgatcagccaaggtaatgacatagtctccactacctatcccccgaagacccacatagaagaggaggagttacatacaaaagacaaattcccagaggccacagcccctgggagtacgtctttaaaagtgattaaaggccaacatggtagactgtccaaactctacttcttccaacagaattacattatctgcaccttctgccatgtgattttccagcacctcccactagactaggcagggtacacacatcgccgcccggatgactttgggtgtaggcatgtgacttagagcccaccttccagccatgggaaggacttgcccaagacagccattgctgcttcagcctggatcctggaaggaagagacaaggagcacaccaga

SEQ ID NO: 14890 - DNA, 581 bp, Homo sapiens
  MAP TO AP000233.1; EXPRESSED IN ADULT LIVER, SIGNAL = 1.7; EXPRESSED IN FETAL LIVER, SIGNAL = 3.3; EXPRESSED IN PLACENTA, SIGNAL = 3.3; EXPRESSED IN HELA, SIGNAL = 1.5; EXPRESSED IN LUNG, SIGNAL = 1.5
tttcactttttgttgtttgagaaagtatttcttcttcatgcttgaagaataatttcacttgatatagcattccaggcttcaaatatttcactctgctactccttgcttacatagatttttttttgtttctttgatttttttaatgagaagcctattgtaattattattattttcttccataggtaagttctcctaccctactccatcactggcttcattcaagattttctctttgtcttttgtctttggttttctgcagtttgaatacattactaggcatgtacatattttggtatttgtttgcttagtgttctctgagctttctgaatatgtgatttggtgtctgccattagttaaaaaaaatacctctgccattgttatttcaaatagttctccattttatctttatttctttcttgtgttctaattatctatatggtacaacttttgatagtattccacatggcggaatgtcatgttctggttttcttcatacttttccaatttcagtttgagaaatttctattgacatatcctcaaaattactgattctttcttctgctgtatctagcttaccgaca

SEQ ID NO: 14891 - DNA, 562 bp, Homo sapiens
  MAP TO AC009290.1; EXPRESSED IN ADULT LIVER, SIGNAL = 2.1; EXPRESSED IN FETAL LIVER, SIGNAL = 1.7; EXPRESSED IN HELA, SIGNAL =   2; EXPRESSED IN PLACENTA, SIGNAL = 2.9; EXPRESSED IN LUNG, SIGNAL = 1.7; EXPRESSED IN BONE MARROW, SIGNAL = 1.4
agtggtgccacttccacttccaccccttgattcctggacctgtgaatcctgtctatgggagaaacagtaccatatattggatgctgattcagaacatgcatggccttctggagaactttgcctcatccaagcgaagtattatcacctagttggcattgtaattgtgacttcaaaaggccattgcacagtttttatcagtccagctgcttcaggatgatggggaacatgataagaccagtgaattccataagcatgatcccactgccccacttttttagctgtaaagtgagtgccttggtcagaggcaatgctgtgtggaataacatgatgatggataaggcattctgtgagtccatggatggtagtcttggcaggagcattgtgggcaggatacacaaacccatatccggagtaagtgtgtattccactgggcacaaatctctgccccttccttgatggaagaggttcagtataatcaacctgctaccaggtagctggttgatcaccctgaggaatggtgccatattgtgggctcagtgttggtctctgctgctggcaaatt

SEQ ID NO: 14892 - DNA, 574 bp, Homo sapiens
  MAP TO AC004909.2; EXPRESSED IN PLACENTA, SIGNAL = 1.3; EXPRESSED IN ADULT LIVER, SIGNAL = 1.6; EXPRESSED IN FETAL LIVER, SIGNAL = 1.4
aacaaagccaaaatgatcacgatcccatttctttctaaatgagctcattactattaatttctcctgtccttagagaatatttgaaaagcaagttcatcaggagagtaaaataaatgttaaaaatggagttggtaaaaaatatctcttcctctctaaactgcatcctaagtaaggacatcccttaggacactaactttcaatggcacaggctctgaatagataattttagattagctatgcacgattctgcgagcacgcatggatgttttgacactggtattaaacagaagctaaatgtttgtagaaccacctctgtaaatgcatataattcgacagattccattctcgagaaacctatgactttccctccttggaagtctatggaagtctgtaataggaaagaatgtaataatagaggcaaaaaagtttaaaataaatagtaacatttaaacaccttctctgcggaccaaattctctgactgtccctgcaataccctaaataggaggactttggtgtgcatgatggagccatatggctagagagcaaggctttaggtgggaagagtgaggtgaa

SEQ ID NO: 14893 - DNA, 555 bp, Homo sapiens
  MAP TO AP000053.1; EXPRESSED IN PLACENTA, SIGNAL = 1.5; EXPRESSED IN BONE MARROW, SIGNAL = 1.4; EXPRESSED IN ADULT LIVER, SIGNAL = 1.7; EXPRESSED IN FETAL LIVER, SIGNAL = 1.7
aaaggacctgaaatgcgttgtgaaggccagaagccgacatccacattctccacccacggagagccccagagtccctcatgcacatcctgcttgatctattacacacattcacacattcgcaacacatttgtttggttttcaagcttacaacatattagaaacagaaaggaagaaaggctgtcagcagcagaaatacctttgagcaagagggacggtctttgagaagcagacttgagaactcaccgtgtgctcttcatgcgccagacactgcggcagccacagcgtcccacatgggatgccacacgtgatgatgttatgttcatggtgatgacctcaggcgtgaagaagaggttcagccgtttcacacagtctgtttaacaagcacatacataacacagacatacgtgaggaatctcagaaaccaaataattcaaacaaagagtctgggattctttcaaaagcgttgcctctgcccaagctttcttcaaattctgtctatagggaaacgtagctgtcaatgtctcattcccgaagacttccagatgcctggatctt

SEQ ID NO: 14894 - DNA, 591 bp, Homo sapiens
  MAP TO AC007719.1; EXPRESSED IN BONE MARROW, SIGNAL = 1.8; EXPRESSED IN LUNG, SIGNAL = 1.3; EXPRESSED IN FETAL LIVER, SIGNAL = 3.1; EXPRESSED IN ADULT LIVER, SIGNAL =   3; EXPRESSED IN PLACENTA, SIGNAL = 2.8
aagtttctgtgtgcttcattttatacatttaaaaccatctctgaaaaagaggccatagacttcaaagaagtcctggatttctctactgactttctctttaattagcttagtgttaatttgctaattgggattacaaagttgttatattccccagataacatatctcattctaataaattctttctggagatacaaaatcttaactcaaggtggtgaggaagacacttgcagaatagaaaaactttagggttccctttaatttataccatattattctatgtaattgtttttatatatttatctacatatatctcactggtcttgccagagcacagaggttcattgctattatgacaggtatgctaatagtgacaacaaacgtttggatctgatgagagtttaaacacaggtttcttgttttgtattttacaatacaattcgtagctatgaatttgaatgtagaggatatatacttttttcaagactaataaaattattacacatggggacttattaaaagttggaaaagtatctggcaggtgttcactagttccattgttctgtatactgaagaatgaaatctaatgtcca

SEQ ID NO: 14895 - DNA, 582 bp, Homo sapiens
  MAP TO AC004624.6; EXPRESSED IN BONE MARROW, SIGNAL = 1.5; EXPRESSED IN LUNG, SIGNAL = 1.4; EXPRESSED IN FETAL LIVER, SIGNAL = 1.9; EXPRESSED IN ADULT LIVER, SIGNAL = 1.7; EXPRESSED IN PLACENTA, SIGNAL = 1.4
ccagcagcagagctgagaccggaactctggcatgctggttctggttcctgcacccgttgctactccttacattgcttctctcttattctaccatctcatcccccaacttcccacaccctcatctctcatcctcctaactattccctggtacctgtgtaagacgataggtagagagaaactaacatctatttgttaagtattcatttgtccaataacatttcctcatgcctgcagtgtgcccaatacttttctagaaattaagggcaccaatttctacaacacagaagacacggcttctgctcttaagagtctaaactcaggcccagcacacgctaaacagtccaaacacattctctcctattttcctcactgcagccttgtccccattgtacggaggaggctgaggggaataaactcactcaaggtcacacagggattggaactaaggttggcctggcgccaggccaaggctttttccaatttacaatgggactcctcctcctctcactttcactaggtactccttggggcggtaggttccaagtcttctctaaatgaaataccccatttcctttctttgtc

SEQ ID NO: 14896 - DNA, 556 bp, Homo sapiens
  MAP TO AP000356.1; EXPRESSED IN PLACENTA, SIGNAL = 1.3; EXPRESSED IN LUNG, SIGNAL = 1.4; EXPRESSED IN BONE MARROW, SIGNAL = 1.4; EXPRESSED IN ADULT LIVER, SIGNAL = 1.5; EXPRESSED IN HELA, SIGNAL = 1.2
gggcactggaactagcctcagcatcttcagcatggggagagccaggcacatggctgggggccaggggaaggttcacaccaagctctgccccttcccaccctgatccctcggactttggggccaggccctcccttactggggctgggcagtgacactacctaggatcagccaccagggggtaccacgaccctggcactttcttaggcagagggtggccagctgatgctgggaacccgggtgccttcttagacccgtaggcgtccagctcaccctgccgatgacactggaggtgaagctgaggtccgaggaatggggactgggcaacaggctggaggaaaacatctcggtcagagccacgcccctggggggtttccaagtttaagcccagagtgaaacccaagcttgtgatcctctccagagggaggcctggttctcagggaacagcaaacgggaagatgtccccagatcccagggatcagggcttggaccagccggggacgcagcccagagggagtgggtccagaaggaaacagctagacacagcagccttcaccat

SEQ ID NO: 14897 - DNA, 573 bp, Homo sapiens
  MAP TO AP000359.1; EXPRESSED IN ADULT LIVER, SIGNAL =   2; EXPRESSED IN HELA, SIGNAL = 1.6; EXPRESSED IN PLACENTA, SIGNAL = 3.4; EXPRESSED IN LUNG, SIGNAL = 1.8; EXPRESSED IN BONE MARROW, SIGNAL = 2.5; EXPRESSED IN FETAL LIVER, SIGNAL = 3.2
gggttaaaaagaaaaagatgggtatcttaaagtacagcgaatgctcagaacaaaggatgatgggaaaatggtttcagtcactgattatttcattatccatagactcactcgcccttcatccttccccaaccccaatctacacgatctgtaagatcaagaaaaaggtttaaatattttaaaataattaaaaagaaatacaaattcacatttaaaaaggaagactcaagtcaggaaatattttcccatcatgcttttctgtgaacaggtgtctgaaccaaaacactgccaaagctacgactgcttcaagtttagtgaagattgatccccatgacaatagagtgacgactgtagcagatgcgctggtttttttgttctacttaattttaaattcctgaaatgggggagaggggagggagtttaggaatttatttatattaaaatacagaagttattgcaaaaccccaactgtaagaacacaccaatataatcggacttttcatacagtagctaagagaatccaaacatttcagtgaaacagtgaatttgcctggtagaacgctgacaaattcccat

SEQ ID NO: 14898 - DNA, 570 bp, Homo sapiens
  MAP TO AB016897.1; EXPRESSED IN PLACENTA, SIGNAL = 1.4; EXPRESSED IN FETAL LIVER, SIGNAL = 1.5; EXPRESSED IN ADULT LIVER, SIGNAL = 1.5
ttcattgaattgtctgtattttcttgtatctcactgagtttccttaagattgttattttgaattctttttctggtatttcatatatttccttataattaggttctgttactagaggattattacttccctttggaggttacatatttccctgctttttcatggttgctgtgtccctaacattgactcctatacatctggtgaaaaaattgtctcttccaattttatggagtaggtttcaggaggaaagacttagggtgcatggttctagatggacacagcaatgtagtctccatattgttcctttagctgtcatacacactagtggtgtttgtgagtttctcagtggcctacagtgagggagtctgtggtaacagtgatgcggcttttccaagggtaggctctcaggctatatctcgggttcgggatacacacatgcacacggtaggtcacccaacatggggtctggcttattggagttggagccacatggctgttcctccggccagaagcatgggcacacagttgcttagctgacctgggagtgtgcctgccaggagtgacttgtaggg

SEQ ID NO: 14899 - DNA, 570 bp, Homo sapiens
  MAP TO AP000356.1; EXPRESSED IN ADULT LIVER, SIGNAL = 1.9
ctagtgcaggctccctcaacagccttatttccgttggtctaatcagagaacaggcttcaaccatggacatctacatgtgtgacccagacagagcaatcacagccaaaacttatttccatagttcatgaccccaaagatgggtgtctttaatctgccagttgaggttttctaagtgtcagaccgaacacctaggccattggcaacaccccaagagtcagtaaaaatataacaagggttaccaagaggagtattggctcagggcctactgagcagagttactcatcaattttctgttctgcgcagctgtttctgagggtgaacagccacagcagccctgtggacaccatgaggcttccacttcatcagaccatcagtgaaccaggccctggcatttaggagaacctctgtgaacttaggttcctgttgacccagtgactttgctttggtggagtgggggatataagtgtcccccaaagggttagctgccagttttttcatgtaaaactgagatgtcagcagggctagactagctgtgttcttaaatataccatttccatcttaagtacacgt

SEQ ID NO: 14900 - DNA, 1980 bp, Homo sapiens
  MAP TO AC008174.2; EXPRESSED IN PLACENTA, SIGNAL = 1.6; EXPRESSED IN LUNG, SIGNAL = 1.4; EXPRESSED IN BONE MARROW, SIGNAL = 1.5; EXPRESSED IN FETAL LIVER, SIGNAL = 1.6; EXPRESSED IN ADULT LIVER, SIGNAL = 1.8
tccctatagcaatgttactttcatcacctttttgaatatcatgagatgtgcatttttctatgaactgttcatatacaaaattggatattttatcaactgtctctttatcaattggtggaaaagaaaacattttttcagcatttggtaaaactttaatatcacttttcttaaattcccttatcagagaatttgcaagttttagagccaagcccataatatctagctctgccatttcatttttcttagaatcttcagtaataatgaggagagaacaaaatttgtgaacaaggtcaatgattatgtcttccaaaaatgtagctgaatagagagaaggctgtgtcttttctttaccagatttagcaagttcagagacatggtcataatcagataagtcactgaaagatgattcttcaccatgtaaaaatggctgtaaatgatgatacatgatttctttcataataaaaccagctaatttactgaggaatgagcatccttttttgtctgcatctttttgtacttcagcttggaattcagatgttttcaaaatattattacatatggagtcgaccaaattttcaataggttctaactgcatactttctgcattatcctctgccatggaaagtcgaatctcatgttcagaaatttcttttataatttcatcagtcaattttgaagctgcctccacaaattcatcatccggtggaaactttttctcttttagttcattttcagtgtgagttgaagggaagacatgccctagaagcctgtaaaccatatcttctaaaagagaatgaggcaacacagtaatatatggtggcaaggcatggctatcctttgtgattatgttaagcacatttctgatgatattatcagcttggggatacgaataagaagaagactctaattctcctgaaactaatgactgcacttgataatcatatatttcttccaatagcaaataatatattttcctaccaaaacatattgtgtcactttgtataaccctatgtatttgaatcagagatttatattgatctaatacttttccatatactgagttgactattttttgaaccatttctttgtatctttctgagaaacacaaatttttatcaaagttatctgcaactaaaatctctgatgtggtgaactccagaacaattgaatttaccaatgttgtaacaatcctggtaagtttcagtttcactctatctggattttcagtaaccaacatgttatgtgaaaatgcataaagaattttgcataagagctcagaaattacttcctccaaaaagacagatgagttcacaataaaagataattctctttgtttaggatctattgctttcaatttataagtttgatcaactgctgccaaaaggagagttttatcttcagataaaaatgattgaatatgatggttaaagatttcttttattataaaactcgctatttttgaaacaggtatgtcacttatgctctttttatcttttgtaatggactggtatatatttgaatgagaaagatcagcataaatggaatcaaccatagactggatatcttttgctgaaatcatactctgttttttattcccatatttaataatacatatttcatgttttgaaattattgacataatttcatttatcagttttatcactgtattacttaagtctgatttagtagtatctgactgctctgcactggtgttcaatggacttatctgagatgtaagctgagtaactattttttccaaatgactatgtgataacatagtggtatacattgttgaagcttgtctttggaatcttgatttacttatatcatattgaactctttgtattaaaacatttgcactgagtttggaatgtgatttaaaaggcagatttgctataagatctggatgaatttggaaatcaaaaatttcagccaggatgatattagttattcttgcagccaatgtctttgtgtcattta

SEQ ID NO: 14901 - DNA, 556 bp, Homo sapiens
  MAP TO AC009290.1; EXPRESSED IN HELA, SIGNAL = 1.3; EXPRESSED IN PLACENTA, SIGNAL = 3.3; EXPRESSED IN LUNG, SIGNAL = 1.2; EXPRESSED IN FETAL LIVER, SIGNAL = 1.4; EXPRESSED IN ADULT LIVER, SIGNAL = 1.9
  unsure 22
  unsure 78
  unsure 84
  unsure 135
  unsure 229
  unsure 290
gaggggctgttgccactactgnggcatggggatgcttttccttctggcaaaaaagtttcatcagagtttacaaactcnagtgtnccccatcttcatcagcatccttccacatgttcccattccaagttgcagggntcccattcttttccaatcaatgccctcactttaatggtagacacctggaaaggctgcacatgcactttttgttgtaggttagccactcacatgnataagagcttctgtctttttttccacaatttcagctcgttctctacaggagataggtctcntcagggaaaccttggcagatttgaggctcagtatctgcttctgaagttgggagatagaatccctgggttcctcattttctttcatcactttgtctactgaacttaggagcaaccaaccagctttattacattccccacatatggtcaaaggtattatatatatagtcacttaactccttgcctctcatgtttggtgactcaggagtgtcaaatgcatttattttgtgtatctctataagcagttcacaccaaggactgtcagtgtt

SEQ ID NO: 14902 - DNA, 570 bp, Homo sapiens
  MAP TO AC007539.8; EXPRESSED IN FETAL LIVER, SIGNAL =   3; EXPRESSED IN ADULT LIVER, SIGNAL = 2.8; EXPRESSED IN HELA, SIGNAL = 1.4; EXPRESSED IN PLACENTA, SIGNAL = 2.3; EXPRESSED IN LUNG, SIGNAL = 1.2
gacaagaggaggaaggtggacggagaaagacagtgatcctatattttttatccttctgtaacttcgtattacctggcagaccacctggggcctcccagatgacttcagttctaatgtgccagagagatgggtctcgtgatttttgctgtgaaggagtcagctgagagatagtagctcatgtctaggtcaaaactctggagaggtgagaaatctcaccccaatctcatcagcctcgctcttctcttacagaggttccgaaaacagaacagacttttgaagagcgcctgatcctcaaagctttcttgctcaagtttgtcaatgcctactcccccatcttctatgtggcctttttcaaagggaggtgagtataatggtgtcatgtgtagaaaggcaatttgccactaagactgggttctctactgtcaggacaatagggtcagcctgtccccattgtccactcagcgtcagccccttctccgccccactttcacctgccttcccatggagaaggaatgttagcaggcaatcattttgaattagcatcttcagactctgatgaccctggcactt

SEQ ID NO: 14903 - DNA, 578 bp, Homo sapiens
  MAP TO AC006427.13; EXPRESSED IN ADULT LIVER, SIGNAL =   5
ctatggcactcagagaagttccctaatattttgttctgtgacctcagaaactgactgcagaaaatcacaatttgctaactcagaaacattttccaattatttctgaaaacacgcctttaacttgagactctactttctgtatgttcattatcagtgtgaagggatattcagagagactcaaagcactatacattggctgtctagcgttaaagaaaaaaattttcaatgatacttgtgaaacatggtgaggaagactttattcaagaccatcacaaataggcacagcaactatggcaatgggattttgcagtacagagaggttgcactcaactccaaatacagcatgggcaagtgggaatctatagccaaggagccctggggagaagtgggaggggagccagtggatgaaaaattactaagaggacacatcaggggaaagaaggattctggctcaattttgacctaagaggattcttgctgaagatggtacagggtgatcagacatcacagaggacacagtagagggtgaggaatctgatcagatatcaaggctgatcaggtatcgaggatggggaatt

SEQ ID NO: 14904 - DNA, 564 bp, Homo sapiens
  MAP TO AC004624.6; EXPRESSED IN ADULT LIVER, SIGNAL = 1.5; EXPRESSED IN PLACENTA, SIGNAL = 1.4
atacccacaccgtgaagctggggtgatgacacatcatgaacagactccaagtgcctggccctctgcctggcatgcagcaaggttctgtagatggtggctgtggttgctagaagggcccggggtttaccgtgtcctagagccctgctcagctccagggacagcgtcctgactcacccgcttccatggcctttctagaaagcagtgtttgtgctggtgtaacactcagcaaatgagcagcagttatgccttctctccctcactccccagaggaacggctgggcgcaaaacttggccagaaaagaaaagaaagagcgcggtgtcttgtccagaggaaaggccgtggccctagaaattggtatggttggtctctgtagctcacacaaaaatgaacgttggaaatctcttccaggatgtgaatgtttctgaacttatgaagaaattagatatccttggcgataacggggtaactatgagcgatcggtttctgctttcgtgttcttgttttgatctgggtgtattctgtgtgacttttgttttgttttgtttttaatttctctctgatgt

SEQ ID NO: 14905 - DNA, 573 bp, Homo sapiens
  MAP TO AL049649.4; EXPRESSED IN PLACENTA, SIGNAL = 1.8; EXPRESSED IN HELA, SIGNAL = 1.3; EXPRESSED IN BONE MARROW, SIGNAL = 2.2; EXPRESSED IN LUNG, SIGNAL = 1.6; EXPRESSED IN FETAL LIVER, SIGNAL = 2.2; EXPRESSED IN ADULT LIVER, SIGNAL = 2.2
gggggaagaaaagattctagttgtaattaagttttaaggcaggtggaaaatatacccttgttcaaccatctcaatcctgggcacttctaccctgaagctgtgatgtacattgaaatcaaaatatggttgattttgaagtaaacattttttttcctagcacacaacagcaaatctgacacttaaatatgtgaaaaacagaagccagaacaaattcaaaataaatatgagttactaacagttatagattagggagttctgtttccacaaatccttagcaaggagtatgctcacaaagcatgtaattacactaacaactaacatgatagatttcttagactcaagatcacacaacaaagtaataataataacaatacttatatctctggggcactgcttttctactgttgggatctaaaattcctaagtcaatatcttatttatttgctgagaaccaaccctttcacttttctaaattattccatattaggatttcatgaactagtagatcaggttactactccttatagaaagctgctggaaagtgctaactaaagtgctggaattttaatgcca

SEQ ID NO: 14906 - DNA, 577 bp, Homo sapiens
  MAP TO AP000352.2; EXPRESSED IN PLACENTA, SIGNAL = 1.3; EXPRESSED IN LUNG, SIGNAL = 1.3; EXPRESSED IN ADULT LIVER, SIGNAL = 1.5; EXPRESSED IN FETAL LIVER, SIGNAL = 1.4
ggagaactgtgatccttcctgattcataacattctgtgcttcctgttgccccgattgagtccaggcccccagacctggttcccgcagcccccatggcagctctgcctgcctttcccgcctcaccagcctatcctcaagtgatggccccattggtcacagaggagtcctacctctgcccagggtctaaccctcctccaatccactccacacctgcatcatctccaccacggccaccaggtcagccagtgagatttggttcccggtgatgaacatcttatcgtgcagaaaatactcctcaaagagctgcaggctgttcttcacctcttccactgcatgctccatcttctcagctgaaacttcctcccctgttatctttgggatcagcaactggccagggttgggaagaggagggaagaggaggctgcactccagggccacctgccctgccaggtctctgtactcttgtctgctggatagatattgaacacttcccaggatataaagcagtttcacctcttttagcagttctgattggtggaagttgccgggaaccatgtgttcacaaggatttggggag

SEQ ID NO: 14907 - DNA, 597 bp, Homo sapiens
  MAP TO AL022238.1; EXPRESSED IN ADULT LIVER, SIGNAL = 1.5; EXPRESSED IN PLACENTA, SIGNAL = 1.2
gcctcctctctcctttttaatatttctttcttcctttttaatcatgtttaagtgaacttactcttagttataaggaactgtcctgctttgtggggaagagggctgttgcttgtcaggcaaaaaagttttctcttcctacccaccatccctctctctgcttcccttgcatttggcaggctgtatgaagccaatgagctgcgaggtgttttgacaggggaggtctgcatgcagcctcttctttgtcctaacaattcctttgttgatcttgcctgtgatgaatcatagcgcctgcattgctctggtctaggcattatttgcaacacacagtatcgtaagcgagagattgttctgcctatattcagtgttttccatgcagcaattcttcttgttgacgttcacagtactgtaacgagtaacagacttgatcacagtctcctcgtgcctgtgcagggctgcacaggcatgatcttatcagggttccaatctgttagattgcctttaaacaaaaaaaacaacaaaaaaataaaatcctgacgtttcaactgtctcacacaaaataatacctcgaggtacatttccccctgcaatgtaaaccct

SEQ ID NO: 14908 - DNA, 550 bp, Homo sapiens
  MAP TO AC004832.3; EXPRESSED IN ADULT LIVER, SIGNAL = 4.7; EXPRESSED IN FETAL LIVER, SIGNAL = 2.9; EXPRESSED IN PLACENTA, SIGNAL = 1.2
ctccatgaatgtcttgtcaaccccgctagattaagtttcagaaggtcaaggatcattacctaggctaccttcatccccatgacctgccacactgccttgctcagtcactaaacatcaacaaaaatcactgtccccaagccctttgccagaactgcctgaatgtctgtctggtttctgccttccctcagatgtcctgcggtttgacaacacctacagcttcattcatgccaagaaggtcaatttcactgtggaggtcctgcttccagacaaagcctcagaagagaagatgaaacagctgggggcaggcaccccgaaataacaccttctcctatagcaggcctggccccctcagtgtctccctgtcaatttctaccccttgtagcagtcattttcgcacaaccctgaagcccaaagaaactgggctggaggacagacctcaggagctttcatttcagttaggcagaggaagagcgactgcagtgggtctccgtgtctatcaaatacctaaggagtccccaggagctggctggccatcgtgataggatctgtc

SEQ ID NO: 14909 - DNA, 561 bp, Homo sapiens
  MAP TO AC009290.1; EXPRESSED IN PLACENTA, SIGNAL = 1.4; EXPRESSED IN ADULT LIVER, SIGNAL = 1.5
  unsure 95
  unsure 413
  unsure 414
  unsure 428
  unsure 434
  unsure 443
  unsure 465
ggggagcattaccacttgagctttgactcctgtcaaattagcaggggcattatattatcacaggagcgcaaaccctattgtgaactgtgcatgtngagggatctaggttgcaagctccttataagattctaatgcctgatgatctgaggtggaacagttttggccccaaactaaacccctgccctcatccatgaaaaaattgtcttccatgaaaccagtccctggtgccgaaaagtctggggactgctgacctggagcataggctgacatcatctcaacaatagccagattgttgacaaaccgccttgaggtaatctctggaatttcgggtgtccatgcctggcttgtttcaagattagcccctggaacttctaagtaaggatataactagataagctaccagtacaaggggnnatgtttggtggggnaggganggtaaacangagttgtaaagtatgtttcaanggctaaaaccaagaaaggaaaaattgtttcaaaatgaattttgaagttaagctactccatcacaaaagtacatgtgaatttttctttttcctcagg

SEQ ID NO: 14910 - DNA, 565 bp, Homo sapiens
  MAP TO AP000111.1; EXPRESSED IN LUNG, SIGNAL = 1.3; EXPRESSED IN FETAL LIVER, SIGNAL = 1.7; EXPRESSED IN ADULT LIVER, SIGNAL = 1.6; EXPRESSED IN PLACENTA, SIGNAL = 2.2
cccctctatctatttttgcctgaggctatagttcgaggattaatactaatgaagacctttctggaagtgcaagagagccttagtgatataactactgatttttcagtctggtcgcacttcaggaaaataactatggtcagtcaaaaagctgaaattttccaaaaggaattttgatgagaaactaaggggaactgttaatagagcaaggcaggttctgcagagccctgacttgtggccccagcgtggctaaagtccagcctcagaatgacccagttggttgttttcaagcaaactttccttccccacttcttcctgcccgcagcgcatgctaaccagtgtggctaccgaacgtttgagatgtgtttcatgtgactgagagaccgagctcttaattctgtttaattttaatcatttaaattcagccagctgcagccagtggctactccactgtacagtgcagttatagaacataaactgaaggaaattttacttttaaaagctaagtctattttattgtttaaaaaatgcacacttagataattctccagtctctggtatttctcaa

SEQ ID NO: 14911 - DNA, 944 bp, Homo sapiens
  MAP TO AC007567.1; EXPRESSED IN LUNG, SIGNAL = 1.3; EXPRESSED IN ADULT LIVER, SIGNAL = 1.6; EXPRESSED IN PLACENTA, SIGNAL = 7.9; EXPRESSED IN HELA, SIGNAL = 1.7
ttgtccaaatacaaataagccaccccctcatccatgccccttatgtcaaaggaatcaatggaaggcccactgccccaggggacaaaggtcctctgagtcagaagccactaaccagatgatccggcagcaggactgagggtgcctggggcaagcgccagcccaacccatcaccctcacagagccccgggtatgcttgaccattgagggccaggaggttaactgtttcctggacactggctcggccttctcagtcttactctcctgtcccggacaactgtcttccacatctgtcactatccgaggggtcctaggacagccagtcacttgatacttctcccagccactaagttgtgactggggaactttactctttcacatgcttttctaattatgcctgaaagccccactcccttgttagggagagacattctagcaaaagcaggggccattatacacctgaacataggagaaggaacaaccgtttgtggtcccttgcttgaggaaggaattaatcctgaagtctgggcaacagaaggacaatatggatgagcaaaaaatgcccatcctgttcaaattaaactaaaggattctgtcccctttccctaccaaaggcagtacccccttagacccgaggcccaacaaagactcaataaaattaaggaactaaaagcccaaggcttagtaaaaccattcaatagtccctccaatactccaattctaggagtacagaaacccaatggacagtggaggttagtgcaagatctcaggattatcagtgaggccgttgtccctctatacccagctgtacctaacccttatactctgctttcccaaataccataggaagcagagtggtttataatcctggaccttaaggatgcctttttctgcatccctgtacatcctgactctcgattcttttttgcctttgaagatccttcgaa

SEQ ID NO: 14912 - DNA, 553 bp, Homo sapiens
  MAP TO AL021707.2; EXPRESSED IN FETAL LIVER, SIGNAL = 2.4; EXPRESSED IN ADULT LIVER, SIGNAL = 1.9; EXPRESSED IN HELA, SIGNAL = 1.3; EXPRESSED IN PLACENTA, SIGNAL =   3
gggcaaatcgcctaaaatgaatcctagtttcctaagttcatcactgataaggttgttgcaagattgttcatacatatcacaaagtactaagccattgaggtactcaccctgagtcctttccttctccctagttttagctcaggaaataatttgcaaatatctgattaggagtaggagaaatactaatggctggccaaaaggaagcatgtactgggtcctcctttcagtgacatgacctgatgatctgagacgaattattttatctcccagtgccccaggtcctgaagagtcaattctacttgctgccagataatggccatgatgcaaatgatatattagctctggtaaggcattactctggttactactggcattggaaaataattactctcattatagttttgtctgcatctggggattaacattctcctaagagtaggcctttggctctttcagggcaaatggtccatacctgtgttttacaaatcaccccaaataggttgcttccagctgtaattctggtccctatgtggcaacaatttcacttccaagc

SEQ ID NO: 14913 - DNA, 562 bp, Homo sapiens
  MAP TO AB016897.1; EXPRESSED IN ADULT LIVER, SIGNAL = 2.6
caaaaccagataacacaatgctgtgtatatgtttacatgagcaaagagaaagttaaatgcctagaaaagatactagcttacaaactaagtgagggaaagagggaggaaaagacttttaacatgtgttatatgattaagatctgaatctcattataaaataaatgcataaagataattattgaaagtatggtcacaaaaatatagtaatctcacagtagttttttttttcccttgtgctttttctgtatttgaatttttttacagtgaacatgtgttattcagaatcagaaagaaatacagcaaagctcatttcattgggatgggagaagagagataagcatgggtatttggtaatttggtgcacctttttatttctttggcctttagtaggaagtagtgagaaatagtatcaataaaattgaaggaaaaaagtcttctcagaagtgaaattttaaaatttatactttaaatgagaattcatagataaacagtgtcatgaactagagttctgccatactctgtggggcattgattgggtaagggtgtaaggttgttcagtcaa

SEQ ID NO: 14914 - DNA, 583 bp, Homo sapiens
  MAP TO AC007463.3; EXPRESSED IN LUNG, SIGNAL = 1.2; EXPRESSED IN FETAL LIVER, SIGNAL = 1.8; EXPRESSED IN ADULT LIVER, SIGNAL = 2.7; EXPRESSED IN PLACENTA, SIGNAL = 3.3
ggtcattgatttgcaaaataggatgaatactaacataatacatatttataaggtttgaagagttaacctacataatgcacctggcagatggtgctatatagtagggcaagcttgtccaacccatgggccgcgagctgcatgcagctcaggacagctttgaatgtggcccaacacaaattagtaaggtttcttaaaacattatgagatttttttgctatttttttagctcatcagctattgttagtgttagtgtattttatgtgtggcccaagacaatcgttctcccagtgtggccctgggaagccaaaagattggacacccctgttgtagggactcaaaaactgcttatttaactctttttcatttatctctgttttctttacttcttttgcctttacttctataatcccataccttgtaaggtgccagaagtactgatgtaaataaaagtgaaaaaagaatgctttcatcagcatccttctctaataatctatttaatctttctataattcccacacagcaaaagacacatatgcccccacacacaggcacaaaaatgcacacactccctaaagcagccatg

SEQ ID NO: 14915 - DNA, 563 bp, Homo sapiens
  MAP TO AC007253.2; EXPRESSED IN ADULT LIVER, SIGNAL = 1.5; EXPRESSED IN PLACENTA, SIGNAL =   3
gcaatggttgttatgcatgggctcagcaacatggacttctactcaccaaggctgacctggctacagccactgctgagtgctccatttgccagcagcagagaccaacactgagccctcagatatggcaccattcctcagggtgatcagccagctacttggtggcaggttgattatattggatctcttccatcaaggaaagggcagcagcttgccctcactggaatagacacttactccagatataggtttacctatcctgtacgcaatgcttttataaagactaccatccgtggactcacagaatgctttatccaccatcatggtattccacatagcattgcctctgaccaaggcactcactttatggctaaagtagtgtggcagtgggctcacactcatggaattcactggtcttaccatgttccccatcatcctgaagccgctagattgatagaacagtggaatggtctcctgaagtcacaattacaatgccatctaggcgacaatactttgtagggctggggcaaagttgtccagaaggctgtgtatactctgaattgctg

SEQ ID NO: 14916 - DNA, 571 bp, Homo sapiens
  MAP TO AC006548.19; EXPRESSED IN ADULT LIVER, SIGNAL = 1.5; EXPRESSED IN PLACENTA, SIGNAL = 2.3
caatttccagacttggaacaccaagttttacagacccagaacaccttgaatgaaggggaggccgggtctccttgaggaaggaacccactacattactgaccatttatgaagttaatctttctcccatccttccccagagagacttctggccttttaccagggtaactgtgcattggggaaagggaaatgataagatatttcagggactcctggacactggctctgagctgacgttgattccacgcacaacgtcattgcagtcctccagctaaagtaggggcttatggaggtcaggtaattaatggagttttagctgaggtccaacatagtgggtgcagtgggtctctggactcatcctgtggtcatttccccagttcgagaatgcatatttggcatagacatacttagcagctggcagaacccccacattggcttcctaactggtagagtgagtgctcttatggtgggaaaggccaaatgggagccattagagctgcctctacctagaaagatagtaaatcaaaaacaataatacaccccttgagggactgcggagattagtgccaccatc

SEQ ID NO: 14917 - DNA, 562 bp, Homo sapiens
  MAP TO AC006548.19; EXPRESSED IN BONE MARROW, SIGNAL = 9.6; EXPRESSED IN LUNG, SIGNAL = 4.9; EXPRESSED IN ADULT LIVER, SIGNAL = 1.6
gaggagacgaaagggtcagggaatttatcctactcatgcagcatagattttatctctgttggtttccctccaaacagagaagacatttaaggaacttttctcacaagagaggccccttcacccttcccttgactctttccactccactgcacccaccaggtgatttacatgttgtcccttagggaggaccttcccttgtgagtctgagataaaagcttagctctaaccttgccttgactgatcgggactcctcagttcaccttctcacaatgaggctccctgctcagctcctggggctgctaatgctatgggtccctggtaaggatagaaataagatgaggtgggaaaatggggtgggagggtgagatctgggggctccacagcttcctatatttatttcaaacgtgttagaggcacatggtctatgctccaggaaagagaattcatattcttgccttatgaataaccaggattctccaaggaactatgaccagtgctctggttaagatcttgaaaatagagtttcgtactggctagtaaattgtgcattcattttagaaag

SEQ ID NO: 14918 - DNA, 588 bp, Homo sapiens
  MAP TO Z82201.1; EXPRESSED IN PLACENTA, SIGNAL = 2.5; EXPRESSED IN LUNG, SIGNAL = 1.4; EXPRESSED IN ADULT LIVER, SIGNAL = 2.1; EXPRESSED IN FETAL LIVER, SIGNAL = 1.5
tcattaggagctttggaggcaggtggacctggactggaatcctagctctgtccctaattagccattagctttgagaccttgaacaacggagcttgccctctaatacccatctgaaagtaaggattataacacttaacttgaaatactatgcagacataaaaagaatgagatcatgtcttttgcagggacatagacggagctggaggccattatccttagcaagctaacacaggaacagaaaaccaaataccacaggttctcactcataagtgggagctaaatgatgagaactcatggacacatagaggagaacaatgcacactggggcctatcggagaacaagagaattttcaccctcaggagaatgaggatggaggttgggaggagagagaggatcaggaaaaatataataactaatgggtactaggcttaatacttgggtgatgaaataatctgtacaataaacccccatgacacaagtttacctgtgtaacaaacccgcatttgtacccctgaacttaaaataaaagttaaaaaaaaatagcatttaactttcacttaaggaaaagtacaataaacacacaaaaa

SEQ ID NO: 14919 - DNA, 558 bp, Homo sapiens
  MAP TO AC004832.3; EXPRESSED IN ADULT LIVER, SIGNAL = 4.1
tagctgttcagacacgagggcaggaaccagggtctcgatttctggcctggggcagagccatcctctggctcctgctgaaccccctgcagtactatgcatgcactgtgtgctcctaatgcaggaatttgaggcggggtgttgtggggtgcaatggatgggttttttctgcctctttagtgtagaccactagggttatggcgaaatcttacctagtgttgagatacatctttatccttccttccctctcctgccagcaaattggaaggaggttttactgaaacatatcagccctgaccaggtgcctgtggagtatgggggcaccatgactgaccctgatggaaaccccaagtgcaaatccaaggtatgagccgccagaggctagaggtgaacagggatgcctggctcaaatgcacattccagttcactccatgccatgcttctagatcaactacgggggtgacatccccaggaagtattatgtgcgagaccaggtgaaacagcagtatgaacacagcgtgcagatttcccgtggctcctcccaccaagtggagtatgaga

SEQ ID NO: 14920 - DNA, 581 bp, Homo sapiens
  MAP TO AL022327.17; EXPRESSED IN ADULT LIVER, SIGNAL = 1.6; EXPRESSED IN PLACENTA, SIGNAL = 1.5
gctgtcatgaacctgtgtggaaaagatattgacagaccaaaagctcatccgaacgtcccatcactggcaccttcctaagggacactgtcttgagcagaaagaaagtggttcagaatgaacatggttggaagtctgagactcaggaagagtgaagggcaaagaggaatgtatgtagtaaatctaaaaaccactggctgtgcaagcgatgatgataatcatgcccagtagactgttaaaaacattattaaacaggctgacagcaatagcaggaagtcagaagggagcacgggacttcacattttccaggcttcaaagtcgatatattgccaggtgggtataagtgtgacttccttcactttagattttgataagtttaacgtgcaatgagtaatttgtaggcagtgagtaaaacaccagaaacagagtctgtaacctccaaaccagaagaaggaaaaaccaaaatgagagaagaagcgtcaatgaaaactaaggcaagaacagagagaaaaaggaacatagaatagatgagatcaacaaaagttaaatgaaatcaaatggtaggtactgtggtcatcaggctc

SEQ ID NO: 14921 - DNA, 572 bp, Homo sapiens
  MAP TO AC007313.3; EXPRESSED IN ADULT LIVER, SIGNAL = 2.6
aaaatgtgtttagtagagaaaaccaagagtgtcgccaagcagtcatttgataatgaggtaaaagtatggatagaaagaaaccaggtgctattcatcaagacaatgggagaatgaccctgaaggcacctcagagatcttcacggttgccatgttcataacaggtccatagtgccagggaattgagggcagaacagtttcaatggagtgactcagggagccttcaggagctcagggctcactgcccagggccgccttaagtctctgtgccccacattctgccaatgcagtcttcaacaacccaggctcaggtgggcccaggttcaactcagaccgccactccagagaacataagggatgagccttggtaggatccacgtggagctgtccctgcagacatgcagagtgcaagcgtagtggaaacatggctacctccacctatattttaaaggatgtattggatagctttgtggtccaagcagagacttgccacagaggtggagccactactgagagcccccattaggtcaatgcttagcggagctatggagatagggctgtcctcaagactccag

SEQ ID NO: 14922 - DNA, 556 bp, Homo sapiens
  MAP TO AL022318.2; EXPRESSED IN PLACENTA, SIGNAL = 1.3; EXPRESSED IN LUNG, SIGNAL = 1.3; EXPRESSED IN ADULT LIVER, SIGNAL = 1.9; EXPRESSED IN FETAL LIVER, SIGNAL =   2
cttaacaccacgccttgagcaagtcgcaagagcgggaggacacagaccaggaaccgagaagggacaagcacatggaagccagcccagcatccgggcccaggtatgggaagcccctccgagcacctctgcgcctcagcctcctctttgagcttttctgatgagcactcacctctcaccctcaaacccctggggcctctcttttcctcctgaccctctctctggacctggcctcttgctctaggttcccagttttggtcccagcgctggtctctcctccgatggtaccaattccaggtctccttccacctcccggggcaggtgcacagggagcctgaaaatcccaatagataatggtgctgtgccccagccagtgaagacggtcagagaggggattctcctcacttgtctttaaatgagcatctactatttcttgcaaatgttccatgtatctggacttggcctaagccctttttatgttcagtgtcatctcgttctccctaatattaagaaaagggggttgcttgtaggactgcttggctatgaggaagccttgttt

SEQ ID NO: 14923 - DNA, 582 bp, Homo sapiens
  MAP TO AC007106.6; EXPRESSED IN ADULT LIVER, SIGNAL = 1.5; EXPRESSED IN FETAL LIVER, SIGNAL =   2; EXPRESSED IN PLACENTA, SIGNAL = 2.8; EXPRESSED IN LUNG, SIGNAL = 1.7
tccaaaactgaagaacttgggagtccaatgttctagggcaggaagcatccatcatgggagaaagatgtaggctgggaggctagactagtctctcttttcacatttttctgcctgcttatattctagccatgctggcagctgattagactgtgcctacccacgttaagggtaggtctgcctttcccagcccactgattcaaatgttaatctcctttggcaacaccctcacagacacacacaggatcaatactttgtatccttcaatccaatccaattgacactcagtattaaccatcacaatgtttatcaccattactggtcggaggaggtcatccttcctcccataggtcttgagtttggcctggcagcacatgggctgatgaccaactagccaattctgtaacttctaggtagttaaccacaaggttaaaccttgatacactgcccaactgtcggtgcagatttaccataggtgtctcctccttggtgatcaccattcataccactctgagctcagcccattgactatgttgtccacacccaatattaaaccatatgatgtcagtattagcctggaccacg

SEQ ID NO: 14924 - DNA, 570 bp, Homo sapiens
  MAP TO AL079300.11; EXPRESSED IN PLACENTA, SIGNAL =   2; EXPRESSED IN ADULT LIVER, SIGNAL = 1.5; EXPRESSED IN FETAL LIVER, SIGNAL = 1.3
ggggaatgttgctctgtgacttaagtgcttaactctttaagaatgcccatcactgtccaaggtactgaccgagatattgcagagttcaaattgttgataatttccaaggcctttcacattccaggtagggcatagaacaatgtcctggcctgagagtgggtgtaagtgttcatggctgaaaacgcagaagaagatatgaattgagattgcaagcctgttattgattccggtgacattgggcaactctctcaacctctcaaaactctgttctgtctatgaaggaaaatgtgctacccactccacagggatagtcaaaagatgcaatatcattaaatatatttcaaagcctggttttgtgccctaaaaatgtgatgatgatgatgatgatgatgatgattatgacgacgatgatgacagcataaaactttcaataatattgagggttgtgtgcctgccaaagttctaatggcttcacaagtatgaattcacttagttgtcataaaatttctttatattatttggagatattattatgctcattttatagataaggtacccacaacacagaga

SEQ ID NO: 14925 - DNA, 561 bp, Homo sapiens
  MAP TO AC007841.1; EXPRESSED IN FETAL LIVER, SIGNAL = 3.4; EXPRESSED IN PLACENTA, SIGNAL = 2.2; EXPRESSED IN BONE MARROW, SIGNAL = 1.5; EXPRESSED IN LUNG, SIGNAL = 1.5; EXPRESSED IN ADULT LIVER, SIGNAL = 1.7
aagcagagagggaaatgcacaaaggagagagagagaaagagagagagagagaaatcagatgatgccacttcagcacctgaatcctacctttcttgtccagtctaatcagttgtgtatgccaaagaattccctttttcagactaaacccatgaatttgagttacatttcggatcactggcaattgaaatggtcaccagcagatatctaaaaattgtagtcatcccttactcaggtattgcccttcatggtttacaaagcccttgcaaacttttctctcattcaatcttctctgtgaacctatgcgaaaggtaatgtcttcccagcattcacagatgaagacctggaccagctgaggccatgacgcattcattctcttcaatcttgcagtggttgttgagtgcttgtcaatgtgcaaggctttgtgctaagtggtagggaggtagtgaccaagtcagaagccacttctgtcccccagtctagttggagagtggacaatacccactggtttgacaaatcactgtcaaagttcacctgtgtacatgcaagaaaggagcaggtcag

SEQ ID NO: 14926 - DNA, 565 bp, Homo sapiens
  MAP TO AC007313.3; EXPRESSED IN LUNG, SIGNAL = 1.2; EXPRESSED IN ADULT LIVER, SIGNAL = 1.9; EXPRESSED IN FETAL LIVER, SIGNAL =   2; EXPRESSED IN PLACENTA, SIGNAL = 1.8
gagaagaagttgggtcgtggtgggggtgctttacatatgttatttcgtgtaaatgttacaagagaactaatgtaagtcattccagttttacagatgaggaagctgagggtttagaagttaaataacttatctaaggtgactaccatatctggtagtgaaagattgaggattccaacctggatatgtttgattccatatttatctgagtcaaagaagattattaatagagcccagatgataggtcccgctgttaaaatattagtcttttccattggtaaatggctgctgcctcatgtcttttgtatatgtcttgtccacccactcccttcctcccagctcgaaagagagggcctgttctgttggatctgtgcccataacttatcagttattaattttcataatatcactcctacatacaagctcagtagaggaactggagaattacgtctcagaaaagtacagaataagctatgtgcaaacttacagaagtccaagaaggaggatgaccggggcattttgagcactgcagaacattttcattatttctgtgtctctgtcctgtggc

SEQ ID NO: 14927 - DNA, 579 bp, Homo sapiens
  MAP TO AC007092.4; EXPRESSED IN ADULT LIVER, SIGNAL = 1.5; EXPRESSED IN FETAL LIVER, SIGNAL = 1.4; EXPRESSED IN PLACENTA, SIGNAL = 1.3
ccaagatacaatctggcacaacagttttgtttgatagacagcattggcctatgcttgtcaactagccaatgtgaaataacattattactgtataatgtcgagttaggctgcataatatttccattgtatgacacacacgatgaagagatttcagagttctccactgtttacataattagcattacatatttgtgagattaaggtaccactaccaccgttattaccatatttccttccttcctgggtgctgatacatgtgcatgttcacttttgagaatgatcagagaaagcacctccatctccaaaggctgtgtccctgcagtccccatagaagggattcgaacccctactttatcttgtggccttgccaaaaataaaataaccagagccagcttgaggaatgagagaagagaacaagagggaaccggcctgaaagacctggctggctctgagtgtagtttattgctctactgctggtttgaaaggattatgtagccataggctatctctagatagaaagatggttcagtgacatccctttggtaaataagtagctatcactcctccctctaaacgtca

SEQ ID NO: 14928 - DNA, 566 bp, Homo sapiens
  MAP TO AP000111.1; EXPRESSED IN PLACENTA, SIGNAL = 1.7; EXPRESSED IN HELA, SIGNAL = 1.3; EXPRESSED IN BONE MARROW, SIGNAL = 1.3; EXPRESSED IN LUNG, SIGNAL = 1.6; EXPRESSED IN ADULT LIVER, SIGNAL = 1.5; EXPRESSED IN FETAL LIVER, SIGNAL = 2.5
catgggctgctccactaagtatacttatggttatttcttgatcatatgctaaacaagtggtggattattcataagttgtctgcaaaaggggtgggagttctggaactgagggttcctcacttttttcgatgatatagggtaacttctgcatgttgccatggcatttgtaaactgtggtggcactggtgggagtttcctttagcatgctaatatattgtaattagcatatgataagcagtgaggacagttttgtcaccatcttggttttggcaggctttggccagcttctttactgcgtcctgtcttatcagcagggtctttgtgacctcctgttttatcacataactaagaatgcctaaccccctgggaatgcagcccagcaggtctcagcctcattttacccagctgctactcaagatggagtcactctggttccaacacctctgacaagagcagggggtgacctgtcacctggggctcagcaggacaataactctaggaaaaactggaaaggctgatagccttgaatttaacctaaggagcttggtgcattgtcaggcaacagt

SEQ ID NO: 14929 - DNA, 549 bp, Homo sapiens
  MAP TO AP000041.1; EXPRESSED IN BONE MARROW, SIGNAL = 1.7; EXPRESSED IN ADULT LIVER, SIGNAL = 1.7; EXPRESSED IN PLACENTA, SIGNAL = 1.2
tcatgcttcctagactctgccaccagcaaagtcaccacttttataaaaagtagatttgaactctggccttctgtttattcaatgcctttccttgcttaccttatatcttggcaaggggtaggggaaaaaagtgaaaatcaatgaaatcaaaagcaaattaggttctccttgaaacaaaaatacttctaagggattagaaacaaacaatttctcccactgtccaacaccagcacctagatgccactgtcattccagacatcatctctaaaaggagcccaaagctacagggcagaaaatgggtctgcccttctctacctgtaaatgggaacaagccgcccatgccttataggaaaagtaacactatatgtgtatgattttttttttatttaactaagaaaatcacagcctatcatgcttttcagaagggccaaaggctataaataaatttaacaaggacacacggggctgttttgggtgccatcaaaatacttatctgcctgcacgtagcgtgcttttggccgttgtgccaagcaagattagcagacttgc

SEQ ID NO: 14930 - DNA, 578 bp, Homo sapiens
  MAP TO AC007567.1; EXPRESSED IN FETAL LIVER, SIGNAL = 1.7; EXPRESSED IN ADULT LIVER, SIGNAL = 2.3; EXPRESSED IN PLACENTA, SIGNAL = 1.4; EXPRESSED IN BONE MARROW, SIGNAL = 1.4; EXPRESSED IN LUNG, SIGNAL = 1.2
ctagtgatgcctttgcatggtccctcagtgagagaaaagaccaagcaccccccttcaaggttcccttcttgtggaggcttaataataattcattcatttaataattcacagatagggagagggtttcacagttaaatctgaaacttaaaagggctatttatgctgaatttctgctattgagactttaaatagccaggttaacatagtaacagacttttttttttaagacgagcacctctgagcacacaaataactatactaattcaagatcaggaagtggtctacacttacgtccatagcaacgacattattcacaagaaccgcaaggtagaaacaatccaagtgtccatcaaagaatgaatggataagcaaactgtggtatatggtttccacatacagtgggaaattattcagccttaaaaaggaagaaaattctgatactgaggacattacgccaagtgaaataagccagtcagagagggacaagtattgtatgattccatttatatgagttacccagaatagtcaaatgtgagagacagaaagattcatgcttgccaggggctggaagaaagaat

SEQ ID NO: 14931 - DNA, 571 bp, Homo sapiens
  MAP TO AP000359.1; EXPRESSED IN FETAL LIVER, SIGNAL = 1.9; EXPRESSED IN ADULT LIVER, SIGNAL = 1.6; EXPRESSED IN HELA, SIGNAL = 1.6; EXPRESSED IN PLACENTA, SIGNAL = 2.1; EXPRESSED IN LUNG, SIGNAL = 1.3; EXPRESSED IN BONE MARROW, SIGNAL = 1.3
aaaggcgactgaggtcagagcaagtgaccaggggtgagtcaggatggagcaggtgaccaggggaacagacgcgaactactgattaagactggtgtgaaagttgtttaccaaaactagaagcaagtgggcgaagggaaccaggaagttacactttaaaatggagaatctaagagggctgaacacagtgatgtactgattctttgaagagaaacttggggttcactatatttaacaaaagggatgggaaagcagagaaaacagtgccaatatctggcagaaggaaatcaggaatatgaccctggtatttgggactgcttctcatgccacagattctggaaggagccattgagtgagaagtcaggtttgttttgacatatttgtgagtctgtttgaaaaaaatactgaagtccagtagcagcatggagggttgtaggtaacttgcacactctggtttgagaccctcagggatacagtgtagtaaggagcttgacaaagataagacttcccagtagagaacccacctttaaaccacctggattgttaataccccacagtcatcagccagaagcaa

SEQ ID NO: 14932 - DNA, 583 bp, Homo sapiens
  MAP TO AL079300.11; EXPRESSED IN ADULT LIVER, SIGNAL = 1.8; EXPRESSED IN PLACENTA, SIGNAL = 1.8; EXPRESSED IN BONE MARROW, SIGNAL = 1.4
cagtcttatattgtcactgctttggtttttttctttgttcttccaaagattgcccatttcttgagttcagaactttctgttctctacatctagccttgtggtcccagaaactgaatagaagcttcaaaaagatttgtagaatgagcaaaagtgttccgaaagggagtctttgcagaaaagaattaaaacagcaaggctgaggatgtaatcttttaaaggcctgtttgcaagttgctccttagctggcatctgggaacttggcttttaaaatgtctcctccattccctaactgataaggttgattctttgtgccttgactgtttatagaaacaatgtaatttatggtgaacacctgctttctttctgagagtctggaattttggttgttgctagacagaaaaatcgatatgagcagcccctaaaaaccactctaaactctaaatctcaaactggctacactgggcattataaatattacaaatgaattcctgcattattgctactggaaacagtgttctgtgtgatcttccataggaggaacagaacataggaagcctgcacatggcttccagacccttatctg

SEQ ID NO: 14933 - DNA, 561 bp, Homo sapiens
  MAP TO AL022320.23; EXPRESSED IN FETAL LIVER, SIGNAL = 1.9; EXPRESSED IN ADULT LIVER, SIGNAL = 1.7; EXPRESSED IN PLACENTA, SIGNAL = 1.6
ccttcattagtgttccaggtctcttaatccctaccttcatctttcagaaatcaattgctgttgctttgaaactgaagtgataaaaagttaacatggggagtataatatactgtgatctacaggaactcagttcccacaataatttctagttttcatgagaaagcctataaagattcacaaggccctgccaagctaaaacagcaaagaatggattttgcttacaattagtttgttcgctgcctctttaatcttgtctactttggcttctgagagtcctttgacattgcatagagctcttcttgttgtcatctgtatacctttgatggtacagattcctactgatttcagtttcttaatgtcagccacgttctgtaaattaaagaatgggcacagcagactgataagatgccagcctgcaaggctcccatactatgtcatgtgtttctgtgtccatctccttccaccatgatgccaattttatacaagctgccaggtggaacccacccaccatgtagccaaatgttctggaaatatctgagtagaacatactcagcaggctgc

SEQ ID NO: 14934 - DNA, 578 bp, Homo sapiens
  MAP TO AC008283.3; EXPRESSED IN LUNG, SIGNAL = 1.3; EXPRESSED IN FETAL LIVER, SIGNAL = 1.7; EXPRESSED IN ADULT LIVER, SIGNAL = 1.6; EXPRESSED IN PLACENTA, SIGNAL = 1.7
gctccagcttacagatgaaaatctgatttggggatgttgtcttcaaaatgcgatatgtattttgaaccatggtgctatgtgctgaagccagcttgtaactgctaataataattttttaaaaatggttgaaattttcacgaaacttaaaagccagttaacctcacattggtagcttaaaattggtcatagtgggaatatttgcatcatgaaaattggcaaatgctacacatcaattttctcctccacccccctggctttgcccctaaaaggcagaatgtatcaatatgaaaaccaagggggtaaagtaggaaagtcccctcttactataattaaaagtgacccacttgggaaaggtgtacttcttgtcattgagacttcaggctccactgaaataaatgttctgctttccaagtgtgtatgtgttgggggaaaggggcaggtaatgcagtgctcctatcagggtcccagaaagaatttaactaaacctaaatctatagctactatctgaatatgcttcaattctcatgccagtagacctacaagaaaaaaaaaaaataagtgatgctactggcagggtt

SEQ ID NO: 14935 - DNA, 557 bp, Homo sapiens
  MAP TO AC008022.1; EXPRESSED IN LUNG, SIGNAL = 1.2; EXPRESSED IN ADULT LIVER, SIGNAL = 1.9; EXPRESSED IN PLACENTA, SIGNAL = 1.8
aaaattgtgtggcatttcccccatcactctctctatctctcttgctgccatgtgaagaaggtgcttgcttctctttcaccttccaccatgactgtaagtttcctgagcactcccagccatgcttcctgttaagcctgctgaactgtgagtcacttaaacctcttttcttcataaattacccagtctcaagtagttatttatagcagtgtgaaaacagactaacacagaaatgcaaactataaaacaactatgcttatcatgttactatgttcaaatatataaagtataagcctatctgcacagaacaaggatctgaaaatgacatcaaagatttgaaaaataacccgagaggctccagaaactaaaagaaaaaaaaagatcaatgactgggtttaacaagagattacacattattagagagagaattagaaattacctaaaatatttcaaagacagacagtaacaaaaaatataaaagaaagtctaagatacagagaggaaaaagtccaacatacgttttattcagagtataagaagggtgagagaatgggcagaag

SEQ ID NO: 14936 - DNA, 590 bp, Homo sapiens
  MAP TO AL078474.2; EXPRESSED IN PLACENTA, SIGNAL = 2.8; EXPRESSED IN FETAL LIVER, SIGNAL = 2.4; EXPRESSED IN ADULT LIVER, SIGNAL = 1.8
catggtgaatcctggaagtcaagtgaggaaaagagttcaaagatgattccttaagtttcaggaataatctaccaagtaaaattatgctcaggagtgtttggcctatttctggtttgctgtacttacttctgtttcttacacttacacaaataagcatatacccatattttaaaaacagatttctacttaaaattaaataaaaatattcacatatatgaaactcttgtccttactcatgaaaaggaagaaaaattaaacatattcttgttgcctaccctccttttataataaaactaccttttgcacctgttaacttttctcttttgagtttcattgcagacacatggcctttcataaacaactcttttcttttaactgtggtaatgataatgatcattatatgagagtcaccttgctaaaacttcgccagtgttatttcatttaatctggcttctttgtactttcagaattgcccgatattcttgaaaactttcgtactctctggcaacaacactatgtttcagaaacattctaactttcagttgccttaaatattcgaattggctagccatctaggaatcctcattaca

SEQ ID NO: 14937 - DNA, 584 bp, Homo sapiens
  MAP TO AP000356.1; EXPRESSED IN ADULT LIVER, SIGNAL = 2.1; EXPRESSED IN BONE MARROW, SIGNAL = 1.6; EXPRESSED IN LUNG, SIGNAL = 3.4; EXPRESSED IN FETAL LIVER, SIGNAL = 1.8
gattgaatgcagcaagggtctggaggctgaggaccaggcagacagacattcagagttgctggaacgcgacagagacagggagtcagactggtcatgcaaggtcctgggcctgcccttgggtcctggggagccacggaaggttgtgggtgccagagggttgcggtcagagtcacagtcaagggccttctgagacctgtgccccctccccaccctccctccccacctcctcaggccagctctggggtctcggcaggtggtccgcaacatgacctccgagttcttcgctgcccagctccgggcccagatctctgacgacaccactcacccgatctcctactacaagcccgagttctacacgccggatgacgggggcactgctcacctgtctgtcgtcgcagaggacggcagtgctgtgtccgccaccagcaccatcaacctctagtaggggctgctgggccgcctgggtgggaaagggccaggggcgggtggcccagggactgcccacttatccagtaaggtggctccgtcacctcttttcctggtgggaaactgaggcccaaccttggtagcttatcctgggcctc

SEQ ID NO: 14938 - DNA, 994 bp, Homo sapiens
  MAP TO AC007363.3; EXPRESSED IN PLACENTA, SIGNAL = 1.7; EXPRESSED IN ADULT LIVER, SIGNAL = 2.2; EXPRESSED IN FETAL LIVER, SIGNAL = 1.8
gaccgctgcctagttaccacctatgttcactcatggcccaaggagtctacaatcagcaggtggcaaatccaaccaggcttgtgtccttccctttagggcagcaagttctcccaggccccgggcaggtttggagatgctgcccaggagccagggcatggagttaggaacctcagaaacctacctggtactctattccactgtgggtgagctggcatccaacctgcaaaacaaagtccttcccactcttccctcccctttcctcaagcagagaaaaggttgtgtgtctggccaccatcaccccaggcctggggtgactgctgtctgcctaccaccagtattcactcaaggctcaagggctcttcagtaagcttgtggtgaatgctgccagtcctgagtctctcccttcagggcagtgagctccccttctggcccagcgcacatccagaaatgccatccaggaaccaaggcctggaatcagggaccccagggactgcttgttgctccaccccactgtgacccagctggtatgcaagctgcaagacaaagtccctttactcttccttctcctttccttaagcagaaggggtctttccccatagtcaccacagctgataatgtgctgggtcacatcttaagccaacatggcttggagtctcacccaagtcctgcagcaagtactaccactgtggagattattcagggcctaacggagctttcatcaagaggtgatgaagtcttccaagactgggtccttcctttcaaggtagcaggttctctcctggcccaggctgtgtttggaaatgtcatccaggtgctaggccctggaatgggggcctcaggcctctgcctggtgccctataatctttttataagtctctgtaatcctttactgctcaggagttatgtggccagaggtcacaagatttgtggcttccccagttgcttctatagataacattactattgtagaaactaagagtggtcttttgagagg

SEQ ID NO: 14939 - DNA, 543 bp, Homo sapiens
  MAP TO Z95114.19; EXPRESSED IN PLACENTA, SIGNAL = 1.5; EXPRESSED IN BONE MARROW, SIGNAL = 1.3; EXPRESSED IN LUNG, SIGNAL = 1.7; EXPRESSED IN FETAL LIVER, SIGNAL = 1.3; EXPRESSED IN ADULT LIVER, SIGNAL = 2.4
ccttactccttggacatcgcgctgggaggggaaacactgcaaaagccaccgcctccagggcctgtaaagagaagccaggctcaggtctttgctccttccagatgccacagtgacccctgggctccgtttctccctctttcctccctgaggctccatctgtaaagaggcaagcgaggaggatcctccagagacccatacaagactctggttcgcctcccctctctcctcagcccctgctgcctttgcctctcccaggtggggctgccaaacctatcctggctgattctgcttcgtttgaacctctggattttgtaggacatagacttcatgtccagaatcatgtaggtttcaaacttttggagtacaaaagatgaggcttttgaaacacagagacttttctctccagccacacatttcaaaacatattttgaaattcaaaagctgagttcagactcttcttctctttgcatttccactataatagttttattcctgagggcgagaacagcagaagatacctgggagagtgagggaggaagaaca

SEQ ID NO: 14940 - DNA, 1472 bp, Homo sapiens
  MAP TO AC007567.1; EXPRESSED IN PLACENTA, SIGNAL =   6; EXPRESSED IN HELA, SIGNAL = 1.3; EXPRESSED IN LUNG, SIGNAL = 1.4; EXPRESSED IN ADULT LIVER, SIGNAL =   2; EXPRESSED IN FETAL LIVER, SIGNAL = 2.3
agctcaactctgctcagaacaggctaaatacttagggctaaaattatccaaaggcaccagggccctcagtgaggaacgtatccagcccatactggcttatcctcatcccaaaaccctaaagcaactaagagggttctttggcataccaggcttctgccgaatatggattcccaggtacggcgaaatagctaggccattatatacactaatttaggaaactcagaaagccaatacccatttagtaagatggacacctgaagcagaagcggctttccaggccctgaagaaggccctaacccaagccccagtgttaataagcttgccaacggggcaagactttcctttatatgtcacagaaaaaacagaaatagctctaggagtccttacacaggtccaagggacaagcctgcaacccatggcatacctgagtaaggaaactgatgtagtggcaaagggttggcctcattgtttacaggtagtggcggcagtagcagtcttagtatctgaagcagttaaagtaatacaggaaagagatcttactgtgtggacatctcatgatgtgaatggcatactcactgctaaaggagacttgtggctgtcagacaaccgtttacttaaatatcaggctctactgcttgaaggaccagtgctgcgactgtgcacttgtgcaactcttaacccagccacatttcttccaggcaatgaagaaaagatataacataactgtcaacaagtaattgttcaaacctacgccactcaaggggaccttttagaggttcccctgactgatcccgacctcaacttgtatactgatggaagttccttcgtagaaaaagggcttcaaaaagtggggtatgcagttgtcagtgataatggaatacttgaaagtaatcccctcactccaggaactagtgctcagctggcagaactaatagccctcattcaggcagtagaattagaaggaaaaagggtaaatatatatacagactctaagtatgcttacctagtcctccatgcccatgcagcaatatggagagaaaggggattcctaacttccgagggaacacctatcaaacatcaggaagccattaggagattattattggcggtacagaaacctaaagaggtggcagtcttacactgctggggtcatcagaaaggaaaggaaagggaaatagaagggaactgccaagcggacattgaagcaaaaagagctgcaaggcaggaccctccattagaaatgcttatagaaggacccctagtatgtggtaatcccctctgggaaaccaagccccagtactcaaaagaagaaatagaatggggaacctcatgaggacatagtttcctcccctcaggatggctagccaccaaagaaggaaaaatacttttgcctgcagctaaccaatggaaattacttaaaacccttcatcaaacctttcacttaggcactgataacacccattagatgacca

SEQ ID NO: 14941 - DNA, 556 bp, Homo sapiens
  MAP TO AL035682.16; EXPRESSED IN PLACENTA, SIGNAL = 1.5; EXPRESSED IN BONE MARROW, SIGNAL = 1.4; EXPRESSED IN ADULT LIVER, SIGNAL =   2
ctatcctgcacaaagaccccaaatccattctcctgtcttccacagtagcaggtttcagctatgcacatgactgggtaatataaatataaaaactatacttcccagcctcctctgtggctcagtgtggttacataacaagactctggccaatacagtattagctgaagggataaatgtgatttctgggttacgcccttaaaggaaagggcgtgccctccttcctcttttttcccatccaggagccatcttggatgactcagatgagggtaccatcctgagaatggagagtgataagacagaaaaagcctgggttcctggtatgatggggccagcataccagccatggactgcttatccctgtgctgttacaagaggaagaaatcatctatcttgttaaagtcattgttactttgggtttggttacagcagcctctacatcctaatcaataccctctaataatcctcccaataacctcccctgccttgcaagcactaactgctttggaatcacgctcaaagactccataacaccgcaaggagtatctcagcagctggc

SEQ ID NO: 14942 - DNA, 561 bp, Homo sapiens
  MAP TO AP000356.1; EXPRESSED IN ADULT LIVER, SIGNAL = 7.6
gactccccttctccatcctgcctcagcagaccacactttctggatagacaggtcgaaggggtcacagcagccaatgctgggctgtatgagtcattgtagcatctgtgaactttgccacagtactagaatcagtgccaagaggtcactgtcaacgagccttcctgatgcgttcctgccccatgactgccctccagtggcaagaggtggtggcgtgtaagtgatggggatttataaaaccagaacctctaaagtacatctgtgttttgctttcagatgacgggcaggtatgagatgtacgcacgggagctcgccgaagctgtcaagtccaactacagccccaccatcgtgaaagagtagccggcttcagtgcctgccttggggtgaggaagacacctctgccccagtggattagcaagtgtggcaggcttaacatgtccaggttctccccaataacattgtccaggttggttttaaaattcccaggcagggggagagtggcatggggagtgacttcttaatgggtaaggggctgcttacttctggggtattggaaatgtttgg

SEQ ID NO: 14943 - DNA, 586 bp, Homo sapiens
  MAP TO AP000356.1; EXPRESSED IN ADULT LIVER, SIGNAL = 2.4
tgttcctgtaaacatgagtgtgcaaatatctgttcaagtccctgctgcaattgtttttaagactttgggaaagacatttggcccagccccttgttttgccatgaagcccagaggtaagggctgcccacagccaggaacaggacccagaagccaggccatggcactcctgagactgtattcttttgcagtgacttcccgctgctgggctgaggagcccccctcagaggctgtgcatgttggatataattctgccctttctcctatttatagctatgccctttgccttctgtacgagagagaagcttccttggacagaatttgctgagtcagcagaggatgggcccaccaccagattctgtcagaaggtaggacattaacggtgcctctggcagcagctgccaaatatgtgcaagtcacagagcatgaccacagctgccgggtttggcctttcaccatggaaaatgcacccatttggtgcttgttttgccagataagattagataagactatctgccactttttttttagcgtactcttagaattggggcgtgtaaggctccagaagggccattagctttttcaggca

SEQ ID NO: 14944 - DNA, 573 bp, Homo sapiens
  MAP TO AP000346.1; EXPRESSED IN ADULT LIVER, SIGNAL = 1.8; EXPRESSED IN FETAL LIVER, SIGNAL =   2; EXPRESSED IN PLACENTA, SIGNAL = 1.3
ccaggctgttagaaattccgtgttggtggcctgccgagaagtaggtggccctggacgcacaagccatcagcctgctcctgaagctgctacactcatgcatgggcagggtgtgcctgaaggccaccaaggccctcaccatgctgccagaggcccctgagggctgcaaggtcctgcaggcccatatgcacaccttccgtgtcctggaggaggactctgacagcaaggcttatgagggcgaggccttatagaaggtgacccagatcgccatcgatgtcattgagtggaaaccctgagcccctcattgggtcagacctgatcagccacctctgcacctgaataaatgcactcagtctctttatttcaagtgggaatggcactttctgctcgtggagcacagtcacgtctcttctcactctcttgccaaaggagaaatgccaggcccagaagcactgggtcctggatggtacaggccaaacctagtgctggcggtgggtgggaagcagccttggactttttctctctgctgggaccaagagttttcctcagaatgtagagaggattgagacctccagg

SEQ ID NO: 14945 - DNA, 557 bp, Homo sapiens
  MAP TO AL049758.11; EXPRESSED IN PLACENTA, SIGNAL = 1.9; EXPRESSED IN LUNG, SIGNAL = 1.5; EXPRESSED IN BONE MARROW, SIGNAL = 1.6; EXPRESSED IN FETAL LIVER, SIGNAL = 1.6; EXPRESSED IN ADULT LIVER, SIGNAL = 1.7
ttttcctttttgagggggacttactctgttgaccaggctagagtacactggcgtgatcatagctcactgcagccttgtactcctgggctcaagtgatcctttgacctcggcctcttaaagtgctgggattatgggaatgagccgccgtgcccagccccttacaagggttttcatgtcatcatgttatcagcaattttttcccagaaatgcatggattcactactacaaccccacagttttgcattcatacctgtctgaatagcctgtggttttcagaactgtttcagtatctttgctggtctcttttttccaataggaatctgaactgtcatcccagctagagaaagaactgctccttaactccactggctcgtcaaagtaactgtaggagcaagagtacaacagtgactttggaggtccttgttgacactcgtcctgggctctctcacttccacagatgtgggggatgcctccttgaagttaatggcagtcacataactaggtctagccaatgagacaggagcagacacgaggtgtgtcatttccaaggcctttca

SEQ ID NO: 14946 - DNA, 572 bp, Homo sapiens
  MAP TO AP000233.1; EXPRESSED IN PLACENTA, SIGNAL = 1.5; EXPRESSED IN BONE MARROW, SIGNAL = 1.3; EXPRESSED IN ADULT LIVER, SIGNAL = 1.6
ttcatgaaaatcctttgatttcttctacttcagcatggaatagagatgaggagtaaaagtgcaggtcaataaattgagcaaggctcttacttcatttgaccatttgaaaatttgcattaagagaaaataaaaatatgtgtacaattataaaaatttgttggtcttagaaaatgtaggcatttagtcatcatacattatttaacaacaatacgaaaaacatattcaagagatcatgaggaaaattattcctgagaagaaacacattcagataagaaaacagataatccttctcaggagaccatataaaaaggaaaaaagaatgatccatgtgcaggcagcccaggtttgggaaggaggtgttggtgaagagtatgaaaagagagtaagtaaagaaaacagctagtaatggtgagtgtttggagaaagactatatattacttggaatctggggaaaagccagaaaagattctgaaaaatcaactttcaaaatgattgaggccacagagagataaattcataaaaggtattttttcagcattaactcaaaagtccactgtccaaagtctcatctg

SEQ ID NO: 14947 - DNA, 561 bp, Homo sapiens
  MAP TO AP000354.1; EXPRESSED IN PLACENTA, SIGNAL = 1.2; EXPRESSED IN ADULT LIVER, SIGNAL = 1.5
tgtttcaataaatggctaatccagtatttttttcctccaaaaaaacaccttttcccctttgatttagtgtataccacacagagtcgcttagccgattcagtgacttttttgatagctggagaatgcttcctaatggttgcaggtgtgtaggggttttcttgacattttcagtaagaaagtgaatgttgtgccataggaaagctttatcacaggtgcacgttggtagccaactaaataacgtgagtgtcaagtacagtatctagtgagtggagaataactgtaataattacaattacagttgtagttaaagtgaagtttgtatcaaaatttctgtttcaaaggtgaacttttaggaggtgtatctgcggtgtttcttcctcagatgtgatttctctgaagcagtggttctctataactgacttgacacacagtgcatctgatatttcgaatgacttaagtgatagtatcaaaattactatcatatacatatttaaatcacatgactaacctgtgtgtggtattatgcaaactgctcagctcagtaagggaacagaaataaga

SEQ ID NO: 14948 - DNA, 577 bp, Homo sapiens
  MAP TO AB016897.1; EXPRESSED IN FETAL LIVER, SIGNAL = 2.2; EXPRESSED IN PLACENTA, SIGNAL = 1.6; EXPRESSED IN BONE MARROW, SIGNAL = 1.5; EXPRESSED IN ADULT LIVER, SIGNAL =   2
gtcccgcctgctgctatcgggtgcggccattgcagccaggccacagacctgggcagcgcgggactgtgccgcacactgcgggtggctgtaacacaacagtgaggaattgtgcatcacgacacagaaaagccacagtaaaaataaggcactaccatctcaaggggcccctgtgaggtacgaggcctgtcattgactaaagcacagccgtgcagcccaggacggcagttccttgccgagggcccgtgtgtttgtgtctggtgtgcgctgtgttccgaggatgaaagtgatggccgatgaacagaactctcgtgttgtcggtgcgaccaggtgcgtgctctgttgttcgctgtcctttttgcatccttggttgtaggccaaagaagacaagatagcagaactggaaacggaaaacgctgtccttcttctgaaattggcacaggtaatattttcacatgtcctgcaggctgagtggaatcgtatccagtggggagtgatttcgtgctgaagtcagcttttagcccttgtggaagaaatacattgggggtgactccctgggaccttttctttttgccatcga

SEQ ID NO: 14949 - DNA, 569 bp, Homo sapiens
  MAP TO AB016897.1; EXPRESSED IN PLACENTA, SIGNAL = 1.4; EXPRESSED IN FETAL LIVER, SIGNAL = 1.4; EXPRESSED IN ADULT LIVER, SIGNAL = 2.1
aaattaacttcaggattccaagtctctattttactctcatcattaactgatgcatgaataactgatttttcatacttgtaattttcatgtaaaaatgagaaccaggactttgttgcagttatctgtgtacatgttgggtggttttatttttgttttactttcctgcatagtgcatttcttacaatatatcttcaatgcagtgttttcgccttgtttttgcaatagggtgctggtcaagataaactaggaatctatgtgaagtcggttgtgaaaggaggtgctgcagatgtggtcagtatcattttgaaagaagtacattttcagtgtgtcatatattcagcaaatgatgtgagagattctgctgatacttctagttatgtacactatagtgcttgttggaagaacaaatagagtatctactcatcattaccttttcttcctcccgctctctttgctctctacccctaatccatgcacacacctgtggatttgcctaggatggacgtctagctgcaggtgatcagctcctcagtgtggatggacgaagtctggttggactctctcaggaa

SEQ ID NO: 14950 - DNA, 571 bp, Homo sapiens
  MAP TO AC006548.19; EXPRESSED IN LUNG, SIGNAL = 9.1; EXPRESSED IN ADULT LIVER, SIGNAL = 2.2; EXPRESSED IN BONE MARROW, SIGNAL =  35
cctaaataatcccaatacaccaatggaatatattatttcatcaggtactcagcagtatttcaaattttgagaagtatcaaaaaatgtgctctgtgacaaagtggtccccaggaagaaacacgttatttacagacatatctgtactgccctggtttgacctgggaccctagggacattgttcctatgctgagttactgagatgagccagccctgcagctatgcccagcctgctccactccctgctgattagcatgttcccagagcacagccccctgccctgaagacttcttaataggctggtcacaccctgtgcaggagtcagccccagtcaggacacagcacggacgcgagggcccccactcagctcctggggctcctggggctctggctgccaggtaaggaaggagaacactaggaatttactcagccagtgtgctcagtacagcctggctcttcagggagggcttcttataaatgattgattatgtagatgtttgtttttatgtttccaacctcaggtaccagacgtgatatccagatgacccagtctccatcctccctgtctgcatct

SEQ ID NO: 14951 - DNA, 569 bp, Homo sapiens
  MAP TO AP000233.1; EXPRESSED IN FETAL LIVER, SIGNAL = 9.3; EXPRESSED IN PLACENTA, SIGNAL = 3.6; EXPRESSED IN BONE MARROW, SIGNAL = 1.4; EXPRESSED IN ADULT LIVER, SIGNAL = 2.1
gtctgctaccacggggaacagcagtggtagagggtgagcaaaagttcagcttgagccggaacaaacactgaccagaggagtgtacagttgcaagatttaacagagtgaaaacagagctcccatacaatgggaggggacccaaagggggttgcccactcccggtttgaatccctgggttttatatcccaatcattgtccctccccctgtgctgttaggcgatatatgatttgactatttctttacctcctgcttttagcctaatttgtatttcagtgaaccctctttactacctgattggtcggatgcgagctgagttacacgctccgtgtttaaaggtgggtgtggtcacctttcccagctagacttaggaattcttagtcggcctaggaaatacagctagtcctgtctctcggtaactttggcaactttttggtaactttaaagactaactggatcatgtagtaaagtgggaagaatgttatgttcagcattcaagcagatctgggttcaaatcctttgataccaaatctcctttaaatttactttctgcacctgtgaaaaggggata

SEQ ID NO: 14952 - DNA, 558 bp, Homo sapiens
  MAP TO AP000359.1; EXPRESSED IN PLACENTA, SIGNAL = 1.3; EXPRESSED IN ADULT LIVER, SIGNAL = 1.3e+02
ttttatcccattctgtgtattgtcttttaactcacttagtaaagtccttttatacacaaaaggtttaaattttgatgaagtccaatttattttttcttttgttgcctgtgcttttagtgccacagtcaagaaattattgccaaatccaatgtcatgaaacttgtcccccatcttttcttctaagagttgtagagtttttagctcttacacttagatctctgatccattttgagttatggttatatggtgttaggcaacgtaccatcttcattcttttccatgcggatatcctgtttacccagcaccgtttgctgaaaaagactattctttctgtcttgaatggccttggcatcctgtggaaaatcatttgaccatgtatgttagggtttatctctaggttctctattctattacattggtctatatttctttccttacaaaagtcccatattgtcttgattactgtagttttgaagaaattaggaagtataaatctttggtggtctttttaaagattgttttgtctattcggggtccctggtgactgtatattagttt

SEQ ID NO: 14953 - DNA, 595 bp, Homo sapiens
  MAP TO AP000356.1; EXPRESSED IN ADULT LIVER, SIGNAL = 1.5
ccacattgagaaagaaaaagacgaatagcacagtaggaaataggcaaagggtatgaacaaaaaaatgtaggggaggaatccagactggccagtgaatgtgtggtgaggggttcagcctcaccggggatatgggaaacatttactcacagtgaggcaccgttcacaccagcagactggcaggtactaaaggtaactccatgcactgcagatattcacgtgtggctgggctgtagagcagcattaggcacatagccaaaggtcccaagggcccaccccagcggagtcccctccatcccctgcataggagactgctctgaacttggtgtgcatggagatgaccagcatctttgaactgttaatctgtgtgtatgtacctactgtttgaaaaaaaaaaaaaaaaaaaaaaaaaaaaagcaaaaaccaatgagtcgaatgaaatttcctactgaattagctcctaggtggggcctggccagagatcatgagaataagagcattaatccttgcagatgttcatcctgtccagtggttcccaaactttttgtgggatcattaatgagtagcttttcttatttctgaagaagcctccttgtca

SEQ ID NO: 14954 - DNA, 558 bp, Homo sapiens
  MAP TO AC004832.3; EXPRESSED IN FETAL LIVER, SIGNAL = 1.8; EXPRESSED IN ADULT LIVER, SIGNAL = 1.5; EXPRESSED IN PLACENTA, SIGNAL = 1.3
ggcagtcttgtcccattctgacaaattgttatagaagagtggtgggggtgaagaggtgacggggtaaggggcagccttagctccaggactatttctgtcacctgtaggctgaagatacaaggccagtgcctttgggagctcagtttcccatctataaagcagatatcagattttgcacccataagtgcatgtgggaaagtgcttgctgctgctgaatatttgcttgactagcctgagtcagacctcatagcctgcccacggatgagctcagccctccgtttgtttgtttccaaggagcctctcatggcaccagcctttggttcccattcatccccattcccgggtgtgatccggctcccctggcaagagttgtgtcagggactggggctcaagccagcctcttcacgtccccgaatcacagcagaaagttgggaaggaaactctggagtcctggcctttgccctagtcacccagggtcatggtgagcgtcagggggttgtgcttcacagatgccatgtgagcagcggacaggatgctgagctgaggaacacaagccct

SEQ ID NO: 14955 - DNA, 575 bp, Homo sapiens
  MAP TO AC004832.3; EXPRESSED IN PLACENTA, SIGNAL = 1.3; EXPRESSED IN LUNG, SIGNAL = 1.4; EXPRESSED IN FETAL LIVER, SIGNAL = 1.9; EXPRESSED IN ADULT LIVER, SIGNAL = 1.6
ccggaactggagatactaacaagacactattaggttgtcctcccgcatcctaatggccactctgcaaaatcctccgacttccctatcccctaaagtccaaaccagtgctcatagaagaagcgtaataactccttgctaggggcttttttgtagatgggcttcctgctcaggtcgtttctgccttcatccttcttcatatggttcaccagaagcaggatcaggaaaacagcagagaggatgcccgcgatgctgtccacaatcaggactgccacgacctccattctctcaaagatgttgctgccctgggcagtgttggacatgggtgccttattggacacatcctggtcccccgcagagagtgagatcctcctggggatgacctcgttgtcctccagttccttggtttcagtgggaccaggttcccaggccctgccctctcagggatgtggttatctagaagcaccaagggttggatcacttcagggatgatcttggggtcccttgactcatcaatatctctagagccagagagctcagagtcatcaggttcctgcccccaacacccacatccagag

SEQ ID NO: 14956 - DNA, 565 bp, Homo sapiens
  MAP TO AC004032.7; EXPRESSED IN ADULT LIVER, SIGNAL = 1.5
agcctccaatttcccgtaactcggcgactcctactcgcctggtaactttggaaaatattatcttagtgtttgcaattcttgatctgggcccaacactgaaattattgcagactttcttcttcttttttttcttcttcttctcttttttgacagtttgagcaaaaggagttgtttttgaacttcaggaggggaaaaacacgcgctcacgcacacgccccaaacagcatcattttgcaggacaaaatgtcccctgtgctccagagcaggcagccccagccccacttcagcaggcctcacaaacacttagtgtcactgcgggttatgtaagcgtggtttgggcctgtgaggttggacgtggccttgggttttgaaaggaggcaggggagtttgggtgaggagccgttcggctcaaaataaatccaggaactcagtgcagaaaaaaaataaataaataaaatctcctagactctaccaaaaggaatattcagatgtatagtctggagtgtccagaactgagaaaacacaagccagactgtggccaacatggctttcttggccccaccac

SEQ ID NO: 14957 - DNA, 571 bp, Homo sapiens
  MAP TO AC004624.6; EXPRESSED IN PLACENTA, SIGNAL = 1.3; EXPRESSED IN ADULT LIVER, SIGNAL = 1.5
gccgtgtctctagtgttctgcacagtgcctggggaatggcaggcaggcaatgactattctgggaacacattttgagtgagggtagtgagggtcagagaaagctctggtgtgtagaaatagcatatactatgaaacagatgagcctgttcaatttccatgagcttcctaatcacatggggaatggaaaatacagatgagataaaatgctttcttctcaaaatgccctaatattttgtttcaatatcaagattcattagagccatttcactttcgctgtccttaacattccggtccaattgatggattcgttcaggagtcagggtccctttgaatctcattacactagggctcctgggtgtattgatcctatttagaaataaggcagtaaatcgtccacagacgttgggaccaaacctccaggctgccaagggaaagaatacagaaagcggggctttctcgctgcattgtctgcttttaatttaacttttagcacaagtttgaatttctgaaccaacaataggtatcaacagctttaaaaatgtttattcccttggagacaataattcaattt

SEQ ID NO: 14958 - DNA, 555 bp, Homo sapiens
  MAP TO AC007106.6; EXPRESSED IN FETAL LIVER, SIGNAL = 2.7; EXPRESSED IN ADULT LIVER, SIGNAL = 1.6
ggcacaagcttatattgatgcacaacataaatgaattactctcaggccctggcaattgagtatgcaataattatagcataatgagataatgaagagactctgtcaggttttttttaagcagagaggcttgaggatacaaatatttgaaaacagagaataccaattagttttcatgttgccctattagtaggacagagacttatattttgttaattctgcagtgaaatgaaagaaggagggaaacaaaatgcaactcatattatggtgctggtgataaacaagtcatggccattatgtgctggaaacatagtaattgaaaatcagatttccttgccagcaaaagcaacctctgaactactgttgcacaagtgatacataggatggggtcttagtccgattcctatattctctctgtttgcttggaatttggatcccaaatgtgacatttatcagtacttatctaaagaatatcttaacaccattttaggttaattatcgttatatttaggtcctagctatttgatttctaccaggcctggaagggtacttaatttt

SEQ ID NO: 14959 - DNA, 598 bp, Homo sapiens
  MAP TO AC007281.3; EXPRESSED IN ADULT LIVER, SIGNAL = 3.6
ttcagctcttttgaaacttgcttctaagaaggaaaaagcaaaatagttttggacacagaataatctgcaaagacttggatgtaagaaattgttaccttgttcagggaatgggaataatttccatattctggagctcagatgccagatcataaaaggtcttagaaagcctgttgaggggtttgagctttgtcctcagggaagtgggaaaccaatgaagagttttaagggacgtgaagagtgtcagatctgcactttaggaatttcattttggctgaaacgtgaagaatggaatgatgcgatttggcagtaatttgaagggagtggttagttatatcagtcttggagacagacacaggtttgaatctcccttcagtgtttatgttcagtactactatttatcacaaatatttcacctttctgattctttcaggtccccaagacatttctttcaccattttaaatgttaaatatcttctgtaccattttgtatacctgccaagtattgggatcacttataaattagattttatatagtaggcaaaatctggtctccttgtttccacccttgccccttcagtcttttctgcactgaaccagc

SEQ ID NO: 14960 - DNA, 561 bp, Homo sapiens
  MAP TO AC007313.3; EXPRESSED IN LUNG, SIGNAL = 1.2; EXPRESSED IN FETAL LIVER, SIGNAL = 2.3; EXPRESSED IN ADULT LIVER, SIGNAL = 2.1; EXPRESSED IN PLACENTA, SIGNAL = 1.6
ttgggcatgcttgttaaatgcttttcataaaatgcttattaaacttctcaggtgttctgataataggagataatttttgggtttgtagaattcaagactaagttgatttttttttcttgctattcatatgttttaatgaagagtgtcatgccagacccctattaacttcaatagggaacgtgccaggttcaagaggccaaagaagagacccagagccagtaaacaagatgtggggtttattgagggaaacttacatacagggatggtccagtggcagtgggctggataggagaactgtacagaccagtcgcagcagcctgggcaggagcaccacaccgcttgtgaaaagcatgcagtttatatagcatttcacttagcaccctcaccctagaaacctccacctggcaaccttcatttaacccaaacaagagagcctcgatctcctgtaggcccgtattccatgggatgaactgggtgttcaggtgtttctcataggtaaggaatgaatctccaggttggctactcccagattccttagtttggcactccaaacacacattc

SEQ ID NO: 14961 - DNA, 556 bp, Homo sapiens
  MAP TO AC007539.8; EXPRESSED IN ADULT LIVER, SIGNAL = 3.4
caatactctgctaagcattttgcaaggataatttcctctactcttcacaacttccccaggggacagggttttacagatgtggaaactgaggcttagagaattgaaataatgatccagaatcaagtgacagagacaggattcaaacccagcaatcataaccactgcagtcaaggtggcccacctgaagtgtgttgggagtggctggaactgacacctgaggagctctgtgacccagcagaattctgtgcttttcctggggagagcttcttctaagaagaggtggccacgacagccgatagaaggctgtgacctgagtgcaagccacgtgccagccactttctgtatgtgagaccgtgctgcttgccaaaagctgttagttccttccattctggctggctgggagagatttctcatggttgtgcgtggggagagttgacatgtttatgtggaggtaatgactgtgttggctccttaaggaagaattaggatgagagcccagttccctgtttggggacttgaacttagattctctggtggcctggaaaaggtggatacc

SEQ ID NO: 14962 - DNA, 584 bp, Homo sapiens
  MAP TO AP000129.1; EXPRESSED IN ADULT LIVER, SIGNAL = 4.3
cagaaaaggatggcaaataggtacaaactggggctctgaaattcacatgcagttagtctgtcaaaactgatctacaaaactggagatgttttgtgttcagagacagtttcccaaggagatgctaatggccgtccatgacaaagatccacccccagataactgcagacatttccaccagtgaatatccacttttgggaaatgtaggcaaattatttcttcttccaatccatttcaaagacgactttatttcactttagatgagggagagagaagccaataaagagtttgaagattcctctattggcacaggcagcgtgaatgctggaatcccaagagaccatgaggtttagtcgctcacccccagcggtcacacgctaaactgtctccgacagacaagtgctggttgcagagccatctagacacgatgatccagagagtctgatgcaagttcaacgtctatgcctcacaacagtcccgtctgcttttctcactgcagtcactggcctccttccaaatctagctgggtttcctatacagcagcaacctggcgacccgccactgaacacagtgcagtttggattgcc

SEQ ID NO: 14963 - DNA, 549 bp, Homo sapiens
  MAP TO AP000356.1; EXPRESSED IN ADULT LIVER, SIGNAL = 5.5; EXPRESSED IN PLACENTA, SIGNAL = 1.2
caatttgctgggccttcaggcctgagatgagagacaggccttttgggcctcagcatttggcagacactggggaggatggcatggactccgtgtcctgggcctgcctcaaggtgcctgaccctctgtggagcccacagtgcatctacacaagctcacagatgtgtttctttgttcctttaaagctcaccaggactttggctacttttatggctcgagctatgtggcagcccctgacagcagccggactcctgggctgtcccgtagccgggatggactgctagttgctaagctcgacctaaacctctgccagcaggtgaatgatgtctggaacttcaaggtaggtccccaggacccctgttgttgcctgctcctctgctttggccctcatcctgctctcaggaactgctgttgcggggttgcccatggcagcatgaggtaccagctcccacctgagggctctgtgtgagctgagggctgaatctctgcctccttgctggctcccgggaggaacagttgggtcaaacaatgtacaagcagcaggctgcaata

SEQ ID NO: 14964 - DNA, 572 bp, Homo sapiens
  MAP TO AB016897.1; EXPRESSED IN ADULT LIVER, SIGNAL = 2.8
cttctctttatgggggtcggcaaacctttttgggaaagggccagggagttaatattttcgtcgttgaaggccacgtggtctccaactcaatcatccagctttgcccttgaggaagaagcagccatacacagtctgtaaacaaaggacggggctgtgttccaggcaaactttgttgtttacaaaaacaggcggcaggctggggttggtggggcttgtgtttaattaacgcagcacacaaagtcttatgacgtcgttttactcttttctctcaggaaacaattctggtgaaatgtgatcgtcctggccaccctctgattgataagacatatcattttgaaaggtaagtgcttttcaagatgtcctataaagcaaacttccatattaaaaatacaaattttgcattggggtttgagtaatgaaatatgtaatttatcctatcatttgactaattgtgattataaatacagacggtccctgaggtagatttttcaactttaggaaggtgtgaaagagatacacattcagtagacactatgtctcgagtgcccattacaacccttctggtttttgct

SEQ ID NO: 14965 - DNA, 481 bp, Homo sapiens
  MAP TO AC007193.1; EXPRESSED IN FETAL LIVER, SIGNAL = 2.3
ctgtggggtcagcacctggccgggccaggaggtggcctgtgagtgaccacccccggggaggtggacgagtccctaatgtttccctcgctccccaccagggcccatgtgtgacctgctctggtcagatccacagccacaggtgagtctagggtggggtgcagggccggcgggtgtgggctgtggcagcaggtggaggcagacagtcaccctgaacccctgtctctcccttctgcccaccctcagaacgggcgctcgatcagcaagcggggcgtgagctgtcagtttgggcctgacgtcaccaaggccttcttggaagagaacaacctggactatatcatccgcagccacgaagtcaaggccgagggctacgaggtggctcacggaggccgctgtgtcaccgtcttctctgcccccaactactggtatgtctttgcctttccagcccagggcctctaccaagccacgggtttttgtcttggtt

SEQ ID NO: 14966 - DNA, 458 bp, Homo sapiens
  MAP TO AC007132.2; EXPRESSED IN BT474, SIGNAL = 1.2; EXPRESSED IN HELA, SIGNAL = 0.77; EXPRESSED IN PLACENTA, SIGNAL = 1.6; EXPRESSED IN HBL100, SIGNAL =   1; EXPRESSED IN FETAL LIVER, SIGNAL = 0.82; EXPRESSED IN LUNG, SIGNAL = 0.7; EXPRESSED IN BONE MARROW, SIGNAL = 0.63
acctccatgacatgagtttacctatgtaacaaaccttcacatgtacccccaaacctaaaataaaagttaaaaaaataaaacacaaaatgattgtatattgatatggtttggctgtgtcctcaccaaaatctcaacttgaattgtatctcccagaattcccatgtgttgtgggagggacccgggggaggtagcttaatcatgggggctggtctttcctgtgttcttctcatgatagtgaataagtctcacgaataagtctcacgagatctgatgggtttatctggggtttctgtttttgcttcttcctcattttctcttgccacagccatgaaagaagagcctttgcctcccgccatgattctgaagcctccccggccatgtggaactgcaagtccaattaaacctttttttgttcccagtttgggtatgtgtttatcagcagcatgaaaatgaactaa

SEQ ID NO: 14967 - DNA, 464 bp, Homo sapiens
  MAP TO AL078476.2; EXPRESSED IN PLACENTA, SIGNAL = 1.4; EXPRESSED IN HBL100, SIGNAL = 0.76; EXPRESSED IN HELA, SIGNAL = 0.92; EXPRESSED IN BT474, SIGNAL = 1.6; EXPRESSED IN BONE MARROW, SIGNAL = 1.3; EXPRESSED IN FETAL LIVER, SIGNAL = 0.81; EXPRESSED IN LUNG, SIGNAL = 0.79
atagctggtttacccatgccagttttttggagtgactgagatgtaagttgttggcatgatgtttccagcagaggaactaagagctgaagggtaattacgcagcatgtcatgcgaaggcaagtctgaagaaggtgttggggaggaagacacatctgccttgcttatgtctgctgataatgaaaatgatgactctgtctcagatgataactttatagatttgcctccttggtatgaaacatctttcacacaaccctcaattgtaggagtcatttcagagtccatcaatccagtagaaagttcagaatcttctttctgttccttttctccttgtagcctttctataaccaactgttcctcaggacataatgaagtgctttcctcatgtggggacactaaggtttctagtggaagagtgacagattcaatgacaaattttggaggccttgattcttctttggatacca

SEQ ID NO: 14968 - DNA, 380 bp, Homo sapiens
  MAP TO AC008266.1; EXPRESSED IN PLACENTA, SIGNAL = 0.73; EXPRESSED IN FETAL LIVER, SIGNAL = 1.4; EXPRESSED IN BT474, SIGNAL = 5.1; EXPRESSED IN BONE MARROW, SIGNAL = 0.99; EXPRESSED IN HBL100, SIGNAL = 3.4; EXPRESSED IN HELA, SIGNAL = 1.8
gacaaaccatatgcaagcaaaggatactcaacatatagataaaacaaaagcatttatttttcatgagttaactgataaaatgttcaacataccaaactgaatcttattggaacagatgtatgggccataccatctatacaattcatacctgtcatatcatcattatcccaacggcgccgttgctctgcaagtttttgcatacgtgttttaactgaggaggctgcagttgcttccaatcttgagttcagccctctcctcatgcccagcagtgatgccgggacagcaacagaatcactgatggtatctgctgcttgtggctgcacctgaggagacacaggacttggagaacaagattttgcagatgtcgactcaactggttg

SEQ ID NO: 14969 - DNA, 481 bp, Homo sapiens
  MAP TO AL031729.16; EXPRESSED IN LUNG, SIGNAL = 1.2; EXPRESSED IN PLACENTA, SIGNAL =   5; EXPRESSED IN BONE MARROW, SIGNAL = 4.8; EXPRESSED IN FETAL LIVER, SIGNAL = 0.91
tttctcaagaacccagagggccaggatttgaggctgccccaattggtggacatggcagcccaggtaactgggccagcagcctttacctcccggacctcccacctattaactgttcacaaattctctgtcccttcaaacgcctgggagggcggccccgccccctgcatcagctgtgcctccagctgtgcctgagaggtactgcctctctttctgggcctcagtctccccctctggaaagtgggtttttcaaatggtccctcacccctcaaacaggccacggtgttgtgagtccacatgagctcccatctctccacactatggtcccccaggtagctgagggcatggcctacatggaacgcatgaactacattcaccgcgacctgagggcagccaacatcctggttggggagcggctggcgtgcaagatcgcagactttggcttggcgcgtctcatcaaggacgatgagtacaacccctgcca

SEQ ID NO: 14970 - DNA, 392 bp, Homo sapiens
  MAP TO AF124731.2; EXPRESSED IN FETAL LIVER, SIGNAL = 0.72; EXPRESSED IN PLACENTA, SIGNAL = 1.6; EXPRESSED IN BT474, SIGNAL = 0.61; EXPRESSED IN BONE MARROW, SIGNAL = 0.98
gcctctaggttgttcctctggaggttttttattttcatttttgttttaatgagtatgtatcttagcctgtatttgacactgtcattttttaacaagatgttatttaagtgaaatcttgcatgtgtgtttgcaggttgatgataattagaagcatgctttccactgaacttcccgacaacatttgttatgcagaatgtctctgagtgagaactcggtttttgcctatgaatcttctgtgcatagcaccaatgttttactcagccttaatgaccagcggaagaaagatgtgctgtgcgatgtcaccatctttgtggagggacagcggttccgcgctcaccggtccgtgctggcggcatgcagcagttacttccactcaagaatcgtaggccagg

SEQ ID NO: 14971 - DNA, 461 bp, Homo sapiens
  MAP TO AC006028.2; EXPRESSED IN HELA, SIGNAL = 1.1; EXPRESSED IN PLACENTA, SIGNAL = 0.69; EXPRESSED IN BT474, SIGNAL =  10; EXPRESSED IN HBL100, SIGNAL = 4.3; EXPRESSED IN LUNG, SIGNAL = 0.64; EXPRESSED IN BONE MARROW, SIGNAL = 0.73; EXPRESSED IN FETAL LIVER, SIGNAL = 0.83
ggcatgtaccaagtccttccaggtgacatttcctccctgtgtcccagcttttagggatcattggccatgggtccaaggggagggaatgtggagacagggttgtatttgccagggaattctgggccgacagggagcaagagcgcgcttgggggcaaagtcccattgtctcatgctgttctccagtcccgagatggtggccaccatgaagaagacggctgcagaagatgtcaatgttactttcgaagagcaacaaaagataaacaaatttgcatggaatacaagtagaatcacagagctgaaggaagaaatagaagtaaaacagaaacaactccaaaacgtagaagatgctcgtgacggtaccatgcttgcagatgctgactgcttaatgatgccttatcaaatcggtgatgtcttcattagccattctcaagaagaaacacaggaaatgttagaagcagcaa

SEQ ID NO: 14972 - DNA, 457 bp, Homo sapiens; identical to SEQ ID NO: 1457
  MAP TO AB023054.1; EXPRESSED IN PLACENTA, SIGNAL = 1.7; EXPRESSED IN HELA, SIGNAL = 0.63; EXPRESSED IN FETAL LIVER, SIGNAL = 0.97

SEQ ID NO: 14973 - DNA, 474 bp, Homo sapiens
  MAP TO AL121654.1; EXPRESSED IN BONE MARROW, SIGNAL = 0.92; EXPRESSED IN FETAL LIVER, SIGNAL = 6.7; EXPRESSED IN PLACENTA, SIGNAL = 0.94
attgtggggtttcttcaagccatggcatactaaggatatgatgactctccgagaaggaacccctagtttggcacattcatcacagacttggagctccactccagaaaacactttcctaaacagggcagataatcctatacacacaattggatcttgaagctttgaaaactgatatttgattctgtaaattttatattcatttttctttctttgtctcttacacaaaaacacacacacatatgcatgcacacacacatgtacaaatgcacacgcacatgctcatgctagacaaccacacacatctccagagcattcatctgatcttttgcagacaagaaagagcagacaagatctgcagatttcacagataatcacagttgcattttggataggaacacccatccttcaaagtctgggaggtttgtcttagatttccttctcaaaaacaggaagtctaagaaatgccctgggctt

SEQ ID NO: 14974 - DNA, 391 bp, Homo sapiens
  MAP TO AL033528.6; EXPRESSED IN PLACENTA, SIGNAL =   1; EXPRESSED IN HBL100, SIGNAL = 1.6; EXPRESSED IN HELA, SIGNAL = 1.8; EXPRESSED IN FETAL LIVER, SIGNAL = 0.96
aaaagccaactgaatcctgcttagggcagtttttctgcagaataatatttgttcattcctgttttattaggaaagacaaatggcagtgaccagaagagtgtttcatctcatacagaaagtcagatcaacaaagagtccaagaaaaatgcgacccagctagaccatttgatcccaggcttagcacacgattgcatggcatcccctttagccacttcaaccactgcagacatccaggaagctggactctctcctcagtccctccagacttctggccaccacagaatgaaaaccccattttcaactgagctatctttgctccagcctgatactccagactgtgctggagatagtcataccccactggctttttccttcaccgaggacttggaaa

SEQ ID NO: 14975 - DNA, 448 bp, Homo sapiens
  MAP TO AC009437.1; EXPRESSED IN FETAL LIVER, SIGNAL = 1.3; EXPRESSED IN HELA, SIGNAL = 1.3
  unsure 22
  unsure 216
  unsure 271
  unsure 282
ttgcagtaatcgcctaaccctnctgtgtatgactgccctgcatccgtccccattgttttggtctgtgcagtcctatgtctttcatccggaagttccccattgagagcttttgttgtttggacacattataatacctcttacatagcttggggcacattgcttctgtggacaataacagtgatcttaataaggaccaacagtaaataacaaacacanacaatagatacaatatcatgtgacaactcagatcacaaaattggtcttgcaaccnagagtccttcngggactggtccaaaccactttgtgagaaatggcagcggtgggctgtctgcaggcttttaatccggcctgcaccggaggtctccgacctatccgtgatgtggcagaaacgcttggctctgccgaagacaaatgcaaggccgcactctgtgttaggaaacgctctggg

SEQ ID NO: 14976 - DNA, 482 bp, Homo sapiens
  MAP TO AC011331.1; EXPRESSED IN LUNG, SIGNAL = 1.1; EXPRESSED IN BT474, SIGNAL = 1.8; EXPRESSED IN FETAL LIVER, SIGNAL = 2.6; EXPRESSED IN HBL100, SIGNAL = 1.2
ggctttgtacagccttggaggccctccagtcaaaataacaaacatgacgtatggaaagagtatgatgtgacttaagtagtgtcaccgactgtgcagatccaaattgtgttgtcctgcaatgtagtcatcttagagggcagcacaattaattggccattactcagaagatttttgaggcctttctagaattgatatatatatatttttttggccttcatttgggaatttactcaaatgtggccccgaagccatggctagagccagagagccccagagcaaggagaagggcatgcagggcatgctgtgatgacctcttactcacagccgaagaaccaacctcataatcgtccctttaactttattccgcagcatggatgggaagttgttgactcaaatgactcggcttctcagcaccaagaggaacttcctcctcctcctctgcctcccgggtgggaagaaaaagtggacaatttaggccgaac

SEQ ID NO: 14977 - DNA, 476 bp, Homo sapiens
  MAP TO AL109799.4; EXPRESSED IN FETAL LIVER, SIGNAL = 1.7
tcactttgaccaaggtctgcaaaatagcaaagaactgacaaaatggtgcagtttggactcacaggtgaccctacccacgctcctcttcttcttccccatagatccctactctgtgcttcaaccttcttcttctctggatcaaaccccttcctcaacccgcattccttcttctcatgaagcccccttgctatccagtctctatcctgttcacccaaaataatgtcctcctggcctctccctgttttcttaacagatgccggagaccccaactggggactcagacccgcaacctgctcctaaaaaaatgaaaacatctgagtcctcgaccatactagtggttcgctacaggaggaacgtgaaaagaacatctccagaggaactgctgaatgaccacgcccgagagaacagaatcaaccccctccaaatggaggaggaggaattcatggaaataatggttgaaatacctgcaaagtagc

SEQ ID NO: 14978 - DNA, 387 bp, Homo sapiens
  MAP TO AC006023.2; EXPRESSED IN PLACENTA, SIGNAL =   1; EXPRESSED IN LUNG, SIGNAL = 0.99; EXPRESSED IN BT474, SIGNAL =   1; EXPRESSED IN FETAL LIVER, SIGNAL = 0.9
tgcggggagaagaaaatagattagatgttttccttgggatttatttattaatattattaagtccagagagaaagatgaatgttattaaagtaacaaagtaacacttcttttcaaggattaattcttcctctaccagccttttattgttaaaaattgtgaatttatggaaaggttgtaggaataagtttctaatgtattaattattctcattcttaggtgcattttatctggtgtttgaatatatggaccatgatctgatgggactactggaatcaggcttggttcattttaatgaaaatcacataaagtcatttatgagacagctcatggagggtctggattattgtcataagaagaactttttgcatagagatattaaatgttcca

SEQ ID NO: 14979 - DNA, 473 bp, Homo sapiens
  MAP TO AC010732.1; EXPRESSED IN BONE MARROW, SIGNAL = 0.92; EXPRESSED IN LUNG, SIGNAL =   1; EXPRESSED IN BT474, SIGNAL =   2; EXPRESSED IN FETAL LIVER, SIGNAL =   1
acatttcaactcccgtctcggcaaagtcatctccaccccgctggcctctgtagttcccaggcacacacctggcgacctcccttctttcaggggtcacccagtccctttgcctcatgcaccccacgcctctgatggcatcacattgtccggtgtgtgtacatgtttgcctctcccagatgtgagctgtggcaggagggcagggactgcagtccccagcgtctgcactgcaccagggcttggagaacaggccggggtgaccctcgctcacctccttccagaagataaagagggtcccgctgatgatgatggccgcggacatgaggatcttcaggatgagggctctgctgaggatggtgtcccgcacactccgtggtggctgcctgaaggcgtctttgtcaacgggctctacccccaagctgctccgaacaagacacagacactttgaaatgaaccaggaatgaaataaaggaccc

SEQ ID NO: 14980 - DNA, 468 bp, Homo sapiens
  MAP TO AC009953.2; EXPRESSED IN FETAL LIVER, SIGNAL = 2.3; EXPRESSED IN PLACENTA, SIGNAL = 0.94
cttctcagaaccatcaaaatgctaacatgcactggctatctccaaaagagggatgaggtgggaagatacaataaattttcaaaacttatttgagacaacattcgttaaatacttcactggatatgcacttcaggatatttaaggttgttttgttgtttaacatacagattacttagttttgttgtttaacatatagattacttcgtgaagcctttttcctctgaggcagaatttcccagtgtggaggtatgggacagtccattggcaaaaatgtcttttcattaaaccaaccaaaaagcaaacgaatgcattataattatagtaaagaaggcaacaagtttacctcctttaaaccagagaagaatttacagatggagaagaaaaagggtaacaggactaaaattaattttaagactgttgtgccccagaagttattaaaggggaaggagaagggaaggaagtgtgtgg

SEQ ID NO: 14981 - DNA, 483 bp, Homo sapiens
  MAP TO AL035250.17; EXPRESSED IN PLACENTA, SIGNAL = 1.5; EXPRESSED IN HBL100, SIGNAL = 0.93; EXPRESSED IN FETAL LIVER, SIGNAL =   1
catgccccattactgaaaactttcagtgatttaccaaggggagagggaagcaatagaaagcagaaaggaggggctggaagggcgggactgaatctcagcccagcccagcaacctttgaccacagagtctttatcaggctgcttatcagcaacagcagacagccaggcacaccttttcccagagtctgtaagctttctgctaattgaggctaacagaccgtcctgcaggggacagggtggacaggtttgctccggggcactccaggagctaagatcagagtcagaaggtccaaagaggtggaccccagcagaacttgagcaaggactttctactcaccagccagcatcctccaatcacaggattggatatggcaggaggactggttttggcccaggaagggcttctgcagggctggaggttgtgttgttatcattgtggccaccatcttcaagacgttgagtgtttactagattgtaggcgctg

SEQ ID NO: 14982 - DNA, 445 bp, Homo sapiens
  MAP TO AL121789.1; EXPRESSED IN HELA, SIGNAL = 3.7; EXPRESSED IN FETAL LIVER, SIGNAL = 2.6
taattctgtggccttgcaccctgtgtcatgcgaatagggccaagtaggagacggaaacacaaccgactcggaaaatgccttctgtgaacttgaaaaggaaaaagaggaattaggttgaaacaacttactgggaagtcagtacttgcaaactgtaaattgggcataaaactgaaagaagaaaattcaaatttgtgggtaaaaaatcagggtgttaaaatattgaacgtgaatcaataaaaatagatttagctttatttccctccgttttggccttcagggtgtggattcatgcattcccctgcaatgctgcaaacccaatcagaacatgaggttagatcataggaaccagaaaatgaaagtgaccacaggcagggctgacatggtgcagactcacagtggatgctgtgtgacggctgagagaagcagcgggagtgtgaaaagacat

SEQ ID NO: 14983 - DNA, 476 bp, Homo sapiens
  MAP TO AC005948.6; EXPRESSED IN FETAL LIVER, SIGNAL = 0.96; EXPRESSED IN HELA, SIGNAL =   1; EXPRESSED IN PLACENTA, SIGNAL = 0.99
cactatgcagagccaaagattcatttatatattcattcactgaataattagatatttactgagccactgccaggtgccaagcccagctctcaatacagggtgtgtgttagtgaagactgcagagagctgccctcccagggcacagttccagtcagggaaacagacaaattaagaaataaaaatgtgacataataagtagtgataagatatttgaaaaaaaaaagtgaagcaggggaagggattagggagttgttttttttcaacagagaggccaaggaaggcctctctgaggagatgatgtttgatcagagacctggatcaagtgaagaaatgaccaactcatggggagatcagaggggagcaacaccaatagccataaaccaggattgtcccaggaaaactaacacctgtggttaccctatagaccaaggtgaggactttggattttattctaagtgtgaggagaagcttcaggg

SEQ ID NO: 14984 - DNA, 477 bp, Homo sapiens
  MAP TO AC010082.2; EXPRESSED IN FETAL LIVER, SIGNAL = 1.4
gaagatcctcctctggagccatgtgtaagacttagttaaatgttaaaatatgccaaagacttcatccactctgatattttgaaaactccaaatacaatttagttgacaagcttcatcagtggaatatcagatagcagctctctccctaacacgcgtcacctgcccactcagctgtgaatgggaaaatgtgtcatgccaccttcagctctgcatttttctctttcatggtgacatgagtacttgttgaatagtcttatttcttattcaactatgaaaacagtgtcattgtgatacatctcagatgcaaactggcattttacaactatttctatatctacttggatgaaattgtctgcgataataattttgttaatgataattttgcatttttctgaaattttaaaatctacttggacacaatcctgcaagctgtctgcaaattctgtccaattaacttcagaaaaagccaaggttcaa

SEQ ID NO: 14985 - DNA, 464 bp, Homo sapiens
  MAP TO AC011364.1; EXPRESSED IN FETAL LIVER, SIGNAL = 1.5; EXPRESSED IN PLACENTA, SIGNAL = 1.6
aagcttcaattattcctctgctcagacttttaattgagacgagatgtatggatggcttggtatgaatgtcaattggtggtagctgtcacaatgaagcagaactgagtagattcttaataagcacatctattcctgggtcccacaccgttaagcgggagggtgtgtatgttaggggtgctctttgctactgggcctctcacttggcggtcttccctcttcggtgggacagcatatatttcctgatatgtaccccctcactctcccaactctgtctgattattccagaactcaggggacttgaggatggaggctgctggaagtgctggctctgggaatgtgcacttcgttcaccctcctctaaggggtgtcttctccccagagaagcagagacaagtgactgcttagggggtggggattctccccagctgccatggtgcaggatcaagaataacttgcgtggccag

SEQ ID NO: 14986 - DNA, 430 bp, Homo sapiens
  MAP TO AC006323.3; EXPRESSED IN BT474, SIGNAL = 2.9; EXPRESSED IN FETAL LIVER, SIGNAL = 0.95; EXPRESSED IN PLACENTA, SIGNAL =   1; EXPRESSED IN HBL100, SIGNAL = 1.7; EXPRESSED IN HELA, SIGNAL = 2.5; EXPRESSED IN LUNG, SIGNAL = 1.2; EXPRESSED IN BONE MARROW, SIGNAL = 1.2
ttcagactatcaaaagcatatcaaaacaagtatattagacatgcaaatgattatttgtgataaatggataatgtgatacattttttgactaacctggcttatatagtatttttttttctcttccatcaaaatgagttttagaactttgccctgatgttgacatttttcatttcgtaggagggagcaaaggagtttgctgctgctctcaccgctgagcggataaagaccccaccaaaacgtccaggaggccgcagaagaggacggcttcccaataacagtagcaggcccagcacccccaccattaatgtgctggaatcaaaggatacagacagtgatagggaagcagggactgaaacggggggagagaacaatgataaagaagaagaagagaagaaagatgaaacttcgagctcctctggtaagacacgtc

SEQ ID NO: 14987 - DNA, 469 bp, Homo sapiens
  MAP TO AC004838.2; EXPRESSED IN FETAL LIVER, SIGNAL = 1.7
tcatctatgtgcttgagtccttgacaattattgtgcagagcagcctaattgttgcagtgctgggcagagaatggctgcaagtcagaaggctgatgcctgtggacatgattctcatcagcctgggcatctctcgcttctgtctacagtgggcatcaatgctgaacaatttttgctcctattttaatttgaattatgtactttgcaacttaacaatcacctgggaattttttaatatccttacattctggttaaacagcttgcttaccgtgttctactgcatcaaggtctcttctttcacccatcacatctttctctggctgaggtggagaattttgaggttgtttccctggatattactgggttctctgatgattacttgtgtaacaatcatcccttcagctattgggaattacattcaaattcagttactcaccatggagcatctaccaagaaacagcactgtaactga

SEQ ID NO: 14988 - DNA, 470 bp, Homo sapiens
  MAP TO AC005158.2; EXPRESSED IN FETAL LIVER, SIGNAL = 1.3; EXPRESSED IN PLACENTA, SIGNAL = 1.1
gttatgggcatttccctcggttctcttttttgcttgtgtagagtttcactggtttgttaaattttgagacttttttttttgccagaaaacctgtggagaagtgtcatccacattttgaatttcctaaagctctaggcttttctcagatgacaggtgaagtggacttttgaaagttttttttttttttccaccattttggaaagttgatggctctgttgttttctttagggcatttttggtcgaagagagctgaagtaatgagaagacatcatggaggcccagtcccacagctccacgaccactgaaaagaaaaaagttgagaattccatagtgaagtgctccactcgaacagatgtgagcgagaaagccgttgcctccagcaccacttctaatggtgagcagcacagggattaccagcagcccagcctggagtcatttctgtgttctctgcattccttgtgaattgagcg

SEQ ID NO: 14989 - DNA, 477 bp, Homo sapiens
  MAP TO AC006023.2; EXPRESSED IN PLACENTA, SIGNAL = 1.1; EXPRESSED IN BT474, SIGNAL =   1; EXPRESSED IN FETAL LIVER, SIGNAL = 1.6
gactgcagttctttttatgtacaggtacattttaaatgtacatgatatttaactagacttgaggttctctttttacagtatttcttaaatactctccctcaaatatatattttcatatggtaatacagagccattttggtgtgggagtgggaggagctgtgaattatgacagttctaattaatataattttgtctttagtaaaaacaggccctggacagcacttaaaccacagtgaattggcaattctactaaacctactacaatctaaaacaagtgttaatatggctgattttgtccaagtgttgaacattaaggtaaactctgagactcaacagcagctaaataaaataaaccttcctgctggaattttggcaacaggtgaaaaacagacagatccatcaacaccacaacaggagtcttcgaaaccgttgggaggaattcagccttcttctcagaccatccagcctaaagtggag

SEQ ID NO: 14990 - DNA, 482 bp, Homo sapiens
  MAP TO AC011406.1; EXPRESSED IN HELA, SIGNAL = 1.3; EXPRESSED IN PLACENTA, SIGNAL = 1.9; EXPRESSED IN FETAL LIVER, SIGNAL =  35
tgagaccaatgatcaatgcagaccttatcataggatccttattgagcgtcaagagaaatcagatacaaacttcaaggagtttgttattaaaaagctgcagaagaattgccagtgcagtccagccaaagccaaaaatatgattttaggtttccttcctgttttgcagtggctcccaaaatacgacctaaagaaaaacattttaggggatgtgatgtcaggcttgattgtgggcatattattggtgccccagtccattgcttattccctgctggctggccaagaacctgtctatggtctgtacacatctttttttgccagcatcatttattttctcttgggtacctcccgtcacatctctgtgggcatttttggagtactgtgccttatgattggtgagacagttgaccgagaactacagaaagctggctatgacaatgcccatagtgctccttccttaggaatggtttcaaatgggagcacat

SEQ ID NO: 14991 - DNA, 362 bp, Homo sapiens
  MAP TO AC008134.3; EXPRESSED IN FETAL LIVER, SIGNAL = 1.1
aacctcatgtgtgggaaacagactggccaggaagaaatttttgtgccttggaagaattcaaattccctagaaagggcagtcaaaaatctttagcaactgactcagactaaaggcatcaataacctattgctggctgaaccaaatttaagctgctaggaaatgacagtactttaaaaatgggctttgcaaagtcattttagtaataaatacaagaacatctgcagcgagaactctcagccaaaggctgttacctgtgagctttcaggatcctctgggcaatggcatcgcctatcttgttgaacacaactttgtcatcagcacagcttatgaaaaactggttctatgagaaataaacaagacaa

SEQ ID NO: 14992 - DNA, 475 bp, Homo sapiens
  MAP TO AC009491.2; EXPRESSED IN FETAL LIVER, SIGNAL = 1.6
tggaagggatttcagacagcaaaacggacttcaggtaggctggctgtgctccagcatgcgggtgattgtctcatttccagggctgaggctgtttgcactttgcagtggacttttgggtcctttaagaggcatcattgaacattgcttggacccagcaccagttagctcattctctcatgtgagccttggcctttctttgctttcatcaggaatctactgtgcccctcaactgcactactggaaacattttcagcctggccgtcaacacagacaatctctgagacaggtctcaacctcacctgcatgcctaagaggccagtccaagttgtgagaataccgcttcaccttggacttgccattgtcctggttcctgcctttcttagaaagcctctgtgaggcccagatgaaggggagcagtgaggtcaacaacctggccatctttcactgacaatagcttctgaggtctgaggtatga

SEQ ID NO: 14993 - DNA, 422 bp, Homo sapiens
  MAP TO AC009891.1; EXPRESSED IN FETAL LIVER, SIGNAL = 1.3
aatccttctgatttcctgaacactttttaggacagcataataaaaaataaattttcatggtaattatttttgaactataataggtaagacaaagatgacattatcagaagataattatccttctgacataatcagatgatagtatgagtagaaatagaagagctagataaacactttctaaaaagttcagatatcaaatcctggctcaagttcacaatactcatgtgattttttttgttcctctgagtccttctctactttcttgcattagactacatgacctcaaagttcacattcactatcattctgtgattcaaaatcgctatgctaaaaagtatgtatatagtgattatagtatacagaatatatttattatttaatcactagatggcagtaaatgtgcaactgtgaggtgcctcaaa

SEQ ID NO: 14994 - DNA, 375 bp, Homo sapiens
  MAP TO AC005682.2; EXPRESSED IN HBL100, SIGNAL = 1.4; EXPRESSED IN HELA, SIGNAL = 1.9; EXPRESSED IN LUNG, SIGNAL = 6.2; EXPRESSED IN FETAL LIVER, SIGNAL = 0.91; EXPRESSED IN PLACENTA, SIGNAL =   1
tgttttgatttatcctttgattttctataatctgttgctttataaattatgctaaagcttaatttatgtaaagcataactgatttggtgttaatcatttaaaaagattgcttaaaatacttaatgttaattaatctttgtcatttctttgtttaggaaatacagaattaacaggtcaagaagaactgatggagatatctgaagttgacgagggattttattccagggctgcgtctagtaccagccagtcgggtttatcaaacagtagtcacaattgtagtaacaagccaagtataggaaagaaccacagacggtcaggaggaagcaaaactggaggaaaagaaaaagaaactacaggggaatcttgcaaagatca

SEQ ID NO: 14995 - DNA, 473 bp, Homo sapiens
  MAP TO AC009487.1; EXPRESSED IN BT474, SIGNAL = 6.2; EXPRESSED IN FETAL LIVER, SIGNAL = 0.92; EXPRESSED IN HBL100, SIGNAL = 2.2; EXPRESSED IN HELA, SIGNAL = 3.5; EXPRESSED IN LUNG, SIGNAL = 1.5
ctttaccatatgtgcctgaacctattaaagtagcaattgcagaaaatttgctagacgtaattaaagacacaagaagtaaagaaattacttcagatacaatggaacagtccattcatgaaacaatacctttagtgagccaaaacataatgtgtcccactaaattagtcaaatctgcatttaagactgctcaggaaacaagcacaatgactatgaatgtcagccaggttgatgacgtggtttcctccaaaactcgtacgagaggtcaacgtatccaaaacgtgaatgtcaaatcagcacaacaggaagcatcagcagatgttgctactcctaagatgccagggcagtcagtcaagaagaaaactaggaaggcaaaagaaatttctgaagcttctgaaaacatctattctgatgtcagaggactatctcagaaccagcaaatacctcaaaattctgttacgcctaggagaggaagg

SEQ ID NO: 14996 - DNA, 468 bp, Homo sapiens
  MAP TO AC011406.1; EXPRESSED IN HBL100, SIGNAL = 1.4; EXPRESSED IN HELA, SIGNAL = 2.3; EXPRESSED IN BONE MARROW, SIGNAL = 0.97; EXPRESSED IN LUNG, SIGNAL = 5.2; EXPRESSED IN BT474, SIGNAL = 1.3; EXPRESSED IN FETAL LIVER, SIGNAL = 0.99
gattcaggctagttttacacttgagatcttaagttaacttcttcctttcatggaccttagtttccttatttattgcccatatgttattaaaaatgagagaatgtttgtgaatgtcatcaactgtaaaatcccttatgtatacaaggtattcttatttttctaggaaaagccagccaaagtaaaagtggaattggcttctggcgtctcttccaaaggctctgtggtgaaaagaaatcagcaacctgtcaccactgagcaaaattcctctaaggaaaatgcctccaaactgactctggagaattcggaagctgtaagccagctcctgaacgtagctcctcccagagaagtaggtgaggagagtgagtgggaggaagtgatcatctccgatgcccatgttttggttaaggaagctcccgggaattgtggtacagcagtcactaagacgccagtcgtcaaaagtggtgtgca

SEQ ID NO: 14997 - DNA, 479 bp, Homo sapiens
  MAP TO AL050317.9; EXPRESSED IN LUNG, SIGNAL =   5; EXPRESSED IN FETAL LIVER, SIGNAL =   2
tatgctctttggctgctgtctctacctgcttctggattcttgttctgccatgactcctggcatgagggtaggatagcaacctgaattctgatgaatgatcttagtcaaaagccctcccaccagtatttgttgttagtaagcatagcaggtgagaggctcagaggaagaggctccagaggctcactggagaggtcaggaggaacctcaagaaggcatccccagtccctagatgctgagctcagggaatgcttcctttaggactgagctttcagaggcatctcacctgctgcagcgaagcctcagactcctggctggctgcctttcttgggtctgggctgtttcctggctcgctgatctctttggatcccagaggctcctggtgcagacttgctgcctgacctttctcagatttgctgagggccagaagatgaggcccctggaaagatttaggggaaacctggctgtttgaaccttttgga

SEQ ID NO: 14998 - DNA, 423 bp, Homo sapiens
  MAP TO AC009486.2; EXPRESSED IN BT474, SIGNAL =   1; EXPRESSED IN FETAL LIVER, SIGNAL = 1.4; EXPRESSED IN HBL100, SIGNAL = 1.1; EXPRESSED IN BONE MARROW, SIGNAL =   1
aaatgtatttttccttcttcaattatgaattcactttagtttaatgtaacttgtttataaattttcaatttttttaactttttgactcttttgtaataacacttagcttaagacacaaacatatagtacagctgttcaaagtattttctttatattcttattctaaacacatttttctatttttaaatgcttttattttttattgttttactttttaaacttttttgttgaaaacaaagacacaaacccaattagtctaggcttacccagggtcatgatcatcaatatcactgtcttcaacctccacatcttgtccacctgggaggtcttccagggaaaacacaccacacatggagctgtcatctcctatgtgaacaatgccttcttccagatactgcctctaggacctgactgaggctgttt

SEQ ID NO: 14999 - DNA, 385 bp, Homo sapiens
  MAP TO AC009811.2; EXPRESSED IN PLACENTA, SIGNAL = 0.99; EXPRESSED IN FETAL LIVER, SIGNAL = 1.1
  unsure 42
tgtttctgaaaatgaggagttgctatgaaaattatttggcantatataactatgccaattattttatcactaacaaaaacatataaacaaatcatctactaacaaaaacatataacctctacaaagtccaaatatttatttaaaataatttaatcaatagcagctattcagtaaaaaaaatgtaaaaatatagatataattcaaagtaaaagaaaaaatgacaactctattagtgatgctttcacaggattcctccagggctactttgccagttggaaatctgcagtcgctgctgcctaagcctgggccttgcttggggcctactggtcttcttctgcctgcttggcccagtaggctgcgcttggctgatgtcctggcttccttc

SEQ ID NO: 15000 - DNA, 477 bp, Homo sapiens
  MAP TO AC009961.2; EXPRESSED IN LUNG, SIGNAL = 4.8; EXPRESSED IN FETAL LIVER, SIGNAL = 1.8
ggaagccatttgcatgttgtttaatttcgagtgtcacataaactcatccttcaaaaaaatctgaagaccaggtgtagtaactctgtctgtaagtttaaagttctccataaactgtatcagagcaaatgtcccaaatcaatgcatcagaagtaaatcagacctacaataatagtaggttcagacctacaatactgtaagcaaataattaatattccattataatatttcttaaagtatgtatgttgttctttgtattctttttgaagtcaaacatctggattcaggttatctctattgttcttacaacagggaagtgaatcaagttttgaatggtctgatggtagtacatttgactatatcccatggaaaggccaaacatctcctggaaattgtgttctcttggatccaaaaggaacttggaaacatgaaaaatgcaactctgttaaggatggtgctatttgttataaacctacaaaa

SEQ ID NO: 15001 - DNA, 485 bp, Homo sapiens
  MAP TO AL034397.1; EXPRESSED IN HELA, SIGNAL = 1.8; EXPRESSED IN PLACENTA, SIGNAL = 1.6; EXPRESSED IN BONE MARROW, SIGNAL = 0.93; EXPRESSED IN LUNG, SIGNAL = 3.3; EXPRESSED IN FETAL LIVER, SIGNAL = 0.92
catgtctacgaagcagccaggtaagaaagtctctcctcttccatttttgaccccgtccctgccctcaattttgattactggcaggaaatgtggaggaaggggggtgtggcacagacccaatcctaaggccggaggccttcagggtcaggacatagctgccttccctctctcaggcaccttctgaggttgttttggccctctgaacacaaaggataatttagatccatctgccttctgcttccagaatccctgggtggtaggatcctgataattaattggcaagaattgaggcagaagggtgggaaaccaggaccacagccccaagtcccttcttatgggtggtgggctcttgggccatagggcacatgccagagaggccaacgactctggagaaaccatgagggtggccatcttcgcaagtggctgctccagtgatgagccaacttcccagaatctgggcaacaactactctgatgagccctgca

SEQ ID NO: 15002 - DNA, 461 bp, Homo sapiens
  MAP TO AL031669.12; EXPRESSED IN LUNG, SIGNAL = 1.7; EXPRESSED IN BT474, SIGNAL = 0.97; EXPRESSED IN FETAL LIVER, SIGNAL = 1.2; EXPRESSED IN HBL100, SIGNAL =   1; EXPRESSED IN HELA, SIGNAL = 0.96
ttcaaggcattaaaagacagccagtcttttggctggagagtaatgagacagggaaaaattgtttatctaaaaaaatgaagaatttggcaaaacaaggcgagagtgtgatcgtggagggtcctgctgagcacagtaaggagtctgaatgtcattcccaatgcaacaggaagtcaatcgaaggccacaagcagcagttaaaatgatctgacttatgctttagcaaaggccaagaaacacgtctgtcatctaggtcaaaatgactgtccagccaaggtcagtaacctcatgcaaaggccatacctccgcctgccaggccagtgtagaggctgagagtgcagatgttcgaccagctccaagaacagcaattgtttccccatcatcatccaccactttgaagtccaggtcctcattgtattttctgcgctttacttgccttcccgagcgtcgtttctgtagggcaa

SEQ ID NO: 15003 - DNA, 455 bp, Homo sapiens
  MAP TO AC009408.2; EXPRESSED IN LUNG, SIGNAL =  12; EXPRESSED IN FETAL LIVER, SIGNAL =   1
ttttcttgtttccagtggggttggataagttagaaattcttaacctgggacgcacagatgagcttcaggggctctgggaacctcttgatattgcaagtatgtgggcatgtgtgttggggggtgagaattttctggggcaagattcagcatttttttccatcagattttcaaaaggacccctaaaagatgaaaaaccactgattggtccttagcctgttctgtgtggtcgcacaggtgatgagcagggcacactagagggactgagactcatgtagttgtggtacttccagcacagtaccttggaagcagccatcacagccgctgtggcggccacgttcaagccccgcttcccgaagtgcacaagggcatcgtaacttcggtcttttgcttggaccagacaatcatcgatttcctgtcaaaggaaaaacagaggcacactgagctggaaggttcaa

SEQ ID NO: 15004 - DNA, 453 bp, Homo sapiens
  MAP TO AC011289.1; EXPRESSED IN LUNG, SIGNAL = 2.1; EXPRESSED IN FETAL LIVER, SIGNAL = 1.2
tttaattctatggcattttaaactctgacaagggtttcgttttaatttctgtcatcatacatattcacatttcatgcaagtacttagagttaattatatttttatttatggaccaattaagcaaatttaaaattaaaatgccactaagttttttcgtttatttcagttaataaacatgtttgacctgaaggttatgaaattattctgtctgtattgtctctgatgtaagatacatatgaacataattttcctaagatttgggacagagtgattccagattcataatctgaattatttccgtagaggacgtttttgtatcctgctttgtttttggtgttgattttcacggaattatgacagttgaggtcacccatcatatcataattaccctgattttccactacctgctgagcagcacctggagctccagtgaccctctataaacagttatca

SEQ ID NO: 15005 - DNA, 473 bp, Homo sapiens
  MAP TO AF186996.1; EXPRESSED IN LUNG, SIGNAL = 8.1; EXPRESSED IN FETAL LIVER, SIGNAL = 1.4; EXPRESSED IN HELA, SIGNAL = 1.2
ttaaaacaacaccacaaggggcgtcaaaccacctgctaaatttgagggaatgttatcctctccccacctcccccagccccggatattagagaaaataacacaggggtgatgtacacccactgctttattgggagtagtatcatcctctcccttcttggatattaggaacaatatcacactgtgcttgtaggcctgtcatgaaattcaatggaatgtcatcctgtgcctccctggatatgatgaacaatatcacgggggatgtacaacttctgagatattgggagggatatcatcttctcccctctgggagttagggacaatatcacaggggtcgtgtacaccctctgggatgttgggactaatatcatcctcccgcccactggatattaaaaaccatatcacaaggggcgtgtgcacacactttgatattggtatgaataccatcctctccctctttggatattcggtgccat

SEQ ID NO: 15006 - DNA, 466 bp, Homo sapiens
  MAP TO AF191252.1; EXPRESSED IN FETAL LIVER, SIGNAL = 0.93; EXPRESSED IN PLACENTA, SIGNAL = 1.2; EXPRESSED IN LUNG, SIGNAL = 4.2
cgggtgctatcgtgtataggttgacattaatgtactcccagaatgcccaggcatggtatggggtggccaccctatggttcctgttttcttagacggaagaccactcctgcagaacatttattatcagcctaggccagtgtgaacatactgggtacattttaggattcagtttatctgttttgtttagggttggtgctaatttggaataagcaaaccattcatgatctgtatcacataatttggtttagaatctgtcaccttacctgttgcggtcactccctctgaatttggggaccccaagaccaagttttactcttctgctctttccacctccagtgctaaggcctagaggggcgcaccttaaatctgaatcaatccacaaagcccgacggacgccagtggcagggtttggtgggattttaatagtaacctacaaaaaaagtcaggaagatagggaatagggacg

SEQ ID NO: 15007 - DNA, 466 bp, Homo sapiens
  MAP TO AP000568.1; EXPRESSED IN LUNG, SIGNAL = 1.5; EXPRESSED IN FETAL LIVER, SIGNAL = 1.7
tttgctaaatatcccagagatggtaagtgcttagtcctgaaccttttataaggtattaggatctgggcaattttccttagagagacagctgagaatagttacatactgtgaagtacacattcataaaattaataagatttgcatgatttaattactgtagttgctcttttatataaaataaaattcaagtttataatttcattttcacactgaaattaacaataattattcactattccccagactacatgctaaaagtagaaaaattggtccagtgagccctcttaccactgtcatggctgtcccaggttgcaacaaagacagtgtcagaaaagactgtaaaaaatgtggctacccttgtcaccttacttttgaatgccgcaattttctctgagtagaccctaaaagggacatagttttggatgtcagcagtacaagtagtgaagatagagatgaagagaatgaa

SEQ ID NO: 15008 - DNA, 483 bp, Homo sapiens
  MAP TO AL078624.19; EXPRESSED IN LUNG, SIGNAL = 6.8; EXPRESSED IN FETAL LIVER, SIGNAL = 1.1
tgtctttttagcagaaaaacaaggattaagagaaagtataagaatcaagagacagacatttggttgggataaacaaaaagtcactatgaggtgattatgacaatggtgatggtgatcattcatttattcccttaaaactatttatttttattagacacctacagagtgcagtcactgttgcaggcaccagggtaacagtaatgaggaaagcactcaaagacttggtcctcatgaagcttactttctagtaaggaggacagatttcagagtcacatacacacctatgtgggcatacacaggaagcataagtgtcaagtggtaggtgctaagaagtgcagagataccgtcaagtgtaatgaagttgaagatgatggttttgttgataatgacggcagtaagtttaaagagttgagtaaactcctaaggcagtaccacttagatggactactggctcatgtgcaaagactggctgttctggctctc

SEQ ID NO: 15009 - DNA, 461 bp, Homo sapiens
  MAP TO AC009640.2; EXPRESSED IN LUNG, SIGNAL = 1.9; EXPRESSED IN FETAL LIVER, SIGNAL = 1.2
gctgtttcctgcaaaagaggaacattatacctcagccagccattgccaggacattgcaggagaaggatctctgcctggctagtgcttggagtcctcacacaccaagacatttggtcacattcagacaatcacgagtctcacttcaggacacgtgtaaaccaaccactgggcagagaaggagatgctctcatgcctggattttggaaccagacaatgcttcactggagcaactccagcagggagagagtagtgcgggcatctcgttacaactgtttatgacttgtaatgccctgtcatttccctttccttctggaggcaggaagtggctctgggccaagctgctggagctcaatatagcctctggttatttatgttcacacgaaaccaggatagacacaagtggtctcctgacaagtcagatgacaacctccagtggtatgcgttcccgccctacttctttc

SEQ ID NO: 15010 - DNA, 398 bp, Homo sapiens
  MAP TO AC009477.2; EXPRESSED IN BT474, SIGNAL =   1; EXPRESSED IN FETAL LIVER, SIGNAL = 1.3; EXPRESSED IN HBL100, SIGNAL = 0.98
tcaatgaatggtcagcttgcttctaggaactctgatgtgtatgtgtgcctgagggtatacgtgccttgtatatgggtatgagtgtctgtgtatatctgtgtgcctgtttgactgcgtgcctgtgggtgcatgtctctatttgtgtgtttagatcagtcagtttcatctctctagggatctgtcttctgggcattgatggcaaatcattaatatatttgttctctctataggttttattgactgataccaatactcaatttgtagagcaaaccctagatataatgaagaacttgctagataatcatactgaaggcagccctgaacatctagagcaagctagcattgaaacaatgatgttaaatctggtcaggtaagccttctactgaaatgtagcagaa

SEQ ID NO: 15011 - DNA, 459 bp, Homo sapiens
  MAP TO AL096771.8; EXPRESSED IN FETAL LIVER, SIGNAL = 1.2; EXPRESSED IN BT474, SIGNAL = 1.1; EXPRESSED IN HBL100, SIGNAL =   4; EXPRESSED IN HELA, SIGNAL = 2.4
agagtgggagcaaaccaaagaactcactgatatctctggtttggctgaatttttgctaaatcaggttttctggaataaaatacttctggcattaactctgatgagtcactggtaagaaagttccatcacaccttggttcatattgggtatttcttaaggaaacattttcttaccatacaatagtaaattgtctaattttgagacagtggaggtgccacttaaagtattggtggctacctcaggagttgtatttgacaagaggggaaatatatttgttttaactccacactaggtccacaaggagaatccagaacaggtccaccagggtccacaggttcaagaggtccccctggcccccctggccgtcctggaaactcaggtatccgaggacccccaggtcctcctggatactgtgattcttctcagtgtgccagcatcccatacaacgggcaaggctat

SEQ ID NO: 15012 - DNA, 453 bp, Homo sapiens
  MAP TO AL049652.16; EXPRESSED IN BONE MARROW, SIGNAL = 0.99; EXPRESSED IN HELA, SIGNAL = 2.2; EXPRESSED IN PLACENTA, SIGNAL = 1.2; EXPRESSED IN HBL100, SIGNAL = 1.8; EXPRESSED IN BT474, SIGNAL = 1.5; EXPRESSED IN FETAL LIVER, SIGNAL = 0.98; EXPRESSED IN LUNG, SIGNAL = 1.3
ggaaggatcaatcatgcaccctgctttcaaaggtttggaattgtggttggagaattttacccccaatagctgagtctaagggtaggagaaaggtaagagactttattcatgtgtagtttttcttatcattgtatgcaaatttaaggattaaactttaaggagactgtataagacacttcttaaactagaaagtgcgtgggagaacaaacggtaatgagctgtttatgtatatatctttttcttttttaaattatagtggttggcacttaccatggttccccagaccagtcccatcaagtgactggtaaccaccagcagcctcctcagcagaacactggatttccacgtagcaatcagccctattacaatagtcgtggtgtgtctcgtggaggctcccgtggtgctagaggcttgatgaatggataccggggccctgccaatggattcagaggt

SEQ ID NO: 15013 - DNA, 488 bp, Homo sapiens
  MAP TO AB016897.1; EXPRESSED IN PLACENTA, SIGNAL = 0.75; EXPRESSED IN BT474, SIGNAL = 0.64; EXPRESSED IN LUNG, SIGNAL = 0.8; EXPRESSED IN FETAL LIVER, SIGNAL = 0.73
tttcttagcttgattgcttgctagtttttaaatgaggtaaaatatagattcggtgagatgcacagatcttgagtgtgcagttcaattgattttgataaatacacccatgtaactgccagctgaatcaagataaagaccattctcattactccagaccttcctgtgtttcagtagctttgttcacatgttcggcagcatgtgagacgaagttacctaagccgtaggcaattttatgtgattctgcatagtagtcaatatggtgataatgttactttcatcagaaggctcaaagtaatggacctgaaaagcaggaaaaagaaggggttatccagaacttcaagagaactctctcaaagaaagaaaagaaggaaaaaaagaagagagaaaaagaggcattgcgacaggcatctgataaagatgatagacctttccaaggggaggatgtgtaagtcagttttggaaatgttcccctttctttgtgctccaaa

SEQ ID NO: 15014 - DNA, 441 bp, Homo sapiens
  MAP TO AC007687.16; EXPRESSED IN FETAL LIVER, SIGNAL = 1.1
gtcaaatttctgaccccctgttaacaaacattcaagatgatatcaagtttctttcagtttgctcatattaccccagatttatttatctcattcgctgtgtgaaaatcattcattttagctttatatttataatatgcaaataaatctttatgggctatgatgagattcacagttagatgaatcaaacatgaatcaaaatgatcaaagtacattggaaagtctcaactgctacagaaataaattcacacacacacacacacacacacacacacacagtctctcatgctcaccgttgctcgtagtgcctgaatagcctgatttcgctgaaatcccatggaggtgatgatagctacgatttcctctggaggttggttatccagtccagaagcaccaaaaacagaggctccagcagaagctgcccctccataaccaggcatggtc

SEQ ID NO: 15015 - DNA, 402 bp, Homo sapiens
  MAP TO AL109946.9; EXPRESSED IN FETAL LIVER, SIGNAL = 0.92; EXPRESSED IN BONE MARROW, SIGNAL = 1.3; EXPRESSED IN LUNG, SIGNAL = 1.1
ttccctccttttgacttccctctttttttcaactcaacttaggttttcagtggtggtgtcactgctgccaagctggaccgaaaacggccatcggcatgctgcccaaccagcaccatgtccaaagacctgaaaattctatgtaaagaccctgctttggagctgagctgctaccgggaccatcagttcagtggccgtaaatttcagcaggaaaaattactgaaggaaagctccacattgaatatggggaatctttccttttatacaaccgaagagaaaatacatgaactctttagtagatctgatatcaggaatatctttatgggcctggataaaataaagaaaacagcatgtggtttttgctttgtagaatgccataacagagctgatgctgaaaatgccatg

SEQ ID NO: 15016 - DNA, 477 bp, Homo sapiens
  MAP TO Z99716.4; EXPRESSED IN FETAL LIVER, SIGNAL = 0.99; EXPRESSED IN BT474, SIGNAL =   1; EXPRESSED IN HELA, SIGNAL = 1.4; EXPRESSED IN HBL100, SIGNAL = 1.9; EXPRESSED IN BONE MARROW, SIGNAL = 0.96
ggctctcacctgtatttgctgtgaagattaaccacaaacacgatcaggtcaattcggggccgattcacactggagggcaaagggagggactttgccaagtggctgaaaaacaggaaattgcaggactcaagatatccgtacccccctcatagcgaccgtttaaatgctgcccttcatgtggaaagaggccgtcaagggctccccacctcatcctagccacccgaggctcttgtggccacgactccttgggccagcacagaggcaggacaggtccggtcctattcagattactcctgtctgattccctctgccagaaacgggctctgtttagtcaccacctcggcaaggggaggttgggatataagacggcatgggactagccagctacgctgcatgctgggagaaggaccagcctcagaggagggggcgctgggcttcggagtttagcagctaggaccgaatccctctggagtgaga

SEQ ID NO: 15017 - DNA, 474 bp, Homo sapiens
  MAP TO AF111168.2; EXPRESSED IN BT474, SIGNAL = 1.1; EXPRESSED IN BONE MARROW, SIGNAL = 1.7; EXPRESSED IN FETAL LIVER, SIGNAL =   1; EXPRESSED IN LUNG, SIGNAL = 0.64; EXPRESSED IN HBL100, SIGNAL = 0.88
gcaccactgtgtgttctttcacacaagagggtattctatatctcagatcagcatgtagcttagaaagaagctcaaataagaaaacaacaaacaatgaacagaaccagcctttagttcagtgaggagacattagagtcactcactggtattatgagcctaaaccagaggcaaatttgcggacatcccagttcagggccccatctgctaggcctgaggtaccaaatctaattgccagtgactttatctctaatcgctcattctcatggctcgtttaccttcttgcctccaatatatcctccagaagcaccaaaactctttgtgaacgttcccatcataacatccacatcctcgggatccaggccaaagtactccaccacaccccggcctgtggggcccagggcgccaatgctgtgagcctcatccagatacaagtatgccttgtatttcttcttgagggcaatcacttcaggaaga

SEQ ID NO: 15018 - DNA, 460 bp, Homo sapiens
  MAP TO AC007041.3; EXPRESSED IN HELA, SIGNAL = 0.99; EXPRESSED IN BT474, SIGNAL = 1.5; EXPRESSED IN HBL100, SIGNAL = 0.89; EXPRESSED IN LUNG, SIGNAL = 0.83; EXPRESSED IN BONE MARROW, SIGNAL = 0.74; EXPRESSED IN FETAL LIVER, SIGNAL = 0.8
cacactaacatgaagtgatgaaaagaaatttagaaactgctagagatttcaagatcgcaaaataacagaaacacagaaactgaatataaccaaatcttttaaattcatataatactgattaggaaaaataaaatcccatgcataaatacttgcgtatcaactgtatgccaggagtcgtgttacacagtgaggaaacgtaagtcgaaaaacacaaatcttaaacattaggagctcaaagaatttcaaagaatacttggtattacttaatagaaggaaggcctacctgttgctgtccaggctgagcttgtgatgctgcttgctgactggctgtgttatttgccgcagctgcagcttgctgctgaaataagttggctggatacaccccccatggaacgccgtaatactgaggtggaaccactgctggacctaaaccccacacccgacccccgaataaaaagtt

SEQ ID NO: 15019 - DNA, 463 bp, Homo sapiens
  MAP TO AP000100.1; EXPRESSED IN FETAL LIVER, SIGNAL = 0.57; EXPRESSED IN LUNG, SIGNAL = 0.61; EXPRESSED IN HELA, SIGNAL = 0.76
ttgttgctgaataaataaatgtcctctgcctcagccaagcaaaaagaaaaagaaagaaactaaaagggaaaagagccaggaggatctaccaggaaggcttttgcttgaatggaacttggaaatgtgatgatataaaaatgatattgaagacagtgtgcatcaataacggaaggggaaagactgctttggagtcaaactgcctgggtttggatcctatctctaccactgcccagctgtgtgtccttggacaaattgattagcctcttgaagtttccatctcctcttctgcaaagtggagataatgataatacctgcatagcagggttgagataggtgatgatgtatgcaaggtccctggcagtgagccagcactcaacaggtggaagatatagtagcaataatagtaggttctttattgaatggctgctagcaatctcttctacaaccagaagtggatctgagc

SEQ ID NO: 15020 - DNA, 472 bp, Homo sapiens
  MAP TO AC011201.1; EXPRESSED IN FETAL LIVER, SIGNAL = 1.2; EXPRESSED IN HELA, SIGNAL = 1.8
ctgcaacactgaggcaaatgtatactgtaggaattcctcagttctcctttaaaggcacatatgggtgtttacttgggtaacccttgggaataggttatgtccagcttgttcaaaagctgttggttataggtctgagttgatgttgattcctcccaacccaaagcaccatcatcatgtccctgttagaggagggctttatggggcaagtaatcaatggagccatggccctgagccatcatgagatggtgggtctcccaggtccgcagaccaacagatggtcacttcccaaattcctgaatacatactaggtaagaacatacttaccttggcagaatcctcatatttcttcctgaccttggagtaaaagctattgtcataggaaaagccaaatggaggctcctgaaactgccttcccatatcagggtagttaatcaaaagcagcatggtatcctggaaagaatggcagaggcta

SEQ ID NO: 15021 - DNA, 498 bp, Homo sapiens
  MAP TO AC004895.2; EXPRESSED IN LUNG, SIGNAL = 0.72; EXPRESSED IN HELA, SIGNAL = 1.1; EXPRESSED IN BT474, SIGNAL = 1.1; EXPRESSED IN BONE MARROW, SIGNAL = 0.76; EXPRESSED IN HBL100, SIGNAL = 0.84; EXPRESSED IN FETAL LIVER, SIGNAL = 0.66
tttcagtttgttgctaagcctgaaggtctctaagattttgtcttctgggagagacagcaaaggagcaggcatcaactgcaataaaaacaaaaatatttcagcttcagtcgccagctccatgcctcctgaaatccagccaagggaaccgccacaaacgaggctgaagaccctgacgtgcactcacctttccaggaagaccgtttgccttagcaaagggattttctgagtgcagggcaggctggccttggcagctggcaccatcaggcgctaggccgttttctttcgggtcactgtcgctgtctgcactattagcaccgtttagggtcatgggttcttgaagctcgtgcggagtggcctcctcatcttcggcatcttggccgggagagtgggagctcacaatcgtaccaatcccattctccttgcccagcccctttgactcctcgtcagagtcctcagaggactcggcgccatagggcaccagcacgctggagttcagct

SEQ ID NO: 15022 - DNA, 474 bp, Homo sapiens
  MAP TO AC007543.4; EXPRESSED IN BT474, SIGNAL = 1.4; EXPRESSED IN FETAL LIVER, SIGNAL = 0.63; EXPRESSED IN PLACENTA, SIGNAL =   1; EXPRESSED IN LUNG, SIGNAL = 0.85
tccctgaaatatgttgagatggataagtcatgactgtatttaaaattatttagaaagtttgtacaattagagtaccacgacattttaatgactttggatataaagaatagtaattaaggcattactgtcagcattaccagcatccatatattttgattatttccaggtctcttgacggccatttttctttgccaacaggaagataccattcagagggaggggcacatgcgatggggggaaggctttgtgctggtctacgacattactgaccgaggaagttttgaggaagtgctgccacttaagaacatcctagatgagatcaaaaagcccaagaatgtgactctcatcttggttggaaacaaagctgacttggaccactccaggcaggttagcacagaagaaggagagaagctggccacagaattggcttgtgctttttacgagtgctctgcctgcactggagaagggaacatc

SEQ ID NO: 15023 - DNA, 471 bp, Homo sapiens
  MAP TO AP000238.1; EXPRESSED IN FETAL LIVER, SIGNAL = 0.57; EXPRESSED IN LUNG, SIGNAL = 0.59; EXPRESSED IN HELA, SIGNAL = 0.62; EXPRESSED IN PLACENTA, SIGNAL = 0.61
taacatggaggacacttcgcaaaatatttgttccttgaatcaagtcttttgtggctgatctgggttgctttatttttttttaaagaacttgaaacgaagcagagttataacttcaatttactccaaagtgtgaggtattattttggagaaaaatagctattggagagtgaaaactacctagctgaagagtaaatggcctttgagatcagacagataagagctatggaagcagggagagtgattatgcaagtaaaggaaggtaagcaaaagtggaatttaagatgcggtgtgtgttttcctccacagactgaagcggctctgatgtacgatgctgtgtacatggtggccattgcctcgcaccgggcatcccagctgaccgtcagctccctgcagtgccatagacataagccatggcgcctcggacccagatttatgaacctgatcaaagaggcaagtgatgctccctcacag

SEQ ID NO: 15024 - DNA, 473 bp, Homo sapiens
  MAP TO AF111168.2; EXPRESSED IN FETAL LIVER, SIGNAL = 0.61; EXPRESSED IN HBL100, SIGNAL = 0.78; EXPRESSED IN HELA, SIGNAL = 0.7; EXPRESSED IN BT474, SIGNAL = 1.1; EXPRESSED IN BONE MARROW, SIGNAL = 0.83
gtccacacagcagctctgacacctggcatcttgggaaacgttgtttaacttgtgactttttgatttctaatccataaaacagggatagtgccgcccacctccttaggttcttcttgattaaacccatgatgaatgctttgatatctttaaccttgttatttttcagctttctttgtagaatgttttcatttaactgcatctggaatagtttaattttaatgtgtacccaaatttctgagaaaaagcttttgtgcaaaaatactaagatttccataaaaggcttctatttacagaatcaaaaactctctaacagttaccttttgttcttctctttctgttgcatggtgacacttttcaattctccaatacctcaagaaatctcgaagatatccaaagagggtgagtacgccataccccacatacgtgagcacagcaaccagcattggtgtttcttcaaaagcttcattaaacgg

SEQ ID NO: 15025 - DNA, 471 bp, Homo sapiens
  MAP TO AL049778.2; EXPRESSED IN FETAL LIVER, SIGNAL = 0.64; EXPRESSED IN LUNG, SIGNAL = 0.66; EXPRESSED IN PLACENTA, SIGNAL = 0.66
aagcacatctggaatcagcctataaatgtagtcctgagattaatgttgaacaagaaggaaggctaagggtattccgcttctgatttccacttactgacaattctcacttagcagcaatgttcgccttccacatgcggacacctgaacactacccccctgtcaagaacaccacgcttacactggctgaaaacaagcttcagaacaccttggaatacagtttagcttcctttgaatccccagcatgtgcttttgcatatctctgtcctccaagggcagaatcagaagtgatgaagcaagagttcaaaaatgttcagctgcatagtattcccaacgaggctcactcacacagttacctgcacagcatccccaaggaggctcactcacacggttacctgcacagcatccccaaggaggctcactctcaccgttacctgcacagcatccccagcgaggctcactctcacggttacc

SEQ ID NO: 15026 - DNA, 456 bp, Homo sapiens
  MAP TO AL049694.9; EXPRESSED IN FETAL LIVER, SIGNAL = 0.72; EXPRESSED IN LUNG, SIGNAL = 0.85; EXPRESSED IN HELA, SIGNAL = 1.5; EXPRESSED IN PLACENTA, SIGNAL = 0.9; EXPRESSED IN BONE MARROW, SIGNAL = 8.6; EXPRESSED IN HBL100, SIGNAL = 0.88
caaaaagtcaaggaggagcaggggtaataacaacataatatgagaaacaaaagataaagcactgcaacttgtttgactttatcttgtgtagagtcgactagtttgctctgcactgaaaataaaaacttatctcacaccaaataaagaaatgccaaatgaaatggacgaaatgtcaaatgtgagaataggatggattgaggggtacgaggagagagataaatagggaagagttttgtaaatatgtctgcttgatcaagtagatgttagatggtgtcttacccagcaactaagacgtattttccatctgcttgatcctttaacctttctagcacggacaaacgtactttggctttgcttttgccatagatttcaatttcatctgcaagcaatccaatctccttggcaaggacatccacagcttttggagtttgtcctcttgaaatctcaatgtcactg

SEQ ID NO: 15027 - DNA, 459 bp, Homo sapiens
  MAP TO AC006975.2; EXPRESSED IN FETAL LIVER, SIGNAL = 0.64; EXPRESSED IN LUNG, SIGNAL = 0.59; EXPRESSED IN PLACENTA, SIGNAL = 0.73
cctctacattactgatggcttttcattacctctcacagattatttgttataaacacaattttaaaacacagagtggtaccaaatcagagaatccttattttaccaccctctgtctgagaaaggtaggagtgtgaaaaacaaaaaagaaagaacctgtcattcacagcttcaagcagttggaatacctttgggactcaaggtgacacagaacaaaactaacccacaaaagactttctttatgatccctcttgttcctctatttaagccaacagacaaagccctgcataccaattccctagctgctcacagtgccaaagtaatttcaacaccaaaagcccactcagccctggagaataagaaacagcgcatgcactcatggttgtctgattaaagttcaagtgctgcatctcggaaagcttctgccctttagaaagcttgaagtccttaggccatgtatgc

SEQ ID NO: 15028 - DNA, 424 bp, Homo sapiens
  MAP TO AL035705.16; EXPRESSED IN BONE MARROW, SIGNAL = 1.1; EXPRESSED IN LUNG, SIGNAL = 1.2; EXPRESSED IN HBL100, SIGNAL = 1.4; EXPRESSED IN FETAL LIVER, SIGNAL = 0.97
aactcaggagctcagagcagcttataatatagaaaaatggcttctacaaatgatcttattacattataatttcctaccttccattcaaaatccagctgcttcatagctcggtaaacttcagccataatgtcatacggtttgctctgacttcggattccaagatgccacttggcttttttcacagctaaagatttgggcttagtcgtattcagtgcatccaatggacatcttgctttggggctgtctgctataagaggtggcatcctttctggatgaggtttcaggcctgggggaatatgcatggcactatcatccataaaagaaccagatggaggactagaggcgaggtagaactcactggcttggttcattattctccgattgtcaatgataagatgataagccactgcaagctggtcttgag

SEQ ID NO: 15029 - DNA, 471 bp, Homo sapiens
  MAP TO Z99716.4; EXPRESSED IN FETAL LIVER, SIGNAL =   1; EXPRESSED IN PLACENTA, SIGNAL = 9.7; EXPRESSED IN BONE MARROW, SIGNAL = 0.9; EXPRESSED IN LUNG, SIGNAL = 3.2
ccattcctcttttctctattttccaaacgcatattcctcattaagcatgtattactttttttcataatcaaactttattaagtaaaacacatatctgtgcaagagtataagtaacgcaccgatctattgatagggttgttttcatgttgatttgaatccctgcacaacaggaagtgatatgccttcaattggtgatagctagaggaaatagctttagcattattctgcctgacttctcttcttgcgtcagtttgcttcagcattattttttaagttcttccttctcacatattccttgacttaaaggtaactgaatttttttccttccattataattcccagttattgtctatggagccccacctgcaggatatggagccccacctcccggatacggagccccacctgcaggatatggagcccaacccgtaggaaatgaaggcccgcctgtgggatacagagcctcacctg

SEQ ID NO: 15030 - DNA, 472 bp, Homo sapiens
  MAP TO AC007655.1; EXPRESSED IN LUNG, SIGNAL = 0.67; EXPRESSED IN PLACENTA, SIGNAL = 0.68; EXPRESSED IN FETAL LIVER, SIGNAL = 0.74
agtggcaaataaaacggctgttcatttcatttggtgtttcactgtattgatgacctcagtaatggcatgattatatttttctgaggctgatttgaactccaccagatgcttctcataacttttgatggctgcttgaagctgtgttttttccactgctcccaggatggcacggacaatcatatctatgccaaggccaagaacagcaactccaatactaccaaggagagaagcaccaatttgagctaacacagtgaccaacttgttaattatgccagttgtgacatttgagcccacaagtttaacagcgactgcactggctgcagatgtagcttctcccaggatgaccgaaataaccttttgcactattgcaattttgtctgtttccttttccttaatatcctgaagttttctatagagggttggctctagcttatcttttagtgcttcatcaaccttctgcaattccttttgg

SEQ ID NO: 15031 - DNA, 470 bp, Homo sapiens
  MAP TO AC006441.13; EXPRESSED IN FETAL LIVER, SIGNAL =   1; EXPRESSED IN BT474, SIGNAL = 1.1; EXPRESSED IN HBL100, SIGNAL = 1.1; EXPRESSED IN HELA, SIGNAL = 0.98
cttccatgatggggctttggggcctcagctgcagaaatgcctgaatttccattcatggtagggcctcccacccttgaaagaataattatctgcctgctgagctgataggttcccatctggtgagggctgaatgccgtagttttagaaaagacaccagaaaaggcaagctcctgaactggctttgacagattcccccagctactctaagggaaaaaaaaaaaatgactgaggtgggtgtcgggtagagggttggggagaaggcctagaaaggaaaagaaaatgaatatgggatgctaatgaattcctgtgatctcactgtctcctattccagcacatgctcctctgcagaaagtgatggggctgccttgccagctggagcctgaaactgtgcccaggtagacagaactgcgagtcccaggacagcctgggaagtgttggctgcctggtaatggaagaatgtccaggatgga

SEQ ID NO: 15032 - DNA, 460 bp, Homo sapiens
  MAP TO AL049836.2; EXPRESSED IN PLACENTA, SIGNAL = 0.9; EXPRESSED IN BT474, SIGNAL = 0.77; EXPRESSED IN FETAL LIVER, SIGNAL = 0.64; EXPRESSED IN BONE MARROW, SIGNAL = 0.8; EXPRESSED IN LUNG, SIGNAL = 0.59
ctctccgctatgacacctggggtgccttgcactcagtgtcacccacagacatgtacaagggagggttttcaagccactcctctgaacctggtggagagctaccgagctgtgagcctgggaagcccctgacaccactgcacaggctctgagtagcaagtgcaggggacaagcagctgctgtctcgccacgcctcagttgtcctccccagtgaaatgggggtggtcctgcctgcctcactgggtgtgtaaggactgaatgggctggtacctgcaaaaagctcccggggcagtacgtggtagccggccttgatatttccggatgttgccattactgatcaggagaggtctgggctgggcattggtgaagcgtttgctctcaactttactgccaccatcagtgtgctgagctccttccctcctagactcagtgctcacatcggtgcaaggggtgaatagacagc

SEQ ID NO: 15033 - DNA, 441 bp, Homo sapiens
  MAP TO AL009179.1; EXPRESSED IN LUNG, SIGNAL = 1.1; EXPRESSED IN HELA, SIGNAL =   1; EXPRESSED IN HBL100, SIGNAL = 1.4; EXPRESSED IN FETAL LIVER, SIGNAL = 1.1
ccttgttttgttacaatgttctcctagataagtgtaaattacttatattgctctcatttccactggaaatcgctagtatagtgaacaactgtatagcgaaaatagaaaataaaatatggagaccatgaactgctaagtctgtcagaggaataggtgaacaacaaaaatttgagtccttcgccaatccggttactgttgggtaggccttcagcatacttttgtccaatcagcttcagactctcactataaataagcggctagctttctctttctcctgaagtgaatctagctctgaaggcatggcgcgtacgaagcagactgctcgcaagtccaccggcggcaaggctccgcgcaagcagctggccaccaaggcggctcggaagagcgctccggccaccggcggtgtcaagaagccccatcgctatcggcctggtacagtgg

SEQ ID NO: 15034 - DNA, 453 bp, Homo sapiens
  MAP TO AL022145.1; EXPRESSED IN HELA, SIGNAL = 1.1; EXPRESSED IN FETAL LIVER, SIGNAL = 0.98; EXPRESSED IN LUNG, SIGNAL = 1.1; EXPRESSED IN HBL100, SIGNAL =   1
agcctatcccaaaagcttccttctcaatgattcttcccttgcatacgtctcctgatataatctggtccttatttgatattttattaaagagcaccatcatttgtcacataacaacattttggtcaatgcaagcccacgtatatgacagtggtcccataagatcgtaatgtagctgaaaaatttctgccactgagtgatgtagccattgtaatgttacagcatcatgcgtcactctcatgtctgtggtaatgttggtgtaaacaaaactactgcgctgccagtcgtataaaagtctaacacacacaattatgtacagtacgtaatacctgataataaatggcagttactggtttacatatttctgatactatgctttttatcattattttagagtgtactcattttttaaaggttaactgtaagacagcttcaggcaggtcttccaggaggtag

SEQ ID NO: 15035 - DNA, 371 bp, Homo sapiens
  MAP TO AL121675.8; EXPRESSED IN HELA, SIGNAL =   1; EXPRESSED IN FETAL LIVER, SIGNAL = 1.3; EXPRESSED IN BONE MARROW, SIGNAL =   1
tcatacatggtaacccagcgccttgtgatggtgggtgtgaagtgctccgcacatgtgaaatctgactgtgatcaatgctttactaatgttccaacacaaaatggaatctaagtcagctgcactaatgtgacagagactggtgctaataattactgacatttggagaggacctgatggcttggacatcacttttcacaccctttattctttttaatccttactacatccccgagaggcagacttttatcattacctccattttacagaagacaaaatggagttctccaaacttgccgaaggcttcacagctggccattagatacccgcacccgacctccttcccctcgttgtcctgtgaggaaacgatgagg

SEQ ID NO: 15036 - DNA, 473 bp, Homo sapiens
  MAP TO AC005227.2; EXPRESSED IN FETAL LIVER, SIGNAL =   5; EXPRESSED IN BONE MARROW, SIGNAL = 0.97; EXPRESSED IN LUNG, SIGNAL = 3.5
aagggggaattcactctctctcttcttgagcaaggacatccacctcctcctcccctgggatattggagctcctggttcttgggagttagttacaccatcaactcccctggttctcaggccttcagactgagttaaaccaccagctcttctggttctccagcttgcagactgcagattatggagtttctcagctttcatcatcacatgagccaattcccataataagtctcctcttatctgtctatctctctttctctctcctattagctctgtttctctggagaaccctaacacacatgttaaatggcacatgcctgcctccatttttgtgcccaaggacctaattaataactatatttctgtacataaaacaaaggaaaatggaaatgtttctgtagaatttaccaggagcctcaacattgttgaagtgtgacactatcatgacagacaactccagaaggaatatgtgcaga

SEQ ID NO: 15037 - DNA, 1976 bp, Homo sapiens
  MAP TO AL109823.11; EXPRESSED IN FETAL LIVER, SIGNAL = 0.93; EXPRESSED IN BT474, SIGNAL = 1.1; EXPRESSED IN HELA, SIGNAL = 2.5; EXPRESSED IN PLACENTA, SIGNAL = 1.1; EXPRESSED IN HBL100, SIGNAL = 1.9
cgttatatctgttcttcattagcatagatactgctaactctatgcatcatcagaagcagtttgctatactggaaagaacaaaactgtcataaatcctgattttatcatttattaattgtgtgaccctggctaagtaggatgtcactgacccttagtttttcttatttataaaatagaaataatatttacatttattctgcagggtttataccctggcatagagcaggagctcaataaatggtagagattactgaaagtataaaagataaacagtgaaacccccccataacctatgggactggagagaaaatgattaaaacgtcctccatagcatcaccacaaacaatgcaaaaaacgaggctaagcaaactaggagactgagtcctgtcccccacacatcagcattaaaaagggctctcaatgtacctaatgctgccatcagagcatgcagaacgctgacaaaggaagcagctctcttatcgtaaaattggtccagggtggccaagacatcttgaaccacatctgccaccaaaggaagcaggttagcatctgagttccgcagcatgacttccaggacctttggggtatgaggatgcagagccagatgacgcagatttaaagagatcccattcactaaatagtctgaattttgattgatcaggtgctgcagggagtcgtagccacaagcacggcaaacgtccatcatggtgctggtagccacctgactaatgagtagggtttggtctccagccttctccagtactggataaagggctgacatcaagagcaaacagaagtcttttcctagtgcatatgcaaactggccaattccttccaactgaatgcatatttgccagatgttactgttcatggagcaaatagtgggacttggctttgagaaggctagaaaagatgtaacttggcaggtgtgttcaccagacgtgatggcttggaggcctgggtgctccatcatcagctcctctcccatttcctcagtttcaagacaggtaaccaaataccaattttcttgacttgtgtattcttcaagtatagatgtcacaatctctctcagttcttctgggtttgttttaatatgtttttcgtgaagatcctcaacctccagcccagcagcccctgtaaccagttcattaaggatcatggcagcttgcttccggtaaaccacagattgatggtaaagttccataaagtgatccacaagcaaataaagattcccataataaccaagtagctgacaaacctgcctcaagagcatgaagattctctcatcagtgaagaagcggaaatatctcctctggatgcggttccaaggctgtgtggctgaggtctttggagaagcattcagatcatcagagttccaacgccgttcctcaacaatcttgatgtcagccacgtctagctctagaacttggatgagtgctttggaaagccgctggagatgggccacagagttgaggacaaagtttatttttgggcccaagagtttcagataaccaagtaacaaggaaagagtagagaatttgccctggtcatcttgggagttcattaggcgaggaagagatgtggcaagggaatgcaggctttctgacaagatgtcagcgagggctttgttgcccaccactactttttgatctgcaaaatgtctcagaactttattgcactgggcttggatttcaggactctcatcatttactagtcccactaaggccttcagaaggggaccagcacattcgaccaatgattgactgcacttcaaaagaaggtcctccacaagttctaccagttccagtctcaccttccagtgtgggtgaacagaaacacactcaattatctttttaataaggatagtcaacttgtcgccagtcttttttacccaatctgcttccctgtaaaccatcagctctgctactctgtgctcaactgcaggttttgcttggacctttgagattcttttgagc

SEQ ID NO: 15038 - DNA, 470 bp, Homo sapiens
  MAP TO AP000402.1; EXPRESSED IN FETAL LIVER, SIGNAL = 5.6; EXPRESSED IN BT474, SIGNAL = 1.2
ccctgtagggcatggttttccaagatcctgtgcctaccagggggtcacactaatactgacatgctctgttataaagcgcatttcggacataccagatcaagtcctttagttcagcttttcgtttttagataaaagtattatttgatttttatctacctttcattgaatatttctcatcctgttacttgctgtaattcttactttctaaaaatcttttagatgttctttttcattttaaatgttctttttccataattgccatcttatgttttttcatcctattcttgtattattaggtatccatctatctttttaattctatcgcagatgaattatttgaaacccttcccacttactctgtactacagttaaagagttgggcacagtctattctgtatcttgagaggagggtaagtaaggaagaacccagaaagtatttaacagctcatttccttgaattattgtttcgc

SEQ ID NO: 15039 - DNA, 470 bp, Homo sapiens
  MAP TO AF124731.2; EXPRESSED IN BT474, SIGNAL = 1.6; EXPRESSED IN HBL100, SIGNAL =   1; EXPRESSED IN FETAL LIVER, SIGNAL = 1.6; EXPRESSED IN LUNG, SIGNAL = 1.3; EXPRESSED IN HELA, SIGNAL = 1.7; EXPRESSED IN PLACENTA, SIGNAL = 0.74; EXPRESSED IN BONE MARROW, SIGNAL = 0.72
aaaaatgttcagactcctcagtgtaaactccgcaggtatcaaggaaatgcaaaagcctcacctcctctacaagacagtgccagtcagacatatgagtccatgtgcttagagaaggatgctgctctggccttgccttctttatgccccaaatacagaaaattccaaaaagcatttggaactgacagagtccgtactggggaatctagtgtcaaagacattcatgcttctgttcagccaaatgaaaggtctgaaaatgaatgcctgggaggagtcccggagtgtagagatttgcaggtgatgttaaaatgtgacgaaagtaaattagcaatggaacctgaagaaacgaagaaagatcctgcttctcagtgcccaactgaaaaatcagaagtgactcctttcccccacaattcttccatagaccctcatggactttattctttgtctcttttacacacatatgaccaatatgg

SEQ ID NO: 15040 - DNA, 455 bp, Homo sapiens
  MAP TO AC005534.2; EXPRESSED IN FETAL LIVER, SIGNAL = 0.7; EXPRESSED IN HBL100, SIGNAL = 7.3; EXPRESSED IN BT474, SIGNAL = 0.6
catgagttccgtcgaatgtcgaggggcgttcattctgacctcattactcatcacttgctagtgactgtggcgtgtatgtgaagtaggttaggtctggcttgaggctgtcccactagataatagttacatattttaaattaggatttattcattagagcatctcacgtcacagaagtgagaaagtccatagaattcgatctaacttgtactttacttgtagcacactaaatatgtcttaacctgatttcattaagggctattttatttatttttaacaggaatcactagatttgatctacttggcgactttggaaggtttaattggctgggaaatttctatattgtattatcctacaatttgctttttgctattgtgacaacattgtgtctggtccgaaaattcacctctgcagttcgagaagaacttttcaaggccctaggtaatcctgaggttt

SEQ ID NO: 15041 - DNA, 461 bp, Homo sapiens
  MAP TO AC007277.2; EXPRESSED IN FETAL LIVER, SIGNAL = 0.59; EXPRESSED IN BONE MARROW, SIGNAL = 0.72; EXPRESSED IN LUNG, SIGNAL = 0.63
cttttggtttgggactctccttatgaaggtgccatgtccaagaccagaacgagaggaagcaatatctttacctggttcagcaaatgcccccagctactttgctggggtttccatagaatttctgttcatgtaattgaagggaaaacttattccatgtttcttattaatttacacttcagtcatcaaaatattgatttttaagagttatttgaagtataaaaccagaaacttacagaatattctgaataaagcttagaaggaatctgctcctccatcccccagctttgctgaagaacagggagaaggatttgggtcaaactaaagagataaataagattatcaaaccactgaattcaaggcagcatccgaaattgtcaaacagttttcagtatgagctggtgacagttggaatcacctggcttctctctggcaaatgaattgctgaacaaggacattggaga

SEQ ID NO: 15042 - DNA, 467 bp, Homo sapiens
  MAP TO AC007860.6; EXPRESSED IN HELA, SIGNAL = 0.63; EXPRESSED IN BONE MARROW, SIGNAL = 0.66; EXPRESSED IN FETAL LIVER, SIGNAL = 0.58; EXPRESSED IN LUNG, SIGNAL = 0.8; EXPRESSED IN PLACENTA, SIGNAL = 0.77
tgatggtcaaaacataattggtgacactaagcacatatagtcaggattactatccagagcatcatacttgcaggtttcatgtgggtgtggcaagggcgagcacacatggccccttgctcagaagagccccaggcttggtttaatgctctgtagtcactagcttgaaactcttacagatttttatctttgaatttgagttttgtaagtaaagtctgatggggtaatgcagcatgtaagtgatgagaggagataggcactgtatcacatttcttgtttatcacatatcgtccttgccatgccccatgaggacagaattctggtggatccacaaagcccagaagttcaatggaactcacagccagtacgagataagtgtgtgatgaaagccgccagccattttgactgttggtataacgtgtgtgtattgaaaggtaaaataaacataactgagtttgttttgggcagtg

SEQ ID NO: 15043 - DNA, 486 bp, Homo sapiens
  MAP TO AC005883.6; EXPRESSED IN PLACENTA, SIGNAL = 0.59; EXPRESSED IN BT474, SIGNAL = 0.6; EXPRESSED IN HBL100, SIGNAL =   1; EXPRESSED IN LUNG, SIGNAL = 0.65; EXPRESSED IN HELA, SIGNAL = 0.91; EXPRESSED IN FETAL LIVER, SIGNAL = 0.65
gatgatgactgcaagattttgttctttcttgtcaactgttatgctcatcctccagctgaaagtcccatcaaaaatacgtttatgctatgtattttcctccaaatgtgactccattacttcagccatgtgatcaggttatacttaaatcaatgaagagtaaatattaaaacactttcttgaacagcacgctaacagcagtgaagagaggcatgggtgtgacaggttttcaaaaggagtttagcatgaaggatgccatatatgctgttgccaatacttggaatacttggaacacagtgactaaagacacagttgagcacgcctggcacaagctctggcctgcaactacattcagtgatgatgatgaacaaggtggtgactttgaaggattctgtatgtcaagtgaggaaaacatgatgtctaacctccttacatatgcaaaaaacataccttcggagtccatcagtaagccggaagaaatggatatca

SEQ ID NO: 15044 - DNA, 489 bp, Homo sapiens
  MAP TO AC007684.2; EXPRESSED IN LUNG, SIGNAL = 0.65; EXPRESSED IN BT474, SIGNAL = 0.72; EXPRESSED IN FETAL LIVER, SIGNAL = 0.62
tttttgctcatctcaccataaaagtaaataacataaaaatacttaccatttcattttatcctttagtttaggaggctgaaaattgctttttgtcattagaaataatgctctgaaaaatcaacaaatcattacacagcattttaatatttcacatttttatctattacacaaattctattactatttgttccccaaataaggtaaaacaagactaagaaaattacttgttcatgacagcatactaagaggataaaaaccttaagcgtaagattcttcaatgatgatgcactgacctcattgggtgtaagtcaaacataggaggctgaagctctgcaagttctatggcagtgattcccactgcccagagatcacagagttgattgtaaccccccttcctctcaacagctgcaacttctggagccatcctgaaataaatattccagaaaataaaaaacttctgttatatgttttcctttatactcccaccca

SEQ ID NO: 15045 - DNA, 499 bp, Homo sapiens
  MAP TO AC007006.3; EXPRESSED IN BONE MARROW, SIGNAL = 0.75; EXPRESSED IN HELA, SIGNAL = 0.61; EXPRESSED IN PLACENTA, SIGNAL = 0.68; EXPRESSED IN FETAL LIVER, SIGNAL = 1.1; EXPRESSED IN LUNG, SIGNAL = 0.6
tcagatgatgttatgattacaaggaagtattgatatacttccctaattgtttcttaggactttggattctatttgtgatgtcattacaaagctatgcattatctgcataatcgccaaggaaaagactctctcatgaagggaaatgcgtcccactgagataatgccgcaagctactgctatacatccaacggcatatgtatggtgttgaaataataagacagcatggaataatgatgaattcttgttcccatcatgacagaaagctttccccaaattatcactattactggcttaattgatccatgctcagtgaaaggatttcagcaaatggatggccttgggactcaattcctacctcacagtacaatttctggcattatcagcctaagaaaggccagtccgtctttgcagaagctgtgatcaccctgcaaagaatgcacactgcagctttggaagtgtgtgtatatgtgagtgtgtgcacccgtgtgtgtgcacatga

SEQ ID NO: 15046 - DNA, 484 bp, Homo sapiens
  MAP TO AC007402.3; EXPRESSED IN FETAL LIVER, SIGNAL = 0.62; EXPRESSED IN LUNG, SIGNAL = 0.59
cccagtctatgtgagaaggtaggaacctaactttgataaacatcaattagcaaacagattaggccgtagaaggcctcatctcactaaccaacttccctgctaactttctccagtactttgcaactgcctcatcccagtgcttaaaaattctcctgccttttgtttcagcgaagttgagttcaatctctttcccttatttttatagtcttgaataaagtattccttgactgtttctcttgtcctatgcatttttttatttgacaatgcagtaaacacttttagaatgtttagtggatatttcttacttgcagctgcacaatctctgaacgccttctatttgggaaaatttcaaggaagacagacagggttttaccttccacagtgaaaactgaggagagggacatatttgttgttgtctaggtaggtgtttggtagctctgtgtgggcttctgacctaacctcaccttgggctactctttgctgg

SEQ ID NO: 15047 - DNA, 390 bp, Homo sapiens
  MAP TO AC004916.2; EXPRESSED IN FETAL LIVER, SIGNAL = 0.75; EXPRESSED IN PLACENTA, SIGNAL = 0.98; EXPRESSED IN BT474, SIGNAL = 1.1; EXPRESSED IN BONE MARROW, SIGNAL = 0.64
aacgctctacccgcttcccgatgcccgcctccggccccccaatgccgtcccgccgtggtcgccccgggttctcgcacgccccgccctcgggttcccaccgctctccgcctccccttcctccatccccgccgggcagggcgcgcccgagacccgcgccgggagcggcggccggggccccgagtggccgggaggggctggcgggctggcgcgcgcggctcgggtttcggcccgcccccggcgccggcgtgatcccctcccgggcgcggggcggggccgggcccagctggccgcgctccgggcgctataagagggcggcggccgcggcgcgccctgcgcggagctgggagcgcgatggtcggccgccgaggcgcggcaagatgctggatgggt

SEQ ID NO: 15048 - DNA, 457 bp, Homo sapiens
  MAP TO AC009958.1; EXPRESSED IN BONE MARROW, SIGNAL = 0.9; EXPRESSED IN FETAL LIVER, SIGNAL = 0.89
gaggctcccacatgataaggaaacagcctttcttctcattgtaagatgagttctgagggcttttttgcatctgtgaattgtgacttctcacgaggaactcacacacttgagtgacctgagaagaccatgaagtgtgatgtatttaacctcaattacatcaccatttttcatgtgattttttttttcatttcagttgtcaatgggaacattatcgtgcccaaacttacaaaacttccagacaaagcttcctgagagaagttgaaaggccaccatcagctgagaagctgtgacgatatttgtagctgcctgaattggagccaacaaaaaccaggtcaggttctgaatcttattatttatagtaattatgacctgcaccttgctgtccttgccaggattagtgacagtgggtggactgatttcatcccctccatcagcagcctggaggctgaagatgcag

SEQ ID NO: 15049 - DNA, 361 bp, Homo sapiens
  MAP TO AL008633.1; EXPRESSED IN HBL100, SIGNAL = 0.98; EXPRESSED IN HELA, SIGNAL = 1.1; EXPRESSED IN BT474, SIGNAL = 0.92; EXPRESSED IN FETAL LIVER, SIGNAL =   1; EXPRESSED IN BONE MARROW, SIGNAL =   1; EXPRESSED IN PLACENTA, SIGNAL = 1.2
gctattagctcaaagcagtcaccatgaacagtcactcatgttgcaattgcaacatgctctcttctttgtcttccttaggagagggagttttcagtgagctggagcttggcagttccatctcaccacctctggctctgacacagcctgggctaggcagtctcactctccatctgcacccttcttctactacctgagtaggaggatcctaaccacactcaccatatgcctaggatccagagaattctgtttccttgacaacaggaatgcaggtgtcaaagcaagccagctttgaagagccacaacagtagcagggatgctgcccttgtctctacattgcttttggcttcttgtgtttgttccc

SEQ ID NO: 15050 - DNA, 379 bp, Homo sapiens
  MAP TO AL031599.1; EXPRESSED IN FETAL LIVER, SIGNAL = 0.94; EXPRESSED IN BONE MARROW, SIGNAL = 1.6; EXPRESSED IN PLACENTA, SIGNAL = 0.9
ttgcttgtgaccagttaggcaatctctaagaagattcagactctacctacaactctttccttctgagccctcataagaattgctgttaatgctccacttacgatacaggctctttccagtatttatttcaaaactgttctagccttcacccattactcagttccaaagctgtttccatgtttgtaggtatttgttgtagcaaataattgctgtcttagttcatttatgctcctggtaccaatttctgtcttagttcatttgtgctgctgtgacagaatattacagactgtgtaccttataaagaacggaaatttatttctcatagtcttgggatctggaaaacccaagattaaggtgctggcatctgttgtgggtcttc

SEQ ID NO: 15051 - DNA, 460 bp, Homo sapiens
  MAP TO AL023656.8; EXPRESSED IN BONE MARROW, SIGNAL =   1; EXPRESSED IN HBL100, SIGNAL = 0.88; EXPRESSED IN FETAL LIVER, SIGNAL = 0.65; EXPRESSED IN BT474, SIGNAL = 0.79; EXPRESSED IN PLACENTA, SIGNAL = 0.72; EXPRESSED IN HELA, SIGNAL = 0.89
cttgaatcacacgtaatcaaatgctagtttaccttccaaaatattacatgcataagaaaagcttatgtatattcaatattttcaggatagaaaattatcttatttttagtaaataatcatttaatttttagcaataaataagccaaaggatcccaatttattaatatgtaatttgtttcatctttctggctgacaaaatgtttgctatacaagagtttgttactaagaaaataaaggaaaatactgacaaagagtctgcaaaaagagaaattagcaaattaataattaatgctgacctgcagctgcatccgcaagttgtgagaaaggcactacctgtgacattctctgactcttcaaaaatgaaaagaaatgtctccacagtgcactggcaactgcagcaaggtggcgctctttagccgataatgaagactgtacaaataggtccacattgtccctttga

SEQ ID NO: 15052 - DNA, 359 bp, Homo sapiens
  MAP TO AP000067.1; EXPRESSED IN BT474, SIGNAL = 0.92; EXPRESSED IN FETAL LIVER, SIGNAL = 1.2
ctgagcacctttcctccttgaattgataactgctttgcaatgcagctctgtacttgctaaatgaaacctcctgccccaccatgatggatttatggctgaaacatcttatctcaactgagaatattttatgagtgtgcatgggtgtgtgtgggataggaggagggaaaaggcagttttgcaaacatttctagaggtgctccataatctgccctaccctgaagtattatctagaagctctttctagatctgccaggcttaagcatctataagtcttctccagatgctagcacaatgtagatgcctcatgaaacatttgctgatgatgatgatgatgatgatgacgatgaaggctgtggtct

SEQ ID NO: 15053 - DNA, 455 bp, Homo sapiens
  MAP TO AL117340.3; EXPRESSED IN FETAL LIVER, SIGNAL = 2.2
gatgttttcagtggggttttcatatatggtctttgttaggttgaggtagttttcttctattttttgtttcttgggtgttttcatcatataattgtgtataatcttgtcaaatgcttattctgttttaattaaaatatccacattttcccccttctttttgttaatatggtatattacaatgattgatttttatatgtagagccatcctagcattccaggaataaatcccacatagttatgataaataatccttttaatatgctgccaaattcaatttgctaatatcttgttgaggatttttgcatcaatgttcataaggggtattgttctgtggttttgttttcttgtagtgcctttttctgtcattggtgtcagggtaatgctggtgccagaatgagttatgaagtgttttctcctcttcaattttctggaagagtttgagaaggattggtatt

SEQ ID NO: 15054 - DNA, 469 bp, Homo sapiens
  MAP TO AC005037.2; EXPRESSED IN BT474, SIGNAL = 0.86; EXPRESSED IN HELA, SIGNAL = 0.68; EXPRESSED IN PLACENTA, SIGNAL = 0.66; EXPRESSED IN BONE MARROW, SIGNAL = 1.3; EXPRESSED IN HBL100, SIGNAL = 1.9; EXPRESSED IN FETAL LIVER, SIGNAL = 0.8; EXPRESSED IN LUNG, SIGNAL = 0.78
gccctcaggtagtagtcccccatgacagagctgggcctccagttgtttcacatgcacacgtgatggtagaggttggccagctcctcactgaagatcaccagctcatcctgggccacactcaggctggccctgcgtctcaccggcaatgttgctcactttcagcaacttctccagctgggccagtgctggcagctggccttctccagcagggagacctccgcggtgagcgcctggactttggccttgtataggccctctcctcagcgtgctgggtctcgcgggcctcatgcctgctgcgcagtgccctgagctgctcttggagctcgccagcctcggcaatgccacagccacatggtacctgcaggccaggatcttgcctgttgatgtccacctcgtagtagtcaccatccgtgatgttgcagtccctctcgttgtcctgggctgtctgccacaccttgcaggttcaaaa

SEQ ID NO: 15055 - DNA, 472 bp, Homo sapiens
  MAP TO AP000053.1; EXPRESSED IN LUNG, SIGNAL = 0.59; EXPRESSED IN FETAL LIVER, SIGNAL = 0.6
gaccaaagcaatccctcaacccgctggaccatgaccgagaacaaacacaaaggacctgaaatgcgttgtgaaggccagaagccgacatccacattctccacccacggagagccccagagtccctcatgcacatcctgcttgatctattacacacattcacacattcgcaacacatttgtttggttttcaagcttacaacatattagaaacagaaaggaagaaaggctgtcagcagcagaaatacctttgagcaagagggacggtctttgagaagcagacttgagaactcaccgtgtgctcttcatgcgccagacactgcggcagccacagcgtcccacatgggatgccacacgtgatgatgttatgttcatggtgatgacctcaggcgtgaagaagaggttcagccgtttcacacagtctgtttaacaagcacatacataacacagacatacgtgaggaatctcagaaacca

SEQ ID NO: 15056 - DNA, 479 bp, Homo sapiens
  MAP TO AL096827.3; EXPRESSED IN PLACENTA, SIGNAL = 0.65; EXPRESSED IN FETAL LIVER, SIGNAL = 0.57; EXPRESSED IN LUNG, SIGNAL = 0.66
aagcaaaataagtcacacctacaagttaaatggattcttacagaattcctctggctactgtgctaagaaaatatactaggtcagaagtagaaggacaaattctaaccccactgcaatagtataggtgagatacaatcatagtagtaatgctggagttgacaagatattagtttctgaacttattttgggagcagagctatcagaatttgttgacatattaaattttttctaatatccagaaaatgaaaaaaaaaaaaaaacagtcaagtacgtgcccaaccttttatgctgagcaattgtaagaatgaactggccattgattaaggtgagaaaatctgtagaaggaacaggtttgtaaataaataccaggagctcagatttgggcatgttagaatttagtgcatactggacatccaagtggaaaacctgagaaaataattgaatgtgagaggaattcacaataggggtacataccctga

SEQ ID NO: 15057 - DNA, 461 bp, Homo sapiens
  MAP TO AL050327.6; EXPRESSED IN HELA, SIGNAL = 0.99; EXPRESSED IN PLACENTA, SIGNAL = 0.7; EXPRESSED IN FETAL LIVER, SIGNAL = 0.61; EXPRESSED IN LUNG, SIGNAL = 0.69
gtgtccgggccttttagatgctaacaacatgaccccagaatgggcacttgtgcatgagtcagtttctcagtcagctttttgtcgtcagccccacatcctgcagaccttggctgaatttgtagcccctccggtctcagttttcccagctcggtcatcagaggctggagttgaatgatctttgtggcttttttgcggacaatggcgttctcaattttgtactctttggcacagagtggtgtaatgtggagaggggagcatcagtctctctcttaatgcttatttaattatatttaattaggaatctcgttgcaattggtctcctggggccatctgctgtggagatttttgaagaatccaaattttatttcttgccatcgatccatgtggttaatgggcctgaggaggaatgatgtcatctgtccttctaacttagcacaagaggcaggaggagaaattgagca

SEQ ID NO: 15058 - DNA, 478 bp, Homo sapiens
  MAP TO AL050337.6; EXPRESSED IN FETAL LIVER, SIGNAL = 0.67; EXPRESSED IN LUNG, SIGNAL = 0.77
tgcaaagcccgtaaaaatgaatatttgtggcagtcacatgcaattaaatacggttaataccaatctttagatatgcagggaagactgtagagacaaaccggaggatggaaagggcacacacacattctgatggtgatgccaccaccaaccgttgatcaatgatggctgagagtaagaagaaattaaagataaggaaaagtaagaggaggcagagtagcagaagaggacatctcatatgaccacaatattggttaaataaacaaaagaaaaaaactctaaatatatctattcatctgaacttaccttttctagtgaattgttaattataaaaactcggtatagtagttcatagtaatcttctatagatacatttttttccttttggtatctatatggtaaatttggagcatggagaattaccaacaaagagccattgacttgggttatattcatgactggaggatctatttttgctgaa

SEQ ID NO: 15059 - DNA, 426 bp, Homo sapiens
  MAP TO AC011236.2; EXPRESSED IN BONE MARROW, SIGNAL = 0.93; EXPRESSED IN HBL100, SIGNAL = 2.5; EXPRESSED IN HELA, SIGNAL = 2.2; EXPRESSED IN PLACENTA, SIGNAL = 1.1; EXPRESSED IN BT474, SIGNAL = 2.3; EXPRESSED IN FETAL LIVER, SIGNAL = 1.1
caatcccatagcatttattgccatcttgtaataacataagggtaatcaaaacaatatgaataaatgttcatattggacaaaggacagctaaaaacaaactgtatccttctcaacaatttctcacttcattgatcatttctagctggagacactttgtagcagaggaatacctccttttagcatgatccgacccagttgttttcttgactttgttttagaatgaatctcttccgcatcatctaataacaaggttcgtatactcattaaaaccaatgatacagccttctgtccgcatattcacttgctcatagagccacacctgaatctgcgatctattttgtaagtatctgaagatgaggttgatgggcgcatcttcaccttctgcactttctggccctggccatggtatgccatggtggaatttca

SEQ ID NO: 15060 - DNA, 1994 bp, Homo sapiens
  MAP TO AC009974.3; EXPRESSED IN LUNG, SIGNAL = 1.2; EXPRESSED IN BT474, SIGNAL = 1.2; EXPRESSED IN FETAL LIVER, SIGNAL = 1.1
taggcaaaaaccgtaccagcaactggagtctttctgcttgcgttcgagcccgtcagaaaaaagccctttttctctccctcaaaagagcctccctgtcagtctcactgccaacaaggccacttcttccatggtcttctccatggcccagcccatggcctcctcatccacagaaccatacctctgcttggcagcggctggggaaaacccttcagggaagagcctggcctctgccatctcagggaagatcccatctccactctcttcctcctataagcccatgctgaataataattccttcatgtggccaaatagcacgccagtgcctttattgcagaccacacagggcctgaagccagtatcgccacccaagatccagcctgtctcctggcatcattcagggggtactggagactgtgcaccgcagcctgttgaccataaggtgcccaaaagcattggcactgtcccagctgatgccagtgcccatatcgccttgtctaccgctagctcccacgacacatccaccaccagtgttgcctcttcctggtataaccggaataacttagccatgagggcagagccactttcctgtgctctggatgacagctctgattcccaggatccaactaaggagattcggttcactgaggccgtgaggaaattgaccgcaagaggctttgagaagatgccgaggcaaggctgccagcttgaacagtctagtttcctgaaccccagcttccagtggaatgtcctcaacaggagcaggcggtggaaacctcctgcggtaaatcagcagtttcctcaggaggatgctggatcggtcaggcgggtcctccctggtgcctcagataccttggggttggacaatacagtcttctgtaccaagcgtatcagcattcacctccttgcctcacatgccagtgggctcaatcacaaccctgcctgtgaatctgtaattgactcctcagcatttggagaaggcaaagctccaggtcccccttttcctcaaactcttggcatagccaacgtggccacccgcctctcttccatccagctgggccagtctgagaaggagagacctgaggaggccagggagctggactcatctgatagggatattaggtatgttggcaatgtttttggttcatttagagcagtagaatgtatataccataatttggggtggcaccgaccctgtacctctgaaggttggttttattttttagctgccctagaatttttggttttcacttcagggcaagggttgggaaactatagcttgcagaccaaatcttgcttgttgcctgcttttgtaaataaagttttgttggaatgcagccttgtccattcatttgcagttgtctgtggctgctttcttgttacgatggtagagctgagtagttgtgataaaccgactggcctgcaaacaaaaatatttactctctggtcctttagagaaagagttcgccaacccctattttaagtaaaaaccaggagagaaataagaattgtgagcaccaaatgttgaagcctgtgactttcctactttttccaaaccaaatgaggttctcagtcattcttggcatgacagccatttatagttagggcacacacatagttggctccttctgttgtgttttgttattttcctgggaacttggtccactaaggcctttttctgagttcccagagagtggcctagggacatttcaagtcaattaccagatatccattgatggttttttagatgtagaatgttgtacttatatgctatgagggacaccaaagaaaatggaaaacatagtgcctctttgcagaatgggagatgtaaggttgaggagctatgcctagacctaagctttgaagacaaaagaaatgagttgtgaggtccaggcaagaagtagcagattggtaatggagaaggggcaaatactgggagatgatgaaggaatgagaatctaactgtgacctctttgatggagttgactaggctgggg

SEQ ID NO: 15061 - DNA, 470 bp, Homo sapiens
  MAP TO AC011502.1; EXPRESSED IN HELA, SIGNAL = 0.94; EXPRESSED IN FETAL LIVER, SIGNAL = 0.96
tgtgttttagctgcacacttgaaaatgaaacactttttggactatagcccaagagttttcagagaggttagcttataacatgtgaggagacctggtatagaaacattcaccccacgccttaagaggtgaaaatttgtctttcactcttaatttcaactattaacccagagctggaaaaatagaacatttcattataccaaaaacattttgtttttattttatatctaaggggtacatgtgcagatttgtaaaacatgtatactatatgatgttgaggtttggacacttaattattccattgcccaagtagtatacatcatacctaaccagattttcaatgcttgtctcccttccttcctccttctctttagaattcccagtgtttcttgttttcatctttgtttccatgtgcacccaatttttagcgtccatgtatgagtgagaacatgtggcatttgtttttctgatgc

SEQ ID NO: 15062 - DNA, 474 bp, Homo sapiens
  MAP TO AL022100.13; EXPRESSED IN FETAL LIVER, SIGNAL = 1.9; EXPRESSED IN HELA, SIGNAL = 5.3
tcagatcaggaccaattttaatgttaatttcttaccttggggttttcttgtctccacatgttgaaccagtgctaaatccagtctcaagttcaagattttaaactatccacccctaaatttgagatctcagtttgagattttaaactatcaaggaacaatttttcttcctcctagagcctagacaaaaatggagaaccttccacataattcttcttgtatcagttggtggtctttcccaaggtcaattgacaatgtagacatctgaaggtcttgatttttgtaactgcctcagttttatatttttaggcatctttctccttcactggctgaagctccccaaggacaggccctgtgtctccttcatctttgtatttctggcaacttacacaaatgcccattacattgtagaggctcagtgagtgtttctgaactgaactaaactctctttcctttattctgatatcatgtttctga

SEQ ID NO: 15063 - DNA, 474 bp, Homo sapiens
  MAP TO AC008278.1; EXPRESSED IN PLACENTA, SIGNAL = 0.6; EXPRESSED IN BT474, SIGNAL = 0.68; EXPRESSED IN HBL100, SIGNAL = 0.78; EXPRESSED IN FETAL LIVER, SIGNAL = 0.59; EXPRESSED IN HELA, SIGNAL =   1
ccatgaagtagccatataatagaccactagacagcatttataaattatgtacaattacaggaaatacttatgacattacatttttaaaatttttcccagattcctcatatcttgatttcaactacataaaataatatataaataaaaagtatatgaaaatataccaaactgataacaatgattatctctaggtagtaggatcatgactgaattatatttcttcttcattttatatattttatctcaaaaaatataagtaaactttttaaaaagtatgattatatttcaacatacagcttcatccaggaccaggaatctaacttgagataagttcagctttccagttgacaccaagtcatctagtcttcccggagtacctacaactatatctacctgaaaaaaagcaaaccaaccacttaatgaaaactaaagaaacagtataattacgttaaaatagcaaccaataactgtctt

SEQ ID NO: 15064 - DNA, 464 bp, Homo sapiens
  MAP TO AL022725.8; EXPRESSED IN BONE MARROW, SIGNAL = 0.9; EXPRESSED IN PLACENTA, SIGNAL = 0.63; EXPRESSED IN HBL100, SIGNAL = 0.99; EXPRESSED IN FETAL LIVER, SIGNAL = 0.67; EXPRESSED IN LUNG, SIGNAL = 0.68; EXPRESSED IN HELA, SIGNAL = 0.69
ccaaggtgtaatgcactccccacttccctaggtactagcattgttgctctccttccaccaggacaaaattgtatgtttcctatttcgggagctattttcacctgtttaccaatgataccctactcatacccagcccttctgtaagcaagggccagatgcaagagggacaaggcaattttaggtcgcttacacagattgattatgtcctccattttgaccaatgcgggccccacagtcatggtaacatctcatgggttatcacgtggctttaatggaagggccaggggagaatttcccagagcagtggagtggacggcaagaatgtacgtcaacttgtttgggttaaatttctcactctccagtgggtcatcatcattagcattggaaacctcatctggggcagtaagagctggaatactagttgatgatcttattagacactaatattttcccacaggtgtttg

SEQ ID NO: 15065 - DNA, 482 bp, Homo sapiens
  MAP TO AJ010770.1; EXPRESSED IN BT474, SIGNAL = 1.1; EXPRESSED IN FETAL LIVER, SIGNAL = 0.96; EXPRESSED IN LUNG, SIGNAL =   1; EXPRESSED IN HELA, SIGNAL = 0.96
attttcagcccaacctgaacatttgaattcatcataaatgaaaattttgggatcatttatcaaaatattttagaattattgatttacagtaaccatatggtgtctctgattttattcatttgtacgttataggctctgatttcttttgtaattatgttctgaaaatgataggtaatgatatatccaactgtgataattatttttgttcctaggatgacatggagaaactgggacttgccataaaggaatctgatgccatgtctactcaagaccaacatgtgctatttgggaaatttgctcaaataatacaggaaaaagaggtagaaattgaccaattaaatgaacaagttacgaaactccagcagcaacttaaaattacaacagataacaaggtatactcatttaaaattgattatgaaattaatatgaaccagagttttaaagggcaaaatggttataatgttgctccccattgaatttaa

SEQ ID NO: 15066 - DNA, 468 bp, Homo sapiens
  MAP TO AC005064.2; EXPRESSED IN FETAL LIVER, SIGNAL = 0.67
agactccacctcttgatggggaaatgtcaagaagactctgtggatggaagatattgctatgtctatttttggaaaatacagtctgcatgcgcacacacgcacacacacggttgctcatacaccaggggcaggacactaaagaagggagcgtagccttccttcaagcatgatttcttgacctcacctttgtctcttggtgtactggcaaaaaccatatcagatactctgaaccctgaacagggatcttcatgcttcattatttcaggtccttttgctgttattagcctgatgattggtggtgtagctgttcgattagtaccagatgatatagtcattccaggaggagtaaatgcaaccaatggcacagaggccagagatgccttgagagtgaaagtcgccatgtctgtgaccttactttcaggaatcattcaggtaaggctcaaagatggggaaatggactgtctcgtt

SEQ ID NO: 15067 - DNA, 446 bp, Homo sapiens
  MAP TO Z94801.1; EXPRESSED IN BT474, SIGNAL = 1.3; EXPRESSED IN FETAL LIVER, SIGNAL = 1.1; EXPRESSED IN HELA, SIGNAL =   1; EXPRESSED IN LUNG, SIGNAL =   5; EXPRESSED IN BONE MARROW, SIGNAL = 1.2
ttgttgcaccacgagttattgtttccagtttttaaatatcataagcaattatacaaacatccttatgcatctttgtatatactgctggctacctccataggacatatttgcaaaagtggaattacagtgcctatgaatcatttctcattgataaatgccaaaagaagcagcaaaatggaagtaaaagaacattagggtaatcaaagaaaaaatgataattacctgacaaggtagcatcaaatcccatgtcttctattgctcctctcaacgtttctggagaggttagtagaggatcatactcaacagtcccattgctatttgcaagggagactcgtatggattttacacctggcttttttgatatgacaccctcaatagactgcacacaggaattacaagtcatgccatcaatgtttatcacagtttcttgtgtcagaggctggcta

SEQ ID NO: 15068 - DNA, 431 bp, Homo sapiens
  MAP TO AC007052.4; EXPRESSED IN LUNG, SIGNAL = 0.94; EXPRESSED IN BT474, SIGNAL = 1.1; EXPRESSED IN FETAL LIVER, SIGNAL = 0.94
aaaagtggcaaagaaaattaggagaaatttaggaaaaatgatttatgatagaggcttaacacacacacaaacgtacacatacagacaaaactcaatagtcagctaataaatttgaaagctcttatttaaaagtattctaaaccagtaagagatagaagatggaaacatagttatatttcattttagcccaataatgacatgtacaagatattatacattatgatttcacttttcagtctacatacatagccttttggaatatctgtgtcctcattgcttccagggtcattttctaagtgctgcttgattttttcttctaatcccacagcatctgctccttgatattgatcaattctcactttgtttcgaaaaaacaaaaatgtaggtgttgctgatatattgttggtggcagctgttccctagaattggca

SEQ ID NO: 15069 - DNA, 469 bp, Homo sapiens
  MAP TO AJ010598.1; EXPRESSED IN HELA, SIGNAL = 0.69; EXPRESSED IN FETAL LIVER, SIGNAL = 0.6; EXPRESSED IN PLACENTA, SIGNAL = 0.61
caataatgttttctccaccgctgttgcttttgtttctgttgttgccatatgcatagctttttctaaagagagattttcagttctagataggttgagattgttttctctaaataccgtttgttctaatactgtttgtgaacatatttatgttgtcttccttattaatacttacagatccttaatttaaaaaggaaacaaaaacctattcttttttttttcctgcattgcattaagaaattaaatgagcaagccgcagaactcttcgaatctggagaggatcgagaagtaaacaatggtttgattatcatgaatgagtttattgtcccatttttgccattattactggtggatgaaatggaagaaaaggatatactagctgtagaagatatgagaaatcgatggtgttcctaccttggtcaagaaatggaacgtaagtttaaacaatggtagtaggcacctgagatgtccg

SEQ ID NO: 15070 - DNA, 434 bp, Homo sapiens
  MAP TO AL009031.1; EXPRESSED IN FETAL LIVER, SIGNAL = 6.1
gctgaaagctaagtgggtgctctgtcattactggggttcgattgactggttctaacagagaccagctatagagctaacacttgatggaatattttgaatattgatgaccttttcactggcttctgcctatggcaagtagaggtacaacccaaagagaagagcctcatttatagtgtgtggctgggggagagggaggtttgcaaactgagtcattttcccccattcagcctgtgtgtgtctgtgtgagttcatacctgtgtgtgtgcataaaatcaaacaagaataaaatgttttcatttgttcccttccttcttcctctctctgtctctccctgtttccacaggtcagcgttgaagttttggtagagtatcctttttttgtgtttggacagggctggtcatcctgctgtccggagagaaccagccagctctttg

SEQ ID NO: 15071 - DNA, 474 bp, Homo sapiens
  MAP TO AC007382.2; EXPRESSED IN FETAL LIVER, SIGNAL = 1.5; EXPRESSED IN HELA, SIGNAL = 0.72
ccaatgcataaaaagacaataccttccttgtcccactggcccaccaagccccagaaagcagcctcagcaccaggctgcttggcaagcccagcttacccttcagatgggcagccatggctgggatccggacgtcgtcgtaggacctcccgtcggtgatgaggatcattaacttcctcttgttgggcttggacttcttgaagagctgctccagggcgaagttgatggcagcccccgtgctggtgccaccactccagtagcccaccctcttgatggcgttgaggatgtcaggcttgctgctgtacttgtcgaacccaaactccagccgctgttcgtaggtgtactgcacggccccgatgcgcgtgtccgtgtcggaaatctcaaactctttggtgaggttggtcacaaactggaggacggtgcggaagttgcccgtccccacactgctggagccgtcgatgacgaagccaatgtcag

SEQ ID NO: 15072 - DNA, 448 bp, Homo sapiens
  MAP TO AC007671.5; EXPRESSED IN FETAL LIVER, SIGNAL = 1.2; EXPRESSED IN BT474, SIGNAL =   1; EXPRESSED IN LUNG, SIGNAL =   1; EXPRESSED IN BONE MARROW, SIGNAL = 0.96
tcagaaccttctgtggtccagaaagacatttgtggacaacatgaaaatttataaccacagttacatctacatgcctgccttttctatgaagacaggaacagagccatctttgagggtttattatacactgtcagatgttggtgccaatcaaacagtgctgtttgccaaccccaactttctgcgtagcattggaaagttctggaaaagtagaggaatccatgccaagcgcctgtccacaggactttttctggtgagcgcagctctgggtctctgtgaagaggtggccatctatggcttctggcccttctctgtgaatatgcatgagcagcccatcagccaccactactatgacaacgtcttacccttttctggcttccatgccatgcccgaggaatttctccaactctggtatcttcataaaatcggtgcactgagaatgcagctggac

SEQ ID NO: 15073 - DNA, 426 bp, Homo sapiens
  MAP TO AC006474.3; EXPRESSED IN FETAL LIVER, SIGNAL = 0.64; EXPRESSED IN LUNG, SIGNAL = 0.68; EXPRESSED IN PLACENTA, SIGNAL = 0.78; EXPRESSED IN BONE MARROW, SIGNAL = 0.7
ttcctggaaatccagacccacggccctatgtaacagattgggaaaagtcaacattctgtgacagaccaaaataatttttaaatccaaatgccactgagataaaacattttattaaatgttacacaaacacttccttagataagtattaagagacctggcttattatttttatctttaaacgtatactccacaacttaaaaatctaaatataaaatgcttacaaccttagaatcataccttaggcctgtcactgtgaatgctatcagcaagcctttgcatgatttttctctttcccactcctacattcttggtgacgacaacaactatagcctgatccagatatttcgaagtgcaacaaattgtattcaatatagagtaagtataaggaagaactctctcattaactggtctcgcggtgattacaat

SEQ ID NO: 15074 - DNA, 430 bp, Homo sapiens
  MAP TO AL031119.1; EXPRESSED IN PLACENTA, SIGNAL = 0.95; EXPRESSED IN BT474, SIGNAL = 0.98; EXPRESSED IN FETAL LIVER, SIGNAL = 0.96; EXPRESSED IN HELA, SIGNAL = 2.3; EXPRESSED IN HBL100, SIGNAL = 2.2
ccgttcaaaaacccaacaagtaaatttaaaaatatattcatgtgtaatttcattctaaaaccagcatagctgttctgtcctcattctctgccttttcagcttcagaatccactgttggcttgctctctaatcctcagcatcttcgtgatcttccctggcagcctcagcagcatctgcttggctaggttctctcttctctcggttcatagatttctggggtcacgtggtccaagtctgcttctagaagttcagtttgtacttccactggcacctgatttatccattcaaagtgaagcttctctacgtgtacttcagtaccttcttcagtctgaattcgacccacttctagataacttatttggacctgctctggaagcacactcgtgtgaacaaagtacctggctgtcctggagcagatctggatggacgt

SEQ ID NO: 15075 - DNA, 462 bp, Homo sapiens
  MAP TO AC004885.2; EXPRESSED IN FETAL LIVER, SIGNAL = 0.68; EXPRESSED IN BONE MARROW, SIGNAL =   1
gagtcacttcgtggctttggcagagtctgccactgtctgctagaataaatgtggagccaaaatatgatttgtctattttgacttgtgtacattttctgagtacaagagactattgataagaagtttaggtaagtggagaaaatgtttgttgattccccagaaagcacaaaatgttcattcagtgaagagagaagaccattcgctcattatagttatgaattaacgctacatcttctacagcagaggttcccaagagtgtattgaaattacctgggaatttgttgaaacacaaattgctgggtctcagccccatagtttctgatttcgtaggtgtggggcaagaggacacagtgttgagaatctgcacatctaatacaataatccagaaaatactgctgctgcttgtccagagaccactcttggagaccactgctctataagcaagagtacgtcaccaagaaa

SEQ ID NO: 15076 - DNA, 456 bp, Homo sapiens
  MAP TO AC007963.1; EXPRESSED IN BONE MARROW, SIGNAL = 0.93; EXPRESSED IN FETAL LIVER, SIGNAL = 0.77
  unsure 330
tctttgaggaacctgcatactcttttccacagcagctgctccattttacattctcataaacagtgcacaaaagttccagtttctctacatcctcaccaatacttgctgtcttttgattttttggtaatagtcatcctgacaatgtgcgttctgttcattttaagtctctagcaactaatgggatatttgaacagggtgtctgaaacttttagtctagcagatagggaatttcacattagcagagtcagaatataaaaatgtaactttacctctctatacatgatcataacttcactctctagccattgtttttcactaaaggcagtgaangagtctttggggatgagggttctggccccgtcactgatgctttcattggccatgaaggctttgctggttgttggtgccatccatttctctgtgttcccttttctctttatgttagtcccactgggc

SEQ ID NO: 15077 - DNA, 469 bp, Homo sapiens
  MAP TO AC007253.2; EXPRESSED IN FETAL LIVER, SIGNAL = 0.97; EXPRESSED IN PLACENTA, SIGNAL = 0.59
tccaatatggactgatgacaaatcaatgaagaattgccattaaatgatttcccacactccttacatggatagtgtggattctctgttgtctgacacactaagagaaaaagctgatgcacctcccatactcctcacatctgaagggtttccttgcatagtggcttctctcatctttttcctttaatttttttctctgtggagattttctgatgcttctccatgtcatgtgtttctggaaagtcagcttcctaagaaacattctttaacagcccacgtggcatcaccatgtctgtttcttcagaaattccctgtgttgatgtggactcgttgtcattgttggtctcagcatctttacaggcatccctggtcccctctgcagggggatcatcctgtgtgtccaggacccaaggcatatcccctcctaccagaagtgagacccgcgcaagtttgcaaactgggtatcctggtg

SEQ ID NO: 15078 - DNA, 484 bp, Homo sapiens
  MAP TO AL049911.1; EXPRESSED IN FETAL LIVER, SIGNAL =  23
gcagcaattgggaatattaactgttctcatgtttaaatatttgcttttggcaaaatccaaacaagctcactatttgttagattagtaggtatagggtcaatgtggcagtaggtctggagtggggcacatgtattttgtagattaaaagatgttgtcaattttaaaacattaattttatattaaatttggagagaataccaccttattgagtgcatgccaacattttaagatgtcttccattttcagagcaattttataaaaaggatatattgaagtttattctactacaggcatgaaagttaccatgcaaaccagagatagatttgctctgtgtgaagaagcttctgcccatttgtccattttagtatatcatttaaacagtacagccagtgctcaatagtggcatcagctgaagtcaccatcatggctacacaaattgattccttatgtgggggaaaaaaatcctcaaatggcagatggacaa

SEQ ID NO: 15079 - DNA, 494 bp, Homo sapiens
  MAP TO AC011415.1; EXPRESSED IN LUNG, SIGNAL = 1.3; EXPRESSED IN FETAL LIVER, SIGNAL = 1.3
gaaaataagcatttattgagcacctactataaaatatgacagcatctagcacagtttacagaacacagacagtactttgtaattgttgatttttcatgtcctctgttctttacctccctactctgcacttctgctgttttgttctctgttgtgcacctgtgttaacagatggtaaatctggaaacagcagctaccacatgggaagggtagagcacaggctgtttatattggcaggccctgtaggaggataaatgtgagtagccctgcaccttcttggtgactttagagatctgcagctacccatccaccctccttttcttctctcagtgtttgttctccctttacctgtcccagtctgcattgagtggaaaagaattcccatgagcaacagtcttaaagagatttactggatgttgtttgtaaagctttttgaattcctcaaacaaaaagaaatataaatacaacacatcatgccgagcaaggtctttcctgtt

SEQ ID NO: 15080 - DNA, 473 bp, Homo sapiens
  MAP TO AC005902.7; EXPRESSED IN BONE MARROW, SIGNAL = 1.2; EXPRESSED IN HBL100, SIGNAL = 0.8; EXPRESSED IN HELA, SIGNAL = 0.73; EXPRESSED IN FETAL LIVER, SIGNAL = 0.64
gatgcaaacagaaagggttaggtgaggtgacctctccctgtccccatacaccaaagagcaggcctgcagcagagggaatactgggagagctccttttccccatacctcccacaggagtttgacatcatggggggctgctgtgccctgcacggtcactccatggactgagctttgcctctgactgtcctgtacctgtgcctctctccccactgcaggtggaacactacaaccaccacacagccacctggcaccctgcagctggcatgctcaacaagcgctgccggcacggagccgcctccctggggagcaagatgtttgtctgcgggggctacgatggctctggcttcctcagcattgccgagatgtacagctctgtggcagaccagtggtgcctgattgtccccatgcacacgcgcaggagccgggtctccctggtggccagctgtgggcgcctctacgctgttgggggctac

SEQ ID NO: 15081 - DNA, 478 bp, Homo sapiens
  MAP TO AC012078.1; EXPRESSED IN FETAL LIVER, SIGNAL = 0.97
tggtgttttggggatttttcatgacttcacttgagtgtgatgtatatagctggcaatctctggtactttaatggctgtgggggtagataatagaatagtgagagagcccttccagactggagttagttgggaattttaggttccatccttctaagctttaatggtatctggtgagcttggaggatatagaagtggatattttttcccttcaaattttgggtttgtttgtaacccatattcccagagagccttttggaagcttgctaaagaagaggcatacctgggtgattgtggcaatttcttcacctagtaagaagtcaaaatataggaatgtcctttcatatgaggcctcaaaggggcttaattgcaagggagccttaggggcaacacagatctgaggagggctaaggataagaggtactgccatggctgtgcagtttcctgatagagtatatagaggatgcatttgaaggtttgg

SEQ ID NO: 15082 - DNA, 459 bp, Homo sapiens
  MAP TO AC007024.4; EXPRESSED IN BT474, SIGNAL = 0.76; EXPRESSED IN HELA, SIGNAL = 0.61; EXPRESSED IN BONE MARROW, SIGNAL = 0.69; EXPRESSED IN FETAL LIVER, SIGNAL = 0.59; EXPRESSED IN PLACENTA, SIGNAL = 0.79
aataggaataattgtgccccccctctcaaaaaaatcccttatttatgattgactttcagggtaagagaggtggggcaatatgaactggtatccatgataaggcaagggtagtatgcctaaagcgttgcacagaaggcagatttatctgtatttagtcatttctcttactcttgccagacttgttttcctgaatgtcactttcgttgtgttgcattccttcttaagcaattagcttggcttctcactgtccactgagtcaagtttgtgcttcattccctggatttcacagctgtgcagaatagtatccaacttggtttcctgctctttcatgaaggacgaggtcagaagaaaagcccagaacttcataggtgatgagcaaggtcattctgggaatggtcaggctcctttactggatgagttcacaaaggtgaaaagaggtgcttgaagacagttcctggg

SEQ ID NO: 15083 - DNA, 467 bp, Homo sapiens
  MAP TO AC006432.15; EXPRESSED IN BONE MARROW, SIGNAL = 0.74; EXPRESSED IN FETAL LIVER, SIGNAL = 0.58; EXPRESSED IN PLACENTA, SIGNAL = 0.64; EXPRESSED IN LUNG, SIGNAL = 0.81
tcccagcaatgtccaaatagaaatgggtaactctgaagaaagggtctgagaatgacagagtgcatatgggttgtggtggcatggccttttccctcctttcttaaaaatagataccagttatataagttttatcatttatgttaactttgagcttcctcgtggcatataggtacagggatttcattaggttcaaagaagttttaaagaaaagaaacaattttggttgtggaagaatgttttcagctcataccaaataattgaagtctgctgtgtaggttttgtcttcaaagtcttccatattgagaatgcagtgcactagcaccctcttctgctggttgcatctcagttcttccatctcttggacaatctttaggaagctattcgtcttggagtaaaatcgatatgcaaagtactcgggctgagggtattgaggcaacacccagccatgagcctggcaattttcattg

SEQ ID NO: 15084 - DNA, 466 bp, Homo sapiens
  MAP TO AC007092.3; EXPRESSED IN FETAL LIVER, SIGNAL =  20
gaaatgcctggtgttaattatttgtttcactatagtaaccatttctctatctttctctctctctcttccctctttctctttcactccatatatatgtgtgtgtgtataatagatatgcatacatatttacatatttatatatgtaaataataacatgttatatgccttaaatatacacattacaacttatttaaaataaaataaaataaaataaaattacctggaaactcttgtcatcataaaaacaacttaatgctgctggaagcaggttaacttaccctagctgcataatcttgaaaaccccaggtaagttttgggtacttggagacattgatcttttgcaaatctgagaagccagcacagcccgtgtctcctttaagtgaatcctacgatgatacaaaataagatgtggcagtcaaaaagatgtttgttgaatactctcattattcaccttccactagaaagg

SEQ ID NO: 15085 - DNA, 489 bp, Homo sapiens
  MAP TO AP000038.1; EXPRESSED IN PLACENTA, SIGNAL = 0.73; EXPRESSED IN BT474, SIGNAL = 0.73; EXPRESSED IN BONE MARROW, SIGNAL = 1.5; EXPRESSED IN FETAL LIVER, SIGNAL = 0.63; EXPRESSED IN LUNG, SIGNAL = 0.6; EXPRESSED IN HBL100, SIGNAL = 0.85
ggtgtctatgacccgcctggggcaacagggattctagtttctatggcaaccctcaagggagaacaggactgaaaggtgggcaggagaaggtcaaagaaaaagttcttctaaggctgtttctgaggccttcattttatggtattgttttctgagtcccaagagaaacaatccaaatgtcccttaattagggactaaatgaaaaccaaaacctaactctggtgcacctacacagcaaggctgaacctcaaatttattcagtggaagcagccagactcaaaagactttgcctatcatgtaattcccttctcttcataggacatagactgggaggtggccaggggcttgtggtgaccttgactacaaaagagaatggggaatttctcaggacaataaaagttgtacatatcttgattttggtagtgataacatggctgtatctgctcatcagaatttacagaactatacactaaaaagagtgaattttaccgt

SEQ ID NO: 15086 - DNA, 470 bp, Homo sapiens
  MAP TO Z83826.12; EXPRESSED IN BONE MARROW, SIGNAL = 0.73; EXPRESSED IN HBL100, SIGNAL = 0.96; EXPRESSED IN FETAL LIVER, SIGNAL = 0.57; EXPRESSED IN HELA, SIGNAL = 0.62
atggaatgcatgcgtcttacattttatacatgttttatgccattgtaagtcagcaaaaggaaaataattgaatatagtatcaggtactagataaataagctaaaaagaactaaatgtgagttaaaaaagtcttcaaaggcacctgacctcaatatgctcttgaagcatttctttacctgttctttgggaaaaaaaaaaaaaatcaaaccaccaccaccctaccacacacataaagccctacacatatgtcccaaatgcatctttaaaacccttacctaagatataagcagccactaatttttgattcacacttaagtggaggtagagaggcaccagcgattccacatcccccagtgtaggcagcatcagggctgcaatgcacaccactcccaggaagacagttagtaaactaggtcctgaggatacagctctgttttctgtaaaaagacaaaaatccctaagcttccttc

SEQ ID NO: 15087 - DNA, 1966 bp, Homo sapiens
  MAP TO AC004526.1; EXPRESSED IN HBL100, SIGNAL = 1.1; EXPRESSED IN PLACENTA, SIGNAL = 0.95; EXPRESSED IN FETAL LIVER, SIGNAL = 0.93; EXPRESSED IN LUNG, SIGNAL = 2.6; EXPRESSED IN BONE MARROW, SIGNAL = 4.9
aaatcaaaattgactatcagttgccattttatatatgttaacatataaagaaaaaagagtcatttgaggatggaagatcagctaaaaagcaagttgtaatatttataacagttctgcaggtggaggtggcagggattcattaagatcttgatcagagttgggaggaatagagaactcctgacactggatctcaaggttggaatcttcttggtttttcataaaatctactggtggcaggggcaagttaagtgagtcaagcggtggaaatgattgtattatctcagatttatgatctccacagtcttgattgagacagtccagagatggagggagactagtagaatcatttggaagaggagatacaattgtcattgtgggtttgatcagattggttactttcctgtccttccaaatccagaaggggaggtggtggaggcagatctgcatcatctgaagaagaaacagcagttccaactgttgaaccatcagcactatcttctgatgtaccatttacttgatcttttattttctctgttttggggttgttggagtcttcaatgttttcacttgattcaaacaacttaatttctaagtcatctgctaaaagtgtgcttttgcttggtttccagggtgtaagtgaaatgattgatgtacgttttgtggatatttcattttctctgatgttatccatacaaatgtcaggggtttctccatcagcaaatggagatctacctgcccaattttgatcatttaaaactggtttccttaagcatttccaaagtacaatgatgattatagctaccaacatagaagtcagaagtacaccaattagtatggcagctattgaattataattgtttttttgtggggtttgtttgttactggtagtatctaagataaatcctggtgtactcctaggtgaatttttgacagttgatgttggttgtgtggatggattatgaacagttatttgttttctagaagggatctggacagatgatgattgttgagtaaaagtatagacaaatgactttggtggttgtgtggtagaagtacgggcagatggtagttgtctggcagaggtgaacacggcttgctgggaggaggtgttggctattggtgttggttgtttggtgttgtaggcaagtggttgtccagcagaagtatgtgcttctggtttttcagaagaggtatagacagctggtgttggttgtccagcagtgactttggcaggtgatattgattgtccagaaaaagtgtcgctgaattgtgttggttgacccaaaggattccctgttgtgttttgagaattagccaatacctgtgacattgatgatgtgaataaggtaggctgtgactgcttctctgttgtaattgtctctgtctttgaaaaaaatgtattgttcaggtgtccacaaaacaaaattaagatgaaatatttgggatccatttcagaatatttcctcgttatctatagcgggtttataatgaaagagaaagacagttaggcgtcattggtgtctagttaaaaatttgacttttcattatgattcctggcataaagtaggtagacattattcctaattagtagtagttgattagtagttattattcctaatttagacttgatacactgtaggtttggtgtaacaactcttggatatactctaacccatcatacagcatttggacctcataagcagtgatctctcttcttttattaatacaagttctgtacttggctctgctgcccctctagcttcattatatttcagtacttcacttagtcatacttctcaaaacgcataggctctatatgctggatccatgtgttctctaccttttttcaccattttctactagaaatatattgattctcctgccttgaagaacaccagtgatcatctgttacctaatctaattgttctttatttcttctctcccctcccctccttgaccacattag

SEQ ID NO: 15088 - DNA, 388 bp, Homo sapiens
  MAP TO AC007021.2; EXPRESSED IN HBL100, SIGNAL = 0.76; EXPRESSED IN FETAL LIVER, SIGNAL = 0.57; EXPRESSED IN LUNG, SIGNAL = 0.82; EXPRESSED IN PLACENTA, SIGNAL = 0.75; EXPRESSED IN BT474, SIGNAL = 0.72; EXPRESSED IN BONE MARROW, SIGNAL = 1.5; EXPRESSED IN HELA, SIGNAL = 0.63
tggcactggaattttcacacagtcaattattaatagttctcagtcatacaaagatgtttcttcatttttttattgtaataagatttcttttttatatatataaaactttcattttaggttcaggagtacatgtgcaggtttgttatataggtaaattgcatgtcacggaggtttggtgtacaaattattttgagaaagacatttctttaatgcactgatgcaaggggggtagaaggcaaagtcatacatacatttgtgggtggtccttttgcattgtctccaatttggcccaagatattgaaagttaaatcatggcaattcaccaggaaacgtttattgcatttttcttcaaatggctttatatcaggttcaattcctgaaaagtcca

SEQ ID NO: 15089 - DNA, 461 bp, Homo sapiens
  MAP TO AC009226.2; EXPRESSED IN FETAL LIVER, SIGNAL = 3.5
gttgccatctcctagccaagttggcataaactaaccatcatagggagtgaacataaaaataaaatacaggcatctttgaggccagtctgaagcagcatttctttgaagtcttggtttttgggttaaatttttttgcatagttaacattttagtctagagtatatccatatttgttcttacatataaataatgtggaggctttttaacccccaaaaaaaatctgtggataaaaatggtggtttcaggaaggtagtccatgtttattagccctctttaattactctggacactctgcctcatttctaaagaggtatacacactccaggtgagatgcataggcatggtaggcaacttttgcatccagccatatgtcctcagctgcctcaagttccagcatgggttaacaattcctatgcaagtcattagggtccagtgacatatctccaattttctgccttggc

SEQ ID NO: 15090 - DNA, 442 bp, Homo sapiens
  MAP TO AC007001.2; EXPRESSED IN FETAL LIVER, SIGNAL = 0.61
ggcaatacttgccacacagaaatgtcttgaaggttatatcaaataaattgatatgttcgaaactactctaaactttcaaacaatacatgttcattactattttattttaaatgcatgctgtggtataagattcagaatgtttgactttcttacatttttcatcccttccatatagaatcaaactaactcagtgttctttttctcactgactttctggccctagtctcacaccaccagggaccttataggtcactgtcattcctttgctccataggaatagaaattaccaacaggaaagtggagactatgctctccaactccagctccctctctggaaagcataatgacgagctgggttctttgcacccagcagtcaaaggtactgagaagctgtcaagagctattttctgttactgcacttggatttctccaaagcccagtg

SEQ ID NO: 15091 - DNA, 472 bp, Homo sapiens
  MAP TO AC010153.2; EXPRESSED IN HELA, SIGNAL = 1.3; EXPRESSED IN FETAL LIVER, SIGNAL = 5.2
ttcaatttttctgtgagttgggttgaagcagaggagtcacaatctcagcaacgagcaagattcatgtataagagccccaatctcacttgaagatggttttccagtaggggagtcagcactacaggtgtgttgaatcatggttcgtatgttaccaaaccacctgtgaatcagatccatgtataagagtaattatttcaatctttgactgctttttatgtgcatgatttattacctcattcctaggccctgttcatgtgggagaatgtcaatcgtgtcagctaggtgtacatacaagtgttctcacctcattgctgctctctgttattacactctctgtatcattaaggctttatgtgatatacctgagtgttataatccttcgtgaaatttatacaagtgaaaagcccaggactttaccaatggctgtgagactggctgtgagagtcagttatctctactggatgggtccagg

SEQ ID NO: 15092 - DNA, 468 bp, Homo sapiens
  MAP TO AP000156.1; EXPRESSED IN PLACENTA, SIGNAL = 0.77; EXPRESSED IN FETAL LIVER, SIGNAL = 0.6
tcggatctgtcttgagggagttgcttcttagaaatttctgtactgagtcagattcttcataacttttctttcacgctaaaaggtaaaacatgagtgactttaaaaatctttctattcattcaaccttttgtcgctgagtacacatgtggctggtgaaatttgctagtgactcaaccagaaagagagcgggagagaggacgaagagaggagtagagggagcgacccaaatcacattttctagaaggtcatacctctgagtagtaaccttggttcagtgagaccactcacccatggagctcctgtgtaatttgaggtcagggtgtgtgatgctggtctcagttggttgctgaatgggatgaacaccagctgccctatttcttcattaaggggaaagaagtctgtcttgtgcatacactggggactggccttggcccatcacattactgtcctgttgcttctttcattcca

SEQ ID NO: 15093 - DNA, 488 bp, Homo sapiens
  MAP TO AC007877.3; EXPRESSED IN BONE MARROW, SIGNAL = 0.72; EXPRESSED IN HBL100, SIGNAL = 1.5; EXPRESSED IN FETAL LIVER, SIGNAL = 0.65; EXPRESSED IN LUNG, SIGNAL = 0.68; EXPRESSED IN BT474, SIGNAL = 0.65; EXPRESSED IN HELA, SIGNAL = 0.71
tccatgtcatcttgtgtgtaaggtataatgtagatcaaattaaaataaatgggtatattatgtgtaggaagcattgaaaccaaaagattaaacacagattttatatcataatatctcaatgtttaaatgggtaaaagagactgaaatcagttcaacattctcatgttatagacaaccaaactgagatctaggaagctgaagtgatttgcttaaagttatacccatatttaatagtgaatacatttggcttatttatatgcagtcttatgatcatgcatgatacaattctttactccaactttgttgtcaaaaatcactttgtgaagattgcaaaggtggtaaccataaaatttaatatcattaatgtaatagataaggatggtgaacatactagtgaatgcaaaagtgttacagaaaaccaccattgttttctttgggaaaagaggaaattaattgggatttaattaaagtggacagcgttctgacag

SEQ ID NO: 15094 - DNA, 485 bp, Homo sapiens
  MAP TO AC006560.8; EXPRESSED IN FETAL LIVER, SIGNAL = 0.84; EXPRESSED IN HELA, SIGNAL = 0.73; EXPRESSED IN PLACENTA, SIGNAL = 0.59
ctgttccagttgggcagaggtggcatggtgagggcagtgctgggagtgaaggaaaggacttgatctgactgggagggccaagctgtcttgggaccttgcccctcccatccttccccaccatggagactcgtggagacccctggggccatgccaagagtcttattgctaccctgtaagcccccacttccctagcactcttccccagtcctctgagaatggccaggttcagagacagcccattgagcctgatgacctgaggaccaagcccttctccaagtggctgagcaaatacttggagctttcttggcctttcctgccactcaccagcccaggagtggacaggactcgtgcctcatacctgagccaaggtgggcataggatgttgctgggtcacatgagtctctgctgtgtctggaacaaaaagaactctgacttcttgagaacctactatgtgcctaggaactagaccatttacctacattagg

SEQ ID NO: 15095 - DNA, 466 bp, Homo sapiens
  MAP TO AC011376.1; EXPRESSED IN FETAL LIVER, SIGNAL =   4
acttgcccagagttggtttctattacttgtaccacagaaggctgataggggatggggacggacccaggccctagatgagatgaaggaatttttaaagcctctttcattgctgtggttttaagataagcacaaatataattaggcctctctcataggaatcaatagttatagatgtactggaaagacaatacttggctcagtatcttaaacagacatgttggctctacacacttgcaaacaatgaaatcaagtataatttgcagccctggggatatagttccagaaagaggctcaaagtacacttaccagtggtattcagaaagccacggaaggggactctgccagaacaccatcgtccgcaggctgatgtcaacacataataaaacaatagagtgaacattgggggagggaggaatctgtaacataaagaagataatggaatcatcaacactgatcagcatcagga

SEQ ID NO: 15096 - DNA, 392 bp, Homo sapiens
  MAP TO AL008728.1; EXPRESSED IN FETAL LIVER, SIGNAL = 0.97
aaacatgtacttctggtgctgcttaagtaaacactctgcagtttgtgttaaaaataaaattattcagaggtacttcttaaagggtggtgaggagccttttgtcagggccatcacaatacatacacggtcctcttcaatagggtttggcagtgggggagagagattagattaagctccattttgaatacagcctgggtgagcggggacttacagctgcagctcagggtgggggtccacagatggaaaattactacaagaaaatacaagggctcagcggattctggctaaaccgacctaacaggattcttactgaagacaggccgggtgaccagttatcattgggggaggtggaggaggaggaaatggatggatgtgagggtgatcagatgcct

SEQ ID NO: 15097 - DNA, 467 bp, Homo sapiens
  MAP TO AC010727.1; EXPRESSED IN FETAL LIVER, SIGNAL = 0.96
agagaacatcaaagctggggtccttgaatgaccgatcacagccaaccaaatctcaaagccatacccgagggacctttggtattgtccacaatccttaagagtaaagaattgaagaaggcaagtctgagttctgattctagctcatcacacattcgttgcagaaccacgggcacattaggtaacctcactgagccttgtttcctcatttgtaaaatcaagatctctataaggattaattgacactgagcaccatgcatgccacattagctgttattactgttgctactgttaacaatgattatatcaataccagcagcatccaagtccactgctccatcacaatacatcagctgcagggatccccagagaggccagggagggcgcaggggcagaacagcctttctgccatgaagatgaaggactgtacgaggaggagcctcccaccggggtgagcttaaatttgcgga

SEQ ID NO: 15098 - DNA, 454 bp, Homo sapiens
  MAP TO AL031431.8; EXPRESSED IN PLACENTA, SIGNAL = 0.64; EXPRESSED IN FETAL LIVER, SIGNAL = 0.59; EXPRESSED IN LUNG, SIGNAL = 0.62
agaagcagctccgtttcctctcaacctttcactctgctacatttattgtgcacttaccacctaccagaaccagatgttgttacaggagctgggaatacatccatgaacagactaatccctgcccccatggaactgatattctacttgggacttaggcattaaaccagtaattgcataattattttattaattacaattgtgatagatgctttgtagaagtactacagggagccatggaatcatttacagtgaatatcagttgggattgtgtttggctgcaacagacacctaacaagatccaagaatatttctttaccatatgaaggcagtatagatggaggaacccagggctggtatggcagttctggtgtcacaggggatacaggctcctcatcttttggattcaccatcccaacatgtggcttccatcttcaaggctacctcctggtccaga

SEQ ID NO: 15099 - DNA, 476 bp, Homo sapiens
  MAP TO AL109624.1; EXPRESSED IN FETAL LIVER, SIGNAL = 1.1; EXPRESSED IN HELA, SIGNAL = 1.8; EXPRESSED IN BONE MARROW, SIGNAL = 1.8
taaagctctgggaatggctgattggcctggtgttgggtcataaacccactcttgaactaatcactgtagccagaaatcagagtacactgattggtcaagcctgagtcatgtgttcaacctcaagccaatcactgtagtcaggggagcagagttctctggccatgcctccctgatgggagtccacctgaaccgtggactgagaatgaaaagggtgatttctcacagagatactggacagtcaaaacatgtccatcacagcttcttctttctttctctatggaccagttttctgtgttttcagtcagtatggtagaagaaatattgctatgcccagctcaagttttactttctctctattcaagaacactagaagtccctgggagactctgactagtgaagctcatacaattaactgtgatggtggagatgaggatagtcttaaaggtaacacggttgcaacagactcatctatgcga

SEQ ID NO: 15100 - DNA, 467 bp, Homo sapiens
  MAP TO AC011395.1; EXPRESSED IN FETAL LIVER, SIGNAL =   1
gatgcacaatacaaggctgtgattgtcttctgtatgcctaaatctgcttagagtgcactggagaaatagactcatgcttccaggcatattcccaattacgtttaaaaaaataaacaaacaggtgcatgaaaactccagcacttagcagctggctcctatgcatttcctcaggggaaatggagctattggctaggcattctcctgagtatttacgaagatacaaagaaaggtggttttgacctctgtttcagaattgaaaaacactaggacctcggggccatgaggaagagggtcaagactcccaaatgctgcttaactttcaccaagatacgcatgtcccagaatcccagcgacttctctaagaggcaaaaattgttctttccaattttgaaagtcagaaaccagaggtgccatggaaaggacttgctgatgaaggtcacatagaaagcgagagggagaacataagc

SEQ ID NO: 15101 - DNA, 476 bp, Homo sapiens
  MAP TO AP000237.1; EXPRESSED IN FETAL LIVER, SIGNAL = 0.61
caaagaacaacagaaataacttgatgaaatgaaaacatttacattttttggacattcagacaactgagtcagtcccagacaagactgtgattttgaataagcaggatgtaatgtgtaatcttcttgttcactttttcatttataaaaatggaaaaaaaccctcctgccttgaatgttataaagtgtaattaaacatatgtaaaagagctatttcataataattttctttctgatacttaaaaatccttctcaaagaggaagtaggtagatcaggtttcaaaattcagaatttctgtttcctattcaggtatttgtttcctccaagcagcctaccctgcacagattaatggtgctcacatccatgccagtgattgacttttcccctaaatacctgcagcctgaacgtcctaaagatgccttggtctccccaaggatgctgattctgagtaagacacagtctctctacatgcgggctc

SEQ ID NO: 15102 - DNA, 465 bp, Homo sapiens
  MAP TO AC005484.2; EXPRESSED IN BONE MARROW, SIGNAL = 0.78; EXPRESSED IN LUNG, SIGNAL = 0.7; EXPRESSED IN HELA, SIGNAL = 0.6; EXPRESSED IN HBL100, SIGNAL = 0.85; EXPRESSED IN FETAL LIVER, SIGNAL = 0.71
gccccacatgctatgctaagcctagagattacaaagatgaataagtcagttcctgtcctcaagtaacctactgagaaatctattcaatacttgaatattataaaactaaacttttcagacttcctctttctgtaaaggacacaaaaatagcagcaaaaagataataataaagtattgctagtaccatttttcggcctccagaagatcctgattcacactattggtgctgtgctctctgccatcaaatgttctgattttgggatattctgttcttcctgtacatgctgctctcatttttaaattgaaagcagcttgtgctatctgcttataatgcttcctgctaattaggatctgttgcttcacttggtgcagagcatctaaaaagaatctttccacttctgttctctcatccagtatgttcttggccagcttcttcacacgattcatttccctgtccttcatctg

SEQ ID NO: 15103 - DNA, 412 bp, Homo sapiens
  MAP TO AC007390.2; EXPRESSED IN BONE MARROW, SIGNAL = 0.83; EXPRESSED IN FETAL LIVER, SIGNAL = 0.68; EXPRESSED IN HELA, SIGNAL = 0.63
ggaaaccaaattgtgcattgttcatttcttatttagattatgcttaataactagtaggttaggattcttatagactgctggagagtggcttgggtaaggaacacatctctctgaaatattacctctattgtgacatgactaaatcattgatgtaaatgattaggaaacttaaaacctacttaacacattgtatttttttttcttcttttggtatttaggtgttcactcaacttggatctgtgctgaaaaattgtgacatttcagtacatctggtagaggtaagccaaaaattaagtgagattcaagcattgacactgactaaagagaaggtcccgttagagcgaaatgctggatccccagtgtatatgaaaggtgtcactaagtctgggattccaatttcctggtaccgaga

SEQ ID NO: 15104 - DNA, 368 bp, Homo sapiens
  MAP TO AL021706.1; EXPRESSED IN FETAL LIVER, SIGNAL = 0.99; EXPRESSED IN BONE MARROW, SIGNAL = 0.92
tagctgttgctggctcattcttttgagcagcccgctctgtctcatctttcagagtgtgtactctctctttaaatgaacactactacgactactattactactaccactactactactactaatattccaactggacctgcctggggctgttttccactcctctctaggaaggtacttatctaccttcaataaactctgctacttaaccattgctatgcatctattgtctgaattctatctttcaagttaggcaagaaccaaggattaccacacttcctggtcacatactgtggtgctgtggctcagacggcctttcctgtgaacttttctctgaggtaagtgccgagggtggttgagtccccaagttg

SEQ ID NO: 15105 - DNA, 467 bp, Homo sapiens
  MAP TO AC007376.7; EXPRESSED IN FETAL LIVER, SIGNAL = 1.1
ccctgggcatattctgtgtcttgagatattaactaacaatcacggtactaatttatgctttatggataaatagacggaaaaggaggcacatgcatgctcaaaaaaattcttatcgatagaggaattctgtgactgtaaaagtgtgtctggagacatcccaagtgtggggctcttgatgtacgtaactccctggatcctcaattttctctactgtaaaatggtaataattccacctactttgtaaggttgttctaacgactagagacaaagcatctaaagtgcccatcacagagcctggtactggatgtagctgtcatcatcatcacagccatcgtcatcatcattctcatcatcattacaccatcctcatcaccatcatcatcaccaccaccactgatatagtttggaatatgtatctgtgtctcttcccaaatctcatgttgaattgtaacccctcgtattgcagg

SEQ ID NO: 15106 - DNA, 474 bp, Homo sapiens
  MAP TO AF130418.2; EXPRESSED IN FETAL LIVER, SIGNAL = 1.1
cctccgttattcgttgaatatcacctataagcaagaaagacaacatagtaaagcagaaagagccatgaatttgaggtggggtgactaacattcaggccctttcatttactgctggctgagtgatattaggtagtgtacttaacctgtacctgtttctcttggtacattggggatagtaagttgactctacagttttttaggtttccagatatttctgtttatgttatttcatttatttcttttttcagttacttcttagaagaagccctttatgtattgtttatttaagtattatcacctcagtatcctctttcaatgtcaccaaaataaggaagctcaagttggtggtgttaagaaatttcgccataaaagtcatagggctgatattgtggatggcatcctagatagatttgctgactcaaaatcccatgctcatttcccttctccaaagcatctaatttcctatggaatgtg

SEQ ID NO: 15107 - DNA, 493 bp, Homo sapiens
  MAP TO AJ239323.2; EXPRESSED IN HELA, SIGNAL = 8.9; EXPRESSED IN FETAL LIVER, SIGNAL = 3.9
aaatccagtcggcagttttcatccattagttgactctcatgcctgcagcacaacatttcacctgaaatagtttctgcgtattgactgagtttgctttctcaccttctttcttctaggtcagctactattttcccctcaaaacattgtggcgttcattctttgctgccttggtggcagcattcactctacgctccatcaatccatttgggaacagccgcctggtactattttatgtggagtttcacaccccatggcatctctttgagctcgtgccattcattctgctgggcatatttggtggtctgtggggagcactgtttatccgcacaaacattgcctggtgtcggaagcgaaagaccacccagttgggcaagtatcctgttatagaggtactcgtcgtgacagccatcactgccatcctggctttccccaatgaatacactcggatgagcacaagtgagctcatttctgagctgtttaatgactgtggcct

SEQ ID NO: 15108 - DNA, 462 bp, Homo sapiens
  MAP TO AL031283.15; EXPRESSED IN HBL100, SIGNAL = 0.95; EXPRESSED IN FETAL LIVER, SIGNAL = 0.94
ccctcatgcattcattcaacagctatttctacagcactcacctcaggccaggtatcctgatgtgggcactgaggatccaaagttgaagcagacagacaggtcccttcccccaggaggttgtgttgggagtaacagatattttattaacacttcgctatggaaaataattgctgggtcccaaccagagcggagtttagctggaagagtggtagcccctctccatcagtcacctagtatggggtccaataaatatcacacttcagaatgactattccagctctcacctccctgtcccccagcttgcctacaaccaggagaattccagtgcccagtgcccagtgcccagtgcccagcacatttaataagtctgtccggattgcctggctgttgctgcacaccgctttcacagagtagctgttgcaagttataaaaatcgaaaccagctgcccatattattcccat

SEQ ID NO: 15109 - DNA, 383 bp, Homo sapiens
  MAP TO AL080249.12; EXPRESSED IN FETAL LIVER, SIGNAL = 3.2
gcagaaaaggccaatcagagcgggtcttagggagtgtagatgggcctagggcatatagaggggctggccaggacttcctgtgggttaatgtagcaaagcttctggtgagcttttcattaaaagacataacactgcctttaatggtggagtttcaggcagtgttccagccagcgtcccttcatcggactgtgtaggggaatacctagcccctgccccacgataggctttgaaaagtccaattggaccctatttccctctccagggtgaaatctttcatcgtaaccaccgttctccagttaccctccttgctgcagtcatgagccttcctgaggaacacaacaaaatggtctactttgccatctcggattatgtcttcaacacgg

SEQ ID NO: 15110 - DNA, 468 bp, Homo sapiens
  MAP TO AL080250.11; EXPRESSED IN FETAL LIVER, SIGNAL = 1.1
tctcgttcctgaccttttcgatgttcagtaggctggtccctggagctaaggctggggaaaaagcaaacgatttatgagacgaatgtaataagcttagatgaagtcaatgtgagaccaggctatcaaagaaaactagtgtctgttttgagcgagaaggcgtaaaactgggcaaccttgaagccgctagaaactgaacaaagactgggttggccgaaatacagctctgaagcctcataaaattcaaaaaagaattactcctcttacgcggatacagtcagttttttccaccgaaggaattgctgcggcacattactgttccttgtgttgagaatatgctgtaagagctgtgtcgagataccagtttttatattcttgtaccttcgactgctgcagaactccccaagcaagaagttcttccacagtgtccccaaattgtggaagaggctcgctcgcttctgaggaaacgtt

SEQ ID NO: 15111 - DNA, 468 bp, Homo sapiens
  MAP TO AC010165.1; EXPRESSED IN FETAL LIVER, SIGNAL = 1.6
agggtacagggaggaactcagttttattttaagaatgaatagatcatcagggctatggctatccagattgtatgactagaagaactgggtggtaactaagttgaggaagacattaaataaaattccatgacttaacatggaagctgagggaaagtcaggaaaacaaacttcgtatcaagaaattgcagaagactggaagtagtgatgatgaggtaaaagtgaaaagcaacaaggtaaaaagcaaaagaccaaggcacatatatgtaattattaaaagattagatatcaggcaagggttgagtctttactgccagcattgttagagttggctatatggtatcctatgaaggtaagtcttttgttccatgtgtggtaactgttcagagtctgatttttctctttcataccatagctgaatatgatggaatatctgtttctatgaatagaatgtagtgtcttgggtgagaa

SEQ ID NO: 15112 - DNA, 471 bp, Homo sapiens
  MAP TO AC006296.8; EXPRESSED IN LUNG, SIGNAL = 0.6; EXPRESSED IN BONE MARROW, SIGNAL = 0.74; EXPRESSED IN FETAL LIVER, SIGNAL = 0.61
catatccttgccttcccattagtagtaccaaaaccagaaccgtgctggcaagaaagcctggggcatgtagtttctactgtttcagccataatgatatgagagagtctagaaagagggtcacaagtggttctgaattgttagcagaaaatatgacatcattatggcaccataatagtgacaaaatgttagacttcacagagatcaacttagaatgccctggatagacaaacaaatagagttatccctaactaaattttcatagtcttattatccaaatggttgttataacaatttgcagaatttctatgtgaatgttgctattcaacatgccaacaacaagcatgtcaacaacaagccaaacaacaagccaaacaacaagccaaacaacaagccaaaccctgaatttgtgtgctagtgaaaacatccaagttatttgcaaatcctgtcaatagaatgccgattgtactgcag

SEQ ID NO: 15113 - DNA, 448 bp, Homo sapiens
  MAP TO AF165144.1; EXPRESSED IN FETAL LIVER, SIGNAL =   1
tgattgcatctctccctttgtcctcagccttagctggtgcaaggaagctgctttagtgaacttccaggaactgagtcattcacatagactcactttcctttcctctcctgaagattcatgataaccatcatgcctcccacgccttgtgtgctctgggataccagatggcaggaaatggaccatttcaatcacaaagggagctgtcctcaggacagccacaacaaatgccagctcagccggcatgtcctctaaggttgcaggtggaacaagtggagcacaaagcatcagaccaatgtctgcagttccaaagtggggagtcagtgtgcaaatgctggcgcctgcgtgtctccacggttactgacccagataccatgctttccctggggcagtcacctggacttgacctagtcaggtacagcatccacaaggaacagcatgagcagcatgt

SEQ ID NO: 15114 - DNA, 456 bp, Homo sapiens
  MAP TO AL031594.9; EXPRESSED IN HBL100, SIGNAL = 1.1; EXPRESSED IN FETAL LIVER, SIGNAL = 0.59; EXPRESSED IN HELA, SIGNAL = 0.62; EXPRESSED IN BONE MARROW, SIGNAL = 0.96
tgtttcctaatgacagaggcttgtttaccatttaatccctaattttagcatagtttataatacattgatattaatgaatatatatgctgaattaatgaatttatggaaggaatagggtgagggaagcagagaaattagaaagaaattataataatccaggcaggaaatgttggacttacaatgatcactttaacttacagctatctattttacaagaaatgttaagattattaggaactttcacggaacatcaaataaagtaagaatctgtaacattataaacatgaagatcctggttcaaatcagggaatgcaataattctgtatctactcaccattcttccgctcactaagtggaggcaaattgggattcctgccagggtggaggcctagggtcagctcgggctgcaaggagagctcctgcagttcattggcaacagcttcactctggggactg

SEQ ID NO: 15115 - DNA, 488 bp, Homo sapiens
  MAP TO AC010719.1; EXPRESSED IN FETAL LIVER, SIGNAL =   1
cctgggagtctagattcaaagttaagaacactgaacataattagggcttagctcaatgcagatcttcagtctgtctttagtatgtgaggttggtttccagggcctagtggtagcactactttggggattatttttactactttgaatctcctgatcacctttgccactggacagaattgaatgctgagaagaattgcagtttcttcaaaaagtgtcctagttggtatactacaagaaaaacaatagaagcagaaaataagttgcattaatgcattctttcaagaaacttttaattctttaccatgtgtcagcttctggatgtaggccatttcagtgtgatacacatagcatgctgctaaatcaacctgaaatatccaggaagtcttcccagaggaggtgccagctggatattggaggatgagtaggtggtacctgaatgaagggaggaaagggcattttagttcaagggaacagcaagtacagactca

SEQ ID NO: 15116 - DNA, 361 bp, Homo sapiens
  MAP TO AL049812.3; EXPRESSED IN FETAL LIVER, SIGNAL = 1.6
aggaggaccaagaccatcacagtgattgcaagagtcagcactgaatttactaatttaacaaccaagggaagataacttggggaagaaatacactgagtggctccctgaagggaaaatgtcagtgagttttacgtgcaggcaagaaagtttcgttgtgattatgctaattaagaatcgaagtttgcatcctagattagacaaaataaatcaattgatccatacattaaaatgtctttttatattcaccaagcgagaggcttcaggttggtctagggaagatctggtgtcctgaggtcactccaagtccgtagatgtttatctgcttcagttggttagtattgccagtgtggtaaaactcagc

SEQ ID NO: 15117 - DNA, 464 bp, Homo sapiens
  MAP TO AC006286.12; EXPRESSED IN PLACENTA, SIGNAL = 0.71; EXPRESSED IN BT474, SIGNAL = 0.81; EXPRESSED IN HBL100, SIGNAL =   1; EXPRESSED IN FETAL LIVER, SIGNAL = 0.57; EXPRESSED IN BONE MARROW, SIGNAL = 1.2
acccccacaaaagttgtttccatcctatagatgaagacttctttgtaactctagtatgcagaaatctctggctatagtttataccatttaacaatggccagttactcctatatacccatctgcttgcttcctgtcaaatgagagcactacctatatgatagaaggaagagtcaattagacgaaagtaaaaacaaaataacaacaaaaatacatcccttaccaccgctcatctgtgtggagggaagtttcttctcacttatcctctcatggttggtgggaaaggcagatggctctctgttggctgacggtatcaggctctctagggcagtagtatcctggggaggatgtactaaatatgtctctttaggcatttggaccatgaggctggacagtgtctgatcaagaacgtcctcctcagcaatataggtgtatggacagtattctcgggtcctggagtagatgtt

SEQ ID NO: 15118 - DNA, 474 bp, Homo sapiens
  MAP TO AL050403.12; EXPRESSED IN FETAL LIVER, SIGNAL = 1.8; EXPRESSED IN HBL100, SIGNAL = 1.1
ttttccactgctacacagggtttttagctttaacctgtgaaaatggactgggttttgacctgggttttagcttgacctgtggaaatggacttgcccttcagatgaatgacgagactgtaaggggttcatttggggattgcaggacacaggtttaccctgtcttagaatataagcatccatgaggcaggaggtcttaaaaaccttttgcagatcttgacatcttatctacacatttcctagtcctcagctgccaaccaaaatctcccaattgctctattacagctcaatgacttacatcaccaagtatggttccattacttctaccagctgaagcaatggaatatgcaatattttattatgcatataattgaaatactttctgttctttctaagttcgaatattgtttgtgtcacatattgttctgagcatgccttggtcacagtcaggtctcgagggacctagggaaggaagtg

SEQ ID NO: 15119 - DNA, 379 bp, Homo sapiens
  MAP TO AL049871.2; EXPRESSED IN FETAL LIVER, SIGNAL = 0.7; EXPRESSED IN LUNG, SIGNAL = 0.64
ttcatcttaagaaggggcaatacataatctctgtacgtaacaaaaaggtatttttctgactgatggctcctttagttctagtagagaaagaactaccagattccagggttgaggaagaaacgggatcccagtgcgctgtagtggactcttacctgaaatctgaccttggaactacatgggacacaccttacacaggctgtacaaacccttgtctgctcttcccacaggaggactacaaccagctgaggccactctcctaccccaacacggatgtgtttttgatctgcttctctgtcgtaaaccctgcctcttaccacaatgtccaggaggaatgggtccccgagctcaaggactgcatgcctcacgtgccttatgtcct

SEQ ID NO: 15120 - DNA, 364 bp, Homo sapiens; identical to SEQ ID NO: 14041
  MAP TO AC009298.1; EXPRESSED IN BT474, SIGNAL = 0.87; EXPRESSED IN BONE MARROW, SIGNAL = 0.95; EXPRESSED IN FETAL LIVER, SIGNAL = 0.59

SEQ ID NO: 15121 - DNA, 460 bp, Homo sapiens
  MAP TO AC007432.7; EXPRESSED IN HBL100, SIGNAL = 0.76; EXPRESSED IN FETAL LIVER, SIGNAL = 0.79
gccagtgctcttttctcaggacaaatgggaaatcaaaggctagcaactatcaagcttagagaagaaggcacattaaaagctgagataagttaaaagctaggcttcttgtgtcaaagagccaagttgtgaatgcaaaaggaaagtcctcatggaaattaaaagtgctactccagtgaacacacaaatgaaaagaaagcgtaacagcctattgccaacatggagaaagtttgatggtctggctggaagatcaaaccagccaaaacatttcccttaagccaaagcctaatccatagcaaatctccaactctcttcaattctatgaaagctgagagacacgaggaagctgcagaagacaagtgtgaagctagcagaggttggttcatcaggtttaaggaaacaggacatctccataacattaaagtgcaaggtgaagcagcatgtgctgacaaagaagttgcag

SEQ ID NO: 15122 - DNA, 481 bp, Homo sapiens
  MAP TO AC009453.1; EXPRESSED IN FETAL LIVER, SIGNAL = 0.92; EXPRESSED IN HELA, SIGNAL =  10; EXPRESSED IN LUNG, SIGNAL =   1
  unsure 38
  unsure 360
  unsure 393
gcagatctggaatggctctcaatttctctgttgctacncaaaggcgtgcaaggctactctgttgacactgatgatcagagtactagcagagggcagcaaaggcacttctctacgcatctcctgagacaaaacttagcatgcctttctgggtacaggaaagaaaatccagctcattaaaaaaagaaagtttctctgacatttcgctcccctctttgcacatttcgcctcttgtcttcatttctcagcctgaccctttcatctcacctttgcccagagggtcaacataacttcactggtgacactgatttttctaacagcagcatttctaacccagtaaaaagtatccccaaagcacaaaanggtatcaaattaaagttcttctccaacaacttncatgttgtggctaattcacaaaggcataaagtgaagaaatgtgttgttttgtttttggcttttgcaaacaagtgaatgctcatctgcc

SEQ ID NO: 15123 - DNA, 459 bp, Homo sapiens
  MAP TO AL049593.4; EXPRESSED IN FETAL LIVER, SIGNAL =   1
caatctttacaacaaaaccaattccttcaatctcacaattgcttccatgagtccgtgctctctcattttctccctagccaagcttcttagctccctctgctttctcgtctctcatttactcactgccttttcatgtccggcttctgttcccaccaggccaaagaaaatgcacctgttaagtgacaaatggattagctaccaaaccaatgatgttttctgcccttggcttccttgaccttgctgcaaggtttgacatgattgaccgctcctttgttgatacctccttttccattacctctttttctccccctaaatctctctggctatccttctcactataatttttttccagaatcttcatgtttcccttgatctccaaattccagcacatctcagaattctctatttggttcttattctcattctatatattttcattgggaccttcatccaaactga

SEQ ID NO: 15124 - DNA, 476 bp, Homo sapiens
  MAP TO AL035694.8; EXPRESSED IN FETAL LIVER, SIGNAL = 0.78
agctgacaggttcatttccccctttctaatctttaatagtaaactcttaaaaaatcaccaagactttcccactggctgtgccccagctctgaattcctcagctccccactcatggtagggtgttgtttactggatggaaataagtagctagatgaagggaagttttgttgaaggatatttgctttggtgattgcttctaccaatcaatgctttcactgacaggaacttcacccctaagatggcacccactagctgctgggtcaacagccatccacatggtttttttcagagcaaagcagagtttccccaaagtgtcttggatctccaacaagacaggaaaagtcagcaaggagaaagaaccttcattctctttcctcttcccttcccttctcttctccctccttctctctcagtaagaattatttccctaataattattattgcccaatctccttccttccatgtttacagatgcc

SEQ ID NO: 15125 - DNA, 462 bp, Homo sapiens
  MAP TO AC009305.1; EXPRESSED IN FETAL LIVER, SIGNAL = 0.57
agggaaaaagcaaaggcttcccataccttcctgcaccttcgtacagtcaatccacccctgagccaatactgcactcaaatctgcctcttttttatatcaccaagcctgatctacacccctggtttgccctcctgcaacagcttcctaactattcttcccgcctgcagaagagtcacttccaaccactcctcccaccctctccacagccgttctctcttccatcttcctaacacactgctctcactgtaggaccctctcccgaccttcagagccacctgcagttaaaccttcaccagcatctcaaggcctccaccctcgtgttagctcttcagcaccctgcccccacattcccttgcaggagccttctggccctgctaaaccagcccagtcactgcccttgactgtacctgtgtcacaacctccacaaacctccctagattctgttaccttccctcctccagc

SEQ ID NO: 15126 - DNA, 444 bp, Homo sapiens
  MAP TO AF165124.1; EXPRESSED IN HBL100, SIGNAL = 9.5; EXPRESSED IN FETAL LIVER, SIGNAL = 1.1
aagaacaaaatagcaattgagggaaatataattttaaaaagtgcattcacataatttttctggtttaaatttatcctttaaagactccatctgaatatccaccgagggcaggagtggagaactatactgaagaatgggaactggtttgaatcattttccctagaaggagagcagtaatgtgttccctgcaggctgctgaggagggatggtcttagtctcttagctgagatggctttattttggccagtggtatttctctagaaaaagtggcaagtagtgagctgtcagcagccaacccctaagcatctgagagatgggtgtgtgagttcaagaaaggtgatagggtggcaggggcatcaacagtgtccactgcaagggcaaatatcagattaactgggttcaaaattcgaatcctgtcactaactgattgtgtgatttcaggca

SEQ ID NO: 15127 - DNA, 494 bp, Homo sapiens
  MAP TO AP000096.1; EXPRESSED IN PLACENTA, SIGNAL = 0.64; EXPRESSED IN FETAL LIVER, SIGNAL = 0.57; EXPRESSED IN LUNG, SIGNAL = 0.64
aaagaaggggagggtgtagcaaaatgctgaataataacactaataataataaggaggaaaacactactagttcatgagttgcacaagatgccaaagttaaaaaaaaaaaaaagtacttaggagcttatttttatcatcacactggatcatgggtgatctggggttttgccagagttgaggatttgcatattgacagttcctgacttttacgtattgtactttctcttaaccttcactttcatgcactctgtattgatccccctaaatctgcttttatgtgacagatagggactctcctgcctctactgctcagtgataaagtggcattgtgcctgcccaccaacaggttctaccaacagttctaccaacagcgccacctcgatcaaaacaccaagtttgtcaaagcatctcgaatactattttattgcatgtgttacattataagttaaataggaaacataaaacaagagttccaacactaaagacaaaaggca

SEQ ID NO: 15128 - DNA, 366 bp, Homo sapiens
  MAP TO AC008277.1; EXPRESSED IN PLACENTA, SIGNAL =   1; EXPRESSED IN FETAL LIVER, SIGNAL = 0.61; EXPRESSED IN LUNG, SIGNAL = 0.79; EXPRESSED IN BONE MARROW, SIGNAL = 0.74
aaccaaccaaccaaccaaacaaacaaacaaaaaaaccgccattaccagcacaagagctccagagaggtttacttctagctatctaggaaaggcaaattgacctagagttggaaattcactgctatagttaaaaatgaaaggctttcacaatagcagctctggcaaagaaatcaggtaagaaaactggaaaaattaaacttatgaatgaaatggtgtacatgacgtataaattaccttttggtctgctaagcacatgtcttcattaggcttctttagttcctttgccatttctaattctaatcttcgctgctctagtttacgctctttatttaatcttttctcatcacgtttttcttgtttcaaccg

SEQ ID NO: 15129 - DNA, 455 bp, Homo sapiens
  MAP TO AC012553.2; EXPRESSED IN BT474, SIGNAL = 1.1; EXPRESSED IN FETAL LIVER, SIGNAL = 2.4
tgcaaaacctcctttgtgtgggcctgtttttggactccttactctctatctgatatatgagtcgttcctttcaccaatgccacatcattttgattatcttcctccaattttactcttctttgcaaaaattgttctgattattctagtttctttgcctttccatacaaattttagaattaacttgtctacatcagcaacaacagaaatcctgctggaattgtgttaaatctatttatcaatttgggtaatactgacatttttactctgtagaatcttctgatccgtgaacatagtatgtctccccattgctttaggtctttgatttctttcatcagtgtttgtagttttcagcatacagatcttataggcatatattgtcatttttataaatacatgtataatacatattatttctataaatgaaataaattcaggttgagtatccctttaaaaat

SEQ ID NO: 15130 - DNA, 350 bp, Homo sapiens
  MAP TO AC006432.15; EXPRESSED IN BT474, SIGNAL =   1; EXPRESSED IN BONE MARROW, SIGNAL = 4.2; EXPRESSED IN HBL100, SIGNAL = 1.6; EXPRESSED IN FETAL LIVER, SIGNAL = 0.85; EXPRESSED IN HELA, SIGNAL = 0.98
cctgcccttggtttactcaggagtcagaccagccctagtttcctgtgtttcatgtattggcttttcatgtgaaactcgaggagagcttgtccgttgctacaagctgttttttgaatgtctctacacagtccaggcaggaagtagaagcactcacatcaggagctcagtgtcaggcaggcaagcctcctgcaggggagccccgccctgctcaggtggcctcatctcccctcccagctggtggtgctgccctatcagatgctgctgcatgcggccactcggcaggctgcgggcatccggctgcaggaccaggtggtgatcatcgacgaggcgcacaacctgatcgacaccac

SEQ ID NO: 15131 - DNA, 474 bp, Homo sapiens
  MAP TO AL035086.12; EXPRESSED IN BONE MARROW, SIGNAL = 1.3; EXPRESSED IN FETAL LIVER, SIGNAL = 0.6; EXPRESSED IN LUNG, SIGNAL = 0.59; EXPRESSED IN HELA, SIGNAL = 0.9; EXPRESSED IN HBL100, SIGNAL = 0.81
ttttaagaaactgtgaaaaccgctatttctagtttacctcacacacatacaaatcatctacttgaggtcacaactgacctgactgctagaggccagtagggggcacttcactgtgggagcagacacctcaaccgccatcttggtctctctttgctcaacagcatggttctatcaggtagcccacagtctaagtttcctaccctatatattaatgttgacgactgctaacatttcagaaacataacctcttaggaaaaggttaacatttctttgaactatctgacctaatcagtggctcaacaccaatgtgaagacatttacctgacaggaagtcatgggagcagttgagaacagtagttcctggttgtatccaagtaaggggaatctcttctggcttaggtgagcctaggaccacaatgtcagcctcgtgaagctaaaaggagaaagaaaaaaacacgcacatcttgatctgag

SEQ ID NO: 15132 - DNA, 406 bp, Homo sapiens
  MAP TO AC006229.14; EXPRESSED IN PLACENTA, SIGNAL = 0.89; EXPRESSED IN BT474, SIGNAL = 0.75; EXPRESSED IN HBL100, SIGNAL = 1.5; EXPRESSED IN FETAL LIVER, SIGNAL = 0.81; EXPRESSED IN BONE MARROW, SIGNAL = 0.8; EXPRESSED IN HELA, SIGNAL = 1.1
ccagcccaaacgaaacataggcaaaagaatctccagagttccttgttatcacagattcctctttttattgtaataaataaatatgtattcataagattgatctcaatgtgcatgacacgtaataaatcaagcgtctacatttctgattttagtcacagtatcccatttggaattttaatcattgaaacagtcctcaaacttgacaacaactaagggagatcaaaacgttcaaatataggccactcaccaagctaccatggcatttagtatgagagctattgactcttcaagttttccctggctttttatattctgaagggaagcaacctcttgttctccctaggaagtcaataaagccatacatattttatgaatgataatgcacagaaattttaaagagacaaaa

SEQ ID NO: 15133 - DNA, 447 bp, Homo sapiens
  MAP TO AC007297.22; EXPRESSED IN HELA, SIGNAL = 0.59; EXPRESSED IN PLACENTA, SIGNAL = 0.61; EXPRESSED IN BONE MARROW, SIGNAL = 0.76; EXPRESSED IN FETAL LIVER, SIGNAL = 0.58; EXPRESSED IN LUNG, SIGNAL = 0.84; EXPRESSED IN HBL100, SIGNAL = 1.5
ttttggagatgatgaaaagccaatatttttcttttatgtttcaatactttacaaaagtccttctgaaatttcttaaatagcagttcttattaattacaagtcaaggcttaagaaggtttaaagaagaggaaccacaacaattgtattggtggcaatactcgatgtcttatttcttattttgtgttcccttgctttgcatgtgaactctctctctcatcgtttccaatttacaattcttgtcttatgacatttctctctctgatagcatcatttctaacctcttccctggggttgtcctgctggcttcttaccatggcatccaggatgtatccaacagggaaatcagactgaaaatgaatctgcaagcaagcctttggttcgtcaaggagataatatgagtcagaaaatgtctcatctaattctctggattctgccttataattggcc

SEQ ID NO: 15134 - DNA, 485 bp, Homo sapiens
  MAP TO AC007867.1; EXPRESSED IN LUNG, SIGNAL = 2.6; EXPRESSED IN FETAL LIVER, SIGNAL =   1
  unsure 58
  unsure 88
  unsure 134
  unsure 149
  unsure 161
  unsure 163
  unsure 229
  unsure 235
  unsure 249
  unsure 251
  unsure 423
caatgtgacttacagtgaaggaagtaattacacatttttctttcacttgaagtggttnctaaatatacaaatatatttactttgcttntcctcaggtaggcagccctttacctaactaccatgaaaagagtttnttaaaaactttttgnttaaaataacananagccctcgttgcagaacaccaaaagccacatattttaagatatcaaaatcttcaatatttttagcntctttnagaaatagaaaacntnagcaaaagatagcaccatcagcaaataatatctcagccccttccttactactcccccaccatccttcctcaggattcagttccagtgaatgatcatcagaagcaaaacctgaagcaaaaatctttcaaaaattacaacaaataaggtacattcttggcaagtctcaattttngtgataactttctcctcaagtttattattataaaactatcttgtaataaggttatttgggga

SEQ ID NO: 15135 - DNA, 418 bp, Homo sapiens
  MAP TO AC008024.1; EXPRESSED IN BONE MARROW, SIGNAL = 3.9; EXPRESSED IN LUNG, SIGNAL = 7.1; EXPRESSED IN FETAL LIVER, SIGNAL =   1
  unsure 312
aaaaacaaacccagtattctagagcactcaagttaaaattataatatttctcttttcatggtctttactggacagaaaaaatcaatttctattatttattacctgcctattcatggtttttacattgtataagcttgttgacttacatttctttcctacattcttgagaggttgcctaattctctcaaatattggtagattagttgctatgcatattttcccccagcattaatgaacttatgaagacgtcaagaggatccacagttaatgttgtcaccatggttgtaaaagccactattctgactaaaaagntcaaccaactcccctacaatattgcatatcagctcttatttcaaattaaaaaaaaacaaaactgtgtttttccaatttaaaatcaaccccagaccactctacaacc

SEQ ID NO: 15136 - DNA, 465 bp, Homo sapiens
  MAP TO AC007385.2; EXPRESSED IN FETAL LIVER, SIGNAL = 1.8
tcctcttaatttgtttttgaacccaataatattgaaccaaaatcaaagtgtggtgttgttttatcagtcctctttcaaagtctaaatgaaatcattctttttatgctgtaatcaaataagttacccatctctggctcaaacccaaacctaaatagcaaagagcagaaaaaggaagttcaggaacacatgatttttccatagtatgtcaaaaaaccctatgctatacttccattagagtgaaaaaaagaactctttctgcttttaatgagcaattaattccagtccaggatgtcgagtttagaataggttaacttcccccaaaccacagccgtttgtgttggatcatggttaaaaccccaaattccaacttctacaataataacattcttttcttctactgcaatgggagaaatgaccattttatgtaacataagaaaacctatagcagaaacccctatgaattcc

SEQ ID NO: 15137 - DNA, 461 bp, Homo sapiens
  MAP TO AB020868.1; EXPRESSED IN LUNG, SIGNAL =   2; EXPRESSED IN FETAL LIVER, SIGNAL = 0.87
tgagagatgtagagagaaggcagtcaaggaatagcgcctataagcacctcctgcacatccggtccctgcgcctccatcctcaccctgccctcagctcactcccctcctgttagaaattggctgtgcccctgaaaagtcatttgcatttgcctaaagactgagtacacaagctcattccaaagtagaaggtgttgaagttccattttggcctcaggtcaaaattgttttctctatttcagcttaatgagcaagaaagcagaatctaatatgtgtatatttctaacgcctgtgtatatttctcaactgtttcccagctcagaaaggtgaggagtatgacagtcaccctgaaatgacaacagaagccaacaataacaattatagtaataatgtgtgtatagaaagtactaaatgaccattaaatgaagagcagattactaggtgctatggaagatacacatgca

SEQ ID NO: 15138 - DNA, 391 bp, Homo sapiens
  MAP TO AC009598.2; EXPRESSED IN LUNG, SIGNAL = 1.8; EXPRESSED IN FETAL LIVER, SIGNAL = 0.93
  unsure 188
  unsure 206
  unsure 247
  unsure 318
gtggctgtacacctgctctgaccacctgcaaggttaaccctgtgtctatttggtgctcaaatctccccttaccacctggaatcttccttccaacaaagctctgtgattgaaaatattccatcctgtgcttctgttctgtttctcaatgtaataggaagttgagaagggcactggtggtggttggggtntggtatggaatctatccntgctctcctggatttgtctttccactccacaaggacatatntgctgcctgggttcttatagctctgtggcagatgccgcgggctccgtccacttggtgcccagaacttggcnagtgctgacagaaacacacagcaaggataagctgatgggcaaaagtagcatctgcccttgtcacaggtaggaa

SEQ ID NO: 15139 - DNA, 492 bp, Homo sapiens
  MAP TO AC005193.2; EXPRESSED IN FETAL LIVER, SIGNAL = 0.97
gactgcagttactccaatgaatggatatgccattatttatttgacctcaagcactccttaattagtgaatattgttgttcctaattttctattctttaacacctatttatttaacacctacttagcacctattatgtgccagacgcattctaaataccggcgatacagtgatgaacaaaacagaccaagtccttggccaaaatgaagcctacattttagtaggggagattgacagtgtgcaagtaaataagcaaatagtttgaaggaaggaggcatgctaagaaaaactgaagacatacttttttagagaaggactggttagaggagtggactactttagatgaagtggtctgggaagaccttctggcggaggtgacagtgggacagaggcctgaagacagcaacgcaaagcaggaggtaagaacagtctaggaagtgggaacagcaagcacaaagaccctgaggcaggaaaggacctgacatcctcaagga

SEQ ID NO: 15140 - DNA, 464 bp, Homo sapiens
  MAP TO AP000119.1; EXPRESSED IN FETAL LIVER, SIGNAL = 0.71; EXPRESSED IN PLACENTA, SIGNAL = 0.6; EXPRESSED IN LUNG, SIGNAL = 0.59
aaaatccctggacattttgcttttacatttctgatttcattttactttaaactttttattttgaaaattttcaagcctgcagaaaagttgcaagaatagtgcaatggacatctgcctgctcctgacctacacttaccagtggttaacattgccacatgagtctctagctctttccatatggaaacttattactatcatttactgaaccatttgacaataagttgcagacaccatgatccttcattctctaaacattaagatgaagaacactcattttcataatcacaacacagttattacattcagaaatttcaacactaacacagtactaatctgtaatatgcagtctaagttcatatttaaccaatgtcccaaaaatgtcctttacagtaattttcttttctgttcccaagtaaagaccttttatccttagcgtcaacaattgttgaaaaggtggatttggc

SEQ ID NO: 15141 - DNA, 211 bp, Homo sapiens
  MAP TO AL078621.19; EXPRESSED IN LUNG, SIGNAL = 5.7; EXPRESSED IN FETAL LIVER, SIGNAL = 3.8
ccctaaataaatgaatagataccctgagctcatgactcagaggacacagtaccctaaataaatgaatagataccctgagctcatgactcagaggacacagtaccctaaataaatgaatagataccctgagctcatgactcagaggacacagtaccctaaataaatgaatagatacactgagctcatgactcagaggacgcagtaccctaaa

SEQ ID NO: 15142 - DNA, 394 bp, Homo sapiens
  MAP TO AL033532.12; EXPRESSED IN LUNG, SIGNAL =   2; EXPRESSED IN FETAL LIVER, SIGNAL = 0.88; EXPRESSED IN BT474, SIGNAL = 1.4; EXPRESSED IN HBL100, SIGNAL = 1.2
ttttaatatgacttgcatgaaaaatgataaatttttactgctttttttgtgaagctataatattgggcatctgtaatgtcttcagttttcagaatcaagccatattctgatcttttatatctactaatgacacccaaatttagaactgtgtgctctggctatgtagaaaagactgattgaaaaagaaaagaaaagactgctttcctgtgtctctgtagctcctcaactttttttttaatgtgctcctctttaaaattttttctttcaggttgtacctacaacagatcatatagatacagaaaaattgaaagccagagaacagattaagttttttgaagaagttctcctttttgaggatgaacttcatgatcatggagtttcaagcctgagtgtg

SEQ ID NO: 15143 - DNA, 486 bp, Homo sapiens
  MAP TO AC011347.1; EXPRESSED IN LUNG, SIGNAL = 0.96; EXPRESSED IN FETAL LIVER, SIGNAL =   1
gatctggggtgaggagagaagaatgagagagacaatatttgaacacgaaaaaaatatgtttagcaaattggatctatttacactattacattaaagaaggaaattaaacaagctctaaaacatccatgggcagatggacacaacctccttatgaatgagaaaaaagaagagaggaggtgctcagagaaagtcgcaaattaccctcaaatctgttttcatacttcttttggagagcttgtgggtcaaagtgcgtatcttctatttccagtattctcaaggcactaagacgagacagagagtgacacttcacagtaaaagaaatgatgccaagtgtggctggtgcacactgagtaggtgagagggtgtggtacaagatgccactggtgatgtagctaggggccaggtctcagatgacctcctaagcaatgttgagaatttgggatttcattctaagggcagtgggaagcctttgggaagtttggacag

SEQ ID NO: 15144 - DNA, 491 bp, Homo sapiens
  MAP TO AC010083.1; EXPRESSED IN LUNG, SIGNAL = 3.5; EXPRESSED IN FETAL LIVER, SIGNAL =   1
tcccaacaaggtagtcagcctagttcataccagattcagtggctgtagcccaggagagaacgaggtatggggcacgtatgtctcagagcagagagatctgcctagaaagacaaagactgagtgagaagctatagtgtgggctatcagagggcagcctgggagcccaagaggcctcggacattggtcagggattggcaaactctttccgataaaaggccactttgtaaatactttaggctttgtggggttttgtcacaacgacttatctctgctgttagagtgcaaaagcagcgactggcaattcataaacaaatggatgtggctgtgttccgatacaactttacttacaaaaacaggccatgggctgatttagctggtgggccatattttgtgacctttgctgtcggtgatcaaagaaagaggacacaacaggagaagtcaggtgaggcattgcccatactgcgtggggcaacgtgcttgccagcttacat

SEQ ID NO: 15145 - DNA, 405 bp, Homo sapiens
  MAP TO AC004032.7; EXPRESSED IN LUNG, SIGNAL = 0.63; EXPRESSED IN FETAL LIVER, SIGNAL = 0.75
aaagaaaatatgtcctagtcctctcagaaggtttatataaaactaattagaagcagatctgctgtaatcaccaaaagtaagcaattttaaacagattctttacgatgctatgtgccagaaaaataggtttccttttgtgccaaagaatctgatttgctgccattctcctgtgattaaatggagtttctgcctcacacgcaggcgtctgtcaaacgctcacacctgcagggcttccaaaactggacctgctggcaggactcgagatgaccacatggaaaccactagcaggccctggacattccttgggtttgtttcacccatggggccttactgccaactgaagacaagcatggcccagggcaaaaacaaaaccagacacatgcaagaggaagccagggaagaatc

SEQ ID NO: 15146 - DNA, 486 bp, Homo sapiens
  MAP TO AC005973.2; EXPRESSED IN PLACENTA, SIGNAL = 0.74; EXPRESSED IN FETAL LIVER, SIGNAL = 0.87; EXPRESSED IN LUNG, SIGNAL = 0.8
tactccgtcgcaacaggcaggctggctccgccagagctacggggcagtatagaccggggaggcgaagggtggatggaagacccctcctccgctcctcggcggaggtcggggagcacccagcccaccaggtcatatacacagcacttggcttggaaagtctcaagggcttggtgaatggggggcccgcagaggcaacgcatctccctttgccttgcagctggggcgaatggagtgagccgctgtggtgtcgcggcggcgcctacctagtggctttctcgcttcgcgtggaggcacccacgaccctcggtgacaacacagcagcgaacaacgtgcgcttccgctgttcagacggcgaggaactgcaggggcctgggctgagctggggagactttggagactggagtgaccattgccccaagggcgcgtgcggcctgcagaccaagatccagggacctagaggcctcggcgatgacactgcgctgaacg

SEQ ID NO: 15147 - DNA, 493 bp, Homo sapiens
  MAP TO AL118523.3; EXPRESSED IN LUNG, SIGNAL = 6.7; EXPRESSED IN FETAL LIVER, SIGNAL =   1
tcatcatggactgttttgccacaataaacagaagatctcctggggcatattaaagggaaatgtgtccttagataacctggaagctagatgtttgtcaatgtggcttcatgtggttgctttcctctgcacacattctgcattctcctctatgcagctcacttcctttgtacggctgtaagtttccatttacctagaacttgcatttgcctatggtttgtggtggcaaccctggctctaaccttacatgacgttattgatccagagtcaatctcaatcttaccacatgttttgtgagcttactttatattttcaagaacgaggatgattggctcctcttgagtcaagtacctgcccatgaactcttcaggtaggaccaaggagcagtcacccagtatacacatggctccttagcttccttctttaggaatggactggaagaatcatgaccaaatgaagggttatagatctggccagcacttcaaacattgccatg

SEQ ID NO: 15148 - DNA, 482 bp, Homo sapiens; identical to SEQ ID NO: 255
  MAP TO AP000093.1; EXPRESSED IN FETAL LIVER, SIGNAL = 0.65

SEQ ID NO: 15149 - DNA, 473 bp, Homo sapiens
  MAP TO AC007749.2; EXPRESSED IN LUNG, SIGNAL =  11; EXPRESSED IN FETAL LIVER, SIGNAL = 1.1
tctctgcattcattcattttccatatagaataaaggcattaagcaaaaatgtactgggtactgggctctgtgcaaggaataccaagatgagaatggaccctccctaccctcaaggggcccaggctctagtctctctttttggcttcgacttgcatccccgatttctatttgtactacacatgccatgaggaatcagatataaacatttacctagaaaagggatctgggagaacctaataatttagcttctgttttccaaaggatattatcttgaagaagaaatcaaaccagaataattacagcagagagaatcagatctggttgaaaataacaacaacaacgctgaatttgttaaacatcaaaacttcacatggaagcagaatcacctttctccccaagaaccagagcgccttcccctccccttccatctcagtgagttatggttaaagagatgcaccacagaatggcataag

SEQ ID NO: 15150 - DNA, 483 bp, Homo sapiens
  MAP TO AC004900.2; EXPRESSED IN FETAL LIVER, SIGNAL = 0.94; EXPRESSED IN HBL100, SIGNAL = 6.7
aaacaacttcattatccagtgggagagtaattctgtgcccctttacagcattctgagtcttccctatatggctcaaatatgcctcaaacaagaaaccagttgctaggggaccagcaggcaaacttcaagagacaggtggtttctgccttttctctcaacttctctatccaatcccagcccaggccagcctatcggtacatttagaaaaaagaaaaatagaaaacacacacaccgcccctcttccataacttcaaaggagactttgcatgtgttattagggaaatcacgaaagtggttttgaacacagaataaaatatgatgacaacgtttaaacttgtacccgttaactctgctgtctggcttctttaggacaccagcatgatgtgctggtagagaaactcgtatgatattgtaagggcttttttcctttttcatttcatgttccttcttctggaaatatgagggtggtaggttggaccacag

SEQ ID NO: 15151 - DNA, 455 bp, Homo sapiens
  MAP TO AL034418.2; EXPRESSED IN BT474, SIGNAL =   1; EXPRESSED IN FETAL LIVER, SIGNAL = 1.7; EXPRESSED IN BONE MARROW, SIGNAL = 1.3; EXPRESSED IN LUNG, SIGNAL = 1.1; EXPRESSED IN HBL100, SIGNAL = 1.3; EXPRESSED IN PLACENTA, SIGNAL = 0.99; EXPRESSED IN HELA, SIGNAL = 1.2
tgtcaggcttgtttccctaacttatacaaggtatgattaaatacactaattagagagaggtttggtgtatttcttgagaatcacagtaacttatggaaattttttcaaagagctatggatctgaactggtttattaaaaactgcttcaagcactatgcaaaagcagagactgctcaagtcaatcagaaaaaacaagttcttgggaagaatgagacagtcatacataaaagttctacccaaaactgaaattccaaattctcaaattcctaatcagacaacttagaaaataaccactactagttaacacaagggcttaatcttacaaggtttttttctctaccctaaaaatatcaaaaagtttcttaatcttctttctttcaatccgtcattcatacccttactaataaaataagaggagctccaagagaactggtaccacggagaaaggactgaag

SEQ ID NO: 15152 - DNA, 438 bp, Homo sapiens
  MAP TO AL096792.5; EXPRESSED IN FETAL LIVER, SIGNAL = 0.59
gcttctatggctgctctttattttatttttatttaaaaatactcttattaaatattaattaatttgattaactaggatttaagagatgttttaaatatacagaaaagaaatagaatggtcatgtcactgtcacccagatttaacattctataacatttatttccaaaagaaacctggtaacagcacatatagaaatgttttatgtagagaatctgaaattcctacgtattgcaggtaagaggataaagttgaacaacattttagaggaaactttggcaagatctactgaagtaaaagatacatatgaaacgattacccacaactgcatttctaagtgtttatcttagagaaactcttgtgaatgcctataaggaaagatttgtaagcactgtttgtaacaatagaattcaaaataatatagctgcttctccatcggtt

SEQ ID NO: 15153 - DNA, 481 bp, Homo sapiens
  MAP TO AL034452.8; EXPRESSED IN FETAL LIVER, SIGNAL =  29
cttgcactgttctgaaagcactacatatagaaagtatttaatctcccaataacgtcatgatggagataacattatcatcaccattttaccaatgaggaaactgagacatggcagagttaaactgcacagctagcagagattacttaaccgcttcagcatttctctgcttccctgagagtcataaagactaaacagtgttatacaccagataagcaggggtgactaaaatgattctagaactcttctaaggaatagatattaaactatctaaatgataagcaagagataatattgaaggattcataaattgaggataatatatgaaaaaatattccagaagttagacttcagtgtgttaaatgtgaatcactcaaaaaagaaaacagatgtctcagtttcaatttatttcacatagatctatgatgacttttcttaaagcaaaatgagcagtaacacttatgagcaggtagcaattctcacc

SEQ ID NO: 15154 - DNA, 428 bp, Homo sapiens
  MAP TO AL078590.12; EXPRESSED IN PLACENTA, SIGNAL = 1.3; EXPRESSED IN FETAL LIVER, SIGNAL = 1.2; EXPRESSED IN BT474, SIGNAL = 1.1; EXPRESSED IN BONE MARROW, SIGNAL = 1.2; EXPRESSED IN LUNG, SIGNAL = 1.2
gagctttggtgagaggttggaaatatagatttgggaatcatgacttaaagataataaaaaccaatactgactaaccacaatgtgacaaactgttctacgctttttactgtattgacaaacagacttcatgcctctctcaggtagatattattactccctgtattttacagatcagaaaactgaaccatagagaggtttgtgagtggcaagtggcatatacaagatttgaacttaggcagcctaagttcaaggccaaagcctgtgttcttaaccattattctattctagtccttgatgtgctgtattacttgttgagagtaattaatagtggcaaaggggatgagattgcccaggaagatgttatgcatgtgggtcaaatactgaatcctgaagaacatcaaatatgagtggcagatgaaagtagagga

SEQ ID NO: 15155 - DNA, 470 bp, Homo sapiens
  MAP TO AC004964.2; EXPRESSED IN HELA, SIGNAL = 0.59; EXPRESSED IN PLACENTA, SIGNAL = 0.61; EXPRESSED IN FETAL LIVER, SIGNAL = 0.69; EXPRESSED IN HBL100, SIGNAL = 0.67
ctttgctacctcctccagggacatgcggagacatctccacatccagcacttcacataggaagtaccctgaggaccacgtgggatgacataacccatctggagtaactagtggcatggtgcagggtgcagagctgtgcttgaggtgctccctaaaccctatcagtcctgatactgcttctggggcctggaggggagtaagggaggccagtgtttgggggacagaaggcggcagccctgtgataaacaaaatcatgtttctggcaccaggagcagaattcatgtgtgcttttactgcttcctgtgctcttcctcattttaccccagggccattggtcatggtgtcctgggaccctctgggggcttggagcatcgataccacaaccatagtcccacctgttaagtaagagaactagccagggaagacatcatttaaagtgtaatttatttatttgtatcttgccttgctcccc

SEQ ID NO: 15156 - DNA, 488 bp, Homo sapiens
  MAP TO AB023055.1; EXPRESSED IN PLACENTA, SIGNAL = 0.82; EXPRESSED IN BT474, SIGNAL = 0.76; EXPRESSED IN FETAL LIVER, SIGNAL = 0.77
ttctagatcctaaattttacgcttttctatcatttatttttttctccctcttcttttcctctctctctgctcttctaactaattggcagaatctctgacctccactttctctgactcccttctcccttcctagaaacagtatccacagtggactccggggctcctacagacttggcacagcttcctacagtcttgaaacagccctgttgttctgtcatggccagtgggcagtttgtgaacaaactgcaagaggaagtgatctgccccatctgcctggacattctgcagaaacctgtcaccattgactgtgggcacaatttctgcctcaaatgcatcactcagattggggaaacatcatgtggatttttcaaatgtcccctctgcaaaacttccgtaaggaagaacgcaatcaggttcaactcgctgttgcggaatctggtggagaaaatccaagctctacaagcctctgaggtgcagtccaaaaggaa

SEQ ID NO: 15157 - DNA, 452 bp, Homo sapiens
  MAP TO AC011278.3; EXPRESSED IN FETAL LIVER, SIGNAL = 1.3; EXPRESSED IN PLACENTA, SIGNAL = 0.91
cagcattaccaaagacacacgaagacattacaagaaaacacaactgtaagtcaatatccctggtgaatataaggtaaaactcctcaaaaaaaaaatactaagtagctgttccaaacagcacatttaaatgatcatacagcatgatcaagtgggatttattcctggaatgcaaggttggttcaacctatggaaatcaactaatgtgatgtatgacattaacagaacaaacgataaaaaatcatgatattatcttagttgatatagaaaaagaattggacaaaattcaacatcatttcatgataaaaattcttgacatactgggaaaggaagctaagtgcctcaacataataaacaccatgtatgaaaagcccaatgctaccgtaatacccaatggtgaagaattgacagcttttcctctaagatcaggagtaagacaaggaggcttacccttg

SEQ ID NO: 15158 - DNA, 373 bp, Homo sapiens
  MAP TO AC012593.1; EXPRESSED IN FETAL LIVER, SIGNAL = 1.6
catcattttatccgctttcctcatactctaagatcgatgcattctcataaatgcatacgatttttttttcagatttatctgggaacatagaaaatctatgtttatataacataaaaagcaatatgagtttttcttaacatagagtaaaattgatggaatagatatattttatatattctaagtatttgttcttagtctacttcttaaagaacttgagatagtctgaattctgtcataaagtttaatagtatagttaaggttcagaagagaatacctgacgtacatccacggcatgtactacatttccagacacttgaaatgagttagagtagggttttgcataggatcctaagctttctaggacccaggcctc

SEQ ID NO: 15159 - DNA, 470 bp, Homo sapiens
  MAP TO AC010899.1; EXPRESSED IN LUNG, SIGNAL = 5.5; EXPRESSED IN FETAL LIVER, SIGNAL = 1.1
aaagagagagaaagaaaaggcttgggctccaacattcattcagtagctaccatgtactttagagtcatgaagtcttggttataaatagcagagtataggaacttatcccctttgtgcacatgaggatactaaaacttagagaagcaaggcaactgtaagaattgaacagttgtcagcacagaaaaaggtgacttcaaagcttgtgctctttgtacagcacctctctgcctctgaattttgtgcatcttgtgttggcatgcccatcctgggaaacaccctacatctctaggctaaacattagcccagacatcaagtacctcatccattttgacactggtcattaactctgagaaccgaaaggtatctgtttgtgttgtgaactgctgtgttttgaaaaacatctgtgtgtccctggtaaaaattagagatataaggattaacttagtcattcccattagtagtatggcttg

SEQ ID NO: 15160 - DNA, 454 bp, Homo sapiens
  MAP TO AC007969.2; EXPRESSED IN BONE MARROW, SIGNAL = 0.88; EXPRESSED IN HBL100, SIGNAL = 0.98; EXPRESSED IN FETAL LIVER, SIGNAL = 0.74; EXPRESSED IN LUNG, SIGNAL = 1.4
tgtataggtatgaaaaagatttccaagatattctgttaagggaaaaaagcaagatgcagaacaatatgtatagggataataaattttctggaatgatccatgagaaggtgataaaaggggttacattaggtagtggaactggagcgaggaaacttcattttctaccctttggttctatatgaaaggttttgtcatattacacatattgctttttaaataatttaaaattagtttagaacttaaaattaaatgataacctttgcactttttggtgtttagcttctttcaggtttttcagtctttctgcttccatgggctccgctttctctccgagcatttctcatgcccatacatgtttattctggaattgtcatctttggaacagtgattgcaacagcacttatgggattgacagagaaactgattttttccctgtaagttgcatagtcttctt

SEQ ID NO: 15161 - DNA, 469 bp, Homo sapiens
  MAP TO AC007877.3; EXPRESSED IN FETAL LIVER, SIGNAL = 0.61; EXPRESSED IN BONE MARROW, SIGNAL = 0.76; EXPRESSED IN LUNG, SIGNAL = 0.77; EXPRESSED IN HELA, SIGNAL = 0.68
tttctctgctcaatccccactcatggaatatacagtccacctgttgagaatactgagatccttatagcccctgccccagaacttgaagtgataattgttctacaactggagagctaaactaagtgacctcaggctgcgcagatctccctccctgcatcaagttctcagttgctgaaacaagaatgtcactcaaagagaatcttgtcaatgtcccaactcttagctctagggccttaacccagagattttgcctggtaggagaaacaggacacaaaatgatgactctaaattcttcccaaaggatctgactttattttcaacgaaacatgaagaagctgaagccaaaggacaatctcaagaacagggaaggttacagtgaaaaaatattaggaagagttttaggatctgataaagatacagcctagtttgtaggccaactagtttgcaggagaaaaccgggcaatctgac

SEQ ID NO: 15162 - DNA, 406 bp, Homo sapiens
  MAP TO AL132708.1; EXPRESSED IN LUNG, SIGNAL = 0.98; EXPRESSED IN BONE MARROW, SIGNAL =   1; EXPRESSED IN HBL100, SIGNAL =   1; EXPRESSED IN BT474, SIGNAL = 1.1; EXPRESSED IN FETAL LIVER, SIGNAL = 0.99
acttcaatgtccttgctgggaaaactagattatttacttaccacttctagctgcttcacagggaaactaggcataaacagtaccagaaatagtcaattcatcatcttctttataataagaggacacagaaagagtagaaaccctgtcattcatatagagtacatgacccaatttaaattcaaccctaagtgccgtctttgctctctgatctacatctttcctctgcattgcacccagcctgagggtagattgataagaatacaaatagatccttttgaacattttctttttttcctggcccagtactgagcccagcaggtatgaagttatgtccagcatgcagaagagggggacgaagttcaataatgggacttgggccggttttagcatcacccaggaaatctgt

SEQ ID NO: 15163 - DNA, 1900 bp, Homo sapiens
  MAP TO AC004827.1; EXPRESSED IN PLACENTA, SIGNAL =   2; EXPRESSED IN FETAL LIVER, SIGNAL = 0.98
tctgcaatcgaatcctcaccctccaatatccattttctttccctttagaggactgatttatccatcaactgggtgttaagcttcctgtttccccttcccaggtcaagggcagcccaggtgcccaatttctctctctcttcacaaggcaccaccagcaatagagatgagaaattctgaagaacagccaagtggagggaccacggtattgcagcgtttgctacaagagcagcttcgctatggcaatcctagtgagaatcgcagcctgcttgccatacaccagcaagccacagggaatggccctcctttccccagtggcagtgggaacccgggccctcagagtgatgtgttgagtccccaagaccaccaccaacagcttgtggctcatgctgctcgacaagaaccccaggggcaggaaatccagtcagaaaacctcatcatggagaagcagctgtctcctcgaatgcaaaataatgaagaactcccgacctatgaagaagccaaggtccagtcccagtactttcggggccaacagcatgccagtgttggagctgccttctatgtcactggagtcaccaaccagaagatgaggactgagggacgcccatcagttcagcggctcaatcctggaaagatgcaccaagatgagggactcagagaccttaagcaagggcatgtccgttccttgagtgaacgactaatgcagatgtcactggccaccagtggagttaaggcccatccacctgttaccagtgctcccctctccccaccacaacccaatgacctctacaagaatcccacaagttccagtgaattctacaaggcccaagggccacttcctaaccagcatagcctgaagggcatggaacaccgaggccccccaccagaatatcccttcaagggcatgccaccccaatctgtagtgtgcaagccccaagagccagggcacttctatagtgagcatcgcctgaaccagccagggagaacagaggggcaactgatgaggtatcagcatccccctgagtatggagcagccaggtaagagagttctgtttctgtcatttcctgacctcatccccaaccagcttctgctgtgtgttgggaatcttagggaaggaacgggcaggtgtttgatataacaaactctgcaatgcatgacaggcctctggcttcgtgaattgcctgccaacccgaatttgtatcctctttagccataattagcactgtattaacaatcccttagctttgtaggttgagcatggcctcaactgcctagtggacgaacaggagcaaaagtcttgttttcagcagctatttgctgtcctctctcctaggatgttgaaggggtctgtgtttctcataagccctccttgagaggtagaagcaaattaccttgcactttaattagtctggaacatcctatcacttgcacatattcccctccatgaagctttcatcatttatttttgcaaacaaatctgtgtatttcttgtcagttaccatttttccatagaattaccattattcttttggactaaacaaacacccagatgttatggtgggggagctatgtatgtatgtaggttcagaatgttacttgccttatgcttgcagtttatgaaatctggactgttgtatcttttttttgtagagaatttattagttgcctgtcacatttttaaacctctgagttaaattcccatcacatcatatagaaattttggtcagatgctaaaatacagaaggaaaaatattaccatttctgtcttatatatttagttgttcctatatatacttcttaattattcagaggtccattgtcccactgctatattcactagaccttatgattctatgattctgttcattgttcctgttgttagtatttgggccatgtctctga

SEQ ID NO: 15164 - DNA, 475 bp, Homo sapiens
  MAP TO AC007390.2; EXPRESSED IN LUNG, SIGNAL = 0.62; EXPRESSED IN BT474, SIGNAL = 0.67; EXPRESSED IN HBL100, SIGNAL = 0.95; EXPRESSED IN FETAL LIVER, SIGNAL = 0.81; EXPRESSED IN HELA, SIGNAL = 0.99; EXPRESSED IN BONE MARROW, SIGNAL = 0.71
ttcagctcaacatgtattgtacagagaagctagctgctggttaaagtaaaagtccaaagctcaaaaagctgcttaaaagaaaacacacataacacacaataaaaacccttcagctccaaacgagaagggaaaaggtccttttaagtttctggctgacatgagtattaatttgaatacagggctatattaaaaacctttagcagaaaaacaaacttaaggctaaggaagtgaggaagacacagtttatgtcttattttaaaaaatgcttacctggaacgctctcactttcatcatctaacacatccatgaatgttcctccatcttcatcaacttcagcaaattcttcatcatccatacttcctaaagaaacttcatcgtcatccaggttaccaagttcatcatcactaccttctgaatcttcatctaatgtgttatccttagctccttttgttctctttttcacgtttctggaaaa

SEQ ID NO: 15165 - DNA, 472 bp, Homo sapiens
  MAP TO AL117326.5; EXPRESSED IN LUNG, SIGNAL = 1.7; EXPRESSED IN FETAL LIVER, SIGNAL = 1.7
tgatatttgattcaacaaagccagttaaacacaatatccctagatatctcctggttacactggtaaaaggcataaatcagtttgaatgagagatttgtttcaaatgagttttggaaattttgaattatttggatatgacatttgtcatcaccctcttagctacttctgcaaataattggaatttctggagttaagtgttgttaaaattgtgttggaatcaattgtctttcaactttgtaattgttttgatgaacctaattgtacaacttgtggatgccaaaactataccccaaataaatacatgttaacattttgcctttagccaataagaagaaggagaaagagcgcccagagatctctcttccttcagactttgagcatacgattcatgtggggtttgatgcagtcaccggggaattcactgtaagtaagctccttgttttgttttgtaagccacgaaagaattcctttg

SEQ ID NO: 15166 - DNA, 461 bp, Homo sapiens
  MAP TO AC007056.4; EXPRESSED IN FETAL LIVER, SIGNAL = 1.5
ggttgggaattgattcatggtacccagagcatgttgcatgttgtgctgactgctttatgactttcgaagttgagtgactctaggttattgccaagctctcctctcacctcttccctctttctttcaagtatctcaggtggtattgatagtaaaacagtcttggcattaatgagtgtctgactggagagtgaaatgtaaataagagttgaatagagcacagccaaagcctacaaattaccgctgacaaataacagggcagacaaagagtatttcagccttaccaaacacctctgctacaatcagctaagaacacctgggaatgtcagggtggcagacacagagccaacaacatgatcaagaagaggacatttgatggcaaagagcaaagcagcaagttgcttgtgcattgcttagagaagaagaggaagaagaatgatagaactactggcttcactcaagaa

SEQ ID NO: 15167 - DNA, 488 bp, Homo sapiens
  MAP TO AC006314.2; EXPRESSED IN FETAL LIVER, SIGNAL = 2.5; EXPRESSED IN BONE MARROW, SIGNAL = 0.9
ttctttcagctcctttgttatggagaactacacttccttggtaattgctttcagcagtgttttggagttctccttgtggagaacttcacctccttggttaagtatattcctagatattttattcttttttttttttttagctattgacaaggggattgagttattgatctgatttgcagctttgtttttggtggtgtatagcactgctactgattcgtgtacattgtctttgtaacctgagactttactgaattcatttataagacataagagtctcttgtaggaatctttagggtttactaggtgtaagactatatcactggcaaacaaagatagtttgacttcctcttttccaatttggatgccctttacttctctttcttgcctggttactttgagtgggacttccagtactatattgaataaaagtggaggaagtcaacataattgtcttgctccagttcttagggggaatgcttttaactttc

SEQ ID NO: 15168 - DNA, 365 bp, Homo sapiens
  MAP TO AC007597.2; EXPRESSED IN BT474, SIGNAL = 0.61; EXPRESSED IN FETAL LIVER, SIGNAL = 0.6; EXPRESSED IN HELA, SIGNAL =   1; EXPRESSED IN BONE MARROW, SIGNAL = 0.65; EXPRESSED IN LUNG, SIGNAL = 0.66; EXPRESSED IN PLACENTA, SIGNAL = 0.67
cacttcccctttttgaggccaacagggccccaaagcagccctgagcctgctgaggctcggccggaggaagccaggctgtggtttctgccaacagtggccgggtgaggaagtgggtgtcctgtctgcatctgtgaaagctgggggtttctagaacatactccctgcaagggctgtggttgtgctggggacgctgccagatcagctggactggggaaggattttccgagcacccagggacctggccctgcagttgcagtatggagtcccagcctcttgcttccagcaggtcttctggctggagaacctggacccagccagccagtatttgataaggagaccacagtcctgccttagttgcagggaag

SEQ ID NO: 15169 - DNA, 475 bp, Homo sapiens
  MAP TO AF152364.1; EXPRESSED IN FETAL LIVER, SIGNAL = 1.7
ggcacacaataggtgttcaataagtgttaggcaaatgagtgagtttaactaaattataacttcctgagaactaacaacatctcaatcactacgctcagtatagattgaggctgagggccgccaatgttggcagcagcaaagcctgcttaaatataataactacagctgcattgcacagaagtccagttagtgcagaagcataaagttttgagggtgtgtgaaaggaacaaagacaaagttcaggtgagacatggaagcaacgagaaatgcaacatggggcgagtaagccagcactttctgctttcacttctatcactttggaaacatttagtccagaatgatctgggggttcttacttatggttctaagacagcctccacattcctcagcatgtccagtcacaatcaccatctccccaagaaggcacaaagtaagcatctgtaaatccatagttggctattttggaaaattagtg

SEQ ID NO: 15170 - DNA, 480 bp, Homo sapiens
  MAP TO AC010903.1; EXPRESSED IN FETAL LIVER, SIGNAL = 3.1
gccatgccatcacatattttgattttataccaaaaactttttaaatgttttgaaattcttgtagtaaattatttttagtcatctgttccaacttaatgtatttatggtgacatgccattattcttttctatattgatttttcagaagtgttatattgttggatttttttctgttttcttatcattcaataaaataggccctctgaattaattctgtgtaataaacaggtgtaattattgcccttggcagaactctgatcagtaaacagtgatcaaatctgtttattagatttagaaggatggcaggcagatacctaaagactttatgccagttccaagtttctataacagtctttgatctaatgcaattctgtttgtcccaagtacagatttctctattgcttagcccggaactaataaataaatgaataattaatgtcatcacaattctcatcatgcttcctttctggctgttggtagc

SEQ ID NO: 15171 - DNA, 479 bp, Homo sapiens
  MAP TO AL079337.3; EXPRESSED IN BONE MARROW, SIGNAL = 0.91; EXPRESSED IN FETAL LIVER, SIGNAL = 0.89
tgtgagatgtttcctctttttctgtattctgagagtttttgtaagattggagttagccatttataaaatttttggtaaaacttgttatttagtatttgataaaataaggatagattactttttaaataacagttttagattaacagaaaacttgaaaagatagtcagaattgcaatgggctttgcatcatttcccttattattaacaggttatattaatatggcatatttgtcacaactaatgaacctatattgacccatattattaatttaggttgttaatttattcagatttcctcagatcttacctaatgtctgttttctgttccagcatctgatctgggaaaccacactgcatttagttatcatgacttatttggctgtgacaaattcccagactgtccttccttgacagttttggagagtacagttcaggtaattttgtagactatctcctattggcatttgtgtggtgttttc

SEQ ID NO: 15172 - DNA, 489 bp, Homo sapiens
  MAP TO AL035670.16; EXPRESSED IN FETAL LIVER, SIGNAL =  12
gcaatgagtgcaataataaaaagctgtacatgggataaaagacctcaaaataaattcttaatcccatcgatctctttctctcttttgtttttgttcatcacaataagaaaagcatctctcttccttggtcctccttcaattcacatacagacaccaaaaacaaacaggtcataagaaacggcttctctcccacttaaactgctgttacatctacttagaacagaaaaatgagaggtgttgaattgctgagataagcttggtcaatgaattaattataggaaacaactgttaccttagaagacactctggcaactgggacccatactcaaaatcttcatcataaacttgaaaatactgatggaactccttgatttttttcttgtttgtggaaaacaaacttttattaaagagcatattcactgtgactggataaaggagatgtctacaaagacagaaacacacaaaaagtcagacccgaagaccaaagaa

SEQ ID NO: 15173 - DNA, 466 bp, Homo sapiens
  MAP TO AC011309.1; EXPRESSED IN BONE MARROW, SIGNAL = 1.1; EXPRESSED IN FETAL LIVER, SIGNAL =   1
caggctggttgcaaggttagtatcttctaccctttaaacagggagtgagagtagtatcaggtgtgtgacaaaacagatgtatgcaaataaataaaatgaatttttaaaagcaaatctcgtttccctttatgcatacccattccttctcagccatggataactggatatcgatcttgtctttttctgctattctattctctcctgttttaaaacttcatctcattgaggtaaatattccattgaagtgaactattacctccgtggaagctcctagcttcctctctgaaactccttcccatcctaaggtcttcgctcacctcttattgaccccacttccatttccacaggcactggtgttccaatctttgggcagcatcagggagaagtgcctgcttccatgcactgacacacttgggtggaaatgtgagggagtcacacacatctccatttccatccacatcgactt

SEQ ID NO: 15174 - DNA, 361 bp, Homo sapiens
  MAP TO AC010905.1; EXPRESSED IN BONE MARROW, SIGNAL = 3.2; EXPRESSED IN FETAL LIVER, SIGNAL = 0.92
aaatcaagaaatgcatatggctcacgtcactaaccatacaagaacattatgaggcattttggcagcagatactggggaaactatgactttgaccagcatataccctttgaatagaataggagaaaaaataaaagactacagtaaatttaactggtctcaaaactattgattttgtaatagagtttttaaatttttcaaagaccaaagtcattacttcagaaataatgaaccatcaatattccaccaaacagcttctagcagatataaaaggagatgtaattggaaggaaatcaacttcagctactccagtgaaaactttgcataaatatgttgttaaaaatggtcttggtggttatggacc

SEQ ID NO: 15175 - DNA, 485 bp, Homo sapiens
  MAP TO AC006230.11; EXPRESSED IN FETAL LIVER, SIGNAL = 0.78; EXPRESSED IN BT474, SIGNAL =  12
caaatttgggaactttctagattgacattaatgcaatatttttttctgttgtagggccacatgcattcataatacactaaaatgtgaaaaaagggtatctttgttttctctatttcttatctagtatttctcagaagcctccacttcattgggtgatggagaaaaatctaaatttagtccagtctggcaaacagttctatctaataatgcaagtgatcttttggggataatgcagctttatagacttaaatgtttttcagatgctttctctaatattcctatttctcaggtaacctggtaccatcttgaagagaactccaaaaccgtagagtttatcacctcagagtcctgcctggaacaaaaatcactgatgaactttgagttctattacagaccctgtgtagtgaggtgagtattaaagccaggccttgataaaaggataaataacttcttgagtttctgtagattcagcagggatcagaagc

SEQ ID NO: 15176 - DNA, 460 bp, Homo sapiens
  MAP TO AC008274.1; EXPRESSED IN HELA, SIGNAL = 0.87; EXPRESSED IN BT474, SIGNAL = 0.63; EXPRESSED IN HBL100, SIGNAL = 1.1; EXPRESSED IN FETAL LIVER, SIGNAL = 0.6
tcactgaagtggattgtagtttaaaagtcatgaatatcagaatcatactctctctgaagcactgtgaccttaacatgttcagtctcaacattttgccttgaattacttgaggaaaccacttgcagtgtttttttaaagagcaggctagggacacgaaggcataggccacaagctctattgccggtacagggcatagaagttagagatgtgcttgttttcagcaaacatgaaggttcatgtggcatccctggggaaaaccctaaattaggtcacattagttttgctatgtggaactttaggttctgactctggtcctgaagcaaatggatgtgactacagttatgtactttcctcataccttcactttttaaattctcgacctcggtcagtttcaccttctcgccaggatgatgaggctgatttctctggttagagcctcactttatgttatgtcagattc

SEQ ID NO: 15177 - DNA, 451 bp, Homo sapiens; identical to SEQ ID NO: 14154
  MAP TO AL031591.18; EXPRESSED IN HBL100, SIGNAL = 0.83; EXPRESSED IN FETAL LIVER, SIGNAL = 0.59

SEQ ID NO: 15178 - DNA, 378 bp, Homo sapiens
  MAP TO AC004838.2; EXPRESSED IN LUNG, SIGNAL = 2.2; EXPRESSED IN FETAL LIVER, SIGNAL = 0.9
ctctggtctcttcccccttcttactggctggaatgtcaatgtcagtgtggtaggagttagagcagccatttggccaaattgatgttgctacttattgaggataacagagctacaagttggaaggagtctagggcccatatcttaactacagtttgctttgtaatttaaatagtatacatatctctttgtaatttaattaatatacttatccctttatgtcttgttcctttaggtatagacattatggccctgcatttcttgctgacaatattaattgcctacttgacggtcattttccttatttctttcttgctgtaatagttccagccctaggtaaggtacttgcttttctagctttcctgagagctacaagtggcc

SEQ ID NO: 15179 - DNA, 461 bp, Homo sapiens
  MAP TO AC005232.1; EXPRESSED IN FETAL LIVER, SIGNAL = 0.88; EXPRESSED IN LUNG, SIGNAL = 2.5
tgacgaccatgcagactttcatatgccaacaaagccggtgcagtgtacttttccaaaagtgctccaattctccttttggacaactttcttaaacgttatttaccaagctaataaaatgtattctcaatggactttttactctgcttacatctttgttcttactcatcccaaagcaaagaatggaaaaaaaatgagttgtacatttagccggggaagggaaaggcaagtactgaggggctcctttttcatttactgatgccaaaactgaggctgtggaagataagttacgtccctgatgtcatccaagtagtggataccggaaccaggaattgcacagaattgtccagctccaaaacccaagcaccttgcttgggacccactggggttgcagtgaaggtggggggctcagaggtgactgcacacgggtcatgcatagccacagtcattatatggccagagtt

SEQ ID NO: 15180 - DNA, 488 bp, Homo sapiens
  MAP TO AC009558.2; EXPRESSED IN FETAL LIVER, SIGNAL = 1.3
  unsure 90
  unsure 135
  unsure 173
ccaagatgatgtttaggccacagtaataactggtagtacacactgttgactgtagacaggcgtgaaccagcaagcacttggatactcaantacacttccaagtgggaagcttctttgctttttggaatggaaccngactttgaagaaaatgtgacacatatgcataatatcanttctggctgactttctttgccttgttgaagttttcatgttgcataaatttaggacttgaattgtccactgcagattttattcaatttgttttgcaaattaccttccattcccaacagtttggccatgaattttacaaagaactccaatgcactttccaacagaaagcctaggataggcagaatagcaaaatgatcaagagtatgaattatggagtgaggctgacctggaatcagtcttggataaattactttgtttctcttagcttcagtttcctcacctctatacaagagattgtagtaattttacctcccaaa

SEQ ID NO: 15181 - DNA, 499 bp, Homo sapiens
  MAP TO AL031432.1; EXPRESSED IN FETAL LIVER, SIGNAL = 0.94; EXPRESSED IN LUNG, SIGNAL = 1.3; EXPRESSED IN HELA, SIGNAL =   1; EXPRESSED IN PLACENTA, SIGNAL = 0.93
caatcttaagcccaaaatgcttcaaagattaaacagccatatacatttaaaatacatagaaaaataatataattagaatgtatacaaagtagattacaaaacaacttcactacaagaaatacatcttatatccaagcacaaaaatgtggaaatatacatgaaaggatatacgtttaagaaaccacatttttatttctaaatgctgagtgagaaggcatggactactaaattctggattactgataaaatttcaaaaagaacttgattttgctagcagaaatttttaccccattctcaagcttctataaacagttcttgaagggattagacagctgttcctctttccaaattctgtttaatttcagctgtgtatttcccatagaatctttcagctttcttgttgaatttggcattcctttcattaatgtagtcgatatctgcatcatcattataaggacgtctccggctatatttgtctcgtttttcaatcctggggaaa

SEQ ID NO: 15182 - DNA, 1969 bp, Homo sapiens
  MAP TO AL022393.1; EXPRESSED IN BT474, SIGNAL = 0.91; EXPRESSED IN HELA, SIGNAL = 0.94; EXPRESSED IN FETAL LIVER, SIGNAL = 0.98
gcatggccctgcttactattcttagagcttagaaccatcacatatgtcccctgcatagtcctgggtcctcaccattttccctccactcccagtttgtacccttccaatggccccattctcattctcaggcctccttcctccccagcacccctgttctccctttttattcccattcttattctagcacttaaatcctcatcctgggcatatatagacttctgtaattcttgtctccctagtactcatcacagagctttcctcccatggcagggcataacccacagttgccggccatttgttgtttcaggtggtgaaatacagactaagagcagggacttgcctccagtcaagaagcttccagaaaaggagcatgggaagatatgccacctgagggaagacattgcccagattcctacacatgcagaagctggtgaacaggagggcaggttacaaagaaagcagaaaaatgccatagggagtaggcgacattattgccatgaatgtggaaagagttttgctcaaagttcaggcctgactaaacacaggagaatccacactggtgagaaaccctatgaatgtgaagactgtggaaagaccttcattgggagctctgcccttgtcattcatcagagagtccacactggtgagaagccatatgagtgtgaagaatgtggtaaggtcttcagtcacagctcaaaccttatcaaacaccagagaacccacactggggagaagccctatgagtgtgatgactgtgggaagaccttcagccagagctgcagcctccttgaacatcacaaaattcatactggggagaagccataccagtgcaatatgtgtggcaaagcctttaggcggaattcacatctcctgagacatcagaggattcatggtgataaaaatgttcagaatcctgagcacggggagtcctgggaaagtcagggtaggacggaaagccagtgggaaaatactgaggctcccgtgtcttataaatgtaatgagtgtgagagaagtttcacacggaatagaagtcttattgaacatcagaaaatccacactggtgagaaaccctatcagtgtgacacatgtggaaaaggtttcactcgaacttcataccttgttcaacatcagagaagccatgtagggaaaaaaactctttcacagtgacccatggtattcatgccaacattggtgctcatttgtcactgaactgaagccaccctggagcccttaatggttacagaaattgtggaccagggctttatttaccactatacatcatcgggtattagaaaatgtagtctggctgagacgatgagttatcttctacattctagaaagtgattggaagaagtcatttgataagaggccatgggagagtggtctggaagttgtaggacctaaaatagtttgttctcacccagtgtatttaaatggccttctggacttgttaattgccctcagccagcactttaggacatctggttggatggctctgatgtggggggctgctgctctgaccattcattttgcctctaatgaatctttcacaaattggtcagatccatgaggtcttttactcttctttgtgccttgtatgataggtgctaataaacatttattaaatgtaccagtaaaatggcctttgtaccaaaaatttgatgttgtctatatttctgagaaatttctaacttatgccatttgaatttatgtattattctctgaggttctagattctgggccaatctagtgtatttgttgccacgtacatactgttttcagaattggggtgggggaatccatatttctctaccatgatagtagagatgagaagaatgccttaaacagcttctttatcattaagacactgtgagattgctccatccatagaactccactgtctggtcaatgttaattatgttagtttacattaattttgctactctttagggggagtctttcacattca

SEQ ID NO: 15183 - DNA, 453 bp, Homo sapiens
  MAP TO AC007564.9; EXPRESSED IN BONE MARROW, SIGNAL = 0.7; EXPRESSED IN HBL100, SIGNAL = 1.2; EXPRESSED IN FETAL LIVER, SIGNAL = 0.57
tttctgagttagcctccttccatttttaagacaatatttctcacaagagaagtttagctaaacaataagggccttttatcatttttgaaattaatagccaaagttactattttcacttcttcaatgattttcacttctactaattttacctaagtactcaaataaatttgagttctatgttcttgaagaatgtgctaattatatgcaagccaaaaacaaaaaaacaaaaaaaaaacaaaccaaccctccaacaatatataagcaacatttacctgctttttcttgaacagcaactgttcctttccccatagctgatgtcataggttgtggtagaactgtggcaatggacgtggcaggtgcttctctgacaattccggaattctgaactcctccactagcagcattcacattaacacttcgtttgttcactgttgtgggcttatttgaacagcc

SEQ ID NO: 15184 - DNA, 1961 bp, Homo sapiens
  MAP TO AC011451.2; EXPRESSED IN FETAL LIVER, SIGNAL = 1.1
aaaataacttcatgaaaagctacaggaatcttgccaagattagagcagatgacataggattcttacagtagggttccattattcaagttgaaggaaatccaaaaggtagaaactatatgcatgttataaaagtggcaaaaataataattatcatgtttcttagaagagtggtatctattaataagtctgctaaaatgcttcctttattgttcattcctgtgttaacaggcaagaaaccaaaatggagaggaactctatgactgtaagcaatgtgaagatgtcttctgtaaacatccatgccttaagaccaacatgagtactcaaaatagaggcaacacgtctgaatgtattcagtatgcaaaagacctcctttctctatacaataaaacctctaccataaggaaagtttctgtgttcagtaagcatggaaaatctttccgcctgattttaaatgttcaggtccagagaaagtgtacacaagataaatcctttgaaggcactgactatgggaaagccttcatttatcagtcataccttgaagcacacaggaaaactcagagtggagaaaaactcaatgaatggaagcaatgtggggaagcatttactcactccacaagccatgctgtaaatgttgaaacacacattattaaaaacccctatgaatgtaaggaatgtggaaaagattttagataccctacccaccttaataatcacatgcaaacccacattgggataaaaccttataaatgtaagcactgtggcaaaaccttcactgtgccgtcaggctttcttgaacatgtacgaactcacactggagagaagccctatgggtgtaaggaatgtggtaaagcctttggtacatctgcaggccttattgaacatataagatgtcacgccagagagaaaacctttaaatgtgaccactgtgggaaagcctttatttcttacccatctctttttggacatttgagagttcataatggagagaagccatatgagcataaggaatatgggaaggcctttggtacatcctcaggtgttattgaagatagaagaagtaacacaggacagaaacgctttgattgtgaccagtgtgggaaagtctttgtttctttctcatctctttttgctcatttgagaactcacactggtgagaagccctttaagtgttacaaatgtgggaaaccatttacctcttctgcctgtcttcgtattcacatgcgaactcacacagaagagagactctatcaatgtaagaaatgtggtaaagctttcactaagtgctcatatcttaccaaacatttacgaacacacgctggagagaaaccctatgaatgtatgaaatgtgggaaagccttcactgagcgctcataccttactaaacatttacgaagacacagtggagagaagccatatgaatgtaagaaatgtggaaaagccttcacagaacgctcagatcttactaaacatttacgaagacacactggagataagccctatgaatataaggactgtgggaaagcctttgttgtctcctccagtctagttgatcatttaagaactcacactggatataaaccctataaatgtaatgcatgtgaaaaagcttacagtaggtcttgtgtactaactcaacacttaaaaactcatgcagcagagaagacctctgaatgtaacgcatgtggaaattcctttcgaaattccatgtgctttcatgatcgcttaaaaactctcaccaaaataaaaccctataaatgtaaggactgtgggaaagccttcacttgtcattcagatcttactaatcatgtgcgaattcacactggagagaagccctataaatgtaaggaatgtgggaaggccttccgtacatcctcaggacgtattcaacatttaagaactcatatgggagagaaaccctttgaatgtgaccagtgtgggaaagcctttgcttctttctcagc

SEQ ID NO: 15185 - DNA, 443 bp, Homo sapiens
  MAP TO AC005158.2; EXPRESSED IN FETAL LIVER, SIGNAL = 1.8
cattagggtcctcaaatgggatgagagaaatacctccagggcaggagctctcccccttctctgcagcctcacaatggaagatctgtaaagcatttgcagcagtagtaagtaaagaataagatatccaggtgtcccacagaagccacttcttttgcatttttcagaaggaaatcacagaaactctcagcttactttttaaaatgccagccaaacttaagagccataaggatttcactggacacagcagccacagccttctgctcagctggcctcaggcattttaaagtcgtaggctccagaggctgagttgtaggaccattttgagcatggctattaataggaacttgagtagtgttcagctgcaagcgatgactgtgaaaactcctagtgaaccatacagaatatatttaagtgtggaattcgctctacctgccctgaaactt

SEQ ID NO: 15186 - DNA, 401 bp, Homo sapiens
  MAP TO AL033520.9; EXPRESSED IN LUNG, SIGNAL = 1.7; EXPRESSED IN FETAL LIVER, SIGNAL = 1.2
tgaaccctggcttttctgacagcaacacacatttatataccactataacactgacagagaatgcaaatatgtattaatatttcctcacttgatcctcaccatattttacagtgaaaagggaagaggttaacaggtgtcactgcttccttgcttgacaaagtccagggcaaaaaccaatgtgcccttacattggcaaaaaccaaaggttcctcacacctttagggtgatgctggagttcagaagctcaatctgcatggggactaccaccgggatctcctcatcctccaagaagggccccaggccactgagcactgaagtgagcagctcgaggtcacagccatgaagcaataaatgtaggaagccattttgtgaggccaggggggaatgaacagctgctccag

SEQ ID NO: 15187 - DNA, 469 bp, Homo sapiens
  MAP TO AC004975.2; EXPRESSED IN FETAL LIVER, SIGNAL =   1
agtggatcctctggctgggaggtgactctccctgggcctctggtatttctgtgtagttctgaccagagcctttgtttcaggttgtcttttcagggacgcttgtacagcagacagccttggaagaaagagagagagtctcactcaggagctcaggacaggtatgcttactgcctgttataaaagattcgggttctctaacaacagggtcatctcctgcaatgcacaccgctgcttgcaggggtacctcaccctcttcacatccccccacaggagctggggctcaggagccatggtgcacggacatgctggccctgactctgcactactggggggtgataaagacctttgtatctgacccaggagtctcgtgtcctctgcctgcattcatgaaactgtgggtggctacctcgttcattcgcaaggacctgtgaaaggaaaataaatcttgggaccgcaaagtcactaagcc

SEQ ID NO: 15188 - DNA, 465 bp, Homo sapiens
  MAP TO AP000096.1; EXPRESSED IN FETAL LIVER, SIGNAL =   3; EXPRESSED IN LUNG, SIGNAL = 0.63; EXPRESSED IN HELA, SIGNAL = 0.61
ttgatggctacaccaagtgaacaaaaagcagagcatttgaagaaggtggacagttttgtggggcaggaatactgagtgtcccacactgctaattgccatggaggtcaggagatgtatgatcagaattgagttttcaaagaaaaattactctacttctgcatggtctcctttacagaagggagtgggttaaaatggtcaccaggagtctaattattaggccattgcaagtcatctgggagagaagcagtggtagcatggagtaagattgtggcagtgggaacaaaaacaagtggatgtatggcagagctgtctagaaggcaaagccaacaacagtggtgtttggctgcaagagaaagagagggaatggtcaagggtgacaacccagatgattgacaagtgggaggatggtgattaccaatccctgaaacaagagtaactggaaaaagagcagtttttgaaggggaa

SEQ ID NO: 15189 - DNA, 390 bp, Homo sapiens
  MAP TO AC010808.2; EXPRESSED IN PLACENTA, SIGNAL = 0.92; EXPRESSED IN FETAL LIVER, SIGNAL =   1
tggtgatagctttgcagcacgtatgttaacttaggccagagagactaggcgtgaatattacacactcagagaatgacaggacttgtattagtccattttcatgctgctgataaagacatatgcaagactgggcaatttacaatagaaagagatttaattggacttacagttccatgtgtctggggaagcctcacaattatggtgaaaggcaaggaggggcaagttccatcttacatggatggcagcaagcagagagaataaggaagatgcaaaagcagaaacccctgataaaaccatcagatctcatgagacatattcactaccaggagaacagtgtgaggaaaaccgcccccatgattcagttatctcccaccagttccttcccacaat

SEQ ID NO: 15190 - DNA, 372 bp, Homo sapiens
  MAP TO AL034449.1; EXPRESSED IN FETAL LIVER, SIGNAL = 0.61; EXPRESSED IN HELA, SIGNAL = 0.96; EXPRESSED IN HBL100, SIGNAL = 0.82
ccccaggaatatatgcaactactatgtacccacaaaaattaaaaattttaaaaatgacttaaatgtcaggagtagaagtgctctattctctccccttgagtgggaaagtctaatttgacattttaaaattaccgtttatttactgaaaataaaaataaaagttcaaactaaaaaaatagttagattaagtaaaatatttcatattaactaaaataggtacttaccaaataatgcaactgtatattacaatgtgcagttcatagtttttcactgttttaatatttaaatacaagtaaaactgtaagttgtcacaaagaatgatagaattgaagtaagtcaagttctgtttcttcgtgtttacaatgtgctgcc

SEQ ID NO: 15191 - DNA, 1970 bp, Homo sapiens
  MAP TO AC004835.2; EXPRESSED IN FETAL LIVER, SIGNAL = 2.7
ttccatagtcaatatactcctgaccattatgtctattatagtaataatcagaattgaacttcaaatagttataattacatcctctaaatcttgaattctggttatattctgacttccaaggagtccctcttcttccgtgaaaattaccaaaatagaaagacctagcacttcttgatgacattacgggcacctgagagggcccatagttcactttctggtccaatgtactatcactaaacctctttagataactggaactgggttcctggtagtagccttcatcaaacaagtatctgggggctagttgtcccttcatttgtccattgttgttttcatgtctaatgaaatgactttcacccctaggccatgaacatatccatctcggttcatactcagacttcctacctggtgtcctaaacttgtaattagagtatttttcctcaccatcacgcttccactttgaaaaaaaggtctgctgactcgaccttgtattttgtttgcgagtgatcattttgtcagtgtcaagaggttctttttctgagaaactattaaatgtggccacagatttctctttctcctctttgtttatactaagggtttcactgaagcattcagaatcactactaatttcctctaagaaatctgtcaactgtaaacctaagcctattgactcatggggtggggacacttggcttttccttgtggatttggaatcttcaatatgataactatgagtcttttccaacagacagctgtttccatcagttggggacagctgaccaccagctttatgggctgtctcctggcaatgagtttcaaacccattagtacattctttggcataatctacttttcctcgtttacgctcaggatcctgagtacaaatctttgatgagtaattattttcttgaacctgttctttcctttccaggttttctacttggctcgaattgattgagtgatgcctacactttctcaaattaatctgaaatccatctcccttagcttggacatccctctgccactgacatgtgcctgctacctgacttgtttctaggcagatacgagtatattgtggaggttcataataattgaaaagatagtcaaaaaatgcatctgtttcatggatcttaggtttcctgccttggcctctcccagataatctggaacaggattcactagaaccgtggtggtcttcattttcaagagactggccttcaattatcgtaatctccaaggagttatgcttaaaaaacaaactgtattcatattcctcatcatctaataatattccagctctctgttttctaggggaataccttaaattttcttccccaaggcagtgggaagatttctgtaagtgatccctagttgttttcttcattttttgtttttgtttattgtctgacttggcaacctgacattttgacatttcctcttgattttgaaggtacagagtgtttagctgttcttccagagttttcaatgtgttccctggagaatcattagctttggtgccaataatgtcgacttcctgtgggttaaactgtatggatcccttcaaagaaaaagattaaaaatctctcatgaaaaactaaacagattaaaaaattccaaagaaaaattgtgctttctgacattgttctgaagagacttccaatacctgggatagatccaaattaggaacaatattgcactgaggaaatagaaggcaaaattaaatgtcttagtctaatatgaactgttttgagtaggtctatgcccatgcttatgtgagaaggcaccacactttacatagccttcaaagcacatgactcttttttcacttgtttgaaaatcaataagcctgatgttccaggtattgtgctaggagctggagatacaaagaggaataagaaattatctatagccctcccagaaaaatcccagtacaagaaaagactgacaggtgaatcgtatatctaaaaggg

SEQ ID NO: 15192 - DNA, 458 bp, Homo sapiens
  MAP TO AC009336.2; EXPRESSED IN BONE MARROW, SIGNAL = 0.98; EXPRESSED IN FETAL LIVER, SIGNAL = 0.88; EXPRESSED IN HELA, SIGNAL = 1.4
aaaggagtgaattcatatggaggataagtgagtgatatccagcattgtgttatattctttcctgctctggggttttcacataatgtttcacataacatttcctctgcctagaatcccctttgccagtaacagttaaaatacttttggttgctattaacagaaaagcaagctggaaagatcaggggtggttcaggcttctgttcataatgccatcagggttctggttcactgtggtgatcctgattctatcctctcctccctgctagctttactttcaagctggcctttcttgtggtagagagagagctgctgctggctcctggactacatgtctttgttcacattcaagaaggggaggcaacttttcccccatcttcagacgaaagtcctgagtttcattttgattatccaaatttgggtcacactcccctccttcccccccaagagccaattactgt

SEQ ID NO: 15193 - DNA, 470 bp, Homo sapiens; identical to SEQ ID NO: 4152
  MAP TO AC008038.1; EXPRESSED IN FETAL LIVER, SIGNAL = 0.58; EXPRESSED IN HBL100, SIGNAL =  13

SEQ ID NO: 15194 - DNA, 1972 bp, Homo sapiens
  MAP TO AL021938.1; EXPRESSED IN FETAL LIVER, SIGNAL = 1.1; EXPRESSED IN BT474, SIGNAL = 0.95; EXPRESSED IN BONE MARROW, SIGNAL = 1.1; EXPRESSED IN HELA, SIGNAL = 1.2
gaagcatgcagcccagttacttatccctggcatatggagatgtgtgcacgtgcatgcaacacgcacacgcaagccagttaatgaaaaggaaacccgaggccctaggcaggcggaatggactcgtggtatcttcgtggagtggacttcccctccctcactgggtctcctgctgccccatcaacgcacccacaaggccctcactaggttcctcgatattggacttcccaggctccacaaccaggagccagtacatttctgtttattatgaattccccagtctgtagtatttcagcaacacgagaggactaatacagcgctatcacccagcacagtggcccgccccctcatcaccccagggaatcagagaacacaccgtccagtgcatagcacgctccacttcctctctcattcctcccgcactcctgcagctgggagtggctgctctgcggaggcccctaccttatagatgcacttgtggaagtcattgaggacgcctttgtcctcctcctcttccttgaccacttctttttcctgagcgaagagtcgccgccggccagtcttcaactgggcctggcccacctccttgagcttgctgcggaagccgttcctgggggccacgccgtggatgagcccattcttgggctcgaagcggggcagagggtggaacttgtggtggtcgttctctgtgtggccttccagcggccccttgcgcttctccaggatctccttctccatcagcacctccttctccagccgccggtgctcctctggggacagggagtcgtaggagagtaggtactggcagtaggcctcctgcagcttggccagccggtcctgggcagttctggggatgcgcagcatgtctgctagtttgttccattttttgaggtcagtcacttgctgcatgccgcccatctcattaatcagccggaaaaagcaggccaggtcgagctcacagccccctgggacagcgaaggggaaaaaaacgggacagttagtgaaagagacacgaacaagatgttcctcattcaacctgtacttcttgaactcctactatgagccaggactctgacaggctctggggtgagagtggtgaacagcagactcccggtccacagagagaagggcgttacaaaatgatgggtcatgaccacttgctacgaagagcaggtggaacgagggactaccattttaggtggggagcgtctgaggaggcagcatttaagctggggcttggctggaaaaggatgcgagctggccagacagacatacagggaggaacatcccagtgtaccatgtactggtacatgtgttgtcacatggaggcgggtgtcatgagaagactagctccctggtgaggagtgggtaggggtcctggctgcacccacggcccagcgtcacctagaatagctttgacacatgcttgttaccaactcccaattccccttctataattcccaatgcccacccactcactcactcaacttcacccatccacccactcactcacacaaaggaagtctattttccatcctgctggatttccagagcaaagagcaacacctgcgtgaggacacagggcagcacatctatgcctcgtccctcgcccatccagacagcgggctgcttctcagtgcataagctggtgctcagtgcccctcctgatcaggccacagagcagcgcaaatgcacatcaaacctgggcaggttttaacgcgcgcccagtggcttttctagatgggaatggagaaagcaacctccctcgggccaaataaaggaaggggggtaggggagattttccaaaataaccatcaacaaaatactaaacaaagtacaaattaacaacgttttaaatctttagagtgtggggatatattgtttttaagtaataaaaggtaaagtgtgcacggatccagtccaggcagggtcgctgcacataccaagcatgacaggacccactaggtgaagcgtc

SEQ ID NO: 15195 - DNA, 467 bp, Homo sapiens
  MAP TO AC009485.2; EXPRESSED IN FETAL LIVER, SIGNAL = 0.92
tgcagggacaacagaaatacctctgagacccatgattaccaagaaagtagtcagtgcggggggaggacaaaaccaagtaactgttgaaaccagagggtatggtggaaggaattgttcattctggagaccagtatcattagcttttactaaagcggattctgaagtaactgacttaggagcagggtctttggttttgtatgctacagggtgcaagagcatgtttgggtcgatgagggacccacagttcactattgaacatcacagatggctatgtatgatgcagacacagaggaggttatttccgaggaaacagccaacctggtggattggaaaaaagccactgtaaggtctgtttaccctgagaagggaaactgtccctctccccctgtaaatgccaagtggagcaacccagatgaagcaattgatatgcttcatatgtaagccatgtgggactggttttctgatga

SEQ ID NO: 15196 - DNA, 465 bp, Homo sapiens
  MAP TO AC008039.1; EXPRESSED IN FETAL LIVER, SIGNAL = 4.1
ttcactgaagccctttgaggtaggtagcattcattattatacccatttgaccacaaggtaaacctagacccagagaggttaaaaaaaaacccactctagattaagccagtaagtagtagagcaagcgcagaaggaggtggtctggccctagagcctgcatctgaccatggtgctgcactgcctgtgatgagccacaccctccagtatcatggaggggtccttagagacaagtctggtacagagacagcagtgggggacctgttactcaaagctgggcatggcaataaggataaaaaagaggggaagaatccaagagccatttctgaggtagaatcagtgtgtattggtgcggacctacctgtggagcccaggggtgattcctgtgctactcatgctgcggcctgggatgagaaatggaggtggaagaacaggtttcatagtgaaggtgagagattcagaatggga

SEQ ID NO: 15197 - DNA, 471 bp, Homo sapiens
  MAP TO AL121656.1; EXPRESSED IN FETAL LIVER, SIGNAL =   1; EXPRESSED IN HELA, SIGNAL = 0.95
ggtgtggatccaatcattcagagagaatgttccaggtgagaagagccaagcaccaaacatggggccctttgaatgaaagaagaaccctctctggaagcttttgaagggacatcagagaggtagtcaccatgagatcctagagagtgctttaggattgaattttattttgcttttcaaaagcttaaaggtgatactcttaacaagtttcataaggtttttcattgtcattgtctttgatgatggtgagatagctctttgtttttgttattgtttgttggtttctaacttaccagtttgttctgtgcatttttaaggtccttaaaattctagtcagggcagtgattgatgggatgactgatcgaagtggagatgttgcaactggcctcaaaggaaagctgcaggagttatttggcagagtgacttcaagagtgacaaatgatggagaaatctggaggctgtatgcccacgtat

SEQ ID NO: 15198 - DNA, 428 bp, Homo sapiens
  MAP TO AL022170.1; EXPRESSED IN BONE MARROW, SIGNAL = 0.96; EXPRESSED IN FETAL LIVER, SIGNAL = 0.93
gttcttgtggtaagggggtgtataaaggcttgatgtttgcattttttaatcttctcgttaatggctttgtgttaagtacagctgacacgccataacacttcagatgccagcatgaagcttgcttggttctgccaagtgtctgatttaaagtgattaccagagatcaatgatcatccaacagtcacaagtcaccctggggcagctcagaattcttggttgcgctctgggactccgtcgtgctcctgttctctgagggctccgtgtcatatataaccacctttcagttttatggcgggcacctcgggtgcagtgtcatcatctcttcccttcacttgtgctgcattgcaggcgttgcttgagtccatggttgatgctgctgagaatctttgtcccaatgtgatgaaaaaagcccacattcgacaagactt

SEQ ID NO: 15199 - DNA, 475 bp, Homo sapiens
  MAP TO AF159056.1; EXPRESSED IN BONE MARROW, SIGNAL = 0.93; EXPRESSED IN LUNG, SIGNAL = 0.9; EXPRESSED IN FETAL LIVER, SIGNAL = 0.9
ctttcaagaccccagagacgaaggcatgtggtgggccctagccctgcttctagctttcctgtctcttggtaagtgtgctgcctacagagaggctcacaggttgggttttgttttggatttttcttctttagcaagggacgccatactaaggaatacctcattatattttatgttgttcccattgcagccagtcagatatctactaacttggaagcgaaaataaagtcaggcaccaggcagatggggtcatctgctgtaatcacctgtgatcttcctgtagaaaatgccttctacatccactggtacctacgccaggaggggaaggccccacagcatcttctgtactatgatgtctgcaactccagggatatgttggaatcaggagtcagtcaggaaagcatgatacttatggaagtagaaggataagctggaaatttatacctccaaaactaaatgaaaatgcctctggggtcta

SEQ ID NO: 15200 - DNA, 455 bp, Homo sapiens
  MAP TO AC007316.2; EXPRESSED IN FETAL LIVER, SIGNAL = 0.59; EXPRESSED IN PLACENTA, SIGNAL = 0.65
tcaatcaccaaatttcagccaatcaaaggaagccaactgttcaaaccatattcaaataaggcaaatgcccagctgtaaccaatctagtttctctacttcacttctgttttctgtatgtcattttcttttttctgtccataaatcctctctgaccatgtgtcagtgctggagtagctctgaatctattctggtttggggggctacccaatctgaaattattctttgctcaattaaactctgttaaatttaacttgtctaaagttttttgttttgttttgttttaacagatggcattagaagtggaacccaaagtagagcctcttgcaacccccagaagcaccaagagaccaagaaaaatacctaccaggcccattgtgttcattgctctcttgcagaaactggtgattgtgggtaagttcactcttggattccaaagctccgtggacttgtgtttt

SEQ ID NO: 15201 - DNA, 472 bp, Homo sapiens
  MAP TO AF131217.2; EXPRESSED IN FETAL LIVER, SIGNAL = 4.1; EXPRESSED IN BONE MARROW, SIGNAL = 1.1
ccaagaattctcatttctaaccgaagttcacattatttcactctgtcagtgttttgaaaggaaatacctgttacagattggaaaggtgctgaaaaataggaaagactcttaattgggacactaatttattcaataacagtttgttgccatccaatgaactatgacaacaatgcctcggttacatctttggacatttattgataaaggtaactatggcaacaaaagaagaggtcaggagaatcctagccagcgtgttcctgactgctttgtttagatcagcgttcgcacttcagtcaggcctctgttagggttatgaggcatcttccccaagtgacggcatagttgcttcagataatgctcagatgagttctgacggcgtggaacagtggtcttaacactctcattttctgtaagaatacaaatttctacttttctagaaagatatttagcaccattgtcaagatttcttaaa

SEQ ID NO: 15202 - DNA, 496 bp, Homo sapiens
  MAP TO AC006296.8; EXPRESSED IN FETAL LIVER, SIGNAL = 0.58
ggaagatgaaatgttcgtagggttaatagatgagaatatatatcggatgtgaatgttcaatgaagactgttagacagtatgtactaaatttaatttactcttgtttttatttacttattcctccagtaaacacttttgagctcctgctgtgggccagttaccagaacagatgttgagggagcaaactcttgagcatgattcttgccctcctggaatcagggtataaaacatgaaatgattgcacaaacagaaataaagttttaactgggcaaagtgcagtgaaatggaagagtgctatgctatggagttgggagaagttggcctcatcagagaggcccagaaaaatttcccagaagtgatgtctgagatgaaatctgaaacagaagcagttttatgtagaaaaacaaggaaggaagagagaacaaagaacacacatgatttatatcaagggcagcaggcaggtaaggggactgagacaatgctggtgtttttggtg

SEQ ID NO: 15203 - DNA, 479 bp, Homo sapiens
  MAP TO AC008013.8; EXPRESSED IN LUNG, SIGNAL = 1.2; EXPRESSED IN FETAL LIVER, SIGNAL = 0.95
ggtgatgacaggaaggcatcaaagccctaaaggctggtaaccgagctgccaagccaggctctccacatgccgacattaagagcagtggcaaggcattagcatctatcctgcccctgccaggccctgtctttatctccactttcctcccttccctttttctgctgcttcctcttctctcttgtttcctctcccctttctagacctaaaagcaaagagtgtcaccctccagatgtcccttggctacaccgtggccctgggttaaggaggtaactggttctccacagctcacaagaaatgggccagggccaacacgcatgtggccttgagcctaatgccagcctgaccactgtgcgggttgttgtctattttcagtgcctggattctcctctaaagatgaggataatggtccctccctcccacaccttcacaaggatgattccaaggacaagcaagattgttcttcagagcacgcctcagag

SEQ ID NO: 15204 - DNA, 453 bp, Homo sapiens
  MAP TO AL096699.11; EXPRESSED IN FETAL LIVER, SIGNAL =  17
attacgatgaggttgatgggattaataattcatagtaagagaaggaagatgacgtaaaactgtgctgcagcagggtttatattgcaggacctgcttcaaaaccctgaacaatatattagattcacgggcagctgctcccttaagtattgctgttcactcaactcttagaatatacaatacaatcgcaaactggggcatataaaagaaacgtgatgctttcattcatttgatcaatatgctttatgtacctagtatatattctagtccttttcctcttggagtttttactcattagggaaaaacgacctgcaaatatcgtaatgtcagtagtgataactacaatgaggaaaaaaattaaagctttgaaagaagacagaacaatggtagtggcatatcaaatagggtagtcagaaaagatctctttgcagtctaaggtaaaggaagtgcgccata

SEQ ID NO: 15205 - DNA, 489 bp, Homo sapiens
  MAP TO AP000494.1; EXPRESSED IN LUNG, SIGNAL =   1; EXPRESSED IN FETAL LIVER, SIGNAL = 0.94
gcaaacaggtcttggcttatctaaagaaaaattgtaagctccccatgacgcaagacagtatcttatttacctttgaaaacctcatcacactctgccctgctcagagtacaatctaaataaaagtctattgaatgactgaagtagagtttcttttttaacacttatatgcacattcttgtgacaggcacagtgaaagatttatcaaggaatgacatggtccccacccatgacactgttaaatccataatttgtgatgcattgtttttagttatctagtgctgctgaacaaaccactccaaacttaatgatgtaaaacaacagcaattttatcatgctcacagacattgtgggcaaggaattcgggacagggcacattggggatggctggtctctgctccatgatgcctaggacctcagctgggagagacttgaacagttgggggctggtgaatccatgtctaagcttcttcattcacatgcctgtcacct

SEQ ID NO: 15206 - DNA, 448 bp, Homo sapiens
  MAP TO AC007563.1; EXPRESSED IN PLACENTA, SIGNAL = 0.78; EXPRESSED IN FETAL LIVER, SIGNAL = 0.65
tcagcaaattctgctaaggcagtagaagtctgctcaaataatgtttccatttccaatgactcattaagtacaataattacaacaattaccatcacttctgttgccttcatgctgtctattgatccacacactctgcccccaaaactgcactaagcacttaacaaggaattcacatactaatgagtggggtatctgcatgacccctccacagagtaagataaataaattgatcttttcttccattggcaatggaataataacaatttttacttttctttttccttgttgccatccatagatctatacccattagaaatcacagcgagaaaaagagcggcaggggaggagctcaagaagagacgagagataggaaagaagcattataatttggcaaaaatgtgagtcagggaacctccctttttctaacccctggaagctctagctggag

SEQ ID NO: 15207 - DNA, 433 bp, Homo sapiens
  MAP TO AC012267.1; EXPRESSED IN FETAL LIVER, SIGNAL =  14
aagcaatttatcaagaaggcataacaattgtaaataaataggcagccaatattggagtacctagatatgtaaagtaaatattaaccaaactgaagggaaagatagacagcaatacaataatagtaggggacttaaataccccactttcaacaataggtagatcatccagacagaaaatcaataagaaagcagtaaacatgagcagcactatagaggaaatggacccaaagaacatacacagaacagtccatccaacagaagagtacacattcttctcaagaacacatggaatattctctggaatagatcatacggcaggccacaaaatcagtcctaacaaatttaaggtcaaaattataccaagtatcttttctgaccacagtgttatgaaactagaaatcaataacaggagacaaactggaaaatttcacaa

SEQ ID NO: 15208 - DNA, 462 bp, Homo sapiens
  MAP TO AC006042.2; EXPRESSED IN HELA, SIGNAL =  12; EXPRESSED IN FETAL LIVER, SIGNAL =   2
acaagtgatggggtttccacccttcccaaggctgtacagcctataatagatctctccattagggcctgtgactcgttcagctgcctaaatcatctttgttttgactttcatttaccatcactcctcctgctgtccccttgcacactaaataatttctctctgtccccactatttacacccttcaagtacttgttgcccatgagccagtcccgttagagccacatggtcatgctgagagacttgtctctttcatcttctctctgaaggctgtcccttcagacttatgaatcatatttgttgctcttcaatgaatgcccatcagtttcttaataatttgcttcatttctttgttactgacactgctcaggaaaatcttctttgtctccgtcgctgcaaaacaagaagataatggtagtagaatctctgctaacagaaaatagagcggagcttttcagctaccag

SEQ ID NO: 15209 - DNA, 472 bp, Homo sapiens
  MAP TO AC007128.2; EXPRESSED IN FETAL LIVER, SIGNAL = 0.9; EXPRESSED IN HBL100, SIGNAL = 1.3
gcagcctgggtaaggtagagaatacagagagagggctcacagagtccaggtgcagatctgtaagaaactgtgttcccttcttcctgtgcttcatctttgtgtaaatggtgataagtgtgctcttattcaggccatatctggctcagtaaccctgaggagttaccaagtattggttggtaagtttgcagcagaaacctgccaacttatgttgccaatcttagcatggaacctgggacacgcagtaactatttattggtttacactgaggctatcctcctcttcctcctctgttaccttttctttcctcaacgtaacctcttccatctattgtcttttctccctgttgtgttggtttgtgatccactcttgaagaaacacccatgtagatcagatttagacactaaaaagaagaaaatatttttctgaaatcctatcaataacagtgaaatcacccattcatatttaagttgca

SEQ ID NO: 15210 - DNA, 478 bp, Homo sapiens
  MAP TO AC010881.1; EXPRESSED IN LUNG, SIGNAL =   3; EXPRESSED IN FETAL LIVER, SIGNAL = 0.97
tttgtgctgcttttgttgacatttagatagtatacagtaaataccttataacagtgatctgtttcacttacagtttcactagcctacaacactgtccactgcagttacaggtttgcagactcacagatattctcttccagatgcaattttgctgtaacttaaatttttgtcaagcatatgttctgcttaaaggttggattttttaatagaatgaaattgattaaaaggcctgcaagcgaggactccaagatgacttccggattccacatctgacttgctggatgagtcagggccactggccccataccttggtctcgacatctgtaaacccttctcagtggtaatgagagttacataggagcaccaggacacaagtgacttcaaagggatttcttcacctgagggagatgcaagccagagtaaaggtagggaatcaggctgtgaaagcaaatttctttcaacatgggaccaaaagctc

SEQ ID NO: 15211 - DNA, 475 bp, Homo sapiens
  MAP TO AC009640.2; EXPRESSED IN FETAL LIVER, SIGNAL = 2.6
  unsure 158
  unsure 187
  unsure 199
aaagtttattccatacacataaagccacaccaccctcttttaacaggtgaatggtatttcaatgtatggagatactgcagtttatttaaagtctcctattaatggacatctagactgattctaatactttttgcctttgcaaataatgttacaattanacatttctgaaatacagtcttctaagaangatgtactctanacctgcaaattctataactctgtttttaactatctaaattttgtacatttgtaattctacttaccagtttccttttaaaacaacagacgcttgtataggtgaagaggatgctgtagtacacttgaaatcccaggctgaaagaaaaattttaaaacttctgggcaaggcgaactacaatggaatggcaggtatggtccttgtcggggtggcaaaatgccatctgagtattaagtgttcactgttctcaaaattcctacactggccaaacatggctat

SEQ ID NO: 15212 - DNA, 448 bp, Homo sapiens
  MAP TO AC009951.3; EXPRESSED IN FETAL LIVER, SIGNAL = 1.1
aaggtgccagattcaggatgtatcttactgtgtgtctggagagcaagtacttgagagaaaagacgtttagaagaaaataggtttgattgtgcaaagctgtagcagcgtttttaaataaataaatacatagatacatacgtaaaccatcaagcatctgagcttggtaacgattttaaagaagaaaacaacgcatgggttatatttctccgtagtcaccaaggtggtgacacccgcacatgggcttttagaacaacaaagcaaaattcttaatgctgatgtaacacttacaatgtttgtgttcccagggtctgaagagtatgcagaccaaaaagccaagcacatttcagaggcaaattatttgtatttttaagtatgtgtttgtacctgttttcctggagctgagcagattcacaagacatgggattcctggggctaaaaccggtaaagt

SEQ ID NO: 15213 - DNA, 481 bp, Homo sapiens
  MAP TO AC010089.1; EXPRESSED IN FETAL LIVER, SIGNAL = 0.91; EXPRESSED IN BT474, SIGNAL = 1.3
tcctgcatgtgaatgtttgcctctctatataggctgggaaagctctcttgaatgatatctgaaaataagtatttcaagttgtttttattctccccatcactttcaggcactctttttaatcatagatttggtttcattacataatcccatatttcttagaggttttgtttattcctcttttttttttttttcactcatcttgtctgtcttatttaagaaagccagtattgaagctctgagattctttcctctacttggcctattctgctgttaatacttgtgattacattacaaagttttcatattgtgttttttcagctctatcagattggtcacattttcctcctcattggcaattttttctatccattcctgcaatttttttcccttcattgcattgggttgcaactccatttgtagctcaatgaagtttattcatttccgtattctgaattatacttctgtcatcttaggcctcggt

SEQ ID NO: 15214 - DNA, 456 bp, Homo sapiens; identical to SEQ ID NO: 15076
  MAP TO AC007963.1; EXPRESSED IN BONE MARROW, SIGNAL = 0.93; EXPRESSED IN FETAL LIVER, SIGNAL = 0.61
  unsure 330

SEQ ID NO: 15215 - DNA, 373 bp, Homo sapiens
  MAP TO AC008024.1; EXPRESSED IN BONE MARROW, SIGNAL = 0.97; EXPRESSED IN FETAL LIVER, SIGNAL = 1.1
  unsure 215
  unsure 347
atccatccattcacacatccattatttcatcctgcattcatacatccataactactctctaagaaagaagaaaaatttattcaggcttctatgtagatggaagtgttttgatactaaaatgtggatgtttgtaattttattattgccatttcctttccaaatgtatgccaatcatacatttttctaagacttatacattacctctgaaatgcttncctcttggaaatgatgcacgtcacttctactgacattttattggtcaaagcacatcacatagtcatgcctgagcctatcctcaggaagacaaggccatttgaccaggaaacacaggagatccagaaatattnggtgaacactggtaacgtccatcagg

SEQ ID NO: 15216 - DNA, 480 bp, Homo sapiens
  MAP TO AC009401.1; EXPRESSED IN FETAL LIVER, SIGNAL =   1
catggctctagtgacaaatgcatatgagtttacagtgacaggttgttttcttggtccaaaagaaaaagcttcaaagtaaagattagggaaaatgaaagaagactcaatagaaatggaagagtttatactgggttttgaaaaatgagtttagaaaaaacgtgatgagtggagtcagagatgtctattattctagactaggaagccccagaagtccaggaggagttctggaaatggttcatagaacattttggctgaagcaaacggatcagatcaagaagcaaacgtgagatggggtgaagtttaccttgcggcagatcttgaattttgttttattatggacattgcagtgacttgggagtgttccaatacagactgacacaatgcaggttctatttaggaagattaatttggcagatgtacaaagcatggagtcagcctaaaagaaaagaaatctattaagaacctgtccgtctttctttc

SEQ ID NO: 15217 - DNA, 471 bp, Homo sapiens
  MAP TO AL109809.9; EXPRESSED IN FETAL LIVER, SIGNAL = 0.88
tccttacaaactgctgttgcccattgctacagtttcactgtccggcctccgttatcagattcagaaactggttcctatcagaacataacctttacatcttatgaaagaggaagcaatgggcttcttggcagatgctgtgtatttgttcacactggggttcaggcacctctgtgccctctcatgggaggggtctatccttgcaggccagagtgtccagccttacaagttgcaaggcccccttcagcgatctgagcctggcacaaggatccgattgacctatgcatcctctgggttctcgacacaccaggttactgtgacctggcttaaaaacaaacacgagctcccaaacccccagaccagcgtccagtacagtggacacacctacaatgtgaccagcagtgtgcttgtcccgctgatggatgatgatgtgttctcccacgtcgtttgccatgtggagcacaagttgacgtg

SEQ ID NO: 15218 - DNA, 473 bp, Homo sapiens
  MAP TO AC009303.1; EXPRESSED IN FETAL LIVER, SIGNAL = 0.95; EXPRESSED IN HELA, SIGNAL = 7.4; EXPRESSED IN HBL100, SIGNAL = 1.2; EXPRESSED IN LUNG, SIGNAL = 4.5
gtagctgccggctctgtccatagaagcccttcccattcagtatcttccctcctggtccactcatttggtgccttctgtgattcagttcacagtcacaccacctcccactcctaggaaagcgggaaagtcaatccaaatctgagatggggacctttaagcccatggcaggagtttgtgcctgcattgtagggcgcatggttgggctcaggtcggggtgcaggcaatattttggctccctagagaacatgtaaggccttttaccaaatagtactgtctctgtctcccttttgcatttaggctcgaagaaatcgagaaatagcaattttgcaccgcaagattgatgaagtccctagccgtgccgagctaatacagtatcagaagagatttattgaactctaccgccagagtaggtgcattgaccacagacaagctcttgaggctgggaagggacaggcgaggggtctgttccactt

SEQ ID NO: 15219 - DNA, 464 bp, Homo sapiens
  MAP TO AC011288.1; EXPRESSED IN FETAL LIVER, SIGNAL = 1.1
tttatcttcctctgtccattttgtattccctttgccttcagaaagcacctcagctggtcatgattctttacctggaaaagtgacccaaaccttcattcctacaaaactctggactattcacagtcctttctggattgagttgagttgtagtttcccactgaccttaatcacagggcagggtaatgctaacagatgacctaagggatcacctgtattccagacatactattttctttctttcgttgtgaggtagtaattcagtttccccttggtagcccagatcatcccaaccaacatggtaactgctttcctgaccttttgattcaaaggcatgaggaggccaaggttgccaggtggaagtctcaaattccatttaatgggatcattgtcgtgtttcctggtaggatcattcctccttctgggactaaaatatctaggctagaagagcacaaagtcacaaaaca

SEQ ID NO: 15220 - DNA, 475 bp, Homo sapiens
  MAP TO AC011302.1; EXPRESSED IN FETAL LIVER, SIGNAL = 0.9
catgaatagccaatctacacagatggctaaaatttgggtatacaatattcttttcctataagttctttttagtccctctgctactgatgatttgtcattggccccaccattcagggatatccccagcatccaattatttgtcttctctcccctcttccactccctcctcccaagcaggagcaaaacaaaacaaacacaaaataaaaccagagagacttcttactctatttgtgcactgtaatccccactactctctacattgtatctttttagacctacatggcttctgtaacagagtagcagtgccaagagagcagcagtgtcagctttggcactgttgacatttggggctgcatgattccctggtggggcatccttgtgtgctgtatgttgttgagcagtgtccctgggcttcacccaccagatgtcaggaccaactctccacccagggaagacgtttccaggcattgccagt

SEQ ID NO: 15221 - DNA, 481 bp, Homo sapiens
  MAP TO AL117192.1; EXPRESSED IN FETAL LIVER, SIGNAL = 1.1
tctttccatggcttctcctggtctaaggcgagccctgaaggcacagcccttccccagggtgccaggagtcccaggctgtggggacagggaaggggattttatcaaacacttaccctttcagagatcctgatcttcctatccacccccacacctgcccttttgatgttctcttagtgatgggagtgggtcctgcccatcagggtaacctgaggcagaaagagaaacagtaaatacattgaaaactgctgatttacactacagatgctacaggatatcaaccccagattcctaaccctgaccttccagtgcctgagattcagggctgacccggatgcagactatgatgtgcagctctacagccccaccctgatccagccaggcacagaggaggttctcaacaaatatttgctgagcccctgaagttgcttcagaagggctgccttggactgctgagtccttgacttccatttctctgggtggt

SEQ ID NO: 15222 - DNA, 475 bp, Homo sapiens
  MAP TO AL049561.16; EXPRESSED IN LUNG, SIGNAL = 5.1; EXPRESSED IN BONE MARROW, SIGNAL =   1; EXPRESSED IN FETAL LIVER, SIGNAL = 0.88; EXPRESSED IN HELA, SIGNAL = 0.93
cttcatttgtcttgcattttccaatttatttatagggcagttagtagccatttcttcacatagttattattaatatcctatatcatcagtgttccagggaatgcatttcagggaatgctgatatagagggttgatttgagataaataaaaaaactgatgaagtatattgagaacctaggtacccaatcctacaatgcatgtgtaattgaggcatttagtcctgtcttgtgacttcagccagcaagtagagcagagaaaatggagagttgtgtttgtccaagcatgggttttggcaaggcaaaaccagcagaatgcaaaggggacaaaataaatgaagatctagtggaagtgttgttgatgagggcttgcatgctgggtcaggaggagggcaaaatgactgagaggggtaggagaagttgggggccttgttgtcatagtgacatcaaaggatatttctggtgggaaagagggaatg

SEQ ID NO: 15223 - DNA, 439 bp, Homo sapiens
  MAP TO AC006325.3; EXPRESSED IN FETAL LIVER, SIGNAL = 1.7
tcttcagtccataaattattgtgcaataatagatgtgcaccatgatcattgaccacatgtaactgtttccagagtctgagggtgagtggtcactatgcatctgttatttagttcctgcacagacagcaaaccacgtagttatattgctttcttgtctcctagtgttaaacccatatggcattttataaataattgaaagaagggattggccacaaaaaggaaagcacaggaaagaaacaaaaagtgataatgctgaaagtgaaactgaagtagaaggtaatggaactgaagtagaagacatggccacctgtgggcatgttgacactgccaccataggagagaccctcgctgcagagccagaggaacttaatgaagaccaacctaccaagataaatgagactgaaaaaaatgaatttgtcgagaggaagcaacaccaacc

SEQ ID NO: 15224 - DNA, 460 bp, Homo sapiens
  MAP TO AC006369.3; EXPRESSED IN FETAL LIVER, SIGNAL = 0.9
acacggtaaactgggagtcgggtatacagaaactctctccactatctttgtaacctttttgtatatctaaaaatcttctctttaaaaagcttcttaggacaacagcagaaaggtagtagctgacatcacggggactgcatttgacaatcaggctttcttcacaagctccatttccccgcaactgtaaaatgctgatggtgatgagtcccttttccaagctcgcagatagagtaaaaagcgtgtgatgatgaagatcacgcacttggtgatgtgcacagagcagctggctaatgaaagcatggtgattaagctgagccctgcatctcgctgttctctaacgggggtccagagggagccaataaagctctctgtgaaatgtactcagaaatctgaaatgtgtccaaatcaccagttgccaactaacctgcccaaaatctgacaggaaattcaaaccagaacg

SEQ ID NO: 15225 - DNA, 468 bp, Homo sapiens
  MAP TO AC009401.1; EXPRESSED IN FETAL LIVER, SIGNAL = 1.1
ccaggctgcatttatttttgtcctctatttaaaaaaaaaaactaattagtctgaaaaatagcctgtaaagagcttggtatgaacactgtttctactaattgcttggataggatggcccgtatgtgtcagtggtctgcaaccacgactgcctcaaataagcaggggcagagtctgctaaaagttcgagagtatttctgccattctgaaaactgcctggatgaagggtaacttagaaaatgcaaaatgcaatggatttcacaggtaagtgatccttggtaagttcactatgcctacttaccgtggtcaaggatatatttcacaatctccccgttgccggttttagctgcgtagtgaaggagtgaacagtggtctggtccctgaattagcagactgcctccatttttatagctttctattagctgcaaagagagacatacaaaaagaagctcaggcagaattcggaacaag

SEQ ID NO: 15226 - DNA, 456 bp, Homo sapiens
  MAP TO AL109954.10; EXPRESSED IN FETAL LIVER, SIGNAL = 1.8
ttggagttagagttcatgccagtccttaggaaagcattttggaagcatggctaaggacattctgggatctgaacaactctacaatgtacctgctacaagtgaagatgcttcccccttgggacctcacggaggaccaccacttggttctcttgggagctaccccagaatcctcacatgtctgaactggcaagaacagggcctgctgatgtcttgggagagcaaggtacaaacctgcatctgacttcgaattagcctctggactcgatataagtaggtgtcgttgctggcattgttgtaggattgaatgaagaagttgagtgttgaattcatgttcttcttgctcatgagcttctgctggaagccctcccacctttggaagtgacccagcttggctgacaggaccagggcaatcagcagcagcagggggtttctccagcatccgatccccatgtctac

SEQ ID NO: 15227 - DNA, 489 bp, Homo sapiens
  MAP TO AC009433.1; EXPRESSED IN FETAL LIVER, SIGNAL = 2.1
  unsure 24
  unsure 143
  unsure 156
  unsure 223
  unsure 254
  unsure 295
  unsure 352
  unsure 369
  unsure 408
  unsure 412
  unsure 428
tccttccttatgcatttctatggntgtttatgatgacgatgaaatgttttaaagacacaaaaagtaatgaaacaaacacccatgtacccactacttagattaaaaaggagaagacaaattgtcagtacaaccgaagtctcctngtgttcacttccntgaatgtgcttctctttttcttcttagaggtaaccagcatcctggatgtgatgttcatcactgccantgagtatctttctgtttttaacacacatatnatatccactatcaatatatattatagttttgcatgtttttnaagcttcacatctacgggtgaatctgtggctgatggcttgtgtcctctgagccacangcccctcagcccacctngctttcagcacagctgtggtgacagctcagagcaccccngccnagtggccccacttcangtccagtgtcctttctgctttcctgccttgggctttctcccgagttccaggaggctgatca

SEQ ID NO: 15228 - DNA, 459 bp, Homo sapiens
  MAP TO AC009756.1; EXPRESSED IN FETAL LIVER, SIGNAL = 7.8
  unsure 38
  unsure 347
  unsure 408
aggatagagctaattattgattctgagaagcaggtttnctctctgttggaaaatgaagtaacaaggaaatggccaaatttgatgggagacaattctccatgggtcttgcatgtttctgcgtatcttgcaagaagaggtactaagtgtttttgttctgcactattttaccaagttgtttatacagtgaacagccttggaagacagagtcggtctccttctacagcaaagggtaggcattctaactatccattataaaaaattcaggtttcctaaggtcaagggaacacacagatacctgtgtattttgcataatcctgggtgtatgactgaatcagtaccatgagaantgtagatattctgaagattgccatgagcaacaaagcatcctttgtctcagactcagaagtnctcatgttttctgaacgtatctgtgaaactgacaagccaacttactagctt

SEQ ID NO: 15229 - DNA, 483 bp, Homo sapiens
  MAP TO AC009974.2; EXPRESSED IN FETAL LIVER, SIGNAL = 1.1; EXPRESSED IN HBL100, SIGNAL = 1.1
catcttgagtgctggtcaaatcagaacacttcttccagaaggggaaatgttttgcagatgctgtttcctcctgggatgaggaatggggaaagcctggataaggccagggtaccatggagaaaatggaagcgggagactaacagaaataataagagttactcaaacactctaaaatctgacttctggagctctgagattaaggctgaaattctagatcttttcagtagtgtgattaggcgttaacttttcaccttaccactgacaggtcgtggccctgaagttcatcccaaaattggggcgctcagagaaggagctgaggaatttgcaacgagagattgaaataatgcggggtctgcggcatcccaacattgtgcatatgcttgacagctttgaaactgataaagaggtgtgctttgacagttttgggccctgtctccccaagcacaagggttccaggaatttcccaacctcagaatgcatgaa

SEQ ID NO: 15230 - DNA, 428 bp, Homo sapiens
  MAP TO AF188025.1; EXPRESSED IN FETAL LIVER, SIGNAL =   2
aactgtatgggaaaacatcatcagtattcaacattaaaacatgaaatacctacttttagtgtaattgatctggttttaaacaagatatttgtctttagctcacctgagaatttctcatagataaaaaaacacatttatctctttgtggtatctgacatatattgggaaataaataattcctttaattaaattattaagtatgataactaaagcccaagaaccaatcaaatgacaattcaaagtagcagatagatgcaaaaaagcagtggattatcaacctcagaaactcctcaggctcaacaacatttgaaataggcaacaaggaagtgatggtaaaataataatcacaaaaatttatctcattgtatcagttataaaagataacatgctctgtagtctggagagatggcaacaggaatcacacctga

SEQ ID NO: 15231 - DNA, 485 bp, Homo sapiens
  MAP TO AC008279.1; EXPRESSED IN FETAL LIVER, SIGNAL = 0.69
tgcttgtctgaaacgttaactccaaaaatttagtgtaggattttatatattaagaatatcattttaataattttatgtccaaaataaagttattaacaactatttcttagtttagaggaatgtaatcttatggctgtaataaaactgtaacacttaccttttgtctataggttactatatgtatttgtatatatgtagtgtgtgtgtgtatatatatgtgtgtgtgtgtgtatatatatatatatatatatatatacatacatacacattttatttttgtttatcttatattttgaagggtcacatgatagcatcctgtgatgcctgtggggttacaaagctgtgggactttcggaagctgttaccaattgtgtccatcgatataggtccaagtcctggcaatgaggtgaattttgattcatcaggtaggatcatttttgtctaatgtttctgactaagccaataacattaatatttgttctgaa

SEQ ID NO: 15232 - DNA, 368 bp, Homo sapiens
  MAP TO AL049758.11; EXPRESSED IN LUNG, SIGNAL = 6.1; EXPRESSED IN FETAL LIVER, SIGNAL = 0.98
gatgcttgtgggagttttccttttcattactttctttcagatttgtattgtagtagtcacataacctgctcccaaactctgacgagtctaaaacatgatgaaaatgtcaggagcatttctaacagtttagttatttttcaccaaagcagctgctttccaactaatgcaatggaatatataacaattacaaattataattccttgataatgaaaaatttaagattaagttcacctataataaaatcagaaagagaagaaaatgagttcttgagtaaaaaggaatggtgtagatgttctgaccactgcttatttccgtaaggtgagccagcccaacataaacccacgaatcaaaaccatcagcagccata

SEQ ID NO: 15233 - DNA, 498 bp, Homo sapiens
  MAP TO AC008179.1; EXPRESSED IN FETAL LIVER, SIGNAL = 0.91
gccttctctgagtcctttttcctttgttctttcttcagactcagtttcccactttacagcttcttctcatatgactcaataaagaataaacaggctggaagttaaactggttgaacaatctctgaataagatactgacactgcctgttattctttctttcactaaagtttgatgacttttctttggccaccctcttcaatcttctgataaccaagatgagtgcctcctcctcttaatcataagcactgtattaaagactctccaacccaaagaaaaacacaaaaacaatcttgggaggggcacagctgaaaaagaacatgttcttaacttctcatttactctcttctctggctaacttttgccatgccgctgccatcaccaccatcagcaccatcagcaccatcacaaccaccctccccaagacttaaaacaactgctttaaatttcttttcatgcagcaagcaatagcttgtaaaaggatgcaaaccagctgaaaca

SEQ ID NO: 15234 - DNA, 451 bp, Homo sapiens
  MAP TO AL049738.4; EXPRESSED IN FETAL LIVER, SIGNAL =  27
ggctctgggtgtgaactgagcttcgcagagggggctggctgctcctgcttctcggttccctccacctctctctctgccccttgggggtcaggatgggtggagaaggccatgccaaagattgagagctctgcctttcccatctcaagtggtcctgggctcactgctcacatgccaacggacacccgcctcaggcgagaagctctgatgactctgatattgttttccagcttttccaactcacctttctgctgaaggacacaaggctgctcctccaaagccctctggcagaacagtcttctgggttaggtctcaggtttgctggatggctttggttggtataaccagattcatgaatggacaggcccagatgcctgccctgtgtgaccaggttatgatccacaagcagaaaaaacaaagatccttttagcctcctgaaatcccttgaatgtga

SEQ ID NO: 15235 - DNA, 482 bp, Homo sapiens
  MAP TO AC007427.2; EXPRESSED IN LUNG, SIGNAL = 3.7; EXPRESSED IN FETAL LIVER, SIGNAL = 0.9
ttcaaagtttgtgttcattcccatcttactcactgtctctcataacaaatcatatccccattaatccatacccggtgtgaatccctgggagatcagaagacaaaaaaggcaaaacaccgactcatcttgaaaaacttatgaaaagttaaatggcaatccaagaattaaagtcgattgtgcttaaatgtatttttgtcaatcttttcatctccctttcgtgagtatccattttctgttcctaaacagatgggacaatcctcaaaagccatagccccatgtctacaaatcctagaatcttagaggtcattggcttcaacctcccacgatacaaggatactctcaaagaaaaccactttcagcctctgcctgacattcacaatgggaagatgatcaacatggccaccactgttgccacctgtaaactcccatcctgtggcggtaagtatgtcttctacagttgcaagaaataaagcttctcccca

SEQ ID NO: 15236 - DNA, 406 bp, Homo sapiens
  MAP TO AL049777.2; EXPRESSED IN FETAL LIVER, SIGNAL =  22
cactctacttgctacaattcctgcattctacaatgccagactgagttttccaatttttattttcagcaaacctctattactacaggtctagctcagtcagaatcaactctcaccagcttaaggataatgtgagagcaacttaagctgacagaatcaattgcttcaggttgtctttgcaaaaatccctggtgttatgtatctgtcctgtctctcctatttgtctaccccagctgctatataatttcttattgcttatttacttgtcatagaatatttgccaagatctacatctacagctcaaatagtgactatttgcagacttcaaatgcatcatatggtttatttaagtaggagtgtatgtgtgtgtgtttgtgtgtgtatgcacagaggcacacacgtgaacatt

SEQ ID NO: 15237 - DNA, 475 bp, Homo sapiens
  MAP TO AC005064.2; EXPRESSED IN FETAL LIVER, SIGNAL = 1.6
ttgggagttctgggatacttgaatctgttcacattctatttcccccaatttagtgactactgagacttcataaaattaagccagttaatcgtggtttttgaaaattattttagcttatgtccttccctcacccaccatgtgacatacattatcttatggctggttgtaaatcttttactcagagaagatatttgacaagggttcttccccacacccttccccatcattttcctatagatttgtgaatatccttctccctcctgatgctaaagagattgccactcgcttccgctggtggcagccaagacatgacggcctggatcagaacgactgggccattgacaatgtcctcatctcaggctctgctgaccaaaggaccgttatgctggacaccttcagcagcgccccagtaccccagcatgagcgctcccctgcagatgccggccctgtcgggaggatcgcctttgacatgttt

SEQ ID NO: 15238 - DNA, 359 bp, Homo sapiens
  MAP TO AC009951.3; EXPRESSED IN FETAL LIVER, SIGNAL = 4.8
tgtgcccactcctctttaggcatccaatcagattaagtgagagcaaacccccggagcaaggctggtgagccctagtggtaagaattagctgaaggtgttctgaatctcaacctttcaagctccttcaggatatggtgctgctgagatcagtacaggaggagctgagatttcccgcacactaaagttgaaaagctctcgctctcaacctccccccacccctctgtctttcactctgctgctgtcagtttgctgcctgtactttggctgtctcttttccagtctctaccctgtgagtttctggcctgccaatttcaacttgaagcttgactgggctgatttgatgcaaatacctccaggga

SEQ ID NO: 15239 - DNA, 361 bp, Homo sapiens
  MAP TO AC012113.1; EXPRESSED IN FETAL LIVER, SIGNAL =   1
tgcaaagtcctacattcagggtcaaaaaatccaatatacaagtacaggatgtgggaggcttgactccgaagcaatgcatgttataaaaggcctaaggtttacagctgaccatcagctttatgccaggtaactatgtgcagcagctaacaaaatctcaggctgccttccttgggggatgtctagtgtctaaaactagagaggaaatggcttcacttcataatgctggaccacaggtggaaggctgtgctcagttttaccagaaacactgacctatttgagcccatccatgggacagtgttcaactatggcttccacagagaggtttcctacacctgtaaaaggctggcttagaagacctcca

SEQ ID NO: 15240 - DNA, 483 bp, Homo sapiens
  MAP TO AC009811.2; EXPRESSED IN LUNG, SIGNAL = 2.2; EXPRESSED IN FETAL LIVER, SIGNAL = 1.2
  unsure 462
caaaaacatataacctctacaaagtccaaatatttatttaaaataatttaatcaatagcagctattcagtaaaaaaaatgtaaaaatatagatataattcaaagtaaaagaaaaaatgacaactctattagtgatgctttcacaggattcctccagggctactttgccagttggaaatctgcagtcgctgctgcctaagcctgggccttgcttggggcctactggtcttcttctgcctgcttggcccagtaggctgcgcttggctgatgtcctggcttccttcccgcacctgccacagctctgagctcagcccaaggctggactgggtgtgccgcgagcagtctccagcttgggtgctggcatctagatgaggggaactcagtggcacctgaaaacttggagatgccagcaatcatagagccccgggagatgttagaggtcttgctcagggagttacaaggntctgaacccccaagagatgtc

SEQ ID NO: 15241 - DNA, 476 bp, Homo sapiens
  MAP TO AC011619.1; EXPRESSED IN LUNG, SIGNAL =  13; EXPRESSED IN FETAL LIVER, SIGNAL = 0.98
cacaatcatgtgagccaacccctcatagtaaatatcttcccatatatctatagctacatctgtaactatatgtagatctagataaatagatcctattgattctatttctgtggcgatccctgactaatacaaaagcaaaatattcttttttcctgatccactcccattttactacctagctctttaaccagtgccaccctcttccccacctactctcccctttttatgcttaacttgaataaaggaaacattacactttttctagatttctttgtgcataaacctaggactttttcttactctgcctctgcaagttttgttaaaggtgccctcatcctcagcatcatgcagtatttgtggctacatgcaattgcattcattagcctcccaaagtcctcttcctctaccactttcacatttggatggatctctgtcattaaggaatgttttctctgagcagtcttgaacttcagggc

SEQ ID NO: 15242 - DNA, 456 bp, Homo sapiens; identical to SEQ ID NO: 4725
  MAP TO AL035667.12; EXPRESSED IN FETAL LIVER, SIGNAL = 0.57

SEQ ID NO: 15243 - DNA, 460 bp, Homo sapiens
  MAP TO AC009893.1; EXPRESSED IN FETAL LIVER, SIGNAL = 0.94
ggaaggtcaataaataagtgtatttggttctttacctccgaaagtttataaaagaactgagaaaacaaagctagtagaagaaaatgattggtagacagttgaagtcaaagcagtttaatcctaattctgaactctttttctgttttctgccttctagtccagtagtcttccccttgcttccagattaccctattgatcaagttatttggtcctccagatggttacttgaaaataaaaatacagcagagaaatgaccactgctttcaacttagcagcaccggtttaagtgatcacatgattgtagttggcactgtttgaagaagttccaccaaaggaagcatgaaagcccaagtcttgacttggtttttgagcagtgccacagagttctttttcagtttcagaagtggaatcagactcttcattgtctctgggaagataccaaagaaggcagttaaacctg

SEQ ID NO: 15244 - DNA, 421 bp, Homo sapiens
  MAP TO AC009811.2; EXPRESSED IN FETAL LIVER, SIGNAL =   1
ggctattttgagctcattacttttcataacttttcaagtgagttttcaagttcgttaaaaattttgaagggaatttatttggaattgtgtaacaaatagagactgaacatcttacaggactgagatttcccatgtgtgaacaagacatagttttctatttggggtagaagaggtcatctgttgatgtatttaataaaaacgtaaaatatttatcatacagagcttatattttgttataattattcccagatttttgataggaatatttcaaagaactcggttctgcttttgctgctcccattgtcgttccccccatcttctattttattaatttctgttctcattactacaatttctaatgttatattgtctcttggttttctttatcattcttttctttagctcttgcatgggattcttc

SEQ ID NO: 15245 - DNA, 369 bp, Homo sapiens
  MAP TO AF064865.1; EXPRESSED IN FETAL LIVER, SIGNAL = 0.92
tctgaggttgtgaatgctttgtattttctttgatttgtttaattatattttgcaaaatgaacatgtgttttctttttctgtaatatggaaacagaagttagctctttataagggctgattttaaaatttgttcagtgctactttttgcatagaaagcatacatgtaaaagatatcattaaaaagagtcctcaaatgttgtaccttgtacttgtaagtttaaaataatttcatcagatccccagttgttattggcaatgcagctgtaatagccggagtcttctgctttcaccgtgcgaataatgaagcttccgttgctaaagatgctcctccgcccatcaatcgttactagactgggtgtcccgttactg

SEQ ID NO: 15246 - DNA, 446 bp, Homo sapiens
  MAP TO AP000020.2; EXPRESSED IN FETAL LIVER, SIGNAL = 1.4
gtcagaaggcaggagggagtgtcctgaaacacaattgaatttgacagcaaagcactgtctatcctgggaagttctgctggtgagcggagtcctgtgagggtcctggtaaccctatccctgcaagaaataagaaggtctgcactcaaataggttcagaaaacctttcctagtttaggcccctcttgaatcttcacagcaatcattaacattttaaaaaccccaagaagttctgcagcaaagacgttctttaactttgaatccaagttgtacatccattttggaccgcagaactgtccaccacctcctccctgaccacaactatgattccctcctctgactaacgtttcacacaaccccacgggggatgctttggccaactgtgatgggtgtggagtggcaaggcatcgtgcgatccaaagaacatgtgtgatgtccaggctccattt

SEQ ID NO: 15247 - DNA, 491 bp, Homo sapiens
  MAP TO AC007684.2; EXPRESSED IN FETAL LIVER, SIGNAL = 1.1
tggaagagatgctcctgactctacactgacctaagtccagaagaaaggggcaagagaatggcatatttagatcgctagtccaccactggaagactaaccgtaaggtttttacttgccagcattttcactaaaagcacatctagaattcccaagtcatacgactgcaatattggttacagaattaacataggtcctaagtaaaaattccattggtatgaaaatatcctatcttcaaagcatgaagaaaaactacaaaacatggtattaaaactaactttattttgtttaatgcattaggtgatgaaatcattattgcttttcaaaagggaaacaaacagtatacctgagatagcttccaaaataagcaacaatatttgggtgtttacagtctttcatcataataatttcttgctgcacaactgcaaagtcttctcctggaataaaaaacaagcatgttgaatatttagaggtaagtttcaaaatgctcattt

SEQ ID NO: 15248 - DNA, 381 bp, Homo sapiens
  MAP TO AL023877.1; EXPRESSED IN FETAL LIVER, SIGNAL = 0.95
taaagccaatttgccagtcctaggcgggggcaaatccccgagcttgatgtgtagggaagggagggggcctgaataatccatgaagagtagtagaatagcagatggaacactgagaagttatttccttgaggatagatttccacgatggaaaggaaatgagaggttctaagaggcgggctagtggctagtactatagcatagtctgcctttgctggtgagtggtgattaggcctggtggaactgccatcaataaaccaaatgtgatgagggtgagaaacagggaagaaggaaatgtggggaaatggggtgaacgtcaggtggatcagagagatgcagtcatgagggtcaggtgtggtatctggaataatgtgggagaccgga

SEQ ID NO: 15249 - DNA, 451 bp, Homo sapiens
  MAP TO AL022324.1; EXPRESSED IN FETAL LIVER, SIGNAL = 2.1
ccagggaacttttgctcttgttttagaaagaagctcatttattgaatagcagaatttgtggtgggggggcacaggcatgtgtggtgtgtgtgtgtagggtgtgtgctgtgtgcacgtgtttgtgtgtgcagacacatttgtgaatattttggagaagagatatatggagggtgggttttcaaagccctgaagttattttctgcagttgagtttctacatgtaagcttggccctgtgtcgcaggaggggatggtggctaaggccgtgaagtttccagcctttaggctggtttgcatttcatgcagtcttggtaagaagggtctcttgtaaagctgatatcatgaagtcaagacatccgtatctctttcatcttgaggatgcttactcacgatgtaggctgtattgttaaaaatgtgtcacttttcccttccagtatccggagtgtgatgcag

SEQ ID NO: 15250 - DNA, 492 bp, Homo sapiens
  MAP TO AC009232.1; EXPRESSED IN FETAL LIVER, SIGNAL =  14
tcctgaatcctcatttacatctacagtcaaggaagtaaaattttttttaaaaaaataaaccaaatttctatccctcacttgaaagcctttattttcagttaaggtcttaggcaagtttttctgcaaaattttagagtcaatcaaagagaagaacatataaaaataatgtggcttttgctattgtggcacctttgaaaaagaaaaaaagaatttaaaaaaaaaagaaaaaaagagaaggaaacatcattgatcaccaggacacctgtgagccggagcgggctccactgtccagcctggtctccattccagctgcagcttttgctgcccccctcgcaggagcctcccttctctgggaacagggctcgctggcttccacacagtgacttcgccttgaaggtgctgaggagagcgttaggcgctttctctactcttccacctttggctgagtcagcatatgaaatttctggataatagtccacacagagcattgct

SEQ ID NO: 15251 - DNA, 466 bp, Homo sapiens
  MAP TO AB020877.1; EXPRESSED IN FETAL LIVER, SIGNAL = 3.9
ggagacccctctaactatgaattgtcacctttccctttccccagaacatgaatatgatgttcttctaataaggaaatatctgaaaagcatcaagactgaaaaaagaaaggcattcctgtctggagagaagaaaagtgagtgaggctgggataatgaaagaggatgaaacgatctatcctgaaatcctaaaactcagtgatttctaaaagtttaacctactgagtgggttttaatcacagtggtcttccctggctttatcccacaggcttcctgaattgctggtgggaggatttcctggaccagaagcaacacagcagcaaaatggtgggaaagccatgactggtcaggggctcgatacacaaattaaacacctcccctctcctgctcttttccagactcctgcacccaagaggagtgaacagaactgggaacaaaagtagccagagaatgagcagtttcctgtgga

SEQ ID NO: 15252 - DNA, 470 bp, Homo sapiens
  MAP TO AC005014.1; EXPRESSED IN BONE MARROW, SIGNAL = 0.58; EXPRESSED IN LUNG, SIGNAL = 0.48; EXPRESSED IN FETAL LIVER, SIGNAL = 0.81
gacgctgagctcacattttgaactagcagaggatattgtacaccagaaagcatctgagccagcagctggccctcgtcgggaggacactgtagacaccatggtgtttaagccaagtgatgtcatgcttgttcacttccgaaatgctgacttcaactacgctactaaagacaagttcaccgattcagccatcgccatgaactcgaagggaatggggaacacaaagagaaggtgcttcagcgctgggagcggggtgacagcaacagcgacaactacgacctcgagtccaacatgtccaatggatgggaccccaatgaaatgttcaagttcaatgaagagaactacggtgtgaagaccacctatgacagcagtctttctccttatacggtgcccttagaaaaggacaactcgaaagagtttcagctgtgagagctgcgtgcagcccagttggctccagagattgaatcaagccc

SEQ ID NO: 15253 - DNA, 487 bp, Homo sapiens
  MAP TO AC001228.1; EXPRESSED IN LUNG, SIGNAL = 0.43; EXPRESSED IN FETAL LIVER, SIGNAL = 1.6
agctgtgattctgccgatgtttttcaaaaatgaaagtcccaactacttgtgtttcttacaatatataaattccaaaaaattctatcaaattatgcataaaaaattacaagaaaagggggactaagcagatgatccaaaagcagcacaactagaaccagcgtacagcagtaacgggtacctgcagagcaaacccagcagctctccgaggctgggagtggtccccggggggtgcgaaccagacacaacagcggggcagaaatgccagctggtggagaagggtgctccaggtgtccaagtgaggaagcagcccaggtgcaaatactcgattcagttttcttaaaacagaactgcaagtttttgcctgggctacagccaagcagagtaaagctcttccctttcctgcagaagatgacaatcctactcttactgtcctagctacctctgccccccgcgataaacttgccagcgcaccaacagaacagcctgg

SEQ ID NO: 15254 - DNA, 468 bp, Homo sapiens
  MAP TO AC002460.1; EXPRESSED IN LUNG, SIGNAL = 0.44; EXPRESSED IN FETAL LIVER, SIGNAL = 0.69
caaagtgaagctccccagaggaataaaggaatctaaagggaatgaaggataaagaggcagtgattaaatagattaatcctaatctgaagtgtaatagattcctgcaaagtgaaaaagtatacttcattgttcagatgatgggcaccagtgggtgaagggcgcttttgaagtcagacactgctatggagaatagtgagaggagccttagttcctagagactgaagagaggaaaaacgcagggccctgcaaatggtagggaagttctagttcttggaaatactgcctaggattatggcaatgtacttaccctttctaagtccttggaagagatataactataatcagagaagatagcttggcaatggcaatgcgtttcctttcctggaaattcaagaaaccagatctcaaactgaactgtaggaattgagaggcaaagggaaggataagggggtggagggagaacaagtt

SEQ ID NO: 15255 - DNA, 466 bp, Homo sapiens
  MAP TO AC006357.2; EXPRESSED IN FETAL LIVER, SIGNAL = 1.3
aagctaggcctcttgtgtcggttagccaagttgtgaatgcaaaggaaaagttgttgaaggaaattaaaagtgctaccccagtaaagatgcaaataataagacagaaacagcctgactgctgatgtggagagaggtttagtgctctaaatagtagattaaaccagccacaatattctctaaatagaagattaaaccagccacaatattccctaaaccacagcctaatccagggccaggccctaactccaagggccttctgggagggctgagaggtgaggaagctgcagaagagctggaagctggcagaggttggttcataaggttgaaggaaagaagccgtctccataacataaaagtgcaaggtgaagcagcaagtgccaatggagaagctgctgcaagttctccaaaagatccagctaaggtatttgatgacggtgacttcatacacaggttttcagtgtcgaca

SEQ ID NO: 15256 - DNA, 597 bp, Homo sapiens
  MAP TO AL139805.2; EXPRESSED IN FETAL LIVER, SIGNAL = 0.6
ttctgtgccttggagaattgtcatattccatattcctttctaagtttagatcagtttccaatgttttcacataagctttgcaccttcaacattatgaaatgtctccaagaggaagttttgtggcagtgtcactccctctgggatatcttcattctttttctcacaaccactctcctcatttatgtcaaaaaattcagcttcactagactcctctggcttcatatctggagtctattgcaccatggcagtgttagcattcccacggttagctgtttcttccataactccatttactttgacttcaatttcacttccagcattattacctcctttcttttctttactttactttcattcttcatcagttcattcactttttcaattatccactttttgaaaacgtcatataggtttacctctgagaggcaaagcagcaacaacacaactacatgcttttgctgtctgtgcatgaactgactaaaagatgcctatgggctaatcactggcagattttgaaagaaatgatgcaattggtcactgaccataacttgcacttgctatttgcacagtgatttgtggactgatgagctagcagca

SEQ ID NO: 15257 - DNA, 593 bp, Homo sapiens
  MAP TO AL135933.5; EXPRESSED IN PLACENTA, SIGNAL = 0.48; EXPRESSED IN FETAL LIVER, SIGNAL = 0.83; EXPRESSED IN BONE MARROW, SIGNAL = 0.61
ttcttgctgtttcctcccactgcctaagatgctgaaaggaaagaagaccaaggggaagaaggtggctctggtccctgctgctgtgaagaagcaggaggccaagaaagtggtgaatctcttgtttgagaaaaggcctaagaatgttggcattggacagacatccagcccaaaagagacctcacctgctttgtgaaatggccccgctatatcaggttgcagcagcagacagccatcctcgataagtgactgaatatgcctcctgtgattaaccagtttatccaggccctggaccagcaaacagctactcagctgcttaagctggcccacaagtacagaccagagacaaagcaaaagaataagcagaggctattggcccagggctgagaagaaagctgccagcaaaggggacatccccaataagagaccacctgtccttcaagcaggagttaagactgtcaccaacttggtggagaacaagaaagctcagctggtggtgattgcacatgacgtggatcccgttgagctggttgtcttcctgcctgtcctacattgtaaaatgggggtcccttactgcattatcaaggggaaggcaa

SEQ ID NO: 15258 - DNA, 591 bp, Homo sapiens
  MAP TO AC025119.2; EXPRESSED IN BONE MARROW, SIGNAL = 0.44; EXPRESSED IN PLACENTA, SIGNAL = 0.46; EXPRESSED IN FETAL LIVER, SIGNAL = 6.5
tcagggccagttgttctttccaaaaactaatatattttcaaatttcattactttataatattcctgtcttacagtctttttttattacattattatatataccatcatagggataaaactaagatgccagttcaaagctcagattatttcaaagatatttagcttttagattctgattcccagtaaccacctttttcagctgactgctaatttcaggtaaagatgtcctacctttcagatggtttagattctgacagctgagcatccattctccagggttctgggccaccatataagcatcaaacagggtagcaggaaagaggttgattgtgtcaatacggtagttcttgttagtcagtgcttgcccgtgaaagaaagctgcgtgcacatcaacttcattacccataccaaaaaggtaccattttactctgtcttcagcacacatggagagtcctgggagacttccaaaagtgtatccattcacagctgtaagtcaagagcagagtttgtgactaagagtcattaatgcttgagatagtgagagttacctctatataaatagaatcaatttggaatggcaaatatctggca

SEQ ID NO: 15259 - DNA, 512 bp, Homo sapiens
  MAP TO AC011472.3; EXPRESSED IN FETAL LIVER, SIGNAL = 0.75
ttggacgtgactttggtcagctggacccagctttaagggaagctgctgattcaggcaggggtggtcttcattccctgaggccccaccctgctcactccacatccctacccaggacccctacctggacaaattcttcaccctggtgcacgtcctggaggagggagccttcccattccggctcaaggacactgtgctgagcgagggcaacgtggagcaggagctgcgggccagtcttgcagcactgcgcctggccagccccgaaccccttgtggccttctcccaccacgtgctggacaagctcgtgcgtctggtcatcaggcccccgatcatcagtggccagattggtaagcgaatgtggcctcagacctcagtttccccatccacatggcttctcagtcctgaggtcctgagggatcttctataagcccatttacctctctggccatttttctcatctgaaaaatgacctccagtcccctgcacccagagaaggtcttctgtgaccctttggc

SEQ ID NO: 15260 - DNA, 591 bp, Homo sapiens
  MAP TO AC018993.3; EXPRESSED IN FETAL LIVER, SIGNAL = 0.46
tgtcgggtactgggcttaacagcttggtgattaaatgatctgtccaagaaacccccatggcttgagcttacctatgtaacaaatcttcacatgtacccccaaacctaaaataaaagtttaaaaatatatcaaatgttgggataatatggacagagtctcctagcaaactttttttcagaaaattatagtccactttttgatgacggtgatttcaaaggaaactatacttgagttcagctgccaaatctttgtttttttttagatgcataacagttcaagtaccattctctcttattttgtcacctgggaaagaggtcaaaagcacagtgggacactttacggggaacctgagagtctaagaaccattcttacatgccattagcatatcaattgatcatgaacatttaaatttggtagttttaggaacttagtttccttttcctaaaatgaagactttggattagtctctgaagcaactttctgctcgaaatgttgatgaatccgaatcaccttttcattcacttgaaatgtaatgacgtttttgatgtctacgttacagagattgaagtaacgcatctttccccttttaca

SEQ ID NO: 15261 - DNA, 599 bp, Homo sapiens
  MAP TO AL137141.7; EXPRESSED IN LUNG, SIGNAL = 1.7; EXPRESSED IN BONE MARROW, SIGNAL = 3.9; EXPRESSED IN PLACENTA, SIGNAL = 0.53; EXPRESSED IN FETAL LIVER, SIGNAL = 0.83
gtggtcggtgtctgggttactggattttctcttctggttatgagtcactgtttttttctcaatgttaaaatgagtgaagaccatgactctaaacctgtgaccttcgcagaaggaaaacattgttactgttgccatcggtattatttggcatctacaaagtcatagaacaaaaacttgcatacattttctccctcaggaaaatctgaacttggctctgaactctgcctcagccatcgggtgccatgtggtcaacataggggctgaggacctgaaggaggggaagccttatctggtcctgggacttctgtggcaagtcatcaagattgggttgtttgctgacattgaactcagcagaaatgaaggtaagagcaagtcccaaaggtcatttatgacacagctttctaataacttacgcgttggggactgtaggaggaagatgtcagaaattctcaagttttgaaaactacacagttatattgattccatggtattcatgtcacagattctatacacacagaccagacgttttttaatgatagagcaaaagctttttaagaccatagactaacaataatgtttgtttggagcatagggctcag

SEQ ID NO: 15262 - DNA, 544 bp, Homo sapiens
  MAP TO AP001415.1; EXPRESSED IN PLACENTA, SIGNAL = 0.58; EXPRESSED IN FETAL LIVER, SIGNAL = 0.47; EXPRESSED IN BONE MARROW, SIGNAL = 0.49
catgacatccccattcttccagtcaactgaacggcatcaataagtggtgatgtcactctaactgagccttagagtccttctcagcataaagctgggcagtcccttcctgttgattgtaataaaacccacttgctacctcttggcctagagaatgtaatgatatgatttgaatagctagatactgacctttccaaaacgttggcttacaacagcttcttggattgtagtattttaacagtaacttgtcggtagatattttgtcactgatgtgggcatagtttgttgcagcctactatgctactattactgcttgtattttttctcagcacacactttgtttccatagcagttctcattttccacgtgacaaaggccatggagctggccgtgtgtgtacaacacaggtcagagagctcccgttttgcttctgtgagtgtagatgggatggcccacttcatcctgaggcctttctccagtgttgtgctgtgagacccagtgggtcctcttgccttcaatgtctttgtccttgcactcaagcagagaa

SEQ ID NO: 15263 - DNA, 557 bp, Homo sapiens
  MAP TO AC010290.4; EXPRESSED IN BONE MARROW, SIGNAL = 0.51; EXPRESSED IN PLACENTA, SIGNAL = 0.5; EXPRESSED IN FETAL LIVER, SIGNAL = 0.64
cttttctgtctttggtgggccttgggaaaagaatatgcagataagacccctcacttccctgtgtaggagatacatttctgtgactggtgttactttgcctttctagccttatatgacttggctgtccttaaaaaaaaggttaaggaaaaagaggaaaagaagaagaagaaaataaaaacgatcaaatcagaggcagaggacctggccgagccgctaagcagtactgaaggggtcgcacctctctcacaggccccctctccgctggcaattcctgctatcaaggaagagtaagtgagcaacagagattctgtaattctcagggtgaatgggtaagccataggctgtgccctggcccctagggcttgtcgtagctgtaagtatgttggacttgtagacctgaagtcccagggatactgctgggaaaatatattgtttgctcctttcttgaactctttcatgactgctaggaggcttgggcgcctgaatcaatctagggatgtgttcttggtctttttggttcttatatttttcttccctcattaggccccttgaagacc

SEQ ID NO: 15264 - DNA, 555 bp, Homo sapiens
  MAP TO AC015529.3; EXPRESSED IN BONE MARROW, SIGNAL = 0.59; EXPRESSED IN PLACENTA, SIGNAL = 0.61; EXPRESSED IN FETAL LIVER, SIGNAL = 0.56
cccatcactcatgaacaagcaccaaactgacatttggggtttacctacctacatagagaacaccctcttttgtctttcctgctgcttctgccacaccctgtttggttttctcagcagcagccacaactccctccttggcctttgaaagtcctttcatgaatacatccatggctaatgaattcctttacaccacactggaaaacataaaatacactttgaatgagaactttcggggaaaaataaacaaaaaacactgaaaaatcatgagaaaccctccaaagtgtgagactcttttaagtgtacactcatttaaccattggacaaagcagacatttttagctctggcattaaaaatttagcatctcccatccatcttggctagtaaaagtctagccacctaaccacggattaggatgaatcctctgagttgttattactgcatttcagaagtggagttgcatgaaaagattaaccccttttttaaattcccggggtctaaagggtaacagtatgagttagaagcatggaagctggaggcttagggtcaggggtatc

SEQ ID NO: 15265 - DNA, 570 bp, Homo sapiens
  MAP TO AL132981.5; EXPRESSED IN FETAL LIVER, SIGNAL = 0.62; EXPRESSED IN BONE MARROW, SIGNAL = 0.44
tggacatgcctggtctactgctcacctcttcaaactctctgttttctcccttcaaggctgaagggactaccatttgaaaaatagttgtcagtgagcactagtgccaggcattgtgctgagtactttatgtaaatttctcatttaatatgcacaaagataccaatgagactattagtccaattttacagatttaaaaaaagaaaacaagctaagagaggttaaatagctcactcagggtcatagagctaagaaggaacagagtggggttttatttcttaaccccaggaaaataaagctggagatttaggaagttttgtagctgtaacggactcctgacaaaattagagggatagaaaagtctgataccaatgttttatttccaggagagtatgtttctgaaacaaacaatgagtgaaacagacaatttcccaaaagtccaacactgcaaggaatttggtgaactaaagcatgccctctgtgccgtgggtatgcaagtaaatgaagcctagaccccccttgggctttagtgatagtttcctagctgtgtcttcgcctgaatcttgggaaata

SEQ ID NO: 15266 - DNA, 540 bp, Homo sapiens
  MAP TO AC025746.2; EXPRESSED IN BONE MARROW, SIGNAL = 0.69; EXPRESSED IN FETAL LIVER, SIGNAL = 0.73
gatccatagtcggcaaaagctggtgattccaaggaacccccacaagagttttaatgtcttagggcaaggataagccagtataggctgtattcattccttgctgagggccctggtccctctggctaagattaggcctagatatttgacctgctgtaggcaaagctgggacttctacccagacaacttgtacccttgattagctagaaagtccaggagatctagagtagcctgctggcatgaggcttccaaactggcagccaaaagtaaatcatccacttattgaaggaccagagtgcctggacttgagaagtggcctagatcttgggccagtgcctgaccaaacagatgaaggctatccctaaaccccttggggcaagaccatccacgtaagttgggacatgtggtctgtgggatcctcaaagacaaagagaagctgggagtcagagtgcagggtgatacagaagaagacatctttgagttccagaactgtgaaccattctgcttcctctggtatttgagagagcagggtataggggttgg

SEQ ID NO: 15267 - DNA, 555 bp, Homo sapiens
  MAP TO AC021383.3; EXPRESSED IN FETAL LIVER, SIGNAL = 0.57; EXPRESSED IN PLACENTA, SIGNAL = 0.46
aagaataagggcagtccacggagttcccacagaccttggacttgttcttttgacaagtcctggacttggctattccctggacttgttctttttatgtttaagttctccctcacagttgtcagcttattgtagtatctgtatatatttttatttttgccatggtaagctattgtagaacaacttcagtctaccaaaccttacatttgataagtattttatttcagcacttcagactaaaataattgttatgccataattttctatagaaatatcagcctcaattttctaatgttcatgtacacaccagtgacttcaaactcagccagaaagaaccaatctcaggctactatatctctgagtgcctgtgttctgcaactacttctagcatcaaatattacaccagttatgattccattctatgtaagtgtccatgccagcgattttaagataaaataactagttagaaaatgttaaggttttattgttatctaggaaatgaggggagcagacgcagttgactcttaaaagtggctttcagaaacgtctcccaacgtt

SEQ ID NO: 15268 - DNA, 555 bp, Homo sapiens
  MAP TO AL118505.13; EXPRESSED IN PLACENTA, SIGNAL = 0.52; EXPRESSED IN BONE MARROW, SIGNAL = 0.89; EXPRESSED IN FETAL LIVER, SIGNAL = 0.55
agtttgccgaccattttgactagttttttgttacctgtagccaagagaacccccaacgtgcatttatgtaataaaatttcaaatgacagcatacatacttgacaatgagtttaaacaggttttcttcagcttgaatctcttggatggcataaaggtctttaagtgagaactccatcaacattccatgcttacacccatcctcagaactctttgttttctgtcctttgctattactaatagaatttgcttcaatatacaaaaggaacatacacttgtcattcttatttcgagaacctgtaaattaaaagtgttaaatacaatagttggtattttcattttccctacaatgactcaactagaatataaaacaaagtcatagggagctacaaatacatgtttttttaaaagggaatgtttcatcttatgtaagcaacaagaaattcctcaaattatttgaggttcaggagcatcttagaaaagatgaacgttgatgaatcattattgagagacaaataatgaaaagagttgtaccctaccttcttccgcatttgagac

SEQ ID NO: 15269 - DNA, 554 bp, Homo sapiens
  MAP TO AC010876.2; EXPRESSED IN PLACENTA, SIGNAL = 0.46; EXPRESSED IN FETAL LIVER, SIGNAL = 0.55; EXPRESSED IN BONE MARROW, SIGNAL = 0.5
caggtgttggggctacataagttatagctatttggtataatgtcctagttttattgaaaaatttctattttcaggttcatcacttagatattacatatacctaaaaaagattaaagataaaataaagagcttattttgacattactcttaattaaactaaacatgtgtgagtcaatgacacaaatgccatcatataaaagtttcagaataatacaatgaaaatgatcaactagtgttatgtgttctttgaataccttattgacaagaactataacttttccaggctcagatgcttttttcttcttgtctaagtgatccttggcaatgtaaacagccactctggtttttccactccctgtagggaggcagatgatgatattcttcccttccaaggctggctgggcaacttccatttggtaaggcctgagctggagttctggctccggggatgctcttgctgccacattctcttcatctgaagaaggttgaaaagaaaaataagagaagggacaacaaaataacagagcttaggaagcctgaaactgaacgtaggc

SEQ ID NO: 15270 - DNA, 570 bp, Homo sapiens
  MAP TO AC025129.2; EXPRESSED IN PLACENTA, SIGNAL = 0.47; EXPRESSED IN FETAL LIVER, SIGNAL = 1.3; EXPRESSED IN BONE MARROW, SIGNAL = 0.59
tgtcaatgctaatgccgatactaatgctgatagtaataccagatgttaatgctcatactagtaataatgctaacactaatgataatgctaataacaacacacactaatgctaattctaatactatgattatataggtagtgatgctaatgctaatagtaacactaatgctggtgctaatgctaataccgacagtaatgctaatagtaacactagtaataatgctaatgctaatatcactagtaatactcatgctaataggaacattgatactaatgctaataccaagagtaaagtaatgctaacgctagtaataatcttaatgcgaatgccaatggtaatgctgatgctaatactaacagtgctaacgctcatggtaccactaacacgaacgcctgtgctaacgctcccatggcagatgtgctgggcactgttttgtgtgctttacaagtacgaaaccctttaatctccataacaaccctatggggttatcagccccactttatagttgagcaaagtggtaaggctgggagcacacacccaatgagtggactccacatgttacccccatc

SEQ ID NO: 15271 - DNA, 574 bp, Homo sapiens
  MAP TO AC021037.4; EXPRESSED IN FETAL LIVER, SIGNAL = 0.65; EXPRESSED IN BONE MARROW, SIGNAL = 0.43
atgcctgctttcaatgttcccaatctaggaaagacgcctcttcccctggaatgggaaagccctacagcttgggatcctttacctcggagcccagatcccctgcttggaggtggcgggagcgggcggctggcagaggccctcaagcagcagccaggtttgtccccaccccgcaatcttggacacccccacctccccatgggcctggaaggccgagtgcccaggtctgcgggggacctcacctatatactcgcctctggcgaagggcagggctgggtgaaccggcctggtttcctgctctactggaggcggctcgtagctgtcatcagcgttctcctcggcgggcatcacgtacatctctgagtccgagtgctcatctggattttcatagtcgctgtcctgcaagtgcagatgcagacactgtgctcagcatccccgtctgtgctgcctggccgtcaggaccattcctgccttgggaggccagagcagtgacaggagacaaggcttggagaggttgacttcaaaaggctaggcagccgataagaggcaaagctggggtttgaagcaggcctttctg

SEQ ID NO: 15272 - DNA, 595 bp, Homo sapiens
  MAP TO AC018469.3; EXPRESSED IN FETAL LIVER, SIGNAL = 0.66; EXPRESSED IN PLACENTA, SIGNAL = 0.51
gcagttttagcaggaaaccgtgccaaaaaaaaaaaaaaaaaagacaggaaagtgaaaggtggaacttaatgtaacatccatgatgtgtaggatataaagtagaacatctgagaaaggcatgggctttggaattggacacatctaccttaaaatagagatctgctttgtggttctagacacaatcttttctattttccatttgtaaagtagaaataatagtactttccgcacagggtcattataagaatcaaatgaatttggaataagttaatttcctagaatacaatatgtgactactcttagctttgctaatattatttcataggcagagcttaccactccttcctttgttctatttccattaggattcttatgacacttcattgaaattatttgtgttcaagtctgtttgggttttgattctcttggacaaggaccatgtgtttattcagagcactaaatttgaggttgaaatttttatgttcgaccaatatgttttttcactagtcaagatggaaatgataatatttctcaaggtggctatgaagattcaataagaaaccatattatgtattctaccttggcacagtgcttg

SEQ ID NO: 15273 - DNA, 593 bp, Homo sapiens
  MAP TO AL121883.13; EXPRESSED IN PLACENTA, SIGNAL = 0.53; EXPRESSED IN FETAL LIVER, SIGNAL = 0.77
tgctcaccattgcatttttcatttcactcattgtatttttccagctccagaatctgtttttttttttttaaataatttcattctctttgttaaatttattgttttggttgtttagtgttttcctgaatttgttgaattgtttctttgtaatttcttgaaatactgagcttccttaaaacaattattttgagttctttgttaggcagttcataaactcctatttctttaggttcagttactagtgctttttcttggtggcaagattgttcttgatccctatgaccatgtgttggtgtctgtgcatttaaagaaacagggagtcattccagtctttggagacttgctttgtctggtagagctcttcactagtctgcctgttcagagattctaagcagacttgctgctggagtcattaggcaggctggcctgtgtgaacccatggggttggatctggagcctggatccactggcttggacctgttgattgtgtcctttgtggtgggcatgaaacctgtatccatgcagcctgaagcttgggttcatagaggctcacctcatgctctggcagttctggagcctgcttctgcagagat

SEQ ID NO: 15274 - DNA, 585 bp, Homo sapiens
  MAP TO AL118505.13; EXPRESSED IN FETAL LIVER, SIGNAL = 2.1; EXPRESSED IN BONE MARROW, SIGNAL = 0.45
ccgagacaagacagaatttgcccaagataaatatattaaaaagaagaaaaaaaagtaagtagtttttattttaaaaggcccacaatattaaacttcttatatgtttataaaatatacattttattacaaataaaatattttaagtcatttttttaaatcagcgttctgttttttcttcccccagatatgaagccatcattactgttgtgaagccatccacccgtattctttcaattatgtattatgcaagagaacctggaaaaattaagtacgctttgtttcctttcaaaagtataattgggggaaatatgtctttaagaaagtcatgattttaagtaaaatgaaaaagcttgctcacctgcataaagtatcctcctacctcataaattgtaagtccttttactgtcacctccaaagcaatcaataatcttatcaacacaattttaataaagcaaacaaaacttgaaaaatgatgattaaaataataggctttacttagctaaaaatgaacaaattattgtttttactttagccacatgagatacgatacactagcccagatgttgacgttgggaaatatccgtg

SEQ ID NO: 15275 - DNA, 577 bp, Homo sapiens
  MAP TO AL117381.9; EXPRESSED IN FETAL LIVER, SIGNAL = 0.47; EXPRESSED IN BONE MARROW, SIGNAL = 0.43
aagcagcttctccttcctcctctccacccaaagctatggcgactcccttgtctgatgcagatcagtgctggatgctgtggggaagagagtactgggctgacagtcagtggatgtggattttgtttcccagttccatcgctgatttgcaggtgagtcctttcccctgcctgagactctgggaaagtatgggcctttccccaactgtcaaatgaagtgggaatcatctcaaagggctccgtctagggctacagcataaggagaatgaaagtaactcatgcagacagatgagtgactaccagggttctctctctcaggggtatccaaaagatccagtaattagtgtgtaaattgagaagcaacattctgaagtaggagaacttgttgccacaaaggagtctgatccttctccacctcaaagcccgctgggcattgctctgaacctgcaggattccaggggaagagagcaataggcacatctatgaccaggcagactcctgggcaaggctagatctttccacgctctagctcctgtggcctcgacctcttcaccccagcaccgcctccaactagtccagac

SEQ ID NO: 15276 - DNA, 573 bp, Homo sapiens
  MAP TO AL121777.16; EXPRESSED IN FETAL LIVER, SIGNAL = 0.48
cttcctcgaaggatggattgcaaagtcatgtgtagagtgtgcagggctcgggtgaatgtctatatgtctctctatattttaggatcgctgtctacattagcaatttgtttaaaaatatatttcaaaattcctgtgcccacgtgaggtctagtgatttatccatgaaggtatagaataacggatagagaagggatacttatgtggtttgttgtccgacagatcgtgtgaaagtttttcgtcatgtccaggcaccacctcttcccggtcaggcccacgttacatacgaggacaatggaacaagtcaaaggcaaagcaacacgtccccctgtaaaaactgtcagtgtaaccgtccacttccgtatctgtccagtcacttaacaaacattgacggaccacctttaaacacaggctgctgtgctggtgtctgggacacagcggtgagtaagagccatctgatctcatgacactctcaggaagttccagtctatgaggatggacagcatgcaggtcaacacataaacatcattcagactgtgaaaaatacaacaaaggacacagattgggagatgggat

SEQ ID NO: 15277 - DNA, 511 bp, Homo sapiens
  MAP TO AC015496.3; EXPRESSED IN PLACENTA, SIGNAL = 0.45; EXPRESSED IN FETAL LIVER, SIGNAL = 0.49; EXPRESSED IN BONE MARROW, SIGNAL = 0.49
tctcaacgatttccacctccacttctgctctgcccatggaatttttcaggattaatcttcaatagtcttatctctaatgagtctacttaataaattagcagaaattgtcataaaggaatcatttgctagtgaacatatattcggtcatatataatagagaatatcagttaatgcccctgaaagatgatttactaagcaaatgttctgttccatacacttgctttcagtcacaagtaacaacagtaacaataaaataatcaaacattgattttaaaaataaaagatttatttatctcccacaaataggaatactcggtgcaggctgatacagtggttcagcaatataaaggatttgggctccttttatcttcctgctctgatattttactgtgggactgtggttcctttggcaacaaagttctagtccacctccacacgtctttcttattccaggtaagaaaaatggggaaagggaggcaacattcagaatggtggcataagaacccctgaa

SEQ ID NO: 15278 - DNA, 577 bp, Homo sapiens
  MAP TO AC025129.2; EXPRESSED IN PLACENTA, SIGNAL = 0.51; EXPRESSED IN FETAL LIVER, SIGNAL = 3.3; EXPRESSED IN BONE MARROW, SIGNAL = 0.52
gaaagtccaggctggttcaggtaggataacagagaactgcagcagggcagtgaggacaagggacccttcactaccctttgaaatattatcaccttgacaaccacacatgtgagaccagcccagggaccaactgccgcttcctcaaatgcattccctacttacctgctactgaatgcacctgaccctgtagcactagagcattcctaaaacgaatgcttcagagaccatgacaaaatgcacattccctctacaggagtgacatatggaatgattatcaacttggatgtttgaggattggcagcattagctccaccactgcagagttctgaagggtaggacacagggcaagaaagtgctggctgggaggaaggaagtgaaagtgatggagaatatggcaaacaccttcaagtctatggacctattcctgatggctctcctgttccacagggagcactgtcatgcctgatgcagggggaccacgctggttggagacgctgaaatggaaggggagggggaaaagaagatcgtgcccacgtcaaaccctccaggtgaaaaaacaaagcaaatctgaaacgca

SEQ ID NO: 15279 - DNA, 557 bp, Homo sapiens
  MAP TO AC015529.3; EXPRESSED IN PLACENTA, SIGNAL = 0.66; EXPRESSED IN FETAL LIVER, SIGNAL = 0.77; EXPRESSED IN BONE MARROW, SIGNAL = 0.5
tgctagtttgcttggcaatgactattctaagtaaaactacctctataagtgagtagaaaagtgaatgattatttcagttaaaacaaaattgctgcattttatttcttcatttttccctattagataaattaacaataactttatctaactgaaatggtgaaattataaatatgatccaatttcatcttgaatttgaaataattttctgggagtgaggtaaatttcacttgcaatcttctagacctgatagacagagaaagaacaaaaagaaaagaagatttcttactttcctctagttgtttcgaaatttgatttttggtagtcagttctttggctggaactgctgtcaccccggctgaggtatgtttcccgtggggctcgatttcccacgcctccagtgcctccaacgcctccaatgcctccagtgcctccaactgtgtttagagaagttgcttgttcatttgactttctggcaaagctctgaagaaatttcagtgtagaattggaaaggaccactgattctgctccaggattgaacttgatgctagcgttggttg

SEQ ID NO: 15280 - DNA, 558 bp, Homo sapiens
  MAP TO AC009943.4; EXPRESSED IN FETAL LIVER, SIGNAL = 0.48
tttaaggtggtggctgtgagaattgaacctgtcagtgattttatttctcttaggacaaaaacactttaaaacagacctagaaggtatgctaattgttctaaataattatgtacacgttcctctgaatattttataggtgaaatatctacctggagcaaaggagcatataaatctttcaacggccgcatctttttctttgaatcttcatgcccatacactttctgccgtcactgcattgaatctggaggggatttcaatattgagatcaaacgaaacaatgatagtgagattgaaaaaataacagttctaattgacaataacgacgtctctatttttggtgacaccattttagttaatggagaaaggtaaataacgtagtgttttgggtaaatgatataaaattatttgaagtaacctgagcaaaaaaggaaaaaaaaaagaaaaagataaaaagggagatgatactttcttcctattttgatgctcttatcgatatttataattgatcattggccaagagtttgataaatgtgtaagactttgacctatttcggattg

SEQ ID NO: 15281 - DNA, 569 bp, Homo sapiens
  MAP TO AC024196.2; EXPRESSED IN LUNG, SIGNAL = 0.98; EXPRESSED IN PLACENTA, SIGNAL = 1.2; EXPRESSED IN FETAL LIVER, SIGNAL = 0.98; EXPRESSED IN BONE MARROW, SIGNAL = 0.46
gtgggaggcaccttagtgagttgatcatagaacatgaaatccaagtttctctatcttcaaaccctgctcccctccaggtgcggttcctggagcagcagaacaaggttctggacaccaagtggaccctgctgcaggagcagggcaccaagactgtgaggcagaacctggagccgttgttcgagcagtacatcaacaacctcaggaggcagctggacagcatcgtgggggaacggggccgcctggactcagagctgagaaacatgcaggacctggtggaagacttcaagaacaagtgagttggggtggagggtggacacaggggagggtggtgtcttcttggtaccagatgggctttgttactagtctactaccatgccttcctttggggctgggaggatataccttccatggacacctccagtactaaaacaaacaaacaaatacacaagccaggctcatgtttagaaagttccagccccaggctcaggccctctgcaaggaacttagtcaacagccagagcaacatgctctgtgcccttggcactacctggtgaaatctgccctgatgt

SEQ ID NO: 15282 - DNA, 586 bp, Homo sapiens
  MAP TO AC021239.3; EXPRESSED IN PLACENTA, SIGNAL = 5.7; EXPRESSED IN FETAL LIVER, SIGNAL = 0.48
atcctgacatggctttttggggacccttctgaaagggttaatccacctcccagaagccctgacttcctcccagtgagtcactcaggcacagaggagcccaggtacgtgggtgtaataacacacgcagagcagcaggcacgcacacacgtgcgcatccctaccgggagtgaaatgaaaatagaaacggaaagcaagaccccttcccttggtgcctatctctccctgtcacctgtcatcaatcttagagaccacatttctgtgggcaaatgagattctctcaatctatcgcatgtggctttttggaacactggtcgaatgtctagcagtgcactttctgtgaatgctttgtgtcctgtatgggttttaccatcaggcactgaagtctgtggttggagaaagaataatacaaagaaaagcagaaaagtaagataactggctatttatatctgctctgtcggaagtggtgacaggtataattactgagtagaaattacagggctgattccagtggtgttcctcctgctgttttcgggaagataaaagattgaaagtgttcctgacatctcctcaaagagagggtgcttcg

SEQ ID NO: 15283 - DNA, 598 bp, Homo sapiens
  MAP TO AC022994.2; EXPRESSED IN PLACENTA, SIGNAL = 0.78; EXPRESSED IN FETAL LIVER, SIGNAL = 0.66
tcatggtccctcataaaggctcagaataaacttctttaaatattttaccaagtttgacttttttcatccacattgcaaacatgttttctattttattatgttctaagactttgtgctttgttaaaatcctataaaggatgttgatatttttgttttatcaggtgatcgacttgcttgtgttcaggccacaaattccaaccagcattttgtggttgccgatacaaatagtgccattggaatttgtcttccatgtgtgccagtcttgagcctgaactgtggtataacccatggttctgttctttatgttatattttaaagggttagactcacagatgcacagcttagaggtgagcatataaatcaagaaatcaaaattttcttaagccgtaatgatagagttaggagtggtctgttggaataaattagtactaacgagaaaatattcagtacttggtaattaactggatgcaggaggagtgggtgtaaataggaataattgacaactctcaggtttataacttaaatgagttgacagaagtgccagtacttgcagaataaaaccaagaaagaagaaagtgatattgagtttgactggcgg

SEQ ID NO: 15284 - DNA, 589 bp, Homo sapiens
  MAP TO AC009311.2; EXPRESSED IN BONE MARROW, SIGNAL = 0.79; EXPRESSED IN PLACENTA, SIGNAL = 0.55; EXPRESSED IN FETAL LIVER, SIGNAL = 0.75
tttctgttcccagagcatccctcctttcctctgtgttccataatgccaccagagttctctttctaaaactcagatctgacttggatattctcttgcttggaaaatcttcctaagatttcttgtctcttctaagataaaataaaaaatattaagcagagattatgaatgtaaagttttgtaattcaaagctcttagaaatctttctatttatcattttttccttcttagatattttcaggaacatctaagaggacagtgcttctgacaggaatggaaggcattcaaatggatgaagaaattgtggaggatttaattaacattcactttcaacgggcaaagaatggaggtggagaagtagatgtggtcaagtgttctctaggtcaacctcacatagcatactttgaagaatagacttaacagaatcatgaaaactatagctttttaacccggattactgtaaatgtttgacaaaaatgaatatgcttttccttaaaaaatgaaaactttaatttttaccatccatttatgtttagatacaaaacttatttccatgtttctgaatcttctttgtttcaaatggtgctgcatg

SEQ ID NO: 15285 - DNA, 541 bp, Homo sapiens
  MAP TO AC010397.3; EXPRESSED IN PLACENTA, SIGNAL = 0.48; EXPRESSED IN FETAL LIVER, SIGNAL = 1.8
aactccctttaagtgattgccaaaaatacttaatgagaggtgatacccagaataaatctggagaaataataaattttaagtatctatcagaaagacattattcataatactctaaatacataagccatacccactgtttgacatcattggtcacagatgtccaataataattggattctaccagagtgagggtcctggatataccatgatgagctccactgtcattttcatggcattctcttaagactttctttttttcctcttctgaaacaattaccaaacgattttgttttctgtcttttccaacataaaacagctttttttctggaataaatgataccaaaagatagaattgcaatttttagagatctacgtagttttaagagaatcatagccttctctttaaaccatgaaggtttttgttttgttttgtaaaatcttactgcatttaaaacagaatatttatttttaatgatgctacaacacaaaggttcttagctgttacacttactagatacttaggaagggcagtagctgctat

SEQ ID NO: 15286 - DNA, 597 bp, Homo sapiens
  MAP TO AL135998.2; EXPRESSED IN PLACENTA, SIGNAL = 0.46; EXPRESSED IN FETAL LIVER, SIGNAL = 0.65; EXPRESSED IN BONE MARROW, SIGNAL = 0.43
atacctgggttctccggttcgtgagcactgtctccctggagaccaccaaaagtgcctgctagggtgctcttgcccacgccgctctcccccactagcatgaccttgaagatgccatccttttgagcaggggctgcctcccctgagcccaaggagtcagacgagccagaggatgaggcctgaggtggccagtcaagttcatctacagcctgggcccgccggagctggtgcttgtaggggacaggcatactgcctcttcgtctgggggccccaggggcagagggtaacccgctccggtccaactctgccaacagtttctctgacttctttagtagcgtggcatctgcttctaaaataaaatgggagggcaaagaaaaggaagctatgagtgggatatgctcaaccatatgcagaaggctcaatccaggctgttccagtatcagaggcccagctacacccacttgatgaccattacccagaaggaactgagaatgtctggcctgacctcttacactaaagtctccagaagcctgaactggagttgacatgatagcttctccaatgcggtcccaaccccaacctattcaaaacgtgccccat

SEQ ID NO: 15287 - DNA, 517 bp, Homo sapiens
  MAP TO AC018780.3; EXPRESSED IN FETAL LIVER, SIGNAL = 0.79; EXPRESSED IN BONE MARROW, SIGNAL = 0.73
tggaaagcgtcagacagatgcaaaggaagtgaccaaacaggtgtcacaaacatacaggcgataaaaatatctaagagattggaagtcagtcagggaaagagagaccaatacttaatcttcacatacactaagtaatctggaaagctgatttttcgaggaccaataggagaaatttattaatacaaagtcctacggccttcttctatagggaacacaggtcatacagttaacctacctcagttcctggctttcggtggtgaggagagtaagaagcgcccaggcgaggacctggctgtcgtccccagagtgaaaatgactgtgatgccggatgttctgcagcagcagctggtccaggaactccagggccttctcctgcacagtgctctcgcagtccatcaccaccgggaccaccccccgcaaccaggctttctggatctgcacgcatctaggctgagccttaggagtgaaagattatgacatgagaaggtctaaatacaagtcagggaagttgtgatca

SEQ ID NO: 15288 - DNA, 534 bp, Homo sapiens
  MAP TO AC022658.3; EXPRESSED IN FETAL LIVER, SIGNAL = 0.58
ttgcacaaagttttgttgggtagcaacagacaaccaacacagaatcaggcctcatatgcactagctacatattaaaatcacttaggaagctttttaaaaatattgattcccaaattctaaccttagggacttgattcaattggtctgaagtgaggcttaggtattgatagttttaagctcccaagataatgccttataatagactctatatagattttgatgtgcagcagagtttaaggccattgcaacaggtgttgaagaaccatggaacaggtttgagcaggtagctgatgtaatcaagcttgtgtataataccatcattgtcaactacacagaagacagagctgagttgaagactggatctaggaaaatcaactaggaagctgctgcagaaatctaggtgggaaacgacaggggcttgaactaggacagtggtagcagggctggagaggacaagatgaatgagaaagatttagatgacaaaacaggtagttcttggatagcgaatatgagagatgaggcaaaggaatgagc

SEQ ID NO: 15289 - DNA, 584 bp, Homo sapiens
  MAP TO AC018780.3; EXPRESSED IN FETAL LIVER, SIGNAL = 0.49
ggctttgctgatcattttccaggtaaggggataactgcgaaattcaaatgttgactttaaaaggaagatgattttattagtgtaaaggaacatcccatagtatataactcctggggagtttatttctccttaggtatttttattcgactattcaagatgggtctgtctgcctttagttttttgttgtttgtgattgtgggcatgatgttttaactttgatgaaatagaagccattagcaagatgtatctggagaaaatttaggaatggaattaggatttagaatacagttgagacatcttcctgtcttctgtgccaggtaagctgtgcttacagcacgaggatctggcaaagaagagcatcccagccctggtgcgagagctcgaggtgtgtgaggacgtggctgtccgcaacaacgtcatcattgtaatgtgcgatctctgcattcgctacaccatcatggtggacaagtatattcccaacatctccatgtgtctgaaggattccgacccattcatccggaagcagacactcatcttgcttaccaatctcttgcaggtgcgtaggggggttcaatctgtccttt

SEQ ID NO: 15290 - DNA, 563 bp, Homo sapiens
  MAP TO AC022268.3; EXPRESSED IN FETAL LIVER, SIGNAL =   2
cttgactgagggcaaaatgacttaaagtcttcacttctgaaaggactaccattccttttatagtaacaaagagatcatcctaagcagaatagccaaatagttaatgatctttgaagcatgagatgtatatagtccatttttgcactaaaaacagtataccacatatatgatttaataaaaagtcttatggagagaatacggaaattcctaggtttgacctatgcatcgatgaggtcacttaccagatatctcctccaggcactgcttagcagtcttactatatgataagtccatctttgtaggactggtacaggagtcagccgatggtaaagcggtaccttcattttctgaatgtgccctgaaattaaccatgaaaatagaaagaaatagcagttatagtcactagtcactcatcaaagtggaagttctacaagaaatattaattacaaattttccatcaaggtaagtatttctttatgactggaatgttccagagctgtctatgtataggagaactgtgttatttttcatacacaacctaagtgggagtgagatgtggaatt

SEQ ID NO: 15291 - DNA, 557 bp, Homo sapiens
  MAP TO AL049838.3; EXPRESSED IN FETAL LIVER, SIGNAL = 0.79
taacgggaaaaacccaagaccccttatcaaagacaactgcatcttttatcttctcatctgccaggcctataaatgatctttactaacttacttcttttattctaaaaatataaaggcatcaagctacatctggttgctatggactcaatcacagatgaagcaaaaagattaaatggttgtgcgactttaatgaacggcatttgctttttgaaaagctgatttggatgtaattaatagcaggctgcctaaaaggagaactggatttgtgtggtgatgataagaggcattcccgtaacactgaccagtgcggctttctccagcccttcaaattgctgagcgttcaccttggcagtcagcactttatgcttgtctgcttctggagagaacttggtactttttctaatagaagagcaattttctttgaagggaacaacaaccaagaaaaatagcatgagaaaaatgttgaaaacaggaaggaaaaaaacaaagaatgtgagtataagcaaggggcaaaacaagagcgagacatatgacctagaaagacaagggagagccaa

SEQ ID NO: 15292 - DNA, 600 bp, Homo sapiens
  MAP TO AL157911.2; EXPRESSED IN FETAL LIVER, SIGNAL = 0.46; EXPRESSED IN BONE MARROW, SIGNAL = 0.48
cagcagcactttcaggtggattaatgctttttactgcatttgtcatccagttcacaagtttatacgccaaaaacaaatcaacaacagtagaaagaatactaaccacggatatcttagcagaggaggatgagcatgaatttaccagttgtactggtgctgagactgtcaaatttctcattcctggcaagaaatatgtagccaatacagtttttcattctattcttgctggattagcgtgtggtcttggaacatggtatctgctcccaaatagaataaccttgctgtatggcagtacaggaggcactgctctactattcttctttggatggatgacactatgtatagcagaatattctttaattgtaaacacagctacagagactgcgactttccaaacacaggatacttatgaaattattcctcttatgagacctctttatatttttttctttgtttctgtggatctggcacacaggtaaaaacctaccaaatactttgtaactaactttgtttttaagtatacagagtaagagagctttccttttagtgttacaaaaaaatgaatccatggattaaaaatcatcaaaccattgggtgaca

SEQ ID NO: 15293 - DNA, 524 bp, Homo sapiens
  MAP TO AC006038.2; EXPRESSED IN BONE MARROW, SIGNAL = 0.66; EXPRESSED IN FETAL LIVER, SIGNAL = 0.51
aagccaccagctttttctctcagaatccttggatagctaactttttcccaagtcacagaatttaggtatcattacaaccattccctagctctgtacttggggacagttaaaaccttttggtgggagtagcattcttgctttctggagtttgtctgtgtatttggagaggttgtgaagagggctggggagaaggtgatgctcgaatttgtggactttgatcattagaatgagattcctcttttttttctctctgtccttgtggtttttctttctttttttctgtaccactgtaaaataaagtataacatggaacaatacacatttaaacaaatgaaaaaaaatcaaacgatagaaaagtgattattatataattcaaaaccctaagtcatacagctaatacaatttgcactgttttcattcaataaggacaatatttctttgaaaattccagaagctattaacatcttcagtaaagaatttataaaaattctaaggcgatacaccccatgaagattgccccttta

SEQ ID NO: 15294 - DNA, 524 bp, Homo sapiens
  MAP TO AC024196.2; EXPRESSED IN FETAL LIVER, SIGNAL = 1.8; EXPRESSED IN BONE MARROW, SIGNAL = 0.42
ttgcagttagctgccacatctcccccagagactgctctcctggcctttcaccggcattcctgtgatcgggcttctgattccccaccaccactgtcctggtcaccttcctctgagtaggctcctatttattacagttcttggagctcagagtccccacagtgatctgactccagaagagcctaaacaagctctagacgtgactctcttcctgattcccaagcggcctccagcagctgccacaccttctgactcacgtctcctcacctgccagctggacactcaaagtcatgtttacgcccactgctctccatccatgtcttcccttcctagtccgtgtgctcctggctcttggctgctcttggctcttggctgcaagtgtggggcactgcatctgtctgctccctctctgcttcccttcagacagcctctctgcccatttctccctttcctacccatctcctgacaggcctgctgccaggacaggtgagatggggagaaacttctcagacagaatggaggggtgt

SEQ ID NO: 15295 - DNA, 585 bp, Homo sapiens
  MAP TO AC016546.2; EXPRESSED IN BONE MARROW, SIGNAL = 0.47; EXPRESSED IN FETAL LIVER, SIGNAL = 0.62
ttgctgctgacatcttcaggaatagaggtcagggataatgctaacatcctatgatgcacaggacagctcccccaaaacaaagcgttacccagaccaaatatgtcaatagtaccaagagaatgagaaaccttcttctaaaacaacaaagatattttatagtattttaaaaccctgtgtttccctaatctcatgaaagtaatcattaggaacaacctaaaacaacgtgatacctaatttttaagtctgagtgtaatttttccaatttctatgcatatatcactagtgataatcattaggcaaatatatatgaaaaattctgaacaagtaaatgaatgacaatgaatcatgcaatacggttaacgctaactatactcactgatatagttaaatcctttaatcctaggatctttaaacatgtaaaacatataaaagtcattcttcttgctgcagatttgattaaccattttataaaccttgaagtaagcctttggtgccttacatctgaatctcctgataattacaaaaattacaacttgagaagtatttgactacttggattttaatcccaacagaaaaatggaggga

SEQ ID NO: 15296 - DNA, 537 bp, Homo sapiens
  MAP TO AC010971.3; EXPRESSED IN FETAL LIVER, SIGNAL = 0.51
caaagtttgataatgccccgctgtcataaatagcaagatgtcaggatgctaaaccagtagcaatcagaattggtgctctacctgtttgacagtccactaccgctcactcattctcttctcttgctgctgtacggagacttgaattttcaggccttttggtaagtcatcagcaatcacttttctacagatgaacaaaagtgctgatttgaaagatattctagatattcagtctagaaagacttggataagagacttttctctcttttttagtggagacaattacattttgattaactgtatttagaacaattagatctcatgtatcaacatattcaaatagtaagatctttaaaataagatcatgcaagtagataggatctttccagcttgcagaaatcatgaatatcagccagactggatacacatttaataaaatatattatttgaggtttaaatcccatgtctggtattttacttgcttcactgaaaaccaagctggttaagcttttaacgttaacacagccacttgcaaatcat

SEQ ID NO: 15297 - DNA, 570 bp, Homo sapiens
  MAP TO AL137124.6; EXPRESSED IN PLACENTA, SIGNAL = 1.1; EXPRESSED IN BONE MARROW, SIGNAL = 2.7; EXPRESSED IN FETAL LIVER, SIGNAL = 0.49
agacaccccaaagactggagtagatatttctacaaagaatatatgcaaaaggtcaataactacatgagaggatgctcaaaattattagtcattaggataatacaaatagaaacacatgagatggactagggaacaatacagtcaggatggctgaaggtgaccacaagaaaccaaagggcaagatgtctgcttatgccttctttgcgcagacatgcagagaagaacataagaagaaaaacccagaggtccctgtcaattttgtagaattttccaagaagtgctctgagaagcggaagaccatgtctgggaaagagaagaccaaatttgatgaaatggcaaaggtggataaagtacactatgatcaggaaatgaaggataatggaccagttgagggaggcaagaagaaggaccctaatgccctcaaaaggccactgtctggattcttcctgttctgttcagaattccaccccaagatcaaatccacaaatcctggcatctctattggagacatggcaaaaaagctgggtgagatgtggattaactatagtgacagggaaaagcagccttaca

SEQ ID NO: 15298 - DNA, 522 bp, Homo sapiens
  MAP TO AC022542.3; EXPRESSED IN PLACENTA, SIGNAL = 0.53; EXPRESSED IN BONE MARROW, SIGNAL = 0.43; EXPRESSED IN FETAL LIVER, SIGNAL = 0.52
aggcagaaccatgaccaaacacccttacaaaaccacagccctgagctttttacttctcctatactgtcaacccagcctaggactccagaaggacagactcggaggggccattttccatcagtgataagagactgtgtctcagacagctgtcactgaacaattaatctccaaaatgagagctccattaccaaacatgtgttctcacgagcaaggccctattctcatcattcagagatgctattagacacaaataatatatattttttccattcataattatctcatcttaatgcagtcttgatgattatgatgtatgctggaactattgactcctcactgttggaattgttaacatcttgtgaaaatatgcacaaaatcattctttccaagctgacttttgctgttaaaattagaaagactaatatgagtttgaacagcatgaataggaaaagtagatgatcaattcttgtgcttggaaatgcaattgcctccctggaaccagggtttcttgctttcgcatct

SEQ ID NO: 15299 - DNA, 562 bp, Homo sapiens
  MAP TO AC021186.2; EXPRESSED IN FETAL LIVER, SIGNAL = 0.5
ggacaggctccactaagcagacctccaggggtccactcttatgtctctcctactaagtcccaccactttcagaaggagctaatcctgtctcagttcaatatgtatacttttatggagcttattgtatcattttttgagttttaattgtatgattatgtttttcccagggaaaaaccaagggaacttactgaagcagaagtgatactggatgaatattccagttattaccataacaagctaaataagagagaggaaagaaaccacgtaggaactataagaaatgcattcaaagttttgttgtaaagtgtagaatattggtcatcttgtgttcataattagccaaatctatttttaaaaagcgcgtgtgtgtgagagggagagagaaagataatcatataggctagatttgaggtgcacatttggactctgtgcttttcctctgtagcaatacgtaaagtgtgtttgtagaatttctactgcaatttctttctttgtatatgtagcagctaacaagacctgtgtctttttttgctggtaagtatccaccgtttcaataaatgcc

SEQ ID NO: 15300 - DNA, 544 bp, Homo sapiens
  MAP TO AC009466.2; EXPRESSED IN FETAL LIVER, SIGNAL = 0.47
gcttccgaatgtcctgtttcttgcttccagtcctcttcctcaacatcccagagccagacattcttaaactcgagttagggaaattagagctgatgaggactctgctgagcctctccctcttgcaaatgacagggcatcaagtccacctcacacaggtcctgctgacatattctgaccatggggtaatcatgtccatgaatctgccaatttttcaggcctgtccagcagagaactctaccacacaaaaactaaactacttttcaaagataaggtcacaggtgatggttttgtttcagttgagagctatcagcctatcccttcattaagtagtaaataaacatctgggtggtttttacctggtgttccaggaaattgagctcatttgtgacatatactaatgcataaaaaccttcagaaacccaaaatttccaagaaattggctccaggaccattggctatccactttatccctgtcgcagaatcttaaagagagactgatacaatgaatgagaaactaacaggtgggcatccgctaggagttaag

SEQ ID NO: 15301 - DNA, 579 bp, Homo sapiens; identical to SEQ ID NO: 14764
  MAP TO AL161744.1; EXPRESSED IN PLACENTA, SIGNAL = 0.45; EXPRESSED IN FETAL LIVER, SIGNAL = 0.48

SEQ ID NO: 15302 - DNA, 569 bp, Homo sapiens
  MAP TO AC018780.3; EXPRESSED IN FETAL LIVER, SIGNAL = 0.8
gctctgcataaaaccttgggtcctttttaaactctttttaaaagggtctctttttctaggtctgaatgaggagggttctttggttcttactcctatctgatggcaattcttatgatcttgctttaccagatcccacaccgggtttttactcttgatgttgtcttagctctgttagaactgcctgaaagagaggtggataacaccctctccttggagcatcagaagttcttaaagcataagttcctggtgcaggaaattatgtttgatcgttgcttagacaaggcgcctactgtccgcagcaaggcactgtccagctttgcacactgtctggagttgactgttaccagtgcgtcggagagtatcctggagctcctgattaacagtgagtatggcgactattgggacagtaaaccggtcttgtgctcattgagaaatagactgcaagggaatcgttcttttctgtggcaaaagtaataggtatggcatgatctatttttactctcaaaaccatttttagtatattttcttgccaaataactttttaaataggcaagcctgatacatttgca

SEQ ID NO: 15303 - DNA, 598 bp, Homo sapiens
  MAP TO AL161752.1; EXPRESSED IN FETAL LIVER, SIGNAL = 0.51; EXPRESSED IN BONE MARROW, SIGNAL = 0.44
gccaaaaccaagagggaatcaggacaagttgcaagattcaaattgtccatatgataacatataccagctcgaggggaggccgtggccttgaagtctaaaggaagttcccccatagttgttgcaagggagacagaatgaaacagtatgcaacaagattttcttacaacatttttatagcatttttcaatataggatacgtcattaaacaaaagcacaatttttaaaaagtgattcttttattgtctaggaaggcctagacaatatagtctggattgattggataaacacagaggaacaagagagcggcagaattgtaccatgcatgcagcaggccatgctctacacgggcctctcaggatgcagcagagaggtaccctgggtaatttctggcaaatctttcagtattgttattctatgttagtgatggtgggaagattcataggtcttaaatatttaccaagtacaggataaagttctcatacttttattaaaataaaggagtgtaagactctgtattgaagagatagcagtctatagttccaaccgtaggcaaagtaaaacattcctaaaactagactcatttttgtgttggctccaa

SEQ ID NO: 15304 - DNA, 520 bp, Homo sapiens
  MAP TO AL133163.2; EXPRESSED IN FETAL LIVER, SIGNAL = 2.8; EXPRESSED IN PLACENTA, SIGNAL = 1.5; EXPRESSED IN BONE MARROW, SIGNAL = 1.6; EXPRESSED IN LUNG, SIGNAL =  21
cctcattagttagagcgccgaaggagttcacagactcacctcgtcctctgtgaactccgtgaactctgactctgtgtcatagctctcctcatcctcactctctggcagcatctgaaggttttctagtgtcagctggcccagctgctgctgtatccgggtgcttgggcggccccaggtgagctggtagggagaatagccctggtaggtaactctgttgacatcagccccacacttcaacaggagtgacaccaggtcaggattttgcaggtccactgcgaggtgaagggcagtccggccattacagggctcctgaaaccaaaaggaatttgagatgcttatggctgcatttggaatttctgctcacaacataagcacgaggagcctgactcagtgcgtcgggggcaggaagcaccaacctgagcattgacatcagcacccaaggacaccaaaagctccacgatgcccaggtagccatggatagaggctaagtgtagacacgtgtggcctggaagaacaaaag

SEQ ID NO: 15305 - DNA, 556 bp, Homo sapiens
  MAP TO AC010311.5; EXPRESSED IN FETAL LIVER, SIGNAL =   2; EXPRESSED IN LUNG, SIGNAL = 2.6; EXPRESSED IN PLACENTA, SIGNAL = 1.9
aattgtccacacacacagccagcatctgatgtgagcacatgtggtccgtgggtgtcggctgcagggacaagagtgggggtttgggaggatgcgtggcagggcccccagactcacccaggacgtgtccttctgccccgcagcactgacctcatgcgcatgtgctggcaattcaaccccaagatgaggccaaccttcctggagattgtcaacctgctcaaggacgacctgcaccccagctttccagaggtgtcgttcttccacagcgaggagaacaaggctcccgagagtgaggagctggagatggagtttgaggacatggagaatgtgcccctggaccgttcctcgcactgtcagagggaggaggcggggggccgggatggagggtcctcgctgggtttcaagcggagctacgaggaacacatcccttacacacacatgaacggaggcaagaaaaacgggcggattctgaccttgcctcggtccaatccttcctaacagtgcctaccgtggcgggggcgggcaggggttcccattttcgctttcctctggtttgaaa

SEQ ID NO: 15306 - DNA, 510 bp, Homo sapiens
  MAP TO AC019248.3; EXPRESSED IN PLACENTA, SIGNAL = 1.4; EXPRESSED IN FETAL LIVER, SIGNAL = 1.6
tttgccaatgactttgttgcattcaaagttagtacctgcccattcatagcaaaaaggcagaagaaaaaaattcacttgcaactattcttcccgtctccttaaacacatcatgcatatatacatatctaggaaagttgctacagacagattaagtcccccgctgacttcaaaaacccatcaacgctgccccaagctcccaggtttaaattcaaataggggcaccataatagtcttggagcattaacagcaattagcttgacaatacattaatatttttatgaactgcagtatttaaaagttcaggaatttctgctcccagattcttgaggaatttcagaatcacagatcccactttcagcttccttgtcgcctcacttttactgccctgggtagacatgtcaaggccaaaaccactggcaagaaaaggcaagtcaaccacgtgccacactgtttcaataaccctgtagatcttaagtcagtggagtcaacagtgtccccaaatcaatgtcc

SEQ ID NO: 15307 - DNA, 526 bp, Homo sapiens
  MAP TO AC017111.2; EXPRESSED IN FETAL LIVER, SIGNAL = 2.3
tgatcccctgcaacaaaaaggggggaaaaggaaggaagaaacatgaatttacatcccctcacctagagtttaagcatatttccttcatcaaacctgatttaattgggtaacactgtactttcctaattgggagcttacacttagtggaatgaatgtctgtactgctggtatgcatgcctaggataaggaattcaggtgtacacctacagaggacaaaggacaaagcaaatacataactgcaacatgaactctcatttacaacattcaggttattggattatcatttggagtctaaattacaagctaattttgtcattttaacactgtgatatgagtggctgagaattatttgttcctgaaaatgcaagtataacactgtattctaaataagaacacaaactaactcaagaaatgattatgtgtgtgaataatataaacggatgccaagcattttagagcagaatgaatgctggattccatcttttctcaatgctccatttcactaagattcagaaagggtgggatg

SEQ ID NO: 15308 - DNA, 502 bp, Homo sapiens
  MAP TO AC002126.1; EXPRESSED IN HELA, SIGNAL = 1.9; EXPRESSED IN LUNG, SIGNAL = 2.5; EXPRESSED IN FETAL LIVER, SIGNAL = 1.7
cccaggctcttaaacattgcacattgtaggtgctttggtggtggggaatggtagacctcgaaagcagttggactctggttttcatttccctggctctggtaattaacctggacctcagtttacccaccctcacagtgcaaggctaggtatgcagtcggtgcctactttattataactgttgataattattgtcatctctccccttctgacacctccgccagctttccccatggagcttacccagcctgcagaagacctcatccagacccagcagacccctgcctcagaacttggggaccctgaagaccccggagaggaggctgcagatggctcagacactgtggtcctcagtctctttccctgcacccctgagcctgtgaatcctgaaccggatgccagtgtttcctctccacagggtaggatacctcctctgggattagccctctgggattccatgatgatggaatgtcaggcctcacatggaacctgtgtcttgctttcg

SEQ ID NO: 15309 - DNA, 518 bp, Homo sapiens
  MAP TO AC018739.2; EXPRESSED IN FETAL LIVER, SIGNAL = 1.6
ccttaatcagggctgctttggccccactctacacaaaagagcctaaaaaggaaagggaagaggaaccatccacctacctgaccgcctcctcctccctcagccccactgttactaggtaaaggtgccacagaggagacagagtttccctgagccccctcctccaataaattggaaaaaaagacaagggatacactacagttacgggaccctgtcttaggcaagtggcattagaaggggagctcttggcctgccctgtgatgcaagatcaacacggcaatcaggtatatgagcccatcactttcaacacctataaagagataagaaaaagcattagagaaaacagagctgctagcccatctacaaaaggattaattgaggccatagcagacaacttccttatgatcccatgggacaggtcagtgctagctcaaacaactttagaggccagtcaatacctcctctggatggcagaatatgatgagttgtgtgaatgacaaaccaaccagaatcaattggct

SEQ ID NO: 15310 - DNA, 556 bp, Homo sapiens
  MAP TO AC011469.3; EXPRESSED IN FETAL LIVER, SIGNAL =  33
acattgttctggtccaaggccccatgtgccgacctgccctgcatggtgctccaagccttgcattgtctccttcccagggtccctgcaggagctggtgtcccacatggtggtgcgctgggcccaagaggacttcgtgcagagccccgagctggtgcgggccatgttcagcctcctgcaccggcagtacgacgggctgggtgagctgctgcgtgccctgccgcgggcgtacaccatctcaccgtcctccgtggaagacaccatgagcctgctcgagtgcctcggccagatccgctcgctgctcatcgtgcagatgggcccccaggaggagaacctcatgatccagagcatcgggtgagacaccgcccttcccccttactttgcatatccccttgggtaatgaataccctcaggatacaataacattcccttccccaacttctggcccatcctctgggtgatctcagtctctcgatggctagctcacctcctgggtaatgtctccttcccttacctctccgccctcagtggtagcagctccgcttctgtgtgactctca

SEQ ID NO: 15311 - DNA, 600 bp, Homo sapiens
  MAP TO AL049837.4; EXPRESSED IN PLACENTA, SIGNAL = 1.8; EXPRESSED IN FETAL LIVER, SIGNAL = 1.7
tgttgcctgttatcattgcctcaggtctctttcattcctccttctactgattttaggactcttaattggttttatcacactgcagtgtaaaaactttcagtgttaaccccattgctgaataaatgtatttaaatgtatcaacatagcatatagattagtcccagcctacttttccagcccatgcacactattttctttttgaacattactatttaaaactatagttttaaaacaaaaagtatattgttattttataactctataccttaattttttttcatactctcagtaatagcctcatctttcttcactactggataaagataagcttcaaatgtcatcacctttaagtagtcatctgaatcttcatcaggctgatagttgtcttctcaccttacttccacagattattatatttgaactgtattatttgcttagacctccccacacacggtactctattttaaggtaggagccatagtttattcatataatttctccttctctactcatatccaattagtcagtatgtttggtgagttcagcttctaaaatatctgctttaatagtacaaaattcagcatctgacccttgttagcc

SEQ ID NO: 15312 - DNA, 512 bp, Homo sapiens
  MAP TO AC010487.4; EXPRESSED IN PLACENTA, SIGNAL = 3.6; EXPRESSED IN BONE MARROW, SIGNAL = 2.3; EXPRESSED IN FETAL LIVER, SIGNAL = 1.6; EXPRESSED IN HELA, SIGNAL = 1.7; EXPRESSED IN LUNG, SIGNAL = 1.9
gtacccctctcctctcctgctgtttatccccttcttccctctattacttctcttccacctcttctgctccatcgtcgcaaattctttaacctcttgttgctccttctccccaatctttcgatcatcctcaatctccatatatttctgcctcttctcccatctctgcgcctcctctgctctccctgttaaattatctcttccctgttaaatccccctttccccaatctctagcaccccagatccccaggtgtcctccctgctgtgcttctccctctgttcttgccaccagcaccactctgctctgtctgccctggctccaaacccctcctcctctccctcactctgatgagcctccctctttgctgccccctccctaccttgctcttcttcatctctctgtacatcaagcttttctctacttttctccagttccttttctcctcctgtttttcttatcctttttttttttttttttttttccacttttgctgtctcttggcaaatccttcacc

SEQ ID NO: 15313 - DNA, 544 bp, Homo sapiens
  MAP TO AC023404.2; EXPRESSED IN PLACENTA, SIGNAL = 1.3; EXPRESSED IN FETAL LIVER, SIGNAL = 1.9
agcattgctggcctagtcactgaaaaatgtaaactcttatttttgattgcaggtggaagttaagccatatgtcttggatgatcagctgtgtgatgaatgtcagggggcccgttgtggggggaaatttgctccatttttctgtgctaatgttacctgtctgcagtattactgtgaatattgctgggctgctatccattctcgtgctggcagggaattccacaagcccctggtgaaggaaggcggtgaccgccctcggcatatttcattccgctggaactaaaggataactgcagtgctcattttcaggcctcagaataagtgcactcttctgttcattctgaccccttcctcaacctcttcacgctggcatgtccttttgtagcagtctgtaacttaactatagtataatgaaaagaatgacctataatataggtgttttgtagattcttgtgtcactgcaaacaatatgaactcctttttcgtattgccatcgggttgcatggaagttttattctcttgttttgctggaaaccaagaggatcca

SEQ ID NO: 15314 - DNA, 575 bp, Homo sapiens
  MAP TO AL138717.2; EXPRESSED IN PLACENTA, SIGNAL = 1.8; EXPRESSED IN HELA, SIGNAL = 1.8; EXPRESSED IN BONE MARROW, SIGNAL = 1.5; EXPRESSED IN FETAL LIVER, SIGNAL = 1.6; EXPRESSED IN LUNG, SIGNAL =   3
agcaacagagctgggatttgaaccctggcattgtataccagagttcaagtttcactccctcactattctataaagctttcatgaatgtagttaggaattttgtaataagaaaaacattccatgccagtattaaaacatttcatgtaccctatacatatatacacctactatgtaaccacagaaattaaaaatataaaaatatgaaaaaagaaaaacattggcaaatgtcatattgtaatagaactgcatcgctttcctttctatgcagaatccagcagtaaacaaaagggttgcaagattagcatttatttaagaatttatagtaccttaaagcttatttgcctagccagttctttggcttcttggtcagcttggcttgaatcgcttccagattttaaaggcaacaggacatccttcatggcagagccacatccttcacaacagaaatcttgtgatctagtagaaaaagattttttaaatgaaaataaatagttaaatgtttaattccctctcactgagacactcaaatgctcgatcattaaacttaaaagaaaggaacactggaaaattccaca

SEQ ID NO: 15315 - DNA, 512 bp, Homo sapiens
  MAP TO AL121852.2; EXPRESSED IN BONE MARROW, SIGNAL = 1.6; EXPRESSED IN HELA, SIGNAL = 3.4; EXPRESSED IN FETAL LIVER, SIGNAL = 2.7
ctcccgagttcctgtctctgccagcaccgcctggatggcctcccaaaattgcgacccagccaccactagcatcgcagcctcccacaaaggagcagagccaagctggggtgccgctggggggtcccatgggcaaaacaacaggagctcatgactcataatgtgtggcagcaagggcatttctgccttccctgaatcagaccaccttttcacatgggtaggggccatccatggagcagctgccacaatatatgaagacctgaggtataagcataagctctcactagagttccccagtgactacccttacaatgcacccaggtgaaattcctcacaccctgctactatcccagtgtggacacccagggtaacatatgcctggacatcctgaaggacaagtggtctgccctgtatgacatcaggaccattctgctctccatccagaacactctccatctccagcctactaggagaacccaacattgatagccccttgaacacacatgctgccaaac

SEQ ID NO: 15316 - DNA, 566 bp, Homo sapiens
  MAP TO AC008655.3; EXPRESSED IN FETAL LIVER, SIGNAL = 1.9; EXPRESSED IN PLACENTA, SIGNAL = 1.7; EXPRESSED IN BONE MARROW, SIGNAL = 1.8; EXPRESSED IN LUNG, SIGNAL = 4.3
gactgtgactcctgctgctgtttccgaatcttcttcttccggatctgttcttcagaaaggacgcctgtagggggatgcaggcctcagcagaaccccagggctaggcggggggccaggccggcaccgccccctcccgctgcactcacactgctccctcatccctgcctccttgcacttgcgcagccggcactgctggcacttgcgccgcatgaaagcgtccatctggcaggttccgccaccccggcaggcatagcgcctggccccaccacggaccacactgcgccggaagaagcccttgcagccttcgcagctgagcacgttgtagtggaagccggaggccttgtccccacagacacggcaaagctcgtggcccagcatcttcggggctgggcccttctttcgcttgcgctctggttcctcttcgggatctgggatgactggggtgggtaggtagaggccatgagaaagccacaaggagaaacaggaaccagagagatgggcccacaggagatccccaggcaaagagccagaggatggagggagagaggagttgctgctcacattca

SEQ ID NO: 15317 - DNA, 579 bp, Homo sapiens
  MAP TO AC007263.4; EXPRESSED IN BONE MARROW, SIGNAL = 1.9; EXPRESSED IN FETAL LIVER, SIGNAL = 8.5
gcctagcaacactttgaggccccatctgaggggtaaactagtagtctgaaagactaaacagatgtcttgccctgaagttccagaagaaagataccatctgtaaatagcctcatcaactttcatagggcttttggcgggtagaggtgccttttaccattatccttctgtccacttgtggatttgtataaatccattaggttaaaattatccattccttttgctcttgaagctgtaggtcagtttcctgcccagtttaaaccttgtcgcatacttgtcacttttaaattctgtaagcaccatcctcagcattccagggctggtaaccccaaagatggcagcagccaagctcctagcaaggggcacccagtcagggataagatctgtagtcgttaagcacatcatataataatggtagataaatatttggagcattcttctctccttagtgtacttcttcatatttcagttgctttgtatataaatctcaccttttctaaggaaacattatatgatctctcactgcatgtcataataagtttcccggaccacctagatgatacttggcaattatggcctcat

SEQ ID NO: 15318 - DNA, 532 bp, Homo sapiens
  MAP TO AC004662.1; EXPRESSED IN HELA, SIGNAL = 1.8; EXPRESSED IN FETAL LIVER, SIGNAL = 1.7
tcagacttcttcccatgctgttgcgggaagtcagggaccctgaacggagggaccggctggagccaaggcagaagaagataaattgtgaagatttcatggacatttatcagttcccaaaattaatactttgataatttcttacacctgtctttactgcaatctctgaacataaattatgaagatttcatggacatttatcacttctccaatcaatactcttataatttcttaggcatgtctttactttaatctcttaatcctgttatcttcgtaaactgagaatatacgtcacctcaggatcactattgtacaaattgattgtaaaatatgtgtgtttgaacaatagaaaatcagtgcaccctgaaaaagaacagaataacagcgattttcagggaacaagggaagataaccataaggtctgactgcttgcggggtcgagcagaacagagccatatttttcttcttgcagaaagtgagtagcagaaatatcgctgaattattttcccagcaaggaataaccctggggaaggaa

SEQ ID NO: 15319 - DNA, 597 bp, Homo sapiens
  MAP TO AC011462.3; EXPRESSED IN PLACENTA, SIGNAL = 2.9; EXPRESSED IN FETAL LIVER, SIGNAL = 1.6; EXPRESSED IN BONE MARROW, SIGNAL = 6.5; EXPRESSED IN LUNG, SIGNAL = 7.8
ctccatttctgcgtttttccttccatctccctgtctctcttctccccttcacccccatccctctgttacttcactctgtgggtcttcatagctcatctccctctggcccctgctcagagcccctctctagcttcctgcctctctccccatctctttattcattcccctccccaccccatccctctctttctccccatcctgccaactcacctctctgactttacttctctttctctctcctcttcctccgtcctggctccccccaagcgcatctcgtagcccggtgggccagacgtaccttgctgtactgcgtgtccaggctccaaatgtaggggcagggcccgaggcagaagttggcatggtagcccttgggctcgtggatccacttccagccgaggtccttgcggaagtcaatgtacagctgccgcacgcagcagttcttctccgtggagctgcaggcaggagagacgcgtcaggggcagggaggggctaccaccatagaagccacatgcccctcctccccaggtgcgtgtgtcaccctaggttgcccccccagccctatctccatctgggtctcccttgcacccactgtgttaa

SEQ ID NO: 15320 - DNA, 536 bp, Homo sapiens
  MAP TO AL138719.1; EXPRESSED IN PLACENTA, SIGNAL = 1.3; EXPRESSED IN FETAL LIVER, SIGNAL = 1.5
agtctctctgcctcctgctgctattcatggtgcccagggctctgcctgatgttctgagatctgagtgggctcagagagcagggagaagccaggcagcaggaggaggcacttccgagcctgccaggtcaggggggccttcctggacccccaagagtgcagggatatctgagtctgctgctgcggcttcagcagcagcagctgcacctggggtgggggtggggctcctacctgctccatggagcaggagcctgggtctgcacccagctggtttacctgccagactgtgagccccttgaagtcaggcacagaattctattcatcttacattctaagtacttacaaatacttctgaaccttcatagatagtcagtcaacatgtataatagtaaagttgaggtacaataatacttaaaaaatttctctattaaacaatatattaccatccccagttactcagaagacctgagagacactttgttgattagtaatcttgtaccacaaaattctgtccctctactaagtgccgtgatacgcag

SEQ ID NO: 15321 - DNA, 530 bp, Homo sapiens
  MAP TO AC008569.3; EXPRESSED IN BONE MARROW, SIGNAL = 2.6; EXPRESSED IN FETAL LIVER, SIGNAL =   2; EXPRESSED IN LUNG, SIGNAL = 3.6
caggtcctctgggaagtgtcgcacaaaggagtcgcccactggaaggttctgggcaggcgagatgcccagaggtgatccctgcccgcccctcccacctcccttcccacacagcccatggaggtgtttgtggacgacgagaccaagctcacgctgcacggcctgcagcagtactacgtcaaactcaaagacagtgagaagaaccgcaagctctttgatctcttggatgtgctggagtttaaccaggtgatacttccatcagcctgtcctggggctcaggaccttcgggaggtcactgggccacagggactgtgtggccctgactgccactccttccctcaggtgataatcttcgtcaagtcagtgcagcgctgcatggccctggcccagctcctcgtggagcagaacttcccggccatcgccatccaccggggcatggcccaggaggagcggtgagtgcgagccgcccgccaaggctgcagggagcaccaccaggagcccagtgtctgacggcctccacttgtttctcctgc

SEQ ID NO: 15322 - DNA, 600 bp, Homo sapiens
  MAP TO AC020748.2; EXPRESSED IN FETAL LIVER, SIGNAL = 2.1
cagctgcctgttgttgtgaggtttttttctccctttattcaattgcctctgaaattacaggtgagcagaatggcaacaggaatcctggtggattgcagattggtgacctggtaaatatagatctcgacctcgaaattgtacagtctttgcagcatggtcatggaggatggactgatggaatgtttgagactttaactacaactggaactgtttgtggcattgatgaagatcatgacattgtagtacagtatccaagtggcaataggtgggtgatatctctcaatttttgacaatgacaaataaaactaatatagagaaaagtcttagagaaagcaaataaagtgatacaaccaaatactcattaaagctagcttttagatggtaagtaaaaatccagaatatatattggtaaggtggagagaaacaaatgataagaattacgtgtgtgtgtgtgtgtgtgtgtgtgtgtgtcttgtgtgtgtatgtgaatttatatgaggatgtttatgatacagtgttctgtacactatttttccttcaagaggagaatacattatatcactattaggtctgaatacagcttaaaagttctgtgttcgt

SEQ ID NO: 15323 - DNA, 554 bp, Homo sapiens
  MAP TO AC020912.3; EXPRESSED IN FETAL LIVER, SIGNAL =   2; EXPRESSED IN LUNG, SIGNAL =   6
agcgccacagttcagaaaagagcaatattgacagagcagcaactaaggacaaattacctgactgaggtccttctcagtgatgtcactctgcttgctgatgaactggacgctcgtggtggcccccgggcaactggcactcacaggctggaagagtgggtcttctaatgaatgcctcgagggtcctctgtgcgctgccacctgcatggccaccatctacagtcaacaggtacaaatcacaaaaataacctcccctcctggtctacaaggacattaagaccctggcttcaagaccattcacagggagttatatgcagccatagctaacacacatgtttgtaaaacctttgtattttctatttgcctttagttttttcccccaaaatttgagatagcttcagtgcattcctgaggatcagtacctgctaaaaagactctgaagcagaagttggcggtgaaacccagggagcctcaatcaagtggctttccgcaggcaccatgtgtggctttggtgtagccccgggagcctctttacctctctgggtctcagcaccttc

SEQ ID NO: 15324 - DNA, 501 bp, Homo sapiens
  MAP TO AL109938.8; EXPRESSED IN FETAL LIVER, SIGNAL =   2
gagtaacctgccagcaatcctatcagcattcatcagactatttaaatagagcaaagtccacaaaaaattccactgagacatgctgagcaaaggccggagccccagaagaaaacaagtacagactcagaggaaagctgccctggtcctgagtgtgactcccatggtccccgtggggtctgtgtggttggcaatgagctctgtgctgtcagctttcatgagggagctccctggctggttcctgttctttggggtcttcctccccgtgactttgctgctgctcctcctcatcgcctacttcaggatcaaactgattgagggtaagtgtgaggccacacaaggaagaacttgggcatcctttcccacagcacatcttgaaatataccgatgcactgtcagtgttttctggccaggagaaacatatatatatatattttgtaggtacttctcaatcagtgttctctcaagttccttgatcaatttggccaagtttgatcctttcca

SEQ ID NO: 15325 - DNA, 543 bp, Homo sapiens
  MAP TO AC020741.2; EXPRESSED IN FETAL LIVER, SIGNAL = 1.6; EXPRESSED IN BONE MARROW, SIGNAL = 1.5
ccaggcactgaaatttcctctctagctatgaaagtcttagatggcatcttcttccaatagcaggttgttgtccacattgaaaatcttttgttttgtgtagccaccttcatcaatgatcttagctagatctcctggataacttgctacagcttctacatcagcacttgctacttcaccttgtacttttatgttatggagatggcttctttccttaaaccacatgaaccattatctgctagtttcaaacttttcttctacagctgcttcacatctctcagccttcacagaactgaagagagtgagggccttcccctggattaggctttggcttaagggaatactgtggctgccttgattttctatccaaaccactgaaattttcttcatgtcagcaaaaaggctgttttgctttcttatcattcatgtgttccctggagcagcacttttaattttcttcaagaacttttcctgtgtattcaaaagctgaccaactgggacaaaagtcctagctttcagcctgtctcacctttgacatgccttcct

SEQ ID NO: 15326 - DNA, 500 bp, Homo sapiens
  MAP TO AC009263.6; EXPRESSED IN FETAL LIVER, SIGNAL = 1.7
aaggatagcaccctcactgcatcaatggtgatggcacttctcaaatatgggccaaagacttacagtccaaaagaagtaattttcttaaacaaattagaagaaattttagatataattgaaccattggaatttggaagatcatggaacctctcttctggcagctagccaaatgtgtctccagctcacacttccaggtggcagagcaagcgctctattaccggaataatgaatacattatgagcttaatcagtaacagcgcagcaaagattctgctgatcatgtttccatgcttgtactgcaattcaaagacccattggaacaagacaatacatggcttgatatccaacacactgaagctcttcatgcagatgaaccaaaagctatttaatgactgtacctaactgttcaaagcagagaaactgaaagagaagctaaaaatgaaagaacaggaagaagcattggttaaaatagaaaatctaaccaaagccaatcaccaggta

SEQ ID NO: 15327 - DNA, 518 bp, Homo sapiens
  MAP TO AC008770.3; EXPRESSED IN FETAL LIVER, SIGNAL = 1.7; EXPRESSED IN LUNG, SIGNAL = 1.8
atctgatgaccaaagcagggaataaatgtttggagtccacggcatcctgagaacttcttgggaatagagtctaggcccccaatgctgtcactctcacccatcctcctctacacatgtgagatgtttcaggacccagtggcttttaaggatgtggctgtgaacttcacccaggaggagtgggctttgctggatatttcccagaagaatctctacagggaagtgatgctggaaactttctggaacctgacctctataggtaaggatgacaatattccttccctcagtgcattagtttaccaatgtttctagctcaccaatgctgttgagtgatttggaacacagacaggaaatactttgatgaataaatgaggcatggctgctgtaaatcatgggcataggtctaataattttttcacaattttatactgcctcaggattatttttctgtgtttgtattttaggaaaaaagtggaaagaccagaacattgaatatgagtaccaaaaccccaggagaaact

SEQ ID NO: 15328 - DNA, 590 bp, Homo sapiens
  MAP TO AC008543.4; EXPRESSED IN BONE MARROW, SIGNAL = 1.6; EXPRESSED IN FETAL LIVER, SIGNAL = 2.1
ccttcagctattgccactcctttcaaacacatgaaaggcctcacactggaaagaaactccatgtaagaaatgtggaaaaaccttcatttctgttcaaaccttttgaagatacatggtaatgcacagtgaagatgaaccttataaatgtaagttttgtgggaaggcctttgataatctacatttatatcttacacatgaaagaactcacactggagagaaaccctatgaatgtaataaatgtgggaaagccttcagttgttccagttccattcgaaaacatgcaagaattcacactggagagaaaccctatatatgtaaacaatgtggcaaagcctttagatattccagttctattcgaaatcatgaaaacactcacactggtgaaaaaccctgtgaatgtaagcaatgtgggaaagcctttagttattccagttactttcgaatacatgaaagaattcacactggagagcaggtgtataaatgtaaggaatgtgggaaaacattcacttatcccagtgcctttcataaacataaaagtacccacacttcacagaaactttatgaatgtaaggaatgtgggaaagcatttg

SEQ ID NO: 15329 - DNA, 527 bp, Homo sapiens
  MAP TO AC008897.4; EXPRESSED IN FETAL LIVER, SIGNAL = 2.3; EXPRESSED IN HELA, SIGNAL = 1.7
gaactgtcgggctattcaggctgtcttcttggtgcaagctccttggaggtcttgtaaattgatcttcgacctatggtagaaaatgacaaagtagcaatatataaatatcaggagtgtagaattttaacttggaactacagtagatgaatagtaagtttttacactgcatattttttgaagtatagggggaacatgttaaatatatctttgagtcttacctgttgtgaatcatgtgacttttgacaagatgtcctgctgccaatgctgccataagtgacaattccccagccattacggtcccacacacaattcgggcaagctgccgggcattttccccaggattatctttgcatgctccttgaacacctagcatctgtagccagggagagacacaacaagattcacccttaaaatcatgaccaatttcttactaaatcaactaaaaacagggcaactgtaatggcatcagaatagaactagactccactggaagcactaactttccaagacttgacagccacacctga

SEQ ID NO: 15330 - DNA, 593 bp, Homo sapiens; identical to SEQ ID NO: 7727
  MAP TO AC019239.3; EXPRESSED IN HELA, SIGNAL = 2.1; EXPRESSED IN PLACENTA, SIGNAL = 1.9; EXPRESSED IN FETAL LIVER, SIGNAL = 1.5

SEQ ID NO: 15331 - DNA, 569 bp, Homo sapiens
  MAP TO AC023753.5; EXPRESSED IN BONE MARROW, SIGNAL = 3.7; EXPRESSED IN FETAL LIVER, SIGNAL = 2.2
ccaggcctttttgctgtaacagaaattgtagctacagaacacctatagcactcctggcatttcccacctgaaggaggtaatggtccccccaaactcagtcctttgccagatgccatgatgccagaaatactggaaacagagcaattctaccttgaataggggctggggaaaatgaggctgagacctgctgggctgcattcccaggaggttaaaacattcttagtcacaggatgagatgggaggtctgcacaagatgcaggttacagagaccttgctgataaaacaggatgtggtaaagaagccagccaaaacccacaaaaaccaagatggcaacacacgtgacctcagcaaaaccaagatggtgacacaagttgtcctcactgctcattatatgctaattatagtgcattagcatgctaaaagacactcccaccaatgccatgacagtttacaaatgccatggcagtgtcaggaagttaccctatatagtctaaaaaggaaaggaaccctcatttctggggaatccctgcccctttcacagaaagcttacatacagggcactcctggat

SEQ ID NO: 15332 - DNA, 554 bp, Homo sapiens
  MAP TO AC022374.1; EXPRESSED IN HELA, SIGNAL = 2.2; EXPRESSED IN FETAL LIVER, SIGNAL = 1.7
gttatgggtgaagccaggagttaaactcaccactatcggattctgaatcagcaccccaaccactaacctgccttcattcaccatctttacctacctccttcctctttccttcacagtccaactcttccttcatgttcctggcatgcaggtctttgtcttgtccctgtccattcttgccatcctttatctttactttcccttctctatcttgttccctctgccatgagcctggagctgaagactgcctataacactggttgtatcagagacccaactgcagtgccttaaacatatttttatttttcttctctttctcttacataaaagaagtctggaggtgagtagttcagggcagatgtggtagctccatcatcaggcggtcttgctgaactcatggcttccattctcaaaatcacctcatggtgacaagattgatgctgtactgctagccatcacatctatattccaagtagtaggaatgagcaagattacaagagatgactctgcatagtcaatgccatttaaagatctttcctggaagccccaatcaagta

SEQ ID NO: 15333 - DNA, 571 bp, Homo sapiens
  MAP TO AL132838.1; EXPRESSED IN HELA, SIGNAL = 3.4; EXPRESSED IN FETAL LIVER, SIGNAL = 2.7
agtcaagactgcaatgaacagacaaataaattacctttaaagggagttttatttaaaatataaagtagtagaacttttgtaattgtagaactgagggcctggcccaacagaatgggaatctggtttatcaaacatgaccaaccttcgccattctggggtgggggaagcagggaggggaggtagagaggtctaagaaggcgagaaaggctttctgtgctaacagtgcccctgcaaacatggtgaaccttcctaaaacccatcggactttctgtcacagtgtggcacacaccaatcccacaaagtgacacagtagaggaagggcaaggattctctgtatgcccagggaaagcagcatgacaggaagcagagtgactatggtgggcagactaggctgattttcccgaaaaagggtaaaactacaaagactgtgctgaaggttgagtgcgctgagctcaactgcagatctaagaggatgctggctattaagagatgcaagcatgctgaacccagagaagataagaagagaaagggacaattgatccagttgtaagcatcatcttttgtttcacgg

SEQ ID NO: 15334 - DNA, 506 bp, Homo sapiens
  MAP TO AC018719.2; EXPRESSED IN PLACENTA, SIGNAL =   2; EXPRESSED IN BONE MARROW, SIGNAL =   3; EXPRESSED IN HELA, SIGNAL = 2.1; EXPRESSED IN FETAL LIVER, SIGNAL =   4
tcccatcctctgatactcgcctactctcctctcaaagaagttagtctttcagtgaaatattctccgtaaagtcaaatgggctctctactccgaaaaccttgctaaaacccagttccagcataagtctgtctgccacaaactcaatgtattgcttcattagagtgcaattcatcccaatgagcttcacaggcaaggcctcggtgaggaattcttgttctatctgaacagcattgataattatttctctcactttctcctccgatggtttgtgtaccaggtgtttgaacatcaagcaagcaaaatcacagtgtaaaccctcttctctgctaataagttcattggaaaacgtgaggccaggcatcggtcctcgtttcttgagccagaatatcgatgcaaaagaaccagaaaagaagatgccttctactgcagcaaaggctacaacacgttcaccataggtagcctctttgtccccaatccagcgcaaggcccaatctgccttcttcttg

SEQ ID NO: 15335 - DNA, 592 bp, Homo sapiens
  MAP TO AC007216.2; EXPRESSED IN BONE MARROW, SIGNAL = 1.9; EXPRESSED IN FETAL LIVER, SIGNAL = 1.7
tcattttatgttgcgtaatgcagtgaatgtgtcagaaaacctccagtcttgttttcttttaaagcacaacgtggaagttcttggaatactttccgatgatgtagagactgataccgtagccccaggtgaaaacctcaaaatcagactgaaaggaattgaagaagaggagattcttccagggtttatactttgtgatcctaataatctttgtcattctggacgcacatttgatgcccaggtaaacaaattattgttgttgtcatagtgggttttaatgtctaaatgaaattagaatatcagtgccttttgtcctgattatttgtgacatgccagttaacccatcttagtgtagagaaggggaatggaaatattataagccacttatatatcataaccacaataggcacctcatacaaggtcttcaagctggtacaagtgcttactggataaggagtattctttgtaagttcctttttatgtttgatctcctgatgatacattctacagtatctaatattcactttgaccagagcacagttactgtggaagtcatggtttatgtgctcattgacagcacatagctttccagaca

SEQ ID NO: 15336 - DNA, 504 bp, Homo sapiens
  MAP TO AL135747.2; EXPRESSED IN FETAL LIVER, SIGNAL = 1.7
ggcagatggaaagctctcagacctcaaggaaggaggaagagacaggaagcgactgagtctctttgagccttgtaattttctggaaaatagaactctttggggtcatgtaaatatgcccaccagggaagcagctggaagagagtcttctgctcccgtttcaatgagaggccttttctggagtagcattggcgcctccacctgctgcgggctgccctgcttcccctgggatgttctctggtggtttctatggcaggggtgaggcctcacctcccagactcgcttctttgttgcttcttctttcactctcctaccaatcacccttgctttcctaggaaaccagagaggaaaccagtctctctgcaggtgcccactttcttctcttttctccagaaatgtgaggctgctgttctctccaatttgatacactgatgaatgaatgcagcttgtgttctgtgaggtgtgaatagaaataatgagggataaaggtgtcctctggccaaataa

SEQ ID NO: 15337 - DNA, 591 bp, Homo sapiens
  MAP TO AF223391.1; EXPRESSED IN FETAL LIVER, SIGNAL = 1.8
cccacaggatttagtggagctgaaaaattcctgtggcttagtgatgtcatagtcatcttaacatcatagtgcaatgcattactcacatggttgtggtgacgctggtgtaaaaaaaccctgaattgtccatcatataacagtagaacatatacaattatgtacagtatatagtattcgacagtaaatgactatgttactgatttggcatttactttcaattgttattttacaatttattcctacttatttttaaaaaagttatctgtaaaacagtctgaggcaggttcctcaggaggtattccagaggaaggcattgtcatcataggagatgacagctccctgtgtgttattgctcctgaagaccttccagtgggacaagatatggaggtggaagacagtgatattgatggttctgaccctgtgcaggcctaggctagtgtgtgtgtttgtgtcttcgcttttaacaaaagattttaaaaagtaaaaaagtaaaaagtaagaataaaaaaagcttatagaataaggatgtaaggaaagaaaatatatttgtacagctgtacaatgtgtgttttaagctaagcattattgcca

SEQ ID NO: 15338 - DNA, 579 bp, Homo sapiens
  MAP TO AC016537.2; EXPRESSED IN FETAL LIVER, SIGNAL = 1.7; EXPRESSED IN PLACENTA, SIGNAL = 1.5; EXPRESSED IN HELA, SIGNAL = 2.8
attagagagtgcccaaggggattcagcataattacttgcttggttggcaagtttttgggttctatccttgagtttttttatgttctcatacaccaagccagattgatttaggtaaaaacaacactcttcatttaacaatatactgagtccaaggcctcggcggttttggaggacaactgcagctaaagagtcaacttgggcctggaggactgataaagtttgtgatatgtctgtgatgctagcagagaagtcattagacgggctacggaaggtcgtgacagaggttgaaatgcctgctattccagtactgagagcaatagtggaggcagaaagtcctaaaccgaccatcaagggaattagtggaataactcttttttgtggtgtcagtgtcataaggggaacagggagctctttggtcccatttgcaaattgaattttgggggtaaggaatactagtgtgcatgtgcctgtccaattagcaggtagacacatgtaggtagaggatccacagaggaagaagagaccttgtgtgaggcaaaactggagatgtaaactaaaagggtgagaaggagtgctgaa

SEQ ID NO: 15339 - DNA, 524 bp, Homo sapiens
  MAP TO AL133313.1; EXPRESSED IN FETAL LIVER, SIGNAL = 2.2; EXPRESSED IN HELA, SIGNAL = 2.7
ttcatgatcactgcagaggcagaagatgccacttgaatctggcctgtgtgttctgcaccgtcagtttcactgggatcctctggcccttccagtcacttgtcttggtgatgtcctcattggccttttttggagacagacccagggggctgatcttaggaaccagagcagatgtagtactgacttccccactcgtgcacctcaggtatacgactttgatcttgttggggttgaacttgggtgacatggcagaggtggtgggtttcctggcctgccattcacaacgtcattcacatgcccttccaggctcatctcctagcacctccctccacattcctatgtgccagacatatctgcctatcgtcaccacctatggtgggcttgggtgcctctggacctgctgctcactctgcctggaatatatttctctcagctaaactcctgcccatcttttcaagctggaatcaaatccccctgtctagagtatttcccggatccccatggagagggttaggcaaagaccatga

SEQ ID NO: 15340 - DNA, 576 bp, Homo sapiens
  MAP TO AC022205.2; EXPRESSED IN LUNG, SIGNAL = 1.6; EXPRESSED IN PLACENTA, SIGNAL = 1.8; EXPRESSED IN FETAL LIVER, SIGNAL = 1.6
agcatattcagcgagatgccttgataataatctgtcagaagaaatctgtttttgtaccccaattaacacaaatatatggaattaaaagggatagatacttacagaactaccaggcttgaaaggttggtaaatgcaaagtcagggatgcttgagatcttgttgagagccagggtcagcgcctgtagggtgggcagattgctgagggggtgcacaggcacctccgtcaagctgttgtcatccagccacagatgccgtaactgaacaagtccttcaaaactgtcctcggggactgaggtaatatggttggcatctaaacgcctaacagaaacaaaaacaaccatgttcagtaacaaattctagtgaaatgagtcagttcaagtctcacaactcaaagctttcaaaacaaaaaggacttataaaaattatcatctttaattttactagaagtcctcataacatctaataactttttcatgatctgtatagtgtatgaaagtcagttctttctctttcttcataagaatggcatgtatccaaatctatattcttcaactatctttggcttttggctaagaa

SEQ ID NO: 15341 - DNA, 510 bp, Homo sapiens
  MAP TO AC010745.2; EXPRESSED IN FETAL LIVER, SIGNAL = 1.7; EXPRESSED IN PLACENTA, SIGNAL = 1.9
cctggacacacacaaagtggtaaaaagaatttgagtctccaacactcatgtccaccgcccctgccaggtggagtgacgtggtactctgccttctcacgtggctcaggttgatgcaaaagtaattgcagtttcagactgtgagttttaaatcattataactaggctcaaacacatctttattaatcaaaataggaaccatgacaatcagcacatttttgccaatgagaaataagtttgtttattcctgtagcataaaaatctatgcttcgggattcaacaaacacttggaaagcattttctgcatcctgctggttgtggaagtgttttccctgcaaaaagttgtcaagatgcttgaagaaggggtagtcaattggctagaggtcgggtaaatatggcagatgaggcaaaactttgtaccccaattcattcaactttcgaagcattggttgagagacgtgtggtcaggtgttgtcatggggaagaattgggcccttttggttgaccaatgct

SEQ ID NO: 15342 - DNA, 597 bp, Homo sapiens
  MAP TO AF233439.1; EXPRESSED IN BONE MARROW, SIGNAL = 1.6e+02; EXPRESSED IN FETAL LIVER, SIGNAL =  18; EXPRESSED IN LUNG, SIGNAL =  24
ttccctgagcctgttgaatcaaagtgcaatttctattctttttggaatgttaaaaagtgaatcataatatttaagcaggtgaacccacgagtaacatagcagggtctttcttgtcattattagctccaacctagcacagacattagaggtacagatgtatactagcatgaaactgggagaacaggagcattcgagcaaccttgagaccaatgggcctctcttataaaatgcacacctcctctcactgagattgaggaaggtttcttgtctccgagccttctcccagtagagctataaatccaggctggctcctccctccccacacagctgctcctgctctccctcctccaggtgaccccagccatgaggaccctcgccatccttgctgccattctcctggtggccctgcaggcccaggctgagccactccaggcaagagctgatgaggttgctgcagccccggagcagattgcagcggacatcccagaagtggttgtttcccttgcatgggacgaaagcttggctccaaagcatccaggtgagagaggcaggcatgcagagctgctaagtctagagggaaggacgggagagaggttc

SEQ ID NO: 15343 - DNA, 509 bp, Homo sapiens
  MAP TO AC010828.3; EXPRESSED IN FETAL LIVER, SIGNAL = 1.6
gcattcacgcatgttgtagcgtgtgtcagaatttccttgtttttaaggctgaacaatattccattgtacagatataccacatattgtttatccattcatccattacttctcttagtagttttacccaaactattaaaaaaaaaaaaaaaaccaattcaaggtaacaaattgcactacccccacccagctacccccacaatttagaaaatctggtttgctcagaggaaccaaaaccatggagaaaatagaccttctttgtgccccctcatcccaacctctcacatgtggtattatcacggtggtaatgtggcttctcaaacttcagccagcacttctttctcagctcaacccagacaaacccaaataacagaaataataaaaccctcacttcccctttctcacccaccagaggaatctcccatacctcgctctccttacactcttgccctgaactcttctcatgtccacctgaccttctgagagcacagggggacttggggagcaatatt

SEQ ID NO: 15344 - DNA, 538 bp, Homo sapiens
  MAP TO AC010636.3; EXPRESSED IN FETAL LIVER, SIGNAL = 2.1
gccctgttagcacaagaagcagataaactaacccttgggccaaatctgaatataaaagcccccatgctgtggtaactttgatgaacaccaaaggacaccattggctaacaaatgctagattaaccaagtaccaaagcttgctatgtgaaaatccccacataaacattgaagtctgtaacaccctaaatcccaccaccctgctcccagtatcagagagcccagtcgagcataactgtgtagaggtgttggactcagtttattctagcagacctgaccttagggaccagccatgggcatcagtagacttggagttatatttggacgggagtagcttcatcaacccacaaggagaaagatgtgcagaatatgcggtggtaactttggatgctgtcattgaaaccaaaccattgccacagggcacttcagcccagaaggctgagctcattgctttaactcgagctctagaactcagtgaaggtaagactgtaaatatctacattgactctagacatgcctttctaaccctccaagtgcatgg

SEQ ID NO: 15345 - DNA, 562 bp, Homo sapiens
  MAP TO AL121819.1; EXPRESSED IN HELA, SIGNAL = 1.7; EXPRESSED IN FETAL LIVER, SIGNAL = 2.2
aggaactgatgccaggacacaaagcttcacacagtaactaagtacagttatgtgccgcttaaggacgttttggtcaatgactgcatatatgacagcggtcccttaaattatgatggagctgaaaaattcctatcctctagtaatgaagccaacataatgtcacagcgccatgcatttctcatgtgtatgtagtgatgctatgtaaacaaacctactagctgacagtcataaaaattatagcacatacaattgtgtatgctacataatacttgataatgaatgactgtgtttctggcttatgtatttactgtagcacagttgttgtcattatttgagagtgtactccttctacttatgcggaaaaaaagggtttttgtaggacagcctcaggcaggttctttaggtggtatttcagaagaaggcattgttatcataggagatgacagctctgtgcatgttattgcccctgaagaccttccagtgggacaagatgtggaggtggaagacagtgatattgatgatcttgcccctgtgtaggcctaggctaatgtgtgcgtgtttg

SEQ ID NO: 15346 - DNA, 598 bp, Homo sapiens
  MAP TO AC018698.3; EXPRESSED IN FETAL LIVER, SIGNAL = 1.6; EXPRESSED IN HELA, SIGNAL = 1.8
gagaggtgaactgtgggaggctggtattctgaagagaatcattatgataaaaggaactcgtcgggcaccggccatttaagtttactctattttaacatgagttctcactaacataatataatgtactaatgtattcttttgcagctggatgaaggctggctggaagatgaaaggaatgaattcttagaggagttaaacttggagatgttggaagaagagcataatgaagcaatgcagcccactgccaatgaggtggagcaggtagggccaacaatttgaactacatcatttgatatgttgcttgttctttttttaatgtgtaaccataaatgaagatgaaaacaaaatcaaagggtttaatccatcatctctatcatggtaattttttagagcaaatgatcatctcaaatgaagcagagggaataaataaaatgtttttccattaagaatatatccagtttgggaagcttggggacaattgttaatacagtacagtagtattcaaatgttgacccaggcactacttcaaactaattgcagaaatttaagagtaaaaaatgtgtgttgcttatcaatatgccagctgaaaacaaactga

SEQ ID NO: 15347 - DNA, 568 bp, Homo sapiens
  MAP TO AC002115.1; EXPRESSED IN FETAL LIVER, SIGNAL = 1.8
ttccacaactcctgggagaccctcctgacatcgcccatccgcgcaggctgcagagagagatcagtgggaggaggaggagccgagagccaccacttaggcttccaaccaatccctaccagggtgggcggagcccacttcctgattggctgcactctctgtgtcttggggtgggcgagaacggcggggccacgccccctaactaggcagccaatcaggacgtggggtgctggtttctccattgcgaagcttcagcctttgatggtttgggtcctgggagtctggttagtacaaggggaagcctagtgggtctggcgctccgttttcaagacactcggagtccgtctttgaggggaaaggtcatggccctgaaaccaccttctgccacccagcctgctcccaacgcgccagctaccccagacgccccccctaccacaggtgatccaggtgcttcagctgccccaggttctcccactaccacaggtggtccaggtgccccagctgaggtgccccaggagccgcaagagcctacacagacaccagaggaactagcattttacgccccaaacta

SEQ ID NO: 15348 - DNA, 579 bp, Homo sapiens
  MAP TO AC005410.1; EXPRESSED IN FETAL LIVER, SIGNAL = 1.6
ggaacatagccacacccatctggctgcatagttgcaggagactagtggcttgcaaagcctaaaatatttgctatctggttctttacagaaaaaggttgtgactcatgatttagatggtgtactggatttttcaaggcttctgtgagattaccacaaacttggtggcttaaaacaacagaaatttattctctcacagttctagaggccagaaatctgaaggtgttggcagggccatgcttctcccgaaggttctgggggaggatcccccctttctttcagcttctggtactgctgctcttccttggcttgtggcagcataaccgtaatctctatggtcttcttccctgtgtctgtcttgtgcatctctatcttctccttttctttgtttggtctcctataaggatagttattttatttagtgcccacctaatccagaatctcttttttgagatctttaattttatccgtaaagataggttactttctgagattctggatggacctatcttttttttgtgtggtgggtggtgtatagttcaccctactacagatggtattgaagaactgggttttggcttc

SEQ ID NO: 15349 - DNA, 550 bp, Homo sapiens
  MAP TO AC010478.5; EXPRESSED IN FETAL LIVER, SIGNAL = 1.9
tgaatccatcttggtgcttgcattttggaagatagttaattattgattaagtttctttaacaaatatattcagatctatttagattgtctatttattcttgtgtgagttttggcaagttgtgtctttcaaaaacatgatcaatttcacctagattatcaaatttgtgggcatgggctttgttcataatatgcctttattatccttttaatgtccatatgatctgtatgtctcctcttccatttctgatattagtaatttgtgtcttcttgcttttttccttagttatcctggctataaacttgtcaattttattggtcttttcaaagaaccagcttttagtcttattgactttctgtatgaatttcctgttttccattttattgatttgtgctctatttttcaaattatttcttttcttctgcttattttgaatttaatttgctcttctttttctagttttcctaaggtgaaagtttagattattaattttagaactttctttcatgctataaatttctgtctaagcactgcttttgccacatttcacaa

SEQ ID NO: 15350 - DNA, 514 bp, Homo sapiens
  MAP TO AC013562.3; EXPRESSED IN HELA, SIGNAL = 1.8; EXPRESSED IN FETAL LIVER, SIGNAL = 1.7
gcctgttctttgaggctttgaaatcaggccttgacttctcctctctaattatcaaactcctagatagcattttcttccaacagaaggccatttcatctacaatgcaaatgtgttgtttagtgtagccaccttcaccaatgattttagctagatcttctggaaaacttgcagcttctgtatcagcccttgttgcttcaccttgcactttgatgatacgaggatggcttctttcttttaacagcatgaacagatttctgctagctttaacagtttccttacctctctcagccttcatagaattgtagagttaggacctcgctctggattaggctttagcataaggaaatgttgtggctggtttgatcttctgtccagaccactaaaactttctacatattaacaataaagttgtttctttttcttattatttgtgtgttgtctggagtaccacttttaatttccttctagaactttttctttgcattaccaacttggctgactgtgtggctcaaga

SEQ ID NO: 15351 - DNA, 505 bp, Homo sapiens
  MAP TO AL049831.2; EXPRESSED IN FETAL LIVER, SIGNAL = 2.5
atgggcttctgagatatggccatgtagaggtgatatctcagggctacggtgagtgctgagatggccgggatcacccaattagtccactaactagagtgagaatcaacagtagtaaaaagggtttctgaaagatttgtgattgatctgtcatctggataaagcccccccaatgatatatgttttggacaattctctagcatccgtagagtgcatgatatcctcagttttcaggagcatcacctacagcttgttccctgaagacttcttccccacagaaatgctcatcaaaaaatctggtcacatcatataccttgtggtgcaagatcacccaggtgcttttgctgtgattgtgcttcttaatctctcccagggtgtagtattttatgcccttgtctgactgctcagccatctcagtatgaagcgagccaggtcctgcacacacagacatgctgaatggaacagagcacgcatcacagccagctctgccagaaacacgtcctgtgtg

SEQ ID NO: 15352 - DNA, 591 bp, Homo sapiens; identical to SEQ ID NO: 15337
  MAP TO AH009158.1; EXPRESSED IN FETAL LIVER, SIGNAL = 1.6; EXPRESSED IN HELA, SIGNAL = 1.8

SEQ ID NO: 15353 - DNA, 589 bp, Homo sapiens
  MAP TO AF223391.1; EXPRESSED IN FETAL LIVER, SIGNAL = 2.7
ccatcacagggttcacacagcagggctgtttgctctgtccacaggccgtcttcgactgcgtagtgacctccttgaagaatgtcttcaacatactcattgtgtacaagctcttcatgttcatctttgctgtcatcgcagttcagctcttcaagggaaagttcttttattgcacggacagttccaaggacacagagaaggagtgcatgtaagtgccaccagcgcattccacttgattttgctgaagcatgtcctgatgatcccactccaccaccacaggtccaccctccctcctttctatcttacccatctctgctcttctttcagcaaaaagacaaaatggaatcaataaactttttactgagtgcctcttttgtgtcagacacgaaaacttgagtgtaaaatatctcgtaccatgacattttacactcgagttttcatttcaaacccctataaccagctattgaaataagttttatttgcttattatacaagtggaagctaagactcagaaagtttaagcaagttgctcaaggttacacagccagtagtgaaagggttaggatttactcctgtatctgttgggcaccaa

SEQ ID NO: 15354 - DNA, 516 bp, Homo sapiens
  MAP TO AC008723.3; EXPRESSED IN FETAL LIVER, SIGNAL = 1.5
tttggaaattgtgttttgtgtgtagttaaaacacattgacatcaaccatgatctgtacaattcatttttccgcagaatctaaacaaaatcttaatgttgacaaagatactaccttgcctgcttcagctagaaaagttaagtcttcggaatcaaaggtgaggagcttttatatgccagctggtttatcaagtgtatcatcaaaaacatctgaaagtattgtatttgattagaatgggttaagtgtatgaatcaaggttataagtaaatctgtaaattaatgaaatgagttatcattagaactctagcaagttttacatttctgcctaggtcattatgtttaaatgtgcccttagttcacaattataatggtcttcaattctcaatcacttctatgtttaaattgttcattacctagtaaacatttcaaaattatgtgatgctttgatttattaagtaccaccatttgagttgttttgtttttgtgtatttgtttgtggggaagggtaagtgtttttg

SEQ ID NO: 15355 - DNA, 583 bp, Homo sapiens
  MAP TO AC004832.3; EXPRESSED IN FETAL LIVER, SIGNAL = 1.5; EXPRESSED IN HELA, SIGNAL = 1.3; EXPRESSED IN LUNG, SIGNAL = 1.2
ttttccagggtccaagtcaggcagaacaaatgcagcaatgtggaacagacggaaactccagctctgtcatttcctcactgtgtgtcaccagagtcacaccacctcctttttatcagctataaaacaggactactgctgaactcgtagagttgggggaaagagtgagataacatatagattaccaacccagtgctgcgacacacagctattattgttattacaactgctactgctgctgctaattctcctccctcctttcaaagtccagttcaagctctaactcctttaaaaagcgtttcacatgatttcagtctaccaggccctcttcttccaagctggtacagacgagatggtctctgtcactcatctggcacttggcatgttctgcctatttttttctctccatgaatgtcttgtcaaccccgctagattaagtttcagaaggtcaaggatcattacctaggctaccttcatccccatgacctgccacactgccttgctcagtcactaaacatcaacaaaaatcactgtccccaagccctttgccagaactgcctgaatgtctgtctggtttctgccttcc

SEQ ID NO: 15356 - DNA, 574 bp, Homo sapiens
  MAP TO AC007539.8; EXPRESSED IN PLACENTA, SIGNAL = 1.4; EXPRESSED IN LUNG, SIGNAL = 1.5; EXPRESSED IN BONE MARROW, SIGNAL = 1.4; EXPRESSED IN FETAL LIVER, SIGNAL = 1.7; EXPRESSED IN HELA, SIGNAL = 2.2
ttgtggagggagtctgcacgatctttataaaggacttcctcaggttgcctttaggagaaaagtagtctctttagtgtctctctatctctacttgtttttggatcagagatggctttagtgtcaaaacttttgtgttctttttcttttttctgtctgcaaaaccaaccctgttctccagaggctttttgtaacttaatccatttcttttccaggaagctaaagaaactatttcgaaagctgaaagatgagaccgaagctggagaaactgactctgcccattcgaaacatccagagcagtgggacctagactacagcttggaaccatacacaggactgactccggagtacatggaaatgagtgagaacccatggtcctgccttccactgggggcaggttcagacaaggggtctgtggggttgaagggggaaggtaggggattggggaaaatgactgggacagcctctgcttcttcatgagcttcatggctattcagtgttcccttcagtgccacatgaaagttgagaagaatggggcagaaagagacctgggaggagaacctggagcagctcagtc

SEQ ID NO: 15357 - DNA, 952 bp, Homo sapiens
  MAP TO AP000345.1; EXPRESSED IN LUNG, SIGNAL = 1.2; EXPRESSED IN FETAL LIVER, SIGNAL = 1.4; EXPRESSED IN PLACENTA, SIGNAL = 1.4
tttaaaattgactacttggattttacctaaagttaccaaacataagcctttaaaaaatgctctggcagtgtttactgatggttccagcaatggaaaagtggcttacaccgggccaaaagaatgagtcatcaaaactcagtatcacttgactcaaagagcagagttggttgccgtcattacagtgttaacaagattttaatcagtctattaacattgtatcagattctgcatatgtagtacaggctacaaaggatattgagagagccctaatcaaatacattatggatgatcagttaaacccgctgtttaatttgttacaacaaaatgtaagaaaaagaaatttcccattttatattactcatattcgagcacacactaatttaccagggcctttaactaaagcaaatgaacaagctgacttgctagtatcatctgcattcatggaagcacaagaacttcatgccttgactcatgtaaatgcaataggattaaaaaataaatttgatatcacatggaaacagacaaaaaatattgtacaacattgcacccagtgtcagattctacacctggccactcaggaggcaagagttaatcccagaggtctatgtcctaatgtgttatggcaaatggatgtcatgcacgtaccttcatttggaaaattgtcatttgtccatgtgacagttgatacttattcacatttcatatgggcaacctgccagacaggagaaagtacttcccatgttaaaagacatttattatcttgttttcctgtcatgggagttccagaaaaagttaaaacagacaatgggccaggttactgtagtaaagcagttcaaaaattcttaaatcagtggaaaattacacatacaataggaattctctataattcccaaggacaggccataattgaaagaactaatagaacactcaaagctcaattggttaaacaaaa

SEQ ID NO: 15358 - DNA, 571 bp, Homo sapiens
  MAP TO Z82201.1; EXPRESSED IN FETAL LIVER, SIGNAL = 2.7
aagggcctctgttttctgccttttttgcccagagccccatgtcctcaccccagactcagcatttctaaatgctgagcactcccacctcagagagcacatgctggggtggaagagtggatacacaactacccacataaaaactctgctcatggttaactagacaccccaaggagaatgaacagaggtgggaggggtttcagggtggggctgagaggtgttttcatgaatcaagatgagttttcacagtaaagcactttcagcctgtcataccgtggacaaagccagctgggaggactcaactacttcctggatcttcctcacagcctcctgtggattcagcgttgcaaaattgattggcatgctctcttctttttccttgggctgagctcctgttgacttgctgttctccactgctctcaggaagtcgaggtaattgatagcattatcatgccggctgactccccaacttgtcccaaaaggaagaaaagaacatattcattttaaaaagccaccctactgcttattcattcaacagttgctgagcacattgggcaatgtggggaaaatgaat

SEQ ID NO: 15359 - DNA, 558 bp, Homo sapiens
  MAP TO AC007900.1; EXPRESSED IN LUNG, SIGNAL = 1.4; EXPRESSED IN FETAL LIVER, SIGNAL = 1.3; EXPRESSED IN PLACENTA, SIGNAL = 1.2; EXPRESSED IN HELA, SIGNAL = 1.4
aaaaaggggaacttatttttcattgtccacatacactggagtggtagggagacatgtttttaattataaacactttaatactcttgatatttttgttaagtgcatgtactattttttttttttttaactacaaatgagtaccaagaaaagcctgggaaaatcccaagagctagtagctaataagagaaaaggctaacaggatgaccagcaaatggacctcaaacagccacttacctatccacttcctctttcatatacgtagtataactgctgccatcataggacaagagcagtccaccgtcactcagccgatgtacatctacttctacacatgagccattcatgatcaccacataggagttgggggactgtcgagtcacctgtagggaatgagaatgaggatcagtgtgtcccttccaggtacagctccaaatgaaatttgaatgcttcaaaaatacagataagaaagatctgtcaggaggaagaaaattcatggcactgatgctatttgcatcagtgtctgtggacatggctcagtcctgctgtaagcaaagaggg

SEQ ID NO: 15360 - DNA, 560 bp, Homo sapiens
  MAP TO AL021707.2; EXPRESSED IN BONE MARROW, SIGNAL = 1.7; EXPRESSED IN LUNG, SIGNAL = 1.3; EXPRESSED IN FETAL LIVER, SIGNAL = 1.4; EXPRESSED IN HELA, SIGNAL = 1.6
ataggctggagggcagattcatgatgaagcccatgacgttagtgagggcaatgacaccgacatccctgcaggggagaaatggtggcaggctctgatgcagcccattttccaaggttccctggctgtaataccacaactggctacctccccactcatgccatgagcccaagtactaaaagcttataccacaaccgtgctgttctccatcaagtcaagcctgattcagattacctgcgcttgtcccaccaaacagcttcatagcctttggtctgaagtgctgccataatgacattcacatcgtagttgccatttcccagcatgctcttcttgtgaggtgtcaccatggtgtttggagacaacctaccaatgtgaaaagaggagggctgagacttgctggatgcctgaaccccctgaccccgcactaccagggatggagagcactttacatcactgcccctggaagttagtttccccacattcaagtgcaatttccccagcttctacctaagtattttgtaagtgttccatgaaggtgactcacttatgaaatcccagcctcc

SEQ ID NO: 15361 - DNA, 562 bp, Homo sapiens
  MAP TO AC007556.2; EXPRESSED IN FETAL LIVER, SIGNAL = 1.3; EXPRESSED IN PLACENTA, SIGNAL = 1.6
gttgtatgtggggttggaggtcttgtggtccagcagcccactgaaaccctgggaaaggcccatgcttgtctgatgaagtacattatatttattgctgcaatgctgcaatgtcattttagcccatatgatggtaacaggctattgccttccattactctaaatgtctgggaatagtgggatatgattttgactgatattcttctattttcacagatgatcaacctttcttaataactgtaaggcaacatataatttttggaatctcccttaatcctgaggtgaagagcaatgatgctatggtccccatagcagggatacagaatggtttagatgttgaatttgatgatgctgagcaatacatctattgggttgaaaatccagtaagttttgaataacattcaaagtatataatttattcttgaagagcctgcctgcactgatgttttcttataagcaaacttttgtcatgtgagtaaaagggaaacaatgtggaaataaatttatccctaagttttttgattcaatgaggggtatatatgtgagcttggcctggagcaaaaat

SEQ ID NO: 15362 - DNA, 1965 bp, Homo sapiens
  MAP TO AC008174.2; EXPRESSED IN FETAL LIVER, SIGNAL = 1.9; EXPRESSED IN HELA, SIGNAL = 1.3; EXPRESSED IN PLACENTA, SIGNAL = 1.5; EXPRESSED IN BONE MARROW, SIGNAL = 1.3
gcatctccagctgacatgatgtgtgacaacccaatggcagtcttggatctgctgtcttttagggtcttctctccaggacctaacttggttttgcttttggccttagcagcactcagtcctaagtgtgttttttttgtaaatttaggcaaagtggtaatttttgatcttgtttttaaatgtgctttaaagcatggcttagggttgtccttagggctcacctttaaaggaagtgagacaaaatttgtgatcttattgagaaccatttgaattaagtctttcttcacttgcaatggtaaatatggcaaaagagtgttttccatcacagagatattttgactgtcgacataagaataagcctgtgatatcgcatatctaggggaattacttatttttcctgcttgtttagtttctctaaaccttaatggtttcattagtaaggaatcattgtggtcagatatttcaacttctgtcctacttttattattttcatataatgatgtcacaactaccaagtacattttccccaaaacactttcaactatgtcatttgctacactgttaatatgtgattgaaaactgtttttctgtgttgtgtctgatgttttaatcttagaattagatataaagttggcagtttcattaagtggaggcaaatggcctgtgacttcccttactctttgatacaacttattcaaaagttcttccactgcaatgagcagttcacctttttctttgttttttgattctccatttctcataaatatttcttccaaaacaattatctgccttttgttttccaatatcatttggttttgctctaatggatactttgtaaatagagattgtttggtacttctttccttctctttgtgacccagcaatatttcatttgataaagctaattgtgaaaagttagaattttcttttgaattaaaacaaatttcctttacagatcttttatcatctaacatctttaacatactgtcaacaatttcactcacaatgatgttttcttggaacaaaatattgttttgatatggatatatcttttgaatttctaagtctaagtcatttttaataagcttcaaaatggcactggcaatgacgtcagcatatgtcttaagcctagcttgcgataggtgaattgtggatccaagtttttctctgcgaccaacaaaagtgaaatctgtaagctcttggctgagaatggtttcagttgctgatattttcaggacatttacatctgattccacttggcttgaatcataaaagatgctgtcattttgtttacaattttccaattctgggataacaaatgacttttctttactttggaaagcaagggtaattaatgaatctattctttctgtggcaaaagattccaaacgtttaaaaatagttttagtaatgaagttagcattttcctcacatgagtcagtagcagatttctgagtgtcttctttctctactacagttatctgattatcatcagcataagctgatttctgatttcttgaatatgaaaaacgctctgtttttctttcagtttttgaccccttaagaggctgttgacagtctatttttggaaacgtatcacaaaatgtcaggggcaatcttgcagaagtaggattctttgcatttatgacaagcgtggcagcagaactgagattatgaagaacaatattcactatatcattggatatcaaaatgacatctgatttaggaactgaaagcttaggaataatcttatttgcaccctccatgaacatttcagaattttcttctgaatgtttatcagctatgctacatttcagagtgggtgtggcaaatgagagattattctgaaacagggttttttcataaatatcacataggataccttcaatggtatcttgtatttgaagttgaagtacttttcgatatttggtctcattgagcagcttttcaataacacctttttgctga

SEQ ID NO: 15363 - DNA, 543 bp, Homo sapiens
  MAP TO AC004624.6; EXPRESSED IN FETAL LIVER, SIGNAL = 1.3; EXPRESSED IN PLACENTA, SIGNAL = 1.3
caagcatgtattaagccctgggaggagccaggcactgttctaggcaccagggatggagctgccaacgaaccagggtcaggagtcgtaagaggcagctggatcccgggtggaggcgacaagacctactgatggaggggatctgaagatagatgggtagatgatagatagatagatagataatagatagatcaatagataagaagaggaggaggagagaacagaagttaagccactttttagctttctttgctctactgaatttgcacagaaagccaatgagaagccagccgaattgcaccccagaatcctggaagggctggcagtggggacggcaggcacctccagggcgagggagcagggcgaagcgcatgagcactgactggcccctcctcagaagcagcggggctggtctctggccccaggcggcacagtcaagggaccaccgctccccacctggctgcgggtggaaggtccttggctggggacctccatctactccacccaccccttccctcaccacttcccgtccttaagggaacttgg

SEQ ID NO: 15364 - DNA, 589 bp, Homo sapiens
  MAP TO AC006427.13; EXPRESSED IN LUNG, SIGNAL = 1.5; EXPRESSED IN FETAL LIVER, SIGNAL = 1.3
cagcagtcacacaaattatcaccactgaattgcatggatgttatcaaatcagaaagaaatgaggccaaagcaaatatcacacatatgtagtgcttttgcttcttaaatttaagttttataagtaattttggctctgtgttaaaaacaaaaaaataataatataatagctaacacttatatcatgttatgtgccagaccctatcctaagctcttttctcttattaactaatttagtcctcacaaatacgctgagatgttaggcagcattacaatccccattttaaagaggagggaaccaaaatacaaagaactgaagtttaggtttcagtacctgagctagtaaccagactagtgtgccaagtgccagaggaaggtggcctaaaccaaagtaatttggaagaggttcagagaaaaggattaattcaagagacatcacactaaataagtaaattgcaataaagctggaaatgggaggcaaagaaagagacaccatcgaagacagctgccaagcttccaacgaacatgtcttcttgtcaaaactgcaaagattccacctctatgtctttgttcaggctcttccctttgtttg

SEQ ID NO: 15365 - DNA, 567 bp, Homo sapiens
  MAP TO AP000350.1; EXPRESSED IN FETAL LIVER, SIGNAL = 1.8; EXPRESSED IN HELA, SIGNAL = 1.4; EXPRESSED IN PLACENTA, SIGNAL = 1.3; EXPRESSED IN BONE MARROW, SIGNAL = 1.4
ctctgccctccatcaaagagtggaactccccagagccccatgcacagcaaggggacagctgggccttactggaaggccttgaacaaaggggaagattcccagcccagctgctcttagacatgaacaggtttcattgctgaggtgtttgttctgtccatgaggtaggaacctcggcaatgaaagggtgaggcagccctgtgtctccacaactggggggatggaaggaaccttggctgcctcaccccacaggtcgggcagggccacctggctgggaggtgccgggaaggctgggccctcactcctgaccgccagctcacaccgccgcaaagccatctccacaaggtctggctacaacacggagggcagactcaacagagaacagtgttgttaccatgaaaatgacaacctgtctttggaggaggccccgtgccactgagcatccagaaataaaccacaacatggacaggcttagaacaacaaggaaagctgccaggtcagaagagaaaaatgagccacaggggtcggataaggctcacacacgtcctcagctaaaaagggcaggaacag

SEQ ID NO: 15366 - DNA, 958 bp, Homo sapiens
  MAP TO AP000345.1; EXPRESSED IN PLACENTA, SIGNAL = 1.2; EXPRESSED IN LUNG, SIGNAL = 1.4; EXPRESSED IN FETAL LIVER, SIGNAL = 1.4
tgaatcatcaaaattgggggaaggaggtccagaatcattggggccatcagagcctaaaccacgatcgccatcaactcctcctcccgtggttcagatgcctgtaacattacaacctcaaacgcaggttagacaagcacaaaccccaagagaaaatcaagtagaaagggacagagtctctatcccggcaatgccaactcagatacagtatccacaatatcagccggtagaaaataagacccaaccgctggtagtttatcaataccggctgccaaccgagcttcagtatcggcctccttcagaggttcaatacagacctcaagcggtgtgtcctgtgccaaatagcacggcaccataccagcaacccacagcgatggcgtctaattcaccagcaacacaggacgcggcgctgtatcctcagccgcccactgtgagacttaatcctacagcatcacgtagtggacagggtggtgcactgcatgcagtcattgatgaagccagaaaacagggcgatcttgaggcatggcggttcctggtaattttacaactggtacaggccggggaagagactcaagtaggagcgcctgcccgagctgagactagatgtgaacctttcaccatgaaaatgttaaaagatataaaggaaggagttaaacaatatggatccaactccccttatataagaacattattagattccattgctcatggaaatagacttactccttatgactgggaaattttggccaaatcttccctttcatcctctcagtatctacagtttaaaacctggtggattgatggagtacaagaacaggtacgaaaaaatcaggctactaagcccactgttaatatagacgcagaccaattgttaggaacaggtccaaattggagcaccattaaccaacaatcagtgatgcagaatgaggctattgaacaagtaagggctatttgcctcagg

SEQ ID NO: 15367 - DNA, 576 bp, Homo sapiens
  MAP TO AC004909.2; EXPRESSED IN PLACENTA, SIGNAL = 1.2; EXPRESSED IN FETAL LIVER, SIGNAL = 1.3
aatccaagcactgatatcccccattacatcagaaatgagtcaagtagcaagagctatttataataaatgtcatggccttttcctctattttaactgataacacattattttaagaattctcagtagattttagtaggagtgggtgtgacaacgtgcgtatgtatagaaaagaatatttttgttttaactctaaaagcaaagattatttttaggtcgcatccatacacgtacctgaagtaatggtattctgcttcctgaatgcctttctgaaaatgctgcctgcctttattgactcaaatgttgtcaagcgtgttacatacacatttttcctaaccaagggaagactcttgttcctaaataacttagtttttgggtggatcacttgcttccaaatacatttgataaaccaatgagcattgatgtgatatgacacaatagaaatgagtaattttaacttacaatgtaaaagtgaatcaagaacaaaaatctgagttttatttagagtgtgtcataagatacaaagaagatttgtagctttctttgatgtgctcacatgaaatgcctgtagtcaaacgg

SEQ ID NO: 15368 - DNA, 596 bp, Homo sapiens
  MAP TO AP000352.2; EXPRESSED IN PLACENTA, SIGNAL = 1.4; EXPRESSED IN BONE MARROW, SIGNAL = 2.1; EXPRESSED IN FETAL LIVER, SIGNAL = 1.5
caacctttgcagcagctctcctgaccaccctgtgccttctgcctgccatgctattcctcagcttctgcatgactggtttgttgtttccttcctgcattttcaaagaggcttttctctcttgccacatgctgtcctgtctactgctggggacccccaccatttgtttctgtcatgtgcccctcccccaccagctagcatccctgggaccagggaccttttctgtcttgctgtttgaagcatccctggggcctgagcaatacctgacagactgctgcccagttgtatttcttgaatgaatgaatgaacaaacataaagacattcattaatttccccagaaatgcttgctgagcactcatgattctgggtgccatggagggttatgaaggttgaatgcttcattactacctcttcttgccccaggctcatggtctgcaggtaaaaggattccatcttgagagtgatttgaggccaacatcagggagaccttttgtgtggattattttcttagatagaatggaaatgttctctgagagaaatcctcttgagtctcttcttttcttgagttatttcttttcatatgttttacttgggttga

SEQ ID NO: 15369 - DNA, 568 bp, Homo sapiens
  MAP TO AC007106.6; EXPRESSED IN PLACENTA, SIGNAL = 1.5; EXPRESSED IN FETAL LIVER, SIGNAL = 1.7
agcctctcccaaccactcagctgcgctgatcacctaatttatctgggtgagaatagaaagaaatgagtattgggggcagtgtcccacatggctgaaagaattgggcactcactatactttcactctcctctgtgggagaaatctcaggttgagggggtctcccttggaattgagatgtaccaccttggagaaggggtgacccaggtaaaatgaagttgttattcatatccttctcagtacatctggtctcagtcttttttggttgttgttctaatgatgtgctgtaacttctttgctggacctctagactctctcaaagtaactctcattcatggtattgtcaaaattgatgcttctaaaggtaagtgattgtagaaagctcctattgtaccatattgctgatatcaccttaattttatttcttgatccatactttgaaagcttttctttctggaatttcatacacactatgctagcaaccactgaagctaatgtgattttgttgagctaaccattatcttcttttttaatataaaattatctgtgtgagtgaaaatgtatagaacaa

SEQ ID NO: 15370 - DNA, 561 bp, Homo sapiens
  MAP TO AL008723.8; EXPRESSED IN PLACENTA, SIGNAL = 1.6; EXPRESSED IN FETAL LIVER, SIGNAL = 1.5
tttccttcagcagtgttttctcttttttaaaaaaataatttgtttacttattttttttctttttttaagcagtgttttgtagttttcaggatatgggtgtgaacccaaaagtctctgagacagatctcaatcaatttagaaagattattttcccaagattaaggacacacccatgacacagcttcagaagatcctcacgacacgtgtccaaggtggctggggcacagcttggttttatacattttagggagacatgagacatcatcaatatgtgtaaggtatacattggttcggtccagaaaggtgggacaactcaaagtggggtaaaggacttctgggtcataggtaagtaagagacaaatgtttgcattcttttgagtctctgatcagccagcctttcaccaaaaacacaatctacatgtggggtggcgtagagtagccgccacttctaccttagtttggctttagtgaaacaataggtcagaggaaggaaatcagacatggcatttgtctcatgtgagcagaaggaggactttgagttctgtctgtcctttgtgcaca

SEQ ID NO: 15371 - DNA, 594 bp, Homo sapiens
  MAP TO AL022318.2; EXPRESSED IN FETAL LIVER, SIGNAL = 2.8; EXPRESSED IN PLACENTA, SIGNAL = 1.5
ccttctctcctttttgctgctgctttgctgtttgctgccatcagggcaggggtggagcagtaagtgggttccacccccagccacaccgtgattggctcaggagtggacacgtgccctgagccagtctaatccatgctaacctcaggaccttcctgggaattgtgggagacagagactctctgttggtccagataggtggggcgtactgtgggcttggcgctgctgtaacaatttttctaccacaggagacgctggtctgaaaagaaggcaacgcaaggaagagaacagagccaaggcacctgcagcgagccagagccagagccctgacatcacaaatgctttaattggttccatttattgtttaatccacttgaaattgaatttctgtcatccccgactggaagtgtactgacctgcatactacctgtgtttcctcacagcaggctgaaaagctgtgccaatattgagctcatccagaattagacgaagtttgtattctttttattacttcctttaaccctgaatcagggtccagaagcattttgttgaccattaactcttctctgtgaataaagcagcatgaggaacaacctc

SEQ ID NO: 15372 - DNA, 571 bp, Homo sapiens
  MAP TO AC007363.3; EXPRESSED IN FETAL LIVER, SIGNAL = 1.3; EXPRESSED IN PLACENTA, SIGNAL = 1.5
tgcctggtctttgtatgtgcattttgagttttcctagtgcaggggaactacatatcctttaccctaaagtcagggctcctatctcaaatactttttggaatgtggtaggggataagacttatcactaattaatctgagtggaaattaattgacatagagataaaaaccaaaccaaaacaaaaattacctaaaacaagtataataaccctccatgtgggagaaacaagcattatgccagcaaggaattgtgattttacttactgaacttgggccttttaatcttctttgccgtttctttgtttgaatgtactccagtcaccagcaaaactacatgaagaaaatttttaaaaatttaatcaattttattttacttaaattctttctcttttgactcatacttgcttcgatcatccacaaagtattctccatggcagaactaattttccctcttacagtcatgcatcacttaatgatggggctactctctgaaaaatgtgtcaacaggtgatttcatcattgtgccgatattgtagagtgtacttacacaaacctagatggtctactacaaacc

SEQ ID NO: 15373 - DNA, 594 bp, Homo sapiens
  MAP TO AP000344.1; EXPRESSED IN PLACENTA, SIGNAL = 1.8; EXPRESSED IN BONE MARROW, SIGNAL = 1.5; EXPRESSED IN LUNG, SIGNAL = 1.3; EXPRESSED IN FETAL LIVER, SIGNAL = 1.6
agtctcagggtgattgcctgatgaatgtacatgacccgacttccagttgtttgagccaatgaggctgactagttatgcccacgggagtacaggtctcttctctacgacccaccaccaggccaaaatttcctctagatgctctgaccagtcagtcctaggacctgattgactccagggagtctgaccccctaagtataacacaacatcatgggcctgggaaggtataaacataatacaactcctgcccaatgaactgaatgttaacaggaagatgttccctgaagctcaaggaaatgactttggtgacaatgacccttgccagagccaatgccttgtcacctacctggtggtcatgatggcgatcaagggtgtccctgctttcatgtaactaacttgccttcaatggttcgcttttcccattaagtgactttttttcagttatatacttttgtaaactagaagtgtttttactgtcatttctttatgtactttttatttttaccatcaatttaatttaaaaaactgcactcacacattttccatgcatacctctaattattgcaggttatacaggtcttgcacttatggaaatgg

SEQ ID NO: 15374 - DNA, 554 bp, Homo sapiens
  MAP TO AC008166.1; EXPRESSED IN FETAL LIVER, SIGNAL = 1.6; EXPRESSED IN PLACENTA, SIGNAL = 1.2
tgtttgactttgaagctctggaattagtcaaatgtttagacagataatggaaaatcaacagacaattgttcacaaaattaggcataatagataagaaatgtgtatctaaaatgaatactaatgtttaaggtatgaaaggcaaaagaggaacttatggaggagcttgaaacgtaatgctgagaaaatatggctaagattcaagataaagtgatttgatggaggcttagtcagaagtacacagtaagagaaagactgaaaggcctgctggatttcccaacatggaggccctctgtgacacttgggagaggagcaccaataatgattttggaaaacaagtaccagattacagtgggtagagtaataaattggaaatgagtgaataaagacaatcactctttgaaagacaatggctcttaagaaaaggtgaggaatagtacaacatctggaggaggattggaggtgaagggagggcatatttcttgtatgtaggtttgtttgcctctttagatggctgaaacaatgggagaatgttcacaggccaagagtcaggagag

SEQ ID NO: 15375 - DNA, 554 bp, Homo sapiens
  MAP TO AL079300.11; EXPRESSED IN FETAL LIVER, SIGNAL = 1.4; EXPRESSED IN PLACENTA, SIGNAL = 1.6; EXPRESSED IN BONE MARROW, SIGNAL = 1.4
tgaactacaggaatgggcaagactatgaagagaaagaatggtggggaggaaggaaacttattaaagtgtttggggtccccattcagtaaccttgggaaatctaactaaaatggtgtctcctgatcagagactttatttatccctaaatttcaatggccaatctatcatcacataattagtgatgctgtgctttgaatttattaccaagcctggctttctgctgttgctattggacttgtaccatattgcaatgtgagcatggagattattgtataaattattctcactcacataatcatcgtgattttaattactgtgtaatctttgctaattactgttgtatgtatcatttgctttggtgccgatttaacacaactgcttttcgtttggctaaaagatggcattacaacttttcctttttgcaggagaaaatttgctttctgtaaacatttgcagccccaaactcttggcttgcagttcttggtttaaaaggaaagatccagaccctaccaccagccctgtttgtttttatttgggataaggctggcttgaat

SEQ ID NO: 15376 - DNA, 565 bp, Homo sapiens
  MAP TO AC007286.18; EXPRESSED IN FETAL LIVER, SIGNAL = 1.3
ccttcagtggaggagaatagcatttgacagctgcctctagagaaagtggaagatgtgcagggctcgcaatgttgggcatgttaacagggggagaaatccgtgaaaaagctgtgaaaggaagtctgtgcaactgaatgaagtgctaaaacagatgactgattttaaaatttaggggcttgagggcagagtgtgcctgtggctttttctctttgtgctaagtggtttcctgagtggaccctgccacaactcactatcacatcatgttgaggctcttcctttgtttctcctttcgtgtcagtttccctcatttcttctgcactgtagcccaaataatagacatctccatgcctgctcattaatccacagggcaaagaaaagaagcatctttgaggtgtttgcattttaatgggctgtacacagacagggttcgcctgcttctgatcctggaggactgaaggaagaggaggctggatcatattttccctttcttgtctaatttaacaaacctgcttggctaccagcaagaagttgacagattgcatactgtcatcatttaatctaaaga

SEQ ID NO: 15377 - DNA, 564 bp, Homo sapiens
  MAP TO AC007363.3; EXPRESSED IN FETAL LIVER, SIGNAL = 1.4
cacttgtgcaggatgtggagtatgcacaattcccattttaaagataagggaactgaggtctgcagtgggtaagtgacttattcaaggtcacatacccaaagtcaagcctgggtttcatggctcctgatcctgcacccttctttctaccccttgtgtctaagacaatctgcaggttgcatcttgttaagactgaaaaagcaaaatggacttttcttaaatctctgtatcaaaatgcttgagatttacagataaggggcaaattactcatcagttaaagatgtatgagaagaatgcactttgtcaaatgtggaggaagtgtaaaaaggcaaagaaagagaaaagtaatttaagcagggaaaataaagaccacagcaagaagaagacacttgataatgttcagcactggtgaccaggaagtgtaaaaattagagcaagtccattgggaattgaatgtggcaatgcatgcaaaagcaacctggagaaagaatgactaaaattaaaaagactcgtactaccaagtgttggtgaggatgtggaggactggcataattgctaacaggaagg

SEQ ID NO: 15378 - DNA, 580 bp, Homo sapiens
  MAP TO AC008272.1; EXPRESSED IN FETAL LIVER, SIGNAL = 2.3; EXPRESSED IN BONE MARROW, SIGNAL = 1.4
ccagaaagtaacccacatgcgtatactcagcttatcttaaacgacggttgcaaatcctcatgttgcagaacgctttccttacatcaaaaaaaattgggttctggtcacatgactagaatatattaagtcagggacgctctgaaggatgaggagtagagttgattggggaaaatggaaaaaaaaaaaagaagaagaagaagaaaacttttaacaaaatgagttggagacctgtttacaggcccccacctcccaaattgatgaacaccagaccatcacaggaaactgaagagtccaggcttctcctccctgcacaagaggtgaactttccatggctccactctcttccccagttgtgcaggtggatattactgagagaaaatcagttggaaaaaggaaggctttatctggggccaacagtctgatttttcagacttcaggctgttttaagcttgaatgtgtggttttgccaaggacccttggctcttttctaactcgttatttcccccctttaaatgagtacatctgactgccattagaagaaggataaggattaggacaaaaacaacttttaagtgcttcc

SEQ ID NO: 15379 - DNA, 566 bp, Homo sapiens
  MAP TO AC007463.3; EXPRESSED IN FETAL LIVER, SIGNAL =   2; EXPRESSED IN LUNG, SIGNAL = 1.3
ttttccctgagcatgtgtccagctcttactcataaatcctcaagcaccaccgctaaacataagagagggaccccacttcgtcaccccagaggaatcccaaggcccgactgggcacaaacatgcttactaacctcatgcacacagttaccacatgattcataatccaaaataagaccctttggagaagagagtggagaggtgctataaatcccaacactaggacagcagatataaatggtgactctcctgggtagactgggaaatacagtcatcctgtttatacacctaatgtctattgagcatcatgttagcaaatgccgtggctttaacatccctgaaatagaggatcagcatgttctgataatcgacactcacattttctccttttctacctgaaaaataatgtaccaaatttcaggtggtgttgctctaaggacctaaaattcatttttaacaatccagtcaaaattcatgtgtgtgacatacacatacacttgtttctttctatcccctttaagttcaaggaaagtgctgtatctaaggaagttgctttggattattagaaa

SEQ ID NO: 15380 - DNA, 578 bp, Homo sapiens
  MAP TO AL079300.11; EXPRESSED IN FETAL LIVER, SIGNAL = 1.8; EXPRESSED IN PLACENTA, SIGNAL = 1.3
ttcacggtgtcattaaatctgcattgagtttcctgtagctacaattggcccaggctatgaccacactcagtcctgggaattatgttttgtttgttttgctgtgtgattaagtctaataacagtaaatccagcatctccttgacttggactttcttggttcattacatcgcagtggatcttgaaaaatatgtatgtgtagatgtaagttcaactggttgagtttcccgtcagccttctgcccagtaggtgtgtgatgtagtggaagaagaagaatgggattcagatctggcccaccagggttcaaatgcaggccctgccacttagcagtatggccttgagcaaatgttttctcaccactgagcctcagtttcctcatttgcaagatgggatgatgcctctgattttgatgcggtgatgcttcttagcttgatgagatgctgcatacgatacatgcagatataggtgcctccttctttgttcttcaccgattttcatggagcatctgcttctgtggctgacactagagataaaatgatggggccccattcataagataatctgaaaggggaaggggtatg

SEQ ID NO: 15381 - DNA, 574 bp, Homo sapiens
  MAP TO AC007539.8; EXPRESSED IN PLACENTA, SIGNAL = 1.3; EXPRESSED IN FETAL LIVER, SIGNAL = 1.4
gtcttctggctgctcctgtcatatggttacacctgtcatctgctcagaaaaagacgtccctccttagaatttgtcctccttggaatacgacagggaatttttaatatgggacaaaattttttttcattcttccaaacacatttttcctgtcattcattcactcattcatttattcaatgcatgttcatagtagagcacatctggcaatagctggggtctgcctggaagatgtctctctgggactttgcttatggagagaagccctccaaactgtatgcgggggtggggcaagagtgggagtgtggcgagcgcgagggttcagagtcacatgagggtgcagagtgatgagatctcgaaaccgaaagtgacctttcaatggcagacacttccactgggcctcagaattgtctcctgtagttaaggggaatgagaatcaggccaaagatggggatgtggcacgttcaggctggtgaggacctgatatgcacaaatcaggcagggaggacctggcctcttggtggcagagaggggaaaggcctaagaagctaaagatcttatggggcatttgctaaca

SEQ ID NO: 15382 - DNA, 589 bp, Homo sapiens
  MAP TO AC007539.8; EXPRESSED IN FETAL LIVER, SIGNAL = 1.8; EXPRESSED IN PLACENTA, SIGNAL = 1.7
cctaagaatcagaagcctgagctctaaacactccaagatgtttgtcctttcagtaaactctaagccctcagggctctattgacaagtctggactctcagatgggctctttttgtcatctgtttatctaaaacccacaagcttttgttcctctagtcatccaaaaaataatcgctattataatcctgcctcaggaattcaattatctcccttacagccttcccccagcttcttaaatgcaaccacagttttgaggcccttgggctattactgtgggtgatgagatgaatttcttctgtcattcattcacacagtcatgagagcagatcttatttttcttggtcatgagcttatatcctgtcaaaccctcacagaaagggaagtgcatccatgattgcatgtttacttattcattcatttggagtaaaagccagataattattttgaaaggcagagacccccagcctctcctgctctctggaagtgtgcaccaaggcctgtagaaatcaccgtgtcaaggaaatgcatagggcaggttcctctcggagaccagatgttaaagctcttgtggccgctttcaagttgtctcct

SEQ ID NO: 15383 - DNA, 588 bp, Homo sapiens
  MAP TO AL078474.2; EXPRESSED IN FETAL LIVER, SIGNAL = 1.4; EXPRESSED IN PLACENTA, SIGNAL = 1.4
cccgttacctggctgttatgaggaaccactggtaatattcattccttcctgctcttggattgcttactgttttttatatatccattcaatcagatgacatttgctgagcacttatcctgtgctaagtagttttctaagtttggagatgatagtgctgtacagaccaacaaaatctttcctctgataaggtttatatgacatgttaaggctgaaaaacatttaaataaatactttagcagtgatacatgcagtaaagaaaagtagtatgaacagaaaatatgataagagcaagaaggttgttttcgatacagtggttggagaaagtgtcacagaccaattgaaaatggaaggaaaatctaaagaaatgaaggagaatgttacacaaatttctttgaaggtaacagcaaactctgatgctctggggtagaagtgaggtagacttactccagacacctcaaaaagccctgctgctgttgcccagaaggggattggcagagcggcagtgacgagactggaactatggatcgagccctggagaggtctcaggaggctaaataggtaaataggatgagggaccatgtggaggac

SEQ ID NO: 15384 - DNA, 575 bp, Homo sapiens
  MAP TO AC008272.1; EXPRESSED IN PLACENTA, SIGNAL = 1.3; EXPRESSED IN LUNG, SIGNAL = 1.3; EXPRESSED IN FETAL LIVER, SIGNAL = 1.5
cccaaattgagataagctaggaacaaagaggaacttcttcatacagtgaggaggtaagcaagagaacaccagcaaccccgatcaacaccttggacatccacagacctcaccatggcagaggtgccctacggtcctcacaggcactacctaagcccacctgaaggagctgtctagagttcacaaagctgtgctcccttcagagaagtagctaacactatgttctcctctgtggcccacatgtctactgtgctataccatcttgcagctagacctacggctggagtgtgtcgtgctcagggttcaagtaggcacaggtccccttcatccctgaggctaaactgccaccaaaacacccccagcctagtgactgaacatccccaaggtgagctataagcatctcttacacacttctcctggggccaagtggaggtggagctgatccacctactcttcccctaactcctcaggccagatctgaaacagtaccctgcctccaagaaaacaataccttagtcactttgagcagtcatgcctccctgtgcctaagttttagcagtgccctgtatcccagaaaa

SEQ ID NO: 15385 - DNA, 548 bp, Homo sapiens
  MAP TO AC004032.7; EXPRESSED IN FETAL LIVER, SIGNAL = 1.5; EXPRESSED IN PLACENTA, SIGNAL = 1.3
aaacagccatgcccatttaggtaatgtctatggttattttcccactataaaggcagcgttgagtagtttagttgcaacagagactgtatggcccacgaagccaaaaatatgtactatccagccctttatagaaagtttgccgacctctgatttaagggaatgaatggattgagtgacgtctatgcatggctgttctgggcttgatcccgaacctccctccagcctcacttgggagaagtctctcgtcctacacagcacctcccttagaatgacactgggagagaagactataggacacattgggtggggagcactcgcagcacctcttggtaggctgaaaagttgtttcagggactccccgggccatgggaaagtggagacggcgctgaaaacctggcatcactattctgggctgcagagagccagcatgcaatgggatgcctggaggcgaagcttttgtttagcacatacattaataaacacaggaggtcactccttcgttccacttcatgaacctccctcagtctggagtgcaaggcaattctgct

SEQ ID NO: 15386 - DNA, 550 bp, Homo sapiens
  MAP TO AC008174.2; EXPRESSED IN FETAL LIVER, SIGNAL = 1.4
gtgcctgtttcaaatgatgctaaaaggtgactatctgatttacaacttctgagcttagggtatgaatatagcaagttggttttattatatttatgtttagagattatagattgtccttttatgtgacatgttttccccacaactgttttttccacatgtgcaggaggaggttttataggtgtggttggtctccttactgacgtgtcaactacaaatgcacagggttctgcctgaaatgttttagttgttgcagatgtgtagcttctatatgtaaagtcttcactgcacgtgctacagaaacttgaactatctgaagagaggatggagtcatcagatactgggtatgtattattttgcaatcttttttcatactttgtgatggctgggtacaatatactggtcactgtagccacaacccaggtcattacattctgaattataatattcagttcttcagaagttacctggaaaggaggtaagcagagatgaaaataaagtcatgtaacaacttactctatgttttggagacagaaggtaacatttaattttt

SEQ ID NO: 15387 - DNA, 573 bp, Homo sapiens
  MAP TO AL079300.11; EXPRESSED IN FETAL LIVER, SIGNAL = 1.3; EXPRESSED IN HELA, SIGNAL = 2.6; EXPRESSED IN PLACENTA, SIGNAL = 1.4
cctgagaattcagtggaaaaatgtatgctaagtgctggacacagtggctggtatacaacaagtacaaaataatagcatactttcttttgcactgcaaagtcaaaatgtagactcaatacattggagcttctaaaaatttaaagtacagctgtccttacaaagtgattcggagtcaatgcttcagttgatttcaattcttacaagcaatgccctcagaaaaacagcactatttatctctggtaggaaatcaaattataaaacaagtaaaccagggtgaacattacccatcaggctgtggcaatgggtgcgtggaaactgatgagccgtcattaatttctcccgcagaatcactacctaaatatgagttggcagtgtggggaaaaggaagccatttatctgtggccagatacagactcacagatgcactgacagtgtcataattacacaccggaagtatgtcgtgcagggttcagtgttcagtcaaagccctgtcatcatggggacaaggtagtttccttgggaatttcgatatacagactgtagaccagaagtgttctcagagttcagccatgc

SEQ ID NO: 15388 - DNA, 545 bp, Homo sapiens
  MAP TO AC007539.8; EXPRESSED IN PLACENTA, SIGNAL = 1.4; EXPRESSED IN HELA, SIGNAL = 1.3; EXPRESSED IN LUNG, SIGNAL = 1.3; EXPRESSED IN FETAL LIVER, SIGNAL = 1.4
cttgaggtgctgactcctccaggctggctggctacttcgaaggatgattctcggttcaaacaatattctaatggccttgggtcatgagctggggtttgggggttttgggttttggggagcagaatcacaggggccaaggagaagcataggggccaagaatttaatgtgtccaactttgagaacttaatttttcctccaaacctggtgcctttcaccgattcttcccatctcaggagatggcaccagcagccacccaaatgctcacttcaaagtccaagtgctatcctggctctctctttctctctctccctggcactctcactccctggagctctctctctctctctctcacccctaggatccagtctgctggtaagtattgttctttctaccttcaaacatatcccagatctgaccatttttcacaagtttcatcctcatattgactggtttgtgcctggacaacaacacactcacaatttgtctgtctgcttccacttctgtctctgtgccgcactcccccccacaccattcactttctgtga

SEQ ID NO: 15389 - DNA, 584 bp, Homo sapiens
  MAP TO AL079300.11; EXPRESSED IN PLACENTA, SIGNAL = 1.2; EXPRESSED IN FETAL LIVER, SIGNAL = 1.4
tgctccagtccctgtttaccccctctgacatctaacaccatgttcctttcattcttcagttcctgccacactggctgcctgtcagtttcttttctacctctgatccttctcttttgctgttccttgtgtgtggaatgctcttcccattggaattctcatggccggctccttctcatccttcacatctcagcttcaacgtgctttgctgtcagagtctagagtagacttcctccggttactttagtccccactcactgtttattttctttgtggtctgcatcacacgttgtactgtagttattggtctgcgcgtttttttgttttgttttgtttttgtctgtttccgctactactcagtaaaagccacgaggacaagaactctttcctggcatgaaacagaaactcaaaatataattttaaaagactgccctgaaaagtcttggcagatatactgaagagtccccagactctagaccaatgtgataaatgtgtggaggagtcccagattccaagtcccaagatcaagctttagatttacaaatagtgccatcattgttattaccattattgtttttagtggctgg

SEQ ID NO: 15390 - DNA, 560 bp, Homo sapiens
  MAP TO AC004032.7; EXPRESSED IN LUNG, SIGNAL = 1.5; EXPRESSED IN BONE MARROW, SIGNAL = 1.3; EXPRESSED IN FETAL LIVER, SIGNAL = 1.9
atgagtgaagacccgacacccggaagcgtttatccccagaggaagaaggactggtctcataaacctggtatgttggagaccaagaaggaaactgcccagaacaggccagaagtggcaaatctttcaccttaatcagctgcttattggatgaaaagtcaccccgataaatgttcaactgggaaggaaaagagctaacgaaatggacatgtgccaaattctggaaatagaccatcaacgaccgtgcctaaacagtttactcggagacttgatcatctagtttagccctccagggattaaatgctcacctctttataacacaggggaccaatgctcgatttccacacatttgaatttcatagcatgcatgcaaatctgtaatgcacgaaactgggtgaggcggaggagttgcagtgtcctcggcacagcgcctccttggggcttgcactggagctgcctggagcccggggatcccacaggttaatgagtgggaccaggacccggccaccagcccctggaaaatcttccccagggagaaggccaccagatcacaagaccccaag

SEQ ID NO: 15391 - DNA, 562 bp, Homo sapiens
  MAP TO AC004832.3; EXPRESSED IN LUNG, SIGNAL = 1.4; EXPRESSED IN FETAL LIVER, SIGNAL = 1.7
tggtgagcataccctctgtgctgggagctttatatcattatcaaatcattcagaagcaggtatgggtattcccattttacagctaaacaaatagaagttcagagagatcaagaaacttttctgaggtcacacagccagtaaatgaggagccagaacttgaacccaaacctatctgactctggattgcacagcccaccctgctttcccctgtagggcttaatattgtgtccagaatatagtaagtgctcaataaatgctttaaatcgtcattgtgtagaagcctggatctgcctggattcaagctggattcaggctgcagggtgtcttggggccagaagggttaattttgcctgccttgaaacaaaggccttggggaaggagagacccccagcctgccccctaaaccccagagcacactgtctacaggtaaggtcccatgtgtgtttggctcctcatttaccaagctctcaggggaccatggcaacaaccacaacttaaacaaacaaccgcaggtgggtagatagagctgcttgcgccccaacctctcctgtcagccggttac

SEQ ID NO: 15392 - DNA, 571 bp, Homo sapiens
  MAP TO AL022328.21; EXPRESSED IN PLACENTA, SIGNAL = 1.7; EXPRESSED IN FETAL LIVER, SIGNAL = 1.6
gggagtataggtatgaggcaccatgcccagttaatttgtctctttatctttaattggacagtgttctcttgagtatgtctgttgacatctaagtagtgacgtaggagcccccaccatgcctgtggttgacgtgtataggccttgtggatggaagtgggctcctacagcatttttgcataccccgtgtttctagctttattatcaactattttttgagatataaaggtgcatacatttgcatgtgtattctttcccagatctcatgtgcaccggatctttggttcatgcctcactgtcaccgtcagctaccagctccttacttttatttgttttcttgtcggatgaggggtgctgtgacctggcacccagctggctttttcttcctccacaaaaccattaactagtcatgcacaaaaaatgtattcttcagttttaattcttttgaactttagaaaaggagtaacttgctgtatttggttcctaggagtcgagattttcactaaacattgtgttcctgagatgtctccgtgttgttgtaactgctgttcattggtttgcggttgtgtgaata

SEQ ID NO: 15393 - DNA, 574 bp, Homo sapiens
  MAP TO Z97055.1; EXPRESSED IN BONE MARROW, SIGNAL = 1.9; EXPRESSED IN FETAL LIVER, SIGNAL = 1.7; EXPRESSED IN PLACENTA, SIGNAL = 1.6; EXPRESSED IN HELA, SIGNAL = 1.4; EXPRESSED IN LUNG, SIGNAL = 1.5
tcctggaaagaatgcctgtgacttcttttctgataatgcatttttaagtagatataattttgagcaagcatttcagtttccctagccttgcagaagaagggcaagagcagattaaacatgtagttcaaggttgggtgccctcctggttttggaagtgataagaggaaatgaggaagagaagaaacttacatttgcagagctcacactgactggatgcaggcactattctcagtgttttacatgagtagccctaaaaccaccctcagaggtggtgtcactttctacaactcacaaagcagaggtatggcctccctgcccggcaccgccatgagtgccagcgatctctgtgaatccagagtgcaagtccatcccactgcactaaccaccctacccatgaagaaaaagacagcccgtcaaattattcaagctttcattgcatttcatattgctacttatagtctaacacaaattctaatgtggtaaagaaattcttgcgatgatagtctccaaagctaagccccttagacaagtaaagaatctagtccaaagggagaggctctgctcagtacttgcc

SEQ ID NO: 15394 - DNA, 563 bp, Homo sapiens
  MAP TO Z97055.1; EXPRESSED IN PLACENTA, SIGNAL = 1.6; EXPRESSED IN FETAL LIVER, SIGNAL = 1.6
tctctaagcacgtggggaacatccactgttactgcattccttgttgcagtgattgctgatgcacagaaccgttctctttattttatccataaattcacttcctaataacaataaggcatgccagggctttggcctcatgccttattacaccacctgaggagtaagataatcacccggaaatgcactgcctgttgtgcattttattacttgaatacaaagtgattcaattcaagaaacacttagttgaagacagcatgaaaaaaaaataatcatatgaaaagtaattcctcctaatgccacagagtacactgcagggagtactcttccagagggagaatggtctggatgacctgttgggtctcctctagttctaatttctaccaactgcgggatcataaaagctagtgagacttcaattacaatatgaagattccaaagggccagatctggatcgttctgaaaatggagcctattgggtgttctacctaaacattcttggtataagcattttctaagcaaccattctctcaaccatccattattcagcaaacactgtaggccac

SEQ ID NO: 15395 - DNA, 592 bp, Homo sapiens
  MAP TO AP000053.1; EXPRESSED IN FETAL LIVER, SIGNAL = 1.4
gctcaaagaggagtcagactggaaagatatacacttggatgtcaccagcatattgatgttgcttcatgccatgggacccaatggggcccccccaccctggaggagggtagttagagaagagaggtctgaggatcaagtcctgggatggttagagtttcatagaggagcaggaacataaataataaaggccaaccacataaggaaaacaaaagctatatattcagggtatactgtaacaagggagtcgtcaccatcacttacattttggtagagactccaaggcaagagtgggaaagtttgacagtgatgttaaccaaaaactgacagaggcaggtgtctcaattgatagcggtttatttcgccaaggctgagaatgtgcctgggaaaaactcgagtcacaggaacatctatgacctgtgctttccaaagagggttttgggaattcagtgtcgaaaaggcaaagaacagacaggagggaaaaaagcgagggagggtgggcagtgaggcaaatggtaacattattgtgaggttctgattaacgctcagtaaattggcattttacataaaataaagcaaacacgtgaaaagagga

SEQ ID NO: 15396 - DNA, 575 bp, Homo sapiens
  MAP TO AP000352.2; EXPRESSED IN FETAL LIVER, SIGNAL = 1.7; EXPRESSED IN PLACENTA, SIGNAL = 1.4
catggagattggtgcatttggtgagttgctccgtggcctctgggatgggttgggcccagcagtgtcgaatggctgtgttcaggccatctcctgcaaagcagtccccaggccaccggcagggagactcaccataggaaggccccctgtgttggaggtggtgtaggttaatgctctcgccctctcttcctccttctcccctcagaccgaagccaggacagcacagccgtagcactctcagactctagctcaacgcaggacttctttaatgagcccaccagcttactggaaggctccaggaaatcctacacagagaagaggctgcccattctcagttcccaagcaggagcgacgggtaaagatcttcagggggccacagaagaaagaggtatgaagccctaactcggtgaattagaaccactttgatgtcctgtggcaatctgggcaaagccgaaggcttcgtggcccagggaccttggctgggcaagtcacttactccctgggcctccatttttctccctgtaggatgagaatggtcccagtgcccgccctggggttgtgagggttgagtgaggcag

SEQ ID NO: 15397 - DNA, 575 bp, Homo sapiens
  MAP TO AC002472.3; EXPRESSED IN PLACENTA, SIGNAL = 1.4; EXPRESSED IN LUNG, SIGNAL = 1.5; EXPRESSED IN FETAL LIVER, SIGNAL = 2.5
acctaccgcataggatggctgcaagggtcacacagaacaagtattggcagttgcaggggtgtgtggaagaaagaatcttcctgcccttgagctgttcagcaaaaacagggcctccccacaaagtgggggattactgtctgaccctgccagccctagaagtgtctgagtaaagaggaaagcacatgtatttgagtacctgtattatcaaatccagtgctgggcgctgagtctagttctcaggtagagagggggcaatgccctgagtccttgcttctgtgcagggagctctccatggtgctaaacaagagtgtctgtagccacgggtgccagtccagcaggctggctgagcgctctggttagtccatccgtttttcttctgtgtatttcttcaaaccagccttcctagacctctgcaacgtcttactgtgaagtgtgcgtggtgatttgtgcatagatctgtattgtctgcttttctctgcttcaaagtgtgatgcgtgttcattatggatggtctgaatccgtatcaactctcagaggcaaagagaagtggccccggcttggtggaggttggtggt

SEQ ID NO: 15398 - DNA, 577 bp, Homo sapiens
  MAP TO AC007539.8; EXPRESSED IN BONE MARROW, SIGNAL = 1.4; EXPRESSED IN FETAL LIVER, SIGNAL = 1.7; EXPRESSED IN HELA, SIGNAL = 1.5
ccctgcttctttttcactccttctacctttccttcttgctttttagaacggcttttaaaagatgcaagccagattgcattcatttttctacttaaaatccttcaacgctacagacttcttttcagataaagttcacacgcccagtgcagcagatgaggtcatcccaagctggctcttgttttgcatcttcttgcaggcccgcgtgtgtgtatctggttatctcacactctcacgtccaatttgcctatgccatgtcgcctacccgtgactgcttgctgagtgttgcaggctcagacacatttgcccttggcaccattttctcattctcccatcctcagtttttctcttcccctcttctcctgtacctgcaccctttcaaacatgtgagtgctttggggacagggacaatgtcttattcctctctagtcgcaacactcagcatgggtactagaacctgataacacaatgaaataattattaaatgaatggcctcataagtccttttccttcattggtagagaaatagaagtcccgcttctcttgatcccatgacctgtgggccaccttcttcactatg

SEQ ID NO: 15399 - DNA, 585 bp, Homo sapiens
  MAP TO AB016897.1; EXPRESSED IN FETAL LIVER, SIGNAL = 1.6; EXPRESSED IN PLACENTA, SIGNAL = 1.3
ccttatttgtgggggatgtgttccaagaccaccagtcaatgtctgaaatcataaatagtacagagccctatggatactatgttgttttcctgtatatatgtacctgtgataaagtttaatttataaaataagcacactaagacattaacaacaataactgaagataaaatggaacaatatatattataacaatatactcaaataagaggtatgttaatttggtctctgtctcctctctcaaaatatcttattgtattgtactcacctgttttcggactgcagcttaccacaggtagctgaactgtagaaagagaaactgcagataagggggactccagtaaactggtaataggtgcacttataaaacatctttgtaaaaacagacttcccagtggccccaaatgtgggttgtcctaatctgctgtgttgtttgttagtgatacataaaagaaagttaccagatctttcttttctctaaggccaggttgaagcagagccttcatgtttgctaggctttctcctgtgtagttagccttgctcagtcagagtacccttaatacactccttttattaacccttcagttt

SEQ ID NO: 15400 - DNA, 571 bp, Homo sapiens
  MAP TO Z82201.1; EXPRESSED IN FETAL LIVER, SIGNAL = 1.4
tgaaactctcgtaagacggcataagagaaaatttagatgaccttgagtttggcagtgacttgttagatacaatccatgaaaggttctagtcccgaccctttccttaccctgaacctagagggctgctctgaaagtgggccacacagagctccagtctgtgggattggttggtgtgggccagcgcagacagtccactccatagagtacacaatacagacagttgactctatggagttcacagcacagacagtccactttatgcagcccacagcacagacagtccactctatagagtccacagtgcagcaagtcctgtctgtggagtccacagcacagacagtctgctttatggagtccacagcacagacagtccactctatggagtccacagcacagacagtccactctatggagtccacagcacagacagtccactctatggagtccacagcacagacagtccactctgtgcaggacaggaggttgggtagagacagtccctggaggttagcaggacttcaaagacaaaattcttttcacactgggcacaggccaagaaagagcacacaca

SEQ ID NO: 15401 - DNA, 573 bp, Homo sapiens
  MAP TO AP000356.1; EXPRESSED IN FETAL LIVER, SIGNAL = 1.9; EXPRESSED IN LUNG, SIGNAL = 1.3
tcgtagaccacctctgggacagtgtgtctgcctctgaggtcagacgctctgcactgggacagggtggagtggagggaaatccagcttggggctcattggaggggcttgctggcagacaccgccctttgtgggaaactgactgtgggagaggggaaccccaacctctgtcaccacatccctcttccctgttgtcacacctgtcacctgctgccatagccatgagacttcccaagggtcactgctgccactcactgcacagcctggaagggagtccacaggggacatacagtgagcaagagacctgtgccactcaggcctcctgggggtgtccccagtgcagccatgatgataatcacagctaccattcaccaagccctgcccacagtctaacctactctattcacaacactcccagcagcaaggcaagtgaggtgctgccgtcatccaggctggacagttcagtgatttgcctgaggccccacagcaggtgagtggcaagtccagcatcagagcagggcaggctggcggtgccccctgagccccctttgccatgctgaccacatgcacatcctg

SEQ ID NO: 15402 - DNA, 568 bp, Homo sapiens
  MAP TO Z82188.2; EXPRESSED IN FETAL LIVER, SIGNAL = 1.3
tggttattcatttagtcccatcctcttttgactacactttgcaaactcactgaatcacagaaccacgaggcctctgggcatgcttagaaggggcctaaggccatctgtattcaacccacccttgtgccattgatagacaatgcttggctcactgcccatgatgcagctgcccagtccctgcttacataccttcaatgacagggagctcattcccttaaggggcagtctctttcactcctggctagcctggcctgttagaaaacccttcctcattttcagcccaaatccttcccttggattgtcctcatagaggtgctacctcttgttctggggccactcagggtcagtcagctccctcctcctcaccacaggccttcgaatttgggaggcacagtcccacccagcagtgtgctgggaaatgttcaacttagagttccagtttagttatttttctggtaaatattccagtatatgaatgtattgaaatgttatttatccaattcatgcagataatgacattaaatacatatcacacaaaaactaaaaacagtcaatatatcgccacacc

SEQ ID NO: 15403 - DNA, 571 bp, Homo sapiens
  MAP TO AL035701.13; EXPRESSED IN PLACENTA, SIGNAL = 1.3; EXPRESSED IN FETAL LIVER, SIGNAL = 1.6
aagaggttggtgggttaggggacttgggagatgttggtcaaagatgcaaaatttgagttagacaggagggataagttcaagagacatattgtacccatctagtactacaatacatgtgttaaaataccttaaacaaattaaattcagtagagcttaatcgctcaaagaagatgtgtgaatcaggcagcatccccaaccagaataggttcagagcaacttcgcgctgccatgtggttggagaggatttacagacagaaaaaggaaagtgacctccagaaaatggaggtgaggtacctaaacagctggattgataacagcttgttgtttgccttatttgatcacaagtttgaagagttgcccatctttggccaaaacttgctgattgttgcaagagtaggttacagtctgtttacacaccacattaggttacatttcactatgtacagagaaacctttaggctgaacctaaaacatgtaagaagtcagctttaggttaaacttaatttaatgcattgtatatttgaaaatttctaaaagaatagattttaagtgttctcattgcacaggcaaa

SEQ ID NO: 15404 - DNA, 578 bp, Homo sapiens
  MAP TO AL035682.16; EXPRESSED IN PLACENTA, SIGNAL = 1.2; EXPRESSED IN FETAL LIVER, SIGNAL = 1.3
gtgggtccctaaaacacagggccgggggcaggtatcccgtttccctggggttaaagggtgggaggaggttcgaaccatattaagacattaaaaatagcagctacttccaaacctcttaggtgctttagctacaggagggcaaaagctgttttaaggaggaacttggctagaaggttctagtacttatgtttgtgggtttgaaggtataaggtgcattttttttctttagccttgatattttgcaagatgctcaaataaaaatgatggcttttgccttccaagtggctggcttagcccagttgaccatgaatgctttgggacccttggaaagctggtctaaggtgggcatcataaatctcttttatgaatgctacctcaaaagtagtctaaaggcacagattacagcagagctgtgctggagagaaccagacaaattcaggttgaccatgtggctttgtcacctccggcaagtggcttctgagcctgagtcacaagcacggtgggactgtacctacctcctagggctgagacgaggagtaaatgcacacacttatgtacacacacaaaatgttccttgc

SEQ ID NO: 15405 - DNA, 579 bp, Homo sapiens
  MAP TO Z97055.1; EXPRESSED IN FETAL LIVER, SIGNAL =   3
gaggtctgggccctaattggtgtcccctccctttgcctagagtagtgattgggccctgccccaatgggtgccaacctgttcgggtgccagggtgcctgttggttcagagggttggggatggagttgtttcatgtcctgctgacccctcccctctttcttcctacaggttgtgcttcaggcccccctcttcccaaatggcatctgagtcctgcggtgggctgtgggctctctctatactcataccaagcagctgtggctcctccatgggatgtggtcaggccctggggcacctgagaaccctgccccatgtccaacctcctgtgggggctggcccagggctccacagcaaaacccaggctgcctctgagccctgccagaaggtgggcatcagagacgcttctgcagaatgtggagaagatgcagggatggggagtccccaggtccccgtgaactgacttctctcggctccacacgacgcagagtctccgctccatgtcagcctcaaggctgagactggtaaagtatgatttctacctcctgcagtcacaaacccctgtaagagtttgaagaaagcctccg

SEQ ID NO: 15406 - DNA, 571 bp, Homo sapiens
  MAP TO AP000053.1; EXPRESSED IN LUNG, SIGNAL = 1.2; EXPRESSED IN FETAL LIVER, SIGNAL = 1.6; EXPRESSED IN PLACENTA, SIGNAL = 1.2
tcctcaaatgaaaattcggggcagctggattagagaagggggaaatgcatgctgcaggggcaaccaacaaggggagattgtgccaattcactcttcctatcctcagattcacctaagttctgaccattcagccccatttgaatgcattctgtattcctatgactgtggattacatttttgtctacctttgtgtcttctgttttgtcctgccctataagcatctcaaacatatgcataaagcctatataaactttataaataaactaacacttctgttttcaacctgtaggatgatgacaatgatgatgacgacaatgatgatggtaatgatgtggaaaatgtgaaaagagaaagaaatacttggaaatatatctcaccctccataaacaaagctcggggtttaattctgacctgtatgagttcatggggtgaactgcagaccgctgtctgtggacaggaaaacgatatttcatctctagccccagggacatctccaaaagctgagctagatgaactttatataaattggtacaaaatataattttctctttgcctgctgaaagccatttct

SEQ ID NO: 15407 - DNA, 583 bp, Homo sapiens
  MAP TO Z86090.10; EXPRESSED IN PLACENTA, SIGNAL = 1.2; EXPRESSED IN FETAL LIVER, SIGNAL = 1.3
aggggtatgtgtgggtgggtacatgtgtaaattcatggttctgttctaggaccaccaaaattttacattggttatgttgtttcttagcattctctacattctaatgagatactagatgtagtccacaacattaaaccacaggacagaccatcaggaggcacgatgagtgagactgaaaaagataatgtttccccaaacaatagtcaaatctgatctattctaggtcagtacaattgaagatactaacgaccacattaggaaaggagggagggaagagtaaataaatctgggacctaccttgcttacaattcccacagacagatgaaattcaattccatgccaaccataccctccgatcactacaacacaaacagaaaaataaaagttcatgcaatataaacagttcttcccattcctaaaaggcgtttggtttcaaaggtaagaagctgtttcttatctcctttcaatcctctccatgcacacaacagtgttaagagttctgtcactggttaaaaaaaaaaaaaaaaaaaaggcccatgtaagtggagttaaataataggtaacactgattgggcacttccta

SEQ ID NO: 15408 - DNA, 572 bp, Homo sapiens
  MAP TO AC007539.8; EXPRESSED IN FETAL LIVER, SIGNAL = 1.4; EXPRESSED IN HELA, SIGNAL = 1.5; EXPRESSED IN PLACENTA, SIGNAL = 1.3
ctcactagggagttggagggggctgatgacagggctggtgtctagagtaggatgagatgagttctgggagccatagcagtgcagaggttcctgccatcagcatttcagggtatgggctgagcatttcagcatttcagggacctgggcctgggtctcaggtgttcccttccttgccacatgggatggtgagtgggtgatcatgtgcaggagctgagtcttagttggatttgtggagttcattcagtctgctctccaatgctaagacctgcacatactgctgtattcagcagtcccctgcacacagggcctagtcctgggccctgtgggtgagagtgagaaaggaggaaagagactctacctgctcattcacccacagtgtaaccattccctgcttcatttcctccgcttaatggatttttcttcctctgtttggctccgcttttcctctctgcaccaaggcttgttgagttgaggcccatgcccagctgaagcccctcgtgccaaggacacagacttgcttctgccactgagctgtgactctgtccaggatgccttcagcctagcaggacagg

SEQ ID NO: 15409 - DNA, 584 bp, Homo sapiens
  MAP TO AC007281.3; EXPRESSED IN FETAL LIVER, SIGNAL = 1.8
ccacagtcgacagttctcacagttcacagtctcagatcattttttttttccacttgtaatattagaatgttggacttgatgttagcgatgttgtaatgaggcatgagaggagggaggttaaggtggaaattgcttaataatgggtcagagccattttccataatgaaaaatctacaggccttggagagcctgcggagaacaggagagggtcacagatgaggccaagtttttgaggttgaacgatggagaagggtggggcccccagcagcgagggctgtaggaagattgctctctttgctccatttttttctttagctgtcaagagttggctcctaaggaggctcagagacatggttatgacagcaagcacatatttgaggaacaaaatttgagcaggcaggagaatgcttccagaaaaagttctcattctcaaaaatttctttatccagtgctgaaaacaatttacccctttgattcccaagtaatttcagttgacaatagaaagttataggtgcacaaggagtaagtcagaagttgaacacaaaagcaaggctgtgagagctccaccccttcaggaaatcaaa

SEQ ID NO: 15410 - DNA, 550 bp, Homo sapiens
  MAP TO AC007539.8; EXPRESSED IN FETAL LIVER, SIGNAL = 1.5; EXPRESSED IN HELA, SIGNAL = 1.7; EXPRESSED IN PLACENTA, SIGNAL = 1.2
tatcctgaagtgcagggacgccttctgagaccgctttatccacccccacttgtgatctgagcttccagatgggggggctacctaagcctttccagacaagcccattctgggggggcccagcaaagctgctccgtagttcacctgctaaacatcacctggagcttcagcgttgtcatcactgggccgagggcgggagtgagccagacgctgtcttttctgtcttgtaggaatctggtttgacattctctctggaattggcaagttctctgttatcagcaacgtaagtacttgcattcatgacacactcgctctgtgggaagggcttccagagaagctgaggtcttcaaagtgggaagccagcccttgcacctcccagccttttccatttgtagctttattggtgacagtgctctggttaacagctcacaaatgccttgtaacccatcatgctgtcgctgaggctgtgtaggtttaattttaatttcacaaagagaaagaaaggtaattatccatcagaatgcataccttggccctgacggtcaaaatcaga

SEQ ID NO: 15411 - DNA, 579 bp, Homo sapiens
  MAP TO AC007556.2; EXPRESSED IN FETAL LIVER, SIGNAL = 1.4
gagcaagagagaaagagagatcagatcacctttggacaaacttcttaataaaggccattctttacagactcaaaattaaggtgaaaggtctagttttggagggtgaatgatttgcccaagcacacctctggggcttgggacacaggagggtgctgggcacccagggcactatggtcagctcacaagatgtctcctgtatgtgattcctggtgcacactcatggccaggtgcctttcctttccagctccccgggagtgcacagagagcgagtttcgatgtgtcaatcagcagtgcattccctcgcgatggatctgtgaccattacaacgactgtggggacaactcagatgaacgggactgtggtaactgtcatttgagaagcttaccatagaattttgtactgtgacagtgtaggggcttcaaattagtgtttataaggcttttagaggaaaattatttttgtatatgtgtaatatgtaaaccttagcataacacagtatcttctgctctgtattttctatgcattattcttaactcatagcagtctagattagtcataattgaggaaaatagcaaggaa

SEQ ID NO: 15412 - DNA, 582 bp, Homo sapiens
  MAP TO AC007567.1; EXPRESSED IN FETAL LIVER, SIGNAL = 1.3
agcacctgggtttttctgtgactttcttttcatcatggttatgcctcttctccgttagcagtgataattgagttagccataggtgactgtttccctctgcttgacagattgaacagtcagattaagggggaatatatttaatataagagagaacaaaagcatttctctcaaatgttttctttccctcctgtgtatctgtcagggcaaatgcttacttaggcattcccactccaatgggcttaagcaattgtatatttttttgaaaattgaaattaaggtcactggatgaattttttttaaataagaaaagcactgcattttattgaactttatagaagcacagcaaaaagtcaacaaagtgtgggacaaaccacatctcttcttaatgtcttcccactggcagttgcaacctctatggtaataataaataataataataataataaataaataaaaatgacatcccaacaattgaatagccccaggaaagtgctatcttccttgcaccttggaaagcttgccaaacagatattctattcaggaagctaatggcttcaaagaggtcatgcagatgagggataa

SEQ ID NO: 15413 - DNA, 572 bp, Homo sapiens
  MAP TO AC009266.1; EXPRESSED IN FETAL LIVER, SIGNAL = 2.1
  unsure 122
  unsure 209
  unsure 308
  unsure 317
  unsure 431
tgaatgctggtgccctttactaaaagagaagacacaaaaggcatatctgatttaatagggtaaagtgatgagctccttttaagatactggaagtttatattgcctgtgaagtattaaagtgngaaatgtctagtaggctgttggtcattttgcctctgagcttaagaggtaggtgtacatgtcaaagaacagtgaattgagcatggaanctctgtgagcaacagtatataagggaaggatgaaggaagatggaattagtggaagatctgcattactgtttttctcattacctttttcatcttcccttncgaaccttngaagttttccaggttgctgtcgttcttcccctctttcttttgtcattctgtgagttttttctctggacagttttatccatttatacatttggcaccaagtttatgaaacttccnatacactatttattttctgaaactctaatgtatttccagttaaatataaataggtccagctgcagacaacataaacttaaaatgtcaaatactcatctaatattcttaacccaagtaacacccccaacctctgaactctca

SEQ ID NO: 15414 - DNA, 579 bp, Homo sapiens
  MAP TO AC004624.6; EXPRESSED IN FETAL LIVER, SIGNAL =  73
tccaggcttcattttccttgcctgtaaagccaagcaagttttggtttgtaaaaccaaacaaggctgttctcttcttaatgatttttgtgtttgaagctgagccatgcttctagtaggccaaggttgaatacgtgctcctaaaagtgaacctgttcctaaggtttgcctataaggaccctaggcattgcttgcattggggcatgacgctttccgcttccctgtcacccattggaggtgacctgctcactgcctggtcttttcccttccagactcgggagcagctacaagctgatctgctgaggtgtcaggccaaaatcgaagatttggagaagttactggttgagaagggacaggtgagcaggagtgatctgtgctctgtgaatcttagcctttctgtccccttggtggtatccctggggctcgcccttgtgccaagggggacattctgtggggctggatcaggagctccagagacgctagaggaaaaaacactagcagaacccaggcacgaatgtgctccctactgtacctgtgtgccgagttaaaaaatcaaaacaaggtatggcattctaacttggc

SEQ ID NO: 15415 - DNA, 547 bp, Homo sapiens
  MAP TO Z82201.1; EXPRESSED IN HELA, SIGNAL = 1.4; EXPRESSED IN FETAL LIVER, SIGNAL = 2.4
gaacctttcagaggcgacctagggatgtgtgaacagctggtgattgtgggggtggacattaaacagagaaattgggttggtccaggcagaggccactcccgcactgtgagttatgtggccctggagtgacaaaattggagacccgggtgggcccaagttatgactggtttccctttgcagacaggagccgaactctgcaaggatggaagcccccacactttcgtggtacgcaggggatcgaagcccagggagaaaggccctgagaatacaaaagtgagcatatggagagccctagaggaggggtcagctgaggctgtggctgcttttgccctcagggaacgtgcccttcggggcacagctggatgccaagagaatctggccgtgtcctcggtggaaggacattgctggaggatggaggaataagtaacaacttctgaaggttgtgtagggcttggactgacaaaactgaagatgtgagggacctccaatacaaagctggtcatccccttaaaatatccacagaattaggaagctgtttggaacagga

SEQ ID NO: 15416 - DNA, 544 bp, Homo sapiens
  MAP TO AL022318.2; EXPRESSED IN FETAL LIVER, SIGNAL = 1.5; EXPRESSED IN BONE MARROW, SIGNAL = 1.4
catcggacaggtgaaatgtgaggaaggaattgagctgaaatgttcaagcaattatttcagggtgaagagttttattctctgttgcattttcctaatgggttgggagatgtgtggcagaaaaactgggaggttgagggtgtcccattggtaggcccagagctggggttccagctaggagaggtcaccctgtccctgctgcccctgccagtaccccctcctctttctctctcccagtcttcctgcctgggaaagcagcagacattcccagggctgtggagggatgggagaggcccagactccagggacgtccagggagttgtgttcagtgggcatcagctccgaggaatctctgcactggggtttctctcttgtgccctcagaaacccgatggaggcaatgtacccacacatattctacttccactttaaaaacctactgaaagcctgtggtcggaacgaaagctggctgtgcttcaccatggaagttacaaagcaccactcagctgtcttccggaagaggggcgtcttccgaaaccaggtagcac

SEQ ID NO: 15417 - DNA, 583 bp, Homo sapiens
  MAP TO AC008009.4; EXPRESSED IN HELA, SIGNAL =   2; EXPRESSED IN PLACENTA, SIGNAL = 1.2; EXPRESSED IN FETAL LIVER, SIGNAL = 1.8
caaggcacaggaaatgttaggaagccaagatgtctgcttactttctgctttaatttttcatcaccacttaaagttttatcatatttaattatctttgttattttccaggtaaataatattgaaaacattttatttgaagacagtgcatttttattgggggagactgaagtttatttgtcattgatatagttcaatatagatcaaacattcataattgcagtactcttaaacgaatatttcttgcctctgacatgaatatagtgctcaaagatccagacagcaatccatacagcttacttgataatacagaatcagatcagactgcagacactgatgccagcgaatctcatcacagtactaaccgtcgtaggcggtctcgtagacgaaggactgatgaagatgctgttctgatggatggaatgactgaatctgatacagcttcagttaatgaaaatgggctaggtatgtaagcacttagggaagagaaatatatatatatatatatatatatatatatatatatataattgtaaactattgttagtatatgaagcttttttcaaagaaatatgcaattcacaaa

SEQ ID NO: 15418 - DNA, 572 bp, Homo sapiens
  MAP TO AC008174.2; EXPRESSED IN FETAL LIVER, SIGNAL =   3
tttagtcacttactctcatggcacacaggtaatactaattattaacatttcttacatcaaaatgcttattcaaagcatttgttaaacccttctttgcctggtcccttctacacttccttttgcttttattttcagtagtataggaatcatcttataagacgctatactatgctttaaaaaccattttattttctaaaagaagtaagcatacttatatcaggtacaaaagcttcagtgttcatcctggtgagctggtgaggaagatctggaaatattggtgttacattgagaaaacacctttgacaaagttgaagacatttttgtcagcattttagatccttgtttggagacatcgggcttgggagtttctgtggacaaagtaaacaagaagaatgatatctttatttttgaacactgaggtaaaataccttgcctaaggtcatatgagtaaaaggtggcccagctggtaatagggtccagactttctgactctcatggcatcattatgcctactgtactatgaggcttctttagtcacgtatacaaagtccatttctcttttctcagcagaa

SEQ ID NO: 15419 - DNA, 556 bp, Homo sapiens
  MAP TO AL022238.1; EXPRESSED IN FETAL LIVER, SIGNAL = 1.4
tggataccatctcatttttgtccttttttgactctacaagttaacactcccacctgtttatctcttaaaacagaccataggctgaatcatatgcttttgttttgagctgcatttatggaaactatttgcaaaatgggcacactaggtctcagccagtgctttgaatatcttaaaatgtaccttttccaccccacctccagtctttatctcatgaatgtcattactccttagattgatgggtcaaccttgagaacgatctgcatgcagcatggcccactgctgacattccatctgaatctaacccagggcactgccctgatccgatacagcaccaaacaggaggcggccaaggcccaaactgcactgcacatgtgagtattcggtcctacacccacgtagacaaacatgcatgaagatgcacccgtgagtattctggcagctgctgaattaaagatgcaccagaacatatacgaagaatggcaccgtcacacgtgcatctgcaagtctcgagtgtggagagtgtggaggtgccgggtcttttccaccaaagcttgga

SEQ ID NO: 15420 - DNA, 567 bp, Homo sapiens
  MAP TO AC007092.4; EXPRESSED IN FETAL LIVER, SIGNAL = 2.2
gcagtaggcaaaatcccatctgacatctgttttagtaaataaaatttgatggggacacttatgaattgtccttggctgcttccatgctaccacagcagagttgagtagttggcctttaagcctaaaatattcattatctggccctttaagaaatagtttgtgaacctctgttgaactagagccttctaagtaacaaaaaaaaaaaaaaaatgaaattgcgttcagcaaagtttacttcacttaccctctcactacttcctcccttccaaggagagatgaggtctgatacttcccattggctacttggactggactggactacactattatttccagaaacaaagatggcaaggcatttgctttgaaattcagcacacagcacacagacctagagaggatttacacatcaattatcaaaaagaaaaaccttctggattgtctctgtgtgtacatatgtttgttggcatgtgtgtgtgcatgtgtatgctagcccgcgcatactcacttgtgtgcgtgagttcagccattccaaggctgaaccaaatcacgaaaagcttgctgtgacaa

SEQ ID NO: 15421 - DNA, 569 bp, Homo sapiens
  MAP TO AP000123.1; EXPRESSED IN FETAL LIVER, SIGNAL = 1.3
aaccacccagaagtcacgagtcgggagttctaagtccttgtggagatggacccaccgttgtctcagagatgccttagtctctacagggaaaaccactgaaaatgccttctagactggaaagtctaaataactaaaatgttttcacttctctaataacttttttttttaaggtcttagaatggaaagatccctattccaacgtcccaaccaaatcaagatgctgtttctagggtccaatccctattccaacatcccagccaaatcaagacgctgtttgtagggtccaaactgcctctgcttaggcagttctcagactgggtagagaaaggaagactacaagttaaggagtattcaaaaacaaaacaaaatgagtatctcagagagctgaaaaatgaattgctgttgcccccaaagaccctttcagtctgaggaagtattattcatgcccctctgccctcatacctgaaaagccccctcaaatcaaagatgaggaataagaggaagaagaaggaggaggaggaaacagaataaatcccctgctccacgtctctggttatggcagtcaagca

SEQ ID NO: 15422 - DNA, 558 bp, Homo sapiens
  MAP TO AL078474.2; EXPRESSED IN FETAL LIVER, SIGNAL = 1.4; EXPRESSED IN PLACENTA, SIGNAL = 1.3
ggagtgaaacagagagattagcactaattagggttttctttatgttgtgatcagaaaaataaagatttgagaatatttttaaaggatgattcttcagagaaattaaagaacatttcaggatagaaacatattctgaaatgtcatgatgaagatcttctagaaaggaactgctttggatggagagtgtctcatatttcttcattacaattttcaggagaaacttagagccatccaagtggacagcaatcctaggcctgcatatgaaatcaaatctgacctctcctcaaacagtccctcgattaatagatgaaattgtcataaaccctcattacaataggcgaagaaaggacaacgacattgccatgatgcatctggaatttaaagtgaattacacaggtaaaaaaaaaaaatcactcttagtcatcttatctgccaaaattaattcaaaactagatttcaaatattatcaatgtcaatgcattaattcataaaagctagataatttgttacataaatcattggaacttaaatgggattagggagtagagagaaatatat

SEQ ID NO: 15423 - DNA, 574 bp, Homo sapiens
  MAP TO AC007463.3; EXPRESSED IN FETAL LIVER, SIGNAL = 1.3
gtctgttcgaggttcttgccccaaatatcacaattaacaagttgtagaaatgagatttgaacccaggtctgtcattcctctgcttttcctatgaccctggttggccttcctaattaaagccataaatctgagtcggtcagggaagttgctttacttcttaagtctaatctgtttcttgcactgttcctgcattcttcactcaccttgttaaggggaacagaaagacttccgcctactccagtgtatctctgatgaaaaatgagaactttgctccgatcctttctaaaatgaaaatattccagccagtgttcacgtgcagtgacgctgttgagagatcatcccagctccctaacggtgtgaaaagcaatttcacacacgcctgtctccaagcggcctgttccacggattagccagacagaaaacacctgcctgctcctcccgcgtggccagggtcatcagacacaaaatggatgtgatcaactcgaagccttgtgaggaattcagctgcccctggaaaacctgtttgcaaatggtcacctgctttgcattgtttacttggtgagaggtagggcag

SEQ ID NO: 15424 - DNA, 576 bp, Homo sapiens
  MAP TO AL022329.9; EXPRESSED IN PLACENTA, SIGNAL = 1.3; EXPRESSED IN FETAL LIVER, SIGNAL = 1.5
gagtatcagccttccccagtctgcctgcctttatgtcaggttttattgtcttcttcaagaagactccatgtgaatttcagccatcacagtgtaacactgatgatctttcaggacaattaagatgttcctgggaatttctcagcgtgtgaacctgctagccctcatatgactcatgggacctcagtgtttcacgtaccctttttccctcacctgcatgactgtgcccttatctttattaggagtctaataaataggatttgctggttttgatttcaaagctgtgaaagccgtactataaggtaaaaggtaacctttatttctatttagtttgtgaaaggaagtcatatgtactaatcagtcattatagtgaagatctttgtgacagtttccctccgagcttcatatttcatgtatgttttcattctcttcttgtcttttggattaaaagtatttctgtaaataaattgggaacaattctgaggtccaggaccttctgttatcaggttagagcattgggagccatttccacataaggcaaatatttctaaagcacagtttcattatttagtcattttt

SEQ ID NO: 15425 - DNA, 598 bp, Homo sapiens
  MAP TO AP000356.1; EXPRESSED IN PLACENTA, SIGNAL = 1.6; EXPRESSED IN FETAL LIVER, SIGNAL = 1.3
ttggtcagttccctgaatgcagagaagtagacctctggtgactcaggtttattgcattactgtcaatagatcagtttatctattgagggtagataagtttatcatctctcatatatccagtcctctggcttaaggcatgctcatccactttaaggttctttaatttggtgaggagaatgcaagacttgggttagtgaagcttaatgggtttgttcaattagctgtatgtatttggacaacttgctgggtttccagggcctttgtcatcccatccgtaacgtgaaggtgtctaaccagataaccttggtagccattcagagatgcagtcaacatgacacaaagtgcacagaccttggtgtccgacagacctggaatcagcttgtagcctgccccctagggtgacttggggcgagcttagctttggacctccttcatcctctggtccctcctctaaatcagggataaaaatagcaccttggcctcagaaggaaccatgcctgaccaatggtgggggacagccacctgcctccctgcttgtatttgtatgctagtgctaccataacaaagtttcacagactgggcagcttagacaacacaa

SEQ ID NO: 15426 - DNA, 477 bp, Homo sapiens
  MAP TO AL049548.6; EXPRESSED IN LUNG, SIGNAL = 0.61; EXPRESSED IN BONE MARROW, SIGNAL =   2
caaatcctgtaaaatacctctgccatagactgtagtgtatctcaggaatcaataactctctcttcccttccaggaccacgcagcagaagtagagagcaaaaagggcgaattgcagagtctgcagggtcacttagcaaagttgggttctctgggccgtgctgaggacctccacctcctgcagggaaaggctgaggactgcttccagctgtttgaggaggccagccaggttgtggagaggcggcagcttgccctgtcccatttggcagaattcctccagagccatgcctctctgtccggcattctccgccagctgaggcaaacagtggaagcaaccaacagtatgaataagaacgagtctgatttgatagaaaaggacctcaatgatgctcttcaaaatgctaaagcattagaatctgctgccgtcagtctggatggcattctttccaaagcccaataccatctgaaaatcgggagctc

SEQ ID NO: 15427 - DNA, 480 bp, Homo sapiens
  MAP TO AC009230.2; EXPRESSED IN LUNG, SIGNAL = 1.3; EXPRESSED IN BT474, SIGNAL = 1.3; EXPRESSED IN HBL100, SIGNAL = 0.99
tctaccccctcaacccctacttattcccaaattataaatgataatagaacaatactatgcatctttcaaagtagctgtgggaccactttcatcactctatagtggcaattcttagaagacatatttaaacaaaagggaataaagaaaattccccaaaagcctgatgagtaaatctagctctctagaaacagtaattgtaaggatgaaagcttataagttttgtttcatctgttaaagttgctcattttgtaccatgtttgatgttcgaaatttttgtcttctgtagcttactgtttcactttgcttttttctttaaagctacaccatttccaaatagcttcaagtgctttacttgtgaaaacgcaggggataattataactgcaatcgatgggcagaagacaaatggtgtccacaaagtaagtgtgctgagtttggaagacttctgtgatctcatttcatttgaatctctcctgacttga

SEQ ID NO: 15428 - DNA, 470 bp, Homo sapiens
  MAP TO AF159056.1; EXPRESSED IN BONE MARROW, SIGNAL = 2.2; EXPRESSED IN LUNG, SIGNAL = 1.1
tcttttcaacatctgtaaaataagcacaataataagtactgtgcagcctatcctggatgaaaggccgcagtggacaccagctcaatggcatcttctctttttatggttatgtactaggccactccaaactgtgcaatgtgtgtgtttctctaatgattcttttaaactcatatttcatttctccccatagataaacaacttgatgcagatgtttcccccaagcccactatttttcttccttcaattgctgaaacaaagctccagaaggctggaacatacctttgtcttcttgagaaatttttccctgatgttattaagatacattggcaagaaaagaagagcaacacgattctgggatcccaggaggggaacaccatgaagactaacgacacatacatgaaatttagctggttaacggtgccagaaaagtcactggacaaagaacacagatgtatcgtcagacatgagaa

SEQ ID NO: 15429 - DNA, 374 bp, Homo sapiens
  MAP TO AC010754.1; EXPRESSED IN LUNG, SIGNAL = 1.9; EXPRESSED IN PLACENTA, SIGNAL = 2.3
  unsure 37
  unsure 56
  unsure 68
  unsure 76
  unsure 82
  unsure 98
  unsure 111
  unsure 133
  unsure 152
  unsure 157
  unsure 187
  unsure 337
  unsure 340
ctgtgtctacaacctgggggaccgtgaggctgaactnccaagtggaccagatcttngaccaagagtgnagactaanggaggncagttatggatcgggntgaaatttcaganggtacaagtctgattgactgtnacctgtgctcaccaaactntccantgtatacatgttgctgaaccccatttttangtggcttggctttgaattcttcaaattttttgtttaactttattatctaaattcattttaaacagaatttatcagtttgcaaggcttaattacaccaaaggagccacatccagtaaaccagaaacacccggagtctatgacatggatggntanaaatagcaatacactccttaatttggatcctgaa

SEQ ID NO: 15430 - DNA, 467 bp, Homo sapiens
  MAP TO AC006042.2; EXPRESSED IN BONE MARROW, SIGNAL = 1.1; EXPRESSED IN LUNG, SIGNAL = 0.98; EXPRESSED IN HELA, SIGNAL = 1.4; EXPRESSED IN PLACENTA, SIGNAL = 1.7
accacttcagtgctgtgtgcatgaatagtctgccagctgacttgtgctatggaagatgtttacccctctgtatacacttaacccatctcctgccatttacattttagctgttttagagaactccagttaattcagaaaatgcttaactttttctgtgttcatgattataaatctaattttgttttatggttttaggtctcgtcagcctatctcggcccctctcttttcatgtcctgacaaaaacaaggttaatttcatcccaaccggatcagctttctgtcctgtaaaacttctaggccccctcttacctgcttctgaccttatgctcaagaactcccctaactctggccagagctcagctttggcaactctgaccgttgagcagctctcatcccgggtttcctttacgtctctttctgatgacaccagcacagcgggctccatggaggcctctgtccagcagccat

SEQ ID NO: 15431 - DNA, 457 bp, Homo sapiens
  MAP TO AC009532.2; EXPRESSED IN PLACENTA, SIGNAL = 3.3; EXPRESSED IN LUNG, SIGNAL = 1.8
aggcatcttaatgcagtgggatgggatagattttgattgggcgacatttacagcttggacaagaacaagcatccatctagcccagcagatggtccttgtggaaaatgcctggtctgtgtcctgttattctaaaccccagtcccagccagatagacctccctgcgcatcaggacgatatactctgctgggaaggagagtctaagggctggaaacaaggacagcagcaaactgaggacctatgtgattcctttgcagagctttccatccaggtgtcatgcagaattatggggatcacccttgtgagcaaaaaggcgaaccagcagctgaatttcacagaagctaaggaggcctgtaggctgctgggactaagtttggccggcaaggaccaagttgaaacagccttgaaagctagctttgaaacttgcaggtgagaaaaagctggtttcactgtcactgc

SEQ ID NO: 15432 - DNA, 395 bp, Homo sapiens
  MAP TO AP000365.1; EXPRESSED IN PLACENTA, SIGNAL = 1.3; EXPRESSED IN HELA, SIGNAL = 0.99; EXPRESSED IN LUNG, SIGNAL = 1.2
tcttgtgaagtggtttggtgagaattttgtttattaagaactgcttctattgggtgaaaacagtgatttttctgagattctaaggcattacagtttttcctgccactgggcagcttaatactaaataatgacattttggtacctgatcagtggcttaaatatagtatagctatagggacaaatgcccctttatctttgcatttatttatttatttatttatttatttgtttgtttgtttgttttagactatttggagttttcctggtcttactggatgtcactctcgtccttgccgacctaattttcactgacagcaaactttatattccttcggagtatcgttctatttctctagctattgccttattttttctcatggatgttcttcttcgag

SEQ ID NO: 15433 - DNA, 465 bp, Homo sapiens
  MAP TO AC007981.24; EXPRESSED IN BT474, SIGNAL = 3.6; EXPRESSED IN PLACENTA, SIGNAL = 2.5; EXPRESSED IN LUNG, SIGNAL = 0.98
acaaaccctttggagattgctgcctactttgcattttggtctgagaagtaagtgagcatgttgcgtgtgtttctctccctcgtaggtgtggtgtcagcacagcggcaggtcaccgttcaggaaggacccttgtaccgcacggagggctcccacatcactatctggtgcaatgtgagtggctaccagggaccttctgaacagaatttccagtggtccatttacctgccttcgtcgccagagcgagaggtgcagatcgtcagcaccatggactcttccttcccctatgccatctacacccagcgcgtccgcggagggaagatcttcatagaaagagtccaggggaacccaaccctattgcacatcacagatcttcaggcccgggatgccggggaatatgaatgccacacacccagcaccgagaagcaatactttgggagttaacagtgcaaagatgaacctagtggg

SEQ ID NO: 15434 - DNA, 377 bp, Homo sapiens
  MAP TO AL022100.13; EXPRESSED IN PLACENTA, SIGNAL =   1; EXPRESSED IN LUNG, SIGNAL = 1.8
ttttcacttagatatcttcctaccccatacatgaaaataaaagtagataaatgccttataaaattaggcccccagggaaaccagatttgcttctttaacttctttggtcaaagacttgagttcagatcaatagtaaatggtttccccctttcaaaggaaaaacctcagaaaattgtttaggaatttaaaattctcactgaagtatataatctaagacccttgatctttaccaatttagtcacatgatacttgcacctggcaaagcccataaattaataactggagccaaatggcaggtacttgagaaagatatcaaatatgtgttacaggaaaagggtcccaatccagaccccaagagagggttcttggatctcgtg

SEQ ID NO: 15435 - DNA, 465 bp, Homo sapiens
  MAP TO AP000567.1; EXPRESSED IN PLACENTA, SIGNAL = 0.94; EXPRESSED IN HELA, SIGNAL = 1.8; EXPRESSED IN HBL100, SIGNAL = 0.95; EXPRESSED IN LUNG, SIGNAL = 1.2
tgatttcaggtgacggactccgaaagtaaaaagacaacaaatattcacagaagcagcttaaatctattttaaagatttaacatagctaaatatctctccattgatgctgaaggcaatagaatggatttttggaatgaaagcacgggacaggaccaaacacatttggaggtttctcctctgcttccaatttcagcaattcatttaataaaagccagagaatccgtatcctccattgtacgatgggcggcagcagccatatccatagcctccaaagccagagccatatccgtagcctccaaagccagagccatatccgtagcttccaaagccagagccatatccgtagcctccatagccacagccagaaccccgtctgcagaagctgccacatccacagccatagccatagcccaggccaccgaagcctccacagctgtagcccaggcctccgtagtagctgccgta

SEQ ID NO: 15436 - DNA, 490 bp, Homo sapiens
  MAP TO AL049796.17; EXPRESSED IN HELA, SIGNAL = 1.8; EXPRESSED IN PLACENTA, SIGNAL = 0.94; EXPRESSED IN HBL100, SIGNAL = 1.2; EXPRESSED IN LUNG, SIGNAL = 1.5; EXPRESSED IN BT474, SIGNAL = 1.9
tgactttttgttttgcttagtcctgatttttgtgtttttatccctcaaaaatgtttaaagcatttgatacagcctggtggatggatatagtgcatatatagatcatatatggatatatggatagatagatggatatagtgcatatagtaggaaagtcttcctactacagttgccattttttctccctagattgcaagcaagtgctatgaggtcagagactatacttgtcttgtccaccactccattcccaacttttaccctaaggttatattaacttctaatgtctgatatatcaaacataaagttctgatttttctttttcagatacaaccgaaggaagtactcagagatcatggctgaaaaagcagcaaatgcagcaggaaaaaagttccgaaagaagaagaaatttcgcaattaagatttaccaagcaaactgcaacattttacattgctcctttatttacttattaaagacgtttggaaaactaac

SEQ ID NO: 15437 - DNA, 470 bp, Homo sapiens
  MAP TO AL079307.2; EXPRESSED IN LUNG, SIGNAL = 8.4
ttgttgaggcagaaacatggagcagttttatcttgcaaatggctgctaccagctgtgtgttcctgtcactggctctcctttccctctagggacccagtccccttaacaatatttgattctctgtcataactcataagtcgtcacttgtgtttattaaaacaatctggtctggtttcccatctcatatatggttcaaactctctctccccagggtaagctggactaggctgggtagggggcagatcttatgtctgagactgtccccttctgactcatgatgtcacagtgaagaggaggaggagtttctctaagtcattgttttcttcattggcttcagtggagctgaagttgctggtgactctgctgttgttgacagccctgtgtgtgtgtgtgtgggtggagaggagtgttatataaagagttaatatggtcagatggaagccccaaaacctccacggaagaggactcag

SEQ ID NO: 15438 - DNA, 477 bp, Homo sapiens
  MAP TO AF159056.1; EXPRESSED IN BT474, SIGNAL = 1.1; EXPRESSED IN BONE MARROW, SIGNAL = 1.4; EXPRESSED IN LUNG, SIGNAL = 5.3
tcttgattctcttttcaacatctgtaaaataagcacaataataagtactgtgcagcctatcctggatgaaaggccgcagtggacaccagctcaatggcatcttctctttttatggttatgtactaggccactccaaactgtgcaatgtgtgtgtttctctaatgattcttttaaactcatatttcatttctccccatagataaacaacttgatgcagatgtttcccccaagcccactatttttcttccttcaattgctgaaacaaagctccagaaggctggaacatacctttgtcttcttgagaaatttttccctgatgttattaagatacattggcaagaaaagaagagcaacacgattctgggatcccaggaggggaacaccatgaagactaacgacacatacatgaaatttagctggttaacggtgccagaaaagtcactggacaaagaacacagatgtatcgtcagacatgag

SEQ ID NO: 15439 - DNA, 397 bp, Homo sapiens
  MAP TO AC007671.5; EXPRESSED IN LUNG, SIGNAL = 8.2
atcactccctctcatctggctaaaccaatacatgaaatgtcaccctccattcaattattcaaacattactctccaaatttacttcacatatatattttaacatatagtacagtaagtaaaagtagtgtggtctagccagataatgtttctcactttattgaagccatgtaaacacatattttacatgtcttcctcacatgaacaaagtaattacaaagatcctaagatgtctgaagtatcagaaatcagtatctagaaatataattattaagatttagtacaaaggttataaaggtttatttgtttttaccttaatactctttgctctgcaataggccaatcaatatccacatctatatccacactatgttcagctcgcatttcgtagtatgccatt

SEQ ID NO: 15440 - DNA, 468 bp, Homo sapiens
  MAP TO AC007705.13; EXPRESSED IN LUNG, SIGNAL = 2.7
gggagtggtgtggctacaagccagggaatgagagcagcctctaaaagctgaaaaaggcaaggaaatgaattctcccctagaaccttccaaaggaacacagccctactgacccattttagacctctgatctctagaactgtaagataattaatttgtgctgtttgaagccaccacctttgtggtaattggttacaattacagcaatagtaaacagatacaatgaggattgttaattacaaaaactggtgccctggagcaccaaatgcatgaggtacactgaatgctattgttcttgctgttctggttattgttgtttttcttctcctttatcatactttctgtcttcttttcctgtccctcatccttctttaccattctctttctctttctcctgctcttcgcttccttctcattccactaaaaatataacaagaaaggaagaaaagagctagcatttgataaggacca

SEQ ID NO: 15441 - DNA, 474 bp, Homo sapiens
  MAP TO AC008073.1; EXPRESSED IN HELA, SIGNAL = 0.91; EXPRESSED IN LUNG, SIGNAL = 2.7
taggggaggattgttttccctcattagccatatataatgaatgctatttgtctttgtaaaatattttcatgtaacttggataaaattaaaattaaaaagacaacttgccagtcactggaaatagtagctgttaatttgtagaaaatgccttagctgtttagttagatgggcttaattctgaaaatgagaatactatacaatagttttcatctctttccattgtaaatgtgtgaatttctaagcactgttaatccttctttttatttccgtaggttgatgaaaaaaccgtaggagaacctggttggctttatggtagttttcaaggaaattttggctggtttccatgcaattatgtagaaaaaatgccatcaagtgaaaatgaaaaagctgtatctccaaagaaggccttacttcctcctacagtttctttatctgctacctcaacttcctctgagtaagtttttagctaacagt

SEQ ID NO: 15442 - DNA, 466 bp, Homo sapiens
  MAP TO AC010719.1; EXPRESSED IN PLACENTA, SIGNAL = 1.2; EXPRESSED IN LUNG, SIGNAL = 2.8
gactacctcccacttatctggcataatggatataaaacacataaaatagagcctggcccatagctcatgttataaaaatgctgacttttttcctcagacttctcaacagtaacattggaagctagaacccatggagtaatagcttcacatttatttagaggaaatattttcaaatctagtattgtataacaactaagctacaaatcaaatgtgagggtagaataaagacattttcaaacatacaaggtatttagagcttgatttcccttatattccttctcaggaagatactgctggtttaaataaaaccaggcaagttgaagacatagaatgcagacaagagaggactcaaaaagagacgaattcattagatgatagtaaagggaggtcccaggataacaactatgcttcaagtatgcagtctcaaaaatggaggaccgagggctccagaagacagacctccagg

SEQ ID NO: 15443 - DNA, 482 bp, Homo sapiens
  MAP TO AL008718.23; EXPRESSED IN LUNG, SIGNAL = 5.9
acatcacagccatcttgtgcctgggactagatagcatctcagcccagggccattttaaagcactgacaaaaagcacaaaaaatgcaaaatacatggcactaactagactgcaaaaaggacacttctttacagtgtgagacggagcatcgccttgtctgacctcagctggaaacctgtgtcaggtaaggaatttttcgacactgcatgaatgtcagtcattaacccgaaagtgccatgagtactgattttagggttacaaataaatttcagtgagtaggtgaatccgtgaataatgacaatggcctggaccaggaaaactgatatttgccaggagttctggtgatccagctgtctcccctgcctcaagcgagtgacctgcttctgtaagtcactctcttcgaactccagaactggaagagccctttccaggtgagtgactccagggactagcaggggagagggcgcgtgggaagtgagcacta

SEQ ID NO: 15444 - DNA, 482 bp, Homo sapiens
  MAP TO AL118511.2; EXPRESSED IN LUNG, SIGNAL = 3.1; EXPRESSED IN HELA, SIGNAL =   1; EXPRESSED IN HBL100, SIGNAL =   1
gtctcccatttggaaccgaggcccttagccttgtttggcctctcaatgctcgcccactgcaggtctcccccagggacgaggagcagctcaacagcaggggcgaggtcaagccacattcattgtcatgtatcctaggtgcccagcacagcttctgacccacaggaggtgttgattaatgtttgtggaacaaaagtgtggatgaaagcaaatcttggattcagaatatattcctgtcccctttagtccctttgaatggtcagaataggcttgtgttttgtggctctgtgaagggttgcttactcaacagccatttgctggcagataaaactggctcggtcactgctccaaaagcatccagggtgtttggctctgtaggtggcattatgccttccagatagaaattgcaagcacacagggtggccctcataggggccatgaacattgtggttaaaacctgtgagagaaaacaggtgcacaccctt

SEQ ID NO: 15445 - DNA, 446 bp, Homo sapiens
  MAP TO AL121591.2; EXPRESSED IN LUNG, SIGNAL = 5.4
ggagcctagccttctatttcctctaggaacaatggtccattatttgttaattcagtgtttatagcaactttatgaaacataactactatgaatgatgagaatcaactgtaataatatctcaaagattgatggttaggatgaggatgatgataattattttattttaggaacattgtaaactcacagatttggctgctttcatcagactgaattctgcctttgagtatctaaaaattggtcagtaaattcagtgctttttagattttagcaaatcaccaatcactcacattttgatctcaccattgttcatcatcttgttagaatcatagtgtccttggattaggggcatccaggagctatacaacggctgggttctggcatcctgggagtgggcacagggtgggcagagagagagatgaaagctagcataagccagtgtgatcgga

SEQ ID NO: 15446 - DNA, 444 bp, Homo sapiens
  MAP TO AJ239329.2; EXPRESSED IN LUNG, SIGNAL =   2
tgatgcaatgaaccaacagctggtaaagcagctgcaattggattttaaaaccatcacctgcttaatcttttgataatcttgtcattctccaagattcctctgtgttctatacaggtcaaatagaaaagttgaatggggatgtggtgggaattaccaccacctttgcctctttcaagtccttgatggtggcactaatctctgcagtcccttcaggaatgcagtattgctttggatttactattttccttggtagaggatttctaggggcttctacctgacctttccaaccctaacagttctcacttcacaggtcagagagccaatgttgggattacgcagactgccaagtatgtcaattccaattatgcattctggaaatgggaaaacaaccacaggatggttttggagacccactagccccattgtgggatggacctgagctaa

SEQ ID NO: 15447 - DNA, 483 bp, Homo sapiens
  MAP TO AC007558.3; EXPRESSED IN PLACENTA, SIGNAL = 1.5; EXPRESSED IN LUNG, SIGNAL =   1
tgcttctaaacaaaatgaaagctgtgcttttcttaaataggcaaatattctgccaactgaactcacttatgattcttacagataatagagaaaacattactctggctcacatctgaatgatcacaagtttgaaattagtggcctaatcaatgagggttattcctatagattgatttctactagtttatatgatttataaacacataaatatagaataacactaatatcagcattgttcatctgtttccatcatggaagtgtcttttatttatttccttttcattttcattggttttcaagttccattttggaaataacattttcttgtaagcaaaattcaggttgttggattggctgtatttggggtagaagtaatagaacaaaacagtgatgtcaaatggtcctcgattggtcaacacattctccatcctctgtttatgggtagagcagtattacactttgagaatggaagaacccatcaca

SEQ ID NO: 15448 - DNA, 483 bp, Homo sapiens
  MAP TO AC009493.1; EXPRESSED IN LUNG, SIGNAL = 1.3; EXPRESSED IN PLACENTA, SIGNAL = 1.4
tcatttcagaaacactatatattcagcatatataagttatacatgtggaggtaaaatgcatttaagtaacttttcaagaaaaaactaatttaggatttgaatgaaaggaaaattggaatgaagttagtaataatgttaagttaaatttcttattccactcaattattataaaagcttataagtaacagaaaaaaaaatctgctaatacaaatgccaatgaactctaagaggcaaatgacatcttcaaagattttatataagttttttttgttgttgttttttgccaatagctgacaatactatgaatgacactgatgttcctttggaaacaactgaatgcatccaaggtcaaggagaaggctacaggggcactgtcaataccatttggaatggaattccatgtcagcgttgggattctcagtatcctcacgagcatgacatgactcctgaaaatttcaagtgcaagtgagtaaagtaggcaaa

SEQ ID NO: 15449 - DNA, 355 bp, Homo sapiens
  MAP TO AC006445.10; EXPRESSED IN LUNG, SIGNAL = 6.6
aagaggatcttttgccctcagtcattagttcagggcgagctcaggctaaacattaatttgaaaccttttctcaaacacttgatttcaatgtttgtttaaatgctaggtttattggtgtaatatatgcattggatatatatggtctctattaatctgactggttgcattcaagataaatgaactttaagtaactaaaataacatcgatattaatataattgtatttactaacctcctgctactcctttcagcctggcataagggttggaattacaagtcagacagggctgagcagcaatcttcaagaaaattgctctaaattggccttcattagctctcacggcactgaaaaacaa

SEQ ID NO: 15450 - DNA, 463 bp, Homo sapiens
  MAP TO AC009410.2; EXPRESSED IN HBL100, SIGNAL =   1; EXPRESSED IN LUNG, SIGNAL = 2.3
tgacagactgatcttctcatttccaaataaacccagacacttctgaatttcttatttatttccagtttaaagtcaaagcatgatttctattctttttttctccctgtagtggtatttgaggttttgggtgtcagaaagtagagaaaaggcatttcccatgctctcgtccaattatactcatattacctcaaactttaggtatttttataataatgggttgaaagttacctttccctatactttccaaattacccattcttttaaggcattttggtgctttctagtgagaagtgtgaactcattcttctgtgggtgacagcactttttcctctttggaaactttttaaaattttcattcatgaagctgtgaaaattcatcatattttggtgtgcgtcatgatctttgttgttcatccttttcagcattcctttcaatttgaccatttgagattactttcagctg

SEQ ID NO: 15451 - DNA, 474 bp, Homo sapiens
  MAP TO AC010881.1; EXPRESSED IN LUNG, SIGNAL = 1.5
cctacttattggggccatccaaggtcaggggtattcctggaaattttttaatgctggtaaaattgaaccaataagaactccttgtctgtcattttctcttagatattaaatgattggaattaaataaaatgtgattgtgccattttgagtgattgacaatatcttcctctaattcctcgttacttccctattgtttcctcgggttttcctttgttttactagcactgctgggtttcagagcctggttgtagtatctgttttgcttggatttttccttccttctcttcatccacagtcttattccgtcacgcaaccaggggagactgacatgacttacctttcacatttcttacatttcctgatgatgagggatttgttgacattttctgcaaaccctgttgctattatgaatcggaaactagatttcaagctccagcatgctcagagttaagctgcattgaaaaggtagaaaaa

SEQ ID NO: 15452 - DNA, 491 bp, Homo sapiens
  MAP TO AC010106.1; EXPRESSED IN PLACENTA, SIGNAL =   1; EXPRESSED IN LUNG, SIGNAL = 7.8
ggagagaggaacacactgagcatttaaatatggtatggtatggtattcaattccatgggactagatgaggtcaccttatagatgaggtgaccaagaagagtagctttcacttttgatcataaattataatttaaaagtacattttatattgtgacccagcacatatgaaaaatacttgtttttattaagtacaatgaaatctaatatttcctgttctattcccccaccccttatcaacctagttctgtcctataatatttattttatgactcattaatagatgtctacctagagtatgaaaaaaaatgccacctacggaattcttgtcagtacaaaaaaggactgtatggagattgtgtcttgcagcatacttatttttaaaggtaaggttgatgcggtacaaccaggcagaaagagctttagtaagaaaaaggagcctctaatgaagtaagagaagaatggcatctagaagccaaaaatgaaattttctt

SEQ ID NO: 15453 - DNA, 390 bp, Homo sapiens
  MAP TO AC011348.1; EXPRESSED IN LUNG, SIGNAL = 5.2
agcacccatttatggctctgtcatgcataaatatactcaaactctctgactgcttgtgctatcccccttggggttctgtgtttcattagtttattttcaaccgtgtgatacaaaattttaaaaactctatttccagcttattttgaggtttgaagactgatcatctatcccagtaggcatcaaacttaataatgcaaatgaaatacatctagcacatgataaaacccgacacatcataaatgattcataagggatagtgatgacactgatgatgacgatgatgataatgatgatgttttaatcctcagtaatcctgcttgctctaaggcagacttgttcaactggaggcctgcgcattgcatgtggcccaggacagctttgaatgaggct

SEQ ID NO: 15454 - DNA, 486 bp, Homo sapiens
  MAP TO AL008639.10; EXPRESSED IN HELA, SIGNAL =   1; EXPRESSED IN BONE MARROW, SIGNAL = 1.8; EXPRESSED IN LUNG, SIGNAL = 2.4
ctcaggatgcaccacctatgcactactccactgcacctaagaaagtcggggcggggggacaagcacattaaacccgcatgcagaagccaaactctgcaacttcacttctcataaaaggagtaccaaaataattcactagatctcaggcaagtataggactttaaaaaataaaattgtactcctattaaaggtacttaaacctatgaaaacacaatcaattatttaacaatggtctataagaggagtataaacaactagcaaaagatggaaagaaaatcacaagaaacttcatttacctttctattaagttgttgtaagctactacactattcttcaggtatggctgcggggtcacgttactgccaaaggcatatttaaaatgaccatctcgtaaccgataagctttccttcttgacacaactgacgtcagtatatctttaaggtgattctgtaaacatacaaaaagaaaaatagcatgatatcctc

SEQ ID NO: 15455 - DNA, 466 bp, Homo sapiens
  MAP TO AL049691.17; EXPRESSED IN LUNG, SIGNAL = 4.1; EXPRESSED IN HELA, SIGNAL =  10
ggcacacataacctgaaggaacttgaataggacaatggaaataacagctcagtggttatatctagtatgtatcagaaaaactggctaagccggttgagcttcccactgttttatggtttgctttgtttaatttcatgaggattttggcctctgttgcttcttctgttatgggtctacatattcatggagaagaggagtttatattaatgacgatattataatacctaatcttaataagcatgaacaagctactaccaaaaagatacctattagggtataatagcaaaatgattttttttgtttgttttcaggaaagagattccaatacattttgaaagtgaggaggaaccaaataggtacacttttcaagtactttatggttatggtgccctttctgaatacttggtcctcgatgaaatgacagaaggtatagtgaggggagagttctcatgtttcccatgtgctg

SEQ ID NO: 15456 - DNA, 467 bp, Homo sapiens
  MAP TO AC010127.2; EXPRESSED IN LUNG, SIGNAL =   5
tgctgtggtgtttccttctcatcaagttttagaacttagagttttttccacacttaaaagaaagaataagtgattgtaatctgctcttccctacattggtgtaaaattataatcatgtttttgttgtttttaaggtcctgaatctctttctggccttgcttctgagctcatttagtgcagacaaccttgcagccactgatgatgataatgaaatgaataatctccaaattgctgtggataggatgcacaaaggagtagcttatgtgaaaagaaaaatatatgaatttattcaacagtccttcattaggaaacaaaagattttagatgaaattaaaccacttgatgatctaaacaacaagaaagacagttgtatgtccaatcatacagcagaaattgggaaagatcttgactatcttaaagatgtaaatggaactacaagtggtataggaactggcagcagtgttgaa

SEQ ID NO: 15457 - DNA, 468 bp, Homo sapiens
  MAP TO AC008617.2; EXPRESSED IN LUNG, SIGNAL = 5.7
cactcttcttttggggcatcaaaggtgagtgattataatggacatttatcattttagagggtaccaatcatataattctctatcttgtgtttgggtaatcctttgctttgtgtctctgagactactgcactgtgtaaaagctaaaaatgcctaatactctctttggtagtttcttttccattgatagcccatgacttaaattctactaatccattgccacatcatagactttcagtcaatagtttatgacataaaggcaattgagccagcatgttttcattacagtcaacatggtagtggttgtggcagtaacgttctcttttcaacaacagcagtggcacagcagcccaagtggtagtatccagtggccagtgatgagtcagtataagccgaggagcctcggcttagtggaggtagcagtgatactgatagtgatccagtaccatggcctgattttagatgctgctg

SEQ ID NO: 15458 - DNA, 491 bp, Homo sapiens
  MAP TO AC009402.2; EXPRESSED IN LUNG, SIGNAL = 4.2
tttgagacctgtattttaatactctccatgatacttttcatggtataaaagtaattgacctctttttttgaaaaaagaagtaaaattaaatctagagacataattttgattttcctttggttttagtgaagaattttaacaggttcatgttctgttcctttgtcaaaggcttggatggggtttttttgtgtttcccgattcttgtcatgtcctgtgccattgccttccaggtttggatttaaggactggcacatacatgccttggcaagaactgggtctcagtgggccagtgtgctcagcttgttggttgtattggctaatcaatacagcgggaggcttcagctctgaagatgaacacggccctgggcaggagtcatcactggtgaatctgactgatggagtccctgctggaggaagcaggatgactgaaaaggaagctcatgcaattgaattttcagaggacatgagtcagacggaggcaggagtagtca

SEQ ID NO: 15459 - DNA, 472 bp, Homo sapiens
  MAP TO AC009497.2; EXPRESSED IN LUNG, SIGNAL = 2.1
tgttctgtgttgtacattgtctgcttcttcaaactttatatattttgtgatcttgagtttagaatgtgtgtttaaagtttattttcttatattcctaagacttttaacatatctaacatttaacacatctctttatgttttgtgaataatttgtcttttgtctccccattagattatgaagtcctaagagcatctgttaagtgaatgaataaaggaatgatagcaattattctgtttcatgcagataaataacttcttaatgattttttcccctttttagaccttgcatcgaagtgggagtttcatcaattctctcttgcaactagaagaacttggatttcgtagtggagcacccatgattaaaaagatagcttttattgcttggaagagtttaatagataattttgctttaaatccaggtaagtaatattttaacaattttgattttctgtgaatttgttttgcttaaagc

SEQ ID NO: 15460 - DNA, 460 bp, Homo sapiens
  MAP TO AC009230.2; EXPRESSED IN LUNG, SIGNAL = 4.6
caaagtcactcagtgtcaagggtatgttccttgatcccttaaagtaaaattacctctttgcttgaggcatgatgcatgctgaattaccacaagagccctggaacttacaggctgagaaatcatccttttgcttctcccttccttgctaggaaaatgctctgcagcccgcagaatcagcagcaggcagaagcacaatcaccctctggttatgggaactgaaagcattcatggactgtcttatctaaatggtttgacaagttctctattcacctggccaattgcatcaggccctctccttttccttccactgctgaaacttggcaggtgcaagtgtcagtattgccctgcggctggaatgtgccctggacaagaactcccagcccatcactgcagcctggagagaaccaagggccttgtttgctgccccagggagtgctgcagggcattacttctaatagca

SEQ ID NO: 15461 - DNA, 444 bp, Homo sapiens
  MAP TO AC009500.1; EXPRESSED IN LUNG, SIGNAL = 5.9
ggaacaccttgaaactcaccctattaaggccagcattcccatgatatcaaaagcagaacaaattcttaaagcaaattacagccaatatccatgattaacatatatatatgtatagatagatagatagttaaaatcaacacatcaaacagcacattaaaagggtcacagatcacagtcaagtagaatttatccctaaaacagaaggatagttcaacatacatgaatcataaatatgacacaccacattaacaaaatgaatgataagtcatatgatcatcttaatagatacaggaaaagtatttggcaaaatgtaacacacccttgcatgatgaaaatgctcaacaagctaaatataaaaagaatgtacctgaatataataaaggccatatttattggccatgacaagcttacagctaacgttatcctctggtgagagatggaaag

SEQ ID NO: 15462 - DNA, 475 bp, Homo sapiens
  MAP TO AC009946.1; EXPRESSED IN LUNG, SIGNAL = 3.9; EXPRESSED IN BONE MARROW, SIGNAL = 1.1
cgactgctagttgagttatctgttgtagctgaaagtattcctgactgatagattcttcttcctcttagcaaggatgcgactggactgctgatgaagtggtcaatctacaagattagataattcacaaatagacttttaagtcttccatatcccctcttgaagctgaaatttccataagaacaaacaacgctgcctttctctggggcagaggggagctttctaggagtctaagaagaggggctggtggtgtgagcaggagatacctgtgaccctccatcttcagagcccaatcagggggtcagtggagaatgggggatctctgagagcacggctgagaattagaggaaacgttcgaacagtcagcggcatggtgaccagccctgaggtcatgacggccatgcctgaccagagaggaggtgctgctgggcaagtggatgagagacagaaaaagtagagaacagagttggtccctggg

SEQ ID NO: 15463 - DNA, 474 bp, Homo sapiens
  MAP TO AC010719.1; EXPRESSED IN LUNG, SIGNAL = 5.9
ctctgaagcctctgtgggaggaccctgccctgcttctcccagcttctggaagcccaggcgttccttggctgaggcagcatcactccagtctctgtatccatcttcccatggcctcttccctctgtgtgtctttgcatctccacacggccttctccctgggtatctgtgtccagatttccctcttctcagaaggacgccagccattggatgagggcccacgctcgtgacctcctcttgactacatctgcaaagtccttgtttccaaataaggttgcattcacaggtgctggaggttaggacttcaacatatcttttttgagggatggcacaactcaactcatagccaacaccgaggcagtgtcctctgccccaggtatctacttggcccgctccctcaccttcttcaggactttgcttaaatgtgccttctgctaagtttatgttctcaatgaagcctattccaaattcccccat

SEQ ID NO: 15464 - DNA, 473 bp, Homo sapiens
  MAP TO AC011094.1; EXPRESSED IN LUNG, SIGNAL = 5.2
tgtcccttgcaaactcttccaaagtatgaaagaggaggaaacatattccaattcattttattaggctagcattatcttgataccaaaatatgataaacacatcttgcaaatatcctcaacaaaatactggcaaatcaaatgttgcaacatacaaaaaggacgatgtaccatggtcaagtaggatttatcccagaaatgtaagtttgaattaacatctgaaaattaatccatgtaatataccatactaataagaataaaagacaaaaatcacatagtcatctcaatatatgtaggaaaagcatttgacaaaatctcaaaccctttcctgaaaagaatactcaacaaactaggaacagtagggaatgtcttcaacctgacaaacttcaacctcaacctcaaacctgataaagggcatctatgattaatacacagctgatatcatacttagtggtaaaagaagaagaaatgcttcc

SEQ ID NO: 15465 - DNA, 447 bp, Homo sapiens
  MAP TO AL096814.10; EXPRESSED IN LUNG, SIGNAL =  10
aagtgaaattccccctcacctgagattcccactgtctggtgctttgtatgtggacggtgggagggatgatgaaggttggcttctggttactgagaggcctcaggggataaagaggggtcctgccctttctgggtttgctcctcctctggcaatcttcatgctcccctgggaagcccccaaacctgtctggacttgctcaaggcagatatcctgttggtcactggcccccattatctcacagtcccaatttcttgccaaaacaacttccctttgctgctaggggacccctgcagctgaaccaagaagacagaaatgcggccccggagcctgggctgcagggagagtgtgaggaccaaatcctagctaaaggttttacaggcccagacacgcatacttctgtttgttggaaacattaccccaccaagctcagtcacctcaggtatttca

SEQ ID NO: 15466 - DNA, 444 bp, Homo sapiens
  MAP TO AP000493.1; EXPRESSED IN PLACENTA, SIGNAL = 0.99; EXPRESSED IN LUNG, SIGNAL = 1.7
cctgatgtgtcctcagctcctaaatagtgtttgacaatttctaaataatgaatgaatgaatgagtacactaaagtgggcatttactggatgtgtccccagcatccagttcccttttgtaattagccctttcccttttttcccttggatgctacctctccccatttcttagcctgcgctttgcttgggattggaccgacgtctagttactgggtatggactacctccccagcccctaccccaaagacttaatataatcaacctttcttactcacctccccttccccaccacggtgatctgtttaggaatggacacatgacccatctgtgaccaatgagagtgaatttcaggatttattctctctttctctataaggatgtgaggtctggaacagctgcagccattttgccaccatgggaaacctgggacatctgaactgactcca

SEQ ID NO: 15467 - DNA, 464 bp, Homo sapiens
  MAP TO AL035425.10; EXPRESSED IN HBL100, SIGNAL =   1; EXPRESSED IN LUNG, SIGNAL =   2; EXPRESSED IN HELA, SIGNAL =   5
tgatgaacaaaacagcaggctgaaaattgaccatggggttcagattcttttagtacaacaagagactaaataacatacagactctccaaataagcatattttatttgtctcctagcccatgatatctgacaatgcctttatagacactctataaatatcaaataaattaactagtcaaatgaggtcataatgttttgtcaatatccataagagtggatcagagcttacttaatcttgtatactgattatttcgtggaaataggtacccgtggtttggatggtccccctggtccagatggattgcaaggtcccccaggtccccctggaacctcctctgttgcacatggatttcttattacacgccacagccagacaacggatgcaccacaatgcccacagggaacacttcaggtctatgaaggcttttctctcctgtatgtacaaggaaataaaagagcccacgg

SEQ ID NO: 15468 - DNA, 385 bp, Homo sapiens
  MAP TO AC007458.13; EXPRESSED IN PLACENTA, SIGNAL = 0.98; EXPRESSED IN LUNG, SIGNAL = 2.3
cagggacattcagaagcactcttgaaatgacaaaaccctcagtggaatttatagcataactttctttttaatattccatttctgggtcaatccttgatcctgttaacactttaataagcagcaacaaagagaggcatcactgcagagactgtgcagatactaaatcagcttatgtacattctgtctaggaagacttttggaacagaggctggcttgctgttcatcaaatttatttgtgagttctagcccatggaatgtgagtggaagtgatgtgtgccatcctccatgggccatcttccatgtttcttctctgttgaccaacttgatacgaacatgcacagtgacctcacagtccaagtattgaagatggtgaagatggtggagc

SEQ ID NO: 15469 - DNA, 463 bp, Homo sapiens
  MAP TO AB020862.1; EXPRESSED IN LUNG, SIGNAL = 2.3
cgcaacttgcacagatcaactgtaccttgttctaagtaatgtgtgctttgctacaggccctaaggagtaaaatttactttcacagcttggcaataaatttatttctccgggaatctatgataagcagtgttttaataaatgaaaaagaggagaaaagtaaacatacaatttttataaagttgtcatagcctgccacaaaacattaagtgggggttatttttaaaccattttaaatggttgtgggaggaagggttgggtttatgtcctgggaagtacttttactcccagaggcttcaactagctgtccaccaggggaaagggcactaggaaaaatagtttagacttttcctggcctaagaaatatggtacaaaatgagcttcttggactccctctgagtgcagtatgagaatataaaactgaaccatcacacggacaaagtcacggaatcttgggtgtctggtc

SEQ ID NO: 15470 - DNA, 464 bp, Homo sapiens
  MAP TO AL035462.12; EXPRESSED IN PLACENTA, SIGNAL =   1; EXPRESSED IN HBL100, SIGNAL = 0.96; EXPRESSED IN HELA, SIGNAL = 1.7; EXPRESSED IN LUNG, SIGNAL = 1.9
tgcccgcataagataaatggtcagtgtcattagcattctctggccataaggcctgatctgccccagggaaacagcctgaaagtctatttatatcctgctgctgggtacacttaccagtcattctttggcttatgattttgcagccatgggcttttagggatactctagatttggttttgaaggaaaatttacattaaaagctgagcaatttttgagaaacccaaactagaaaaaaaaatgtattgataaaagttgtatttgagctagtgagaacaatatgttctcctcattttacagttttttgtagctgtaaactttgttcttgtcttcaggtctgtagcatctctgtctgttggagaaggcacaggtgtcagagcaccagtcagaacagcaacagatgataccaaacctaaaaccacatgtgcatctaaagacagttggcacgggtaagagcttcttattga

SEQ ID NO: 15471 - DNA, 474 bp, Homo sapiens
  MAP TO AC007917.15; EXPRESSED IN LUNG, SIGNAL = 2.1
ttatttaaatcacaaaacaacctttcaagataaatattagcattcccatttacagataaaggaactgacactggaagaaaccaagtcaactaacaaaagtcatgtattttttaggcagtggggctaatttaatttctgacctagctcttcactccagagtccaagctctgtttgccgcaactgctgtctcacatagatttcattgagcaagcactgatgtataccagacactctgataagtactttatacatcatcccactcattgctcacaataacatgcaagggtaagtgctactgtccccattttagaaatgaaggaactgaggctaaggaggatggagctgtcattggcatcatctgcctttatggattgtctctgtgggaaaatgcctgctgagttccaaaggggaggagaacaggtacaccatccagtcataccttgtatggtgtgagcattctccctgtttccacgt

SEQ ID NO: 15472 - DNA, 466 bp, Homo sapiens
  MAP TO AC006466.3; EXPRESSED IN LUNG, SIGNAL = 2.3
ttataaatgcctggcagtacggtatgtattttctatcttccccacaggaatgtatgcttcatgaggctcaggagcttttttgtttgccttagtattcccagtgcttggcacatggtaaatggtcaataaatgctattatttggtggactctatgcagggataccataagggaaattctgtagtgtttttatattttagggggcttctctttccattttccactcctgtccttagctcctttcctgctggggttgctgtgagaaccaaaatggctgacaaggatagcaaaaatgcagacagaagggctggggtcagaggggagtgttccaattgtgatggtggaactgtgttagccctgaatgctattcttatggaaatttttacccttatccctgcaacacgttctaaccacatgactgtctcaattgccagagttcaagctcttgggagtggaagtctttgaagc

SEQ ID NO: 15473 - DNA, 425 bp, Homo sapiens
  MAP TO AC009405.2; EXPRESSED IN LUNG, SIGNAL = 3.8; EXPRESSED IN BT474, SIGNAL =   2; EXPRESSED IN HBL100, SIGNAL = 1.5; EXPRESSED IN HELA, SIGNAL = 1.5
ttccagcaaatatcctgatgcaatttctcctgatgttcaatgaagctgtcatattgatctttagtaagctttagattttggagaactgctgctactgtaaagggcataccttaactatcttttctgtgataatcaatttctggatttttccattaggcattacctgtttatatgccagagcctttatcctttctttgaagacctgaagtcctcaaatcaatccttccagatacatgaagtcatatctattgacagagatgtcaattttgcaaagaacattagaagtcccttctgcctttacattatcttgttcattacttatttccttctcaaaagtaatgtcatcaacttccagaccaaattgaaaacatagttcatcaaattcttcatcagtgtaggcctggcccagggtttggaagaacaga

SEQ ID NO: 15474 - DNA, 464 bp, Homo sapiens
  MAP TO AC010087.2; EXPRESSED IN LUNG, SIGNAL = 5.3; EXPRESSED IN BT474, SIGNAL =   1
aaaacttacctcctcgacctttgatcaaatttaattactaagaatttaaagagggaaacaatacttggtaaaataaataaaaatgtattataaaagtcttttacaagctgcaggaaatctgttatcaaagggaacaatccccttgaacttcatcctacaaactgttcaaagcacacacccgattgtaacacccatacatttcctgttctcacccatgggctatttaaacacacacctgggtgtcagtgaaaaggaaaaccatattcttgtcttctacaccagccattttgtacaacttcctcaggtcttcatgaaaactatcataattatatccccggctgagttcaatctgcaaacatttgtaaccgcatatatgagctgcaagtctcgtgagtgactgctttcctgtgcctcctactccaacaagcagggcattgcctctttcttgacgtatcatccgagca

SEQ ID NO: 15475 - DNA, 490 bp, Homo sapiens
  MAP TO AC010091.1; EXPRESSED IN LUNG, SIGNAL = 2.5
aaagaatcaatggaatgttttactcctaaacttattttaaaatgctttataagtgaaaaggcaataatttaatgttaaaacttatcaatataaatgtataatttatgccctgagattttagtataaaatataataaatgtaatatataatatgaggtgttaattaaaaaataaaagaaaaaaaggattattgaagaagacacattattgcctaagctgcatttttacgtgctttcttttccatagcaattattacagtcattgtaagggtgagtcgcataaatgaactgaatccaattggaagtgcgtcagcatttaccttcagtgtatttgaaaatagtccagttgatacactagttggaaaagttacatttaccgatgcagactggccatttaataatatggaatataccgttgttggaggcaatttgggaacacctcccaaattttacattgaaccagatacaggtattgtaaaaacgctgacatca

SEQ ID NO: 15476 - DNA, 460 bp, Homo sapiens
  MAP TO AC010798.1; EXPRESSED IN LUNG, SIGNAL = 5.4
  unsure 277
  unsure 335
  unsure 346
  unsure 375
  unsure 399
  unsure 425
  unsure 430
cccaaatcataaagaaaaagctcacaattttttgtatagctaataacttttaaaaaaaaaagacaaaaaacaacagatcttttggaaaatactgggtaaaatgccccaaactgctttattactgtaagttttaacccctatcgtgctcttctctctgacctcgctagcatgttaacttcctcctaccatgaccattcttgaacttgtgacccactgtgttgactcatccctttacttttacccagttcattgttctttcttcattcccctagttttngaagttcagcttttctggtccatcatgtcaacaagattcttgcccttcctgtcttttnggatacacccnatatggctaaagctcaatctatagtggantggttccattctatagccaacacnttttggaaaaatttaagcagagaggntttgnttaataaagccttcaaattcagggccctta

SEQ ID NO: 15477 - DNA, 499 bp, Homo sapiens
  MAP TO AC010088.2; EXPRESSED IN LUNG, SIGNAL = 2.3
actgggattttccccatttcctgcatgtgaatgtttgcctctctatataggctgggaaagctctcttgaatgatatctgaaaataagtatttcaagttgtttttattctccccatcactttcaggcactctttttaatcatagatttggtttcattacataatcccatatttcttagaggttttgtttattcctcttttttttttttttcactcatcttgtctgtcttatttaagaaagccagtattgaagctctgagattctttcctctacttggcctattctgctgttaatacttgtgattacattacaaagttttcatattgtgttttttcagctctatcagattggtcacattttcctcctcattggcaattttttctatccattcctgcaatttttttcccttcattgcattgggttgcaactccatttgtagctcaatgaagtttattcatttccgtattctgaattatacttctgtcatcttaggcctcggt

SEQ ID NO: 15478 - DNA, 470 bp, Homo sapiens
  MAP TO AL078591.15; EXPRESSED IN LUNG, SIGNAL = 2.5
tctgaactaaaaatcacctggcaaaactgagagagcatgaatatacgagcataggcatattgaatactaagtgcagagatcagaattgttctctactgggctcctagaaggctgtcagctagattcttactctctaggaaggagacagacaagagtcttctatgtcatttcaagaactgtaaaatcttagattttaccaaacttgcaacctaacaagctagtctgccacagtttcatatatgttggcagaagacacaagactcttgggtcaaagacaaaaggtttgattatgcacagcatagcaagcagcatgagcttcctgttcatgttagtttcccttgtattcactcttccaagtcccatgggagtgacatggaggcaggccaggtggataccatgtatgtggtgggtttttggtcacaattgaggaaccctaagcttaggaaacctctatcttttataagggtagc

SEQ ID NO: 15479 - DNA, 467 bp, Homo sapiens
  MAP TO AC005798.9; EXPRESSED IN HBL100, SIGNAL = 3.1; EXPRESSED IN LUNG, SIGNAL = 1.7
ctaggctagagggggtggtctctttgcctttgatgtgctccctgggggacatctctgttttctccttcctgggctttgtgttcccaaatagagtggagctgactagcttaagactggattctggaaaatcctttctgcacactctggttttcacagctgtcttggaatatctacagatgtctttctgtgagcgcagattccgggcaacttgtttccaatagactctctcatccttgagctttaggcatgaggttggattgccagcaaagacacaggaaaattcatggtccaattgagtgcactcaaccttgagagagatgccctcctcctgctcagtagcagcccatctgcagttggcttggtctttggtgacaaacttgcctttgttcccgggcctgcttttctgcttaatctgggtgttgcccagagtgtccttttgttctgagaccactttgctgtgaagtcca

SEQ ID NO: 15480 - DNA, 464 bp, Homo sapiens
  MAP TO AC006042.2; EXPRESSED IN PLACENTA, SIGNAL =   1; EXPRESSED IN LUNG, SIGNAL =   1
tgggatgtgctgacctacaggtacatacagtgagctatggaatttttaaggcaaacaatttgatttaaaagaaatgtttagttcaataaaggtaacatacgcagaaattagcttaagacacaagcttggtctttagcctttgaagaataaactgggtcagtagtggtggaatatgaaatcaagggaaatactatgtgctttctatgtagatgaatatatgcaccagcatttggatgtttaatggtattcctcttacagccgttggacataccagatggtcgaagagctccacttcctgctcattaccggagcagtagtactcgcagcattgacactcagactccttctgtccaggagcgcagcagtagctgcagcagtcattcaccctgtgtctcccctttttgtcccccggaatcccaggatggtagcccttgctcaacagaagatttgctctatgatcgtga

SEQ ID NO: 15481 - DNA, 471 bp, Homo sapiens
  MAP TO AL049868.10; EXPRESSED IN PLACENTA, SIGNAL = 1.2; EXPRESSED IN HBL100, SIGNAL = 0.98; EXPRESSED IN BONE MARROW, SIGNAL = 0.98; EXPRESSED IN LUNG, SIGNAL = 1.1
ctctccttccacccagtgtccctattggttttccaagcatatatattttttcagctcctttctgttagcttagaaagcttgacccagtaatggacctttaggaccagatgttatagggggtagcagcatagattcccagaaagcagattctgagcacactgaccccttggcttttctcagaccactgccaagcaacaggtccctttactaatcttaggctatatgtgggggacttcaactcttgggtgtctcggggacttcaactcttgggtgtctgagataacaattttcttttcttaagatctacaactcttgaaaaagaagttcctgtcatcttcatccaccctttaaacactggattattccggataaaaattcaaggagccactggaaaatttaatatggtcatccctcttgtggatgggatgattgtcagcaggcgagctcttggtaaggtcttcatatgtggcc

SEQ ID NO: 15482 - DNA, 462 bp, Homo sapiens
  MAP TO AC007283.3; EXPRESSED IN BONE MARROW, SIGNAL = 1.1; EXPRESSED IN LUNG, SIGNAL = 3.1
tcacccttaccaaaggtgttgaatgagagtaaaataaaaaataaataaaactaattaattacaaatggaagaaaaaaaagagctctcaccttgggaccaatttcttcagatgattacacagagactgaatataccagctgccttcctccacatgccgaaaggatacatagcctgggacagtggccagaccaagtaggaagtcagcctcggcaggaatactgtcctgcagggaagtgggtgcctgctcagggttcagagcatctgcttcgatggatacggaaggctgtatctcttcaccttggcaggcctggatgaaaaagagtttaggtttttcagccagtctagggcactgcagggctgtgaagtgagacatgatctcccgaatgggaatgagggcctcatccgaagagtagacagctccaaatctcccatgggtcagaatacagaacacgaagcagtccc

SEQ ID NO: 15483 - DNA, 401 bp, Homo sapiens
  MAP TO AL109935.20; EXPRESSED IN LUNG, SIGNAL = 1.2
tcatttatcccattttaatactttgcaaaaatatgtgtagataataacatcagtattttataaaacacacctaattccttaacctgtagtatgtgtaatctttgcataatacattatttttgttattcgaagatttagcatatttgggggcactttaaaatgtagaatttaggcaacatttgtatgagtttttcttttctgccacttcttgcatctcattattttgtttattacgtagggtgaagctgacactagaaggcctggaggaagatgacgatgatagggtatctcccactgtactccacaaaatgtccaatagcttggagatatccttaataagcgacaatgagttcaagtgcaggcattcacagccggagtgtggttatggcttgcagcctgat

SEQ ID NO: 15484 - DNA, 468 bp, Homo sapiens
  MAP TO AC008159.1; EXPRESSED IN LUNG, SIGNAL = 0.64; EXPRESSED IN PLACENTA, SIGNAL = 0.8; EXPRESSED IN BT474, SIGNAL =   1
ttgatgctacccatgttcttgtgataaatccttacatttttatagacttctgggtttatttaatagtaggcagaatggtggctcttaaatccccaagcactgaggatccactggcaaaacttttgtgggttttgcctaaagtaatttgtatcttttcttcattttgatatgaaagtttgattttgatagaaagagtagataaagcccatcctagctttatgactggtttcttaatttgatcttgccaaggcattaattatattcaaaatgtggttaattttagcttatgtgttagcaataacacattgttttattttatgtgataacatcatcattgtagctacagtggtaggctttgaactggttttagtggcatttgagaaagtaaatattgatgtcttaatgaaaacctgtaagcaaccaggtaagccaacttggttttagcaggctcacaatgaatgaaatttc

SEQ ID NO: 15485 - DNA, 428 bp, Homo sapiens
  MAP TO AC009651.2; EXPRESSED IN LUNG, SIGNAL =   3; EXPRESSED IN BT474, SIGNAL = 1.1
  unsure 64
  unsure 188
  unsure 259
ggagtgagtagtttttacaagtctttgaaataatcatatttgtattttgacactaatttgaaancaaggagctggcttgaaatattaaacctaagtgatcagagacaatgagctatcagactgcatgatcaacgtagagcaatctccacataagatgagatgcatgcagcctctacaaatttggcttnggggaggagtttgcttcgctcgcttgaataagccactgtctatggctcacaagggtcccgttcttaatganggtggtgcgtagcagcaacacactgtgaatccaaatagcagatggcaacactgttgagtaggctggcagtctgatgtctagccaccaactggcagcaatcattattaaactgattcatgtgcccagggaaaatcttcataagagtcttagcaaatgtgagcagcaagaa

SEQ ID NO: 15486 - DNA, 478 bp, Homo sapiens
  MAP TO AC007445.1; EXPRESSED IN BT474, SIGNAL = 0.98; EXPRESSED IN LUNG, SIGNAL = 1.1; EXPRESSED IN HELA, SIGNAL = 0.94
aaaatgacccattctgtgggtataagttttcacatttttctagccacccttgttcctaatgaataggctcttgtacaaaatacatggcaaaagggacggaggttatgaattagctcattaagcacgtatcccttcattaagtctgatcttggtaacaccatcccaggtgcctaacctaacaccattgccaacagtatgatgactgacaatgtgatgtctttccaaggaagaccaactaaccacttgatagtaggttgtttatattaaactcttttaatcctgataatagtagtaattaatctgcaatggcataccattcattttggatctggatttaccttccttgctcacaatttttccacccaaaatatttctcactgatacaggaaacaacttattcatcaccaaagtatcccacacaatattgcttctgataaaaaaaaaaaaagcaattcacagcagtaatgaactcatgccg

SEQ ID NO: 15487 - DNA, 441 bp, Homo sapiens
  MAP TO AC009962.1; EXPRESSED IN HBL100, SIGNAL = 1.1; EXPRESSED IN HELA, SIGNAL = 1.3; EXPRESSED IN LUNG, SIGNAL = 2.2
ctgtgttcgttggggttagctcttttctgcaactctagcaacttgagacaatgaaccctttataagggctatttattccccagtacacatgtgtaaacatggtaaaataaataatggtttccagagcagaagctgagaaaaaagattttatcacaggaaatcagtaatatgtattcatttataatgtggtgtggactatcaatttattttatattttcatgtttccttttttgccccctttttttgtagtgtttcagaattgttggaactttatgaggaagatcctgaagaaattctttataatcttggatttggacgtgatgaaccagatattgcttctaaaattccttccagattttttaattcatcatcctttgccaaagggatagatattaaagtatttttgagtgctcagatgcaacggatggaagtagaaaaccc

SEQ ID NO: 15488 - DNA, 459 bp, Homo sapiens
  MAP TO AP000317.1; EXPRESSED IN PLACENTA, SIGNAL = 0.69; EXPRESSED IN LUNG, SIGNAL = 0.62
ctaggtcatcgctttggaggtactgggctttcttggcccctccccaaactttaacccatttaaggcagccgtcactttttgcagggcctccaagctcactcagaaatcttgtgttgaatggtgcagagctaagttgttcactctgcagtatcatattagaagagatttggtttaccctgaatccactctgacgatgtttgttcgtttgaccttcaggtgtgcaagttggttgtcttcagggaagagagcagttctcactcaacaatcagacataactctgtcttataacaaaattgcacccatggagcgtctaggaactccctacccaaagtgtggtctgtgggccagcagcacctgcgtcatctgggaacttgtaagaaatgggattcttagcagatcccagaccctgctgcatcagaacctgcattttaatgagatcccaggtgatttgtgtacctg

SEQ ID NO: 15489 - DNA, 1978 bp, Homo sapiens
  MAP TO AC004595.1; EXPRESSED IN LUNG, SIGNAL = 1.2
ttcctggtactcaggctcaagttgtaacaaccctaccaattaacattggaggagtgactctagctttgccagtgataaacaacgtggctgccggaggagggactgggcaggttggccagcctgctgctactgctgatagtgggacttccaatgggaatcaattagtttccacacccaccaacaccactacttctgccagtactatgccagaatctccctcctcctccactacctgcacaaccactgcttcaacgtctttgacaagcagtgacacattagtgagctcagcagatactggccagtatgcaagcacatcagccagtagttctgaacgcaccattgaagaatctcaaacacctgctgctactgagtctgaagcccagagctccagtcagcttcagcctaatggaatgcagaatgcacaggatcaatcaaattctcttcagcaggtgcaaattgtaggccaacctatcttacagcagatccagatccaacagcctcagcaacagatcattcaggctattccaccacagtcgtttcaactccagtcagggcagacgattcagaccatccagcagcagcctttacagaatgttcaacttcaagcagtaaatccgactcaggtgcttatcagggctccaactttaacaccttcagggcaaatcagttggcaaactgtacaggttcagaatattcagagtctttcaaatttgcaagttcagaatgctgggttatcccaacaattaaccatcaccccagtgtcttcaagtggtggcacaactcttgctcagattgctcctgtggctgttgctggtgccccaataactttgaatactgcccagcttgcatcagtgcctaaccttcagacagtgagcgttgccaacctgggtgctgcaggtgttcaagtgcagggagttcccgttacaatcactagtgttgcaggtaagttctgacatctttttaagtaccttttaaatagtttttcataacaattattgcttttctctcctaattctaaggtttgacgtagacctctgaagtaaacacacaatcataaggaaccagaaatagcaatattatactaacaaacatagctctgtagtaatcaatgtgacatgttcacttttgtagattttataataatgtgttaaatttgttagttttttaaaaagtattgttttatgggacagagctttctgattagaatcataattgccttctgtaatttagtggtcttatttgagtacattccagctcttcagaaagaaccctagtcgaaatgatatttatctcttctttgagggaaagtagttttaaactgaattggtatatataattgtgagtctgttgaacttttaattctgtggtgtaataaggctaacttttttttagtggaagttatttctcaagcttcagcatcttgtcgcccatgcttttgtgttttattacactggttttaaactagatactgatgcagttgagagataattttaagttgtaaattgtttggttaacttttatgcctacttttatgctactatcaggatttgaatgaataatccttcatttataaaattatatttaattaaatcatggtcattgtgtgatttgtagatgtttaatgtaaggttggtggaaagcaatgaaaaatgttgacagtaaaatgtcactaatttgaattaattgtggtaaagttatttttaaacctattgtaaaagcagttgttatttgttatgcatataaatagctccttctgaagtacttgggaagtagttttaatcttttttggaccagtcttattgtacctaataacttttgttttctagtaattaaacccttttcattgattctgatttgatgaaaacctcgttgtgttttagtgcctttgatacttccagaccttgttagttaaatatttctattttgataatgtgggataaataagtttatcacttttgaatgatctttcttgaaacaa

SEQ ID NO: 15490 - DNA, 1969 bp, Homo sapiens
  MAP TO AJ010770.1; EXPRESSED IN LUNG, SIGNAL =   2; EXPRESSED IN BT474, SIGNAL = 1.1
ggggcaggaccaacatttactttttgtagaattttttaaaagagaaacttctgtcagtcttttggtaatgagatgaagcagtataatttgccagaagctaaaaatgccattcttacattttcattttttttcctaaaggaacaagataaaaaagtagaaaactcaaataaagaagaaatacaggaaaaggagacaatcattgaagaattaaacacaaaaataatagaagaagaaaagaaaactcttgagctaaaggataaattaacaactgctgataaattactaggagaattacaagaacagattgtgcaaaagaaccaagaaataaaaaacatgaaattagagctgactaattctaagcaaaaagaaagacagtcttctgaagaaataaaacagttaatggggacagtcgaagaacttcagaagagaaatcataaagacagccagttcgaaactgatatagtacaacgaatggaacaagaaacacaaagaaagttagaacaactccgggcagagctggatgagatgtatgggcagcagatagtgcaaatgaaacaagaattaataagacaacacatggcacagatggaggaaatgaaaacacggcataagggagaaatggagaatgctttaaggtcatattcaaatattacagttaatgaagatcagataaagttaatgaatgtggcaataaatgaactgaatataaaattgcaagatactaactctcaaaaggaaaaactcaaggaagaactaggactaattttagaagaaaagtgtgctctacagagacagcttgaagaccttgttgaagaattgagcttttcaagggaacagattcagagagctagacagacaatagctgaacaagaaagtaaacttaatgaagcacataagtcccttagtacagtggaagatttgaaagctgagattgtttctgcatctgaatccagaaaggaactagaattaaaacatgaagcagaagttacaaattacaagataaaacttgaaatgttagaaaaagaaaagaatgctgtgttagacagaatggctgaatcacaagaagctgaattagagaggctgagaacacagcttctatttagtcacgaagaagagctttccaaactgaaggaagatttagaaattgaacatcgaataaatattgaaaaacttaaagataatttaggcattcactataaacagcagatagatggtttacagaatgaaatgagtcaaaagatagaaaccatgcagtttgaaaaggacaatttgataactaagcagaatcaattaattttggaaatttcaaagctaaaagatttacagcagtctcttgtaaattcaaagtcagaagaaatgactcttcaaatcaatgaacttcaaaaagaaattgaaatactcagacaagaagaaaaagaaaagggtacacttgaacaagaagttcaagaattacaacttaaaacagaattgttagaaaaacagatgaaggaaaaagagaatgatcttcaagaaaaatttgcacaacttgaagcagagaatagcattcttaaagatgaaaagaaaacccttgaagacatgttgaaaatacatactcctgttagccaagaagaaagattgattttcttagactccattaagtccaaatccaaagactctgtgtgggaaaaagaaatagaaatacttatagaggaaaatgaggacctcaaacaacaatgtattcagctaaatgaagagattgaaaagcaaaggaacactttttcatttgctgaaaaaaactttgaagttaactatcaagagttacaagaggagtatgcttgccttctcaaagtaaaagatgatttagaagacagtaaaaataaacaggaattagagtataaaagtaaacttaaagcacttaatgaagagcttcatttgcaaagaataaatccaactacagtgaaaatgaaaagttctgtctttgatgaagaca

SEQ ID NO: 15491 - DNA, 406 bp, Homo sapiens
  MAP TO AF126483.1; EXPRESSED IN BT474, SIGNAL =   1; EXPRESSED IN LUNG, SIGNAL = 1.1; EXPRESSED IN HBL100, SIGNAL = 0.91; EXPRESSED IN PLACENTA, SIGNAL = 0.92
tgggtcaacagatgtaagcgtcttactttctccccaacataattatttcattaactatgaagactctagacgtttactttgtagaaacaggaaagttcatttcttcacaaattgcaaatccgctagaaaaagaatgaattcagaatgcaggtggctctgtaatgctttagcatgtgaaagcctctctggctgtatccaaagcccttggggattttgattacaaatgtatccatgggaaaggtcctactgggcagcttgtctcaccagagcctgaagtccatgacactgaaagatctgaagaagatgatcacttcattatccttgcatgtgatagtatctgggatgttatgggaaatgaagagctctgtgattttgtaagatccaggcttgaagtcactgatgaccc

SEQ ID NO: 15492 - DNA, 397 bp, Homo sapiens
  MAP TO AL021579.1; EXPRESSED IN BT474, SIGNAL = 1.1; EXPRESSED IN LUNG, SIGNAL = 1.3; EXPRESSED IN HELA, SIGNAL = 0.95
gctttcggaaaaatctgctgacaaaatacctgaacctaaagaacagcggcagaagcagccacgagcaggacctatcaaagcccagaaggtaaatatactttataatccagataaaattttatgaaggccactgacatgaagagcaaataatacttttaaaagtgaacttaattttaatgaatatctttgatcatggtgcaatgatgaaagatactcatctatcataaacatagttttatcataaacatttgactttagcttccagatttgagtccagtagaaaacaaagaacacaaacctggtcccattggaaaggaacgttcattaaaaaatagaaaagtaaaagatgcccaacaggtggagccagaaggacaagagaaaccaagcccagctacag

SEQ ID NO: 15493 - DNA, 482 bp, Homo sapiens
  MAP TO AL121775.1; EXPRESSED IN LUNG, SIGNAL = 0.98; EXPRESSED IN HBL100, SIGNAL = 1.6
tgtttgttcttagtcaatgatgggttcacctaataaccctaggctcccactctgcctatggtaaactgaatttagtcccttttttagagtgcgtaaagctgctttgagagagaacagcagggaagggtccaactgcagacagaaggttgagacttgttattttcttcttttaagtaaacatgtggaaacaaaaatgcattttccagccatttattgaatatatgcaaaaacttccaaattcctaaggaccagtgaaaaggaaatgtctgattaccttattctcttccttcccacaaggaaatcgattcctccctttttctataccttttgtcctgtcctccttcccgaagagataaacaaacagaagagaatcctgaatcttaggaccatcttcaagataaaatgcattttctttttctagacttctctccatattgtgaagcaggtaacaagtagtttggggaaagacatctccccgatcc

SEQ ID NO: 15494 - DNA, 474 bp, Homo sapiens
  MAP TO AC010678.1; EXPRESSED IN LUNG, SIGNAL =   2; EXPRESSED IN HELA, SIGNAL = 6.6
tcacgtggatataaaggggcgggcaggagtgctcccagagtgggagaaccctctcagggctattaactcagcccagagtttccccagctttttgaagcagaggatgtacctagagctgcagggtgggcactctgcagtggcctggtaaatgtggggtgagcagccagtcaccgaggggctttcattgcccatttttggatgagcaaatagagcctccaaagacacaacacaggaggggcaaaagcaatggcctgaggcattacctttttccttcactggcacctgtacgcttcagatctctctgggcttgccttgaggaagatgatgcctcttcttcatgagtgtaggcacaaaagcaaccagtcatttgtggtagagccatccacaaccccttttgtgggctgatttgggcctccttaatccactggcctgtgaaacgcaactggaattccagagtccagaattcacatttga

SEQ ID NO: 15495 - DNA, 482 bp, Homo sapiens
  MAP TO AC010170.3; EXPRESSED IN BONE MARROW, SIGNAL = 0.9; EXPRESSED IN LUNG, SIGNAL = 8.5; EXPRESSED IN HELA, SIGNAL = 0.97; EXPRESSED IN HBL100, SIGNAL = 1.2
agcagctcactgcattctaggtttttggtttcattcattcctcactctgttactagaattctatcttttatgctttttgggaggggggtaatcatttgctaccacaaaccaatttgcaaaggaagaatgcttcctccttttaagtagtcacaactcccatagtaactagtatgcctctcaatatttattgaataaactagcacacagtaccgaagaagataagataccctgctttgtggatgcttgtagtttattctttagtagtaatgcttaatcttaatcttgtgacaataaagatcttggtaaaattctctaaaatgaatagaagttaaaagatgtggtttgagtcctctctttttaacaagtactgaacaatcttggacagtcacctctccaatctgaatctcggtttcgttgtctatattttattcatttatttattcattcatttactcatgaaacaaactttcctgaacaccagc

SEQ ID NO: 15496 - DNA, 382 bp, Homo sapiens
  MAP TO AL035412.22; EXPRESSED IN LUNG, SIGNAL = 0.6; EXPRESSED IN PLACENTA, SIGNAL = 0.73
aaaataaaacagaaagcaaacaaaagtatattgaaaaaagcaaatataatagaaaaataggtaagaggataagagactctgtatagccagaactccttaaatgcattcaattttattagaaaaaaaaaagaacgtgttaagtctttaattttatggaaacatgtagggttcaggaagacaatgtggcaagataggaaggtcagaaaaagacacagaatatctactttcttgtggccacaaaacattgtttgtggcattgagcctagaacagagttgacatttgcacaaatgaagtgggggcatagctgggactgagcagtgtctggctctcccttagttgcctcacgaatggggttagggatgctgtgcctgaacttgttga

SEQ ID NO: 15497 - DNA, 459 bp, Homo sapiens
  MAP TO AC008079.7; EXPRESSED IN LUNG, SIGNAL = 0.64; EXPRESSED IN HELA, SIGNAL = 0.74; EXPRESSED IN BT474, SIGNAL = 0.7
ctgattggaaagaagccaggaaagtaacatttctgttcaagacaaagaaaagtgtcttacattggcagcatcttcttttttacagatgtcttgtacagtgtcctcattagcaatgtcatatacagcgtccttattagcgaattcgtatacagcatcctcattagcgatgccatatacagcgtcctcattagcgatgttgtatacagcgtcctcattagtgatgtcgtatagagcgtcctcattagcgatgtcatatacaatgtcctcattagcgatgtcatatacagcaacctcattcgctatgtcttgtaaagcatcctcattagcgatgtcatatacaacgtcctcattagcgatgtcgtatacagcgtcctcgttagtgatgtcttgtacggtgtccttataagcaatgtcgtctacagcgtccttgttagcatgccttgtgggtgtcattagcga

SEQ ID NO: 15498 - DNA, 460 bp, Homo sapiens
  MAP TO AL049797.8; EXPRESSED IN BONE MARROW, SIGNAL = 0.78; EXPRESSED IN HELA, SIGNAL = 0.89; EXPRESSED IN PLACENTA, SIGNAL = 0.6; EXPRESSED IN LUNG, SIGNAL = 0.63
taagtgctttccatgcgttgtccctataaatcctcacagcaaccttatttgataattacttttatcctgatgttacagatgaagaaactaagacttaaaggtaataattacaattgctaaagttggtttcatgcccagctctatttgtctccaaagcctgagggcctaatcatatgaaattctttcaaatttgaaaccaacatttttagatgataaatactgatgaatgatcatttaattcattcttgtttttcttttatgtttttaagatcctgatgaatttgagcgaatatatgagcctctggatgtcaaaagtaaaaagattcatgtagtggacagtgggctcacatttaacctgccgtatcccttgatactgagacctcagagaggggttgatctcataatctcctttgacttttctgcaaggccaagtgactctagtcctccgttcaaggtaagg

SEQ ID NO: 15499 - DNA, 377 bp, Homo sapiens
  MAP TO AC007881.2; EXPRESSED IN LUNG, SIGNAL =   1
aaggcaatcaagttgtgcagctgggcatctaaaagacagaaaaaaaaaaaagacaacaaaactagaaagccacagaaacacgggttcatgatggctgaatgatatagagggtgacagatggctacaaagcggtcagaggccatcacactcaggagcgtgtctctcttccatgcctccaaaaatggcaaagggagacatctgagtcaggcagcctgcataggagatgactctgctgtgagattggatgtccacaatcatcttggctaccgtggtggaggtgaaaccgatgtcaggcaaggacaggttggagaggaagaagtacatgggggtgtggaggtgggagtcagggctgacggccaggatgatgagcaggttcc

SEQ ID NO: 15500 - DNA, 478 bp, Homo sapiens
  MAP TO AL031676.2; EXPRESSED IN BONE MARROW, SIGNAL = 0.66; EXPRESSED IN LUNG, SIGNAL = 0.62; EXPRESSED IN PLACENTA, SIGNAL = 0.6; EXPRESSED IN HELA, SIGNAL = 0.65
tgagatgtgaaataagatctaagcgtataaaaaaagccaaccattaggaaaaagaaaaatctgccaaagagaactatgtgaaggccctgaggcagcaaggagcttctagaagtcagaaggtgaccagtgtagatggatcgaaaggggaggagcgatgggagatgaggccatggaggtgagcagggccagctccgtccactcggcttccccagccaaggacctggttgcctcccaggtccttgatgagcagcctccatccctctgctcctctcccacacccgccctcctgaggttcagctccagggtgccattgctgctcttatgacacggagagcagaggttgaggatctgatgactgcaggcacaattcctctgtgccaggcactgcgtgaactttctgcccaacttcttataatctatccaggtagatataatcactacctcccacataccttacgggcattagacgatcttccca

SEQ ID NO: 15501 - DNA, 444 bp, Homo sapiens
  MAP TO AC004832.2; EXPRESSED IN LUNG, SIGNAL = 0.8
agtggattgagtgggctttggggccaattgggggagaaatgattcccagttcagccacatactgtgtggccttgggtgggtccttggcctctctgaacctgcattcactccacagtaccaggaggagccgaggagcccaggagcccaggaaggcagattctgggtgtgaggctcagggggtgagggtgctgtgtccggctgcagctgcccagggtggcacccacacaccttctgactctgcagctcacactcccgcaggagcagctcgcagctccggaagctgtccctgagcaactcctgtttggaggctgagagcaagaggcctttggggtccaggcttcccacaatgtggtaccagacagggctgccctcaccgtcgtggccgcatatgccgttagcgttgtacagcctgaccacctggatgcatacacaggagacgggggt

SEQ ID NO: 15502 - DNA, 458 bp, Homo sapiens
  MAP TO AP000054.1; EXPRESSED IN LUNG, SIGNAL = 0.66; EXPRESSED IN PLACENTA, SIGNAL = 0.62
tgaaaggtaggctgtttgggggtccagaatttcaacatatgccaccaaacccttttcttccctctgaatttttggaggcgcacctcaccttgtgaatttgtagcaccccaaaccagtaagcacacacattcaaatacatgtacatgcccacagctacccactagtaagcaccatcccccatgtccggtcacacagatgtgagaagatggagaaatgttcacctaaacagctggtgtgtgaagtcctgcctctgtcagctgagctcacatgggaaagatccccagtccctaggccccacatcaatgggcacagggccttcggaggaaaggacaaccactccgtcgtggagggagaacactttggactcgggtgtgtgtttgagggattccagagggtagaggttgaggaagaggagttgggagagtgagaaggtaggatgttgcacaggatgagaccct

SEQ ID NO: 15503 - DNA, 461 bp, Homo sapiens
  MAP TO AL121658.1; EXPRESSED IN HBL100, SIGNAL = 1.2; EXPRESSED IN HELA, SIGNAL = 2.1; EXPRESSED IN LUNG, SIGNAL = 1.7
tcaatctttgtaaatgttttataccagtaacatacctagagttttgtcatgattctaacaagggttaaaatttgtttttattttgtaaaaactaaatctctggataaaatcctctataactgacttaatgccaaatatagttctctagtgaatacagttttaccttcaggtaaataaatatacaatttatggatttttataccctttttcctatttttaaagcttgaattctgtgaactttaaggttaacttatttatgaaaagtgtaaatgttaggttgtattttcatattaaaattttgtatcctttaagggtactccgaaaacaaataggacaaataaaccttctacccctacaactgctactcgtaagaaaaaagacttgaagaattttaggaatgtggacagcaaccttgctaaccttataatgaatgaaattgtggacaagtaagttttgccatc

SEQ ID NO: 15504 - DNA, 394 bp, Homo sapiens; identical to SEQ ID NO: 2728
  MAP TO AC011242.2; EXPRESSED IN LUNG, SIGNAL = 1.5

SEQ ID NO: 15505 - DNA, 418 bp, Homo sapiens
  MAP TO AF042089.1; EXPRESSED IN BT474, SIGNAL =   1; EXPRESSED IN LUNG, SIGNAL =   1
aggcaggtgtgtacagcaagacgtgaataacacagcaatcaatgttgaaagcattataaggcaattgagtttgtcagaactacaaatattactgagtgtgggttgctctgaaatctgaaaacattacttgtgaattgcttctatccaaaatgcagacacaatgctgggtattggtttacttgtttccgatttttcaaccctcttttccaggcaaaagagggttgtatccaaacgatacagacccacagagtctaacagatgtctctatattcctcctcctcgaactctcagaggatccagaactgcagccggtcctcgctgggctgttcctgtccatgtgcctggtcacggtgctcaggaacctgctcatcatcctggccatcagccctgactcccacctccacacccccatgtactt

SEQ ID NO: 15506 - DNA, 476 bp, Homo sapiens
  MAP TO Z97985.4; EXPRESSED IN LUNG, SIGNAL =   1
tgccaacttttgaacaatgcaggtggtcagaggactatacttcgagaaaaactgtcctagggatagctctacagtctactcctagtacagttttatccatcatcctagtgttgatttcaaaaacgtttgtagcagtttacacctctgtgtcctgggccagagttaaggtcaacttcagagtcattcgcacacaagggtctgtccctgacaccaaggctcttgatttccttgggctgcaaacaaagaatattacttccctaatataattcagtaataatgaaactctgtgtgcacattttcatattcttccttattgggtacattaagcacttgttggaccttaagctgctcaatcttatggtcaagaaaaggagatattccagcagtgccaagagaagaaaaggactctctctagactacatcatgatgactcaatggaccagctaacagtagaaagcaatgggaaagatcatgaa

SEQ ID NO: 15507 - DNA, 478 bp, Homo sapiens
  MAP TO AF057177.1; EXPRESSED IN LUNG, SIGNAL = 1.1
cttcttttgcaaggattgccatactaaggaattcctcattatattttgtgttgttcccattgcagccagtcagaaatcttccaacttggaaggcagaacgaagtcagtcatcaggcagactgggtcatctgctgaaatcacttgtgatcttgctgaaggaagtaccggctacatccactggtacctacaccaggaggggaaggccccacagcgtcttctgtactatgactcctacacctccagcgttgtgttggaatcaggaatcagcccagggaagtatgatacttacggaagcacaaggaagaacttgagaatgatactgcgaaatcttattgaaaatgactctggagtctattactgtgccacctgggatgggcacagtgattcagatccgccctacaccacactgaaaacctgccttgtggctgcttctggtacacaagatagagctgccccctctcatttcctgccaccaaat

SEQ ID NO: 15508 - DNA, 447 bp, Homo sapiens
  MAP TO AL020990.1; EXPRESSED IN PLACENTA, SIGNAL = 1.1; EXPRESSED IN BONE MARROW, SIGNAL =   1; EXPRESSED IN LUNG, SIGNAL = 1.4
tgcctgttgacctcactctgctcataaaaagtaagaagcaggacagatgccaggagtcagggcaatggtggccttatgactgatgtgatctccttcttccctcccattgccaacaagtgctcttggggtcattatgtgtggccaaggatatgaggaaattgacagaccaagatttctaatcctttttctaccagtttgaaaatactttgtttctgttcaataccttctgttcaataatcctaaaagactgtgatttcttcatataatacagtttaaacatgaataatagcagcctacccttcttcttccagaaggcctccttgtaatacatcatgcacttaatgacagctcccattggaagccgctgaattaactggtttctctctgctggaagctctggtctgaagtgaatcttggcagtcaaggtcggagggatcgcattaatta

SEQ ID NO: 15509 - DNA, 458 bp, Homo sapiens
  MAP TO AC005883.6; EXPRESSED IN BONE MARROW, SIGNAL = 0.66; EXPRESSED IN HBL100, SIGNAL = 1.1; EXPRESSED IN LUNG, SIGNAL = 0.81; EXPRESSED IN HELA, SIGNAL = 1.1
ataggtgtgagccactgtgcctgatccaggctgacattttaaaaagtaaagttccaccagcccacctagaatgctatacctaaagcttgtctttatctatccccagggcacaagcctggataaggaatctgctcaaattgtttattgtttctcaaaggaaatgtcacctaggagctgtcagcctacgtctcagagaagcctaaactaaaaataccagcaggattctgagactcagagactccttgaatagtagagctggaataatgaaaataataatgaaagcagcaatgactacatgtgccaggccccaggatatgtactccatatatgttcatccagttctcacaaccctccctgcagtcatcatggtttttatggccgaacaatctcaggatcagaaagattaattaacttgcctaaagtcaaattgttagtgtccaaggtaggagtcaagcccc

SEQ ID NO: 15510 - DNA, 1985 bp, Homo sapiens
  MAP TO AF127577.1; EXPRESSED IN BT474, SIGNAL = 0.98; EXPRESSED IN LUNG, SIGNAL =   1; EXPRESSED IN HELA, SIGNAL = 0.99; EXPRESSED IN HBL100, SIGNAL = 0.99; EXPRESSED IN PLACENTA, SIGNAL = 1.2
ctgggtctctgctcttccactgacatggatgactgcattccacattgtgctaaattttgtaacagcttactggcactaaacgttgcagagttctgtgcaccttcattttgggctggtttctctcctggtgggtctttgctttttgtaaggtccattgagtggttagatgcagtatttgttagcttttcagactgagtactgcagacatatggtggggaattccatttgatgaccagagagtgttgagagagattgatgggagaccctgctttgcttgatgtaagtaaaggtggagtgctcactggagtagtccgatttgtactggggctttctatcacagaagtccttgcataattttgtgtattgaacttgctcacatcattgtgtactccctgagggctggtgtttttttctacattttcttcattcttatggccaagtagcaattgaagaagtgttactttctggtgtgagtttagcttagaattctttgaggtatcttgatcttctttgatatctacatctgggacttttggatcccaagtgtttagcaaggattgagtgaagttatccagggaaacaggttggtcagattctgatttttcagttcggtgtttgcaagacaagtctatgggaacacagttggaataagaactttcatcaccactgctgtcatctgtaaaactaggattgttatctgaatattcatcaatagttgtaggtgtactactttcctcaaaaatgcttcctctctcactgtgactgtgtccattcattggcttaggtatagtctggcttttaagaagatgtaaaagcaaactattgttagcagcttgttttatattgtttctttccagtgagttcttataacctgcatttttaggggaagaaggaatgatacccattggattttgaaacactgtagcactacttttgctagccatcagtttgcttgatgatgttcttgcctgaccattaagatggcttgacattccttttgggagctggtaactgccaacatccttctggccattttcttgcaatctggccatagcagcaagtctttcacttgctgcttgatttgcattttgcgtttttaaagcgtgttctcgagaatactgctgcaaatgggcttcgcttgacagaagtaatgctaactggctacaagcaacactaggtttaggtgaggtggcaggactagcccttttttccaccatgcttgcaacagcctgtaatcttgcagcacatgacaacggttcactcatgacctttgttccactttgtccaacatgatgaggagactctgcaaacctatctctgatgaggtttttagtcacatcaggaagattcgtatcaggcttttgatctttaactttacttttcttcaacaaagtttttaagtgacttgatgcaacaccatagcaccttaaatccttctccacttttaaagaatcatgactgagggcatatccttgctccttgaggctctgcctgatttgttgtgacagagcaacagtctgcagcctagagctgaatgactgaagcaaagaggccagtaatgtgctatcctgtttgcctttaggcacactgtcaaccatgccagctagcaaagcttccttctttacgtttaaattcatgatagaatcagacagcctcttccgctttgctgcattccagtcctcagaagactgcaacagtctggcttttttgaggtgcagcatgccagacccctgatatgtatgtgtattgagaactggaccattactttgacaggtgggaaatgcactgccagaaatgttaaagttctgatcctcttcattatgcccagcagactttttgtcaacggcagtacctgatccccctgctgcctgatgcattagtaatccttctaggtaagttaaaacaatagaatcctggtgcacatcagagccaagctcttctccatgagtcatgttcaatagaagtgttcacaagggcttggtttc

SEQ ID NO: 15511 - DNA, 475 bp, Homo sapiens
  MAP TO Z86090.10; EXPRESSED IN BONE MARROW, SIGNAL =  23; EXPRESSED IN LUNG, SIGNAL = 0.72
ggccctaggagcataatgttgtcagtagagtggaatagcattgtgttttgtgtaatgaggatgtgctaaagtctgaggtttggagaactggcagaagagttaatggagtcccgaggcaagatggtaaaggtgtattgatgactctgatgcatgaaagcagggtgtctgacctcttcttcttgaaatagagaaatagcatttgtcagctcagtaactgcataccaggtgtgggagactgtgtttattttctcccgcaatgagaacatatctgaaacagcagctgcagttggcgttgtcacataattaagtttatggtaattcactgtcattctctcagagacccatctgccatcttcactggccaaactgaagaatgaaggggaaattgataaaatcaccaccccagaatttttcaaggccgtgatgatattattaatcgcttcagttgcccaggagtttcagcgttgcttttggt

SEQ ID NO: 15512 - DNA, 390 bp, Homo sapiens
  MAP TO AC009481.1; EXPRESSED IN LUNG, SIGNAL =   1
tcctttagtgagggcagaatgttgtgtgaatcatctgtgtgattcttctcttcttgcacccctcctttctttctctctatctgtctctctgtctctccctctttcactcaaacacacacacacactatgccatatgccagaatagatgagaaaattggtccatttctcaaggaaacacaaaaatagcggtcatcattttaaattgcctgtcattattattatttcatgctcgaaataaaaatgtacagacactgggacattgtgggcattaaatctgaggtgacataagaatgaggagagttttccatagctactgatctgaacattgcccagtttctcgagctcgttgcttttcctagccttctcttcaggctttatgtggctctggaa

SEQ ID NO: 15513 - DNA, 448 bp, Homo sapiens
  MAP TO AL031662.24; EXPRESSED IN LUNG, SIGNAL = 1.8; EXPRESSED IN HELA, SIGNAL = 3.1
gcattccttagctttcttcttcccaaagcaatttcctaaccagaaacttgagctcaagaggtccatgaactcaccctaaatcatacagtgactgtctcccaaaagttagcccagaaagacctttgactacatctgtctccatgaaaccaatagcttggggctcattcctatcactctttggtaaccatgccccctcctgccaactgcagagggctgtcagggtgagggctgttggggagaagtagggtggagtcagtcatgtcagggatggaggtctcttcctcagagctggcggatgacatctgctgcctactcaaggagccctgtgtcctgcagagggctggcccgctccctggcaaggatatacccctacctgtgactgtgcagaggacaccactcaactggaaagagctggacaggtaaagttggggactcctggaaacatgaa

SEQ ID NO: 15514 - DNA, 448 bp, Homo sapiens
  MAP TO AC009493.1; EXPRESSED IN LUNG, SIGNAL = 2.3
cctagtaagcctgtgtccgctcttggcagaagagactgaagatgttacatgtttaactggaattgtgaatttttaaccctagtcattaggccttgggctgggtattcagccatatcttctctgtggctaaataagttaatattttttagaactccctgaaaatcagttgactctccactcatgatttgaattttgaattcaaggctttcagtgtgtttcttgtttttcatgtttttagactaatcagaaaaagccagctcatcatgtggtttttataatcatcatcaccatagtgatgaaagacttcactaccacaagttttgcaaatgccttaccgtccacccatgccaccaccagtgataatttgagtaagcctaataccaatgcaagccacaaattcgcaatgtctcatttaatttcaacaaagagaatctttgcatccattgaa

SEQ ID NO: 15515 - DNA, 480 bp, Homo sapiens
  MAP TO AC006111.2; EXPRESSED IN HELA, SIGNAL = 0.77; EXPRESSED IN BONE MARROW, SIGNAL = 0.91; EXPRESSED IN LUNG, SIGNAL = 0.6
cctccggtccttggtcaccagggattccagggcttgataccagatcacccagccagcacgagggggtgcttcctggggatacgttgcccaatggcatggtaacatcctcatccatccccaccaggtgaagcagacggcgtcacactagcctcaccctcgtgcagtttacactatgagagtgggggacttgccacccgatgtcaggtctcctggctgcaccctccccagccagctccttctccaaccctgtgacgtggcgagggtgcccgtcagcccaggctcggtgtgggtgtggtcatggcatgaacagcctgtggagtcacaggcccccaccacgtactccaggttcttcagggtgctgttggcgcagagggcatgagcgatggcctgggctccctcgggactgatggagttttctcgaaggctgaaaaaaaaggaaagacctgagcttctgaccgggcagatgaggtgtctggcaaa

SEQ ID NO: 15516 - DNA, 494 bp, Homo sapiens
  MAP TO AP000185.1; EXPRESSED IN HELA, SIGNAL = 0.85; EXPRESSED IN LUNG, SIGNAL = 0.7
tcagtggggttccttcattcttgaaattcacctgatgacgatgaacaggttcaatatgaagttcatttttcaattcattctatctcatctgagtacctactctgggaccatggactgtatagaaattaggacttgaaattgtcctttgccacctccttccttctccttatggagtacagaacaatggctctgggcagggccagcttcaggtgtgcatgacccattgggacagtggcgtagaaccccgtgcttggaagagccttgaacgtggtcaatgctctgctgtcagcccttcctgacttttaaataagggggccccatatttacatttcatactaaggctcaaaaatcatgtagctggttttgctcttggtaatgaaagactccttgaggtggttcccacagttttccatatcccagccagggctctcttcacactgtccccacttccatggctggagccgtagttttttcctggtcataactgtggaagg

SEQ ID NO: 15517 - DNA, 411 bp, Homo sapiens
  MAP TO AL132778.2; EXPRESSED IN HBL100, SIGNAL = 1.1; EXPRESSED IN BT474, SIGNAL = 0.91; EXPRESSED IN LUNG, SIGNAL = 1.5; EXPRESSED IN PLACENTA, SIGNAL = 1.9
ggtactgagagtggggtactgctataaagatacccaaaaatgcagaagggattttggaactggggagtgggcagagattggaagagtgtggagggctcagaagaagacaggaagatgatgaaaagtttggaaattcctagagacttgttgaattgttatgactgaaatgctggtagtgatatggacaatgaagcccaggctgaggaggcttcagatgcagatgaagaacttattgggaactacagtaaagatcacttttgttatgcattagcaaagaacttggaggcattgtgcccctggcctaaggatctgtggaactttggacttgtgagtcgtgatttagggtacctggctaaagaaatgtctaaccagcaaagcattcaagatgtagccttgctgcttttaacagcc

SEQ ID NO: 15518 - DNA, 474 bp, Homo sapiens
  MAP TO AC010135.1; EXPRESSED IN LUNG, SIGNAL = 4.3
taggatgcccagaactgaccaccaaataattctagggaattgaagcatgcaaaatgtgcaaaaatagcaagaggcaaaggaagtaaaatcctgtgtccatagctccaaagcgttttctttaacttcaaggccattttattttaatttttcataaactgtcttctcttgatgtacaatttttatacatatgataggcattgtggatattatttctcagtaaaatataatctaagagaataatttgactactgtatgccattatatgactggggtagattgcacttttacctgtaacatggttttcatcacatattttaattctaatcacacagagctcatcaaaagggacgaagaaaatgctacatatcccagtgtagtaaaggttgttatcactaagtagtaatttttaataagtaataaattttaattaatgattatatattttcactgccattaaattcacttttcttcaga

SEQ ID NO: 15519 - DNA, 497 bp, Homo sapiens
  MAP TO AC010141.1; EXPRESSED IN LUNG, SIGNAL = 3.3
tctcctcctgaaattgagctgaatggagaaacactattaatgagtcattttgtctccttgtctaaacgtgtaccctttttgccagtaaaaactgtctttcccagatcagtatttaatagctttgttaactgagataactgccacagaaagccaggataaaatcaattctctccaaccaagccagcttacaagcatttggcttcctggaagagttgtttaccagcactatggaaggaaattaaaaattatcaagataaaagaaagccctgacgtcccagctacctctcttgtctctctttcttcctcctttttctttcttctttcttgttcttttccatctccatgtacactgtgttcttcttaagtcttttcttcttgtacattcccttcattctgcattttcccatcttgctcagttttttctcctctggtctcctctcctattcttctttccatagcctcttctactaatcctcttcagaaaatatcttcctcaa

SEQ ID NO: 15520 - DNA, 457 bp, Homo sapiens
  MAP TO AC010150.2; EXPRESSED IN LUNG, SIGNAL = 1.3
gcagttttagtatggtagaagacccatttttacagactttattctatttatgcagagaaggtagatacattgtattcttttatcctctataaatgaacaaaacttgttttgttagtcttagaagaaaattctaagatcttaagtgttaccttcttcgtagtgtgatatttaaatgcttacaattgtggattttttatactgcacagaaagctacagtttatatagaaacaggacttgtgagggaggcccaaacgattcttctctgtttttgtaggacaaatgaaaagaactaaatgtgctgacattgacgttgagacaccggactccattctggttaatacaaatctgcgagcactgatcaacaagcacacattttcagtccttcctggagattgccagcaacgactgcttttactactcccagaggtagatcgacaggtgcgtcattgaactcctt

SEQ ID NO: 15521 - DNA, 407 bp, Homo sapiens
  MAP TO AL032822.1; EXPRESSED IN BT474, SIGNAL = 1.5; EXPRESSED IN LUNG, SIGNAL = 1.1; EXPRESSED IN HELA, SIGNAL = 1.1; EXPRESSED IN HBL100, SIGNAL = 1.2
atccgctcttcctaacctggatatcccagtttagcagctttttggagagatgcttcagagacatggtggcattctctgggtggtcatgtcgggggatatgggatcattccagttgaggaggtggggatatgggtggtgtcatgggtgagggacttggggtgaaagtactaaagggctttgaggtcgtcgtggatggcatgccccaccactatcttccctgtgagtatcttcaagatctggccccgagcaatcttgaagggtgtggcattcaccatgtgctgcttctggataccactccatctggtccagtagtccacagtgtggcaggggggaaggatgtactcatcataaagcacatctccgttgtagttgacaatgctacattgagccaagaaactaacatgccc

SEQ ID NO: 15522 - DNA, 463 bp, Homo sapiens
  MAP TO AL049738.4; EXPRESSED IN PLACENTA, SIGNAL = 0.63; EXPRESSED IN LUNG, SIGNAL = 7.7
gtggctccaggtattgcttcctaaacctgagtaaccatgacaacctctctaattccggagctcaactgtagacacctagactataattctgggcaactttgtgtcttatacaggtctgagggctagagatcagagtggacacatggttcaccatgtagaactgtcatcttgtaaagaccttctgtgacctccgggactttgcatgggtactcctatcatgggtgtgcagcctggggatgtgtgctgtgtgtcatatatttttctgaaccacagccatggtgtttttggctccagcacacatcacaggaagacttctgtgcagggcagtgtgacacaaacacattcagagcagtctgttgctggagaaggtttatctccttggctttgaaacgcttgcagcctttcagcccctaaaagcatttagaagcaggatgtggatgattttccatatttctaaaaagac

SEQ ID NO: 15523 - DNA, 1977 bp, Homo sapiens
  MAP TO AL109823.11; EXPRESSED IN HBL100, SIGNAL = 1.3; EXPRESSED IN BT474, SIGNAL = 0.98; EXPRESSED IN LUNG, SIGNAL = 1.1; EXPRESSED IN HELA, SIGNAL = 1.1
ctgtgtggctgaggtctttggagaagcattcagatcatcagagttccaacgccgttcctcaacaatcttgatgtcagccacgtctagctctagaacttggatgagtgctttggaaagccgctggagatgggccacagagttgaggacaaagtttatttttgggcccaagagtttcagataaccaagtaacaaggaaagagtagagaatttgccctggtcatcttgggagttcattaggcgaggaagagatgtggcaagggaatgcaggctttctgacaagatgtcagcgagggctttgttgcccaccactactttttgatctgcaaaatgtctcagaactttattgcactgggcttggatttcaggactctcatcatttactagtcccactaaggccttcagaaggggaccagcacattcgaccaatgattgactgcacttcaaaagaaggtcctccacaagttctaccagttccagtctcaccttccagtgtgggtgaacagaaacacactcaattatctttttaataaggatagtcaacttgtcgccagtcttttttacccaatctgcttccctgtaaaccatcagctctgctactctgtgctcaactgcaggttttgcttggacctttgagattcttttgagctgttcatcagccataatgaagctcactgtcttgtaaaagatctttagggaagatacgacaatgctgtgaccttgtttaaagtctcctgtgataagcctggtcagtgcagttgagattccaggtaaaaaagaggcaaacaaatcccccagctgcttttgttcaagttcatccaatgaccttggatggtcctgacaatcacactgcaagagtagaacctgtaaacattttaaggcagcaattttaatttgctttgatttctcctgttctgcaaggcctaacagtaaagatacagcaaatcctaaacgtggcagaatggagggctcataaaaagtcagaatgatgtccccataagctgagtgcattaatgtgctaagtccctggatcacagccaatttcaactcctcggacacagccgcaggtttttgggagctgggtgaatacagacaagcagagagttctgaaaagagttcctggagaagctcctgttctttcacacatgttgaagaaaggacaaatgtgaggcattccaccacactttggatcaaacgctctcttttgggacctggggtcttcagggtaaatcgcagagggaagaggatgtactgctgaagttcctgaagggcactgtcactcacagcttgtagtcgtgtctgcagatgctccacattctccactgtctgggtctttgtgagctgaacacagactggacgtaagacaccaaaggcctcctcaggagtatcaaaaactgccattgtgcagcagccttcccctcattgaggaaacatcctgcaggctggaggaaggaaactgttcagtaaaaatgtcaagttcaaagcaagtatgaagtgaacttgcattcattcattcaacagacatttacctggggtctatgtgccagccactgcacaaggcactaggggtgcaatgaaactgagccccctgtctagtgagggaagtacatgtacagttacaataaagtctcttcaggattaggacaggcctaagcttacagtcctgagtgtggaagtcatatcctgaggaagccaggatgggtctcacaagaaaattatgctcgaggcaagacttgagggaggaaggaataggaatctgtggactattttcaggagttcggattttaaccttcaggagtttggatttaaaccttcaggtttcatctttttaaaactgaggtatacatatagtaaaatgcactatcttaatgtacagctcagtgaatttttgtgtttgtatagaacaatgtaaccacttcccgaagtaagatacaaaataattccaacaacctagaaggctccctcatgtccttttgcaat

SEQ ID NO: 15524 - DNA, 373 bp, Homo sapiens
  MAP TO AL096701.14; EXPRESSED IN LUNG, SIGNAL = 1.3; EXPRESSED IN BT474, SIGNAL =   1; EXPRESSED IN HELA, SIGNAL = 1.6
aaccacaagcctgctttttccagtaacaaatagcatatcaataattaaggaacacacaaaagcatcaaggaccaaatgactactaaagaatttccaacttactcagaatacctttttaaaaatccttttattgtggtgggaaaaagaagaaaaaaaaaggagaaaagggtggggggtttgtgtcagatacttacgctgactttgggctgagaaggcaaagtcccacttgccttcattgtgctcactagcttgttgaacgcagtcatgtctccgtctttcttcagttgtcgattgttggttacggcactcaaggtctcttctaggtgttctgccatgaagggagttgaattcttcacttgctggtcaaccttca

SEQ ID NO: 15525 - DNA, 485 bp, Homo sapiens
  MAP TO AL049694.9; EXPRESSED IN BONE MARROW, SIGNAL = 0.65; EXPRESSED IN HBL100, SIGNAL = 1.7; EXPRESSED IN LUNG, SIGNAL = 0.9; EXPRESSED IN HELA, SIGNAL = 1.5
gtcaccaagtgactgcaggggggtgactcctccccagcccaggcagaagcagagatcaggattggcaaggatggtggaaagctcctgaaataaatttcacatgtttttgttgcagccaggcataagcacgtcatatatgactatgagaacattaggaagcagttaggcaaacatgcttgtcggggaagaaatgtgtgtgtggaaactttttctgtatcctcattacactcactgataaaaggaagaaaacctttctttttctggtaacgaagaacgaggaccgtccactccctgaagcttccgagttggaaacactcaccaaatcatctgctgtcacaggctgcccgcttttgtcactggccaccaccatccttcccagccgtgccttcatgtctgcgaggctgtccgtcagggccagcaccgccatgatctcgctggccactgcgatgtcaaactgcgcctgaaccagcccaaacacaggtagt

SEQ ID NO: 15526 - DNA, 454 bp, Homo sapiens
  MAP TO AC005105.2; EXPRESSED IN LUNG, SIGNAL = 0.71; EXPRESSED IN PLACENTA, SIGNAL = 0.73; EXPRESSED IN HELA, SIGNAL = 0.59; EXPRESSED IN BT474, SIGNAL = 0.6
tgacatcattcttggcaactgatagtttttttttttaacgtgcattatataaaaagctcactatatcttttctagatataatattagactgcaaatataacttttaacaataaatcaatatatgtaaatgataaagtatgtttcctaactgttggtcacagcaatagacaacatttcaaatggaaatatgcattttttcttttttcctttagtatttttgaaatgagaatatatgtggcatatctttatgttgtagagctcagtgatacaacaaatacctatgagcccagcccccagcccccagccccagaaccagagcatcaccagtcatttctaactgtcagtgtgttccttccacgttccatcctgcctcgcccttggggtcgtcactgtcctgaagttggggctcatcatcctttggcatttaaaaggagttttatcacaaatgtatgca

SEQ ID NO: 15527 - DNA, 447 bp, Homo sapiens
  MAP TO AL078596.8; EXPRESSED IN LUNG, SIGNAL = 3.8
gcctgctgtcatcttttattccaaaatgggtctcggcgattagaagagaaccaaatacatgtagcggtgcatgaataatgctcattgtaggaaactgacacttgctcaaggaaaaaaagtttgggtataaaatcacttcattatttgcttttaccgcagcttcggtgctaatcccttcagaggtcagattgcttagcatctctctctccctctccccttttctccctcttctccgccctcctttccctctcgccccttccccccttccccgtctttcctgcgatttcaggccgcattttagatatcccctgcaaagtgtgtggcgaccgcagctcggggaagcactacggggtctacgcctgcgacggctgctcaggttttttcaaacggagcatccgaaggaataggacctatgtctgcaaatctggaaaccaggtaccttagcca

SEQ ID NO: 15528 - DNA, 469 bp, Homo sapiens
  MAP TO AC007708.13; EXPRESSED IN BT474, SIGNAL = 4.8; EXPRESSED IN LUNG, SIGNAL = 3.2
aggctgccaatcaatagcaccacaccaagggaattgcagatgtcataaatagtccacattggcagatgttcatgtctacatttgattaaactgcagatgacatcgataatgcacactggcagatgttcatgtctacatctgattggaaagaagccaggaaagtaacatttctgttcaagacaaagaaaagtgtcttacattggcagcatcttcttttttacagatgtcttgtacagtgtcctcattagcaatgtcatatacagcgtccttattagcgaattcgtatacagcatcctcattagcgatgccatatacagcgtcctcattagcgatgttgtatacagcgtcctcattagtgatgtcgtatagagcgtcctcattagcgatgtcatatacaatgtcctcattagcgatgtcatatacagcaacctcattagctatgtcttgtaaagcatcctcattagcgatg

SEQ ID NO: 15529 - DNA, 496 bp, Homo sapiens
  MAP TO AL118512.2; EXPRESSED IN LUNG, SIGNAL = 1.4
catatgcatctaacgacagttttgtacatgaaagtactacatctcaacccagagggtaattcagaaggaaaaacagagaaacttaaggaaatgccactgacaaagtctccaacagagagtaatgagcagatttagtaggctcttcacatcttgaagcaattgaggccatagacacaatgcttaattcaacttccatccttaataaagtaagctgcacaaacaagtctttaatggtgagtataaataattatgaacccataatgaaaaacaggattgaaaaagttagaaaaattggggaagctatgaaacatagtattctttcagaacttactgtacaccttcacttcatagtgctttatcatttctccagcctcattcgtggctacacaagagtatcttccagcattgtcctcctgtgcattgaggatctgcagagttctgcctcctgtaaaatcatgggacatcaaagagtctctaaaatcacagtgacagtgga

SEQ ID NO: 15530 - DNA, 499 bp, Homo sapiens
  MAP TO AC010974.2; EXPRESSED IN LUNG, SIGNAL = 0.89
tcagagtattcatacttttcctactgcttatttttttaactactacttatatttttctactacatatcttccaaggcagactgacagactgtaaaagcatcactattgtttacaaaatgtaatttgcacatacacgtacatatacatgtatgggaacactgataaactagaataaactttttttaattaggacatgtattatctaatctggaaatgtcaagtcttttgagatttaactgtccaaggcaggattttgagacaaataattaaattatcgctattcaatgtttctgcttggttttacctagaaacttcactcacgtctcttggatctttcatctggagatttgctttcagaggtggaaagaaaccgaagtctgacacagtcacgaactgatgctgaggtgcacgtgagtttcccagttgccttcagaacacttgttttggtggttattttccttccatcaaatatgatgtcacaagcgaaccataaagtgca

SEQ ID NO: 15531 - DNA, 458 bp, Homo sapiens
  MAP TO AC011003.1; EXPRESSED IN LUNG, SIGNAL = 1.2
ccaacaagtcagcctgtttctcagactgattcattgctactttgtgggtaaaacttgcttaatataagcatatctaatcagaggctattaaaattaaccttttagtgggaattcccagtctcattcttgacccaactcttgatcaaattctctccagtcctactagttctttctaaggcttacgtctccagtgccacccctcaacccatgtcttcctgattcttctgtgagctgatggatactttttttgtcctataagacctcccattcatgttccacctttgaccatgggcctctatattccacacattctcctggattatcccacttacttcgtggttttaatttctatccctgagctgctgacttccaaatctgtagcaacagccttgaccttggcaatacttcttacggccagatccaaagtcttcatggacatcttcatctgggaagctccc

SEQ ID NO: 15532 - DNA, 476 bp, Homo sapiens
  MAP TO AL109843.5; EXPRESSED IN BT474, SIGNAL =   3; EXPRESSED IN HBL100, SIGNAL = 1.7; EXPRESSED IN BONE MARROW, SIGNAL = 1.5; EXPRESSED IN LUNG, SIGNAL = 1.2
tggcattagttttgccttgctaattgacatactcaactctttacccttggcccgataatgttgaattctgaccacagagctaaactggcctggcttggagaaatggcacttaagtgctgtgaaacagctgaattattaaaaggagatgcgaaagagagaaaccaaaaggaggtatttgtgttttgagaaaaataggagggagggtgggggcgaatctccaatgatttaaaaaaaaacacatcctttgtctcctttaatatgactcctctttcttgaatatctagaacccctgaaaggtccagaaaagtccatgtgtctgctctaatcaaagcctttatgatgcaggccttggttactgtggctttgacatcaagattggcaagcgcaaaagtaaataaagaaaccttagagatgtctataccctttggctcagtaattcctcttgtagagatctggccttaagaaataatcagtgg

SEQ ID NO: 15533 - DNA, 455 bp, Homo sapiens
  MAP TO AB023057.1; EXPRESSED IN HBL100, SIGNAL = 0.66; EXPRESSED IN BONE MARROW, SIGNAL = 0.68; EXPRESSED IN LUNG, SIGNAL = 0.94; EXPRESSED IN HELA, SIGNAL = 0.67
catggtgtgagaacctggccccgcccccgcggtcagcccggtcccccgagccccgccctgcccggaccaacccgcggggattttggcctaaactgaaaatgaaaccgggtaaaggcgcctgggcctctcccaggtcaagggtctcggggtcccgcggtttcggggaggatctcggacccagagactcgaggcgacccggccctccgtgggggatggggaggggtcgtgacctgcgccccgggccggggtcactcaccgccctcgctctggttgtagtagcggagcgcgatccgcaggttctctcgttcagtccgtgcttgggccttgcagatctgtgtgttccggtcccaatactccggcccctcccgctccatccacggcgcccgcggctcctctctcggactcgcgtcgtcgctgtcgaaccgcacgaactgcgtatcgtccacgtagccgac

SEQ ID NO: 15534 - DNA, 475 bp, Homo sapiens
  MAP TO AL109614.4; EXPRESSED IN LUNG, SIGNAL = 1.5
agctcaccgggtacaaacaggcctttgtccttccccgtctctctagacgcttccctccacattccccagtaactactccatacattctcctgctttccacaaaacactgacttccctccctgccctgcctcagggactggggctgttttgttccccagcatagattcccactaaatatttgctgattggctaaaagcatccaaatggtgatctcacctgagagcccctgtgccagacacgggagacacagcagaagatgccagaagccctggaccacacaaagctcttaaactagcagaggagacagacaaaaaaaaccaggtgtgcaaatgactacatactctgtcttcaggtggtcatgcgtgtgagggcgaacatgcaggatgagggcgacaggctggaggatgacctgagcctgcgcttgcaatgggtgagggaaggggccaagccatttagacgggatattcagggaagg

SEQ ID NO: 15535 - DNA, 462 bp, Homo sapiens
  MAP TO AC009497.2; EXPRESSED IN LUNG, SIGNAL =   7; EXPRESSED IN BT474, SIGNAL = 1.5; EXPRESSED IN HELA, SIGNAL = 1.6
ttcatcttggtaaataaggtcttgctaccataagaaggagtcctctataagatagaaaatgtctggggaaaactctgctaccatgaattgtacagaatatgttaggttctattaagattaccatttaaattatgcctctggggaatgcactggatttaaacacacaaatacacatctccccggggtctggcgataatatacgcacatcgctctgcaggtcgtaggctttcttggcctggatcacatcgttctgatctggcagacacgtccactggtgcagataattgcgataatcaatgtcgctaaccaggacctggcatttcttggcttgaacaattgacatcatgtccaacggtgtgttgtgaattcctttagacttctcataagctttcttatattctctgtcactctggatcttggcagcatgtatagcccatactgacttggggtcatcttgtaggg

SEQ ID NO: 15536 - DNA, 459 bp, Homo sapiens
  MAP TO AL049794.13; EXPRESSED IN LUNG, SIGNAL = 8.1
taaattgagctggcgtcttgatattccttctctgggggagtaggagaggcaggatactacagggccatggcaggggtggatagcacaatgatgaaagataacttgtaaccctttcaaaatgttttgactaacaagaaatatagtaaaatgaaattgggattcttttccggcttaagatgttctgagtttaaatttcatggggaggcatgctttcaaccagcttatatctgttttataatagaatcaatccactgaactttttgtctccagaacattatggcaacctataaaagatttttttctctggctgcctgcagttttccattttgtggagaagatgtgtattgggagtgtaatggattcggaagcagctctcgtaactggggctgttgctcagcaggcttgtaggcgggtcaggtttgtggaacaagtttcctgcggtcctctggattcctgttg

SEQ ID NO: 15537 - DNA, 491 bp, Homo sapiens
  MAP TO AC007738.1; EXPRESSED IN BT474, SIGNAL = 1.2; EXPRESSED IN HELA, SIGNAL = 1.7; EXPRESSED IN LUNG, SIGNAL = 0.98
agccaccaagtggataatcagtctaagtgaattcaatttttatccatggttttgattttgattatttaggtacaaagattagcattattttaaaaagctttatagaactgatatttttaacatgtcaatgatccaacatccctcttgaaattttctcctttattaaaaaattaactttttctcaataaaagaaaagcttgatgacttcaaacttgggtagtaatatgctactctctcaccttcctctgataaagttcctctggtgtcgtggagcgcaaactcacaaggcggtagtttttagtaatggttcgtgggcgtttccgtggtggtgcaaatcgctccatttcagtcaccaagtaaaggccctgttttatataaccaaagtagcgagccttggcagatatttcataatcagaatcagaatcctcttctccttcatcttcttctccagctctagtctccaaacgagatcgtttgggggcaagtttaat

SEQ ID NO: 15538 - DNA, 483 bp, Homo sapiens
  MAP TO AB020876.1; EXPRESSED IN LUNG, SIGNAL = 3.7
cagctccaagtccttcagaatctatatactaacaatacgactgaattgacaaagatgaggttgattataccagcatcagactgacaaagtcctcatttttctcctctaaaccttaggtttgaacaaacctttattttggatggcactagggaaatcccattctgcctctgcctgaggttctgtttgggtgttgtagagcagtgattcacaggaaaagcaccttccaaacccacatgggttccttcttcttcttcttcttttttttcccctgatagaagtaatttttggactgctgtgagatgcccagatggagagtgctgtagacaccaaggctctcttcttggccatgggtcagggagggtatcttcaggggctttctcagcctttctgtcgccaggaagtttcaatcctccagacaaagaagggtaggtttttccctatacctgaaaagctcttttgttatctttttgttcctcccatcca

SEQ ID NO: 15539 - DNA, 467 bp, Homo sapiens; identical to SEQ ID NO: 4956
  MAP TO AC007102.4; EXPRESSED IN LUNG, SIGNAL = 0.82

SEQ ID NO: 15540 - DNA, 449 bp, Homo sapiens
  MAP TO AB020873.1; EXPRESSED IN LUNG, SIGNAL = 0.88
tccattcgtagtcagcaaacactttcttaaagacagttgactccatttatgatgacaaatccaccagtcttctctatatttaggtgagatcgttctatgtttacctggctaacattttctgagatgtattggattggtatgagttaaggcctggtctgaaaagttccataaactacctactacctcgttgcatcagatgtatatgccactagttattatatattagaacaataatatttgctaaagccatgtgaaatcttaagagattaaaagttacagaatggaaagaaaagaaggatgaatttaaagatggaaagaatgaatttggattctacttccatttcttaatgaatattaataacaatagtaataacagcaacaaaaacaagaataagctccaggctttatggagctcttaatatcttctaggcattgtgctaggaactttg

SEQ ID NO: 15541 - DNA, 1972 bp, Homo sapiens
  MAP TO AC004616.1; EXPRESSED IN BT474, SIGNAL = 2.2; EXPRESSED IN LUNG, SIGNAL = 1.3; EXPRESSED IN PLACENTA, SIGNAL = 0.94
ccccctgtgtctaaaataaaagctgaagttataaaaataaaaataaacacttattcgagtaaaaaatttccccaaatgtgttataaaaatttctcctaatgtgtttatgttgttcaccatatactgttttaatgtattatattgctagccaataaaataaaaattgaccaaaaaaaaaaaaagtagatgcttaaacatcttacctgtggaaacctttgtccaagtaacgaaaggctttggttttcctgttgcctcacaggggaacacagtgtctgtctcagcggtgacggacacagtctgtggggacttggtgaggatttgtggcttttccccaagagaccagaatttggatgcaggaggtcctcctgcaaagaactttgagctgctctggtggaagcttcctgaggactggacagaagatgttataaaggagatagaactctgggtggaagagaccatagggatattctgtaagttagttgagggtgatcccgtggtctgcggagtgtgcaacaacggaggtgccggagggccaaagtccagatggaaggtgctatgggaatgtatcctgttgtaggaacctggaataacttttctctctctcattactggggcaggagaagtgggtatctggggtctccgggtgactcccaactgtggaaaagaaagagtcttgttggtaaagaaagggagtcttccattggaataatgaggaattcttggactgggaggctttccaactgggtttcttgcctcagggatgttgttatttccaaacactttggagtagccattgaattggtcagttcttcggtcagtaaacttactaggaatgctgggtttggacatgtgcaatgggagaggaattgttgtacttgataatcttggagttgtaaactgtttgttctctggcaaagccccagaaggatatgtagttatttccggtttgttggtccagtgacgaggtgactgggaagttacaaagtatctggaagcgctttgtgtggacatttcaggcagcctcactgttgctgttggtaggatgggtttggcagggactctggttagttgatgagaagcatgaactcttccatcctggcgttggctatctgggccacgtggtagactcctactaccaaatacttgcttttccaattccagctttgtagacaagttaaatgcatcctggtcggaagagggtgttgataattcatttggccctgacatatgctgtgttccttcattgttcactggggttgcttctgtttctggattccccacataattcaagaaaacattttccttggaatctctagatgcttgagatattcttggactgggaagtgctggcttagtggtggtggtttgtcccaaagacatgagaattgtggatggggacgaggatgctggctccttcatccgggcagcagtaggggtgtgattctgtggtctagtttcagaaaggagaatagccacagtggtttcaagatgatcttgatcaagggtggtggtttctgcctgacttgaagccacctccacttttatgcttgagagagttgtggaagaaccagcttcttcctggtgaaatggtgtggagactgtcaaagaggacaaaaactcggaagtgaaatccacatcctcaagctctttaagaaggggagggtctgtaagattttccccagaagtggtaacaggtatgcctgtctgtagcctcccaggctgggccgtccttgagggattccaggttggagttcctggaaagcctacaggagaggattcttccttaaattctcccatagtggagaccaaggagcgagaagttggtatggcattagtaattgattcaccagtgactaaaatgtcacttttatgtttgtcaacatttgtggcaacatcatccttaatttcttttccatctgatgtgggtttatatgtgactggaagtgtctcttggactttagggtaagatgaa

SEQ ID NO: 15542 - DNA, 358 bp, Homo sapiens
  MAP TO AL096763.9; EXPRESSED IN LUNG, SIGNAL = 7.1
caaaggagacatggcaaagcttaagtgaagggaaaatgcaagcagaagtaaacattgtggtattaccatgaagctaagccctctggtcataactaattactgtaaaggttacaggaatatttaagcaatttactggaaatggggaccagagagtaaaattttgccaaggatgaaatttaacaaaattaccatatgacatttggagtggacggtgatggccatcattgccgcctggaaaatttggttgtgtggctgtgtcatcagtgggattatctgctgtgacataagtggaatcatctgctatgtcattagtggaattatctgctgtttcagaaacttccaccatctcaatactgca

SEQ ID NO: 15543 - DNA, 392 bp, Homo sapiens
  MAP TO AL078645.18; EXPRESSED IN LUNG, SIGNAL =   1
acattctcaaaggctggtgccgggaaggaagatatccatctggaaacagacatctcatcagcaaatgcaccacacattcccaaggcaaggcagccatcaggaacgtcctacctcaccaaccagcctctgagcgaatgaatgaagcattttgggttacgacagtaaaacaatcactaccaaaatccagttttccttttgttgaagacatgggggattaatttgagactttaggttccctttatcagagcccacactggaagaaatggagacagccaccgttacagccagagggtcctggcgcagaaaaacgtgccaactcgaggaagagaagggagacacaggacctgtcttccttcggctccccccagcttccttgcacctgttcccaattt

SEQ ID NO: 15544 - DNA, 492 bp, Homo sapiens
  MAP TO AF165147.1; EXPRESSED IN LUNG, SIGNAL = 1.7
tgggatgtagaagaccagggtcagtttgttgattatgtgtagactctgagatgtctgtggaacactattccaatgagacctggagctccctgtatatagtgatattttcaagttgtgacagatgtgtattttaccaactggatgatctccatgtctcatattatcttccccacatgattcttgtgagtatgggcctcaaaaggcacctggtgtgagatttagaagacagaagtgaagtcgcattggattatttttatgctccagaggttggagctgggtatgagatacagtaactacacagtcaagttctacctgccaactcaccttggtggcaacattcagcctcattcctgtataatcctctgttcctgctgtagctccttcttcagcatctcttgggctgggtgaataaaaaaggggactggcttctacaggacacccatgttatcaagggttacttcttagtaagagactgacgtgtgttccagttca

SEQ ID NO: 15545 - DNA, 484 bp, Homo sapiens
  MAP TO AL109657.7; EXPRESSED IN BT474, SIGNAL = 1.5; EXPRESSED IN LUNG, SIGNAL = 3.1
ccagtctcggctattgatggtaagaactgttttgaagaagtatatatagcacatgtcactgtgcttaaggctttgaatgtagtgtgtactggaaaagaacatctgctgaatgaattaattgcttatactctgaagtgtcaacacatactcaatagaacatgcagaattactctgcatggcaagtgtaagactctgaattttacttctcaaaggaaagccagtccacaagagactccctgatgggccttgtcactttgtccctaagagttgctcactggagactttcagagattcaggacctgttcaagacaaacttacattaaaaaacaggatatcccggagcaaatgcgtagtttccagtttcatgacggcaaagagcacaggtatgtgggcatctggactcgtttgagcagccatgtcgtacaatcttctggccaagtgaatgtcctagaaggagaagaatagccctacccatcagattctg

SEQ ID NO: 15546 - DNA, 472 bp, Homo sapiens
  MAP TO AC007538.5; EXPRESSED IN LUNG, SIGNAL = 0.99; EXPRESSED IN BT474, SIGNAL = 0.97
caagagtgcttcattgtctcaagtatatgagaggaggcatgagactagtgcagcaaagtatccactgggttaatccctatggatgtcatcagtgatcattagtagcctggatgtcatttgttgcacaaaagacagattggagtggattcagtagaatgggaaaagaactggagacagtatagacaaatattttggtgagtttagctataaaagggagatgagaaataaggcataacataggagaggaacgtgtaatcatcagtatttttccttaacctgagggatgctaatgccaaaaagagatgcaattagggaagaagtgaaggccttgaaggccatgaaggccatgaggagtatcaaactccagtggaagattgccttagggaagagtaggaacaggtcctccactgtaattacagataaacaaatgaaaaacatctaaatgtaggtaggtttgcaggtttgactgcag

SEQ ID NO: 15547 - DNA, 484 bp, Homo sapiens
  MAP TO AC007038.3; EXPRESSED IN LUNG, SIGNAL = 0.98
tgatcctcacagtctacaagataagcaagacaaaaaattgtgttcatgttacatgttcaaaaactgagggttagaaagttggaaaggcctacgtaaggtcctacctataacaaaggctggaactgggactagccatctgattccttttccaattaccactagacaacaacattttttgatgttcttctctggtacccatcctatctttccataatgttatgatccttttgatcacagagtgagaacttccccactgaagaaggagaaaaggaggaggacacagaagcacaaggtgctactgcacacagtccactctctgcccaactctctgaccctgatgacttcacaggcctcgagacatccagcctcctacagcatggagacactgtccttcatatcagtgaggaaaatggcatggagaacccgctactatctagtcagttcacctttactcccactgagctggggaaaacggatgcagtat

SEQ ID NO: 15548 - DNA, 475 bp, Homo sapiens
  MAP TO AC007773.1; EXPRESSED IN LUNG, SIGNAL = 1.4
tctgggcctaccagtgtttcagtaaatacggacacgccctgtgtaatcacctaagaaaatggtgacttcctttcagagaatatgaagaggaactgtccgttgaatgtgattatgatttgctaatgtacttctttctataaattgtcaaatgtgtcaaatgatcctttagcagacttgattttaaaatatggtaattcgttgtactaggccatgaaagcaatgaacctgttcttctacagcctcctaagagttggacatgtatatttattgaaaattacatatttctttccactttttagagtcaattgaggaaccatgagagagaacagcacagtcttccagataccttgtcaatagcaacttctaatgagccaagaatttccagtgatacagctgatggaaaatgtgtccaggaaggtatctatgtattttgttatgcaggctgcagtgacttgcacatgacataaaagtgccc

SEQ ID NO: 15549 - DNA, 448 bp, Homo sapiens
  MAP TO AC000052.8; EXPRESSED IN LUNG, SIGNAL = 0.61; EXPRESSED IN BONE MARROW, SIGNAL = 0.64
cactctttttatgcccgcaccccccctgctgctccccgtagctaagctgtcactcctgtcttgttttatgttctgtttgtgtgtattttcttgagcactttcttttgtggtcattttgggtgtgggatacctttacctactgctgttcagaataaaggcagtgagtctcatctttttacctagtcagagagtattttgttgaatcctgggtgttacagtgaaaggatagtgtcaagtcaagggggacttgagagcagccagcattatctggcactgatggaaagaaaggaaggaacacacatggggtattgttgaagtacgagctaacctgctcctcattgatgtagggctaatgtcgaaactcagaagcctgcagggccagacaggtaacttaatggaggggatggggccggatgtgcagttaatgagttggaggatccatgtccag

SEQ ID NO: 15550 - DNA, 463 bp, Homo sapiens
  MAP TO AC007435.12; EXPRESSED IN LUNG, SIGNAL = 0.92; EXPRESSED IN BT474, SIGNAL = 0.66
ccaagaggagccaggtaaatgtcatttcagggacacatgaacaaggaattctaaatgggagataggtggatcattcaggaatgctctgtttcatttcctattctaaaaacacatgactcttttgagatttttgtttaggtttaaaggaggataaccaaacactagaccgatgaattgcagtttttaaaaagtagaagcagctgcctgttggcttttgccctaaagtcccgtgggagtggaaagaggcatgactgtttcccaggacagattgttcccaactggtctcactttcaggattgtgcccacgtggtcaaagttgagtctactttccgtattgctgatgcctgtggccatagccatggaaggacgtggaagaagccgtggtcctgcccctgtgtaagatgaagacttgtgaaaccactgggtcatcgtttttcattttggtcacttgctgtcagccttg

SEQ ID NO: 15551 - DNA, 1954 bp, Homo sapiens
  MAP TO AL035660.11; EXPRESSED IN LUNG, SIGNAL = 1.3
gaataggaattctaggacccagtgatagtccaagcagccttccctgccactaccaggtcctctactcgccaggaaatggtgttcatcttcccaccacttgtaatatagcacttctattgatgtgaacaatggttatcagtcctaccatgttcctggagagtccccaactttgggacaggcacctctcctatttggtaagaaaagcaaacttaccttgctattggtccagcttttcaagtggttgctaagcaacagggctatgtagatattggatttctgtcttcattatattgttgtgtcaaatgatcatcttgggcaacctcatgctcagtaattacaatattatgtgactcactggattcctgtttgtatctgcctttttgttcatgactgagtaggtcttgtttgctatctgcagattgaccagactttccttttgcattttggccagaccattgatcttgattaggatttggtgtctggatttgagacttgccttctactagcttttcaatttggaaagaaatactgctttgggatacatctttctgcgtgctctttcctccatagttgagtcgtctttcttctgtacttgaagattggtatgacattttattttccttatggccatgctcttgatcttgactaggaattgttacctggttttgagacttgccatgtattttctcttcagtttggatagaaatactgcctttggatacacctttctgtacatccttttctccactgttgagacgtctttcttctgtactcgaagattggtatgatattttattttccttatggccatactcttgagcttgactaggaattcttacctggttttgagacttgccatgtatttgctcttcagtttggatcgaaatactgcctttggatacacctttctggatgcccttttctccacagttgagatgtctttcttctgtacttgaagattggtatgatattttattttccttatggccatgctcttgatcttgactatgaattgttacctggttttgagacttgccatgtattttctcttcagtttggatagaaatgctgcctttggatacatctttctgtacactcttttctccatggtgaagttgtctttcttctgtacgtgaagacgggtatgatattttatgtgccttccggccatgctcttgatcttgactgagattttttgtctggtgttgattcttgttatatactaggagctcatcttgggtagtaaaaatgtctttgggtccatgttggagtctgtcttgatgtgcaggatggagtgaagtttgtagtttacttgaatgttcctctctcacgtcaaccacattttggtaatgccctttattttgatgagaatttttagtctcacgttgttgtttgttaactactagttcttcagtttggagaacataactgctttgggatccaccttgtgttctacctttttgtgcaccagaggctgaagcttgttctttacttagtccatgaacccatagccttttttctgtgtttgaacattgactggataatccctttccagatgggctattcccctgatcttgagaaggattttgtgtcccatgatgagcttggcctcctttatgatgtataactatcatgtgaaaatgaccttttgatttatcatggtctctgccttcttgtttataattgagcagttgttgacttccacctaggtgttgttttgattttgtcgccttatgtagggcattcaaatcatattgctgactttttcgggtccagtcatgatcattgatgtctacatgatatgtgtgttgaatagaaaaactgcctttggatttagtatgttgttggtctttttgtccaaaatagtgctggcccttttgtccatgtggaaattgggaagatccgcttggcaattggccttttgatccacctggtaattgataatagaaatgta

SEQ ID NO: 15552 - DNA, 463 bp, Homo sapiens; identical to SEQ ID NO: 5125
  MAP TO AC007653.1; EXPRESSED IN HBL100, SIGNAL = 0.86; EXPRESSED IN LUNG, SIGNAL = 0.61
  unsure 26
  unsure 112
  unsure 269

SEQ ID NO: 15553 - DNA, 429 bp, Homo sapiens
  MAP TO AC010142.2; EXPRESSED IN LUNG, SIGNAL = 1.2; EXPRESSED IN BT474, SIGNAL = 1.2
tcagatggtgccaaatcaagactgtatgatggatgcctaataattttccattgaaactctcgtaaaggattccttatttgatgagaataagcatgggaattgtgacagagaactctctggtaaagctttccccagtggttttctcctaaacatttggctacctttctcaaatcactctcataataagcgaatgttatcattctttgaccctccagaaagttaacaagcaaaatgccttgaccatctgaaaaatctgttgccattaccttttctcgatctgtccacttttgctttgactgaaacacttctacctcttgatagccattgctttcgtcttcgggatcatactggtaaagccatgtattatctcctgttacaagtccttgaatacatgtttcagcatcttcatcccattgtttgacatttcca

SEQ ID NO: 15554 - DNA, 439 bp, Homo sapiens
  MAP TO AC007163.2; EXPRESSED IN LUNG, SIGNAL = 3.1
gaagtcaaagctttttggcgagttttagagttttcagtgaaagaggaaattattaaaattcttggctcacgattgccatgggtgagtcatctccaaattctagcagtctataatgatttgttcctgataacagttaacattgatttactattttgtccacctgctttcatctgtcctgtgctacccgatccatgacaccgtgcagtggtaggtttggatgcttaccttagacgaatagatggttagtggggtttgtgatgatggcagcaaggagacattgaactcctctgggacatcagtgatggttggaattttgtactcatctgggctccgagagtacaggacaccttctggggaatatttcagttcttcagtggtataaagccccattccctgaataaacaaaccttcaatctggagggggacaatttcaagcttt

SEQ ID NO: 15555 - DNA, 461 bp, Homo sapiens
  MAP TO AC008015.4; EXPRESSED IN LUNG, SIGNAL =   5; EXPRESSED IN HELA, SIGNAL = 1.1
tgcgccactaaattggtttcatggctcactcgtgggtcatgacctgaagtttaaaaaacatcgtgctagattctgtgtcttttgctgggctccttgtcactgcactagcctgaggtgcctttgaggaccaggcagataaagtaaatctgtgaaatggggttttatttcagaatggtaccttcaatcatattcttgagatacatacacaaattatttgcatgttcgcatttctataaagaaatatactctgccagttttcctaaaacacgctccccactttgtctttttgcctcctcatatttgatagctgcaagacatactttgccagcctcctcactcctattggaaaaccagcagtgcagatcatgtaattcaggactagttctggacccccagtgtttgggagcaatgcggggtcgggggagctcaggttcatccactgcacgtccagtattgccagg

SEQ ID NO: 15556 - DNA, 489 bp, Homo sapiens
  MAP TO AP000094.1; EXPRESSED IN LUNG, SIGNAL = 1.1; EXPRESSED IN PLACENTA, SIGNAL = 0.83; EXPRESSED IN BONE MARROW, SIGNAL = 0.63
cacatgtatgagacaaagaacaacagaaataacttgatgaaatgaaaacatttacattttttggacattcagacaactgagtcagtcccagacaagactgtgattttgaataagcaggatgtaatgtgtaatcttcttgttcactttttcatttataaaaatggaaaaaaaccctcctgccttgaatgttataaagtgtaattaaacatatgtaaaagagctatttcataataattttctttctgatacttaaaaatccttctcaaagaggaagtaggtagatcaggtttcaaaattcagaatttctgtttcctattcaggtatttgtttcctccaagcagcctaccctgcacagattaatggtgctcacatccatgccagtgattgacttttcccctaaatacctgcagcctgaacgtcctaaagatgccttggtctccccaaggatgctgattctgagtaagacacagtctctctacatgcgggctc

SEQ ID NO: 15557 - DNA, 476 bp, Homo sapiens
  MAP TO AC008176.1; EXPRESSED IN LUNG, SIGNAL = 4.8
ttgtccactcaaattaagagcagttttcttagaattaaacagattttttatgtgaaatgtcctattaaaacaaaaatgtcacctaagaataagactttgcatggtgtctggattagaactagacattgttactctttcaacaagcctattagaagaaagctaagatcagtcttaatactttctaactagcaagaaaaactctattattggttaatactttctaaccatgaaaggaaaccacactgcttcaaaggaggcaataataaagaatatcgatactcacaaccagagctatctccagctctttgcagacacttgactcagtcttctctaggatttcatcaatattatccattgcgtcttctgaaatcagtgatccttccacagataggtcaaaaacctcatttgcaaaaataaacacatgaaatatctcatttaattcaatcagcattcatcgtgccttaatacctgaagca

SEQ ID NO: 15558 - DNA, 450 bp, Homo sapiens
  MAP TO AC010876.1; EXPRESSED IN HELA, SIGNAL = 0.95; EXPRESSED IN LUNG, SIGNAL = 1.7
ttttctgaaatggaatgggctactttttgaatacctgaagactgcacattttcatggttacaggagatgattatataccaaattctttggggggtcattacctcattatttttatttcctagaccataagctaagggtatattttcacaactaagacctccaaatttcaggagacttacttctatgaaactgaaaaaagaaaacaaacctgaaaccactaactattcctttctctgtccagattttggaattacagatgcaaagtataatggaaaagaaaatgaaaaccaagagaaatattgccaagcattacaagaataacccatcactaataactttcctttgcaaaaactgcagtgtgctagcctgttctggggaagatatccatgtaattgagaaaatgcatcacgtcaatatgaccccagaattcaagtgagtccagaaagaccc

SEQ ID NO: 15559 - DNA, 485 bp, Homo sapiens
  MAP TO AC008278.1; EXPRESSED IN PLACENTA, SIGNAL = 0.65; EXPRESSED IN BONE MARROW, SIGNAL = 2.1; EXPRESSED IN LUNG, SIGNAL = 0.59
agaggagccaatcataccccaattcacatatcccaatttgcattactgagggcactgcaacacatacatacaaatatctataattattaaagcagtatattaagtgagctgaacttgataaggcacaaacagaaaacattatctgttaccttgaaatcatctctatgggttatttctttccctgacctagatgaagtctctggcatcttccagagcttttctggtcactctgagacaatgaagagttgtctggttactttcatctaattataccctcgtttctgtaaactatcatgtccaggatcgtgattgaaattcacaacttcaaccaacatcatggcttcctcctcttcctgcttggcctattccacgccagaagcctgcagtgggatggaggatggggtcagtctcttttctgtactcgcctctcccattagctgttgtttctgactcctgggaaggataaagtctaggggatggggtgg

SEQ ID NO: 15560 - DNA, 471 bp, Homo sapiens
  MAP TO AC011334.1; EXPRESSED IN HBL100, SIGNAL = 0.95; EXPRESSED IN HELA, SIGNAL = 1.1; EXPRESSED IN LUNG, SIGNAL = 9.3
tgggaagaagtagaggagtttgagatatatttaggaagcagagcctataagacatgctgatcacttgcatacataaactgagagaactagaggtatagaagacttctagaacttggagaaattggatgaatggatgtattgttattgatgtaatgaaccttagaggtgggtgggatcagaaagatctatttgctttcaaaggaaatggggagtggacaggtatgttggcagcataagaactggaataacagcacatctcattcatgccttaaaagaacgtgaaactttgaatgtacagcaatggtattcaataggtatgactttgcccctaaaggacatagacaccagggatgttgctaaatatcctccaatgcacaacacaaccctcacgacaaagagttatctggccaaaaatatcaatagggctgaggttgggaatcccaaccttacaggttgcctttttggcattta

SEQ ID NO: 15561 - DNA, 467 bp, Homo sapiens
  MAP TO AL035696.14; EXPRESSED IN BONE MARROW, SIGNAL = 8.5; EXPRESSED IN LUNG, SIGNAL = 0.64
aagtgctatctcatccctgagcaatggaggaggaatatatgtttcaattaatagtaaaacgaccaagactgatgcatcctatagtatctgggacctgctttactcacttgtcatgaaaaattgtgaaggattttgaaacgtgaaagaaaatgtgagtgatgcctataaatctatatatctacagttgacccttgaacaacatggatttgaactatgcagttccacttatacatgaatttttttcagtgaaagttacgctgactgtgcctgactctcttgccttctcttccacctcgtctacctcttctgcctctgctactcctgagacagcaagagcaaccccaccttttcctcctcctccttagacaatgtgaagatgatgaggatgaagaccttcatgatgatccacttccacttcatgaatagtaaatgtattttttctcttccttatgattttcttagtaacg

SEQ ID NO: 15562 - DNA, 432 bp, Homo sapiens
  MAP TO AC011308.2; EXPRESSED IN LUNG, SIGNAL = 0.95
tgggtgctagtctctcctttgaccttctaagtgcaccagagtatgttactgccatgaaattgcactgtaatattttctagttgtgattcattcacagcttaatatgcttctagttctggcttgacttttcccccaggaagagcctaaaatctcttcattataatatagacagtgtactgcactttgaatacaaatttatccatgttcagagtaatttttcttgtgattgtctctaccctggagaagtgcctttaatgaattacatacaaattgtgtaatttaagaagttaatttggttttctggttacacaggactaaaaacagcccttgtagaaagagatgatttctcatcagggaccagcagcagaagcactaaattgatccatggtggtgtgagatatctgcagaaggccatcatgaagttggatattg

SEQ ID NO: 15563 - DNA, 498 bp, Homo sapiens
  MAP TO AC007218.2; EXPRESSED IN LUNG, SIGNAL = 5.6
tgtcctggctcttgtctttttctaaacctatttaactctttcctaaatcccctgagagagactgtatccttagaatacttttgtttgttaaatttagttatctagaattgctttccattataagcaacctaaagaaccatggtttcatgtgacaggaactcagtaaatatttttagggagcaaactcatcatgcaaagatccactgggaagcccaggagcaaacaaagcgagtgtgagggtctcaagtccccctaaagaaaggggtcacccggggtcttaccatcacccacaaactgaagcaaggccaggtcgatctgcctcttccaaggagagcctttctgaagggcaattccataaccggtggtggcaaagatgtacccactcccgatggtcaccagcttgcagccttcatccctcccagccttgtaattcaagactgcggcatcgtagatgaaagcgtccagcttcctgaaatgacaagaaaccagggggtcata

SEQ ID NO: 15564 - DNA, 454 bp, Homo sapiens
  MAP TO AL009182.12; EXPRESSED IN LUNG, SIGNAL = 1.2; EXPRESSED IN HELA, SIGNAL = 1.4
tacacgatccacccttttccccctcaccatcccgttagggcaatgataggtctcttgatgctcccatttccaataaaataaaagtcttgagggtctgaaagggtgagaggctagaatatcaccatattgacataagggaagggaagaatgaaactaacctccctcccatttcctagattcaaaataggggcattattaccatgaacaatcgtgatctctctgcccctgtagaaatctcccagggtgacagtcgagccctgttttgaagctactactcgaacagtcctcctgctgtccaaacaatccaagtaggggtcccattccaggtttctcttgctgagagattgggcccgggtagaggacatgcccaaggattctcccatgcgatcctggcagtaggacttgaacttccactgcacaactgcaggctgatgggaggatgttgagaagtggc

SEQ ID NO: 15565 - DNA, 420 bp, Homo sapiens
  MAP TO AC009312.1; EXPRESSED IN LUNG, SIGNAL =   1
gcaaacacacctgagaaaggtaaagattagtcattaacaccatagcaggaaactttagcactaacaccttagcatcatgggcttggaaagcaggaattatagtcaaaaataattgaacagttgtctaggtcatttttgttgtgtttaaaaagaaaagcacgaagtggagagttcttgggtgtatagaagcacatgcttccaaatcagactaagctgaagaagttgcttgaaatttcttagcctcagtttccacatttgtaaattggatttaagaaaacctacctcatgggcttgccgtgaatatcaaatacagtgtctggcacaaggtagccactcagtttacattggtgactgtaaagagtgatctttccatagaaagtgaatatcaaatacagtgtctggcacaaagtagccactcaa

SEQ ID NO: 15566 - DNA, 462 bp, Homo sapiens
  MAP TO AC009497.2; EXPRESSED IN LUNG, SIGNAL =  16; EXPRESSED IN BT474, SIGNAL = 1.2
ctctgaaatgacccaaaatcgtattatctaacttctttaaagtgaactgaaatatgtaatgactgccaatgttgagccaatttataccaaggctaagaaaacatactgaaaccatttaaattagaaaacccctcttaatacattattttcatatgtctttttaatatgatttcttactactttagtacaaatacaaagaaggttaccgtaagcaactgggccaccacatgggtttccgcaccctacaagatgaccccaagtcagtatgggctatacatgctgccaagatccagagtgacagagaatataagaaagcttatgagaagtctaaaggaattcacaacacaccgttggacatgatgtcaattgttcaagccaagaaatgccaggtcctggttagcgacattgattatcgcaattatctgcaccagtggacgtgtctgccagatcagaacgatgtga

SEQ ID NO: 15567 - DNA, 463 bp, Homo sapiens
  MAP TO AC009954.1; EXPRESSED IN LUNG, SIGNAL = 2.5
catggatagtcaggaatcttgttcttacctaatctgttaattttagatcagacattacactgaaagtattgatgatgggtttaaatcaggttgcagctcacatgttgtgataatattatgttgattttttgtttttaatatgtgaggaacagaataactgtatactatttattcatagtgacattgcaatattgattttagtacatattattatcttcataatcacaatttcctccccattttcttagttctcataattttagccacagcccagttggctggaccaatggatggagagaatcactcagtggtatctgagtttttgtttctgggactcactcattcatgggagatccagctcctcctcctagtgttttcctctgtgctctatgtggcaagcattactggaaacatcctcattgtgttttctgtgaccactgaccctcacttacacttccccatg

SEQ ID NO: 15568 - DNA, 471 bp, Homo sapiens
  MAP TO AF165176.1; EXPRESSED IN LUNG, SIGNAL = 3.2
ttctgaattatcatcagcacccacatgttcacactcagtgcctcgggggcttcaagatgtcccagaaccgcagccagcagcccagagtgtcttatctgaagaagggccatattgcctgtccacatgcatccttaacatcacatggaaagggggattcaacttcaacagagggaaaataccgccaggtgaatcactttcaactacacagaaggaatcacaaatgtctgcctccaaaacttcagagtcccagtttattttgtaaaattggactcttgtcactcctgtcatttccacacatgcaggtcccccaacatgaacgcatgaaccaacaacatgtacccttttatatcaactttacaccccagccaagagaagcttcatgaaaaacggcacataaagataactaaaacatgacttctcaaaccaaaagggtttaagtctagatgtaagccaaactctgtaaaccctctc

SEQ ID NO: 15569 - DNA, 465 bp, Homo sapiens
  MAP TO AC007778.1; EXPRESSED IN LUNG, SIGNAL = 0.95
caacaggtgctcagcttactgtctagatctaaatttaaatggaaagatttttctttatcttttaaatcctatgcaacattggcagctgtattaaaagggtcatgagagcaggttgtgcctacataatgagcaaattgatcatttaaaagtttactctgacattggctttcttatgtgacaaactcaattgacttgttgagagttctaaattagccagcagaataataccaggttgccctttttaatcaggaagatatgacctatatttattgcttttatccctaggcctctcacatcaaatgcaaaattcaacaaagaacctaaatatggtggctgtatttatttgttttttgggggggttagtcatgcatgagttccacttcctaatagcatctccatttcctttgggaaacttactcttcctccctgtaagtcatcttcgtaagccaataagcaagatgctca

SEQ ID NO: 15570 - DNA, 475 bp, Homo sapiens
  MAP TO AC010088.2; EXPRESSED IN LUNG, SIGNAL = 2.5
gggtcctgtccacaaggtagactgtgacttctcactgaatccacacccatgtagctgatgagattttcttctcttctctctggccactgccgatattgtgccttatacaagagaccataaataaaagcctaataacaacacatatatctggagccaggacatgtgcagcatggtgactcttagtcttaaagcgatacacaagtgtaactgtgacatatacctttacccagctccttagtgatttaataattctgcataggtatagcatcaaaatgagattttgacaaatccttggtataagcatcttcatgatttgactgtgttatcttaataatatccacaggcgtgactgtaacgtatttctggcccatcacataggttacatgactgttctctcccacctgtacatgattttctttggtaactgtatcatttctaaacactgtatccaaatgatatgactctcttgcctggg

SEQ ID NO: 15571 - DNA, 376 bp, Homo sapiens
  MAP TO AC009966.2; EXPRESSED IN LUNG, SIGNAL = 1.9
ggatagtattcatacagctaccacatctagtgctattactactagtatcaccatttttgtttctacctctccaaagactccaactactacttctcctactaatgtactggctgggataattattgtcatcaccacccttgggtattgctaccactcaagtgtgaagatgcagaaagcgacgtgagcaatcactgggaggccattccggacacacttatcctgttttgcttgtatcctgtttgcacttcccttgctctgggtctagggggagtcgtttatgaagtccctgagatgtgtggagctgctgttgatgtggttgtggaagtgatgctacgtttacgggatgttttctctgagcctacagggttggaaatga

SEQ ID NO: 15572 - DNA, 455 bp, Homo sapiens
  MAP TO AJ239320.2; EXPRESSED IN BT474, SIGNAL = 1.4; EXPRESSED IN HELA, SIGNAL = 0.94; EXPRESSED IN LUNG, SIGNAL = 2.7
catgcattttaggaaagatcccaggataggattttccactgtaacagaacagactgttccctctccctcaaatcagcaagtttcaagtttccactgcaagaataccacttcagtacaatacaggaaagctttctggaatataatttcagaaagatgatgaaagagggaaaggcaaaatacagttctcttagcttttggtgggtttcacttccttcagtccccactctgcccccaacccccaatcacacatagctccagatctctttgtatttttattttgagtacctgctccaattcataggcctttgccttatcctcatcccggtctgcattcttccgataggccaggcccaaaccccacacagccaagatgctgtacacattatctcggacccaagcatctttctgatcatagctggctggaagcaagccagtcactggattctgcaaggtca

SEQ ID NO: 15573 - DNA, 487 bp, Homo sapiens
  MAP TO AC010127.2; EXPRESSED IN LUNG, SIGNAL =  12
tttgtttcatttcttggttatattgcctatagttgttttcctaagtgtattgcttaagaaaaaaaaatgaattttaagatttttttgaaccttgcttttacatatcctagaataaatagcattgatagaaaaaaagaatggaaagaccagagattactaggggaattttttttctttattaacagataagaattctgacttttctttttttccatttgtgtattaggtggttgtgaatgcccttttaggagcaattccatccatcatgaatgtgcttctggtttgtcttatattctggctaattttcagcatcatgggcgtaaatttgtttgctggcaaattctaccactgtattaacaccacaactggtgacaggtttgacatcgaagacgtgaataatcatactgattgcctaaaactaatagaaagaaatgagactgctcgatggaaaaatgtgaaagtaaactttgataatgtaggatttggg

SEQ ID NO: 15574 - DNA, 469 bp, Homo sapiens
  MAP TO AC009705.2; EXPRESSED IN LUNG, SIGNAL = 5.8
  unsure 28
  unsure 97
  unsure 115
  unsure 131
  unsure 143
  unsure 148
  unsure 187
  unsure 317
  unsure 437
cagtagctttactcatcaactccttgangacatacagcacctatctctctcctggcctggtcattcctctgactttgcatcactttttaaaaggggnaaagaaaaccaatatganggacatcataaagggnacacatttctanctcanataacaaagagaaatgtttaacatttgaagtaatcaccnaatggacaaaacccctctgttttctaatgtggagggcctggagttacattagcaagcctggccattttgcaggaccaaacagaaaaggaaagatgaaaaccagaggtatgcaaatactgaatagtaggcnaaatgaaagcaagccacaggactgggaaacaaacagagaagcagagttagaagttgtcaactggaagtcaccaagaaaagacgaacaaagatatcataaaaagaggaagttaaatattgnagcccctgaattcaaagccatcagatgtcagc

SEQ ID NO: 15575 - DNA, 477 bp, Homo sapiens
  MAP TO AC009405.2; EXPRESSED IN LUNG, SIGNAL = 1.7
tgatgatgaagtgggttctgtcactcaaactatccttaaagctcccttccctgatgactgtcttaactcggtgctggtcagattttgggaattagcactaaacactaatgtatacatgcagttatccaggcctggtagagggtatttgcaatctccaagagaaagtttaactccaatttttaaaattcgttacacaggtattgaattttatttcttcctctcttttgttaacattgagaaggttttcgtttttcttcaccttttacaaaataatctcttcttcatttggtcaatttaccctttaaggctcaaagccacctcctctgtggagcatttcttgattccttgcaacatggtcctcatcctctcctgtatttgcacacaccacagctgtcatccttatcagactctacagagggctctcacgaggtgttgcctccacttctggaccatagctccttacatgttgtgttgcca

SEQ ID NO: 15576 - DNA, 365 bp, Homo sapiens
  MAP TO AC009476.2; EXPRESSED IN BONE MARROW, SIGNAL = 0.93; EXPRESSED IN LUNG, SIGNAL = 1.5
tgtgctgtgtcgtaccatttctgacattcctaatatgccaataattcagttagaaaaaatacgtaagtatctcttttacttactcctagaatggtattcatatgtgtgcatatgtgtgtgagatgtgttgtacatgtgtttaatattagagaagcaacatcatctgacattgaagatcactaattttggagatatcctaagcttgtaatcgaccaattcaaatgttcatctcatctggaaatgccctcacagacatatccagaaataatattttaccagttatctgtgtatcccttgcccggtcaagctgatacataaaattaaccatccaaaggtggttctgaagaacattgctgcaaaacgaa

SEQ ID NO: 15577 - DNA, 478 bp, Homo sapiens
  MAP TO AC009971.1; EXPRESSED IN LUNG, SIGNAL = 4.4
gcatgtgaaaaagcagtctggtcacttctttgtagaactgttgcactgtgctaggggaccactcagtccctagttgctgcccactccctagagcccaaaggcaacaatggctaaaactgtgaaagagcaaagatggcagtccatccctctccctgggagctccatcccagggaggttcagaatcactgccagctggaaaatagcagtgagggtagcttgagaccctgagttgggaggtcctacccagtaaggaaaagtatggtcaggggcccaaataaaaaagctgtctggccacttctctataggtcagctgcaatgaaggcaacaaaggctaaggatgccacacagcaaagatggcggcttacctctccctctgggaactccaaatcagatgagtgtaatgctgctactggtgactggctggagctccaagtcagtgggtcttatcctctgaggtgctacagaatcagggccctca

SEQ ID NO: 15578 - DNA, 453 bp, Homo sapiens
  MAP TO AC010740.2; EXPRESSED IN LUNG, SIGNAL = 4.6
taggggaggcaagaaacatcattttatcggactattaatgttatttaaatgaattagaaaatactagagtatatttatacttattaaccatctaaagtaaaaatgtattctctctagcattataataatgcctgaagaaagaaaaaaatgtgaaataaaaactaccaacaagtaaaatcataatttctctcctgtcttgcccccctctgcttctctcttcctcatttcaaattaagagattcattctcctgctggttgtaacggaaatgaatttcagtgccaccctgatggtaattgcgttcctgatttgtggcgctgtgatggagaaaaagactgtgaagatggtagtgatgaaaaaggttgcaatggtaccatacgattgtgtgaccacaaaaccaagttttcctgttggagtacaggtaagtgaacattgcttttggcttctattgggtc

SEQ ID NO: 15579 - DNA, 463 bp, Homo sapiens
  MAP TO AL020997.1; EXPRESSED IN LUNG, SIGNAL = 2.2
gcttattgtgggcatgaagacatgatagcctttcttcagcaacaacaaaaaacacaactcaaggatatttgcacagatgacctgttctcagctcaaggccctttacctcttgaatatcactgccccactagtcaatgaggatgttccacattctttctaatgagacttgagacttgttagtattcgtagtctcgggacagtatgaatcttctctaaatgcagaagtgtctcaactccctttggaggtcaagattagcccctcatgccttcctcacctttatttagtatgattttctccatcagattccctttgtactgactgctgtctttcctgtatgaaccctggcttagaacctgacagagttcaacactgcccacaacaagcggatttctacccttaccattgaggagggaaatctggacattcaaagaccaaagaggaagaggaagaactcacgggtga

SEQ ID NO: 15580 - DNA, 458 bp, Homo sapiens
  MAP TO AC010908.1; EXPRESSED IN LUNG, SIGNAL = 1.2
aaacagttttgaacttattgcagacatttaagaaaatcattttaaaatggaaaaagtcatttttagatttaagaaaaattgccattttctttgaaaaccaccattacatataccagaatacacaaatcagtgcataaattcaaggagaaacatatgtataagtagatgtaacagcttaaagccatggatgaaatgcctgctgtggaggctgagtgtggtaatcaaaagtaaatgctgctgaggagtttctcccaaatcaaaccagggaactaacctcatctcttcttcttcttcttcttcttcttcgtttttttaattcttatggataactctgatgcaagacttaagcagtgcctcaaaattaagagcaaagaaatagaagagaagatccacgtaactcttcatttgtctgtaaaagttaaaatcctactcaaacacagctaaataagattcattca

SEQ ID NO: 15581 - DNA, 463 bp, Homo sapiens
  MAP TO AL035608.11; EXPRESSED IN LUNG, SIGNAL = 1.8
ggaaaccgggtgaagaatatgtgaactctgtactatttctgcaactcttccataaatctaagattatttctaaacagaaagtttaaaaaaaatttaagacaagaaacataagggaagtgggaggacagaggatgtcaaatcaattcaggcaaccaagaaatatttattgagcatctacatgggtaaaatcatcattgtaggagatacagaagtcccttgtcctcagtttttaatttagtgtgctattaagtcaaagcagtaaatgtttgatgccaaagaagcaaagaagtttgtgtatgtagaaatgatcaggcttgttttggaaactactctaaaatatcagctgaaggagcttggaaaagtggtccatgcctaaatgatgccagttagaagacacaatgaaaatctctatccccagctgctattctcccaagcacttctttcaggaacatttgcaaagcag

SEQ ID NO: 15582 - DNA, 417 bp, Homo sapiens
  MAP TO AP000359.1; EXPRESSED IN LUNG, SIGNAL = 2.1
ttcttctacacattcacccttccaattaagtaataactaatgtaataattttctaataaatacatataagttgatataattatgttataattaataacatggctctagacccttcgccctcttgggctcatatattttcttaataaattgactctagcttgttagtcttccacctaagttgcctgctccagatggtttttctttcctgtatcactgttgttgtatcttagggaatgtcatgtttgctggttttcaaggtgatttgtatcctgcccaatgatgacaaacgtagatatgacagcataaaaagatacctatgtaccaaatgcccaattccaagccagtgtgtggtgaaaaagaccttagaaaaagtccaggcaaggaccatcgtcaccaagattgcccagcagatgaatt

SEQ ID NO: 15583 - DNA, 410 bp, Homo sapiens
  MAP TO AL049548.6; EXPRESSED IN BONE MARROW, SIGNAL =   1; EXPRESSED IN LUNG, SIGNAL = 0.65
ttcaaaggacctgtggtaaggatcttatggatcagagaagtagtgtttctccctgcactcaaaagcaacattttcatcacttccagtagcattcaataaaacaattggcatggatgtcacgactttgtgattggttttcagtagagatgtcaaaataattcatttttgttaatatgtgacattaattctagcactttagagtctgtgattagccaatggaatgactatgtagagaggaaaaaccagttggagcagtggatggaatcagtggatcaaaaaatagaacatcccttacaaccacagccaggtctgaaagagaagttcgtcctgcttgaccacctccagtccatcctgtctgaggcagaagatcacacgagagcccttcaccgtctaattgcgaagtccaggga

SEQ ID NO: 15584 - DNA, 403 bp, Homo sapiens
  MAP TO AP000547.1; EXPRESSED IN LUNG, SIGNAL = 1.5
tatcttcctggcctttgtgctcccagccaactgggatggagcctccagctggcatgacatgttgtagctatggacagaagagtggctgtgaggctgccaggaatctcaccagggccccctcccagggcctgtccagagtgaggtctgggtaccccaggcattgccagaccacaggatctgatgttggccaagaggccatggccacaggctttctgaggctggcccccagggagagttcaatcctactatcccaattcctgccctggccttacctctcagtctcaccgagccgcttcatggtcccaaaccaggacccaaagtgctgcttgggctcaaggttgtaattatttgcagccaactggagcagcggacctccttgcttactttgaattcctgggtccag

SEQ ID NO: 15585 - DNA, 477 bp, Homo sapiens
  MAP TO AL035407.15; EXPRESSED IN BONE MARROW, SIGNAL = 1.1; EXPRESSED IN LUNG, SIGNAL =   1
aagcactcatggcaaggacatgtatctaaaaaaagccttgatttatttcaggagcttgttaaaaggggttcataagctaaatttttcagccaataaattcggtttcaatatgaaatgggtaataggataacattagtccaaatttcaggaattttccacctcaaataattgcctataataaaactacgagttataattattgccataatcaaccattctacagaaaccactcttttctgaatacatgatgtaaagaagaataaagagaatgagtcagaaatgcagagactcacattttttttattattgttctctccgtagcaccccacaaaaaaaagtcctggagcctgaactatgattaaatgtaatatactgcatgccaatgattttgagcataagatgcaatcagtgtatgataagctaccgatcaccccaagggtgagtcttcttcagctggtgttattttgttttgttttt

SEQ ID NO: 15586 - DNA, 490 bp, Homo sapiens
  MAP TO AL050335.17; EXPRESSED IN LUNG, SIGNAL = 1.8
cgccagacagaagcagagtctttctcattttcctgtttctatcacaggagaggagcaactccaggggccatgccagtccttcaaggacaagagctaaaactaccgtgaaagctgcttacacattagcagggcacacacataaatccatcacatctattttttaaatctggatgaataaaacagatacaggccgggcacacagtatatcttggagctgtggaaacagcttatggagtaactcaatagagtgaaggattctcactctccctctctctctctttcgaatccctatcgccaagcagcagtgaattaaaattgcctgagaaatcaagcaggtggtaatcgcttctctgtcagataagttatccgaggacagacttttttctgaggcggttacgctgtcttcctcagctccatgatgcagaaacccatagagattaaaatcagctgcatcgtggatacagttacaccctaaaaagaaaaggcgtgg

SEQ ID NO: 15587 - DNA, 492 bp, Homo sapiens
  MAP TO AL031661.16; EXPRESSED IN BT474, SIGNAL =  12; EXPRESSED IN LUNG, SIGNAL = 0.94
gggtggctttatggtctagcagaaatagcaatgtgcttcttttcaaaggaccaaggtacaactggccatcataccactgtactgggttgaaggacgtcccccccaaaaatatgtgtcctgtatacaaaccctggtaccagtgaatgcgaccttatttggaaatagagtctctgcaaatgtaactaagttataaatctggagatgaggtcattttaaaagagagagaagagagagatttgagacacagagagccaaggaagaaggtcatgtggagatggaagcagggattccagtcagtgcttccagggtcagacatacataaatatcaccataaatatggcactttacctttaaatagatctgaggattacttgcgaaataagtttcctgggcattgggttgcagcttgtcagttgttatgaaggagagtcgtctgaaatcagatggaaggttgtaacactaagagtggatgaatgtgactcttaacacatg

SEQ ID NO: 15588 - DNA, 470 bp, Homo sapiens
  MAP TO AC007679.2; EXPRESSED IN PLACENTA, SIGNAL = 0.68; EXPRESSED IN LUNG, SIGNAL = 0.63
tgctgggaataaacagatgaacagacatggccagtgtctgtgaggtgcttaaagaccagagaagagacagatgcttatttctaattccccacactatactgcgaaactcgtcagggtaggtgtttttgtcttttttttaattccctgctctatccccagtatattgaacagtgcctggcatgctataggcattttaaaaatactcgatgaatgaataaataatgaaaatctggctggggaagtaggagaaagcttcaccaaaggccttagttgggtttgttcttgaaagtatcatttcttgaagaaagagttacagacatcctcacaggagaagaaggtcttcttggaagcctgggtacagagcaggtggcatgaccggatgctggaagagtaggacatggaaagacagatcaaatcacaaaggactttgtatgccaccttgaggaatctagagttttgcttacatcttg

SEQ ID NO: 15589 - DNA, 466 bp, Homo sapiens
  MAP TO AP000512.1; EXPRESSED IN LUNG, SIGNAL = 1.4
aagtattgagggataaagcaaacgttggtggatttggaaactagaatatttggttgggagaaaaaaacagatgcaagtatgtgaagttatataaaaacactgagagcctctatttgaatggaaagtatctttttccttgatcctagagctggtaaaaaaaattttaaaaaaataaagaaagtattagtataaacagacaatgagtttatttttaaaatatgtttatattttcttcccactaaaaggccctagaaacaagaaccaatccagcagcaacaagcatctctggcagtctatcatttcccttcaactgaaatcagatcttcttaaagaaatgcttggctctcagactgggaacggaaatgtacaagatgtgcttcgatatctggtcaaatcagaaactcaaaaagctatcaaagtctctttggactgtgtcagaaagaggtgaaaagactcccacttgcca

SEQ ID NO: 15590 - DNA, 342 bp, Homo sapiens
  MAP TO AC007867.1; EXPRESSED IN LUNG, SIGNAL = 7.7
tggaatgttagagtggaaacgtcttccaagtatatttggttcagcagttgttcaccattcacatttttattaaagtcttttattgtgtggtatttcatgcattatagtgtgtgatatgttaattgaaaatatttaatttgtggaatagagttttgtcaaatccattcttttgttaagcatcaatacatataaaatagatgcctctcccagaagaatttgaagttatagcatgctgttttcattttagatcatagcagaacttcagacaaccatttcctctctgaaagaagagaacagccagcagcagcttgctgcagaaaggcggctccaggatgttagaca

SEQ ID NO: 15591 - DNA, 1965 bp, Homo sapiens
  MAP TO AC010826.2; EXPRESSED IN LUNG, SIGNAL =   1; EXPRESSED IN HELA, SIGNAL = 0.95; EXPRESSED IN HBL100, SIGNAL = 0.99
ccagatgagaacttctgggctagaattttatatggacataattgtaaactctgggtacacagacaatacaagactctatgtaatattataaggtaaagagtccagcacagtaagtttctgctatactgtttacgctagggcacagcttttatatactacttaggcatacagttatccacatataactttttcctactgaacactgacattagacaagaaaccacagctaatccagcaaccatcattatatcacctgatatgagaaaaatctagagttttcaaacatttgctaaatggaagcctggaaaaatcactgcaagtgtccttctttctgaattcgaagtctgtctttctctacctgtaagcgttccttttcaatctgcagcttctcagattcaaacttcaaaaactgcagcctatccttttccagttgcaagcgttctcgctcaagttttaacttctctgtttctatgtcctgtggttgaagcatggatttttctccttgaccaagttcattttccaaggacggtttctctgaattgactatctgtaacctcaacttttctctttcaatctgcagccgctccttctctagctgaagccgctcatgttccatgtctaaatgccgcagcctctctttctcgatttgtaggcgttccttttctacctgcagcctttcggcctcgatatccagtcgtcgtttttccaactctagtttctgtttctcaatatttacgagcaaatgaggctcatcatatgcagatctagatggtgttgagttaagggtaaaaaactcatcaatgtgggggaaatcgggaagttcattttctctcctggaatctggtatgacggatgacaacatttcttcctcctcctcaatttcaaactaagagcaaagagaaaagcaattttcagtattgacttctactttgtggcaatttgtctaaatatttcttaaaagctttctgcgtcgtttggggaaaaatacttaatttgaattttgaatatcatttacactgaattacttgatgtctgtaatacatataacctaggtaattatatttaggtgggaagaaaagtattaacgatgtaaagagaaaagcagaatgacttgttatgtactatttttaaataagcttgaaaatcttggaatgtgttaacagttcctgaacaataatctcccacatcagaattgaaaagattaaaagagggtacagaggctaatacttacttcaggactctgcggatccctttcttcctcttccaccttgacctcagttaaggatccacctgcatccctgaaatctgccacattttgccagtcaaaatttgcatcatttcggaatccaatcttttcatctatctcttcagtgagagagtcatccaaatcagaggagggaaggggaaatcctgaaccaaccagcttaatgttggccttcatcctctttctcttcataagtgctcgccagtcaaggtaccttcttttcacctctgtccctgtcctctgttctccttctcctacagcattcacacactgtgcaatctcttcccaagccattcgcttcatcacattaattgttgtattgagctgcttggaaaaaatgacttctttccttttcgtaatttctttcaaaagggtctgagtttcttgaacactaaaattgcttttcctttttcttttcaactgcttcattttcaatttcaatgcagtttttatggtaagagatgtgaaaacaatttgaggaatgctgcaaagcacaaaaaccagggataattctttgctggcccttagttcaaatcattgtcttccattcatctagtggcaaggcagtctggataattcctaaaaggaaaaaagtacaagcaatcaatcaatctgcaacttctacaacatacttcaacctaatgagctatataatttttaagagaaacaaaaaacaaccctctaaatatagcttaaaattg

SEQ ID NO: 15592 - DNA, 470 bp, Homo sapiens
  MAP TO AC011294.1; EXPRESSED IN LUNG, SIGNAL = 1.1
aggctccttcagaggtcctggcagcctgaagaagccacctgctaagttcactctgacttgggaccatcccaatatatgggcagcttagaaaaccctcatgcctgggtggccaaccttccatttttcttattttcctcagcatgaatgatctggcaggcattttgactaacacacatgtgccagggattacaaaattaaaagggagcccagggagacaacaggagtaggagaagcattttctaatggcttcaagttctaagcatccagcaaagcagaatcactagttatcattatgcttgccacctgtgcaattgacccactggctgggatgtggtctaagagaagaaacgtgtgccttctgctggatcttttggaactcctccaagataaaaggaattctgacaccacattcagcagtatcaacttcagggaggtactacagaaacactcacggatctcaagtgagtcct

SEQ ID NO: 15593 - DNA, 495 bp, Homo sapiens
  MAP TO AC005481.2; EXPRESSED IN LUNG, SIGNAL = 0.96
gtcatcgcggatgcttattgtttattttgatagatactgccacattccctgcaataatctttgccaagatggcgtccccctagtgccatagacatggtacctctgtcccaggtctcccagcctcaggtatcagcgaacctttgaactttgccgctggtaggtgggaagggctgcatccaagtggttttcacttctgtttctctggcttgcgtgagactgagcatactttctcatgtttgggagccgtttatggttccttccaagagtggttttggacacagtcctcatggcagcaaggccagcagcctcgaaagcctgccaagtgcaagtgtggcacgtccacgcaacatcaatcacaggtgctgtcacggaaatggacgtggcagtgaaactgttctgctcctgttcgtctcctccgtgtccgtcatcacagccacagtcacctctgagagaggcagtgatatcgattaattagggcaaagtttaggaagacca

SEQ ID NO: 15594 - DNA, 471 bp, Homo sapiens
  MAP TO AC007735.2; EXPRESSED IN LUNG, SIGNAL = 0.89
cagcagagagttttgggaggaactcaagaacacctaaacaaaaagaaacctgaagaccagacagtagcatgttatagccaaattctgattaaaatgtgttctttgacatttgagaggtcttttgatttctaagtaaatgtgttttgattgacttaggtagtcctgttgaacctgttaggtagttctgtcccgtgtcccatctattaaagcttcagttgtccttgatatttaagagttaatggtgtagtaatttgtgccatgactaacaaggctgaattacttgtcaacactgtggcaggtatctgtttcctagtaactcttcatgggtcagatattgaggtcagttctgaagaacttgaggaaatgagagtaagtaaggagagaaatgctgggtcggaccttacatttaaaattttttttcatggagaaaaacatgatctttgtgaagatggaagcaactgtaagtaagca

SEQ ID NO: 15595 - DNA, 436 bp, Homo sapiens
  MAP TO AC009311.1; EXPRESSED IN BONE MARROW, SIGNAL =   1; EXPRESSED IN LUNG, SIGNAL = 4.6
catttgtgaaaagaagccagctctgaacttggattagtttcatacccacaataatttgtagtccatttgcatttttttcaagtaagaggtagttttccaataaaaatcagaagttatatttcatgtgtattcacactttgtctaattaaggaagcaattttctcccttttacatgaactggatttgaccagttaagaaacttactattggaagtggctatctttgctaagatgacttttgcttagccaagacagtttacctgtttagtccataactctttttcttcttgcaggatttcatgtctgtgctgctggatggatggctaagggcagagttggataccccattgtgaagccagggcccaactgtggatttggaaaaactggcattattgattatggaatccgtctcaataggagtgaaagatgggatgcct

SEQ ID NO: 15596 - DNA, 471 bp, Homo sapiens
  MAP TO AL049794.13; EXPRESSED IN LUNG, SIGNAL = 2.8
ttctttctccagatgtccgcatctcccactccttctctcttgagtttttgttcaaatgtcgcttcttcaatgtgggctttctcagttattccattgaaaatagtgccccctattgctggtgtttcctgtcccccctctatttttcctcgtttacagcacttatcaaaatttggcctcttaggtattttccttacttactggtttatagtctgagtccctctgtgagcactgggaccatttctgtcttgttcttggattatgctccttgtgcttggcgtgtaccaagtgttcaggtgttgaatgaaaaatgggaacccgtactgttaaaatccctaaattttcaaatattggcaaggattttagcggaaacaaacaaccaaacaaggaaaccatgcaggccaaacagatactctctctgggtatgatgctgtctgctggctgccagcctgggcttcgagtggaggaccaggt

SEQ ID NO: 15597 - DNA, 474 bp, Homo sapiens
  MAP TO AC005674.9; EXPRESSED IN LUNG, SIGNAL = 0.58
ggagggcatctctctcaaggttgagtgcactcaattggaccatgaattttcctgtgtctttgctggcaatccaacctcatgcctaaagctcaaggatgagagagtctattggaaacaagttgcccggaatctgcgctcacagaaagacatctgtagatattccaagacagctgtgaaaaccagagtgtgcagaaaggattttccagaatccagtcttaagctagtcagctccactctatttgggaacacaaagcccaggaaggagaaaacagagatgtcccccagggagcacatcaagggcaaagagaccaccccctctagcctagcagtgacccagaccatggccaccaaagctcccgagtgtgtggaggacccagatatggcaaaccagaggaagactgccctggagttctgtggagagacttggagctctctctgcacattcttcctcagcatagtgcaggacacgtcatg

SEQ ID NO: 15598 - DNA, 466 bp, Homo sapiens
  MAP TO AL109653.9; EXPRESSED IN LUNG, SIGNAL = 2.1
ttcatcaaaagtttaccaagcacttactatgaaccagattctgtgatgaccactgggagtatctgtctcagtagttctcagacttgaatgtgcatcagaaatacttgaagggctcattaaaacagattgctggccccacccctaaagtctctgacttattaagtctggagggatgctcaagagtatccattcctaacaattgcccaagagatgctgataggcaagggaccagacttctagaacggcaggttgttcatacgggaaggaacatgtaaatgtttataatgcatagtaataagtggtaagtgccatgaagtgtgttgggagagcacagaagaggggcactttattcagctttgggatgaggggacaaggggaagaggtcaccaaaggctttccagaagtggtgacacctcaggtgagtcttggaagttgagtgagagttcccatcaggggaggaagaatt

SEQ ID NO: 15599 - DNA, 498 bp, Homo sapiens
  MAP TO AC007367.3; EXPRESSED IN PLACENTA, SIGNAL = 0.74; EXPRESSED IN BT474, SIGNAL = 2.7; EXPRESSED IN LUNG, SIGNAL = 0.64; EXPRESSED IN BONE MARROW, SIGNAL = 0.7; EXPRESSED IN HBL100, SIGNAL = 0.84
tgtttcgggaaatcctagatgagatggcatttactgaaacctcaatgacaagaagcagccagtcctgtaaaattcttggaaaagctgatccaagtagattaaacatctgtgcaaaggcctgagtcacagcaatgttggtgtgtcagaaatgcaggaagtgagggtacataagagatgacttggaaaagtagggcctcacacaatgacaggaactctgtcctttatcctacgcgtgatggaaagccattggagggatttaggaagaaggtggtaccatgatatatttctgttttcaaaatgtccctttttgtaccatatagagcttggatcataaggaagcaagaagagaaacagaaagaccaggaggctattgcagtggcacaggtgagagtggcaggtgacttggcacattggctaaggtagggaaagaaaagacagatagagtggacaggttagatatgttgaagagatagtctcagcaggactttccaatggatt

SEQ ID NO: 15600 - DNA, 400 bp, Homo sapiens
  MAP TO AL035451.5; EXPRESSED IN LUNG, SIGNAL = 0.94; EXPRESSED IN PLACENTA, SIGNAL =   1
cacccagacatgcaataccataattataaacccctgtacagcatgacagacaccaagtctcatttatctttttcactcctgcacctaacctaagcccggtgcatagtaggaatttaataaatgtttgctaaaccaaacttgattttgactcccctaatagatggatgagacgagtccctgtcctcatagtgcttaccatctttgcctttatatctgcccaccactatcatgtgtcttatatttagaagatgttcagtgtccattaattgtaaatatttacatgaaaatgctttaaaatgtattttgatacgctttttactgcatttctcttgcattttaccataatcattagcaacattgtacatgtttcattactttcttttatagatcatccagttgt

SEQ ID NO: 15601 - DNA, 457 bp, Homo sapiens
  MAP TO AC009594.2; EXPRESSED IN LUNG, SIGNAL = 3.3
gagtaataggtagcccctctgtcttcttcatcctactgccctgtatcttgcaaattctctagagtgcacatgcaataattttgaaatgctgtatctcattattttaacataatatatgaaaatgcagaaaaatagtaaaagtatccaaaattctaacataattctgaagtttcaacaatatcaagtgtgttcacactccagtacattttgcattcacttgctaaagaaccttctgttcggtaggtgttttactgcctctttcacatccttgtttctaagactgtagattaaaggattcatcatgggagtcatcaccccatagaacatggatataattttgtcggtagcatccaagtcatctgaattaagtgtctctttagacttgggcttcatatacatgaagaggatggtcccatagaatattatgaccacagtcagatgggctgagcaggtagag

SEQ ID NO: 15602 - DNA, 420 bp, Homo sapiens
  MAP TO AC009613.2; EXPRESSED IN LUNG, SIGNAL = 1.6
ggttaattttcatttctgtcctccagttttactttccagtgaaagaaagatgacacaatgtgtctggtgctatgtgttctcttctaggctttcctgacaatgaacagtaagtggctcatctgattgtgataaagatggtatacactgccttataatctaaacattgatgtgcagagctgtaatcacatctgactggtgggcagatcagttgtctttgtcttcaatctctcttgttgtattgccgtgaagtgctgtcacaatgactgatagaggggtagaagctgtaaattcaggagaatcattcagttacacaagcagaaaggatatctttcttgtagagaaatccttatgcgtaagtagaatagaaaactacccacatgtgagtgatttcagagtgtaggagaagacagcttcactgca

SEQ ID NO: 15603 - DNA, 454 bp, Homo sapiens
  MAP TO AC009444.1; EXPRESSED IN LUNG, SIGNAL = 4.2
  unsure 281
ggcttttaaagaaaattaatgctgagttaggtgtggagatacaacagccttcaagccattcaaagtcttggcctacaaataggcaaattcactttgtatctttctcacaagcataaccattattagctaatggctcttagacatgtgaaaatgtgcttcaagcttctttgttattgtgcccacctcactgtaaaggaagttagagaaaagtggtgagaaaattgtgaggagtttggtgtgtaggatagagagtagcacatcacttcatgcccacattagtngagaagtgcaatattctcactattctcttgcatccatcagatgacagtgcaattgtggaacaatggccctttgctgaagggttgtcccttccattcctggcacttttacgatcagcattcaggacttttcctgggagaagtgagaggcaagagggaaagctgagggattattt

SEQ ID NO: 15604 - DNA, 453 bp, Homo sapiens
  MAP TO AC009722.1; EXPRESSED IN LUNG, SIGNAL = 2.4; EXPRESSED IN BT474, SIGNAL =   1
  unsure 139
  unsure 160
  unsure 172
  unsure 217
  unsure 234
  unsure 244
  unsure 265
  unsure 408
atggacacttcacgaaaccctatgtacttcaattgtagaatatatttgacatgaaagctataccagtcagtatgtggatggggaggaggtaagacagtggctgacacagaaaatttaaaagaaaattcacaagtagganctggctatttaaatttatacnttctaattgaangacacagctaccacaacaatttgaaatattggtaatatcctaatncttacatctttaagggnaggaaacttnattattattatttaatgttantacaattttatttatcttagaaaatattgtgagtaatttaaataaggatgaaaatgtgttccatgaccaagaagagaaatgtaccctctcagccaatgtaattcattcaatagccaggagaattggagtgcaggtaactgcanagtctatcttaaagctctctttcctaaatagacactgtgacattg

SEQ ID NO: 15605 - DNA, 460 bp, Homo sapiens
  MAP TO AC010740.2; EXPRESSED IN LUNG, SIGNAL = 9.7
ctccattttgtctttgcgtggcaataattcttctattctttaatcagtatcaggtatatgtaaatccaaggaataaaaactccctaatacctattctagtgaatacacataaacctaagttttgcaagtttctgttaaattttggattaaaagaaattgctgttttaagacagagaattatgtaataaattatacttttaaataatatattttgatcccaagcatttcattaccagagtttacattttcataagcctattaaaaataaatttaatttcagatccttttgaagcattcatcatcttttctattcgtcatgagatcagaaggattgatcttcacaaaagagactatagtctacttgttcctggattgagaaacacaatagcacttgattttcacttcaatcaaagtttactttattggacagatgttgtagaagacagaatataccggggaa

SEQ ID NO: 15606 - DNA, 480 bp, Homo sapiens
  MAP TO AC010885.1; EXPRESSED IN LUNG, SIGNAL = 5.2
gaacggcaaccatgacaaacccaatatcttcaacactcattctgcaaacaattctttagctcgttttgtgttatacattccttaacatttttagaaatttacttaattgatgattgtagcaatttgcctatattattctcctctttctcagacccatgttaggaatatagtaaaatatcagtcagaagacaatcaatcttatcagagtgatttagtctttgtaattcatttcatattattttgccttactgtagttatatttttgttgatctattcattataacacatttcccaataactcagagatgattgtgaaactggacaagatgaccttcaacattgtattgacttttattaatgatctcttcaatagtgcatttgcttttatcaatgactcctcaaaaaaagtagtaataataatgaagatggctattatttattatttttaaaaatactttgcatgtatcatgtcatttaatt

SEQ ID NO: 15607 - DNA, 478 bp, Homo sapiens
  MAP TO AC010125.2; EXPRESSED IN LUNG, SIGNAL = 0.91
gacacactgccttctaccccactgattttatgcaagaaaatataatgaacttggccaaacactttgtaaaatgcatgtaaacccataacccgataatgctcttggaaaggaattgatatcatttgtatttggagatctcttaaatttcttacatcttttacatttggtataaaataaaaaattgtcagaagaaataaaagcattcaaatggaaaaagtgaatattaagggtaatatcaaatcagtacttaagaagaatgctgggaaaggccaggaaataaagattacagaaattgaagagaacacaaattatcagaagccaaagtccagccctagcccacccatcctctatacccattatctaggggaaatatatgatcttagggcaagtgcaagaaaggttacaattaaaaacatctcagtgatgattcttgccttaaactccagaagaatccttgtccaactctgctggatgaagg

SEQ ID NO: 15608 - DNA, 463 bp, Homo sapiens
  MAP TO AC010754.1; EXPRESSED IN BONE MARROW, SIGNAL =   1; EXPRESSED IN LUNG, SIGNAL = 1.6
  unsure 238
cactgcagaaaggaagtgggttatttccaccactcgctggcttttctttttctctttttttctcccttttttccactctctctgtctctcaacttccaaaggaaacactcggataaatcctatttggctgaagtcaagtgcactgaagactgcattagttttgcaggaaggtgctgagaatctcacagtgtcaagtatatggtgtcctggagtgttaggaatctagattttccttccnttttgtaggtaatttgcaccatgacttcttagatatcactatctgcctttataacctgacatttttatcgagtggagaaaacacagccttaactctcccttgcaatgtgaatccggggcaggtgtcaatgccaactacagctgccacaagtattactagtccacgtgttctcttccttcaggatttggaggctctttttgtatccctcaccacgggcaaatattt

SEQ ID NO: 15609 - DNA, 468 bp, Homo sapiens
  MAP TO AC007363.3; EXPRESSED IN LUNG, SIGNAL = 4.3
tttttaatctgtcccttccttcaggaagtctcagatttcttaaaggcatctggattccttcagttttttcatttacatttgcattagggaagagaacaaatctgtgctcaaggacatgttggtaatatttgtggcataaaattaagcacgtggcataaaattaagcacatggcatgacttcctttctggattcagaacattaactgcacttacccatactggacaacacccatcagtggaccggcagggccaatgtcaagagcttgggcaacatcagccaggagctgcttctggattcggaatcgccgtttgccaatgctggtgctcccatcaattaaaaacgacaagtcaattttgcagtctgcggaacggaaaaagactctattattctcatgatctctcactgcatttacctgggcatcctcttgttcctctttctccatcagagccccctgagaaatgaaaaga

SEQ ID NO: 15610 - DNA, 484 bp, Homo sapiens
  MAP TO AC010128.1; EXPRESSED IN LUNG, SIGNAL = 6.5
tgatggttccaaggaaaattgtaacttcatattttccacctaaaaattttatattgacattttaactaagacgaacttcattcatagtaaacagtgaaaaggagggaaaaaaagggatttggttcataaaatttattattaatctattctaacatttttggagtttctaaactatttgggaattgctcaagtgctatcatgtttcttttcagtatgtcagtgattattaagtcacttcattctttccagctataggatattgtggggggattgtcttcagtggtataaggactgttatgtacaaaaaactgacatgactcttggttggatagcatttaatataaatgtcgtggctgacatgttggttttgatagtcatcaaaactggtgcacctgatgcaccagtttattctctgatcttctattgctttgataatcttaataaacaacaacagagccacgtaagtgccttaactttgcctgga

SEQ ID NO: 15611 - DNA, 490 bp, Homo sapiens
  MAP TO AL096763.9; EXPRESSED IN LUNG, SIGNAL =   6; EXPRESSED IN BT474, SIGNAL = 1.1
ttgagtttccatacccctggcagtccatagcagggagccacagtcaataacccctttcctgttctagtaaagccattcaagacagagcaattagccctaagaacccaaatgcagagagaaatacaattcatgatcttgctccttgctgtactctaatgaggcactcagtaattactaagttccattctccccagaacaaacacaacctgaatggattcttctttctacccttctcttaaacacaattggcttttatttattcagacatactctatgtgtaacaaacctcggagagcactaatcttattggggtcaagggcacacaggccatgcttcagattgccatagacgttactttggaccaggacatcttttgtgaagagtttctgaataaggtatctagccgacaggcttgcgcaagacttagtttttgccaaagtcagtactgaacatggcatccgtatatttctccatggtcttccaaaatagc

SEQ ID NO: 15612 - DNA, 472 bp, Homo sapiens
  MAP TO AC011287.1; EXPRESSED IN BONE MARROW, SIGNAL = 1.1; EXPRESSED IN LUNG, SIGNAL = 3.6
gctggagcaggagacacaagaagagctaacattcagaaaaccaaatcagttcctagagacagggaagttagaagccagacccttgggctgcagccagaaaagttgggagattagatgtgcaatctaactccttctggggagaatctgagaagtgtgctttatggcctgtattcactgtttactgatctgaggggtagagccataatgtgcttgtgtgtccatttaaaaacacttgttctctgttgttccaggggactagcaaatgccgggccctatcagctccccgggataggcaatttaggaggcagtccttcaggctgcagctattaaacttagggatctcctaccaggaagaagccgaaggcttgtttttatcactgaatcaaaccaggaaggaaaagccaagggaaatgcccacatacctggtcaagttcctagaggacttatgattgcctgctcttttagctctgag

SEQ ID NO: 15613 - DNA, 393 bp, Homo sapiens
  MAP TO AL035701.13; EXPRESSED IN LUNG, SIGNAL = 0.69
tgcagttttggaaagaaagtaggactttgccttcactcttaaatttactttctaatttaaaggtgaaattgtgattactgtaaattgctattaaatgaagacctgggaattatctggttgaaaattgaactaattattctgtgtgaacttctttaaatcgaagtaccctcttaacacaacagtatcacaaggtatgatttgttcctaggatacaacagaaatatctcaactaaatacttacatttttgtgatgattcatttagcacaattgtccagccttcatcggcaaccaaaataatgggctgaattcgatcattatgttggtaataaaatctgttaggaatgtcttctttgagataaacattcatatgagggctacagtttttcagtttg

SEQ ID NO: 15614 - DNA, 355 bp, Homo sapiens
  MAP TO AC008079.7; EXPRESSED IN HELA, SIGNAL = 0.6; EXPRESSED IN LUNG, SIGNAL =  11
tcatattaagttaagtttggggatagcccagaattatatatggattttcaactgcacaggagctggtcccctaacccttgcactgttcaaggatcaacagtatgtataatactacagattttattcatattttagagtgtagtactactactcattaaaaaaaattaactatgaaacagcttcaggaaggtcttccacgagttcttccagaagaaagccttgttatcatagagaatgacagctgcatgtatgttattgccactgaagaccctgaagacctttcacttggacaagatttcgagatggaagacagtgatattgattatcctgacccttacaggactaagctagtgtg

SEQ ID NO: 15615 - DNA, 466 bp, Homo sapiens
  MAP TO Z98946.15; EXPRESSED IN LUNG, SIGNAL = 0.61
ggtgaatctcttccctgagctctaatttccttatctgggatattatctcatatgaggttaatcccatagggttactgggaagaagaaataagtaaggaaaagggaaatattcccaacacagcaacatacagcaggagctcaaatatgagtcccttttgttcttttctccttccctttcctttgccaggtcaatcagctcagatacccaagagttaagaaagtgaacagaaactaagggttagggaagactgcaaaaatttctgggccacactagtgacttctcagcttgcttctgaactagttatttgctggaggcccatggagtggtagcctgctctaaaaagccagcatgtaagcaaaagtagctataagtaagtaggcagacaaggaagaaagttcagttcccataatcccagcccaccctacagctttaccagctgttcctgagtctttttctggtcccggg

SEQ ID NO: 15616 - DNA, 456 bp, Homo sapiens
  MAP TO AL078583.15; EXPRESSED IN BONE MARROW, SIGNAL =   1; EXPRESSED IN LUNG, SIGNAL = 1.4
ggtttgttttgtttcgctttgtctggtcttttcatgcgttgtggaatacacatgacaggcaagggaatttctcctttaagcttttgactaacaggtaactgtagcaaagcagctatcccctcttgctctgcttaaatgtttgaaaggagactttcaattctcaacagctaaagcataagggaaattctcttagaggtttggaaccccaaagaagcagtggggtatggctctccatacactccccgcgtcttcccaagtgccccttctcactgttgtctcactaaaggcacctgcagaaaataactgactcttaatgaatgcctttgtcagtgacccgacaagtgccccttgcctggaccaagatgagaaagccagtgttacttccaggaaccccatttccatggactgatggaatctgcccctgattctgctgtcggaggcgaaccagaccctata

SEQ ID NO: 15617 - DNA, 488 bp, Homo sapiens
  MAP TO AL049836.2; EXPRESSED IN LUNG, SIGNAL = 0.62
tgcatgttctgatgtttcccacaataaactgatgtatcttttgttgatttcagagcgtggccttgaggatgttccttcacctctctgagcttcaggctcctcacctgtacaatgaagacagcacctgcctcatggatttgctaatatatgcaaaatgcatagcttgctgcctggaagataataagtacccaaatgttagctgtttttatttttcgctcaattttctacatataaacatgtcattgtgctccgtgctggggatatggcagtgacagctaaactccagaagagaaagattaaaccaacactcacagacgattaatccgctgccgtgaggaccaatgatgtattcattacagttagggatgctgtggtggggggcacgttgagagcatttatcaggggaactttgttgagagttttgatcattatcttaagagcaacaggaagcctgacattgaaggcttcaagcagagctgtgaaatcag

SEQ ID NO: 15618 - DNA, 464 bp, Homo sapiens
  MAP TO AL050403.12; EXPRESSED IN LUNG, SIGNAL = 0.96
catgatcttaattatcagcatcttgtagtacaaatagaagtgttcagaagtaatatagttcgtaaatattttctattactttccatttggtagtatttggggacaaagcagctatttggaatttgagagtcaactcagagactattgtcttagaatcagtagaagttcaaagatcagagttggagggaccacccaattgactcttgtaagtcaagctttttgctctcccaaaaggaatccataggattacagaccctcacttggagtctttggattgcacaaagtgtttctatatgaatgttcgatttggtatgcaataatttccagggcaaaattactcagcaacagcaagaagggttggaaggcttcagcaaattcctcccggtgggccttgacttgaacttttcgggtctggactatttcttccacagctccctgacactcctgttaccccaagggtgaga

SEQ ID NO: 15619 - DNA, 454 bp, Homo sapiens
  MAP TO AL078588.9; EXPRESSED IN LUNG, SIGNAL = 8.4
cattttatccagtcagctgggaataccatcaagccacatttttatatgggtaaaatgtatacaggttaagtgaatgtaggcaaaacactgatcaaaataatagagtaattaaaaacatttaagcagcatgtagaatcattcattcacttatttatttgtttaataagtacaatcattcaagagagattttataaaagatgaacaagtaagaacataaatttcaaaattaatatttaaagagatatttttatgcagttgtaattattttttacctgaacactgttgctatatcctcctcagatggatgcaaagtatctcccaaacttccagatccaggatgacttcaccattttatttttcagcaataataataataatgatatcaacaaaaacaactaaagtaacagcaacaatcatttaggtaagtgggctcattgccttttacaacatgctt

SEQ ID NO: 15620 - DNA, 486 bp, Homo sapiens
  MAP TO AL080274.10; EXPRESSED IN LUNG, SIGNAL =   1; EXPRESSED IN BT474, SIGNAL = 1.1
gggcagctcaggttcagtagaaggtcttacataagatgaggaggggaggagaaatcttttgaaagaagctgccatactcacctgtaaaatgaaggaggtggcctacatccctaaaggccttcatggtttttatagtctatgattctctgatgtagtcaatactcatatttctgagagtacatcacattgacctcagggatgcccatttctccataatatcactgtcagtcatttagcattaagcacatgcaggcttgcattatgatttaccttatgaatgtagttactctgacgtcccaacttgataagatcctcaagactttatgcctccttgaaactccattacctgatgcagtgacctatatctcatatgaggccttcaatgaagatgtggtcatgatgatgatgacaatgatggtgatgatgatgctgatagtatcactgctgttaaactatcctgtctaattgaatgagtgccaagcaacc

SEQ ID NO: 15621 - DNA, 468 bp, Homo sapiens
  MAP TO Z97985.4; EXPRESSED IN BT474, SIGNAL =   1; EXPRESSED IN LUNG, SIGNAL = 3.4
atttccctttgatgcttcccttcaaaattacctttgtacagttaggtaacttgtcccccatggcagtgtgtggtagaaagtagctcttgagaacaaacctcagaaaattgggccgctctacctcactgagcctaagggaacaggaggcctagctgggtgtgacaaagggaccaccccacccttcatttctatacttttaagggtacaaattgggaagcagaaataggacagaaaggcagaatcttacattaagatgggtttccctgccactcttttatcggacagcagatgtgttaagatgatcttcacttcctgcatgcgtcttatgtcactggaatccaggacgaaaacaagcccatgggcctgtgcatagtagtttggccatgcttcccggcccttcaggtctccattcaggtcatagatggaaagttcatactcatctaacaaaagtgtagtcagttccgattt

SEQ ID NO: 15622 - DNA, 470 bp, Homo sapiens
  MAP TO AC009724.1; EXPRESSED IN LUNG, SIGNAL = 5.1
  unsure 106
catttcttggactgaagggcagaaaatatgagctgttgagacagagtctaatgatagaagatttgaaatgtttccaacacaaagaaatggtaaatgttcaaggggnatggaaaccttaaacaccctgatttcaccattacacatgtatgcatgtatcaaaatatcacacgtaccccataaatatgtaaaattattatgtaacaataaatttttttaagaaataacagggaaaacaatgtgcactattgttgtcctggatcctcaaagttttgaaaatctgcagctacttaacaataacagcctcaggcttctcagggagaaaaatttccatttccagccccaagacttcaccacaagtgtggcttcagaagatgttgtgaactgggaaaggccagaaaccagagagtgggaaaaagtgatagcagccatagaatcaagaaaggaccctgcagagggtgacagctttcatc

SEQ ID NO: 15623 - DNA, 475 bp, Homo sapiens
  MAP TO AC005008.2; EXPRESSED IN LUNG, SIGNAL = 2.9
gaagatgaggaaccacaaagctatagtgaagactgacagggcatggtgtcaaggaaattaagagaaaacttaatttcaagaaagaaggcaaaaaaaccatctcagtgattactgagaatactaattataagaagagcaaactatccattggatttggtaaaacagaggttattatgaccttgacatgtgcttttgaaggactggtagatgtaaaaaccagattaaaagtcattaaaggtgattgggaagtaaacaatgtaaacgtcttttacagacaactttttgaagagcttttctatgaaaactatcagagaattgaagctgaaggcagatgtaagatcagtagaagacttttataaaatagtctatattagagcatttctttgtgctcattggaatgattcagaagagaaggtaagtctgataatactggaaagaagaaatacattaagctacagccaacaggaagacaaga

SEQ ID NO: 15624 - DNA, 465 bp, Homo sapiens
  MAP TO AC005998.3; EXPRESSED IN HBL100, SIGNAL = 2.1; EXPRESSED IN LUNG, SIGNAL = 5.5
aatattggatttgaagtaccttgctattaaaacttctctgaccatctaattgtattaaaaataacatgctgggaataggatgtgtcctcgaattaaattgcttttcaatggcattaaggtaaaataatgcctgtgtgtttattgtttttattaatatgacatattgtgtgatatctgggcccaacagctgtctcaattgtgggtgatatttatataagagcaaactttaaacagatgacaactcggcagattcagcagcggtaagcccttcttgactcttttctgcaggttgtggatgagagagctgtcccatggctgggctgtttttacgtatactggctgcttacaggatatcacgctgctgaatgacgtgtacttgaagaccagcagagggtggtggatgtgcctctgcccacgctgtgtaaagatggcggcagagcggacccaacagcacccttggagtct

SEQ ID NO: 15625 - DNA, 482 bp, Homo sapiens
  MAP TO AL031602.10; EXPRESSED IN PLACENTA, SIGNAL = 1.1; EXPRESSED IN LUNG, SIGNAL = 0.93
tagtggccttggaatcagagttatagtttcatgtaactaccatggccttggacaagtcatttagttttaaattttagttttctcatctaaaattgaggctattaatgcctagttatttggaggattaaatatgaacatatgttaaaacacctgatatgtggcgactgcacacagtacctgttcattaagtaaatacattagttctctgaaaagtcattgcaggaaaatgcctactgactgttttgatgctctgctgtcttgaattggatgtttggttctatccccagtggcagatgcctggagagccctcaagaatcccagcattggggaaagcagcattgaaggcctgactagtgtattgagcactagtggaagccctacagatggacttagtgttatgcaaggtccttacagcgaaacggccagctttgcagccctctcagggggcacgctgagtggcggcattctctccagtggcaagg

SEQ ID NO: 15626 - DNA, 363 bp, Homo sapiens
  MAP TO AL032821.2; EXPRESSED IN LUNG, SIGNAL =   2
agctcagccacaatctaggctacggggagacagcaaaaaaactacaaaggaaaattttttttttaagtggtaaaaagaacgactgatttggaccacatttacctgtcaaactgcccattcagggaattctaaaaccaggaagagcacctaagtgaaaccaatgttacatttattgacaggcttgctgctagtcaaactcggggtgaaaggcaacaataatacagagagtagagaaatgcaagtatagaagaatggaccccagctttaacttggaagggcaaatattttggcctacactcaaaggaaagtgggaaatacttctaaaatacataccaataccgtagccacgttatttggaaaagc

SEQ ID NO: 15627 - DNA, 488 bp, Homo sapiens
  MAP TO AC007252.2; EXPRESSED IN LUNG, SIGNAL = 0.91
ccattggtaacattcttttcttccaacagagattgtttttttcccctgacagcttagaaacatagaaaagtgatgagagtaaaaagcagagggaaaatgactctcctgatgtggtgtatggggttgatgtgtgcacttgaagctacaatattttctaattatttacaatatttctttgaagctcaaggctgatattctgcttttggtaggctgcttcaccacctttgtgtatctcccttttctctttcttaacaatgtcagatattaatctcatttaggatttccaaagaggaacagggtaaaacacagatttaatgagaaatttgagaaatggctatttgacttccttttcttcctccttttctctgctccccaaggagctggaaactttgctgaagcatgtgtggagatggtaagaattctgtaaactctgttccctggtccctgtgtacttagaaaatcccattcctacccaatttgcatgcaga

SEQ ID NO: 15628 - DNA, 1975 bp, Homo sapiens
  MAP TO AC005532.1; EXPRESSED IN LUNG, SIGNAL = 1.5; EXPRESSED IN PLACENTA, SIGNAL = 1.5
cacgagaactggaaattggctgtgatttacttctacattctcagtgcctggcatataacagcatcaatagctatttgctaagtgactactgctgattgctgatgtccctgttctcatctattttgttatactgccactctatttaaaaagactaaggaagagtccttgttgttggtactaaagaaacatacacatattaacatgtttttatcaacaaaattcagtcagtccaagtattgacatagtaataaaatttctaaacttacctctacaggaggataatagttgtaattccagtaccaaaacgttctaggtagataacctttaattaaatggtgttctggcacaaagggatgaaaagtttcttttccaatggtatctctggaatctcctgcttctacattcataatttccatgcatctccccagtgctaagtcttcaatggaggaactatgtgtacacttgtctgttttaaatgcatcaacaaatcttttcaaggcttctttgcttagtacatatcctgctcctccactcatgtagccctgctttacataaggcttaaatcttctcccaaagtaaatgggttcttcagggtcgtattttgaaagaagccacctcaaattgtctagtatgacatacgtgtcatcatctgctttcaaaaaccaatcagcatcttctaaataatgttcatgaacatactgaaaagctttaattgttttccagtatagttgatctctgccttctttggttttcagtcccacagcagggaagtctttattttcttctgaactcataaacaacactttgttacaacgctgggcccaagtagctttgacgtgtttggcctttttctctaggttttgagggccggtcataacccagcaaagaattctaactttctgatagaggttttcagcaatgtctgtgttctcatctattaaacaaaacattttaaaaggttatttacatagatgtaaaatccaaatattaataaattatactgaagaaagcactgtcctaatttcaaagtccctatttatccctctattagtgatttagccaaaggaaagcaaactcatcctaatgtgaactgacactctgatttattggtttcatgtcagtgttatctaggacatcactggagctagtaagagttgacattataatctaaattcgtctcaaactgtagtttactgattaaaagcagcagcatcacctgggagcctgttagaaatgcataatcttaggcccagacctactgactcagaatcagcattttaataagttctcctggtgcttcataggcatgctaaatgctgccttaaatagtctctgcttggcacttcataaaagaaagcagccagtttttaatagattactgacagaaatttctcactgctctgaacgagtttctgaagagcaggaaagacatgctgctgaagtggcagttcatttttgaagttcacaataatccactattaagaatttctacaagtaccctgaggtggtaaaaggtcaaagcacaggagttgagattactttctgatagtcacatacctcattccaaaatgtaaatccaccaatcaaaaacagaagagaacaatggtagacatgggaattccaagatggtctagagcagtgctctttaaactacaggtttgcaaagaaataaggagcttataccagaacagaaagcaacacattactttgaaaaaggcctactatcagaaccaaccaatcaaaatgtccacttaactaagcagtgagcttaaaactgaaacttaaaactgtccatttaagtaagcagtgagcgtaaaactgatttacatcctagtgtaacctcattatcttgtgcagacaaacagctgacaaagtgtcaggccaggaccgcattttgagtagcaccggtacagaggaagagctcaatgatgagattctagatgagtacttcccaagctatctgtggtgaaaggcc

SEQ ID NO: 15629 - DNA, 1929 bp, Homo sapiens
  MAP TO AF117829.1; EXPRESSED IN HELA, SIGNAL = 1.2; EXPRESSED IN BT474, SIGNAL =   1; EXPRESSED IN LUNG, SIGNAL = 1.9
catttaatgaaagtttatcaagcagtgtatttgagcagacactatgcatggcactggggaaacagaagtgcattaaatatagtctctgctctcatgggacttcttccaattttttgctaaaaagtaactcatgaagatttttaactaaaaatagttttttttttaagtgttaggataatgtatagctaagacagtccagcagaattaaaaagctataaaagcttactaggtagataagtaataatcatggaaactgaaagtagtatccttataggatatttttccttttccttttttaggagcctaaaaggggatcgagttatgccagaggaaatagctcgctactataaacattatgtaaaagtcatgggtcttcagaagaatttcagagagaatacttacataacttccgtatcaagactctacagagatcaagatgatgatgatattcaagacagagatatttcaacaaagcatttacagatagagaagtcaaactttatcaagagaaactgggaaattaggggttatcagcgaatagctgatggttctcatgttcccttctgcctctttgctgagaatgtagcgctggcaactggaacgctggattctcctgcccatctggaaattgaaggggaagattttccttttgtgtttcattcaatgcctgaatttggagctgctataaacaaaggaaagttgcgtggcaaagtggatccagtgttaattgtaggttctgggcttactgccgctgacgcagtactgtgtgcttacaacagtaatatccctgtgattcatgtgtttcgcagacgagtaactgatccaagcttaattttcaaacagcttcccaaaaagctgtatcctgaatatcataaagtctatcatatgatgtgtactcagtcatattctgtagactcaaatcttttatctgattataccagctttcccgagcaccgtgtgctttcctttaagtcggacatgaaatgtgttctccaaagcgtttctggattgaagaaaatatttaagctgtctgcagcagtagtattgataggttctcatcctaatctgtcttttctgaaggatcaagggtgttacctaggccataagtcaagccagccaatcacatgtaagggtaatcctgtggaaatagatacatatacctatgagtgtattaaagaagccaacctttttgcattgggtcctttggttggagacaattttgttcgatttttaaagggaggggcgctgggtgttacacgctgtttagctacaagacagaagaaaaagcatttgtttgttgaaagaggaggaggagatgggatagcttaaagcaagtttacaagtaattaaaatggacagtttgccattaaagatttttaatagtggttttgcagtgtactggcttgaattttctggacttgagttaactgaaggagagcctcaaactatagtaacttcatttttaaaagttactagaatttggtatcctgatttatattgcagtgtttcaaaggtgtcactgtcagacaaatagaaacactgccaacttggtgtaacttaagctttcatttaactaaaacattcttttcttgcaaaacttatttttcatgatcatttttggttatttattatacttgattccaaaatagtacagccttgaatctataaaactgtgcagtcattatgccagaaattatcttaaatatataatgggtcaccttgctgttcaaagggtggtgcaaggtcctgcagcatcttacatctgtagcttgttagaaatgtaaactctcaggccccacaacttacttcctgcattttaacaagatccccaagggatatgtatgctcataaaaatttgagacactggtttaaatgaaaatggatataaggtatgtataactgggggtggggtgagggtaggaggcattt

SEQ ID NO: 15630 - DNA, 447 bp, Homo sapiens
  MAP TO AC012111.1; EXPRESSED IN LUNG, SIGNAL = 0.96
gcagggcactcaaggtctacactaacaaagagtaccaatgctgaagacttgctgatcctgaatgtaggaagcctgagaacatctggaaaaaaaaataattatgtttaaaaaacagttgttccatttatctgctgcttcactttgacgaacagaaaacaatgtcacataacatagatagtcaccacaaggacaccagcttgtttaaagttacacatgaatttatatgtgatgctgaaggataattataatggcttatatctatttctaacatcttgaagttttgttgttgttgttgttgttattgttgttgttgttgttgaggattttttttaagaacacacagagaaagacctggtagaagtctttctgacatctggcatagaagacaattatacctttattgcacaaggaaataaaatagctgtgtcttagctccgtctttggctg

SEQ ID NO: 15631 - DNA, 484 bp, Homo sapiens
  MAP TO AC006474.3; EXPRESSED IN PLACENTA, SIGNAL = 0.79; EXPRESSED IN BONE MARROW, SIGNAL = 0.93; EXPRESSED IN BT474, SIGNAL = 0.66; EXPRESSED IN LUNG, SIGNAL =  94
acattgccctcagcaaagtgtaaaccaaatgttttccttcacaactcttgatgttggtactagttacacaggtaaattaatttgctacatcttatacacctgtccacttaaaatagttccacttactgaatgtaagttatacttcaatgctgttgatttttaaaatgcatatgaggccaaacaaaaacatttcaaaaagatttaactgaaaggaagatgtatgttatatgatataaagaaaatatctgtgaataattctacataccgtgagttccagattttgttggagccgaggatgaactaagtagtggatctaaggaaggatccaagaaacctgtgttcatgtttgttttatataaaagctgagctccatcttctgacagattatctaaacttatcttgctttgtctacttgtatctagaagatcttttccaaagaaagcttcctagatgaagataagcacatacaaaaatggttagaaaa

SEQ ID NO: 15632 - DNA, 486 bp, Homo sapiens
  MAP TO AC007358.2; EXPRESSED IN LUNG, SIGNAL = 2.7
cagaaaaattgcactttccaatctgacagttgatcaaggggtatcccgctgctgtcagcaggaagaaatgtttaaacacagagatgggagtttaaacattttctcattatcacagaataaggggaaaaaacacaaataaataaataagtaaaaatggcatccagactctgtaaccccctgctgggagcgtaatgaagctgggtcatgtgacctgaaggagtgggcttttatctctggccccagtatcgttactcaagtgacacctgtcacatgacccaacttcggtcttttatctgccttccccaggcactcttttggggaactgtcttttccagagatgcgtggcccattgcagccattgtagtgggcgctgttcgtgtgattagcctggccttttgtgtttcctgcctcgaatccgctagatctttctctaaacattgaaacataaaaaaattacaaaatacctacaaaactgaaacaaaaacc

SEQ ID NO: 15633 - DNA, 477 bp, Homo sapiens
  MAP TO AP000107.1; EXPRESSED IN HELA, SIGNAL = 0.75; EXPRESSED IN LUNG, SIGNAL = 0.69
gctagtaaataaatgtgacaacatagcttttgttgcttggcattgggaaggttctaaagtaagaaaagtcaggaaagttgttggcaatgctggtaacgttttcaatactatatgatttaaggctgagtccctgttgaaaagagccatatctaagaatgagatatacatacatggctgccagcctttgtgtaaccacatgggcttctctctggagtcactgtccccaccgctatggatgagtaagctctgctctgggaagggatgcttggcctccatgttgatgcgcagcctcttcagaccacaaatagccaggtattcagtggggagagtgttggtgctgcacagggaaagcttcaggtcttggaccagcgtgaagttcagcaggtggcccagcgcagatgtgtccgtgaaccagatggtcagatggccattgtagctggttcgctctactgcaaggggcaggacggttttacagtt

SEQ ID NO: 15634 - DNA, 458 bp, Homo sapiens
  MAP TO AC007271.2; EXPRESSED IN LUNG, SIGNAL = 2.6; EXPRESSED IN PLACENTA, SIGNAL = 1.2
tgagtgaaaagggggtgaaggatgttaaataacttgccaggggtacagcacacaggcagtaagtgatgcagctggacttgaatatgcttctcagactccccagataatgatcttatcacaaggctgtaaagcttttatatgtaatgtgaattgatgtatttaataatcaatgtgtttcttcgtagatattaaatcaagacacactggcagatttttatgtaaattgcttccacccttcttccttttaaagataaatgcaaggaacgtgaagaaaaaataattttagtgtcatctgcaaatgaaattgatgttcgtccctgtcctcttaacccaaatgaacacaaaggcactataacttggtataaagatgacagcaagacacctgtatctacagaacaagcctccaggattcatcaacacaaagagaaactttggtttgttcctgctaaggtggagga

SEQ ID NO: 15635 - DNA, 472 bp, Homo sapiens
  MAP TO AC007464.2; EXPRESSED IN LUNG, SIGNAL = 2.4e+02
accaaaccatcttggaggagaatagctgtgacaaaaaaatgcattcctgcctatccagccattgaggtctcctggattaagacatatttgtaggctattaaaaccatccaaacagagagagagagagagttgttttatcctgtccaggatcacaagattccagggtggagagccctctccatcaacccaggtattatctagatgagaagaccaaggcccagcatgaggaactccctttgctgtggcccctatctcgcagtagcagagtgaaaactcagcccagagctctgcctcctcacctccacatcctcttggcccacgccaggactcctgaaatgagtgtgtgccaagctcatctgcaaagagtggatggacactcctggtttctccagcatttgtgttcagattgtggccacctctgctgtgctgcagggcaagttggaatgagggtaggtcagggataaccactcca

SEQ ID NO: 15636 - DNA, 469 bp, Homo sapiens
  MAP TO AL035425.11; EXPRESSED IN LUNG, SIGNAL = 0.94; EXPRESSED IN HELA, SIGNAL = 1.3
aatatcctccataagacaccattgtttataagatgcatcactagtttaaaaacagcattagggaatatataatgagctaccacaataaatattaacatactttattaaacacatcctaattttataaatgttaaaatatgagtaaatcttagacttaagaaatatagtatatttattacctatgaaaggctggcaagtttccttgaaaggctgtttgctattgttttagaagaaaccaaagtatcattatcacgcagtcctttactgttttctctccaaatctttctagggacggctggcagctgccttcgtcgctttagtaccatgcctttcatgttctgcaacatcaataatgtttgcaactttgcttcaagaaatgactattcttactggctctctaccccagagcccatgccaatgagcatgcaacccctaaagggccagagcatccagccattcattagtcggt

SEQ ID NO: 15637 - DNA, 477 bp, Homo sapiens
  MAP TO AF165926.1; EXPRESSED IN HBL100, SIGNAL = 1.2; EXPRESSED IN HELA, SIGNAL = 1.7; EXPRESSED IN LUNG, SIGNAL = 2.1
tcagttctatttcactgtcagcattacaagcagtactggcaagtttgtttccttttcattctgcattgtgaacacttgcaagtctatctgggagtacccatccacatttaaatctctcttcttattaaggaaaaccaagttaaatatctatgtatttcattgtttttgtaaatacctttgtgtctagatacacaaacttgggttatgagaattctgaattttatgggttctaagattaagagatttatgggttctaagattaagattaagagatttatgggttctaagattaagattaagagatttgtttttcttatgtgtgtacaaggtatacagcctcctgccatgtcaactccagtgtgtgctctgggaaacccagcaactcaggccacaaatatgagttgtgtgactggaccagagattgtgtactctggaaaacacaatggtatttgcatttacttttctcggatcatgggg

SEQ ID NO: 15638 - DNA, 424 bp, Homo sapiens
  MAP TO AL132780.1; EXPRESSED IN LUNG, SIGNAL = 1.1
tttatcccaccagtgttctgcttccccagtagagactgtgttaagaaaagaggcaaatttgctttctcagactgcacagagcatctcattattttgtgaagccccatggccacctatttctgagacatggggcatggcggaagccagagttattcttggctgtagattttattcatccttttccaccttgatttcaatgaatgagttcaagtcaggacagcaggttttgtggggttggtcaaaagatggggagccaggtgcattctcatcccctccctcatcttcctcttcttggaaattaggattgtaaagttctggtggaaggagctgggcttcagcagaaggcagtctgtctgagggaggcccatacacacggttggctttggtgccatgcttagagttagcatccaggtggtagcagagc

SEQ ID NO: 15639 - DNA, 457 bp, Homo sapiens
  MAP TO AC009396.3; EXPRESSED IN HELA, SIGNAL = 1.4; EXPRESSED IN LUNG, SIGNAL = 3.8
caaaatctaataactcaaaatccaaagacttgaacaccccaagggaacactgaagtctcagcagaacccttgatgcttgggaaagtagaaatatagggaaggtttgcataattccctgtgttcacttctagctcactgaatgtgactttctgctgagcctaagcatacagcaatgaataacaacaatagtaacaacatgaggggtccctgctttcatagagcttgcattctagtaagtggggcaaaaagcaagcaaagaaatctaagttatatatggtggtataaatgctatgaggagaggaaataaagcacaatgagggagaagatgatggagtgcattttagaaatgggaattgatagaatctgggatttgcttgacaaaaagttgaaggagaagcagatgcaaagacctgagattcaggtgcttgttgaattcaagggacatgaaaaagaacaa

SEQ ID NO: 15640 - DNA, 489 bp, Homo sapiens
  MAP TO AC007568.1; EXPRESSED IN LUNG, SIGNAL = 1.7
aaacagtttttcaagattctgcacagaatatattatttaagtataaatccaacaataaaaatggtttccagatatgctttcacaaaccactggttacctaagaataataaaaaaaaaccaaaaaccagcattaatatagatctaactgtaagaagactgctaaggaattctgtactcagctctaacccgctcaacacagctgtcactatcttgggtgccaatgatacaaaaagccacagcggatggcaaaatgttgagtcaactctgacaagatggactttttcaggaagaaatgtgagtcagttcttgagtacaaacacagaagcaagcatgaaaaacacttaggggtgtcaattaacaagatattgaaccaccaagccatgaaatggacactgcccctcctccaaatcagcaactcaaccccagacttcattattcagtagagaacaggtgtcagaactggacttctggactcacttttggctgaag

SEQ ID NO: 15641 - DNA, 1964 bp, Homo sapiens
  MAP TO AC005365.1; EXPRESSED IN LUNG, SIGNAL = 1.4
ctgcacaatatagagggggcagggaagatagacatggacatttttgagactccaaaagggactttatctaggatatggagttaaatattttggtaattgctctttgaaacaaaacagttgttctaaaatatgttattatagggagattggtggacggctcctcatggtagaaactcgacttgcaaatgatctggctgagtttgagggagacttttccttggaaggacttcgtctttggaaaacagcattctcagcaatgactcagaatccaaggccagggtcaccccttcgcagtggccaaggagttgtcaataaagggtcaagtaatagccctaagatggttgaagataaaaaaattgtgattatgccttgcaaatgtgccccaagtcgacaactggttcaagtgtggcttcaagccaaagaagaatacgaacgttccaagaaactgcctaaaaccaagccaactggagttgtaaaatctgctgagaactttagctcttcagttaacccagatgacaaacctgtagtgcctccaaaaatggatgtaagtccatgtatactccccactacagcacataccaaggaggatgttgataattctcagattgctttacaagcaccaaccacgggatgtagtcaaactgcaagtgaaagtcagatgctgccaccagttgcctctgcaagtgatcccgaaaaagatgaagatgatgatgataactattacattagttatagctcccctgattctccagtaattcccccttggcaacaaccaatatccccagattccaaagcattaaatggagatgatagaccctcatcaccagtagaggagctgccttcattggcttttgagaacttcttaaagccaataaaagatggtatacaaaaaagcccctgcagtgagcctcaagagcctctagtgatatctccaattaatactagggcaagaactgggaaatgtgaatcactttgctttcatagtacaccaatcatacagagaaaacttctggaaaggcttcctgaagcacctggccttagcccattatcaacaggtaagtgtacaaataacaggaagtctccataattgttcttcagaaatagaaatgaagataacattagactgtaatgaaaatcagagctttttaaatgaaggtatagctcagcaaatatttttcgtcatgtcttagaaagtcgtcacatggcaactgtctttctgctgtgaaatctacttatatttgcttccatcctgtcttgtgggtgaaatgcaggagccctctcaaaaggcttatcttctcaacttgactttcctgttggcttttatacatacccaggtctcccacattttaaaacagaaacaaaaaacctgccttgacctcacgtctccagccagcttctactctttctcctccccttcaaagccaaatttcttaaaagatttatctaatttgacaactccagttatttacctcctactcatttctcagcccactctaaactgaattctgcccctgtcattctacattattagctcttgtaaagattcccagtaaacttatagctaaaaccaatagatgttcctgagtcttatcatatgtcctctaagcagccattttcttgttgaccttaccttccttcttggagcttctccacttggctttcctcctacttctctgtttttttcccacttgattttctcattattctcagttgttatctaaatattggagtttattaaggcttggtcttaagccttctttatatctttctctaaatgatctaattcctgtctacaggattactacagataactcgcaaatttatattcccagttcagatctctcttttaagctccagaacactatatccaactacctatctgacatttccacttgaatgctaaatggcacctcaagattagtattttaaaaaccaattcatgatctcaccgcatacattcacca

SEQ ID NO: 15642 - DNA, 1950 bp, Homo sapiens
  MAP TO AL096829.12; EXPRESSED IN LUNG, SIGNAL = 0.99
agcatttgccaaaagtcatcataatatcaagtgattgtataagcagaaacaagctgtcacagacctgtgtgtcagctaacataaggagaatgctttcttctgatgctatttatttacaggcagttttaatatatatcacttcaattatatctacatcaaataaaataaaaaattagtgaagcccccagattcttcattggaccagaagacacagaaataaatcctggaaattatcaacatttcttccaccatgcagatgaagatgatgaggaggaagatgattctccaccagaaaggcagattgtggttggaatatgttccatggcaaagaaatccaaatccaaaccaatgaaggaaattcttgaatgggtctccttatttaaatatatcacagtagtggtatttgaagaggaggttattttgagggaaccagtggaaaactggcctttatgtgattgtcttttttctttgcactctaaaggatttccactggacaaagtggttgcctatgcaaaactcaggaatccatttgtaatcaatgacttgaatatgcagtatctcatacaagattggagagaggtatatagtattcttcaagctgaagttattttacttccttgttatgcaattttgaaccgtgacccaaataatcccaaagaatgtaatctgattgaaggggaagatcatgtagaagtaaatgaggaagtttttcaaaagccatttgtagaaaagccagtcagtgcagaagatcacaatgtttacatttattacccaacttctgctggcagtggaagtcaaagactctttagaaagattggcagtagaagtagtgcttattctccacaaagcaatgtacaaaaatcaagctcatatacacatgaagagtttatgcccggagacgatactaatgttaagagattcctcatgttttgcaccaccaacatctttggcagtctgaagcctatggactctttcttaacaaaagtgttcttaaatgctttaaacatgtaagattatgatggagacaaattttattcaaatataataaaatatttaaaaataaaaaagtaatagacacaaatatgccatttgtttagaaaatgtttcatactcagcagaagtatcttgtcatatctctgggcaaggaaagaactctgggagagtctaaagttgcctttctttgtattttattatgtcctttttggggaagacttgttcagacatgatcaacttatgggttctactgtaagattttataatattttgtcatagttcacatgaagttcttcctcacatcttcacttggctcatttgtgactatttccgtgggacttttttatttattaatattttccaagaggaaagaataaaaaattcatgtactctgaatcctttagtttcctcagaaggccatgaagccccagacaagccagaagcaattattcccattttaaggacattcgagcctgcatacaattgtaatacaaaccaagcaaagctctttcagaaggcacaactctacttcatgatccatgaaaaactggttttaatatttgcatgcatcttcttcctatgaaggtctgtttgaactggatatttctatagcatgcacaaatgatagattgttatgatcaattaatattcaaaatttcccccagagagagagagagaatgagaggtagaatcactcacaggtacagaaagaactaccattataaacagactattataaagacaagcttccttctgtgatggtttcccaatgaatcacacttctctgtctccatatgcttgtgtagtccctgtcacatttactctgggcttgaccattgacttgctccagccaacaagatatcagcagatatacagcaagcaaaggcttgataagcatgtgtgcactggggcttgctctcttggagcacttctgccaccatgtgaagaagccaggat

SEQ ID NO: 15643 - DNA, 462 bp, Homo sapiens
  MAP TO AC011242.1; EXPRESSED IN LUNG, SIGNAL = 1.3
tgcatggatgaatgaatgaacagaagaatgcagagttcagctgtggtttaggactcatgattcacctaatgagtccaagaaatgatttagggtgggaaaagttgggcagagaggaaaagatagagaagcttttctgccctttctctagtgtctcttcattgttttctttacattattggatatttcttcattttttacaaaagccaaggatactaagtctggggtaaatctggtcaactatgtacacaaaggttttcattatgcatctctctcccattctttcttacttttgcaagaaacaacttggcaccaaagaatggccacttcctggctactgtcaaataaatgcgcacacagtcagcagcactgtgtccccggagggccatccatctggttgaaagtcgctggcaaagctgcctaaaaaaaaagaaaagaacaaaaacaaaaacactaaagcaaaaa

SEQ ID NO: 15644 - DNA, 357 bp, Homo sapiens
  MAP TO AC007064.25; EXPRESSED IN LUNG, SIGNAL = 0.96
gtgaccacctgttcatgcagagagatgtgtacatatcccacctgaggaaggagcatgggaagcaaatgaagaaacacccctgccgccagtgtgacaagcctttcagctcatcccacagactgtgctggcacaaccggatcaagcacaaaggcatcaggaaagtgtatgcctgctcacactgcccagactccagaggtacttttaccaaagggttgatgctggagaagcatgtccagctgatgcatggcatcaaagaccttgacctgaaagaaatgacagacaccaccaatgaggaggaaacagaaataaaagtagacgccaaggtccgcagtcccaagtggaagttgaaagaaccgg

SEQ ID NO: 15645 - DNA, 464 bp, Homo sapiens
  MAP TO AL034375.23; EXPRESSED IN HELA, SIGNAL = 3.8; EXPRESSED IN LUNG, SIGNAL = 2.2
aaatgcctttcggtaaaggagaatttgaatagcattttacgcattaactgtctgggaatgctcccaacataatatactgaaacacagaagactggctgtaggtccagatcacctggtagtgaaccatggaaaggtattattcacacaccttggagcctgcggattctctaagccttcttaatcattcttcaggtattactttgtccttcaaaacagcagatttcagacgcatttataaaacaattcagttgtaatctgggtccctaaagcttcagtatagacatttatcttgtaagtaacaaagagatgggaagatttcctaagttctcatgctatcccacctcctgcttgtgttactcactattcaaaatttaagaataagaagtcatctgggagaaaggggatgggaccgagcatccctgaaacacggctcagggcttggttccctcctatgcccatcacct

SEQ ID NO: 15646 - DNA, 476 bp, Homo sapiens
  MAP TO AC008273.1; EXPRESSED IN LUNG, SIGNAL = 0.62
tcccactgtgcctcttgtctatttacttgttagatgtggttacttttttccccaatgttgagattaatttttctaattctgctgaatgtcagctttctgtcaagcttttttttttgcatattccaatttaattatattttacttattgtctttcatagatgggcttcatgtatcttcctttctttgcctttggtttttaaatcctgtttgtgtttgtccagatgtgtttgtgtttctcctgccagcgaatcttactagtttttttctgtgcaataatgtctgccttccgactttaaaataggatgcctctgagactgaacgtcttgatggtgcactatttattcccccggtttacttcttgcctcagagtgctaatattaggcactgcatcttagcagacacggctgaggccctgataccagctgctcagatccccccagggtgagagctgagactggtgggttctcttggtagca

SEQ ID NO: 15647 - DNA, 478 bp, Homo sapiens
  MAP TO AL031053.1; EXPRESSED IN LUNG, SIGNAL = 1.1
tgcaattaacatatagcaactgttcagcttctataatattttattaatgccataaggatgatttatttttttaaaaacctgtatagccaactgctttttaaactttgataaactatttctttggaatgtttaaaacaaaaaagatttttaaaatcccagagcaaactgactttatgcagaaatgttacagtgttgtctatgaaattatccccactaaagagataaaataagaggcattaaatgtatattctcatagggtatttcttatcttacagatgagctctgtgaaaatgttacagcctcgtctcagtagtatcctgttcaagctcacatttgaagaacacataaacaacatcaaaccaagcatcatagcagtaactcttgcctgtgaagaactgaagaaaagtgaaagctttaacagacttttagagttagttcttcttgttggaaactacatgaactcaggctcaagaaatgc

SEQ ID NO: 15648 - DNA, 380 bp, Homo sapiens
  MAP TO AC006369.3; EXPRESSED IN LUNG, SIGNAL = 2.7; EXPRESSED IN HBL100, SIGNAL = 1.4
atgcagaaggttggaagcacacatgggctagtcaggggatctgcagattatgcatcctatgtagtttgtggctggccctcttgatggaatttgggaggtagttaatagaaactgtggctctttgctgaattccatactcaggttgctgtgagtgctgccccttttccctgctcctagctacccccagattattcagccatactgattccctcagggttctcaaatgggtgaggcagaagtgggtctcttctacagcatcctacagctgaggaaattaggcactcactgttctcattttcccctgtggaagaaactgggctgaagcggtctctcttggcactgatctgtgccacactgggggaggggtgacacaggtaaag

SEQ ID NO: 15649 - DNA, 422 bp, Homo sapiens
  MAP TO AC010149.2; EXPRESSED IN LUNG, SIGNAL = 1.1
tgaaaccacccaatgaaatggatgatttataataaatacatatttttcccaaagttaaaaaaaaaaaagaagaagaaacaatgtcatccccagccccagcctcagagagggctcctggagcaatcttgaccaacaggtcagatgatcaaagccaaagggtggcctagtggtgggactatttctccccctcctccacaagcttctcttgttcagttttgcttttaaagaattccctgctgattcctaagactcagactaagactgttaaggaattttatttttttctgcaggtttcagcagtagtgacttttcagacctgagtaatggagaagagcttcaggaaacctgcagctcatccctaagaagagggtcaggtaaagaagattaggatgccaagacttggcctgcagaatgtcaggaat

SEQ ID NO: 15650 - DNA, 472 bp, Homo sapiens
  MAP TO AC007617.10; EXPRESSED IN LUNG, SIGNAL = 0.81
gggtaaaaatatcacaaaaatagcttgttgagatcctgcagaaaaacatgttttatagccacactcatgctttgtgtcagaacttttctccttcagagaaaattgctaacattatctaaaaagagagttttttcagttctgacttcgcttttaagttttaaaaataataaaacattaaaaagatgaacataaaaaacaagctgtatgtttaatgaggaaaaattattactgtatcattatcatagacatttccaggtcagcttctggatttttttctctgatgatgattctcattttaaaagtgatgaaaatgagagatgaaactatagttcacaagcggctttttcagtgtgagaaattgaaggaacgcggggcagagaataaggtctcacaagatgggagtgtggtacccaagggctaggtggcataaaaagagaacaagagattttgtttgcttggtttttgtaattgc

SEQ ID NO: 15651 - DNA, 497 bp, Homo sapiens
  MAP TO AC010102.1; EXPRESSED IN LUNG, SIGNAL = 1.3
aagtggggctctttattcgcctgtaattttgcaaatggcttcatttcttctacaagtacatgcaagacattttggatagtttaagaacaccggttttcttaaaaacgctgtgtgagaaatgtggatgtctggaaatgaaaaaaagccagatggctttatttgtttcatctccttttgcacctacagagcctgaagaagatcatacaatgcgttcttcactttggtgtcttttcaacgaagattgaggagaaaaatagaaccctaaataattaagactgactcatacttgtccgctcacagcaatgttctacccactaacttataacacctttatgaaaagtcagatcctctacatttcaatttcctattacaatacagaagatggacattttagcagcaagacttcaaaggggaaaacttcagacacagactgagtgcactttgcattctgtcatttataaaagagagacactaatggatttaagcaaggaaggtga

SEQ ID NO: 15652 - DNA, 474 bp, Homo sapiens
  MAP TO AL109952.6; EXPRESSED IN HBL100, SIGNAL =   1; EXPRESSED IN HELA, SIGNAL = 1.5; EXPRESSED IN LUNG, SIGNAL =   1
tttaaattttaccatttcaaaggcattatattcaaaggcatgttaaatgtttcattctgtttgttttttctgttagatatcgtaaaaatttgactgccgcaaagaaaaatgagttggtacaaaaggtatgaatgagaaagctctgtgttaaatcactgttgtttaaaaattaagtctagatatatatgacctgatgggagtaagaaggaaagggagaataggtgatagtgacaattttttatttctttcccattagacaaaatcagagttcaatttcagcagcaagacttatcaagaatttaatcactatttgacatcaatggttggttgcctgtggacgtccaaaccctttgggaaaggaatatatattgaccctgaaatcctagaaaaaactggagtggctgaatataaaaacagtttaaatgtagtccatcatccttctttcttgagttacgctgtttcctttttgctaca

SEQ ID NO: 15653 - DNA, 369 bp, Homo sapiens
  MAP TO AC011347.1; EXPRESSED IN LUNG, SIGNAL = 0.99
tttatgaagacagcattaccgtgatattaaaaccagacaatgccactgtaaggaaaatttaaaaatacaggacagtatccctaattaggattaatgcaaacatcttcaacaaaatactagcaaactgaattcaacagcacattaaaagtcattcattgtgatcaattgggatttatatctgggatttaagcatttttcaacatacagaaatcaataaatgtgatacctcacattaacagaatgaaggacaaaatcactatgatcatctcgatagatttgacataattgaacatcattttatgttaaaaactctcagtaaattaggtatagaaggaatgtacctcaacacaatgaaggttgtgcatgaca

SEQ ID NO: 15654 - DNA, 468 bp, Homo sapiens
  MAP TO AC007738.1; EXPRESSED IN LUNG, SIGNAL = 2.2
tttagaaaaacacctaactagaacggaaaaaaaaagttatacagatgggtctgagtaaagggcaagcaaggtataaacacaaccaaaatagttttatatgtgtttagtaagttatgcataatattttactgtgaaaaaagtcaatctttatttactaacttctcaggtctgtagaacatttcatctttggtttgagacacatatgtatcaaagtgcatagaaaatgctttaaaatatttaaaaaggaagttaaaataaaacctacactattcatcagtaatcttagtttttcaatgtctttcatctgctggagttctttcagggttagagttacatcacacctggcttcataaaccaatgtttccagagtaaccaaattgtcacagagaaccagcaaaccaggaatattccgctccatcccaagtcgaataagtgacaatgcacagtccacctaaaattgaaaagcaa

SEQ ID NO: 15655 - DNA, 471 bp, Homo sapiens
  MAP TO AC009474.1; EXPRESSED IN LUNG, SIGNAL = 2.6
acaagtggctttgggacaactggatatccacatgcaaaacaacttgggccccttccttatatcatatgcttcaaaatggagggattaaagacctaagaatagaaggaacttcctcaccttgataaacggcacctacaaaagcataacgctaattttataatttcttctaagaaaaggaacaatacaaggctatctgctgtcactacttctattcattgttgtactggagattcaatccagagcaattaggcaagacaaagaaataaaaggcatccagtttggaaaagaagatataagactatctctatttgcaaatgacatgatcttgcttattgaaaagcctgaagaatctacaaaacagctatcagaactaataaccaagttcagtgaggttgcagagtataagatcaatacacaaaaatcagctgtatatctatacactagtaacaaacaatctgaaaatggaattaa

SEQ ID NO: 15656 - DNA, 480 bp, Homo sapiens
  MAP TO AC006323.3; EXPRESSED IN HBL100, SIGNAL = 0.97; EXPRESSED IN LUNG, SIGNAL = 4.1; EXPRESSED IN HELA, SIGNAL = 0.91
gagcatctttttctttcttagaggtatgtacaataatggtggtaagttttaatgattgatgacagactaagtgcattattttttctagaattaaattttttttctgtcaacagttttctcagatatgcttattggtgagaggggtcttttattttttgataaattttagagtttgctctctgactagtattttaaatctggagaactgggtaaagacatgtacacatgaaaaaaaggttgtattttagttatttcacatttgatacttagagtaaacctgctttttaaatatatttttttcttttaggtggaagatgaaactgttttacataacattccttatatgggagatgaagttttagatcaggatggtactttcattgaagaactaataaaaaattatgatgggaaagtacacggggatagaggtgagccatatgcttcttctcttggaaaaaggggctaaagaattgagagaca

SEQ ID NO: 15657 - DNA, 446 bp, Homo sapiens
  MAP TO AC009558.2; EXPRESSED IN LUNG, SIGNAL = 1.7
ggctcttcctatgtgctttccaacctgattcagcagtgattcccttgagtactcagaggtaccagaactttctcagagtgagggaaaataataaaaatgcagtatgccagccactcttggactttagcattaattccttacacatccttctttttttcccacttcacatcattcccccaaaaatctcctccttagtagggaaaaccattttccctgctgtagagaaaaaaagagaattcctttttgttagcataggaatctaccacaaaggaggagggaaacactcctgtttttccttggggaccatttttatttgcatggttgctgcaaactctgtccctttcttgatgtgggtttgccttttgtctgtgatcatccagggagtttttttttccttctttggcatcttatcagactgggggcaggtctgggaaaaataattgtgc

SEQ ID NO: 15658 - DNA, 360 bp, Homo sapiens
  MAP TO AC009612.2; EXPRESSED IN LUNG, SIGNAL = 1.9
  unsure 277
gaggcaactaccctggaaaagttgagcattatgtcatacacatagtctgtgatccagcctttttactcctagaaatataatttggagagattggtgtatattttcaccaaggtacatattcaaatatgtttataatagcattgtttataacaactaaataatgaccaatcttctcaggggtttactctggcagatgggccattggaatacacaattttccaccggacccctcatccctgtgtggaccggctcaagcctactcacatggtggccacgnggattcttagggtcaagagaaatcaggcaaatcctcgccaggcacatgtgcagaacgataacactatcgcctctgccactttc

SEQ ID NO: 15659 - DNA, 481 bp, Homo sapiens
  MAP TO AC007320.2; EXPRESSED IN LUNG, SIGNAL = 1.5; EXPRESSED IN PLACENTA, SIGNAL = 0.79
caattccttttcctttgaatacctcaaaaaattcatggaggaagttagtatctacctctctccacaaaaccaacatgtttctttcagtaatatgcaggtaacaatgcagaaataacatttcaatttttgatttgcaaacaaggattggtatgcaataactattattttcaatgcttgctttaatatctgctcgagtctcctttttcagatcgactctccccaccatctactatagatgccacataacttgagctaccatatgcttcacgaggatcagggagcaccctacccagagaaggcggattcctttggtcttttctgcaaacatgctcacgatcacaataatgaaaatcaccacagctcgagtaactctcccaacttctgccatatctatctcgtgtattactatatgcgtggcaggtgcttccaccataagacatccgaggccctcttgcaggtggtgcaccatgagaggtccctg

SEQ ID NO: 15660 - DNA, 469 bp, Homo sapiens
  MAP TO AC010850.2; EXPRESSED IN HBL100, SIGNAL = 1.2; EXPRESSED IN LUNG, SIGNAL = 0.89
ttttctctttttcaatgaacaccaattagtcacatgattttaaaaagcaataaaaataaaccaatcccagacggattgtacttcttcctgtcctcatttctaccccgagtctccaaaaaaaaaaaaaaaaaaaaagaagaaagaaaaaaaaatcacagtgccacatgcccagaccttcccttctccctcctatcatttcaataactcagctgggtagggagcgtctctacctaccccaggaagccttctgaacttgactgacaggagaagcccatgccccaggggcattttctcactgaccatgccagggccctggaggacaagccagagctgtccatggcattgctcctgcaggtgatgctgccttctgagggcaaagcgctctgggacgggtcggccccgctcacgtgggtgtgcagccccagggcagtggaacagtgcagaatcctcgctccactgctgaggttac

SEQ ID NO: 15661 - DNA, 448 bp, Homo sapiens
  MAP TO AC010130.2; EXPRESSED IN LUNG, SIGNAL =   3
ggtcacttgttccttcttatccagtattttctctgtctcctggcagtctttgagcagctcactcacatatttcagtaacatctatttctaaatcacttttctgctctctctttccaagtcgtctccctctttgagaaaaactttctaggactattgtactcttgaatagccctcctacttctcacctctgtccaactgtcttatttgtttgcctatgatctgtttgcctttttacttttctgtattttcaaacaattagaaaagtatttttcactctaacattttgagttcatgatttcattcatttttacctgtcctgtcttcattaccacatcccacaccaaggtgccacagtactcacatttaagctctgccatgacactatcaccttggctgtgctttacttcactccccctgggggacaaatagcaaagccaaatatcccaca

SEQ ID NO: 15662 - DNA, 485 bp, Homo sapiens
  MAP TO AC010905.1; EXPRESSED IN BONE MARROW, SIGNAL = 2.6; EXPRESSED IN LUNG, SIGNAL = 5.2
tttaaactcacttatactaggaggaccatatattagatatacaataaaacagtaaatctttcctcaccctttttctatataacgcactattttttttcctcaaagttttatctttcaagtataaccccacaaggagttctctttgtcaaaaataattttttgtagtgtttagcattcctttcagaatttgtctaataattttctgacggttcaaatacctttcaaactacaagaacagaggtttttttttgtttttgtttttgcttttgttgttgtcgttgttactgtttttcctctcctgaaagctgactatctttattttaaagtctggctttcagtacaggagatgcaaggagacagagtaaatgaacgagaaacacattatgtgaagtcactggcagcaatcaaggacaagccacacaaaaagcctgcaggaaccagatgaaaagtccttaccgttttttcatcctccatttcctcctttt

SEQ ID NO: 15663 - DNA, 473 bp, Homo sapiens; identical to SEQ ID NO: 4729
  MAP TO AC007366.2; EXPRESSED IN PLACENTA, SIGNAL = 0.65; EXPRESSED IN LUNG, SIGNAL = 0.6

SEQ ID NO: 15664 - DNA, 472 bp, Homo sapiens
  MAP TO AC010874.1; EXPRESSED IN LUNG, SIGNAL = 2.2
tgacaccaacaggctcaaagaaaagaaatgaagaaagatcttctatgcaaattaaaaacaaagaagagcaggagtcactattgctatgtcagataaagcagactttaaatcaacaacaattaagaacaacaaagacattacttaattacaaaggttttaattcaacaagaatacttaactatcttaaatatatctgtactcagccttggagcacccagactcataaaagaattttttttttatttacaaaaagcctaaacacacacacacagtaatagtgggagacttcaacacccccctgacagcattagacagatcatcaaggtggaaattctgaaattaaactttacacttgaccaactggacctaataaacatctacagaactccagccaataactacagaatatgcattattttcatctgcatacagaacatattctaagattaaccacctgtttggttataaagca

SEQ ID NO: 15665 - DNA, 412 bp, Homo sapiens
  MAP TO AC010087.2; EXPRESSED IN LUNG, SIGNAL = 0.89
ggcaataagaaacagaaatgatccagtggatcctagcctcaacttggaattctgaaggccttttatcaaaccctggttgtgtaaattagctaaatctgtctaggcctcaaatttctcctctttcatatatggaaacacagtgcctacaataatgaattactataaggaatgaattcaacaagaaaaggttacataaaaatgtgattattatgcaagggctatatgctcaacatacctggatctgtgaaggttttaatgagctcttccattgccaacatccaagaaacagcaagatggcaattttgcaaaaatacccagtttcctgatttcattgcatccttgaccattttttcagcaataggtccttgtccttgccccagtgaaattgactgcaccctgaattgaacagcaa

SEQ ID NO: 15666 - DNA, 489 bp, Homo sapiens
  MAP TO AL031283.15; EXPRESSED IN LUNG, SIGNAL = 2.2
tgaaaaactgggtggttagaatgaagtgtttatatctgttgtcatttttcacccccggttctcaaaaaaggcatagcgtaaatggatgtgggagaaaggaaagtcatgctgaaagccccagttgcacatcctttcaaagcatgtgcgtgttctctgcaattgcagaaagtgaatgaaacagaattagacattggcctccttaaagcggccaccagcggccgcgggtaatgcctcttatgcgcgaacgttttccttgtagtacctggatatgagcaaaaccctcggaagtctcatgaacatcaagaatatgtcaggccacgtgtccatgaaatacctctcccgccaggagagggagaaggtcaaccagcttcgacaaagggacctcgacctggtgtttgataagatcacccaactcaagaaccagctggggaggaaagaggagctgttgagaggatatgaaaaggacgttgaacagctcaggtacctcgg

SEQ ID NO: 15667 - DNA, 480 bp, Homo sapiens
  MAP TO AC011296.1; EXPRESSED IN HBL100, SIGNAL = 1.4; EXPRESSED IN LUNG, SIGNAL = 1.8
tctacctaaaaatcacaaataaaacctaatagagtaaatataagtctctataaataataaaagagttaatattacttataaagagactaaaatgtgttttaaaaaaagacaaaattcaagcacaagcattctagcagcaaacctaatttgtttaaatgccacaattaagaaaacaaattgtgtaacctgcacaggtctccaaatcagaatcagcgtcctgataagaaatgagtgggacctggagacccaggatggaatgacttgagtggatgagcctgagaatcttgaatctcaaacttccccttgggcccctctggctggcagatgtaacctccctccccttgctggaagggagcacgtttatcctgcagacctcaactgaggccaaggttccacaaaaggatgtcctgttcctcgaggagaccagctagactcttagtggcaggttgattctattaaatccctctatctgggatgcag

SEQ ID NO: 15668 - DNA, 491 bp, Homo sapiens
  MAP TO AL034344.19; EXPRESSED IN LUNG, SIGNAL = 2.3
tggcccactttagagtctttgaagaaacacaaagttaccttgcagtgtctttggaaataagtaggcatagaactcaccctttgccagtgaagtggactggcaaacactgctgtcacattttgtacccacgcagagcaccgcttcaggcacacttggtccaggcacacttggtccacgtgatctttgtaggtgaaccctgcacgctgagtcctgtggtggcccctggcccctgccaccctcccgggattgcacgctttcacagccacagcaagctcagccagcgttcactcttcttctagcccatcctacttaccacagtcacttaactccgaaaaatcctggcaccttctcactgcctgccaagttgtactccactggcacgtggatggtgtgactgcctttacacgtgactgggaatctaaaccccaccctgctcagcgccatggcggggtgtctgatgcagcagccgcagcaacagcttcccaagttgt

SEQ ID NO: 15669 - DNA, 477 bp, Homo sapiens
  MAP TO AL049796.17; EXPRESSED IN LUNG, SIGNAL = 3.5
gcacatttttattttcatttgtcccacccaccacatggtttcccaagacaagggtaccatccacccttaaggacttaagaagactcatttcttgctagaaaaatctactcacaacgttgaaatgaaggcctttttcatcctaaaatctactcacaacattgaaatgaagggctttttcatcctaaaatatctcagtgctgagtgtgattactgagccaggccaatagccaaaccacattaggtggccaggcaggaacaggggaaggaaaagaaaattttccaggatgaagaaaaacataacgtcaagacaaaaatgagggttggatgggtccttatggaagtacagtttggggtgatggaagatgtgtcaacagacgaggttgggaaggtaggatccaggccagatacggcaaaaggggtaggggcagacttgattcaagataaggaatgtggcaatgggaaagcatttggcatgag

SEQ ID NO: 15670 - DNA, 456 bp, Homo sapiens
  MAP TO AF179633.1; EXPRESSED IN HBL100, SIGNAL = 1.3; EXPRESSED IN LUNG, SIGNAL = 1.3
cccatctgtcaattggaaactataatagctctagattatgaagagtcaccagttgaggtaagatgtgtaaaagattgtgcctaagttcccatttatttctggaacaaaaagtatattgataaatatgtacataaaatagaaagggatatgaaaatagacggcgttggtattcttttcttctgttaaccaagccaagatgttcactccattttcctttgcacctaaacttcttgcactcccccactcaccagtgtgccatgaagatgagttgcagttttgtctgtctcatcttctccacttttcttgtcattgacccaccccttctcatcattaaccacttttagtgagctaagaacataacagaaggcgcccttctccaattgtgaatacttcctcaagccttctccttccacaaagtcaagaaggactagacccagcctgcaataggagcgttta

SEQ ID NO: 15671 - DNA, 459 bp, Homo sapiens
  MAP TO AF186996.1; EXPRESSED IN HBL100, SIGNAL = 0.97; EXPRESSED IN LUNG, SIGNAL = 1.4
cctaggccccaggtcaatacccaggtcccaagtggacaccaggcactagatggacatcgtgcccaaggtaggcatcaggccccaagtggatatcaaacctagcccagctggagatgtgcatgacacattgttagccctcaatggatctgagcaagcatgacaagtctcagcgtcatgacagcagcagccctgctgaggacagggctcccatccctactgccagtgctgcctggcctgagcctccctgtgcttcctccacagggcagcccatccagtatgctcgctccacctgcgaggccggcgtgggtgagctccacatccaggatgccctgccggaggaccatggcacctacacctgcctggctgagaatgccttggggcaggtgtcctgtagcgcccgggtcaccgtccgtggtaggagcctctggtcacccgagtagaagcacctttcctgcagac

SEQ ID NO: 15672 - DNA, 456 bp, Homo sapiens
  MAP TO AL049564.10; EXPRESSED IN LUNG, SIGNAL = 1.5
tgtctggtgctaggcagttctggttcaagttatcctgcgatagggccttggctgtgtgttgaaaccatcaatggaggctcaccattcccagggaaatcctgccacggggcacttgcagtccccctagcggccaaatagcgggactacagttccacaagcaaggaacctactcaacctgcagagaacagagcccatgttaggtggtaggccatttcagaatgttacgttgtctaatacagcaaagctcttataagatcatcatgtgcccccttactccccgaattgtttggtttgtgcaattcatcaggatcaatggaaacttagaaggcaggaaaacaactcttatgtcaaattcagagccattaatcaccttcaattttaatttattactcatattattgctgacttgttcagataaagacatcataaacatgtacccaccaagtgcaatgatat

SEQ ID NO: 15673 - DNA, 429 bp, Homo sapiens
  MAP TO AL109935.20; EXPRESSED IN LUNG, SIGNAL = 0.96
tcccattttacagatgaacgtgaacttgttttggtagagcattccattagtacattttttgactgcacattcaatatgtatgcttatacattatgtatatattaatatattgtgaatatatttatgtatgaagtgtccattaaaaagaataagttaaagtaattggaagaaaaaaatctaccattttcttttcccgcctgctgtactttggagagcactgatttagagtgtgagcatttagctttgcagttaatgtttctttttcatgcacaactaatttttcttcttctaggggataaatgtacatactgaagacttgctcagaaacccatcctatattcaagaggcaaaagctaagggactagtcatattctgctggggtgatgataccaatgatcctgaaaacagaaggaaattgaaggaacttgg

SEQ ID NO: 15674 - DNA, 411 bp, Homo sapiens
  MAP TO AC005375.4; EXPRESSED IN LUNG, SIGNAL = 1.7
tggaccaatatcccataatgctccaagaaaagcatgatttttttaaagggtatttgcgaagcccactatgtttccaatttctgtaaattcagatcacaaaggtaaaggagtggagctcatatacctaggagtcaggcgtcctctccaagaccacttctccctcacctcaggcaaatcataaggacagcagctgcccctcacatgggccactatgagcacagtggtgtgcagtgtaacctggaggatgtgtttcaagagtgtgaactcagaagagagagaactgaagaataagttatacttgcaaaacatttgggtgacgactttctcagctaatctttactcagccaaaaaagagataaggtaggtaattacattccctaatttttctgacaaggaagctgaggttcagag

SEQ ID NO: 15675 - DNA, 1862 bp, Homo sapiens
  MAP TO AC005083.1; EXPRESSED IN BT474, SIGNAL = 1.3; EXPRESSED IN LUNG, SIGNAL =   1
gcttccaaagttgcaaatccattctggaatcaactgtctgcttctaacccatttttggatgacataactcaactaagaaataacaggaagagaaataatatttccatcttaaaggaagatccttttcttttctgtagagaaatagaaaatggaaattcttttgattcctccggtgatgaacttgatgtgcatcagttacttaggcagacttcctcaagaaattctggaagatctaaaagtgtttcagaacttctggacattttagacgacacagcacatgcccatcagagtatacataactctgaccagatcctactacacgacttagagtggcttaaaaatgatcgggaggcttataaaatggcttggttaagtcaacgccagctggcccgctcctgccttgatttgaatacaattagtcagagccctggatgggcccagacacaacttgcggaggtcaccatagcttgcaaagtaaaccatcaaggagggtcagtacaattacctgaatcagacatcactgttcatgtgccccaaggtcatgtggctgtgggagaattccaagaggtgtctctaagggctttccttgatccgccacacatgcttaaccatgatctttcgtgcactgtgagcccgttgttggaaatcatgttaggcaacctcaatacaatggaagcccttttgctggagatgaaaattggggctgaagtaagaaaggatcctttcagccaagtcatgacagaaatggtgtgtttacacagcttgggtaaagaaggcccttttaaagttttaagcaactgctacatttataaagacaccatccaagtcaagctaatcgacttgagtcaggtaatgtatctagtggttgctgcacaagctaaagctcttccgtcaccagctgccaccatttgggattatatccacaaaaccacctcaattggaatttatggacccaaatatatccatcccagttttactgttgttttaacagtttgtggacacaattatatgccaggacagcttacaatttctgatattaagaagggtggaaaaaacatatctccagttgtgtttcagctctgggggaagcagtcatttttacttgacaagccacaagatttaagtatttctattttttcctgtgatcctgattttgaagtaaagacagaaggagaaaggaaagaaattaaacaaaagcagttggaagcaggtgaagtagttcatcaacaatttttattttctttagttgagcacagagagatgcacttgtttgatttttgtgttcaagtggagcctcccaatggtgaaccagttgcacagttctctatcactactcctgatccaaccccaaacctaaaaagactctcgaatctgccaggctatttgcagaagaaggaggaaatcaagtctgctcctttatcaccaaaaattcttgttaaatatcctacatttcaagataaaacattgaactttagcaactatggggtaaccctgaaggcagtgctaagacaaagcaagattgattacttccttgaatatttcaaaggggacacaatagctctcctcggggaaggtaaggtaaaagctattggtcagtccaaagtgaaagaatggtatgtaggagtcctcagaggtaagattggacttgtacactgcaaaaatgtcaaggtgatttcaaaggagcaagtaatgtttatgtcagatagtgtctttacaaccagaaatcttcttgaacagattgtcctgcctttaaaaaaattgacttatatctactcagttgtattaaccttggtgtcagaaaaagtttatgattggaaagttttagctgatgtcctgggttactcacatctgtccctggaaga

SEQ ID NO: 15676 - DNA, 414 bp, Homo sapiens
  MAP TO AL035705.14; EXPRESSED IN LUNG, SIGNAL = 3.2
aatcaacttcattcatcacttgagaattgatgtactaatttagaaacataaattgagtactaatttagaaacataaattgagtactaatttagaaacaatgtctgttcagtctaaccaagagtatgcaaaaaaaggactgataaaggttaaatgaattaacacttgctgaatatgaacatgaaaaaaaatctttgtaaaaggttaacaattaacaattattataaaattcctaaaaaacattttaagataggtgtctctttggtattattagatacaaaaatacttacagtttgataatatgaggatgacgaaagagttttagattttgaatttctcgttttatttttccaacaacatctaaactgcgaatcttctgtctatttaagattttaactgccactttatggcctgtt

SEQ ID NO: 15677 - DNA, 495 bp, Homo sapiens
  MAP TO AC007392.3; EXPRESSED IN LUNG, SIGNAL = 0.71
tggcttgtccttattttaatcctataaaatacagtgaagatcatactaaactttctgtgtttgcaacaaataaagctgttaaaggataaactcagtgtcaaggttctgcaagtatcctaagtagctatttatacacttcattaatctttgtaattggcttgtcttttactgccattaattagatgatgtagtattccattaataagagtgacacacctcagcatttttacctttaattatagacttcatgagacacttaggctattgacaaaatggctaaatattgcctgatgcacacgtatcttttttattctctttcagcacccttacccttctgaagaacagaaaaagcagttggcacaagacacgggactcaccatccttcaagtgaacaattggtaagtaatttggctttgtgtttacacacaatctgtttccccctctggcaacctgcagctcatgttttgcattaagaagacacacccagttgccact

SEQ ID NO: 15678 - DNA, 1960 bp, Homo sapiens
  MAP TO AL021068.1; EXPRESSED IN LUNG, SIGNAL = 1.7
gaggtaaaaattgacctggaatttagataggtcctgcagattatagtgataataatagtctgaaaagattaaaagaacctcaagtgattaggacctgaccaaataattcatccttgaaatggtctggggagaaagctgtttgattgaagaatgcaaatattacaaggaggaaagatttttgaaaattgtttttctgaaaatgtaaagagaggaaaattttataggggaaggaatattaatattgttatttgtagttaccttttgatacattagcataaaaatgtttaaaaatcaatgtagcacttagctacatcaaattcaaatttaaagttgaatttttcctgcattgctgtcacattatttcccttggatactcataagtatgaattagaatgttatgagcaaattatgagcaataaacacttaaattttcccattcataaaataaattacatgaacaggaaaaatcccattttgtatgtctacttataaatgaagaatctcaattttgactgaaaaatatcttgtttttagatggcttgtgagaaggaagagaatattaaccaagacttaaaagagaatgagacagtaatggagcacaccaaacggcattctgatcctgacaaatctttgcaggatgaggtctcaccaagaagaaatgacatcatttctgtaccaggtattcaacctttggatcccatatcagattcagatagtgaaaactctttccaggaatccaaactagaaagccagaaagacttggaggaggaagaggatgaggaagtaaggagatatattatggagaaaattgtacaagctaacaagcttctacagaatcaagaaccggtgaatgataaaagggagcgaaaacttaagttcaaggaccagttagttgatttggaagttcctccactagaagacactactacttttaaaaattattttgaaaacgaaaggaatatgtttgggaaactgtcacaattatgtatttccaatgattttggacaagaagatgtgctcctgtcacttactaatggaagctgtgaagaaaacaaggataggacaatactggtagagagagatggaaaatttgaacttctgaatttacaagacattgccagtcaggggtttttgcctcccattaataatgcaaatagtacagaaaatgaccctcagcagttgttacccagatcttccaactcctctgtcagtggcaccaagaaagaagattctacagcaaagattcatgctgtcactcactcatcaacaggagagccgctggcttatatcgctcagccaccactcaaccgcaagacttgtccaagctctgctgtcaactcagatcgaagtaaagggaatgggaaatctaatcacaggacacagtctgcacatatctcaccagtgacttcaacatactgtctttcccctcgacagaaagaactacaaaaacaactagaagaaaagagagaaaaactgaaaagagaggtgagaacctaagtgggcattatattaaaagtagagtatgttttactgttttataaatgcaatgggaattaaaacagttgttcaaaccattggagactttttttgattgctttatttatctattgttagattgattaagtgttaagaatgtgcatttatggaatgaacacagtgattactttggtccttgtaaggatcacaaagaatagtagactgatctgtgttagcggagatctcagtgatgacttcatctgatcctttcattttaaaggtgagactcatgagacgttaagtgactgctgaaagtaatcttgatatgataggtaaaaataaaatgtcagatggaaaaatgaaggcataaagtgtagaggtttaggaggcaacaggaagacttggactataattcttttatttgcatgtgtttcatgttatgttctatgcttacaattcttttatttccaggagtttagtttca

SEQ ID NO: 15679 - DNA, 435 bp, Homo sapiens
  MAP TO AL080313.13; EXPRESSED IN LUNG, SIGNAL = 2.7; EXPRESSED IN BT474, SIGNAL =   1; EXPRESSED IN HBL100, SIGNAL = 0.95
gctgctcatggggaatagacacaatgagtcccggacttgcccaggtgctgaggacacaaagacaaagcccaagagtcagggccccaggtgctcaccacccaggagttggtatacatagagttagtttccttcctacctgggagttatgtgattcagtggaaagaaggagtttataacaggaaagcctaagtctgaattccgtttactgattgcagaaaacgttgggttaaaaagctaggaaaggtgaatggaggccctgcccactgtggcttttctagaactggcctttccaagttgcagataattcctcttaaatttgcaggttgaagatggagatgagcaagctgcgagtctgggtgatctgcatcttgtggatcaaagctacagcttttgcttatttaaaaggtagaattttccaagtgaccaggctgactt

SEQ ID NO: 15680 - DNA, 455 bp, Homo sapiens
  MAP TO AL080274.10; EXPRESSED IN LUNG, SIGNAL = 3.2
tgtctctgaagctgctcttttgtaagaactgcaaggaagggggctattgcagcacagtaagagacaaattacatttcccattgtaagtttgcagcgaaacattgtaagtatcttgaacaatagggtacacacattaaaatcttcttatgccagaggaagtctatattttataaaaccatacacctgctacttatgctgaaaagttgaagaaaactgggtctgaatcagtgacttatagtggtgcttctcaaactttggggtgcatcaggatcacctgggggctcattcaaacacagatttctggaccccagctgcccccagagattctgattctgcaaatcttgagcagcctgagattctgcagttctatgaagcttccaggtagtgtcaatgctggtgctaggctgaccatagtataggactgctggcttggaggatatgcagctgtccagcct

SEQ ID NO: 15681 - DNA, 453 bp, Homo sapiens
  MAP TO AP000428.1; EXPRESSED IN LUNG, SIGNAL = 2.8
ccaaatgaactaaagcctcaatcttagaacaactttcagtctgggatgaaataagaaagcttagcctcattagaatggtagatcaaagcagtggatctcagtcccatgtccctacaatatgattgtcatgtcttgccaattattacatgccatattatcatgtggcaacggacaatatattctgggaactctgaatgtagaataagaggatgtgtgttaaaaatctgagcttggtatacagggggaaaaggaaggagcgtaaagaagatgctacttgtctcactcacctgacatgccatcagcagtcttatcagtccttgcattcttacctttggccttgattctgctcctattgccattacattgattcaaaccttccttaatttccacctagatgattggaaaagacactctttcatcctgcctctctatgctgttgttcacctcgtaacc

SEQ ID NO: 15682 - DNA, 489 bp, Homo sapiens
  MAP TO X97051.1; EXPRESSED IN HBL100, SIGNAL = 0.98; EXPRESSED IN LUNG, SIGNAL = 4.3
ggatcgctggatcacaatgtacagttttttttttaatggaaactttcattttttggtgaaattaggaaaacagataaaacccacagaatccaaaatatatgtgaagatgccaaaaacagttgacattgggcagaggtcacatggaaggaagtgaatacatgacggggtgtgagggcccagaggcagctgaaatacgctttctaaacacaaggacctcttctgagagggcagaagttttatcctgcacatgcaatgaccagcacagctaaaatacactttctaaacatgaggacctcttctgagagggcagctttatcctgcaaatgcaatgaccagcacaggacccagaataaagagagttgccagcggacgcctggtgtccatgtgtccaggtgagttcgagatgcggacggcgctggccagccagtcacaccctaagtcaatctgctgcatgcatttgtccttgccacagcagaaaacgagaaagcc

SEQ ID NO: 15683 - DNA, 455 bp, Homo sapiens
  MAP TO AC004998.2; EXPRESSED IN LUNG, SIGNAL = 2.6
tgactctgaattagccaagaaatgtaagtttcaggcagtagttaaaagtgaatgctgtagggaaaggcagagaagaccttaatacatatattcctttataaaagcaacaaaaatactagaaattggtcaaaatcaaccttttcaaacctgaggaagttaacgaaatgcttgcaacaattcaaggagcatttatttaagaaaaactgctgaatcttggtaagaacagtagggtttgcgatattgtaatttaatctacccccatctccctttttcagttctatgatagccttcaaaactagtagcctcgcaaacatgagagctgtgagaaccagcaggcttgccttcaccagaggagccagactggatttggagctcctcaaaacgtctcatctcgaggccattttcactatttgacctgaaaggcagctctctggagaaagcccagtcacagggta

SEQ ID NO: 15684 - DNA, 493 bp, Homo sapiens
  MAP TO AL078615.2; EXPRESSED IN LUNG, SIGNAL = 9.8
cctttaatgaaacacctacctttctactatgagaggtcactgtctttcttataccaaaacacagtttagtttactcatggctattgtataatacatgtaaactgttaattttttttccttaaccttttggatttgttttggtagatgaatgtcttgttttcacagcagtggcatgtgtataatccagtgctgcagcttccttactatgaaatgacagctccacttcctaatagtgcatccgtgtcttcctcactgaatcatgttccagatcttgaggctggacccagctcatataaatggactcaccaacaaccaagtgactctgacctttatcagatgacagctccacttcctaatagtgcatccgtgtcttcctcactgaatcatgttccagatcttgaggctggacccagctcatataaatggactcaccaacaaccaagtgactctgacctttatcagatgaataaacgaaagagacaaaagcaaacaa

SEQ ID NO: 15685 - DNA, 471 bp, Homo sapiens
  MAP TO AC010727.1; EXPRESSED IN LUNG, SIGNAL = 1.2
acaggcatttcattaagtttattatgtaacttgtagaaaataaatccatcagttatagatacaacctcccttacctggtgtgtagcagctctcctcaaagcacaatgggggaaatttcctttacctgggcaacagtgatggctgaaagcctccctgccacacttcagcctctcacgtaggacctggaatcgataccagatgaagtcctagttgtcttgtttctgtttggggctcactgtcatttgggagcctgtaccgaacttttatttcatgcctagtcaggtttagatttagagacctccatcaacttgccctgtgctatcttattttcccctacctcctggtgggaagagagaaaattgattattttaaggaactggctcatgtgatagtgggggccaacaagtctgacatctgcagggcagtccagcagactggacattcaggtaaggactggtgttgcagtctttg

SEQ ID NO: 15686 - DNA, 468 bp, Homo sapiens
  MAP TO AC009396.3; EXPRESSED IN LUNG, SIGNAL = 3.3
cctttttggttcctgtgtctcattgtttctcatgttgttttgggctatgtcctgaagcctctttttgggtcatttttccaggtgcccagtgagtgatggatggatactgtttgcaagattgattcacatggcacttttgtttggcttttgacaggttgtttataagaataatgacatccgtctggagctgtctcgcctggcccggattgcggacaccaagatgaaaatctatggcgaagttgtgtttaagtgtgagaatgtggccacactggaccccatcaactttgagaccccagaggcttacatcagcttgcccaagtggaacactaaacgtatgggctccatctcctttgacttccgcaccacagagcccaatggcctgatcctcttcactcatggaaagccccaagagaggaaggatgctcggagccagaagaatacaaaagtagacttctttgccgtggaact

SEQ ID NO: 15687 - DNA, 466 bp, Homo sapiens
  MAP TO AP000172.1; EXPRESSED IN LUNG, SIGNAL = 3.4
ccctcccatcaatctagttaccatgtactgacagaacaaaaagacctagctaaacctcaaaaaaaaagaagtcactggaaagcacattgtccagatggttctggtggggaacacctttgcctgcttatagctctgtgagatcctgagcttggtgagatggactgggaagtcctaacttcatttatgtcttctctccaccctgaaacgatgccaaaatgaccccaaatctcaaataaaagttggtgtctgttgctgtaaatgtacaaataacccaaagtcaaaattagggatggaagttaccattccttttgccttctgtgttttgaggtggtcgtggggaggaggaaggctttcagggacaagcagacggcgacagggatcacactgtcacctgtgtgcgccttttcttctaatggccttaaactgccaagtggctgcaactgcagcgtgctgattttaaatgctt

SEQ ID NO: 15688 - DNA, 460 bp, Homo sapiens
  MAP TO AL109798.8; EXPRESSED IN LUNG, SIGNAL = 0.91
tcaagtttgaagacctagcatgagtcttgccctggagtggagaaaacttctacacacatatgccaaatatgtacttaagcaaaactccacaacagatggtgctgatttcctctctcatcatacattctccacagcaaccacctgaccatctatttgcaagaatgcccaagaaaataaattttaaaaggccacttaaagccatttctattgaatatcacattagaaagaatacgctatttttaaaactttcttcttacctagtggaggttgaagtaagtctccttccttttcacatgtcccaacaggttgtatgtctggggaatcgacaagcctccaaaaatcatttctgttgtcactaccatccagtcgtaaccgtaacctggccccagtaattccaataaccgtagcaatacatactgaagtggcattgcgagggtcacgggcttccaatttcatacca

SEQ ID NO: 15689 - DNA, 458 bp, Homo sapiens
  MAP TO AC010134.1; EXPRESSED IN LUNG, SIGNAL = 5.5
gaattccaggccagctaaacgatgcagtgacagggcaccgtaagaacatgttacaagcactgaagatgctacaggagctaaacaaacaagtcttcttggtgaaataatttggcagatatttacagttcagaagaacaaaacgtcaaaatgtaaggcatgaaatatttcttggcagaccacggtttgacacattccttctgtccagttaggtacacggtggctggacatgttctggcacttttgtttttcttgtgacttattaatttttcataatgatattcatttgcaacgcaatttggtcaccaggtatgctatgctcagaaagagccacacaatcagtaaattggggctcagagctaataaagggatggaacagaggaggctggggtctagccttaagtctcggatgggcaccaggccgctcaagttcttctgggtgactacctcccgtgttccaa

SEQ ID NO: 15690 - DNA, 495 bp, Homo sapiens
  MAP TO AC004838.2; EXPRESSED IN LUNG, SIGNAL = 7.7
tttgaggagagattgcctagcaatgcttgtaattcatgatcttagaggagaggtctcgggtagccaggattctgaagacaggatgtcagccaactggtgctagtctctctaagaaggcaaaatgaggctggttgtaggaatttgggggaaataactgaaggcaattgctattgttactgccatttccagggtgaaaaaccattcctaaggtgatactgacagtcaaaggaagaaaaacaggagaatatgtcatttttttcttcctccaggactccagtcttccttcagaattcactatgtggaagcctaacaggaaggcagctgaaaaagtggaaatgtagtttgcggagccccagacctactaagacaaggaaaaatacaagagtgtgtttgaaactaagtgataatggcttaaaaacaagcacgtatgataaaagtaagttttgttttacttcctaatttcatgttttacacagtgcaaaaataattgcaaaa

SEQ ID NO: 15691 - DNA, 361 bp, Homo sapiens
  MAP TO AC007882.2; EXPRESSED IN LUNG, SIGNAL = 5.6
acccagagccaacatcaaagtccccacaggccaatcctggcctcctcactgctcctggaaccccaggaccctgtgccccagtctccccatctgcagcatgtgtgtctcctctgacccccagcctgccccacagagcccaagacatccagagccatctaatagatatgtaatacatatcaattacataataattcatgatacatcatattatatacaaagtacgatgtcataatgtactgtgatgccataatacatatgaagtataatgtcataatatattgtgatgtcataacacatactgatgatgatgtcacaatatactgtgacgtgataatgcctatgaattttgatgtcataatac

SEQ ID NO: 15692 - DNA, 450 bp, Homo sapiens
  MAP TO AC007748.2; EXPRESSED IN LUNG, SIGNAL = 1.3
aaccacattttatgccctccgcttcttaaggtgttcttgtctgtctacagataaagcgtcagtgagtgatcataggggatcatgtacagcagagctctcacagaacataaagtttgttgcacaatttggctattggtatcatcagatttatcttttaacctctgctcgttgtggaattttctgtcggacaaaaaatattttatttgaagcatcttcagttctttagctttctttttttcctcaggcatcctacctggtttccactcctgattgtctttctcatcattacagtgttcaggtttctatggctgcgttcacgggtttcaatccagctctgactcttaccagcctgcagacctgggtcacccctgcactgcggctttctcatccacacagtggggatcatggtggtacctaccttaggtagagcttttgggaagagtaagtgaa

SEQ ID NO: 15693 - DNA, 436 bp, Homo sapiens
  MAP TO AF057177.1; EXPRESSED IN LUNG, SIGNAL = 6.6
agccctgcttctagctttcctgtctcttggtaagtgtgctgcctacagagaggctcacaggttgggttttgttttggatttttcttctttagcaagggacgccatactaaggaatacctcattatattttatgttgttcccattgcagccagtcagatatctactaacttggaagcgaaaataaagtcaggcaccaggcagatggggtcatctgctgtaatcacctgtgatcttcctgtagaaaatgccttctacatccactggtacctacgccaggaggggaaggccccacagcatcttctgtactatgatgtctgcaactccagggatatgttggaatcaggagtcagtcaggaaagcatgatacttatggaagtagaaggataagctggaaatttatacctccaaaactaaatgaaaatgcctctggggtcta

SEQ ID NO: 15694 - DNA, 487 bp, Homo sapiens
  MAP TO AC006042.2; EXPRESSED IN LUNG, SIGNAL =  11
ggctagcattaccacccttactgtactttagagtttgaagaaggtagtccactagctgatgctattggagccaccttgaaaattaaccttgggagttcctctctttccttatctaatctgtcacattggcaagtatggttaatttgtgttggcagtgcatctgtcaatgcaagagacactccatcaacctgttctatttttgtgtttgtaaaatgtcagagcatagaaatcatggtcttttatataaatgaggaaaatagaatgacaattggacctgaattcaagttgtttttttcactgtcttgtactttattcacagtgattttagatgagcctcacataaagaatattaacgagaaatatggagctattctacttgaggctcttcccaaaagtctgctttggtaaagaggtctagaatacatgccaggcgattttaaatttttgaatatttatttcatagtaaaggctaaggagaccacttgtg

SEQ ID NO: 15695 - DNA, 455 bp, Homo sapiens
  MAP TO AC010722.1; EXPRESSED IN LUNG, SIGNAL = 2.7
tgaactccgtttatgcctacgtcaggatcaacagccgctgggagagtatatttagagtttatagccgagttctctggaattgatatgttgataactgttgctgggaacaatggtgcattatcatttatatcttctatcagaaaacgtatcttaaccagtctaaatatttcatccggcaaaatggcaacctccacttcataaaagcaatgctcatcccttgggataccagcacataatttctcacgatcaatgcgagcgccggtagtgaagatctcaccagtatcctcttcaattcgaatcagtggcacatctccggtcttgtacactagcttgaactgcatagtagttgtcaaggacttgtttggaatcagcgacaagttaaggtctttcaacaagttgcctatcaggacgttttctggaatttcttctcggatggtgtagtttttctcctgggc

SEQ ID NO: 15696 - DNA, 496 bp, Homo sapiens
  MAP TO AC009483.2; EXPRESSED IN LUNG, SIGNAL = 1.5
acatacgactccccaaaggccaataattgtcagcaatttttagcatgaagtatttttagattaagatacatatgttattttttcagacataatgctattgtatacttaacgactacactagattataaacataacttttgtgtgtgctgggaaaccaaaactttcacgtgacttattttattagtgatattcactttatgacagtggtccggaatcaaacgcacaatatctccaaagtatgcctatatgaagcaaggagcacaaagtaaacactcaataaatgttagctatattatttccttactattattattttcagcattgttatgcagataatgagagttctcctctatcttctggggttgagaaattgacatgtgtgaagttgagggtgccagcaccacctccctggcagcatggaaaaagccatctgcaataggggagaacaatgacaaagaaaagcaaagccaagtaatcggattagagacagagcccc

SEQ ID NO: 15697 - DNA, 493 bp, Homo sapiens
  MAP TO AC009226.2; EXPRESSED IN LUNG, SIGNAL =   3
ccatgcctataccatggaggacctgaggacccaccatctattccaatgatccaccatcaccaccctctaaagatggagaaaggtacaagagtttcaaccttggccaagtctagtgccaggaaaatggagctaggacagggtagggaaatcatagaggcagaaaaaaaaagaaatcaggaaacaaaaagtctgcttggaaacccatcaaaggctgacacagtagggctgaaaggcaacccagtgaagaagtcttatacctcactctggactttgtgtttttccatgatcagcttatactgagctcttctaagcaatagactgtttctcaagactttctagatgttgcatggctataagatccttgtctggacctacaaggtccagaagaagaaactgaagcccagagaagttaggtaatttgcacaagaatacttagctagtaagaagcagagccaagattccagccccgggcagcttaactccaaagcccatg

SEQ ID NO: 15698 - DNA, 459 bp, Homo sapiens
  MAP TO AC009957.2; EXPRESSED IN LUNG, SIGNAL = 1.3
gagcgttcagtgcatttttggcttcccttaaggaattctgacttaggtatggtcatttatctgtggccttaagattacctgttttttctgtttgttccactgtatgttttcatcttcattggaatacatctactgagtaatgttcctaacttcatgctccactagccaaacactgggaatgttacagttcttgtgaatgagaacagtaaaagaaattattttcccaaagaaacatagggatacacctttacaacaacaaactacaaaattccatatgacattattcttcttgctttaaaattattcttaagaacttggtagaaacaaagaccttcttcacaggaaacttaagtactaagtccatcttaggagttttatccaggaaacctgtatgcaagttgcagaaacagcactgagacccttatttattaaaatttagccctttcaataaatgtggaa

SEQ ID NO: 15699 - DNA, 456 bp, Homo sapiens
  MAP TO AC010137.1; EXPRESSED IN LUNG, SIGNAL = 1.7
catttcagcaatttcataacaaaagtttaaaataaaaagacatctttctaaatcttctagctagagggtttatcttatataaagctgaaatattttcatatgtaataatgtccctcctccacagaagtagttgtactttgataaatataaacaaggatgaacactagaacacacagtatacagtgggatttgacttctcatcagtggtccttctccaaggccacatccctgggatttaagcattccagagaggagccaaggagaatctggagttcatttgtacattctagtaaatctagtagtttgttgctttccagattgaaggcttccaagtctttggaggaagagaacaagatacttgctgaaacctgtctgtaaaactctgcctctgcaattgggacaattttcagatgtggaaaactccagcgaaatatgcaggatgacattttcactttc

SEQ ID NO: 15700 - DNA, 398 bp, Homo sapiens
  MAP TO NM_006902.1; EXPRESSED IN LUNG, SIGNAL = 0.9
gtaaaaagttgggggttgggggaggagagaatatggacacaagggggtagaatgtgttcattatacttttttaagtcagaagaattagtaaattgatagattaggagattctaaaaacacttgctcatcttcgtttttggaggcctttaaaaaatgaggaaatttattatggcggggcttttgtgctcttttacttgatggctttatccttaggctggcagctagaaagctgaaaatgtccaagaagattttgagtaagtttctcatttctcaacaggaaaaaatagacaaatatgagacagatgatgacattgtacaaatgaataaatatttttactgtctgcataatcatgcccaaaatccatgcttattcattggcatacttgaggactttgttg

SEQ ID NO: 15701 - DNA, 972 bp, Homo sapiens
  MAP TO AL033383.24; EXPRESSED IN LUNG, SIGNAL = 0.95
tgtagttgtatattagagcatttttggaaactaacatatttctgttgcaggtagctagatacacatatgccattgggaactaaacattaaccaatctttgataaagggtacttaactgtatcattttaatagcattttaattctagtcaataaaccattcattaattaaattattttttaaagggaattcaaaaaatcttcagtggaaactggctttaatgtaatcaatcatcctataagggtcttcactctgaaccacccattaacaattgcttcagttgataagcaagttggtccttaccctggactgccaatgccattaggtctctgctggccctatgctgatggagacttttttaagaacagaaatgagattcatgttagttcatgttcaactatagaaaacaatgatggtgaaacattacctgctccaaattggaatttgaaacatggaaacagcagtgtggaagaaaatttcacagatgaaagtgatttatcagaaaatgagaagacaaatgatactttactcagctattttaaaaaggtggacctgaacttgaagccagaaacaataaaaaatgttgaggaacctttcaccgaggagccaaatgaagtatttccatatcctgattttctccctcctcctttcagtgctctagacttgcacaatttagccctctccaaatctgacaattggaaagtgacagtggaccctgcagaaacctctgttgaacacttgataactcgtttactggaactagaacgattacaacatatgactattcaaaaagagaggccaagactacaaacgactttctgtactccagcagttactgaacgaccctcttcctccaaagctacaccaaaagtgagacagccaaaactttgcgactctttgagtcttcagataccttgtgtagataaaagtcaagaaaaaagtaaaaacaactctggttcttgtaagcttgaaca

SEQ ID NO: 15702 - DNA, 452 bp, Homo sapiens
  MAP TO Z92540.1; EXPRESSED IN LUNG, SIGNAL = 2.2
tggtagttggtgcaaagtgcagcaacttggcttttattttagagggaagtcccgccacactgcactcctctggacccctagaaacttcaatattacaggcccatgtgaagttccacagggaattatctcctggcctttggcatgcacatgtctccttaggcatctaggatccttaatatgatctgatcataagaccaattagcataatgtcgtcaatataatggaccagtatgatgctctgtgagatatcaagttcatcacaatccctccaagctatgtagataaagctgacttagtcctgagggtcaggggtcaggtaatagtaaatgttggccctggcaataaagatgctacaaatgaaactgcagctttgattgtcattatcatcatcggattttatttctgatgatctgtggtcattcttcataacccaactgacctttgttttaggc

SEQ ID NO: 15703 - DNA, 350 bp, Homo sapiens
  MAP TO AH007965.1; EXPRESSED IN LUNG, SIGNAL = 0.66
tgctcaggaggtcatttcacagattttcgggctccaatatgttgactgtcacagcagctggggggatggcatagctaccggctgtactaagaactcagagccctgccctgagcctgcctgagggtccttatggtaggaggatgcccctcatgccagcccgtgccctcatgcttgtgtcacctccaggtccgcaaaattctggacctggtacagagcaagggcgaggaggtgtccgagttcttcctctacttgctccagcaactcgcagatgcctacgtggacctcaggccttggctgctggagatcggcttctccccttccctgctcactcagagcaaagtcgtggtcaa

SEQ ID NO: 15704 - DNA, 426 bp, Homo sapiens
  MAP TO AL033378.7; EXPRESSED IN LUNG, SIGNAL = 1.1
tcatgtgaaaccatgtatttgcacagtgtattttcatttttctgtacatatgtaagtgggagctgggtttataaagagggtcatgatacggagaaaggtggtgaatgtaaagaaagatgtatgcaagaatgcaaaggtgtgttcacaagagactctgttggtttccctccaggtggggaggagcacgtgtttgagaattcgccggtcctggatgaacggtccgccctctactctggcgtgcacaagaagccccttttctttgatggctctcctgagaaacctcccgaagatgactcagactctctcaccacgtctccatcctccagcagcctggacacctggggggctggccggaagttggtcaaaaccttcagcaaaggagagagccggggcctgattaagccccccaagaagatggggacattc

SEQ ID NO: 15705 - DNA, 458 bp, Homo sapiens
  MAP TO AC007678.1; EXPRESSED IN LUNG, SIGNAL =   8
tagctcccagcctatttccccaccatgagaccagaggctcattttgctaagacatgttcacgatgcaaagatatggctaccaaacaaccagctcactgtctgcctgacgtggccttattaagagctcttagaagccaagaccacctctgtggctagccccccaggttgggcctaagtacataggaccacctgtctcctatgtctgcacacattccatcactgcaacccatgcctggctggcagattttaccaatttcaaagtgcccagggggtggaagatgcttacgttccagtccagtgaaatgacatctgacatctttgttacttgggatgtcatggccccttctggtatacggtgccttaacataagctgggtggaggccctgttgccattctcattcaggttccatatctttgcagttgagtcttcagatctgcagaataaaaacacaggaggc

SEQ ID NO: 15706 - DNA, 380 bp, Homo sapiens
  MAP TO AC009492.1; EXPRESSED IN LUNG, SIGNAL = 1.8
tctttcctgcattttcatgttctcttctggaatgattttttttttttctaaagaacgttttttggtctttcctgtagagcatgcttggtcatgacaaattctactatttcttttcctgaaaaatatttttctttcagtttaaagtgtcttttccctgggtatagaattatgtttggtatttccttctttcagtactttaactatgtcctctgtctccttgttccattttctcctggcttccatcatttctattgagaagtcagttataattcttattgttgctgttttgagaatacttgtctttttttctctggatgctattgagacgctctctctgctcctgttttttcagctgtttggccatcatgtgcttggatacg

SEQ ID NO: 15707 - DNA, 491 bp, Homo sapiens
  MAP TO AC009185.2; EXPRESSED IN LUNG, SIGNAL =   5
agttcatatatttttgcttccagatagaaatatctcttctgttattctatgtattaaattatatactcatccaatacagtgccaagtattttatgtctttagaactctaaaattggagatgctaattgaaagaggacctggcatccactcccagctctgtcactttctaagtctcttaagttctatccttgatctccatggctttggttttctcggagtaaagagggaaaacagaccatttctagtgagcctctacctcttgcactgtctaactttgttgtcttttccccagtgctcacacacttcagaagtgtttctctccactttgctgagcagagttagctccataccttacaacagccttggtgaaaacagacacggtgtatgttcctgcagtcctggaatcccttaccatgaaggctccttctttgccctggaatggttagaaagaatggaaagttagtgatctcaggaaaccaggcttatgcctc

SEQ ID NO: 15708 - DNA, 437 bp, Homo sapiens
  MAP TO AC009303.1; EXPRESSED IN LUNG, SIGNAL = 3.7
taggatgttctgggcaagtggcctctcaaaaaacttaatacaaaaatcaactattattcttgtaagttaataaaagctctagatcaaacactaaaattcagagaagatgacaaaattatagagctttgcactcagtggctatgtaaagaagcactaatgatgccaagtggggctgagaatgtaggggagcctgagcttactctgctccttgctagagagtctcttaagtgtgcactctgtttctcagtgggacaagaaaataaaatcacaatactgacctcagggagactgtaagtcttctggaactgggatacagagtaggagcggatatagtcacccatctcttcttttgtttctatagctcgtttcaccagccactggggaagaaagtgaaaagacaagagttgctaaggacaacatcccactgaagtgaaggc

SEQ ID NO: 15709 - DNA, 490 bp, Homo sapiens
  MAP TO AC006548.19; EXPRESSED IN LUNG, SIGNAL = 0.67
tttcagtagcgacatgataatctacactgtaggttattccaatgacccagataattttgaatatcagcaaatattgcacatttttcccaatgaatgtcctcatcagggcgctatttcttatgctatcattatccagagatgccttcttcataggaatcacgctgctctcaagtgtatacatggtcattcttttgtccaggcatcagaggcactcccagcactttcacagcagcagccttatattaaggacctctctagtgaaaatggccaccaagaccatcctgatgctggtgaattcctttgtgctgatgtactcagtggacttcatcctctcatcatccacaatgctgttatgggtaattggccctgtcacctatggtgtccacaagtttgtggtcaatgcctatgccactgtcagtcctctggtgctaatcagatctgataaaagaatcatcaatattctgcaaaagtttcaatggaagtgccatct

SEQ ID NO: 15710 - DNA, 469 bp, Homo sapiens
  MAP TO AL023754.1; EXPRESSED IN LUNG, SIGNAL = 1.5
ttgaagtgtgaactctgaggatgaagaaacagggctgcaggggtgtgtaacttgcaccaagtcaccctactttacattgcgccacaccgcccagctaagtcttcgaaatgttcataaggtgcttgagcactgattcctttgcctgttcaatgtttgaattccactgtcactggcttttcttttttcctcgtaatgaagcaaaacctggtgggttaattaatccttcttgatgctgggcagcagtaataggatcaagaagaaagcctttctcctcctgtgctcccaaggatgcccagcgggagactgtgaggagatggaacacagccttcactctgttaattgttcaagagcaaatcacctgtcagcaggaaacagaaaaaaagacagcacgaaattcagagtcagaacaataaataacattcagtgctatacccttgagaaaaataaagctgccaacattctgtttctt

SEQ ID NO: 15711 - DNA, 463 bp, Homo sapiens
  MAP TO AC009892.1; EXPRESSED IN LUNG, SIGNAL = 1.1
agtaattcccattttccgggagaaccccacatctcatatggtttcaagccagacaatggggatccgcgcagagagaacatgcacgcacacaaacaggaaggacgcagacgggctttgggggtgatgagggacagcttccccctgaggtctcaggcgaggggtgaggaaggagactcatgtgaactcctctgtctctgctctcaggcttgttcacaaaaccctccatctcagcgcacccaagctccctggtgcatgcaggagccagggtgagcctgcgctgtcactcagaactggcctttgatgaatttatcttatacaaagaggggcacatacagcattcccagcagcttgaccaggggatggaggctgggatccattacgtcgaggctgtcttttccatgggtcctgtaacgcctgcccatgcaggagcctacagatgctgtggttgtttcagtcactcccg

SEQ ID NO: 15712 - DNA, 461 bp, Homo sapiens
  MAP TO AC010170.3; EXPRESSED IN LUNG, SIGNAL = 1.6
ccttctgttttagggaccagggattaacaccatttttgttgttgctgttgttgtgtccagcaatcttaaagtgggggacgggagagcaaaccacacagcctgagatggcaaacaggtttctgaatgaagcccttgcaagcgaccacaagccaggtcaataacatgattccacagcaaaccaggcagcccaggataaacagatcagcaacacaacgtggcacactccaggagatctttggggccagacacatgccttcctcacccagagggcccagggcagcttccaggaggtattatgtcaatgaggatgtccattacagacagctctccaaaataacctacatcagaagttggttacctttgaaaggtgttatgtcaatgaggaaggccattatagaagatactatatcaacaaggatagtcatggtagaagatacattcacaagggtgactgcagtaaa

SEQ ID NO: 15713 - DNA, 482 bp, Homo sapiens
  MAP TO AC009925.2; EXPRESSED IN LUNG, SIGNAL = 3.8
ggtcaacactgcccagaacatgttcacacccagtctggttgtgacagcaccagggcttggcctcaaatttgctctgaaacctgagcaagtgccaacagtggggagaggccagtcagcgggagcaggcacttttgagcctgtggggaaaaaggggcttcctggacccttctgagtgcagagatgcccaggaccacagccacagctgggtggatgtaactgttcttgggaaggtgaggctaccacccctccaactcaggaggcaggggtcccgcctgctcctagctccaaccggctctgtggagcacgtagcagcagcttcaccaccccaaatgcagccaccatcatggcagcagcgacttcagatgggctgccactgcccatcaattccctctctgaagaggtacgtttaactgctgttaggatagggacaatgactgctcttaactgcttcatgctgacagggggcattgttttgaggaaaa

SEQ ID NO: 15714 - DNA, 402 bp, Homo sapiens
  MAP TO AC009957.2; EXPRESSED IN LUNG, SIGNAL =  14
aaatgctggcagatggtagtgatctacttgaacacagttgagttttctttattttttccatggaaaaaagctcccagaaacttttgttctttaatatgttcagcatgcatatgttttacatctattaatgagtattaaaaatgcaggtcctaattagatgtctaaatctgagaggagttgtggtgagtaccagcctcttagaattattaaaaaatacagttttgatgaacaggagtttcttttttgctgtgacatctttcagccttctcctgttccagaaacgaaggaatttgcattatcaatgcttctcagctattgtgttctagggtttctactagatattgtgagttttgatgataaaccttcagatgttgatgatgtcaaaacttgggagaattcagg

SEQ ID NO: 15715 - DNA, 472 bp, Homo sapiens
  MAP TO AC010731.1; EXPRESSED IN LUNG, SIGNAL =  12
aaaccaccctattgatgcacatgcagaaatatctattaagaataaaggcttaaaagggacaaaggatataactattcacaatgcggctttgcatttttatcagtgcctctgctcctgcctgctacaacctaattcccatattgacgagtggcgaagtgtttgggatgcatacagaaattagcataactctatttgacaacaagcaggcggaagaacatctcaaaagccttgtggtggagacccaagacctggcatctcccgtcctgcgcagtgtctccatctgcacgaaggtggaggaggccttccgccaggcccacgtcattgtggtgctggatgacagcaccaacaaggaggtgttcactctggaggactgcctccgaagcagggtgcctctctgcaggctctatgggtacctgatagagaaaaatgctcatgagtctgtcagagtcatcgtgggagggagaacctttgt

SEQ ID NO: 15716 - DNA, 456 bp, Homo sapiens
  MAP TO AC010142.1; EXPRESSED IN LUNG, SIGNAL = 2.3
tgagttaaatctaaagagttaggggcactattacttaatctgtatcgatgttttggcatcaagtcttcaacatgaaataagcaagccaaattatagagtccttatgtgatctcttcaaaatgatcttattttccaaaatatgaatgacctatagaaagaagagttttagtgccactaaagaagagcataggctttagaaggcgaaataaagatgatttgaaatgtgtttgttaacatagaagatattgctgatatggtgaaattattacacatggaaaattatatgcataatgaagcagataaaaaatggaagtaaatatacattcaaagaaatgaaaatgggcattttagggagcctgaagctctgtaactggacaaagtaagacaaatgtaagtagaggagtcagttgtaaaggacaaattgtaacattgtctacaacaagccaaacaaggaag

SEQ ID NO: 15717 - DNA, 466 bp, Homo sapiens
  MAP TO AC009890.1; EXPRESSED IN LUNG, SIGNAL = 2.4
accatgtccttgggtttttgctaaggatgttgtgttcatgatttcacttaatcctcataacaaccacttgatctaggtaccatcctgcatactataaagggacccactaaacagggattttactatggataaataccatgctcagtttatgctccaaaccagatccgctgaccataaccagaccttccccagtggccaaccatatggaggtgttggatttcctggatgctgccagggtccaaaataacaccaggagcgagggggagttccacagataatctgctcacccttcctttcctaaatgatgctctgagatgccatgtttcctgtagcctctctgagccatgccacaggatggatctatcagttctttttgtaatgaagtagtggccatcttggtaatgcacccctgtccattggttgttcctcctttatctctttctttacctctcactcttgcttccct

SEQ ID NO: 15718 - DNA, 470 bp, Homo sapiens
  MAP TO AC009959.2; EXPRESSED IN LUNG, SIGNAL = 1.1
tgaatgtaatgttagtgcatcccttttcttttctaactgaggtcacttaggattaaatgggcctgttccggctttgtctgcagacttcctttgccaagtagatccagtgccataaggccccagtgtgctagttaggttcagctttacgccatagagtttgtaaggcagccgtgtccccctccctatttctgttgttttgttgatttaatcctaggatgtggtttggttggtttatagctttttaaaggtatattgaatttgcctcctggttcatctctcccagaacgaggcagaagtagccttttgggttaagactctggccccggaagccaaggaacctttgacccctagtcaacctgtggaatctgagctacctctagagagactcacaatgactgagccggttaatggactttgtggagtacctcaaattgtggtcatttagggcattattatgaaattgtttatcg

SEQ ID NO: 15719 - DNA, 498 bp, Homo sapiens
  MAP TO AL117693.1; EXPRESSED IN LUNG, SIGNAL =  12
tttaacccctaagcttcatgttgaacatgctcattatgttcattctctaaatcttaaaacacaactttctacaagtagctactttgctctgaacatgtaagtggttctccactttcctcaaaataaaccttagtttactctttatttgtagtaaagtatcttattttcgaaatactttaaaatctgtttctatccagctctctgaatatttcttttagttttccttatgaactctaaggtatggtcaaagcactcttatttgtatactggtctacttgtccttagaagaggccgtagaacttactcttctgtcttgtagtacgtctgtctcagtaggtatatttatatttatctgaatgtgttcttcctcaaagaccaattcaagtgtcacctgctccatcaacctttttctaaagacacttcggtccacaaacaattctctctttaaactccagaataaattatttccttactactcattttatcacatgctcctct

SEQ ID NO: 15720 - DNA, 467 bp, Homo sapiens
  MAP TO AC011229.1; EXPRESSED IN LUNG, SIGNAL = 1.1
ttgtacattcttcactttttgcctaagaacaagctaagaatcatgagcattaaaaccgttttttaaaatgtgatgaacccacaaaaaactaaaggtgtacttgagtctgctagatcaacacattcttataattccctcaaggccatcatacagtttggcacccacatttaagctttgaaaattatatgaccatctattacattttagatgtcacatgtcctcagaccttttctattataacacaagacagagttagaccattttttaaaagatccctctgttattgataattgcctaaggtgcttcttccttttctttttcagaatgaagaacaaattttggtattttgagtttggcacatctgaaactttctcagccacctgcaagaagctacatgaatctgtagaaatagaagtaagaaaaaaatgaattctcttttgtaatatgatgaaatggcttgagctttg

SEQ ID NO: 15721 - DNA, 446 bp, Homo sapiens
  MAP TO AC011403.1; EXPRESSED IN LUNG, SIGNAL = 1.5
aagctggaagctacaggcataggctgaaacccagtgagaatttacattgaaacctgtgtatgttctcactgcctctgaaatttttggcacggatgatctgaagtagttgaagtttttcatcatgaagttaaacacacacacttggcccaagaatcaaagaaactgaaggacaatttaagaaaatatagagcagtctcaggcccagctgtagcctcatgccaatgaggtcagttgaaagatcagcagcaacatatgtgagcaacaacatggtgcctgttttgcttcctttctctaagtctcacagaagaatgtctttgtggtccatcctaaacagaagcatacaagaaaggaaattccagaaaacgaagttcagactagccaagttaaacattacaaagccacttcaaaatggtaagaaatgttaggtccctagatgattgaagtca

SEQ ID NO: 15722 - DNA, 453 bp, Homo sapiens
  MAP TO AC011459.1; EXPRESSED IN LUNG, SIGNAL = 5.9
aagaaagcaggttaatggtgcatccagtgacaacgatgtcagggtatatatagatctatacctgcccgagctcactacagaatattgtcacactctagtggacagcatgttcatgtctgctcagcatctatttccctgtgtttggtaatgccccttggattatccctgtgctttaggtaaggctaatcctacctcactggctcgtagccacaggttatgggttcagggatgaacacgttgatcccggcagggccagtgggactcaagccaagaacttccgttgcaaacgaatgaaaaagataagctgcttttccgtggatttgccaagcttatggaagacaagcttggagctgctgaaggtcaacttgcagaggctactcatgaagaaagccaagaatcagagagagacaggctcctggatccagtcatgcctgaagacacagccctggatgt

SEQ ID NO: 15723 - DNA, 485 bp, Homo sapiens
  MAP TO AL035089.18; EXPRESSED IN LUNG, SIGNAL = 3.4
ccggattttcctttcctctcacattgccccagtcagaatcattatttacacttctctttctggtaccatgatgtatgtgagagctgaagctgggagctcccacatagccagaaatggttgttcacggtgccccagggccaacacagtgcctggcacacagcgtgtgctcaaaaagtatttgttgacccagtgaatcatgaatgagtgaatctatcagaatggattcatttcatcctatcaagcactcttttagattaaaaccattttcctcatttagttccatttcctgctgtcctctgctgccaggtccagaactggagcaggctaccaagtttacagatgtgatccctgctggagagaggctgtgttcagacagatgtgtggacagaaatggcagtggagggcaaggagtgccaatgggggttacccaggggccacaggggctgggagtggaggctgcaggaggcaagaagggatgcagaaag

SEQ ID NO: 15724 - DNA, 469 bp, Homo sapiens
  MAP TO AF165424.1; EXPRESSED IN LUNG, SIGNAL =  20
ggggcagtggaaagagaatcaggaagtaaatatattagagcaaaggtaagttctggacaacactaaccaagcaagaataaggtgaaaagaaatgagaagataatctactatgttaataaataaaacaaaggctaaaaactgtatgataagaaaagaagagaaagagaagaaatgggaagttgccataattcacagagagccaaaactacatgattatagatataacaaatagattaaaaacataatggatggaaatgtaaattgagttactaagatagaaaaagggtttgagataatcaccaatatagttaatcaccagataaaaatattggagaagaaggtggggattgaaatactggaaacaatgaagaatatggaacagagatacccaaaatccaacaggagcatcctgacactagtgaatgtagttcctgcaacaataaaagctcccaaagaattactaccaaaa

SEQ ID NO: 15725 - DNA, 459 bp, Homo sapiens
  MAP TO AF186998.1; EXPRESSED IN LUNG, SIGNAL =  11
ttgtatggcctgttaaatggttcattaaatgttaaatgtttgtcatgtgaataaatgaaccaaaaaatacctagaaccttgtagacttatattttattagagtgtacacatctgtgttctatgttatataaagatatattaaattatttttctttttaacaccttcagctgttctttctttttgagtacacgtgtgtacatgaacaagcgtttgggtgaagttttataaagcaaaaacagaacaatgtacaaaattaaaataatttgtgtctctttgttcttgccatttcagatgatggaaaattatcctttgaagaattcaaagcatattttgcagatggtgttctcagtggagaagaattacacgagcttttccataccattgatacacataatactaagtaagaaacttttttatcactggattccacaagtgaggcacagagagcgtgaatgcat

SEQ ID NO: 15726 - DNA, 468 bp, Homo sapiens
  MAP TO AF186997.2; EXPRESSED IN LUNG, SIGNAL = 0.94
atcaggggatgcattcagagctgccagtggccctgggtcccgtccacacgaagaagctggaaagaatgaggccatgccaaaacagaggctgagatgagaggcgaaggcagaaatctgcccccattcctgggaaaacttcctttctacgttttgttttcatgggccaatacatcccttttccttgtttaatctaacttgatttggaattctgcatttgtaataaaaaagttctaataataataaagttcatgctgttatttggcagatgctgagatgtgagcaagagaaaagagtcaagaatcaagcaggaatatcgagcaaggtggactcagtgactcatagaaaacacacggagacaggttttggagatgatgatgataataatgatgaacttagttttgggcaaaatgagtttgaggatctttgaattttcccatgtggagctgttccatttgttgtttggaaacg

SEQ ID NO: 15727 - DNA, 453 bp, Homo sapiens
  MAP TO AL118523.9; EXPRESSED IN LUNG, SIGNAL = 1.9
ccatcacaccatgcaactgaaataaagagccaattgaaacataattgggatatgctactagatgtccctggtaaagacagagtcaaatgttctgggaatggggactgagaaagtctaagataacccaaaattttggtcataccgaggctattaaaactcctcttaccaagctcgttattagttctttgcttacaaatccaatgtatcctatgcaaactagtagtttttctgtaaaattatgaaaacacaacatggaaatctagaaatagaactgatcttaaacacaaggcgatcctgagatagaaaataatggctttctcaccctcccttttttctttttccttctttctcttttcccttctttttcctcctcttcctcctcctcttcttcctcctctacttctctctgcatttcttggctttccctatatttgttgaattccttccgactgc

SEQ ID NO: 15728 - DNA, 483 bp, Homo sapiens
  MAP TO AC007077.2; EXPRESSED IN LUNG, SIGNAL = 0.68; EXPRESSED IN HELA, SIGNAL = 0.73
gcacctatcaaaaagcctgcttacatagtaggcactcagtaaaacttagcttaaaattttatcaaatctccttaaaatttggaagttgtcatttaggttagcttcccaattacaggctccatccccttacaggcatctccagatggctgggtgtgaaaggatcactctataattggcctgaattcccccaagtcagtcattttctcagcactatactgagggcccgaggccctctcacccagctacctctccttcctccaccttcttccaccagaactggccagcctcggagaagttggcttttgtctgtctctcccaccagccattgccaaggatggcagccagtcctttattggagccaggtggagctggcaaagccagctgttgcctgccttgtgttgcctggacttgtggatgccaatcttcctcttccctggctcaggataaatttttggcatctttgctcttttctgcaaaccccag

SEQ ID NO: 15729 - DNA, 1951 bp, Homo sapiens
  MAP TO AL021997.1; EXPRESSED IN LUNG, SIGNAL = 1.1
gggcgatagttaagactgtggactctggggctaaattgcctgggttggaatttaaacgctgcatttaatagttctgtgacaatggacaagtcaggtaacctccctgtgccttcagtttatgcatatttgaagtggggataatcatagcacttcagtcacagagtcatttgagatttaaaaagttaacatatgtaaaacacttagaacagtgcctgccttgtaatgaatataatatagtgcctgcttatgtacatcctcactgggagcctctgggtgctccctccagccattttagcagtgctgatgaccccttactctactagcctaaacatccctgtttaacccaacctgctccttaactgacagttcttcattcctagaacatgtctgtttgatatcgatctttctatttccatcctatgattgtattctttcataaaggaaagagattacattgtttggtccatttattattccagatggtgaaagtatacctgagaaccaggagttggcatcaaagcaagaaatcttaaaagaaatggaacatttgggggatagcaaactccaaagagatgtatctttggattctaagtacagagaaacttgtaaacgagacagcaaggcagaaaagcagcaggcacattccactggagagagacgccacaggtgcaatgaatgtgggaaaagcttcactaagagttcagtactcattgagcaccagagaatccacactggggagaagccatatgaatgtgaagaatgtgggaaggccttcagccggaggtcaagcctgaatgaacatcggcggagccacactggagagaaaccctatcaatgtaaggagtgtgggaaagccttcagtgccagcaatggcctcactcgacacagaagaatccacacaggggaaaaaccatatgaatgcaaagtgtgtgggaaggctttcctcctcagctcatgccttgttcagcatcagaggatacacactggagagaagcgctatcagtgtcgtgagtgtggcaaagccttcattcagaatgcagggcttttccagcatctccgagtccacactggtgagaaaccctatcagtgcagtcagtgcagtaaactctttagtaagcggacacttcttaagaaacatcagaaaatccacactggagagagaccataagggtgatgagtttgggaaagccttcagtcatcattgcaaccttattaggcattttagaatccatactgttccagcagaactggactaattctgtggaccctcagacccctaaatggggccgtcttggaaagtaagattttcaagtggcttattctgttcttataaaatttattttgtattgcattgaaccacttgtctacaaaccaggtgttggtgtctcctgtgtggatgactgtgattgtagggggttgctgggtggccttcttattccctagcctttggtccatttcttatgatttcctttaaaggcaccaaatcttatctggaaataaattgttatggaggggctgtttttgagcaatactgcatattgaacaattctaaaagaccagtatctatgtatacttttaaaaaaaagatttgctaagatcaaaggatattcagaggtgcatctttttctgtaagagtgacattttaaacaaatgtaaggttttggggaataagaatcgtccacattcccacaggaaatcattgctatggtctcccctaggaatgtgatagatagcttctataattatgcagcattatccatagtatgaaacctgtagttttaatggtttagaaatctatgtctcatttcatatctaactcatgtttttgatacgaatcaatatatatgttgatatcatgagttaatatgagtttgacatgaatcatcaacatagtatatacatatcaacataactatgttgatgattcatatcaaattctcaatgcaggtca

SEQ ID NO: 15730 - DNA, 464 bp, Homo sapiens
  MAP TO AL034399.6; EXPRESSED IN LUNG, SIGNAL =   1
tggttgcatccctcattttctaaaattgtctgagagccagatatttcttacatttttcttcctgatctactaactcctaattttccttaaaaccattttggttgtacttacacccacataaggcattctctaatattccctaattgtcacctgagttctactctcataactagcaacaatacattactgttagattcataaggacaaatctatcagcaatttcttgtgttttactcttaagtacagatggtatacccattttgaccctagaaatagttaacaaatcataaatcatctttttttctgttacatgaactaaaatatattctgtctgaaaagacacatgcatcattttaaagattataaaatatgtaaattataaatattgtctttttcaaattatttttaagtaaaagcataccagaagaaaaaaaattaaatggaaaggaaagcacagtattttc

SEQ ID NO: 15731 - DNA, 477 bp, Homo sapiens
  MAP TO AC006481.3; EXPRESSED IN LUNG, SIGNAL = 0.44
caaattagtgagaattcctggagctcaggcttaacacataggaacaccataaagactgattgggtttcaataaaacatcaacagtcctcatgaaagaagaaggcaaacctgacgagctatgtgacttttggcaaattacccaccatctttaagtccatttcctcaaatgtgaaatttttttaattaaaaaaaattcttaaatgtacttaaatggatgttttccatagtaaccttcaaaaatgaacccagatgcatatttcttcttcctgtgtgagaaaaagatgagaaagagaagaaagaaaaacaaaacaagcatcaacgttgtttctaagcattttcccagtgaagagttggtcccttgccctcaccactccatcgagcccatgaagtatagctcaatgaataactaacagatgattacatttatgaggaaagagtactcagagcagacagctacttcctacaggtgacaagcaa

SEQ ID NO: 15732 - DNA, 366 bp, Homo sapiens
  MAP TO AC005668.1; EXPRESSED IN LUNG, SIGNAL = 0.41
tgttgcctcacccttaaatgggcttaattcataataagagataaatatataatattggaagtatcagaaacttaagggaaattgaagtaggagaaaaataaattattagatcattacatcacactatatgtcaaaataaattattggctaattaaaacaattaaatgtaaaaaaagaaacaaacaatctggaagataatatgtgtcaatatttaactgattgctgtgtagggaaaaattttccaagcacaaagcaatgggtaaaatagtaaagaagaagacctacagatctgatgagaacattttcaaacttctgtacctcaagagaatcataagcaaaactgaaaggtgagtgacaagctaaaaa

SEQ ID NO: 15733 - DNA, 483 bp, Homo sapiens
  MAP TO AC002532.1; EXPRESSED IN LUNG, SIGNAL = 0.71
  unsure 232
catgtgaatttattactcccgttgaaatcatgtacttaccaataaactatttgctattcaaaaaaaaagaagctggtaaataaagacccagcttttttgcccacagtggaacactcctgagatatgctctgtgtggccttttagaaagtctctaggatgatggagccccagttgtccatagtgataacccattcattcacctaaactgtattggcttttctcccttcctgtnctcacctccccactgtccacgtgtgcctcacaggttcacctcccacaaaaactacttatacttgagtcctttcctgaaggtgtgctttttagacaattgctaccaaaattggcccttgatagttaccctcaggataagattctgcaattgaatcacttgccagtcaatggcaaggggcatcctcctgctgatggtaagtgtggtcatgataagcctggcgggctgcagcctcacacttactaagatgctca

SEQ ID NO: 15734 - DNA, 447 bp, Homo sapiens
  MAP TO AC005908.1; EXPRESSED IN LUNG, SIGNAL = 0.49; EXPRESSED IN BONE MARROW, SIGNAL = 0.51
tggatgagcgcaactaaggggcgagggggaaggtggggagggggaggccaacaaacaagcatcggctatcgaagcaggggcctagtatatcctgtttcttctgtagtttgctgacctaggccaaatcaaggccctttgtcttggaaatggaccactgtatacattatttcctttaacctcactcaagtctttattcaaatgtcaccttttcagaatgccctctccagattaccctctctgcaaacactgccacctccatcacattctattttcttacttgctttagttttcttcagaactttcttcagcaccggacaccacttcatatatttgcttattgtctgtttcccccataaaatgaaagctctgtaaatgctggcagcatcaggctcctctgtactataatcccagtttatagaactgtctcttacgctgagtgaacattca

SEQ ID NO: 15735 - DNA, 481 bp, Homo sapiens
  MAP TO AC000059.1; EXPRESSED IN LUNG, SIGNAL = 0.44
gaaacaattaagggggaaaaatgatttttccaaaaataagttgaatcatttcattcatttgcttgcttagtgcttataaataaggagtccatatatagtttgctctctctcttccaaaacattcaaccaccctgggagagaatgcataataaggcactgataaagtttcctgctgtcttccagcaccgcatgctatcataagaaggctattccttctgtttacccagtgataaacaaaaagactgcacttaccgagctggggctggagtgccgcctaactttaggtgactctttgccagtggaggaggtcttaaagttaatgcaagcattgttctcagaatgcaccctctttacttgattagctggtttctcaaatgggtcaaaagtgctctgtgtcctctgaactctgacttttttatcctcaggaattgtgtccaggggtttgatcactgagtccattccctggcagttccgtgtagac

SEQ ID NO: 15736 - DNA, 467 bp, Homo sapiens
  MAP TO AC004049.1; EXPRESSED IN LUNG, SIGNAL = 0.48; EXPRESSED IN BONE MARROW, SIGNAL = 0.52
acttcttgccgacatgcacagacctggccagccagcccaacccaggcatggagccgccaggaccccaagaggagagccttgccacgcctcctatgctcacccacggggcttcccaaccagaccgctcatggtgcaagaagcctgggaagacccagagcaagatctcatcattcctcagacagaggccagcacgggccttgggggaggatggtgcggctgcagggcgaagccagtcccctggactttcccacgggcatgcagtatctgagtggggcctctaggacgtgcccaacctgcacactgcctccaggaagcagagcatcatgcaggtcttctggccagagccccagtgggtgcccatggaggccctcagcatgcccagcgtggcttgatcacctgcctgtccagctctggtgggccaagaactcacccaacagaataggccagagaacacttaaaatctactc

SEQ ID NO: 15737 - DNA, 468 bp, Homo sapiens
  MAP TO AC005725.1; EXPRESSED IN LUNG, SIGNAL = 0.42
gggttttccctgtaatgtgcttgatacttcctttgaaagaacctggttgtacataccttaatgtgtcacccttccaagcagtcaccttgggaggccgcatgctgatttttctgcagaaaatgtttccacggtccctctcttgaaagtacattgagagcccatggcatgtcattttgactttatataagggtaacatattttaattttcctagggttgatttgattcttgtaagcaatggtaagtcatggggctgagtctgatgaatgagataggtgatcagaaatcaagagtgcctccagtaatgagacttgctctcctaggagccgtgtcagctgtctctgaaggcaggagcccagaagaggcatttcagaaaggagtgaatggcagctctgcacaggagtgcctggcaatccacgatgatcattttgaagaggacactcctcatgaggaacgacaattattggcct

SEQ ID NO: 15738 - DNA, 474 bp, Homo sapiens
  MAP TO AC003070.1; EXPRESSED IN LUNG, SIGNAL =  70
aaccgaattaacccccaaacaggacgtgacgggaagggaaggggggatggggagttgggaagaaggaatcacattttgcaaactgcccactaggggtcaccgtaccctcagaaccgagggtgcagaagtcacaccggcctgcggctatgcgctggcggagggtcccagagagaagaaggcccggctgcgtggcctccgccgcccagcttgtgtggcaggaccgcggccgccgccccagtcacaggccagcagtcagtgcggcgggaagatgtccgcgcactgctgcaggatgagctccaccacctggttctggaacaccatggtcatgggcatgctggtctcttccacctcgggccgcagcagcgtgggcccgaacacaatggccacgctctgcaccgacatgcggttctgctcgccgtgctcgatcaccctgtggcaggggtgggtgggttcagggctccgaactgcgaactg

SEQ ID NO: 15739 - DNA, 458 bp, Homo sapiens
  MAP TO AC006084.1; EXPRESSED IN LUNG, SIGNAL = 0.44
aagagaaaataatttagatggagatgctaaagggaaaaggcagtgaaatgtaatttataatttgtttacaaagcttccctaactatgctagacagcaattacaccaatcaagtcctctgaagtgactttgctgatgcacagatctaaaatctaggcagggcaaaaagtcagcagggctcaaaatctgagggctggagaggagaacagcttaagatcctcaatcctgtgatgcttgtgtgccaaagacttgaaatagagaactaaagattgcagcctttacttgtcctctaccctgacaggagattcaaaacgcagagcagatgaaaaaatggaaagagaggcttgagaaaaagtattattctatggaaattcaagatgactaccagcctgtcactcaagaagaatttcgagagtaagcttatgttctaaccagactattatgggatatcatgacatgc

SEQ ID NO: 15740 - DNA, 418 bp, Homo sapiens
  MAP TO AC004384.1; EXPRESSED IN LUNG, SIGNAL = 0.44
cattttgtcaattttgtttaactttccaaaaaataacttttcatttcattgatcttttgtattgctgtcttcatttcaatttaattactttcagctctgatctttattactacttttcttctactaattttggttttgatttgctcttgcatttctagttctttaagatgcattgttaaattgtttatttgaatgttttcctcttttttcttgtaggcacttatagctataaacttccatcttagtactgcttttggtgtatctcataagttttggaattttgtgtttccattagcatatgtttcaagaaatttttcagtttctgtcttaatttcatcattgatccacatgtcattcaggagcatattgtttaatttccatgtatttgtatagtttccaaaatgtctcttgttattaa

SEQ ID NO: 15741 - DNA, 469 bp, Homo sapiens
  MAP TO AC004544.1; EXPRESSED IN LUNG, SIGNAL = 0.51
tgatgaactgaatgaccctctgttagttttcactgtaatttctgatagatattcacaaaataaaaaacatcagatccaattctttaaaaagtgaaagtgaaatcataagtccttagtgccagcatggagaggcttcaggaggcatggagccctgtggtttgactgctgactcttccactttgtggctgtgtgagcaggaacaatcacaaccagctctctgaggctaactcttctcttgcacaaaacaaaaatgataacaacgccttaattcccaaagcttttagaatgatcaaacaaaacaatgcatataaaagctttgaaaactcagtcactgctgtcaactttcactaccagaaggattctgcctttgcctatagaaaatcgattattttaatttttccccacaagaatcctagaagaaatgattcaaatccttattatttcaatccatttaatcttgtgtgaattc

SEQ ID NO: 15742 - DNA, 482 bp, Homo sapiens
  MAP TO AC004527.2; EXPRESSED IN LUNG, SIGNAL = 0.51
tcatcaaatgactccatagtaagaatcattactctgaaagattgattttgttataataatggaaatttaaatatttaaaagaaaaaacagatgccatttttttttctaaaactctacaaagcaaattgctacaagagaggcagaggaaacacaatatacacatatccaaaatataatttgcagtgaaataaaggaaagcacattacagataaacttacctgatttaaaaaactaacctgtaaatggatttcttctaatttttctactgccgtcattgccctttcatctagctccgatttatattcttgtagtttactaagttctaccatattgtcttccatatgtgtcttaagatttaatatttcttcttccaacatctttttatccttctcaagtttttcacattgctgttgtacttttttcatagataataactcctgttgaagaacttgattgtctttagccaaatcgacacattttga

SEQ ID NO: 15743 - DNA, 488 bp, Homo sapiens
  MAP TO AC002980.1; EXPRESSED IN LUNG, SIGNAL = 0.45; EXPRESSED IN BONE MARROW, SIGNAL = 0.64
gcaaaggaaggttagctaaaggaaaaaaaaattacatggagcactatccttataactttaggttaaaataatttttccatacttaaatatacagagtacattgccaacaaatggaaatctctgcttttggaaggtgaggtatataggccaaagtacaactaaagttagagaacgcctctctctctcctctcccgactccatttcttcctcaggagagattttcccaaatgacgccagctatggacctcagcctgtccacacaggggaaaagctcacctttccaatgaagcaagccaaagcctctattggaagcaaaccctggccttccttctccagagcttgcatcttgacctgagctttacactgttcctttctttccccattgactaggctgttgtgtgccttagaataggcttgctccatatactgctactatttatatcctcctgcttcatgctgattgacctagctttgggctctttacttgc

SEQ ID NO: 15744 - DNA, 449 bp, Homo sapiens
  MAP TO AC003036.1; EXPRESSED IN LUNG, SIGNAL = 0.42; EXPRESSED IN BONE MARROW, SIGNAL = 0.56
aacagggtatgtggcacctcctgtgtttttcccaaggagtcccgggctgtcagaaattactttaggtcctctcatgtgggcatcaagagtggcaagaaaacagactggggaaataattcagctgactaagaagaaaaacaaagaaaaatttttcttaaacaagatccaagaagcgaaaaagcaccaaggccttttatatatatatatatatatatatatatatatatatatatatatatatatagcttgaatatcagtttttaattaagttgattttaaccaggaatgagcaaagacagccagcctgtgaagctagagacaagatggagtcagccatgtcagatttctctcactgtcataatttcttccgttacaatatttgcaaaggcagtttcagtaacacccttttccgggttaactaacttactcaccaggagccaagccaaaaa

SEQ ID NO: 15745 - DNA, 458 bp, Homo sapiens
  MAP TO AC005730.1; EXPRESSED IN BONE MARROW, SIGNAL = 0.56; EXPRESSED IN LUNG, SIGNAL = 0.43
tcaattcatggaacttcggcgaatggagcatttggtgaaattttggttagaggctgaaagttttcattcaacaacttggtcgcgaataagagcacacagtctaaacacagtgaagcagagctcactggctgagcctgtctctccatctaaaaagcatgaaactacagcgtcttttttaactgattctcttgataagagattggaggattctggctcagcacagttgtttatgactcattcagaaggaattgacctgaataatagaactaacagcactcagaatcacttgctgctttcccaggaatgtgacagtgcccattctctccgtcttgaaatggccagagcaggaactcaccaagtttccatggaaacccaagaatcttcctctacacttacagtagccagtagaaatagtcccgcttctccactaaaagaattgtcaggaaaactaatgaaaa

SEQ ID NO: 15746 - DNA, 395 bp, Homo sapiens
  MAP TO AC004027.1; EXPRESSED IN LUNG, SIGNAL = 0.45
aaattaacctgcactcatgtagcttttttcttttataaacttctaaatttttaaactttcttattcttttacaacatgtagattaaaataaaaatacattttatagctctacaaaaatattttttgtttatatacttattctataaggtttttctatttttaagtgtatttactttcttttactttttaattgcttttgttaaagaagaataagacacaaacacacacattatcctatgcctacagagggtcagagtcatcaatatcaatattttccacttccacatcttgtcccactggaaggtcttcaggggcaataacaagcacggaactgtcatctcctatgagaacaatgcactaggtttgtttacaacagcatcaccataaacatgtga

SEQ ID NO: 15747 - DNA, 471 bp, Homo sapiens
  MAP TO AC001226.1; EXPRESSED IN LUNG, SIGNAL = 0.41
ttctgacatcacatattcagcctactttctattccccactaattataaatgacacttttattatatacatgacctttttagatattagccagttgtttatggattttatttggtgagtaacctaacaaggtaaaatctgaaattatgtcttaaatttctgaacagtagctcactctattctgttttggtactaaaatagaggcaataactaacctggaattgaaaatcatcggaagagtaactgttgtaactcctttgcccacagtggtaccagctgttccagtgatggtggttcctttggcttttagctgtacagtgagtgctttggcaatgcatcctagaaacatgtccaagatacccagcttattccagtctcctttctctgttgagtgaatgatatcactgatatctgctggggggagggatttcactcctatgatgctggccagacgactaggggttacttcaggc

SEQ ID NO: 15748 - DNA, 489 bp, Homo sapiens
  MAP TO AC004033.3; EXPRESSED IN LUNG, SIGNAL = 0.44
tgaactggttgtgagccatccctaggggcaacccctcccccgccccgtcccttcatgccagggctctctctttgcttcatggcgaccacctttcctgtcccttttttctgatcaccctgctcagtggcctgtcattgctctctgttgagtgccccttcccatatgcctctcctggacctcagccaggctggtgtgctggcgatagcaccttgtcaccaggggcagctgctatgcagggcctgttggccagggccctgcagcggtggagtcactggtgtgtgcaaacgtctcttctccttttgtgtttcagcgaggatgccatgaggaaagctggtgtggcacacagtaaatccagcaaggatatggagagccatgttttcctgaaggccaagacccgggtaaggccctagtaagtggagccactctggcagagagacttggagaggagagcatcacagactctggaacccctctgttgggtgtcctagg

SEQ ID NO: 15749 - DNA, 452 bp, Homo sapiens
  MAP TO AC005304.1; EXPRESSED IN LUNG, SIGNAL = 0.52
actgagcagctgaaccaatgctggcagtcatgtacctccagacttcttgctgtatgagaaaacacaccctattttcctaaatcattgttgatgggaatttcttttgcagcaaaaagcattttgatatagaagacatcatatatttaagaacatcctaaaggcaaatagaagagtttcaggaaagacggtgacatggcaaagagaatccaacctaacctctggaaagtgatcaaaaaggatggaggaatagcaaaataggaggaatattttatcaatgccagacttcagaaagcttgctgttatctgcttcatacttcatagaatttatactcaacgtagaatagaagagaatagaataaatgaggtgactgtaggcaatgcacaacttcgccttctgagaaatggtgtgatcatctacaactgagtaatgacaatcccaacagaaccactct

SEQ ID NO: 15750 - DNA, 467 bp, Homo sapiens
  MAP TO AC002490.1; EXPRESSED IN LUNG, SIGNAL = 0.48
  unsure 368
  unsure 420
  unsure 425
  unsure 426
  unsure 441
  unsure 443
  unsure 446
tgtagggagcagaggtccagaggacgccacaccccacatttgaatatttttttttcttgtcacgcaaacttcctgggcaggaactccaagggctcaatggacgggaagcagggtccttaaatacgtcccctcttggctcttgccgttccaggagccccagttaccgggagaggctgtgtcaaaggtaatcctcttccctgcattccttattttttctcttgtctaggtggagtctgcactcagagccggggccctaagtgtcaagagtcctacatcatctctccagggggtccctgcctctgggaccatcatctctggagcatcctcctggacctctggcagctctgccatcccccaaaccaggaggncagaggtcccagggatccgcggagcagggacaccaaggtggccgtggagtgnaggannccctgatgggccgtncnagnactccatgactggaaggaagg

SEQ ID NO: 15751 - DNA, 480 bp, Homo sapiens
  MAP TO AC005589.1; EXPRESSED IN LUNG, SIGNAL = 0.42
tcatgccaccacagttaaggacaattgcagaagagaatatttaccatttagcactgtcatcaaaatcaaccatcttctttggaagaaaggatagttacaaaatagtacacagttgtattaagggtaccaataaataaataaataaataaatgctaatggatttcttgtctcaattgctaaagggttggcatatacctgcatgcacctgctgtctttttcctacagcaccaagtgttacaaggaaacagaaataagtcctgatattcaatttataacttaatctctttcagaaaccaagacactgctacacgttacaactaacagaccaaatgacattcatgggcatcaatattaaagctcatgagctctctattaaagagcaccaagagaatgcaaacaaaacagatgatggtaatggagttcggtgagcaaataagatgttattttcatgagagtaactctttgcctgttcattgaaga

SEQ ID NO: 15752 - DNA, 469 bp, Homo sapiens
  MAP TO AC005191.1; EXPRESSED IN LUNG, SIGNAL = 0.43
ggcaaacactaataaggaaaaggtaaatcagtaaaactcagcatgggccacgtagggtagctccaggatgctacctgagatcactggtgcaatttctgagatagggcatctcaattccagaccacctaaccttccctagtttcagggcttctgacctggtgccctgttgtgcctggctatttcccagcctataggaatttctcttacctgcttctctccgctgggccgcctgtagctgagcagaagctccacagcgcccaccacttccttgcgtatggcatagagcaatgcatcacccacatacacgctgtggttcagcagtagctccatgatctccaggttctcgttctcaatggcaatgagcagggcactccggcccaaggggtccatgcagttgatgttaacattatagtagatctcagcctcctgaagggcctgcttcacagtggcatagtcccccttctccaca

SEQ ID NO: 15753 - DNA, 472 bp, Homo sapiens
  MAP TO AC005206.1; EXPRESSED IN LUNG, SIGNAL = 0.53
ccttggggagcttgatattgtgatgtgtgagttattctatggagctattctatgtgagctattctatattttagacagcaaacgtatcccaccacttggaaatatcacccattttgattgaaaacaaagtagaatcaatgacctgaccaaatcacacgtgtgtgtgtgagggagactgggtctttccactcctgatgttttctttcttctgaaaggagtccaaacactccttgcttctctccacccgccccctcttccctgagaaggaggagtggtttaatatgactggtgagtttggaaggaggaactgtgccttatatcatcctctcttttcttcttgggagcaagcttcgctcccgtggggtgggaagagtaggcccattccagctcagctgcctgtcatcgagccgccaagtctgcctaactctgaagttgagtatcgggaagctcgattgtctgatgatataagcca

SEQ ID NO: 15754 - DNA, 407 bp, Homo sapiens
  MAP TO AC004544.1; EXPRESSED IN LUNG, SIGNAL = 0.43
gggatttctccttacaatccctacaacatatttttatttacttatttatttagttacttattttatattgatatggattcatgactgttgattttataattcagtactatctttattttcttgctcaattgttttcattttagggactgattcagattagtttcagtgaccatccaacttacgtctacatgttttttagcacttagttactccagaaagtacacagacaccacaacaagatgttccaggcttatcttgtatttatgctgttccagcctggaatcagctacttttcccagaaactctggtttctgatttattgaaccataatttttagaaactacattgtggttctcagtgtgctcattactatttgggtattattgcttctaggactttacacacat

SEQ ID NO: 15755 - DNA, 463 bp, Homo sapiens
  MAP TO AC005951.1; EXPRESSED IN LUNG, SIGNAL = 0.44
tccttcccatgaaggaactaacagtgttttcaattttgctctattaaaaaaaaattccaagctgaaaatcatgatgcatacaatttcttcggagttatttacatgagaaaaaatactctcaccccatccacccactgtgctcccaatgattttctactggtttctggaacacaccaagctcatttcattttagtaaatcttcattagcagaatattttttctccagatcggtgtaaactggctgtttcctggcattgagatctcaaactaaatgcctcttcctcaaaatggtctttctcttcaatcacacaaatgcagtcatccatcatagcatcctttttaattctctgcagagtaattatgatgtcatgtttttcctgcttattgattcctttttttgttgtttcctccagtacctctaccccactgctaaaatataagcaacctgtaagaaatgagtgtg

SEQ ID NO: 15756 - DNA, 457 bp, Homo sapiens
  MAP TO AC003958.1; EXPRESSED IN LUNG, SIGNAL = 0.49; EXPRESSED IN BONE MARROW, SIGNAL = 0.5
gaagcatctaactagcatattttggagaaaaattagctgaagcattaggaaaggaaactatgctgtatgccaagcccccacccacaattaatggtataaaaggactgcagaggaaggagagactcaaacctgcccacatccacctccagcagcttacctgcttttccattacctgttccagcaccatgtcttacagttgttgcctgcccagcctgggctgccgcaccagctgctcctcccggccctgcgtgccccccagctgccacggctacaccctgcctggggcctgcaacatccccgccaatgtgagcaactgcaactggttctgtgagggctccttcaatggcagcgagaaggagactatgcagttcctgaacgaccgcctggccagctacctggagaaggtgcgtcagctggagcgggacaacgcggagctggagaaactcatccaggagcg

SEQ ID NO: 15757 - DNA, 485 bp, Homo sapiens
  MAP TO AC004041.1; EXPRESSED IN LUNG, SIGNAL = 0.41; EXPRESSED IN BONE MARROW, SIGNAL = 0.52
gcctggcacatagaaagctctcagtaggcattttgttatacttataatgtgttaccaaaaaatatttatacaaatctgaatgtatcatgctctttggaagcgaatatcggaattttaaatatcagaatttttatttcttttataatatatttataaagcaagaataatcatatatttatagaaaaagatacaaccgtattcagaatactgtattttatgtttttttctcattggtgatataatttattttcttaaaatagccatgctggctggagccacagcagtttactcccagttcattactcagctaacagacgaaaaccagtcatgttgccccgtttgtcagagagtttttcagacagaggctgagttacaagaagtcatcagtgatttgcagtctaaactgcgacttgctccagataaactcaagtcaacagaatcagagctaaaaaaaaaggaaaagcggcgtgatgaaatgctgggac

SEQ ID NO: 15758 - DNA, 454 bp, Homo sapiens
  MAP TO AC002093.1; EXPRESSED IN LUNG, SIGNAL = 0.5
  unsure 256
tgccttggacgtaaagaaggccttcaaatcaaacaggtagaagtagttgtcatccaccaagtctgtcaggagctgattagccaggcggtagagagtcgacatcataggtagtgtgaactgccagcgctggtaagtggagccatttacatacctaggtaaaaaatgaaaggcccacctcaagtaagcagctagacaaacccataccacctactgatctcccaggactccttctgcatttccagaactcctcccaggntgtagtatctccatctatcactcacttcctgctgtccctcaacggctggtggtcatagaaccagtccaacacaggggcgtcctcctcagggtccagctctagctgaatggcctccagtggctcaacatctaggatgttgtcagcatagtccaagggcggctcctcatcatcaaaagggggaaaacgcatcctcttgaa

SEQ ID NO: 15759 - DNA, 414 bp, Homo sapiens
  MAP TO AC004869.1; EXPRESSED IN LUNG, SIGNAL = 0.53
cataagggagttcaacaaagttactgaacaaaatactatattataaaaatcaaaatgccactccaaaactgtgctagcttaagataaaatataatagaaaatgatataccactcataattgcaaataaaaactacacataacaatataacaaaaaattcacaaaaaggaacatttaaaaattctaattatgtttttaaaatgaattaataggtgtaccatgttcatggatgtaacaatcacctcataaagggatcagttctccagattgttttatcatttaatgaaattaaatttaaaatgatagatttagtgtatgcatttgatcaactgactctgaaatttacatacaagaataacatcctaagaattgataagacaaagttcaaaaagcaaagcagtaagaaataatcacc

SEQ ID NO: 15760 - DNA, 463 bp, Homo sapiens
  MAP TO AB019437.1; EXPRESSED IN LUNG, SIGNAL = 0.43
ttgttgttctaaaaggcaatcaagaagaactagaaatattgtctgtgagtgatatgagtgagagaaacagtggatctgtgtggcagtttctgacaagaatgtctctgtgtttgcaggtgtccaatgtgaagtgtagctggtagagtctgggggaggcttggtacagcttggggggtccatgtgactctcctgtgcagcctctggatacactttcagtaactatggcatgcactaggtggaccaagctccagggaagggactggagtgggtcttacattaatgctagtggtggaggcatatactactcagactctgtgaagggccggttgaccatctccagagaaaacaccaagaactcactgtatctgcaaataaacagtttcattgctgacaccatggccgtctattactgtaagagacacagtgaggagaagtcagtgtgagcccagtcacaaacctccta

SEQ ID NO: 15761 - DNA, 483 bp, Homo sapiens
  MAP TO AC003071.1; EXPRESSED IN LUNG, SIGNAL = 0.42
gcttcctcagaccatggaacccagcccttcagagacaagcctggtcgagaggccccaagtggggtctgtggtgcataggacttcccttggcagcactctcagcctgacacgttccccttgtgccttgcctttagccgaatgtaaagaggggcttgtgtgcaatggtgccccagagactgaaaacagggcctcagagcagcccccaggtcttagcaccctccagatgtaccccacacccaatgggcattgcgccaatggggaggctggtaggagcaaggactcactgagccgtcagctgtctgctatgagctgcagctctgcccacttacactcaaggaacttgcaccacaagtggctgcatagccactcaggaaggccatctgcaaccagcagccccgaccagccttcccgcagccacctggacgatgatggcatgtcagtgtacacagacacgatccaacagcgcctgcgtcagattgagtc

SEQ ID NO: 15762 - DNA, 481 bp, Homo sapiens
  MAP TO AC002466.1; EXPRESSED IN LUNG, SIGNAL = 0.41
ggaactggatggtatcaaaattcaaagataagtggcaatatttcttatttcttttttaaagctttcattggaaaaaaaaaaagttaacttttgtggttatgttgaaaaaaaaatgcaaagaccagtacagcctatccttttttcttttagaagttgtggaggcctttttttcagcagtgtgattccctgacatccccctaccctgccattctactaaatttcctctcacatcttctatacagccccctcccacatacacaggacagaagtggaacaagtggagaagaaaatgatgagagtaatgccgagggaagacagcagtgtgtttaacatcacaagatcagagggagcccagaagcagaacctagaaaaatcctttcacagcatgcaatatagaacaaaaatccccagaaaactcaaatactactattatcatgtttcaaaacaagaaagctaagaaaggtgacaaaaggacccaaga

SEQ ID NO: 15763 - DNA, 458 bp, Homo sapiens
  MAP TO AC002477.1; EXPRESSED IN LUNG, SIGNAL = 0.46
atgcgaatagtcagaagcggaatgaatgatagatcggactccaaaggcacgtaggctcgtacaagagaaagtgcggccgtctcactcacttctgccgcaggctctcctccctctccttgtcgaggaggctaggccaaggcttgtcgctcccgtaggggcgcgagtagctgccgtaatagactgacgaggaggcagaagcgaaggggatgccccggggcgcagagggccgctctctagaacgcgaccgcgagcgtgagcggtaggactggtttcgggagccttggctgaggccacccagctgatgggtgagtccattccggtccccggaccgagagcaagagtgcgagcgagagcggcggccccgcggggagcgggcagatttgctgggcttcggactcttcgacgaactgcgacgtcttccccccgagcccgaggcctccctatccgggctgcgtgag

SEQ ID NO: 15764 - DNA, 465 bp, Homo sapiens
  MAP TO AC006151.3; EXPRESSED IN LUNG, SIGNAL = 0.48
aactcaaaacaaaaagatgagcctagatatgacaaggttgttacatgatctagctaatgctgaactagttgataaaatatgcacattcatctaacactgttactttaggcagtttccttttcattttacacaactttttttgacctcactttttttacctacaaagtaataaattccattaggtgaattccaaaattaatttcagccataactttcctattacatagttccattaacaaatgatgtgatgcagtctatgttgcaagttggactaccatttatccaagacgacgaattgtgctctggaatgcagaatacagcactgggagttggcctcaggacttcaagatttgctgcaggcattcagaagagttatttaaattctctggacttcagttttctcacctacaaatacaaacaaaggtaaaataatctctaagtttccttcaagctctaatattcggc

SEQ ID NO: 15765 - DNA, 481 bp, Homo sapiens
  MAP TO AC005701.1; EXPRESSED IN LUNG, SIGNAL = 0.47
caattaaatgttgtcaccatgaagatagtaataatttcaacacattgataccaaaatgcaacttttcatttgcccagtctatcagctttagtcttttgctatcagcctaaacttctatccttgtcttcggaagacactgcacttactgactgtcctaatcacttattcatccaaacacactttttgatgctttccctaaactcgtagtatgtgcgcctgagtggctgggttattacctgaacaagggcgtggatcttaaggccagattccttgatgagattgtaatatttttccattcgatcatgccgatcatccagagaaagaagggattccctttttccatcttttgtcttaaatattggagtcacccatgttttcatgatgttttggatctcttccacattgtctttagttttctgaattctttgttcaagatcatgaatactactggtgatttcagtgacataatcgcaaatgcctg

SEQ ID NO: 15766 - DNA, 476 bp, Homo sapiens
  MAP TO AC004468.1; EXPRESSED IN LUNG, SIGNAL = 0.41
ccttttcacttggattttcttcaaatatttcaaggtagctcttaattacctctagtaggtctttattctacgtttgagtttcttttctcttcttttctcttcaaacttcttgggataattagatagattataactttctacctctatttttctgaacttttgatcctttgcgggcacgattgaaatattttcttatctatgcaaatgagcaaatacacgcaaaagcagattgaactatagtggtgtatggaatgcaacccaggcttattctgtgatctttcttgttttaacaggttttaaaagcggatctagaaaagaaaaagcaatccatgggcaaactgtattcactcaaacaagatcttctttcaacactgaagaataagtcagtgacccagaagacggaagcatggctggataactttgcccggtgttgggataatttagtccaaaaacttgaaaagagtacagcacaggtt

SEQ ID NO: 15767 - DNA, 468 bp, Homo sapiens
  MAP TO AC004820.2; EXPRESSED IN LUNG, SIGNAL = 0.43
agcagcgctttgcatttaggaaatcactcaataactatttgatatattgaactctgaaataattttggctacatttttgaagtcagagagcatatctcacttctgtaataatgaaataatgcgaatatgagtaacactggatcaaaacacaaaacaaaccctggggatgggatggggtgggagtggggagagcacaaccacttggaattaagtggtattcaaactacaagaggataaactatatgagatttgtcttagaattctaattaggaaagaaatttgacttacctgtttaatcattttgccaagttcaaaatctggccttctgcctattgaatagtcagctttcacttcagaataggtatcattaataattgccaagaacatattctagggataagtattcaaataattatttcaataaaaatttagtttaaatgttaatgactttaacaagttttgggtttg

SEQ ID NO: 15768 - DNA, 448 bp, Homo sapiens
  MAP TO AB019441.1; EXPRESSED IN BONE MARROW, SIGNAL = 1.8; EXPRESSED IN LUNG, SIGNAL = 0.42
aaatcgcaagaagaggaaaatgcacacagctgtgtttagaaaattctcagtccagcactattcataatagcaaagacattaacccaggttggataaataaatgatgacacaggcaattgcacaatgatacagacatacatttagtacatgagacatcgatgatgtatccccaaagaaatgactttaaagagaaaaggcctgatgtgtggtggcactcacctccctgggatccccggacaggttgcaggcacactgtgtggcagggcaggctggtacatgctggcagctcctggggcctgatgtggagcaagcgcagggctgtatacccccaaggatggcacagtcagtgaattccagagagaagcagctcagccacactgcccaggcagagcccgagagggacgcccacgcacagggaggcagagcccagctcctccacagccaccac

SEQ ID NO: 15769 - DNA, 458 bp, Homo sapiens
  MAP TO AC005886.1; EXPRESSED IN LUNG, SIGNAL = 0.44
aaaagctctgaagtgaatatggccaaatgtcaatattaatcaactccagtaggtggcaggtatatagatatctgtttctaattatggttacttttctgttctcttcacttttctgtttaacaaaatgtaaaatgttaaggaaaaggaaaacctagttgagttcaacagaaccaaatgatggatgggtggaaccatgaatgaagtagctgttattggaaggaaacaatcataaactccaatgttcaaaaataaaatctgatgttcctttgtttaattcttggatgaaaatgaaccatccatcgaacagaaacctcctgatgctgctgttggtaacgtctggttgtcaccagccacggaccttgttttcttttcatcactgtcatgtttcttctccctctttggggatctgtcttccatgtgttttctataaaatcagcataacagttcctagtgaaaaa

SEQ ID NO: 15770 - DNA, 375 bp, Homo sapiens
  MAP TO AC005906.1; EXPRESSED IN LUNG, SIGNAL = 0.47
ggaggtcacagggaatatggaatgggtagtagaagaaggcagttataaataccagctttgactatgtaagcagtagcaaaaacaaggattgtaattatttttttaaattttattatgaatatgtttgtaggtgtatatgtataaacatatctgtatacataaaatatccttaatatatctttgttttcttccttgttatccccttatcctataacataagatgtattagctttatattatagtatttaagctacaggatgtcaaggaggagaatgaacattatccaaggactttggatcttcttctaaagaaaggcttagtgcactttcagttgtatgcagaatagttgtatcgttaggtgggagtatgattttg

SEQ ID NO: 15771 - DNA, 329 bp, Homo sapiens
  MAP TO AB001523.1; EXPRESSED IN LUNG, SIGNAL = 0.44
ctgtggttggatctcaagggcattatactaagagaaaaacgccagtcctataaggaggtgtactgtgtgattccatttctaaatgacatcctcaaaatgccagcctcagaaggagagcgggtcagtgttccacggagcagtgggaggcagcaggaggccgtcctctgtggtaatggagagttctgggccagggccgctgtggttgttacacgaatctacacatgtgacaaatgccatagaattagacccaaagaatgcctgcgaaagctgctgaaatccagtggggtctgcagcctggttcactctgtagtgaaatccagtggggtctg

SEQ ID NO: 15772 - DNA, 460 bp, Homo sapiens
  MAP TO AB003151.1; EXPRESSED IN LUNG, SIGNAL = 0.42
gagtcaagcctggcctttcagtccagcccagcccgtcgaggccccgcccctgttgttatggcccgcctccaggcaccgcccttgatcccaccttcatgagtcaggccccgccttccagcctagcccggccagccgaggccccgcccctgtagggacagcccacttccaggccccgcccttgatcccgcctccttcggtcaggccccgtcttctagttccgccccgcccgcggaaaccccgcccccgcgcgcctatggcccacctccaggtcccgcccctgagcccgcctccaggcgtccagccccgccttccagccccgccccaagcgccgaggcccggcttccaggctccgccccgacccgcgcggtggggaagagccgctgccgctggttctccggctcttcctcggcggttctggctcccggccgcgccgcagccctgcccagtctctctcccccag

SEQ ID NO: 15773 - DNA, 480 bp, Homo sapiens
  MAP TO AC005859.1; EXPRESSED IN LUNG, SIGNAL = 0.43
tgggagaaattaatgtataatcccactaccctaggtagtaaatactattaacaatttatcatgatcaaaaacacttctgaaatatttcatatctctgtgtgatcatttctactcaaaaccttgcagtggctccctattaatttcaggatgcaggccaaagtctgcaatgtttttcagcacatggcccaagtgacctttctagatatctttcttgccacttccagtggggcatccccatcagactgataagctgtttcagccattttcttgaaagttgtcagcatttatctagcatgacttggtgaagggcaggaaggtcagatgagctgggagagagaggaggtagggtaagggcagcaagtgatgccggaagagctgcagcttccatctatagtaactctgcaaaaggtttgggtctgtgctcttcaccaggccagagctaaggaaactcattgtctgatattcttcctcagtgacggg

SEQ ID NO: 15774 - DNA, 484 bp, Homo sapiens
  MAP TO AC002556.1; EXPRESSED IN LUNG, SIGNAL = 0.45
tctagtggccatctggaaatcatgatgcattattgagaatgaaatctctagctagaaagaagagaaaaaagatggagagagagactgagtgcttgatgactcagcactgtcaaatcagtcctggactgcccacctctggatgccgtttatgttggaggacaataaacacttatatgtttcagccactgcagtcagactttggttaccagcagctgaagtggtttgtaaatgatacatttctgctgtggaagtgtgaggggagaaagggcactacgcatctaagctaagagttaacgctgagtctgccacggacatcctctcatctgcctcttgagcacagggaaaccacgtccttttccttccaaagatccactggaagttctccttgtactctcgctcttcctacttggagggtcacttacctatattctcccacatggttagaaatgtgagagacaacagtttactcctcctgatactccaa

SEQ ID NO: 15775 - DNA, 464 bp, Homo sapiens
  MAP TO AC006079.1; EXPRESSED IN LUNG, SIGNAL = 0.46
ttggaagtgaaatatacgatagccagaaaatattagtattcactcaggtgggagatatgggagtcttgggagtttcaacataaaacattttaaaaaccaacgtaaatttcaatgttgctgcagccaggcaagatctgccattgttaattatgggaagaatgcttaagtatgttagaaaacagcctcatttgtaaaacacaccagtgtctctacttttctgtcttctctctgacagcattcttgtgaactctttgttaacctatgccacatttatcgttctgctcaaagagaagaaatatcaaggaaaaaaaaagtgtgttgaaacattgcccagcccagatgaagaagtagagaagaatactatttcgacaaatttgaggggaagacagagaaaaacaatctctgcaaagagagtggaggaaggaaatgctattggcactgtcaggaaatatggccaagtagga

SEQ ID NO: 15776 - DNA, 486 bp, Homo sapiens
  MAP TO AC004547.1; EXPRESSED IN LUNG, SIGNAL = 0.48
tctggaaaggattcaccattaagaacattcatgattcatgggaggaggtgaaaacagtgacattaataggaatttggataaattgaatccaaccgtcatggatgacttttaggggttcaagatttcagtggaggaggtcactgcagatatggtggaaatatcaagcaaggtacaattagaagcagagcctgatgatgtgagtgaattgctacaaactcatgacaaaacttgaggatgagtagttgcaagcaaagaaagtagtttctttcagagatggaatctacttctggtgaagatgctgtcaacattatttatatgacaacaaaggatctagaatattacatcaacttaatcgacaaagcaatggcagggtttgaaaggattgacttcagtttcgaaagaagttccactgtgggtaaaatgcaatcaaacagcatcacatgctagagagaaatctgttgtgaaagaaagagttaatccatgtgg

SEQ ID NO: 15777 - DNA, 456 bp, Homo sapiens
  MAP TO AC005703.1; EXPRESSED IN LUNG, SIGNAL = 0.47
gatcctgggtaggcttttcctctgtggcccttgacacaattgaagtaggtccatttgctgttcagcaagtactaggtactgtttgttctacgccacatcttacatcattaaatgcttccagagttctatgctccaatgatgatggaggcatgaccatcatgtctatcataaagctgggaaaggcaaagtacagagatgtacttatctcatagcttttgggcaaatgcggcaagattcggacctgggcagtcccaccactaagctagtatttccttttagcaatgaggctcctgtgtggtagatctggaatgcaggtagtgcaggtagacagatccgggttagaattgcagctctgccagctgaccttcatccaggtacttaaactcttggatctttcatttttcccagttctaaaataggaataataatacctacctagtgaacaagttttacaag

SEQ ID NO: 15778 - DNA, 467 bp, Homo sapiens
  MAP TO AC000389.1; EXPRESSED IN LUNG, SIGNAL = 0.42
ctgcagttggtaaaggacttatcaaatagtgtcagctgaacaggaattacagaactctccccacctacccatattacctacggttcccaccatcttgagaatacttagttataaataaaatcatagttttcatgaactgaaactcttaattaaatagaatctttaggcatgctactctttagaggataaagaaagtgataagaaagcaaactgataacagggaaccagtaagaaaaataactccaggctatgtcttggagatagtagacatttcagatcaatctttcctatcttttttacttactttctatgctgcacacggagagcatatttagaatgatgaaccgtaggcaacataaaagcatcatcaaagaacatttctttcatgttcattatacatactctatagcaaaggctggaaaatgggtggctatatttagcacagacttctgaacaacatagtctag

SEQ ID NO: 15779 - DNA, 434 bp, Homo sapiens
  MAP TO AC006398.1; EXPRESSED IN LUNG, SIGNAL = 0.49; EXPRESSED IN BONE MARROW, SIGNAL = 0.5
catgttcccaacaacaaaatgaaaaaccatgtcatgtcattcatggggcattgcatggagtactctgaaggctatcgtcttagcagtgggaagaaaaatagccctagattaaatactgccctgatcccacctaacaaagcttaaaatcaagattttaaagaataaaatggtttccaagtaacttaactgcatcccagaacagagtttaagaatatttatgaaaacacaagaacatctaccactcaccaagataaaagccacaatgtctggcatccagtaacaattactagccatgcaaagaagcagaaaaatatggctcataatgaggagaaaattaatcaacagagacttaaatatgtcatagatgataagagtagataataactttaaaataattattataactatattccatacagaaaggaaagattgag

SEQ ID NO: 15780 - DNA, 469 bp, Homo sapiens
  MAP TO AC002504.1; EXPRESSED IN LUNG, SIGNAL = 0.42
cctattcactgctcatttggccccagacgcgtccgaaaacaacctgaggccaaagaggggcaggtgggcgcgggccgcggtggaaaggaagggggccccgcagcgcgccaagggaagggacgggtaggggcccggtgcgcccgccgggccgagccgcgccgaccctgggctctctctgccttgcaggtctggttccagaaccgtcgggccaagtggcgcaagcgggagaaggcaggcgcgcagacccacccccctgggctgcccttcccggggccgctctccgccacccacccgctcagcccctacctggacgccagccccttccctccgcaccacccggcgctcgactccgcttggactgccgctgccgccgccgccgccgccgccttcccgagcctacctccgcctccgggctcggccagcctgccgcccagcggggcgccgctgggcctgagcactttcctcggag

SEQ ID NO: 15781 - DNA, 466 bp, Homo sapiens
  MAP TO AC004544.1; EXPRESSED IN LUNG, SIGNAL = 0.46
cacaatcatgacaaagtgcaagtttcctcattctcccttgaaatctttcttttctgaccctccatattccttccccatcctcagtcaaccaccaatttgttttctgttactacagattagctggtatttattaaaattttatataagtgggaacctacattatgttctcttttttgttgtctggctattttcattcagtatagcaagagacccatccatgttgctgagtatcaatagctcattcctttttattgatgaattccattctattgtatagacatactacaatttgtttatccactcgcctgttgatgggcatatgagtagtttctagtttaggactatgacaactaaaaccgctatgaacattcttataaaagtgtagagataggctttcatttctcatgtgtgaatacctggaagtagaaaacatatgataggcttatattttaccttcttaccaaca

SEQ ID NO: 15782 - DNA, 460 bp, Homo sapiens
  MAP TO AC006115.1; EXPRESSED IN LUNG, SIGNAL = 0.45
ttcctttctttttaggcccgaataatatgccattgtctgtatagaccccatcttgcttatccattcaccaatcgatggagacttgagttgcttccactttgactattatgaataatgctgccatgcacgcggttgcacaaacgtctctttgattctctgctttcaaaacttgtgagtaagattcagaggtaaattgctggttcatgggtaattttatttctgttttttcagaacagtcggatggtttcccaccacagctgcatcacatcacgatcgcaccaacggtgcaggtgtttcagcctctccaaatcctgtcagtgttgttatattctgtttaacggatagtgaccatggaaacggcaatgagttagttccttatttctttgccagggaaaatattgctttcatttttaatacttattacttaatcatggtatatgtctttggttataccgtggca

SEQ ID NO: 15783 - DNA, 468 bp, Homo sapiens
  MAP TO AC005186.1; EXPRESSED IN LUNG, SIGNAL = 0.49; EXPRESSED IN BONE MARROW, SIGNAL = 0.49
ccaggctctcattatctctattccttccagtacctgaagttaaaaaaaaaaaaatcctttatctgataactcctataatagccctggaatttatagaatgtcctccaatttgcattcctagcactgttttctcagaagggactttataggttgattctcagtgttttctttcgatagagagaaaaacacacagaaagagacagatctagaaatatagagataactatatgcatatttatagctacaatatgtatgcatacatatccgtactgatatagatataggcatattgatgtagacataaatagagatgtatccaaaatgtcatggcttttattgacatatggataattacctctgtattagtcagggttctccagagaaacagaaccaacaggacgtgtatatggagggagagaaaggcactgatgataaggaatgtgcttatgctgttagggagcctgaaga

SEQ ID NO: 15784 - DNA, 384 bp, Homo sapiens
  MAP TO AC004057.1; EXPRESSED IN LUNG, SIGNAL = 0.54; EXPRESSED IN BONE MARROW, SIGNAL = 0.58
gcagatttctaaaaagctcaacctcatcttttaaagaaaattatcttgcatttaatttttttagatggtccccttctttctgaaatacctctgaaagtcatttatctctttttatgaccagaaataattttgcattatcaccatggcctacttctttatcatcccccaggaggagtctggcagccaaagagttcctttccacaaatgtgttcagctttaagtaccttggattgtacgtcagcattgtggtcattctgaagcagaagtgcggcagatttggtgtcgtctttcctagcggcaatatgcagagctggcagcctcactttccctttggtgtcattctccaagaggatggccaccgcctggttgtgtccttgctggagt

SEQ ID NO: 15785 - DNA, 387 bp, Homo sapiens
  MAP TO AC002452.1; EXPRESSED IN BONE MARROW, SIGNAL = 0.53; EXPRESSED IN LUNG, SIGNAL = 0.48
aggagtctcaaaaggcagtcctattaaaaatagtatcaggattatggcagaccgtatcactctcttcttataatttaattttttcctcctttttcattattctatacatatatttaatggaagattgcctttatgaatttgaacacagatcttttttttctattaaaaataactacatctaagtcttattcattcttccagcagcctcaactaaagaaatctgcagagagttacaatgtgctggttgtgcagaggaagtataagcgtacagtgacacacatgtatgtggccaccaggggaagtaatcattctttattaaaaaacactctgcagcggatgaatcaaaggcctattaagaaagcctttgattcaaagcccattcaaaga

SEQ ID NO: 15786 - DNA, 467 bp, Homo sapiens
  MAP TO AC005219.1; EXPRESSED IN LUNG, SIGNAL = 0.52
tccattatttgccctccaagtaaataatttcctttctcataatctttattacttttcccatttcctttgcattttgtaaaggctgttgaaatttatcctccatgtgaatgatttaattttctggcattaattatagtttttattgcctctaatttgatgattttaatcttatcattaatatatgagtttccttgcccttcttacagcccttttcatctcatctagctttcttctcatggctttctacttccgttttataaaagctatgtttattgaaagtgtcgaacagttttctaaaattttcttctgggatttgccataagttattttcactgtgatgctcttcttgggaattttcaagatgttgtttcctgtggtgttcctgtcatcttcactagggtttttgttgttccttgtcaggattcccctgctccacttggctctgcacaaagaaggaactgtgggga

SEQ ID NO: 15787 - DNA, 462 bp, Homo sapiens
  MAP TO AC005026.1; EXPRESSED IN LUNG, SIGNAL = 0.47
gcaatttatcattttccctgcacattaataaacagagctcccccgaggtaagcccctggaagacaaatatttctccctagtttcctcaactgtagctagtagatcacatgggggaggagaggtgcttgtcaccgcaagttgccagcttcttatccttcacttcttccacgtaggcaagtagcaataaatagctggtatagagtccaactgcaggtaattaggttcttttttgtttatataacaggcaccagattctccagccccaggctgtcagccaggccgagccgaaaacgtacactgtccatatcaccactctccgatcatagctttgaccttcagaccatgataaggacgtctcccaactccttggtcacgattctcaataattcccgtagcagctcttcagcaagtggctcctatggtcacttatctgcaagtgcaatcaggtatgtattttcctga

SEQ ID NO: 15788 - DNA, 438 bp, Homo sapiens
  MAP TO AC000120.1; EXPRESSED IN LUNG, SIGNAL = 0.43
tcaagactagcctgggcaacacagtgagaccctgtctctactaaaagattaaaaaattagccaggtgcggtgacacatgcctgcagtccctgctactcaggaggctgaggtgggaggatcacttgagcccaggagtccgaggctgcagtgagtcgtgatcatgccactgcagtccagcctgggtgtcagagtgagaccctgtctccaaaaatattaaaataaaataaaataaaaaagaaatgacttgttagatagtcaatcactcatcacctaccatctctttcatctgccctctgtagatagcgtgcaatagtatacaactgttttcctttacagatttccactggaggtctcagcaaagggttgtcatcaaaatttatctccttcagtgaaaaaatattgtagatagcactaggtagagctgtcagattatttcct

SEQ ID NO: 15789 - DNA, 465 bp, Homo sapiens
  MAP TO AC000003.1; EXPRESSED IN LUNG, SIGNAL = 0.43; EXPRESSED IN BONE MARROW, SIGNAL = 0.53
tcaatatctctgcatttccaggatttgctaatgtttatttagaatttttacacctattctctaagtgaggttaggagcttttacttcctttcttctcccaattgtttttctttgaacttgatatcagggtattataaaaaggagctgaatgttttctatttatggaagagattggattaagtggttttttcttaacgatttgagaaaacttatcagtaaaaccacaccgacaggtacagttttttaaggtaggttttagactgccgaatcaattcgtttgaaggttatagacctattcaggttttctatttcctcttgagtcaatttggaatttttattttcctggaaaattgtcagtggcaggagagaacaaataaccagggagttccagaacttgggggaaaatagcatctttgtctgattcattgctatccaacactgagaaggtaggagggaggagatcga

SEQ ID NO: 15790 - DNA, 467 bp, Homo sapiens
  MAP TO AB003151.1; EXPRESSED IN LUNG, SIGNAL = 0.44
cattatgatcagacattaaaaattggataaatatgtctacaaggttttactaaaattaagtttaacattaataacacactaatataaagatgaaatttagcttatctggtataaaaatcatacaggaagcattgtcaaatacaaaatggtgtttggccttctttggtctaaaaactaataaaaataggtgccaaagaaaatttctcaacaagaaagcatgaaggactataaagtccactgttgatatccccacgtttaaaacaaaagatcaatttcttagaaattatatactcggtttatcctccaccttctcttcccttaaaacagaggtcttttagcacaggtgctgcctttggactttccagtgcctcagcatcagcctggggatcacgttctcatcaaagaggggaaagaagggaaactcgagccagcccgggaaggaccctaccttgtgctgctaaccactg

SEQ ID NO: 15791 - DNA, 467 bp, Homo sapiens
  MAP TO AC004067.1; EXPRESSED IN LUNG, SIGNAL = 0.42
tccacagatgcagtttcaccaagggcactacctggattccagcacagctgacagggtgggagagggagtgcctgcctgttccatttcgtccaaggaaatgggaggtagagcaatagaggaggattcccctcaatgggaatagtgtttgggtttggggacaccccccacaaaagtaaattgtccactattatattgtaaagacctgggttagtaattttctatgtgttggaaaatggttcttactgttctaaaacaaagacatgctcatgcatgatgtttttctttcagatggcaacatgatttcagcttctaccttgatggatattttgctaatgaatgattttaaacttgtcattaataaaatagcatatgatgtgcagtgtccaaagagaggtaagaaacacagctatccaactattactttttttttttttttttagatgaattctcacttgctctgtttccca

SEQ ID NO: 15792 - DNA, 469 bp, Homo sapiens
  MAP TO AB019439.1; EXPRESSED IN LUNG, SIGNAL = 0.43
aggaagccaccacacatttccttaaattcaggtccaactcataagggaaatgctttctgagagtcatggatctcatgtgcaagaaaatgaagcacctgtggttcttcctcctgctggtggcggctcccagatgtgagtgtttctaggatgcagacatggagatatgggaggctgcctctgatcccagggctcactgtgggtttttctgttcacaggggtcctgtcccagctgcagctgcaggagtcgggcccaggactggtgaagccttcggagaccctgtccctcacctgcactgtctctggtggctccatcagcagtagtagttactactggggctggatccgccagcccccagggaaggggctggagtggattgggagtatctattatagtgggagcacctactacaacccgtccctcaagagtcgagtcaccatatccgtagacacgtccaagaaccagttctcc

SEQ ID NO: 15793 - DNA, 501 bp, Homo sapiens
  MAP TO AL137853.3; EXPRESSED IN LUNG, SIGNAL = 0.86
gtattctggaggctcggttgcagtcctccagtcccccttgtgagatagcatatagttattagtttgtggctcagatgtcctggaataagtgaaccaggagctgacagacgtgttcttcatgacagaaattgaagcaggacattgctcggcaaaagagcagcttggaggccacccgtgagatggtgacccgattcatggagacagcagacagtactacagcagcagtgctgcagggcaaactggcagaggtgagccagcggttcgaacagctctgtctacagcagcaagaaaaggagagctccctaaagaagcttctaccccaggcagagatgtttgaacacctctctggtaagctgcagcagttcatggaaaacaaaagtcggatgctggcctctggaaatcagccagatcaagatattacacatttcttccaacagatccaggtgaggatatatctgccatgttagcagaataaagggaagagaagggcagggagagaac

SEQ ID NO: 15794 - DNA, 587 bp, Homo sapiens
  MAP TO AC024123.1; EXPRESSED IN LUNG, SIGNAL = 5.8; EXPRESSED IN PLACENTA, SIGNAL = 1.7
gtggccaaacactttaaggcattcatgtggtcgctaggctgcagggttgaaccctggctcaccccgcagggcgccgtgtgctctgtggcctggctgtgcctttgctgacaccgtgcccgtgtgtgttcatgcaggtcaggagcgggtcgtgattgccgacgatctcccgcacccgttcggtctgacgcagtacagcgattatatctactggacagactggaatctgcacagcattgagcgggccgacaagactagcggccggaaccgcaccctcatccagggccacctggacttcgtgatggacatcctggtgttccactcctcccgccaggatggcctcaatgactgtatgcacaacaacgggcagtgtgggcagctgtgccttgccatccccggcggccaccgctgcggctgcgcctcacactacaccctggaccccagcagccgcaactgcagccgtaagtgcctcatggtcccccgcacctcactccctcgttagatcaggctggttctgggagctgacgctgaaaggagcttctcatctggggttcctgggtgtacatagatggttgggtaggttgtgcact

SEQ ID NO: 15795 - DNA, 553 bp, Homo sapiens
  MAP TO AC002036.1; EXPRESSED IN BONE MARROW, SIGNAL = 1.7; EXPRESSED IN LUNG, SIGNAL = 2.4; EXPRESSED IN PLACENTA, SIGNAL = 1.5
gtcctcagacttctccagcgcctggcgcagctcctcatcggggatcttgtcctgccgcttcttttagtctaagtccaggcggcggccctccagcttctacaggtggtgctggatccccttcaggtctttctcacacaggttctggaggaggtcaatgaagttctgcttgacctctatgtccagggagtccttcacctctgccaggtgcttcatggactcgccggcatccagcagtgcgtcactgaagttggactcgttgcctagctccttctggtggcggatcaggcactcgctcaggagcccctccgactgcgggtagccggggttcttcacctggccccggatcttgcacaccgcgttcagcatggtcagcttagcctgcgaggctgggttgggctgcaggtacttgatggtccttgccagcatttccgtcaccgccttgctgatgacatcgccatctctttgaagtcatcgtccagcttggtcccctcagcccctccgaccttctcactgaccagctggctggccttgtagaactgcttcttcagccctg

SEQ ID NO: 15796 - DNA, 558 bp, Homo sapiens
  MAP TO AC011375.3; EXPRESSED IN PLACENTA, SIGNAL = 1.5; EXPRESSED IN LUNG, SIGNAL = 1.8
ttgccaaaaatatgctgctcagtagtgagtcttgaaaattcctttgattttaagatttctaataagatctgagaattaatattttgtcagttgatgtcttatattttattttttataggagagacgataataaagacattgactcagagaaagaagctgccatggaagctgaaattaaagctgcccgagaaagggccattgtccctctggaggctcgaatgaagcagttcaaggacatgctgctagagagaggggtcagaaaacaatctttgggggagatatttctgttttgtataagtaatataaatatgtcttgctaaaaggtcaaatctaaggttagtgctcatgttatggggggggataaggggatttttaaaattactgtacattttttgcaacagcctttttcttggctaatcttatcatatttaactaaatgccattttactgtccttttaagtacaaataacacttaacatttattgggtcattaaattgtggtgagtaatataagacgagtattaacattacagaatggcggactgcttgggataggta

SEQ ID NO: 15797 - DNA, 578 bp, Homo sapiens
  MAP TO AL121808.2; EXPRESSED IN BONE MARROW, SIGNAL = 3.4; EXPRESSED IN LUNG, SIGNAL = 2.1; EXPRESSED IN PLACENTA, SIGNAL = 1.3
ttccaaccctttcatagtggtattgatacaatgatacactgtttttcttgaaaatgtgattaatggccagtttttctaattgtttctataggatttttgtgagcatggaacaaagtctgggttaaaccagggggccatttctactcttcaaagtagtgatattcttaatttaacaaaagaacaacctcaggccaaagcaggcaatggacagaactcttgtggagtagaagatgtccttcagcttctgcgtattctatatatagttgcaagtgacccttattcaagaatatcccaggaaggtctgtaagaagccttgtttcatttctatagcagttttaaagcaagtcagtttatatttttattaattttattaattaattttatagatggtgatgaacagcttcagtttacttttccaccagatgaattcactagcaaaaaaattacaacaaaaatattacagcagattgaggtaataaaatcagacagctgaactcttcattctattactgttggacttttcctaatattccctttactttcttttctacctctcaccatctttcccttccctctga

SEQ ID NO: 15798 - DNA, 563 bp, Homo sapiens
  MAP TO AP001224.1; EXPRESSED IN LUNG, SIGNAL =  18; EXPRESSED IN BONE MARROW, SIGNAL =  14
tgaaaattgctcattaggtttgtacataactttgcaattcattatttcaggatccagtggggatattgtgatgactcagtctccactctccctgcccgtcacccctggagagccggcctccatctcctgcaggtctagtcagagcctcctgcatagtaatggatacaactatttggattggtacctgcagaagccagggcagtctccacagctcctgatctatttgggttctaatcgggcctccggggtccctgacaggttcagtggcagtggatcaggcacagattttacactgaaaatcagcagagtggaggctgaggatgttggggtttattactgcatgcaagctctacaaactcctcccacagtggtacaacccctaacagaaacctcctcctggggttgcccagttgctcacatgtgctgcttgtctggagagcagctcagcagggtctctgagtctgcagaagaggaggctgttggagacctcagggcagaggttgctgctgaggactctggctcatgatagcctcagctgtacttcagtcccacatgttaaggcc

SEQ ID NO: 15799 - DNA, 514 bp, Homo sapiens
  MAP TO AC009989.6; EXPRESSED IN LUNG, SIGNAL = 2.4
tccagagtgatggcagtttgcctttttgtctattgatggaaaattccatcagcacatccccgtgtcatcatcattcggggatgctcttgcagggcaggaaagagcacataggaggaactgcaggagggcccatttgtctttgaacttcagaagtgaggaggtgtttatgtctcagctgggcgtgtttaggttttggcaacgtggatgggttagtaatgccgtgctttctccttttgttgcagctggtccttcggggtgttaatgtgggagatcttcactttagggggctcgccctacccagggattcccgtggaggaactttttaagctgctgaaggaaggacacagaatggataagccagccaactgcaccaacgaactgtaagggctgttgtctttcctgccggtgccccagtggacttgccacaccagtaatacctctcctgatgtatctcatttttgaaggcccctggtttcctaaacatgctctaagaagaatggctgaagctctctgg

SEQ ID NO: 15800 - DNA, 528 bp, Homo sapiens
  MAP TO AC022325.3; EXPRESSED IN LUNG, SIGNAL = 1.6
gccattttccactttccttcacactcattctaccatttccagtgatcattttgcttttgatcaatgtccagtagtccgaaacctttccagtaatgcttattcaagtgtgtttcacattaatgatcttggtctgctagaaaaccaattacacattcttacatttaatctcggctctgtaatggatagtgttttccttaaagatgtgccagcggtggattgtcgcaagcacagcagcacacaaagctgtgattgctttaagaaaaatggtccaagcaagacgttacataaaaactctggaaatcaatcaaagtagtgaagtaatttgtcattattttcttagctttaaaaaagtgtatttacttttgctctaaaatctcaaagacagactgtgtatgttatctaaggagagtaagttaaaaaatatatattccatgtgtttttggaaaaaatcaggcaagattatgagacaaaaatcaatcttcatttttaattaaatgtctaatatatgcataagactgcatcatgaca

SEQ ID NO: 15801 - DNA, 585 bp, Homo sapiens
  MAP TO AL136092.7; EXPRESSED IN LUNG, SIGNAL = 3.5; EXPRESSED IN PLACENTA, SIGNAL = 1.4
aggagaggtccggtccaggccgactgtccctcgggggcctgaggccgtgccgggcactcagaccttgtagtagatgttcgccgggctctggggcggcatctcttggacgatgtagacagggtgcccgtagtccccactcaccttctcatagtgggggcagtagttgttctctgtagtccgtaagggaatgatgatgtcgctgggctcggtgcccgctgtgccactgccccccttgggactggccagggtactgagcgagagggcagccgcccgctgctgtgtgtgcttgcggtgccgcttgcgtagcttcagtagtaggaccgtcaggaagatgatgatgagcaggaagatgacgcaaccggcaccgacagccgcgaacaatgccaccttggagttgaagaagccatcagggtccccgctgctgcccccacttgcacctgggccactcttctcttcctggttcacagtctctgaggaagggaaaggggaaggaacagtcagccaggggtcccagggacacacagcagatttcaggccaggcccagcttgcatttcttcagggacagggcctaacaaggtgacaga

SEQ ID NO: 15802 - DNA, 579 bp, Homo sapiens
  MAP TO AC008635.4; EXPRESSED IN LUNG, SIGNAL = 2.4; EXPRESSED IN BONE MARROW, SIGNAL = 1.7
tggtttccagcccaagtaacctagtctaggcctgagtcccagcccatcttttacaggacggctcctcctgtagccacatccctccagtaggcccgccccagcactgggctccacccccaaggtgccaggctgtttccgggtccacccccctctcatggctccgcccacttctccagccccaccccacaacccacccgcccatggggtaggcgggccccaggcacctccagctgagatgtggctccaggggctggccgggtacatgaaggcggcgttctggatctggtcattgatgtcctcatcctcgttgaaagggaaggtgccgctgaggctgacgtacatgatcacgcccactgaccacatgtccagcgagcggttgtagccctggttgagcagcacctcgggtgccaggtaggccggcgtgcccaccactgagcggcggaacgacttctcgccgatgatgcgagcaaagccaaagtcacacagcttcacctgcagagggcaagggatggaggctccaccaggtgatggagccgcacccaccccagcatccccaccacaccaccctccatggtattc

SEQ ID NO: 15803 - DNA, 586 bp, Homo sapiens; identical to SEQ ID NO: 12027
  MAP TO AL138828.4; EXPRESSED IN LUNG, SIGNAL =   3; EXPRESSED IN PLACENTA, SIGNAL = 2.1

SEQ ID NO: 15804 - DNA, 526 bp, Homo sapiens
  MAP TO AL138761.3; EXPRESSED IN PLACENTA, SIGNAL = 1.4; EXPRESSED IN LUNG, SIGNAL = 2.6
gaagggctttgctctctgtgaccaccatcctggggaagactaattggtatatgccatgtatctatagtcccagcccacagaattaaagtgaacatcaacaagcctaaggtggctctaattgtttagaaagaaaggaattttgtagaacttctaatggtcattcaaaaattttaaacctaaaagagaagagactaacttgcatatttacctgtttaattttatcacggtcctgatctggtgtggctgttgagttaattctcaaactcttcttaaacatggccattcgagtcttggcttcactgcgctgaatcttgggcagtcttgctctttcttgagtctgtctgtttttcaattcctcaataagtctttgattgtaacgctgcatttgctctgtttcctatgaaagttttaaatagaatccagtgacgcagaaacaatagtcagtacccacatgcatattcaaatatgtcattttgttattgttgtttcctataattaccctctcccttgttgcagtgaccagcaa

SEQ ID NO: 15805 - DNA, 548 bp, Homo sapiens
  MAP TO AL135744.2; EXPRESSED IN BONE MARROW, SIGNAL = 2.6; EXPRESSED IN LUNG, SIGNAL = 1.7
caagctattgttgggaattcaagaaaaagtgaacagctccgttatctaatagatctcaagttttcaagtcctggtctgtaacaaccaaaaggcagtctcactttaagtatatcagtagattttatgcacaacataccacattcaaattctataaaacagggctcatgggctaaatgggagactgatggcagatttacttacttcaaccattccttgatggggtcaagagaggctacaggaatggcgttgatcatggtcactttcttgctgtagtccttgtagacgattaccatatcaaagttcttcaggtgaaactggacccgctcaaagtggatcagctctacctcatccaatgtcaccacaaaaggtggctgtcagggagaaactgaatcattagcatataagtatttcccccaaagcaataatatttcaaataactttcatgatctaaatcactacataaaagataacttaagctgttttttggttttttttttgaaagactgaggcagtacaacatactaagaagccacagaaaaaggatctgc

SEQ ID NO: 15806 - DNA, 540 bp, Homo sapiens
  MAP TO AL159191.1; EXPRESSED IN LUNG, SIGNAL =   2
atggaagccacaggatgttccggtgatctagaaacaatatgccatctttcttttctggtcacgtttctgacaagtaggcttgtcctcactatggcaagatggtgaaacagctcttacacactggctcttcagaaaagatggaaactcctagacaggctaataaaaataacataaaaaggacaaccaggagatccagtaaggtaggtaataaacaaaacatgagtaagaaggatggagaagacaggaataagacccagatgcagcaggaagagaaacttgacacctctgaggttacaagaggctagaaggctttggacaagtttggattttctgaaatagaaaattgtgcctgagaagaataaaaactatatgcatgagaatgcgcagagtttgaaaatagaagacacggagaaggaacctcagtttctaatctggagcaacctaatgaagaagattaattgctctaagaagggcaatgtcagaacgtctgtagaaggcagacaaaactccctaaatccttgatgtagcttgaaggcaggc

SEQ ID NO: 15807 - DNA, 595 bp, Homo sapiens
  MAP TO AL136092.7; EXPRESSED IN LUNG, SIGNAL = 4.1; EXPRESSED IN PLACENTA, SIGNAL = 1.9
acatgccagtcttcaaaggggatcagatccagcagggtcttaactacatgcaatagcattgcaccacttagaagctcccactactacaggagaggaaagagttaagcccagggagagagccagaggatgggatgggcgggactcacaggtaatgtagtaatcatggtgcttcttgaactccaggcccatgtagttggggctgaactcctggaacttgatggtaaagcgtatttcctgctctggcctattgcaggtgaccaacacgttggggtcgagaactgtgctacaggcagctgcctgctcaggccgcaccaggtacagcttgtagtactcatagggccgccctgcttctgctcgggggcagatgatgtccagcttgtctccaattttcggatagatcaccaagcccttcccactcaggaacctgcccagaaggaagaagatggtcagcctcagggttgggggtggccccaggccattccagaaccagggaagcggacaagagccgggctgggcctactgggtggagatggcaagagcaagccttctgcccttcctccatcctcaggctgggggtggggagagagaaccacac

SEQ ID NO: 15808 - DNA, 533 bp, Homo sapiens
  MAP TO AL138725.4; EXPRESSED IN BONE MARROW, SIGNAL = 1.5; EXPRESSED IN LUNG, SIGNAL = 1.7
cataaccacagtgtgcgaggggctcagcaccaccaggtctgtgatgaagcccccctgttcaaacttcttgaccttctgcacctcttggcctggaactctggggtgcagttgtggtgaatgaaaccaatacctcccatcagagccatcgcaatggccatgtcggcctctgtcacagtgtccatgggggaggagatcagcgtcagcggcgtcttcagcgtgatcttccgggtcaggactgaggtcaggtccacctcatcagctatgaagtctatgaatcctgggagaatcgggacgtcgttgtaggtgaggccgtcagcgctggtgaagagctgctgtgggatgagcccgtcctcaggcacgtagccggtgcagcagttgctcagatagtccgccatgctgcgggagaccccgcgaccccacgtaaacacccgcgcagccgctgctgctgctgctgttgttactgttgccgccattttttaaatataaaatatagtctaattcagggcatgctgtggatcacaatgcctcatcct

SEQ ID NO: 15809 - DNA, 522 bp, Homo sapiens
  MAP TO AL136418.1; EXPRESSED IN PLACENTA, SIGNAL = 1.4; EXPRESSED IN LUNG, SIGNAL = 1.7
gcagtagtgggacctgaagcttgactgactgtctttgacacagacagctctggtttctagttaagcagcaacctaatcagcttatatactcttgtgcaaaactggttttcatttggtatgatatctgtacgttaaacctggcggataaggaaagttgaaaaactgcattaagcactcttacgtccaaacgtacttaggagtcttttttaattgctaggaggacactatgaaaatttggttctagcagatgtaaaggaagaaaaatttaagcccaagctgttcagtcccggaatttaaaggacttttctccctttacttttcaaatttaagcaaagagacttttaaaaaaccatggcagatgtggacccagatacattgctggaatggctacagatgggacagggagatgaaagggacatgcaactaatagcccttgaacagctatgcatgctgcttttgatgtctgacaacgtggatcgttgttttgaaacgtaagtacattccttcatcatgttcctttgg

SEQ ID NO: 15810 - DNA, 599 bp, Homo sapiens
  MAP TO AC012568.3; EXPRESSED IN PLACENTA, SIGNAL = 1.4; EXPRESSED IN LUNG, SIGNAL = 2.5
ttgcctacggatctcacctcagttactgagagtataactgaacttccaagatcctcaaaccttattcagcttctcctagggattacacagatatttaattcaattacagctcagcctgttccagtggcatcatcatcactgtcatcatcattgctatactggcaccgaccaggacaggatacaagagctcgacctcagagagcaggcaggcctacccagtacatgccagagggtgggagagtcagggggcttgctaaatttgaaacctttttctgacatccaagtatttaaacagctcattgactcccatacgtaaatattactataagctacagtttcatttaccctgtgctggggccaacagggtttgaaagtagagtaagcataaattaggtactggaaagtttcttatttcctgtagtgtcaggtgttcatagtcaaaaagagaagaaaagaagaagcagtgtcacatggcaagtctcccaacaaacaccaaacgtatgtatttgcacacaattagtccctttcgctaactgcccaaagcgagtagcacaacaggaattgttctagacacatccacaaggacacaacccaggact

SEQ ID NO: 15811 - DNA, 530 bp, Homo sapiens
  MAP TO AL158823.1; EXPRESSED IN LUNG, SIGNAL = 2.7
agttccaggcatgtgaaaccacatatatgaaaactgatactggaaccctaatgctgaccagacaacgacatacacatttgtgcctgaactggaatgccacacgccacaccgatggccgcgctcagagaagtgaaagaggaaaggaggaaaaacttacactactatcatccattctctcgcgccttttagatttgtgtgtctcatagtcttccatgagggtctgcatcagattcttgggccgctgggttccggcagcctcttcaggggctaagtcaggctgcaagctggggccttcagtggtgggggatggaggaggtttgactttctctattttccctgaaacaacacgaagaaaataccctttctaagcttgtctgctcatgactgcttttagaaagaaaactggcaaataaaagagcaacaacctctgacacagagagtggtaccagaatgatggttaagtgtaggccattttattatattacagggatcaaagcacttaaggttaatgcacaaacccatccaaagat

SEQ ID NO: 15812 - DNA, 583 bp, Homo sapiens
  MAP TO AC018573.2; EXPRESSED IN LUNG, SIGNAL = 2.6; EXPRESSED IN HELA, SIGNAL = 2.5
gggcttggcatagttcacagcaaaatgaaatgaataatctattcattatgttattcccctatcacactgaagctgtttgcaggtgcactgctgttattgtatctgcttccttctgaattaaaaaatttttaaatataattgaatccattggttttttctctaatgatttgtgttctttttgtcttatataaaaaatttttccctacctcaagatcttaaagattgtcacctatattttcttctaaaagtgtttttaagtatatttttaattgtagaataatatacttacaaggtgcacagatgataaaagtatagctccaggaattttcataaagtccacacatctatgtaagcagacccagattaagaaagagcataatcagaagccagggggtgtcactcaggcctcctttagtcacaagctccctagccagggtaagtattaatctgacttctaatgtaacaatttagtgtttcctgtttttgaactttataaaggcctacagacgcagcatatactcttagatgtctgagtcctatttgtgtgattcattcacactgtgcatacagccatagctttttc

SEQ ID NO: 15813 - DNA, 504 bp, Homo sapiens
  MAP TO AL157996.1; EXPRESSED IN BONE MARROW, SIGNAL = 1.7; EXPRESSED IN LUNG, SIGNAL = 1.7
ggagtcgccgatactacagctgccatggccgccaagtggcatctcttcattccatccacttccggattgtctaaccaccccctcctttacaaaggcacttccgggttacaaccgacctccggcccaggatacttacgttgccgccatttttgagtagggctaatgaaagatgtctgatgtcactgtctataccggtgatcacttgagccgtatgtttaataacgaaagtacggaagacagcgtcttgaaaaaaaataattcttcctaaagcttggaaactttcccttacctttttgcctttatcgaagatggctgaaacagagtcagtagctgctctagctgccggaagtgactgtgcctctatgatccaaaaggctcttttgcgttgcactttcgacgacttccggcggctcctctcgcgaggattggctgttagcggcgttgtagttaagctcgtgtaacggcggcggtgtcggcagctgctgtagcgaagagagtttggcg

SEQ ID NO: 15814 - DNA, 523 bp, Homo sapiens
  MAP TO AC002477.1; EXPRESSED IN HELA, SIGNAL =   2; EXPRESSED IN LUNG, SIGNAL =   2; EXPRESSED IN PLACENTA, SIGNAL = 1.3
tttacacttgcaggaaaagggaaaaaaaccctcataaacaagtttaatgacaagcagcaccttgtttcttattcgatctctcttgaccacttcttctttcttttcagttttttctgagctgcctattgattctgtactttcagccttctttcctttatcccgaagtgtgtctttctcttttttcatttcttcttcttttctcttaaaagtcttctctttctcatagcgctccttctgcctacggcgctcttcttcttgccgcttcagcctctctctttctcgaagtatgcgctcctgatctcgttcatattcccgttccctctccctatagtctctgccgctctcatcttcaggtctgcatgaaaaacaaatctgagacagaaccctgaaagatcttgtaatcacaaatgcaggaacactgtgattctgatttggcccctgcaatgaggttgcacttttagagcagagtgaaaaatactagtgttttaagaaggaacaaaaccccaaaaccattcacccagat

SEQ ID NO: 15815 - DNA, 508 bp, Homo sapiens
  MAP TO AC008891.4; EXPRESSED IN LUNG, SIGNAL = 1.7
ttgcctggcatctaaccttcgtccttgcccctggctgggccctgacctcaagtgacctttgacctctggcctttgcagttacacattcggcaaagtacagggcaacagcgatctctactggaaggcgcagcgttaccgcctcatccgggaattccactctcggcccgcgctggccccgccctttatcgtcatctcccacttgcgcctcctgctcaggcaattgtgcaggcgaccccggagcccccagccgtcctccccggccctcgagcatttccgtaagaacagagcttggcttaaaaaggagaaatataggggaccgggagcctggaaggcgaggggaagggggcatgccccaaatgactaacgggcgtggcttaggtagcgaggggcggggtttaagcaacaaggggcggagcttaagcactgaggggcagtgcttacgggtgaggggcggggcatgttctcgaatcaccaggggctgggtctgggatagcgtgcgtgttctgag

SEQ ID NO: 15816 - DNA, 569 bp, Homo sapiens
  MAP TO AC008752.3; EXPRESSED IN LUNG, SIGNAL = 1.8
gttgaacctggggaggagactggctaggcaagggcagaagcccagcagggcaccagaatcccccaccccggggttgtgtgtctccagcccagcaggggccttggaagctccatacctctcactctgtcaccccaatctctggctcttacagatgcgacctaaagtcatgtggcacctccttcgaaggtacatggcatcccggctccattccctgcggatgggtggctacctgttctctggctcccaggccccccagttgtcccctgctctgttgagagccctgggccagaagtgccccaacctgaagcgcctctgcctgcacgtggccgacctgagcatggtgcccatcaccagcctgcccagcaccttgaggaccctggagctgcacagctgcgagatctccatggcctggctccacaagcagcaggaccccaccgtgctgcccctgcttgaatgcatcgtgctggaccgcgtccccgccttccgtgacgagcacctgcagggcctgacgcgcttccgggccttgcgctcgctggtgctgggtggtacctaccgtgtgaccgagacag

SEQ ID NO: 15817 - DNA, 563 bp, Homo sapiens
  MAP TO AL136039.1; EXPRESSED IN LUNG, SIGNAL = 2.2; EXPRESSED IN BONE MARROW, SIGNAL =   2
ccaatgtggaaaaaggatggctagaaaaaggccttaaaaacattgccctagacataaagcaatgcagatctgcctcctactgagcaatacttactttcacaaaagccccacttttcatctgctttgtagtcataggttgtagcacaccacagtctgccatcttccctcccatctgatgtacattcatcatactccttatctaggaaaagaaaagggaagtggcagggctccccatgtgctgtgccttcaatggcggtcaaagctggaatgacaagaaataaaaatctaaacatgaaacaacacctctggtattcatggattcaatgccatcaattttggctgttggaatttgaagcaaagattcatgatgcctgatttgtaactgggaacataaaagggctagcaatgattttgattagggaggacttggtttagtcaatttagtgagcatggctagctgactacatagcatctgtgtctaggttagactttctgaagttcctgatatataaccttagaatattaaaggtctactgtaaaactcctgcccaaaaagtaagcaa

SEQ ID NO: 15818 - DNA, 551 bp, Homo sapiens
  MAP TO AL158070.2; EXPRESSED IN LUNG, SIGNAL = 1.6
ttctgggatctttggtttgctttcccaacttatattgtgaactgccttctcttcatcccaacattcctgatgttgctgtgtctcagtttacagatgttaaggaacttataatcaaaactgtattaagctcggcaagagatgagccctctggtcctgcacgatgtgtagcactttgtagtttaggtatttggatttgtgaagaactagtccatgagtctcatcatcctcaaattaaggaagctctgaatgtgatttgtgtttccttaaagtttactaataaaacagtagcccacgtagcttgtaacatgcttcacatgctggttcattatgtacctagacttcagatttaccagcctgattctcccttgaaaattattcagatccttatagctaccatcacccatcttttaccagtacagacgcttcatcttatgaaatggacaagaggttggtagtatctttacttctctgccttctggactggatcatggccttacctctaaagacactgctccaaccatttcatgctacgggagcagaaagcgataaaa

SEQ ID NO: 15819 - DNA, 573 bp, Homo sapiens
  MAP TO AP001221.1; EXPRESSED IN BONE MARROW, SIGNAL =  15; EXPRESSED IN LUNG, SIGNAL = 5.8
acctccagggaacgatgaccagtgctctgattaagaacttgaaaaaaaagagttcccttgtggctaataaataatgggtctattttagaaagtctacttttcatgatataaatcaaaactttaaaaatgtaactgtaaatttatatcacaagagaaattatgaaagttgctcataatgtatctatataaacttgcacttctctgttattatttcaggatccagtgaggatattgtgatgacccagactccactctccctgcccgtcacccctggagagccggcctccatctcctgcaggtctagtcagagcctcttggatagtgatgatggaaacacctatttggactggtacctgcagaagccagggcagtctccacagctcctgatctatacgctttcctatcgggcctctggagtcccagacaggttcagtggcagtgggtcaggcactgatttcacactgaaaatcagcagggtggaggctgaggatgttggagtttattactgcatgcaacgtatagagtttccttccacagtggtacagccctgaacagaaacctccctgctgtggt

SEQ ID NO: 15820 - DNA, 522 bp, Homo sapiens
  MAP TO AL133223.1; EXPRESSED IN LUNG, SIGNAL = 1.7
ctcgcctagaaaaccagtgcatttggaaatgatgtcaggggtcacctctgagtgacaccagacgccctgacatcacaactgtctccattccagcaggcagcagcatacctgatgccatctggcatttgaatgtctttatgtccgtcgaccttgcatgccagcttaaactcactgtcgaaactcctggttgtgaacaggcgctccaggaaggtgttgagcagacgctggtcaaactcgttgtccacgcgcccgccataaatggactgggccattaaggtctttagtgcagaccacgggatcttatccggtgagatgttctgcctgccctgggggaggaaaagcagggttcgtgtgtgtggtcagaggcgggcaggcccggggcttcctttcgaggggcacagctttcctcctcactccccatggccagctaggctttggcggtcacgaggggtcagctcgctcttccacgcagagtctggcctctcagcaccacgccctgcagcatcctccccagatacacgt

SEQ ID NO: 15821 - DNA, 598 bp, Homo sapiens
  MAP TO AC013533.3; EXPRESSED IN LUNG, SIGNAL = 1.9
gcatggcacacagtaaatgcacaataaatatctgttaattgaatgactaaagaatgacagatacatcccaggtttgtatgaaccaaacatgatgagtcaaacattgttgtgactattcaaatatttgaaagcatatacccttaaaaattaagtctcttaagtttaatgttatttttaaaagggggtaaaagaattcaaaacattttaaagctgcttagagaaacattataaaatcaaaaatgaaaactaaagaacaggtttctttaatataaaagaacatttaaccaaaacgccaaacttacctctgtaagcaatattgctagcatatcctgcctctgaaaacgtatagccaagtgtacaagagtatagccaacatcaaaggcagaaggacgattcagcaagcgtacttcatctgcggtgagctgacgtgcaatgtctcctcctgatgacttgtatgcttctatggcagctaaatcaccttctacaacccctaaaacaagcatcaagatagaaaagcatttaattctcattttcttcaaaaaacacaaaccgtagcaatcactccaaaatcttttaagtgtttctctgtgcttcctgg

SEQ ID NO: 15822 - DNA, 562 bp, Homo sapiens
  MAP TO AC012664.3; EXPRESSED IN LUNG, SIGNAL =  36; EXPRESSED IN PLACENTA, SIGNAL = 2.4
aatcaacaagagcctgtgggcaaggatgctggagaccagatatggcaaggagaggagacagtggaggggctggattctgttctgttgcccaaactacaggagaaacacctcccaggagcacagtgagcaatggcagattgaaggggaaggagggagactgaatagagcttccttggtccaggagtttctcaacccacaggccattgaattggacttgcagacaccactttgaaccctggagtctaactcatgcttcattcacaaactatgcaatcaaatgacatactgcggccactcacccctggtttcatttttaacccatgcattgatggaatcacaggcagaggctggatcctcaaagttcacattccggacctcacactggaacacatctttgttccttgtaacaaaaggcacttcaatttcagaggcattcttaacaaacacggcgttagccactgtcacaatgtctttattcttcttggagacgatggccttgttgatcttctttaatattttaccaactcctaaaagagaaatcagaagatacagcaatacttcc

SEQ ID NO: 15823 - DNA, 519 bp, Homo sapiens
  MAP TO AC023078.2; EXPRESSED IN PLACENTA, SIGNAL = 1.5; EXPRESSED IN LUNG, SIGNAL = 2.1
acatccactccaggatgctccgcagcagggacagggcccagagcaggacacacaccaccgctgacaggtgtgtggggcggtggcagcggtaccagatgggccacaggacggacaggcagcgctcggtgctcacggcactcagaaagctcaggcctgcaaagtaggaaaacatcatcacaggatagaggattttagagatggtatgggggatactgatgaagcttaacagggaatatataaggcggccgctgaggaagaggaagtctgctgcggccaagttgaggatgtagatggagaaggcgttcctgcgcatgcggcagcccaggagccagagcacaactgcgtttcctgtcagcccgacaagggaaacgatgcacgtcagcaccgtgaggctcaaggtctgcttgtagcaaagagtctcctcagttccgttgattggtgtcagttctgtgtccaaggttgagatggttggatccatgctcagaaaccctagtctggtgaccctggaaacagaaacca

SEQ ID NO: 15824 - DNA, 537 bp, Homo sapiens
  MAP TO AC024123.1; EXPRESSED IN PLACENTA, SIGNAL = 1.4; EXPRESSED IN LUNG, SIGNAL = 2.1
agggctgtgtatcttgctggcttagccagtggccctcacggtttgcttctgccccacagcctcgccgctcctgctatttgccaaccgccgggacgtacggctggtggacgccggcggagtcaagctggagtccaccatcgtggtcagcggcctggaggatgcggccgcagtggacttccagttttccaagggagccgtgtactggacagacgtgagcgaggaggccatcaagcagacctacctgaaccagacgggggccgccgtgcagaacgtggtcatctccggcctggtctctcccgacggcctcgcctgcgactgggtgggcaagaagctgtactggacggactcagagaccaaccgcatcgaggtggccaacctcaatggcacatcccggaaggtgctcttctggcaggaccttgaccagccgagggccatcgccttggaccccgctcacgggtaaaccctgctgcgactccacctgggtccagggggcggggagtgtcaccatttctctctcgaatttgcatgagcccaagt

SEQ ID NO: 15825 - DNA, 544 bp, Homo sapiens
  MAP TO AC011475.2; EXPRESSED IN PLACENTA, SIGNAL = 1.6; EXPRESSED IN LUNG, SIGNAL = 1.9
ccatgcccatcctcatagtcgtctcattgcccaccatcaggacacccttgtaggcgtggatagcgggaagcatctccgggccactgcatggagcagaggatggcaccagtcaggcgagcctctgcagagcctccccgtcaccacctgagcctcctgggatccccgactcacagggtttgctggggatgaggacagcagggcagtcaccatcttaagcacctcagccactccctgccaagagagatggagggaggtgagtcccaagtctagtacactgccactgcccatacctgtgctctcaggacagtctaaactcactttattgttcttgaagccaggaacacagaactgcttatagtatcaaagtcccgggagctgcgagcattcaggtacgtgaggtagcggtcgggcatttttccacgcagatctgggaggggagaaggaagggattgggtggattggggcagactgctcaggactgaggtcgcagcccacattcacagggggaaaggatgggaagcggggagaggaaaaagggaacggt

SEQ ID NO: 15826 - DNA, 547 bp, Homo sapiens
  MAP TO AL096700.14; EXPRESSED IN LUNG, SIGNAL = 1.7
agtatgaggtgaacccacggaccacagagattttacatcacctttcagaacgcaacagggtccagaacagggatgtctacctggtaatagaggacttgaagcagaaagcaagtgaataccagtcagaagccaagtatctccaagaccttctcatggagagtgtgaattttttcccctgccaatctctctagcactggttccaggtatctgaatgctttggttggcagtgcggtggcccttgaaacgaaggatgcctcactaactagttttatccctgtagtgaatgatttgacctcttacctctttcgtaccaaatccaaaagtgaagaaatcaagattgaactggaaaattttgaaaaaaaatctaactgcaactttagtattagaaaaatgtctacaagaggatctcaagaaagcagagttgcatctgtctacagaaagggccaaagttgataatcgtcatcagaacatggactttctaaaaccaaagtcagtggaattcagatttggaatcaaggctgcagagggagcaactttcagccagagg

SEQ ID NO: 15827 - DNA, 504 bp, Homo sapiens
  MAP TO AL109628.2; EXPRESSED IN LUNG, SIGNAL = 1.9
atcatagagctggccgaatgccggggtagaggggaccggaagttgtttttttcgcccccgcccagcggccggatcgcatctcagctggttggctttggttagagctcccgtcagactttcgttcggccctaggatttggtagccccgaagtgtgggctctctccagtaccagactcatttcagtaccagcctttgggaagtcgtgtgaatacctcggtctcttagccacagggatagaatggcggcctgacggagccgcggcgccggcgaagtcgctgaggcgcgagctggaacccccagaccagctcaaacgggagccaaaactcgaagcttggaagaattagcaggaaatggcggatgaggcgttgtttttgcttctccataacgagatggtgtctggagtgtacaagtccgcggagcagggggaggtggtgagtgctgccacacaaccttgaggtccttttgcggtgacacaccttgtttcccctcagtgctttccttcaa

SEQ ID NO: 15828 - DNA, 586 bp, Homo sapiens
  MAP TO AC003677.1; EXPRESSED IN BONE MARROW, SIGNAL = 1.7; EXPRESSED IN LUNG, SIGNAL = 1.7
atccccggggtattttactgaaaaactgcatcactatttcctggtctaaaatatacagattgctaaaattagccctctaataaatggagaagttctcctctagtggttcagtgcacttaaatacatagtctcaccagatctctggggtaggggctgtttcccccactttgtggatgggacactgagacgtgaagttatgagagctggccagggtcttagtgaatggtggcagagctggtcaggatcctggtgtcctggatggtccacagaaggaccttgtgttacagacagttcacctctgtcactggttcatggcacaggatgaccgctatatgctcaaggagtcaaatcacacattggagtttcacctaacagtgatggtgctcacagtgggtttaaggcaagtcttcaaggacagtccacattagagagagagaggaaaaaagtacccaaataagtattctacagagcagagctatgaaaggtcccatgagaaggccaaagtgtgggacctggaaggagagaaagagcccacatttcatcatattgggagcaaagaggcctcacggaagctcagaaatcttgg

SEQ ID NO: 15829 - DNA, 599 bp, Homo sapiens
  MAP TO AL136384.2; EXPRESSED IN LUNG, SIGNAL = 2.7
attccacacccaagtaagcgcagctcattaacacttaattaaatatgcttttcaaagccatggaaatatgcatatcatatttatcatgtaagtttggagcttacttttaatagatattcaaaagaaaatcatctttgccatacttgatatattgtaaaaataaaacaatagtctaaaaaattattgttatattagaagaacttaaaaatacttagcataaaacatgtcctaagaatttcattaaagtaaaaataagtgaaaatgaaaataaaataaagtaaaaataagttaaaaataagtttatctcaagattgtaaactaaaacataaaaattctcttacctcaatggtgaatagcttcctttttaatttaaaagctaagtctttgacatctgattcatcacagatcaagttattaagccgaggaatctgccgtatatgaatcaatccttgtggaaaagaaattaaaagaaaaaaaatttaaaacattgtcatcagatgcataaattaaacagtcttatagcagaatcctgtaaatttacacacaagcatcctccccttttaaaactggagcttactaccaggagcaatgaagcaaat

SEQ ID NO: 15830 - DNA, 534 bp, Homo sapiens
  MAP TO AC008783.4; EXPRESSED IN LUNG, SIGNAL = 1.9
ttcacagggtggaaaacaggaactaatgttatatattcctgtacttatcttcataatgaagcagaaagaaaaacaaaaaagttacaaaaataaatgaaaagaactgtattttctagaattgaaaaatattcttttagatgatagataagatgtttacatcaacctgcaaaaagtcaatgttgaagaggtctcattgtatctcacagaattttgatttgcctactcacccacaggagacatttctggaacagtagcaacataaggtccatccaaaaactttggctcattatcattaatatcctgcactttgatgatgaattctgattcaggctccaggggctttctggtttctatgtccacagcctgagcacgaagagtgtagaaaggtttctcttctctatctaggctccttattgcatgaatgtcccctgtggtttcatcaatggtaaaaacggtgccagcgccatctcctgagagggtgtatttcacagtgccctctcccttgtctaagtcggaatggagctttagggaaga

SEQ ID NO: 15831 - DNA, 530 bp, Homo sapiens
  MAP TO AC012568.3; EXPRESSED IN BONE MARROW, SIGNAL =   6; EXPRESSED IN LUNG, SIGNAL = 6.3
tcgcagaccaagatcatcacctcaggtaaccatgcttttgccagtggaagccatgaggagacactatcaaggcccgatttctagagggaacaaaaaatataaacaaacaaaaacagaaaagagatagtcagacaaaatgtaatgggaaaaaaagaaggcatgcaataatttcttattcaagccttcatagaaaacaaagtcttacttgtgtgctgtcaaagtaaaccacaaatgcttggacagattctgcaatctctgcagtaacaagaaatttgtttggcaccacacatagattgatgtctgctgaatagtatttattatcaatggtccagggataaaatctcacagcatcattggaagtcacttccacaataagatcttctgttccaaggatatctaaaaataaatgacaacattaccatgtaaagtgcaaaaccaatatacattggttgattttctcagtcagataccagataaagctggtacttttgctgtttccttttatgtgaggatttcaaaggaccctgcat

SEQ ID NO: 15832 - DNA, 600 bp, Homo sapiens
  MAP TO AC022035.2; EXPRESSED IN LUNG, SIGNAL = 5.8
gaggtccagccctctactccgggtgatggccaacgattcttttcagaatcacaagtaaagaaatgaactagtttctcctctaccccctgtccatcatctctttgaaacagaagtgaacaacttacttctactgtgccatccaaaatgttattaataaactggaccatgtcttcaacattcttaatctgtctatctagcaagaaatattgctggtttgaagtattcagtacaactacagttgggactgtcaattcactgaaaatataaaaacaaatcaaaatatacattaaacacagcaatagcaagtattctgatattcatttatatctcagtagccataattatagaagctatttaatacatttgtgcacattttatggtagaaaatgatcaaatagacctagtatttacgtgtattttatgcattcatgacatacctttttaatttgtttgatatttctaggatacgcaattcatctttaagtcttttcaaattatcaaaaatctcaaaaacattttataacatatgtattgaaaaaaattcctatgggtggtctgcacaattcaaacttatgttgttcaacggtcaacagtcccttt

SEQ ID NO: 15833 - DNA, 540 bp, Homo sapiens
  MAP TO AC019248.3; EXPRESSED IN LUNG, SIGNAL = 3.4
tcccatgcttttcccactacatcacgcagggagctgagcggggtcatctttcatcagcagtttctaagacaggggacactacagctgcagaacacaggatccgggaaggtcaaacctgtaacagctaactctggtcaatgacaaatggttctcaaatgatcagcatcgtgtgcctaggtggagagtagttgccaagaagaggacagaggttgttcagaattgctacattaggataattgttattcatgaaacccagaactaagttcattcatcagcaaccttacctagttctgggggcagaacggtgaggcggttcccctgaatgtggagctctttaagctgggtaagctccccgatttccttaggcagcgagatcaggtcgttatccctaaggctgagctaaacagaagaaaacaagttgtcaacatatttacacattaaaaggtgctccacagaaactctcatcctctatgtcctctcttctactaaagctcaatcctttccatgtatttacaagtgccggcggataatcaagaaaca

SEQ ID NO: 15834 - DNA, 587 bp, Homo sapiens
  MAP TO AL136170.2; EXPRESSED IN LUNG, SIGNAL =   2
gagttggccttcatctctgtgattctagtaaaaatacaataaaatataaaataagtaaaataaaaaatataaactaatcaaatctttaaatgaacaaagtggtattataacgtgattggttatgacatgacactggctataaatacaatttacaaaagctatacagtattcactttaatatacatttgttaaatgaattaccaaaatgccaagattagtctaagaagtaaggaacaaaaaaggtcctaccttgtcaataatggactgcatatgagatttgtgagactggtctccataaagcaaagaggaccactggtccggtgcaattcgtaagcctgcttccatagcaatctgcactatctgggagtcatgttctcgccgcagagcttcataggttctaaattcttctttcagctgcatcaaagaagagtcttcatcacgtttggtgacctaataagacacaaataatctcataatgaagtcaaaaaaatgagtttatgctttatatgaacatataatttttaatgtaacaaatttagcatcaacagcaagattaaatgaatataccatttgcctgcaaaatattt

SEQ ID NO: 15835 - DNA, 565 bp, Homo sapiens
  MAP TO AC008752.3; EXPRESSED IN LUNG, SIGNAL = 2.8
ttgaatgcatcgtgctggaccgcgtccccgccttccgtgacgagcacctgcagggcctgacgcgcttccgggccttgcgctcgctggtgctgggtggtacctaccgtgtgaccgagacagggctggatgctggcctgcaggagctcagctatctgcagaggcttgaggtgctgggctgcaccctgtctgccgacagcaccctgctggccatcagccgccacctccgagatgtgcgcaagatccggctgaccgtgaggggcctctctgcccctggcctggctgtgctggagggaatgccggccctggagagtctgtgcctgcagggtcccctcgtcaccccagaaatgccctcccccactgaaatcctctcctcctgcctcactatgcccaagctcagagtccttgagctgcaggggctggggtgggagggtcaggaggcggagaagatcctgtgtaaggggctgccccactgtatggtcatcgtcagggcttgccccaaagagtctatggactggtggatgtaactactccacctgcccttgggacccatcccagttttcatcat

SEQ ID NO: 15836 - DNA, 502 bp, Homo sapiens
  MAP TO AC008569.3; EXPRESSED IN BONE MARROW, SIGNAL = 3.2; EXPRESSED IN LUNG, SIGNAL =   9
aaagactgagtcacgtcgggaaagagcatcccagagagaggcccagcatgtgcgaaggccctgggttatctttgaggaagtgagcagagtgagcagagaccttggcaggagggtctcttcccgcctccccatcggaggactcaaggtgggagaaggcgaaaaggatgggggagttgagttccttggtgttgttgtggctcagaaagatggagttgacggcagagaggcgtctgagttggacaccacggatgctgctttcatatatctcctccagttcggcttgcttcttggaatgcaggttcaaggaggcattggccagcaatgtcgtcatgttctggatggagaggatgcccgccacggcggggcctggggaacagacacactcgctgcctactcccgttgtcctcctcccatgctctatcctccctcccaagatgacccagctcaggctcagccagtccaccacgatgacgccaggagcccctcccgatgagtcagtttc

SEQ ID NO: 15837 - DNA, 599 bp, Homo sapiens
  MAP TO AL034380.25; EXPRESSED IN LUNG, SIGNAL = 4.7
ggggttttgcctgtattcacatccttatcccagtcaggaatccacctcacctgaacatgcatgcacagacctccaaacagcagcagcactgcagcgtggaccacgtacacaaacacctgaggactgaggaatccaagatcgggcttctctagggtcttattgttcttgctcctttgcagcccaagtgtaaggcagagccaagggtgagtggtcacgtatgtccaagttgcccaggcaaccagtatagccactggtgcagccagtagaaaattgggcacctgcttgagctcatagtatttcaaaaagccaacattccagtagacatcctggatatagctgtatattagtggaacatcccagaagcaccaaggcggttcatttccctctgcaatccggtagcccttgtctacagctaactgtaccaaaggctcaggaatggggcgggctgagcctggcagacagaattgggtgtaggcataatactgaaagagggcaaagggaaggccaagtgtgaacaccgacagaaacagagaggccatcagcttaaagagctgtctcagaggattcagcatcgttagagaagagaaaaagccttggca

SEQ ID NO: 15838 - DNA, 540 bp, Homo sapiens
  MAP TO AC021993.2; EXPRESSED IN BONE MARROW, SIGNAL =   3; EXPRESSED IN LUNG, SIGNAL = 3.3
ttttgagcacagtgtttgccactcaatacccaatagcaattgatactacaattatctttctcatacaggaggttgtgatagacacgactgtacacaccaacattcagttctttctgaatgttacacgcccacaggcatgtgtttcactccttctgttatgtgggatgcaggcctgagccactgtatttgctatcagaaggctgaaggggcttcacatcttcaggcagcatacccaggttgtatcaataaaagtaactgatattagtgttcccaggggatgaagattgtcattctgtccagcaaaatcttttcactgagttggataaatatattaacaggttccctttgttcacagtgtcttagtttatttttgctgctgtaacagtcactcatgatctcacttttccgatccttgcaattaggcagggccacgagtctggaccacgagtctgtcacatggacagagagagcaagtgatatgcagcacttccagccaaagcccagaaaagccggtgtgacagcttcacactctctgctccc

SEQ ID NO: 15839 - DNA, 527 bp, Homo sapiens
  MAP TO AL122020.2; EXPRESSED IN BONE MARROW, SIGNAL = 2.6; EXPRESSED IN LUNG, SIGNAL = 2.9
aggagaaaaaccgttgggaggttttgaacatgccaagtgctgtcagggctgcttgacccataccagtgggctacgcagggcctgagggccacagccagggctcatttgtcactggatgcctacagcaagcggggacagaatggaggtaactgctgtccctaagcaccagcagcttcccacgcttccttgtgaggtacttgctcccagttgtctcactccttttgctcttctgcagttttcttctgtgtatctgaaaggatataatggacaggattgactgattttcagtagtaggaaaatacactagagtttggcaataagagatggaattgatgaaacacaatgtttttctttagaaatatacttaaatgtatactcagctttttagctgtcattcctgaggactcactgaattatagtcttgaatctgattcttctagaactctcccatcttttccagaagtcactgcggaactggtggacttgggcatctctttcagaaaacctgatgccaggaccagttccta

SEQ ID NO: 15840 - DNA, 518 bp, Homo sapiens
  MAP TO AL158070.2; EXPRESSED IN LUNG, SIGNAL = 2.5
actgacaaacccagggacacttcctcctcacaaaccgtccttacaggtattcttacttcacaggcataactggactctatgggtaagctaagaaagtgttagctaataatggagtcttgaaagagatttttggttttcttttcagttacttctttatttctacctcctgaaattatttctgtagtacctttataaataagtacttatttgattcatacttgaatttttttcctgttttggcctgagtgcctccattccacatgtgatcagtttcttcatagaagaaaaaaacatcaagttttacatcatcttttccctggaaggatagttccaagctgtcttctacctatggggaagatgaaaaccttcacacactgaaacaaaggaaatacatttttaaaaacctttttttaaaaaataaaaataaagaaacagattcttaagttttacatacatagagtattcattctaagatgcacattttttcaagttaaggcacctctgaaattgggatgcat

SEQ ID NO: 15841 - DNA, 505 bp, Homo sapiens
  MAP TO AC018676.3; EXPRESSED IN BONE MARROW, SIGNAL = 1.6; EXPRESSED IN LUNG, SIGNAL = 1.9
tctcttctgatttccagtgggacaatttttcaagtcattcagtccgatgctgctgggacttactgcactgacctgcaatcaagactgtcaatgctcaatcaaaaccaacaaagagcataatggctaagcaaaagcaaaattgtcaataccttattattgcaataaaatatgctaagaattacgcattgaatttcccagactgcattattgaaatgtttgctaattttcacgacaatttaccagatactgctgaagaggaacttaatgaaactgtggctgaagttaaatttaaaataatccaatgcacttctcaaaggaagattactccccagctgtcaaacagctttgatggtacctgatactaagagaactctcaaaacctaacttcgatttattctaacattgacttgctggaaaagcatctcacagacctcaacaactttaaaggaacttaaaacgttagattgtgggcagggaaaagagcaggcacacgttttgtcagaga

SEQ ID NO: 15842 - DNA, 557 bp, Homo sapiens
  MAP TO AC023009.3; EXPRESSED IN LUNG, SIGNAL = 8.7; EXPRESSED IN PLACENTA, SIGNAL = 7.3
gaaagtggaggcttttgcagaatgagtgggttctccctgtgaggctcacacttctgagatcttggagggaactttaactttgatataaagctataacgggcattaacacctagcaagacaggggccagacagcgagtctcagaaagaaccacaccattgttagcttacaggacaagggctccagcgtcacgtcgaacgtctccttcttgaattctgccttcgggaccccggtgtagaaggtgatgttggctgagagataagctgtgatggtgtaacggttgtggctgttgttccggaaggtgatggagagcttgaagtcttttcccagcacagcattttccacttcaaagtccatgtcaacgttggaccttgatttcatgacaccttctgtgttgaggggctttttagctccgtacatcagggcagtttctagggccaatctctcttcttcttgacctgggggagatccagagataatgacaggcaaaaatacaatccaccagagagaaagtcacattaatggatgcaccgtgtactgcacttgttggggtgtttct

SEQ ID NO: 15843 - DNA, 589 bp, Homo sapiens
  MAP TO AC008850.4; EXPRESSED IN LUNG, SIGNAL = 2.1; EXPRESSED IN PLACENTA, SIGNAL = 4.2
tgccttgttcttatgttttggttttttagatcggcttcagctccccaggaatatgattgaaaacagcatgtttgaggaagaaccagatgtggtggatttagccaaagagccttgtttacatcctctagagcctgatgaggtggaatatgagccccggggttcccgactgctggtgcggggtcttggtgagcatgagatggaggaggatgaagaggattatgagtcatcagcaaagctgctgggcatgtccttcatgaatagaagctcaggccttcggaacagtgcaactggttacaggcagagcccagatggggcttgttcagtaccctctgcaaggaccatggtggtctgtgcttttgtcatcgtggttgctgtttctgtaatcatggtgatttacttactgcccagatgtacctttaccaaagaaggctgccataaaaaaaaccagtcaattggactaattcagccatttgcaacaaatgggaaattgtttccatgggcacagatcaggcttcccactgccgttgtgccactacgctatgaactcagcctacacccgaacctaacctcgatgacattcaggggttct

SEQ ID NO: 15844 - DNA, 598 bp, Homo sapiens
  MAP TO AC016025.11; EXPRESSED IN PLACENTA, SIGNAL = 1.3; EXPRESSED IN LUNG, SIGNAL = 2.8
ttattgacgcttgtccttcgtttctagggcactgtgtttagtcttgagtcagaggaggaggaataccctggaatcactgcagaagatagcaatgacatttacatcctgcccagcgacaactctggacaagtcagtcccccagagtctccaactgtgaccacttcctggcagtctgagagcttacctgtgtcactgtcagctagccagagttggcacacagaaagcctgccagtgtcactaggccctgagtcctggcagcagattgcaatggatcctgaagaagtgaaaagcttagacagcaatggagctggagagaagagtgagaacaactcctctaattctgacattgtgcacgtggagaaagaagaggtgcccgagggcatggaagaggctgctgtggcttctgtggtcttgccagcgcgggagctgcaagaggcacttcctgaagccccagctcccttgcttccacatatcactgccacctccctgctggggacaagggaacctgacacagaagtgatcacagttgagaaatccagccctgctacatctctgtttgtagaacttgatgaagaagaggtgaaagcagcaacaactg

SEQ ID NO: 15845 - DNA, 548 bp, Homo sapiens
  MAP TO AC008686.3; EXPRESSED IN PLACENTA, SIGNAL = 1.4; EXPRESSED IN LUNG, SIGNAL = 1.9
accatgcatcctctctgaccccgggctggagcccccctcacccggaaccttctccgcagcatgctgttgagggcgaagtcgtccttccaggcgctctgggcctcctggatgtggctcagtgtgggcagcgccttcttgagtgtgctgcggtcggcctcgccatgctccagccggaacatggcgtccgtctccagcttctgcttcttctcatgctctgcaacgatcagagctcggctgggctttgggggccccagcgcagactcagggccagggcccccaggcaggtaagtgggtggcgctcacctgtggtcagcacctgctcattgtccgccatgtcccagcgctcctccttgcgctgggcgccactcacgatcacgtagtcgcagttggcggggtccgtctgcatctcgatgtagttgacacagaggtggcatttcatccggaacctgggagggagcggtgggcaggagtcaggaggctgtggctgtgcaccaggacagccctgtcgcctctgcctgcttccttccacccaatggtgtcatttgaca

SEQ ID NO: 15846 - DNA, 517 bp, Homo sapiens
  MAP TO AL136170.2; EXPRESSED IN LUNG, SIGNAL = 1.9
acagagcgatctgagtgtggggtaatttctcattttgcttttttatcagaatgtggagagtaaaggaatgagggaccagcgattagatcttcagagaagagcagcagaaaccagtgatgatgacctcatcccatttggagaccgaccaacagtgtctcggtttggtgccatctcacgaacttccaaaactatatatcagggtgctggtccaatgcaggctatggcacctcagggagctcctacaaaatctattaacatttcaggtaagaatctcagaggtaagctgacctaaagggttcataatcttgactttcagcattacccctgctctccatttactatcagtgtttttagtaatcttgcaaggcagtaattttcaaactttccatggaatcatccctgtaagaaaggtaatataacccagagaattttaggtatataaactgaaattaaatgtctatatgtgaagctttcctaatgtttcttccccactccacccccaccccaaatagcttaa

SEQ ID NO: 15847 - DNA, 540 bp, Homo sapiens
  MAP TO AC011450.3; EXPRESSED IN BONE MARROW, SIGNAL = 1.9; EXPRESSED IN LUNG, SIGNAL = 3.3
gggaggtttaaggagccaagccaatgtcacagaacaagtgatagggctgaaactactggggacgaggaggagctgaaggaggaaggagagggtaagaggaagagagacagagatccagggacgggaaacaggcccagaaagaagagaaagtttcagaaggaaacagggactcagggtggggcagggacagagtcccagagagaggggcaccaagatactgctccccacttgggtggctgcctaggtgggaaatggggctgcctggagctgtgccacacagctcatcatcactcccctcacctctcccaggcttggccttcgtgcctctgcagatctggtccaaagtcctggccatctcaggaatcttcaccatgggcatcgccctcctgggttgtgtgggggccctcaaggagctccgctgcctcctgggcctggtgagtgcaccatccctctccgtccctaggaacactcctatccccaccctcaaaaatggcctgggccggggttgcaggggtggtcagcctgatctctccactctgc

SEQ ID NO: 15848 - DNA, 549 bp, Homo sapiens
  MAP TO AC009181.5; EXPRESSED IN BONE MARROW, SIGNAL = 1.6; EXPRESSED IN LUNG, SIGNAL =   2; EXPRESSED IN PLACENTA, SIGNAL = 1.4
aatgcaaggggtggtacttgctaggatgaaattatagaggtcattaatctgtatgtctcacatgcctttttaccccagtctgtttattctatgacttttctattgttggatttctgggtcaatcatttcagaatttggccccaggctttatgtaggtatttctcttataaaattaaaaacaatcctgtttatttagtcattcaacagatgactttgcatgcctttgaagtgcaaatgctatttgaaatgttggggatacggtggtacacaacctgcattatggtgatacggcctctggaccattcattttctctttcttccccctacgtaggtcctctcagggtgcgccatcattgtccgaggtcagcctcgtggtgggcctcctcctgagcggcagatcaacctcagcaacattcgtgctggaaatcttgctcgccgggcagccgccacacaacctgatgcaaaggatacccctgatgaggtaggtgtttcctgaggccatcgtgagcctgtggacctaggtaatagcccactgtcttctgtcgctga

SEQ ID NO: 15849 - DNA, 517 bp, Homo sapiens
  MAP TO AL159165.1; EXPRESSED IN LUNG, SIGNAL = 9.7
ttctctccatctcccattgcaaatataaaaagtacaaagtaatgtacaaaatggtgttcttttggacttaagtttttacatataggtccatttgttgagagagaagaggaacagagacaaatagaggtttctggtgcttttctactaggtaaagagggtgtagggacagggaaagagaaagatggtgtggtttggggatatggatgggattttttaatttgttcaacagaaattttcagtgctccagtggcttcctgaagcctttaaggtaaaatcaatagagaaatatatcagaataattttcagtggcatgcatgatgaattattgttttattattgaagaaactatggcccagagagattaggtgatttgcccaaagctacacagcaaataatggtggagctgaggtagaaatttaggtcttttttttctccaaagcctacaatctttttctggtggaacacgaatacctgctcttcaggcttgttgtgtttagggacatgagctttggatgct

SEQ ID NO: 15850 - DNA, 579 bp, Homo sapiens
  MAP TO AL138775.1; EXPRESSED IN LUNG, SIGNAL = 1.8
atgagtgagtggtgacagcctgtttattttcagtaggagaaaatattcctgaaactttgtgtttgttcacctagaaaaacaatgcattccactaaaccttttggtctatcgattcctagagataatatagtagacttgagggtgcttattattttaagagatgataggtttaattagctgtcattgttaatagggtcataagagaagaagatgatgcaacacaggggaatggaatgcatcctttttcaggggattgggaacctaaaatgatgattattgagctgctcaaggtagtttcattaaaggtaaacatggagaatcattgagcattttccacaaacttttgccaggcattcttaccctgccctaccccaatgtccattcgcaaataaaaacaaagacttaaactagtggcattcaatgagttttcacttctttagtggtctgtcctgaagactttaaaataattcaattatgctgtacagagctgaccttatacaaggacctagatatttgcttatattgtaaaagaatttctatgtatggatatattctccttcagctatgctttgtgcctga

SEQ ID NO: 15851 - DNA, 547 bp, Homo sapiens
  MAP TO AL136039.1; EXPRESSED IN LUNG, SIGNAL = 1.8
ttcctttggagtcaattccgcgttcgtgagaagagtcgcgcaaagtttgttacgtgggagagaggtgtgggcagggtgaccgccccttctttttccaccccactccaccttcctaaatagcccctttggcgcaggccaagcaaagccaaagagcgagtgacagcccagtgcgagatgtgcccagggagaacggggtcccgagcctggagtccccacggccccgccggctgtagaggctggggggcggaggctctgggccttcagcccgagggggcggatactgacccgaggacgccgaggccaagctcagcagcaccgcacacagcagcagcgtcagccctatccggacccgcatcctcctctcggggccggtgccaacccctagagctgtcgccttcgcctctgccaccacggactcagccaccaccgccgcctcgccgctgctcttcctgctctagtctccttcctccgccccttcccaggcttccctgacccagcgcgcagccaatccccgcccgccgtcgcgggcttctggtccaatcaccat

SEQ ID NO: 15852 - DNA, 593 bp, Homo sapiens
  MAP TO AC024123.1; EXPRESSED IN BONE MARROW, SIGNAL = 1.5; EXPRESSED IN LUNG, SIGNAL = 4.6
tggctgagtatttcccttgcccggcccaccccaggcctagacttgtgcctgctgcaggcccttgacccctgaccccattgcacctgtctccacaggagccgaggaggtgctgctgctggcccggcggacggacctacggaggatctcgctggacacgccggacttcaccgacatcgtgctgcaggtggacgacatccggcacgccattgccatcgactacgacccgctagagggctatgtctactggacagatgacgaggtgcgggccatccgcagggcgtacctggacgggtctggggcgcagacgctggtcaacaccgagatcaacgaccccgatggcatcgcggtcgactgggtggcccgaaacctctactggaccgacacgggcacggaccgcatcgaggtgacgcgcctcaacggcacctcccgcaagatcctggtgtcggaggacctggacgagccccgagccatcgcactgcaccccgtgatggggtaagacgggcgggggctggggcctggagccagggccaggccaagcacaggcgagagggagattgacctggacctgtcattctgggacactgtcttgcatc

SEQ ID NO: 15853 - DNA, 541 bp, Homo sapiens
  MAP TO AL136298.1; EXPRESSED IN LUNG, SIGNAL = 2.2
ttttcgtcttcgttgtcaaaagaaaggaggctactatttttaatttgtttttgtgagttctttttgaccgagtcctgatttacttcatcttcatttggcttcttcttttttgagcttgctgttaaacctgaatatttttcatctgagggatgcttgactggttttcgatatatgactcttccatcggctggagttggttcttcatctgctttggcagcctttatttctgctttaattttcgtgacttcttcaactgacaggtctcccttttttaaaaccaccacttgaggctgttcatcttctttgtcactgtgatccccatcttcatctgggggctgaggctgaattctcttagtctctacggtgggtccctccctgtagccgacccgttccttgaagcgggccagaaacgccggctcggctggccgcacgtacgatacctcgacataatcttatatgtagaaaactttaaagacttaacaaactgttacaaccaataaatgaatacaaaatcaacatacacatgaagcatccaaaaatg

SEQ ID NO: 15854 - DNA, 562 bp, Homo sapiens
  MAP TO AC011450.3; EXPRESSED IN BONE MARROW, SIGNAL = 3.2; EXPRESSED IN LUNG, SIGNAL = 7.9
catacccatcaccttgtcccctgatccccaacatcatatgtctccagtcccggtccctctgactcgtatccctctcccagctgcgctgctgcggctggcactacccgcaggactggttccaagtcctcatcctgagaggtaacgggtcggaggcgcaccgcgtgccctgctcctgctacaacttgtcggcgaccaacgactccacaatcctagataaggtgatcttgccccagctcagcaggcttggacacctggcgcggtccagacacagtgcagacatctgcgctgtccctgcagagagccacatctaccgcgaggtgggcaggggttcggagcataaacctgtcgaatggggcggggcctgcgggagggggagggctgtcagtgagtagcggcctgagaaagggcggggtctacgagaaaaggaaaggtacggcaggaggggcggggccctctgaagggggcggggtctgcaggaagggcagggcctaaagaaaaggctgggctggctctggaatacagatgtctagggaggggccaggcttggaaaaggtgaagcgag

SEQ ID NO: 15855 - DNA, 587 bp, Homo sapiens
  MAP TO AL133444.1; EXPRESSED IN LUNG, SIGNAL =   3
tgccgtgtatatttcccttttcaggaatcattaaccaatggcaacaggaatccaaggataaagtgatttccctcctgttaactcatctgcctttgctgaagccaggaaacctcgacgcgaaagtagaatatatgaaactgctgcccaaaatcctggctcactctattgaacacaaccagcacattgaggagagcaggcagctgctgtcctatgctttgatacatccagccacttcgttagaagaccgtagtgctttagccatgtggctgaatcacttggaggaccgcacgtcgaccagctttggtggccagaaccgaggccgctcagactctgtggattatggacagacacactactatcaccaaagacagaactctgatgacaagctcaatgggtggcagaactctcgggattctgggatttgcatcaatgcctccaactggcaggacaaaagcatggggtgtgagaatggccatgtgcccctctactcctcctcatctgtccccaccacaatcaatacgattggaaccagcacaagtacaagtaagttccccggaatccctttaacgtagtctggtttggcgatt

SEQ ID NO: 15856 - DNA, 509 bp, Homo sapiens
  MAP TO AP001207.1; EXPRESSED IN LUNG, SIGNAL = 2.2
ccagtaaagccttgcagacctacctgatatccacactgatcttggccttggccttccctctctcaacatgcaaagccattcctctcccaggcccaccatgtggcccctaagttaaaaccaagctaaaatggaaatatatttagttgttataaaaaaataaaatgtgggcagtctcccaacagaaataatcagcctgcttgcccagagggcaagtgctaatgtatcagagcagaggaatgaagtggggaggaaacagaaggctgtctcccaagcctggtccctaacaccctgtgcactcaataaacaaacagccatttgaatcactttggttctccttttttattattctgcagaatgataaagacctaaagcctgtttatatagtgttttcatggctagagttgtataaaactgcattttgtcagtttgaataagtccatttgaatgagtcaaattttttaaaagcctcgagatccaacagagctggaagaaagtaggggtgggggtta

SEQ ID NO: 15857 - DNA, 516 bp, Homo sapiens
  MAP TO AC012566.3; EXPRESSED IN LUNG, SIGNAL = 2.2
tgaaagggcaatacccaaagcctccaagtctttgcgtgtttatgtccagattcaaaaatacataaaccgtggtttcagctgggaagatgtgtacagtgacactagctgaaatgcaatattttacaaaagcaaaagtcacagatgtcaatatagcagagttgagccaatcacatacaatcaggattttttacacaataacctaagatttgaagtaattttttaaaaaacctttttaggaaccacagagaagtcatcattcaagatccgaaatgaagaaaaaaaaaggaagaaaaaggaaagaaaacagagccaactatttattcgccaagctccgtaagtataagatccatgcctatcatgtctactttctgtgttctcattgttttgtcagtgcataacatataatattataggtgttcaataaatatatgttaaatgattgaagacataggggtagcaaataccaatgttacagcaaagagatttgactaatcatggtgtggagaatccaaaagg

SEQ ID NO: 15858 - DNA, 545 bp, Homo sapiens; identical to SEQ ID NO: 14815
  MAP TO AL133249.1; EXPRESSED IN LUNG, SIGNAL = 1.8

SEQ ID NO: 15859 - DNA, 580 bp, Homo sapiens
  MAP TO AC004551.1; EXPRESSED IN LUNG, SIGNAL = 2.5
ggacctcccctctttcagacagacccatctgcctccccacccatggtggctgccattcttctggtccagcactggcttgatagggcaaggctgagatctcattccaaagaggtatgcctggcatgcggatgatgaggtacagggatagggtgtgagaagcttggcacctcgctgattggagctggtgcagcaggatgttcctgatggtctcatcttcaaagttgtagttgaccatccaatagatacacagcttctcctggcatttgatcagctccagtacggttctgacgccttcagcaatgtcaaagttgtcttttctgcacccctgttcccaggcatacaccgtaagcagctccagggcatacggagacagcgagggtaaatccttgatttttttctggcactgtgggataaggaaagggtagcagctcattgggggatctagttcttaccatgtcagggatctgaaatcaagaaaccagaggtctacaggaagtcattgtcctttgctagaatgcctacagttcagtggactgacaataccaagtcttgacaaagatgtggaacaactgggatggag

SEQ ID NO: 15860 - DNA, 569 bp, Homo sapiens
  MAP TO AL138828.4; EXPRESSED IN PLACENTA, SIGNAL = 1.4; EXPRESSED IN LUNG, SIGNAL = 1.6
agatacgggacgtgacttggtcacccatctagtaacaggccgtgaccagagccggatcgcgtccctcgctttggtcacaagcttcctggtgctctccaaacacagcgtggtagccttgctcaccttcctccgaagccgagcccccgggaatcaccagaacatcaagcggagggcgttaggaatcctcaatcaaattccagactgcgccactccttgtgcagatcgctcagacgtctacccagacctcgacccagtttccacccgcgcgcctcggcttgcagccacaggcggtaacgatgccctcagcgaggaataagaggtcaacccggtgcccagccctggagcctcacgctcagccagggtaatgttatgggaagcgcgcccccgtcctcctgcgcccaaccaacccacctgctagtccctaggaccggactgctacttccgcatgacaggactgctacttccgcatcccagaacgaaatcaaactccgcgggccaggacccgtaaccagcctcattgggcaaaactgaagatcgctgcttctgattggtcattgcatgatgtcagg

SEQ ID NO: 15861 - DNA, 580 bp, Homo sapiens
  MAP TO AC021887.2; EXPRESSED IN LUNG, SIGNAL =   2
aggtggcatttgcattgaactattataggtcaaccatgaacagacagagatcatgaagaacattaaagttaaggagaaagcaatcatatttagagatgaacatttgaggaagggtaattagtttctctatgtctcgaatacaaaatggttttagacttatctacaatatcatgatttatgacaaaccaggaaacattatcttcaaagtacctgagatgaagttacaaataatcctttaccaaaaaatagctaacaataggtcataaatcagttggaaacccccttagatcattttactgttctcaggcatgatttcctcagtctaaccacatatagtgatggactttaagacagcaaggaccagtgttaaaatacgaaagaaattggaagctggttattaaaataaagaactaaacccttttctccaagatctattattccctgaataaatgacttgagaaattttcaattaaataagacttctgtctctaaaagtgcatttcacaagaaaatatttttttctaatctcatatttcctaaaagaaggaaccatatgatctcctgccaagtctctaatgca

SEQ ID NO: 15862 - DNA, 524 bp, Homo sapiens
  MAP TO AL138761.3; EXPRESSED IN BONE MARROW, SIGNAL = 1.6; EXPRESSED IN LUNG, SIGNAL = 1.8
cctgattcaaggtttagctggatatttaggggtagtctgtgaacaggtcattaaaacctctcttgaggtgaacttaaacaggtcactaaaacctctcttactccagttttcttggcagtaaaatgggaataatgattgaccttatgacaactctatatgactgttgagaagaccgaatgaaagaatgaataggtgctatttaactctcaagtattattagtattcctaaatccttagatagtcttaaaacaatttttttaaaaaaaaagctttagtaattaaaaacagtagtttacacttacctccttctttcggttcttcagcatattctgaaatttggacaactctttctcttgttctcctttgatgcgtttggcttcatctcgcaagcgatttgtgtgctcttgttccaggcgttcgatagtctgtttctgctgtttttctagattctcaatttcctggtcatattgtcgctttttactctgtaaaacaatatagctcaagatgataacttttccatcacc

SEQ ID NO: 15863 - DNA, 503 bp, Homo sapiens
  MAP TO AC015971.2; EXPRESSED IN LUNG, SIGNAL = 1.9
tcctattcaaggaacccgtgttgataataacagcaaccccggcattatgaggtgactgtaaggtaagtgcagccttaccgagctggttcttcatccccatgagcactgagttcatgtgtgctttggatgcatacagcttgctcacagccttccttgacctgatcatctccttggccagaactatgcagacatccttctggcccttcttggcagcatctttcacagatcgtttcactttttcttcttctctttggatatctaaatttagaacagaacaccaaaaatcaagggtaagtcaggtttattggcactcaaatacattcttattgtgatctaaatgtatctattaaatagaaaaacatatagaaggatatacataaaatcaaaataacgtagtgaatattcatcatttccagaaacaacatcaaagtttaaaagaaaagtacgatcctattatacttgaatttctaaacacctttctaacatttgttggtactggccct

SEQ ID NO: 15864 - DNA, 592 bp, Homo sapiens
  MAP TO AL121787.22; EXPRESSED IN LUNG, SIGNAL = 4.5
agaggtcatttctttgggggattaacttagaaatgtaaagcaagattacctccttcaaagaacccacaatacagttgaagaatcaaaagaaaaacatagaaatcaaaggtgagtgattcaagagtattcattgtagatggcagggtactggcagttgtttgtgctgcagaggttcaggtggagggaaggacaggatttttcttccatctctttcatgaagtttatctcacctaaaatcaacacccacaggatggacaggacttcactagggagcaagtggggagagacccttcaggagaggacactggtgtggcaaagacccaaaaagaggcacttgcaggactttgaggaggcatcttttatcagcacaaatgagagatttggggaaataagtcaaaatatggtctcactacatggggccttactatggaagaataaaatttagacaaaagaatttagacttgaccaggtaagcaataggaattcatgaaacattgtgaaccaagaagtgacataataaaaaacagtttaaggaatatctgtctagcaatggaatgcatgttggatggcaacaacaacccaccacagacag

SEQ ID NO: 15865 - DNA, 598 bp, Homo sapiens
  MAP TO AL139120.3; EXPRESSED IN PLACENTA, SIGNAL = 1.3; EXPRESSED IN LUNG, SIGNAL = 2.7
gccatgacaggaatagggacataaggaaaggatgatgggatttattattattgatttttaattaaaaaaaattcttaggaaactctagtaatggaaaaagaaaatttaaaaacataaatttaaaattcatcaacctagaagaactattaattaacattttgattttagtctttgctctcaggccctatttcttttaaaaccgatgacgataatgataataacaaatacctcaatgtttcctggcactttattatgtgccaggcattgttgtgtgcactttacatgtatctacacatttataaaaatttccatagtaaagactattgttatccctattttgcagatgaggaaactgaggtacggagaggtgagattcttgccaaaggttactagctaaaaagcggcagagccagtgcggctccagagcctactaccccttatctactgggacatatgcctctggacgtatacatagaaatttcacatgagtaattaaacaagactggaactgtttgctccagcaaggataagactcagatgacaaagttagatatagaaataaaatttcctaacaatgacacttgtcaaattccggagg

SEQ ID NO: 15866 - DNA, 519 bp, Homo sapiens
  MAP TO AC011467.3; EXPRESSED IN LUNG, SIGNAL = 1.7
tgcttgtgtttcacgaggagaaaatcagcttcctgtttggatgcccactagacatttgaagttctacaatgaacccatcggagatgaaaagaaaagcgcctccatggagatggaaacaccactcacatggatggataatcctattgaagtatatgttaatgatagtgtatgggtacatggccccacagatgatcgctgccctgccaaacctgaggaagaagggatgatgacaaatatttccactgggtatcattatcctcctatttgcctagggagagcactaggatgcttaatgcctgcagtccaaaattggttggtagaagtacctactgtcagtcccatcagtagattcacttatcacatggtaagtgggatgtcactcaggccacgggtaaataatttacaagactttccttatcaaagatcattaaaatttagacctaaagggcaaccttgccccgaggaaattcccaaaggatcaaaaaatacagaagttttagtttgggaagaatgtgtggc

SEQ ID NO: 15867 - DNA, 561 bp, Homo sapiens
  MAP TO AC008635.4; EXPRESSED IN LUNG, SIGNAL = 2.1; EXPRESSED IN PLACENTA, SIGNAL = 1.3
taggttccacatctagcgccgcattcctgtgggatgacagaggagcctgatgtcactgagaccctgtcacccccgtccccagatgcccctgcccccggctctgagcttgctgccctcacttcttggccgtgaccgccttctgcaggttccagagcttgagcgtgccgtcctcggaggcggtgagcagagccgactggctgtggtggaaggccagggaacgaatgccgtcgtagtgcgagcgcagggtgaacttggggttccacgtcttcttaaaagcatctttgctgtcagacagctggggttggggggagctgcctcagtgtcttcgcatccatcccagcagtcatgcagacaccgacacccagggcttgagggcccctgtcttccacccacatgaccctggcaggaatgccctcagagcctgggctccagccgggaactctccccttcctctgctgggcagagtctccatgctcgcccaacaagtccccacactgcgctgggttctggagagacaaaggtgagcctgaccccttggggtcttgcagttgagaggaaggg

SEQ ID NO: 15868 - DNA, 521 bp, Homo sapiens
  MAP TO AC024167.1; EXPRESSED IN LUNG, SIGNAL =  35
ggaaggtgacagcgagaaagacaaagatggttctgcagacaccaagccaacccaggtcgacacatccagaagctattacatgtggtaactcagaggatattttgcttctggtagtaaggagcacaaagacgtttttgctttattctgcaaaagtgaacaagttgaagacttttgtatttttgactttgctagtttgtggcagagtggagaggacgggtggatatttcaaatttttttagtatagcgtatcgcaagggtttgacacggctgccagcgactctaggcttccagtctgtgtttggtttttattcttatcattattatgattgttattatattattattttattttagttgttgtgctaaactcaataatgctgttctaactacagtgctcaataaaatgattaatgacaggatggggttcccctgtgcttttaccagtagcatgaccccttctgaagccatccgtagaaagtactttgtcctccaaaaagctaacatacggttttgaagcagca

SEQ ID NO: 15869 - DNA, 545 bp, Homo sapiens
  MAP TO AL157885.2; EXPRESSED IN LUNG, SIGNAL = 2.2
gaccttggaagcaataagcgaataaattaaactgttgagatttggaatataattttcatagtctaatgcaataggagagttaacattcatcagataattcttagtttgatttctgacacatatcactagcttgccagatccttaaaggcatcacgtccctgaaagattggatcttgttgatgttagtatcattcacattgcctagcacagtctcttacacataatgagtattcaacagaacaaacagaaagataatcatattcaaccataattcactgatcatgtcaagttgcacatatttccagcatcttaccaagttactgttcagggcgatccacacacgttcattagatgtttccatctgcagccacgcaaatgcattactgtagggatccagaatgctggctataagggaattgtgaagcttgcagtatgtctccgcttcatgccattgaaatttttgtctcatgagtgaatagctgcttttgccatatttaacaaagccatctgtttgaatcgttgctggaggattagtcaaggaaggg

SEQ ID NO: 15870 - DNA, 566 bp, Homo sapiens
  MAP TO AC020714.2; EXPRESSED IN LUNG, SIGNAL = 1.9
ccaaaaatgttaaccctttcctacataaaacacaaatttatttttatttagagaaataactcacttgctgtagatttaattttgctgacttcttcattaacagcagacgcagaaaccagtggtgcttgtggtctgttatccacagaccttggttgaatagaatcatgaatatctacagacttctgtgatattgtatcctaataaataaaaaaaaaatcactgtaagtatggttaataaagtttatgggtgaaaatattttctaaaacgctattttaaaaaattatattatgtccctatgaaaatgatgttttacacattacagttataacacaatcagaaaattatttaaaattacctgtacatagagaaaagttgactttctgaccctcactgggctcaggtctgaaaccatccaacagcaacagataaaaatgcgaaacttcaaagtgtagagaaactggtcagcaatacccacaagtgttcatgaaatctaaacagacaccttttgcaggggtgaatttagaaaaggatcttctgtcacccatggacccagggactagaaagg

SEQ ID NO: 15871 - DNA, 573 bp, Homo sapiens
  MAP TO AC024123.1; EXPRESSED IN LUNG, SIGNAL = 3.6
aaaatgtggcccttttcctcctcacctgctgccagaccatcagccgcgccttcatgaacgggagctcggtggagcacgtggtggagtttggccttgactaccccgagggcatggccgttgactggatgggcaagaacctctactgggccgacactgggaccaacagaatcgaagtggcgcggctggacgggcagttccggcaagtcctcgtgtggagggacttggacaacccgaggtcgctggccctggatcccaccaaggggtaagtgtttgcctgtcccgtgcgtccttgtgttcacctcgtatgagacagtgcgggggtgccaactgggcaaggtggcaggctgtccgtgtggccctcagtgattagagctgtactgatgtcattagccttgatggtggccaggactggtagggccctcagaggtcatggagttccttcgtggagcgggtgctgaggctgtatcaggcacagtgctggctgctttcacctgggccgtctcaccgaagtgtccatggagcctgcgtagggtgggtatctgtgtcgattttacagatgcagaaacaggctca

SEQ ID NO: 15872 - DNA, 590 bp, Homo sapiens
  MAP TO AC022034.3; EXPRESSED IN LUNG, SIGNAL = 2.2
tgcttgctttgtcattccagccataggtggcatgctccaacagcatcatgttctgggcccacacctacactgaggtgaccaatgtcttcaactgttgtatctgcaccaccctttcagcagcagctgcaggcagcttgccctggaacgtgcatccagcttctgtgcagaactggacatggctagagacttggtgttcaatagacaatgcaatggtgggctttggatagggggacgtcccaaaacccatggcaagcctgccactggctgacttatagtgtccatgatggatggggctggctaacgggaaaacatgtggtgcccccattgcaggtaccatgatgtataggggagcactggggtaaagtcactgagggattattgctgaggtttgtgcaaacataacacatgccgcgaaaccaagggtgtggtggaataagttgccttaccaaggctggaccttcatggactttatgcccccagggagtttatgggtctgtggggacacaggatggccatatctaccagccaattggactggacgttgtacctgggggtggctttctgtgcctgccactgtgtttcccacattg

SEQ ID NO: 15873 - DNA, 532 bp, Homo sapiens
  MAP TO AC013359.4; EXPRESSED IN LUNG, SIGNAL = 3.1
acatcagaaatcagcgaggggaaagggcatggttcctgacctcctttgtttccaaaactaaatcatgatgcagtgatttaagtggcctctctaaccaccatgtgcccatgacctgcatgaaatcgctataaaacctcaacaggcattagcactttaaagaaaggtgacttcctaggtagtaaggtgattttactgtgcactacatttatgttctttaattgggctcagatccatcccagaatcagcagacatcaaatccaacgcacagttcagaagatgtgaagccaaaaaccctcccgctggataaaagcattaaccatcagatcgagtctcccagtgaaaggcggaagtgagtaaccagacacgatggttgtgggattcccttttttaaaaattcatttagttagaagggagaagaatgaaaaatgtgagatggcaagaggacagcagcatttttgtgctttctctccattaaatctcattgacaaggtagtcaatataaatggaagtttgggtcagtctttctggcaag

SEQ ID NO: 15874 - DNA, 589 bp, Homo sapiens
  MAP TO AC010582.6; EXPRESSED IN LUNG, SIGNAL = 1.8; EXPRESSED IN PLACENTA, SIGNAL = 1.3
ccacattataaatgcgtaagccagagttagaattacctgtactctttactacacatattaatacaatttaatttgttatacattttttattaccagctatatgaaagttatattttatgaagataaatatagccagaatataaaaaccttactaaagttaaaacaatctaactttatctttaaaatcttatgttgtacagcacctaacagtctctgaaaaaaacaggatataatttatcagtgttgtaccaactaaaaaaggaaataatcaagtagattattttaagtatgttactagaaacttacttcttccacctgcccatcttcagctccatctttctctttgtcttcctcctcatcatcatcatagtcttcttcttcatcttcatcttcttcagatgatgtatccccagttccatcaacttgtaagaccaatggagcttgtgtttgagcaggctgggcctgcggttgctgctggccagttgcagttatctgtgcttgggctggtgtaggtgctgccactgtcgtaggtataacttgagtcttatttcctgtaaataagatttgctgaggctggatgatgacacct

SEQ ID NO: 15875 - DNA, 590 bp, Homo sapiens
  MAP TO AL121975.3; EXPRESSED IN LUNG, SIGNAL =  13
catgaccatgaagaaacccacagaggttactcacaaaattaatcactcagcattggtattagtaggatcaagaaaaaaaacttaaaaaccaactatggatagtaacaaataaaaacctaggaattttgggattaacagtacaacatcatatgtaatctgaatatcattatgaaaactgaattaacttatttcctagagaaacacagaataaaactaccaggggtatataactgaaagtgtgaacatgtcagatacagaaatcaagtaaaatactcactgccaaagccttggacagtttggctctaaattcattcaggatgattgccacaatgtccttaagtggtacgtaagcaaagccatcttccaaatagactttccttcctcgaaacaaatccagagcatcagcaaaagggatctgaattaagagtaaaacaggcaaaataagtcagcacctgtcattaagaaatcctaagtcttcatatgtataaagtataaacaaagaaattcattagtcctagcagagccaaaagaatatcaaaatgattaatttatcctccttaaaactcaacagcattagcaaacagtggcag

SEQ ID NO: 15876 - DNA, 526 bp, Homo sapiens
  MAP TO AC008045.5; EXPRESSED IN PLACENTA, SIGNAL = 1.4; EXPRESSED IN LUNG, SIGNAL = 1.9
ttcttccataacccagtgccttcttatttctaatgcctcctagtctgatgtcactgagaagatgtttatggccttgcttgccagagaactaaaaaagaaaacaacaacaacagcagcagcaacaacaacaacaacaaaaaacatctaacaacggagccaatgcttactcatgccagtcccaggattccatatatggggacattgggcgtgttttaagccatatgctcataacctttgtgtcatgattcagttggtgtgtcttgatcagtttcctcatctgtcatctcttggaaagcatgtaaagattaatcacagatatctgcttgtattacctagattaatgctagatgattagcagatgaaccttaacatctcagtggcttaacaaaaaaaggtgttaatctcccacttctatatgaagcccaggtgggagtaaggctgtactccacaaagtcattcagagaaccaggctgttgaaggctctgccatttctagtaaatgacctccaaggtggttctcagcacaa

SEQ ID NO: 15877 - DNA, 569 bp, Homo sapiens
  MAP TO AC010745.2; EXPRESSED IN LUNG, SIGNAL = 1.7
gctgcttgttctgtgtagcgggcattgagcctctggacagggaagagaaggcagtgcccatgacttgccatgccctgaacttagatgatctcgtttactcctcacaacaaacctgtgagaaagtgtcagtatccccatcttaccaatggggaagcttaggcccagagagggcaagcaatttgctcacaatcacacagctggtatggatttaaactcccaccttagccttagcgtgcctccaggacccctgcaattccctcttaccctgaacatggtcctgggggaccccatcttagcatgtgcaaaaccgaacagggtgagagccctgccacacttgaccttgcatttagtaataacaatgaggggggagggagaaggggggagggggaggaacagaaggaggagggagaacattaccaacatttagcactcaccggtcctggtacttgctcaggactttaattgagcaagtaaaggacccatccccgcaccaccaccaccccaagaggatcttgggtctgaggagctgaccgatcccctcattcaatcctcacagccctaccgagaag

SEQ ID NO: 15878 - DNA, 551 bp, Homo sapiens
  MAP TO AC008860.5; EXPRESSED IN PLACENTA, SIGNAL = 1.8; EXPRESSED IN LUNG, SIGNAL =   2
aaaaactatgggtgcatgggtgagggttttaattaaaatactcaagctttcattaatggccaagggataaaacctaaagttgattagacacctgcatgtatcagcacagcactaggagctttacagagctcattttatttaagtcctattttagaacaaaggaaacagtcttaggcaaggcaaactcacagttggctactcaatgtcttttatttctgcctgttttttggccccagaaaatgcaatattttgacacagaaaaaaacattaggatgagtgtgaaatcaaatacgattctggtttttgagctgacatttagtcatttggagccacatggctgtcccagggcctggtccccaggtcatgtgcttaaagcttccaggcggttctcatcatgatgatgaagtacacatcagtgtcaatggatgcgctcacacctgcatagtagttcatgaactcctcaggggtcacctgcagtggaaaagttagaaacaaaaacgaaactttgcttctcactctgtcaatgggcgcccaccttgtgcacctgtaaa

SEQ ID NO: 15879 - DNA, 550 bp, Homo sapiens
  MAP TO AC022211.2; EXPRESSED IN LUNG, SIGNAL = 2.7
ctgtcctcctcgaacctttgcagcctgtggcagctgggggtcgattactttgattactgccccgagctgggccgagtctccctggagctgcacattgagcggatacctctgaacaccgagcagaaagccctgaaggtgctgcggatctgtgagcagcggcagatgactgaacaaggtgagctggccctgctcccagcctactgtctgtgggacgcaggagtcaggggatcctgaggtcacactttatgcctaccccagccatcctcctcctcacgagccacactggagacgtggggctgtggacgccaagaggtaaactaagagatgggataattacttgggagggacaggaaagctagggatccactggaacccagacaaaatctacacgccatctggaaaggcctgagccgccccttttctcacacacttgattccacgaggtcagggctggggttggcgctgtttccctgtccaggtgggttgctattgctagctcagcctggctcaatggggaagcagtgctggaggtggctccagaaaagcagag

SEQ ID NO: 15880 - DNA, 592 bp, Homo sapiens
  MAP TO AL121923.7; EXPRESSED IN LUNG, SIGNAL = 2.3
aacaaaaggcacgaaaatgcaaaagaagatgcagcacagcattaaatagactgtaaagaggacccttgcttgcagtacgggatgtggtccaagaatgcagagtgctgcctccttcaacctcagctgggactgtgtgcattgggcaagtcaaattttttcttgctctgtgcatgtccatgaaagcaccgggagcattgattttgagattgcaaactagttttagtgggtaatgcaaggcacttgtattggttcgaaccccgagcgcacgccaacagacaacacaaggcggtgtggagcaacacgctgttttaataagcgcccgagcgccggcgggctgaggcctaaaatggcgtcagcccgaaacggggacggggcaggggttttatagtctcctgttaacaggacgtgtctgacgtaactgctacgcttacccagacggcctctctcttggtcttcggcgggtacgtgtcttccggccagctctcttccgcttctgctgtcttgatgacgcacagtgctggcgcaagtcgtcttgcgccaggcgactgggtctgaggaggcaggagttattcattcccttaagctttcaggc

SEQ ID NO: 15881 - DNA, 591 bp, Homo sapiens
  MAP TO AC010291.5; EXPRESSED IN LUNG, SIGNAL = 1.9
agcaaggacccagagaactgagttgccataacatctctctaagacctgcttcaggcagtgcatttcagcaaggagcagaccatggaggatcacagggatctgaatttgcaggtgatggtccaaattcttggctccaagtataaaatactgatttcccaactcctctacccagggctttcttgctctgaggccaggctggcactgtttgcataaagcactgttccatttgaaaacagctgtgcctagaagcagatgagagccgacgaagtagggatcataagtcagcagaactgtgctacaaaggcattttctgttgctgcttttggtggatgctgactaggaaatcagacactccataatcaacagaactttacatcgtgcattttagaagctaaaaatcctagataagagatccttaatggtttactccccaggacaaaagctgcagctcatagattctgtgttttctggcattaatgttatgatctcactgaaatgaacattatcagaactccttttaaatagtctttttgaagtttgctaacttatggttataagacgtgcgttttccctccccgatgaatgtcagtt

SEQ ID NO: 15882 - DNA, 598 bp, Homo sapiens
  MAP TO AC022034.3; EXPRESSED IN BONE MARROW, SIGNAL = 2.9; EXPRESSED IN LUNG, SIGNAL = 1.7
tttgctttctcctttttctcttgttttataaactaggcaaggcggagagcagcaggagaactggtggtctccttcctcactatgacttaaaaaaaaaaaacaagagtcccttcaaaatattactgctcattgacaatgcacttggtcactcaagagtcctgacagagaggtacaaggatattttcagacctgcaaacacaacatcgcttctgaagcccatggttcaaggactaattccaactttcaagtcttgtaatttaagaaatacattccctaacactataactgccatagatggtgattcctctgatggactagaaaaggaaattgaaaacattctggaaagtattcattcttctagatgccactctagaacattcatgattcatgacatcaaaatatcaacattaactgtagtttggaagaagttaattttaaccttcataggtgattttgacgggttcaaggtttcagtggaggaagcaacagcagatgcgatagaaatagcaagagaactagaagtggagcctgaaggtgggactgaatttctacaatcaaggtgggactgaatttctgcaatctcatgataaaacttgaa

SEQ ID NO: 15883 - DNA, 589 bp, Homo sapiens
  MAP TO AC012596.2; EXPRESSED IN LUNG, SIGNAL = 2.5
gtagcctcggtctggaactgtctccccaatgaacccctttataatctcctaaacagatgaacaaatacctgtcttcataagccacagaaaatggtgtcttcctttgcatattaatgggaaaaatctgttgccagatttccagtgaacatttcccttccagaaaacttattcccaaagaaggtctctaattttaccaagaagaaatccgtgagcctttaaggtcctgactgggaacttcttcttgaacccctgagctcctgagtgctttctcatgtccctgggctcaaagcatcacaggctgccaggttcttgatatccactcagtgaagtgtgactagggaatgaagaaagggaagattctaggcaaggaggaagagataaaagggctaagaggggataaagaggaaaagaagaaggaggagaaagcaaagcaggaggagggggaaaagaaggaagcaagcaagggaagaaagaagggaagggaagaagaagaagaagaaggaaggtaggaaggaaggaagggagggagggagagaaggaggaagggaaagagggaggaagaaagaaaggaatggaggaagagggaagg

SEQ ID NO: 15884 - DNA, 590 bp, Homo sapiens
  MAP TO AC010322.4; EXPRESSED IN BONE MARROW, SIGNAL = 5.7; EXPRESSED IN LUNG, SIGNAL = 3.8
agaagggaagagaggcaaggctcataagacccatccccaacccttcccccacctgcaccccaggacactggggtgctgacatggttctctcggattcagggcaagtactttgagatccagttcagccgaggtggggagccagatgggggcaagatctccaacttcttgctggagaagtcccgcgtggtcatgcaaaatgaaaatgagaggaacttccacatctactaccaggtgcagggaaggggccgggggagagggagcaccacctggagcccagcggggtggacaatgggaaggtaaacacctaggggggcatggcagggcagatgagggatcacaggggctgagccaggcaagcaccagatgcatgaacatggcacaccctccagctgctggaaggggcctcccaggagcaaaggcagaacctgggcctcatgacaccggactactattactacctcaaccaatcggacacctaccaggtggacggcacggacgacagaagcgactttggtgagactctggtgagcaccggcctctactccagtccccggccaggcagacctcagccccagaaaccctcctgagtt

SEQ ID NO: 15885 - DNA, 570 bp, Homo sapiens
  MAP TO AC011338.2; EXPRESSED IN LUNG, SIGNAL = 2.8
taagcacgtgttcaccaaggctcccaattcagtggtgaggattctatgatgatcaattcctcctaaggtatttgtaaaatgcccaccagattaccaaccattcctgtatttccagaaccctttggagtccttatgtaacctgggagagctgttattcttttttctttttggtagaagtgaatcctgcaggaaaacttgctccattttggttatttctgttatatcacaggtgggctggatagcaagttttggaagcactgaacacccacacggagctgctcctctcaagcggggaggcatcttcactaaggaggtgagtgaaaaactgacccaacacaaatcatgcttcaattatatccatttcctatagttggggaaggttgcagtgctatcttttcctcatttgaaagagaaagtagaacattggtgtgaataaaggcagtggcaagaatgacatgtttggacagctatttacactcttgttaaagacattagcttttcttcagaatcaaaagacagagtgagaccagccttatgtctaaatgtcaaagagcaccgaaattcaaatgc

SEQ ID NO: 15886 - DNA, 577 bp, Homo sapiens
  MAP TO AC011465.4; EXPRESSED IN LUNG, SIGNAL =   2
gaggcagcaggttcaagttctggctcagacttagggctttctgaccttagagcacaaacttccaatcatcacacatgtctctttcaaaacaagatacctctgctatgctcttatccctttttaggtctcgagagccccctaaccttcccttctctcccttgagtagctcatcaccctgcggggctccatcctggaagatgctacgcccacagccaccaagcatgggaccgggcggggcctgcccttgaaggatgccctggagtatgtcatccccgagctcaacatccactgcctgcggctggccctcaacacccccaaggtgacggagcaactgctgaagctcgatgagcaaggggtgagtcaggggctggaggtgggggtgctgctggggcagtaccttgcaaccccactcctggtagctttttctatcttggtcactttcttttttctttgcaagtaacagaaacctacttaagctggtttcagcaaaaggagggattcaaatcaaattctagtggtgccaagagcaagaatgtaactgggtctcctaaaggagggagattgtctgggggtgaga

SEQ ID NO: 15887 - DNA, 557 bp, Homo sapiens
  MAP TO AL138970.2; EXPRESSED IN LUNG, SIGNAL = 2.2
aattgggacagaacctcacgatcaaacaagcaaactgatatatttttctgtgaaaatgtatgagtatttacatcaaatgggacaaataaaaactagaagtaacctcaagtcagttcagaagactttttgctgctgaataattcaggtcaaatccaggtctactgttaaataagttagaagaacttgtggttttcagagctttttggagtttggaattgtaggtaaggacccggggacctttaggagtcagtagatccaagtgtgtgctttagagctggcattgttccatctaggtccaccacttcttggctagattcttgggcaaactgtttacattctttgtcttctgttttctcatctacaagtaagaatcataacatgacctaacatacagggttggtaagaggatttaaaagaattgacacataaaatctgaccccataataagtgcccaataaatattagctactgacgtattaccttatttcatgaagcaaacagcttgtgagacaggtgttatattttggttacctgaaagatgaggaaacagagagcgg

SEQ ID NO: 15888 - DNA, 594 bp, Homo sapiens
  MAP TO AC018897.2; EXPRESSED IN LUNG, SIGNAL = 1.8
tagaatgggaggcaggtttgctctaagcagttcccagcttgaattttccctttagcttaggattttgggggctcaggatattttcctttaacattgtctttcaactctttcagcaattgttttactgtctttcagcaattgttttactgttttccttagattgagtttcagccttcttctgtaatttgttgagcttccctgccatccagtttctgaattctatgtctgtctttttggccatttcgatttggttaagaaccattaatggggagctagtgtgattctttggaggtaaggttttagagttgccagaattcttgcttttttgttgtttatttctttgtttgtttaaatctatgtgggctaatattcctttaccttttggcattgctgtcttgtgaatgaggatttttgtttttatgttctttaatgcccctgagggtttgactgcgatatatgttgggtttagttgattggcttcatttctggatgctttcagagggcaaaggctcagtttggcactcctgtgctgcatagtgttaccctggagggctgggacccatggcttttttctctggtcccttgaagtcaagc

SEQ ID NO: 15889 - DNA, 557 bp, Homo sapiens
  MAP TO AL121716.16; EXPRESSED IN LUNG, SIGNAL = 1.9
accagcaatggtgctcaagtttttatcatcccttccagaaaatctttttctaccatctcttctattttttgcctggctttgctggaacatggtttgtggttctccagtttcatgtccttattagggaaggcatttgagtagaggataggactccctgagtgtcctccacatcggcttgtgactttgctgttgaagacttgactgagcacattgaagaacggcaggagctgctccatactgcgcacggtgcagatggtgagcagcaagtgccctggctcccaacccaatgttctccctgagttgtcttcctctggatttttctgcagaaaacaaaaagtgaactggtattaatacaacagacaatgtggtatgttagaaaaattaaaaatatataaactttggcaattggtcaagaaatgaatacaaatgacattaagtttctaactcctgacctgatcaaaacccttggtgcttctgagaccttttactgccatttattagttttacatggagcagtctaacattgtagtaatagttcccaactagaatgcgcagat

SEQ ID NO: 15890 - DNA, 519 bp, Homo sapiens
  MAP TO AC016939.8; EXPRESSED IN LUNG, SIGNAL = 1.6
gcaacactattggcacaagccttatttacccttaattttttaaatttaaagataaatttccatcagctgtagaaaagcactttgctaaaacctctcaagacataaaacctgctgttttacagaaagttgtaaacagtaatgtatggtatggtccaaatgaattgcttaaatgggggaaaggatatgcttgtgttcacaccccctcagatcctctttggattccagcaggatgcatcaaaccataccatggcatgactaggacccaacccataccagaaatgaagaaaatgaccctgcaggacccgcagccccagacaatactgcttcctcggatgacacaagccccagacattacctgggggatgctgaagaagacaactcaggaggccgagcgaatcctgctccggacacagacaccattcactccagataatttgttccttgctatgctctctgttgtacattgcaactcatgtagggcattgatcctttttatgctctcgctttgtctgcaatctg

SEQ ID NO: 15891 - DNA, 574 bp, Homo sapiens
  MAP TO AC019248.3; EXPRESSED IN PLACENTA, SIGNAL = 1.5; EXPRESSED IN BONE MARROW, SIGNAL = 1.7; EXPRESSED IN LUNG, SIGNAL = 3.8
tctcaggatcgttttccaggtggaacagaacaaatcctactgcaaaccctctgcgcgaagcccctgacaagtgaggtttacaagcaggggctggggtctaaaccagtacaatcgctcacagcaggaccagcagtgaattggcaaacttagaaagccttccagctcatccacgggagagtcctgcccgagaactcacagaggccgttgacatccagcatgttggagatgccccggtcactcatgtccacctcgggctggttcttctcccggctctcctccaccaacttcttcagagacttggacatggtctgcaccgaacaacaacaaagcacgtgggcgatgacagcaagcgcagaggcggaaaggcaagaggccttcgctgccactctgaggcttccccagggttggagcgggtgggcgtccgagggcgtcccaggggctggtccgggtgcggggaggggatggggtagggcaggggagtgggaagggttcagccccgctgcggccacgcagcgagaagcaaccccaagtgcaacaccgcacacactcaccacggaaggtagcccctaagacg

SEQ ID NO: 15892 - DNA, 535 bp, Homo sapiens
  MAP TO AC022211.2; EXPRESSED IN LUNG, SIGNAL = 2.8
tgctcaccttcagtggattggccagcaacatgacctgggtgatggctgcaggtggctggatggggctaaatggagagagttctgtcccagaaggtggctgcaacttcactttcattgactaaagagagagaaactcctttgaagagaactggtaggtgcccccagatggaacctgcagtgcacacacacactgccacctgctggctgcaaaggcctctacacaacagggtcaagataaggccgttttggccccagggagacactggtaccttgggcactgcagcctgcagcacgatgctcttgacaggtaagggagccgtgttcagcatggacaccaccaccaccagcacgtcaggtcgtcctgggggacactccttggcaaagtggaagaggatgcggaagccgtttttatcgtaggctgtcacaggaagggcactgcctgtaagaacgtgacgtgagtgtgggaggagcagcaccagagacacccaacagagccccggcggtgaggagaaaagggctactccgtggtcatgat

SEQ ID NO: 15893 - DNA, 523 bp, Homo sapiens
  MAP TO AC022034.3; EXPRESSED IN PLACENTA, SIGNAL = 3.4; EXPRESSED IN LUNG, SIGNAL = 3.7
aaacttgctggttttgtggctcaaggggcatcacagaacctaccaataggtgatgtcacccctggaggcccagctgtaaaatttctctcttttgtactctttctctttatttctcagaccagccgacacttagggaaaatagaaaagaacgtacgttgaaatactgggggctggttcccccgaaaatgagcatatgttcttttccaatggatgagctaatttcaagtcatccctttcatgttgaagataaagttgatgatgttttacttatggatgaaactcacagtcacatttataactgggaaaggtaccgtaattgtcagttttcagaacatgattggcctatacataacaactttgatattgattaagttcagcttgatccaagatctctgttttatgtcactgatgaagaagtacaatttgatccctgaaaatatttgaatggagatcgggaaaagtatctggaggatcctgcttttgatatcaattattctactgagccttgtgagccagatcatca

SEQ ID NO: 15894 - DNA, 532 bp, Homo sapiens
  MAP TO AC022211.2; EXPRESSED IN LUNG, SIGNAL = 1.8
gcctgtcctgctgaaagaacccgcctttcagatggctgaaaaggcaccaatggggcagtatgtgctccccgttccctgcgtccacatcaggactgtggtctccagcagtaggggtgccacggtctcgcagtctccatggatcagcgctgccgtggggccacgctcctcggcagtgggatacccagggcagagtgcgcctgccggctgcgggcctcggccacctggcggggggagcagaagtcctccaggaagatctgtgccaggttccggagcctggcgctggccgagagggagaagcgaagcatgcactgcaccacgggcgtggcggtcagctctgggagaaagctgcggcccggcgggctcaggtgcatgagcgtggtgatggcagacagcaccgtctcctcattggggctggataggcagttgatgatgagtgggacacctcctgcgtgcaggatgtgctccttgttggccctgtctgggcacaggttgcacaggcctcctgtgggagagcaaggaagagtctggatgc

SEQ ID NO: 15895 - DNA, 534 bp, Homo sapiens
  MAP TO AL121808.2; EXPRESSED IN BONE MARROW, SIGNAL = 1.9; EXPRESSED IN LUNG, SIGNAL = 1.7
gatttgagcaagttcggagcaccatggccctcatcttcgcattttacgctttttttgcaagtttatcaacaagctcaattaaaccaccaactgttttctgaaactggccagttttgtccgcaaagttcttgcactcttctttgagctctgtggtctgctgggtaacctctgagtccaacacccacagcttgttcaactcatcaaagtgcagtccctcttcagccaggatgtcctttaccatagttgtttcgcatccaagttccctagagaagctctgctctgaaggagtgacggtgacagtcaggaggaggtgtgtcataggaacaagggtcgagaaagaataaagttcgcttgcttgtcacaggtattgttcattcaacacacatttctttgagtgcccactacatgccaaaactgctagatgctgggggtacagagatgaatgcaacatggtgcccaccctgctggccccgtggcagcagcttactatggcccaggctgatgtagactggcagcttctccccatcactggta

SEQ ID NO: 15896 - DNA, 588 bp, Homo sapiens
  MAP TO AC006548.20; EXPRESSED IN BONE MARROW, SIGNAL = 6.6; EXPRESSED IN LUNG, SIGNAL = 1.9
ggcggagtttgtagagcttgcatgcagtaataaaccccaacatcctaagcctccaccctactgattttcagagtgaaatcagtgcctgacccactgccactgaacctgtctggaactccagaggcccggttggaaacctcatagatcaggagctgtggagactggcctggcttctgcaggtaccaattcaaataggtgtattcatcatcagtatccaagaggctctcactagatctgcaggagatggaggctggctctccaggagtgacaggcagggagagtggagtctgggtcatcacaatgtccccactggatcctgaaataataacagagaagtgcaaggttatataaacacattttgagcaactttcatgattttccttaagattttgatttagagttacatattttttcaagttttgatttttatcatgaaaagtagactttctaaaatgaaccaatttgttactagccagcagggagcagtttattttcaagagcttaatcagagcactggtcatttttcctgggagatgattcctgactattcctgagacaaaaaatacgagtaatctttcccggagcaca

SEQ ID NO: 15897 - DNA, 530 bp, Homo sapiens
  MAP TO AC008655.3; EXPRESSED IN LUNG, SIGNAL =   3
gcttggactagacctggctcccagtcgagcagggtggggcctgaggaaagactctgcggaggggagggcagtgtggctggcagaacccagcctgaacggaccacgtgggccgcgggacgtagttggctctgcgcagaggctctgcggggccctacctgcggcctcttgatgcgcgtgtaggacagcagcgcctccacgtagggctgctgcaacgcctccacgcggcccggctcctgcacgttgggccggtcggccgagaagatgttgatggcgatgagcagggcgtactcagcgtcgtccaggcccagccgccgcatggcccgcgagaactcgaagatggggttgatgaactccacctgcaggcctgcggggcgggaggcagcccgtgactccctcagcccgaaaccgtgccccacatcctggaccctggcgctgcccacagtctctggggctgggaacacagcagtaattacagcgttcttgtcatttctgtccacctgtgccccgtgcccatgagtgctggcatgtag

SEQ ID NO: 15898 - DNA, 582 bp, Homo sapiens
  MAP TO AC022035.2; EXPRESSED IN LUNG, SIGNAL = 2.5
tcagaaattcacatcatctctggatttttttcttaccttattatttgtgtcctcctttgtagaaaattgtctttttaccaaatactctctgatagactcatgcatttgtgaactcaattgaaattggtctgtatgttcacaggattcttctacgaagccaggaagcttcagatcctgggtaactttagcttctaatgcctccttctgaggtggcaaactctgtttctttttcagtgtactcaattctttcatcgccatctctagttttattctgagttgtcttccttcctccctggcactgttcctttcagctcgaactttactccatttttctctccagttggcagtgcagtccgaccaccaccgcatggtcttttccatctgagcagctctggccttgacttcttcaagctcccgcaggcgaagttcttcacaaatatcccatttgttggtgttatatgagtgagcacagaaattgtgagcagcatgagattgtagcccatgaagtgggaagcaggtattacaggtatccctggggggtgaggcaggtgccaccatgtcgccgcgtgacttaattgatga

SEQ ID NO: 15899 - DNA, 511 bp, Homo sapiens
  MAP TO AC008635.4; EXPRESSED IN LUNG, SIGNAL = 1.7
tcagggtttcagaacaagggagcccacggcatactccaggaggaggggccgccagggcacccagcgccatcagctgacactctgaccctggccttcaccagcagtcaggaggaacagagagacacacctgccatgtccacgggctcacctctttatctgctcctcgatctgtttcaccagcagcgactccccaccactgagccctgcagggcctggtggagccctgggggccccttcactcggctccactgccccgttgagctccagcgagcggcccagcagggaacggacgcgcttggaccgcatgtcgaggatggtgtctgtgtagcccacctcttccaggtacctgcaggggtgcagagccacgtgggtcagacatcccctgggcttcttcatgtaccacaggggccaatgcaaaccgagacaacctcttaaggggccacttaagagcatacaccaaaatctgacataagcacaccctcgctccagcagttccccgtcaaggctattt

SEQ ID NO: 15900 - DNA, 531 bp, Homo sapiens
  MAP TO AL132773.14; EXPRESSED IN PLACENTA, SIGNAL = 1.3; EXPRESSED IN LUNG, SIGNAL = 1.9
cgaaattgttggatcatagggtagttctatttttagtttcttgactaaccttttttaagctgagaataatattgagcttttgttcttctctgttctcagatttaatcttttcaatgtttttaaaaattttgtttgcatttttttcctaggataaaatttacatgtatggaggaaaaattgattcaactgggaatgtgaccaatgagttgagagtttttcacattcataatgagtcatgggtgttgttgacccctaaggcaaaggagcagtatgcagtggttgggcactctgcacacattgttacactgaagaatggccgagtggtcatgctggtcatctttggtcactgccctctctatggatatataagcaatgtgcaggaatatgatttgggtaggtatattttttccagtagatgccttttgaacatcagatttaaaacctctaagcttattattttgactgtttagaaaagttcaacctaatcttgattcggtactttatcttgaaacatagtaaacactgggccca

SEQ ID NO: 15901 - DNA, 523 bp, Homo sapiens
  MAP TO AC008655.3; EXPRESSED IN LUNG, SIGNAL = 3.1
tgggtgtgggaagaaagaagttacctggatttggctctcccgcaacacagccgctgctcccacagccccacacccccgtggatcccatttccccctgttgttgcccctggcacggcctcgcgtccctggggtttatggagttagggtgctccccacccgtcaggcctgtacgtgggatgaccataccgaagccggttcctcagtgtggtcacttcacggttcatggactcggccgactctgtgacatcttccagctcacgctgcagcctccggcggccggcctgagcccgggatgcctcctcctcggcctcctccagctgccgcttcagctgcttgactcgaaggtttcccttctccagcttgatggaagcagggggactgggttatatctccaggtactgtcatcactccctccctctccaacagcccactactgccccatccctactgcccctgactctctctgccccatcctctgctctctgtttaggccttgttcttttctcctaaatccctcatgcca

SEQ ID NO: 15902 - DNA, 600 bp, Homo sapiens
  MAP TO AL137858.1; EXPRESSED IN LUNG, SIGNAL = 1.8
taaccgcctgaaatgttgtggtaagaagggttctgagatgaaatcgagctcagaagaaaagagaattgtgatttcctggagatacctgctgttggcgtaggagctgggctctagggtgaggaaagtggtgatggggagaggtatggtagtacagttgcatgttttggatagtcctgtgtggaataaaatgtcgtgcttcatctgcagagagtgttaaccacagcagctctgggataacctccaacttggtttcctcaattagttctataaggataatagcataatattagcaaaactattgagttaaagtccatttagtcttctctgtgtatcataaattttctcttttgaaaaatgtgacaattttaacctttcttaagttctaaaatagacttttaatgtgacagaaaacacagacacacaaagttacacagaaacatgataagggcttttgtttgtaaaaacaagcatccacttcaaggaattgtgttttaagagactaaaaaggaagtcatataaagagcattggtttttataattcaacaaaaagtaattatacacagtgatcaatgttttaaaggccaaattctgagaccctga

SEQ ID NO: 15903 - DNA, 542 bp, Homo sapiens
  MAP TO AC010358.5; EXPRESSED IN LUNG, SIGNAL = 2.7
tccatgttctcagatgccagcacccagcccaccccaacacacggcagccagttctcacctccacatcaaacagcgtcgagccatagccaggccactccttgatcaaggccatgtacttggccatggcctgttcctggttcattccctgaaatttcctccacttgtcaatgatactggctcgagcagaggagacttcttccttaatccacatgtccagcatctgctcctcctcgaccttctgccggaccacggatcctgtccggaagctccgcctcagggtcccctctaggaagctcgtccgcctcttctccagccgttcacaaggggtgaaggttttggttgactggctgatgcgggccttgagtctctgcagggaataaacctcttcgagaggtgggatggcagcgtgcagagtataatccccctgcagatactggagtcgcagggcagcaagaacctggaggttttcttccggggctggatggtggccatggataaccgcttcgtgggcctgaaaggagacagtcaacagctttccggtc

SEQ ID NO: 15904 - DNA, 600 bp, Homo sapiens
  MAP TO AL133374.1; EXPRESSED IN LUNG, SIGNAL = 1.6
tcagtgccttatggtgaatccaaagtgattaaaaggaaacactgcttttcatttatgaatgcatgtttaagaaagaaaaatgtatttcatttttagattatataaatggtggtgaactttttactcatctttctcaaagagagcgtttcacagagcatgaggtgcagatttatgttggagagattgtgcttgccctcgaacatctccacaaggtaagactcttcatttttcaggtttcttttctgaagtctgttaactaaggtaataatggagctggaagagctaatgtttttacatgttattgtcttagtggagattatgaaagcatacttatagaacattaccaattttctcaatttcataattccgtttgaaaaaatctactttccaattgtacttgctatgatagagattaaaaagaacctaagcaggttttggcttttatcctgaaaaatcctaatgcttatttgttacaaagtatcattataataaaagcttttaattgttaaaataaccaataaaatgaaaccatcagtcataatatgtatttccttcattgtaatttactgcattgcagactctgcctgtacatcttcaggg

SEQ ID NO: 15905 - DNA, 567 bp, Homo sapiens
  MAP TO AC008154.6; EXPRESSED IN LUNG, SIGNAL =   5
ttggcatttgcgtttatctgggatatttaggtatacatgtgtgtacacttggtatctttacaaaatcctttggtttttttttttttttaaatttcccattccaggggtccagtaccagcacctctcaccagtggtctacactattatacaactttagaagaactctggaaaagttttgatctttgtgaagactattttaaacctccatttggaccatatcctgaaaagaggtgagttgaggtgttttgttggatggaattggctattttctgctggttagttaaaattatggtactcatctctaagcttcagagaaatcctaaaactgggaagcagggccctaactcccgctgtagaatttgaagggagtagaccctgcccctctatggagggcccaggcatataacctaggttcaccattggaagcttttatctgggaccttgaatcttgagggagtgatagaaagacacaggggcagttagaggctattcaagtcaccagcagcagaagaaccgagatttcagaggaagagcacagacatccattgtggtaaggcaggcaatgat

SEQ ID NO: 15906 - DNA, 564 bp, Homo sapiens
  MAP TO AC006111.2; EXPRESSED IN LUNG, SIGNAL = 1.8
cgctgtcctagttctggaggagtcagtgcagccaccatcaggtacagacaccaacccgggcacccatgcaaagggacaggatgcttcgtcagaccccaggccggctgtgggggtgggggtgggggcagggcctacctcgcacacagtgcagtgccagcgcgtctccacgtggtgcttgcactcgttgcaggtgtagacaaagcggtcctggccctgggtgtgcagctccaccagcatgcagagcgtggaccacttggagcggcgcaaggaggagaactcccagtgcttgtctctggcgagggtgaggaaggcgtcgcgcccatccatgaggtcacagctgagcagggggtcggggtcgacgatggggggcagggtgttgatgacaggcccagcgtgcaggtggatcacgaagaagacctgcaggagaggaggggctttagtcccacacaagggacatggcacctccagtggtgagctcagggcaggcgcagccacccagcctgcagaataggcaggtggctgagcctgatggccctgatgccttgggatggaacaaaattggtg

SEQ ID NO: 15907 - DNA, 552 bp, Homo sapiens
  MAP TO AC023000.2; EXPRESSED IN LUNG, SIGNAL =   6
gctccaggtgtttttgcttctgtgctcaaaacagatgtttgtctttagaaatcatctttgcacagcatttcaatcaaaacagcgatgaagatacatcactgcatgcttggggaaaacaccatgtgacattcatttttagctaaatctgtgcccccttgtcagaaggcaaaatgacaggctcatgggtcgagcactttggagctggcaaagctcttttgcagtgtttatgtgtagaattattttaaaacatatgcctaatgcaccccctatttgtcactaatcagccataacacagcaggcaagtttcttaatccttgtgaagccccatgtactaatggatagaaatggaagatgataaggatgaagatacgtgaactatctcataatacctcgtgcatagcatctattaagatgaagaggaggaggaagaggagcagaagaaagaagaggaggaagaggaagaggaggaggaatataaacatatcgaaatacttttttatcttgggctgaattctggagcagcagacccaagggtaaggtgctcttgcgcag

SEQ ID NO: 15908 - DNA, 558 bp, Homo sapiens
  MAP TO AC023847.2; EXPRESSED IN LUNG, SIGNAL = 5.1
ggcaagcactttctttttggttatgtttgttgcaacgctgctctatttttaaatttgccacaggaaggacttctcaagttcaaattccatagatccaaagtcactaaatataccagcacctaacagcagatttacaagcactaacctctggaaatatatcttccccagaaaaagcaagtctgcctttgctgagtccaagaaaaccaattacccgaaagactctgaaaccaccacctgaaaatgctagaatagaggcctctgttgatttttatgacaaaaatatttttttgatcactagccgaacatcacccttatctgctctcctgtgcacatcaattaaatgaagagggagggaaaaaggaaaataaaaaattgtgttattaaagagtagccagtgaggaactggttgttttcaggcaatgaggccatagtgtcttagaaaacccttaagcagacagtccctgagaaagagtgtgttatccaatgttaagaaaatatctatgattgattctttactacttcatgatagggaagttatgccatgtagtgatggtgtgg

SEQ ID NO: 15909 - DNA, 543 bp, Homo sapiens
  MAP TO AL121787.22; EXPRESSED IN LUNG, SIGNAL = 2.1
attctggggtgagcagtttggacaaagacctctctgagccggtgccaaagggtctgtgggtgggagccggccagtccctccccagctcgcaggcctactcccacggtgggctgatggccgaccacttgccaggaaggatgcggcccaacaccagctgcccggtaccaatcaaagtctgccctcgctcaccccccttggagaccaggaccaggacttccagctcctgctcttcctattcctacgcggaggacgggagcgggggctcaccctgcagcctccctctctgtgagttctcctcctcgccctgttcccagggagccagattccttgccacagaacatcaggaaccaggcctgatgggagatggaatgtacaaccaagtgcggccccaaattaaatgtgagcagtcttatggaaccaactccagtgacgaatccggatcgttctcggaagcagacagtgagtcgtgtcctgtgcaggacaggggccaggaggtagggaacccacataaattcaagcatgtgacccactctctaggccctt

SEQ ID NO: 15910 - DNA, 516 bp, Homo sapiens
  MAP TO AF236876.1; EXPRESSED IN LUNG, SIGNAL = 1.7
gcgctcagtttggaaaagtcaccctgagactccataccagacttctcctcatctttttcttttccgggtaaactgaactgtggtccctgggctgtgttttgaatgtccagcttctcagcagtggaagccgatacctcattcgatcagatgatatgatagaaacagtttacaacgacagaggagagattgttaaaaccaaagaacgccgagtcttcatgttaaatgatgtgttaatgtgtgccaccgtcagctcacggtaagtgcataaattctctatagtagtcctaccatcatcacatgttacctttgcctaagggcacatgcatgactttgttaattctgtcactcagactgaactggttttttgtgccaaagctctgtcctgtgactaagggaacccttataataagcaagcttatttttaaatagattcagtgtaagtcaccaagtcactgttagtagaagtacgtagaggtttatatactctttaaacagggctgatggcggaactagaaa

SEQ ID NO: 15911 - DNA, 587 bp, Homo sapiens
  MAP TO AC008403.3; EXPRESSED IN LUNG, SIGNAL = 2.8
gacaaaacagtcaggagggctggaacacttggtcagtgttcagtgttcagaaaacaaatggacagccagtatctgaatccagggattaggaccaagtctgtccacctagaatagacccggcaccatcacgcttctggaacccggaggtgccagaagcccctgcctggatgtttgcccagctgatcccagtcctgtggccccaagcaccttcttggggtccatgttgaacttcttcctgcccattgccatcttccggttccgttgcaaggtcttactgcaggagcagagagcagggttggggtggagggtcaatgcctgggcatccctggcctcagccaaccccacgccccctaggtcatccgccccagccctcacctgccctcattggcctccagcccctccacctcgctcatggcttcactgagctcctcccgcaggcgctgaatctccaccagcagctcctgcttccgccgccggatgttctccagctccatccgctcctccggagtcaggtctgggggttctagggatcggggtcaaggtttaaaagtcagtgctaggggccgtgagcctgaattcctgcaatc

SEQ ID NO: 15912 - DNA, 542 bp, Homo sapiens
  MAP TO AL158801.1; EXPRESSED IN LUNG, SIGNAL = 1.9
cacggtcatcaccaatgaagtaggcagacttgtgggaaagtgtggtatcatgattttatttataacttgggtggagattatttgggtaaaggaaaacgcaatcatatgtcaacacggagtgctgcatagacttggggaatgaatggggtgtgcggcgtccctcatcccctcaggtgagggccttcaggaagatggcatattttctggtgttgagaatggttgttatcctaaagagaccctcattgtctgcacacaggtcagggccctttgaagtacgagcagaccttgaggagtccatggaatttgtggatcccggagttgctggagaatcagatgagagcggagatgagcgcgtcagcgatgaagaaaccgacctgggcacagactgggagaacttgcctagtccccggttttgtgatatcccttcccagtctgtggaagtctcccagagtcagagcacccaggcgtccccacccatcgcgagcagcagtgcaggtgggatgatctcctctgcagcagcctcggtgacctcctggtttaaa

SEQ ID NO: 15913 - DNA, 600 bp, Homo sapiens
  MAP TO AL158017.2; EXPRESSED IN PLACENTA, SIGNAL = 2.3; EXPRESSED IN LUNG, SIGNAL = 8.2
atgaaacccagaggtaggggtgccaggttggggacagggacacgtggaggctcttttatccagtgtctcaggagataaaatccacagcttgccacactgtgcttgaaaattaattcctgaattgtaacacacacagcagatacaggacaacttgtgggacggggatgacaatatcaaagcccaggagctaagagcgattccattttccctgcccattccacgggccttacatgaggtaatatcctgctcttgggcagctcacctgatacaagaggggcctgcctgtcccaggcacataggacagcatgaacaggggacagatggagcctcttcgtttgttcccccaggactgtccccagctggtgcccacagaggagatcttgattccagtcggggaggtaaagccaatcacccttaaggcgcgaaatctgccccagccgcagtccggccagcgaggctatgagtgtgtcctcaacatacaaggagccatccaccgggtccccgctctgcgcttcaacagctccagcgttcagtgtcagaacagctcggtaagaaaacgcaggctgggccctgcctggagcagggcttcctctcacactc

SEQ ID NO: 15914 - DNA, 518 bp, Homo sapiens
  MAP TO AC004506.1; EXPRESSED IN LUNG, SIGNAL = 2.2
acgttgcaggaaaggctaaccggtggtttggggtttctccccctaaatctggaaaaatgaacatgaacatccttcaccaggaacagctcatcgctcagaagaaaggggaaattggatccaaaatgcaacagaaagccaagcagaatgaggtggccagcccacagcccccatatcccggcgaaatcacaaatgcacacaactcttcctccgtttcaaacaagtttgccaacgacggtagcttcttgcagcagtttctgaagttgcagatggcacagacgagcacagatgcccctcacccccaacgccagggcgcccagtgcccctcccggcacgcctacctcctgcgccgggaagaggtccctcctcatcagcaggcggataggcctagggctggccaacccgccaggccggtgaagagctactctactcgcacgccaagcagctgcctgtggcgcaccgcccgagtgtcttccagtcccacgacgagggtgaggaggaggactagaagcagtggctgg

SEQ ID NO: 15915 - DNA, 530 bp, Homo sapiens
  MAP TO AC023302.2; EXPRESSED IN LUNG, SIGNAL = 3.2
ctcttctgggtgctggaaagaaatcttgggggaaatgagcgatcactctccagccacagaaagtgaccaaagagccacaacccacaagctgatgtcacactctgatgtcaggatgctctctcctacagagacctgtcactcagtgattcatgcgagcatccgatcctcaacactgggttcttttaaaggcctggtggcaacactgatcaaagatgctacggagccagatgagcagagcgcctacagggtgattttggcacagaagcagaggtaggtccaccccaagaaaaactgccaattctttcacgtttgtttttggcttaattgcctttccttctctgaagggagaattcccaaatttatttctagcccagacctcactcctgaactctaaacttaaattctattgcttactctacatctccacttaaaggtctgatgagcgcctacagctcaacaatactcctgatctatgccctgccccacaatcctgagccactcacagccctccccatctcaatcaacagcaa

SEQ ID NO: 15916 - DNA, 575 bp, Homo sapiens
  MAP TO AC008655.3; EXPRESSED IN LUNG, SIGNAL =  59
agtgccattcctggcaatacctagggctgagggagggccagtgacactgacatctacactctctacactctgcccctgcagggaccctgaagagcctgatggaggagagctggtcctggggggctcggacccggcacactacatcccacccctcaccttcgtgccagtcacggtccctgcctactggcagatccacatggagcggtgagggacttggtctcctggctctggagctggaggctgggggcctggactcctaggaccctgcctctgatgactgcctccttccccctcagtgtgaaggtgggcccagggctgactctctgtgccaagggctgtgctgccatcctggatacgggcacgtccctcatcacaggacccactgaggagatccgggccctgcatgcagccattgggggaatccccttgctggctggggaggtgaggtcccagtctggtgggtacgggctgggaaggctgatggcagtttgacagtgaacatcaaagggcctgagggtgggaggcaagtatttaaggggctttccagggcagcaggcactggacttcgtgacaga

SEQ ID NO: 15917 - DNA, 598 bp, Homo sapiens
  MAP TO AC008569.3; EXPRESSED IN LUNG, SIGNAL = 4.8
gtcactgcagcagacgagaggagggtgtgtctgggacccaggaccctcgcaggcttcaaggggcagccgggaccatggggccctccttccttaccccgtggtccgggcctcggatcctggagaagccccagggctaaaggtgcctgtgcccgtggcattggggatgagcctccggagcagccgcacccacgtggcgacatcgatgttcatctgcctagcacgctggaacgccttccctggggggacggggcaggcgtcaccctccatgacactcccaggacccctggcctctcccccaggaagcctggagcaccctctcaccttgctgcttggagaaaattttcttctgccgtcggagccgaggaatcctctcaatgacagggttgcggaaggtgacctgggggaagggaccaaaatgtgaggaccctctgcccacctgcaggcagacagcttggtaaggaagcccctgggagcacaggtgtgcgcgcccaagtggggttctggtcacgtggcatcagattcaacccgagtaccaggtgacaatgaagaggtcatcggtgcaacccatggctcccctcctgaagggacgtcttggaaa

SEQ ID NO: 15918 - DNA, 585 bp, Homo sapiens
  MAP TO AL133445.2; EXPRESSED IN LUNG, SIGNAL = 1.9
atagctgctcctgaacacccacttcagagacatttttaagtgggtgcttgtaaaatatacagccttgctatccagtgggctgtagtagaccctggctatatgcgtgtgtacaggcacattcatgactctgagaataccactagacataggtaactgggcatcctctggagacaatttgtctgcatcgtctctggtcgtagataccacagtcatcataatctgtatcatctcatcatcaaatatcacagttttgatcacagtctaaggtaggaagaatcaggtacttgagagttctggagtaaaattacatcatgtttaaagttcagtttccatactggtttctctcatctacagctcgagatttgcagttatagcagaaaaggtgttagagaggcattgggtccagctttcctttggtcattcctttaaatggggagaattattgataagtttcctttttaagagtggcaaaaggaggcgtatcttattcttcacacctagtcacaccatgcagtggatagaccagaattaaaaataaaatctatgcacatgctatccaatttgcctttcttggactaggcggaa

SEQ ID NO: 15919 - DNA, 568 bp, Homo sapiens
  MAP TO AC013528.3; EXPRESSED IN LUNG, SIGNAL = 2.4
actgtgccaagaagccagtcacaaatggtgatacactgtatgagtccatttattcctacattcttgaaaagacagaagtagagtgatggagaacagatcagtggcagtcaggggatggaggtggagggaaggtgttgttgcaataaagggatagggcaagaaaattcaggggataacaaaactgttctgtctcatgattatagtggtagtaacacaaatctacgcatgtgttaaaattcataaaactgtacatcaagagaaagcagttaatcttattctatggtgatttaagaaataagatcaataagtaaaataccataacaatgagtaaccagagatgcaacaccccagctcaaatctggactgccccactgcacggaatgggcctcccaggcaatcttgttggagggagcacagctgccacctgtgtgcttgggttatggccacatgccatatgcaagtggctcgaacagcctgccagtctccaagagggcaccagcatggtcctgggtttcccagccactttccgtttattcactcctctgtgagaagacccccttcctacagg

SEQ ID NO: 15920 - DNA, 574 bp, Homo sapiens
  MAP TO AC011836.3; EXPRESSED IN LUNG, SIGNAL = 2.9
ggcagagaggtcaaaagtgcatggcctttgcagctggacaaatttgaattctaatcccttctctgccctctagtgactattggacttgagcaactcattttacctgactcagttacaaaatatataaaattagggtaaaagacctaccattgtaggttgttgtagtcatgtcataatctacataatgagccaacatagtcttatagctggctgtagggcagtaagtagcatctctcaaagtaatgataagtttactattgttattgatagtgtccttaggagctctgctacttgagggctgtttatattccccttgttatctgccctcactttttgaccctcactttcctgctcatttctaagaactactttatctgtatccgataaagctttccctcttatgtttccaggcagctccaaaagccccaggcagggcaatgttgaagacaagcaagcagacagacactattatcttccaccttatagggaacaagaatgtgcttttaatgaccagagattcaggagaaatgcactaaatctccctgaatataaaaggaccatgccaaagaatgag

SEQ ID NO: 15921 - DNA, 527 bp, Homo sapiens
  MAP TO AL135744.2; EXPRESSED IN LUNG, SIGNAL = 1.8; EXPRESSED IN PLACENTA, SIGNAL = 1.4
ttacagcaaggattccagcctccttccccacttcccaatgcccaaatgctgagcttacatctttgatttgaactgtaaactccttttcatccatgcctcggcgaagtttggtgaactgggctgccgctgtgctgactgcagatgcttcctcctctgccatggaagctgcactactacttcgtggtgtggggactggagagtcaccatattctccaggagtcaatgagggactgtctagcaagtggttgcctggccccaaaattcctcctgttaccatttcctggctcctacggctagaaggccacttccctgagagtacagcctggcagacgaggtcaatacggtttatcaggacacgatcctgaatggggaaagaaagaaataccattttaagagtctgagtactagctgtgtgatcctgtgatactcaatagtgccatcactaccaggatgggtaaaaatcataaggcagaaaagaggaagttaatactattaagattcctaagtcaactgggaagtttcctgga

SEQ ID NO: 15922 - DNA, 526 bp, Homo sapiens
  MAP TO AC018633.2; EXPRESSED IN LUNG, SIGNAL = 2.8
aagtgtggcatggatgtctgcgtgaatgcccagactctgacttgtacctggataccctctaggtagaagaagctctgatccagatccatgatccagaactcaggaagctgcttaacccaaccactgcagacctaaggttcgcagactacctagtgaggcacgtgactgagaatcgggatgacgtcttcctagatggcacgggctgggagggaggtgacgaatggatccgggcccagtttgcggtctacattcatgccctgctggctgccacactgcaattaggtaagaaaccacacggagcctacagctacctgttttattataatttttcattttgtaacatttatgagattttggattgcacaataaatacatattccttatagaaaaattaccagttattccctcatacaaagatagccacttttaacgtctttagtactttatagccttgcaaatcttttcctatgcatgtattttggattttggttttatggtacttttggtggtccttttacaaaaatgg

SEQ ID NO: 15923 - DNA, 563 bp, Homo sapiens
  MAP TO AC010582.6; EXPRESSED IN LUNG, SIGNAL = 1.8
tcaatccaggctactgggtcatcatcaggtagagttgcactgccaaagtgatcagggtcatcaatttggagttgtttgagtttttcaacagcatcagagtgtgactgggttttgcttgaatcatcaaaactgatggcatcctggtagatgacaatgagggaatctctttggcttttgcccgtggtactggaaatggaactgttttgggagcgcctctcctgctcctcaaagaaagcactgaaagggttgataggggagggctgtacatcctgcagagtctcattcaggaaagggttggttgccctccaaggtgaagcctcagttacagaaggcgtgcggtttaaagaggaaatatccagcttctgaactttggagaagttcatcaaagtgctcttgggacggtccctcttcttaaatgatcccattgaattataaggtacatctgggatcacagatgcacttggtggtgtatttggcttcagaggagaggtgactggtggtaaagggcagctgacttcattgtcatcaaaggtgacccagctgggaaaacgagcagaggtcac

SEQ ID NO: 15924 - DNA, 575 bp, Homo sapiens
  MAP TO AL139392.1; EXPRESSED IN LUNG, SIGNAL = 1.9; EXPRESSED IN BONE MARROW, SIGNAL = 6.5
tctggcttgtctccacattgccacccttcagaagaaccaaccactcatggaattgctgcttcggaatggagctgacattgatgtgcaggtgagacagccagcaaagcactgcccggcccagggcctgcccccacctgacacatccccaagtcccctgcccagcagtcagaagtggtggcattcacttccttatccagagcccaggcccagcacactgcctctgagggccttggctgacatccttattcctccccaggagggcaccagtggtaagacagcgctgcacctggctgtggaaacccaagagcggggcctggtacagttcctgctccaggctggtgcccaggtagatgcccgcatgctgaacgggtgcacacccctgcacctggcagctggccggggtctcatgggcatctcatccactctgtgcaaggcgggtgctgactccctgctgcggaatgtggaggatgagacgccccaggacctgactgaggaagtaagtggcatatgctttgctctccagggccttgcacacccatagcagagagaggttctgtcattagctgaaagggcca

SEQ ID NO: 15925 - DNA, 542 bp, Homo sapiens
  MAP TO AC017089.2; EXPRESSED IN LUNG, SIGNAL = 2.7
agaccaagggctgatgaatgggctttttgggccagataaaacagcaatattttatcatcttttgctttttcttgtccctggtttgaggattatcccttcgaatctgcaacattctcctcaatggactatctgggagaatgtcagagggggtctttttagttccctctttcctttgttcccttaggcctagaattcctgtttcccaattttttgttagtctctgtgtctgagtctttccctgtgtaatcagcccccctaactggaggtttcttgcacaccctgaaacctccaagaatgcccaaccaccaaggcagtacttatagtccaattttcctaccttggctcatgcacgaggttgcctggttgccatggcacctgcttttctccaggtgtcactttcgttatttcctgaataacagccttggctttttctatggcttctatggggggctggcacacctgggcagagtgggccacctaaattggctgggacgcatctcccctctcagtcggagtctcactccacaaaggcagagagatcc

SEQ ID NO: 15926 - DNA, 504 bp, Homo sapiens
  MAP TO AC008655.3; EXPRESSED IN LUNG, SIGNAL =  22
tccactgccccaactagaaccccaaaaatgacccaattggcaggaagtcccatccctggccattcctagggctggcgggggagggctggcgacaatgacctctacactctgcccctgcagggaccctgaagtggctgatggaggagagctggtcctggggggctcagacccggcacactacatcccacccctcaccttcgtgccagtcacagtccccgcctactggcagatccacatggagcggtgagggacttggtctcctgggtctggagctggaggcctggactcctaggaccctgcctctaatgactgcttccttccccctcagtgtgaaggtgggctcacggctgactctctgtgcccagggctgtgctgccatcctggatacaggcacacctgtcatcgtaggacccactgaggagatccgggccctgcatgcagccattgggggaatccccttgctggctggggaggtgaggtcccagtctctggtgggtgtgtcct

SEQ ID NO: 15927 - DNA, 586 bp, Homo sapiens
  MAP TO AL158047.2; EXPRESSED IN LUNG, SIGNAL = 4.4
cccgtgtcatcatcttcctcagcatccttgatggcagatttctgcatttgtggccactgttgaaccaactccccttcatcagtacatgttatcttcttattcgctttaaaatttctcttcattactttttttgcttctgcaactttggtcacttttttcttgatgctggatttagaaggttctttcttctgtaatgttttctcctctttaaagtcaaatccaaacacattgtgccacttcaccttcaagaaatcagcatcttcttcctcctcatctctgtccaggaactgcataggaacttccttgatcttctttgcttcactggtgttaggaagagatggagcttgagatccttttgcttttgccagtttctcttccatttcttcttcattatcttcctcttcctcctgttcttcatcactagtatcattagccagtctgtgctctgtccctttgagtctttttccacctttctgaaggatggacattttctcattgaagaaggctctaaattcttccactttgtcattggtgagggagggagcccttggctcagttactttattggcttggctcattaccaatt

SEQ ID NO: 15928 - DNA, 567 bp, Homo sapiens
  MAP TO AC020754.2; EXPRESSED IN LUNG, SIGNAL = 2.5
cctggactcagaaggagcactacaaaagctggccaatgagcagcaaaagcgtataaggtgcacctggacccctgggttaaggatctctgtcccccagtgggaaaggggcagcagctgcaggaggagcagcctaggttcttggagatcgagctggcctgcacgctggcccgaaggtggagtgacttgtctgagaaggccaagtacaagacccgagagcaagccaggcagggagtgccaggaactcagcaagccgcccaagtcatcaagagagtacagatctggcaacagagcatcatcagcaactacctggcctgcttcaagaacgaccgggtgaaggcctcgaaagccatggatgtgacctggaatcccaaggaggagaacctgatgtgaattgagaagacagccaaagaccaaaagtgatgagagagagctgagtgcgatgtgggcacttccagctgctacagagtcttccaagatgatgaaattccagggaggaagcaagaagccttgtgaaccggtatcagaaattcttccaggaactgctgtgcaatgggagctgaaacacct

SEQ ID NO: 15929 - DNA, 575 bp, Homo sapiens
  MAP TO AC010473.3; EXPRESSED IN LUNG, SIGNAL =   2
tcatgccctattctgaacccctcagatgagttccgtgtttgttttgcttgtcctagtgctcaaagacaaaggctataccacccttcaggatgaggccatcaagatattcaattccctgcagcaactggagtccatgtctgacccaattccaataatccaggtcatcctacagacagggcatgacctgcgacctctgcgggacgagctgtactgccagcttatcaaacagaccaacaaagtgccccaccccggcagtgtgggcaacctgtacagctggcagatcctgacatgcctgagctgcaccttcctgccgagtcgagggattctcaagtatctcaagttccatctgaaaaggtaaagcatgggggcacgggagatgagctgggcagagctgcttacacaggtggggcactgggtcctcgttcagataaagaggcttttgaacagaagacacctctagtaggacagggacctctgggtcagacttgtgggttgcctgagcaagcttagagaatgctgccatcctttttaagtcacacaaggttatttcagggaccaagtcaccgttggtgtaa

SEQ ID NO: 15930 - DNA, 521 bp, Homo sapiens
  MAP TO AL139104.2; EXPRESSED IN LUNG, SIGNAL = 1.6
tggcttggcttcttacttggcaggtggcctggcactcctatgccagctgtcaagctgaagacgtggctggacagatactttagaagagctacgtatgatgttctgagtgagatctaaagaaaaacagaaactgaagaaacaaaacataaagtttgcctgcattaagagcctgtttttctgtaatatacatttcatttttttaaaatcttgaacccactctttcaatacaggtgcccattattataaattctggttttggctttagagttcaaataattcaaattatctgcaaatctgtaatcaaagaactgtctagatgtccataatgaaagctatcctcattactactgtgaaatatttgcttcatctcaactttccgatgaaattctcatgaaaattcagaagaaacaacacaaatacaattttaaaagtgatattttaaaataacgttaaaggagaactatcacaatttcaatagaatacacaaatagactttattgggatagatttctgtggttgaa

SEQ ID NO: 15931 - DNA, 554 bp, Homo sapiens
  MAP TO AC008543.4; EXPRESSED IN LUNG, SIGNAL = 3.2
taaactgggccaaacaaaggctttcccacacaacttacatttataaggtccatctccatggtgtgccgccatgtgtcttcggaggtttccaagagaactaaaggtttttgcacattctttacaatcgaagggtttctttccggtggggggcctttcatgtgtctggaaggagtgctgatgactgatggctttcccacgttgtttatgtgtatatggcttctctccatattcctgatgctcacatgatttgtgtccagtgtcaactctgatgttgcaattaagagacgaatgacccaagacgacttctccacactcaccactgtcacatggatttactcgaggagtgttcttgttcacaatactatctggaatctggccaaaagtttctccacattgactgtcatctttaatttcacatgtatgacttctgtaacaaataagaaatatattactaaaggtttgtttataagtgattttctatatattgaagtactagatttatatttgtaacattatcatgcaaagtacaggcttcatcccctgtttgaatgtga

SEQ ID NO: 15932 - DNA, 569 bp, Homo sapiens
  MAP TO AC008403.3; EXPRESSED IN LUNG, SIGNAL = 1.7
tcgtcctcatcttcctcctggcagcagctcagagcaagttcattctcataacaaaatgcagtcagagagccggggaaactagacttgaggctgtgggaagcctgctctgcccgttcatccagctccttagcactgcagaccggtgtccctgggacctcataagtgcgatggaagtggcgatagtcgacctcatactgggagccacgctggaagagaactggctcaaaacgatggccccagagcagttcaccagggaggtaggacgagcgacactgtgtggtcatggctgtggcctcaaccatcccctcgagaatgaccaccagctcaaagtcagccctggccagctcggcacgtcctagctcatacagaggactggcagagtcgatctcatggacgatggtgatgggggacacgaggaagatacgatcggtgcctccatcaaagcccacatccacatcctggtggtccagcgggatgtactcaccctctggggtcacacggggctgcagcaggaggcgaggagccaaagacagcagggagcacagagacgggcagagacgaagtgagag

SEQ ID NO: 15933 - DNA, 504 bp, Homo sapiens
  MAP TO AL049871.3; EXPRESSED IN LUNG, SIGNAL = 2.1
caacaggacatatcccagcctcggacatgtctgtatgatccaaggtacccaaagtcagacagagtaaactcaagcctggcactggctttctgccgcttcatgtgctttggaaaaagcaggagaagcaatagcagcaggagtccccagcagctggagccgcaagaatgaactgcaaagagggaactgacagcagctgcggctgcaggggcaacgacgagaagaagatgttgaagtgtgtggtggtgggggacggtgccgtggggaaaacctgcctgctgatgagctacgccaacgacgccttcccagaggaatacgtgcccactgtgtttgaccactatgcaggtaagaaaaagtgggaaactctctgcatccagacaaacgatgcagggggcgagaccctaagttcagaggggcctggctcatttctaatgtcagtattgggtgcgggcctggcagtaaccagggagcttagcgtagcatacaacccaggacttgactgttggt

SEQ ID NO: 15934 - DNA, 533 bp, Homo sapiens
  MAP TO AC008723.3; EXPRESSED IN LUNG, SIGNAL = 1.8
agacccaaacctggtcagtgttatcctctttctctttctgccagccacaggagccgtcgggacacccaacagtcgttcagggaaacggggctgggggcgtctgggaagaggaaactgaacacaagccccgagctgccgctaccttgaggatctcgcggccgcccaccgacagcgccacatgccggctctggaggccgcactggatatcctgggcgcgcgtgcctggcggcacctgaacttcaatgaacacctcctccaaggtctggtaccactggccccacggggtcccgcacggtaccaccccactccgctcctcaaacggggccgacataatccagtccctcccggccgcggccgcaccaggcggagccgagcgcacgcgcggaatcccacgcttaggctacgcctcggcctctccgctcgggtcactgcgcatgcgcaggaacgcaagctagcgctttggtgtgcgtgttcgtttttccctttgaatggccgtttacggcaccggcaggccccggatgaaagaactgaaa

SEQ ID NO: 15935 - DNA, 568 bp, Homo sapiens
  MAP TO AC004832.3; EXPRESSED IN BONE MARROW, SIGNAL = 1.3; EXPRESSED IN LUNG, SIGNAL = 1.2
tctgcaaccttggtaccctccaaggttgtgcctctcatacctttcttgatctgaccacagtagatgagttttccccagggcatctctttctgtactcactaacgtcacagagtcaggaggactaacaatcaatttcagggagggagggagtgtaggatataaacagagaaatcaaagggttaggaggtctctgagaaatgagggagccacctagacaggggtgagctccttatcatatttctgcatgccctcgtcagggagcaggacctccactgtgaagctgaccttcttggcgtggacaaagctataggtgttgtcgaagcgtaggacatctgggggacagatggaaagaggggcattgggcttggctttacacactcttttttccacccctggccatggaggaggacaggcttgtgttcccactggctttgtttgccaagctgggccaagctcccaccacgcctcttcccttccccatgggaactgccaacccaagcaggtcctgtaaacagacaccaacctcctcttggcatgtgcccaggcatggctttactggcatcgagaa

SEQ ID NO: 15936 - DNA, 579 bp, Homo sapiens
  MAP TO Z97055.1; EXPRESSED IN PLACENTA, SIGNAL = 1.3; EXPRESSED IN HELA, SIGNAL = 1.3; EXPRESSED IN BONE MARROW, SIGNAL = 1.5; EXPRESSED IN LUNG, SIGNAL = 1.5
aaatgcacccatgatgctgctgacagcactctcctaaatacatcataacccccttatcagaaaccttcagtcatcctcctcctgacccatgccgaagggttaaaacctggccttcaaatgcatcttttccgccagtctacctttcaaaactgatctgtcccaacttgccttgagaaacataactctacagaatagccgcagggcttgtctccttgcggtgctctggccacagcccggcttccctctcctcatgtccttttcttaggccaggttgcaattctgaaaactaccccacatctcttcccctatcccatcctcaacgtgcattgcaagtctatctatggtccaaactcaagctccaatatcaccttcctcatccaattgttcctggctattccaaggaatatgaacttttctacaaaactttctttattcatacaataattatttactgagtgtatatccggctctaggaactgttcaaggcactgaagttaccacagtggacaggacagaaaaggtgcctgctcccacagaacacagatcccagtcacaaacaagcaaacaaacaacatttca

SEQ ID NO: 15937 - DNA, 557 bp, Homo sapiens
  MAP TO AC007363.3; EXPRESSED IN LUNG, SIGNAL = 1.5; EXPRESSED IN BONE MARROW, SIGNAL = 1.5
aaagtgcttggcacatacaggctagtcttaatgccaaagatattaagtaagcatacatttatctatgttttgaccataaacttaagcaagagtggtatgaggattctgttacggtatctgcatttaggtagtgacttaatccaaagcatgccatgcctcctgtcttccttcctgcatcctagaccaacagctgaccaagtggtattacctgtcacccttctccactttccccatccccatttttctccaacccatcaccatagctgtgatatttcttcctccaaacttttgggccttccttggtaacatctccataatttccttgctcagcacatacaggtagaaaaaatgagtttatatcatcaagaactttggattccttttcatgaacatgaaagagtacaattctcttcctctccccatcaaagtgtaaagagaagtcagttgtccttttttatggagtgctatgatgaaagatgcaggaccatgcatgacttccaagtcatccctccacagtaaggtcgacggagaaaacacgggatgctcagttaagtttg

SEQ ID NO: 15938 - DNA, 573 bp, Homo sapiens
  MAP TO AL049758.11; EXPRESSED IN PLACENTA, SIGNAL = 1.7; EXPRESSED IN LUNG, SIGNAL = 1.5
tgtctcttacccctggcttgcccagagcctggctctgtcccttgactgagcaggtacagtggctatggtgaggcgaggtgctagggcactcacctgtggccttcttgaggacaggggtgtgttttattggttatttatccctctatccacccattcacccaagcagttacagaaggctatatgccagacacgtcaacaactgacacggtgacactcgacgtgtaaaaacaagtgtacagtttaccttaagaacatcttgcttgcacttttctattttgtcttgcaatttcttgagctgttcagggttgagggatgggtctgccttgctgttggcttctcgtgagatagccagcttctcctctttgcacgctgcatggtgggctttctttgctgcttctacctacagggagaatgagttcctgaatgccatgtcactgggagttcaggatcctcactagaagtcacacagaccatgggaatgcttgtgctaccaagaggggagaaaaaggcaggtacaaaattgtatgtatactatcatagcaaccagtcacaacaggaacgcactcaacacat

SEQ ID NO: 15939 - DNA, 594 bp, Homo sapiens
  MAP TO AL022329.9; EXPRESSED IN LUNG, SIGNAL = 2.2
ttctcatgattacctgttggctagttatatattcttttctaatgatgtttccattggaacagcgtattttagggccacaagttcactgaagtgagattcaggcagttcaagtaagatacaagtcttgctatttcaggacctagcatttattcaccagttcttccatggaaatgataaatgtttacggcttttgcatttctccagttttgaatgaatagtgataggacatcatactttacccaaatattagtcagtgatatgttctatatcacctgatgccatattttgatagaacaattctttatttctacagtcacagccctttcagacaacataaaaccaaagacaagcatgaaattgaccgaatgacactcaccgtggtaaggggattcaaaactgtattcttgtctgtatggtaattgtcatgcttcattccgtcaataataaaaaaatgctattacataaaatgttataggaaatataaaattatgtatagacataataaaaatttgctttcttgaaacaaataaatgcagatacaatttctaaaagaatttctaggggaaacattaatggaaatagatgccaaggcaa

SEQ ID NO: 15940 - DNA, 552 bp, Homo sapiens
  MAP TO AL021707.2; EXPRESSED IN PLACENTA, SIGNAL = 1.3; EXPRESSED IN HELA, SIGNAL = 1.5; EXPRESSED IN LUNG, SIGNAL = 1.2
acacgtattccacgggactgttgaagatcactcaagaaaacacagctgaggctatgagtactttcctagcccaccgtaagtgcctgataaatggtagtgattatcttttcatgtcttgtgtcccttatacctgctaacgcaatctagctaatacctacagctttgaaggtttatgaagctgagacactgccccacccacagaaatccagaaatatcagtatcaagatgccaaggagaagggtcccctacctctggaaaatctcttgcagcgtatcccgggtgaaggcattgctgtcctggaagacgttattgagggcgtggagggcacaaagctccctgcgctgtttctcatggtagatttgtgggggtgctgcctggggcagctccaatgattcagatttggccttgtctcctttccatggcacacaactcatgttttttgttttaggttccagagatggctataaacaccccactcttccctctagaggaagaatgtaagcttctcagtcttttccggattcctgaggtccaccttattctctggtgtcc

SEQ ID NO: 15941 - DNA, 589 bp, Homo sapiens
  MAP TO AL020993.1; EXPRESSED IN HELA, SIGNAL = 1.4; EXPRESSED IN LUNG, SIGNAL = 1.5
ccgaaggcagggctattaacaggacctaactcaggatacttgtgtggataaaatcatgtgtgaagagcttttagggccttgcttctcaaagaggggccccaggccatcagcacacctggagtgtgcagggggaagctctcagccccaccccagccctctttacaagacccccgcgtggcacctgtggcgtggcacctgtgtgcactcgtgttttcaaagcccccggacatcccaaccacagcccaagtgttctgaaagtggccccagccacacctgccttcagggcgagggcttgttcctcactgactcctgctgctcccagcaagacccacttccgggtctgcagggagaggccctaagggcacagaggtggacaaagggctgcctgcatcactttatcttttctactttattacttcaaattaacaaccacgataaagctcaaaaaagtccaatatttacacaggaaaaaagtacaaaattccccccaaagttcttcagttttttttttttcagttttttaaattacaaagtaataaaaagctttgctctttaattaaaaaaaaaaaggaaaaaggggaaacagagg

SEQ ID NO: 15942 - DNA, 575 bp, Homo sapiens
  MAP TO AP000344.1; EXPRESSED IN LUNG, SIGNAL = 2.4
tgcattgaatgaaacagctcattcattagctcattcatccagaacatttatagctgcctgatatataccacttattatgctgggggcctgaaggacagagagatcctggtctctagggcctcactctgtagtagataattaagagacagatgacaaatatcgtgggatagatggcacatggtgagaaggtgcctgaacacattctcccctaactgaggagaggaagctagcaaggtgttaacagtattcgtacgtcctcactcttctcataatcatgggccttcaggtaaaggatgatggccaccccactctccatgacggctttgtggaataagccttcggccatgggagacagaatctggagagagaacacagaagatccaggaaaggttacgcagaggactccccaccgatcacaaataccattcatccctcttcaaagaaaccttcccaggaagcctccataaaagctctaaacttagaggggaaaaaaaaccctttttggcgggggttaaaggactagctgtgaaggtttgggcaagttacttaacctctctgagccctggttcttcatg

SEQ ID NO: 15943 - DNA, 590 bp, Homo sapiens
  MAP TO AP000353.1; EXPRESSED IN LUNG, SIGNAL = 1.3
ctgcctttcaagcctctcagggctggctggggaagttttgagagtcacaatagcatgggggtggccaagcgggcggcggtgtctatggttcccttctgattttccatggactcactgcctgatttgtttggtcttccatcctttctgaaatcagcagtgttatgttacaaaaggaaacggaaaggagatagggatccaaactgtgctggtgtgtgtgatgcaaactagacccgtcctcacgggtgtgtctgttggtgtctatgtgccctgggaggtgcagggatgggagggtcttcagcgggacgtactgctgcagcacagcggatggagacccaggagacagtgtctgcccattctggtgcctactgtagatagaccctgtctgttggaaagcaggtgtcttttcataagctgcttcaggatccacatctgcatggtaggaagatgcagcattgatgtttgctgccctggatgtggatagcctcagtaccctggttttgtccttttcaggcactgccaggaagtagaaggtggctgctggcctccacatagtcccccagcctgcaggtggaccctccatgtcacaacag

SEQ ID NO: 15944 - DNA, 557 bp, Homo sapiens
  MAP TO AL035682.16; EXPRESSED IN LUNG, SIGNAL = 1.3
caggagagggacagagaacggctaccagctcaattcaatgatcttccaacagcaactcttgcagattctgtgggctcctctgtaggcaaccacagttttctggactttgacattttcaagactcaaactatcctttgctgaacctttgctgaatttacagaggtagcctgacaacatacttgagaattcaggccaagagtcagcctcctggctcttcgtcagagcctagctctgcccctgcccctatagctcacaactgacaaggaagaggaggaggaggaaaatgtcactgcggttaggggaagaagagtgatcagcaactactgaaccctcaccgtgcgcgtctggtactgggcaaagagctttacaggacgcccccattttcattcttacggtaacccagagagtcgggcaccattataagtgacttggccaaagttacaaaagagggcagtgatgaggccagactgagagccaggcaggacaaccacagcaactctttgccagacaaatcctagaactgaggctgggccttcagaccaaccatccaattcctg

SEQ ID NO: 15945 - DNA, 591 bp, Homo sapiens
  MAP TO AB016897.1; EXPRESSED IN LUNG, SIGNAL = 1.3; EXPRESSED IN PLACENTA, SIGNAL = 1.3
ctttaaaaatggttagatttgttgcttaaaatagtgaagtttcagttaatgagaaaataagctttgaaagtgtttatcttcccatcattactaattaagtaaaaatattttctttattctcagtatatttacttaaaagctgttttatgattctgtaggaagaattgacctttatcaccttatttcttatgctaagaacaattcttatggaattttaatgataatcagggtgttgaaaataaaatcttaagagatactgaatatgctttgattccagtttcagatcgtcgtggctcaggtaaaccccgaccaaagagtgaaggctttgagctctataataattcaactcaaaatgggtctcctgagagtcctcagctgccttgggcagaatatagtgaaccaaagaaattgcctggtgatgacagactgatgaaaaatagagctgatcaccgttccagccccaacgtagcaagtaagagtgacacttttttgcttcctaagtacacttgtgatcacagtctgaagtgagaggaggcactttgtggtttgttaattattaaaattattctctgcaaacattggctaactagg

SEQ ID NO: 15946 - DNA, 595 bp, Homo sapiens
  MAP TO AP000111.1; EXPRESSED IN BONE MARROW, SIGNAL = 1.5; EXPRESSED IN LUNG, SIGNAL = 1.2
caaatgttaaaagaaaatgggcattttataatttgtgaaatattagtgagttagagcagagcttgacggcactggccctgagggtccttcttcttcctttggaagaatgaaactgggggctatgcaattcagggaagaataaaggaaaaacaggtaattggcagaggaggttggctgacttagaggtatggaaaagacaaaacaaaggagggaaaaagagaggtatgtatgatggggaggagttcagagccactgaaaattttctctggccctaacaggaaaacgagttaccccacaagccagggttttatcatctggtacgtggagatatccatcagcattgtcattggttttcatttgtttgtttttaattctcaagtttaaaaaaaaatttaaaatttaaatgtgtctcaaccaccagaaactatagtgagatttctctgtaataaataggaaagaaggagactgatccagtccttgttaaaaaaaaaaaaaagaggaaactgaatcacaacatactttgcttttttcttttctcacaaaggaacagtgggccctttatgctgggtgaaggtgagtgagatgggggaaggtt

SEQ ID NO: 15947 - DNA, 582 bp, Homo sapiens
  MAP TO AL078474.2; EXPRESSED IN LUNG, SIGNAL = 1.4
agatatccaagagacgggggatatatccaagagacgagctatagataagtgaagagtctaaaatccacctctctaacatctatttttaatgatacacctttcaaaaggtttcctcatttagacatgagtgccgtaaaacagattattgggtaactagaagtcactttgtatgtcaaaaagcagagcctcatgccagtagcagaaaaagatgctatatttggctataacatgatttcctgactgtagcaggcaccaggatcacctggagggcttggtgaaatacagatagccggaccctaccctagagcaggcctaagactactggctaagtcggcctcgagtgagggtggagaatttgcctttggacctatgttctctcctgaggctggtgctgcttgtctggaaagagcatcactttgagaatgtgtcatggggagtcaagaacgtggaaaactacctagaagaatgttaaacacagggcaggcattcagctgaatgaggaaactagaaatgatcaaacacaagaaaagaagagagatgtctagaagacaggctggagaatgactctcccaaccaaccaac

SEQ ID NO: 15948 - DNA, 565 bp, Homo sapiens
  MAP TO AP000354.1; EXPRESSED IN LUNG, SIGNAL = 1.3
gcaggaaggtcaggacagaggtaaaactatttggcaacacttttcctggagtggagcaattgccttcacttaagagaggggaaggaaaaagtcattaaatggagattaaagtaaaaacagagaaggaaagaagaaaatagtgggaaaaaaatggaaaacattgaagggctttgagaccccacagtgttattttatttttctaacttttttttttcctgtgcttctctggcacctagatacttcctacaatttgaattcctttaactgtcatggagcattgatgattaaccagatgaatgaagtgtttggcttaattattgagacagcatgtgcacacacccattcatttatggacacccacacctgtgtgtctgtcactgcacaatattctcatgactctcttcttgtagtgacaggatacaggatatgcatttcttcacctctcatttcaagtattgtttgaggctagatgtagttgagggttaaggggaaggactcttttgatccaggacacttcactgctggttggagcttttgtaaatacaaaacactactgctgctcaca

SEQ ID NO: 15949 - DNA, 552 bp, Homo sapiens
  MAP TO AC005300.10; EXPRESSED IN LUNG, SIGNAL = 1.5; EXPRESSED IN PLACENTA, SIGNAL = 1.5
ttgttttggcccctaagatggctctatcccaattctccttctcagcttatgtcacgaggccctgagtatcatggcagaggggagaacggggaaccatgagaaacaggggggcaaagggcagcacggaatgtgttcccagttttgctggaggctgcccagtccatttcaggtttccttgctcatgttggcccctggaaaggcacatgatcccttgcaccagagacctgagtggtcaattcatgagcattcagtcttctaccagctaagatctgagtcaggccagagcaaaggaggtgggaggaacagagaggagagctgggctcaccggcagcagcctggctctgatctccatgtagagcacgttgtcctcgtagaactcctgcatgctccggaagacatagtctctgaacactggtgcgtaatggatgagaccagagatggtgaagaagatggtttcaaatttcgaccagacaacattttggtttgtgtaaatcacctccgggtgctgggtcaccagagtgaaattcctcagcaagctgtccaagacacgaa

SEQ ID NO: 15950 - DNA, 551 bp, Homo sapiens
  MAP TO AC008022.1; EXPRESSED IN HELA, SIGNAL = 1.5; EXPRESSED IN BONE MARROW, SIGNAL = 1.6; EXPRESSED IN LUNG, SIGNAL = 1.2
  unsure 130
  unsure 143
  unsure 191
  unsure 385
  unsure 454
ctggaaatgctttcctgcccactgctgccactgatccctccccctgagcatgccacccaggagcctggagatagccacctttcctgccacagtgtgtgcccatgaacatcactgaagggcctgaggacanggcccgctcaacnctggtacccaaccccactgcctaagtatgctgcccaggggcctggggnattaccccaccccgtctatgatgattggcagctatgcactcctccaaggggcctgaggacaagcccacccagcctgcagctatcaccacttctgaaaacttcctggatgtgccacctgggggcctgggtcctggaatagccagcctgctgcagccaccaccaccagtgtgtgctgcctgggagtccgaaggtanggtccaccactgggccaccttctgggtactctcatcgcccacaccatatatgttgcccaggggcccaanacatctgcccaccttcctggcccactgctgtcactgctggcatctggaggtccaaggattgacctacctggacccactgacactgctgcccacattt

SEQ ID NO: 15951 - DNA, 569 bp, Homo sapiens
  MAP TO AL022312.7; EXPRESSED IN HELA, SIGNAL = 1.4; EXPRESSED IN LUNG, SIGNAL = 1.6
tttgcatggtggggtacttcattgtaatacaaaaaaggactgacactgagcttaatgctttcttaatctcactagcttggggaaagttttcctacaatacccaagatcagcccctcctccttgcatcctgatctatcatgggacattgtagctccctccagaccctaaagcatgcagtgctggaggcaagaagatttgggttgctggaactcacagagtaccctgtacttgttggggtttggcttgttaggggagggaggttcttggggtcccagtacttatggccgtgttctgtcttcattctcagatgagcaatggcaggcgctggtgagcgcaaaggcaagaaggatgacaatggcattggcacggccattgactttgtgctctccaatgcccggctggtgctgggggtgggtggagcggccatgctgggcatcgccacgctggcagttaagcgggtaagtgcatgcagccagggctgggggtggaatgtagtggtatggtcataagatgtaatgttttatagaaagaaaatgtcgaagcgttctaggaggaaatgatcgcaatga

SEQ ID NO: 15952 - DNA, 589 bp, Homo sapiens
  MAP TO AC006548.19; EXPRESSED IN LUNG, SIGNAL = 6.3; EXPRESSED IN BONE MARROW, SIGNAL =  14
ttagcatgttcccagagcacagccccctgccctgaagacttcttaataggctggtcacaccctgtgcaggagtcagccccagtcaggacacagcacggacgcgagggcccccactcagctcctggggctcctggggctctggctgccaggtaaggaaggagaacactaggaatttactcagccagtgtgctcagtacagcctggctcttcagggagggcttcttataaatgattgattatgtagatgtttgtttttatgtttccaacctcaggtaccagacgtgatatccagatgacccagtctccatcctccctgtctgcatctgtaggagacagagtcactatcacttgccaggtgagtcacagcattagtaataaattagtctggtatcagcagaaaccagggaaagcccctactctcctaattcatgctgcaacaaaactgcagacgggggtcccatcctggttcagtagcagtcaatctgggacagatttcactctcaccatcagcagcctgcagcctgcagcgtgatgatttggccacttattactatcaacagcattacagttaccctcctactgtgttgca

SEQ ID NO: 15953 - DNA, 570 bp, Homo sapiens
  MAP TO AL008723.8; EXPRESSED IN PLACENTA, SIGNAL = 1.4; EXPRESSED IN LUNG, SIGNAL = 1.2
cagggaggctctgtgttgagattgtggagacacaagatgaaagtagttggatccctgcatcactttatggaggaaagtttcttgcctggagctttgcctgattgcatcatctttgtatgagcgataaacaaccctttgttttttacctcagcatagcctatcctgtcccgactaatcattggtgctgctgtatcaaaaagccaaaatatacagcattagcttagtggctggtgatgtgtgccaaggacactgatactggaggctggggcatggcagtctgtactattaatggtaacacacttgttaaatggcatacttgcattaagaaggctaagaaagaaggctattgtaagcatatcttggctgttgtcttcattcaacaaagccttacaagaaataagtggctagtttgtgagcagcaataaaggaaatagagaaattccagaaagttagggcttagcaaaattaaaaagctgtctgcttccagatgccaactaacttgatacaggattgacaacaccattgagcaacaaaggcccaaattacctcagggcaaaaggcagattaaaa

SEQ ID NO: 15954 - DNA, 573 bp, Homo sapiens
  MAP TO Z98884.11; EXPRESSED IN LUNG, SIGNAL = 2.8
tgttgtcctggaaatacctacctagactagaacataagaccttgctcttgaaaattgccgaaatgacagaggagtgcctttcgtgtcagcatcagcattaaaagtaccaacctgcacacacctaatttagtatttcaggaattgtcatcttaatttttacatgattctagatgagctctgcggtggctgcatttgaacagccagcaattctggacttgttcctctttgtccttccagccagttcacgtgagcgtgtccagcggctacgggagcctggggagcagcgggtcgcaggagcagcttgtcagcatcgcctcctccagtgaggccagtgggcaccgtgtggaggagacgaaggcggagcaggtgcatgggcttatgtcacattcttatacaggcatcgtgttttctgtactacctcggttctgaatgtggtgacatcttagtatatattcctgacttgaagacctcaactgataacagatattttcatccattttggtttggaaaaaaaagtctgtaaaaagaaaatatcacctttggaaagtgatatttgaattaattgtatgcgtt

SEQ ID NO: 15955 - DNA, 566 bp, Homo sapiens
  MAP TO AP000352.2; EXPRESSED IN HELA, SIGNAL = 1.4; EXPRESSED IN BONE MARROW, SIGNAL = 1.3; EXPRESSED IN LUNG, SIGNAL = 1.2
cactggactgcccttctaggcacctccgggctgcatggggcctatgttgtgctggggctcgttcttccctttcttttgctgcccctcatctgttttccttcagttgtctctgctcaggccttgggcccagatgtgctgagctcaccgtgcacttcacctggcttcttgctgtactaggactccttgctccggctgaaggactatcggcagtgttttgagtgttccgatgtggctctgaacgaggctgtccagcagatggtgaactcaggtgaggctgccgccaaggaggagtgggtggccacagtgacccaactgctgatgggcatcgagcaggccctctctgcggacagcagtggtagcatcctgaaggtatcatcctccaccactggccttgtgcggctcaccaacaacctcatccaggtaacccctggctccttctcaccctgccctgccccagcaggtatgtctctgtgacatcctgcttcttcagtagttcatagctttcattgctaattaggcacccaaaggggacatgatggcttctttggttggaactttcgggatct

SEQ ID NO: 15956 - DNA, 557 bp, Homo sapiens
  MAP TO AL022318.2; EXPRESSED IN PLACENTA, SIGNAL = 1.8; EXPRESSED IN HELA, SIGNAL = 1.7; EXPRESSED IN LUNG, SIGNAL = 1.3
gaagtgaggagcacctctggacggccacggagcaaccctccaggtgtgaagtggcagccctgtgtgtgatctttctgccctccccgagttttcattttcgatagtaaaatttacttgtaaactaaaagatttatattggggaagatgaaaggaaggaaggaaggaaacttcactttccaaaaacaaccactgggagtccgctttgtgcagcgataggtaagcttctgtgcaggaacgggcgctgctgcaccccctaccacccacgcagcctcctccctatctgccttcaggtggtagccagaggagttcagagcctctacagagagcacaacttctccagctggaactgaagggggcctgcccctccacaccggcgggtatttctcgaaaggtggagatgagagactgagaaaagaaataagacacagagacaaagtatacaggaagaaaagtgggcccaggggaccggcgctcagcatatggaggacccgcatgggcactggtctctgagttccctcagtatttattgatcactatctctaccatctcagcgaggg

SEQ ID NO: 15957 - DNA, 570 bp, Homo sapiens
  MAP TO AC002472.3; EXPRESSED IN LUNG, SIGNAL = 1.2; EXPRESSED IN BONE MARROW, SIGNAL = 1.5
gggaggatcagaaacgaggtttataaaatgctcttactgagaaatccagcagttccagggcagaggctggattgtcctggacagacttgaggagaccaaagcagccttcacttcgcatgggattcctggacacctgagaaacacgcacacaaagctgcgagaagccaggtccgggaaggccagagagcaatgtgaaagggaaggaggggctcctcatctctgaggacacagccactatggccacactgtttcggctcagaaggtgtctccatcagatagtcagacagaatgctctggtgaggctgctgggtcagggaagaaaggaagggagaggcctccgattgatatagacacacaagacacacccttgcctttaagaacttgcctgctggggagaggggagggaaaggaagcatcatgaaatgtggtgtgatcagcgcagtgagtgagtgtgcaccagctcccctgggagggaaaggctgggaggggaggtgtatctgggcagggctcagcggagcttcccaggtgaggtggccggagctggacacttcagcaagaacagcagaggaa

SEQ ID NO: 15958 - DNA, 557 bp, Homo sapiens
  MAP TO AC004832.3; EXPRESSED IN LUNG, SIGNAL = 1.2
tccttcagggcctgtatgtctctggctcctggtgcacagtaggtgctcatgaatatggactgagtgagtgactgtatgaatgaatggtgctaacctaggctgtgtgtccctgaatgggggaggtgtgtcactgcccctctgtttccttctctaaagcatgggacaggtggctctagcctttcagagccaggtcccagctggggcagacttacagacgccggcctctgagcaggtgaggttcccatcctcgggcaccatgtgggcgttatagcgctggctgggtagaacatctgtcatctcccctgcccgctgtcgctcccccatcttggtcttcaggaaaactccgaagccgatgtccgcaccatcagatgagaactgccacctgtcagggggagggggaggagacaggttgctgctcagcctgatgggtctctgaggggttagggcctgcccctacctgagaacgcagcctggaaataggatctcgtattccacttggtgtgatgagccgcggttgatctgcaccgagtgctcgtactgagtcttcacctggtccc

SEQ ID NO: 15959 - DNA, 556 bp, Homo sapiens
  MAP TO AP000356.1; EXPRESSED IN PLACENTA, SIGNAL = 1.4; EXPRESSED IN LUNG, SIGNAL = 1.6
agcaagcaagcaagagaagcagcggggattttaggaggtgcttctgcagaaaccagtcgtttatatcatcttcaacaatcctggctcttgctgaagtagactaggggcttccccgaggggcggctccacctcatgctgagacctctgcatgccttgggggtggaaatatttgatgagactcccaggggtccttgggaccttgggctgtgaggaccagaaggattagaggactgtgccccttctccccactgtagatcgaagtaaagctctcggtcaagttcaacagcagggagttcagcttgaagaggatgccgtcccgaaaacagacaggggtcttcggagtcaagattgctgtggtcaccaagtgagtggggaggggcttgggctcacgcactgagggtgcctgtcccttcagctgtttctgcagaaaagagcatgtgtgggtctctcctctctgtgcatggccactgcacggtgaggtcaggccccagggaacacggcgtcttcagctacctcctgtgtttcctgcaaaccagctcaggaatgtccttgccac

SEQ ID NO: 15960 - DNA, 576 bp, Homo sapiens
  MAP TO AC007092.4; EXPRESSED IN LUNG, SIGNAL =  18
tgcactaggtgctttatgagctaacttaataactttttaaggtaggtattattatctttcctatttagagatgagaaaactgatgttcatagacgtaagtaactcactcaaggccgtgaggcaggtaagtgaatgactcaggcatttataaccacatccattctctattatcaagacaaaagttaacaagtgttggtgaggatgtagacaacagggaatacttgtgcatttttggtaagaatgcaaactgacgcagccagtatggaaaatagtatggagatgtctcaaaaagttaaacgtatcactaacaaccatatgatacagcaatcccacttctgggtgtatatccagaggaaatgaaatgcgtatgttgaagagatgtctgcagtcccatgttcattgcagcattattcacaatagggaagacatggaaccagccaaaacatctattgatagatgagtggataaaggaagtgtagtgtatacaggcaatggaatatcattcagccttaaaagagaaggaaatcctgccatttatgacaatatggatgaacttggaggacattcagggacatg

SEQ ID NO: 15961 - DNA, 577 bp, Homo sapiens
  MAP TO AL079295.1; EXPRESSED IN LUNG, SIGNAL = 1.3; EXPRESSED IN BONE MARROW, SIGNAL = 1.4
tgtctcctgtagcaatacaaatttaagtaataggttgtcaaatattaagcttacctagactcaattgcaaagctaaggagaaagataaaggaaaaaatagagaagggggccaaaaaagaaagagaaaagtgtgtgtgattagggggtgactaagacggaaaaaacaatttaatgagtcaagattgctcggatttcatcatagcttcatttatgaaattctgtttatcttttcaagaaagctaagtaatttttagaaaagcaatacttttcaagagacaatcttggcctcagcgaagaaatgattataactgaagatatggagcaatgtagaagaattcagaaagaaaccaaatctctggaaaaagtgaggcttttttttttcattgtaaaggaacataaattcagtctccaacccacaatccccgcctatcctccaactccccaaatcctgcaaagcccatagaaagtggaaagtgtgccaaaacaaacagtgtggctgcagctccgtggatgaagggtgggataaggttcgagtggcaagggagcatgactggcaggcaaccgaatggaatcactt

SEQ ID NO: 15962 - DNA, 544 bp, Homo sapiens
  MAP TO AC009290.1; EXPRESSED IN LUNG, SIGNAL = 1.3
  unsure 279
ctacacatcctccttggcaggaggcaaaagattcactgtctaaagacattgatccatggcagagatagctttaaggataccaggcacagctgagaggaagggtgagaatcagaggttagctgaaattgatttctgaatagtgagactgtacagtcatcttctctctttcagccaaagcagagcactggatccttcttctctggaaaacacaaaccagcctagagagaacacctgtagattctaacctttacatagatactgttcctcacccttatgatngaggtcttcttgacaaccccacacacattctcaagtttaggacattgtagcaatacttcaacattctgaaggaaaaaaaattaacctagaaatttgttcaaccaagtatgaatcagaataataaagacattttcagaaatagaagttctcaaaatgttcaagttctttgccttctttctcctaaagctgatggagaatgcactccatcaatatgagaagataattcaagagggaacaaaatatggtgtccagaaagtgggattca

SEQ ID NO: 15963 - DNA, 568 bp, Homo sapiens
  MAP TO Z95114.19; EXPRESSED IN HELA, SIGNAL = 1.3; EXPRESSED IN LUNG, SIGNAL = 1.2
caccctgtgcctttcagaactttttagggtgttttactttgggcagatacaaatctcatagggaagaggggacaaaaaagtctaacatttttttctctgaacctgaagttaataacttcttcatcctgctttccactgggagcataagcttctgaatttttgttttgttgaggcatggggtcttcattgtcttccttgtccctgctggcacctgctcaggtatcttcctctgggtccctgtcctgctgtcagtatcgatccgcactgggctccacccagctgacctatctgatccttgttgttgaggcactgagattgcctctgtcaaggacatggggaaaccttgggttttcccactgttctgggggccttgggacgctccaagaggctgtctccagcccctgcaatgtagacacagaggaggcatccttactccttggacatcgcgctgggaggggaaacactgcaaaagccaccgcctccagggcctgtaaagagaagccaggctcaggtctttgctccttccagatgccacagtgacccctgggctccgtttctccctctttcc

SEQ ID NO: 15964 - DNA, 565 bp, Homo sapiens
  MAP TO AL022238.1; EXPRESSED IN LUNG, SIGNAL = 1.2
tgctggaatttcttgagtggatacggatgtatagttaaacctagctttctgggatctgtgcataatccacgatttatctctggaaataagtcatgtgaactcattcagaagtcagccattgaatactttttagcaaggtgtgaccctgtaggtctgctgatttgcctgctaaaagaccctagcaacagtttggagagttggctgtaaggagacagggatcatgtcagaacaagttaggggctactttaaaagtctgaggccacattggtgcagtggccatgtaaatggagaggaaggatatagatccagagtcgaaggcagactggccagcccagccctggtggttgaccggagtgagtataaagagcttggtgagtggggcgctactgccatttactgaggcaggagctacaagggaggaatggcaggtatgtaatggtgagtaggaggaatgagaaagtggctgagttcagtttggggattgaggtacccatagatcaaccaggtggacgtctcactcagtaggtatgaggtctggcacttgagcaagtggtctggcctagag

SEQ ID NO: 15965 - DNA, 569 bp, Homo sapiens
  MAP TO AL008582.11; EXPRESSED IN LUNG, SIGNAL = 1.7; EXPRESSED IN BONE MARROW, SIGNAL = 1.4
ctctgaacccgtgctgttgctcatcacggcttctgccagaggcacttaacttgagtttgaaagcacaatccagaaggccggtggtcgtgtcacggctctgccttcatctgtttcatcagtaagtctttcttgaacttcttctatgtgttggacattgtcctaggttctgaatatattgtgaccagaatagaccattttttgtccccatggagcttatattttagtggactttactttcccatctggtccaagtctctgtcttctcatgtaaacaagggacagaatgacctgtagtaatcccacttggcacaattgttagggtaagagagctgttgtcatctcgccagcagcatcctttcttcccttgtcttgcctagccgtgtggtgcctggctccccggtgggggtctgctgtggggatgccccttccctcagcgtttgcccactgttctgtgttggtagatgcaggatcagcagagcctcccttactccctggaagccctggagatttgtggctcatccagctagactcagcaaaggcacttagggtcagcagttgggaccaacaac

SEQ ID NO: 15966 - DNA, 541 bp, Homo sapiens
  MAP TO AL022238.1; EXPRESSED IN LUNG, SIGNAL = 1.2; EXPRESSED IN HELA, SIGNAL = 1.5
agggtaccactggcactcaggccagtttcctgcagctctttgagggagatgaccataaggtattctgaaagtgacctgcaggacacagaaactcaatggtggagcctaagagacaaggctgcctttgaggatgataggagagattgactgtgggatgggtggggtctttcgactagaaggaagttgtgggggttagggagcgagacctgggtaggatgacaggttgaggcattctcacactggacacatggattattataaggatgtgtcttttctttccaaggtagagcagcttgacaagatggtgacagaaaaggcaggatttaagaggtaggtaaatgggaatgtgttggcctccctgttaagttgatggaagtcctatattcagtatacctgcagatttgaccttacaatttttgcctttttcttcctttgttcttctacccatttttttttttcctgtctctatcctgggttttactttcttactatctggattctttttttttttttttttttttcgcctaatcgtcttgctgac

SEQ ID NO: 15967 - DNA, 586 bp, Homo sapiens
  MAP TO AL031587.3; EXPRESSED IN PLACENTA, SIGNAL = 1.2; EXPRESSED IN LUNG, SIGNAL = 1.3
gaaagggcatgatgtcttggggtttatagtccactgagcctcgccggaggtaaccccggctcagggatgctttcgttgccatggcaaccgccgggccggcgcgggcccctgagtgcagctgaggaagctgggacaaaccctgcccttcccaagatggcggcggcggcagggcaaagggcggggttagacgctgtcagcctgtccagaccgttcctctgttttcgcttgttcctactaacagcgagcttccgccaatacttgttctcgttcttggttccgagcgtcccgggagccgggaagggaaggattgtctgcagggattggagcaaatatccagtggggggaaagccgggacttccgcgtcttgccggaagtgacgtgacaatcgcggccaccgccaggtggaacggcaggtgggttcaggtaccagcctggccgggacccggctgtgggaccaacgcttccggtgagcgacagaggcagctccccagggcctggagacccgtggggcggactctgggatctgagcctatcgccctggcctggagcccccctttgtacctagtaagaatcacctacccagccc

SEQ ID NO: 15968 - DNA, 565 bp, Homo sapiens
  MAP TO Z95114.19; EXPRESSED IN LUNG, SIGNAL = 1.3
cattctgaagacgctccttgaagactcctcaggaggtctccagtcgcccacatgggtgaccctatcaagaatttctcccggcatcagccttctgtccttctctgtgtcactcctcccagtaccccagtcctgctcctagaatcacttcccaaacaaatcctctgcctgggagccttgcctagggctctcccttcaggggaactcaggccacagcagcctacattagacagcatgaaggctctgggcttttgtgctaagagtaataggaagccattgaagacatggaagccggtgtttgatgaaatctgtgtttttatgggtcaacttggcccaatgtggaggaagagctggcctagcggcaagggctgtgtatcagcgaagaccattttggaagcttttgcaggagtctgggcgaagtgagaaggctgactggatgagggtgtttgcagactggatgagggtatttgctgtctggctgtctctctctgtccctctatgtctcatggattttccttcaacctacatacaggcccttctgatcttagcctcatgtgacccatgtcaa

SEQ ID NO: 15969 - DNA, 568 bp, Homo sapiens
  MAP TO AC006548.19; EXPRESSED IN LUNG, SIGNAL = 2.4; EXPRESSED IN BONE MARROW, SIGNAL =   3
cccaggaaaaatgaccagtgctctgattaagctcttgaaaataaactgctccctgctggctagtaacaaattggttcattttagaaagtctacttttcatgataaaaatcaaaacttgaaaaaatatgtaactctaaatcaaaatcttaaggaaaatcatgaaagttgctcaaaatgtgtttatataaccttgcacttctctgttattatttcaggatccagtggggacattgtgatgacccagactccactctccctgcctgtcactcctggagagccagcctccatctcctgcagatctagtgagagcctcttggatactgatgatgaatacacctatttgaattggtacctgcagaagccaggccagtctccacagctcctgatctatgaggtttccaaccgggcctctggagttccagacaggttcagtggcagtgggtcaggcactgatttcactctgaaaatcagtagggtggaggcttaggatgttggggtttattactgcatgcaagctctacaaactccgcccacagtgctacatcctcgaacagaaacctccctgctg

SEQ ID NO: 15970 - DNA, 567 bp, Homo sapiens
  MAP TO AB016897.1; EXPRESSED IN LUNG, SIGNAL = 1.4
tgggagaggtggagtttcagctaatccttggaacagacataattgggataaaggaataagggagatatattgtgggtgggagtgagagcacaagcagagatagaagaaacgagtcttgtgtgggccacttttggataaggtgagacctgtgcgattactaaggagagcagaataaggaaggcagtgcttaattagttttaaaactcttgattgacaggttaaggagtctgtgccttatcttgtaggcaccacaaagaaatgcaggatttagaacaaaagaggaacatgatgaaactgacattttaggaggcttcatctgggtctggtgtgcaggatggattagaagaacctgggacgaaaggtgggcatctgttcaggagttcgtcagaggaacctgaacccttttagcgtatgggttgaaggtgatgcgtggggcatagtaagctgcctctcagagaccaagacgtgtggggttcacctgtgcaggcagagggtagtccagggcccttcagtccacctcaccatccagaatttctgcttactcctggtaaggtcctgctcacaggc

SEQ ID NO: 15971 - DNA, 570 bp, Homo sapiens
  MAP TO AC004624.6; EXPRESSED IN BONE MARROW, SIGNAL = 1.3; EXPRESSED IN LUNG, SIGNAL = 1.3
gtctgtttctggcttctggccagaggttatgctccctagcctgccagaatggccaccctgcaggctgcaatcctttatgggaaataaagccctcctttccaaatgtatgaacctcatcattcagttgacacacttgatagaaatcttccttcttatttgtaattcattatactattatggttttcctagaattctgcaattctcactgacagaaagaacccaggtgcccttcccccaggccctgatctgcagcctgaatcccaccatatcagatgccttaatggcttggcagagttggcctgaatatagtattcctggtgacagtgaagtcctcgcctcaacattttgctatgtggataacatctgtggaagctgaagtgcctggtaagtaatcagggcctcaaaaatgtcatttcctgccagtgaaggactgtttgcaaagctggttgcaagaatccctcccacctctgtgtgcacattcatttgtaatgtgactcccctgcccctcccagctagaggtggagtctggttctccacaccctggactggccttgccacatgcttagacca

SEQ ID NO: 15972 - DNA, 580 bp, Homo sapiens
  MAP TO AC004832.3; EXPRESSED IN LUNG, SIGNAL = 1.2
cctctgagcaggtgaggttcccatcctcgggcaccatgtgggcgttatagcgctggctgggtagaacatctgtcatctcccctgcccgctgtcgctcccccatcttggtcttcaggaaaactccgaagccgatgtccgcaccatcagatgagaactgccacctgtcagggggagggggaggagacaggttgctgctcagcctgatgggtctctgaggggttagggcctgcccctacctgagaacgcagcctggaaataggatctcgtattccacttggtgtgatgagccgcggttgatctgcaccgagtgctcgtactgagtcttcacctggtcccgcacgtacatggacttggggatctccccgccatagttaatctgcggacatgggatgagatgggcttgcttccgtctcctggccattgttcatgtttcttctgcctgagacactttcaccacctcctggaagtatcctcttcatcctagccccactctcccacctcctcaagccttctatgaccctccaaactgggccagtgcgtctgctgggagcttcccctcccagctcatccctctgggtta

SEQ ID NO: 15973 - DNA, 572 bp, Homo sapiens
  MAP TO AC007564.9; EXPRESSED IN LUNG, SIGNAL = 1.9
aatcctgggactgacacgagatctgggtacaggccaatatcccactatgaggacagccatcatttaccattactttaaaggaggctttgggtcagaacaaagagcaacaagcttgagatggaccccatgaactagccctgctttcagaaggcatcccaagcaatccagccttgagtggtcaatgtactacaagaacacggggctcaagccaaacacacacagctacaacaatggaatatctttttaccctgagttttgatcatttttcaggcttagttgtatagcttcatataaactctcaagttgaaaacttggagatttctcttccattagtatttgacgttctattttgcctgaaagaagaaaaagatacaaagatggtttttcctttttctagcacttagaacttaagaacaaatatttcatgctggaaattcagaatatttgatgtgctgtccttttgtatgtctgtctatttcttccagaaggtaagccaatgaggaaagatccattgcctccttcttcagaaccctcaggcttcccctgcattcaggaagcaacatgaggcaagc

SEQ ID NO: 15974 - DNA, 555 bp, Homo sapiens
  MAP TO AC007106.6; EXPRESSED IN LUNG, SIGNAL = 1.2
tttagagggaaagacctgtttgaacgacttcgcacatagtagggcctcaataagtttacattaaaattgtaatgagcttgataataaatgcaaatcctgtgccaacaagtcaaacctaccccctgcttaaaattctagttttttttctgtcaaagaaaataaaaattactcagattcatagccaatgctcttttcagctagtcttaaattacattccatatctcttataattcccctttaatttccagtgcaacaacaaaattaaatgcttcttgcttcctgaggataatttctttgtgtcatctcagtatctttgtgtatactatcccgtccacacacacacacacaaaaatgaagaataaaaaatccctttctattacttctgaaataatctctgataatatgtgactatagcaaaaactatattctcaatgtttcctaatcttctcaataaaactgtcctccctacttttttaataatccaaaaaaattataatatttttaaggctgattacaatgcagctgtaagaaacagtcacttaggacttcaagttc

SEQ ID NO: 15975 - DNA, 570 bp, Homo sapiens
  MAP TO AL022319.2; EXPRESSED IN LUNG, SIGNAL = 1.2
accgtgttaggaactgggtgtacaaaggtgaaaggataacaagtggaggattaacagacatggtctccctccccacaactccacatgtcactgaatccccaaggcccttccccaagcacaggctcctaaagatgaagccactattgcccaaggggaaggcacatgatgtgtctaggagatgaaagacttaaacaaacaaaaactagactcgtatgtaacagataaagatttgggaagtatactggctgagcttccccctcccctcatgcccacccctccatataagcttctagcccagactgagaatcctgaggatagagatctgcagcaagagtcagatcctggcaagggcaccaaggatgtccctggcgagggaggccttgcatctcgagtctgtcaagggctaagtcttgggagctggggagaccagggaggggctggtcatccatctatccaacaagtatttcttgagcacctactattagctagccactgttctaggtactgagtgttctgtgaatgaaatagagaaaaattccccctcattcttctttcattctgagggcgaag

SEQ ID NO: 15976 - DNA, 422 bp, Homo sapiens
  MAP TO AL049775.2; EXPRESSED IN BONE MARROW, SIGNAL = 4.5
ttgatatttagcccttggctctatctaagacaaaggtattgcaattgcccattttaccatcaaacgaggaagctttgttgtacttcgctttcaaaatgatccttgaaaacctacacacatacacacaccagcacttacattcttttagtatttcaggaagtgggcatgagtaggtttgagccttgaaactgctttgtcatccagtttgtagctggctaaggaatggaaaaaaaaaaaaaaaaaagaagaaagcagagctcatcttgatcattgtaattggcactgacagcaaacaccagtgtgccaatagcgccaaagaattcctacgcaaaagctacttcagctgtccgagattttcctgatttgttttgtttgtgcatttgatgtataatcttgtggtttggccctcctcaccacctaaa

SEQ ID NO: 15977 - DNA, 477 bp, Homo sapiens
  MAP TO AC007239.2; EXPRESSED IN BT474, SIGNAL = 2.4; EXPRESSED IN BONE MARROW, SIGNAL = 0.64; EXPRESSED IN HBL100, SIGNAL =   1
aattgctcatgaaaccaccctgtgtgcagggtctcgcccctgccagttgaggtgcagagagccactgcaggtggctgggcagcccccacctgttggagtcatgcagtgtgaatgtgactcaccactgttactgcatcattcagcagggactctccaaagaccaggatgtagagctgctcattgacgtgaatgttctcaaagacagcaagcacagccacaggatcgacagctgagattaagctgccaaagagcaggttctggagcaaagtgatgtcgctgaggccgaatgcttcgatctggcagataccaaacaaagacaccccaatgccaatggaattccaaagtgtccctaccacagcataccagaaaatcgtgccaatgttctcaaagaatgggcgagtgggcatgaaatagccggcatccagcacgatgggtgggaggaggtacaagaaaaatacatcagtcttcattgcaggg

SEQ ID NO: 15978 - DNA, 483 bp, Homo sapiens
  MAP TO AC006449.13; EXPRESSED IN PLACENTA, SIGNAL = 0.61; EXPRESSED IN BONE MARROW, SIGNAL = 0.75; EXPRESSED IN HBL100, SIGNAL = 0.67; EXPRESSED IN BT474, SIGNAL = 5.9
tgggttcctacagctctgatggccagatgccctctccattgtagggacaacagcagaagggagtttgaaaaaggtgttggaatgaattagtgaaaagggaaaagcattctaaactaaattacaaaggtcctactggcgccaactatgctccgtcaggtggaatgatcatttgcacttgctttaggtgcccataagtgcccacgctgctcaaatcaccacccttttgtccatactcctggaaagtactgaattccattcttcttaaggtttaagaggcgcctactctaggtacagaaggagccttgcaggtgaaaatgaaggttagtaagtacctcaacgtcccgcttcagtttctccaggaagttctttttactctcctctcccacatgcagcttctgcccttcattgaggaagtcattgtctttgaatgttggcaagtccttggcctaggagagcaacagcagttaggctgggtaagcctga

SEQ ID NO: 15979 - DNA, 450 bp, Homo sapiens
  MAP TO AL049868.10; EXPRESSED IN HBL100, SIGNAL = 1.2; EXPRESSED IN HELA, SIGNAL = 0.93; EXPRESSED IN PLACENTA, SIGNAL = 1.1; EXPRESSED IN BONE MARROW, SIGNAL = 1.5
aatgggtttgggttttagggcatgaaaaactatgctaatgaaatactgtttgagcacttgaaaaatgccactattttttgtggagtattacaatacatctgaaataatctgttcctgtatataaataatataaaaaagcaaggcttcctgtagtgtatgacattgtcaaataggtcaagcttcagtgcaaatgctttgaaattggtacagtaattcctggctgattgtttttgttctccaaatgaatatgctcaggtaaaagtgatggttgactcaggagaccggaagcgagccatcagttctgtgtgcacctacattgtttatcagtgtagtcggccagctcctttacactccagggatctgcactccatgatagtggcagcttttcagtgtctctgtgtctggctgacagagcaccctgatatgcttgatgaaaaggtgagtttattt

SEQ ID NO: 15980 - DNA, 485 bp, Homo sapiens
  MAP TO AC005948.6; EXPRESSED IN HBL100, SIGNAL = 0.96; EXPRESSED IN BONE MARROW, SIGNAL = 0.93; EXPRESSED IN BT474, SIGNAL =   1; EXPRESSED IN PLACENTA, SIGNAL = 0.99
gagttgcatggataaagtgctgatctcagccctgctgctccttggtgagaccctcagccacttctttaacctctccagcaggagctggcttggcttcaggatatagggtacatccttcttactcctaggaaatacttgttttcaatccccctgggtctcagcatgtgccttctcattcctgagggcagcagcctttataagagagtgtgtgaagccttggagacccatgccaagagggtgggctttcaccagaggttggctcctggactcccagtcaccccatatcttcatttcctcaggaactgtccccaccaccactggctaaggggtctgatggatatcatggagagcccccagagatgtgaggttgtttttcagatcctagaattggagatagaaggaagacaagagaagaccaatgagcttgacctgtgaaattcaagagtagagggtaaggagaactctgagagccagagtgttggcac

SEQ ID NO: 15981 - DNA, 475 bp, Homo sapiens
  MAP TO AC007970.3; EXPRESSED IN BONE MARROW, SIGNAL = 0.92; EXPRESSED IN HELA, SIGNAL = 1.7; EXPRESSED IN PLACENTA, SIGNAL = 0.94
agtggcagtaacagcatcatcatagagatcactgcaaatctagtctaatttataaaattagaaactcacaatagttggtaccttgagaaatattagtgacaaatctctggaaagacacaacagaccacaacatacaaaaatgtcagggcatcatgactatagagaaccatatatggttcttaaactatatggcacttaaactatcatagcattaccaacagcaatctactgctactaatcagtttttataggggaaaatgaacaaatttcagtcacatagatagcatgtataatggcctgggtctgacatataattacgatatgaaattagaaacggtggctaacagttaccaaaggtataaaactctaattttggatgaccgtttggttggccagttcaaactacagcatagccataagagttttgacaaaattatttaagacatccttctaactgcgaactttatggtgtttt

SEQ ID NO: 15982 - DNA, 499 bp, Homo sapiens
  MAP TO AC010143.2; EXPRESSED IN BONE MARROW, SIGNAL = 1.6
tttgggtgtatgcccagtagtgggattgctggagcctacattctatttttaggttctcagggaagaaactgtctgattaaaatggagttatgttcgtgggtagcccctggtctatgggtgccctggagaggaacacttactctttttcctgctgtgaccacctctccactctcagctgcaccaccatcctcagcctgagtgtatcactgcgttctcaggcagttctcatagctgcctgtggcactgccccccatgcccctgactttccccatcaatccctcctcttcaccaggaagaagggtttgtcattcatagcctggagccccagggccttaccttggtgctcagaaccttccagtttcctctcatcccgtgcttctcgtctgatgattccctggtcttccccgtgaaccctcatgcagccaggatggatgagccacctgctcctgcacctgtcaccatcgcactttgctgttcttctctctttgcttggcacctc

SEQ ID NO: 15983 - DNA, 473 bp, Homo sapiens
  MAP TO AC010970.1; EXPRESSED IN PLACENTA, SIGNAL = 1.4; EXPRESSED IN HBL100, SIGNAL = 1.1; EXPRESSED IN BONE MARROW, SIGNAL = 1.1
tcaaaatttcatgtacctcccagttaaaattcaaacgtggtagcttttggatgacttttctccagagtttaagggaagaaaactatggattcagccatagtgttcatcctgacgctcgaattatatgtcccttttctagtccagttaccgcctccctccccactattgtgaagtcaatgtgtgtcttcccatccatgtttaatacctagtgtgcatgtccatgaagaatggatagtgttctttggcctggttttgcaattttatacaaatagctgtccatacttactctcctgaaagttgcttttcccttcaacaatatcttccagatgaatctagaattctgcatttctggtgaccagaggatgggcgaccccccctgcaacccccaccccaaggtgatgctgatgttctggtccaaggcctgcacatagcctggtgaagcttggggtcttgggacaggtttgttgtcagca

SEQ ID NO: 15984 - DNA, 485 bp, Homo sapiens
  MAP TO AL109935.13; EXPRESSED IN PLACENTA, SIGNAL = 1.1; EXPRESSED IN BONE MARROW, SIGNAL = 1.2
aaccctgagatgcttgttcccatcaactagaggctcagtataggagttgtctgatgttgtcttgtacttttggcaattcatttacccaaaagcaacatttgttatctaaggctaagcaaattcctccctgtgcttccattaacatatcatagtccttggagattttggaggactacagctgctaaagagtccatttgttcttacactgttgttaaaattttagcctcaatgttgtcggctatttcctttgtgagttggctatagatcaaggagacttttgtgattccagcaattctgatttccatacagggtataatgccatgttccacaagaagcagaattaattggatagccctcttcaccttgggcaagataggatgcctgtagattggtgctggaagagagagattgccagggactatgaaggcgtctggggatacatagcctatggtacaagtttcattccagttagtggggaggcattg

SEQ ID NO: 15985 - DNA, 484 bp, Homo sapiens
  MAP TO AL035411.25; EXPRESSED IN BONE MARROW, SIGNAL = 0.91; EXPRESSED IN PLACENTA, SIGNAL = 1.6
ttcatgcaaccccctaaatctgtttcatctctaggtaaagttaaatccttctcatgtgatctggattttcagattccccagtggggatatgtgtttggaggtaggtttgcctcctctcacactttgggaactcacagtttttttttgcctgtttcatggaatttgcagcagtgtgcaacttctttcaaaaaatctgtgaattcctttggttttcccggtacgttcctgtggtagttcttggagcaaaagatcatggtgtgagtctgcacacactgttctgtccatccatgtgggagctgcacattagccctgtctcctattcatcatcttcccccgttcttgtcctgattatccaattttgagtgctgttgaggttgatctgtgggttcaggtgtttcagctgtaatgatggtattataaagttactcatcaattttcacctaatgatttttttgcagtcactgatgattgctgactacatcca

SEQ ID NO: 15986 - DNA, 498 bp, Homo sapiens
  MAP TO AC008013.8; EXPRESSED IN BONE MARROW, SIGNAL = 1.6; EXPRESSED IN BT474, SIGNAL =  17
tggttcatattggctgactggtaagcctacagtgataaccctacgacaaaaaagataatctactgcaataaggtgtggtcaatgtacgtgatacatgaggaagataggtggccattacatggttctttgaatttaatgttatacagcttgaacatttcaatctgagatcaggaaattgggactgcataccttatattcaagcttttatgttggtacataataagcacgcttcccagaaaggttgctggctgatggtgcaaacaggaccatatcaggtaaaatctcctcactctccattacctgaggaggaaaagaaggagataggataatcttgtcaactataaaccctccacaggcaaatgatgctgaggctttgcaggtgcctgtcccattgcagcctgctctggcacctgtgcaggctcccatggaggccccagctgcagtaccagcacagtaccctgagttgccccatctctgccccctccaccagaggattat

SEQ ID NO: 15987 - DNA, 490 bp, Homo sapiens
  MAP TO Z92542.2; EXPRESSED IN HELA, SIGNAL = 6.8; EXPRESSED IN BONE MARROW, SIGNAL = 0.95
aagattttctcctttggttgtttctaaaagttttataagcttacattttacatttaagtccatgatctattttgtcaatttttgtacaaggtgtgagataaaggccaaagttcttttttcttctcccttatggatgtctagttgctccagcaccattcattgaaaagtctattctccctccattgagttccttttgcagtgaaaaatcagttgggcagatttgtgcatctctaattctggattctctgtccctcttctagtttctagatgagactgtataagattgctgttaattcttccttaagtgttaaaattctccagcaaacctatttgagcttgcagatttcttttattggaaacttgataattataattacatattcaatttctttaataattacatgactcttaaagttgtttatttcatcttggttaacttttggtagtttgattttcaaggaaattggtccatttcttctaagttgtcaaa

SEQ ID NO: 15988 - DNA, 442 bp, Homo sapiens
  MAP TO AC008127.10; EXPRESSED IN BONE MARROW, SIGNAL = 1.2; EXPRESSED IN HBL100, SIGNAL = 2.5; EXPRESSED IN HELA, SIGNAL = 2.1; EXPRESSED IN BT474, SIGNAL = 0.97
agctggagccaagaactgagacaatgtgggcacgccacagagtaacagagggatgtgcctgaatgactttgtctctaagacggttattaaacctgaattctatgttccatgtggaaagcagataaaatttgggaaactatctctgaagtgtcaggactgttgtgtgatctctcgtccagaatgtcgggaccactgtccccttccctgcattcctaccctgataggaacacctgtcaagattggagagggaatgctggccgactttgtgtcccagacttttccaatgatcccccgcattgttgtgcattgtgtaaatgagattgagcagagaggtcttactgagacaggcctgtataggatcttgggctgtgacagcacagtaaaagctgaaagagaaattcctcagagtgaaaactgtacccctcgtcagcaaagtggatga

SEQ ID NO: 15989 - DNA, 403 bp, Homo sapiens
  MAP TO AL049539.19; EXPRESSED IN BONE MARROW, SIGNAL = 0.94
atcagtgtggcagctcagtgaatgcctgggctttgtctcttcccacccaacgagccccattcaagcccccagggggaagaaaaggagataaaaagacaaagctgtgcacagcccagcgcttctcctctctagctgtgcccaggacagcttttggcttgggctggtccatcctgcagacaagggcagagaaatcaaagaaaccatcacagatctgtggggcaggaaaatgagcctggtccagctttcacagctctctgagatggggcatgttgggaattttagccgatttaataaaagttgcagcatgagacctgtgaatcccaccctgctgcttcctggatcctgccacaccccatccagcagcaaccaagccagtctcgcccctgactgggacagagtggct

SEQ ID NO: 15990 - DNA, 370 bp, Homo sapiens
  MAP TO AL096704.6; EXPRESSED IN PLACENTA, SIGNAL = 6.1; EXPRESSED IN BONE MARROW, SIGNAL = 0.92
tttctgccattcctgtatgaactgtaccattgggaaatcaaatagttgtggataaaagaaaatgttgctttataaatgtcattctaaatgacaaatgaagaagcagttataaaagtcaaatatcaccatactgcaacctcccaatgaattaatggatccaagcattgagtatcaacagtcgctaataacaccaaagataggccatccacattttatatcctttctgtattttcactagttgagagtacaatcctgactgaagatgcaatcaacaatattcagactgtgaaaaactctatggctcaaaaagcatggattcttcaacagataaacagcaaagaaaagaaacagatgaaggaggagtcagcgt

SEQ ID NO: 15991 - DNA, 451 bp, Homo sapiens
  MAP TO AC009481.1; EXPRESSED IN BONE MARROW, SIGNAL = 0.95
tcttgttccatcgcaaatccacactgccctagtccttcaataaacccatcacacattttcaccatgtcctctacagatactttttgtgcagtgttaacaatgtcatcattgtcgttattatcgccatcacctcaattcagaaccatttcagctatttcaccatcaatcagtgaatgaacaaccagaggcttattatcaatgttaaaacatcttcaatatctacttcttccaacttactgacagcctctgaagatatattttttgcgtatgtaaggaggtcaaatatcttttttttctcaattgacaggtggaatccttcaaagtcaccacctggttcatcatcattactgaacatcattgcaggccagaggttgtgccagaaatatacaactgtgtatttagtcactggattccaagcattggcaacagcacacacagcatcgttcatcct

SEQ ID NO: 15992 - DNA, 419 bp, Homo sapiens
  MAP TO AL109758.1; EXPRESSED IN PLACENTA, SIGNAL = 0.69; EXPRESSED IN BT474, SIGNAL = 0.81; EXPRESSED IN BONE MARROW, SIGNAL = 0.9; EXPRESSED IN HBL100, SIGNAL = 0.8
aaattgttttgaggccttggatgttttttttcttgtaagtaaaagattcttgaccaaaaaaagagatccccatcctgccatatgcttaaaaacctggaaatatcacggttactctgtaaagccaggatttttctctcttccagtactagcaattataaagattacttatctaataatgtacacaaaaagattgaggcagaaattagtatagttgctattcaagttaaatttaaataccttgtaacacttaccttatccgcacacattgacactttaatgtcctgctgagatatttcataatgccggatattaaaaacataattaccagccaattttaaaatatcagctgagatatactctagtacagccacaatatatagggatacatggtagtccactttgtaccctaatacttcctg

SEQ ID NO: 15993 - DNA, 460 bp, Homo sapiens
  MAP TO AC009297.2; EXPRESSED IN BONE MARROW, SIGNAL = 3.8
tttttgaaagtcattttggctgaaattttaggtaagaaccatatagaatcatgagagaaagtgaaagaattagttatttgcttctagagttggcattaatgaggttcttgatgagaatctgataggctgtggcagggctagtaaaattataatgcaaatatagatcattgcctagttatctttttggccataataaagctttctaatacaaaaaaacaaaacaaaacaaaacaaaaaaacaaaaacaaaaacaaaaaaccagtttgtacctctttcactggcatcatctaccaagatgacctctgagagtagatagtgtggggaacgatttatcacactgtaaacagttctaaggagagtgctccaagcttcattatgaaacacaatgactacacttgtgtttggaagttcatcagggtagacttttgtcttacatctgaaaaagagaaaagaagaggga

SEQ ID NO: 15994 - DNA, 470 bp, Homo sapiens
  MAP TO AP000244.1; EXPRESSED IN PLACENTA, SIGNAL = 0.61; EXPRESSED IN BONE MARROW, SIGNAL = 0.81
tgtgttcggtctgtcattttgatacaatagtctttccagggtaattgtcatgatgtcatgctgtctcaaaaaaaaatccatttacagacattttttactgtaactaaagtctaacagggattttttacaatggttcttgtaagtactatgcagccactacaaattatatgtataaggaatgtttaatggtgttgccaaatgctcatactgtaatgacgttataagacagtatagaaagtatattgaagtttcatcctccttgaggtgaaatgttaagccatgtgaatgaatgatgtacacaagaaaacagaagagggctgagaacagacctcaggaaatctccaggagactgagacagacaaagaattagagagagagaaagctgtagacagagagagacaggcactaaacaagactgcggaagtcctggaaggcttcctagagtcggacccaggtgagctgattctgaa

SEQ ID NO: 15995 - DNA, 404 bp, Homo sapiens
  MAP TO AC009299.1; EXPRESSED IN BONE MARROW, SIGNAL = 0.77; EXPRESSED IN HELA, SIGNAL = 0.96
cagccatgtttagtttttctgctggtgagcagatataaatgtaatctgcactactatcaaactccaggtctgatagataacaagctaatatttatttctaagtactctaaaaattatttgtaaaacctgcataaaaaggattgcataaatatattgtgattttattttaacaattattctacactacaatggaagtacatgctcaaacaagacacctcagcagtattttaaagcagtaaccacctagccaatttctgtatgtctgtagtttttctaatccactctccctgtggttgagcaaaatcgaattgcctctcacatttgcagacagctctgtgaaggtgataatagagctgctccctgctgtcatgaggcaggaaataggaaaatggcatatggggcta

SEQ ID NO: 15996 - DNA, 446 bp, Homo sapiens
  MAP TO AL035703.19; EXPRESSED IN BT474, SIGNAL = 0.96; EXPRESSED IN BONE MARROW, SIGNAL = 2.3; EXPRESSED IN HBL100, SIGNAL = 1.7
cattgatttggatgtgtggctttttgacgggcaggagaacattgatgatattctccaacttcaaggtgtcagactagttaactgtgggatagaaatggagactcaaatttagttggtgtatatttaacatgcagcttctggaatttacatgtgaaacttatgtgaaaaccacttaataactaagccaccaaagaaacatgtcattggaacaaacttcatagcatcatcccaaaataaaaccctgccattccaatgcataggatcttctcctaccttttggctgcactgtgtctacatcttctggcttcctgtctaatagtgctgtttttactgcaggattagaatattggtacagcctcaacagggacacaacagtttgaacatccaggctttcctctcttactttacccaggattctctggaatgctgaatgtcctccttcaccc

SEQ ID NO: 15997 - DNA, 457 bp, Homo sapiens
  MAP TO AL049633.3; EXPRESSED IN BONE MARROW, SIGNAL = 0.97
aacccagagttccaatgtgcaaggacaggagaaaacgggatcctagttccggaagagaaaaaggagcaaattcacctttcttctgcctttttgttctatctaagccttcgaccaattagatggtaactgcccacacttaataagggtggatctttcttactcaatctactgattcaaatgccagtctctcctggaaacactctcaaagatatacctagaaataacgttctaccaattaggtgggtatcccttagtccagtcaatttgagacctaaaattagccactgcagtcttcttctgggatctctaggcatcaagattaatgagtctggaactgccgttctgctcaccatggagacagcctgcctgaaaatgaagcttgcaccaaggaaagcaaagcagaggcatggagagcctggtacagatggccctgttggggcgatttgttcttgagagc

SEQ ID NO: 15998 - DNA, 469 bp, Homo sapiens
  MAP TO AL031656.10; EXPRESSED IN PLACENTA, SIGNAL = 0.67; EXPRESSED IN BONE MARROW, SIGNAL = 1.2
gaatgtaggtaaaatgcctgccacatattgtttctattctattcaaatgacaaaaaaaatggtctattaaacattcattatgaaatcaggatacttggagagattcctttaaggggaattatctgctctgaatccacattgccatttgcatgcttagaccacgtagcccttcattcatttaacagaacctccttgagtacttacttgctcaatgctggaccatgctgggcactgaggtaccagagcttagaagacactgtgatcactaccctgaggaatgtgctgagggatggtgcacgaagcagggtgttgtaactttccagcctgcatctggttatgattgctgtggctctctggattctttctgccactggttgctgatttcctgtttccctctcagagcatccccctccccttcactcatgagtcccagagctcctagaaactccaatctgtgctgtcagaacca

SEQ ID NO: 15999 - DNA, 466 bp, Homo sapiens
  MAP TO AP000095.1; EXPRESSED IN BONE MARROW, SIGNAL = 0.62; EXPRESSED IN PLACENTA, SIGNAL = 0.74
ctcagacccaacatttaacagtgactgtgtatccatcacaccattcccgcacagccccaccctccacagcggaaggaaaagctcccatcgaaagacgcagaagggaaagaaacaataatataggaagtgttttgtatttatagaggacataggcaggcagatgagtgaatgacttcagtactctcagctcttcaaaatcattatcaaacatttcacatcttcaagctgctgatagggtaaactcttcctttcattataacagggttttcatatttggtttgtttcatttaggaagaaccctatgttatgtacaggaaatctgataagcctctatatggaaatgacagatttgaaggatattgcctagacctgttgaaagaattgtcaaacatcctgggtttcatttatgatgttaaactagttcccgatggcaaatatggggcccagaatgacaaaggggagtgga

SEQ ID NO: 16000 - DNA, 377 bp, Homo sapiens
  MAP TO AL035447.3; EXPRESSED IN BONE MARROW, SIGNAL = 1.1
gtgcagtggtgagtctgggggcctgcccccgagggcactggaggagtgttgcaggcatcacccacgccctctgcacccacgctggaggacggggaggttgtcaggggctatgatgagatgagtgggggccgcttcgactttgatgatggaggggcgtactgcgggggctgggaggggggaaaggcccatgggcatggactgtgcacaggccccaagggccagggcgaatactctggctcctggaactttggctttgaggtggcaggtgtctacacctggcccagcggaaacacctttgagggatactggagccagggcaaacggcatgggctgggcatagagaccaaggggcgctggctctacaagggcgagtggac

SEQ ID NO: 16001 - DNA, 427 bp, Homo sapiens
  MAP TO AL049796.19; EXPRESSED IN BONE MARROW, SIGNAL =   1; EXPRESSED IN PLACENTA, SIGNAL = 0.89
tgcagatgtctaggctccactcaccaaaagttaagaattaaataggctggggtacaggtgtagatactttttaaataactgcctgggaatttctaatattctggttcagattcatagcacacacatgaagaataagcatattatatattaaatgttgaggtgtttcttttgttatgttaaatgcttacctacatactaaagtgcttttttgttttccaatttaacacgctggagttttgtttgttgttgtttcttttagaactgctttctgaagcaagtttccaagaagctcttcaggaaagcattcctgacattcaagcgcacgagtgggtgccgctgtggctactgcggtattcggtcattgtgaaaagtagaggaattatcaaatcaaaaggctacattttacaagctaaaagaaggggttctt

SEQ ID NO: 16002 - DNA, 364 bp, Homo sapiens
  MAP TO AC007327.1; EXPRESSED IN BONE MARROW, SIGNAL = 1.4
ttggtaggtcccttgagtggaggttggttaggataacatctattatgttttttaaaaaggttactgttgtacccatgttgtttatttaagctaaattcagtgtttgttctacatgtttattgtagaccccaacaggtaactgcaggtggttactgacctaccattctttcctctaggagattgactgaaaaagtcaatctctggagaagacagtcaagcactgagtaatattttggtcaatgatagatggtgtatatgttcccagaagattataatggaactggaaaattcctgttgcctggtgacatcttcatgatcctgatcccatgtaagcctaggataatgtgtgtgtgtcttagttttt

SEQ ID NO: 16003 - DNA, 432 bp, Homo sapiens
  MAP TO AL121749.7; EXPRESSED IN BONE MARROW, SIGNAL = 0.92
cacctatccggtcctgacactacaccatatatggaggctacagtgggaacttggactttgcagaacatcccctattcacagtttcctcaactgtacatggagtcccactataaaactgtgcctgtctcaaaggggtgtgatgatgggttaaattagaaagtccagacaaggcacaaaacgctgcctggtacatggtaggtcctcatttcatgttagaatgcagcgagaaatacagtaaggtaaacaggaagtcaggaaacggggtggaatgtggtgggcagagagaagtccccatcgaatgtcttctctgtccataggaagcgaggccacctgccaaggtgtgagaagagcagaagaggcttacatggatgatgggaagctcggacagtgaatgaattaggaacatggaggtgaggatacagtgctggaggc

SEQ ID NO: 16004 - DNA, 364 bp, Homo sapiens
  MAP TO L78810.1; EXPRESSED IN HBL100, SIGNAL =   1; EXPRESSED IN BT474, SIGNAL = 0.9; EXPRESSED IN BONE MARROW, SIGNAL = 0.96
ttgacaaatgacacaacccctaccaaaatatagcacattatcgcactcaagaaagttccctcatgctccttgggttggagggattttagcaaccccagagcccctcctgttttctttccccggaatccccccaggaatttatgttctcaagccagtgttttcccaagacagcagcagcttctccctggccttgttttgcaggtgctctcccgttctctgctggctcccttcttgtttacatgaacctggagaaaatctggaacggaccccgagatcagttctctctcccacagaactttgctaatgtctgtctggctgctgcagtgacccagaccctctcctttccctttgagaccgtgaagag

SEQ ID NO: 16005 - DNA, 455 bp, Homo sapiens
  MAP TO AC007564.9; EXPRESSED IN BONE MARROW, SIGNAL = 0.99
aaaagtaatattgcaaagtcacaaagcattatttcttaggattcacagctatagctgaacgatttatctggattcgtttgtgttcattcaccatcaaattcttgtaattcgtatgcttagaagaccttcagaccttcagaagacacactacatatgtgtcaaaaagttgagtcatgtctcgtactctgaataaactagaggcagaagaattacagagtttaagtccagttacatagttctgctttgaggatataaaagataatctatagcaatgtcattttccattatttaacaacttacttccatttcattatcaactgattcctcttccacttctacttcatatatgttttcatttgaggtaatttcaggagctgctggcaatgatagttcagctatttgagcaagattagataatttctcatgaattgcaataaccctgaaaataacaaata

SEQ ID NO: 16006 - DNA, 444 bp, Homo sapiens
  MAP TO AC007158.5; EXPRESSED IN BONE MARROW, SIGNAL = 0.92; EXPRESSED IN HELA, SIGNAL = 1.2
aataatgcctggaggtgatgtgtcctcaagggaaggctttaatcaatttttccattggtactagagagctgaatctataaactgctgagtaaaaaggagtgatgagctgtcttaacacagtctccacctgtttaaaggtgcacttactcttgctgaggaaaaccagaagaagcttcagctcctgaacaatagctacagccaaggatactatcatcatttcttccttttcttggcctttattcttccttgtcagatctcatacaactcaaccaaaaggaagaagaataagaagaaggaagaggaagaggaggaggaggagaaggagaccatttttctattaacttaatcagatcagaaaatggacttacctacttgggtgaaggaagccaaagggaagcagtgtgttgacgatgctgggaaaagcactaagcacaccatagttgc

SEQ ID NO: 16007 - DNA, 477 bp, Homo sapiens
  MAP TO AC006474.3; EXPRESSED IN HELA, SIGNAL = 0.62; EXPRESSED IN BT474, SIGNAL = 0.84; EXPRESSED IN BONE MARROW, SIGNAL = 0.72; EXPRESSED IN PLACENTA, SIGNAL = 0.91
atgtcagcgctaccagattgctcccatattagattatgaattcctgaagaagagaaattactcatcatggtatgttccatttgtgcctagggcagtatattgtttataatatttcaataaatttctcaaatcaatttaaatatattttactgaaaagagaaacaagtctatcctaaatcaaattttcatggtctaagaactatattctaaaataataatgcaaagacctcccttctcaaaacaaaaatgcaacttcaaaaagtagattatccaaaaattccatacctgtctaaatttccattcctgttcatgttctgattctctttgctttaaaggatctttaaaaagctccgaatcaatacgagagctgggatcaatgctatcttgctgttgctgccttttcatggaatcatttgacatctgtactttattaatgcgtaaagcagctctgttatctctggctttttgctttgacaa

SEQ ID NO: 16008 - DNA, 465 bp, Homo sapiens
  MAP TO L78810.1; EXPRESSED IN BT474, SIGNAL = 0.91; EXPRESSED IN BONE MARROW, SIGNAL =   1; EXPRESSED IN HBL100, SIGNAL = 0.94; EXPRESSED IN HELA, SIGNAL =   1
tgaccacaagaaagttggggtagttatatttctatcagataaagcaggtttcataacaaggaatgtcatcaagaataaaatggggatcattctgcgaccggcactccacaggtcagatggctgcaaagcagtggcggaggtgaccatagccacataatgtccatagttcgtttatccgtccatgccaaatggattatggggaaggtgactgggacaaaaatgcaaaagactgctaaagtgagagtgatcaggcttgttctggatccccatttattaaagtattataataagcaaaaaacgtactttgctcacaatgcccttcagcagtgcacaattggggatatcgtgcttctcaaagctttacctgttccacgaacaaagcatgtgaaacatgaactggctgagattgttttcaaagttggaaaactcgtagatcctgtgacaggaaaacctcgtgcaggaact

SEQ ID NO: 16009 - DNA, 428 bp, Homo sapiens
  MAP TO AL031297.4; EXPRESSED IN PLACENTA, SIGNAL = 0.61; EXPRESSED IN BT474, SIGNAL = 1.6; EXPRESSED IN BONE MARROW, SIGNAL = 0.72; EXPRESSED IN HELA, SIGNAL =   1; EXPRESSED IN HBL100, SIGNAL = 0.74
accaacatgttttgaagggctataactttttagctaggtgtcccaaaggttatatctgtgtaatgctttgatccatcaccacatggagtggacacagcctgttcttaaacacctctagggacaggcagtccattccataatgggtgtatgtcttcaaatgtttgaagatgttctctcctccattttatcctttatatgtataaaaatatacccatttcacttaactatgcccaccaaccatgtgatagatcaagaagcaatttactgtccctttcatgttttggagtttttatttaccttcagattctcctatgtgtgtcgtctgcagccatcacagtcagatctcgccaatcttggagaaccccttctctagcatattccctaaatgtttcttttctggcagcacgcccatcaacagcaagaagcac

SEQ ID NO: 16010 - DNA, 489 bp, Homo sapiens
  MAP TO AC010888.2; EXPRESSED IN BONE MARROW, SIGNAL = 0.99
tgtgaaataacattatgcctaaaaaacaacatagataccttaatttaaaaattctttattgctaaaacatactaacgattatctgagtcttcagaatcatactctttttcctggtagagaatctttcttcagtgtgatggttgctgagtgatcaggacggtggttgctgaaagttggggtggttgtggcaatttcataaaataagacaagaatgaagtttgctgcatcaatggactcctcttttcacaaaaggtatctccgtagcatgtgatgctgtttgatagcatttgactgacagtagaacttcttttgaaattgaagtcaatcctctcaaactctgccattgctttcttaactaagtttatgtacaagtttatatctgttattgtcatttcaacaatgttcatagcatcttcaccagaagtagattccatctcaataaaccatttcctttgctcatccataaaaagcaactccacatccattgaa

SEQ ID NO: 16011 - DNA, 468 bp, Homo sapiens
  MAP TO AC007773.1; EXPRESSED IN HELA, SIGNAL = 0.61; EXPRESSED IN PLACENTA, SIGNAL =   1; EXPRESSED IN BT474, SIGNAL = 0.73; EXPRESSED IN HBL100, SIGNAL = 0.68; EXPRESSED IN BONE MARROW, SIGNAL =  25
caatttaaatctatactggggatcgccgggtgtgtggacatggagcttccagcttagaaaatacttagatgagattacagacactaacattctcttatattttccaaattacatgcctgtaattatcctgtaacctggtatttttctgttttacattatcctttttagatatggaagaaagtagcagtgttgccatgttggtgccagatattggggaacaggaagctatactgactgctgaaagtatcatcagtccttcattggaaattgatgaacaaagaaaaactaaaccagatccattaatccatgttatccagaagttaagcaagatagtggaaaatgaaaagtcacaaaaatgtcttttaattgggaagaaacgcccacgttcaagtgctgcaacacactctcttgaaacccaagaactttgtgagattccggctaaagtaatccagtcacctgctgctgata

SEQ ID NO: 16012 - DNA, 490 bp, Homo sapiens; identical to SEQ ID NO: 2664
  MAP TO AL121759.5; EXPRESSED IN BONE MARROW, SIGNAL = 3.7

SEQ ID NO: 16013 - DNA, 406 bp, Homo sapiens
  MAP TO AP000083.1; EXPRESSED IN BONE MARROW, SIGNAL = 1.1
tctccccactttgtgactccatacagggacttaggcaatactacaaagtttgggatccacaaagtgcagaaccctacagctcctaagaattctctcacctaccctctggtcttaggctctggcaggtcgcagatgacttgctttctttctgatcccaggctgcgctctatctgatcagatagcaaatcccaggtaacatacctgctatctgcagatctgagctttcttcttggacaccttatacccacagtcctccaggtgctggagcagggtatccattcccttggcactcccgactgctgtgggttgtcccagcaggaggtcatcaatgtactggagcagcacacagcctaggtatctggcaggaaacttctggaggtctcgagccattgcctctccaaagatg

SEQ ID NO: 16014 - DNA, 424 bp, Homo sapiens
  MAP TO AL132708.1; EXPRESSED IN BONE MARROW, SIGNAL = 1.1
gtccaaggatggaagcaaaggatggcagccaaggagcttgcaaggcagaacatggacttaggctttaagctgctcaagaagctggccttttacaaccctggcaggaacatcttcctatcccccttgagcatctctacagctttctccatgctgtgcctgggtgcccaggacagcaccctggacgagatcaagcaggggttcaacttcagaaagatgccagaaaaagatcttcatgagggcttccattacatcatccacgagctgacccagaagacccaggacctcaaactgagcattgggaacacgctgttcattgaccagaggctgcagccacagcgtaagtttttggaagatgccaagaacttttacagtgccgaaaccatccttaccaactttcagaatttggaaatggctcagaagcaga

SEQ ID NO: 16015 - DNA, 452 bp, Homo sapiens
  MAP TO AC011561.2; EXPRESSED IN BONE MARROW, SIGNAL = 0.99
ctttgccaagaccaatctcctgtgggctgtgggacatggcctaggtggactgaggacgccactgtcccaaggtgaatctggagatactgagttgaaccagggcacacctgaacaagacatggtagagtattttcaacactattttctcttacttgacaggtcaggaattcatctaaagccttttcagagtgccaggtccttgttcgtgtaatgaatctattgattcactttttctccccaggagactccgaagatcagagagtgtcaagagagaagacaaagaattctcgttgcttgtcatagggcttctgggtgaagagacaggtctcagcatattcccagaagatgtccatggcccagttactattctttgggggttaaatggttatttattccagaacttacttacttcagtactctcaggtaacattgccttggatgcccataaactg

SEQ ID NO: 16016 - DNA, 444 bp, Homo sapiens
  MAP TO AC012545.1; EXPRESSED IN BONE MARROW, SIGNAL = 0.98
cacatttcctataacattactgctaggtaatttcacatgattaccagatttaacaacaataaacaaaaaggattgagtatgacctgccaaactgaaaaagtcatataaaaagagaaatttacattccttataaatattagaattaaattatccaatgaagcttctcattaaaacttgaaagatatttaacaatatttacctttaggctctgctactctaatgaagacagacgcagcacgccagcccaccaagccaaaaggtgagtcattgggcaaagttgttataacagacttgcttctgtcctgatcaatagtagcacctttgtatgagtcctcaaccccttctgtggtgatacgggtgagggttacaatcacaacctctgataactctggtatattatcagcaagaatagttagagtgattgttgacagtacctggccttca

SEQ ID NO: 16017 - DNA, 496 bp, Homo sapiens
  MAP TO AC007786.1; EXPRESSED IN HELA, SIGNAL = 0.65; EXPRESSED IN BT474, SIGNAL = 0.63; EXPRESSED IN BONE MARROW, SIGNAL = 0.66
cagccctgaatataaaccatccatatgtcctgtagatttaacctccaaaatacatcaaaggaggtctggaatcaacaaacctcaggctgtctccactgccactcgctcagtgccaatcttgtcctgggcggcactcggggttcccccactcgctccttgtcaagtcattctcccagcagcaccagatttgtctataaaatgcaaaccaaatcatggtacttcctgcttcagtccctgagctggcttctcactcctcgggaatcaagttcaagttcccctccatggcccacatgaccatgcaacccaggccctcctcggcctcatacatgctaccctcccctccacagtgtgttccagccacacagagctccttgtcctgctctgcaccacttgccccctttccacaccgaggccttgtcacactcagtgctgtatcgttcactaaaacgtcaccgccttgatgagctggatgcacagaggcattgaggagaagtgc

SEQ ID NO: 16018 - DNA, 1957 bp, Homo sapiens
  MAP TO AC003029.1; EXPRESSED IN BONE MARROW, SIGNAL = 1.3; EXPRESSED IN BT474, SIGNAL = 0.9
agatgtggggcagtaacgtcaatgagacggtccagacagtagtggatgtcattgctctggccaacagcttcactaggggaataaacacagaggtggtgctggctggaatggagatttggaccgagggggacctaatagatgtcacagtggacttgcaaatcacactcaggaatttcaatcactggagacaagagatgctcttccatcgtgcaaaacacgatgttgcccacatgatcgttgggcatcaccctggacagaatatgggccaggcctttctcagtggtgcctgctcaagcggttttgcggcagctgttgaatccttccatcatgaagatgtgctgttgtttgcagccctgatggcccatgagctcgggcacaacctgggtattcagcacgaccactcggcctgcttttgtaaagataagcacttttgcctcatgcatgaaaatatcacaaaagaaagtggcttcagcagctgcagctctgactacttctaccagttccttcgagaacacaaaggggcctgcctatttaacaagccacggcccaggggccgcaagcgtagggattctgcctgtggaaatggtgtggtggaggacacggagcagtgtgactgtggttctctatgtcagcatcatgcatgctgtgatgaaaactgtatactgaaggcgaaagcagagtgcagtgatggtccatgttgtcataagtgtaaatttcaccgtaagggatatccttgctgtccttctagtcgttcctgtgatctcccagaattttgcaatggtacatctgcattatgccccaacaacaggcataagcaagatggctcaaaatgtcatacaatttacgagtgccttaaagttcattgtatggaccctaataatcagtgcttacaattatatggatatggtgcaaaatcagcctcacaagagtgttacaattcaatgaacagcaaaggggaccaatttggaaactgtggcatttctaccagtcctgggtcacaatatgttcggtgttcagatggtaatatattttgtgggaaacttatatgttcaggtattacaggcttaccaaaaatcaatctccaacatacaatgattcaggtccctcagggagatggctcatgttggagcatggatgcctatatgagtactgacattcctgatgaaggagatgtgcacaatggcacttactgtgcaccaaacaaagtctgcctgaattccgcctgcacagataaaaccccagtgatttctgcctgcaacccagaaaaaacgtgtaatgggaagggagtttgtaatgatttagggcactgccactgtaatgaagggcatgccccccctgactgtgttactgcaggaagtggaggtagtgtggacagtggccctcctggtaagctaggtgggacaccttcaggagaaggtgaaaatcacaatatgactcattccagacgtgaagaacatgctgtagacatgatgatattatcattcattatactttttataatattattattaagtacaattatttgatctgcttgcttaaaaaatcaccagaggctgccccggcagaagctcctccagcagtggctccaccaccggccccagaaataaagccagaagcagcagaagtggccacagaagaaaaagaagagaaggaggaagaaaaagaagaggaggaggaggaagaagaggaggaagaatcagattcctaaggttagaaatagggagatgaagccaagtatatcaaactcctcaagtactgagtgggaatgagatgtttggtgaagtagaaatagatagctttagtggctctgactcagatatactgatgtagaaggaaggattctttcacttttattatttattttggtaattaaatttacattaatttaatatgttaaatattttagtaccttttgctttttcacatttcatttgaaccattaacatgcatctttgga

SEQ ID NO: 16019 - DNA, 417 bp, Homo sapiens
  MAP TO AC008417.2; EXPRESSED IN BONE MARROW, SIGNAL = 0.92; EXPRESSED IN HBL100, SIGNAL = 1.4; EXPRESSED IN HELA, SIGNAL = 1.5
gtatttcctgacctgctcgccatacagaacttaagagtaaattagtatcaggatatactctaaaatatacagcaatagtcaaatgaaaggcatgaagcttttggctaaaggtgaagccctgttaataattcctcaaagcatagtaaagcatacattatttttttctcctttccttacccccttaaaacaagtacataataaacagtaattttttataagatatattttgagacatacctttgactgtattgttctcaaattaaccagatgaatgtcacaaggcaaagatgactgtaatggagagaattcaccttgcagctcaagggtaggtgaggagaacttatttgccattggaatgactggatgattcatgagagaagaagttatgtggctaaggagagaaggataactgaccga

SEQ ID NO: 16020 - DNA, 442 bp, Homo sapiens
  MAP TO AL021026.1; EXPRESSED IN BONE MARROW, SIGNAL = 0.91
attccgggatttggaaagagctccatggaagagaaggatcacagaaaatagagatggggccagcaaataacaacttctcttacttcccaatgttgcctcccatcaattttgttcttcagccatattggagatactctatgcctcagaaaaaaaaaatcttgggtcattttttccttccttatcaatttatatatggaccaataaaacaagagggaaatattacacttccaataattgtctctgttttccatacagagtcctgaggaaagagcctgtatttaacgatgagctcccagcaagcattctgtgtggcattgtgtccgtaaagcctaacgtgaaggaattcacagagacctcggccatttttgaggatgggaccatatttgagggcattgactgtgtaatctttgcaacagggtatagttttgcctaccccttcctt

SEQ ID NO: 16021 - DNA, 472 bp, Homo sapiens
  MAP TO AL117353.2; EXPRESSED IN HELA, SIGNAL = 0.91; EXPRESSED IN BONE MARROW, SIGNAL =   1
attacaccattgcctttgccatattttattgtccagaagaaagtgataagtccagcttatatccaaggagaggggattatacagggttcaagcattaaggagtatgttgatgatcatggggccatcttagaagtcaacctatcatttgctaatccatcaagcattgttttcaatgctcatcttacttgattttttagcaggaatcaatactgttgaccatgttgtccttttgaaaactgcaatgctgttaatattactatccctccaaactgtatatgttaaaacccaattgatgttatatcatgagacaggcattttggaggtaatctatgacaaggaaccatctatgaaccagaaagcgggacttaccatctaccaaatctgccaacatcttgatcttggatttcccagcttccagaactgtgagaaataaatttttgttgtttataagctacctagttcatggataggc

SEQ ID NO: 16022 - DNA, 404 bp, Homo sapiens
  MAP TO AL034347.15; EXPRESSED IN BONE MARROW, SIGNAL = 0.94
agaacttagcggctgactggactgggaaagagaaagtgggaagaatcaaggccgactcgagtttccagattggatcaaggatgaacagtgatgctgcaaataataaaaataaggaatatggagcatggccacgctgtgtaggacaaggagaagataactttggttgtagacatgttgagttaaagatatctgatagactcctacatggagataactagaggacaatgtgatccaatctagagcacaaatgaggtttaaaaaatgtaaaaatactaaccaatctgaagacgatcaagctctggtgtgaagagtccagtgggatagatttttatcaaaaagtagatgtatttattgttgggaagaactggttccttgaactctgagagtaaggaaccagatacagg

SEQ ID NO: 16023 - DNA, 420 bp, Homo sapiens
  MAP TO AC012460.2; EXPRESSED IN BONE MARROW, SIGNAL = 0.98
ttttattgccagttcctgggatcttgcttgatatagtaacaggcactcaatgagttcctgttgaatgaatgaatataaactttctcagtaataacagctgttttaatttttaccttcaatatttacatattgcatgcttttcagttgggtgtttcctttcttgttatagttttacgtgtatgcttattctctttaaaatgcatgttttctaactttgaaaactaactttgactaatgctggtatctctcttatgagaggactttcaggtgatttctgttctacatccttgactgcttctcctcagatatgactttgacactcagtatgctttcgttggtgattattctgggcagatcaccctgctgaagcttgaacagaacacgtgttcagtcatcacaaccctcaaaggacatgaaggt

SEQ ID NO: 16024 - DNA, 421 bp, Homo sapiens
  MAP TO AC006459.2; EXPRESSED IN BT474, SIGNAL = 0.7; EXPRESSED IN BONE MARROW, SIGNAL = 0.94; EXPRESSED IN PLACENTA, SIGNAL = 0.64
ttccttcgtgtagcctagctgtgagttcttttgtcaggtattcattatgcatatcttctttcagtctatggcttatagattttctttcgttctttcttatttcctgaacaaaagactgatttttaattctgtgcaatttatagcttttgcaattgttttatattctgttaaaaatcatagcctctctgatttcttgggagcattttccaatttgtttttcaagcttgattgtttcaggtatgtgatttatctcaaattaattatttgcatgcttaaaattaaggtaattgttttcctttcatataggtattcaattgacccagcaccatttattgaaaaggctatcctcttactgaaatgcagcaaagttgttgtcttaaatcaggtcatcaaacatttgtgagtttatttctgaattctt

SEQ ID NO: 16025 - DNA, 391 bp, Homo sapiens
  MAP TO AL031585.1; EXPRESSED IN BONE MARROW, SIGNAL = 1.2
ataccatgatcaagtggggcttatttcaggtgtgcaagcctggttcagttctcaaatatgaaggtaatgaatgtaatccaccatattaacagctaaagaataaagatcataggatcaaatcaattgatgcagataaagtatttgaaaaaattcaccatacattcatgataaaaactctcagaaaaatgggaatacagaggaacttcctcaacttggtaaaagacatctacagaaaaccatagctagcattatactcaagggtgaaaacttgaatgcactacccgctaagatcaagaacaaggtgagaatgtccactcacatcactcttattcatgtagtgctggtagttctagctagttcaataaaacaagaaaaggaaataacagttgca

SEQ ID NO: 16026 - DNA, 385 bp, Homo sapiens
  MAP TO AF130358.1; EXPRESSED IN BONE MARROW, SIGNAL = 1.7
caaatgagagcgttctgctgtagcagcatggcaaaacatcagaaatgtgtatttatttcacatacatcatatattatgtttatatttattttagtctacaattacacattttaggtataatgtttgagttttcagttaaaataatataaatagcttttataattaatctttttacagcaatcttttgaaagctaaaacacaaatttccttatattattaatgtaactgtgataactatgtgagtttaggtctttttgtctgctctggagcctacgtcatcactagaggatccctggctgcctctcgaaccatgtatgttcaactgttaaataatgtactgcacctccccatccagttttttgaaacaaattccacaggccagatc

SEQ ID NO: 16027 - DNA, 476 bp, Homo sapiens
  MAP TO AC004859.2; EXPRESSED IN BONE MARROW, SIGNAL = 0.77
tttgctcatatcattacgtacccttttaaaataattttaatagaaatatcttataacttgtttcataaaatggactcttaggattctcattttttattttcagtaaggctgtgatgaacattctcatgaatatttctgcacaggcctgatacatatcacctgttagattcttccaccagccgtagctaagggttcccctcatcgatgcgtgtgaagtttccataacagatattctagtgccttttaactctaggcactctcctaggtaccaggcagagcaccggtgtgctccctatcatcacagaccttatagtttagtgcagggtcagggggctcatagacagtgccatgaagtgggtgtgggaggtgttctgcaagatactgggttagtcagcagacaagtcactgaggatttgacatttaaatggaaacttcaaggtcaggtaggcaaatattggggagcatcagatcaagtc

SEQ ID NO: 16028 - DNA, 465 bp, Homo sapiens; identical to SEQ ID NO: 4315
  MAP TO AC007722.1; EXPRESSED IN BONE MARROW, SIGNAL = 0.65
  unsure 43
  unsure 155

SEQ ID NO: 16029 - DNA, 477 bp, Homo sapiens
  MAP TO AC007021.2; EXPRESSED IN PLACENTA, SIGNAL =   3; EXPRESSED IN BONE MARROW, SIGNAL = 1.6
ttgcaaagaatttctattatgaaagcatagggaaaactttaatggacttttgaaaacctgccatgaattttctatctgttttagtctggttatatttcatatgtcagagcccatgcagcatcaactgtttaaaaaaagtctatcaacctccacagtcacttattaatgaagaagcaggtcaacttttaagattaagagttctctactcaccctgcacagaggacatttccacggattaaagacaagggctttacttcaataataaatcactttaaaattctgaccttgtgctgtttctaccgtctcctttttttcttgaactaaactgtcggtgttgatctgaataatctttttcaaagttatcaaccattcctccatttcctgctcagtttcagcagccagataatggctatatttatctaacatcttgagttcaaaagcatgacggcgcattttggggcactagaggggagaaaa

SEQ ID NO: 16030 - DNA, 474 bp, Homo sapiens
  MAP TO AC007043.3; EXPRESSED IN BONE MARROW, SIGNAL = 0.84
tgacgattgaacttgctactctgactttcagatatgaatgagcctgttcactatgatcatggtgaagatatatatggtaaagataattagagggtaaagatatacacatatacatatatgcatataaatgtgcatatataacatactatattacaagaattatatgtattacagtcaatccttgaacacaacatgggttagaactgtgtggatcaacttacactgattgattgtcttcagattctgcatagacattgttcttatgaagctgggaatctctgcttaattttacagcatttacagatgagacagcaaaacaaatccctcctcttcttccttctcaatttggagatgatgaagatgaagacctttatgataatccagttcctcttaatgaacagtaaagatattttctcttcctcgtgattttcttaatgacattttttttctcaagcttactttggtgtaagaaca

SEQ ID NO: 16031 - DNA, 484 bp, Homo sapiens
  MAP TO AL031430.1; EXPRESSED IN BONE MARROW, SIGNAL = 0.97
aaagatcgggttgaccacagttgcagggaaattaaatgaacattctcttaagcaaaatcatagaatttaatgtagcaattaatatctattgcaatgtgctgccatcacaagctgcttgaaatgtaatgtaaggctcatgggggatgaggccagcagtgccccagagtcttgagtcttcagaaatgggtccctaaacgggcctggtatttaactgacttctttctccgacaggagcagaaaacacagataacagctattgttccttaaggcttggggtagatcatgtagcctttcatccagttcacatttgggaaaactgaggcatggggcatcagagacttgttcaaggccagttttggtttattgtagaagtggagcatgaaacagtgggagggccagcccctcagggtcaggaacacccaggtgacggtgcagacactgcagtggaggaagacacggggagaccgtctgagctcttttcagg

SEQ ID NO: 16032 - DNA, 397 bp, Homo sapiens
  MAP TO AL031599.1; EXPRESSED IN BONE MARROW, SIGNAL = 1.2
gtgcactgtactgccgtttgatttaggaaagaaatttttttcccctctgaacttcccttgtgcttttttttttatgttctgagtttgtgttggctttcagccttccgttccttttgttgtatttgatctggtgccaaatgagagtcagcacttaagttataagtatcattttctaacacagtgacagaaggaaaactccgccttccacacccactactaattaccatattgctacaaaacatgacattgcatccttcacccatcacttgtgaatttttgttttccacagctctcatttctccaaaaatgtgtttgagccacttggaaaatatgcctttaagccattcaagaactcaaggagctcagagatcatcctggaagctgtggctcttttgct

SEQ ID NO: 16033 - DNA, 449 bp, Homo sapiens
  MAP TO AF111168.2; EXPRESSED IN BT474, SIGNAL = 0.81; EXPRESSED IN BONE MARROW, SIGNAL =   1
cagaacaacatatgagaaagcttaatgtagaaatagctagagtggaaagagaattgtagagtccatagtgagggagacagtagagcaagacaaagccggaaaattctccagagctctcatgatgcaggtgtggtgggtgacagtttttttgtaaatgccaatgtttttggtagcactgtcaccccctctgtcttaggtgctcacaagaacatcaagatcaatatattatgaatttcatctaatatacaggcccttttaataaaaggcatatttatatcaaggtgaaagtgcctacttacagtatcaagtatttctttggtatgagctgctgacaggcaaaacctggctctggactcaataattggggtggcaggaaatccaaccacaacgacaccgatgttccgcttcagcatctcccgtccaaaggcgctgcaaaggggaaaacaaga

SEQ ID NO: 16034 - DNA, 466 bp, Homo sapiens
  MAP TO AP000106.1; EXPRESSED IN BONE MARROW, SIGNAL = 0.93
actcttacattgctccctcaaggcgttgggacccagaaatcttttgggagatgaggtagaggtcattctctgtagctacttgctgctgaaaaggggcatcgagggtcttcagggttcttcctcctttcttgctgtcacggtgaggaggtttttgatgactgaacaactgctgaacatattatgtcccaaatcaccaaaagggaaaaaatgaactcaccagaaaaatctattatcagttgtctgttcttgcatgctacgatgcgcattaagactcaaatctaaactgatgccagatgcagaccatgcaaaataaaagtttcctgaattcaaaactttccgcacttctgaaatgcgatcctcatctgaagaatcgattcgcagtgatataaactcagtggaagtaactcggaaaacttcagattcttgaatttttccaacagacatacatccagtgactaggaccaga

SEQ ID NO: 16035 - DNA, 479 bp, Homo sapiens
  MAP TO AP000216.1; EXPRESSED IN BONE MARROW, SIGNAL = 0.92
tcctttccccaaagtactgcagtgttactttgttatatagtgggtgaaaaatgtacttgcgggtctgtttctgggctcctgttggcggggggtgttgtcagtctgttgtctctccatgctctgaatcactgtagcattaggagtcctcttgctctgtgatggttcctcaagattgccttgactcttcttggctctttgtatttccaagtaaactttagaattaacttgtcaatttccataaaaattactactgggatattgattggcattgcattgaatctctagttcaatttgagtagaattaatgttttataggttgagagcatcccaaatatgaaaatccaaaatccaaaatgctctaaaatctgaaactgcttgaagctgacatgatgctcaaagaaaatgctcattggagcattttggatttctgatttttggacttgtgatgcgatgctcaactgggaaataaatataatgca

SEQ ID NO: 16036 - DNA, 365 bp, Homo sapiens
  MAP TO AC008277.1; EXPRESSED IN PLACENTA, SIGNAL = 0.65; EXPRESSED IN BONE MARROW, SIGNAL = 0.81
aagctgccaagtgaagatccttagatactgacctaatgagaagagtgataagtgtacaagttctactgtttagaattaggaaaatgatcagaagtatgagtaattcagttttgttccaagatgaaacttgaaatttttttaaataaaacatagaaagccattgtgacgttaactggaaagttaatttatatatttttgtttggttggtttgtttggttttgaggtgcagaatggtggcgaacaactgatgctcatactcgtacaggagcaaccttctttccaccattactgggaattccaccactatttgctcccccagcccagaatcatgattcttcttcattccattcaaggacttcgggaaa

SEQ ID NO: 16037 - DNA, 373 bp, Homo sapiens
  MAP TO AC008177.1; EXPRESSED IN PLACENTA, SIGNAL = 0.71; EXPRESSED IN HELA, SIGNAL = 0.76; EXPRESSED IN BONE MARROW, SIGNAL = 0.7
tgctgctgaatttggtcaagagattgtactaatcataaaatgaatgttattgatcattttaaagtctcttctaaaagtagctaaatttatactgctgattccttttgaaacatgcgacctacagcttcttggcttttatgagctattcaagagatatttagtcatcacgttgtgtcacaatgggagtgactcacagagcaaggagagaacctgaggattcctcacacatgtagtactcagagctctacggaaacccaggcacctcgacctcaagaggatcagcctggccagggtggcacaactcttccttccccgtgcacagcaggaaagctgccatcagctgagcaagtccaccaacagtttctgtgtccca

SEQ ID NO: 16038 - DNA, 456 bp, Homo sapiens
  MAP TO AC007910.1; EXPRESSED IN BONE MARROW, SIGNAL = 1.2
  unsure 21
  unsure 355
gctgctactgtttgctcacgntcgtcgcaaggtaaacattgggcaagtacttgccactctaagtatgatacagatggaaaccccctaccacagaaccagggaaatgggaagtgggaccagtcccaggccccaatatcaaatgggatgcttcagactcagaccaacattgcatttccacttcaggcagtcccaacgcagcccccaccacaaacaaatttacctacagtcaacccagatgggtcccagcctcttcttctcagtacaatgcttgtccacctccacgttaggggttggggcggtcgatctctgtagcactattcctctaaatttactacctaactctttgcctttaatntgtccccacaggggtcactggccctttacctcaaggtttggtgagcctggtgttaggtagggcatccacctctgctaaaggaatcaccattcatactggtc

SEQ ID NO: 16039 - DNA, 463 bp, Homo sapiens
  MAP TO Z98884.11; EXPRESSED IN BT474, SIGNAL = 0.67; EXPRESSED IN BONE MARROW, SIGNAL = 0.66
cttgtccctcttcacagcagaaggggaaaagtcaaactgggaatgcatcacatggaggccaggagaaaagtcatggaaccactaattctgtttttacactcacagtaatctaagccagttctttacacaacctcttactcgttgaataatagcgaaaatttaagctaacatattctttcttttgaaaacaaacatgtttaaacattttagatgtgggtatgtctgtcttggaaattaccaataaaatatttctcccagccttgtttcgccatgggccagtagggtgcgtcaggaccagcactaatatctttaatctcctcagtggaggtgaagacagaaagcaagagaagtgtcactccccattccggatcatcccctatctgattcatgtacatcaccctgcccagccagaattggaatcggaaccttgctgtctcactgtggttgaaaagattcactctgg

SEQ ID NO: 16040 - DNA, 491 bp, Homo sapiens
  MAP TO AC007564.9; EXPRESSED IN BT474, SIGNAL = 0.67; EXPRESSED IN BONE MARROW, SIGNAL = 1.1; EXPRESSED IN HBL100, SIGNAL = 0.94
cttaagcttgctggcagacctgagtttccctctaaattaaaatgtcttttaaaatacttttaaaaagagagatatataaggagaaaaaaaaaagaaaaaaagttttaaaactaaatatcaaatggctttgtactaaaattattatacattacatgtaaaatcattatgtaattatgaaacaaaactatactgtttaattgaccacatataatttccatattctgagttagatttatttaataaaataaaaaatgctgaaaagaaaatgtctcaccttagtaagaacagtggagtactgaaatgctatacactgcacagatgtcttgtgagcactgatggtcttaactggtgatttcaacattcttaaatcatattgatatattttcccccgggaagatccaatagccaaagtggctccatcaggcatgaaatctaccgcagttagaggagtgtcagccactaaagttttcactagcctttggaaaggagaa

SEQ ID NO: 16041 - DNA, 473 bp, Homo sapiens
  MAP TO Z83851.17; EXPRESSED IN BT474, SIGNAL = 0.78; EXPRESSED IN HBL100, SIGNAL = 0.77; EXPRESSED IN HELA, SIGNAL = 0.65; EXPRESSED IN PLACENTA, SIGNAL = 0.62; EXPRESSED IN BONE MARROW, SIGNAL = 1.2
ttttaaataaaatgtgagggctctgaaataatttacaagtcactggtctaataaatgggattgctctaatatatggggaacagtggaattgccagacacaaggcacaaaaagttgtgtccaaatcactggaatccaaaactagacaaaggattataaaggtctgaccagtttctctaaaatcccaggaagtagaaagctcatcttaactactttcttactttatccctacaattactgtttccttagtcagctctatccgcttggcaggaagtttcttaaaatctttcatgctttcttgaaacctccaactctccatacctccccccccttccctaggcagaggatcttcagtgcgcaaagagtactccttacattcctgccccatgcgcagcctgcttctcacccacacacctctgctcgcacctctgctctcctgtgggagaaggatattcttactacccaacgccaatca

SEQ ID NO: 16042 - DNA, 459 bp, Homo sapiens
  MAP TO AL096819.2; EXPRESSED IN BONE MARROW, SIGNAL = 0.93
gcaaacctaattaaacctgccatgagcatatcattttattgatttcaccttttaacttcactcttctcaaatgatataaaggacatacttttttagtccattaaacatgaactgagtgcctgttgcatacagaacctaccctgaggaatgtgcaagtaagatagagaactctgtccttatcttgtttgacctcactgtagcataggacactattggctactttctccttgaaaatatctctcctttgacttctgcgactcttttccctgttttgcttccaaactttgtggtcttgtttatcactcttcttccacttcttaaatgttagagatccccagtgtttctccctgaaacgtgtcttttcacacttattctgagccttttttctggagacatgaacctcctggagaatgtgataaaattcaggaatcttctggagggagggcatgttccatctaa

SEQ ID NO: 16043 - DNA, 472 bp, Homo sapiens
  MAP TO AC005487.2; EXPRESSED IN BONE MARROW, SIGNAL = 2.6
tgagtctcagtttccttctccctaaaggagggatagaacccatctcagaaggttcttgtcaatattcactgagataagcacaatttctgataaatgttcatgcttattacatgccagttgttattattattattattattttttagggtgtttttgcttttagctcaaccttacgttactgtggctgtgtgagctggtgttgctgtcttctgcttaattctgtggcacaatgtcctgtcctagctttcttcaatctgagtgtaccctctgcttctctccctcagttccacccctggaagcagaaggttcccgggggttaggagagctgcttcagtatcattgctcttcaatctcagacaatagcaaacacccttcagatcttaccaggtaagagatcaggttaccagtggaactgacctgttggttttgtcatctgaataaacactatagatcacctcctgaatgatttggc

SEQ ID NO: 16044 - DNA, 414 bp, Homo sapiens
  MAP TO AC011192.1; EXPRESSED IN BONE MARROW, SIGNAL =  11
tctgttcacagcaacaagccgtctacgaaagttaacattaagatatcactgacttgatatgtttctcttaccaatggtacattcataaaaagatatgcagtgtacaagaatacatttttactgcttctgtattaggtctgatgtcacctgaatgcaagtaattatggactggaggccttccccaccaaacatcaggctaggctttttgaatggtatcactcctggctgcatcttgcaaaaaggctgtatggtctgtcaagccatttctgtctcccaggcctccttcccctccgtccccaggactggcttcctgcccatgatcatagagtccttctacatctccccaaaaatcattcataagaactcacaggaggaggcacacttctccactaaagcctggtttgtttttctggt

SEQ ID NO: 16045 - DNA, 487 bp, Homo sapiens
  MAP TO AC006427.10; EXPRESSED IN BONE MARROW, SIGNAL = 0.73
ttccttcccatcataaccatatcatgctgtatcataattgcacatttcctcatctgtctcttgccattaaattttgagcattataaagacaggtgctgtgtcttatatatcactgagtcactggcacctcacagcatgcctagaacacattcaagattgattgaacaatatggtaaaccaggcctcaaaatcctgggcttttcccattagactcttatttatagcacaagaggttaaaaacatggcatgtatgtgtttgggaaagggatgtagtcatgacaagctaaggagtcaaccactcagtatcattaaacaggcagcacttaccctctatggcttgaaaagaatctattttgatgaaggacatgccaggtttctcaacatcaatgccaggtgatttcttaattaactcacaggtactgtccataggaaagtccagcgttgattataaatgagaattaagataagagcactgcttcctttagaa

SEQ ID NO: 16046 - DNA, 490 bp, Homo sapiens
  MAP TO AC007554.1; EXPRESSED IN BONE MARROW, SIGNAL = 1.1; EXPRESSED IN HELA, SIGNAL =   2
cctggaatccaaaactgaaaagaaaatggtaagcactgtttctgaattggtaaccacaggtcactatggattcaccttgggagaagaggatgatgaagacagaacacttacagttggatctgatgagagcaccttgatctttgaccaaattcctgaagtcattacggtgtcaaagacttcagaagacaccatccacactcatttagaagacttggagtcagtctcagcatccacaactgtttcccctttaattatgcctgataataatggatcatccatggatgactgggaagagagacaaactagtggtaggataacggaagagtttcttggcaaatatctgtctactacaccttttccatcacagcatcgtacagaaatagaattgtttccttattctggtgataaaatattagtagagggaatttccacagttatttatccttctctacaaacagaaatgacacatagaagagaaagaacagaaaca

SEQ ID NO: 16047 - DNA, 364 bp, Homo sapiens; identical to SEQ ID NO: 14041
  MAP TO AC009298.1; EXPRESSED IN HBL100, SIGNAL = 0.68; EXPRESSED IN BONE MARROW, SIGNAL = 0.68

SEQ ID NO: 16048 - DNA, 427 bp, Homo sapiens
  MAP TO AP000012.2; EXPRESSED IN BT474, SIGNAL = 0.95; EXPRESSED IN BONE MARROW, SIGNAL =   1; EXPRESSED IN HBL100, SIGNAL = 1.1
aatgtgtgaaaaggcagaggatttaactatgaagtgtcctttttaataaaggcctcaacatatatatttaaacatatttgaaattcaattatgtgagtgtttacgtattccaccaaatttagagaaagcctttcatcttctctcttacaggagtacaaaccaccaggaacccgtaaacttcataacattcttggagtggaaacaggaggacctggtgggcgacgtgctggggagtcaggtcatacggtcgctgactacttgaagttcaaagacctcattttaaggatgcttgattatgaccccaaaactcgaattcaaccttattatgctctgcagcacagtttcttcaagaaaacagctgatgaaggtacaaatacaagtaatagtgtatctacaagccccgccatggagcagtctcagtcttcgg

SEQ ID NO: 16049 - DNA, 474 bp, Homo sapiens
  MAP TO AC008168.2; EXPRESSED IN BONE MARROW, SIGNAL = 1.7
gctcagctactctctatgtgatttatgcaactcactgttttaaaatgattttcccatttgaaaaatagggaagacagtaacaattttactgtcccacctaactagaatcttcaggaggttaaaaggaaaaaaatcaagtgagcatgctttgcaactgctagagtattacacaaataggtatcatgtaatgaatccattataggatcaatctcattccaacaaatctccaccttctcctttacatttcatactgtctacacttactgcctcagcctcaacaccttttactctcttaagctccacacagcccagctggcccattacacatgaacttgtgtaggatttcttcttcctgcatctcatgtcattgagcatgatccacaccatcctgaagcccttgtcttccttaagatcttctgaatttccttctccttgaccattgttcactatggtagtaaagttgtggggcagtca

SEQ ID NO: 16050 - DNA, 470 bp, Homo sapiens
  MAP TO AC008069.2; EXPRESSED IN BONE MARROW, SIGNAL = 0.64
tccattccttcccaattcaggaatcttttgtgattgggaagtaatgctcaaactctgttgaaagctgagataggtgatcacgcaccagttgggagaaagaaggccctggctcagtctctttcaaaatctcttctaatgtttgaaacatgtcaaagatcccaatgttctctcgtcgccctcatacttccagtttggtttttaatgcagcctctgtatctgccgatttgaacacagttgtcatttttccttgcagggacagattgagtttattgagcaagttgaatatgtcacacaagtcaggaagttttgtgacccattctgtgtcactgaaatgtgctgccagtgatgacaggttttctaagagaaatctctggagttcttgtgactcaaaatccctggccagtgatatacctttagaaagccatttcacttctgtatataagagaagatgtatgtgctctgcgaccatc

SEQ ID NO: 16051 - DNA, 496 bp, Homo sapiens
  MAP TO AC007364.2; EXPRESSED IN BONE MARROW, SIGNAL = 1.4
ccagcccttctattaaggttttgttttgttttgtttaggtatgaaacgaatatctatttaggctaagaaattcccacaaattacaaattttaaaaaggtgacaaatattataaacattattttttgctatgctttttgataattgttggtaatttgaaataacaaagtagatttataatgatcataaaggcaagttaagtatattattctgctattggcattacttgtcaaatccagcagtcaatttattatctcctcttactcggttgttctgcagcatttgacagcggtgaccactgcatacctcttttgacacactttcttcttcagcctcaatgacaccacagtcttctggttgtttcttctgctttactggttggtcatgctcagtgtcttttgctggcttctcttcctctgctgaacttctggataacggggaatttaataatgtgccaagaatttaatcctagacctccttctcttttcttattaaccc

SEQ ID NO: 16052 - DNA, 484 bp, Homo sapiens
  MAP TO AC007381.2; EXPRESSED IN BONE MARROW, SIGNAL = 0.81
tggcccctacaagattacccctacttctgatataaagacatgtcatcgtgtctcaagcggcagctctcccaatcttagcgaggctcaatcttgcaacctttcccttagccagacccagcctcccagagactctgagagaggacccccacttctccctcagcagccactgccatttacccaatacttatttcctacttcttggtagtttattgtatcaggctatcttacttccatctgtctgagtcagtcaagtactattttgaagaaggcaaagtagtaattcatatatcagtaggtaggtaaacatggaaatcacaccaacaacaaagccagaagcaataatgataacagtaaccacaacagtgaccatgtgtggaatgctcctgtatgccctgtgctttacatagctgatttcatgtcactctctcaacacaccttcgaggtaagtatgctttacagatggggaactgaggctcgggaattt

SEQ ID NO: 16053 - DNA, 483 bp, Homo sapiens
  MAP TO AC004480.7; EXPRESSED IN BONE MARROW, SIGNAL = 0.79
gagctctgaacgcctgattgcgccactgcaccccagcccagtgacagggcgagaccctgtctcaaaataaataaataaaaataataaacaaccgaattcagtggtcccgttagaatattccaggctccgagaagccaggtgctcacagcgtcgggatttgcccccagccagggcctccgctccctcttgcctcgggcagatgctcctggaacacagagctgcggcctcggtgctgatgctgagtgctgtgacccagcctccccctacttttttcctaagggtataagcttcactctgcctggggctttggctgtaagttggagtctggctttacccactgtgggcacccaaggccaaggtgggtctgattcaccactgtttcctcagccctgccaggctctgaatatgcctttaggaatcattctggaagatttctttcttcactggactatataagtgcctctgcgagaaaacaggccctag

SEQ ID NO: 16054 - DNA, 480 bp, Homo sapiens
  MAP TO AC009363.3; EXPRESSED IN BT474, SIGNAL = 0.99; EXPRESSED IN HBL100, SIGNAL =   1; EXPRESSED IN BONE MARROW, SIGNAL = 0.99
agcagccctacagaggagaggtgataaaacacacttcatcgccttaaccattttttttttttttggccaaatacagctctattgagtcctcaagttctcttttctttttcctgtagctattggtcaaaaaagtcagagacctgggaatgtgtaagcaggcatggagaagagctctccttcgggtgcaggcttttggtaaatagagggatggagggttcatgcagagacgaaggcatggaaggatggctggacggataccacacaccaccagagcctgctttcactcagaagggagatgcagacccatgtaatcctccccgtctctgcttcccaggactcatctgatgatgtgagaagagttcagaggagggagaaaaatcgtattgccgcccagaagagccgacagaggcagacacagaaggccgacaccctgcacctggtaagtgttcagatcaatcttcatcctcgtgagctttaggc

SEQ ID NO: 16055 - DNA, 472 bp, Homo sapiens
  MAP TO AC005227.2; EXPRESSED IN BONE MARROW, SIGNAL = 0.96
cttcccaaaataaaatgagggttttagattagagaaggagaaggtccattgagaataagattgtgggaccttgatcaagacccttaacctctccatgctttagttcactcctccatgaaaggggcttaacaacagcacctgcccgaagcatggtggagagaactaaatgggacaatgcttgccatgtgcttagcactgggcctgaaacacaggaagctgcaagagaaatttctgctttttaaatttgtactaaggttaaaaaaatttacaagtattacacctgattgttacagagaaggaacttaaatatggcactgagaacaataaatctgcaattcctgtaagtcagaacaatgcaaaagcagttgatgtggcctataacacagagattgctatgaaacatgaaagataatacaagacatcgtgaaaacatttaattctatatgttctgttcatatttctgcaaataatt

SEQ ID NO: 16056 - DNA, 456 bp, Homo sapiens
  MAP TO AC009640.2; EXPRESSED IN BONE MARROW, SIGNAL =   1; EXPRESSED IN BT474, SIGNAL = 1.3
cagcatctaagccccttcactatgcatgagaaacctcatgaggcagagcccacctcccactctagaagctgaacattctaagtactagcttgcctggcctctcttgcagctaggatgatggcatgtggctttgagtcatctgattggatgcattcccctcacattttgaacccagagctcatgaccaaagaaggaggaacctcaaggagtccattctggcaagggtaatagcagggacagaagctatattcattttgcagaagcagcaagcataacaattctagtggccacctccagtgccagcatcaggctggaggtaagacaagctgtggtgtcagtgcctattggcagaggcattgatatcttcctggaatacttctgttgcataatgttggtcatagtgccaggctccacagcctccaagctcagttctccagcacttctagagactgtcag

SEQ ID NO: 16057 - DNA, 473 bp, Homo sapiens
  MAP TO AC005018.2; EXPRESSED IN BONE MARROW, SIGNAL = 0.93
gtaagaaataagctgaaacttgtctgtatcaattagttttccttgagcactccctggatatatgcaactacacggaagtatttaagagattataaaaacagtttctcatcaagtttttcatctgaggcagggaccttgatggtttcttctcatggacaggtaactctatgtacatttcagtacatccctgtaatcttcagcctacttgttagttaccataacaacagtaacagcattttcttcttctttatccaggacatctgtgttaaggcttatctagcccttcgtcatcacacaaacctactgatcatcctgttctccatgatgctgatgacaggaatgccccagttaacaagcaaagaagacattgaatatatccgggatgccctcacagtggggaaaaatgaggaggatgctaaaaagtattttcttgatcagatcgaagtttgcagagacaaaggatggactgtgca

SEQ ID NO: 16058 - DNA, 481 bp, Homo sapiens
  MAP TO AC011236.1; EXPRESSED IN BONE MARROW, SIGNAL =   1
ggggtagtcatatggcaaggttggaggctatgaatggcacaaaagtatgagttcctacttactaaagctggtataattacttttgccatgcagtgcccaacctgccagcagcagaggccaatgctgagtccccagcacggtatcattctttgaggagaccaaccacccactttctgccaagatgattaccaggccctttccactctagaaggagaattgcttcatcttgactggaattaacacatgttctagatatagtcttaccttttctgcctgcagggccttggacaacactctgagaactcacagagtgatctaccggtatggaattctgaatagcattgcctctgaccaagaaacccaacttacagcaagagagtgtggcaatggccacatgacaatgggatccaccagtcccatcatataccacatcactcagaagcttctggactcaataaagtgaggaaatagcctttggaaa

SEQ ID NO: 16059 - DNA, 460 bp, Homo sapiens
  MAP TO AC010104.1; EXPRESSED IN BONE MARROW, SIGNAL = 0.92
agaagagaaggccccatttggagacagaggcagagactggagtgatgtggccaggagaccagggacacatttaaggacacgcttctgtcgcaggtggcagctaacctgttttctctgcacttatttctgtggctttttgggtaaagaggcaactagggatactgattacacagaggaggaagctggagctcaaacagcaccagcagggtaacagaaatttaaaaaacgcagagctcaatcagtttaatagtcaaaagctatgaacacatcagactgtgaaacaccaaaatcaggtggtgaaacgtggcgctgccctgaagacctttgaaaggcagaacggatggggtttcctaagttttcctcagttatgattctacttcttctaggaccctctggcttgtgacagtcaaagcaccagctcagaatctgtatcagcatgcaatgcttcaggaaaattcca

SEQ ID NO: 16060 - DNA, 486 bp, Homo sapiens
  MAP TO AC011363.1; EXPRESSED IN BONE MARROW, SIGNAL = 0.99
ttttaaaagactgactcaatcctccttttttctggattgtagactataaagctcactgtagagaactgaacagcttccctgaaataaaataatgatatctccctactccatcccttctacaaacagtaactgcagtgatagcagccacaaaaagatcaggctgggcccaagacttccccagagttttttgctttacctgctgtagatgaggcactctcggttattgatgactttatccgatttgtacctccggaggtcttcccaagcgtccttgatggcagtgactgccaggataacacagattggtatcatgctcacctcaggctggaaagcattgaccacagggataaaattcagaaccgcaatgcccacaaaatagagattggcaaaccggtgtagctgctcaaaaatgtttttggggacgaaggacaacacggtgtacttgctggtcttgatttgattcccacgatgatgtctgttggggtt

SEQ ID NO: 16061 - DNA, 441 bp, Homo sapiens
  MAP TO AC007460.1; EXPRESSED IN BONE MARROW, SIGNAL =   1
  unsure 23
ggtaaatcctgattaaagggggntaatattattatagtgtctattacattgtactctcatttttctggaaattctaaaattctaagcattaaagcataggacaccatatttaatatttttagcttactaaagaccaatcctactgataaatcaaagttttaaaaatatttttagaaatctgttgctattaaataaaaggccatttgaagattgtgtctaagtaaatttttcttttctcctttagagtgcgtcagtttatagaaatggtgaatggtacagatagtgaagtacgatgtttgggaggccgaagtccaaagtctcaagacagttatcctgttagtcctcgaccttttagtagtccaagtatgagccccagccatggaatgaatatccacaatttagcatcaggcaaaggaagcaccgcacatttttcaggtgaga

SEQ ID NO: 16062 - DNA, 413 bp, Homo sapiens
  MAP TO AC007544.4; EXPRESSED IN BONE MARROW, SIGNAL = 1.1; EXPRESSED IN PLACENTA, SIGNAL = 0.91
tcaacactttggtcaccaggcaggaagaaggttgggaggctgccactccaatgactgatacttttgtgtcccttccaagagatgactgaatttgagacaggaggggtgggcaagaatttacctcagtttcagtatctggccaaaatctactgttacactgtagctatttagacttagcttttggaaggttaaatagtcagatatacaaacatccaaatcaatgccagtgctggcatccctgaacatgcatgtgacaaatgatcatttgatcttgcatgtccccttcatatctaatcagggtatcaatgtgagcagcacaaacagggagtgtcatcagagtttactgtttgtaaccaagtatgcaatctaaaattcttatacgcaatataggggtaaacagtgacaatctcttt

SEQ ID NO: 16063 - DNA, 428 bp, Homo sapiens
  MAP TO L05367.1; EXPRESSED IN BONE MARROW, SIGNAL = 1.3
ttttatacacagcttttcaggggaaaaaaaactgtactgggtaataagtatatgtagattgtttcagagttcttaaattattgaaacataccatttacatatgtaaaatgtactatactttaaagataggtactataattagtaaatagattactgttaaataactttttttaaaaaaaagtttcatctatgcacataggctctgagcagatttcagatagttcctgaataaaaatcaaaattgactatcagttgccattttatatatgttaacatataaagaaaaaagagtcatttgaggatggaagatcagctaaaaagcaagttgtaatatttataacagttctgcaggtggaggtggcagggattcattaagatcttgatcagagttgggaggaatagagaactcctgacactggatctcaagg

SEQ ID NO: 16064 - DNA, 484 bp, Homo sapiens
  MAP TO AL023583.13; EXPRESSED IN BONE MARROW, SIGNAL =   1; EXPRESSED IN HBL100, SIGNAL = 1.3
tttctgtagtgcagtatcactatgaccttaagaaaaatccaatacgatttttattttgctcaatgattctgcatcggcctagggacatataaagtaaatcctacagtaagattatctgtgtgtgtgtgtgtgtgtgttgtgtaaaagagagagagagaaagcatgtatagacactactagtgtagggttagtattagggcagggtttttttaaaagacaactgtaagttttaatagaagtcataaaaagaagcaaataatatattgaaagagaacttaagcattatctgattccattttataggtgaggaagctgaagcccacagaggataagaagcatctcaaggcatcacagaggaataatagtaaaatgggggccaagaaaccattgattttgactccaagtccagtgatcttcccattataccatacaacaaattatttcaaatgtaataaaaaggctattatttaaatgactggtgata

SEQ ID NO: 16065 - DNA, 483 bp, Homo sapiens
  MAP TO AL109627.8; EXPRESSED IN BONE MARROW, SIGNAL = 0.95; EXPRESSED IN HBL100, SIGNAL = 0.98
tcttgggagggtctctttccaaggcccggcttattatataaatactctcagtgtttcacctcgccaagcctgtatcatcctgatgtcaggggagggtggaaagtgacccaggaaaagtgtgaggagaagccagatttggatcccaggatgttggactccaaagtctgacctcttcccagcacactttaaggcctctgagaactctgggaagtggggttgtggcctggagggctgaactgggcatcacctcctggtcctggaagtcgctgcagtcccagtggtggagggctgaactgggcatcacctcctggtcctggaagtcgctgcagtcccagtggtggggggctgaactgggcattgcctcctggtcctggaagtcactgcagtcccagtggtgggccaaggtggcactccctgcttccagtgctccaggaaggccatggccccagaaggacatgaagatgctgaagaacacggttcctg

SEQ ID NO: 16066 - DNA, 425 bp, Homo sapiens
  MAP TO AF127019.2; EXPRESSED IN BONE MARROW, SIGNAL = 1.1
aagtcgccaaaacgtcactcactgtccttcttagtatctaattctccttcacctaatagaacagcaaattctttgagtttaggatccttaatgcagtgtaaatattgccttttatccttcttctcagctatggtctcaattcaaatcatgaggaccattgtggtggctcccgaatggcctcactgttccactccttccccactgcgctacagtccattccccagtgtcgcattttacatcgagtaatttccaaatccccacaatgtgttcctgaagcccctctaggatctggtccccaggcacttttctgtgtccgctcttctgctctttcagccgccccagctcatgccagcctttgtgcttgcatccattcttcttgagatgatgcagccagacgtccatcctgcttggctccttcatggtag

SEQ ID NO: 16067 - DNA, 383 bp, Homo sapiens
  MAP TO AF057177.1; EXPRESSED IN BONE MARROW, SIGNAL = 1.1
aggaaagtgtggctcaggtccatagtttgaaacaggtcactctgggctcctctcccccagtcaggatcagagatatgctgggctgccctgccttcctttgggtcatcctgtttccaggtcagtctcctacctaaggacctgtgtagaggtggcgaggctttgggacatccctacctcactgctctctccctgacagctggctggtggctcatcaggccggagcagctggcccatgtcctggggcactagggaagcttggtcatcctgcagtgcgtggtccgcaccaggatcagctacacccactggtaccagcagaagggccaggtccctgaggcactccaccagctggccatgtccaagttggatgtgcagtgggattccat

SEQ ID NO: 16068 - DNA, 406 bp, Homo sapiens
  MAP TO AC012513.2; EXPRESSED IN BONE MARROW, SIGNAL = 1.7; EXPRESSED IN HELA, SIGNAL = 1.3
agagccccctccttacaatgaactgtgatcatttggtgtgacagagatttcctctgcatcaaaagttcaatgtgaaattcagaaacctgcaaaatgctcattgtaccacaggttggaaagccctggcttaaatcctaaatcagaggtgagctgttggagcagcagacagaagaggggtgggaatgggataagggcatccaagcaactgctaactggccactctctcccctgcagtggcaggccatctctctgacggtcattgagaaggttcaggttgcagccgccatcctgggctccctcttcctcatcgccagtatttcttggctcatctggtcaactttcagcccctcggcaagatggcagcgccaagaccttctcttccagatctgctacgggatgtatggct

SEQ ID NO: 16069 - DNA, 459 bp, Homo sapiens; identical to SEQ ID NO: 14150
  MAP TO AL049610.9; EXPRESSED IN BONE MARROW, SIGNAL = 0.79

SEQ ID NO: 16070 - DNA, 409 bp, Homo sapiens
  MAP TO AC012528.1; EXPRESSED IN BONE MARROW, SIGNAL = 0.91
gaagcttaaaatctatctggtcaggaaaaaaagaaaaaaataaaaacatacataagcaaacaggtatttagcaacaaacaagaaaaggaagtataagagcaaaacgcagtttattaaagtggggcagattactaaggtctaggtgagtggagaaaatttatggagaagttggcttttgagctgcttttggacaaaaaataacactgacaacatttgcatgcattataagacagatcccaaagatagtttctgcttacagttgccactggaggtcttgcttttgctacagtccccagcagtagagatttgctgtcctgtgttcttggataagaaatttattggtggattatcacaaaaagaagaatcatcgaaacaagaaaaaaacagcacagtgaatatcaggatggcg

SEQ ID NO: 16071 - DNA, 411 bp, Homo sapiens
  MAP TO AL021328.1; EXPRESSED IN BONE MARROW, SIGNAL = 3.3
tctaggggccatttcatttctaaggaggttcatgatcattgcccaagtaatttctcattgtaatatctagagtcctacaagcttatgagctaacaacatttgcccatgaggttttagatgctgaaataagatacaataggtctgaaatgttaataaaatattcttcagtgatctcctttcttagtcaacgttgctatatcctcttcctgtgtcaactcctcagaatgtgggctttccatactgacagtacccccaccatgctacatgttataggtgaacaatctaattttttccagtagcttccactctcttctgtggataaatgttagtttgatgatgataatgatagtcataagttttattatcatcattactgttcttattcttcttctctggacctctgtgtttcct

SEQ ID NO: 16072 - DNA, 341 bp, Homo sapiens
  MAP TO AL022165.1; EXPRESSED IN BONE MARROW, SIGNAL = 1.1; EXPRESSED IN PLACENTA, SIGNAL =   1
tggtggctggataaatgagctgagtggggacgtacaaatccattgcacaatcagtggcccatttcagctacagatgctaacagacccacaaaggtcaccagctgaaaggctcaagttgaagatctggttcttccttctcctcatcatggaccaaaaagctttgtaacaaaacagagagccaggaatgttacggataatccaggagtttggaaggatttctctccacaaggtcaagacaagtcagggaatcaacaaccatgtcaggacaaggatggctgagtgtccccagctcaccttccgtagcatatcattctgctctacgctgttgatcttgccaggac

SEQ ID NO: 16073 - DNA, 396 bp, Homo sapiens
  MAP TO AC010812.2; EXPRESSED IN BONE MARROW, SIGNAL = 1.1
aaggtgcttcttacttcatgtgacatttattttgtatcttcattagtaacacaaaactagtgcctgtaaaatttccagagtagcattagaaaatgcaattcattagaaactttgcaaaaagttccactctttcaaatccccattttggtcactgtcaacactacagtgacaaaaaattaagaaatcattttggtgagaaccaaatagatacccatttcccagagagcatagtcagcaatttaggtattagccaaaattagtagagatccctctccttttagtcttacctttgatctaggtgtgttttcctgacttgatgaaggcaaagcctccctgaaattcaggtcttctgcttcagagtcatttccctcataatcgtttactgaacaaaggcgg

SEQ ID NO: 16074 - DNA, 455 bp, Homo sapiens
  MAP TO AC011299.1; EXPRESSED IN HBL100, SIGNAL = 0.92; EXPRESSED IN BONE MARROW, SIGNAL = 1.1
ccctgcttctactttttggattcttctttgtagagatcatcataattttggactatatccttttgtgtcataaataagcaattgtataatgaccttcaaaaattcttactatatctaagttacaatggctataaaataaaataagacctgtttttacctagttttaaaagttttctttgtttttccatgacaatgactcaatttactagtagaatttacctcttctaacaaagtaacattaacattaagtaacattactttaaatggctaaagtataaaaggcagttctctgattttttttttttttaacaggtgatgcagaagatggggaagaatatgatgacccttttgctgggcctccagacactatttcattagcctcagaacgatatgataaagacgatgaagccccctctgatggtatgtgacattttcccacgtaactctgacactca

SEQ ID NO: 16075 - DNA, 464 bp, Homo sapiens
  MAP TO AP000169.1; EXPRESSED IN BONE MARROW, SIGNAL = 0.76
ttcttatgaaaggtaggctgtttgggggtccagaatttcaacatatgccaccaaacccttttcttccctctgaatttttggaggcgcacctcaccttgtgaatttgtagcaccccaaaccagtaagcacacacattcaaatacatgtacatgcccacagctacccactagtaagcaccatcccccatgtccggtcacacagatgtgagaagatggagaaatgttcacctaaacagctggtgtgtgaagtcctgcctctgtcagctgagctcacatgggaaagatccccagtccctaggccccacatcaatgggcacagggccttcggaggaaaggacaaccactccgtcgtggagggagaacactttggactcgggtgtgtgtttgagggattccagagggtagaggttgaggaagaggagttgggagagtgagaaggtaggatgttgcacaggatgagaccct

SEQ ID NO: 16076 - DNA, 386 bp, Homo sapiens
  MAP TO AL096755.1; EXPRESSED IN BONE MARROW, SIGNAL = 4.2
caggattgggagatttcagctgtctaatccaattgcaataggatcaggacttgttaatggtcatttccaaggcacgtgggctcttccgtgaaatgtttttcccttaactagagagatgtgttatttttaaagatggtgttggctctaagaagagtatttctccttgacctccagaaccccctgtccccagagtcctacccttttcccagggtgagcgttttaagaggagattcttctcatggacttgtttttcacaggggtgatggggcagcatggggcgtgtccaaacacagccctgacctcacttatggctgttctgacaccctgatgctgccacccccaggtggcctgtgcattgtggggccgcaccacaggaactggacact

SEQ ID NO: 16077 - DNA, 482 bp, Homo sapiens
  MAP TO AF130342.1; EXPRESSED IN BONE MARROW, SIGNAL = 2.3
tgggaaagtcaagcacagagaaataaagaaactttaccaaagttagccagctagtaagaaagagacatttgctgataagtatgataattcttaaattggaaaaattccacacactcatatgataattcttaatccttcaattatctcatgccctcaaataggtgtttcatgccatctctatgcaagtcattgtattttgcacagctagaatgttgtctgttgtttttgtttacatggcttcatgtcttttaggacatggtacgtaggaaattgcatggtgaagtggtacaagcatcaggctcaagaatgagagtccagtttgacagaccagatgaagaagtgattaagaccatagttctggacttagacaagcctggctttgtgactttggacaaattatttgataactgtaagtgtatttatcactaaaaggcagataataatattatgtcatacagatgctcatccattgattcaacaaa

SEQ ID NO: 16078 - DNA, 458 bp, Homo sapiens
  MAP TO AB020872.1; EXPRESSED IN BONE MARROW, SIGNAL = 0.95
cagggagggagagaaaaagggagggagggaaaaaggaagagtgggtcatggtttgctgctccaatgaaattataagcaaaaggggaaggcagagggtaataaacaatttcaaaaaattaggatgtcctaagcactgtgaaaggggagcacagaaagatttttacttgtggaccttggttggttggggaagtcaggatggaattttttgtgaagttacatttaaactgagagatgaataatgagtagacttcagccagaattttttttttttttttcaaaagctccttctagggagagaaaaaaatgtgataaagcccaacattattgtaatggaagagaacaccagaggaacttcagctatggttttaggaaatgtcagagtggaaatagggggaatactgggagttgaggcaggacaggtaagcaagggacagactgtgcaagactttacaggctgg

SEQ ID NO: 16079 - DNA, 457 bp, Homo sapiens
  MAP TO AC009304.1; EXPRESSED IN BONE MARROW, SIGNAL = 0.76
ctgacgttgggaaacaactggcagcctctgccattgacctgtcctcagccatcccatcactagccaatatgagtttcattaagcatgtagcatctactctgatgatgtagggaaggttaccatgacagtgacttacaattaaccaggtgtttgggaccagtgccaacaaacactgcctgagagatgacaggcttctttagttgccccataatggcacatttccgtttctgacatggtccccatggtgtcacaggggtgacctgggtcactactctctgcctagcagagccaggccatgaactgcaagtcagcatctttcctgcagcagtgattgcttatgtcctgcacatgctggctgacagcagcattcaaatcatcagagaaatcaggaagttggagttaggtattctcattacatatataaagaaatagaagaggccaaagtttcagaatacaa

SEQ ID NO: 16080 - DNA, 435 bp, Homo sapiens
  MAP TO AF176315.1; EXPRESSED IN BONE MARROW, SIGNAL = 0.9
gcatcaagagaagcgggtagacacccaccttgcccatatgcacagagctgccacagacattgcccttgctcctgaaaagcaagttcagactcaattaaaagatgattaagtggcctggccaactgaaacagaagcagcacagcctctccctgccagggcttccacagggacagaaagcagcacaaagactgctgctgaccttcctgtccagccttacctttgacttgccctctcaggctgggtttgcagtgccaggggcctctctggcctaaaggcagctgggcattgtgtagtccccacaaacagctgcccagtgtgtctagagaagggatggacaccactaacatccaaatgaggccccaggcagcagggaactgagagtcagtgccaagctcctctgagcctgcataattcagagtctgcaggaagccaaac

SEQ ID NO: 16081 - DNA, 484 bp, Homo sapiens
  MAP TO AC007632.4; EXPRESSED IN BONE MARROW, SIGNAL = 0.72
tggtgagagttattatagtcaagttcgatgctaaaaaatagacatgtaaataacaaaataaaagaatagattatagttggttcttgaacaatgctggggtaaaggaggacaaatccctgcacagccaaaaatgtgtgtataacttttgactctccaagaacttgattgctaatagcccactgttgatcataagccttaccaaaaataaaaagttgattaacacatattttatgttatatgtagtatatactctatttttataataaagtaagctagacaaaaaagatgttatttagaaaattataagaaaaagaaaacatatttactatgtattaagtggaagtggatcattctcattctcatcgtcttcatgttgagtaggctgaggaggagaaggaagagaaggcgttggtcttgctgcctcaggggtggtagaggtggaagaaaatctacatgtaaatggacccacacaattcaagcccat

SEQ ID NO: 16082 - DNA, 411 bp, Homo sapiens
  MAP TO AC007951.1; EXPRESSED IN BONE MARROW, SIGNAL = 0.63
  unsure 212
  unsure 217
gtgacgggctaatgaaaagctcatgcttgtttcaagaaatgaggagggactggactgtctgtgtttcatcctccctatctttatctgtaactttggaagtcaggcagactctatccaaacctaagtgcctcctcttacccactatgtggcctgggggcagtgatacaacttctcagaggcttagtttccacattgtaagaatggggtctacnaatangtttccacctccaggtttttgtgaaggttaaagcaattagcacagtgctaacatagagaaaaacatatttaaattcaattacttttgttgttgttagtaatagtgttgttatcttgttcacggataccactggcagtgtatgtagcatagtccataagcgcacaggccatagaccgaatggcctgaaggtaaac

SEQ ID NO: 16083 - DNA, 466 bp, Homo sapiens
  MAP TO AC008041.5; EXPRESSED IN BONE MARROW, SIGNAL = 0.68
gcttggtccaggtcatcttccccatgtggcttggaggaatttctagcaaactcctggattttgaaacatgacttggcctctttgaccaagtcctgaaccagacaccagctcactgccttccaggtctgatcctgtagattcctcatttaatcatccagccaagccctgtgttattgtagaggaggcacactaaattatttcttatttcaatctgtgtttatatattggtattcaatcgaggctttatctattaaaattgtgatcaaataggaggcacttatttcatggattatgccattataagaaataaggatggcttcacttacacttactgtcccataatcatcattgcaatggtttgcttcatccacgaggtctgtttccagtgttgtgcttctctgcatgttctttgggatctccatcttctgatttgaagatatggtgaggatgatgatgatgacagtgc

SEQ ID NO: 16084 - DNA, 491 bp, Homo sapiens
  MAP TO AC007558.3; EXPRESSED IN BONE MARROW, SIGNAL =   1
gagccagcagacaagagacctagaaaagagtccgttttgcagattgaacctaaaagtggcctactgcagaaaccctttttgcttggagaaggtcagtctttgttctactaaggcttccaaaaaattggatgatgctcacccacattaggaatttgctttactcaaagtccaccaatttaaataataatctcatccaaaaaacaccatcacagaaacatccagaataatgcctgaccaaatacctgggcaccatggcccaactaggtagacacataaagttaaccatcacagcagtcatttttgttctggggagaagaatagagagtgggatggggctgtcaggcggtgggatgattggaggaaatgacagttccagggcaaggaggagaccacaggcaatgtgggaaaggacactctgtccaaaggcaaccattacatcatgagtcatctgaaaagccacagaatacatgagaggaaaaaggtggaagaga

SEQ ID NO: 16085 - DNA, 462 bp, Homo sapiens
  MAP TO AL049911.2; EXPRESSED IN BONE MARROW, SIGNAL =   1
ctggcaaatggaaattttggattttaaatatctaaaatgcacatggaattttagagctggaaggatccttagaggtcagctaattcaaatcattttacagatgaagaaaccaaaatccaaagaacaagccatttgtccaaagtcacacagaaaacattttttcttaacgtttgagtataaagtgttttaataaaatcattaaattacacagttggagataaattaagtccatttttccttttcagaatggtgagatattttgacaaaaatgagttttaaaaattaagcctaagcgatcaattatcaatacctttgcatagagttttccttcctcattcattgcaagatagaattcactttccacccctttgattgccacaatcccaactgccactgtcctgatttccatgatatctgcaaggaatcacagaaagacatgtcaggtattcgttcagctttgcc

SEQ ID NO: 16086 - DNA, 409 bp, Homo sapiens
  MAP TO AC012354.2; EXPRESSED IN BONE MARROW, SIGNAL = 1.2
gattcaataggctggaaagtggaaaaattaaactctctctgtttttcaatagcttatctcctccttagctatgaaaaaaaaaaacagctgtgggttttaaacagacctcttctacttctgggcttttcctgagagaggcagcctgataaaaatctgaactaaaagtgagaacatctctggaagtcgcctgagtccacacaaattcatctagggatctatgtggctgaacacttcctgcatccagtgcctagctgtattgcaacttacctgtccataataccctctggtgggaacagcatgcaatgggaaatgaggcgctgcaccttcttggctaagcccattcattgccttaggctgtactttcaactgagtcatataatttttctgtccgtttttgaagtaagaatgg

SEQ ID NO: 16087 - DNA, 423 bp, Homo sapiens
  MAP TO AF053356.1; EXPRESSED IN BONE MARROW, SIGNAL = 0.93
tcagcagtgattgttcggagtggagcagctgaggccgcatctggaggggagatggcttccttctgccaaggagaaaacaggaggtcgctgcagtgccacagaaagggaaggaatacggacagttcctgtactccttagcaagacccttctccccttcttacagaaagggcaagcagaagtgtccgctcctactcacctgggctcccagagcccgaagcagagtggtgaggctgcgaaggccactgacggctttatccacatgcagctgcaggggctcccacggctgggaagagttgaccaacagggcctggccccgcaggacagcttccgacagcagggccaggccctgccagacttctacggcctgctgcccgacctacagggagtggactctgggagtcagctgacccatgtcaccctctc

SEQ ID NO: 16088 - DNA, 465 bp, Homo sapiens
  MAP TO AC007462.2; EXPRESSED IN BONE MARROW, SIGNAL = 0.72
tggaaccatttagtctgttttatttctaaagtttcttaataccacagatatcttaatttctctaggaaataccaaaaagtgaggacagaaagaataataataattgtctgcctccaaggagttaaccatcaagcagacgaaagagagaaagataattataacacgttggtgctttttaaagacctgtgcattctcctctctttgaaataggtaccatttctgtcaacacgttgcgtactccctacactgctcctggtgagagtgagattctggacctggatgatgagttgtacctgggggggctgccagaaaataaagctggccttgtcttccccaccgaggtgtggactgctctgctcaactatggctacgtgggctgcatcagggatttgttcatcgatggccaaagcaaagatatccggcaaatggctgaagttcaaagtactgctggagtgaagccttcct

SEQ ID NO: 16089 - DNA, 460 bp, Homo sapiens
  MAP TO AC009965.2; EXPRESSED IN BONE MARROW, SIGNAL = 0.93
caggtttttctggtggtcttctagagaattgatagtggaacattttcatcagatgtcattgttctttctaagtttcagacaggctggtagcttcagggaaagaggaaaagtttcgaaaacatatattgtttgccaatttaataagaaaattaaccctaaaaattacattttatgtcttgacttgggatttcacaaggaggggtaatctccttgggatggagagcaggcaggagttatacaaacttggcctcagttggcctggtatagaccaatctgtcttctgtcttcattttgcactttgtaattagtgttctcctcagtcctgattcctctgatggggcagcttgggctctggtgaatgtggagtccctgatttctgctttgattctggtgtcatttgtttccttggtgccaaggccctttgtgattctgagcactctcatctctcctttcctcccct

SEQ ID NO: 16090 - DNA, 459 bp, Homo sapiens
  MAP TO AC009976.1; EXPRESSED IN BONE MARROW, SIGNAL = 1.5
gatgccagaaaatgcaaagcccctaagagggtgtcacagtcatggcatcgagagcccctaagtctgtgcaccctgaagggccacagctgtcctcttatttttgtgttccacactacgataagcaagggggcgagttttatccatagttgtgttacaggtcattcagccctgatagtcagctgatctcaaattattgttctgcatcccagaagagagaggtacatgctgccttcagtctttccacctctacctatagagataaaccatgtgctggctgaggccacagtgatagcctcccctgagtcagttgccaggtatgataatgttgattcttctcagaggccacccccaacatctctgtttggttctaagcctataactaaactaaagtactggcgggctctttacggtgatattgagagtgcaacccatgagaagttgtggtaaactgaagaacaa

SEQ ID NO: 16091 - DNA, 474 bp, Homo sapiens; identical to SEQ ID NO: 10611
  MAP TO AC007462.2; EXPRESSED IN BONE MARROW, SIGNAL = 0.63

SEQ ID NO: 16092 - DNA, 466 bp, Homo sapiens
  MAP TO AC007461.8; EXPRESSED IN BONE MARROW, SIGNAL = 2.6
gggggaagaagaagaggaagtaggaggaggagaaagaaggaggaataataagttatttgatgtgaatggagcatagaatggttgaagagcaggagaatagtaagataccaaatcagcaaggtaagttgagccaggattatggaaggctttcttgtttgtcttttatctgtattagtcccccaccatcttggctcgtgaagtctgcgcaataatcagtctcgccccacactttcattggaaagacacatgcatttactctgggcatcacccatcacgatgcttggctatggtgcttctcttctgagttggtggccacggccccaatgccaaggatgagagacctgctccgtgcagcagtgtttccttctactttgctacagaaataatctgtagactctatgattcatgccagtgccctcagccactgacaagcatgttcacttggccattttgctatttgcccctg

SEQ ID NO: 16093 - DNA, 490 bp, Homo sapiens
  MAP TO AL117672.1; EXPRESSED IN BONE MARROW, SIGNAL = 0.93
tcctatcaaggctgtgacctgctaggacttagaagcaagctatgatcccaacagaagttaaattataacctgttatgcgagcctctaatgttctttgaaatttgaggtaaagggtaggtaagcccttctacatggcatgtgttaagtctatgtaacaatgtaaccctttcctgatacaaaggggttagttcttttaatgttttaaataatttatttttctttatgatattaatagtaatagatgctcattgaagaaaacctggaaagtacagaaaataatacaaaataaataaaatcacaactatcttaccaccaaatgacaaggttggctaacattctgatgtagtcagcagatattcttctggcttcttttgtagccattacagcattctgatgtagcattctgaagatccttctggtctttctttctactgctaatagttttgttgaatttttaaaaattcacagattacatggagagatttaaatt

SEQ ID NO: 16094 - DNA, 481 bp, Homo sapiens
  MAP TO AL121757.2; EXPRESSED IN BONE MARROW, SIGNAL = 0.93
tgagtcaactctccccaaggatgtgggcagggtgctaggctcactgaccctgaaagagcagaaggtctggaccctcacccctcgcacctccctcacaccacttttcttgcagacatcaccatggcagcccagaatggaaacaccagtttcacacccaactttaatccaccccaagaccatgcctcctccctctcctttaacttcagttatggtgattatgacctccctatggatgaggatgaggacatgaccaagacccggaccttcttcgcagccaagatcgtcattggcattgcactggcaggcatcatgctggtctgcggcatcggtaactttgtctttatcgctgccctcacccgctataagaagttgcgcaacctcaccaatctgctcattgccaacctggccatctccgacttcctggtggccatcatctgctgccccttcgagatggactactacgtggtacggcagctctcct

SEQ ID NO: 16095 - DNA, 471 bp, Homo sapiens
  MAP TO AL078645.18; EXPRESSED IN BONE MARROW, SIGNAL = 0.95
gctgatacttcgtgaagggcctgcagaaggccttgctaccttcattcaactgaataaaggacatcgtaagaccataggtactctttctgatccaagttagagcacactgtgagaaaatattaaatgagttgtggagaggtccattctgtcaacctgtcatagtttttgaagaaacatcaatgaaatattagacaagagggagaggacaaggggttcagctgtaaaggtgggagaagggaagaatcccctctctaacccggaggctgctgcgagttgctgtttttgttgctgcagccaatgctgttgctacttctgcttttgctgttgttgttgttgttattgctgctgctattgctgctgttttggattcccagccagcaccttctcaggggcagcatccatccccctgcttcctcatccccagcattatcacgtaaggtaacaggcgtgggctcccagacatgattcctt

SEQ ID NO: 16096 - DNA, 448 bp, Homo sapiens
  MAP TO Z86090.10; EXPRESSED IN BONE MARROW, SIGNAL = 0.68
ggatgtgacttttggaagccttcttaaaaacgggctcttcttaatagttattggccaaaaactgaaacaaacactagagctaaactacagatatttttttctttgcaggtgtttttaaagaacgcagtaatggattgcttctttctaaatcatttcaataagaaacagtaacataaagccctttggttcgctatgaaaaatgcaaacgacattaagcaaaacttagtttaataacttccagccaaaggttccccaccctgcagtcatagggctgtgggccagctggctgtaccacctcacccccgggagatgactgcttttcaacagtaaaactgcgtaagtgacatttggagttttgggggtcttctgaagtaaaacatgtaggtctaacttcttactgacaataagtcttaacgttacaggcttcggcttgatgtagaaaggaccc

SEQ ID NO: 16097 - DNA, 483 bp, Homo sapiens
  MAP TO AL049836.2; EXPRESSED IN BONE MARROW, SIGNAL = 0.62
tactgttgcctaagatgcgggagagccgcgaccccgggggtggcccccacggacagtcaccggacacctgtgctctgccagctccactctggccagggttgtgatatattcagcgaggctctggaatatattacaaaccatgaactgcagagcctcccatgccaaacatgagcataggcagaaccagagtgtggccagtctacccacccctggggagatccaagagtctcagaggatctagcagggagagatgctccaaagtgcagacaggccccgcccttccgggggtgggtgagggctgtgggtaaacagcttggtacagaggctgccaccggcacccaggagagggttccagcttcccccggggctggggacacacgttgctcctgggctctgtctccaagtgagaggttatataaccatggccgttgcagcagccccgctggctgggcccttgctcctcgcacgagggctagaaacaac

SEQ ID NO: 16098 - DNA, 431 bp, Homo sapiens
  MAP TO AP000014.2; EXPRESSED IN BONE MARROW, SIGNAL = 1.3
acggaagcttcttgacatggtgaatgttccccaagggatgtcaagtgtgatccttctcctttgcagagcatatgagctgcctcgattgtgtgacaaatattttcgtgtgccagcataatccgaactttggcagaggctggggtaagggcgcagtgacagagaagtgttctcagagcctggcagtgttagatttagaaagaagggatgcattttgcattcttgacacaggaatcctaggaagtgactcttcttgtcttagaaacaggatttatcactaatgacaaagagataactcatacttcagagaggcttgcagcatacaaggcactaatgatgacaacaattatgaaaattatgatgatgaggaacatgatgatagcaacatgcctctaaagtataccatgaggcaggcgctggtctaggcactttat

SEQ ID NO: 16099 - DNA, 469 bp, Homo sapiens
  MAP TO AC007733.1; EXPRESSED IN BONE MARROW, SIGNAL = 0.98
  unsure 22
  unsure 47
  unsure 168
  unsure 187
cgtggtcataccaaagcctctncataaactagccatcatttctgttnctgtctgatcagcatgctaaaatcaatataatgaattagtataatactctataaaatgtgcacacaaagatctttttagactatatatgacagaaggctgataaataaacagccttaggtncaaaactctaaataaatanttgttgtatgtcttatgcaaatattgcctgattcttatactctttttctgattattatagaaaataatgcatttgccaaacccatgcctgtaactcatgtacttaaagctgtgttcatcgtctctagttgtagtaccacatccaatataacagctgcaattggagctacaaatggtcgaattaatagtagcctacagaaattccccagaatccaaccattactgcaggggacaaactggataattaaacaaaaatataatgggaactgacatccctgggtgt

SEQ ID NO: 16100 - DNA, 456 bp, Homo sapiens
  MAP TO AC007732.1; EXPRESSED IN BONE MARROW, SIGNAL = 2.1
  unsure 31
tcatgacattcagggcattggggttggatcnaggggttgggaaatggtggcgaacagggaagggatggggaattgggaagtgaggatggactgaggagacttggaggttggaagaacagtaggggtttgtattaaggtggaaggcctctgatggttggtgggttgaggagggacaaaggatctgggaggaacgagaggcagggaaagagtgaacggtggaggaagggtgcacactgagctctgggcagtggttgcagaatgaaagcaagtcttggcacatgcagtatcccgggagtaggcaaggaatttggggtagaatggagcctgggagtctgtgttcttctcagaactgcaaggatggaagctgcagtaaggggaagtcttggtctgggggaacttatctttggcatcatctgagttcttccattccatattcctcaactccaggtagcccag

SEQ ID NO: 16101 - DNA, 422 bp, Homo sapiens
  MAP TO AL049873.2; EXPRESSED IN BONE MARROW, SIGNAL = 1.2
ggcaaagattcttggtctcttacattcttagcaggaagagacaaacaataaacaatacattcataaattttatagtatgttagaaagggataagtgctatagaaaaaggtagaacaaaaaagagggttgggaatgcaaggacaggggtcaggacacaggaggaaacaggtggtcagggtagaattcattgataaggtttgaaaaccttaaaggagctgagggagggagttaaccatgcgggcatctgatgagaaatccctaagggacaagtacagatagaggaaagagcagcaagtgctgagccctggggtgtccctccagtaagaggtgtgggagaaatgaaagaacctgccaaggacactaagaaggtggccaatggggaaaatcaagagaagaggatgacaaaaacgtgtgtaattttt

SEQ ID NO: 16102 - DNA, 360 bp, Homo sapiens
  MAP TO AF088219.1; EXPRESSED IN BONE MARROW, SIGNAL = 0.98
tgagggtctaggctgagtggagaagggactgagagaagggatggtaaggttctgaggccagagagagaggctgtctgagggaacccagccaggacaggcccagggaagctttaaagaacataaggtgagctccatgtgaaccagaggtgggggtgggcaccggactcctgcccgagtctgcagcccatgacggtctaattctgcctctgcagcttcgtcaccaagaggaaccgagaagtctgcaccaaccccaatgacgactgggtccaagagtacatcaaggatcccaacctacctttgctgcctaccaggaacttgtccacggttaaaattattacagcaaagaatggtcaaccccag

SEQ ID NO: 16103 - DNA, 459 bp, Homo sapiens
  MAP TO AC005832.1; EXPRESSED IN BONE MARROW, SIGNAL = 0.56
ggaatctcaaatgtttacaccctttaacactgtaattttcctactagaaattttatcctaggaaaataatcagtaatatgcccagagatttctaaaataaggacatttgcacttattgcaatcttatttatagcactgaaaaaataataaacctggatgtccaataataaggaatggttaaataaatgaatatatgcagcaaccaggaactttggttttgaagaatatgtaataatatggggaaatgctcacacatgatgtttgtaactaggaaaaaaatttaccagtgataattttccaagctcctgtccttgatgataaatatgccatacctggtgggacccatttaggtttcttgctttcagctgaaggactgcgtatttctaatggtttcctagtggtatctgaagacagagaaaccttttttggcaaggactgagattctgatttgacggcagc

SEQ ID NO: 16104 - DNA, 480 bp, Homo sapiens
  MAP TO AC005195.1; EXPRESSED IN BONE MARROW, SIGNAL = 0.55
cacacagttttcaatctagatcccaaataacacaaaaccttaaccttcaaagtattttaacaaaagcaacaatggcagcttccgtctccagctaagccctccagaagggtttcgatttgcacccaaggccctcttggaacaaaggaagaaaagccaagggctcagtgtctagacacaacatcaagcaggtagacaggtgctaccttagcccggtcccaccgaccaagggaagacaatgctctcagagtctcctaaccaaagcaagcaccagcaccagctctcccaaccccaacccctgtgcaagatcaaactgaaactcaccctgtgattgagggaagacctcagccccgcaggccactcacactcattcttcacctctgccaagagcacacactcctggcaggagtaaaacaaggctgatttttattaggaggaaagacattgggtttctcttgttccagaccttcctgactgaaggga

SEQ ID NO: 16105 - DNA, 463 bp, Homo sapiens
  MAP TO AC004067.1; EXPRESSED IN BONE MARROW, SIGNAL = 0.9
cttgcatgcatccatttttgcccacctctgatttcatttgtaactggtggatagtttcttacaaattcagactcaccttccattgctggtgtttcatctcaaacccaagctatacccagtctttctgtattctgctcaatgccttcttcagcagcacaggaactcgggagtttgctgagcctgtatacccagtgcagcattggaggactgtggagttaatgccccttcttccccgctctatctcccttctgctcccatatcagggagctgaggacaaccctcaaatggttgaataaatgtttcagcctcttgtctttcagatggacaattgtgagtgatattctaagtgctactcataggtactggcagaatgagtcccctgttgtctctagcagtcacctcagtaatgctcttacattagctctttttccttcctgtatcatgcctcccattctctttctcc

SEQ ID NO: 16106 - DNA, 471 bp, Homo sapiens
  MAP TO AC004974.1; EXPRESSED IN BONE MARROW, SIGNAL = 0.5
atcagtggctcaaggaatcgcatactggggaagaagaacctggtagtactgattttcttctttgagggcagaagagaaagcgatgaagtcagatttacattagataagccatgaaaattgcctttgatccacatataatgaactctgtaaaaaacgcagcagagaatctgcatctctaagacaaattttcaggctgctaacattggcgatttgagacagtcactgtcagtgacacagggcgccatctctatcctcaagtctctattatctaactggaaaaagaagacaagtatgtaggaaacgggaaggggctcagtaggaaggaacaccacaaatggctttattaaggatagtgcagttttcttatttgaatatttatgttccaaaaagaatttaagaaactgcacttgaaaaaacacgtttaaatttagctgaggaaaaaagtagaaaggagcataagaacaatgggtg

SEQ ID NO: 16107 - DNA, 441 bp, Homo sapiens
  MAP TO AC005828.1; EXPRESSED IN BONE MARROW, SIGNAL = 0.49
tcagacgttttctgagttagtagcttttatatttacttggaaaagttgaggaatgaagagacaaaaaagtattatgtaatactgagatactaagtgatttctagtataatcactcaatagctgataatcatagctattgctcttactactgataagcctgtttgcattctcatctttcttttgcaggtggttgcctatcactattgtcaagcagataatgcctacacttgcttggtgccagaatttgtccacaatgttgctgccttgctctgccgctcacctcagctgacagcctatcgggagcagcttcttcgggaacctcacctgcagagcatgctgagccttcgttcctgtgttcaagaccccatggcctccttccggaggggagttctggagccactagaaaatctccataaaggtacagataaggcccaaaggagg

SEQ ID NO: 16108 - DNA, 467 bp, Homo sapiens
  MAP TO AC006345.2; EXPRESSED IN BONE MARROW, SIGNAL = 1.2
gttcttaactcagcctgcggtgcggggccccctggaggaggtgtcatctcctgtattatatgggcttagtaagtcctgaattgaacagctacacatcaagtcttatggtcactttgaagagaataaagccagagggattcctggtgtgtctccgttcttccctgccagggagttagtggttctgagttggccacggtgagtgtgcaactcaccaaacatccctcttcctccttcctttcactcccttctcagagcatgatggaagcctgcgttttcatttcagactgatgggtttctgaaggacaacaacaatgctgcccagcgcctgttggacgggatgaacttcatggctcagtcggtgtccgagcttagccttggacccaccaaggctgtgacttcctggctgacagaccagatcgcccctgcctactggaggcccaactcccagattctggtatggtgtgcca

SEQ ID NO: 16109 - DNA, 507 bp, Homo sapiens
  MAP TO AL050320.19; EXPRESSED IN PLACENTA, SIGNAL = 2.2; EXPRESSED IN BONE MARROW, SIGNAL = 0.45
ggcaggacaaagtggaagagagaaaggcaaatggcaaaaccgaatctgaaaactcctttgcagcagttctgtccagaaccttccacttactcctcatggggcagaattgtgtcatatggtcgcactcagatgaagtggatgctgggaaatgtagtttttgccaggtccacagccacctgaaacaaacaccaagtaagaaaaagaggggactagacattgggcaggcaattgcaatgtctgccacagtactgccatgtaaggcaaaatgctaggctgtaagaagaggatatttttattactattcctgtttttgataagttctaaaataatagaaggagaggagcaccaagcagtagctaaataatttgaccaatgaagatcacctgcctcagcaatggaagagttcatgtgcataagccgtttaatagctgcatttcttctgttttccttctcagtggtagtcacagctctgaaattatagtcacaagaggaaacattgctgctggt

SEQ ID NO: 16110 - DNA, 530 bp, Homo sapiens
  MAP TO AC011299.3; EXPRESSED IN BONE MARROW, SIGNAL = 0.49; EXPRESSED IN PLACENTA, SIGNAL = 0.49
tgagtgtcagagttacgtgggaaaatgtcacataccatcagagggggcttcatcgtctttatcatatcgttctgaggctaatgaaatagtgtctggaggcccagcaaaagggtcatcatattcttccccatcttctgcatcacctgttaaaaaaaaaaaaaatcagagaactgccttttatactttagccatttaaagtaatgttacttaatgttaatgttactttgttagaagaggtaaattctactagtaaattgagtcattgtcatggaaaaacaaagaaaacttttaaaactaggtaaaaacaggtcttattttattttatagccattgtaacttagatatagtaagaatttttgaaggtcattatacaattgcttatttatgacacaaaaggatatagtccaaaattatgatgatctctacaaagaagaatccaaaaagtagaagcagggtaaaacagagtgtatatccaaacgaacaaaaccaagataacagtaacaacaacaacaacaaaacccaggaagcac

SEQ ID NO: 16111 - DNA, 511 bp, Homo sapiens
  MAP TO AC007595.3; EXPRESSED IN BONE MARROW, SIGNAL = 0.48
tttctgcagacccacatcagatgcagctgcggaacacacactgggaagagccttggtgagaccagagtatcagagccaggtaggaaagaaatctcacagtgtggagcacagtttggacccagctccagctggcagctcgctcacctggggagtggtgatgatcactgctccatcgatgtgtgctgtggccaggtaccggacgaccgagaggtgttcatccgacgtcccaggtggggtgtccacaatgaggtagtcgacctctccccagtccacatctcggaggaactgcttgatcatgcctagaaagaggaatccacaggggatgcttacttttcctttcttttctgtactttcaactccctcttttttttttaaaggatggggtcttgctatgttgcccaggttggctcttaactctgaggctcaagcaatcctcccacctcagcctcccaagtaactaggactataagtgcgtgccactgtgcccagctcacggagaagcatgatctga

SEQ ID NO: 16112 - DNA, 545 bp, Homo sapiens
  MAP TO AC018796.3; EXPRESSED IN BONE MARROW, SIGNAL = 0.43
ttttactgggcttcagggtgagggggtcagcatttcagaggactgctaggattagagcaaattgttccttggttacttttttcctgcttggtatcacacctttcttcctttttattgactgtctcaattcctagggctgccataacaaagtaccaaaaatgagtgacgtaaacaacagaaatggattctctcgcaattctggaagctagaagttcaagatcaaggcatatgcaaggttgtgctccctctgaaggtgcaagagaagggtctgttgaggcctttctcctgacttctggtagacctttggcttgtggcagcagaactccagtcttcacatggctttcttcttgtacatgctcttctatgcccaaatttgtccttttcataaggacaccagtcatattgggttaggagtcaccctactctagtaccattcatcttaactaattatatctacaatgattatttccaaataaggttgcattctgagacactgagtgttaggacttcaacatataatttttggggggagcataattctacca

SEQ ID NO: 16113 - DNA, 589 bp, Homo sapiens; identical to SEQ ID NO: 15284
  MAP TO AC018731.3; EXPRESSED IN PLACENTA, SIGNAL = 0.51; EXPRESSED IN BONE MARROW, SIGNAL = 0.49

SEQ ID NO: 16114 - DNA, 564 bp, Homo sapiens
  MAP TO AL161747.1; EXPRESSED IN BONE MARROW, SIGNAL = 0.42
ccaaggcagaaaagatggtccctctgtagagaattccaaataaatccttcctgagatggctttcagtatagggaccataactgaaaacacagatcagcacaagttcccagctatattttaccgttgttgtttctcccgccgtgcaatttctttcagcttgaaggctgcttcacaacgccgccttcgccggtccccacgttctgcagcctctatcttcatttgttctctcttgtagctgcgctgatacgctgttactagacgccgaagcctagctgttagggcagagcccggaggccagaataaatggcctggctgttgggtcacctgggctgtggaaaacaaagtagaatgaataggaagtatagcaagggtagtagaggcaatactagtattttaacccacccaaaggcaaagctcttagaaatcccaggataggacagaattcagtgaataattccccaacccaccaccccacacagaattatactagttgacctagaagtttaccttcatctccatcaatcactgagatctcctcatccatcatcatcaagggatcaccct

SEQ ID NO: 16115 - DNA, 568 bp, Homo sapiens
  MAP TO AL121827.9; EXPRESSED IN PLACENTA, SIGNAL = 0.53; EXPRESSED IN BONE MARROW, SIGNAL = 0.5
ctctgaagcgggagaaacagatcccacctggtggggctgctgtggaccctgagcgctggcctgggaaggcggtcactgtccaggtgcagagctctcgggggcacagaattcccagtggtggactgagtaacagtcatttagagtcccccttctgtctctttaaaagcccctcggagggccacagttatcagaacagcggtctggaccacttccaaaacagcaacatagaccagagcttctgggagacctttggaagtgctgagcccaccaagacccgcaagtccccgagcagcgacagctggacgtgcgcggacacctccaccgagaggaggagctcggacagctgggaggtgtggggctcggcctccaccaacaggaacagcaacagcgacggcggggagggcggggagggcaccaagaaggcagtgccgccggccgtgcccactgatgatggctgggacaaccagaactggtagggcccactgcgcccccgtccccagcgcccccgggcgacttcgtgtttgcactctgccctcgtcgttcctcctccttccatttgacccaagaa

SEQ ID NO: 16116 - DNA, 565 bp, Homo sapiens
  MAP TO AC025226.2; EXPRESSED IN BONE MARROW, SIGNAL = 0.47
attgagagcagagaaacggcatgcacaaagatataaagatgtcaaaacaacatgtttctaaaccattctaagagggtcccttacactcagcttgagcaaattagaagcagaaattttctctagaaggctacacattgcatgacttatttatattcctagaatgtactaaacttatttaggtttttactaaattgtagcaagtggaaatagattagacataaagaaccaactttatgtgatagtccaatatagtgtcaaaagtaatcattatcaggaacttcatccataaacccaatcaattctctcttataactcattttgtcatgttttgtttttataaaacacatgcttccacacaaattctgaaagtctttcctcattctctttctcccaggacacatcccaaatccatttgagagcctgaaagttcctataggaggccagctctatccatattctattgaagtcagcaggagctctttagaagtgccagataaaaagctgatctgtggacatcctgattcagcagtggtgacaccagcattgtaagcaatgccaagggaac

SEQ ID NO: 16117 - DNA, 522 bp, Homo sapiens
  MAP TO AC019222.3; EXPRESSED IN BONE MARROW, SIGNAL = 0.42
tgggaagccattacacttcccatgtgtacccacagggaggacgcttccctgcttgctcctctccctttcttctcctccccgatcttagtgctaacaattccatcctgctttccttcctctacaggtgagcatctccaccgtgggctacggagacatgtacccagagacccacctgggcaggttttttgccttcctctgcattgcttttgggatcattctcaacgggatgcccatttccatcctctacaacaagttttctgattactacagcaagctgaaggcttatgagtataccaccatacgcagggagaggggagaggtgaacttcatgcagagagccagaaagaagatagctgagtgtttgcttggaagcaacccacagctcaccccaagacaagagaattagtattttataggacatgtggctggtagattccatgaacttcaaggcttcattgctctttttttaatcattatgattggcagcaaaaggaaatgtgaagcagacatacacaaaggcca

SEQ ID NO: 16118 - DNA, 598 bp, Homo sapiens; identical to SEQ ID NO: 13163
  MAP TO AP001440.1; EXPRESSED IN PLACENTA, SIGNAL = 0.58; EXPRESSED IN BONE MARROW, SIGNAL = 0.44

SEQ ID NO: 16119 - DNA, 546 bp, Homo sapiens
  MAP TO AC007923.2; EXPRESSED IN BONE MARROW, SIGNAL = 0.45; EXPRESSED IN PLACENTA, SIGNAL = 0.47
aatagccccttcttcatgggggttttgtggcaattaaatgaggtaatgtatgtaacacccttaagaacaatgcttgtgttcagtcagtacctagcaattattatcatcatcatcttcttcatctcgggaggtgggaacatcgaaagctctcatgtaagatggcaactacgatgaccccagggccctcccattctgatggccagtattaggaatcacaggagcaccagagtgagaatgctggagctagaagatcatccagcctcagcagggaaactggacccaaagaagagcagagaccagccccgagccacccacttggttagtgtcagaggcaggacaggaaccctggccttctgtgtgcaggccatttttctcactctagcacatgtgattcctccagtcccagaggtcaaggtcagaagagcaacttaatacatctctgtaatcaggggagatgagctccttggacattggaaacattgtgctaatccactccaaaatattctagctcaaggccaagtgcagggggcttatgtcagtggaagc

SEQ ID NO: 16120 - DNA, 555 bp, Homo sapiens
  MAP TO AC017073.3; EXPRESSED IN BONE MARROW, SIGNAL = 0.47; EXPRESSED IN PLACENTA, SIGNAL = 0.56
gcaattgcaaaatgatggtggcttggaccaagccaataggagtagaagtagaagtagtgagaatatgtttttgagggatagggacaactgggtttatagcggattggatgtgggatatacaataaagaaggaggccgaggaggacttcaagcattttggccagagcaaatagaaaaatggttccatcaactgagaccaagaatgcagtaaatggggcaggtttggaagaaaagatcaagagtttgatttcaggcaggttaggtttaagataattattaaacatctgagtgtaaatagcagacagtcagtcagatatctggctgaaggggagatgtctgatccagagatgtaaatttggaaaaattttaatattcatttttaaacttacggcaaaagtctgtctttttgttatacagttttatgagttttttaaaaaatgcataatcatgtagccaccaccataatcaagatacagaattgttctatcatctttaaaaaactccctcatactgcccctttgtaatcaaaccctccccccatctacagcccttggta

SEQ ID NO: 16121 - DNA, 526 bp, Homo sapiens
  MAP TO AC009467.3; EXPRESSED IN BONE MARROW, SIGNAL = 0.44
cactacgctgtccacacaatgacatcacctaataatgaatctgcctaatgacaatttctcagaatatatccccactgttaagccacatataattttattattcttgtgctggcagtgttcacagatctcccttatttaccagctgctctcatgtttgcttccttgcttaaagatctcacaactatactcaaagccttcagaatctagcatcctttgcttgcccttctgggctacagtaacaaactctgccaagaatgacatccaaaggttaaaatattatataaaatgggttagtttctgatattaaatttgtaaaaccaaaattaaggacttctcattaatttttgttcacattacatactcctctaagttttaaattcctggaaatacttagccaatatattttctaacacaagaaaaatatatgcaaaagcacatttcatttctaataataaaaagctcaaggttctcaattgcatggcagtggacgtttttctgctagttaacataatcgcagggcctaaaa

SEQ ID NO: 16122 - DNA, 582 bp, Homo sapiens
  MAP TO AC013596.3; EXPRESSED IN BONE MARROW, SIGNAL = 0.44
tcactggattcatctgcctggccttgtgctcttctgatgatttcgctatcagttaacacttcatagcctggttcagtactgtctacttcaagccatttttcaaggttctcagtagtcacattttccaatcctttggtgtgttgtaaaatggcagccacagtagccacagaaatatcttcaacatcaaagtccaggctctctttctcctctaccatagggagaatcttcttccatgctctgctaatggtaactggttttactaagttccatgccattgctatttcataaagtgcatccaacagagttagcttcttccagaatgatttcaggtcattaccttcttccaagttgttctggagaagacctgcacgataatttctcttcatcgttgctatgactccctgatctgaaggctgaatcaatgaggccacattaggtggtaaatatttagcaaatatttggccatcatctgaccttaggacattttcatttggatgtgttggtgaattatccaacaagagcacagccttttcctgcaagcctttagatcttaaatactctcgaacttgcggcacaaaaatt

SEQ ID NO: 16123 - DNA, 558 bp, Homo sapiens
  MAP TO AL121586.28; EXPRESSED IN BONE MARROW, SIGNAL = 0.53; EXPRESSED IN PLACENTA, SIGNAL = 0.76
tcaaccccatctttggagagtgaggctgggccctgtggggtggaaacggggtagctgcaggagcatccagccctgtggccttgtggcagctggcctaggaatggcaagggaatggacaggggatgctgacacacccgcctcctccccagaccacctcctggagcatggaagtgacctcagtccctctccctccttgccaggatcctggagctaagcatctctctcccagctgagacggagctgacggtcgccgtatttgatcatgacctcgtgggttctgacgacctcatcggggagacccacattgatctggaaaaccgattctatagccaccacagagcaaactgtgggctggcctcccagtatgaagtgtgggtccagcagggcccacaggagccattctgagtttctggccaaacacattcaagctcacattcccttttgtgtctccagatcctatgatttcatggaaggggaccctcccacccaccgccactgccaaccaagacatagctcagtggtcaagacttgggcttgggagtcgggatcctgtaacga

SEQ ID NO: 16124 - DNA, 589 bp, Homo sapiens
  MAP TO AL133344.19; EXPRESSED IN BONE MARROW, SIGNAL = 0.44
tgggaaagtggttcaacaggggctcgatgactgagtaactcccagtgaagcaatggcgatgtatcttgtggtcagagggcacgtaatttttcaagatgtgcagtaggtcttcatcggcttctcggcagtggatcatcatgggcttctttagagagacggccagccgcagcagtctcttaaatactttctgctgctctgggatatgcgtggtgcacttactggagtaatccaagcccatttcgccgaatgccacagccttggggtgtcgtaaggcttttaaaatacttctttcttgatagttgttataataatgggcaaaatgagggcgacagccaaagaccccccaaaccagatcatctttcaactgatcctcccacaggttatcacttaggttttgaggattgcagaagcaagaaatgcagccctgaaactccttggggaaggtgttgctataaatttttctgaatttggtaaaggtgcctttgaaaggcagcctggaatatagcaagtctaaatgacagtgggtatcaatgaaacccggttgctctggctgccagatggtccttggcggaaagctagatgcacgtcc

SEQ ID NO: 16125 - DNA, 558 bp, Homo sapiens
  MAP TO AC010486.5; EXPRESSED IN PLACENTA, SIGNAL = 0.47; EXPRESSED IN BONE MARROW, SIGNAL = 0.46
tgatcacttgcacctcaagcacacttcagctgctagacagagaagatcccagtctctcctctctgtgagcccccaaccccctgctctttaccacttaggtctcctgacttgggcctgcagcatagctgcttcacccttggctgaacattcccattggcagtggctctgtgtctctctggggtggaagtcccataggcaattgacagcccgtatgccattgccattgtgatggtattgctcttgctgcccttggactggggaacagacaaggaccttggtcagtttgcatacctccagcatatcacagctaccctaaggagaagaggctagtttctcttccctgtgcacccctgacttcctgcttttcaccaggcaggacccctagcttgggcccatagtgcagtcaccctatccctaggtgaacattctcattggcagtggccctgtgtttctctgggatggaattcccagaaataactgacagcccctttgccgccactaccactgccgtggtaccctcccttgctgctcttgggctggggaatgaacaaaatccct

SEQ ID NO: 16126 - DNA, 564 bp, Homo sapiens
  MAP TO AC012571.3; EXPRESSED IN BONE MARROW, SIGNAL = 0.45; EXPRESSED IN PLACENTA, SIGNAL = 0.49
gcttttccttcttcccacagtcataaaaaaatctgtttttttcttcaaaaataatgcttgatctttagccctttaaaggtatttttcagataactcttcttatatcctgagcttttcttgaggcaactcattaatatactgattctgaaaagagtatactaaactctcagcacattatgtaatttgtctttatgcgaaagatgatcttttcattcttctttctcttttttatgtatttcttttagatacgtctatcaatgccatgcttattacaaagttaactgggtggaaatatgtaacacagagctcaatacagaagcaaactataatttaacatcagtaaaagactggtaattaaaatgttaatatcatgcaaatgtcactttttatacaacagaaaatttcaagatacgaagtcatggagtacttaggcaatggaactgtgacctggatacttaccctcaacaacaaaatgagtaacaataccaattgcaattcctatgattgctacaattgctaatgtgaaaagagctagccgtactgagtcccaaaattgctgctttc

SEQ ID NO: 16127 - DNA, 520 bp, Homo sapiens
  MAP TO AL161781.2; EXPRESSED IN BONE MARROW, SIGNAL = 0.44
gctgactctgccctttcaacactggaagtgttcatgagccccttgtgggccttggcacaggcatggactaactcagcttggtggctgagctcagaacgtggagttggcatttgactaaggtactgtggagtcttggtgctgagacgtctctgtttcttctttcagaccacagagtattcagccatggcctcgctggctggtgggctggacgacatgaaggccaatctggccagccccacccctgctgacatcgggagcagtgtgccaggcccgcagtcctaccccattgtgacaggtgagggcacctggggcatgggggatgagtgagggagagagagagagataggagtgtgtggtgggaagagtggcttcttggtgtgtttggatgtgattggccaattttgttttaacaaggttatgaggcctgggaacaggtcaggtgctggggccagggttgcagctgtgatgagacatggctggatatgattccaacaaagctggggagaacaaatgccaaatg

SEQ ID NO: 16128 - DNA, 529 bp, Homo sapiens
  MAP TO AC022843.3; EXPRESSED IN BONE MARROW, SIGNAL = 0.46
aaaacctgcaggagcaaatgtgggcaaaaagggccttgttctccaaatatctgggatccatgccctgatcactgatgcttctgatcatggagatttagacaaagagtgatagccttttttgttactccctccattgttgcaaatccctcctcatctgactgaaatgatttttagggaatttaaagagatagctttttttttcatttttctctttttctccttttgtgaaccagagattgaatactaggatagtcaaaagcaactacatatacaagaaaaatttgaaagtcattgtgcatgcccagggaaaggcacaggctcagaaaagacctgagaagaccttaagtttacagttcagcctaatcttcagaaaagaggcagcctacaacaactacaaacaaataaacaacaacaacaacaacaaagcaaacagcaagcactgaggaatgggaggaaatctgatttccagagatacaacactattaggttcagaagctcaatttaaaaccaaatatcacaaggagcacaa

SEQ ID NO: 16129 - DNA, 585 bp, Homo sapiens
  MAP TO AC018421.3; EXPRESSED IN BONE MARROW, SIGNAL = 0.49
ttctgagcaatgtggcaaaggtcttcctttgagccttgagatatgtagtcatgtccgggacaagggtttttctattcctaagggctccgagctctgttgtgggattctaccagcgatcctctggactggtgattaggtcctcttctagctagattaaggtcccataaaggaggggggaaactccatcctaactgacccctgcaaagggtctctggcattggtggtatgagaaaggcaacggtgagcattacacataggtttaggagagcagctcagggagagcctctaaaaccatccctagctgggctctggtacagaagctcctgaaaggagctgttaatggaaggcatcagttcgggggcataagggacaggaaagcaacagccacagccgcaacaagcagaattgctaatagagatggcagggatgggggtagagaaggcgaagaaggtggaggggaggtgggaagtgaggtccgcatgcagaaggaagccacggagggcccagcagtgccgcagctgggtgagattattgtccagtactattcaaccagctctcttagaagcacttggaaacatcccagct

SEQ ID NO: 16130 - DNA, 559 bp, Homo sapiens
  MAP TO AC021846.3; EXPRESSED IN PLACENTA, SIGNAL = 0.54; EXPRESSED IN BONE MARROW, SIGNAL = 0.45
tgcttttgccctgaaagaagacactatgcttattttcccagtctgtttgctatacgtgtattcttgagaagatagtccggaaaaagggtaacctctgctcacaaaacatagagaaacctgagagtcctgtggaaaattgtccctcaacacctctatctgcagtttattcacctgtgaaagaggaataatgataattattcactggcttgctgtgagaatttaatgagattctatttggaaagaatttagaagggcatctgccacatttcaagcatccagtaaatgttagttattgtcgttctttttaaaaattgtgctaaaatacatataacatgaaatttaccattttagcctttttaaattgtagaggtcagtggtattaaatacattcacattgttgtgcgaccatcagcaccatccatctccagaaagttttcatcttcaccagctgcaacattgtacccattaaataccaactccccattcctaacttgccctaaagggaatccaaaggattctttagtccaagaatctaaaggccaacgaaactgcagtctga

SEQ ID NO: 16131 - DNA, 516 bp, Homo sapiens
  MAP TO AL137026.10; EXPRESSED IN BONE MARROW, SIGNAL = 0.45
aattcccaagaggggacttgagggggtcattgccctggacaatcagtggtctccaagatgctattcagatccctttcaaagtcctggaggaacaaagtgaccatactgtcccagtatttgcctgttgttccaggaaaatgaaggacagagccctcttctctgtcagaatgtcctggtttcaatgataaactgtatggccagtctgtcaaagagtgagggagtttgtgggatctgctgcgctcatggctggaaatacaaagcctcctgttcctccagccctcttccatcaccctccccttctcctccaggaaagcctggagaagccccaggttcttgctgtacttcctccctggatgtctcttctcttcacccaaacttggagctgctttctggagcatctgaatccctggcctggcctggggctcctcatactccctgtaaaccaggtacaggcagggaaaccagcccaggaagagagaagttagagttccacagggtttgaggtggaatgccagt

SEQ ID NO: 16132 - DNA, 580 bp, Homo sapiens
  MAP TO AC008919.4; EXPRESSED IN BONE MARROW, SIGNAL = 0.82
attccagtacgagaccgtggcttcctggtgcaggtatgagccaaaactctatccattgtacaaatattttagttcttacggggtttttaaatcatttatgagcttgtcttaattatttttccttactgttttattcagacaattgagtttgctgaacagcggatccctgtattaaatgaatattgtgtggtttgtgatgagccacatgtgtttcaaaatggccctatgcttagggtaagttcttgctgatagaatgtccgtgttggtttagaatatagaaatatagaaaagatttgaaatataaaaataagtaaataaatgcagttgaaagcaaatactctttattgagcaaattatttacatataattttgacaaaatagtattacttctaaagtagcctgtgaaagagcagttagtttgatattaggaaaatgtttcttattatattttttacatatgtttatctaacagctatttatccatctacacctatatcaacgttaagcatcttaaattgtggaattttgaagaaccagtgtttacaaggttatgtgacaaggatgcttaggcagtgtccct

SEQ ID NO: 16133 - DNA, 554 bp, Homo sapiens
  MAP TO AC011938.3; EXPRESSED IN BONE MARROW, SIGNAL = 0.44
actttggtatgcctcatccgatcagatgaaggccttcagaacaactgagatgtcctagaaaagaaggaactctacctcaagatgacagcattaactcctgcctgagtttccagcctactgatactaactacagatttcagtctcactagcccctacgactgcaagaactaatttcttaaaagaaatctctatacacttatatacttacctacctacccactcacgcactcactcacccatccacccatctgcccatctgcccaccatccatccatgcatccagttgactttgtttctctggagaaccctgacggatatagaggttttcccaggactgaaaagcactgcaagaatgctgagcacatagatccacttgacacacagatcatgaaaagcagaaacagcctgaaaatggagaaagaaaagttctgctgaaaagacacagcattattgccaccatgcaggcggagaccagtgcaaacattactctctgccctcgtgtcacagtgggcagacagttacaacaatctcagcgcagtcagaactgaaagggg

SEQ ID NO: 16134 - DNA, 561 bp, Homo sapiens
  MAP TO AL136112.9; EXPRESSED IN PLACENTA, SIGNAL = 0.53; EXPRESSED IN BONE MARROW, SIGNAL = 0.44
attcggagaaaaataggggcgccaaaacaactgcttggatttttaagtccagaaaaactggtatactgtttgtgttatttaggcatatttttgatccaatatttacactatctaaatattgggggggggttgttttctaacactctagtggcatatgttgtttgcaattgtcttattgaaagtgatacatcattttaggaagctaaggttttattttgttgtttttttttaggaagctgttgataactcttcctgagctggtggaatgtaccagtgccaaagcattctatatcccagagactgaaactcttgaaatcactatgactatgaaaagagagttagatattgctaatttcttctgaaactgcatgaaaaagataaaaagtagtaaaatggcattggtaacaattaaaaaactttgaaaaaaatgattgttttctatattctctttattattctgacatatttttgaaagggacaaaattcagttctagtgatattgtgaccatttacagtaatttctattactctgttaggaaatatgtttccttggccaggtgc

SEQ ID NO: 16135 - DNA, 558 bp, Homo sapiens
  MAP TO AL158842.2; EXPRESSED IN BONE MARROW, SIGNAL = 0.44
caggttgccttaacaggctccccagctctgttccattaactatttttggctcagtgattagaaggccttgttgggccacacccttacctctgacattctgacaactggctggacattttcactaggtatcccactgggcactcaaactcaagatgcacaaaccaaacacatcacctctcctttcttctcctcctctcagcctaactctgacttccctttctctccttcaggcatctgagctgggaacatcaatatcgtctttaatgtctcgctatccaacagcttccacattcagtgagttcccgagacctgaatatctggctgcgaagagccctcctcttcatagtcccacagcttctgtccagctcaggcccttgaccccctcacatgggctcttgccaccacatccagcatgcccaacaacctcccctcctttttcctttctctccccactctgacacatacaaagtgtcactaccagatcatcgcactcacccacagctccggcaagcctctcccctgctacagaaacttgaatggttttcttttgccagctga

SEQ ID NO: 16136 - DNA, 515 bp, Homo sapiens
  MAP TO AC008919.4; EXPRESSED IN BONE MARROW, SIGNAL = 0.63
atttgccagtgttcagggtcattcaaattatgaccattgggctgtgaggtttgttttgaacagatctgtgaactacaaatggttttgctttttaaaagggttggagaaagaaaagagacgacgaacaagacgagcacgcacgagacgcaacgagaagaacgaaccagacaggacaacaacggaaaaaagaaacgacgaacacgaaaaccaaacgaacacggaacgcggaaccggacacggacacggacgcggacgggacgcggacgctacggaacgggacgacaacgaggacacagaaagacaaagaaagaaatacgaaagaaagcaagcaaagaaagaaaggagagagaaagaaaacgaaggaaagaaagagaaagaaaagaaaagatggatgcggcagagactgtatgtagcctgaaaatcctaaaatatttactctctttaccttcacagaaaatgtttgtggtaccctgaactagaggcagagatgaaagtgttcatttgcttggccctta

SEQ ID NO: 16137 - DNA, 537 bp, Homo sapiens
  MAP TO AC009298.2; EXPRESSED IN BONE MARROW, SIGNAL = 0.53
caaggcctcatagcagatccatgcagttagatacagaatccatcttttctaactcctgatttcctggtctttccttctaacctatcctgtttcttctaccccaaaagatgttaaaggtagatgcaatattttaaaaactgaaaatagttgtttttatgccatgacattttggtccaattggaataatggaagagttcatgaaaaatactatcaatattgaagaaatgttaactacatttgaatggtggtttgcaatatgatacttactttttctgtgagtttataaaattttagtattttgaagaatttaccacacctgtgaattctgaattcccttaccttgaacaacaacttggttgctgggcactaagatctgctgtccatcagtggtctgtgcatactgtagaatggtagtacccggctgagtggctgctgcattggtcatggttaatgtttgcaggccctgtaccccatcggtaccattgttagccagctgtattgctcctccctgggtaatggcaactaaaagccaatgga

SEQ ID NO: 16138 - DNA, 534 bp, Homo sapiens
  MAP TO AL136320.7; EXPRESSED IN BONE MARROW, SIGNAL = 0.55
gtgaattctaatggccctcgcactctcagctcagggagtatactgggtcctgcctggtgtccagctccctgtgctgtggcctggaaactctttcaggccatgagctgttttcaggcaagaggactgtccatctaggccagaggcagaagtctgcaactcttaattatatttcctgtccctggttcttttctcacagtgccttctatttatccagaggaattccagcaccagcgatggtatgcaaacctttagtggcacacgttgactcagatacagcccagattccttggccatgctttccaggtcttccataaaccattctgttctttctcctctcattcccttcattaccttcatttccattcctacagatttgttaactggaatttctgtacttccatctctttttgttgacagcttctctttgttcaggttctccatttcctgcacatttttaacacatttgcaagttgtaaattatcttctttctgcaaactcctgtaaagatttatgtgcacctctttgattcaagcc

SEQ ID NO: 16139 - DNA, 570 bp, Homo sapiens
  MAP TO AC018780.3; EXPRESSED IN BONE MARROW, SIGNAL = 0.45
acactcaagtagccatcgggtacacagctgcagtgcgctgatgagctttgaactgtaaatgggaagacacagtccatactcaagacaccaagtggagaacggggagcgctctgaagctgcctcctcgcatgtgcttgcagaagggcagcaggttcagtggtaccagcaagcagctgcccagcccgtgctgttcccgggagtgtgctggtggcagcttatgcactgggtacagcaccacccaggaggggcgaggctgcaccacccaggaggggcgaggctgcaccacccaggaggggcgaggctgcaccacccaggaggggtgaggctgcaccacccgggcctccaagacagggtggcatgtgtaggcagatggggcggtgggggggggggtgcagagaagcataatgtgcagacagggcctgctgaggaagaggacgcaggagggtggacgtgtttgtgcacgcgtgcacctgagcctaacaggtgagtctgtaaaggcagcttgggaccagctgagactgagggtggacttcaggctctcctaggaacacagcgattgaggtgtcttga

SEQ ID NO: 16140 - DNA, 541 bp, Homo sapiens
  MAP TO AL161747.1; EXPRESSED IN BONE MARROW, SIGNAL = 0.46
tcccaagacatgcaactcacccgtgaatctttgcagtacatttcatactgttgaatcatctgcctgctggccagactgccatggtacacaatagtgttcatttctgtccatgtattaaattctcgctcccagttagtaattgtggacagtggggcaatgaccaagaagggaccatggatgcccacattatatacttcctgcaagaaggcaatggactgaatagttttgcccaatcccatctcatcagccaggatgcagttctgcctgcagattcaccatgggaaaaaaaaaatgttaaaagatactatctttaaaaaaaatagagtatgtaggaagaaattgtttcaatagaaaacaaataaaaataatcccagaactaagcttacatcttatggcccattctttcctttacctgttataccaattaaagagcagccaattaaccccttccaactgatattcccgtagctggtttctgtttttatattcatgtgatagctccaatttcttccaggcacttgcctgcggacgattctaaaaa

SEQ ID NO: 16141 - DNA, 562 bp, Homo sapiens
  MAP TO AC012177.2; EXPRESSED IN BONE MARROW, SIGNAL = 3.7
ggcatttattgaaacggtggatacttaccagcaaaaaaagacacaggtcttgttagctgctacatatacaaagaaagaaattgcagtagaaattctacaaacacactttacgtattgctacagaggaaaagcacagagtccaaatgtgcacctcaaatctagcctatatgattatctttctctctccctctcacacacacgcgctttttaaaaatagatttggctaattatgaacacaagatgaccaatattctacactttacaacaaaactttgaatgcatttcttatagttcctacgtggtttctttcctctctcttatttagcttgttatggtaataactggaatattcatccagtatcacttctgcttcagtaagttcccttggtttttccctgggaaaaacataatcatacaattaaaactcaaaaaatgatacaataagctccataaaagtatacatattgaactgagacaggattagctccttctgaaagtggtgggacttagtaggagagacataagagtggacccctggaggtctgcttagtggagcctgtcc

SEQ ID NO: 16142 - DNA, 525 bp, Homo sapiens
  MAP TO AL158075.2; EXPRESSED IN BONE MARROW, SIGNAL = 1.8
ccattccaattgcattttccttaaagttcacaaccatcttaaggccatgctcccatgcctagaggctgacaaccttcctaaaagagctagattcctacacggtcttagccccagtatatacatacaaattaaaagagaaccctaatcaccactttctcttggagtaacgtcctaagtctgaataatgtacatatcatcacccttcgttaactgtagaacttagtatttcaatcaaatgacacaacctagctgatgtgacatatttagcaatgtgcaccactgttgatatgctcatgcaaaccaagcacttctggggacaactggagaacaatggagtgagacagaagatgtaagtgtaataacaaatgcaacaaccaccaccttatcagaaaggttgttggaagcatttactaagataatacaaagaaaggctgttactgttcttacctcacctcctcagacttacctggactaagttatgacttgagagaaatgctccccctcccctcacttccaaatcctgga

SEQ ID NO: 16143 - DNA, 573 bp, Homo sapiens
  MAP TO AP001242.1; EXPRESSED IN BONE MARROW, SIGNAL = 2.4
tgaatgggccatatgtgatggtatttggtaaattatttccccaactgcacctgcaagaatcataaaaacggggtattgttcagtttctctgttccgccaggctgagctaatttttgttttgggttgtagcacagtgtgagggtgcttattgccctgctgacagtaatatgttgcagcatcttcagcttccaggctactgatggtaaaggtgaaatctgtcccagatccactgccactgaacctcgaggggacccctgagatggactgggaagcatacttgatgaggagctttggggcttgatctggtttctgctggtaccagtataagtagttgccaatgccttcactggcctggcaggtgatggtgactttctcccctggagtcacagagaggaaagctggagactgtgtcatcacaacatcacccctggaggctgaaaacatacagcaaacattagcacaatataagcatctgcttaatgaaatcaccactaatctagtagcacaagatgaaagaatacgcattacttaaaaaaaaatcacatttaaaaacaagccaagttccatatggtg

SEQ ID NO: 16144 - DNA, 582 bp, Homo sapiens
  MAP TO AC020897.3; EXPRESSED IN BONE MARROW, SIGNAL = 1.7
ggaacccctcctatccacacaaagttcttctctaagtctcctcttgaatttcttaaaaatgttttatttttaattaattacagattcacaggaagttgaagaaaaacttatgagaaaagctccatatgccctttgcccagttttccccaacagtaacatcttgcgtaagtacaatacagtaacaaatcagtaaattgatattgatataatccacagagattatttgggttttatgagttttgcatgtgcttatttatttacttatgtgtgtgtgtgtgtgtgtgtctgtgtgtgtagttctgtgcaattttgtcagatatgtggattcctgtaaccaccaccataatgtagataaagaactgtttcattactacaggttttcttgtgctagaactttacagctatatccactcctgtcctatcactaacttactattctatccttgagctctgtacttttgttatttcaaatatatatatttgatatataaatatgcagacaatccggatccctcatccactgctgatgggaatataaaatggtataatcactctggaaaacagttgggcgtgtcctataaa

SEQ ID NO: 16145 - DNA, 546 bp, Homo sapiens
  MAP TO AL138831.2; EXPRESSED IN BONE MARROW, SIGNAL = 1.5
ttggaaaaacagagagccttgattaaggccgaacttgataatgagttaatggaaggaaaggtccagtctggtatggggctcattttgcaaggttatgagtctggctctgaagaagagggggaaattcatgaaaaggcaagaaatggaaataggtctagtactagatcttcaagtacaaaggggaaacttgaacttgtggacaataaaattactacaaagaaacgaagtaaaagcagatccaaagaacggactagacataggtctgataaaaagaaaagtaaggggggtattgaaatcgttaaagagaaaacaactaggagcaagtcaaaggagaggaaaaaatctaaaagcccatccaaaagaagtaagtctcaagatcaagcaaggaaatcaaaatcccctacccttagaaggcgatctcaagagaaaattggtaaggccagatctcctactgatgataaggttaaaattgaagataaaagtaaatcaaaagataggaaaaaatccccaattataaatgaaagtagaagtcgcgatcgaggtaaa

SEQ ID NO: 16146 - DNA, 551 bp, Homo sapiens
  MAP TO AC005323.1; EXPRESSED IN BONE MARROW, SIGNAL = 1.7
ttgcatttgttactgctgactctaaattattaacgtttctcagctcttattgtctctaagtatttcttaaaatagaccttcaatcccactgtactaagctaattcagaactccctttgtatcaataacaagttggggagtccttattaagtgcattgttgttttttatagaagtggaattggtactacaataactgaccagttactctcttttaaggcttaaaataatttctacagtggtaagaaaaggtcatagtcttcactaattccttcatatagatatttccattgccttactgtaaaatcctctcaccaatcagctacaaactcacatcaaaaatctcaaaaccagcaatgtccaagaccccgatgaagtactgcctgggctgcttggtgtccagctgctggttgatgcgggcaaccatccacaggaacatcttctcgtagacggctttggccagagcacctactgcgttggacaccttaaaagacaaaattataactctcgaagttattaaaggcctatgaaaatgctttcatccctggcagtta

SEQ ID NO: 16147 - DNA, 507 bp, Homo sapiens
  MAP TO AC010361.3; EXPRESSED IN BONE MARROW, SIGNAL = 3.9
ctttctctctttgggggtccggagttagcatgtaagaaaccggactatcctgaagattccatgctggagaaatcacacagatcacagagatggagcaagaggcccaagcagccccagatgtttcagtcccagctgtttgaatttttgcagatgatataccagtaaggtgagtaaagaaacttaggagctgactcagccacagccacatgactgcaacctcatgagacaccttgagcaaaaactttatggctgagcttctcctgaattcttgacccacaaaaactgtgtattaaatgattattgttttattaaattttgaattgattttgtacacagccattatgaatgaaagaacttgcctaagcaaaaggaatgactgccaaagctctaagatctgggccaccatatgagataatgtagattttactgattcaaagagctaaacccttaccattattaattttctaaaaatttagtgttctgaattcagttttcaagtgctgtcgc

SEQ ID NO: 16148 - DNA, 523 bp, Homo sapiens
  MAP TO AC008636.4; EXPRESSED IN BONE MARROW, SIGNAL = 2.2
ttcccagtcaggcataaaccacaaatgttcacacccttggacagaagatctctctctgttccaggtcgtggcaccttcactggacctctttaagccttaatttctccatctgtagtacacaggtgatgagaacactgcccttcttctccctgtctgaaaggtctagtgaggcagtgtacaggaaagctgtgtctagactgtgaagtgcagttcacatgtaagggaggagtcataaggatgactactaagcaactgttctcactcttctgtcctcttctgtctcatagagcacctgaagaagcctcttgaagactacatggcccttttccccagtgtgaggattcttcgaaccaagaaacgggaagggctgataaggacccgaatgctgggggcctcagtggcaactggggatgtcatcacattcttggattcacactgtgaagccaatgtcaactggcttccccccttgcttggtaagggagcccctcccacttggagggaggcaaactgcaatgagccagtg

SEQ ID NO: 16149 - DNA, 558 bp, Homo sapiens
  MAP TO AC023890.3; EXPRESSED IN BONE MARROW, SIGNAL = 2.1
ttgcaaaattctgcgtgaaggcctaggaactccaattcacttgactcacttatccttctcaagaattactctattccacactatgttgtaaacatagatcatgaggccttttctcttaagaactgatgaggaaagcattaagacttacctaaaggaagcgtcctataaataagctttccttaaattaggtcaaggtttctgggatgagacaccaagcaaaaatagtctcttacagagctggaggcacttacctccccggcttttgatgctcgccttaagaagtgtagtggcaagggtcgacccaactcaaatttcaattctttcaaaattagagtttccatttctcggatttgggaactggtataagcattgtctgtgatgtaaacaaagtcttcaatatttggagaaaacatctcctcatacttggaagccaagagcagagcagtaatcccaactaattgaagcttcttccgggaaactggctgaacctaatggaaaattaatgtaacaaaagtcacacctaacaagaagagtgaagctttaggtgggagaagggga

SEQ ID NO: 16150 - DNA, 506 bp, Homo sapiens
  MAP TO AC012178.2; EXPRESSED IN BONE MARROW, SIGNAL = 1.6; EXPRESSED IN PLACENTA, SIGNAL = 1.4
tgacctgggagagtaatggggcagggttcaaaatctcttctcagggatatagcagcatgtaatcttccttgctcttctccctaactgaactcaatccttgcaatctctgactccttgaaggcagaaaaatacactctgattgatgatcaattctcccgaatctattattaacggcacaatttctgtgcctagagtcttacagggtcttgatttctgatggtcaaaacttaggatttcagaatgcagaaaactgtttctgaagctcctgtttctgaaacacagaagcaagtttcaaaagcttgtcttgaaactcaaaatcatggaactgattctcctcctctttctgaatttcttatgtaacattctttccctgaagcagagaacaaagaaagtcctggcatcccaggctggcagaagcatcattaggaaattagggagaggattagaaacatatctgttactatttgccaatatgcttttgctaaacgcatcagacaggtaggaca

SEQ ID NO: 16151 - DNA, 590 bp, Homo sapiens
  MAP TO AC018552.2; EXPRESSED IN BONE MARROW, SIGNAL = 1.6
ctgaaaagccaggcagactccctggaggaaggggtaaaggagtaatagcacaaacatatgaaaccttttatttacagagccatgtgccaagccttttgtacatgctttccccaaagcatcctaccagccctgggagatggggtatttgcttttaccttggaaacagccccagagagggtctgcatcctgctcaagtgcaccgttagtgtgatgcatggagctggaattctagcccaaccaccagactctggagccccagctcctttccctgctcctcatccttgctgcccatcttcgtccagcccattcacactctctgcattccttccttaggtcaggaaaagcccaccgaagggccaagaaacacctgcctggggagcaacaacatgtacgacatcttcaacttgaatgacaaggctttgtgcttcaccaagtgcaggcagtcgggcagcgactcctgcaatgtggaaaacttgcagaggtgagggggccccctgagctggagggggaatctgaagctgctgggaggaggactatcaggaagggatggggccatcttcccccatggccccagaaaatgttgctcccat

SEQ ID NO: 16152 - DNA, 521 bp, Homo sapiens
  MAP TO AL049831.2; EXPRESSED IN BONE MARROW, SIGNAL = 1.8
caaatcagagaaagccctgctctttctcttctgtctctgtaaggattccctcttcagaatgttttatttctcttgccaagtacttaaatttgacctgccctttaaagcccatgtcaagaattacttctttgataaaacttgtttgtttgttccttgcctgattagtctggctgtcattgatctttttctacaaacaaacatttaatttaatattcaatgattttataatgttattatttgcactgattttatttgtgttagtcttatttgttctaactaagtgataagtacttcaggacagggacatgctttatatttattcttaccctctaacagtactagcatagtgctcagaaggtagtagatgctcaaaaaattagttgactaattttctttttgtataaaatgagcagtgaggagtatagaaccaatgcttattgaacatctaacatgtgccaggcacaatgggagcatattatatataatgtctaacttaataatcacaacagcagagtgaggga

SEQ ID NO: 16153 - DNA, 527 bp, Homo sapiens
  MAP TO AC023078.2; EXPRESSED IN BONE MARROW, SIGNAL = 3.6
agggtggtgcagagaatcagagatgatacagctgttgatcacctctggtttgtgttcccagggacaccagactagggttcctgagcgtggatccaaccatcccagccttgggtacagaactgacaccaatcaatggacgtgaggagactccttgctacaagcaaaccctgagcctcacagggctgacgtgcatcgtttcccttgtcgggatgacaggaaatgcagtcgtgctctggctcctgggcttccgcatgcgcaggaacgccttctccatctacatcttcaacctgtccatggccgacttcctctttctcagaagccacattatacgttttccgttaagcctcatcaatatcctccatcccatcttcaaaatcctcagccctgtgatgatgttttcctaccttgcaagcctgagctttctaagcgccatgagcaccgagcgctgcctgtacgtcctgtggcccatctggtagcgctgccgcccccgcccctacacctgtcagcggtcgtgtgtgtcatgctct

SEQ ID NO: 16154 - DNA, 592 bp, Homo sapiens; identical to SEQ ID NO: 11984
  MAP TO AC013533.3; EXPRESSED IN BONE MARROW, SIGNAL = 6.2

SEQ ID NO: 16155 - DNA, 567 bp, Homo sapiens
  MAP TO AP001328.1; EXPRESSED IN BONE MARROW, SIGNAL = 2.6
tacctccagggtcttaggggaatgatatgatcttgtagctgactagataggttttgagaaacctgacctctgttttggtcatctttgctcttattgtggatgtaatttgatctcttcagaatgtctaataatatttctttcctttttaggtttttcaggcagaaaatccttttgattttatggaaaacatttctttagaaggaaaaacaaatttctttgagaaacgagtttcagagtatcagcgttttgcagttatggcagaaaccacagataacgtcttcaccttggatgcagatttttaaaaaacctcttgttttaaaactctataaacttgtcattggtaaatagtagtctattttcctctgcttaaaaaaaattttaagtatatcctttaaaggactgggggtttgctcaaaaggaaatccaaaacctattctaaacaatttgcatttatataattttcctgtttaacaacaagagtgtgacctaaatgcttttgtcttgtcactgaaataaaagatggcattatgtggttaagagcatggggcgaggggtcagacatgagtc

SEQ ID NO: 16156 - DNA, 527 bp, Homo sapiens
  MAP TO AC006548.20; EXPRESSED IN BONE MARROW, SIGNAL = 1.8
gagggtcctcacacagaagggcacagggtagtggggagggcctcccagagggagactaatggcccagagacaggaaaggagctgtgaagagttcaaccgcaagggcagcagggcagaggccagggccactgaggcaaatgcaaaacagcggttctcacgttcccaggcagcctggaggggctctgagtggccaccatgtagccccattcccctctcccgcccaccttccaggggtgctgctggctgttggcttggcaactgtgctgttgatgggcctgggcctcctgctgagtccctccctgccccacgcctgccccatgcaggcttggaagactcagtggagaaggctaggacagcctcaggtgcctgctgagtatgtgatcctcagagacaggtgagttccccctgccctccacacaccaggcccagccctggccagcccggggactgctgtggcaggtctggccactccccaggagcccgggcactggccaagctccccctgtccctgtggacttgggacagat

SEQ ID NO: 16157 - DNA, 594 bp, Homo sapiens
  MAP TO AC009399.5; EXPRESSED IN BONE MARROW, SIGNAL = 2.3
aaggaaggtattgggagagaggaacatttaatccttttttcagcaacattagtgattcttcgtatttagtgattacccaaccagctgaaatgaatgttaaaactgagacagagagtgaagaggaggaagaagtcgcattagataatgaagatgaagaacaggaggcttcccaggaggagtctgcaggatttcttagagaaaatcaagccaaatatacaccctcattgacagctttggtagaaaatacacccaaagaaaattccatgaaagttcgtgaatggaataataaaggtggacactgctgcaaacttgagactcaggagctagagcctaaatttaacctgatgcagattcttcaagataatggcaatcttaggtatgtatcttttataattatattagtaaaactgataacagctaacttgtactgtgtaccagctactattttagtggttttacagtcatttttcatttaatatttacagaagtcctatgaaataatgactgtgattagatactgttattattaaggaaactgagccttagagaggttaggtaacttgtctaaggtagagctatgatacaaacccgggt

SEQ ID NO: 16158 - DNA, 529 bp, Homo sapiens
  MAP TO AL132801.1; EXPRESSED IN BONE MARROW, SIGNAL = 1.6
gcccaaattctgtctgtgaactgcctgttagaatttatagatctcatttggttctgatagggcatggtatttgtcttagattgttttggtgccatgttaaggaaataaatatgtttattactgatcatttgactttttttaagtttcattcatcacctgtgtatatcatgcaggttccccctactgagacagttcctcaggtcaaaaaagaaaaacatagcacacaagctaaaaatagagcaaaaaggaaacctccaaaaggaatgtttctttctcaagaagatgtggaggctgtttctgccaatgccactgctgctaccacggtgctgagacaactagacatggaattggtttcagtcaaacgacaggtactcataagcctggtcttggatgtaaaagaattaattagcactttagaggtgtttctgttattcatatatgtgaatgttctctttccgcaaatctcaaaggagcattttgtttcgaaggaattggacagatcttaagtaccagcccattgtttttcttt

SEQ ID NO: 16159 - DNA, 509 bp, Homo sapiens
  MAP TO AC023851.2; EXPRESSED IN BONE MARROW, SIGNAL = 5.4
cctcacctcatctggctctcagtcccctttgtttctcttatattgttctgccattgccctaaagccaaaagatctttggggcagcggccctgtttggtgtttggcacaatttcatttactgaacatctcgatgtacatttatgatgccatataactaataataaaaacaggacagcctagggcatcgttttttattgtcagctccgtggcagctgtgggggatggggaggcagagaatagagagcgcaggaatggtgcagtactccccaggagagcccagtccttgctgagcccattctgcaagccacattccttcccaaatgatccacaccgtgtccagaccctctcaaagagccattccaagctttgtgaacactctgcaactgtgcagaaggccagatcagaggcttttgtgcactaccagggaggtacataagctgtgcaccccactatttttcagatggcaagtttgcccacctttaggcatgtgcagaatggatgacagcaga

SEQ ID NO: 16160 - DNA, 523 bp, Homo sapiens
  MAP TO AL159141.1; EXPRESSED IN BONE MARROW, SIGNAL = 1.6
acacctgtaaagtgccccagacaagatttgcactgagggctttctgcctctgaggacagcctttctactgctcctcagctgcacctccccaccttctctgttgtttttgcaacgagcagtcaatggccagtttgcaggccatgttggtagagtaagtgagatgcatggcctcagtctatgacacattgctgcacctcttgaccccgctatggggtttagtcatccctaggactaactgccgggagactccctacagattcctctcacctgcaagagcacagcttctcctaagacctaggaacatgctttttttttttttttaaaggcgatgttcctcctggaagaactgcattcctttctggcacagacaagaccttctctcctgggagagtttgatctcaggcacgaggaggaagtggagaagggaggtttccatttgggaagccaacagcagttcagattcatctatcagcacttacttcctagagaacaggatttaaatggaagctgagtgtgttgcagc

SEQ ID NO: 16161 - DNA, 554 bp, Homo sapiens
  MAP TO AL132655.5; EXPRESSED IN BONE MARROW, SIGNAL = 4.8
agtggctttcagcaggactcacctcagggaacctggtacgggggtgggctcaggctccagggaggggccggtgctgatgggggagcagggaggactgggtacatttccccagctctgaccttatctgcttgtttccctagaaaatcagccatttgggcggaaaggggagagggaagatgagcaaaggacagaacagtccaaaaggaagtgaagcagggtctgtccaaactggaactgaccccttccatccagagacgcgacccatgctaggctctggcctggggttcttggcttctcctgtcttccatgcagctatccctgaggacaaaatccatgaacccgaagagaaggaagagggagtcctttgggaggctaagtgtttcactgttctgcaagtccagcgacagagcttcctgagttattcccacctgtatgtggtcgccaatccggaggccaccaaagcctcagcgtacaggcaccaggagacctagggacaaagacctcagatttcaggggctccaagagtgtcctgtcccaaagggaacaggcataaa

SEQ ID NO: 16162 - DNA, 560 bp, Homo sapiens
  MAP TO AL138717.2; EXPRESSED IN PLACENTA, SIGNAL = 1.6; EXPRESSED IN BONE MARROW, SIGNAL = 1.6
acctttgcaacgtatttcggggggttgcagccacatggtttccaggtgaagagtgtgtgtgggaggctcaggaagcaaagcggccttctctcacaggcgttgcctttggtcctaggatgattacatggaagccctggccaggctccacctcacggtgaccagggcctacaaagtgaatactgacatcaacttcgaggtgtttattcataaagtggatggtctgtcagatgaccacaaaattgaaacccaaagagatattcaccagagggcaaacgatgaccttgcagatgctggattagaaaaaattcacctcaggtgagaacagaaaccccttaaggatcccaataaaggatggaagaaagcaagtttggggttcggagtcaccatgattggcttggcatgggcagtaatttaccttctttttaccctgtttcatgctgtagatggataggattaggggaaaatgagctttgcatgtgctaatgctaatctttagtgaaagcgatgtttttttgttttttaacaaatggtcaaagctaaggttctcccctcacatgaga

SEQ ID NO: 16163 - DNA, 524 bp, Homo sapiens
  MAP TO AC008638.4; EXPRESSED IN BONE MARROW, SIGNAL = 2.4
ctcagtctgggttcctccagccgctcaaattttggatgctttcagagccacctcttaaggatgactttgggggccatgaacagacaactaactatgcccaggaaaatcatgagttcgtctgggtcaatagaataaatggcacacagaatgtgagaagactagaacagaacaaggtaactgcatctgagcaattgtgagataacttggtacatagtaaaacaattgggaagggtggggggtaacttctggaagggaggatccatatgcctcagataacacgtcagcatggaatttataaagcaaacggccaaaagccacattgtggcaattcaggattggtgtagactcctggcatgggtggtcatctctattctgaatggagtagccttgggtgtgtccatagggatctacaagctgacttccacatctgaacttactccagtacttaagttgtagttttaacccaaaacttctatactgctggcttgtgttgtgatgcagatgccaaggtgtggggttagatg

SEQ ID NO: 16164 - DNA, 571 bp, Homo sapiens
  MAP TO AC023404.2; EXPRESSED IN BONE MARROW, SIGNAL = 1.5
tggaggcaaaaacaagaagctattttatgctaaaccacacttactggcttatccttgatagtgggacttgatacacaaaggtagagttttccatcttcttcaatgcatgcatcaatgagagcctgcacagagctttcatcttgaaacagcaggaatgcatagcctggaaaaaagggggaaagaaggcttacatgttttcctattttttggtaattctccagggaaaggaatcatgcacaaaactaaagaaaggaaaaaggaataggaaaaaaattaaaacaatatttataccaaaagtctgatgacatcaacatacagttcattttggtagtatcttgaagcatcttttagagtaaaattaaatttgaattaaaagaatattatgttgaaattttaaagagcatttgggaaaatgcaagtttaacaatgcaacattttacagtgaaggtgaacatttatgaaaaggctacacattaaacaatgtaagaataaattacataagtataatgaatcttgagaattacctttaggaggaaaataggatttgctctcagctttatgaggccaatcc

SEQ ID NO: 16165 - DNA, 584 bp, Homo sapiens
  MAP TO AC018552.2; EXPRESSED IN BONE MARROW, SIGNAL = 1.7
ttaaaggcggccactaattccgtttttttcacaatgtaatatggggcaaatgaaacatgtctttgaggtcactttggcattaaagagacaccagactggagccaggtgacggcccctcccacagcgggagagccagggattgatgggtggaaatgggagaggcaccttcacagacagaaaagctcagccaggggacttcctgggtttgctggccagaggtaccactcccagtcccaccacagctgccccctcctccagatgctggttccgtgaagggacaaccatgtacgccctctatatcaccgtccacggctacttcctcatcaccttcctctttggcatggtggtcctggccctggtggtctggaagatcttcaccctgtcccgtgctacagcggtcaaggagcgggggaagaaccggaagaaggtgctcaccctgctgggcctctcgagcctggtgggtgtgacatgggggttggccatcttcaccccgttgggcctctccaccgtctacatctttgcacttttcaactccttgcaaggtgaggcccctgcaccagggaggtgatgggctgtgttgtctg

SEQ ID NO: 16166 - DNA, 580 bp, Homo sapiens
  MAP TO AL133467.1; EXPRESSED IN BONE MARROW, SIGNAL = 1.5
tggagtgagactggtgcttgagcaggcattaacacagaggctcaccacaggcacccacctgccctgggtcggcggccatcacagattcgattcccagccagtggactctgaaagggaggttgcgtgcaggaagcatattggggctattgtgagcaacacctgcagcggtgcagggcagggagcagggctgggcagaggcagaggctgccatgtggcatggttgagcataggaagctctagatggttcttcagagttgcactgagtggaggccagcagctgcctctctgccctgggccccactgcccgcatcgacagtgatcaggctggaaggacggcatggccttgggagaggcagttctcttggtagagggcaattcctgggaagggacccagcgaggatctcccagcctccaataaccccacagctggggaggagaactcggtcctgaaggaggatctaggtgatgccctacagcatctgctctgggaggagagagggaggagctggcggaagagactccctgtggactggggctgtagagcagagggcagaagggatgtccaggctgagaaaacagc

SEQ ID NO: 16167 - DNA, 556 bp, Homo sapiens
  MAP TO AC022311.3; EXPRESSED IN PLACENTA, SIGNAL = 1.3; EXPRESSED IN BONE MARROW, SIGNAL = 1.5
taaatgtggccaagggtgagcttgaatggcatagttacagaacacttcagaaggcaggttttctaaattcatagtatctctcaaaatagcacaaatgaagttaacatatatcctcacatgaacgatggacacaatgaaggtataagaacattagaaatcagaagaattgggttctcccaagttgaaccactgaaacagactagagtgacaactctggacaatctcattatcctcagtgatgaggacacctttattcatgtgggtggctgtcgtgaatgcccgttttaggcagtgatggaaggtttcctgggaagtataaaggacccagtgaatcttagaatttggaagttgagaggtattttagacagcagctagtttaaccccatcactccacaaattctgaaactcagcaccagacagcaaatgtttcttatccacaccaggagtacagttgatagcaaatagaaagcattcaagattctatacactatcacttaggttttttatcattgtattcgttttctctctgtgtgtgacagatcaccacaagcagcat

SEQ ID NO: 16168 - DNA, 525 bp, Homo sapiens
  MAP TO AC009242.2; EXPRESSED IN BONE MARROW, SIGNAL = 1.5
ccacagagctcttccaggtcctgccttgactcccctggatgtttaattccccacacaaagtcctctccacctctggctctggccactccagagctcttcacaccactggccttgaccctgtttctcacccaagtctcccaagccctggccttctcccaaggtctctcggccctgcccgcaccccatgacatgttcttcctctcccgctcggaatattcccatcacccctcggcctccatcctccaagcaggggaaggagccaagtagcaacctttttgctggaggcaggagggactacgtgctgctagtgtcaaccaaaccaggcacttactccagctgcagccatggaatttgcccatggccttccctgctcagcccaggacccacccccacctctgcaatgcccaccctctggccaggttccttgggctgggatggggtcctgacactctgccccctgtcctcctccgttccttcctaaacaagagactgtaccccttgactcctactctgagcccacaaggc

SEQ ID NO: 16169 - DNA, 531 bp, Homo sapiens
  MAP TO AC018711.2; EXPRESSED IN BONE MARROW, SIGNAL = 1.5
taagagagcatggtgcatcgttacctccagttccgctaaaacatgagcagcatcctcattgttctcttggacctccagatcctcctcagggatggtctcccagttgccctgatgagcaaccagcgtgtgcactagttcatactgtccagggagcgccaggctgacccgagtctgagtcccataggtgaagcggaggcgccgaagcttacagctctcctcactgcccagcttggtggtgggaagcacctgcacccccaacagcagattcaacagctggcacttgacgttacaatcctggccgaggatcagtatgcaagggaggcagtccacaatctgctggaggtacttctcttccttaggtgggaaggaaatgcagctcagttggcctggttggggaaggggagagtggaggaagagaaaggagtagagagagaggagtgaggaaggggagagagagagactcacgcagaaatcccatgaggaagacaaggtcctagaggagaaatttctaggaaccttggttgaaggaca

SEQ ID NO: 16170 - DNA, 592 bp, Homo sapiens
  MAP TO AL109658.5; EXPRESSED IN BONE MARROW, SIGNAL = 1.5
tctcccgacaagtccaaaaccaattgtctcacctttcactttcaggctggtgccctgtccagacaggtattgcctgttgggtttcctctgaaactttacacagtaataggtgcctgcatcctcactggagacgttttgcagaagaatgctgaagtcattgttggaggcctgcaccgctgtctccttggggtgggagatgcctccaaagttgtaaatggcctcccggctcagaccagctccctggaaccacctgatgggtccagggggaccgtctccaagcactgtgcagttcagaaagacagtgtctccagtggtccccaacaccaattcctggggctggatgatccacaggtctggttcagggtccccagctcctgaagccaaagaggaggtccttgttgaattccctctcctcttccatcgttcactcatttcctacctggtgttttccctcccttccttctttccagatttcttcactcagccactccttcctgctttctttattactcaccagttgactcattcagtaaaaaagctctgagtacctactacataccaatggtaggattggggaacatgaaactcagga

SEQ ID NO: 16171 - DNA, 535 bp, Homo sapiens
  MAP TO AC020714.2; EXPRESSED IN PLACENTA, SIGNAL = 1.5; EXPRESSED IN BONE MARROW, SIGNAL = 3.5
ccactgcttggtttgatctgaataaataaaatcttataaaagtcagcagaatcacttcattatgtcccaaattttggtaaccagactaaaggttttggtttataaatagtttaatttatgtatttgttatagtttatagcagtttggtttgtaataaatctaaatccatgtaagagtaagacaagcttaaaaggatttctgttatgagaaatcagtagtcactatcaaacttttaatcactagtcactctccaactcattcaatatacaaatataaatgtaaagttgtataaaatcttcttacgcatgtgggattgtggttttgaagatatccagtgtgcagttgcaagttttatcccagatttctagggtaaatttttcaccattcagaataacaacattctctaaacagtttgtaccagatcgcgctaactgctcattgtctaggaaagaaaagagcaattcatttatatattaccagggtcacatttaacactttgtgtcacatatctggtacagacctaccttgctgcaca

SEQ ID NO: 16172 - DNA, 510 bp, Homo sapiens
  MAP TO AC013557.3; EXPRESSED IN BONE MARROW, SIGNAL = 1.6; EXPRESSED IN HELA, SIGNAL =   2
tgaggctcagcagatgtttgcacttatcgttgtgctgcttagtgaccttcaccagccacttagtgaatttttccaccacctgctcggccccagcagcctgagcctgctgtagctgcttctctgcctcagccccgcagttcactgcatttggccagctcgcctgacttgtgctgtggtggcgtgccctcaaagacatacatgggcttgatgccgttctccatcacgcgaatagtgcggtagaacatgcctatcaggtggctggtggtctcaccctcctcgttctgcagcacatccccaccctggcgaacagcaatcaggaactgataagtgctcatagaggcatcaatggccaccttacggccaaagtagctcttgatgtcattctcccgggtggcactgggggccacatcagcaattagtttggccaggccttgaatacccatggcaacacagaggagggatgactggcctttgggacacgaggcctcggcggctaaagcttgattcagg

SEQ ID NO: 16173 - DNA, 571 bp, Homo sapiens
  MAP TO AL035705.22; EXPRESSED IN BONE MARROW, SIGNAL = 1.7
gaaatgtcaaagccctgaatgacatttaaagttggataagaatcaacttctaaatgtgatgaatcaacttcattcatcacttgagaattgatgtactaatttagaaacataaattgagtactaatttagaaacataaattgagtactaatttagaaacaatgtctgttcagtctaaccaagagtatgcaaaaaaaggactgataaaggttaaatgaattaacacttgctgaatatgaacatgaaaaaaaatctttgtaaaaggttaacaattaacaattattataaaattcctaaaaaacattttaagataggtgtctctttggtattattagatacaaaaatacttacagtttgataatatgaggatgacgaaagagttttagattttgaatttctcgttttatttttccaacaacatctaaactgcgaatcttctgtctatttaagattttaactgccactttatggcctgttaattgatgttctccaactaaagaaaagaaaaaggaaaaaaaatgtgctatcatatcaacataatcatttattcatgcttccttccattgtgcccta

SEQ ID NO: 16174 - DNA, 543 bp, Homo sapiens
  MAP TO AL138688.11; EXPRESSED IN BONE MARROW, SIGNAL = 1.7
ctctctgtgggcaagattccagacctatttttttctagcctggaaatttcactgaaactattttgttcttgattcattagaaagttttaaaaaatctctaagcctattttaaaactcaaatgctatacctatagcatttgagtattatatttacatacatggtttttaagctgctgtatacaattacttcttatatccctgtttttataaaatgttaaacatcactatagttacagtaccaaaaatcattttttaaattctaaaactattacttatattatcactcactttctcctttttaaacttttaatggttattcttgtattttttaataaaattgacacgaataaatccttaaatttacaaaagaaaaatagcaagccagcatctttctcatttatcctggatttcttcggctctggacaagtaagtggataggtcatagaattcctacacaagaatacctggactaataactatgaatataatttaaacatcactttacaaaaaattaatccaatagggtttaggtctcctttcacg

SEQ ID NO: 16175 - DNA, 524 bp, Homo sapiens
  MAP TO AC025289.1; EXPRESSED IN BONE MARROW, SIGNAL = 1.8
agtgggtgttgtctccaagccgtgctccagatactgccgaagctcaccagcatgcttcacgagcaaccgcagcaggcgcaatgtggccatcacaatcatgtcatcagtgctctgttccactctgtgacttaaatgcagcctagggtcatcctcatctaaaggaatctaagagtgaaagatgaggggaataaataagaaaataactcagaacactacttttgtttaataagaaaaagtttccaaaataaattttcttagaacactgtgctacatacttgaccagcgttgagtttaaggaaagtaaagtatgcactgcaagagagtttgtacaggctgaatattctatctacaactttcctccacactttaataactccttcagttgcactttcatcaagttctgaaagccatgggcagcttgatatcaactgacgccagataacatcaaccatgtcatcttcttcgttgtcttcactctcagttatctgaagtgttatatcttcatcctgaagaaaaattgtgca

SEQ ID NO: 16176 - DNA, 599 bp, Homo sapiens
  MAP TO AL078590.27; EXPRESSED IN BONE MARROW, SIGNAL = 2.1
ctaagttcaaggccaaagcctgtgttcttaaccattattctattctagtccttgatgtgctgtattacttgttgagagtaattaatagtggcaaaggggatgagattgcccaggaagatgttatgcatgtgggtcaaatactgaatcctgaagaacatcaaatatgagtggcagatgaaagtagaggattagaagagactaaagaaaagtctgtgaacccatactggactctttaaagataacacagagagtaaaactgcaaagaaactcttaataaatattttttcatagtaacattgatgatgaaaacataagtattcttagggaccctgaaggaatatttcactaaggtatcatctaatggcacgctgtgatgtttcttcataatattttcaactacactgtattttttttaattgctgaaaatggaggaagtaacctggagacaatataatttacgttaagatttttttaaggaacaaaatgaatgtgttttacaggtagatgttaaatagtggaaaccaatatgaagaaaactgcttttattgctgatgagttatctatctccaacaataatcagcatttggaatggggattta

SEQ ID NO: 16177 - DNA, 588 bp, Homo sapiens
  MAP TO AC021876.2; EXPRESSED IN BONE MARROW, SIGNAL = 6.5; EXPRESSED IN PLACENTA, SIGNAL = 2.8
tgccccttttcaactttcagagcactagacaaactgaatggatttcagttagagaatttcaccttgaaagtagcctatatccctgatgaaatggccgcccagcaaaaccccttgcagcagccccgaggtcgccgggggcttgggcagaggggctcctcaaggcaggggtctccaggatccgtatccaagcagaaaccatgtgatttgcctctgcgcctgctggttcccacccaatttgttggagccatcataggaaaagaaggtgccaccattcggaacatcaccaaacagacccagtctaagtgagtatgctgagtgtgtggtgggtgttcatgagaattccccttggaatcttagtaacagtgtgtcgttctggtacttggtgcccttctgaacacagccatgaggactccttgtacagtacttgggaatgtgtaaaaatcttgcagtatcttggtgttcatttcatataaatctggagctaatcctcattctcaaagggaacgtcagattttcacacatgaatggaaaacaaatgatacctaatcctcttctggttggggaagctctggaagacagaaaggcagc

SEQ ID NO: 16178 - DNA, 576 bp, Homo sapiens
  MAP TO AC022211.2; EXPRESSED IN BONE MARROW, SIGNAL = 3.6
tttccatctggcccttacaccctggacaagtcagctgatcccaggaggcaaatggggacgccaccctctactgacgtggctgctgtgcagatgagtaaggtcatgaatacactgccaagtgcacagcccgtgtctctgacaaggcacgtgctcagcaaatgctggctgagctcctgaagggcagcgcagccccgggaggcagcctttgccgtcggcggtcccaccttcatcagctctctgtccccgtccgaagagtcctcctggctgtaatgaagcagcatctcactgagcagtctcacgttgttgttaacttcctctaacgtgtgcagacgcttggtcaccttctggatccgtgcctcgtcctgccccagtgaagaagttcaagagaaagagagcgtcacttgactgtctttccacttccaccaggtcacaccttaccccacaacacaagtacagacgctcggaagctcctttcagtgtggggtgcctggggcccagtctatacttctgctttcacaacactgctcccaacccactcctctcttccgtgctcccgcggaagctattgtgctcctc

SEQ ID NO: 16179 - DNA, 515 bp, Homo sapiens
  MAP TO AL118518.13; EXPRESSED IN PLACENTA, SIGNAL = 7.6; EXPRESSED IN BONE MARROW, SIGNAL = 6.5
tacagggaaaagcatagccgatctgaattatttcactatcttgtcattcctgtccgtaaattattctctcctattttgaagaccccgattctcatactgcagtttctaacacgtgactatggtggtgatgtgtcatttactgagacaagcagccttctttcctcatggaaggacacccccatttttggagagatcaaacatctgagctcaagagctcaagaggacagcaaacatctccttaaagtcctacacagctgcaaagcaaacactgctccatcctggggacgaggggaggggagaacacattgtccacctttagacttgcatgtaagcacgatggaccccagcttcctcctggggtgagcttggcttagaaacttcacccctctacttctcttccctccagggacacattaggggaaggcgtggtgttgaagggggaatgaaactactgactgctgcaaaaagcaagagtactgcctggctcccaggagggtgtgggaaatctgcgtttc

SEQ ID NO: 16180 - DNA, 543 bp, Homo sapiens
  MAP TO AC019248.3; EXPRESSED IN BONE MARROW, SIGNAL = 3.7
caatcataatcaggtgggggtggggggggggtggggaaattaaataaagcagaaaggtaacagtcctgaaaaatagatttacaagtccagaattcttacccaatgtctgccggaaagacatcttccagccttttgctgtctgaaatgaatctgtcttgaacaccaggagcatactattattgctgctcttcacatttggtgggcgcttggaaccgcagaatttgccaagaaggggatcgctggtattggcaccatcgtaaattgccaggtagtcatgggagcaggaggtggagggaaccacatcaaaatcactgaacctgtgaaatgtaccttgttaatactgatgtttccatttggacttctattaaattgtagctttagctcttgcaaaaaaaatgacaaggaaaaaactaccagtagagcattcaaaactcacttgatatgaaatattagaaatcaaacagtactttactgatcagttcaaaagtttagccaaatttgtttttagtaattacaatacaacaaaaactgtgacagcagctg

SEQ ID NO: 16181 - DNA, 532 bp, Homo sapiens
  MAP TO AC002467.1; EXPRESSED IN BONE MARROW, SIGNAL = 2.1
ttcctggctcctctgttctcccagttttcttcctagacaacatcaaagtttgggctgaggtgaaacccatccttaaaaattcatctccttgatgtcttgcttaccaaggaacagtgtgtaggtcttttggataatttgatatgaatggttgaaagatttcaaatctttgacaattaagttgacagtgttttcttcgtttagaatggcatcataagtgatgctgtttcaacaaataatgcttttgagcctgatgaggatattgaagatctggaggaacttgatatcccaaccaaggaaatagagattcaagtggattggaactctgagcttccagtcaaagtgaacgttcccaaagtgccaatccatagccttgtgcttgactgtggagctatatctttcctggacgttgttggagtgagatcactgcgggtggtaaggttctggttttctgaattatacatttggagctttggcaatagtaaaatgatgtgggttgtccagtattgcaacagggcaaatacatgggctttgt

SEQ ID NO: 16182 - DNA, 500 bp, Homo sapiens
  MAP TO AC023851.2; EXPRESSED IN BONE MARROW, SIGNAL = 1.5
agtcagggcattcccttttccccttcggtttccagccctatactttggccctgcaactatgatggatttgtaaaaaattggatgactgctaaggagagggatttggagagtagatgagatgtatgcaaatctctaagtgcacaaatgatgattgatagaagttctaatatgtgaattagctgtaaatgtatttttgtgattcaatttgggttggacgctctaaccttagagggtctaagtaatgaggcattaaattcactgctatttcttcaaaccaccacgaaacataactacatgtcaaaaaaataatcagataatgatagctgttttatgggtggtatttttaatatcattattgccattgcaaacccaagcaaaatgaatatgatcatttcagcaaaatccctggtgagtaatagtgtccattcagaggcaaagctcacatcttagaatgtctgtctgtccatggctgttttaaaaggggcttatggctgtgtaag

SEQ ID NO: 16183 - DNA, 593 bp, Homo sapiens
  MAP TO AC011024.3; EXPRESSED IN BONE MARROW, SIGNAL = 2.1
tcttggtcatggagtgtcccagccaggggccacaaaacttctaacttctaggtttgaacaagggtcaaaataactgagaccctcctgcaggtggaggagctgcagaagacagcagatgtcgttgaggtggggccttcccaggctacagcagcagaacctgattccatcagaatagacttatgcttgtgaccccagggccctcagcaatgtcaggaacaggggtagctagacggaatgtagatgaaggagaaaaatctctgttaagagataaagtatttttaggctcacaaaaacagacaaaatatttcagaacactgctgtctttaaatgaacccagtgctacacctacaccaatactgtctcattttctcacctgtactggagtcctgtggcttctgtaacatattaccatgaagtctgtggcttaaatcaacaggaattgttctctcgtccagaaggccaatcaatctcactggggcaaaatcaaggtgagagacctgagctccctctggagctccagggagattctgttccttcatccttcttcctggggtgactgccagcattcctgggctcctggccttatcagtcca

SEQ ID NO: 16184 - DNA, 600 bp, Homo sapiens
  MAP TO AC008384.2; EXPRESSED IN BONE MARROW, SIGNAL = 2.3
ttcaggccttgtattggtcctttccttccacttagaatataccattatgacttgtttctttactatcttgtccaccaactacatagtgatctacttgaggcagaaaacatgtcttttctatctccatgtcccatatagcagcacagaacctagtacactgctgaaagtatggcaaatttttgacaaaggaagcagtgaactcaagaatatttgagctccaagaatcattggcttaaaaaaataatttatgaaaaggatatggaagtattaatgaaactaaagattggaaagggaagctggggctcaaatgagcagttgtcagtttcatgactgattctctccatctctcactgttaaaaattccttggtttctgtgacactggacacatctatttccttttttcctctcttcagcctgctgtctttgcatctcaagcaaaagaggcaagaagataggtaccccaaaatgaccaccttagtctcctctgtattatggttctctagaggtacagaactaataagatataaatatatgagtttattaagtattaactcacataaacagacagtcccacaataggccatctgtaagccaaggaa

SEQ ID NO: 16185 - DNA, 527 bp, Homo sapiens
  MAP TO AC010618.4; EXPRESSED IN BONE MARROW, SIGNAL = 4.9
gtcctgagaggaggggaaaggtgtttcctgggacaaggaggaggaggttgggcagaggtggctggttggaacaggttggatgctgagaaggggtcagctgggcaggagtggggcccgggaggctggagcacagattctggggtcatcatagcatctcctcccacagctcatggctgacgccgtggccaccttcctgcagctggctgaccagtgtctgacgacggccctcaactgtgaccaggctgcccagaggctggagagagtcagggggcgcgtgctgaaggtgtgttctgtgggtacggggtggcatggggtggcagtgggcctgggtgctcagatggttgctggacgcaccgctgggtgtgttgtgcagaaattcaaatcggacagcgggttggcgcagaggaggttcatccgaggctggggtctctgcatctttttaccttttgtgctgagccaactcgagccaggctgcaaaaaggtgagttaatgggaagtgtgcaagagggtctgacagcatcaccatg

SEQ ID NO: 16186 - DNA, 500 bp, Homo sapiens
  MAP TO AC017005.3; EXPRESSED IN BONE MARROW, SIGNAL = 1.6
tgaagtgcttctggcaaatgattgtcaaatgctcacattttacaatatcagagtttactattagatcagccttgtttaactttctctcccacagtgtttaaatccagtaactttactcccatatccagacttcaacacacatgtccatgactgccaacaactgttagagaccagagaaattggccgacatgatctccaagatgtgcccttaaaggaggcagacaccactgtggatacagagagtagcagcctccttgagtggggagttcaaaagactggtgcagccatcaccatggagatggatatcctgtgggcccaagttctgccggctggcacctcagctcagagagctgagttggttgccctgacacaggctctccgattgggtaaggacaaatgtattaacatttacactaacagtaggtatgaattcgctactgtgcatgtgcatggagtcatctatcaagagtgcaggctagtcaccacagcaggaaagatga

SEQ ID NO: 16187 - DNA, 585 bp, Homo sapiens
  MAP TO AC019219.2; EXPRESSED IN BONE MARROW, SIGNAL = 1.5
cacaacactggcaaatggagtcaaaactgcatgctcatagtttatcaccacaaactatgaagctactagaagaaaactatggggaaatgcttgaggacactggtctggacaaagactttttgagtaagatgtccaaagcacaggcagtaaaagcaaagcagacaaatggaataacatgaagctcaaaagcttctgcatggtataataaactttcaatgaagagacaacctaaagaatggaagaaaataattgcaaactatacatttaatgagagattaataaccagaatatatatatgtttgtgtgtgtgtgtatatatatatatatatagagagagagagagagagagagctcaagcaactcagaataataataataatcatcattattattattattattattgtgtgtagacaaatgaatcaggctctgtggctccggggaactggaaatcttcacacaaaggcagagaaagcccttccagaatatttctacactatttcctacactaatcactcaagaaccatttccaaaagcaataaagtatatctggccaacccatgatcagcaccaaaacttgcagaa

SEQ ID NO: 16188 - DNA, 555 bp, Homo sapiens
  MAP TO AC004254.1; EXPRESSED IN BONE MARROW, SIGNAL = 1.9
acccagccccaactagtaccgagagcctctacatcttccagagccgcaaaccgagcaggcagttgccctgttttgcctcaggcatgaaggggccaaagagagtcaggaggaggcttattaccaaccccagattagtgacagacacccacaggcccaccgctgcccattctggtccagcttctctcctgttaagcctagggcttagacacatcttcaggcctggagctgaggctcaacatcaggaccatcctggaaaaggcggaccacagccactctcacttcttaggaagctccagggtccaaatgttagtcttgtgtctggtctgagtttcaggcggcaaggttaggtccactccttctcttggctcccaccaagggtctctcaaatgagctgaatgccaagggcttaaagaaagtctcactcacacaggaaagcaatgcacccttgccaagagccctccctccctggagataaggcttaggtcagcacctgtgtgtaccccataagcccctgccctgggccccaggaaaatcactgatgtggggcaagaaaat

SEQ ID NO: 16189 - DNA, 550 bp, Homo sapiens
  MAP TO AC018711.2; EXPRESSED IN BONE MARROW, SIGNAL = 1.5
ctgggaagtcagcctttgagctggtcatgcctctttgttgtgctgggtccctctcactgtgatcttgtttccatgctcctttctctaggggctcgcccagaacgtcttcctgtgtttgatgaggagtgctggcagttgatggaagcctgttgggatggcgaccccttgaagaggcctctcttgggcattgtccagcccatgctccagggcatcatgaatcggctctgcaagtccaattctgagcagccaaacagaggactagatgattctacttgaaagcaaagacctttctctttcactctctagttatttccttccccctcaccttttggccatggggagaatttgacatttattcactataggacacactcccaagggaactggtgcttgctgggaaacttggaaccttcccaggcagggatgactcctggacagtgaagagttgaatgactgagcatattcagcagctcactgaagcgccaagctatccctttagcaaaaaagtgtctcagatgtgtaaaagctgaggaatgtggtgttctggctt

SEQ ID NO: 16190 - DNA, 593 bp, Homo sapiens
  MAP TO AC008891.4; EXPRESSED IN BONE MARROW, SIGNAL =   2
cctccatgtataagagcgggatcccgaataagagaagcatgaagaagtacatcaggatgaagctgcctgggaagggagccaggggctgtgctcaggcagccaggagtcctggccctgtccccattttcccctaggagcccacgtgcccaaccccagctttctcctccttcagggcccaggactccaagctcccagccttgaaacgccttccttaagctcaggacccaggcccctggccttacctcctccgttccggtgacacaggtaaggagaacgccacacgctgcccagcccgacagagaaggcaatctggatcaagatgctctcagtgtttttaggttgaacgaagtagttttgggtcttggtggcctggatctccttggtcttgagcctccaggacagggagttgggggtctggaatttcttagaagactctttctctgtcagataattcctcaagggactccgtggctcttctttcaggcccggtaaatcctgagaaaatcttgggtcaccaagagcagcagaatttaaaggacacgtctcaggtgccaggctgtgaaatttcataaccagggctttggagaaatgag

SEQ ID NO: 16191 - DNA, 550 bp, Homo sapiens
  MAP TO AL049872.3; EXPRESSED IN BONE MARROW, SIGNAL = 1.5
tgacacacagtcatttccaggaatatgccatttccactaagtattcagttagtgaagcatctgtctctaaaaacaactactatgcaatgaaacagcaatctgaaataagttccaaagactgtataccagacagtgcttgttgtagtctgaacacttcttccactgatgcactctgggcaagaattctttccttttctgtcatagtatcactttgcttcacagcagaaggctgcaatttactacattccaatttcaagttttcacattcttccattatttgtctcttttccacatttagctgttcttgttctctcctcaaaatatctctgtcattttctgcagaagataattttttatttatatcttttattttatcctcaagttgttccatttttttggtagactccactttttctatttgtagaacttgaatagttttttgcatctcatagattttagagagatcagtttctataactccagagccacctagaacataaacacaaaacaatgacatcaaatgtcaagtaccaagaaataaacggtttgc

SEQ ID NO: 16192 - DNA, 506 bp, Homo sapiens
  MAP TO AC002115.1; EXPRESSED IN BONE MARROW, SIGNAL = 1.5
tgcccactttactgagagggcagtggaggctccaaatggggagggaacttgctcgtggagatgcctggtgccagggctgctggccccgagcagaccttcctaacccaccgctctgtccagctgtcaggcctgtccctgtttgctgagaccatatgggtgacagccgaccagtaccgtgtatacccactgatgggagtctcaggcaaggatgacgtcttcgctggtgcctggattgccatcttctgcggcttctccttcttcatggtagccagttttggtgtgggtgccgcactctgccgccgccggtccatggtcctcacggtgagactccaggggttgggggatggggacactgaaaacggagttcagcatcactgagtcatagtagcaggtgcagccccagccactagtgtgagttccccatggtgtcacactcagggatcccaggcatcatctcattcagtcttcccacagcccaataacccaggcttgagtagcagagctgg

SEQ ID NO: 16193 - DNA, 517 bp, Homo sapiens
  MAP TO AC007225.2; EXPRESSED IN BONE MARROW, SIGNAL = 1.6
taaacaaaatcccaaagccgtcaagtcttcctggagatggcaatgtactatcagtttggaatgtataccagtttggaagctgaaatcactctgctgtagccttttgagcactggcagcattttccaaaatttttcttttccattcttcataatcctgtgtcagatcttcatctttctgtggtttatgtggcatctcctctaccttctccatttctgacagaaaattatcaaaagcaatttcaaaattcttagcttagaaatgaaatttaaaaaaaggtaaacttgtttaaattgtctaaaatagaaaagatactgaaatgacatggagaaacagcagttatcacttttttttgagatggggtcttgtaatgttgctcaggctgcactcaaattcctaggttcaaatgatcctcccacctccacctcttgagtagctgggaccgtggctgggactataggctcacactatcacacctagcttagctatcacttttttccctcccttacactccaagca

SEQ ID NO: 16194 - DNA, 592 bp, Homo sapiens; identical to SEQ ID NO: 12151
  MAP TO AC018835.3; EXPRESSED IN BONE MARROW, SIGNAL = 1.6

SEQ ID NO: 16195 - DNA, 516 bp, Homo sapiens
  MAP TO AC022013.2; EXPRESSED IN BONE MARROW, SIGNAL = 2.1
tagagcttctcccctttgcctgaccttgagattctgctccttcttctgtacgtggccagaggttggagcgatgctctctagaggcgataatgcaaaggatatctgtcctggggactcctacagcaggcaaatgaggtagaaccaaactgaaaatagcaaaataaagtcaatgaattgatatgaccaacaaagacccctctactattttcattatcttggccctcagacccttggcagccaagtctttatcctctaggctggaaactagaataactctggtaaaatctgaaagaggaaatacatagagatattgacattgggggtgtatctatcagggttaagtcagaaaatcagagccactaaaagtgtattaggggagtaagcggcttactctaggaattagagcttgcacaagtgtgggaagagctgaggaagtaggaatctggaagagaagactcagaggatccaaggaagtcattacctactgtggcagtcagaacagtgacccccaaagaa

SEQ ID NO: 16196 - DNA, 538 bp, Homo sapiens
  MAP TO AC008770.3; EXPRESSED IN BONE MARROW, SIGNAL = 1.5
caggcattttcaaggaaacacactctcaggactgctaatgttaacatttttctgcatatgaattcagaggactttgttatgacaggcgctgtagacacacactacagacagacattagggacagcccaggcagcgtgcttttctttctggattcactgaaaagacatttcctgttctgctgttggtattgcttagttcagttttagcatcagaatcgctttatggaagaaagtgggtatacaccaagtgataaccaagtcatggaataaatgtctggagtccacagcatcatgggaacttcttaggaatagagtctaggcccccagtgctgtcagtctcacccatcctcctttacatgtgtgagatgttttaggactcagtggtctttgaggatgtagatgtgagcttcacccaggaggagtgggctttgctggatccttcccagaagaatctctacagagatgtgatgcaggaaaccttcgggaacctgtcctctataggtgagggtgacaatattacttccttccttcagcgaatt

SEQ ID NO: 16197 - DNA, 594 bp, Homo sapiens
  MAP TO AC008753.5; EXPRESSED IN BONE MARROW, SIGNAL = 2.2
cggatttcttaatctccccccgaacttcctcttctccacccagaacagccattggtgagtggggcagggcaggagggaactgaagagtgagaaagcattatttcagcaaaaggtctttcctcccttgctctctcctccaaccactggctcagcctctccgcccgctgcctgtgaatgatgcaatggaaggtgtgctggggtcgccctgtgtcccgtgcataggagcatctcagcctccaggtcctctcctttggggctcacggcacccccatgctacgaaccgcaggcagggacggcctctgtcgcctgtccacctacttggaagaactcgaggctgtggaactgaagaagttcaagttatacctggggaccgcgacagagctgggagaaggcaagatcccctggggaagcatggagaaggccggtcccctggaaatggcccagctgctcatcacccacttcgggccagaggaggcctggaggttggctctcagcacctttgagcggataaacaggaaggacctgtgggagagaggacagagagaggacctggtgaggggtaaggaggtggcgggacaggcaaggctagaatgc

SEQ ID NO: 16198 - DNA, 577 bp, Homo sapiens
  MAP TO AC018814.3; EXPRESSED IN BONE MARROW, SIGNAL = 1.5
atacacaattcgccaaaggctaatcagttcctagtgtcggagtacagaaaatgattccccaaaatgtggcactggggcatgctgagtgcttctgtaaattgaaagggctcagaaataagcctcagaatcagggttcccctaaccttgtcttgtccccccaccccaccgagtgcagctgcattttgagttaaccctgtaggatgagctttcagagttttacgcctttttgttgtgcagagcaagcacatgattcatcagtttttgttttttatctttagcatgcttgtttttctttttctgtatgtggtgctgtggcttgttgttagacatctgggcagaagagttgagctaatgttgtaagtaaaacacttaaattaaaacttcaaatatctcctcaacttataattaaatgtaccatatggttctattttacggaaagctggggcctaatttaatgttttcctttttcagcaacaaattttactggcttgttctcaatcatttttatgtcacaaaaacaattactaccaaggcaatattttgagattattagacagaaacaacctcttacctgggg

SEQ ID NO: 16199 - DNA, 500 bp, Homo sapiens
  MAP TO AC010369.3; EXPRESSED IN BONE MARROW, SIGNAL = 1.5
aagccgtcttctcttcctccagcaccttgtccttcagagatccagacagagcctcgtgaaacgttagaatacaaagcagcacttgagctagaaatgtggaaggagatgcaagaagatatatttgaaaatcaggttactttttaaatgttactttaaaaaatctgctttgtctgctctgtatatttttccttctccgtagcaaggtttaatctctatgttctgtaggtaccttatctaacttctttgaatgtcaacaatgctttacttaaaaaaatttgagaatcaaaaaatacctgaaatgtggcaccttggcagaagccactcagaattctgtaaactttgttcatgattattgggtaaaattgggaagttactctttaaatttcatgtcctcatttggcatgccctcctggaaccttgcatcattagtctccaaacaagagttagaaagcacaacccactgttagttttatagtttcctgaagtgaactcaaatgggc

SEQ ID NO: 16200 - DNA, 597 bp, Homo sapiens
  MAP TO AC009818.4; EXPRESSED IN BONE MARROW, SIGNAL = 1.6
atgtcagggctgaaacaaccccttgcaaatccaggttgctttggctcacatgtgtgccagggctggtcagaaagaactcttgcctgctctagagtagcaaatgcaatgtttctataaacttaggcgataactggactgggtatataaataaagctgaagaagtggttttatttctaagcaatttaaacccatgtcaatgtgttttgttatataaaatgcaaacgccaaagcccctcatggagagctcttcataaccaggatcttacttccattaaaatctcacctcgtgccacttctctcacctttgtcacccttgtccttgccacttctctcgcctttgtcctatctatattcaaactcaggttctttttcttgtacttctgtggcttggaacaaaccattttgctgggtgatgttgcattattcctcctctttgctgacaagtaaattgctcatccttcaagactcagtataaacatcacctgctctgaggcattgttgctcagccaggcaaggtcaatgccttttcagcatgttatttctatctattatattacttgctattttgcactgtaatgatgtccatgcctgtctcct

SEQ ID NO: 16201 - DNA, 525 bp, Homo sapiens
  MAP TO AL157882.1; EXPRESSED IN BONE MARROW, SIGNAL = 2.7
ttgattgtgcttgttttgtgctttagtttaaaaataatgaggaaggtgatatggcagtagtgatgtatttttaattataattttatttactttttgctcatctgtttaaatgcaatgtattttaatacatttactttaaaacttttatttagttacaccattccagaagagggagatattttgaaatttaactccaaatttgagtctgggaatctgcgcaaagtaattcaaattagaaagtaagtcacttaagattttctcattttgtatgtgcacagatatttcctaattttcatcagatttctttgtcttctattttcagaaatgaatatgatcttattctgaactcagacataaacagcaatcattatcatcagtggttttactttgaagtcagtggaatgcgaccaggtgttgcttacaggtttaacatcattaactgtgaaaagtccaacagtcagtttaattatggtaagacagttttctttcccaattgaaatggcatgcaggcatcttaactgtgga

SEQ ID NO: 16202 - DNA, 596 bp, Homo sapiens
  MAP TO AC011352.2; EXPRESSED IN PLACENTA, SIGNAL = 1.4; EXPRESSED IN BONE MARROW, SIGNAL = 3.5
atggctacaatttgttgggcactggataggcattggaagatttagcatgaagcagtcataaatattgttcttaaggtgctactctggtaggataatagggcttctgcctaagttactataattctagactactgtaaacgtacgtgagatatccagatagaactcttttagtgtattggtgggtgattagttaattttcaggtaagggtatagaagctggcttcttggaggagaatgggaatgatttatttttttggaaggaatcattgtaactatcaggaagacagtgtggcacatgggaaaaagagatttcatgatagccactgctcattgagagaaagaaggctttgaagatcttctcccaggaagctgtaaacacatacagagagatatttaccaaaatgtctgaaataagaagtatggagattaataatgaaaattgattgccgcccacacctacaatggcaactttggcttttgatgtttttgaatttctgaaggaatttgtaacttcaccagttttggatatttcactttctctaatgtccagggacaggtatctatgggcaaagtggcagcagaaagaggtggggaaa

SEQ ID NO: 16203 - DNA, 587 bp, Homo sapiens
  MAP TO AC020722.2; EXPRESSED IN BONE MARROW, SIGNAL = 2.3
tccacaccacattctccatcttagctttgactgcttattctttcccatctccctaacctctaaatattgactggttcagagctcagttcttggactttttcccttttttctttacactcattctttggttatcaatttagtctcatagctttaaatattaactaagtgtaatgactcttaattttatatcttcagcctaaacctgtcttctgaataccaggctaacatatacaattgtcttctttaaatctctacttggatgttgtagtaagctttcttattattttcattactattattgccaccattattgtcatcatcatcatcatcatcatcatcataattggctttctccctaagagaaaattataccacttcatcactttgatgatgttctaaccttatgacttcttttggccaattaaatgtggcatgcacagtttaagtaggttttaagatgcagtgtgtgaactctcatatcttttttacatctaccacagtaattaggaacattctggttagagaggctgaccataagctttggtcccaaagagaagaaaacagaagcagagtggtatccaattcca

SEQ ID NO: 16204 - DNA, 528 bp, Homo sapiens
  MAP TO AL121654.1; EXPRESSED IN PLACENTA, SIGNAL =  12; EXPRESSED IN BONE MARROW, SIGNAL =  15
gccttctggacacagacctcttcccagtgggagccacactttcaggaaatcataaaagataagaaaagtaaaaatgctgccaagagtcataacttattttttgaagagtgagctccctcagggccaagtacttcctggaagaagatgattcaagaaagactatggagtgtttcctgaaaggctggtcagagctagaccagcatctgtggagactttagtgcttttgaattcatgccctggccttctgtgccctggctgtgtctctagctctctttagaagtcactgctggcctttatcctgcctctgcagcagcttcttcccagtctgctccgtcctttttcttttcaaccagatgtacattcttgtctgtaacctaagggcattcttgttcattttctttatttacaacaaagtttactttaaaagaaagaaaatgttttttcaatatattccattgttcagatttttttaaccaagactggtttcactcctacatatgctccactctggatgaaagatttttgcca

SEQ ID NO: 16205 - DNA, 594 bp, Homo sapiens
  MAP TO AC022008.2; EXPRESSED IN BONE MARROW, SIGNAL = 2.3
cccaagacccagaagatagctgaagaaagataggagattagacttggagataaggacttgggtataagttccagctatgtaatgagtgaagaaatctcataaccctccgtttactcatatgcaaaacagatgctttgaaatcctaatatgtttttcaatatttctgtactcgccaatataacatcacaggtacaattggttccattgttagtttgacaatattggctgcttcccttcttcctatctgatccttttcatttatctcctctctattaattggcaaataaacagaaaagttaagtaagcacaggatttaaactactttataaaccttggatcaagacaaataaaatacataaagcattgttaaaaaattgtacttttccttgtaattggaccctgaatatttttgactcacaattacttaaagattatgtttatgaaattgactatttaatatctatacttctgtatattgtgtatgaacataatccacattaggatttctatagacaatgaataaatcatactgaaactcctactactttttaaaataaaatgtccatagcagtaggcaatatcttatggcatcca

SEQ ID NO: 16206 - DNA, 515 bp, Homo sapiens
  MAP TO AC000062.1; EXPRESSED IN BONE MARROW, SIGNAL = 2.7
attgggcctttccttttgtcatgacaatattgtctcttacagagaatgaacattggtttacgggcattcttggtcatagctgatagcttgcagcagaaagatggggaacctcccatgccggttacaggagccgttcttccttcaggaaacacgttaagagtaaagaaaacatatttgagtaaaacactaactgaagaggaagccaaaatgataggtgagtttcagaagtgcataagaactaagccttattaagcccttaaaatgaccagtagatatttatctttagtgagatgcagtttttaaaaatctttatagaagtagatgataagacattccaacattaattgttttgattgattcatgctgtgttttgttttactgctctttaaactttttagaacttcctggtaaatattttggcatttaaatgttagacttttatctatggtctttttaaagcctctaataatgattactacgtttttcagtaagtctccaagacatctgtgtgcttt

SEQ ID NO: 16207 - DNA, 592 bp, Homo sapiens
  MAP TO AL135905.2; EXPRESSED IN BONE MARROW, SIGNAL = 2.3
cccagccaatgctattcttcaaacagcccaatgggagcagaaaatatactatgtgtgctcaagtcatctacaccatggctgtctgtgttactagtgtgtttgaaattttacagatcagtaagaatttcagtggctcactaggctttatgaaccaatatatgtaggagtgggttacccagcaaccactctatggctttaagatgagaaggtaggggaagtgaggaagtcacacttacctgcctgctgcctgccttccttctcccatagccatgctcttggctggggagaaagggtagatgtagagcctccaagagctgcagaactattaaaaatccagtgggtttctttcataaacacatagatgcttttctaaatccaacagaaatctgactccctgacctgattgttaggcttgtggtcagaatcccagcacatgaactggcactgctgctgggaattatgagtcaccctttcatgttcttcctggtgttgaagcaagtctctgcagaggaaaaagagcaatctgtcaggtgagctcatcactgttatcgtcactgtctaagctctaacttcccaagagaccatgcaatgt

SEQ ID NO: 16208 - DNA, 532 bp, Homo sapiens
  MAP TO AC018388.4; EXPRESSED IN BONE MARROW, SIGNAL = 1.9
tactctggattccccactccctaacagttttatagttacttctatcccacatttctaaatcattttttatagttgactctggctttctttggagaatttatttgctggattcacatccaattattaagcccctcggccacactgttgctcgcatttttaaggtgtgtagctgcctttcagcttcagtcagcctcatggtctcaggcagcatttttcatcagcctgccttctaatgtctgtacccttacctgaagctcctggctttaaccaaaggtcctgtgtccctttctctactggaatgagcattttgggtctccatatcttgtgggagctgaaagccctgtccactgcgtcagaatctggaaccaagcaggtcctgccatgctcatctttggaggtctgtgagggtttgtgttcatgcagatgtttgctttgtttggggtcctggaagtggctttctggcttcttgtttttatatagtacttattcttggtgtgtttttgaaacaaagacggacagtcaaagcctgaac

SEQ ID NO: 16209 - DNA, 561 bp, Homo sapiens
  MAP TO AC012664.3; EXPRESSED IN BONE MARROW, SIGNAL = 2.3
tttcccttctgtctatctcaagcatgtccaattaatagttacgtaccctgatgaaaagtgcagtcctctcaggtccactgctctgtaacagggctccaataactgcaaagaaagtctgctgtaacacagctgggggcactgggaattcttcactcagtgttaactgctccacagccaagtttctagccacgtgacacacgacttcctcaccagtgagaaagtcaacaagattttttatgccttcagtgggcatgtctgggtactcgtcttcaagaaactgtgtaaggcaagtctgtgaaaaagatgtcccttgttcggatagttcttgattacttttaagattcagaagaacagcttctttctctatcccaagttgttggcgtttggcctcctcacttttaatatagcagctattaacaaatgcagttttgagaagatctaaggaaaagttttcctgtaaccgatgtccaaaagcttgtatttctgcatggtaatcccagttcggcttctctgaactgaaaatgtaaagacagtaagagatggtaaagagaacaacctgtt

SEQ ID NO: 16210 - DNA, 569 bp, Homo sapiens
  MAP TO AC005323.1; EXPRESSED IN BONE MARROW, SIGNAL = 2.4
tctcatgctcatctgcttggatccaggatagattttgactattttaacctctcagggatcaacttttgagacttctagactcaaaagaatagaattttctcttttcctatttatacctatttacttttcatatcttttcaaagactcctttcagtaggaattacatttgtatattttgtaaggtacattttgtaaatgtgattttgtatgctctaacaagaggatttgcactggctaattttctgtcagttcactactcacatcaaagatctcaaagccagcaatgtccaagaccccgatgaagtactgcctgggctgcttggtgtccagctgctggttgatgcgggtgaccatccacaggaacatcttctcgtagatggctttggccagagcacccactgcattgtacaccttcaacagaagtgatagtttagttttttaaattgaaaacagtgatgaactcctgagtcacttgcggttcaaataaatcagacaatttaagtcatgtttacctgctgcacagtctggcctttggttacgaactcattgccgaccttgactctgggata

SEQ ID NO: 16211 - DNA, 538 bp, Homo sapiens
  MAP TO AC008865.3; EXPRESSED IN PLACENTA, SIGNAL = 1.9; EXPRESSED IN BONE MARROW, SIGNAL =   3
ccagcacctagcttacagccaatattgcacagtaaataaataattgttaaatgaatgtcttgaccttcactaacgtgaaaataactgtacttggagacaggcatttttttcttactagaatgattaaatataaaaataaactaaaaaacaaagcactcataatttttttttcttgtccaattgtcttctctctcaatctctcatttttttggtttccattaggtgtcatcaatcttacagaagaagtgctgtgggtcaaagtgaatataaacatgaatggttattatattgtacactatgcagatgatgattgggaagcactaatccatcagttgaaaataaatccttatgttctgagtgacaaagaccgagccaaccttatcaacaacatctttgaacttgcagggtagagtatacttagtttgagattttttctttttttaaacaaatgtcattgaggtaaagaacatatatgaaaaacagtttgaaagaactagcatgtattggttggtacaatacattttggaggattgggaaa

SEQ ID NO: 16212 - DNA, 560 bp, Homo sapiens
  MAP TO AC008569.3; EXPRESSED IN BONE MARROW, SIGNAL = 1.6
ctttgttagcctcggctctggcccagccagcatttaccaagcttggcaggggcagctgcctttgaggtttgcggtggtttttgctccttaaaagcctgatgaattatgcatggctcccaggggcctgcgcaggtcccagcctggggctgcctttgagtggagccccgggaggctctcaggcctgccttggtcccctgaggcctcctgttcgcaggtgctgggccgtgcaggttggggccttgggccgtgtatcagcatggagcggtttcctcctcatccccataggtgtctgtgttcttcggtggtctctccatcaagaaggatgaagaagtgttgaagaagaactgtccccatgtcgtggtggggaccccgggccgcatcctggcgctcgtgcggaataggagcttcagcctaaagaatgtgaagcactttgtgctggacgagtgtgacaagatgctggagcagctgggtgagtcctctgcccttgcagccccagctgagagtcagtgactaggcgggccccatagcaggcggaaggctcttgagtgggttacatgggc

SEQ ID NO: 16213 - DNA, 515 bp, Homo sapiens
  MAP TO AC008753.5; EXPRESSED IN BONE MARROW, SIGNAL = 1.5
aaatgaaggatgagaaggcgcttccactgtccaaacgtgaccactgccaccccgtcactccccgatgctcaccacagtttctggagtctgcaggcgggatgttgcagcccctcagccagcaaccacaggccccagtctcccaggtcgttgaaactcaagtccagctcccggaggttgtggttggcctggagcaccacagaaagaccctcacaggcggcagagcccagccggcagatgcccaacctgcaaagacaggatgctagggcggagtgggaggcattcctcctgcaaaatctgctgggagggccctgtgccaagccctgtgctggttgcagacagagggacagactcaatctctacccttgagagacaaaaagaaaaagacgacagaagtaggaagatgagaggaagggaggaataagagaacagaaggaagcaactaagaatcaggccaggtgccctggctcatgcctgtcatcccagcatcttgggaggcttgaggctggagggttttt

SEQ ID NO: 16214 - DNA, 569 bp, Homo sapiens
  MAP TO AL157883.2; EXPRESSED IN BONE MARROW, SIGNAL = 1.6
aataagggcctgggaaattgtccttgtcattcctctctctattacttcccatagtcaagaaaacactttaattctataggttttgcatttaaaaaattatcttctcttcatctctacccaagcctagataactctcatctttcagctgaactattttaagaaccctctaactcttctcttgttccacatttaacctatctttccactgcatcctaaatctatgattctcacgtcaacctccttatgaaaatcctccaatggtcccttaggctaaagattaacatccagcccaccaggttctccatgatctgcctcacctacctgtctagccctatattatttcctgttgtccccaacattatgcactttaaccatctggccttctttctgtccttccaaaatgtcatgttctttcttgtctacggatctttgaacagactcctttcgcctggtaccatcatctccccacaaactcacccagaaaactcttatttatctggaagatgcagagcaaatgaaattttatcatgcaagtcttcctgaagctgccgacgaggtcacgttctctt

SEQ ID NO: 16215 - DNA, 556 bp, Homo sapiens
  MAP TO AC007345.2; EXPRESSED IN BONE MARROW, SIGNAL = 1.7
ttctatgcatgggtagggaagacttaattagcaaaaatgacaattttttaaagtttttcattccttttatctatgagttaatatttttctctagaacttgactcaatatcaatgtaactataccttttttaaccaggtggggccgatggagagagattctatctcatggccgtttcaaaaggcagctaaatgaacacgatgtagagataatttgccgagctctcttagcatattgccttgttcactaccgaggagatgagaagattaaaggtttcatatgggatctcattactccaactgaagatggacagacacgagagctacagaatcatctaggtaagaacattgtttcatttgcttttaaaatttatttttagttatataagtaatacttaacatattctcctataaaatataaaagcattacaaataatattaaggaaccttaaccttcactcccaattcaagttccagcttcagaaaatgccagtgttatcagtttggtggattttacattttgttatcaaatacgtatctgtttggaattgatgaccca

SEQ ID NO: 16216 - DNA, 593 bp, Homo sapiens
  MAP TO AC020912.3; EXPRESSED IN BONE MARROW, SIGNAL = 1.7
ttggtgaagttgggtcagtgctatgctagtagccttctccagaggtcaggggacctgccaggacaggaatagggagtgagttctaggtccaggcaaagccatacagtgggctgggctgtgacctgcacgtccatctgtggctcacctagggagagcagctgtggttcatgcgtgaatgggaatattgcagtcctcacatcttgcagaagatgctgcagaagtccatcctctgcttgttctccatgctgattcgggctagaaagagcttggtcaccaagacatgggaagatcatgcaagagcgtaaaacagaaggatcacaaggctacaagcaaaaacaaagccaaaatttgaccacagcagaaaatcagctgctaaacgctaagaaaggctagatcctaatgtgtgctcattgtctctggaagaatatatctcttccctatttgagaaccccctgcctccctgactctctcctacaattagggaagaagtgatggggaggacacagacgcaagactgtaaactgagtaaatccctgatgccacagagacaaggtggaagggaggcactgtgatggcaaggtgacttagcaagc

SEQ ID NO: 16217 - DNA, 507 bp, Homo sapiens
  MAP TO AC011469.3; EXPRESSED IN BONE MARROW, SIGNAL = 1.8
cttcaaaacccatgcactccagcacttttctatcctggtcctggagacactcacacacccaggaccctatatctcagtacccttggaagcccagcctgggcggggccaggggggctcaccgtgagcaggtgcagcagatcctcattggcgctgcagggtggatgctgcccttggagggccaccagctcctgcagccgcaggtagaggttgttcagcttgggtaggtgcaggcggccgtcaggcaacctgtcgggctgtgcctcatgcagggacaccaggtccttgaggtgcacgcccagtacaggcagccggaaacccgcgcagccagcccaggtgcggcggtagcgggcgtagttgttgtgggaggcaaggagctcagtgagctccaggagggcctggggaggagggacatgggattggggcgttatcaggacagtcccatcccctgagcagcctcctgtgtgggctctaggccttcagggacccagtggcattgtggaaacctct

SEQ ID NO: 16218 - DNA, 594 bp, Homo sapiens
  MAP TO AC008895.4; EXPRESSED IN BONE MARROW, SIGNAL = 1.8
ggttttaaaaatggggtgggcacactgacttgaccttggattttctgtttcctggaaaaattgtgtcttttaaacgaggtacttttgtttccaagccgaagttcagtcattcttttaggaaggagacatgcatttcggtgcgtgggcattcagtgagcacttgttttatgcccagcattgtgttgggtgccctaggtgtggtagtgacgttaatccagcttacagtcttggggatgttaggttttaaacatgtacttgcatgcattttgaatattaccagagggaaggtacaggatactaaggaattgtgtaacaaggaagtttaacctaaactgcggtatcaggaaagctccccaaggaaatgatatttaaggctgagactttggaagctgaggcagacaaagtcagtgaggatggaagcttcatggagctgaaagaacttcatgtgttcaaagagttgaaagaagcttagcgtggctgctctggagaggtgagggggacccacgccaaataatagagggctgtggctaccacgtgaagggttttgtgtttttgtgcatttattgaatacttactgtgtgccaggtacgtgtc

SEQ ID NO: 16219 - DNA, 569 bp, Homo sapiens
  MAP TO AC007539.8; EXPRESSED IN BONE MARROW, SIGNAL = 2.1
aaagggcacaggcattgtagtcacgtcgtctcagagttcaacaccagcaccatcctgctctgtcctggagcctctccaccctcagtttcttccctcatgcaatggggaacgcagtccttcagagtgctgtaaaagataaaacagcgcagcacagtcatctcatgaggtaggactggctaaggggagctcctctcactggcctccctctccagaaagcccagacatagagcctggggtacagcagcccttatgtgcgggactagatcttggtgtccagtcatgggctggggcaatgccacttatcattgcctgctgcctggaagccctgtcccccaacctgtcttcaggatggagcccaactaatgtgtgcctcaggcctcccgatacctctgcagggccagtctctgcagtctcagtcccatccccttaagaccgcagcctcctgacttacccagtggggccaggttgtcctcctaacacccagacctatccccgggcctctgcatgctcccattgtgctgttactttgttccatcttctgcattgtcacctctgtccccctagctctt

SEQ ID NO: 16220 - DNA, 571 bp, Homo sapiens
  MAP TO AC004624.6; EXPRESSED IN BONE MARROW, SIGNAL = 1.4
taacagtgagggtgccaaggagggtgtgggcagacggagtgtctggtggcccccacccctgcctgcagagaggcatctatggggggctgaggaggccaggcaaggtctaccacagttcctaggcctggtgggatacagtgggaggaggcgggtgtgaagcaaggggtgtaagaggttccaggcggcttaacagaagcagctccagaagagcactgcaaagctgcaaagctgcaaagctggcagctcagaatggctgccgcagggctcggggttgagactgaggttcccatggaggcggacggccagcgaccagcatgcatgcctggcacagagcaggtcaccacagcagactttaccaatggactgcgtgggggaatgtgagtgcccagccctctggaatggcttctctaaactgtggtctgcatcctccatgcggtgggatcgtgacgcagagctcacatgctatagctggccacctgggtcagagggcagctctgccacttccttgttgcataaccttgggcaagtaacataatctctttgtgcctccgtttcctcatctttaaaatgg

SEQ ID NO: 16221 - DNA, 584 bp, Homo sapiens
  MAP TO AL031588.1; EXPRESSED IN HELA, SIGNAL = 1.5; EXPRESSED IN BONE MARROW, SIGNAL = 1.5
cctcagctttgatccctgacccttgccttagtcaaatgcagggctttctcccctggaggcctggaagtcctgactgcctccctttgggttgcttggcacggaggcactggccccaggatgaagcatggcagggaactccgccagccacagccctgggttccacgggcttcccgagcagcctccaggaatctcagctaacagaacccagctgcgcccgttctgcccacctcactaggggctgcatctccacccggcttggcttcctcccgagctacttctgtggcagtacttttggagaaagtagaatcgctttcctctggagaaaagttaagtgcctgaggcacacgggaaggaggagaacccctgtcaggggacacatccaccagcctggaatctgtctttctgttgctctcccttgttggttcagttctgtgggaaggaaaaaaacttatgagaaaatgtctctaaaatgctcgttcacttggctgatgtgggaagcaagtcactctggaggaacagtgtcctgggtggagtgcgtcccggctctagggccttcaccctccagacccccagtttcctgtgta

SEQ ID NO: 16222 - DNA, 579 bp, Homo sapiens
  MAP TO AC008166.1; EXPRESSED IN BONE MARROW, SIGNAL = 1.5
tcgcaactagactaccagcctgtactttactacaagcatgttactttactgaatactgtaggatattgtaagaaatggcatttatgtatataaacatatctaatcataataaaagtttcagaaaaactatggtattataatctaatgggaccagtgtcatataatcagcccattcttgactgaaatgtccttatgtggtacatgactattttcaaaagtagtttttattcaaaatcactagctacagagatcagatacaagttctcctccatcagatacgagatcataggtgaacaatcacggccctactggaaagctgagggcagagtgccaaaaccagttggaaaacccacaagaagcatctgtggtgcagaaaaggagggtagcaagaatatggcagactgatccgcaaggaacctggagtccctcaaaaagggtaggtggaagtaattctttggccccttcaccctgcaacagcctactgagtaccaaattgtcagagagcccctctgccctcacaagtctgggcaacactgtggcagtttgagaacttcttgggggcagagcaccagatggcct

SEQ ID NO: 16223 - DNA, 581 bp, Homo sapiens
  MAP TO AB016897.1; EXPRESSED IN BONE MARROW, SIGNAL = 1.3
agtgttactaacgcgccaggggccctatcctggtgctgtggtttggatgtgtccactgaagttcatgttttgacaacttaatccccaatgcaaccatgctaagaggtgggacctttgagaggtgattaggtcatgagggctctgcttcataaatggattactgtcgtcattacatctgggcagtgggctcctgataagtgaatgggttcagccgccatccccctcctttgcatttccaccttccaccacccaccatgggatgtcagagcacaagggcccttgccagatgctggcaacttgatattggacttgtcagcctccagaactgtgagaaatacatttctgttcattgtagattacccagtctgtggaattctgtcatattagcatgaaatggactaagacatctgttgagaggttatggttttgtccatctaatttgtcacctttacctctctctttgcaaatacaattctccttgtggtcaggccggagccagccctctgttgtgaagaatcggtggggagacaggcctgaaaaggtagaagtacctgggaaagggaagggcactggaaatgttc

SEQ ID NO: 16224 - DNA, 562 bp, Homo sapiens
  MAP TO AL022319.2; EXPRESSED IN BONE MARROW, SIGNAL = 1.6
tcggaggcctcactgttaaggtgtcatttgagcagtaaaccaaaggaggtgagagagaaaatcatgtggatcagtggagggcagagtgttctagttggagggaagagtcactgcagagacccacaggcaggagggggctggacacgttccaggaacaccaacaggtctaagatggctgtggctgaatgtgcagaaggagaaggggtgggagaggaagtcagaaagacagttgacagtcagatcaaagatgtccttgtgtgagatgagaagtccctgggaggtgcttaagcaaaggaatggcatggtatgtcttctttttcataaaatcactttggcttttatgtgaagagggctccatggagcacagggagaagcagggtcacaggttaggaggctgctgcaataattcatggaggcaacaatggtggacaggatatcttgatcctgcaactgcagtggaggtgatctgattctggacatgtttcgaaggtagagctggtaggagagaaagaattgagtcagggatgactctgaggtttgggctggatgcacctctattcca

SEQ ID NO: 16225 - DNA, 573 bp, Homo sapiens
  MAP TO AL022329.9; EXPRESSED IN BONE MARROW, SIGNAL = 1.4
aagcatctgtctcttattgtgaaactcacataatcagccaagtctgcctgactaaattattctcttcctataggcctctggttcttattttaagattaaagacccttttgagaatcctactaagtgagagcctccccctcccaaaagtgcgctaactcacttacacagatttatctgaaaagctacactataactagaatgtccagtttgctacattgcattaaacactggctcccacaggagcctacgtgcccagcgtctgtgtggctggagctctctctcgtgggtcccccttgtgggaagcaaaacgaccatcagaaggtggtatagcgagcacagacccacagtcggatgagtcagatggttacttgggaccaagtcacccctcctaggagtggcttacgctggatgtccagtacctgaaatccctgactacagtggctttgggacaagtcatctttccatattttcatgtttcccattgtaattggtgggcacacgtccactggatttgagactatagttcatgaaaccactgccaaagctgcctagaccagaaacctttgccatttc

SEQ ID NO: 16226 - DNA, 564 bp, Homo sapiens
  MAP TO AC009266.1; EXPRESSED IN PLACENTA, SIGNAL = 1.2; EXPRESSED IN BONE MARROW, SIGNAL = 1.4
  unsure 395
ctactgtatcctcaacacaactgcttaagcccaatgtgggactatgtcaccagggccccagagctgacacctttttattccttgttttttttttttttttttttgctgtttatccatgtcatatactctaacgtatcattagagtatcattgggcaaagctgaattatatgtgtaccaagatctaattcttctcagtcctctggttatggggcagagccagaggcagctcaatctcctgggaggtcacctgcagcatcaagtagccttgtccaggttgtatggtttgtcacaacatctccacatgaacagacatactgtgtaaaattagtgcccgttatgccatttcatgaagcagaatgcagcccaaaaggggttctgccacctagacacatanctttagtagccagtgacaaaatgcttaatagtacttcatgagcaaggggcctaaggaattgctaaaacaacttctgggtcaggtacaaagagtatcataacctaatcaaagtgaaactagggtggagaatgaaggtttaacggtagtctcaggcagtgttctcaaggct

SEQ ID NO: 16227 - DNA, 550 bp, Homo sapiens
  MAP TO AC007463.3; EXPRESSED IN BONE MARROW, SIGNAL = 1.4
catgatatacagaaaatccaggtggtctctgaaagcctgggacatcaaggggcaaagtgtagatgatctcagatgagctttttccaaagatgccagaaggaaaaagttaacaggcaggtgtttatggagcaagcagaatgaaatttgtgtttctgatcatcagatatgttctagaatgcagaggtgggaaaatgataatggcttagtccccgtgtttgcaggcctcctctgcacgggagagcaatgaggctgtccctgaagatacttcagaagctcaagaacaacgtgcgtgtaaacaatgtgtcctgctggctccaaaccagcatggaaataaatcacagccactttgaacattgttatcaaataccgtgagactctaggacgcagcgccgcttctgcagggccacctttcctagcaaaatctccagaagctcgtgggtgatttttagtgttcaaagttcgctctggaagctcccatctcattgttggggctggaaaccagaaacaccccgtgcagtagaggaatcgtcctgacctccaaagccagttc

SEQ ID NO: 16228 - DNA, 544 bp, Homo sapiens
  MAP TO AC007567.1; EXPRESSED IN PLACENTA, SIGNAL = 1.6; EXPRESSED IN BONE MARROW, SIGNAL = 1.3
gcagacaaaaggcacctgagggggaagaaggagaatgacagggagggaattgtgagtctgaccatttcaatggccacttctacagtgtgaatctttataaacaccaggtgctgaaggtaaaagccaaattaattttgattagcttttcagtatcacacagacaccttctccattcacgcagttcagagtgatgataaatgctgggaggctttgactcctgggcctaacagctttaaaacgttaatacttacgatcaagaggtacttccagtgcactaatcatctggcacaggaagagaatcaggggcactctgcccgcagataagcgcttctttttcggcattattttaagctgcattagcttaactcctgctgagactcacacactgaatttccttttcttctttcacaaaagattttgtgaaacgttgtgtgcaacgtttaagtaattttcatgcgggaaactgaaaaaggatagagtaggaataataattataatgtattaaaaagaaggaaatgaagagcggaagtctgcagcacagaga

SEQ ID NO: 16229 - DNA, 567 bp, Homo sapiens
  MAP TO AC005006.2; EXPRESSED IN BONE MARROW, SIGNAL = 1.5; EXPRESSED IN HELA, SIGNAL = 3.3; EXPRESSED IN PLACENTA, SIGNAL = 1.4
tcccacggtccctctatattcacctaaagtcagccaagctcagctggagcttcttccgggctttgttccgggtgatgtagttggtggccgagcctcgttcatactgggagaggaaaaaaacaattctccattagcaatgattgtagtgactgacatcaaactctgggcatgcctagttccagaggcaactatcactctggataagtggctgagatgagtctaggagaggaaacactgcagggaaggagccgacctgcctggatgagctctcctgtaccatccttgcggctgtcagcatagggaacacatacatctgcatgatgctgagggctgcgaggctgctacggatagggtgctgtgccaagtgcttagcactagctctaaatgttggccattacaattagtgattttcacacatttcatttaattcccataaccctgtgatgtaggtgctgtccgaacgtccatttcacataggagaaaacgggctcgtaaaataacccatgcaactcttaaaaagcacacagctttttaagagttggggctgggattcaaactcaggtctga

SEQ ID NO: 16230 - DNA, 576 bp, Homo sapiens
  MAP TO Z95114.19; EXPRESSED IN BONE MARROW, SIGNAL = 1.4
ccttagaaggacccttgtggttacattggacccacttaaagaatcccaaataatctcccatctccagatccttatctggacgataactgcaaggtcccttttatgatggaaggtgatataatcgcaagtcccagggttaggacatgcacatctgtagggggctgttattcagcctaaaacaagttgcatcaagaaaattacgatggggatatcaaggagtttgaagaatcccaactcgtagccatgtctaagggcttttctgaggtacaggccccgctagaggaagctgctccaactctgttcctgtctgctcctgccccactctctgtttctagacagcctgcgttcaagtcattgtggcccaagactgaactgcagaatggaaaggagtgaggcgctgcagcagaaggagctcgctgtcaaagctccaaagagccggagaccatttgcagggtggggtctgagggaggttggcaaggaaaggggagcatcatgtggattcctttccatagttgtcatgagctaacacacttcgccccaacagctggcttagattctaattgtgcccaggactgg

SEQ ID NO: 16231 - DNA, 570 bp, Homo sapiens
  MAP TO AL008723.8; EXPRESSED IN BONE MARROW, SIGNAL = 1.6
tctaacccaccaccagcttcctgttgaccgacttctcttccttatccccacccctaattcctgttttcccacacatggttacatatcttccctgttatataaacccctaattttagtccatcaggaagatggatttgagactgagctcccatctcctctgctgtggcacctaaataaagccttttttcctggcaatactcattgtctcagtgattgatcttctgtgcagtgagcagcagtgcctagaactgaactctggcattttggtaacagatactcacccccgacttgatgtagatagggacaaagatccacccaagaatcagcaacattactgaggactacaaggaaccaaaataagagacagtgagacattaaagaggcttggcttgtggaccttctccttctatgacctctgagtctggaaattaaaaaaaaaagttggctcaatcctgtcccattcaaacaactataatcccaagacaattgtgagttcctttttttctgtttctatgactcaggggccaccattttctgaggattaaattgtggtgaaaaagggaaagaaga

SEQ ID NO: 16232 - DNA, 566 bp, Homo sapiens
  MAP TO AL034406.1; EXPRESSED IN BONE MARROW, SIGNAL = 1.3
tgagagtcttgactagcttccaactagatgagctgagataaggaaacactggattctagcacagtatatgtaaagattgaagggtatctggccctgctgatatggacacagattttccaatcaaacgtgggaagaaattagcagttacttgttggggtcctgctataagccattcagataagatggcatgaaagcttagtatgtaggaaatttggttgaatttgatagactggtttaatggaccagaaatcattcccttgatcatgttgaggtctgctatgttcattgaaaacatgcaatacttctatgattaccacttgttctctcttttcatccagatgttggctgttgtacagcatgtgcttaagagcagggaggtaatttatggtttggtgcattgacatattttagtgttaacaaatttgaagtttcaattaaaatcaataagacattgttatactgtaatgaagagagatggtgggggaagggagtattttaataaactatgaaagtaaccactgcaacactgagaattctttatagaaacattaggccaataaacatga

SEQ ID NO: 16233 - DNA, 575 bp, Homo sapiens
  MAP TO AL022320.23; EXPRESSED IN BONE MARROW, SIGNAL = 1.4
ccaaatctgttattttcccccaaacacagtcgtccttgttatatggagatgaatgcccatttgggggaggaactggatagtggtgaaaggctttcgctctgaggcctcacctaaataattatgggaacttttgagcaactcgttaggtgaagacatcaacagtctacagaagagctgcaaagagcacagcaagatgatttagggaaatataacatatgtagtttggtgtagtgacagctgggagagagaaatgttcataatatttgaaggttgtgtgcagtacacttaaaaaaactaaaatgagctgggtaatgacaaattcatgaagggaggagaaaaatcttatctgggtatcatatcgatggttagagacaacttttaagatatttaaaacaacaacaaactctaggacagttaaaaagtgcacatgaagactttccactaaaatcggaaccaaaaaaattgtctttcgtatcatacaaaaactctgaatatcatgaaggtggcatttcacatcagtggagaaatgatgaattcagtgaatagtgttagaacaactaggtaaccatctggaa

SEQ ID NO: 16234 - DNA, 570 bp, Homo sapiens
  MAP TO AP000111.1; EXPRESSED IN BONE MARROW, SIGNAL = 1.6
acatcttctgcccagcactcccagccccctaccctgcagcattttaccccataacacttatcaccttcttacctttaaatgtgttcctttccttacaaaagcatagcttgtaaaatccaaagtcttgtttccaactagatatcatctgcctcctgatgccatgcaaatgcacatagcaccagctaggaaatattcttgtcacaaaaacttgatcctgaatttagtcaaacttctccagctaacttccactcacttggaatagagggacaagagcatggcaccataaggaagcatgcagacaaatgctgaatgtgggacattctccaagacaatcgacctggtctctgcaacaaaccaagggaagggggattaaaagagaaaataatggagactgcggtagatttaataacacttacaagatataacaacaaaatgccatggggagaacctgctcaaatcctgatttgtgccaaccaacaataaagagacactttggagtcaagtaagtaaattttattatggactgaatattacatctagtatattaccaaagaaatagtgtgcactttg

SEQ ID NO: 16235 - DNA, 549 bp, Homo sapiens
  MAP TO AC009313.2; EXPRESSED IN BONE MARROW, SIGNAL = 1.9; EXPRESSED IN PLACENTA, SIGNAL = 1.4
tgagtatttcacacaggagaaactgaagaaaactccaggcatgaagactttatactcaagtaaaagaggagaacaaaggccaaatctgtccacagtgacattttgttagctggcgtgcctttcaacagagtttcattctccagtttgccacaatccccatcactacttatattgtataagccgcttcacacttcacattcaccttacctattagttcctgtatgcattgcagactttgacccctgcaagtgaagatttatcttcatctacttttacacactcagctttggcagaggtctttaaagtccatcttctagaacaaccgtccatttgataattagattctctaatacatttctggctagctttttgcacgtcagaaacaccagaagaactaaaaataataataaaataaaaaaataaaaaaaaatgcctgagccccatccctgacctactgaattaaaatattgaaggatgcagggggagggggttggggagagttctaagtatctatgcaggtgaatctgatgagcagctaggggttacaaa

SEQ ID NO: 16236 - DNA, 577 bp, Homo sapiens
  MAP TO AC009313.2; EXPRESSED IN PLACENTA, SIGNAL = 1.2; EXPRESSED IN BONE MARROW, SIGNAL = 1.7
gttaaacaagggttgcctgcatcacagtgttctaggtggcttgtcactgtaacattccaaccagctgggaaaaaaggtgaaagggaaaacttgttatggaagttacacccatttgccaatgactagcacgtagtcacatgaccacaccagctaaaaatcagaagtattagtactataagagaaggagagaatagatattgaggaacaaataacatatcttatatatatggtctcactgaagttttacttaatttttactgtatatatggtctcaatttttattgtaaccctacaactatgtatgatgtgaaaagtgatgttcagagttcagtaaatggctaggaaattgcagatctggggtctgaatttaaaggctgtattttttttcagtctatttagtaaagtgtttaggagggaatatataaatgttattgaataaacaaaagtcacagtaattttcacagtattacttgtaatcacatatttttcatatcacatatttttacagtatcatatcatctctttacttccaggacactctatatataaagtttactccttgcttctcaccattgtg

SEQ ID NO: 16237 - DNA, 549 bp, Homo sapiens
  MAP TO AL035682.16; EXPRESSED IN PLACENTA, SIGNAL = 1.2; EXPRESSED IN BONE MARROW, SIGNAL = 1.8
atgttcagagttgcccgaagtttctccatggtcaaagctgggcccttctaggttcagggtgcttttcgctggaaaacccctgcccagatggtttgcaacctccataacagagtcggggaatgcaaagagctgaatgaaccgggtttgattctcagctcgttctctgactgtatgatgttacctctccgtgcctcaattttctcatctgtaaagtgggaatcatagcacataccttttcaggctgttgtgaggatgctaagcattcacataggtaacagtgcccagcacagtgcctggtgttcaatagctggtggttatgatggttagtaaaatccccatgcttcatgttggactctgaattccgtgctttgcaaacattggctttgttttgtgccagaacatcaggcatgccacaagcatgtacatgagaggtcggattctggagccagcggggttagatttccacctctgccacttccttgcttggtgaaccttgccttggtgacaaaaccactctgtgcctcagtttcctcatctgtaaattgcatc

SEQ ID NO: 16238 - DNA, 550 bp, Homo sapiens
  MAP TO AC006427.13; EXPRESSED IN BONE MARROW, SIGNAL = 1.4
tggaaagaaaacatcctggggaaggatgctaacaccttgagtcttgaaggacaaagaagataatgtgacttgaaaggagggaaaagtcctcaaaccaagagagcaaatgtgcaaaggcctgaagaagacaaacggcacggttccagagcctgtgggatctcagagggcagatagactcaataaatagctgtaactggcgttgaaggtagaaatgtagcatcatccaggagaatgagaaaggtcaccaaggagcatgcagaaagaaaaaaaaggaaaacagctacagactatggggcctgaggtatgcagaagaagtccacattgtaattcctggaatctgtgactatgttacctcacgtggcaaaagggactgagcagttgattaaattaaggatcttgacatgagagattatcctggattatacagatgggttgaatgtaatctcaaggatctttatccatgaaaaggggaaacactctctccagaaggagtgcacccctgcacataccttaattttatcccggtgaaacccattttcagcttctgacc

SEQ ID NO: 16239 - DNA, 565 bp, Homo sapiens
  MAP TO AL035681.13; EXPRESSED IN HELA, SIGNAL = 1.7; EXPRESSED IN PLACENTA, SIGNAL = 1.3; EXPRESSED IN BONE MARROW, SIGNAL = 1.6
ccctcctgagaaagaaagggcagggcacaaagggatgcccaatacaaacatggaaagtgcaggggagcttgctcctgggcaaatgatctctgagcctcattgttagaataggcccaatgatacctcacagagctgctgggacaaataatggagacaatgtagcagaaagagcctgacaaccagtaagagttcagtacactccctctcctcccctggacacaccagtgcacaacttccagaaactcaccatcttctgcagtgttgagtttgaggctcttgcctttgaaactcagctgtcccccggccacctgagtcttggcaagtgtctctgccagcttggcaatgtcttccgaggccatgttgactaggctggtgggctcccctggagatctgcagactgaggaggccaaagttgcagtaagaaaaaggagtctcctggggcccctggttgggggcagggtaggacatcagccatctcaggagtctgaccctacctcccctgctatggagaccctagagataaatcactggaagaaaggaaaacagcatcagagaaggaacagtt

SEQ ID NO: 16240 - DNA, 566 bp, Homo sapiens
  MAP TO AL022329.9; EXPRESSED IN BONE MARROW, SIGNAL = 1.4
gagcctggggttataactgtgtcaagagggtttgaccacaacaccactgacagttgaggccaggttctttgttggagagaaggtggttttcctttgcatcatggaataagtagcagcaccccagcctctatctgctagacgccagtagcattcccccctccaaatcttcacaaccccaaatgtcttcagacattgccaaagaaaggtaccttcagggcaaaaattactctcccccaccaaccgccgcaccaccccatttgagaaccactggtttagatgataggagattctcggtgtgtggcagataggattgaggttgaaggctgatgccaggtgtagggaccagggctctaactcctcagagagcacgtaaaacatgaatctaccctgtagttgctgtgcccagattcattgccattccaggaaatgagcttaccacattgactgttgaagtcacgccagccccagcatcaaaagcgaaggagtggatgtttcagttaaaattgcgggaggggacttggtccttcctgttgcttcttctgacacctgcatcaccgctttctttt

SEQ ID NO: 16241 - DNA, 582 bp, Homo sapiens
  MAP TO AC009313.2; EXPRESSED IN BONE MARROW, SIGNAL = 1.3
aagactcctgttccatttctggacatgaattttaacttaacaattagttcaaatgcagggatgagaaatgccagggtttttgccactgctggtttgtgtagctgctggaagatcctgccttccataagtggcccatcatttttatgctaaatttcagtcatgttggtaaagcccatttcttttattgccttcaaagtgttttcactgacaaaattagagaagaaatgaagtattctcatctctctcattgtctggcttccccccagttttctgtttcttcaggagcctcgataccatcttcttcggattcccctttgttttcagtttttgctttttttgtatcacgcccagcattagtcactatttttctcttgttcttcttttcttttttgatttcgaatctagagactgaattgctgcttctgcactggttagtatgatagatttctagttttctttaacttttacattttctactatttctttagacatgtctccatttggggcttctgacaagcccacaatcataacatgttttagggatttttttaacttttccatgccccactgtttcttctgaca

SEQ ID NO: 16242 - DNA, 571 bp, Homo sapiens
  MAP TO AC006992.2; EXPRESSED IN BONE MARROW, SIGNAL = 1.3; EXPRESSED IN HELA, SIGNAL = 1.3
ctgccgtcagagagtgacagtccagcaggaaagacagacaatccagaaatataaatgaaaaattacaaacaatgatcatgactgtgaagaagagggaaagggtgttaggagagtttacaaagagagtgtatgtgtggggctgatctattataaaggggcaggagggcttcccgtagagttgcactttggagctgatgttgactggggaggtggtgcatggtgggggaggagtgtgccagccaaaggaggagcacatagaagcctgaggtgagaagggtcctagcatgttctggaaccaaagagaagaccagtgtggctggaatactgggggaaggggaaggctgggaggacacgaggctggggaggtagacagagccttttatataatattaaatgttgacagagtctttaggctaaaaaacatttaggggagccgttacgtgtgtaattattcctaactgaaaagttcaaagtactgttatttgagctatattttgttaaaatcaacaatgacaacaacaaaccactaggacaacaaaaatttcttcctggattgctttttagattgggt

SEQ ID NO: 16243 - DNA, 575 bp, Homo sapiens
  MAP TO AL035701.13; EXPRESSED IN BONE MARROW, SIGNAL = 1.6
tctccttggcttatggatggccatcttctctccatcttcatgtggtttaccccactgtgcatgtttatgtcctcatctcttttgataaggacgttggtcagattggggccaacctctgtggcctcattttaaattgattacctctttaaaggccctgtctccaaatgcagtcatattctgaggtactaggggtgaggacttcaatatatgaactttaagggggcagggacacacaattcagcccataccatctaattaaagaagtgtctggtccccttgccagcatgactcacctgtttgcagatttgacccacctgctggtaagtgtgccacacctgctggccggtgtcatataactgctcacatcacttacctgcctactgacagaacctgcctacttgctgggctgtaagaaacccctgacttcctaatagccacagcctgattcctgacatcacctgtttgcaaagctgccccacaacttgtttcttacctcctccagcaatgcctcaggccaccccccttcttcccgaaccctactctactcaccttctagctgtttctttccttcccac

SEQ ID NO: 16244 - DNA, 593 bp, Homo sapiens
  MAP TO AP000346.1; EXPRESSED IN BONE MARROW, SIGNAL = 1.3
ggaaaaactggtcttctgggaaaggtaatcattaaatatcagagcaagaaaaaaaatggttacaaacacagcacacaaagcccatggatacaaattgtctcatatctatcttattaaaattccaaaggaacaagtcagacttctacacatatttcctttggttctgacttcattgcccttttcctaggttccaaagcaacaggtgtcactcaactgctccccagagatcctcctagagtatcattctctagctgcagatctgcctcattgcagctgccctcatggatggtgtccattggccaatcattaagagacaaaaactctgcaagaagttattccagagagcaactcgcccagcctcctactgcaggtgaggccacactgggttgcacaagattgctctgcactttcctaggtgttgtcagactctccctggtctctgtggagtcagaggtctctaaaaaggcattgctcacacttgccagcctttgagtgagaaagaggaactgaaggaaccacttttaactttttccttccactggcccattacaggtctcacctccaatctcacagccctgagattcccactttga

SEQ ID NO: 16245 - DNA, 584 bp, Homo sapiens
  MAP TO AL079300.11; EXPRESSED IN BONE MARROW, SIGNAL = 1.6
atgcctgggtttaacctgtgcatgcctgtacccttctacacctgtaaggacttgatcttcacccacacttgctcctcagcctgaaggaccgagcttgcctacagatgggccatatttaagcctctgctgcacccatgccttggggctgactttgggtatttgtctgcactggcccataatctgatcttccacttgggcctccgctttgccctctgttccctcagccctcacctgtgctctggtttttctcagacactttggcctggatctctatctctgcctcagtctttccaggtcctcttgggccctggaccccagcacagaggctggatactgaaacagactcccctggtgcccccttctctgatctcttcggtgccctgcctgtgggacactttggattcccacagatcatgcttgctagaacttgagctgactctgtgaatggccagctttttcctaccagcttgaacccgctttggccaccagcgtgtggagtgccttttccaagaggtgggattagctgtgatccttctgcctgccccaccctattgtaagcaaatggacaaggtcctgaagggagg

SEQ ID NO: 16246 - DNA, 550 bp, Homo sapiens
  MAP TO AP000041.1; EXPRESSED IN BONE MARROW, SIGNAL = 1.4
caatgcacattgtgggtttcatggaattttattctaattctgcaacttggaacacttttgtccacaccccgttctggggaggtaatggggccatggaaccctttctgtgtccatccatatttcagccctccaggaggctttgccaggcaagttatacctcactctggatgagcctctggacatcaagagacatcaatggtgccaaagcaccatactagatttcaacagaggcagcatgcatggcccttcagagaatgaaggctggatcctggtccctgacatagagaccctaaagcactctctcatctcaccgttcagaatatgtggatcacccccttggagagttctggccctcaggaaacttacacctaccatctaaagttctacacttctaccctgactcccacactccataaaaccagggagatggagccccagctgcactgtctcagtcagggtcccagcaggaaatagcatacccaagttaggatacttggaaaggggctaattgacaaagggactcattaccacaatggagccagcatgtaga

SEQ ID NO: 16247 - DNA, 566 bp, Homo sapiens
  MAP TO AP000352.2; EXPRESSED IN BONE MARROW, SIGNAL = 1.4
gagatgaatgaccgagacaggatacagaccaaatgctggctcatgaggccctggagagaggcagagcctcctggaggcctgggttctggaccccaccacccacttattttagctgccttcttcctgactcagatttagtttctctaacaggaagagttcagatgcttgtgtcagaacgtgtgttgtgactttgtgattttggcatgttacatgcaggttaagaaagctggaccctgaggaggaagatgattcctttaataactatgaagtccagtcagaagccaaactggaaagcttcccaagcattgggcctcaaaggctgtcatttgactcagccacattcatggaatctggtaggaatcgagcagtgtgaccattcactttgggaattcttcttcccactatcctataacctgcttatgttttgttctgggagaatggttctggggtgttttttagtgtggccaagagtctgcctggattagtcttggacctaagccctgtggtcagcttggaggtcttctgaaatgtccaggctcatacttgctatgctttcttatggccaa

SEQ ID NO: 16248 - DNA, 586 bp, Homo sapiens
  MAP TO AL035682.16; EXPRESSED IN BONE MARROW, SIGNAL = 1.4
atggggaacgttcaagagtgaagaaagtgctctgtcttgagtggtggttacgtgggtatatgcgattgtcaaaaatcactgaacacctacaatctatgcaatctactttatcttaattatacctccataaaaatatatatatatgtcacaaagagaggcagagagggaaaagagcatgtgaaaaaatccactttctaacccacaccccatacccactcccaagccctgcaaaatgagcaaagcgaatttacattctgtgccctgagctggcagggctttgtgtgaaattgctttacgtgttttctgaaatacacggagcagagaggcccatctgctgggcagggagaaagccatagtggcttgggcagagctacctggagacatggctggagaggttctgttaagttctcacaggaccaggtgtgtgcctgtggacatctcctgtctcattgcagcctttttctccccactgggcagtgtggaaatacagcctggagaccgtcaccatgtgctgagccccggcaaacattgcctggttccgtctttataggacagagactgacaagtaaattgggctgtcagagca

SEQ ID NO: 16249 - DNA, 568 bp, Homo sapiens
  MAP TO AC007286.18; EXPRESSED IN BONE MARROW, SIGNAL = 3.7
gagctttagggaacaatgggataaagacagaccagacaggacaggccgtccagaacactgcccagaaaaattcccaccacctctgccagctcctaaactgcccgtgtagggagatttctgctgttacaccatcagctggtttatcttgtctgcatggcatgttgagagaaggctgtttgggggccagctaagtcagtttctctagctgctgaaatagctttcataaaaatagagttacaaaactaatgttaacgcttgggctgtatactgtctttttcagaaaaataatggttattataaacaaggaacagtaaaggtttctgggagaaaatataatagaaaagttgtcctggcaccctttggagaaggtaatgggactctctcatgacctttgtttcagaattgctttgtaattctggtaagatagacactaaattgtcatttctggactgtatagacacactaaattgtcattactggaagtatatacacaaacatgcaaaaatggacccattttaaaataagcaaatacaagggccaaaatgttcgattacaggttcatgatgga

SEQ ID NO: 16250 - DNA, 561 bp, Homo sapiens
  MAP TO AC004032.7; EXPRESSED IN BONE MARROW, SIGNAL = 1.6
tgagccagttctgacaattccaagatcctctactccagccagccctgaggccccgtccctctgtcacctgcttccccagggtccaaactccagacagtggtattttcttcccttcctgttgcccagatggtgccggtctctttgtcttgagggtttcttcccctttcctttttcttttttctcacttgcattctttcttttccttttctttttttttttttttttttttttccatctttgaaggatgaaggagcaactccctggatggcatgggaaaacaaaagggactgctgtcccacagcccagtggcagcctcgccacccagagctggaaggtatggaaatgagctgttgtggatgcaaatgaggcttctgggtgatttgcacagagccggcctgggcggggccaaggtggagcaactagggaaggctgtcgggagttttcccaaccttcccccaggtacctggcttctccaggccagccttcccttgagaaggcctccctaaaagctctggcctctgcagcatgaaatatctgggcagctgttgggatttcgtcatt

SEQ ID NO: 16251 - DNA, 575 bp, Homo sapiens
  MAP TO AB016897.1; EXPRESSED IN BONE MARROW, SIGNAL = 1.3
gggtagctgctgtaaccctgaaccatgttttgatgttaagttccctgactcgccttcacacggtggttaagttttatgaaatccagatgatttggaagcagtgtgggtatgcagtttactttttaaaacattgcttttggggacggtcagcaggctacttcttggtcatctgtgggacaacatgatgcttcctgtttaatttggattttaaaattacaaacaattccctcctttttatttttctaagtctttttaaagtttaaaagtacaaagcgaatagcagtcagcgtggactggttacgtaagagcctgaatattgcattggttctaggtcgtgttgataaatgccatacagggtcatagcatccagcgcagaatgtggtgatcccggtcttgaaaaaccagctgtcttggttgctgttgaaaactgagagaagtagacggttgattttcagttcatgaagttgttgtggtcccggaaatgaaaatgtggttctctgttgttggaagaacacagtcagtggtgagtttcttcagggggcagttgccggtgttctcgtgctcactgtggtctt

SEQ ID NO: 16252 - DNA, 485 bp, Homo sapiens
  MAP TO AC004916.2; EXPRESSED IN PLACENTA, SIGNAL = 1.6
agtccacaggtgggctcgccatccccaggagcgcactggatgctgtggtgtagctggatggtgctaagcttcgcacaccccaggcaggggtcgagaagaccctcagcctggccaccatcctgcctcaccgggccatatgccccaaggaaccagggcacacaccctgctgaggaggctcctttttcccaagcacccttgcgggcggcgaacctacctggcgcccagcctcgttgttgtggcggttcatggctgagcgggcatctggccggttctcccgggcgtcggcgaactcccgagacaccatcccaccaaactcgatgtcctcgctacagccaccccacttccagcccttgcctggtgagccctggtggcggctgctgcagccacagatggcggccgtgccttctgcacatgagcgtgtcactgcaaaggccacaccggctgaggcaatggcgtggacaaaggccgactccctggtagctgta

SEQ ID NO: 16253 - DNA, 496 bp, Homo sapiens
  MAP TO AP000344.1; EXPRESSED IN PLACENTA, SIGNAL = 0.96
gatgctgccatctaccacgccccagtgtgcccggcatgggttgatgagaggctgccaatcagtagcaccacaccaagggaattgcagatgtcataaatagtccacattggcagatgttcatgtctacatctgattggaaagaagccaggaaagcaacatttctgttcaagacaaaggaaagtgtcttaccttggtagcatcttttttacagaggtatcgtacagcatcctcattagtgatgtcgtatacagtgtcctcataagaaatgtcttctatagtgtcctcattagagatgtcatgtacagcagcctcattacagatgtctacagcgtcattagagatgtcacgtacagcagcctcattagagatgtttacggcatcgttagagatgtcacatacagcagcctcattagagatgtcatgtacagaagcctcattagagatatctacagtgtcctcatcagagatgtctacagcatcctcattacagatgtca

SEQ ID NO: 16254 - DNA, 476 bp, Homo sapiens
  MAP TO AP000426.1; EXPRESSED IN PLACENTA, SIGNAL = 1.3; EXPRESSED IN BT474, SIGNAL =   4
tactaggctcaaacggggaggccatgaaaacacgttttaggaattgaaatggtcattgcaaatctaactatatgactatgattttatgagacacagttgactttcatagaatagaaaacgctttgctctcggcttagcctgattttggttactcagtctgatctgcactaaatgtcctgacatagactagtgccgggcacatcataagagctctgtggctccagctgtgattactacgccaggctccccttggcattgagacaacatgtcagtttatcgaggactatacagggaagtcaaggtcaacttaccaatgtcaaggaccctctgcttcgccgtatgctgccgagagtgccagtatttccagtatttgagctgttcatctctgtttttgtcttcactgaagaccaccatcaccacactctgcagaggggagaatcgtggagcttactttttgttcagtgcctctgttgcct

SEQ ID NO: 16255 - DNA, 473 bp, Homo sapiens
  MAP TO AL050320.16; EXPRESSED IN PLACENTA, SIGNAL = 1.4
ccaatttgctgggttcaaagtaaactctaccatcttgggcaaggtacttcctctttctgagacctggattcttcattgtaaaatgggaatcatgacaaggataataataataatgcccactgcatactgttatgaggattaaatattaagcagttagtagggtgtctgacataacttgagtgctacagaatatatatatatactttcatacacatttatttgaaaaattctatggttcacaaatattgaaaactattaatttgaaccaaagactggactcactgacttggatttgctctctaaaactgggtccctcttgtctacataactgacctgcggcacctacagccaacctggccatcccggtctccttcttggtctttttggtgcccaagacatgtcctccatatattcctatttttaagaattacatgtttatcagaataatttcattctcagtgctcaagttgaag

SEQ ID NO: 16256 - DNA, 462 bp, Homo sapiens
  MAP TO AL035106.25; EXPRESSED IN HELA, SIGNAL =  11; EXPRESSED IN PLACENTA, SIGNAL =   1
ggagtcactctgtgcccttcagtattctggtgtagtgcccttgggatgcagcttagtctagatttgtggcttgaaatttgtaccctgggtatttgcctcccactcccatccctaccctatgccatgaccttgagctgacactgtcactggggttaagggggtttgagtcctggttctgccactgcactagcggcgagaccctggggaagcaacttttccttggttttgtcatgggtatgtgagtctgttacagtagttaccatgtaaggctgtcgtggggaatgagtgagttcacccccattccaggagagcagcgtgcagcctgtactacatgctgggcagcctgtactacatgctgggcagcctgtactatgtgctgggtatgtactctgtgttagccatcagcactgacctgggcactttgtggctcagggtgtctgctcagatgatgcacacagagcc

SEQ ID NO: 16257 - DNA, 491 bp, Homo sapiens
  MAP TO AB020878.1; EXPRESSED IN PLACENTA, SIGNAL = 7.2
gtttcccaaagccttctcaggtaatgttgaaggaccactagtgaaaataattactgatgtagtctgacatcctcttgttctgcagaggcccaaagggtaaacgatgttccctgcttactgagctgggtagtagctaagcatttggggaagttccggtgccccagctctgaaggacccctcttccatgctgacttcctctgttcactccaaacccctgggtgccacaggtcctgacatttcattttttccagtgccattcctgtgtggaaccatggtggtccccatctttacaggaggcacctgatgtcaaatgaatctctcggagttttggagagagaagcctctttgaacaggaaggattataagaaagggaagctcagctctaaggcattcaccattcactttgccctgggctagtcctttagaaagatgtgtgttcctattacttcaaaacccctcaccttgagatccctctgaaaccagcactggct

SEQ ID NO: 16258 - DNA, 462 bp, Homo sapiens
  MAP TO AC010091.1; EXPRESSED IN PLACENTA, SIGNAL = 2.5
tgctttacctgagcatttttcacaagtgacttctagcaagcataagcaagtttctaaaatagtcatttagaatctcagcaatttaaagcctctttctgcttatgtatgtttgtagtattcagaatctgccataacaaatgtgttgttctttattatactatgaatcaaattttaaatttaggttatgtgccttaatagtctaaaataacaatagataggaataatactacagaatttggaattattatgttttacatttaaatttttttccttcaaaacagagacttgaaagattatgaagcttggcttggaattcatgatgtccacggaagaggagatgagaaatgcaaacaggttctcaatgtttcccagctggtatatggccctgaaggatcagatctggttttaatgaagcttgccaggttagttactttagaagattttgtatttttcacctggaca

SEQ ID NO: 16259 - DNA, 469 bp, Homo sapiens
  MAP TO AC009310.1; EXPRESSED IN PLACENTA, SIGNAL = 0.98
ttgttttgttgataaccatttgcactgttttctgaagaatatgaataaagctgctgtgaacattcttgtaccctttttttttgggcggggagggaatttgtctttatttattttgaggaatgttgtggtttgaatgtattctctccaaactttaggtgttgccaatgtgatagtattaagagatagggctttacagaggttattagatcacaaggtctcgtccctgttgcatgggattaaatagaagaagcttcacgcagtctttggctcacttgccctttcaccttctgccaggtgaggacacagcattcctccttctgcaggatgccgcccttgccagacagctgcacctgctggtgctttgatcttagacttctcagcctccaacactgcaagaaagaaatttctattctttataaattaaccaggctcagatattctgttgtagcggcaacacaatgaatgagga

SEQ ID NO: 16260 - DNA, 480 bp, Homo sapiens
  MAP TO AL035454.16; EXPRESSED IN BT474, SIGNAL = 1.4; EXPRESSED IN HBL100, SIGNAL = 1.8; EXPRESSED IN PLACENTA, SIGNAL =   1
aggctggcattatttttccctgtttacaaatgaaacagctgagacttagacgtctaagttcagtgacttatccaagatcacatggttggtaacctgggttgagatttttctttgcttccaactcgagtttatacccaccactaaaatcttaactaagcactggaggaaaatagagatgaacaggcgtggccctgctctcacagaagccactgtttaattctacacttttgtatgtgttttgttcccctagagttgtagtttgaatttttggagtttccaggctttggtatggttttggtgtttacttacttactatttttttaagccatgctgttttgcctgggatttccttaattcccttgcacttgtcctcgtgcaccctgatgttaagaactggatcaagtatgcccgctttgaagaaaaacatgcttattttgcccatgcacggaaagtgtatgagagagctgtggaattctttgg

SEQ ID NO: 16261 - DNA, 475 bp, Homo sapiens
  MAP TO AL049868.10; EXPRESSED IN HBL100, SIGNAL =   1; EXPRESSED IN PLACENTA, SIGNAL = 1.2
tgattcagtgttgctttggccaaaatcaccttacctatatagaaagaaaattcattgggttgcaaaaagaccccaacatgtagcatcacaaataacatgtaatattagatgggttggcctatccctggtgtgtaatgagtaactcgcccctccataggagcagttgccaactttagcatctgctgccttgccagaggctgtgagggctttggccctgccacagtgcggccatttatcaccatagccgagaaggacatttgcagctggcttagattaatggctctcccaacgtccttccccaccctgaaaaaaaattatatcggggattcctgtcatgggccgaagctgtgttcctgcttctcctctgggattatcagccttgactatgctgaaattccttgtactctggccggccacacttttgttccctataagaagaggaactaaagtgaaagtcccatagctggttgctaaa

SEQ ID NO: 16262 - DNA, 484 bp, Homo sapiens
  MAP TO AC007378.2; EXPRESSED IN PLACENTA, SIGNAL = 1.3
ctgctgggaacattacctttcctgatcttgacctctaccgtatgtaaatacccacatacttcctgccaggatgtctttttttaggatgtcttccttttactcctgtcaacctgggaactcccgccgtcatcttctccaccctctgacccatacatctctccccaggggagtcccagggcagaaatctagcggctctttcctcatcttacattcacatgctgacacccagctgccctaagtttcctgtgtcctgcctctctttcattgtagcagatgcaacattttgtctcctcttatttcacctgcccgtatttgccaggcttctgcgtttagcaatttttgcagcagcatcgaagttaggggtgagagccagcacagccagcttgcagctcatggaacacccccattcatgcgtgcagagagatcgatgctcaggtgggagcttaagatccaaaaaattaagactttcagcttccaagatagc

SEQ ID NO: 16263 - DNA, 465 bp, Homo sapiens
  MAP TO AL121773.1; EXPRESSED IN BT474, SIGNAL = 2.2; EXPRESSED IN HELA, SIGNAL = 7.1; EXPRESSED IN PLACENTA, SIGNAL = 1.3; EXPRESSED IN HBL100, SIGNAL = 1.9
tgccatgtgattccattttgtagtcagggttaagaatctctattttggaaagtaggcaggggcccaatgatctgcaggtaatgaggtcattgcaggtcattgtgggactcagatgagtgaaagattttccaattttaacatattaccagaggtagaaaatgataataggttatatttaatttgttaatatgtattctgtgggttttatttctctccccctcctttgcatgtctaggtgaggttaaaagactcacttgtcagctctcttcagttttgtaaggcaaaagatgctgaattagcttggatagatggtgtcttagatatgagagtttccaaagtggacacaggggttattttagaagaaggagaactaaaggatgatggagaagactcagagatgcaagtggaagctccctcagattctagcgttatagcacaacaaaaggccatgaaaagtctgttcgg

SEQ ID NO: 16264 - DNA, 448 bp, Homo sapiens
  MAP TO AL117352.3; EXPRESSED IN PLACENTA, SIGNAL = 1.3; EXPRESSED IN HBL100, SIGNAL =   4; EXPRESSED IN HELA, SIGNAL = 1.3; EXPRESSED IN BT474, SIGNAL =   1
gcctaggtcgtttatttgggaatgtatcttcagacccactcacatcctgggatggcatcacagatgctgattccgttacttttgaagaatttcttagggatatcttagaagatgaaacccttctctgagaactagaagagactgagtttttagggatgttgccaactgttacacttatccttggagatccattcacacctctgaaagccttttggttggcaaatgatactctaggaaagtagttgcttagaacattttggtgactgttactaacagcaggggagaccagatgagaatttttacttgaaccattctgttcaaatttcaccttgattttagaattaggtcttacagcatttgctgaatggttttgatttaaaagatcttgggttttattaatggcatgtgaagtgatcagtttcccaggtgaaggtaaattgcttgtttc

SEQ ID NO: 16265 - DNA, 488 bp, Homo sapiens
  MAP TO AB020878.1; EXPRESSED IN PLACENTA, SIGNAL = 2.7
tgaatgaatgatatgtggaaaggaaagaaattagaaaggaagaaaggaaggaaagaatgaaagcagggaaaaagaaaggaaaaaatggaggtaaggaaagaatgactcattcaataactaaataaaggaatgatcaattttcaattagtctttgattgatgctattatgttacatgtcaggcttccatacaaaatctgttattttggaaactaatcattcaagattccaagaatttaataaactctcccagcattttctttctgtgtctctttttatagactggagaggcagatttaggtatttttgacaatgaaactaagcaggaggatcaagtccagattgttagggcccttgggataaagaacaaaattcaggtttttgtactggtcacagcttggagaaagcttgttatttggaacaaggatatggatgcaataaacattctgaggtttatcttgctttaatgacttgccttaagtggctttga

SEQ ID NO: 16266 - DNA, 413 bp, Homo sapiens
  MAP TO AL096763.9; EXPRESSED IN PLACENTA, SIGNAL = 0.94
ctttcattgtggttttgaagaagtagaacactataaaaagttttaagtttgcccaagcaaagaaataacaatctatcgatagttatgtgaggctttcaaaagcctacatactcttagtacatttctaaagaccctcatcatactcttagtaaattcctaaattgtatgttataaataataaggcactataaaaacctataatacaaattaggaggacatacaactaaccttttttcctgagtttggaccttttttccttggtgtgatatttttaacagaactgctccttttggggactgcagtaggtccaggtggtttaattcgacttgatctcctgacctgctgtgttggtaatattagagtagttttctgtggagactgcattgaatgctggcttgcttcggaaggagaag

SEQ ID NO: 16267 - DNA, 486 bp, Homo sapiens
  MAP TO AP000404.1; EXPRESSED IN PLACENTA, SIGNAL = 1.5
tcctctaattcacagactatcagggactctgattttactaagatttgtatgttcttaaagtgacttatagaaaacaaaatttctcaagtcttttgtttctcttttttttccataggggtaccaaagtctgatctcttgcacaccaaatcattaaggggccataaagactgctttgaaaaataccatttaattgcaaaccagggttgtcctcgatctaagctttcaaaaagtacttatgaagaagttaaaaccattttgagtaagaagataaactggattgtgcagtatgcacaaaataaggatctggattcagattctgaatgttctaaaaacccccagcatcatctgtttaatttcaggcataagccagaagaaaaattactcccacagtttgactcccaagtaccaaaatattctgcaaaatggatagatggaagtgcaggtggcatctctaactgtacacaaagaattttggagcagagggaa

SEQ ID NO: 16268 - DNA, 467 bp, Homo sapiens
  MAP TO AC010908.1; EXPRESSED IN PLACENTA, SIGNAL = 1.1
gacaatagagtcaaagagtcactgagtttaatctatcctaaatttcagttaaggggtaagacaagggcatccatctacctcctgtccaagaagtatcattagatgacaaaggcgggtctgcatcccaccacataatcacattaaaaacagggggattcagaacatgactccaataaacatgttcttgagctgagtccacctggcaaagaacaagaaataccagccaccccaacacccatgtctttcttactttctcagaagctttcccaattaccgccagatacataagaaactggttctgtgcagctgcaggggctcccctggccgtaagccggatagttgtctgttggtccaacagatgcaggtcttcttaagggtggaggaaaagagggcaatggcttttctattaggggaggaaaagagggcaatggcttttctattaggggaggaaaaggctgcactctgtc

SEQ ID NO: 16269 - DNA, 496 bp, Homo sapiens
  MAP TO AL121773.1; EXPRESSED IN PLACENTA, SIGNAL = 0.96
ttggataagggtcaactgatacccacaaagattaaaaccacaatttactattgtgttagtacagtgttgaaaccaaataaaataaccaggagtaaaaatataactactcctaataaaatataggttgtaaaaagtgatttccattataagaaatctaaagggaaagcccactatatagctattgcttctgcagtaattgtcaaaacacctctaagagtacattaacttccatgaaatctaagaataattggaatcaattcttcagcaatgaatacaacacacatcagaatgtctttaccttgcatacttagctgaatagccctgcggagatctgcttcctcatcttccatgtcaatttcttggcgacttagtgccagagccctctgcaaatcctcctcatcttcgtctaacattcctgagccatcatttgcttctaacactcgttccaggtctgttttatggactctaaagaacaaaagcactggtaataactgca

SEQ ID NO: 16270 - DNA, 451 bp, Homo sapiens
  MAP TO AL109953.6; EXPRESSED IN PLACENTA, SIGNAL = 0.94
tggagagcagaactggaagactgggaatggaagaggagaatgtctatttttttttgtattattcctgattgcataattatgtcatattcacctattacctattcaaacaaagtcattgagtagaataagaatagctctttcatgctttgctagagaaggagagctgtccaccaaggagcccgcaaatgtagcacgcgtggatcttgcccagagatgttgctgcaggatgggtgctggcccttgtgctgtcctgagtccggtgaacaccagccccaagcaagcgaggaagggaggaagcctggtgactgctcagtactcccctctgggaaagtccttccacgtctccatggctggaggcttaaattcaaatcgaagtagcaaagcagagtagcaacttctcatgttcccaccatcagctccccagaaccagccaggaaatagccctggatga

SEQ ID NO: 16271 - DNA, 486 bp, Homo sapiens
  MAP TO AL049647.7; EXPRESSED IN HBL100, SIGNAL =   1; EXPRESSED IN PLACENTA, SIGNAL = 1.9; EXPRESSED IN BT474, SIGNAL = 0.96
gatgcctctatcttgtctgtctttctaaagtttatcctgagaagatgtacaggagaacatgggtaggtaattcatggcagaattgaacttgcaaagcttcttctggtgtaatgtggaaatagttcttcttgacctttctgcagtctttgacattgtggactcagctctcctgttggaaacctatccctcatttccttaaccctcttacagtccctgtttctcatctgctagggctgcttcctgtgtctttctctggccccttcttctttcctccccttggttctgaggacgcagccccaggcaccacgctcctctctccccagagccttccccaagaactgaatccccatgtggaaaatcagccacccaccttgattcagatgactatgatcttcattcatctcctgagcatgattccagtattccccacgaccactggaggtttccacctgaatgttcttacactcgttactcagagtggctgaa

SEQ ID NO: 16272 - DNA, 481 bp, Homo sapiens
  MAP TO AL035634.7; EXPRESSED IN BT474, SIGNAL = 1.4; EXPRESSED IN PLACENTA, SIGNAL =   1; EXPRESSED IN HELA, SIGNAL = 1.2
tggcaagtgattaacaaaacagtaaaacatttaaaagagagttgttattattattctttttagctttcctgtgacattagcaatgaaaccttaatatgtcataaattgataaagctagaagtaatgaaaacagtttgggaaatcattaaataaaataaatatttcacttattaaccttgtaaatcaaaaatccttttttttttttaagtaagcttctcagttaagatccaaataaaaataactgaatcatatccaaaacttaggagatcactggaaagggaaaaggccagctgcctcttggtagggtatatactttgtattaatgtatacttctaccacggccctggttccctggctcccctttaaacttacttgttaaggggaattttcatggatgaggaactagcacgactgtttcctcgctgagcgccgcctgcatcagctgactctgaatccttaaagtaggaagaggatttgggcc

SEQ ID NO: 16273 - DNA, 481 bp, Homo sapiens
  MAP TO AC007556.2; EXPRESSED IN PLACENTA, SIGNAL = 0.74; EXPRESSED IN BT474, SIGNAL = 0.63; EXPRESSED IN HELA, SIGNAL = 1.1
tccccttttcatttaggtgacaaaatggaatctcttcaaacgaaaatctaaacaaactaccaactttgaaaatccaatctatgcacaggtaatttttaacaatttttcttagcacagacattttttcttagaaattatttgcttggttaaattggacacacacttagattattctgagcagagtggccacaaatagtcttctttatgaaaaaccgtgtatggtgaccttgggggaataaatggctgattcctgttacattgtattcttagatggagaacgagcaaaaggaaagtgttgctgcgacaccacctccatcaccttcgctccctgctaagcctaagcctccttcgagaagagacccaactccaacctattctgcaacagaagacacttttaaagacaccgcaaatcttgttaaagaagactctgaagtatagctataccagctatttagggaataattagaaacacacttttgca

SEQ ID NO: 16274 - DNA, 1913 bp, Homo sapiens
  MAP TO AC010766.2; EXPRESSED IN PLACENTA, SIGNAL = 1.2
ttcagatggggaaactggagttaaataaggttgaataaattataagcagaaaagcaggaatttgaacatgagtcttcagactccacagctgattgtctttctattatatcatagttccattcacagatataaaaattttaacctacatgtaggggtccctaccaggaataactgtcaggaggaagaaagaactacctctttaatcttcttattttatctttcatttattgtctttactgcagaagagattacactacatctgagatggagacctttcctctgctgctgctcagcctgggcctggttcttgcagaagcatcagaaagcacaatgaagataattaaagaagaatttacagacgaagagatgcaatatgacatggcaaaaagtggccaagaaaaacagaccattgagatattaatgaacccgatcctgttagttaaaaataccagcctcagcatgtccaaggatgatatgtcttccacattactgacattcagaagtttacattataatgaccccaagggaaacagttcgggtaatgacaaagagtgttgcaatgacatgacagtctggagaaaagtttcagaagcaaacggatcgtgcaagtggagcaataacttcatccgcagctccacagaagtgatgcgcagggtccacagggcccccagctgcaagtttgtacagaatcctggcataagctgctgtgagagcctagaactggaaaatacagtgtgccagttcactacaggcaaacaattccccaggtgccaataccatagtgttacctcattagagaagatattgacagtgctgacaggtcattctctgatgagctggttagtttgtggctctaagttgtaaatcccacagagctttaggactagggtcttactaaagaaggacctcttcttgttcattcttgtttaaacctttccttaatatctactctttagcactatagtgaactcctgattatttattctaactggaggagtgaaaaatccaaaattgtggataattcaattaaaagttatgactgatactggcgtgcagattcttctctctctatctctctctctgtgtggggggagggtggggagggtgtaaaacaaactgaatttcatcctagctcagctataaagccaagaaacagaatccacctaactaggcagaattaaggaaacaaggactaaagccaatatggacaatgaaaagctaattgtactgccaatgatactattcagaaaaatagtgaatgagtgtgacatatattattatcactactctcttcaaagggtatgtgctcacacttgtgtgaattgatgtatgcacataacaaagagtctgcctgtccttcaggaaatgccagaggaaaaagattctttggctgagctgatgctctcagtgtcaatagctccagccctatgcaatctccattcttccaccctcatctctatttcacaggttgctgtaaagagaagaaaattcttattgtaatctttattcaagccaagtcttgataccctggggctgtgggagaggaatggcaagccatggaagaatagaggagccagaaagatgggaatagaaggtctgtgctaagtaccaggcaggactggtcttcaacctgtgatgtcttatgctactgtagttaattttgttcactaccagctatttatttgcaaacgttcgtggttcaacattctgcttaaagtatggacagttatcttcttcatcgatgtgtggacatatgtttctattcctctccttaaatcctccctccatcctgagaccactctttcttaatgttctaattttaaataaatgcatgtaaatgtatgtaaattatgtcatggtaacatctttctagtacataattctctatatgtcattttcccgaagctttatca

SEQ ID NO: 16275 - DNA, 475 bp, Homo sapiens; identical to SEQ ID NO: 10316
  MAP TO AL049837.3; EXPRESSED IN PLACENTA, SIGNAL = 0.94; EXPRESSED IN HELA, SIGNAL = 0.86

SEQ ID NO: 16276 - DNA, 475 bp, Homo sapiens
  MAP TO AP000317.1; EXPRESSED IN PLACENTA, SIGNAL = 0.64
agaaatgcacaaaatagctgcatagaatacgcttaactaactatgagaagcaaggatctaggtgaatctgtatataatacttacaaatatttctgaaaaatgaacaaatataatgaattggttggttgttcctaatgagctgagctcagggacttgacgtgctgaacagggactcccagttcaagtgctacgtaaatgactcaagagcttcttggtgtgccctaaaaaagaccctgatcatgtgtagccacagagctgaaattgctgaaaatcaaacacagaaccttatctttcagctgactgaattacaacgcaaattgagctcccagcctcacagggtaaaagtgagggcattgattaagaaagaatgggatcctgtaaattgggataggaaggtgcgggaagaccttgatgaagctggggacactgagcccctaaattctgattattttgcttcgcaagtggcagatgtctc

SEQ ID NO: 16277 - DNA, 489 bp, Homo sapiens
  MAP TO AC006155.2; EXPRESSED IN BT474, SIGNAL = 0.71; EXPRESSED IN PLACENTA, SIGNAL = 0.6; EXPRESSED IN HELA, SIGNAL = 0.65
caaaaagttggttcgttgaaaagataaacaaaatcaatagactgttagctagagtaaccaagaaaaggaaagagagaatccaaataaatacaatcagaatggagaaaggagactttacaattgaagtggaccttgtaaacatttctccttagttaagtggaacacattaggctttgtcaatagagggaactggagaaactggaaagggggttctttctctcctcagtcctagtgtgatttttttccccttcccctgatgtggctgctggtggcgtggagaaggcccagcagtgctcacctttcaacgtttctctgacacctcggatggcagcttcctgcagaccagcttcatcccctgatgccatagagaacttctccaccacccagcaatcctcagccacactgtatcctatggggtctcaatattagccttatgatgggaggggacatctaaattctttctttcttccttggctatgctccgtcatc

SEQ ID NO: 16278 - DNA, 495 bp, Homo sapiens; identical to SEQ ID NO: 951
  MAP TO AJ006997.1; EXPRESSED IN PLACENTA, SIGNAL = 0.8

SEQ ID NO: 16279 - DNA, 388 bp, Homo sapiens
  MAP TO AJ006997.1; EXPRESSED IN PLACENTA, SIGNAL = 0.63; EXPRESSED IN HELA, SIGNAL = 0.69
aaattgagagagaaaaacttacccacatacttgaataaggtagagttcagaagtttgtacgggattcagagactgatgggaaattctctaacatgctgtgagatagtaaaaatgatctctctaacaagtactagagtccctgttgtgtccatagcactagaataaatgcaggggaaaggactaagaacttaaaacctcttttaggagagtttgcaacgcagagtggccaacagaatcatcttgtccacctccacactagccaacccataaagaatgtaaaccctatgtctatcatacaaagaataattaaaatggtatttggaaaaggaggtgatcaagtggaaaggagggatagaagaagaaatcatggactgaattggcttcaagc

SEQ ID NO: 16280 - DNA, 472 bp, Homo sapiens
  MAP TO AP000239.1; EXPRESSED IN PLACENTA, SIGNAL = 0.69; EXPRESSED IN HELA, SIGNAL = 0.6
ggcatcttcctgcatttttgtctttagttccagaatgatggatatatatttgtgtatgtatatgtgtgttttatactttctggtttctctttgctgatactgtttcataaacataactgtataaattggcttttttttattagaaccaaccatcacaggagcttcatgaatgagaagcatttagagttgagaataagaatcaggagtacccaggaaaagtctagacatttgcaaagaaactagactaagctgacaattttggacttgcttttgcagagggctgacctggcagtggctcctcttaccatcacctacgtgcgggagaaagtcattgacttctccaaacccttcatgaccctaggcatcagcattctctaccggaagcccaatggtaccaatccaggcgttttctccttcctcaaccccctgtctccagatatttggatgtatgtgctcttagcctgcttgggag

SEQ ID NO: 16281 - DNA, 482 bp, Homo sapiens
  MAP TO AL049594.4; EXPRESSED IN PLACENTA, SIGNAL = 0.68
gcacattcttgttagcttgcacctgacagtcagcacttcattagaaggtctaagtaaagaagtcaatatagatatacttttaattttgcatcttgctcccaaccagggaaccgagggaactaaacagtggagaaccatatgaacacacaggcagggcagggtacatggcagcactttctcagtggcttgaaacctgtttccctggagctgacacagggcagtgcatgcggcagaatcgggggaatctgctttgggtacatatgccatcaagtcacgcttcagaggcaagtttcttctcagtaggaaaaggaaatgtggtattatacgaacatcctctttgagccaaacactttctttgggaaggggaatggtggatatcccaaagtgcggcacaggggatgggggctcacaggcatccatggaaaaggagaggcacttgtcaatttcgtgtggaaatatcaggatagccctgaaacagcagc

SEQ ID NO: 16282 - DNA, 423 bp, Homo sapiens
  MAP TO AL031734.9; EXPRESSED IN PLACENTA, SIGNAL = 0.9
tgcaaaccccaaatttacatcctcacttctgtccaaactgatgaaacatttaaaaaatctacagaaacttaaaatgggagcaaacaagctagtaatgtactactgcccccttggcacttgtaagaccttttctctcttgctaaagtaattttccagtaagaaatggggaagcctttctcaaggttatgtcagtgcaaatggttgtagaagagcccagagactccattttattctttgtaatagtcagagaagagtgattgcttccttgactttgtggccttgaccattccttaagtggctgagtaaaaaacaacaacatgtctcagaggagagctttctaatggttttcctgtggtccattgcccctggggtgcttccatcacagcgagtcaccgtggtgatgccacagtttgagccttcctc

SEQ ID NO: 16283 - DNA, 422 bp, Homo sapiens
  MAP TO AC012553.2; EXPRESSED IN PLACENTA, SIGNAL = 1.2
tgaacttgacattttctatcttgtgtagttttaatcagacttggtatagattgatggcagtagaaaacttgtgttttggatgctgggtaataggcaatatttgtgatttttagaataatttgtttcgtggcacagaaattgtattttattgctctgagctggtgttatgtattttaacaattctagctagttggctagccggtggttattttgcagtttttgatcattctcatcactgtcaccttcatctaccagtcaaccaaggaaaccacctatgacttagtggtaggccagtatgatagagaactatatttgccctttgagggtagaattgatattgctgatgtgattgggaaaatactgccattcgtctgaagaacacttattaaattcgtaggatatgaaagatgctgctgaaggga

SEQ ID NO: 16284 - DNA, 452 bp, Homo sapiens
  MAP TO AC007102.4; EXPRESSED IN PLACENTA, SIGNAL =   1
acagagctggtggcatcttctgtttgagagatgcttctgactctaaacagatgatagggaaaggcccagaggtgaagatagaaaaccacagaatatctaaggcagctctcagcacccaccccagcaccagaccccagacctcttggctgcctgtggcccccaggacatgctctgctggctgtcctgcactgggggatttcttcacaatcccattcaccatacaaaagagtgtactctcagctctggccccactgggcagacaaccagggcttacctgggcaggacttggtaaggaccagaagcaaatcatgatgcagctcctgaagcagctaagccactccctagacagatcttttctcagaaacacaaccaagcataacttcagctctgaacatgtcatagaggtgctggccatgacctggtcccagccagcagggtaccagctagagcct

SEQ ID NO: 16285 - DNA, 492 bp, Homo sapiens
  MAP TO AF111168.2; EXPRESSED IN PLACENTA, SIGNAL = 0.82
tgggtaggtgtcatcatctccatttgatcgatgtgaaaaactcatgaagagggttgataacttggccaaggtcactcaatgaatgatgtgggagacctataatagcattcaacccaagtgcatgtgactccaaagcctggttcttaaccaacttgcaccttatcataagctatgctgtactgctagttatcccctcacacttcaatagcttgtcttccaagcacttccaggaaaagggcagttggcgtcttctattcctttgtatccctcagagtgctttgaaacaagtacttactaaactttatagaccagatgatcagttcttacctgaagaggtctaaaagcaacttttgatcccctatttccttaaggaagtgaataagatgtctcagggcaacctgtcgcacctccagctctcggaagaggatctctgtcagacagtcaggagttaagttgagaaagattaaagccaattagtcaagtgtgaaattg

SEQ ID NO: 16286 - DNA, 372 bp, Homo sapiens
  MAP TO AL109807.6; EXPRESSED IN PLACENTA, SIGNAL = 1.9
gaacccaacttcacaaacaatgtttgccagatattaatattcttaccaatgaaaatgagcttaaaaaattatgtgggcagagggcagaggaggccccactggtctgtaaccctgaattcaaactcacctgctttaaagtctctttggcctgaccactttcaaataactttctctgcctgctttggcctatatatcgtttccaaaatagcatgaaaaacttttctcattgtatttcaaaacgaaaaatgttccatctacatctggaaatactaaaaaatgtgctttcttacagtattttttttttactaggtatggacaaggttctgacccttattattggaactcaaatccagatggagtttggtaaggttc

SEQ ID NO: 16287 - DNA, 375 bp, Homo sapiens
  MAP TO AL121907.2; EXPRESSED IN PLACENTA, SIGNAL = 1.1
tgtgctctatgcggactcaccagtcgctttgttctggcccatttgccggttctgtagaagcctgtagttccaggcaattgagactaagacacgataccccttcacctttcagatacgataccccttcacccttcacccttcaccctttaccccatcacttcaaggtgtgtttcctcagaacgtggaagctgtctgttacaaagtcaggaagctgacgtggatacaataatattactaatactcagcccgtgtgagcgtgttgttggccgtgtgctgtgtgtacgtggaactctctcccgtggtctcacactcagcccgtgtgagcgtgttgttggccgtgtgctgtgtgtacgtggaactctgtcccgtggtctc

SEQ ID NO: 16288 - DNA, 460 bp, Homo sapiens
  MAP TO AL121965.5; EXPRESSED IN PLACENTA, SIGNAL = 2.5e+02
ttgcaaaaagggacatctggatgaaagagacacttgcttttcacctctttccttttgaattttgtgatatattttggtattacctattttttaagataggtaacattattttttatgattttatataaagcattatatactaagacctagtaataccttaagatgcttaaaaataattttctgatttctttgatgaactcatacaacagaaatgctaaaaacaattgcttttaaatgctaaataatactcttacgctttcttggtatctaggtacaaaggtcgagaaataagcaagtacgagaattattcccagatggttttagtattcatcatgcaggaatgcttcggcaggacagaaatttagttgaaaacttgttttctaatgggcatatcaaagtcctagtgtgtacagctacgttagcctggggtgtcaatcttcccgcccatgctgttattatt

SEQ ID NO: 16289 - DNA, 473 bp, Homo sapiens
  MAP TO AL122018.4; EXPRESSED IN PLACENTA, SIGNAL =   2
ttgctcctcaatcaaaacccaattctaggcagtctcagttgctatatattaatgataatattacatgttcattttacctcatcatcttatttccaagacagaactacaggatgccctgtctacagacaaaaaggagcaacaacatgcttctaagttgtctgcagactcagagttctccttccatccatccccaggcctccccctaggcactactgtgtgacccactaattttaatgtcggatataaattaccggtgatgctgaacccattcttgaatccgtcctgctccactgcaaacatccatccaatgatgcctccaactggggccagtggaagcagagaatatccaacggtctcgggaatggtgctgatggctgtgtaggagcgcccgtggttcattactacgtaagagtggaggtcagtgttctcaaagacaatggggacctggctgctccccacaaagatccttcctt

SEQ ID NO: 16290 - DNA, 469 bp, Homo sapiens
  MAP TO AP000197.1; EXPRESSED IN HELA, SIGNAL = 0.63; EXPRESSED IN PLACENTA, SIGNAL = 0.83
cccacaaccacatttaaccctcacagtgtccctatgattcagatacgtttttattcttattgatgaagaagctgaagttcaaggacattagatagtctgctgcagttcccacagcctgcatatcactgacccaaattctttgtgttgcgtcatggtgaagggctccatcctctagctctctaaacctaaattagaggtatcatccttgactcttccctcacttgacccattgccactcaattagtcgtcaagttctgtggattcgtttttctttcttttttttctttctgttcgttctgtcaccaggactgctgaaacagcctctagtccgacagtcacctgcattaacgttccaaaatgaggatcagatcgtgttatccctgtacttaacgtccttcagcgtgctgccattggccttagaatgaggtacaaacttcttgatatggttttcagtatcaccagatattcg

SEQ ID NO: 16291 - DNA, 446 bp, Homo sapiens
  MAP TO AP000176.1; EXPRESSED IN PLACENTA, SIGNAL = 0.61; EXPRESSED IN HBL100, SIGNAL = 0.8
ccccaaatcacacagtcctcaagcaacagaggggccatgcttaggacccaggccacctggctccagagtctgtgctcataagcacttcacatgaaggactgaagtcctcagaagcaaaggcctaagggatatggcccagggagctgacttggctgggtacattcagccagtttggactcgttaagaaagttctaaaggagaagaggtcttcagtagagaataagagcttgtagggtgagagctacctggaacctttagattgggagcaaggccttacctcaggttcctcagctgtgtaggaggagggctacccttttcctccaagttgttgagctgggtaagggcagagccagttgatgggagagagtgcccaggcacaactgggtgtgaaccaaaggacaaatggctatgtctggtgctcttaggcaaaggctgattgtccaagg

SEQ ID NO: 16292 - DNA, 409 bp, Homo sapiens
  MAP TO AC007101.1; EXPRESSED IN PLACENTA, SIGNAL =   1
atgtccagtctgccattcagctgggagcacctcagaaacaggcctcttgccttcatcatcctggcactccctgactgaccacaaccagggactctacatggacaaagggactggagaatgaatgctgagatccacgtagggcacacataggctgtgtgacaaaggttaggccataagtctctctggccttgggcacagatgccccatacctggcacttggcattctccaccttggccatcagcctctggatcatgtgggtcagctccttgatctcctccttggtgcagcccacagtctccccgtgccagatcaccgtggccttcatctccccgaaatgggggaagcagagatgctcctgaggctcagtgtgggatatcccttcctttagggatgattgtgcaggttgtg

SEQ ID NO: 16293 - DNA, 468 bp, Homo sapiens
  MAP TO AL109823.11; EXPRESSED IN PLACENTA, SIGNAL = 1.6; EXPRESSED IN HELA, SIGNAL = 1.1
aagcaacatgaaccaaactccattgttttgaattgccaaaaacatgttcttttagaattaaaaaataataataattattcagaatttcattcatgttctgccatggacttagataaactaattttgtggattttcttagagtccgtgacattgacttacatgtaagctctggggctaagaacagttttttttaagaaatggcaggaatgactgtttttagaatttgcctccacctcatttaactccaactaattttctttaaaccccatgtcttaatgggtagtgttgtttgtgttttcatcttacagactgaggaactaatcaaagctttgcaggatctggaaaatgccgcatcaggggatgctactgtccgacagaaaattgcttctctgccccaggaagtgcaagatgtttctctattggaaaaaataacaggtgagaaggtagagtttgggtgaaaggtgagga

SEQ ID NO: 16294 - DNA, 463 bp, Homo sapiens
  MAP TO AC009532.2; EXPRESSED IN PLACENTA, SIGNAL = 3.1
  unsure 108
  unsure 138
cccatgggctttgtatccatggtcagccactgtgatttattgctttgggagttaggaagtcactttggaaaggctcatgtttcctggttccagactgccctgccaggncccactgaagcagctgctgggaggcccctngtgggcagcactagacaggagtgctgctcaactggaaataagtcctggggctgttctgacagctctaatcctagccaagagctcttggaagtccaccttgtagggccaagatggggcaggagcctaggtccttaccagaggggccacagctgcggcttgaattctgatttgcaagctttttaaactccatgagctccgcatggtccttctcatacgtcctctttagattctccacatactgcatcatcacttccgttgctttcgacatgcgcttttcctgcggggaaggagcgcatgagtgcatgaggccattggaggaaaggct

SEQ ID NO: 16295 - DNA, 445 bp, Homo sapiens
  MAP TO AC007326.22; EXPRESSED IN HELA, SIGNAL = 0.66; EXPRESSED IN BT474, SIGNAL = 0.72; EXPRESSED IN PLACENTA, SIGNAL = 0.61
tcaaaagtcaattgccgatgaaaaagcccgtaaggtcatagtggagttgatggcatatgaaaacgccaatcctgagtgtcaatcagccattaagccattaaaaggaaaggttcctgcaggatcagatgtaatctcagaatatgtaaaagcctgtgatggaatcggaggagctatgcataaagctatgcttatggctcaagcaataacaggagttgttttaggaggacaagttagaacatttggaggaaaatgttataattgtggtcaaattggtcacttaaaaaagaattgcccagtcttaaacaaacagaatataactattcaagcaactacaacaggtagagagccacctgacttatgtccaagatgtaaaaaaggaaaacattgggctagtcaatgtcgttctaaatttgataaaaatgggcaaccattgtcgggaaacgag

SEQ ID NO: 16296 - DNA, 439 bp, Homo sapiens
  MAP TO AF109907.1; EXPRESSED IN PLACENTA, SIGNAL = 0.99
gccaacaaatacatttaagaaccctgaaaatacttccaataattaaaagtttcaaataaagtttagcaaccactatcaccagaccatttttaccttcctttaatgatctttggtttcagccaatcattttgttcagtgagttgcaactcctggggttacatcaagagtgtgaactatttgaataaaaggagctgaaagtaggctagtttaggcacttccaagtacttgttaaaaatgtagtagaaaccgcttggctgagcaaacccagaaagagcccagctaactgagaatactcatcatgaaatacatatttgctggactcactgtgtccttgacagccatgaagcagtgacagatccagcgacgagtggtgccatcacggcatatgtaagaaaaggctctatcaaagttcctgtctggggcacagaaagaaactttc

SEQ ID NO: 16297 - DNA, 365 bp, Homo sapiens
  MAP TO AC009965.3; EXPRESSED IN PLACENTA, SIGNAL = 0.93
atgcacgaaatttaaacgggaattcctgtttgctatttccctgcttggctggaggaggtactgacacaggtatcagataactgatattgaaacaagaattcacaatttttattgacaacttggaaaagtcaactggagacacacagttctcttggaagccacttcctttgaccttcctgacccagtgtctccaaaagcaggtgaggatgaggcttctctttgtccaggtggggacacggtctctcccgcccctccggcggccttgtagaagatagccactagagggcgcctttcgcccagccatggctccaagcgctaaacctgcttcataggagagcacattaagctgagaaggaggcaagtca

SEQ ID NO: 16298 - DNA, 461 bp, Homo sapiens
  MAP TO AP000051.1; EXPRESSED IN PLACENTA, SIGNAL = 0.6
ttctggcagtgatattccccaggtgacccccttggtggatgggaagctaaacaagaaaatgtgtgtgtttcaggaaacctgatgattccagtttcagataagtccttccagtccatccccctagtcctgcatctgctaatgtgcagatgaaaggctctgtgtaacttggatctacagaaactgtcaattctgaaaggctgccttttggtcttaaaaggtgtccttgaaattactcccaggttttggccctgactgactttccagtgaaatctaattggccgggtttaaaacacagctgtgaggattttgaagccgcctttgaaagtgaactgctggtgcactattgcaatgaggacatgcacagagatcccaaccagagctcaagagtaataatgctgtggtaccttttggaaaatgctgttgtcaggcagccccggtgcggtgggaaccatgagttggtt

SEQ ID NO: 16299 - DNA, 454 bp, Homo sapiens
  MAP TO AC007382.2; EXPRESSED IN PLACENTA, SIGNAL = 0.6; EXPRESSED IN HELA, SIGNAL = 0.73
cccttcaactgagcttttggagaaatgaagattttgcaatgggaaagtattctatcttcagaagtacggtgacagcagtcttatttttgaatctacatcctcccttgaatctaggaggaggacacaaataacatacccccggcccagttctccagtgctccccattcacccagcccagtagatgctcagacagagctgttactctaaaagcccaatttcccatttccctagcacaaagcaacacatggtctacctactgacccatctcctggctcctgtggcccactgattgtggtctggggatgctggtggtagaagcagcagaaggggatggccttggcaaggtggtgggggtggccacagctacagtgacagccagaagctgcatcagagtgaccggctgtgcagttgtccctggaataggtggcctctgataggcttttgtggtctcacc

SEQ ID NO: 16300 - DNA, 400 bp, Homo sapiens
  MAP TO AC011059.2; EXPRESSED IN PLACENTA, SIGNAL =   1; EXPRESSED IN HELA, SIGNAL =   1
aataaatgttgtgggggctgcttttttattaaaagaaaaagccttattgtagactcttttaccctttctagctccctaaaataatttcttaataactcctataataatgggacttttatacaggtcttatatgatctcaagaaaccaaaagccatccaaacttgttcagcaaacattggagtttcctgaaagagtagaggatattcttttagaaaccagaaggaaaaactagtaacaataaactctcaacctgagactctgaaagtagaaacatcatctgaaattgattacagtcccagtgatgatgaccatgatgttgataatggtattgataatgaatgtgacaatgatgattatggggattatacacatttaccaaatgttcttatatgtcaagctc

SEQ ID NO: 16301 - DNA, 409 bp, Homo sapiens
  MAP TO AC011257.2; EXPRESSED IN PLACENTA, SIGNAL = 0.96
aaactatgtatttccatgactgctgataaaaaagaactttcttttttatctggtattcttttttctatttctctttgttatttgcatttcttccttttgtaattactttggcatccgttaaccttttttgaatccatctctatatcttttcttactgatttttaaaagctctctatacattcagaacattaatatttatgttatacaatgcaaatatttcccttctttccatcacttgccttttgatgttgttcacaacaatggtaatggtagttatgctactaagtttaattggttttgctattgttgttgatggtgttgatgttactgcttgtggcattgttggttttggtggcagtcgtaccagggctgttgtttttagtagtgatggcgatgctgtgtcatttaa

SEQ ID NO: 16302 - DNA, 446 bp, Homo sapiens
  MAP TO AL109613.11; EXPRESSED IN BT474, SIGNAL =   1; EXPRESSED IN HBL100, SIGNAL = 0.92; EXPRESSED IN PLACENTA, SIGNAL = 1.9; EXPRESSED IN HELA, SIGNAL = 1.5
gctcagctgggagctaattgttcactgcctcgtgacagctattctgcgaacagtcggcattcctattaacatcttttatttctttgttccatgatgaattcttcacctgcctaactaaccttgggcaccccggcgcccctcatagtcctgcagaggaggccctgacctacctgaggaggtttcccctgggcaaattctgctctcgggcctggacgccacccatggtgaggctcagcctcttggccacatccggccttcccttggtgaggctgccctcccgggcctggcctggggaggtgccataatgctcctccaggcaccgcagaggcaccgtcctgttgatgggctggaagatgatggcgccactctgctgggagatgggccggcggttgcccacgtagcagcgcaccaggccggggatggagtcgaagctctccatctcgaac

SEQ ID NO: 16303 - DNA, 422 bp, Homo sapiens
  MAP TO AF097649.1; EXPRESSED IN PLACENTA, SIGNAL = 1.7
gcatatgggtttatcagcagcaaaaatgtaatgctaagctgggtctgcccctggggtcacttgatgtttacttatctaatgcaaactaatttcattgtttgtccaagaaaaacatgtctaaaaaggaaaatctgtaattaaaacattctcacaggcattccaaagttgaatgggaactaagagcatacaatatattggtttagatgatcagaaccatttcccctttctatcaagacaactaatatagcactatgtttatttttctttaggatgtttcaactacccccaaaactgccaaaacccaaaatttatcctggagtacaacaaatatttccacaatgtcttctacatcctactattgtgactggtaatatataaatgtagcatactatatatattaggtcatgcccctttaatatgca

SEQ ID NO: 16304 - DNA, 462 bp, Homo sapiens
  MAP TO AL035551.6; EXPRESSED IN PLACENTA, SIGNAL = 0.98
tggggaaagggaaatacctcactacagtctcttttagcctttaatgtagggtaccaagaaaaaaactccactgaggtcccatttagaatttctatctcactaataggtgaagagaggagactaataaacatgtttgaagatcacagccttttaacacaggagccacatcagtagggctcctgtgttataacagggaaacaatagaaagaactatgtatctcagaccttatttaaggaaaagtatttagggaaactcaaagacaatagaagatataaaaatagggacacaaaaggaaattttagcatataacacctatcactacagcaaagagtaaacatagcccaactcctagccagataaacagaaaagctcatactaaaggcctatttacctgagttctttttacccatgtctgactttcaacaacaattacaaggcataccaaaagacaaaagacgcag

SEQ ID NO: 16305 - DNA, 401 bp, Homo sapiens
  MAP TO AF121782.1; EXPRESSED IN PLACENTA, SIGNAL = 1.9
gggtagagtggaaaggagggcatggcagtggcttccaccggaagcacctgatctgccagggagagctggtgttcggattcaaaagacacagtctgagtcactggatggacaacctgggggttaccactggtaaatacagaaaggttacagcacacagttgatttatggagatccattcatttaacaacttgaaaaattggctaccttccaggttctgggtctggtaatgaagtcatagaaggcccccaaaatgcaagagtcctgaagggctcccaggctcgcttcaactgcaccgtctcccagggctggaagctcatcatgtgggctctcagtgacatggtggtgctaagcgtcaggcccatggagcccatcatcaccaatgaccgcttcacctctcagag

SEQ ID NO: 16306 - DNA, 1904 bp, Homo sapiens
  MAP TO AF067845.1; EXPRESSED IN PLACENTA, SIGNAL = 1.1
ttgaaaacaaacacatttgcctatatctctaggcagattcttacaaatatgctgtactttacagaggctctattttttttcagcaaccaaaacaacacatataaccttacaactaatataaaggggagcaaattgatgactttaatatagaaaccgtttcgatattaaaccatttataaggtgccaataatttattcatatttgtaaaatcagctggttattaaactgcaggaagaaataaaaacatccccgactacttcatgctcttgtggcgtggaaaggccgcgcgggtcctgagtgtgcgtggaaaggccgtgcgggtcctgagtgtgcgtggaaaggccgtgcgggtcctgagcatgtgtggaacggccgtgcgggtcctgagcgtgcgtggaaaggccgtgcgggtcctgagcgtgcgtggaaaggccgtgcgggtcctgacagtgtgtggaaaggccgcgtgggtcctgactgtgcgtggaaaggccgcgcgggtcctgactgtgcgtggaaaggccgcgcgggtcctgagtgtgcgtggaaaggccgtgcgggtcctgactgtgcgtggaaaggccgcgcgggtcctgactgtgcgtggaaaggccgtgcgggtcctgacagtgcgtggaaaggccgtgcgggtcctgagtgtgcgtggaaaggccgcgcgggtcctgactgtgcgtggaaaggccgcgcgggtcctgactgtgcgtggaaaggccgtgcgggtcctgactgtgcgtggaaaggccgtgcgggtcctgagtgtgcgtggaaaggccgtgcgggtcctgagtgtgcgtggaaaggccgtgcgggtcctgagtgtgtgtggaaaggccgcgcgggtcctgagcgtgcgtggaaaggccgtgcgggtcctgagtgtgcgtggaaaggccatgcgggtcctgagtgtgcgtggaaaggccgtgcgggtcctgacagtgtgtggaaaggccgcgcgggtcctgactgtgcgtggaaaggccgtgcgggtcctgactgtgtgtggaaaggccgtgcgggtcctgagtgtgtgtggaaaggccgtgcgggtcctgagtgtgcgtggaaaggccgtgcgggtcctgactgtgtgtggaacggccgtgcgggtcctgactgtgtgtggaaaggccgtgcagatcctgagtgtgtgtggaaacaccgtgcgggtcctgactgtgtgtggaaaggccgtgcagatcctgagtgtgtgtggaaacaccgtgcgggtcctgactgtgtgtggaaaggccgtgcagatcctgagtgtgtgtggaaacaccgtgcgggtcctgactgtgtgtggaaaggccgtgcgggtcctgactgtgtgtggaacggccgtgcgggtcctgactgtgtgtggaaaggccgtgcgggtcctgagtgtgtgtggaaaggccgtgcgggtcctgagtgtggaacggccgtgcgggtcctgactgtgtgtggaaaggccgtgcgggtcctgagtgtgtgtggataggctgtgcgggtcctgactgtgtgtggaaaggccgtgtgggtcctgactgtgtgtggaaaggccgtgcgggtcctgagtgtgtgtggataggctgtgcgggtcctgactgtgtgtggaaaggccgtgtgggtcctgactgtgtgtggaaaggacgtgcgggtcctgactgtgtgtggaaaggacgtgcgcgtcctgcgtgtggcgtggaaaggccgtgcgggtcctgagtgtgcgtggaaaggccgtgcgggtcctgactgtgtgtggaacggccgtgtgggtcctgactgtgcgtggaaaggccatgcgggtcctgagtgtgtgtggaaaggccgtgcgggtcctgactatgtgtggaaaggccgtgcgggtcctgactgtgtgtggaaaggacgtg

SEQ ID NO: 16307 - DNA, 1950 bp, Homo sapiens
  MAP TO AF129408.1; EXPRESSED IN PLACENTA, SIGNAL = 1.9
ttttgataaccaggatgtctagtgtttaacatatttcaaactcttgctatatgtagtcaaatactgtcaaaatagatctgcccccaaaatgaagcatattttggcacctgtgctgaatgctgctacaaagaccagcaagtgcaaataaaaataacagtcatgatttagtcacattcataacttttcatagaaaaatataaatatattccctgaattgtaagacaaaaaaataattttaacagccagctttcaccataaatgccagtccatttcctcttaaatgaactggctttccctcaaggtcataaggtgcaaccattgaaatctaacacattttctaaacttctgtcatcatccccatcatggtatctcacagtccttctaccctgatttctcgtttttatttttgaacgtcgaagaactcttttagattttgcatagtccaaatcctcccagtcattatcatccacacttaacctagggcgtttgctttgtctttgacgtctcacagttttagatatgttagctgtaaaagttttaccttttctaactacttttgcttttcctttcgttttcctccttttggtttttgtattatcagtacagtcaatatctgattcagttacagatcccaaatctgatgatttggaactagtatcaggtctaaactttgaattcccagttgtttcagagattttcacattttccaattcaggatgcgatctcttcctttttacttccttctctgctgtttcctgtgaatcatgaatcacttttgtcttactaaaaggagcctttccataggtcctgagtcttctgccattccacctgcgcagcccataattcagttccacttcaaaattattctctgcagtagctttttgtgccaaggttgactctgaagaaaatgtcctatcagtctcactccctggaatatgactttttgaatcttctcctgaagatgtaacagaggaactttttcttttagaaggtgcatctattttgtgaatattggtatgcctgtgcttgtgttctgaattcaacatatcttcagagtctgagtctccatttagagcctgactaagcacttttgtactaccttcggagtcaggatcaggtggcttgccttcacaggcatactgttcacttggtacttcacaatgtacacttccttcacaatcactcaatttcttcttagctgtagtacaagcaagatggagaggttttttccttccatttttgcttctagtgtgcacattttctaaactgacatcttctacatcactcatgagcttgatcttattggcagccgtagctgcacatcttcgagtaatcctcaggagacctgttctggcttttgatgatttcttaaccacctgtaaactactgtctgagtcactggaacagacccttttcctggaaatttttctgcttagtccattgtcttgtgatgcagaatctaaaagttaaagagcagatttctattaatcttttgtaagtctaaaggaattatatgttcaatattaaaaacaagttcagaattcgtattaatttgaagggggtattgcagtgaatggaatggtacacacctattagtatagtcatatgttgctcaacagcaaggatacgttctgagaaatgcatcgttaggctatttcgtcttaagcaaacatcacagagtgtgcttacacaaaccttacagtacaccctactacacatctaggttatatggtatagcctattactcctaggctacaaacctgtatgacatgctactgttctgaatcctgcaggcagttgtcacacaatggtaagtctgtgtctgtgtatccaaacagaaaaggtaatgcactgcactaggacttgaggacagctatgattacttcactaagcaatggaaatttttaaccttcattataatcttatgagaccaccactgttatgcagcac

SEQ ID NO: 16308 - DNA, 349 bp, Homo sapiens
  MAP TO AC007099.3; EXPRESSED IN PLACENTA, SIGNAL =   1
aaccatcaaaactttggggcctggtgagaagtgtaggctggagtcatattggatctctgcatatggagttgtcatctctcaaatgcttgcttcttcctcttcttcctccagaaaatcctgagcgagcagctctgtactttgtttctggcgtgtgcatcgggctggtgctgaccctggctgctctggtgataaggatctcttgccacacagactgcaggcggcgtcccgggaagaagttcctgcaggacagagagagcagcagcgacagcagcgacagcgaggatggcagtgaggacaccgtgtccgatctctccgtgcggagacaccgccgcttcgagaggactttgaa

SEQ ID NO: 16309 - DNA, 466 bp, Homo sapiens
  MAP TO AP000239.1; EXPRESSED IN PLACENTA, SIGNAL = 0.74
gtgaggacagattccttgccttaggtcaccatgggcggcctgcctccaatgaccagccaaagtgagtacaaaagaccagctcctttgccccaacttgggacaactctgaagggccatttcagcttcagagctcctgatggcatcagttgaggacttcacttggactgtatcacagctactttgtctctctggccaattctcccttcttctcttcccttctacaagagttgatcccaagaatgcttcctaataaactgcccactactcttcattttatagtgcgcttcccaaagaacctgacctacaacaagacccacttaaacagtgggaaaatgtggcatcttttctccactatacatatctgtgtagccccaacaagcctctgacctttagacttctccagaatgatttagaggtcaatgtctatgtctccaaaactctggcagatacaagcaattctttccca

SEQ ID NO: 16310 - DNA, 475 bp, Homo sapiens
  MAP TO AL049828.2; EXPRESSED IN PLACENTA, SIGNAL = 1.9
ccagaaatccacattaacctgagtcctgacttgactgtcacactatatcccaagaggactcaaacagaggaaacacagaaagaagtaaaggaatcaaaatagcatgttaattataacttgacttttggtcccaaaccattatgcaatacactaatgatgtgaacaatctgacagggaacatatggaatactcttttgcctcatttgctatagaatagtactcaaagacaaagaaaagaaatgacctatttctcctacatcatgcaaatatcaaaatttaaaattatgttgagatatgctgcacataagaaaatatatctggagaggcagagtagaaaatagtatttatccctgatgtctagaacctcctacccagacattcctaaattgaagcttttggcaaagctgttatgtgagaacaagatgggaaaggaggaggcagcaaaggtacacagagaggaggaggataagaagaa

SEQ ID NO: 16311 - DNA, 430 bp, Homo sapiens
  MAP TO AL034422.18; EXPRESSED IN HBL100, SIGNAL = 1.1; EXPRESSED IN HELA, SIGNAL = 1.2; EXPRESSED IN PLACENTA, SIGNAL = 0.98
ttgtgctttgctgtatttttcctataataaacattattatttatcagaaaaaaatcaataaatattaaatttcaaaatagctacttatgtcacaatgacaagacagagccaactagaaacagagaatgaaacagtaaaaccaaataatcttcattttaaaaatcattttcttacattcgactgtaggctttcgataccagtagatcaaatttacctaactggaatgtattaatctgttacactggctgcaggctaactttccaaaacaaagaggtcagcgccccaccaaaatatgatcaggacttaccctacaggggtgaaggatgtcttctggaggacagtggctctggaagcaacagatttagcatgttctagtttaacagtggcctgagtcagaggctgagacagaacattggtgacttgcaactgg

SEQ ID NO: 16312 - DNA, 1987 bp, Homo sapiens
  MAP TO AC004388.1; EXPRESSED IN PLACENTA, SIGNAL = 0.93
tgaagatggtggctttcctcaaagatccagtactgctattttgcaagtgagtgttactgatacaaatgacaaccacccagtctttaaggagacagagattgaagtcagtataccagaaaatgctcctgtaggcacttcagtgacacagctccatgccacagatgctgacataggtgaaaatgccaagatccacttctctttcagcaatctagtctccaacattgccaggagattatttcacctcaatgccaccactggacttatcacaatcaaagaaccactggatagggaagaaacaccaaaccacaagttactggttttggcaagtgatggtggattgatgccagcaagagcaatggtgctggtaaatgttacagatgtcaatgataatgtcccatccattgacataagatacatcgtcaatcctgtcaatgacacagttgttctttcagaaaatattccactcaacaccaaaattgctctcataactgtgacggataaggatgcggaccataatggcagggtgacatgcttcacagatcatgaaatccctttcagattaaggccagtattcagtaatcagttcctcctggagactgcagcatatcttgactatgagtccacaaaagaatatgccattaaattactggctgcagatgctggcaaacctcctttgaatcagtcagcaatgctcttcatcaaagtgaaagatgaaaatgacaatgctccagttttcacccagtctttcgtaactgtttctattcctgagaataactctcctggcatccagttgacgaaagtaagtgcaatggatgcagacagtgggcctaatgctaagatcaattacctgctaggccctgatgctccacctgaattcagcctggattgtcgtacaggcatgctgactgtagtgaagaaactagatagagaaaaagaggataaatatttattcacaattctggcaaaagataacggggtaccacccttaaccagcaatgtcacagtctttgtaagcattattgatcagaatgacaatagcccagttttcactcacaatgaatacaacttctatgtcccagaaaaccttccaaggcatggtacagtaggactaatcactgtaactgatcctgattatggagacaattctgcagttacgctctccattttagatgagaatgatgacttcaccattgattcacaaactggtgtcatccgaccaaatatttcatttgatagagaaaaacaagaatcttacactttctatgtaaaggctgaggatggtggtagagtatcacgttcttcaagtgccaaagtaaccataaatgtggttgatgtcaatgacaacaaaccagttttcattgtccctccttccaactgttcttatgaattggttctaccgtccactaatccaggcacagtggtctttcaggtaattgctgttgacaatgacactggcatgaatgcagaggttcgttacagcattgtaggaggaaacacaagagatctgtttgcaatcgaccaagaaacaggcaacataacattgatggagaaatgtgatgttacagaccttggtttacacagagtgttggtcaaagctaatgacttaggacagcctgattctctcttcagtgttgtaattgtcaatctgttcgtgaatgagtcggtgaccaatgctacactgattaatgaactggtgcgcaaaagcactgaagcaccagtgaccccaaatactgagatagctgatgtatcctcaccaactagtgactatgtcaagatcctggttgcagctgttgctggcaccataactgtcgttgtagttattttcatcactgctgtagtaagatgtcgccaggcaccacaccttaaggctgctcagaaaaacaagcagaattctgaatgggctaccccaaacccagaaaacaggcagatgataatgatgaagaaaaagaaaaagaagaagaagcattcccctaagaacttgctgctt

SEQ ID NO: 16313 - DNA, 482 bp, Homo sapiens
  MAP TO AL031734.9; EXPRESSED IN PLACENTA, SIGNAL = 1.2
caccaaaactataagaaagtccagaactacgagaaataagtttctgttgttttcaaattatccagtctgtagtaatttgttggaccagtgggaatgcactaagacagtggccatgtgtctatctctggaaatctgattggttctcaaagatcctatgtaggtgaatcacattcatttgtgtggatagtttttctcagctatggtcactgccattttcagctttatttctcttaaaaatgtctgttatctggttctccaagtttctgttctgtgatttccagcatgaatgaaacttaggaaaactcttaaaaattagtaaaatttcaatgtgaccaatttaacctacaattcctatctgttctattcctaccatatttatagagactcttccttgaccttccgcaaaaaccaggaaaaaatttccgttagtaaaatgagctttttcattaaaaagccagcactgcaatggtatttcccccttt

SEQ ID NO: 16314 - DNA, 470 bp, Homo sapiens
  MAP TO AC007304.11; EXPRESSED IN PLACENTA, SIGNAL = 0.66
catgaatatgaagccactgtctcagtgtcaggcacatagtgggcttgttctttgtgccccaaagctgcagtgttatcttcttcctgtgttggaaggaaagcaggatccctatttcctcttccaatccattgaacataaccctggttcttgggcatatggctatgtgggacagcatactagagagaaattgtggcgtctctgagacaaccactgaaaataagttcctaagaaaacccacatcaaatggaagccccaaagccatcacatgtcctgtggcagccccggatcctaagataccagcaacaacagcatcttgccttcaaagagcacattttctttcgcaaagcattttccaacacagcatctcattttatggtcaaagcaaacctgtgcacgtcaggcaggtgacagtatgcccacccgatgaagacaaaaaaggggtaagaataagtggaattctatccacagtg

SEQ ID NO: 16315 - DNA, 478 bp, Homo sapiens
  MAP TO AC008249.14; EXPRESSED IN HELA, SIGNAL =   1; EXPRESSED IN PLACENTA, SIGNAL = 1.8
accttgcagggcttaacagggtcaagctatcagatcaaatcattattcaagagatactcagaaaataataaataatggggaacagcagtttcttcacaccaaaggtgcctactgtatgcaattattagagggaggctggaagatgaccagagaaagaggttctggaaaagaccgggtgaactgaggagaaggtgtgttcttttgaggcctttgttgtaaaatgactcatctgcccctttctttcttttttgattattccagaacgctgcgatgactggggactagacaccatgaggcaaatccaagtgtttgaagatgagccagctcgcatcaagtgcccactctttgaacacttcttgaaattcaactacagcacagcccattcagctggccttactctgatctggtattggactaggcaggaccgggaccttgaggagccaattaacttccgcctccccgagaaccgcattagtaa

SEQ ID NO: 16316 - DNA, 479 bp, Homo sapiens
  MAP TO AC007842.1; EXPRESSED IN PLACENTA, SIGNAL = 1.2
gggaagagaggatgatggaacttgcatttattcagaactttaactgcaggcacataatgggcaatgtgcttatttatgctatttcacttaatttgcatcaacaatattctttaaaagcgtatgaacactttatttcagaaatattaatttctttattcttttacacacattgcaggcttgagccccagtttatttgcttactatgttgcttctttcctgcaaagcagttttccatcttgaaaatacatttaatttttttttaatacataggcttgtcatttcaggtatctttggcatttagggatgtgtccatagacctctcccaagaggagtgggagtgcctggacgctgtgcagagggacttgtacaaggatgtgatgttggagaactacagcaacctggtctcactgggtaaggtatctttcgaaatcgtttacaatctgttttctggagtatcagctttctccactgtcaaactt

SEQ ID NO: 16317 - DNA, 471 bp, Homo sapiens
  MAP TO AC007480.1; EXPRESSED IN PLACENTA, SIGNAL = 0.94
accgcctttcatacatctgctcatatttcgtcatcttccatacacgcttacctgtaaatagggtccataaagaaaggagtgggtcttgcatgctgcaaggaaccatctgaagcaggtcttgattcgacgttgcttcctttttttcccccaaacacgtggttttttcgaggctcagtcagctttgtcccactggctctactcctactgcccatacttagatccaggggctggtcttggcttgtggcaggtgtcactggaggcttggaggggactggagtcaagggcttctcatcctttcgcttagtggtgagatcaaagggggactcagagctgcccttctgcagtttctttacttcacctggtgattggggttccattttcaaaggtaacgatctcaagtctctatcaggaaatgggtacattgattgagagaatgctggaaaaaatgggaggggaaacatggaagggtaa

SEQ ID NO: 16318 - DNA, 433 bp, Homo sapiens
  MAP TO AL122001.5; EXPRESSED IN PLACENTA, SIGNAL = 1.9
tcccaggtatggcgaaatagccaggccattatatacgctaattaaggaaactcagaaagccaatacccatttagtaagatggacacctaaagcagaagtggctttccaggccctaacgaaggccctaacccaagccccagtattaagcttgccaacggggcaagacttttctttatatgtcacagaaaaaaacaggaataactctaggagtccttacacaggtccaaggaacgagcttgcaacccgtggcagacctgagtaaggaaattgatgtagtggcaaagggttggcctcattgtttatgggtaatggtggcagtagcaatcttagtatctgaagcagttaaaataatacaggaaagagatcttactgtgtggacatctcatgatgtgaacagcatactcactgctaaaggagacctgtggctgtcaga

SEQ ID NO: 16319 - DNA, 399 bp, Homo sapiens
  MAP TO AC010872.3; EXPRESSED IN PLACENTA, SIGNAL = 4.1
attggagctggcatgaaaagtcacctgggccataataacaggaacatttaacttcaagaactgttcctggtctaaaaatatattctttataaggccaggatgactcaggtcccacagacaaggtgaaaggatttttaaattctgagatattaacagctagggactttggcaaagacaagttattttccaccaggttatttgaatggtactttttagatttaggtccttcaagaagggcagatatgacttttttaatattaactttgtttttagattctgaatttagcattgaatattcacttacagattttggaaaatattctagttctacttgaaaatattctgcatatccagcttgtaacataagagagataacatcaatattttctgaggcttcaa

SEQ ID NO: 16320 - DNA, 389 bp, Homo sapiens
  MAP TO AL049796.19; EXPRESSED IN HELA, SIGNAL = 1.7; EXPRESSED IN PLACENTA, SIGNAL = 1.1; EXPRESSED IN HBL100, SIGNAL = 1.3
tgaagacatgaacagtgaagggaatgtagattttgaatgtgataccaaactatacacgtctgcgcccaacacatctcagggtaaagataattctgtcttactagttctcagcagtgatgaaagccaacagtctgaaaacagtgagaatgaagaggatactttatgttttgttgaaaatagtggccaaagggagtcattaagtggagacacaggaagtctgtcatgtgacaatgcattgtttgtaattgacacaactcctggaatgagtgctgataaaaatttttacttggaagaggaagacaaggcaagtgaggttgccattgaggaagaaaaagaagaggaagaggatgaaaaaagtgaagaagattcatcagaccatgacgaaaatg

SEQ ID NO: 16321 - DNA, 469 bp, Homo sapiens
  MAP TO AC007317.3; EXPRESSED IN PLACENTA, SIGNAL = 0.93
gccatgtttgagatgacaggagaatgcttatttgaatttaaatcatgtttaaggcagagctatattaagcaatggctccataactaatgaatttctttggagaaattgctaaatattataccatcatactccaattttttaaaaacatatctagcaaattcatttgaaagaaaacaacaactgaattatctcttaggacagacccactccaatggagaaagaaaatacacctaccacctcttcactgcttccaggatgccaaattttgatgtcaactattgttttctttctgttaccatagtgaatgatagaatggattgctaaagtcccttggagaaagatttctttctttttaaaacaaacgttatttttttttcttctgaagaacaatgctatgcgcacaatgtagtactttgaagtctttaggattttgatcattataatttcctgaagcatacatacaaagctc

SEQ ID NO: 16322 - DNA, 466 bp, Homo sapiens
  MAP TO AC007567.1; EXPRESSED IN PLACENTA, SIGNAL =  97; EXPRESSED IN HELA, SIGNAL = 0.62
aacaaaatagacatatccaagggcttaggtaaattgtacacagactacttgtgcaatgggaaggaaaatgggcacttcatcacaaactctatttgtgtgctgtgaggagagggacttgcatttatgttttgcctttggcatgcagtctagtctgttctcagtggatccagaagcagccccttgtctagctcacccttacggtcttccgaatcacttccccttttttggacatgcttagtttatacttcctgccccgcagccatctctggtgccaagttgtctgccccattcttgttcagtttcctgttcattaacttctggctcattattacattagtatccctaaagtccacatttgcatcaccacacatgaaaaacgttttgtctatagcaaaaaggggcacagtgatgacatatatgatttggtacagaactactaataacaacaggggttaagaatgggtga

SEQ ID NO: 16323 - DNA, 472 bp, Homo sapiens
  MAP TO AL035695.17; EXPRESSED IN PLACENTA, SIGNAL = 0.83
cagtttccggcatcaattcgaattttgctaattttgtttcaccatagcctggcttgacttacgggtctcaaacaatgcttaatgtttaatggccaaattatgctaacaagcaaatgatcaaacttaggggaagcactttattttttaaggtaagtgcaaaacagtggtagcattgtgatcattctgaaaaatctagcctaaaatgatggcttttttgtttctaatcactagaacacactatgtaagtgtagagttattccaaaatgtgaccatttttgtaacactgatttttttttcattccagttcaaatttcctataatagtagtaacagacggtggggaggaggggaagaaggaggaagaggaggaaaaggagatgactcagctatagttcccctaaccctcttggtttatgaagcagctcagaaacttattagaacaaattccagcatccgagaccactgagctaacc

SEQ ID NO: 16324 - DNA, 424 bp, Homo sapiens
  MAP TO AC006155.2; EXPRESSED IN PLACENTA, SIGNAL = 0.61
gcagaggaaaaatgcaaagcttgggggaaaactgtataaaaagtcatgatcataacattttaatattgcacagagaaaaatacttcttcatatttctatgaaatctatccaatcaccttacatgcaaaactatttttatttcttcttcccaaactccaccccaaattcctccccagccttaccccatcctttgaccttatgactccttccttttctcttaggctctacatcacaaaagctcccaaagtctactctggaaacactcaaatatccttcaggagtggaagaggaaaagaaattccatggacagtcagaaccaacttttaaaggtaaaggtggggatgagaaagaaactcaaaacattgatgattttggtcttgttccataggcttacattttcttctctatggaccaagtacctccg

SEQ ID NO: 16325 - DNA, 474 bp, Homo sapiens; identical to SEQ ID NO: 15022
  MAP TO AC007543.4; EXPRESSED IN PLACENTA, SIGNAL = 0.85

SEQ ID NO: 16326 - DNA, 487 bp, Homo sapiens
  MAP TO AC007463.3; EXPRESSED IN PLACENTA, SIGNAL = 0.6
acgcagctattgtcaaagggtaagcactgtaaaatgaaacaagtagtatcatctccaaaactcttgtgctaattcttccagagcttgttctgtggggagaaacacactgctatggaaaccactaaagagaagcaaaaaattctttgtaactaggagctggggcctttagctttgcaaattagtgccaaaataccacttatccatctgcatccctgacagtacaaagatagtaaaacatagcaccttatcctgtacttgctcatgcagatggagaagtgtctgaatgtgataaagaccatgtctaggtttctcctggacaccaggatctggaaggagaaccccactgtgagaagcagaggtagggagcactgcattcaggcacatgagatgacattcccaaagggcttttgcaaaccagaaagcatggtggatgtgatttttattaccctcctgtgtgctcctgagtgctctgcgtctagctgtgcac

SEQ ID NO: 16327 - DNA, 469 bp, Homo sapiens
  MAP TO AL096792.5; EXPRESSED IN PLACENTA, SIGNAL = 4.7
ttgattcttccttagagtttcaacctacattacctagttgttattgcatgttgtccactttttccttcatatcccttagcatagccgtcagttatgtttagatcttgtctgatatctgagtgtggttttgatgcttgctttgtctcatgagattgtgatgtctttcttgttacttagcatgacttgtaattttctcattaaaattcagacatgatactttgggaaaaggaactgaggtaaacaggattttggtgtggtttttatgttttactggctaggcgttaaactgtgtttaatatttgctatagctgaagtttcagaaactcacatttcttctacagtccttgtttttgtctctcctgctatctttggatttccctagaaactacctcttaaatagagtctgtgtcttgcaactcttgcaatttcagtccactcttattatcctggagccccaatttgttggtaa

SEQ ID NO: 16328 - DNA, 466 bp, Homo sapiens
  MAP TO AL034452.8; EXPRESSED IN PLACENTA, SIGNAL = 0.63
catttcacataaacattcaaaggcaaggagaaattctgggctattaggaagttttatcacaaaacttattttttcctataatagaaaaaaaaatgaataaggtaacagtgcagaaagttaccaaagtcaaaataaaggaaatggcatctgtgattttctatttaaaaacttttctagactcaagcaaaatttctcagtacattggcaacattttctaatttgtaagtttatgtgttcataaatttgacttctctttttgagaatattgcattaagaaaataatttctctttaattcagttggcaaattatttaaagacgagcatttacagatttttttatcatgaaaaaagttaactcgactattaaatggatatagggtatgaatttttaaaaaaagactttttaaaattcattttcttgttgaaactaactgcataccttttaatcctctgacacctggacgtc

SEQ ID NO: 16329 - DNA, 427 bp, Homo sapiens
  MAP TO AL132776.1; EXPRESSED IN PLACENTA, SIGNAL = 1.4
cccctcagctaaaagggaacttccctatccctttgactgtatctttggtgatagaaccaggtgataagttgactttaccataagtcaacttatggtaaagtgatttgcattcatgttttatctctcctaaattgtacactccttgagagcagaaactgctagattagacttgctacttacatggccagttttttgtaaagatgaggaccttcaatgtgtattagttgaagaaattctactttatctgttccacaaaaagataaattgtgttgattaacttttctttcccttttcacaggatcagcatgctcttttggtaaagtatcaaggtttggttgtaaagcagctagtcagtcaaagtaagaagactgggcagggagattatcccttgaataatgaattagacaaagaacaagaagatgttgcc

SEQ ID NO: 16330 - DNA, 463 bp, Homo sapiens
  MAP TO AC008269.1; EXPRESSED IN PLACENTA, SIGNAL = 0.62
tcagtcctcaggcacaaatagtctcatcattggccaaagaatgaactttttctggtaatttacttaagattattattattaagagtaataatgttatcattactttttaataatctaatgaacacccataaactcatcatcttttattcacaacttggtgtcttgtgggaggcacaaacgtgaaggaaatggatcattcctttcaagaatcttgtggtaggctgataatggctcttagaactggggaatttataaagaaagggaatttattacgtgcagttctggaggctgagaagtccagtgttgagggtgtcacatctgatgagggccttcttgctcatggagactctctgcagaattccaaggcagtacacggtgtcacatggcaagggggtaaggcagctgagcttgctggctcaggtctctcttccccttcttataaagccacaagttccacttccat

SEQ ID NO: 16331 - DNA, 439 bp, Homo sapiens
  MAP TO AF130358.1; EXPRESSED IN PLACENTA, SIGNAL = 0.96
aagtctggcactccctcaagagatattttttgaataaaagaacaaatgaagttgtgggtcagaaaaagaatgaatagcagtatcatcagaattttaagccatgaagtgtgttaccatgaagtccattgttgaaattattattattattattttaacagcatgggacaatggcagctggtctgtctagctcgtgctctgcttcgaaaaacaaaaattctcatcttggatgaagcaacagcctccattgactttgagatggacaagttggtgcagaccacaatcaggaaggagttttctgattgcatcatcctgaccattgctcacagactgcaatctatcattgattcagacaagtgtgctttctttcttttcagaaataaaatcatttctgccaagataaatattgggcatatgaaacacactgattacatgccggtca

SEQ ID NO: 16332 - DNA, 418 bp, Homo sapiens
  MAP TO AF067845.1; EXPRESSED IN PLACENTA, SIGNAL = 1.9
acagattcagggtttctgggggcttgggggagagggaacgggagttatttctgaatgattatagaggttctatttggacatgcaatgcatgtgcagcgttgcgaatgtatttaatgacgcataattacacacttaaaatgagtgaaatggcaaattttatgtcatctgtaccagaataaaaaatatttacaaaaaataaaattaaatgcacataccttttgactcagttaattaacttggaattcatcccatagaagtgcccatatgctcaccaatgtggaaggagagctgcttcttgcagcagggtttgtaggaatgaaagatggaaaatgaacgcgagtgtccatctgtaggaaaacagccacttcactgtgcatctgtgcagggagcaccatgaagcccataaaatgagtgaggc

SEQ ID NO: 16333 - DNA, 384 bp, Homo sapiens
  MAP TO AL008710.1; EXPRESSED IN PLACENTA, SIGNAL = 1.5
tgaacttaaagggcaaacaaggaaactaagacagtcacaatcaaatgttttattctttcctcaaagcagccaaaaattctctatcaaactctggattgcaatatctggaagtagaattgatttggctcaactgagagaagccccagtcctgtacgtttttgtctgagtgtgcttagaaattacagtaacagttgggattagcagagcaggggagactaagacatgagtaacaccctgaataaagagttctggtaaaaacacatcctcttgtatgacaactactagtccacaggaagacaaaacccagctactgtatcagtatgatgataaggcaagctcatcttctagcatcaaggagaggattgttgaagatgcaggtgagca

SEQ ID NO: 16334 - DNA, 387 bp, Homo sapiens
  MAP TO AC010904.2; EXPRESSED IN PLACENTA, SIGNAL = 5.1
tggatacgcagtgtccctaacattgtataaaagatcccagtttatagaacgcttccgaattcatgatctcatttggatagcattagacactgtaagggaactaactctgttgttcagagcaatgtcccctatcctattggtacttcctgttccattgacaaactctgtcctattagtatttactgttctgctggttatttcctgttctcttggcatctcctgtcctgttagcatttcctgttttataacagtggcatcacctgtcctgttagtattgtctgtcctattagccatccctgctctattttctgttctgttaacatcccctgtcctattagtatttcctgtcctattagtattttctgtcctgttgacatcacctctcct

SEQ ID NO: 16335 - DNA, 396 bp, Homo sapiens
  MAP TO AL034410.8; EXPRESSED IN PLACENTA, SIGNAL = 1.1
gcttttcctctcccttcagctttttcataccttccaagaatatcttgacagatcgttaattttgttccttgggtttttgagtacttatgaatgatttaattaatgtatgtatgtataactttgaagggacagttaaggtaagtaaacagaaaatatacagattcaaaggtctttaaaacccacgaattgaaatcttcaggctcatgtgggtgctagggatgtgggtaaaacagagaaaataaatgttacaaactctaatttcaaggaatgctcacctagctggtgaaacaaagataatctccaagaaatggaatcctttcataaggtacaccacaccatcattaaatcctagattgtgatgaactggcctttaatgctggagaaatgctggaaagc

SEQ ID NO: 16336 - DNA, 469 bp, Homo sapiens
  MAP TO AC007751.3; EXPRESSED IN PLACENTA, SIGNAL = 0.98
gcaaagcacagataaataaataaatgcatacacacatacatacagaataaataaataaggcaagcacctaactgtaactaattcagctccttctgtacatctcttctgtatttttgtatgtcacttctttttttttgtccacgaatcttttccaaccacacagaagcactggagtctctctgactctgttctggttggggggctacctgagtcacaaatcattctttgctcaattaaactgttaaatttaatttgcccaaagtttttaattttaccacatggtatcagaagtaggaaccaaaatagagcttctagtgagccccaggagcattgggtaaccaagcaaagtacctgcctggccattgtgtccattgctgtcccagaaactggagactgtgggtaagttctctctcggattcttaagatccatggatttctgttttgagctatctaagtttgtttgagcaaa

SEQ ID NO: 16337 - DNA, 405 bp, Homo sapiens
  MAP TO AC012447.2; EXPRESSED IN PLACENTA, SIGNAL = 1.1
aaagcaaatggatggcaaagcaaatggatggcaaggactgtgtcttagtcatcttggtacctttagtgcctgttcctgcaagcagacctcttggtatctccattaattataggaattagactccattaattataggaaatccctttaaacccctgaagagtccaacaggagattcaaacttagctcatattcttgctgtggtcctcacctcagtgttctttggctcttcagtaagttctgcaggcccagaagcccttctttcctttctgaccagtttgaactagcacagtggttgagaacttctgctacatcctcagtctgccgcagataatggggaatgccaccattcctggagccatatgagcgctcagagcaaacacttgaggcatcactgttggcatcatc

SEQ ID NO: 16338 - DNA, 434 bp, Homo sapiens
  MAP TO AP000116.1; EXPRESSED IN PLACENTA, SIGNAL = 0.6
tttgttaaagaattactctgatgcttgttaaaatagttaggaagactttattcaagactattgcaatggcggggagagatccagctcaattctgaatccagcaaggacaaatagagaattacagtcaagtagcagaatatggtcagtgaatggtaaattgctaagtggagacatcaaggtcagtagatcttataaaactggcttagtctgcttgggctactgtaacaaactactatagactagatgccttaagcaatcgaaatttatttcttatagttctggaggctaagtctcagatcaagatgccgacagatttagttcctggtgagggccctctttgtggtgtgcagacagtcaccttcctgctggcagaaggagagatcatctctctgatgtctgttcttataagggtaccaatcccattcatgaaggct

SEQ ID NO: 16339 - DNA, 485 bp, Homo sapiens
  MAP TO AC007597.2; EXPRESSED IN PLACENTA, SIGNAL = 0.72
tgctgagtaattttctgttgtgtgaatatatgaaaatttgtttatccatttactcattgcaggatgtttgggtttgcagtttgactgttaggatgaaagcttctctgaacacttggatagaagtcatttgtggacacatgtactcatttcttttgggtaaatacctgagattgaattgctgagtcattggggaagcatatggtttgcttttgtccacactgccaggcagttttcatcatggtggctccattttacattcccactagcagtacatgagagtgaagagctgcttctcctccttgtcaacacttggtattttcattttaattttagccattctagtggtacagtggaatctctatatggttttaatttgctggtggctaatgatgttgagtatctttttcatgtgcttattggtcattttggcatcctctttgttgaagtacctgtgtaagtctcttgttcatcttttaattgggcca

SEQ ID NO: 16340 - DNA, 475 bp, Homo sapiens
  MAP TO AC007366.2; EXPRESSED IN PLACENTA, SIGNAL = 3.3
cagacacacacatcctttagtatccaaattagaattttatctgatggataaaatttattttattctcttattcacagcactcttatttattcttattcacaacattgctgaagggaaaactcaacagctattgtttgttgcctgacttagctatagatcaaaaatacctgttttgcaataagaaaagaaaaagttgtcaaaacaactggatgggaaaacaatagaaaaaattcacattactgtttccttttgaagatatggttgtggacgtattcctctttaaggataagaaatttgaaactacagtaatgctaactgatagacgcgttaaattcagatgtactggcttctgtttcatggaacctacgtttatttcttctgctgtcccacatttaattgataacgacatcactacaagtataagaaaaggaagcagagtgaggtttacggatgagcacttgggagggatttcaga

SEQ ID NO: 16341 - DNA, 1959 bp, Homo sapiens
  MAP TO AL032818.2; EXPRESSED IN PLACENTA, SIGNAL = 1.3
agtccaggaatcccacactgtgatcctgctgtctccccagatgctacactacactcccaacttttacactcccaagagcagaggacaagattggggattcttccaaatgtaggggatgtgccttgtgaaggacatgagtagaaagcatgactaggccactgacactccctaatccccttaatcccacagactcagcagttgggggaacgcttgcttgtgactcatgaaaccatcattcatcaaacaacaaggtaaaccattttcttcccgttgatgtttctggtcttcagccccagataacggtggctgttcttctctggctgcccatacagcatgtcaataaagaactcaggctcatctttggccttagattgcgaggtcagaaagctgaacatggttctcagcttacggcacaaataggtcattgcttccacttcatccgatggctcctcatacacgggctgcttcatttcctcatatgcagacagaattacagcctgaaataagttgatcaagacgcagatcatcaccagcatgaaagatgagaggaacaggacccccagaatcctgttattggaaaattcagtgttctggaaagctgagacacaataggaaaatactgtctgagtggaatgaatcaagttactgtagttccattcatgctgaccaaacaccaggtaaccaaaagccatgtatacgaagaaatacacggacacaacaaatgccatgtggcagatgccagggagggcagcctggatggccctctgagccaggcgcacatcgtagaagaatctggaatacctgagggtcttcaaaattgtcagaaataacaggaaacccaaaattatcctcataatgtgatctacctgagaaactgcatgaaagggaatgaagtcttctgggttcgacaagtaaaaccgaattatgccagtggccaggaaatgtttcctgagaaagagcacaatcaacacagtaaatatgcactttaaagcaaagttgagcaaattatacacacttctcacataggaggctctttcttgcataatgatacaaccctcatcaacaacgtaggctaagaaaaaaatgagaatggccacatacaagtagatttctgctgaagcttttctgtcaaaatcagcaagtgaaaaagagtgcagagatatgcttgtgttgacaactcctaactgagagacttcaaatatgaccgaaatgctacagaacagatttatatctggattaaaagttgttaattccaaaaccacagcccatgtcttctcatccagccaattgctttcttgaagttctttgagcctcagtgtggaattaaaccgctgctgttctggaaaaaaatagagtgcatatcctccagatccataggtgtgtagtagtccataggaataatatagccattgcgttccttgaggcttataagtaaatccattggtactctcatctatagcctgcttatcaacttcattccaaaagccagaatagttttttgtgtcttctgggtcaatgccatatttggggtgacaatgaatttctcttctgatgctgttttgcacaaacttttcggcaggtagacacattttttcactagattttgctctcacttgcctcatcaatggaaggccaaggattttagacgagctttcaggaagaaatgttggattcaggtcattgtgtaacaaaggcaacagcacgctgtttagccatctatagatgtcttccagcttagtcacagtagcaagatccatagagaaccgatcacgaataaactggttatagtaaaagcagtcagtgtgacgtagtaagacgataaggatcaacagaagggctagaaagataaagtgagttagaatgtaactcagaaacaggagtgctcttctcttgatcctcttctttcttttgaatattctgatttcatcttctgtaaggggttggtacatcctcgtgcct

SEQ ID NO: 16342 - DNA, 390 bp, Homo sapiens
  MAP TO AL030997.1; EXPRESSED IN PLACENTA, SIGNAL = 0.93
atccctcccttctcaaatgcctacctcttcccttcccttcccttccccaccccacaccagacaacaggcagagataaacacagtcatcagctccttaaacttgattttattgtaatcatcgccatcagtggtgatgatttgtccaatttggtttctccatgtgtgactaatcctccccactgtcctgtgaagatccttcagataagcctaggtcttcatcctcctgtgaggatccttcagatgagtctagatctttgtcctcctttgaaggtccttcacatgggcctaggtcttcatcctcatttgaagatccttcagataagtctacgccttcgtcctcctccttttggattggattgatggagttctcttgggactgttcattctcca

SEQ ID NO: 16343 - DNA, 399 bp, Homo sapiens
  MAP TO AC007256.1; EXPRESSED IN PLACENTA, SIGNAL = 1.2
tgctctccagatgtggtctgtgaattactgtggtataacgtgactgttcaaatttcacttttcaggggctttgaccacgacctttgaagagcttcattttgagatcaagccccacgatgactgcacagtagagcaaatctatgagattttgaaaatctaccaactcatggaccacagtaacatggactgcttcatctgctgtatcctctcccatggagacaagggcatcatctatggcactgatggacaggaggcccccatctatgagctgacatctcagttcactggtttgaagtgcccttcccttgctggaaaacccaaagtgttttttattcaggcttgtcagggggataactaccagaaaggtatacctgttgagactgattcagaggagcaacc

SEQ ID NO: 16344 - DNA, 456 bp, Homo sapiens
  MAP TO AC007511.1; EXPRESSED IN PLACENTA, SIGNAL = 0.92
agtattttctgtttccttccaaacattttatacttaagtaaatgctagcaatttatacatatttcatagtcaatgaatgtttttgcttctgtgtttgtgtgtgtgttctatggcttgttggatataaatgtcatagtatcttgtaatctttttcagaggggcttctgaacaatgccagggatacaagtgtcatggatactctaccactgaatggtaaccatggcaatagttacagcattgccagcggcgaaatacctgagcaactgtgtgcaaatcatagaccgtggctataaccataacgagaccgccctagagaaaaagattctgaaggaactcacttccaactatatcccttcttacctgaacaaccatgagcgctccagtgaacagaacaggaatctgatgaacaagctggtgaataaccttggcagtggaagggaagatgatgccattgtc

SEQ ID NO: 16345 - DNA, 481 bp, Homo sapiens
  MAP TO AL078582.7; EXPRESSED IN PLACENTA, SIGNAL = 0.92
tggcagacttgaggactgaactacctacctcttctaagaagttgaaatgagaatgttttattgatgggaaattatttttttgttttgccttctagaattcaaatgaatgttcatattccatgaagacaatggctgatagttttttgttaaagatttagaaccagtggatttttatgaatgtgaaccctttcatgtcttgtggaagattttctgttttttaatctttttatttatttatttatttttgctatgttttcataggaaccagggaaaatgtgtagagggcatggtggagatcttcgacatgctgctggctacatcatctcggttccgcatgatgaatctgcagggagaggagtttgtgtgcctcaaatctattattttgcttaattctggtgagttgataacacaagataactcaatgctggatgaaatgtttatttgtagttttcaaccagatacgatctacccactccaaagg

SEQ ID NO: 16346 - DNA, 394 bp, Homo sapiens
  MAP TO AC007744.1; EXPRESSED IN PLACENTA, SIGNAL = 0.74
aaggcatgagtcctactgggttttcagtgtgtgttcagtatcttaagtctttagggcccaagaagggacattgtaggtcatggaagggatagtgtccatttccttttttttttttttttgctatgttcttttctcttaaatgatgaggttgcagcctgaaatggacctttctttctgtgagaaacagagcttatgccagagcagggtggatatttacaagcatctgtaacccttacagttggatctgactcaggttacagacagggcacaatacaatatggagacccagtgtgtcatcagttccaacctggtgctttgtttctgtctcaagcactaaccacatcctgagtatcagctggagtcctggatactggcccagcattgaatccatctt

SEQ ID NO: 16347 - DNA, 464 bp, Homo sapiens
  MAP TO AC007735.2; EXPRESSED IN PLACENTA, SIGNAL = 0.89
caaagttgtaggactcatattgcctaatttaaaaaattactataaggttgtaatcaagacattatgatatacataaaggaataggttagatcagtgaaacagtgtcagagtcaagaaatttacccctacattcatggtcaattgctttccgaaaaaactgccaattcaattcagtttggaaaagattgtctttttaccaaatggtggcaagacaatttaatatctacataaaaaaataagaagaagaaggagaaggaggatgaggaggaggggatggaggaaaagcttcatccttacctcctcatgccatacacagaaaagaactcaaaatgcattacagacctaaatgtaaaatccaataatagaaagcttctaaaagaaaacacaggagaaaatctatatgaccttgagttaaacaaagagttttagacgtgacagcaaacacacaatctataaaagaaaaa

SEQ ID NO: 16348 - DNA, 415 bp, Homo sapiens
  MAP TO AC006389.2; EXPRESSED IN PLACENTA, SIGNAL = 2.8
gagtttgagagggctttcccagacttattttttccttaggctcttattttaagtgagccattttcttaaaatgtgaagattttcaggaatgtattatacacagcatattatagccagaatgttttgtcattttttggcttctgctgtggtctggatactggtgtcctccaaaattcatatgttggaacctaatatccaatatgatagcattaagagatggggtcttttgggaagtaagtcataaggactctgccctcatgaacaggattagtgcccttactgaagaggttgaacggagcagccttgcccccttctgccatgtgaggatgcagcaagaaagtgtcatctataaggaacaggccctcatcagacacagagtctactgttgctttgatcttggatttctcagcctcca

SEQ ID NO: 16349 - DNA, 393 bp, Homo sapiens
  MAP TO AC005017.1; EXPRESSED IN PLACENTA, SIGNAL = 0.66
atcttgcatatgtgctcgggtatttagtaacttaagacattcgtactgcattgaattctatcgcacgcaagaaattagaaaacacaaaatcagtgtaacaaagccaacatgggatttctgaaaggctttaattcaacatttgtcacaaatgttgactaatcaccttctctggtctcgttgtagtgctaggcaccagagataatgcagtgaaccagacagacaccatccctagcctcatagagcttgcaattaaaaaccatactccaatggaaataaggaaagaaagaggcaaatgcccagacctctacttgctcttctggtcttccattgccttctcagctgttaaaccaactctttgtgtcatttcctttttgaacaatgaagggcctgcta

SEQ ID NO: 16350 - DNA, 459 bp, Homo sapiens
  MAP TO AC004080.1; EXPRESSED IN PLACENTA, SIGNAL = 3.9
aacccctgtacccaggatgccttagaggaagggaaggcctccccaaagacctctacctacccaatcaagggcaggcccttattttcccttcttgggttccccagaggccgcagtaccctagcagaaacagttactgaggtggctgacagggtgtcccttcccaaatcaccctcccaccttaggcctacagccccacttcaatggcgtttgtgtgtctgtgtctgtacacgcctgtgctctggactcgctgtgcagggtccggctccgaggcgctggtcggcagtccgaacggagggagcgagacccccaagagcaacggcggcagtggtgggggcggctcgcaaggcaccctggcgtgcagcgccagtgaccagatgcgtcgttaccgcaccgccttcacccgagagcagattgcgcggctggagaaggaattctaccgggagaactacgtatccaggc

SEQ ID NO: 16351 - DNA, 454 bp, Homo sapiens
  MAP TO AC006372.2; EXPRESSED IN PLACENTA, SIGNAL = 0.8
ggtcatgaaaatttatccttatgttgtcttctaagaattttatagttttagatcttacatttaggtctttcattcatttttgctaatttttatatatagtgtgaggtaagggttcaattttattttattttttcacaggtggctctccagctgtcccagcaccatttgttgcaagactgccctttccctattgaatggtcacagcacccttgttggaaatcagttgaccatagatgtgagggtttatttccagactgtcaattctatcccataatgaagaaagtaccacactattttgattactgttgctttttagtaagacttggaatcagagaatgtgagtcttccagctctgttctccttttccaagattgtcttggctattctgggcttcttgcaattctgtgtgacttccagaatcagcttcttaatttccacagagacatcagttggg

SEQ ID NO: 16352 - DNA, 474 bp, Homo sapiens
  MAP TO AC006270.1; EXPRESSED IN PLACENTA, SIGNAL = 4.1
tgcatttacaggaagaagtggacagaagttttttttttaaatccactccttcttatcagggaatatcctgataaggagtggttaagtagggaggaatacctttcattttgtttacccttaggtttctctctccagcatcattaaaaagaccaggaaagttttatatatacatctcaacaattcaaaagcagaatttttaaaaaccttaagcttgtgtaattattttaaaaaggaaaaaaaggacacaaaattatcaatataaaaaccaactcaccaatgatgccactatctctgctttcaagggtagaggttggactagtaacagccccatagctgcagtccttggcagttgcatttgtactgatgggtgggagtgtagagcaggggctactggctggtggagaggcagtgctgctagtcagagtggaacaaggacttatccgctgggtgattgctgaggtctgaaaaattgga

SEQ ID NO: 16353 - DNA, 466 bp, Homo sapiens
  MAP TO AC005033.1; EXPRESSED IN PLACENTA, SIGNAL = 3.4
gatcatgtcagactcttgaagataagttaacttttatgtagagcgatagagatactatagcttccagacctgttctccctttccaaaccagtcaggctttcctctttccactctcctgcctcctcctatcccttgcttgcctggtagagatggaatgggtagcagatgttgtctcttaatggcatagcctaaggtaacttattacccacaatccttcctccaattgtagtgtgtctgaaatgtaatctccttttattgtagtgtgtctgaaatgtgatctccaagagcgactgctctgcccatccctactcgctggcacagctgacggctccttgagaatggatgaccctaaaggagacttcatcacactctaccagatggcttcccagtcatcggcctctcattacaagctccaagtgatcaagtatggtccaagggaacctccccaatccatgcaaatgctatt

SEQ ID NO: 16354 - DNA, 562 bp, Homo sapiens
  MAP TO AC018787.3; EXPRESSED IN PLACENTA, SIGNAL = 0.58
tggcatttgacaagcagaagaggcaacttttcaggagactagcgagcctgggaagtcaggggatccatgttggtaatgacaagaagaagaagaaactaaatgtgtggaagagaaaagggagctaagctggccaataaattaaaagctaaaggaaaggtgaaagaggaggttaatgaggagagcaaaggtgatgaagtcaaatcatgctgctgtgatctggcattagatgcccagtctgcataatggagatcgcatcaggctgtttggtagaatgcaatatgtgctaacatacatgacgtgctaaaaaccgtgcctcattcataaaaaggggccaataaatgttagccattatcatcatgatcatcctcagaggaggaaaagctgaacaatatttatcttgtgaattcggctaaagattagagaaacatttcgaagcatgcatcaaatatttttcctttacttttgtataacaataccaattaaattaataaaggaagcatcacatttatagtgtatttccagaattaaggtggagacagcaggagtcacccgaagaatggaa

SEQ ID NO: 16355 - DNA, 536 bp, Homo sapiens
  MAP TO AL121894.14; EXPRESSED IN PLACENTA, SIGNAL = 0.49
tgctgatggtgaaccaagtctcctagactagacatcttggtccctcacttaggggcagatggagaaggacaggccagaagaggatgtggtcaccaacctttctgtccatgctatcctccctccatgaactcaggacgcgcaacagcctgtaggcatgctcctccttgctctgcacgttgaaagtgttcaaggcaaactccactgtggcgaggaacataggatcctggactattttattattaccacccatttcctcttcagaacaccaggcataagtcaccaggagctggaagcccatgagaagcagtgacagtgcccagggcatagccttcctcctctgcggactcgacatgatgcaggctccagcagcccttgcctttgcccttcagatccctggcgtccactggagccttccagggctcaggtctggcctttaaattcacctgctggggcagaaactcctccctccaggcctcacctctgcagttacaccctgtctctcccacacatggcctcccttcttccaaaggcgttta

SEQ ID NO: 16356 - DNA, 502 bp, Homo sapiens
  MAP TO AC022317.4; EXPRESSED IN PLACENTA, SIGNAL = 0.47
tgctccttaaatgcacatggggactagatttatagcatccaccacgtgaactaaccaaatgtaaaattgtatgactattgtactttttctgtgcaggtatttctttgactatagtcatgtaatagacaaaagcacaaatgtggtgtctacttctaccactattaactgtaacaccttgaacaagttacttaacctcatgtgcctcaattttcttatttctaaaataagggtaataatgatacctgaaatcaaggaatgctgtgaagaatacataaactaatatgcacgaagtatttagagtaattaaaacaataagtaccatggaaatactagctctcattaagaattcatgattctagaatgaaattttaaaataagttatagaatttgaagaacaaagttttaaattccaatttgctttgttaaaattgcacataactctatatatcctaggtagacatgattgacagtagccaagagtgaaccacaactattaccaccg

SEQ ID NO: 16357 - DNA, 518 bp, Homo sapiens
  MAP TO AC008701.5; EXPRESSED IN PLACENTA, SIGNAL = 0.67
gcattttcctcctctttcccttttactccctcaaaccagaatattgcaaacagcccgcaaagtgaaataaaaccccaaggaaatggaaaaggaattctgcctataaaaggggctttgcaaagggaagctagttccattggtggacagaaactactccctcccggagtattagttgatatggcctggagcgtgggtcttggagaagctgcagatttttatttagatttggatttttccactttctttcaggaagtcagtgtttggaaactggtggtcaaggtatttttttccctaatgagaaacatattatttgtgtttgttgtttaggataaaaccattgaaattttcacttttctcagtgtcagagtaagattgtggagtctaactggattttttgatgtgatgagtgaaaaacaaaaagagatctttcattattctggattctaagccctggaatcctcgatttttaataatatccttactctttccataaattttgaacctcttctatgcgctgg

SEQ ID NO: 16358 - DNA, 531 bp, Homo sapiens
  MAP TO AL137022.6; EXPRESSED IN PLACENTA, SIGNAL = 0.47
ctttgaaaccccaaattcccttgaaattctcatgtctgtagagataagctcctctaatactgctccctcctcccaaaacatcagcctcagaaccctccctgccaccatccctcttgggccccaagcccttcatgagttaggtcccagcacagcccatggagaagcacaaggtcacgctgagaggggcacgccgggatgagttacaggcctggccagcttgtcttggcagaagctgcaggagcatgtgtgggagtgtgtgctgagggagctagaccaaggtggggggatggaagccttggtttgtccaaactcgttgccgtggatccttatccaggatttgggatttactgtgttggcctgagcacctgggaggagaattaatagttggctagattggctaattaaagtctggattaagtagtagcctacagttaataagcatgaaatgccagaacttccctggcattctgtagaagaaggaatcagaagtccccgggagacgggaatgctggactggatctatgatgcgca

SEQ ID NO: 16359 - DNA, 513 bp, Homo sapiens; identical to SEQ ID NO: 9000
  MAP TO AC009334.3; EXPRESSED IN PLACENTA, SIGNAL = 0.48

SEQ ID NO: 16360 - DNA, 565 bp, Homo sapiens
  MAP TO AC022036.3; EXPRESSED IN PLACENTA, SIGNAL = 0.51
gcaaatttccaaagcagttgtatcagtatatactctttgtagtagtacatactactgtctctcttctatttatttattcattcattcattattcatgctggtgaatatgtaatgatataacgttagttttaatttgcattttcctgaaaacagataaagttgattgttactgttttaatttttattttcttccagattactaaagtcaacactacccaaatgtccatcaaaaataaagtggataaattcattgtggtgtattcatacactgaaataccattcatcagtaacatgaatcaataagtacatacaattacgtgtatgaattttgcaaacataaccttgaaggaaagatgtcagaaacaaagtatgcactgtttgaatttgtttatgtaatgttgaaacaaaggcaaaaataatctataatgttaaaaaccagagtattggctatccttggggaggcagtaggaggcagggaatggtgatgaagacacaggtaatatttctatatcttgataattgtgacaaaagtgtgtttactttttgaaaagccatccaacttcaa

SEQ ID NO: 16361 - DNA, 592 bp, Homo sapiens
  MAP TO AC013635.3; EXPRESSED IN PLACENTA, SIGNAL = 0.61
ctgtggagttgcttaaggggcctcatgggtagatatgggcccatgtagatgattcagagaagttctgtcttagtctatttgatatatgaggcttctagcagtgtttgaaaatcagcctattaggtcataatattccttctctgcaatttgcctgatgagtataaaccaacacccctggtgatccagcccagggcactgagatttattgtcaccatttgtccacagcctgagtttctctaaatccagcctaagaccattggctgtgaccaggtgattaaatgtccctgttagtcttttctaattattgaggagattccacgtctggatatggttctgctcagagacctttagaaagtatatcttgtggatatacatgtgttttatacctgagcaaatgactgtactcaaagcagctgagaggagaattagtgcaggcaacagaacctgtacaaagttactgctgtggctcatatttttgttgaggtcatcgatgaagtcatggatgtcatgctgctcaatctgtgggtaccttaaagctgaaagtgatagtgactaccttgcttaaacaagaagcaagagtcaaaaggatccg

SEQ ID NO: 16362 - DNA, 588 bp, Homo sapiens
  MAP TO AC011229.2; EXPRESSED IN PLACENTA, SIGNAL = 0.46
tctgtaacgcagcaatgaaagaatttttgtaattttatctatcctatgctaaagaaaaaatattgaactctgagcttctatttctttgacgtgtttttcagttatgtaaagaccaataagtcctgtctttaaaaagctttctctagaattctctaaggcacaatcttatagtcatttcctaagaagggcttacgagataaccctagggagaacttcgggggttatagagtaagtagggaattaatgtttaaaaattatatcataaattgttgaaaaaatatatttttaattcaccagagattaccttgaagacaattctctgtcttgaaagattccctttcaagatgcaaattaacacaattatcttagttgaaaacatatttaggaggtatgcaatcaaaatattaaatcagttaaataaagccgacatgtgcaatcacatttggtaagtaaataatttttaattagaaactttaaaaaatatatttagcatacttttaagagtggagcatattttccgcacagtcagtactgctcctcaatttgtgtttaactttatttttctaatccagaaaccaatgagctggt

SEQ ID NO: 16363 - DNA, 511 bp, Homo sapiens
  MAP TO AC019194.2; EXPRESSED IN PLACENTA, SIGNAL = 0.47
catgtggatgtgcaaaaagctggcatttccatgactttgttacccagtaattagcaagaaatggcagaagtgggattcaaactggtccctgcctcctgctctctgcttttactctgtagtcccttccatgcataaatctgactggcaaagaatgttactcatttcaatacactaacatttcctgaaattctctttcctcttctccttccctgcatctctcctttcttcaggttgccatggagtcgtggccccctcttctgatgacatcttcaagttggccgaagccaacgcctgctgggccctggaggacctgcggtgcatggaggaagacacattcatcaggaccgtggaactgctgggagctgtccagggtttcagccggcctcagctgatgaccctgaaggagaaagcaatacaggtgaagcccacctcagggaggaaacattaaacagaggaaaaaagaaaaacaccaaaaccagttcagcatttctgcacatagaaccctcctcga

SEQ ID NO: 16364 - DNA, 572 bp, Homo sapiens
  MAP TO AC022474.3; EXPRESSED IN PLACENTA, SIGNAL = 0.47
ttgtgtggccccactaattctttttactctgccctttcctatatgtatgccgctcctcaagctttagtcctggcccgcaaatgatgtcaggcagagttaaaactaagccaggattgccattcgctgtgtaaggggaattttttttttttttttttggtgccccagaaagatttcaaacttaaactgcagcataaaccagagaaagcagattgatagattcatcaatgtaaatgattagctttatttttccagtgactgattttaggaatctgtatctgattccatttagaaattgtgctggaagacttctgggaaaagttcctttgctccaattaggagacactgaagataaaggaaatggcctctatccttcttctggtgcccttaacgttaattcctggaactcctacaaccatctcataacaatcatggaggaaggcaaaccctagagattcacagaaaaccagaactgaatctctaattcacttggcttgaggtctgccttatctctagtctatttgaagtgaaataatcaatccctttatttttaaaggcaatttgatttgtttggc

SEQ ID NO: 16365 - DNA, 564 bp, Homo sapiens
  MAP TO AC012686.3; EXPRESSED IN PLACENTA, SIGNAL = 0.47
agggacagatcacttccttccttctgaataatgatgttaggagagccatttccattggaaagagggtaagagaatgtgaagtgcatttgtgtataatatagggtttgtgaaaagagaatagggagatagctggaaggcaaggtaaattccaggtcatccattcaacaacaacaacaaatgtatataacaacaactatctatatatctatatttattagatatttagtactttcaatattaccaatgctgtatttaatcctggagaaaaagatgaatatgacatagtccttggccctaacaatctagtagatacagaattagaaggctcagagagtataatatttttcttcagataccagaaagccactaaaggttttcaagaagaggatgatgtgaccatagctgttcctcttacagattcagacaccgatttgagagggacttcgaaggttaaagtgtcctcccgtggaccacagatttccatgcaataatgccctctatggctgtactagcctacgcagtagcgacctatggctatggagcacttgacatgcagctaggcaa

SEQ ID NO: 16366 - DNA, 504 bp, Homo sapiens
  MAP TO AL133414.3; EXPRESSED IN PLACENTA, SIGNAL = 0.46
acctgcaccaggagttatgggcacagaaaagaacatgaagacacagagaggaaggagagagacagacaccagggaggggaagcctcactcaatccaggtgccatggatgggatgataaagagagacaccttctaaattcacaaactctcttcctaggattccgcagaaaaccttccctcctggcccacccaggtcccctggtgaaatcagaagagacagtcatcctgcaatgttggtcagatgtcatgtttgagcacttccttctgcacagagaggggacgtttaaccacactttgcgcctcattggagagcacattgatggggtctccaagggcaacttctccatcggtcgcatgacacaagacctggcagggacctacagatgctacggttctgttactcactccccctatcagttgtcagcgcccagtgaccctctggacatcgtgatcacaggtgagagtgtccagacattcttctcattgtcattgggatgcagagtga

SEQ ID NO: 16367 - DNA, 536 bp, Homo sapiens
  MAP TO AC009049.3; EXPRESSED IN PLACENTA, SIGNAL = 0.46
ctttccctgttgcaggtgacaaaattaaggcttgcacaagctatgttacttgctcgaagttgcatagcacagaaatagagaagtctggattcaaactcagtcgtatccaaagccagagtgttggcagtaataatttcccacatactgctagtagggcaaatgatccataggcttgccacaacatcatggaattgttattactaagtcaacattccttttttcatcaggtccaaggaaattcagttataatagaggcatttactacagttacattttcatcataactaatgcaagctaatattctgtataaaattaccactatgaattaactttatgtctggagaaaatgggattgtatgtaattactgatttccactcacagtaaaataagcaaattatcttccccaacataaatgcaccataaattgttttgaagcataatgaagaaatgaacttctgaaagaaatatgagccaaatctgccaaattattgtaaatgatagcccctttaaaattagagcagtaattgcgattgga

SEQ ID NO: 16368 - DNA, 533 bp, Homo sapiens
  MAP TO AC018578.3; EXPRESSED IN PLACENTA, SIGNAL = 0.47
tttccatggcactgatgaagttacatttttttaagttgtttttgttttttttctgtgagattgaatcacttcaggaaaacagggtgctttaaatgaataattaaagttgtctttgttgattcttaaggaagcctcaagaatggagagttgaatggtagggttagcactgaaatagaatagctgaagcagagatgacaaacatcgtgtgctgatagcttaccagatcagtgatggaagtgtagagcatatctctgcactgaaggctgaaatcacctctgagacaccagcaagacccagcatggagccaaaggaggactgatggagagtggccccaccattgtgaatgctggcattggagcccatcacaacctatatcaaaatgggtgggctgaaatgtgaactttctagtactccagctgttcctgagattcctagaacagggacacttcctagttagccatctggaggcatatcttgggtctaacttatgagcaagtgattaaaaaaaaaagtgaggagcatcagaatttggc

SEQ ID NO: 16369 - DNA, 550 bp, Homo sapiens
  MAP TO AL133352.10; EXPRESSED IN PLACENTA, SIGNAL = 0.51
tttgggctcattttggagagacaggatagtatagtgaagaaaggtgaataaaggataatagggactagagtctgataaaactgagtttcatttctagttctgccatttgctagctctgggactttggggaaattactttagctcactccctgggcctcagtttcctaatctataatatagtgcctatttcacaagttatttgtgatgtcaaatgagacagcatatttaaaggcttactccattattttggagggatgggagagtgagcaggaagagggctgtttggtcagtttagggtaaatgcctcctaagttcagtctgaatttttacccctatgtccctacaggcttacctgatttactccagcagtgtggcagctggtgcccagagtggtattgaagaatgcaagtatcagtttgcctgggaccgctggaactgccctgagagagccctgcagctgtccagccatggtgggcttcgcagtggtaagaaaaacctcagccacagctccctggaccctctggtcacaggttagagccccagggatagc

SEQ ID NO: 16370 - DNA, 596 bp, Homo sapiens
  MAP TO AC019281.4; EXPRESSED IN PLACENTA, SIGNAL = 0.46
caagctttcatttgcagcagaaagaatggcttgatcattgtgagaccatataacctagaagctcttctgcagtctattgataaactctgagacagggttctaacaggcacaatttgagatatttcctctggcttggaattcagaagaaacacacatggatggttctaacatggcagagagtgactgaacttttagaggagtcaatgttcttggagcagatagtttcccaattggtccaattttccctggagttgcaggagaggacagcaaggatggtgtgaagggctggtttttcatagttaaccctcagcatgtcctatgttttcaaccttacaagaagaaaggccctggctagataggtctcaggagctcagggttctagacctgcctctgacattttataaactttggaactcaatttctttctctgtataatgagagagttaaacagaatgattgttaagtcaatgttaattctgaactacactcccctttctctctacacatttcaatgaacataattcaagccagcatatagctttaacaactttcaattcatttggttgccaccaattccctgcctatgggtgcaatac

SEQ ID NO: 16371 - DNA, 518 bp, Homo sapiens
  MAP TO AL121713.24; EXPRESSED IN PLACENTA, SIGNAL = 0.46
aagggtattcccgttcatcccagtaatgctaatcgaggaaatggtcctcgaggaaatgacgctgcagcaacagcatcacctggggacttgttagcaacagaagttctcagactccgccatagaactactgaatcagaaattctggaataaggcccagcattccatgttctaacaaaccttccaggtgactgtaatgtacattcaagtttaagaaccactgtaatagacccatttcttggttgattaaatggatcttatattgtaaataagcagaatagtcaaatgttccttcacacaataggctagggctgctatttgacaggatcatggtcgttttaacaggaggaatatgatgaatctgaaaaatggaaacaatatttgcaatggcagttgtgtgtccctatgcaacatgaggtggggaggccttgaggattccactgatggaaagaattgagctgaaatctgagcacctgccatcctcttcctcctctcccctcccaacatctgcatggaaccac

SEQ ID NO: 16372 - DNA, 565 bp, Homo sapiens
  MAP TO AL096800.20; EXPRESSED IN PLACENTA, SIGNAL = 0.5
cgacagcacaattgtcatcctgctaaagagtattgtgaactcaatggaaacgaaaagtgaggctttcatctgtaagcttagatcccatttatggcaatcatctcaacctctgcgcagggctcacagtggaaattactacaagctgccgaacacagatgacatcatcttgccacccacaaatgttatgggtttgacagcccagaagatggcatcccctgggaggaatacagctctaactaagttgacaagttttgtgtgtttgagaggaaatagtttcataaaagttgttctcctctccgttttctctttgggtttggcaactgccactacaatgaaattatggtcacgacaaggagccattagctttccccagagccatgagccacagctccctctgcgtggaacgatgtgagtttgcagccctttcctgttagagctttcacaacttggagctctggaggctgagatttaaaccagtgcctatgctattgtgctgttactcctttgcacttctctctgctgtactgctaatcaccagggcttttcagttaggccaccagagctc

SEQ ID NO: 16373 - DNA, 572 bp, Homo sapiens
  MAP TO AL139195.2; EXPRESSED IN PLACENTA, SIGNAL = 0.57
ctattggtgaaggcagggaccaaaaaaaaagaaaaatcttcaaggctatcttaccacaatatattatactactactacgaatactacacaaatttcaagcatgttctctgatgatacttattgattagcactttcttcttggtgaatacaaaacattttttaaaaagcatgaggattcctttctccttaactagattactatttctaaggtcattacataagtaaactaaattttaaaaatacttttaaaatatagggaaaaaattacatattgctttaagaactatttaatttgttactatttaaaattacctgtagtttgatttcaaatacattttgaataagtttagccaggactgtttctggattactgaagatatctccaacttgtttgttcactctttgacagagtattccagcgtcttcaaatatatcatttctcaaataagcaccctaaacagcagagacattttatacagtgaacatataatttctacatgattttaaaacaacaattagcataaaataatatccaacaaagtgtactgttatgttacctcctggcactgctt

SEQ ID NO: 16374 - DNA, 591 bp, Homo sapiens
  MAP TO AC010767.3; EXPRESSED IN PLACENTA, SIGNAL = 0.46
tccccatggtaccaactttcatggcatgagaaatagtttagcaggtctttccctgagccactctaggcctgcaagtccctttgggatgcaagataattttttaaatacactagttattcaattgttgtgcccatattaatttaattgccactgaactaccactgtccacactgggaaatgtgataattaggtgcttttttttttttttttaccaacttgcatttcacccattttactaaagatctattctccaggtgttcgtcagatacccctgacctatctggctatgaggtgtcaggcactgtatttggtgttgctgatatggtgtcaagtacaatgatagagcaagtaagatggctcacttgctcatttcactgtggagtagtctttttaactgctttcctttctctttctctttaaattgaaaggaggggtagcaaggacatggagcatctttatttgcactacttctaagatgtactacttctgttatctgcctttattccagagaactagcttcccagattttaagaaactctggggttgtcatgagatttttccccaaaggagtgggacatgaaaagcagggta

SEQ ID NO: 16375 - DNA, 509 bp, Homo sapiens
  MAP TO AC013726.3; EXPRESSED IN PLACENTA, SIGNAL = 0.49
gcgggtagtagcgatggtaggtggttacctctttgttgagagagaccgcaaggtgcaggggcttgtcagacatgaagaactgccaggccgcctcagctcggggctggggacccatctcaagtggggcatgctgtactttgcggatcagtaatcgcacggagctcctgtgggaaacagccacagacaagccagggattggcacccaggccgctttagggaggcttctgttctctccccactgtcacatggagattctccaggaatgctccccatggagacagggtggacgggaagagggcaacgacactggtcagagcctgaggcagccctgacggtggaagagcctgggggtctgggtcctggtcccttccctgtgggggaagctgtggggccaggcaacatcccgagggccaagcttagccccttaggctccgtggattcccagctctgcctcctgtcagcaaggctaaggtgtgagggcgtcaagggcctcatggaatagctgccat

SEQ ID NO: 16376 - DNA, 536 bp, Homo sapiens
  MAP TO AC022474.3; EXPRESSED IN PLACENTA, SIGNAL = 0.54
tgataaggaggcattaaacaacgataaagtttcaagagatttttacaattaaaagtatataggtactcaacaccagagcacccaaacgtatggagcgagtattaacagacctaatgagagaggttgatggcaatgtaatactagtaggaatcttcaacactctgctttcagcaatggacagatcatccatacagaaaatcaacaacaataacaaaaaagcattgaagttaaactatactgtagtcctaattgacctaacaaacatttacagagcattcattctatccaatagctacaaaatgcacattgttctcaacaacacatggaacattatccagaatagaccaaatgttaggtcacaaaacaagtcttaacaaatttacaaatatcaaaattacatcaagtatttattctgaccctgaagaaaaacaaaaaaaccagaaagcaagaagagaagtaagattggaaactggataaatacatggaacttagacaacatgctcctaaacaacaaatgggtcaatgaggaaattgga

SEQ ID NO: 16377 - DNA, 578 bp, Homo sapiens
  MAP TO AC018684.2; EXPRESSED IN PLACENTA, SIGNAL = 0.48
attgcactgaccaggacctccatttcaatacttagtgcctattcccagtcttagtgggaaaatgttcagaccttgatcatttagtttgatgttaattatagatgtttcctttagctgatagtattgaagaagttcccttctattcctagttttctaattaaaaaaattaataattttttttggtcaaatgctttttctgcatctatcgaaattattttcttcttttgtctattaataatatgaattaaattcattgattttaaactgttaaaccaaatttgcatttcttgcctatactccataagatcatggtgcttctatttttgtatatttttggatttaatttgctaacattttctaaaggacttttgcttctatgttcatgagaggtttttttttatttttttcttgtagtagctttgtcaggttttgatatcaagtttgtcatggtaaattatgtgagcatctctaccaaaatccctatcctgtacataaatgtcaccaccacaaccaccaagagtttcagtctctttcctttcctcttcagtctgggttagtcttgtaacttgctgcgacca

SEQ ID NO: 16378 - DNA, 551 bp, Homo sapiens
  MAP TO AC016113.4; EXPRESSED IN PLACENTA, SIGNAL = 0.48
tagctcagggggcaactaagatacctattttactgattagaaaatgaatgaggctcagaattattaaggacatacaggagtaaactcaaaagttgaacagaggtaattttagcgaacctcaaagctcaggttcttttcttatatgttgtgctgcatcaccaacatctcaacagatggataaaagtaaaataatattggaaaatatacagagaaaacaatgagcacagtgtcctacttattcaagtgcagaactgagttgcagctggtgttcaacaaggaaaggaggtggtgtgagggcatagcaaactcaagcactattcaggaaaccatcattttgaagcaaataaaccagtggatagagcaggacaaagacaatgccacacccctgttcaattctgaacttgggcaagatggctggtgctggaagaccaggatccagtgctaggaagacaccttgggggagcaaggcaggattgccagaattcctgcccaaggaagggccaggcaggggcagctgaacagatatggcatccaggaaacagttcagggaa

SEQ ID NO: 16379 - DNA, 532 bp, Homo sapiens
  MAP TO AC016224.6; EXPRESSED IN PLACENTA, SIGNAL = 0.54
ataacggttgccctctgaagagccaatttaaaaatactaccaacctatcacttaggagaagctttactgtcatcatccacaataaagtatgtttcttccatttgcaggaataatttggaaaactttttgcatagatcccatgataagtttcaaagagcaaatatattcattatgttataaacaagccacagactaccactatttcaggtatttgcaggcactattgtgccttaatataactgtggagtcatttttccaaaatctgaatataaagcctctatttctatccttcatttgattggaaccattcaatcatcctggtagataataagtttgcatgttcttagattgcatttcattatgcttccgttcccctagaaaataaatgtgctccttttcccaacaattgtagaggagaaatacttctgacatctcaaatttcagcctctggaagacgtccctcttctggacatgaaagtcatttgtttcctggacattcatctgttaaataagagaagtcaagaccccctca

SEQ ID NO: 16380 - DNA, 556 bp, Homo sapiens
  MAP TO AC012686.3; EXPRESSED IN PLACENTA, SIGNAL = 0.7
catgttcaaggtctttgcccactttgacatatactccatcaccctaggggatttacttttctaaaacaaatctcagtcaagatccatttatagtcatttatatgaatccccactaccctctttagcatgacataccagcttttcatattttaagccctactaaatccccatcccatgtcatgttcccagcactctaagcatacctttcttcatcaccgaatgcctccttggaactgaagacatttgcccacgctacactcattgtctgtatcatatgccttttcatggtcgtccattcctctctcctagcttttccttattttagtaggaataacctccacctggaagcctctgctgactgttccacccacctccacgggccagatgtctctaaaaacatgctcccatggaactctctgcatgcagtgattacaaatgtttattatattgtacagaaagtgcctgctcatttggcagtcttcgttgctaggctgatagctagttgtgatttgtctgtaatcacagccctagtgtctggcacatagcacaaactcga

SEQ ID NO: 16381 - DNA, 572 bp, Homo sapiens
  MAP TO AL160281.2; EXPRESSED IN PLACENTA, SIGNAL = 0.49
gctggagcaactgaatagccttggaaaaaataatcttgacctctgcctcatattgcaagaattaaaggttgttacataaatgaaccaaagatggtccctgtatattgactctgttgttcacttcttcacagcaggctggtgccaaattcaaattcttacacatcaattgctttaaatatagcccaagtaatatttttagccattcagaacttccctgctttgcataccctgcaaaactgcacctagcctctgcctgccatagataaaacaaattctggggctataaaagacaccaagctgctgctgcccctcagagctctctgacacagactccccatcttgctgctgagccacatcaccttgacacataacgccttctccaattcccttctccaccaggagttccattgccctcttccctttttgggcagtggccccatgccactgtctcaggaggtctcctgctgtagggaacttcccctcttgtgcaatgtgtcctggtgccacccaaatgacagcttgttttgtaatactgacatgtcatgatcatgtcttttcttggatcagccctg

SEQ ID NO: 16382 - DNA, 552 bp, Homo sapiens
  MAP TO AC015493.4; EXPRESSED IN PLACENTA, SIGNAL = 0.54
cttaacagggcctcatccagaacctaccatagaaaaaaaaatctgtctgagaaataacgcacacaataccttgcagatatcactccattgcccaggaccattatcattgatggctctaactttaaacacgtattctgtgttgggggtcaggttgtgcagctccagattttgctgcattatgtcccgaatttgtccacagagctccatttgtacgttgttaggaggagaagtaatgacttcatagaattccatctcaaaagagtccacgtcttctgctggacatgtccagtaaacctatggaagaaatgaacatactggtgtggtactagtatacatcattcagctttctttcccttaaagatttgtgatgttgactatctgtggggtgagtttaagctgaccccatcccctgtagctaccgaagacttttaattagaccatgcacaagtcttggaagactgtgtgatgaggcctggcatgatggttgtaatgagtttcacaaacagaaggtttccgttctgttactgtcagtcgacatggaggtgacaattg

SEQ ID NO: 16383 - DNA, 532 bp, Homo sapiens
  MAP TO AC011957.2; EXPRESSED IN PLACENTA, SIGNAL = 0.58
agatgatcaaaggaggtgcggtgtgactcgcaagctggagagacgggaaagcctgctcctgatgtggaaagcatcattattatcccccactgcagacagccacagagcgctggagctgggaggaaccttccagatccctcaggggctggactgcttatctccacagcagcagccccgcacctctgaggcaacaaagctagaagctgtcatttcaagtaagcattttttttgtagaatgttatgattacaagtttgggtgattttttttttttttccagaatcagagatctggaaaggacatgtaagatcacccaccagggtttctcaacatgggcacttccagccacttttctttggggatgcagagagcaattatttgttgggagggactattctgtgctgggtggggtgcacagaacccctggaccccgcgtactaaaggccatgaatgtcctctagtcactgtgacagccctgatctccctcccgtctccccatttccaaacacgaatggggttctgcattgatccagt

SEQ ID NO: 16384 - DNA, 551 bp, Homo sapiens
  MAP TO AC021383.3; EXPRESSED IN PLACENTA, SIGNAL = 0.54
ctaatggttcccatgagcaagaatataactaaaaaaatttaagatgttttctctgtgctttatataaaagcatgactactaaagctgaattggatttaactaaacaaatggtataccaggcactcttcttattttctatttgtttctatttgttttcatcttccttcttttttccaccattttctaaatactagtttcttccattttcttaatactagtcttcaaaatttttctattctttttccccagagacagcccattgaaaatcattgcaaaggaaagcagttatcaaactgctgacatgttctgccttccactttatcacctagcagtcttcaactacttggagaagttttattatatccattatttctattgtacctttgttttctattcagaacacagatccctccttcacttatattgattgctcagcatgtgctaggctgtttagttcttatgaaggcaaaaattagaataaataggaagaatcgctgtctttatttttcatttctttaaaattatcttttaggtttttgtggttggcttct

SEQ ID NO: 16385 - DNA, 584 bp, Homo sapiens
  MAP TO AC015873.2; EXPRESSED IN PLACENTA, SIGNAL = 0.46
gtcatccttgactgtgcagcctgtcgatgctgttggggagtagcacagtctgaaccacggtgtccttcaaaaagtcggtgcccttcaaggatctggttgtgaacatcaccagggaggagtgggcactactggacatagccctgaggaagcacagaggcatgatgctggagatcttgagtcctgtggcatctgtggctgaatctgtcaacattcatttacttcatcaaatgctacccagaatagcttccccacattccactccatctctgccctggctcctatgcagtagtccccacctcatctggtttaaatatgttcccagatcttcagtggatgcctgaaatgagagtatcgaaccttttctatgctgttttttcctgtaccttcatacccatgataagggttaaattaggcacacgcaagagattaacaataaaaattaataatacaatcaaataatataaaaataccctgtaataaaagttatgtaaatgtggtctctgaaaatatcttattgcgtgatacttaattttcagaccacagttgaccgcaggtaactgaagccgcaaaagcaaaaccttagc

SEQ ID NO: 16386 - DNA, 534 bp, Homo sapiens
  MAP TO AC018525.4; EXPRESSED IN PLACENTA, SIGNAL = 0.46
cgcttttgattcctctccacatgacattctcatcaacaagcaaggagatatggtctagaccatacttgggttaggtgagtgcacagttgtctgtggattcatactccacggttgattatcagctactagtcatcatccataggggccatatcaattggcttacgagcaggtggtatcattaataagaccagttatgtttctgttgatgaagatggaattggactggtatagaggcatgtagataagccaaatcccttttataccaaaaggagagagtccaagttccaggaaatatttagcagcatctggtgtcttacgggcacatctaaaaggtgacagtccagagactgaataacaagcaaataaagctatcagttttactaattattattcagtcttaactgttgtttcaaggtgtgtaagtgatatcaggtaactattggattctgaaaggccccctggaaataaattatattcataaactctatagaaaccacacataaagggagcaactcgaagagggtagaagagggc

SEQ ID NO: 16387 - DNA, 552 bp, Homo sapiens
  MAP TO AC022015.2; EXPRESSED IN PLACENTA, SIGNAL = 1.2
accttcgttggaatctgagggtagtaatttctctcatctttgtatgaaaatgtctatttcatttttattcttacaaaataattaatgaatataggattgagactgacaataattttcccttagctctcaagttttaattgcatagttactaatgaaaagtttattgttggtttagttgtcattattttgtacaaatctctcttttgcctcaagtggttttaagagttcatccttggtgttctgcattttcatcagcagctgtcctggagtatgtttagtttagttattccaagttatccacctccttggtggattttcctcaagactcatgtctttcctcaattcagggacaggctcgtcacactctgattaaacacggcttgtttcctgtgtgtgtttttaaattttatgtattttcattgtggaatttctattagacccattctgttctctttaattttttttctctgatttttccattatctcttatgttctcagaagtcctaattcttgtttctcttgtctgctgatgcttgcgtacaacggcttttt

SEQ ID NO: 16388 - DNA, 586 bp, Homo sapiens
  MAP TO AL161756.1; EXPRESSED IN PLACENTA, SIGNAL = 0.46
tggcaattcgaatgactctgctttcctcttcaggctcccggagagagagatgtgggtaccgccttgtgcggagacagagaagtgccgacgagcagctgcactgtgccggcaaggccaagagaagtggcggccacgcgccccgagtgcgggagctgctgctggacgccctgagccccgagcagctagtgctcaccctcctggaggctgagccgccccatgtgctgatcagccgccccagtgcgcccttcaccgaggcctccatgatgatgtccctgaccaagttggccgacaaggagttggtacacatgatcagctgggccaagaagattcccggtagggctttctggctatcagttttccatgtacttgtagaaaggccggccgctaatatttaaggggcaagagtacaaagtagaggtccatgagctgtgcctagatatttaacaggtcctcagctggatttgtaacttttaagtgcaatatgttccttccttctgtcttggcatacctaccttcaacaaggccgtgttctgatttagaattctgagactcttctgagttctgtacccaacatggtagtgcagaa

SEQ ID NO: 16389 - DNA, 529 bp, Homo sapiens
  MAP TO AL160492.1; EXPRESSED IN PLACENTA, SIGNAL = 0.64
ttgtccagcctcccttgtagctaggtgaggtcacacatctgaattttggccaacaagatgccaacaggtatgttgtaaaggtaggtggcttgtccctcttcatcctgccctctgtcctgctggatgtgatggctggagctctagctgccaccttggacagtggggatgaggaagatgaggcctcatcagggaatggcagaggaggaactggcaaagcctctcacgactttgtggagtcggtacaaaaacagccctggactgccctcctctaggccttttttatgcaggagagaaagaaacttctatgtattttaagtgtctgttgtttttttttctgttacacacagctgaatctaatcctgatctcttctttcagcaaatgccagctaattttaacacaagtctataaaagggaaaataatgaaaaaaaatcagttatcaaaacaaatactaaaatggtccaaagtcaagtattgaagacttttggagaataccactaatgagcaaacatagaaactccttctccccc

SEQ ID NO: 16390 - DNA, 591 bp, Homo sapiens
  MAP TO AC025129.2; EXPRESSED IN PLACENTA, SIGNAL = 0.46
tgagcctgtctacatggtggagattgtcctgtttctcctctgtgctgagtctgtctacacggtggagactgtcctgtttctcctctatgctgagcctgtctacctggtggagactgtcctgtttctcctctatgctgagcctgtctacatggtggagactgtcctgtttctcctctgtgctgagtctgtctacacggtggagaccatattgtttctcctctatgctgagtctgtctacatgatggagactgtcctgtttctcctctatgctgagtctgtctacacggtggagactgtcctgtttctcctgtatgctgagcctgtctgcatggtggaaactgtcctgtttctcctctatgctgagtctgtctacatggtgtagaccatattgtttctcctctatgctgagcctgtctacatggtggagactgtcctgtttctcctatatgctgagtctgtctacatggtggagaccatattgtttctcctctatgctgagtctcctctatgctgagcagatttctcagccatcttcttgaaaacttgtctttataatcttggcttccacgaccctgcaacaagaacgttgtg

SEQ ID NO: 16391 - DNA, 558 bp, Homo sapiens
  MAP TO AC015744.3; EXPRESSED IN PLACENTA, SIGNAL = 0.47
tccgtttatgttccagcattccatctatgatatcacattgcatttaattattatgtctccttagtctatacttggttaatagtttcaggaaatttgtttttgtttttgttcattctttgaggacttctacatcaacagtcatgttatctgtaaagaaagttttatttattctttcccaatctatatgccttttatttcctttctttgtcttaatgacctagctaggaattccagtataatgatgtctaaaaatggttatggacattcttacttcattcctaatcttaggaggaaaatgtcaagtttctcaccattaagtattatatcagttgcaaataatttgtaggcaatatttgtcaagttaaggatgccaatcatatcaagttgattgatggtgcttttcaggttaactgtaacctcattttcggccttcttgatctatcattactgaaagaggggatgtttatgtcttcacttataatagcaaaaattgttttccttcgcagttgtattagtttttgcctcacatatttttattcgctgttgttaggtgcaaaa

SEQ ID NO: 16392 - DNA, 575 bp, Homo sapiens
  MAP TO AC026236.4; EXPRESSED IN PLACENTA, SIGNAL = 1.6
tcccctacctaaatcaccccagggccaagttctggacaactgaagaccactcttatagcccagagtccaccaaaattattcaaaccattcagtcctaaatttactcagggtacctgccttgtctcacccatcccttcccacgaaaaccccaatactggatctgggccatgttctccccttccctctctctgtttcctgactggccctggtgtatctccacgtgggcctgcgtgacatacttgcctcctgcttctcgaggtctgtaagtataaattattccctcacgatgatcatttcagcatcttgtatcttacaatacctgattaaaacaatcccgggtacaatttttagaacacacccacctggtattgaccttcataattgaaaaatacccttcacagctgatagtgcttactcagggtaggaaaacgcccattctccaagtggacttttcctttgtttagtttattttccaaaacctttccctaatgtaatgtaacaagacaatttattgagatattatgtttttttcttcacttatttttttccctgtcccctcatggaccacatgtgtg

SEQ ID NO: 16393 - DNA, 507 bp, Homo sapiens
  MAP TO AL137225.7; EXPRESSED IN PLACENTA, SIGNAL = 0.5
tgggagtctcaccatccttctatgccatggcttgggtcctgcacctggtcccagtccactgtgtggccctaggcaagaccatttcttctctgggcattgcgggtcatttccagaagggactcccccatgattcctgatgaagcaagcaaggcaaggtgatggttcccaatgcagagatgcaaaaactgatgtctgtgggcctggggcagggctgggatcaccagtcagggcttgttccctccaggctggagtggggttcgggtggctcaggggtgggctgttttggctgagctccctgatgctcatttctaccccagcccacagatcctgtgggcagcggccagggcagccatggcttgggcaagtaggctgggcctgctgctggcactgctgctgcccgtggtcggtgcctccacgccaggcaccgtggtccgactcaacaaggcagcattgagctacggtaagcggtgtgttacccagtgagtgtctgtgagcctgtacatgcgt

SEQ ID NO: 16394 - DNA, 534 bp, Homo sapiens
  MAP TO AL121917.12; EXPRESSED IN PLACENTA, SIGNAL = 0.85
gaggcttcctggtctctgtggacagacgcccaattccccaggccatcagtgcctttctcaccacatccccatgagccccagcgtgggcaggaatggacttttaacaaaaccaccatctacctcaagaagggggaagctaacaaaaagagatgacatgtattactttgttccttttagaagcctaaatgatatgatgcacatgttacccttcattgaagattctaggtggacacacaacttggatatcaacagggagcagaaaacaaacccactagcaggaccaaaaggcagacccatcagcagaacacaggcggcagcttccacaagtaactccaaaactgaaagtcaaatccaggagaagactgaggaagctccattttctttgaggtacatcaacatcaataacagatcaatggacccacttaatggagctcttaattgagtagaaaaaaatatttaagagttttgccgctctacggcaggaaagctaattttcctaaactgaaatatccttcacttcccttggggaaaaat

SEQ ID NO: 16395 - DNA, 566 bp, Homo sapiens
  MAP TO AL157405.2; EXPRESSED IN PLACENTA, SIGNAL = 0.5
cttttgaaggccttttggtggagaataatttgatgggaggcaggactaaatgacttttagaatgtcatgcaaattttcctgtgttttgatatatcctattaatagttatgaagacattttgtcttttttcctatattgactgttccttttcttcatcatgctattcctagtactttaaaatctgatcctctttttttcaggagggttaatacatgtcagtttgacattgtatcattgaatcagaattgaccatcagaaagagtaaaattcccaggccttttttaccctagcctgggtacaagctcaagatgatgcagaaggaggagcaaagcatgggatccaagaaagttaagttccagctcaggtcgaagagaatcatgtctgtgatctgtgtctttggtttcttcatctacagctgtcatcttgtgggctggagcatggtggccaggaagtgtgcaaggggctctggtgtccatgcagccctcatagacctgaggaggtatgattgctctaagcccccagtggggttccagtttgatagctgccctggatggagatgtgggagt

SEQ ID NO: 16396 - DNA, 528 bp, Homo sapiens
  MAP TO AC019159.3; EXPRESSED IN PLACENTA, SIGNAL = 0.48
cgatttttcttgcctcatcctcacattgatggacacattaggggggaataacaaagcagaaggggcggtactattgagcattccaaaggtgagaatgccacacgcttgcagcttacatttcagaagctgcatgttgtgaagagtctcctgctctgttaaagaaatgtgactggtgaaatgacatggttgcaaatgtccctaaccatcatggtgatataacagcctgaagttaaaatattgattctggaaatccagtatgcattgactcatgtatcagcacttcaacctgtcacattccaatgacaggggcagtgctgagaggaacatcctattgtaaaaacgcagcctatttctggtactcaggaaacactcatgaccacggcagctgtgtcagtgattacaatgctgaaggatgctccattttgattgaaagatccttcagcggccaaagatatctagacagacatatccaaattaatatttaagtaatgctacactcaatctattccagtaaagaagcacacgcca

SEQ ID NO: 16397 - DNA, 550 bp, Homo sapiens
  MAP TO AC015578.4; EXPRESSED IN PLACENTA, SIGNAL = 0.46
ctttgtccatgtgtgccaactatttttataagatatatttgtagaaaggatgtaaggctggcactacattaggttgcatcactttcaagttatttggcctggagcaggcctatatgaactattcttgaagactaaatgaaattcatattctcttggtttatcctgacacaggtagtaaaaaatgattattgttctgctaagttcagtgtagtttattaaaatttgaagtctattcacaaaataatgaaaatcaagctaacatctctttttaaaaaatctcacttgattgctgtaggctgattctggaactccatgaaaattaatccatggagtttcagtagctagtccaggcagagctgtcaatgcaaatgtccagaacaagccggcaaccgtggccctaaagactacccagagacacagcctttctgttatctgaccttccttctgccctgaaaatacatcagtgtcagtcatggccctggaggtaaagacagagcatccttgaacttaatctagcaaatcacatccaacagaatgtcgacttgccttg

SEQ ID NO: 16398 - DNA, 550 bp, Homo sapiens
  MAP TO AC018796.3; EXPRESSED IN PLACENTA, SIGNAL = 0.47
tgtctccattctgtctccccatttaggtgatgagagatctttttaaaggcaaagacagcaatttcctggggatctatgagtacactgttcaactacagtacaggtaactgaattccaaaaaaatctggtaaacaacagtgttccaggttttgtctcccaaacctgtacaaagcaatttcatttgtgtgatttctgagaggatcacttagccaaggcatcgaaatataaaagatggcttagggaatgattttcagtgagtcttagtcattgcttccgctaggggccttaatacgagtgggtaggataactaggggaaattatgtccttgttaccttttatctgcctctctgcctctcattctctccctaacaatcccctgttgcctcttaagaacaccccaccacacacagacatacactcacacctcaaagtgctgtcacttgcatctttgcaaagagcaccccgaccccaccatacgcagatacactctcacacacatttcagtcccaacctcaggcatacttctgttccaagatgcccaacctctgat

SEQ ID NO: 16399 - DNA, 508 bp, Homo sapiens
  MAP TO AC008270.3; EXPRESSED IN PLACENTA, SIGNAL = 0.47
ccggagaagacacaaagaatgtagaggaaatgtatatttgattataaaattacttttttctttagtttcttaacttcttcacatgctaaagaactttttgtggtgttatggttgttaataaggccagtcttaataccaatgttttctggcatttctttgggaacaatgttcataatgctgttttgttcaacaacgctttcgtctgcttttcctgtcaagtcatttcttacttaaacattcaaaatgaagtgagctctaaggttcaaagcaaatttcccttttctaaggattccttttttttctttcacttatatattaaagttaataacattacttataattagtacttttctcatttctctctctctactgaatgtaatcccctccttagtatttatgtacctgtattatttcctgccattgaatcttagttgactctttgatttgctttcacaagaagagtatggtgatactgtgccagttctgggcctagcagaagcatggcaag

SEQ ID NO: 16400 - DNA, 551 bp, Homo sapiens
  MAP TO AL136984.7; EXPRESSED IN PLACENTA, SIGNAL = 0.46
tgggccaatagctgttcttccactcactagctgtcttcctcagaagcaaaactgttctttaattcttagtttggtgtaccaccctttctcaagctacttgcttggatataatataggttagtccattaattttacaaactttttacaaaacatttttttgtaatgtcaagtgtggcatatatcagaatatgacttttctgactctgaacactgaagctttggatacctggaatttaaaacgctataatggattacagttatgattgatagggatgtcaggaagattaggatttcttctgaaacaccccgtatttcaagtcgttcttctttaggaaattgggttttgtgttttctgtctttgacttctaggtcattctaatgctcactacagatctggatggagaagatgagaaagacaagggggccctagacaacctgctctcccagcttattgctgagttgggtatggataaaaaggtaaaatctgagaggcagactgtgtgagaaacaggattggctgagatcctttctcaggttcccattcgtttcat

SEQ ID NO: 16401 - DNA, 565 bp, Homo sapiens
  MAP TO AC017086.3; EXPRESSED IN PLACENTA, SIGNAL = 0.47
ctctaggaagtggtgacggcaacagtggtggggcaatggtactgaggcttggaagtcagtgatgtttcctaagactgttgtctaaaaatcttttctaccaagggagtaaagggataacgagctgggatatttttgaaggatactcacaatttgcaacacaaataaaatctagtttaaaaatatgtgtgttttttcagctctaatgactgaaaatgttaaactaaatattttgcttaaacaagtaaagatgaaggggttagatgagcaaattagaatgcagaagctgcctctgctgccagttttccctagaagagaatggctaattcatatgcgatgtattcttgtctctccttgggagaaagaaagtcagccctgggaggagcccggctgttcagcattttgctgctggtcaggattgattccagatgtgggaggtaaatgctagaaagagtttggaaaatggagtggaaatgaaaaatccctcaggccatttgagtgctgatgacagatgaggtagatattttcaggtaactaatgaacttgctgggagcttggagagtgctta

SEQ ID NO: 16402 - DNA, 544 bp, Homo sapiens
  MAP TO AL135998.2; EXPRESSED IN PLACENTA, SIGNAL = 0.59
ctgctcttctgaccccagagcttctgcaactacttcctgaatccattcaaagaattgccatctatgaggttaaatccctaacccatgtccagggtatattccccttacatgcagcaatggccccccaccaaggtaggcccagatcaacatgcataaattccagtaaattctggatcagtcccactggggtgtatgaccccagccccagttcagcgaagctctgctctgcagcagtttggactacatctgcagtctctccagaagccacctcaggtactgctgtgggtgagggagttgcagcaacaacaggaggggcctgaacctgtgtgaaagaaagccttgtattatatttattcagtagcgaacacaaagcaagtgagatctttttataataaccagtactgggttctgttctctctacttcttgttcttccaggttagcctagtgtctgcagatttcaagcttaaaaaggacatctcatttttatcaatagttaggaagagaagttactttgagtaagaatccatgacttcccttcatgct

SEQ ID NO: 16403 - DNA, 595 bp, Homo sapiens
  MAP TO AL136089.8; EXPRESSED IN PLACENTA, SIGNAL = 0.59
gctgacttcgggtttactgctcaaggtaaacaaacagtgactgtgattaaaggaacctgacgtctttccctcagcctacattgcatcccagctccaggcctgggtgggccatgggtgagaagggcaggtgctaagcccgatggaagtccccccgctgaccaccagtcttgctaatgagcttgatctcctccaacacgatgtccctgctgacagccttgcacatgtcatacagggtgagggcggccactgcagcagaggtcagggcctccatctccaccccggtggggccccgagcccggcaagatgcctggatcttcacggcatggcgtgtgctgtccagctccagctgcacctggatgtggctcagggccacgtggtggcacagagggatcagctggctggtcaccttggctgcctggactccagccagctgggccaccactagggcatctcctttcttgagctggttctgctggacaagcttgaaggctaccggtcccaggaggaccacggctgaagccacagccacccgctctgtgtctggcttcctgcccacatctaccatagctgcccgtccttccgagtccacatgagt

SEQ ID NO: 16404 - DNA, 594 bp, Homo sapiens
  MAP TO AC010634.2; EXPRESSED IN PLACENTA, SIGNAL = 1.2
atttctgcccatcgaatcagaatcctaccttttaatagttttctgctcttctctgtcctctttctcatctgttgaacgcgaaatcctgcctcctctttctgggaagtatttcctggtcttattctctcctttatccttcttagtctctgttctcatcttctcctctttgaagaggacaagaatttcctgtttaattggcctgttgttgctgtatcctttcaagtggttcccaaactagttgagttacaaaattctacataatctctacattaaactaaaaataattaggcctatacatttgtgctaaatttgatatgagcttacatttaattctaacagacaatttaggcatgaaatgaagactttttacattatgaacattttctgagcatacttcccctggcttcgtgtcctttggcattcccacgcctggcatgtgggctccagcattggatttgggcatcagagctccagggcacatctgggggacagggcagtgctctagggagctcactttaagaagaatcgctccagagggcagaaagaaggctctccagtaacatttgcttcacatcattcggagagaagcagagg

SEQ ID NO: 16405 - DNA, 544 bp, Homo sapiens
  MAP TO AC019250.3; EXPRESSED IN PLACENTA, SIGNAL = 0.46
aatcagtggccaatttacggtgtacatgtaacatgaacaaatacaaatctattttgttattaggatatggggattatccattactgtatcacaacccggctaaaattgactgatacaactcctttgaggattataaacacagtctttgaagctaatgcatgatgatatgaaaatcagtgttgatgatgtgacacgcagtgttttccaacaaagtaagaaagttcagtatgctgccaggcatcacagatgcgccacacgtgcatcgggtaccaagggtgttctgttcgtcaaagttctgtttgacaaaataaaacttttatcattttgaaaatgtcattagctacaggagttttcaaaaggggccaacaaaattaaactttaaaaatctgtttggtgtgtacataacacacaaaacaagagctgactgcactgaaagataccagggattcatagagttgtatgctgaaaggaaatggcatttctgtgagtttatttatgacctacttcaatatattggaagaaatgtcagcaatttggaggttgg

SEQ ID NO: 16406 - DNA, 582 bp, Homo sapiens
  MAP TO AC018421.3; EXPRESSED IN PLACENTA, SIGNAL = 0.47
cggttggatcccattatttgttgacactgtcttccttatgtgaatgcaaattctgctaatgtcaatgctaccatgtatggagccaccataatatggcaggcatcctggaagcagcatttgattctttacctcctggaatctttaacacaatcttatgaaatactcacgtgttcgcatgagatgtattagtcaagatgctaaacatgccacagctatcagtggcctggtcctcgtctgcacaccagggcttgctagtgacatgtctgtcacaagtggcattggagccagcttgacccactaaagtaggataagtcaaattcaatcctatttccacagaaaacttccccaaatacatggtagacacctatcgtgtctccatatgcatcctctccttcgggttaaacgtgcctaatccgtcatcattttgtgctcataataaaattttgcattttttcacctttttggaaactctcatatttctaatgtgtttgttttgttttcaagcattatgaccagaaccagatacgatacttcaggaatgacccaaagaatgaggaatagacacagccatcatgtcctcac

SEQ ID NO: 16407 - DNA, 510 bp, Homo sapiens
  MAP TO AC009234.3; EXPRESSED IN PLACENTA, SIGNAL = 0.47
caggggaaagaaactgaagcacagaaacatcaactatcttacctcaggtgatacaactaccaagtttaagggagccaagattggaatctgggagtgtctgattctaaagccattcatcttaactaatttaatgcaatgagttatctataaaaagttattgttattcctgtttaattcaaatttagaaacctaggctcacaaaaatacgtccatatttcaagggcaattcacttactatgaccttgattaaatgacctatgtcaacctaattgtcttatatccctagtactccacagagagcctggtacatagtccattgtcatgtactatatataaaactaaacactcagtcaccaatttttctgtgcacagaatatttactccacaaagataaaaatctcattttcctattattcaaaatcacatgcttcggaataagagtattattttcatttaaaagcaattaatttgttttaaatgtgtttcaagagtgatgattttcctggggaa

SEQ ID NO: 16408 - DNA, 578 bp, Homo sapiens
  MAP TO AC022015.2; EXPRESSED IN PLACENTA, SIGNAL = 0.94
tggcagtagctgtggagatggcagtggttacaatagtggggtgatggtgagggctgtagtgatgacggtggcggcagtggcagtgatatggtgatgatggtcatgagagaaatggtgatgatgttgggtggaggaggtggtggtggcgattgtggagatggtgatgttagcaatggtggtcgtgattgtagcagtgatgtggctgctgctggtggcatatggagtaaatgactgctaacgaaatcattccaaacccgagagttcatggcttcatgaagagctgtcaaatttatttagatgaacaaacaatcataagaagttcaaagacaaaccattttcagccaacatggcctctcctgagaaaggtgagaaacttaaactaattcattttttcctttaagaaattaacaaggcctacaaggaatttcccctttgcataccccaacccatgatggttttaagttttcctctgctaatcttgagaagagtttctgtaacactataattaggacttgctcctacacagcaaccattccctgctcatggtgagcaaaattagacacccctccagacaatgt

SEQ ID NO: 16409 - DNA, 506 bp, Homo sapiens
  MAP TO AC009410.3; EXPRESSED IN PLACENTA, SIGNAL = 0.46
gcatatttaggaaggctgcgatgtttaatattttccattaaatgaaagctcatgctcagaaaccttgctatttagatatttaatttattttattcacccactcattctgtgtaccaggtactgtgatggacttttgcatatatgatttctcatcttcaacattactctgcaaggttaattttattattttcattctacatatggtgaaatttaatctgagaagaagtaagtggcttcccaaagagaaacagcaagaatatggcagagttggccttcaaatgaagtacagtggggagggtgggatgagcagagggaaaggagatgtcttgggagaatgcttcttaacattagtgctggtaaggcaacaatttaacaagattagaggaaacatagcaacgaggcaagtgaaatatcagttatcagaccacaagttctctaaataatataatcaacaagcttctcctttgtagggggtagtttcccccaccaaacaaagccacactcct

SEQ ID NO: 16410 - DNA, 568 bp, Homo sapiens
  MAP TO AL136132.15; EXPRESSED IN PLACENTA, SIGNAL = 0.69
tggaactgtgctgaatttgccttataactgagccagaatgaagctaaactcaccttaagaaattcaacttcagctatcaccactaccagaagctccaatgagccctttacttgcaacatttgaagcactgaagggtgataaaaatatgcagcaagagaaaaacagtgcaaaaggcaatttccagggcactcacatagatctgattgttcccaaagcgcttctgaatctcatagagcaggctgccatcattgagctcgctgagcgttgccaggtcatcgtttggggcaggaggcattagcttgacctggggaagaaccgaaagtatgatcaattctaattgctttccaatcaactttcttcacagttggatgttccactttcaattacctgtcaaacatttgaagacaacctgagttaggaactgttattaagagatgaaatggttcaatgaaaaagaaaaaaaaaaaaaactctaaagccacagagcaatgtattcagatgagaatttttgtgctatactccccagtgtgcaggtgcacacaccctgtctgttagcccaggcattagg

SEQ ID NO: 16411 - DNA, 512 bp, Homo sapiens
  MAP TO AC019222.3; EXPRESSED IN PLACENTA, SIGNAL = 0.52
tgaacggaccaatcttgatgcattttcagtggggcatcctctctcttaataggcaatataacatgtagtcccgacgagttcacctgctccagtggccgctgcatctccaggaactttgtatgcaatggccaggatgactgcagcgatggcagtgatgagctggactgtgccccgccaacctgtggcgcccatgagttccagtgcagcacctcctcctgcatccccatcagctgggtatgcgacgatgatgcagactgctccgaccaatctgatgagtccctggagcagtgtggccgtcagccagtcatacacaccaagtgtccagccagcgaaatccagtgcggctctggcgagtgcatccataagaagtggcgatgtgatggggaccctgactgcaaggatggcagtgatgaggtcaactgtcgtaagtagctttctagcatggcatgttcagttctcttccctgtatcaactgggacaatttgctggcttcattccatggtgtttcctcc

SEQ ID NO: 16412 - DNA, 528 bp, Homo sapiens
  MAP TO AL161668.1; EXPRESSED IN PLACENTA, SIGNAL = 0.49
gctgaaactgtcgggagaagttctgcgaaggctgctccttgcggcgttgggactgagggtcacaggcacctatatttccgtttccggttcgcctccggagccatggcggcggcactgaagtgtctactgacattaggaagatggtgccccggccttggagtggctccccaggcccgggtgagtgcctacattccctgctgtcggagagactctggatctgcagagacatctccgcgcagaggaggagcgctcctggcagcccccgccctagcgattgccagcaactttcctttctgccaggaaatcaacctacctttctctgcctgcaggcgctcgccgccttagtacccggagtgacccaggtagataacaagtccggtttcctgcagaagaggcctcatcgccagcaccctggcatcctaaagctgccgcacgtgcggctgccacaggcactggctaacggtgcccagttattgctacttggtgagtaacggcgggaaagcgagaagaaacgggactggacctaca

SEQ ID NO: 16413 - DNA, 581 bp, Homo sapiens
  MAP TO AC022015.2; EXPRESSED IN PLACENTA, SIGNAL = 0.74
tattcctagggccccaaaagcacaaagctcaccataaaaagacacagatgccctgaaagaaatttctggaatctacaggccttctgctcaagcctaccttccttactctttgatatcagatagtggtaataaaatgggacatatttctgatatactgggaaaagtcatttcttcccctcttgaaaaatgttctcctcttttctcaccacagctgggagtttctaatatgaataaagtgccaggaatttggcagtaacagtatattcataaatacacatgaaatttggtggggtttaaagaaaaataaaatggaaagagcatattgtcaggtttaagcacagacctaccttgagatgaaaactgagtctgtttgtaatggttgttcatttgctttgcaaggatgcgtgccaggcactcagcctcatccagaggtgcaggcagagatccccggcacccacagctgggtaggagcagcaggggaggtgctggatctctgtcttcaggcccagaaacagaagctgcaggattcacacgagctaaaggctacactggccctggttgcacattttgcgtccacaaac

SEQ ID NO: 16414 - DNA, 572 bp, Homo sapiens
  MAP TO AP001417.1; EXPRESSED IN PLACENTA, SIGNAL = 0.53
aaagggctctggaagagaggaagccagggtgccgctgctgcgccccgttcctgcctggcttggacgtatctggaactgacctcattctttcactatggtggacagaattctaaagctgtctttctaagatgtcgtcccctggttatataatcaagcgctaatccaggtaatgctgtgaagggactttgcaacccaaattaaggaggctaatcacctgacctgaaaatatggcaattatcttgggttactgagtaggtccaatgtaatcacattagctcttaaaagcagaagaggaagccagagagatgcagcagaagggctggtgggactggaaacatgagaactttgtctgccattgctagttttgaagatgaagatggaggaagggaccaccgaggaatgtgggtgggctttagaagccgagaacgatgcccgcaaggaagcaagcaagggaatgcacccggaacgactttggaagcagatttattccccaaacctccaggaaggaacacagccccactaataccttgattttggcctatgagacccagagcagagaacaagctgaaccc

SEQ ID NO: 16415 - DNA, 593 bp, Homo sapiens; identical to SEQ ID NO: 12305
  MAP TO AC007226.2; EXPRESSED IN PLACENTA, SIGNAL = 1.6

SEQ ID NO: 16416 - DNA, 600 bp, Homo sapiens
  MAP TO AC010368.2; EXPRESSED IN PLACENTA, SIGNAL = 2.6
cagccatctcttcttgtgtctgtgttttaatagaagggcaagtctgaagaactactgagtgccttgggatgccaagactttcctcccacttctgactatgaggacttgctggtggagtatttagaagtagatgatagtgaggaccagcatctaatgtcagtccattcaaaagaacacccaagtcaaggtatgaaacccacatacctggatcctgacactgactcaggccgggggagctgtgacagcccttcccttttgtctgaaaagtgtgaggaaccccaggccaatccctccacattctatgatcctgaggtcattgagaagccagagaatcctgaaacaacccacacctgggacccccagtgcataagcatggaaggcaaaatcccctattttcatgctggtggatccaaatgttcaacatggcccttaccacagcccagccagcacaaccccagatcctcttaccacaatattactgatgtgtgtgagctggctgtgggccctgcaggtgcaccggccactctgttgaatgaagcaggtaaagatgctttaaaatcctctcaaaccattaagtctagagaagagggaaaggcaacc

SEQ ID NO: 16417 - DNA, 598 bp, Homo sapiens
  MAP TO AC010745.2; EXPRESSED IN PLACENTA, SIGNAL = 1.9
tcatctgccatattcccctgacctctcaccaatcaacaaccccttcttcaagcatcctaatgactttttgcaaataaaatgcttccacaaccagcagaatgcagaaaatgcttcccaagagttcatcgaatcctgaagcatgcatttttatgctacaggaaggaacaaacttatttattgtttgcaaaaacgtgttgattgtaatggttcctattttctttaataaagatgtgtttgagcctagttataatgatttaaaattcacagttcgaaactgcaattacttttgcaccaatgttgaaaaccttttttgaaacaaatgaaaaccacaacatagcatatcaaaatgtatgggatatagcaaaaataatcccaagagagaattttatagcaataaatggcaacataaaaaaagtggaaatatttcaagtaaataaaccgtcaacaatgcaccgaagggcctagcaaagcaagaagataccaaacccaaaattaatagaaggaacaacaacaacaaaaagatcagagcagaacttgaagaaatagagactataaaacaatctaaacgaaaccatcaacaaaacgaaaagctgccttc

SEQ ID NO: 16418 - DNA, 594 bp, Homo sapiens
  MAP TO AC010450.3; EXPRESSED IN PLACENTA, SIGNAL = 1.8
catgcttcatggagttgtggggagaattaaattgtgataaaatgcttaacaagatgtctagcatgtaacacatctattcaatcaaaatctctctattctttattcagttttcttataagatgtcttttcagccaagacttctttctttgaaaggccatctaagacctacctattcagatgtgtctatgacatgtataactggtaagttcttcatttacaaatatctgatattttcagtgggcagagtcaaaccacagacaagcaaatgggatgagaagaaagaggaaaggactctctgtgttaaaaccacggtggggaatggctgtctgaccttttccagattctgataaactgcccagggactgagcctgccaatatgtaggaattggaaagagtctgttcagtttgggacacatcttaccttatcctgtgtctggatcctagaaaggagcaggtatttgaaaatttcttcagacaataccgatgcattgtcgcctttgacaaccactgacctggatgaagagataaaaacatgcagaattactataactgacagtaatgatgctacaactaactgcaagaggagcacagaga

SEQ ID NO: 16419 - DNA, 553 bp, Homo sapiens
  MAP TO AC009028.3; EXPRESSED IN PLACENTA, SIGNAL = 2.2
cccaatttttgcccatacacatgtggtggacatttttcatgtgcaccaatatctggtccttttctgcttcctggttacaagaggttttattaataccttccctccctgccttcttggagttagctgtggccatgccactggatctgaccactgaaatgtacttggaagtagtggcatgcgacccttctcagccaaagtatacaattgccggtgttcaattctccacccctctttacgcatcccatcaaatgccgatgtctgagtcatctgtgtccctgggtgtctatgctcatcagaatcctgctgctgacctgcatgcagcatgtggcacaggcaagaattaaacccttgttgtttgacatcatgcagactttggaactacttgtcatcactacataatccagcctattctggccgatactcatagctatgagcagccttgtacatgcttctctctgcacctgtgatgacatttctccagtaatgaatgtctattgaaaagttaaaacattaaattgcttttaaagtaccttcttatccctccagcccctac

SEQ ID NO: 16420 - DNA, 552 bp, Homo sapiens
  MAP TO AL078590.27; EXPRESSED IN PLACENTA, SIGNAL = 1.4
atgctctttgggactgaagcaaatctgattttcaatgtgaaaataaaatagaaaactgttcttggagttatttctaaacagaactaacatcagaatcatctgaatcatcagaattatctatttcggaaaaatcagtttcatcaaatgaatctacggccaacaactgcttgagaatgatgttaacatcacgcgtaggaatgctacgttttctaggatttgacattttcagcaatcgagaattactatattttgtaaatagaagtaccactactacaaacagaatactataaaaagaatgatgtcttttgtttccaaagttgatatactagagcaatgccaaaataataataaaagtgagatatttcgtggcaaattatcttggggtaaatactgtagccacaagcacttgtggtgactattcttagggcaaacgggaaaagggttaagaacattgactccattatgaggatttacctccatgacctaatttaaacctaattacctccccaaagccctattttcaaatatcatcccattaggggtgagggtttt

SEQ ID NO: 16421 - DNA, 507 bp, Homo sapiens
  MAP TO AC011453.2; EXPRESSED IN PLACENTA, SIGNAL = 2.3
gcagcatgtcacatccaaagaagcttcccttgcaagttggtaaccttgagggcttcaataccacacagagttggtctaggtgatggctgaccatccaggcataataatttggggaacaattccaggatggaggttatgttgctagacttgtttgtccgggaaagtggtagacaggaagttcctgtctgcacacgtctcctggctccagccctttcccctgtccatctgtcctacagactccgcctcaggcatgttgtcttggaggacgtgcagaaaggcagccatgcactttctaggtttcgatgccgtcttagagtcactggtcaccaggtctgggtcaaacgggagtctctggctgtcaagactggactgggaggaatcacatcgcttcttcaccatcagctttatctgctttgccttttccgacttcagctttctctgcagggggtatcagtggggttgacaaagattgacatctttttgttatcctcatccctaatcttgcca

SEQ ID NO: 16422 - DNA, 578 bp, Homo sapiens
  MAP TO AL136130.7; EXPRESSED IN PLACENTA, SIGNAL = 1.5
gtgttgctcgtgacagttggggacctcctcagcgtcagtctcgacatggctgcaactagggggtcctcgggatcctcccagaatctcttcctcggcatctggctcatgataaggttttaggtgtcttgatggcatccaaatcggctgttgatttggtcctggagaagcacaagcataacctttaccccaagttattttacctatttcccaacgttttgttattggatctctccaccaaatcggttgttctgcttctgtctttgcatctggtttctgtagatactgttcaggtgctgataacatctggcctttggacaggctcaaaaaatttaaagttaataatgctagattcaattgcatctgtggggttccatattctctatttcccccttttgcaactgctgttttagaaaaagattcattctttccattatgacttgtccttgagaattgtatgggataccagtaatgtgtttaatattccacatagagaaaaatgtaactagagcttggctagtatagcctggggcattatctgttttaatagaagctggaatacccatcactgcaaaacactg

SEQ ID NO: 16423 - DNA, 597 bp, Homo sapiens
  MAP TO AC023154.3; EXPRESSED IN PLACENTA, SIGNAL =   2
ccctcttcacccttcacaacctccggtaatgatcattctgctcatgagatccacatttttagctttcacatatgagtgagaacatgtgacatttctctttctgtacctgaaccaccagtctttgaagggagtttaaacattgctgtgaagctaaagcatccttggaaatgtgccaacgtggaaccaactctatttactagaatttctctctaggagaatatagtataatatgtctggaaaaaatgttctgacattttctggggagtatttgagtaacaaggggtagtaaatatggtgacttacaaagtgcttccttttttgctaggcaggtatgcaagttgggggccagagcagagttgttggggacaataaaatggaagctgagctgctacgaatactccccattcttcctatttccctcaaatcactgtcagtgtctcctcacgtagcacagtctcctctgtatctaggtgtgcttgtgcgtctgagctctcaccacggagatgtaagcagaatttttgtataggactgctgggaaggctttataaaatgtagaggatgtgaatactttttttgcccttccttggttcctccttc

SEQ ID NO: 16424 - DNA, 595 bp, Homo sapiens
  MAP TO AC010289.2; EXPRESSED IN PLACENTA, SIGNAL = 1.5
agctttacctactgggtgcgatctatgctttccagacacaaactggacgccatcctgggcaggctgggctacacggccaccttggagtctgagttctcactggtccaggccatcagcaaagagaatgtcaagcagatggtgttcaagatcttcctggtgagggtctcatgtgaagccgttctcagaaccgcgggcacacggatgcttgagccgggcacagagaaactcgctaggacccacagcaggcacagctcagagaaaaggctggtgaagccctgcagctgcctcgagggggttcagccaggcccaggttccgggggaccacagcaaggtccctcagaaggggtggggtccgagacggccctggcagagggcactgctggccagagatctctgcccatggctctgagcccatctgaggtctcaacagcccccaacagcctccccagtggctctccagtcctctagggcccccagtgccatggcagcacatgcctggacagtgaggaggtcctgccttgcttcagtgaccctgtcttacactggatgccctggtttcccaaggacattttcctgagaagcctgaagggaaacc

SEQ ID NO: 16425 - DNA, 501 bp, Homo sapiens
  MAP TO AC009275.5; EXPRESSED IN PLACENTA, SIGNAL = 1.4
tcacccccagaaacatcttccttgaggctgaattgttctttttagtcttttctaatcttcaccaagtgacacaggagcatgagcctgtgggaagctcaccagggcctgtcaggagagccgagggggctgtaggcggtcaccacgatgcctttggactggcagtactggattaacttctcctgagtgagatatgggtggcactcaatctgcaaatgcaaaaacaagagctgatgggagcactgtggctacacgctgatgggacacagatgaagcttcctatgctaaagtccctccctaccccatacagaaaactatgtataacaaacaccctatttcccagataagctgtaacttcctacagttcccaggtagtatccttggtgttattattatcttattatagatgttctcatgggccctagaggcttttcttggctttagccacttatcaactatcacagttctgaggatctcatggctgcctctttgtcagaccccaaa

SEQ ID NO: 16426 - DNA, 591 bp, Homo sapiens
  MAP TO AC010653.3; EXPRESSED IN PLACENTA, SIGNAL = 1.7
gaatagctgcacaaaagggcagagcagcaatatactgaataaaacatccaatgcctgtatcattcctttgaaggctgtcagcaatacattttgaataacctgaaatgaagatcaaaagggaatagaattcatttatttatttattttacctgaggcggtaaatgaaaagaaactaaaatttagaattaggaaaggtctaaatttaggcaaacatcaatatcttgttcgtaagagctataaagaagttcaataatttcatctaagtcacaaagcatgaaactgagatataaaaatagagaccaaagcaacaaaaagagttaaagaaaaataaaaccaaatattccttcctctgacttatttccttctcagtcaccttctgcctgaccttccacacacacagctcctctgtattccagtcatgagcagcatgatggttctcttcaataatttcagtttgagagtggttcctccttcctgtggggattccctgggaattgttcatgtttctccctcttttctcaagcacattttaaagacaggaagaacgtgagagaactcaagatgggaagaagagaaagagagaggctgcgt

SEQ ID NO: 16427 - DNA, 585 bp, Homo sapiens
  MAP TO AL133371.2; EXPRESSED IN PLACENTA, SIGNAL = 1.7
tctcttctctgtggacacgcaggcggccccggtgactgagatggcatcgtctctaaagatctggggcacactcttggccctactttgcatcctatgcacactgcttgtacagagcaaagaagtttcttggagagaattcatgaaacagcactacttaagtccaagtcgagaattcagagagtacaaatgtgatgtcctcatgagagaaaatgaagctctgaaagacaagagctctcacatgtttatctatatctcatggtacaaaatcgagcatatatgcactagtgacaactggatggatcgcttccgaaatgcatatgtatgggtccagaatcctctcaaagtactcaagtgtcaccaggagaattccaaaaatagctacacagagagcaggagcttcaactacattgaattccattgtagcatggacgggtatgttgatagcatagaagacctaaagatggtagaacctatcggcaactagaaagtctatgcacatcctcaggtattggtagagtattcagtgctttctaagtagcagcccctgcctccatcaatagtcctaccactcccctcttgcattta

SEQ ID NO: 16428 - DNA, 548 bp, Homo sapiens
  MAP TO AL133304.2; EXPRESSED IN PLACENTA, SIGNAL = 1.4
aggctccacttctcatttgcgttctcttgctatttctaccatatctgcagtgacttcttccactgaagtcttgaactcctcaaagtcatccatgagagtttgaatcaatttcttccaaactcctgttaaagttgatattttgacctcctcccatgaatcacaaatgttaatgacatctagagggatgaatcctttccagaaggcttttaatttactttgcccagatccatcaagggaatcactatctatggcagccttatgaaatatatttcttaaataatatgatttgaaagttgaaattactcctggttccatgggctgcagaatggatatcgtgttaacaggcgtgaaaataacattgatttcctgtacatttccatcagagctcttgggtgaccaggtgcattatcaatgagcagtattactttgaatcaaatcattttgctgaacagaagttctcaacagtgggcttaaaatattcagtgaaccatgtctaaacagatgtactgtcatctaggccttgttgttccatttagagaacacgggca

SEQ ID NO: 16429 - DNA, 532 bp, Homo sapiens
  MAP TO AC006111.2; EXPRESSED IN PLACENTA, SIGNAL = 1.6
gccctttccaggaagttttccagcccctggtttaaaagagtacaaattacctctggttttctctctggaaaggtttggcgatggttcttgctggttacccgtctgggtgttttgtgctgtttcccggagcacaggtggatctggagcagaggcaagcacacccccctccccattcacagagtgggccggttcacttgcttgccatttggttaccctttgctttttagtcctaggggcctggctgccagacggaggtttcttctctgcagggccttgaagggttttggtcttggtagcagtttgtttggtccttttcaatttgcttcttatctgagtgccgtttgaggcagccttttgtgtcttcctttctcctgacacttccttgattccatgttttttcaccctttggaaaaagctagcgcagagttctttaaagtcctcatcagactcatccatcatctgaccagttttaaggctttcaggctggtcttcagaggagcgagggtcaatcccaggacaggcagacagatga

SEQ ID NO: 16430 - DNA, 598 bp, Homo sapiens
  MAP TO AL138827.2; EXPRESSED IN PLACENTA, SIGNAL =  64; EXPRESSED IN HELA, SIGNAL =  22
ctgtgacctaaaggggaaggaaaaaaaaacatattatagattagatgatagatagatagatagagacaaaattgaagaatattacataaaattgtttgcattctgctgaaataagtagatgcatactacatttgcacagtctcctttttaggaaatatttttagcacaagtaagctgtactttctcccaacctgccccttgtcacctctacccctattctcctcattctgaataaatccagtctatacccacaagacaattgactcttttaattaatgggtagaaatgtattccccacctgtacaaatgctcgacagaggctgggtcattagacacctttggcattaaattccatgggtgggctctatgaacatttctctgattgggctgttagaaagcttctggggatcttgaggttcttaccctgttatatgatttagctacacagcaagtggactctgaggtgacgttcttttggaccaacatcgtcttcttggaccttagtggagtgggatatgctctagagaagcagcagcccatgcactgaagtattggggcacccggctgggagaagaatgggttttcctgtagcgtgcat

SEQ ID NO: 16431 - DNA, 530 bp, Homo sapiens
  MAP TO AL159165.1; EXPRESSED IN PLACENTA, SIGNAL = 1.3
gtgcttcctgggttttgttgttgttgttgttactgttatcttggttttgttcgtttggatatacactctgttttaccctgcttctactttttggattcttctttgtagagatcatcataattttggactatatccttttgtgtcataaataagcaattgtataatgaccttcaaaaattcttactatatctaagttacaatggctataaaataaaataagacctgtttttacctagttttaaaagttttctttgtttttccatgacaatgactcaatttactagtagaatttacctcttctaacaaagtaacattaacattaagtaacattactttaaatggctaaagtataaaaggcagttctctgattttttttttttttaacaggtgatgcagaagatggggaagaatatgatgacccttttgctgggcctccagacactatttcattagcctcagaacgatatgataaagacgatgaagccccctctgatggtatgtgacattttcccacgtaactctgacactca

SEQ ID NO: 16432 - DNA, 598 bp, Homo sapiens
  MAP TO AL136384.2; EXPRESSED IN PLACENTA, SIGNAL = 1.7
tgaatccccataacactgggcaagtaaaaatgataatgatgtgacagaactgccaaaaagcaaatgtaattttggtctgaattaacagtctaatttctaggttcagaaagatgcttgtcctgttctattccacagtagtcaaccaacctgatgataatatattcagtttggggacttacacaaactaaagcatcttcaaaaacagtgatggtgaagggagctgaaagtatgtgacaatgagaaatggaaatatttagcttaaagaaagagacccgagagacataagatagctgtcttcaaatatctgttggactataaaacggaaatggaatttcatttgtacattatggctccaaggggtggaacaaagcctagtggatagaaacaacaggaatatcatttttttcttaatacaaaaatccaaatgagctgtatcatcactccaccaagactgctctccaacaccaattattttataattgtctaatttgttggatatttgtaaatccttaccttatttatttatgggaactattaccattgacaactttcttcatgaaactactgtacactccctccccaccttttcccagttttt

SEQ ID NO: 16433 - DNA, 587 bp, Homo sapiens
  MAP TO AL136527.7; EXPRESSED IN PLACENTA, SIGNAL = 1.6
gccttcaaaggcctaaaagcctcacagatactctcccaccccttgaacgtaggcagggctcagctctcagatcttcacttcacagataagaaagggaagccagcaggatctcagcactcctgtgcaggtctctcggagagctgcagagtgctcaggctcagaaacacccctgactctggacactggatccttggggaagatagagcacacaaagccacagctctgtcattacaggacagactctgaaaataatgattctccaaattgccttggtccatgaccttttttacaccctcatcctgttgctagaagggaaaaaagactaaaaaagcaccatctccttgaatcttcctccatggtatttatttccactgcctcacagaggagaatgcattaaaattaccacagcaatggaaaatgagaaacgactattgtttgatacaaattggaccagatatcttagaccattactaatgtgtctccttcataaacactgagtcaggaaatccacaaagaccaaactgacatcatagttcctttctggctaataatgactccttaactagacagaagtgaacagcacccaa

SEQ ID NO: 16434 - DNA, 587 bp, Homo sapiens
  MAP TO AL135752.2; EXPRESSED IN PLACENTA, SIGNAL = 1.6
taaattgcattgagtcccccattctttctactataccatgttaaatcttgaaagttaagtaaaaacactttaaatagaaaagtattacttagggaattagcataatctaacaagtaaaatcaactaatacaaattaacttactcttgggggccaatttttgaccacagctaaataaaatctctccttcagagatgggtttatctaaagtttcagtttcagtgacagtaacactcaatgtgctctccagtgttgatgaatcagaacctggcatctgtgagggggaaggggccttggtgccggcaggaaatggcataaagggaactggctctggaggtggaggctgagcagggaaatccatactctctggttcttcatccttagccacagacattacactaagaaaataaagacatatttggagcttgttaggtcactgaaggcctgtattcattttgatataaaaaacagactcgaagactatgtctcctttagcaaaatatttttttaaatctgcactactataattaacaagatttttaaaagttgttttcatgctttaatcataggccatcttgaaagctcttcc

SEQ ID NO: 16435 - DNA, 600 bp, Homo sapiens
  MAP TO Z97197.2; EXPRESSED IN PLACENTA, SIGNAL = 1.3
ccaccacatccccatttaactctcctatttggcctatgcagaagacagatggatcttggagaatgacagtggattactgtaagcttaactaagtgatgactccagttacagctgctgtacctgtaccagatgtggttccattgcttgaacaaattaacacgtctcttggtacctggtatgcagccattgatttggcaagtgcctttgtctccattcctgtccataaggcccacgagaagcaatttgccttcagctggcaaggccagcaatataccttcactgtcctgcctcaggggtatatcaactctctggctttgtgtcattatttggttggcagagatcttgatcgtttttcccttccacaagatatcatactggtccattacattgatgacattatgctgattggatccagtgagcgagaaatagcaaacacacacaacttgatgagacatttgcatgccaagggatgggaaataaatccaactaaaattcagggaccttctacctcagtaaaatttctaggggtccagtggtgtggggcccattgagatatctcttctaaggtgaaggataagttgctgcatttggaccctctta

SEQ ID NO: 16436 - DNA, 500 bp, Homo sapiens
  MAP TO AC018967.3; EXPRESSED IN PLACENTA, SIGNAL = 1.4; EXPRESSED IN HELA, SIGNAL = 1.7
ggtactgtttcttccgcagccaggattcatggtccaggagtcaaggggtggatgtggaagtggcatcactcaccatcacccctagtgacccactagcaagacttttgcttcctgttcccatggcattatgttctgctggcccagaggtcttagttccaaaggaaggaacactgccaccagaatacacaacaatgattccattcaactggaagttatgattgccacctggacactttgggctcctcctgcctctagggctaagaagagagttacagtgttgactggagtgattaacccagactatcaagatgaaatcagactattacttgcaacggaagtaaggatggatatgtctggaatacaggagatcccttagggcatctcttactattaccatgctctgtgattaaggtcaatgggcaactgcaacagcccaatccaggcaggactacaaatggcccagggccttcaagaataaaggtttgggtcactccagcagt

SEQ ID NO: 16437 - DNA, 538 bp, Homo sapiens
  MAP TO AC010311.5; EXPRESSED IN PLACENTA, SIGNAL = 1.9
gtgtatgtgtgttcagccgcagagacttgagccccccttttctgtttctttctccagggctgaagctgccctcgaggacctggtctccaccattcgagtctgaagattctcagaagcacaaccagagtgagtatgaggattcggccggcgaatgctgctcctgtccaaagacagactctcagatcctgaaggagctggaggagtcctcgtttaggaagacgtttgaggattacctgcacaacgtggttttcgtccccaggtcaggacttggcgctgggctctcttagtgggtgccaattggcttggtgttggtggaaggtcattacttagggaccgagaggtagtgggacccagagacggcagaagggtgggtggagtctgaatggagccctttcctgggtggaggaagagatcttgcagtttcgaaatttcgaggggaattttatcaggaagagcaaataatcgcacaaaaggggaaaaatggacaaaactcagcatttgcctttcttacctctcctgagctggtctccacgtgagt

SEQ ID NO: 16438 - DNA, 533 bp, Homo sapiens
  MAP TO AC019043.2; EXPRESSED IN PLACENTA, SIGNAL = 1.6
caggatgtgccaaagttgtgctcgggcacatcaggaggaaatcaggccccacaatgtcacctccaagcacctcctggggttgcctgtcctctctcctcttcctgctgagcccctgggtccaaggacctcccaccttcaaaaaagtaaaaacagcacagcccagacccaggggtaaaattcatgtcatcacttcttcctgggccagcacccaaatacctcctgagccacaggaacacgatgcctctgtggccctgacagccactgccgattgtcctgggaggggccttcagggaaccgcacaggaaggagggtgcagctcagcccgttttcaaatccagcaggatgttcatgacctccctgcagacactaatggacagaacgtcacagcagtctggtgagcgatgatgtcagtgcattattaaattcaaactggaggggaagttttgacactaatcaatgctttttatcccacccaagactggcatattcccgagacaaatctcagtggttactgaatagcttgcagacctggg

SEQ ID NO: 16439 - DNA, 500 bp, Homo sapiens
  MAP TO AC010487.4; EXPRESSED IN PLACENTA, SIGNAL = 2.7
aagttttatgcctactttagtcctggaacccacattgaggtatcatgaagaatgcagaacatctaaacaaaggggacagtgaaagtccagatgctacatcatgaagcttttcatttcaaaatcaatacagcttccattttagtcaagcaaggatgcaactcccaagagaaacaagagaaaatgcaaagatccacaagggaacatccccaggaaggaagttatcctcacccagggagaccaggttcctataattctccagcatcacgtctctgtatagagtcctctgagcagggtccaggcatttccactcctcctgagagaattctatggccacatccctgaatgtcaatagaccctgaaatgaaaacacattttaaccaaatggttatgagaggagatcttatctttacagaaaatgagaagaagagaggggaaagcatggatttaattgtagtgaatgttctgacaaatccgagtaagggattcttcaccacatgatg

SEQ ID NO: 16440 - DNA, 536 bp, Homo sapiens
  MAP TO AC011508.3; EXPRESSED IN PLACENTA, SIGNAL = 2.2
gcagctgtctccctcagttctgaccgttcctcactgctttgcccacctccaggcaatttctcagtccctgtgtacatcagaacctgccaccggccctcctgcaccaccgagggcaccaccagcccctggacagccatcgacctccagggctcctgctgtgaggggtacctctgcaacaggaaatccatgacccagcccttcaccagtgcttcagccaccacccctccccgagcactacaggtcctggccctgctcctcccagtcctcctgctggtggggctctcagcatagaccgcccctccaggatgctggggacagggctcacacacctcattcttgctgcttcagcccctatcacatagctcactggaaaatgatgttaaagtaagaattgcactcctgtccctctggccttccatctctcccgcccttgtgccccacaacctggccaacagtactggaagaaactggacacagtcaccagcatcccaggggagggcaaaacagccatgtcgtgccctgatgaagagcaattc

SEQ ID NO: 16441 - DNA, 575 bp, Homo sapiens
  MAP TO AL158845.1; EXPRESSED IN PLACENTA, SIGNAL = 1.7
ccaccgtcacacaaaagatgtcgaatattttcattgcttcagaaaaatttttctggccctttgaagtactctgtcttccaagttccaggagattaaaaatttgctttgtgtcatcgtaacatttttctcctctagaattccatatcaatggtatggaattccaaattcagatttggaatttcaaattcaatttcaattcaaatatggaatttgaaatcaaatttccatatctatggtaggttattttttatatctggaatctttcactcagcataattttttcaagatttatattgttgttacatacaattaatttttattgatgaataatattcctacctcataatttatacattcatctgctgatggaaattcaagttgtttacaatttttttttattataaataaaacttctatgaacaattgtgaacacatctttgtgcagacatatatctcttgagtacctcaaagtagaatcactgggatatagggtaagtgtatataaacttaaaatgattttttaaaacgtttttattttctttgagacagagtcttgctttgttacctgggttgga

SEQ ID NO: 16442 - DNA, 561 bp, Homo sapiens
  MAP TO AC017093.2; EXPRESSED IN PLACENTA, SIGNAL = 1.6
gtaggcaaagggggtctaggaggggtttttgttttatgttttaaaagagacacttgaacttattgagaggaaagttggaaacacaagctaaaagacagaagatgggatccacggcatgggtggatggagagatgttggaattgagagggaccatgtcctccactgtacctggaagcaaaaggatgaacacaaaagcaggaaagtttgtatagatctcatggccagaaattgaagttgtttccatgtaatggtttctattatttctgtgaagtaggaagttacattgtctccttaaagcgagcaagaaatccaaggtttgaagagaacagagagatttgaaacagagtgtagaaaaacaaaccagaggtagagtaggatttcagagcagtgcctgtggcccagcaggggaggaattggcctcatcagatcggttggtgatttcccgcagcagtgcccagcagcctgagcgctcaacctgagaagatgaacagtgagtcattcagatatgatgaaagagcacaggaaaaaggagctgatggtagagtcaaaccccaccacaac

SEQ ID NO: 16443 - DNA, 511 bp, Homo sapiens
  MAP TO AC017116.2; EXPRESSED IN PLACENTA, SIGNAL = 2.2
aatgggtgcttcgtaaatgctcacatcccttctctttctccgaagggaaggccgaagcctcccaggtaccccgcagaccccagagggcctgattgaggaagctgcgcccacaacatctgcagtacccccgggtcccccaaggtcttacctctcttctcggtggtgatgacggtggcctccagtggctccccccagccctgcctcgtcttggcggacagcctgaagatgtatgcggactccggtgccaggtcggtggctgtgaactgcctcactgtggcgccgacctccacggtggtgaaggtgtgggggctgctgctggccaggcggtaggcaatctggtaccctgcaggcaggtgacatgggagacagctgctgagccagtcacccacggcacagggaagccctgtgcccacaccctgtgctgacccctggaaggccatctgtctcttccccgtctctggaggtcactgcctgtgcactgaaagggtggtctcatggctgtgatgaatgg

SEQ ID NO: 16444 - DNA, 590 bp, Homo sapiens
  MAP TO AC013379.4; EXPRESSED IN PLACENTA, SIGNAL = 2.7
tgccctctaaacaatcccacaaattttgatatgtagtgttttcatgatcattcagttcaaagcattttctaatttccattatgatgtctgttttgatccatgacttatttagaagtatttttcttaattaccaaacatattgtgatttttggttatcttttgttattgatttctagcttagttgcactgcagtcagagaatatactctatattgattcaatcttgtgaaatgtgttgatatttgatgtcctagtatatggtgagttttggtaaatgtcctacgtgtgcttaaaaagaatgcatattctatggttgtcaaatgtaatgttctgtccattcagtcaagattactaattgttttgcttaaatctatgttctgatttttttgtctgcctcttttattagttataaacagaggcatgttaaaatctctcactatgattgtggattttccgtttttctttttagtactttcaacttttgtttcatacattttcaggattgttttatagctcagaatatgacctatcttagtgaatattccataggtgcttgaaaaaaatatatattctgctgttgttggatgatgg

SEQ ID NO: 16445 - DNA, 523 bp, Homo sapiens
  MAP TO AC010311.5; EXPRESSED IN PLACENTA, SIGNAL = 1.3
agtggtcattcctggcagtctgtattgtaatccatgttccccattgctgcaccctcctgcgctctgatctttcttcttaatcaagccttttattctccagtgtcacttttttaaaaaaaatgatggtgatggtgtcatcatacatgtcctactgtcgttccaggccatctcggaaacgcaggtcccttggcgatgttgggaatgtgacggtggccgtgcccacggtggcagctttccccaacacttcctcgaccagcgtgcccacgagtccggaggagcacaggccttttgagaaggtggtgaacaaggagtcgctggtcatctccggcttgcgacacttcacgggctatcgcatcgagctgcaggcttgcaaccaggacacccctgaggaacggtgcagtgtggcagcctacgtcagtgcgaggaccatgcctgaaggtagggctgctgctccggggtccgagtgtcatgggtgggacatcaaggctgaccaaggacagattctccaccctctaagcagtgc

SEQ ID NO: 16446 - DNA, 563 bp, Homo sapiens
  MAP TO AC016941.8; EXPRESSED IN PLACENTA, SIGNAL = 1.6
aagagtcagcgctacaaggctgaggaaggccttcaggcccaaggagaggcaccagggcttatggatgtgcagattcccacagctgaggagcagaaggctgcatcctcctcctctactctgatcatgggaacccttgaggaggtgactgattctgggtcaccaagtcctccccagagtcctgagggtgcctcctcttccctgactgtcaccgacagcactctgtggagccaatccgatgagggttccagcagcaatgaagaggaggggccaagcacctccccggacccagctcacctggagtccctgttccgggaagcacttgatgagaaagtggctgagttagttcgtttcctgctccgcaaatatcaaattaaggagccggtcacaaaggcagaaatgcttgagagtgtcatcaaaaattacaagaaccactttcctgatatcttcagcaaagcctctgagtgcatgcaggtgatctttggcattgatgtgaaggaagtggaccctgccggccactcctacatccttgtcacctgcctgggcctctcctatgatggcctgct

SEQ ID NO: 16447 - DNA, 571 bp, Homo sapiens
  MAP TO AC010368.2; EXPRESSED IN PLACENTA, SIGNAL = 2.4
gagactgaccaggatacgccctggctgctgccccaggagaaaaccccctttggctccgctaaacccttggattatgtggagattcacaaggtcaacaaagatggtgcattatcattgctaccaaaacagagagagaacagcggcaagcccaagaagcccgggactcctgagaacaataaggagtatgccaaggtgtccggggtcatggataacaacatcctggtgttggtgccagatccacatgctaaaaacgtggcttgctttgaagaatcagccaaagaggccccaccatcacttgaacagaatcaagctgagaaagccctggccaacttcactgcaacatcaagcaagtgcaggctccagctgggtggtttggattacctggatcccgcatgttttacacactcctttcactgatagcttgactaatggaatgattggttaaaatgtgatttttcttcaggtaacactacagagtacgtgaaatgctcaagaatgtagtcagactgacactactaaagctcccagctcctttcatgctccatttttaaccacttgcctctttctccag

SEQ ID NO: 16448 - DNA, 600 bp, Homo sapiens
  MAP TO AC019181.2; EXPRESSED IN PLACENTA, SIGNAL = 4.9
tcctttactgcatcacagacctgtatgtacatagaagatctattcctagtaccaatcttagaatgagctattcatcttattacatattagtaactgttactaattaccaactgttataggactacttcttactagtctacctagaaaagatgttaggtaagaggaaaaataaatggtacactgcctcatccaaaaaaacaaaatagaaaacaaaactacacaccttatctgtctcatccacgctcatggatttcactatacaagaagcaggcctctcctggatgtgtgcaaggtcttgggggacactctgagatgctggcatcgggggcagtggagcccgcctcttcttgggtgcatccgacggcagggtgttggaaatatatggtttggaaatggtattggaccttgtaaaagttgggcggtgcttatttactagaggggttgcaggggcacttgcagtctagtaaagaatgacaaagacaaaatctagtaatttcaagatattagtaaaaagcattagtaattaaaaataattgaagaatcttacaaaatgcaatataagaaaatacttacttggtctcgctttttcttactgcgttg

SEQ ID NO: 16449 - DNA, 595 bp, Homo sapiens
  MAP TO AL121716.16; EXPRESSED IN PLACENTA, SIGNAL = 1.3
tcaagtggcaaccctttagcctattacctatttcctcctcctgtcttttgtaacaattaaaacaattgtctttatatagtgaggcactgtcaatacaactagtatgtcagtattaaatcagctttactagtattaaatcagctttacttattagaacacaaacttcatagagtaggatcccaagttattacacttcaagtttatattaagtgaatacatattatgtcttcatgtcacatttaattttttgataatccacctgcttaactgagcatgatccttgctgaagggtggttcagtttgaagatccaactctgctttgcattgagaatataatgttctaaacacttcaatcaggacatcttctagaattacaggtcctaaaattaatattcaaattaaagacagtaattaatcagcatgagcaaatcatgcttatctgaaaattggcccaatgaaacaatgttttaaaaacaagtatttttaaaatagtatttcttcagaagctaagctaaattcacacttctttgagaaggtaatataagatattacataactgaacaaatatttaaagtgcaggttgacacaatagaaa

SEQ ID NO: 16450 - DNA, 597 bp, Homo sapiens
  MAP TO AP001207.1; EXPRESSED IN PLACENTA, SIGNAL = 1.5
atctggtttatgggccactgttagaaatgttgtatacattgtactagcaatgacctttgatctggtctcatctcttttgccatatgctgtgttttgtctctaaaacagtaaacattggttaatgttcatgtgaaatgctatgatgtgaaattggtcaaaagagcagaaatgtccaagtgagtggatctgaccgctgtttgttttctttcacagtggcacatttcagtacaccctggaagccaccaaatctctccgtcagaagcagggggagggccccatgacctacctcaacaaaggacagttctatgccataacactcagcgagaccggagacaacaaatgcttccgacaccccatcagcaaagtcagggtaggggccacatttctcagataaagtacaaaggaatccgatgaacggaatggctacctcacagccttgtggaatggcatggaaaaaaaataaaaccttcaacataaataattctagaacgaatgtcagagagttggggcaagagcacttattggctcgtagttgatcattgtaatcagtaaccagtaaaccccagggaagggacatggttggaacatgctgtctga

SEQ ID NO: 16451 - DNA, 579 bp, Homo sapiens
  MAP TO AF233439.1; EXPRESSED IN PLACENTA, SIGNAL = 1.9
atcttgtcatgctccaaggcccacgaaaagcctagagaaaacttttggtgggctcgttgttacattccagcctttgtataagggcactggctcaattagctttaatgtttaatgtagctgctcagtcagtgctgggacagttgtaagggaggcctacattagtgagacctggcccaccacaacagagcagcaagggaggcaggggagaaccaggtaaggtgaggctgagatggggggtcagtccccagccccatggtggacctctggtcctcctgcacctgggtgagctccagcgagagccaggtggctttcctctagagaagagcctgtaacccctcctgcaatgggagtctcctcctcctcttccaggtcttgtggaagatgaccagcggggtgatccccagtgggcaccagtgtatttgcctgtcaacaagggaacaagcgaatcaagtccctgtgtggttcacggagggggaagatcaggtttcacttgtgaagaatggcgggtgcttgcacttggagactatgccagtgaatgtggagggctgcaccctgactaggcagcaacagggtctttag

SEQ ID NO: 16452 - DNA, 592 bp, Homo sapiens
  MAP TO AL137862.1; EXPRESSED IN PLACENTA, SIGNAL = 1.5
ttggttttccattgtgcaagcagggcttttagagtacctggaacatagcagatattcaataactatttatttactgaatgaacaatgatggttaaaaaaaaaacacacactctaaggtctgagtgtgctgagaacagcaacttcctacgtgatgtacaacgatgtgcgaatatgataatgattacaattccataagaactgccataactttttttttttacatcatcctttgaataaatatatactcaccgtagtgtcccgggtatgtgttccttcttgacagggatggaaatctgtggttctggtgaggggcgaggctctgaaggttttgaaactggtggtggaggacctacgtctttgggaatttcaacatgtttccaatcttctccttcttctactatcaaaccaattagtgaacctagccgtatatttttacttccttcttcaacctatatttaaaaaagaagtaactgtagagaagtaaaactccatgactgcattaagtagtttgttcttttgttgggtaattctccccttaagatatcttaatttgagctaaaagctgcttccaagacagtttgcctctgccttc

SEQ ID NO: 16453 - DNA, 573 bp, Homo sapiens
  MAP TO AC008920.4; EXPRESSED IN PLACENTA, SIGNAL = 5.7
agttgtctttttgtggcttgcttatttcacttagcacaatgtcctcaaggttcatccatgttgtagaatgtcttggaattttcttccttgtttctggctgaacagtattccatccacacacacgatggaacactgttcagcctgaaacaaggaagatatatatatatatctatatatatatacacacacacacacacatacatatagatagctatatatgtacacacacgatatatatctatatgtatacacatacataatcgtgcaagcatatatatggaaggtgcactgttgtgctcaaaatgtggggtgtgtatatatagatatatacatatctatatatacacattcaaaagactttcaaatctattttctagaaaggattgcgttatcttcatcctaagtaatgtgtaagtactatttgcagtcattgaggataatcctctttggtggtaaataggtgaactgattttctttttcttagatgtttgagttttaacacttaatatctaaacttgcttttgaataccttgaatgaagaaactgataggtccacacataccgatgatgaca

SEQ ID NO: 16454 - DNA, 538 bp, Homo sapiens; identical to SEQ ID NO: 16211
  MAP TO AC008850.4; EXPRESSED IN PLACENTA, SIGNAL = 2.5

SEQ ID NO: 16455 - DNA, 576 bp, Homo sapiens
  MAP TO AC024167.1; EXPRESSED IN PLACENTA, SIGNAL = 1.4
aacctgcttttctgtgtcccttgagatcttaagtcttctacttactagattatgagaaaaactcccaaatttccctccaaccataacctcacttccaaactccagtcctatatttccaaatgcctgctggatattttcaccctgaaaatcccaacatcaccgaaggagcaagaggaagaggtggtttccaggatgcagagtgaactgtggctgtacaagaggagagagaacgtccttttgcagaggaacgaagcccctgcctattgacccagcagggagggaaccaggaggagaagtactccagcctctcttttcccaccctcttctaatcattcaaatggaaactcaccccactcccaaaatgagctcctgccattgctggcccttatcttgttttgagaactgctatcatcccatcactcaggctcaaccttgaaattatttgtaacacctccctcccctgtctgcacatctagtcaactgcagtatccaatagatgcctctctagttatatttccctagtgtcttttaaatatggcacttcttctttgttcctgtcaacaccacccgaattct

SEQ ID NO: 16456 - DNA, 503 bp, Homo sapiens
  MAP TO AL133413.5; EXPRESSED IN PLACENTA, SIGNAL = 1.3
aacattttggctcccacaacttaatatttatatagaaaaatctgacccctatgaatgcggattcgacccaataacttccgcccacctccccttttccataaaattcttcctagtagccatcatgttcctcttgttcgacttagagatcactctactactaccgctgccatgagcccttcaaacaaccaacctgacactaataatcagcacagcccttatattagttaccattttaatcctaggttcatttattatgtgccagataatgtgctagttattaaaaatacgaagagaataaggtagctattttcaaatctgcttttggattagcacctaaatatttccctagaaagttacccaagtctactgatttatttaaggttcagattccttacaaattacactttctacttttattaatgagtaggtaagatcttcattaccttctaattagccacatttattctcttttctgttcatattgatgagcaatggagccatta

SEQ ID NO: 16457 - DNA, 594 bp, Homo sapiens
  MAP TO AL158072.2; EXPRESSED IN PLACENTA, SIGNAL = 5.5
tgagtctgtgtgtctttaaaggtgacagtagtctcttgtaagcagcatatagttaggtcttatttttcatccattctaccaatctatgtctttttataaaacattattattattgttattattaattttagagccagtatctcactatattgctggggctggtcttggactcctatgttcaagtgatcctcctgctttggcctcccaaaatactggattataggtgggagccactgttcctggtcaatctatgtctttttattgaagaatttaatccatttataatcaaggtaattactgataggtaaatatttactactgccattttaataattgttttctggttgttctgtaacttatttgttcctttctacctctcttgctatctttctttgtgattattttctctagcagtattttttgattctttactttttattcatggtttatctagtataggtgtttgtttgccattattgtgaggtttatgtaaaacatctcataggtataatatgctcttttaagctgataacttaatttttaatcacatataaaaactctacacttttattacaccccctatgcatacatttt

SEQ ID NO: 16458 - DNA, 522 bp, Homo sapiens
  MAP TO AL157789.1; EXPRESSED IN PLACENTA, SIGNAL =  11
tgttgaaaagacgaaaggggtataggaggccaactaccacctcaatcaaaactacatttagccttatttacttcacatttttggactcctggtacagatggtaagactccagcagaaagacattggcaagtgttagaggaaaagaggaaagtttatctgaaagcattatggaaatccctggaaggacaatggaaaggtcgggtggatttactgacgtggagaagagggtatgcttgtgttttcacaggagatggacaagccgtgtgggtgccctcaaggtgtgtgcaaccatggaatgggagactggaggaacccagggtggccaaccatgggtccggtccctctggtgtgagccatgagccagctgagcctgagtgcgaagacggagagaaggccgaccacagtcatgacatcaacccccataacctggggacaactcaagaaaaccacacaggaggctgagaaactactggagcaccagggacagtctgtaaagttggatggaccatcaatgggaaaatg

SEQ ID NO: 16459 - DNA, 565 bp, Homo sapiens
  MAP TO AC011609.9; EXPRESSED IN PLACENTA, SIGNAL = 1.8
ttcaaaaggccattcattccaccgttctatcaatccagctacttcaggatgatggggaacatggtaagaccagtgaattccatgagcatgagcccactgccgcacttctttagccataaggtgagtgccttggtcagaggcaatgctgtgtggaataccatgatggtggatgaggaattccatgagtccatggatggtagtcttggtagaagcatggcatgcgggataggcaaactcatatctggaataagtgtctattccagtgaggacaaacctctgccatttctatgatggaagaggtccaatataatcaacctgccgccaagtagctggctgatcaccccaaggaatggtgccatatcgagggctcagtattggtctctgctgctggaaaatttggcactcagcagtggtcatagataggtcacccttggtgagtggaagtccatgttgctgagtccatgagtaaccgctatctctgccaccatggccactttgtccatggacccactgggcaatgacaagggtggctggggaaagaggctgagtggtctccatggaatgg

SEQ ID NO: 16460 - DNA, 518 bp, Homo sapiens
  MAP TO AL109985.2; EXPRESSED IN PLACENTA, SIGNAL = 1.6
tccatcttcatctccatccctgtccctgtatccatctccatctgcacgtccatctccatctccatttccatctctatctgctctccatctccgtctccatctgcatctgcatctgcatctccatctccatctgcatctccatctgcatctgcatctctatctgcatctccgtctccatctgtaactccatctgcatctccatctgcatctccatctccatctccatctccatctgcatcatctccatctccatctccttctgcatttgcatctgcatctgcatctccatctgcatctccatctccatctctatctgcatctccatctccatctccatctgcatctgcatctccatctccatcagcatccccatctccatttccatccccatccctgtatccatctccatctgcacctccatttccatatctccatctccatatctccatctccatttccattttcatgtccatcatgtcctgttagtcctgtttttctggagagccctgacaaattca

SEQ ID NO: 16461 - DNA, 566 bp, Homo sapiens
  MAP TO AL139348.3; EXPRESSED IN PLACENTA, SIGNAL = 2.4
ctcaggctactgatgagcccaccaagggcattctttctctctgttacagtggttttgattccttgcatttacgtttttatagtgtctttgagtttttcgtggtttttatatctgtgggtgccagaggtgtcaagtttctgaaatgtcctcagttttgtctctactggtggcttggtcttccctttggacttgtgcttagaaagaatctgcatcttgcagctctttcagctgtaattctcttatatcggatgcctggtacttgtaggaagttgagaagcattctaaaatcttatgattaagcttttatgctgaaactagcttctgaagtccattgacgattaattcttgaagatcgagctagctttgcattcctacaattaaaccaaacttagtcatgctgtattttaaatacacacacacctacacacaaatatccccttcatgtgcaccactctgggactggtctagcatcctgtctatgctagttgtttatagcacagatgaattatttgctatgtttctttggatgttggctgcacaggtgctgcttgagggcaagtcagaga

SEQ ID NO: 16462 - DNA, 559 bp, Homo sapiens
  MAP TO AL138831.2; EXPRESSED IN PLACENTA, SIGNAL = 1.5
cacatctgcgtatgttgcagctagtgcttttgaatacattctcaatcatatattttctcctttattttgatttaagacttgatttctgcaatttgaattgcttcataagcctttctgtttttcagatgcctatactctgtaactctattttcctagccttatatcacaaattcactttaaattttggttaaagtctcagtgtcagaacttactttctggtgccaggaaaggtgtaacttgaagtccctttctggtcgtcagacccctcccacctcatttgttgtgaacagaacactttctttagaatgctttccttaaaaaacttggagctaatcttctctctgtgaacattactgaacaccttgccttctggaagccagctgatcttgtcacacccaccatggcgagggggaagaagaaggtattcaggagacacagcaaccctcttaggaacagaaaaaggaattgcatttacctaaaagtcatgaataaaagatcagcctaactagaaaaacaacccagagtcatgcagctgctgcgctgcgggatcaattttagt

SEQ ID NO: 16463 - DNA, 599 bp, Homo sapiens
  MAP TO AL133415.12; EXPRESSED IN PLACENTA, SIGNAL = 1.3
taatggcaaccccataaaggctaatgaggttgttttcgtaatgttgactggacattgttaatttctcttatttttaatgcaacttttgacaatttgtgtatttttatgtaatgccaggtactgatggagttccccaaaattgaatctgtacatccacaaaaatatgcaatggatgtagaaaataaaattcaagaaaagaacgttgaaccaaatattagctttgatggcagcatacagtgttctggaaaagatgccattctttttaagcttgaaactgcagaagaaattcacaggaaaaatcaacaagatagtgatctctctgtgaaaatgctaaaagattttcttgaagatgacactgacgtgaaccagtatcttttaccaccaaagtcattgctgcgatatgctcttctgttagacattgttcagcccacttgtagaaggtccgtgtgctttaccaaagggtaggttttaaagatctattgatcctgtatccaaaataaccaggttttttaaagctattgtttctttaagttcttctaaaaacaaggagcattttataaaatgtttttgctagaatgaggtattttcccttaattgcc

SEQ ID NO: 16464 - DNA, 567 bp, Homo sapiens
  MAP TO AL132838.1; EXPRESSED IN PLACENTA, SIGNAL = 1.7
cgagttatcagctggcattgatgaactggtctgtaagttgttgggttacatcataaaatgggatgtttcacatctcaggcacagacgacttggaggttgctctcagagggcagactttttgtagaggaagtccggcttgcttggtgacctccttcctctgcttattgaatcttccctttccaaatctgtatttctctgagctccatggcccagggactcactgtctgccagtcttctaccggatctctcttcgggagcttcagagctacatgcagaaagtgaaggtctgttaggagtcagcccaaaagtcaagtcagtttctactgcagttcgtcccctgacatgggctggaccggtactagcattttctggggctgccaaaggaaagtctgaccgctggggaggttgctcaacgacatccaggtgtatcggctcattcttttgtctgtgtagatgcccgtcaggggaaagtggatattctctcctagcttcttcctgttttttaggagacgtctgaccaggtaggtaggctgactttaagccacttggtgatgccttattgtggct

SEQ ID NO: 16465 - DNA, 536 bp, Homo sapiens
  MAP TO AL158148.1; EXPRESSED IN PLACENTA, SIGNAL = 2.1
agtttcaatccaaggggtcccctttagctcatctccaagatgggtaaacgtagccaccattcagaaagcccagaaattcttgttcccacatcttagacccctgagcaacacaaggagaaaatgcagctgcttacctattaatatctactgagggacaatcagcaaagcctcaaaggagtcgtctcaggtagggtacttggcctgtggcaggagagacagaggcacaaacccacccacccatcagcttccggtggctgatcggggcccagggagggaagcaggtgaaacagcagggtgggggtgacttggcagtcatgcatctcctccccgactctgaggcctggcaggaggaggccacaccagcctcacctgccctgacccccgccccccaccctgtgaccctgtggctatggccgctggtcgcccttgtccccaaaatcaccatgcctgtggccacgtccctcatcttctccaaaagcatcattaagaacaagtgattttggatgatggatttttgatttacaaacggcgcattt

SEQ ID NO: 16466 - DNA, 592 bp, Homo sapiens
  MAP TO AL109658.5; EXPRESSED IN PLACENTA, SIGNAL = 2.5
ttttgagaatgcaaacgcagattgtaaacgtgcactggcacctgtgaggtgtacaaaaaacttttctcagagcttgtcaggatgtaggaactgagcttcatgggtcttcaatgttagcgcaagcaatggctaatctagcagttgacaaatctaaaaggagccaaggattaagccctaaagtaggaaaatgttataattgtggaaaaactggacattttaaaaaggaatgctgccagatctcaggacagaaaggatcttataatgcagtacccctccctccatagtggaaaacatgccaggactctcctcgctgtaacaaaggaaatcactggggtaatcagtgccgctcaagatttcatcagaatggcatcccccactgtcgggaaacgagaagggggcctggacctgggtccctcaaacaatgagggcattcccagttcagaccacaaccccatttcaggggcgggtcccaggagaaacattgattccctcattccaggaacacccagaagtgcaggattagatctcccagtcagagaacaggtaatgttagttggtggagacaaacctatcaaaattcccactggcatct

SEQ ID NO: 16467 - DNA, 571 bp, Homo sapiens
  MAP TO AP001208.1; EXPRESSED IN PLACENTA, SIGNAL = 1.7
acctgcgtcttcagtcttgcttttttttttttttttttctccaaggtcttcagcactgtgacccagtcttgctcagattctgacgtctttctctttggtgtgtgggaaggtctgtggttgagtcaaggtcagagcttctttgccttgtttctaggccattcggagaaactacaccttaaggtaagggagttctccacagggaccagtcacctccctggagttatgccccggggtttgagtccctgcagagatgcatgacttgaaaagagtagctgcctgagacagaatgtgggtgttcctgttctcccatccaggtggtttcccacccagttatgtcattgccaaagacacattttttatgtattaactgtaactcatttgccatttgtactttacatgtgtgcttatccaaatagtctgtttttctaattataatttaagtttttaaaattctggaaccaaattatatacctctataaacacccgggccccggcataaagtcttgcattcagtagattctcaatcaatgattaactgaagttaattatatgaggcacttcgaaatgagga

SEQ ID NO: 16468 - DNA, 589 bp, Homo sapiens
  MAP TO AC020749.2; EXPRESSED IN PLACENTA, SIGNAL = 1.6
ttgctacctggaggagtacgtcaaaataatcttcctaactctataaccaaatagatataatggttttctggaatatttctatgaatcaaatcatgtgttagaaaatatctacattaaaaggacataaatgacaccattaagaacaataaagatactagggtatattaattttaacatccatctccttttagagtttgtaaactaaatccgcaaatacataccagatctgtctttggaggatctggacactcagcagagaaataaggtgccgaacttctgcctccactgctgtcagaagatggctttggaggttgagcatgctgtctgtaagtagcacttttaggagtccaacaaaacaggttgatagattctctcacacagcgttcaatgtcaatttctagatagaaatgttttaaaaaagcaaatgtatagaatttagattgctcttttaatgtaataaacaccatctctcctaagtgaatatatctaaatatggctaagatgataagttattagaaaaaatgtcagtaaaaaaaacaatgtatatattaatcagcatatttatgactggattgatggaaatatttgg

SEQ ID NO: 16469 - DNA, 543 bp, Homo sapiens
  MAP TO AC009680.5; EXPRESSED IN PLACENTA, SIGNAL = 1.8
gtaggcaaaaagcagccttggaagtaagcacaggcagtagccactgaaacactggggtagggtgctagaggctggtggccttcccttttgtggctctgcctctctcatttcattatacccatgggtctgagaacagcttgcccttctgattccatgctcatcaagctgctttctgacacaaatatgggatcctgtctggcatgtctttagggagaccttgcttaaaacttgagggagttgaggagcaactcagcagctaggtctctccttataaattaataaactgacagccgggttagcgatttgctccccatgtagtctgcctacaggagcaaaatgcgctgggtgggaagatgagccgcccatcttcagctgtttcacttctcattctaaatggaaacattggcattctgatctcacacattagttgtaagagtttcattaatatgagtccagttctggaggacagatgtgctctgaagctgctgacaagtgtggtttctgggcccacggggctttgggccagaccacagacagtgggaa

SEQ ID NO: 16470 - DNA, 586 bp, Homo sapiens
  MAP TO AL157885.2; EXPRESSED IN PLACENTA, SIGNAL =  32
tcagggaggtctgtgaggaccacatggacaaacacatgttcctcaggcgccagatgtctgtgagggtcaaatggatatatatgtgcccctgagggagatatctgtgaaaatcacacggacatgtgtgctccccggggagatctctgcaaggatcacatggacacatatgccctcagggatcaaatctctgagaatcatgtggacatagatgtattatgtcccaggaagatctctgtggatctcatggacatgtgctcctcagggagatctctgtggggatcccatggacatacatgttcttaggaatcagatctctgaggatctcatggacatacatgtacttcttaggaatcagatctctgaggatctcatggatatacatgttctccttaggaatcagatctctgaggatctcatggacatacatgttctccttaggaatcagatctctcaggatctcatggacacatatgcagaaagtcagatataggagctcaagttccttctgttccctgtgcctcacagcaatgtctgattcctccttttccagggacactagagcagcgccattcctcagaatctccca

SEQ ID NO: 16471 - DNA, 518 bp, Homo sapiens
  MAP TO AL136298.1; EXPRESSED IN PLACENTA, SIGNAL = 1.6
tcctgtcctgctcatgtctgtctagctatctactttaacatttcctccctaaagagtcaaagacccaattctttgggagaatggataaaggtcagtcttctgtaactgctttctgctgacagaggggcactgatggttgttctgtgggttttggtctcttgttagttgtcagggcagggtagctctatgggttggtgaaagtggtatacagccaggtctaagggatacaggcaggattttgcctctgtcatgccactgatgggcagtctaggactcttctgtagaaagatgacttgaaaattgagaggacggtatccctcactgaggatcatctggagcttgatggcctgaacatgagaggagataaatcgggttattagatttaaaagacatggaccaaaaaggagcaaaagtaggagactaacaagtaggcctaaaaagggaagaacccagttgaaccatttctagtttccttcccaatttaacgaaccctgagaggcttgttcccgtaaattgga

SEQ ID NO: 16472 - DNA, 543 bp, Homo sapiens
  MAP TO AC011497.3; EXPRESSED IN PLACENTA, SIGNAL = 2.1
gtcctcgtcaggctcatctcctatgacctgcgtgaaggacaggtagggttccagcctcagccagggacagggacagagccgaggagcgtgggcagcccccaccttggcatccccatggaggggtgcagccctggccagctctccccaacctcacacaccgtctccctcctcacccccaggacagtgaggagctcagcagcctgataaagtccaacggccaacggagcctggagctgtggccgcgcccccagcaggcaccccgctcgcggtccctgatagtgcacttccacggcggtggctttgtggcccagacctccagatcccacgagccctacctcaagagctgggcccaggagctgggcgcccccatcatctccatcgactactccctggcccctgaggcccccttcccccgtgcgctggaggagtgcttcttcgcctactgctgggccatcaagcactgcgccctccttggtgagcctcaggcccccacagccacctgcgcctgctcccatcccacccagcttgctttaagctcctcca

SEQ ID NO: 16473 - DNA, 523 bp, Homo sapiens
  MAP TO AC010093.2; EXPRESSED IN PLACENTA, SIGNAL = 1.4
gttttccccagtcctaaggcccaagcaacattaattcatttgcagtagcacagactataggtaggcaaattgtacaaaaggtcaaatctctgcacttggcattaccttcaacagagatcccttaaaaatatcgatagtttctgaattatctctattatctattatatagagatgaggtataagacatcttgtttgtcctcaagcatcagacagaggaagcacataatgtttttaagaagaaaaaactactcagtgatacttttaaaagcatagtagggcagactttattcaggaccatcttaacacatatagggaccaatgcagtaggattttgcagttagggaaagagttgattgagctcaactccaaataccgcatggggaagtgggaatttatagccaaggaacagggtaggtatcggtgcatgaaaaattactaagaggcaacatcaggggtaggaaggcaattcttgttaaagacaggtcagggtgaccagatgtcacctggaagatggtggaggatg

SEQ ID NO: 16474 - DNA, 569 bp, Homo sapiens
  MAP TO AC018760.4; EXPRESSED IN PLACENTA, SIGNAL = 1.6
ctcaacgccaccttcctaaggaagccatcgctggctcggattctcccgtttccaggttggcctggccctaccttagggtcccagcctctcagggtggctgcctggcccagggtgcccctcacagcccccctgtctttcacctcttgggtaatgggctgctcgtcttctctggtcacttgcagccccaggaacgagaccttccatggctctgtcagaaccagatgctgacctgtgggagagtcaacagctgccatctgagatccagggaagacaagcatgattgggcctccccagaagttgctgtgccctgttctcaacagggcccccaaagccagagtggggcttctcaccttcttctctgcaaggccaaggtcactctcaacagaagaactgtcctggtgccttagctcttccatgtctctgcccaacgttcatgagcatcaacttgaatgcctccagagacagggtgatcatcacctctctggcaaatcattctcttgctggacagtgagtccaggtctaccccctaaatttgcctttcctctgtccctccaagaatgcctggctag

SEQ ID NO: 16475 - DNA, 546 bp, Homo sapiens
  MAP TO AC011497.3; EXPRESSED IN PLACENTA, SIGNAL = 1.8
ctgcctagggcctgtaactgaatggggctcaggaacagtctgtcaagctgcacttgatcccaaaaccactgatttggaaccatgttgtcagtcctgcccgagcctggctacctcatcccagccctgacctccacaaggtgtagggccctcggcccaccactagcttctgcagccgcacctggtacttgtagcagtctcgacggtcactgggggagctgccctggcatgtgcccgtctctgtgttattctgacatggacagcccgtcccatcctgctcgttacatgtgtccgcgtggccattacactggcatctggggaagaagttgagggttacggagcccccatggcctgcagtggtccaggatggacaccccatatgtgagctcaactctgtgcaacaggccagaagaggaaactgaggttcacagaggtcaagctgtttgcccaaggccacaaagcagttaaattaccattgggattagaacccgagttgcacagactccagcactcactgaacactcagaaagaaggagatggaaaggggag

SEQ ID NO: 16476 - DNA, 549 bp, Homo sapiens; identical to SEQ ID NO: 6699
  MAP TO AC022212.2; EXPRESSED IN PLACENTA, SIGNAL = 1.4

SEQ ID NO: 16477 - DNA, 586 bp, Homo sapiens
  MAP TO AC019181.2; EXPRESSED IN PLACENTA, SIGNAL = 2.7
tgggtttgtggaattcatagcactgatattaaaacattgatagaaaatttttaacaccattttagcagtctttttttttaacaggtaactaaactgagtgataaatgaagtgttttgtcaaagaacaaacatcaagacgtatatcacagagactttcaatggtggaataagaaggggaggtcctgatatttcatttactccagcgtacctgccatgaacagtagtagatttgataatatccccaggtaggaccactgagagttcaacgtctttatctatcatgttttctttctgttccatgatgaaagcagtggattctacagaatcagcagctgaagagacatcagtatatttggtctcagctggaggaagtggtgccttggcttttggttttctcctaaaatataaagaaaacacaaaaaatacaaaatattttatttttaaggtaactttttaatatgatgtatttttataaatatgatctagtagtggtttttcacatctagaaaaaatgttctacaatgttaactgttagtgttggatggtcgaattaggattttgttttccttttccagtcagcattttg

SEQ ID NO: 16478 - DNA, 599 bp, Homo sapiens
  MAP TO AC011455.3; EXPRESSED IN PLACENTA, SIGNAL = 1.6
caagaaacagagccagaggctgctcagagacatgatccaggttagctgggcggggccctgggcctctgaaggggagggagctgctgcccctgttctaggcgaccgaatgccctcctcacttccagcccccaggaaccctgcgcctcacggggtctcctgggtgaaaggcccgctcagcccggaagtggaccatcctgggccggctctcgccagcctactggaagaggaggaggaagaccttgaaggaaaggaggaaggaagggaggacgaccctgaagaggaaggccctgaggacgtgctcaccattcacgtccagtctctggtcagggcccggagcagctacgtggccaggcagtaccgaagccttcgggtgcgcatcgcctcagattctgggggtccccacgggtctggggacccggccacggagctgcttcaggatgtgcggcacctccttactgacctccaggatcacctggcaaaggactcctacatcagggctgtctttggaagcaggggtcctgggctccccaagaaggacgaggatccaggtaatgggaggactggaagggagcccccacgggttcaagtgtgcaacttcg

SEQ ID NO: 16479 - DNA, 530 bp, Homo sapiens
  MAP TO AC023009.3; EXPRESSED IN PLACENTA, SIGNAL =   2
gccaccattaaaacccattggtccttctttgccatgaaaatcacatcttttccatggcatttcttttacaacagcaaaagaactgtttggaaggtttgacacattttctccagtgagacttcaatgaatattaaatttccagcacattctttacctaagaagcaggacagcttatccccaattgactctttgttccacttgccccttacctttgctgtgttcctggtggcttccaggctaatgtgggaggggtagggaaacttggagaaaagtaaagcagaccctgtctcaagtcttgatgccaggcctgtgtgtgttttctcctactagtcaagaaagaggcggtgctgatccaagccggcgagtacatgggtcagctgctggaacaagcgtccctgcacttctttgtcacagctcgcatcaatgagaccagggatgttctggccaagcaaaagtccaccgtgctaaccatccctgagatcatcatcaaggtcagtcttagcgtctcatcctggaacagagacaaaggc

SEQ ID NO: 16480 - DNA, 516 bp, Homo sapiens
  MAP TO AL133388.2; EXPRESSED IN PLACENTA, SIGNAL = 2.1
tccacttgcattttctgtgcacaaggacacagagggtcactattaacagcaagaaaaaaagatacaaggctatttaaatcaatgacatctacaaattttcaacagtaaaaataacctaatgcttccaggatgacttgcagtgtcagagaacgtgtatcttaaattagacacttgatttataaacatttggccctcttagaagcattaagaagagaagaatgcaaataatggactattggtattcatttgacagatggtttttattgttgatgaggatgatgatgaagaagatgaggttacagcagtaattggacttaagggatggcacacagaccccaaacccacaaaatgaaacctgtgtctaagtactctctttaaactggcaggtcacggtaattcagctgacttctctctaacattcccctgtttccatatgtgtattttgcacactgttaggcatcagctcagcctgaacaaggtattaaggaaatgttaggaaagaggagacagggcctt

SEQ ID NO: 16481 - DNA, 527 bp, Homo sapiens
  MAP TO AL133241.2; EXPRESSED IN PLACENTA, SIGNAL =  12
atttggtgtattgctcctgcatgctgttgaacatttaggtgtaacttttgacttgccaaaaacttaattactaactaataagctactgttgactggaatccttaacaatgacataaacagttgactaacacatattttacatacgtattacatactgtattcttgaaataaagtaaactagagaaaagaaagtattattaagaataacaaaattaagaaaaagaaaaatatttactattcactaagtcaaagtagatcaagatataagtctttatgcttttcatcttcacattgaataggctgatgaggaggcggaggaagaggaaaaggagttggttttgctgtctcaggagtggcagaggcagagaagagttgtcagggaggtagaagaggcaggcacactcaagtgtaacatttatggaaaaaagtctgcatgcatgtaagtagacccatgcagttcaagtctgtattgttcaagggtctaactgaattttatttttgtatgtagctgccataaaatggattgc

SEQ ID NO: 16482 - DNA, 526 bp, Homo sapiens
  MAP TO AL135746.2; EXPRESSED IN PLACENTA, SIGNAL = 1.3
caagaccacttggcacacagtaagaccttgataagtattttttaattaacatatgaatagataaatgaaaaaaaaagaagaagcccagctagcacagatgtttattgtggagcatcttatctgtcccccaaatgccctaacacagcttcagctgctgattggcatagaagaccctaaaactgttgagtgggatacccaacgtttcgagtacccactcctctaccttcaattgagttgggaatgtatccctgatgtacaaattctgcaactgcaccgggcttctctggagccttccctctccaactgaaaccacacattgagagtcagaggaaaggacatggtggctgtccagactctagctctaatagccgttttagccaaatagaaagtgaaagcattttcttttacgatgaagttctgaattgttctctaaactacattgttttttctattgccgtcaatttctcaatttctttggtagtgtgtcttcctcactcctaccaaaacaaaccaacaatgtgagggg

SEQ ID NO: 16483 - DNA, 591 bp, Homo sapiens
  MAP TO AC013568.3; EXPRESSED IN PLACENTA, SIGNAL = 1.8
atgtcttcctcgagtgtgggttcttcctccctctagctcactcctgcttgggtccccttcacatactcgggaggccctccatgaacccattctgtctctcctggctggagatgccagcagacattttagggaatgcagaatcaatgagaagggaattgggccgagtgtgggacagcttgaaccagtggggttcgcctctgagggaaccgttggagaacacctggtccaaaatctcattctggaggcggcgaaaggcctttcccatctgccttggaaggctgctcactccagtctgctgctgctcaccgtggcaaatgagcagtaacaagggtgtaacaagtgtagcttcctgcacgtagccccccagcgcttatgagcgacatccagcgagcctctttgcccctctgagactctgccatctcttctgaaagcgaccagggttctcaaccctggcacatgagagctggggctttctccagctctcctgcccatgtgatggatgtgggcatcatccagggaaggccggtagactgtaaaagcctaccggggttagttattaacctgcagcgcactcttgacagcccattccat

SEQ ID NO: 16484 - DNA, 589 bp, Homo sapiens
  MAP TO AC012568.3; EXPRESSED IN PLACENTA, SIGNAL =   3
agagctagctgtttcgccacctggttcggtctgccttggctaagattatctgaatcaagatcctgctaggagaattaaagagaaaatggtacccacatatttgttatatatttattcttcttcctttttctgatagccactggcaaggctcacattcatgtgtggtatactaccaatttttttcccttctctgtgtttaaagtcaatttccccctcaacaatttctgcccagatacctattccaagttgcacaaagctctctcttggcagccaaaggaggaacttacccacaatgctatcaacctgggcatctgttgtgttagatgcaccaccccgatgatcagagagggattcagtactatctgctgctggcaaatggggttgctgttgaggaaaatacacataagcaacaatttaatcgtagtctatttcagaactaaatccaaaaaagctcacactttcagtccttggttggcttgagaaaagagtaataggaactggaggcaaagaaagaagagcaagatcacattaaaaaaataaaaggctaaaacttaactaacccagaagtactttcccccaaggaagaact

SEQ ID NO: 16485 - DNA, 519 bp, Homo sapiens
  MAP TO AC010093.2; EXPRESSED IN PLACENTA, SIGNAL = 1.7
cagcagctgcaatagtgaggcttatttcccccagtgtgctctccctgtgaacactgtcagttatggtccacatttctctccccaccctgcaactccacagtccccatatcactcattaaaactgacctttggaccaggacccctaaaggatctacaaaatgaccaattttagtcagatacagtcgccccaggaaatgcctattaggaagccgatagtgagagtgggcaaggagtgggtgaggagggcagcaccgcaggaggtggcaggggtccagtcgacctgccatgagacctggaggtaggtacagagcctcacctgcaaaaaccccatgaggtaggaagaaagaatgcctgctctctcttaaggccttcaagagggctgaattagactagcacttagcacagagcctggcatagagtgggggctcaattggctcctgttaagtgactgagtaaaccaaccagtgagcaagccaactttctcctgtgtcctccccaacacgatggggactaaggaaa

SEQ ID NO: 16486 - DNA, 575 bp, Homo sapiens
  MAP TO AC013568.3; EXPRESSED IN PLACENTA, SIGNAL = 1.5
aatcttgggctgactgttgggtggtaaaaggggcagtatgaaggtcaacagatgggaaggggatggagttccagctggagcaggtttcaggttaggccagaaagccatcagttgtgatgcgatacctgcggagctccagggcagtgcagaatttggcacagtggttcttgtggtctatgtgaggaagcatggtcagtactgctaccttgcatagctccggggggcctcctttacattgccgtctatggaggaacagagatggtaaaaacataaggttgtccatggagccacctggctgagtgatgggctgcatgactcagaaactgggttggggtggtggctggaagatggcgtgtttccccacacccctgagaggaaggaagagggttgcttatccatgttggagagggccagggtaaagctgaaccctactaaaggaaagcacacaatgcctgcgccaagaccaccacgcagcagaggaccacacaggacgaggctggggaccccacatgagcagtcctcccctcctcacctgtcttgttgtggggctctgggggacaacaaggcctctgaga

SEQ ID NO: 16487 - DNA, 513 bp, Homo sapiens
  MAP TO AL031123.14; EXPRESSED IN PLACENTA, SIGNAL = 1.5
tctgcagctggacaattcactgctaaaatcccaaacctaagagcagagccaaagccagaggagaggaaagtgacaatagggccaaagcctcattccagattccaaatgtcattctgtagccctcgtgctatcaactgctgcctgctggctgcagccaggtccctgggtccatacacagcctgcatcaagagcctgcagagactcgggggctggagatgggaaacagatggtggcctgcgctttgtctttcccaagtttacagcctcacctgggggtggaggctgttctgaggggcccccaagaggtaagttcacgcatcactactgaccctctccctgtgaaagcagaaagtcagcacgcatcctaccccagaccagaccagccacacctgtagattcaaggtcctgggggaacagtattcaaatgcctctgctctcagccttttacttctgactgtggttcccagcgagtctaaaatttgagaagtgaaactgaacatccaactgccttggt

SEQ ID NO: 16488 - DNA, 558 bp, Homo sapiens
  MAP TO AL121819.1; EXPRESSED IN PLACENTA, SIGNAL = 3.7
gttgaaacacccagcaaacccctcctcttctgaaaagtcttccttggtcacctcacatagaaataataatgtttctatattcttagagcacttggtatcatttcctgtctgtggccttattggctgtcctgcatgccaaattccctctcatctctggcctaatgtcctaaaaaaaaccaaaactgcctctttgtctccttcctccctcatttcctccttccttctttccctccctctctctttcttccaacaacatatagtaggcaactatatgccaggcactttctaggtgctggaaacaactgtgaacaaaacaggcacagtccttgctccagtggagttgatattctagtaggcatatttactcacctattcctttccctggaccacactctttgggaagcaggagccacctcatctcttcttgtgtctcttgtaacccttgtagcttgtgccttgctgggggtttaaaatgcttgttgaatgaatacatgctccttagcagaagcatatgtagaggccgccaattcagaagatcctgggacaggaaaggaatga

SEQ ID NO: 16489 - DNA, 546 bp, Homo sapiens
  MAP TO AC020754.2; EXPRESSED IN PLACENTA, SIGNAL = 1.3
tcacaaaagccttcctggactcggactttctgaatgttgtgccctacgttgaggatggggtgaagaggaggcagtttctgctaccagggatgctaccccaagagggaagaccctgagcccaactgcagtgcccacctgggtgggggaacccatgtggagcggcctgaggggcctgggcatggggtgcggctcccacaccaaacagggcatgtggccatgtggagaatgacctgcacacgctcacacattgtacaaggtgtgggtgaagtggtggctctgtcacttaggaggacttcctgttcccaaggccagaacattctataaaaatcattaaggagttagaggttctctgtttgctcaccctcggcaagttcctcacccagcaagactatgttgtgaagtcctacccttgcgtctgccgaggggacccccaccaccaccagcccagcatctggaagaagcctgactctccctttggagtgccagttcctcttgatttctagttccgacatgtccaaaatggaaggtgcttatctccaaacccca

SEQ ID NO: 16490 - DNA, 580 bp, Homo sapiens
  MAP TO AL117332.16; EXPRESSED IN PLACENTA, SIGNAL = 1.3
ctcatttgggtgctcatttgggcttttctttgtgttggcatctcatagtagtttatggtaagacttctctcagaatactcactgttcgatgtttttctcattgttgattgatagctgatctcattatgcttggccttgccacacatgaaccgaactttaccattattagagaagaattcaaaccaaacaagcccaaaccatgtggtctttgtaatcagtttggacatgaggtcaaagattgtgaaggtttgccaagagaaaagaagggaaaggtaagaactttgagatggtagttgcctcattaaaaaaaaaaatctattgtggtaaaatgtatatgacataaaatatcatttcaaccattttaaagtatacaattaaatagcattaaatatttgagttaccttgtttttaaaatggatgaagagaagattgtggttgattagttctttatgtgcttgttctgttaccgttacccttcacagagatgtatcttttttcttttttttttcttttgagacagtctcgacagagacgaatcttttaaagtactttaaaataaacctgcattcaaaaacatgca

SEQ ID NO: 16491 - DNA, 588 bp, Homo sapiens
  MAP TO AL133551.4; EXPRESSED IN PLACENTA, SIGNAL = 1.6
ttttggcttccatgaacactcgtagattgaacattctgcaagtaagaattataatagtacctctgtcaccttgctgaattcatcaccacaagaaaaacacaaatagtttaatgcttttgcactaaactgaatagttataactccaaagttatattaaactgaagccttcattgtgatcaatagcttggatcagtttagagcgtagagtttctttttctgtatattttggaagatccagaagattaaaacaagtatgggaaactgggagatactcctcaccacctcctgtggactggatgactagtttcagactcttcataccaagaataggaatgcgatcactacctgtcaaaaatactgccaagaaagaaatcattcagtcaaccacttcaaaacaaaaagatacagtagcaagtaatatttggtacagtcgctacagcagagcttcactttaacatctgctctaacgtgttatcttacttcctaatttgtggaagacaagttttttgagacacattctaattgctcatccacacaatattttttctttaaaagtataatcttaatactggcacaaaggaagtgctt

SEQ ID NO: 16492 - DNA, 548 bp, Homo sapiens
  MAP TO AP000127.1; EXPRESSED IN PLACENTA, SIGNAL = 1.2
ttcaggatcatcacattgggcatagcggtcactgcggtgggattttgcaccggaagagagagattggactcagctttgaatacagcatgggcaagtggggatttacagccaaggagcagtgtgggggtcggtggatggaaaattattaagaggaaccatcagagataagaggaattctggctaaactgacctacaaggattcttgctgaagagggacaagggtgatcagacatcatctgggggatggtagagaaagagaagcctaattaggtatcaaaggtggagggtttttgctaagctgacttagcggagttcttggctaaaactggattttacaaggaaatgcaaggacaagcttaggagaagcttcaggagcctgagtaaagtttggtcaaagatatttgttataacataaactcctctgtctcatattcctgtacttccaagcgattcaactatcttgaaggtcctcctgaccagctctgacaatctgatcagcaaaatgtatgaatttgtaaagtgctacatcggcaatttagccataaaac

SEQ ID NO: 16493 - DNA, 575 bp, Homo sapiens
  MAP TO AL079295.1; EXPRESSED IN PLACENTA, SIGNAL = 1.2; EXPRESSED IN HELA, SIGNAL = 1.4
tgtgactgcagcctccatacatcatggaaagagacaaggccccaaggagtttttttgttttgttttattttgtttttaaagaaaagggcaaatgaggggtccccacatgcaaaaagtccaagactaggataaaggtttcctcaggccaggaattcatgctacttttctacatttagaaccaatattttacagtgcaaataggcttaaaaatttattacaggaaagaattggtacaagcttaaaaaaaatgttacaatgatttttataaactcactgaatgacaggctcatagtgaggtctgactggcacaatgatattttgaagtgtgtccctggtattatagaggacaatttgctccctggtgtccaagagagagaagagcaattgagcagcctgggtctgacccagcaaaactggagtcccctggtggctgaatgtgcccggtaatgtaccaaggagaaaatcattttaggacatttcctgtatgtgtgtttgggaggagagagacaggcaggggctgggaagctttggaacagggtgggcacgatgagatgtcagctaatgaaggaggccct

SEQ ID NO: 16494 - DNA, 571 bp, Homo sapiens
  MAP TO AC007253.2; EXPRESSED IN PLACENTA, SIGNAL = 1.5
taccctggccccttttagtcatggctggagcagctgggacacaggacaccaagtccctagactgcacacagcagaaagaccctgggcccagcccacaaaaccattttttcctcccaggcctctgggtctgtgatgggaggggctgccacaaaggtctctgacacgccttggaaacattgtccccattgtcttggtggattaacattctgctcctcattacttatgcaaatttctgcagctgcttgaatttctcctcagaaaatgggactttgttttctgtcacatcatctggctgcaaattttctgaactttcatgctctgcttcccttataaaactgaatgcctttaacggcacccaagtcatctcttgaatgctttgctacttagaaatttcttctgccaaataccctaaatcgtctccctcaagttcaacattccacaaatctctagggcatgggataaatgttcccagtttctttgctaaaacatagcaagagtcacctttactccagttcccaagaagttcctcatctccatctgagaccaccttagcctggatttcactggtcat

SEQ ID NO: 16495 - DNA, 583 bp, Homo sapiens
  MAP TO Z95114.19; EXPRESSED IN PLACENTA, SIGNAL = 1.2
aatcaagggggagcttgtgcaacacttgataaacattgctgttttcatcaaccaatcaggtaaagtgcaaaccaacttaaaaaaattacagacagggccaacaagttaatggaaaacagagtttcaggaggctttgactggtggaaatttaacaactggtcctggttttcctggttagccccctttcttggtcctaaaacagctttatacaacttatagctttcaaacgatgctcatttgatttacaaggttgttttgtttcttcccacctagaatccataaaactccaaatgattctacacaaggttaccgcgaggtctcaaccatgtctgatatctacgtgggccccttggatggccaccacttttctctgcccaacctaccagctacaagagagcaaaaaagagaacccaattattaccactgcctcttgtcagcaggaagtagccagattaattgtcaccgatctacccaaaaatttggctttttttctctaaagggggaaatattaggtagttaaatagacattagcagctaggagtgggtaagaaaagagagtagaaaggctgacagtgaaacagcc

SEQ ID NO: 16496 - DNA, 578 bp, Homo sapiens
  MAP TO AL022238.1; EXPRESSED IN HELA, SIGNAL = 1.4; EXPRESSED IN PLACENTA, SIGNAL = 1.3
gttcagtttggggattgaggtacccatagatcaaccaggtggacgtctcactcagtaggtatgaggtctggcacttgagcaagtggtctggcctagaggtgacagatttgagggtcgtgaggttattggggtaatcataagattgaaggagattatccagagagtacagtcagtagggcaacttgttgggacacacactgcatttcactgaaattatttgtttaaagacatactgaatggctatttgttttctagacggatctgtttggccgaggcatttcttaccgcagatactatattgaatacgctgcagaacatttctgaaggattggtcgtgtaccccaaagtaagaagcctcaattcaaaagtaaagtactagggaggggttagaatgtgggagggagggtgctctggggtgtgttgagggagctgtattctgatccgataggcattcttcccacccgagctcatccttcagttcataagctctagggaactagctctgtggaattcatagacacattatagaaacagaaaaagaagtattttaaattgccttaaactatctagcagcatga

SEQ ID NO: 16497 - DNA, 550 bp, Homo sapiens
  MAP TO AC008166.1; EXPRESSED IN PLACENTA, SIGNAL = 2.2
ggattgcaactccctgtttcagaagcagacactaagcctcaaatctgcttagattgccctgagtgagagtcttacctcctatagagaaagagctgaaattgtggaaaacaggacacgagctcttatcatgcaagtggctgacctgcagtgaaaggtgcatgcacagcctcaccaggtttctactgttaaagtgagggcattgattggaaaagaatggcaccctaaaacttggaatgaggatgtgtgggaggaccctgatgaagctgggaacgctgactttgtaaacactgatgcaccttttttgccaaaagaaacagcttccccatccctagtagtggcaacatcccctccccgacccatgctgccatcagcctttctacctttgtctaaggaaataaaccctgttctgcctgaggcaacagtcatggcctcccctgaggcagttgccaggcaagataatgttgattatcttcacaagccaaccctaatacctgtttgcctctagacctataactagaatagagtcccagcgggctcctagaggtaaggt

SEQ ID NO: 16498 - DNA, 572 bp, Homo sapiens
  MAP TO AC005300.10; EXPRESSED IN PLACENTA, SIGNAL = 1.5
ggtctcgcctctcagagaaccaggaagaacaatactacttaataatggaccacacaagacctgccagcaaaagacagtgcaaggaggaaaaccaagagcgtgtggggtccaggaagctgaggtatgtctcgggtccagtaaaacagggactggagtggctgtaatgatcccatcttctttccactgaacaggcaagacccccgggagaggcaatcttccagctcctcctccatgttagcttgtacatgagccctccaagcttggacaatgacagctacagagccaagcaggaggagggcagggaccctggaaaaacaggaggaagcaactcgagccaacaagatatcacacctgaacaccaaaaaacagctgccaagagaaaactgaccaagccccacacgccacacaggaaatgcctggacaaatggtgcctctaacccttggcttcacaggcttatgctgttgcacccagacctgtcactgtcccaagcactcagccagacatgtaacaaaggcatttttatgtattctttttggcagccctttgaggaagtgtcagcatctccaaatgg

SEQ ID NO: 16499 - DNA, 587 bp, Homo sapiens
  MAP TO AB016897.1; EXPRESSED IN PLACENTA, SIGNAL = 1.6
tcatgtcactgtttcctcttggaatgaagttgatatttttaaagtaattaaacggcacttactaccataggtaccattatctaaatctgctgcacattcaaaggcttcttcctggatgacattttgctcctcttgtcctctcaccctgtctgggcagatgatgtgctgcacacgctcacaggagccatgtccttgctacgacgctgcagagtcaatgccgccctgaccatccagctcttctctcagctcttccacttcatcaatatgtggctgttcaatagattggtgaccgacccagattcggggctgtgctcccattactggggtgcgattatccgtcagcagttgggccatattgaagcctgggctgagaagcaggggctggaactggctgcggactgtcatctgagcaggatcgtgcaggtgattgctggtgccactccccagctcatgtgctttatgataaaggcatctgatctttatgatgagcaagagcttcaatgcagcaaaacctcaataccctctttttggggtttttcgtatgtacaaataatgaagtagtgctatgtgagtacttgggctgcggt

SEQ ID NO: 16500 - DNA, 579 bp, Homo sapiens
  MAP TO AC006427.13; EXPRESSED IN PLACENTA, SIGNAL = 1.3
ggcctgggtgtacagacatcaaagacatacttcttcacttccaagggctcacagttcacctgggaatacaaacaagtaagcaaccagctacactttagtatgatacgatctataacagaagtttccaaggggtgctataagagacagcagaagggcatcagatgcaggaagccttcctaaggaaaatgatacacaagaaaaatttggagggttgaggaaggaatgttttgggacaaaaaattcaggcccaaggagaaggatgtttcgggggacagaacgtagttttcaatagcatagaggcatttgaaacgtgacatgttcgtgaaactgcagttatttgacatgactggaaaaaagagtgcttgtagaagagtggtaagagatgaaacaggaaaggtgagcaggggataggccagaaaggtctctttagcccatactggggagtctgaaggtgaagaagacaagttttgttttagaaatgctaagtttaaaatacaaatgcatgctgctcaggtggtagatgcaccaaaatcttacaaatcacaactaaagatcttactcatgtaaccaagcaccacc

SEQ ID NO: 16501 - DNA, 549 bp, Homo sapiens
  MAP TO AC006548.19; EXPRESSED IN PLACENTA, SIGNAL = 1.6
ctttgtatggcaccattccctgtggtgagcggccagctacctggtggcaggttgattatatcggacctcttccatcatggaaagggcagaggtttgtcctcactggaatagacacttactccggatatgggtttgcctacctgcacgcaatgcttctgccaagactaccattcacagactcacggaatgccttatccaccatcacagtattccatacagtattgcctctgaccaagcactcactttacaggtaaagaagtggggcagtgggctcatgctcatggaattcactggtcttaccatgttccccatcatcctgaaacagctggattgatagaacagtggaatggccttttgaagtcacaattacaatgccaactaaattacaatactgtgcagggctggggcaaagtactccagaaggccttgtaggctctgaatcagcgcccaatgtatggtactgtttctcccatagccaggatttacaggtccaggaatcaaggggtggaagtgaaagtggaaccactcactgtcacccctagtgatcca

SEQ ID NO: 16502 - DNA, 588 bp, Homo sapiens
  MAP TO AC006992.2; EXPRESSED IN PLACENTA, SIGNAL = 1.9
atggcaacaaacgtagggagatctatacacccaaatgaggcgtgtccttcaaaggagtctttgtgggaagttagtcacttttttttttttaaagtgagctgcctttgcttaaaatgcttttctataattctctttttaaatggccttaagtttatggttcttattttatgcttcacagtgtacaggtcaaaaaaaaaatctcatttcctccttgcagttgggtcttagtctataatggcattccttatcatgatcagccaccttattcagctgactttgatacaaataactttgggagggatccccaaatcaaatcttccctcaacgatgaagatttttatccagcacacagcatataataaatatgtgatgacagaatgattgaatctgacacttgggagtatagacaaaatttggcactactggctcaaaaaatggagtttaaaaattgccacaagcaatggcactattgcctcattgtcttatattattatcttatttaattttgacacatactatatatttattgtgtgaagaatttgtatcttctatttcttttgtactcatccacaaatgcccatgacagag

SEQ ID NO: 16503 - DNA, 568 bp, Homo sapiens
  MAP TO AC006427.13; EXPRESSED IN PLACENTA, SIGNAL = 1.4
tgtgagaataaatccatgagcctaaaggttgaatcctccagcccagagggaggtgcctcaagtcatagaggattattcccaggtcctggaatcaaatggagttttcctgtctggatttcaaaattgcttggaaccactgactcttgggttttgtttgtttgtttgcttgtttccttcaattttctccctttttgaatgggaatttctgtaactgatatcttatgtctgtcctaccactatatattttggtatttcttgagttttgtaggtttcagatggagaatttgccttagaatggattatacacagagccacattcatacctgatttaaatgatttagatggtgagacttaagacttttaagctgatgaaatttagatgactttttttttttactgtgtatgctgtaattagttcacacatttatggctgttaggaggaattagaccattgtgaatgctttcatatccaacttatattttgcatgtaagttggatatgaaactttgaggccaaacagcacattgtaggaggcagaataatttcttccactccaaagatgtgtatg

SEQ ID NO: 16504 - DNA, 574 bp, Homo sapiens
  MAP TO AL022238.1; EXPRESSED IN PLACENTA, SIGNAL = 1.4; EXPRESSED IN HELA, SIGNAL = 1.3
tcgccttttagtttcatactccttgactatttgtaaatgacattgaatctccgtaacgattatttggttaaacattttatctcttgttttatctttaccagttactccctctcttacttaaattgttctccctccaaggggtaatggtggttattaaaagaagcaatgaaaccttgatgatttaaggtctcggtctgagactttcgtgtgttctctttgggttttcaggcctgcacagctgaccacagttgggaaacgttgctgtctttggattcaggatctttgcatggatctccagaacttgaagcgtgtccgagatgacctgcgcttccggggagtaaagggtaccactggcactcaggccagtttcctgcagctctttgagggagatgaccataaggtattctgaaagtgacctgcaggacacagaaactcaatggtggagcctaagagacaaggctgcctttgaggatgataggagagattgactgtgggatgggtggggtctttcgactagaaggaagttgtgggggttagggagcgagacctgggtaggatgacaggttgaggcatt

SEQ ID NO: 16505 - DNA, 563 bp, Homo sapiens
  MAP TO AC007556.2; EXPRESSED IN PLACENTA, SIGNAL = 1.4; EXPRESSED IN HELA, SIGNAL = 1.3
gtagacgaagatgatgggggaaaggggatcaaggacactggtgatcttgtcgaaatggttgacctggcatttaggtagataaagaaggaagcaaaaccccaagtgggtaatagttgaggtttattgccaacctctctgaaagtggtactggatctcatgatacaggtgtgaccggcacaatgactgtggtgactatagcgacgagaggggctgcttataccagacttgccaacagaatcagtttacctgtcagaacgggcgctgcattagtaaaaccttcgtctgtgatgaggataatgactgtggagacggatctgatgagctgatgcacctgtgccacaccccagaacccacgtgtccacctcacgagttcaagtgtgacaatgggcgctgcatcgagatgatgaaactctgcaaccacctagatgactgtttggacaacagcgatgagaaaggctgtggtgagtacaacagaggatttgggaaaaggaaacaggggagactgaatatggattctcaacccttcacgacttagactttccaacctgtcctctaactacaaa

SEQ ID NO: 16506 - DNA, 561 bp, Homo sapiens
  MAP TO AC007556.2; EXPRESSED IN PLACENTA, SIGNAL = 1.2; EXPRESSED IN HELA, SIGNAL = 1.5
aatatatgtgctccagagtctagtacctctccattgttttttgggaaaaattctataaactgccccctttctttccactaaatgtatgttactctccaagaccttaaggaaactcactggacttagggggaaggtaagctttgacagggagactaattggctggcctgcccctcctcccacccctaacctgggccggtttgcatggtgtgggcactctgctgagtacagctgactaacacctgcatggctttcccttcctgcagccatcgaactgcctatcaacctgccccccccatgcaggtgcatgcacggaggaaattgctattttgatgagactgacctccccaaatgcaagtaagtctgaatgttgaggtcccagctataggccttgcctcttctggggaaatttgagaccttaaagtagccaggaaaacaaatacaggaacctcaccagttcactaattcttacattttaaccagcttgccttcccttgagggagtctacagagaactgaggcagtgcttctttaactagaatgtgcataagaatcccgtggaga

SEQ ID NO: 16507 - DNA, 558 bp, Homo sapiens
  MAP TO AC007567.1; EXPRESSED IN PLACENTA, SIGNAL = 4.2
gaaaagaaggcaaatggagtgaagtgccatatgtacaaactttcttttcattaagagacaactcgcaattatgtaaaaagtgtgatttatgccctacaggaagctctcagagtctacctccctaccccggcatccccctgactccttctccaactaataagcaacccccttcaacccaaatggtccaaaaggagatagacaaaggggtaaataatgaaccaaagagtgccaatattccccgtttatgccccctccaagcagtgggaggaggagaattcggcccagccagagtgcatgtacctttttctctctcagacttgaagcaaattaaaatagacctaggtcaattctcagataaccctgatggctatattgatgtttacaagggttaggacaatctgatctgacatggagagatgtaatgttactgctaaatcagacactaaccccaaatgagagaagtgccaccataactgcagcccgagagtttggcgatctctggtatctcagtcaggtcaatgacaggatgacaacagaggaaagagaacgattgcccac

SEQ ID NO: 16508 - DNA, 597 bp, Homo sapiens
  MAP TO AC007556.2; EXPRESSED IN HELA, SIGNAL = 1.4; EXPRESSED IN PLACENTA, SIGNAL = 1.7
caaaatggaatctcttcaaacgaaaatctaaacaaactaccaactttgaaaatccaatctatgcacaggtaatttttaacaatttttcttagcacagacattttttcttagaaattatttgcttggttaaattggacacacacttagattattctgagcagagtggccacaaatagtcttctttatgaaaaaccgtgtatggtgaccttgggggaataaatggctgattcctgttacattgtattcttagatggagaacgagcaaaaggaaagtgttgctgcgacaccacctccatcaccttcgctccctgctaagcctaagcctccttcgagaagagacccaactccaacctattctgcaacagaagacacttttaaagacaccgcaaatcttgttaaagaagactctgaagtatagctataccagctatttagggaataattagaaacacacttttgcacatatattttttacaaacagatgaaaaaagttaacattcagtactttatgaaaaaaatatatttttccctgtttgcctatagttggaggtatcctgtgtgtctttttttacttatgccgtctcatatttttacaaa

SEQ ID NO: 16509 - DNA, 572 bp, Homo sapiens
  MAP TO AC007564.9; EXPRESSED IN PLACENTA, SIGNAL = 1.2
gctgaggcaaattcaaaagagaatcttccaaaatgtcttgttcagtaacatccctgctaggatagatgtacagcctcccaaagtgaatacctttacaaggctcctgtttttatttattcttttattttttaaaaaaaaaattcttttattcttttaaaaaatgagtcagttgataatcttatctgatgccaaaaacaaagttaaattatcataagggagaagaaattctgcctttcttatgtgtggcttgtaggaaatgcatacatcttaatacatatgtttagttagtttagcggtacaccagcagcgcagtatctggggagcttagggtctctgaatgctgcagcttcccctgtcaagcagagaaaagcttaggttcagttccccttctgggagtaggggtacatgggtccctgatcccagctagcttggtatccaggtatcctagaataaatacccagggtcatttgtgggcaatcctgctccttgtgtcagtatttttgtcctttgctcaacctctaaatgtctgtattccctgtggttctgcctttagccctctggattttcatgct

SEQ ID NO: 16510 - DNA, 551 bp, Homo sapiens
  MAP TO AC006427.13; EXPRESSED IN PLACENTA, SIGNAL = 1.5
gagaggggcttaccttgtagcttgtagcttttcctttaaagtctttgagattggaagacttggtttaatttctcactttagaccttaacgtgtgactgtgagcaaggtagttaagctttccaagactcagttcttcatctgtacacagggatccgatggttcctatatgtggggtctgtgggaggattcaatgagtcaaggtatgtaatgcactttgcatgtttcctggcacacagctggggatcaaaacatgtttcttgaataataggaccctcagaaaaggaaaagaagctgaggtcactctctccaaaaaatgtattcccatgattttgaaatcaaggagtttgtcctttatttctgtaggagtgattaggatgtccctaaatgttagaaactcagttaacagcagagaaacaagatgaatcagcagtttgctctaatagatccaatctttgaaacctttcaatcagcattgggatggcaacccaagtaatttttttaagtattattttatttaggcctgtgtggctggcttttcagtctgggctgac

SEQ ID NO: 16511 - DNA, 559 bp, Homo sapiens
  MAP TO AL079295.1; EXPRESSED IN PLACENTA, SIGNAL = 1.4
ggttaagaatatcaatttctaagccagtctgtctggatatcattccccacaacatctcttagtagctgtctgaacttgggcaagttacttaaccgtcatatgcctagtttcctcttttgtacaatggagataacacagagctgctgagaggattcaatgagttaatgagggtaaagtgcttagaacggtatctgatattaatgcatcataagcatatataaagattagctatttttattatgactatgtgccaggcactgttctacacactgggaatacaacagactgctgacgaggatcctgatctcagggagcttctgtttggggtcggggaggagacagacaacaaacaaacatataacaatcaacggtaagaactaaaatcagtgacaagtgaagacaaagcagaatgaaggtaggagtgatgagggagtgctggtttagctaggaaagttaagggagaggtcgcccttgagaagaaatattcaagagtagaacaaaccatatgggtaccagtgggaagacattttgggcagggagaaaagcagaagggtcctga

SEQ ID NO: 16512 - DNA, 585 bp, Homo sapiens
  MAP TO AC008174.2; EXPRESSED IN PLACENTA, SIGNAL = 1.2
tgctcaataaatgcaagctgtcattattattattactgccaaatgtttgtttgggttattttctgctaaaatccgtagtgtgtttagcacaaagctaacttaacactttttctgccaggaaaatggatcatgtttcatgaataaaactcagtatccctaaacaatcagtactatgctgctgaaggagagagttcatagaaataaaagttaagtagataaattaataaatacaacacaaaactttaaagcataattgtataccttttgatttataccattatcctgtacatctgcctgataaacaacagaagctgagttttttttcgtaaaattatttgaactattttgacgctgatgagcagcatttgctgtatgtcctaaaagaaaacgagagagaaactctatagttttttttttttttaacagctttaggaaagtacaatcaaagtacaataaattgtatctatttaattatttaattgacttggaaatatgtatccaactgtgaaaccatcactgcattcaagataacatgtctattatccctagaagttttctaatgcaactttgtgatttatccatctc

SEQ ID NO: 16513 - DNA, 550 bp, Homo sapiens
  MAP TO AC008166.1; EXPRESSED IN PLACENTA, SIGNAL = 1.3
tggattaaaatatgtcccacactgagtgagctgaaaatgtctgatctcccttggtttaatgtagaggaagagatcccaagacttagggagattgggatgatgaagtgggttagtcactttagacatactcatcccggctgggagtgtctagaagacatacccttgaccaatgccttgtgaaataagtttatgagggcagcatctgcatctttaaaaaaccctgtaattgctcttctccatatgtcagatctaacggtgggaaccacagtcactcaactacaaaatttaaatacagtgggaataattggatcccaggcagcagaagccaagtggtggcactgaaccatcaaaatcaaggtgagcatagctactgtaataaacagcagaggcaaagcagcattaaaaatactctgacttgtgtagagtttgggcattagctaattaatcacagtgttcctagaattaaaattaataggaagcctattgcattcctccttaatttacataagcagaaaacttctaggtcaaatggacaaaagaccaatttgga

SEQ ID NO: 16514 - DNA, 576 bp, Homo sapiens
  MAP TO Z82201.1; EXPRESSED IN PLACENTA, SIGNAL =   2
accaccttcatcctgctctggccacaagaagcgctggctccctttttttttccttccaccatgattgtaagtttcctgaggccttcccagaagctgagcagatgccagcatcacacttcctgtacagcctgtggaaccgtgagccaattaaacctcttttctttatacgttacccagtctcaggtatttctttatagcagcacgagaatagactaatatagtgtccaattgctggagctgaacatgctcaaagggcatattcagtatgttctgatgaaatcacagaagatcagacaccatctgctccagtacccatcaagagccaaattccacccattactctccccagtaaaaagggggctagccttaggtaaagccatgccagacatgagaaccacacttccttcatgttgagcttagagtctacctggctagcacatctccaagtccaacttctttgtattcagtgcttctaaaagtcaccctctgacatcgcatcccactgaatcttcccatttctaagctaatgatcttgttcactcaaccttttaaaaccctttcccatcttgaggctcc

SEQ ID NO: 16515 - DNA, 575 bp, Homo sapiens
  MAP TO AC007564.9; EXPRESSED IN PLACENTA, SIGNAL = 1.2
ggaaaaacaacaaaatccaggacaagcaaaagcaaggtagatttaaaccaaatatattagtatttacattaatggattattcagtcagaaggtaatattgttagacaatatttttaaatatccaagaacataccttttataagaagcaaaatttaaacacaggtacatggaagggttgaaagcaaatggctggaaaaatattaccatgaaaataataagcaaaataaagccactttcctatgttagcatcagataaagcaggctttatgggaaagtgaacattattacaaaaaggtcatgtaatttaaaaagcataattaagaaaagtactattatcaaaatgataaaatgttcaattcaccaagatgatataacagctatcaatctgattgcacccaagaacacagcctcaaattaagtaaagcaaaatttgagagaactgtaagaaaaaactaaacaatgacaatcatagtgaaagatttaaacatacttctcttagtaattaattttttaaaaaaggcagacgaaatggaaaaatcagcaagcatatagatgatttgaacaagactggccaa

SEQ ID NO: 16516 - DNA, 567 bp, Homo sapiens
  MAP TO AL008723.8; EXPRESSED IN PLACENTA, SIGNAL = 1.4
tcatatccttgatgagaggggagatttatacccagagcctctcatgacttaaaagtctaccactctacgaacacagggtctttgaagctccctttttcctcatgaagactttgaagagacagtcctgagaatttaagacatccatatccttgaccctttaaaggctgttgacagtctacacatccagctctctgatattagcactctggccccatctgaccaacctcttgaagctaaaatgccaggaggctctgaactcacagaaattaacaaaaccacacagatgaagagggagaggatggagaggtagacctggagtcgctccccaccaaaccgcttcttgagatattccggcatggtcatcacctgcagagacagacattgacagggacttaacttacccttagggccctgtgcgttcagattattcagcatttcctaagcacctgtgagtgaaagtcctgtgtgtggccccttcctggtgatggaaccatggcttcttactcatagaggcatccctgatgccatgcacagtgactggcagagggtgggtgcttaaaccatgct

SEQ ID NO: 16517 - DNA, 588 bp, Homo sapiens
  MAP TO Z82201.1; EXPRESSED IN PLACENTA, SIGNAL = 1.5
tgacaacaacaaaaagtacaatgcatataaacagtcaagaaaagacacagtatgaagaaaccaagcaagctgcagaagcagactcatatatgacacatattttgaaattatcagatagggaatttaaaataactatggttaatatgtaaagtgttcttatggaaaaagtagacaacatgcaagaacaagtgggcaatgtaatcagagatggaaactctaagaaagaattaaaagaaaatgccagaaattaaaaaaaaaagccactgcaacagaaatgaagaatgactttgatgcgctcatcagcagaccggacatggttgaggagagaattagtgagcttgaagtatatcagtagaaacctctgaaactgaaatgcaaagaaaaaaagaacggggagagggtggataggacaagatatccaaagactgggaaaatttcaaaatgtgtaacacctgcatcattggaataccagaaagagaaagagaaataagcaaacaaacaaagaaacaaaacaagagaacaaacaaaaacaaaaacccattttaattaataatggtagaaacattcccaaaattaatgacagacagc

SEQ ID NO: 16518 - DNA, 555 bp, Homo sapiens
  MAP TO AC007106.6; EXPRESSED IN PLACENTA, SIGNAL = 1.4
caccattcataccactctgagctcagcccattgactatgttgtccacacccaatattaaaccatatgatgtcagtattagcctggaccacgttagtccagcaccctggctgaacccatctgtgtaccatgccccattggggctgacttgggggtgccactctttaaacagtgatgagggtctaagggtgcctcagctgacccatggccttatcttgcattaggattacagatcccaagatttcttgtaattctgctgctaaggggcttgtactcagggtattccactgttcaaagtaggcaccccactttgctaaagtggatgtgtgtgccatcccagtccagggggttgttacccataaatgtacccaccccactaatgggtaagtcacctgcatgttgactgtagcccatcctgtcatgctctcacgagtctgatgggtggcatatgcagctgctaagtgcttctttattgatgcatactggagttcagctcccttccaaagttgggactaaaagactactggtgttctaaagctctccatgtgctgccatag

SEQ ID NO: 16519 - DNA, 559 bp, Homo sapiens
  MAP TO AL021392.5; EXPRESSED IN PLACENTA, SIGNAL = 1.4
tttcttttgtggaaggagggcttccttgtgatcttggcagtgcaataatgttatgtctgtagacatttacttgcaatcaggtagcggatggcattttgggatatctgatcactatgctgccagaagtcaagttgactcattagctcattctgggagttacatccttggctgccaacatggctctcaccttgctccagaggagtactttggagagaattcagggtgtacattttctggctaagccatggaatggggcctggcccctgctgcttactcctcagctctcatgcctgtttccaagcttcagggtcctgcagcagtcccccttcctggtgacctcatgggttcctctgagggcagccagtgagatgctgcgactcagtgcagccggaatgcacagcagaaagagtgagggggcacctgtgtgtgtgctggtgcactggggtgtgttgagggtgttggtagtgggaagagccctagaattgttcaagccagtcatctggattggacgttacctagaaaactcccagatttcctctccgttttaggcaccacagat

SEQ ID NO: 16520 - DNA, 593 bp, Homo sapiens
  MAP TO AL079300.11; EXPRESSED IN PLACENTA, SIGNAL = 1.4
gggccctaactagaacccaggtatcctcactcctggtcctgtctaccttccacaaaggagacctgttggtttatttgatggtttcaagttcttcattgaaattaaccaaggtatggcatcctgtgatctcccatcaatttgagccacaagaatctaacttgatcaattaattcctgcctcattttattctgttctcttccttctcacaggaagtaacatttctgccaacaacaacatccactcctactcagctcttcgttccctgcaattcctgtcttgcccgacccctgcagagtggaagaaggtgatggatgggcagagaaatgggagatggacagctaccagggaagaatctgtgatttgggagccttttggtgacatgcacattcaaaggactaggaaagaatggctttttcaaacagcataaatagaaaaccagtgggcccgagcgctcactgctacataatgaacgtgcctgccttttcctaacaacattttaagtcggtaattggcccgacaggggacgtgaactgtacactgagtcacagaatagtacagaaaatctcagaatggcttcacctcccatcaggaaa

SEQ ID NO: 16521 - DNA, 584 bp, Homo sapiens
  MAP TO AL079300.11; EXPRESSED IN PLACENTA, SIGNAL = 1.2
ggccaggcataccttatttatctctctatccagaaaacttaactcagggattgtcatttacatgtatgtatgtttacaaacatatgtacatttgtttatatgaaaggatgaatgtggctcttcccagaaggaaaagaagggaggtgttagagacttttctttatgaaaaagattaaaaatagcaccatagtttcagatttaaaaggctgtgcttagcagttgatatctcagcacagaacaacagaaagctctagagcttgaaagctggtagtttcaagttgaacgtctttctctgcatatgccagctgtgacctgggaaagcctcttcccatctctcagcctcagtttcctggtccgtaaaaccaagacgatcatattctacttggtgggatctctgcagagagcaaatgggaaattggaatcaactcatgtttctaacaatagaagaatagatataatggaatattatgcagctgtaaaaaatgaacaaactacaggcacacacatcagaggagaatgggtataatggaacattatgcagctgtaaaaagtgaataaactacagctacacacattaatgggga

SEQ ID NO: 16522 - DNA, 562 bp, Homo sapiens
  MAP TO AL079295.1; EXPRESSED IN PLACENTA, SIGNAL = 1.4
gagaaacatttaagagtctggggaatagacacaatacattgtgatggcagaatgcagcatttctcactgcctagaagaggttgaacactggagcccactaagaaaggtgctacaatcaaaagagcaaagtatttactgcaggggagccttgtatttgtgcctggcaaatttcacatacaaaatgttgggaggaaatgttcaaaaaagatttgacagtggtttggaaatgttgaaaaaaaagagtgaggaattatgacttcggaagggaacatgtgggataccaataatgtcagatcccggagaggaatggtataccagaaggagaccagggtgggtaagggggggctgtatcacctagtatgactggttcccagaaactatctgtctaccataaacagatgtccaagaaacaacccctaggtaaggaattacatgatgaaaagttcaaatttgagagagataaaattgtttacatatggcaatctgtgtagatcagagtttggaatttctcaggggagaacagaaaactggaggaacaaaaccaggaatttgagcttatgcc

SEQ ID NO: 16523 - DNA, 566 bp, Homo sapiens
  MAP TO AL035682.16; EXPRESSED IN PLACENTA, SIGNAL = 1.2
tattcccccttcccctaaaggaaggtactaaggcaataagagctaatatcactgacatcagcttactttgcactgtgctaaggatttatgtgcatttaatttccggaacccttataaggaagatgctgtctcacagatgatgcaactgaggctcagagaggttgagtcatctgtccaaagttacccggctaggagcagacttcaggagtcctgagccctgtgcctgtactgcctctcaataacaaaggggtcatcagaaacactccttacctgggtggtaggtaaagtgctgaggctgacttcgttttctcttcccattgatgacgtagaagttcacttttacaggtgtgcggatatgcttgttccgatattcagggatctcaacaaaaagcatgttctataaggaaggagttgtcatgaacttaactgcaatcatgtctcagttcctacccagaccctaagcgcatccaggcagcccactgtctaatgggtgttttgatgtgcctttcatcggtttacaggggaagttcaatttcaggggaatttaacttgtcagcggcagcaaa

SEQ ID NO: 16524 - DNA, 557 bp, Homo sapiens
  MAP TO AL035682.16; EXPRESSED IN PLACENTA, SIGNAL = 1.3
cagctactctgggaaccaggaagttggggtttcaggcccagccctccactgatgaactctgtcacctcaaagaagtctagtgaccacactgtgtgactcgacttccccatccgtaaaatgggaaggggaggaagcagaccatgagttaccctccctccagctgccaggctatgactccaggagtctgatgggtctagggtaaggacaggagaggaattcacctcgccaagaaggactcttctcccagacaagaaaccaacatggctctgccctctgaaccctgtgtgaagtcaaccaggctcccagagtgcaggtagaagggcagctgatgttttctgagcacctactatgtgcctgatactttcagttccttgatctccttctattgctaatacaccaccaaccccatctcagagatgggaaaactgagtcccaaggtacatagtgtgaggccaatccaggcttcaggccgagtctgctgggtgattcaaaatccagcctttgaagtgggaattacacaaaggcctttggtaccaggaacaatttctgatggtgga

SEQ ID NO: 16525 - DNA, 549 bp, Homo sapiens
  MAP TO AP000041.1; EXPRESSED IN PLACENTA, SIGNAL = 2.4
ctgcccagagtagcattcaggattcaaactcagttgatataacaaagacatctgcagcagacagttacccctccagacatccaaaagtccccactcagagttcaaaagtctgttacctttggttagtatttggtttcagtgcattataaaaaccaacatgatggctttaacaaagcagaagggtttgttctctcatctaagagaccaaagcattggtccccagcaggtctggcacccatagtatcagcgacccaggttccttctcttttcatgctcttttatatgtggccccacagccaacttatgatcctcaatgactcctccagcctccaccatcacggaggttggggttctgcctagctgggagatgagaatggaatgagaagaacatgctgtctctggaaggatagctctggaagttgcccatgccacttctgtttacttcctactggccagaacttggtcacaaaagaggctgggaaatgtaaggagtctgggatatgtagttttaattccaggtggccacatgccaaaccaaaaagcctattt

SEQ ID NO: 16526 - DNA, 557 bp, Homo sapiens
  MAP TO AL035682.16; EXPRESSED IN PLACENTA, SIGNAL = 1.2
cagaggggtttatttgtgtgtgtattacacacacacacgcgtacaggaggttgagctaccaggaggccgtttttgctaacatagttagaaaactgatggaaaatgcattagtcctttttcaccctgtggacaaggaagctgagctactttgctacaatagcaggaaggcacttgggtaaaacattcagataactgaggaaagcccaaattccctcatgtacaaaaaacagctcctagccagtcctagccaggtcgagtgagaacaaatcactcaccacacactcttggcttttccccagtgaagtcaatattgctggagagaaaattctttaggtgaagctgctagtataaggaacttataataaggaacttattttgttcatgaggaagtatttagcatcccagaagttccatggtaggggtcaacctcttactggcattctgtttatttaaaagagaattttgctaaactctttgagcttagggtgggtgagggaaaggtcgttcattgtcagggaaaaataaatgctaggtatcgaccgacaggttgcatacaa

SEQ ID NO: 16527 - DNA, 589 bp, Homo sapiens
  MAP TO AP000127.1; EXPRESSED IN PLACENTA, SIGNAL = 1.2
ggaattttgacagctacagatggtgactgttgtattggaaagaccaaggcaacaatttgtcattagctaagaaatgattgtcagagcctagaaaaacaaaacaattgtataaatctgcataaatccataatccctggattttaaagtgtgtggctttggttaatgctgtaggctcaagttcagctgaatcttcaaccttcagtagctgctacatccccatccagtgccaaatccccttgacttagcactgctatcatttctatttcctctggtaccacagtttacctagccaaggtcccagccactggagctaacgctgccaaacccaaaactatagcccaaggaagaagagttgaaagcctgcaaagtcaaaatggccaggcctatatgcatccccatagagaaaacccaagctgagagccaaagagagaatggtaccatagaagcagtaatagaagttcccagaagatgaagtttgactcattgtgtccagatttgtaaatgaggtttattgagcaaggaagttgccagagcttgatgcctcttctcacaggcactagaggatagggcttcaccaagagccgttctt

SEQ ID NO: 16528 - DNA, 555 bp, Homo sapiens
  MAP TO AP000129.1; EXPRESSED IN PLACENTA, SIGNAL = 1.2
tgtctggagttcttccctgccacctcagctgagctcacatgcccactggtaggtgctgtaggatttcctctcacaattatagccttaagttattaatgtttgagacaggaaaagagagaggaggattcttataaacggctctgagcatctactgaggatgagaagactttaactaaaatcaacttcgctcttgagaacacatttctctttgacgactgaaacacctaaccttgtcattcaagttaaactcaattgctaccattttaaaatgtagcgactcagtattaaactcagtcgattcaagcctctgttcctcagctcctttctccctgggaatggtttttactggtgggtgggtttgcagcactgtcctggcatcaggtgtaagaggcaactggagttggcatccacaactgacttcctccaaacccaatcgagtttgccttaggttcactagctctgtcccagaatgctgcaacccacctccagtaggaaaagaggacatagaatgaagggattgggaaaatctaagtggcttttctatgctctacctca

SEQ ID NO: 16529 - DNA, 576 bp, Homo sapiens
  MAP TO AP000129.1; EXPRESSED IN PLACENTA, SIGNAL = 1.3
tagcttgctcattgctttgcaaaataatggcaaagccatttccagatattcaggactgtggagatttctgttctccattactataatgaacaaattcagataattaggatcttgagagtataccttgtgatacatcaagtcacattccacgttaggtgacaaatatacaagtgcattgagaaaggcaatttcaattttttcattagagagcaatctggtgtagacccttctaatggaatcagtatccacagacacatcatcagggcctaatttttgcaaattgttgtctccctgtgagctatcacctgtgcttgaggaagatgcttctgagtcttcttccatagcagcagcagaacatgcagcttttgccttttcattttcattcttctcttcatcctttgcttgaagagacttcagttcttccttggtgtgttgtttagctttccagaagctctctaccaatgcctcagcactagaaaaaactcttccaataacacagttaagggggaataatcctctctttctctacataattcagtaatttcatataccttctcttctgttaagtaagtcaca

SEQ ID NO: 16530 - DNA, 559 bp, Homo sapiens
  MAP TO AC006427.13; EXPRESSED IN PLACENTA, SIGNAL = 1.4
gcatccattaaagtctgcaaatgatttccaggtaacccaagagaacatagatgaacacacctggtggaactcatctgtttattgatatctcatcctccttaggcacagttggcctgtcattccatgctttaaataacttctctctttgccctctgtaatagtagatgttcatggttctctctggccattttcttccagccttcaccaaatctactttatctatgtaactcctaaggtatgttctttgccttctctttctagatgtagtggttatgcaccttgtcacaggttttgtaacccatagaaaaccaatggtcacccatggtccacggacattctttccagaaaaagacactcagatgactgtgcccctcctggcacacacactctgatagaaacagaacacacactcttacacacttgcacacacctacactcacatacatgctcacacatttcagccaacaatttcaggggggttcacaaagttcctggttccatgtttagaacctttgcttgacagtacttccttcagtgatgttatggaatcctagacttg

SEQ ID NO: 16531 - DNA, 561 bp, Homo sapiens
  MAP TO AC007719.1; EXPRESSED IN PLACENTA, SIGNAL = 1.3
  unsure 533
ttccttaaaaccagagtcccctgacttgtgctccagagcacgcctttcacattctttctgaagttgtgcaaaatggtggtacaggttttgatttttcagtatgggctagattatgttatatacagtttgcagttctattcttcagtcaaaccagttctacaaaatccatcatctctatcaatccagcaatccttcttaaggttagaacccagttaatagtgtcacttgtcactaataaattttcccttcattcacttcaccaccaaaactggcaattttaccttctaaatccttttcaaagtatcgtcttccttttttctccagtttacatccagttttactccccaatatcttttccataggctttggttctcactttagcagacatcacaatcaccaaaaggactttatgaaaacagtgatagctgagtacccccctccagagtttcgtactcagtggatctggggtaggtccatgaatctatatttccaacaagttcccaggtgaaactgctgctgccggttaggcgctnacactttgagaactacacaatagacaat

SEQ ID NO: 16532 - DNA, 578 bp, Homo sapiens
  MAP TO AC004032.7; EXPRESSED IN PLACENTA, SIGNAL = 1.7
tcactcctgcagagcaagggggaattgaatccatttgctcaggatgacttcatactgggttctacctgggatacagcagacttgggaaaattgggggcagccctggggtccctgaagggcctccagtggaatttagctccataggcatccggaagcatgtattaagtcccttccttgtgctacttctttctccagtggtggttagtacgtgggagtgctaagagcagtgcctggcacacagtaagcactcaatactcaataagtgtttgctaacatgagcttttccaccttcacagtgactccatgcattcattcatccacctaacatttttgcccatccctgcccttcactaggtcctggaaacgcagcaatgaacaagaaagacagagtggggagtgataaaagacatcaaccttgccctcacagagctcctgctctggaggaagaccaacattacctaggaatggctctaacaggagaaaaactgcacgtggtgtgtgctgctttagaagaaggtgctggagctctagggagagcacctgggggcttgacctggcctgcgtaggggaagggtcag

SEQ ID NO: 16533 - DNA, 554 bp, Homo sapiens
  MAP TO AC007556.2; EXPRESSED IN PLACENTA, SIGNAL = 1.4
tgaaccattatagtgagttggtcgttgatattttaggatctctaagaactgctttttacctacaggcattaatgaatgccatgacccttcaatcagtggctgcgatcacaactgcacagacaccttaaccagtttctattgttcctgtcgtcctggttacaagctcatgtctgacaagcggacttgtgttgatattgatgaatgcacagagatgccttttgtctgtagccagaagtgtgagaatgtaataggctcctacatctgtaagtgtgccccaggctacctccgagaaccagatggaaagacctgccggcaaaacagtaacatcgaaccctatctcatttttagcaaccgttactatttgagaaatttaactatagatggctatttttactccctcatcttggaaggactggacaatgttgtggcattagattttgaccgagtagagaagagattgtattggattgatacacagaggcaagtcattgagagaatgtttctgaataagacaaacaaggagacaatcataaaccacagactaccagctgcag

SEQ ID NO: 16534 - DNA, 564 bp, Homo sapiens
  MAP TO AC002472.3; EXPRESSED IN PLACENTA, SIGNAL = 1.4
aggggaggtgatattccagcttggctcttgctattagaacctccctgagcatgtgcgcagctctgggtgtcacactaccaacctggagagtacccagaggcaggaccaggatgggagggcctggacacctcatgggaactgctgctgcccagagctcggggtcctgtcacccacaggcctggaggccttaagaaagtgactcaacctcactgagcctcagtcttctcctctgaaatggggatcacaggacttcctaccaggcaggggatatgtgaagactgaacataatgattcaggaaaagatgtagcccagtgcctgggggacaccgagcacaggctgagccttcagccacctgggaaggggaaagggaaacacgggtggccccctggggctgatggaggaacaagggacccgctgggaggatcctgggtaaactcacctctgggcatctgccctgaacttgggctggcgtcacaaggaagttggtcaccaagaagaacacgttctctccctaggaggcaagtctcaaggttggcctggctgggctcgtgttgactggaaag

SEQ ID NO: 16535 - DNA, 556 bp, Homo sapiens
  MAP TO AC007313.3; EXPRESSED IN PLACENTA, SIGNAL = 1.5
ttccgtaccctcattgaaaacaatggttaacggcagaaacaatagctaacaccacagacatctcaactggttctgtttccacaattctgactaaaaaattaaaattgagcaaactttccatttgataggtgtcaaaactattgtgcctagataacctgaagacaagagcagagctttcaatggaaattttaaacaagtggaatcaagatcctgaagtatttatttaaaggactgtaacagaagatgaagcatggctttaccaggatgatcttgaagacaaagtacaatcaaagcaatggctaccaagagagggaaatggtccaaagtaaaagcagactggtcaagagcaaaggtcatgtaaagttttttgggatgctcaaggcattttctagtttactttctggagggtcaaataatgataacatctgcttattttgagagtgtttggagaaagttagccaaagctttagcagaaaaacacccaggaaagcttcactggagtgcttctgtaccacaaaaatgctcctactctttcccctcaccaaacaaaggcaat

SEQ ID NO: 16536 - DNA, 551 bp, Homo sapiens
  MAP TO AC007281.3; EXPRESSED IN PLACENTA, SIGNAL = 1.2
cctcaactcatccaaacctcagaatatcccaaaagtctaactctttaccctcttctgctaaatatgctctttttctttcttctctgaattcctgtggttggtattgttagttctcttttcacatgtgtatgtcttatttccccaactgtattatatgattttcagggcaaatactgtatttttttttcagttttatttctgcatgtatttatttacttatttattaaataatttcagcttttattttagattcatggggtacatgtgcaggtttgttacatgggtatattgcatgatgctaaggtttggggtatgactgatcccatcacccaggtagggaccatagtatccaataggtagttgttcagcccttttctccctccctccttttggagtccccagtgtcgtattattctcatctttatgtccatgtgtacccaatgtttagctcctagttatatgtgataacatgcagtatttgattttctgttcctgcattaattcactgaagataatgacctccagctgcatccatgttgctgcaaagaaca

SEQ ID NO: 16537 - DNA, 568 bp, Homo sapiens
  MAP TO AC007567.1; EXPRESSED IN PLACENTA, SIGNAL = 2.7
ccctccaatactccaattctaggagtacagaaacccaatggacagtggaggttagtgcaagatctcaggattatcagtgaggccgttgtccctctatacccagctgtacctaacccttatactctgctttcccaaataccataggaagcagagtggtttataatcctggaccttaaggatgcctttttctgcatccctgtacatcctgactctcgattcttttttgcctttgaagatccttcgaacccaacgtctcaactcacttggactgttttaccccaagggttcagggatagcccccatctatttggccagacattagcccaagacttgagccagttctcatacctggacactcttgtccttcagtaagtgaatgatttactttcagctgcccgttcagaaaccttgtgccatcaagccacccaagcactcttaaatttccttgccacctgtggctacaaggtttccaaaccaaagctcaactctgctcagaacaggctaaatacttagggctaaaattatccaaaggcaccagggccctcagtgaggaacgtatccagcccat

SEQ ID NO: 16538 - DNA, 568 bp, Homo sapiens
  MAP TO AB016897.1; EXPRESSED IN PLACENTA, SIGNAL = 1.4
aagcattgaattcagggaaagttgtgagtaatttcagatttcattgtcaatgaattatttcttgatccattttactccatctgattttcacattcgtttttattcttttttccttttttctttgtttttgaaatctttccacagctgaagattcatttttgtctgccattataaattatactaatagctctacagtccactttaagttgtcccctacatatgtattatatatggcatgccggtatgtattgtccaaccagtacagacctgacatcagccctacagagcgcacacataaagtcattgcagtcgtcaacaagatggtgagcatgatggagggtgtcatccaggtacgttccagccggccagccatgctcctccagtgattgtggttgtaattgctaagccagtgaattcagcttctttaaggcttctcatttggttacaagatttttttctaaaataaaagttatgtaaatattgtaggaaaatgtataactttaaagagttgaaaggaaatgcaagcttttttctattttgttttccctgtaaaacttcagcataagtg

SEQ ID NO: 16539 - DNA, 557 bp, Homo sapiens
  MAP TO AC007463.3; EXPRESSED IN PLACENTA, SIGNAL = 2.7
atgtgcctagatggaggtgccatttagcaaactgcccacaactccccagcagtagagtagagggaaggaagggctgagggaccagaaaagaactctagacctttgcataaatcttagccccaattccatggtcttggggaataagtttgcctgaccaacgtctgaaaaagttgatagagaagagtcaaaagggcctagattttggagtcaagtttatctgtgtttgaagcatggcccacccacctcttaccagggtgtttttaggatccacatccccagctacagcaggagacaagggtcttgagacctttagaaatccaaattctactcggacaacatagttgtcctgggcaaaaggaaatgtgccatgatcccaacattgttttcctacattgttactacatggctatgaagtttttagccttactcctaaatgtctgggggtttaaagaatggttcagcaaacgtggctcccccttaaagcccaccatgtccccaaagtctagaagactctgtctttggctgcctttaatcttagagttcgttttcctcctgga

SEQ ID NO: 16540 - DNA, 594 bp, Homo sapiens
  MAP TO AC008174.2; EXPRESSED IN PLACENTA, SIGNAL = 1.5
cacaaagaaggaaggttggcccagccaggtgaagaactctatatttgttttgtccaaaattctatttgttacaaatcattacctatttgcaatggccaactgctgggtgtggcagccaagagcaacacagtttttttcctcagaacttaattatatattatatatcttcatgtgttatcaggcaagactctacacagatagaagactttaagctgagctttgactgctacacaggttttggccatgtcaagatacagggaatgaggaaaaggtattcctagtggaagaaggaacatgagcgaagtcactggaagaccttggagatgtctgagaataggaatatagaattgttagagccaagtgtcaatgtgatgaaatcatggatcttctcttgcttgttttgcttttgtttatttttctgaaatcaattaagtcatgcctggagtaagtctatttaagagtttgtagttgtagctacattaccgtccatcttgggagaatactggttttaaggatggaaaataacctcctcgtgcaggtgggtaggactgctaatatctccaattagaatgatgtgtgatgtatctggactgg

SEQ ID NO: 16541 - DNA, 588 bp, Homo sapiens
  MAP TO AC007539.8; EXPRESSED IN PLACENTA, SIGNAL = 1.3
tctggagttcagggaagacgtccaggctggagacctaatcactatagaaggcatttaaagctataagattgcatgagatcaccaagagaatgagagtagatagagaaaatttccaaggaccaagtcccgggacactgctatgctgaagtttgggagcatgaggaggagacagaaaagagaattgaaaagggataggggagaatagagagtcccagaagtcaagaaagcatttcaaaggggcaggacaatcaattgtattagatgccactgataagtcaggcaaggagaggactgaaactaggagcttgtctgctgcctgagagaaaaatctgtgtcatcatcaatgtcatcatcatcatcatcaacaacaaatagatcactggaccaccattcaacaaatactaaaaactgggtcaatggtgggtcatcttgccaaagttctaagttttttctttttttaaaattccattgatacctcctaaagctagactggaaagtgggaatatttttattgttcacaaataatacataattatctctcctttgtaaaatcttccctttcccagccccacccaactccaaatcttg

SEQ ID NO: 16542 - DNA, 574 bp, Homo sapiens
  MAP TO AC007462.2; EXPRESSED IN PLACENTA, SIGNAL = 1.2
ttaatgtcttaaatgcccttatagcacataatacttggcacattatgtacttaatatataacacatggtataatatgtgcttctttaaaaatatagagccatggtataggaatgttttgcaccccgttctctaattttagcaacatcttgtaaacattatgtcctgtctttgattaaaacatacaatatttttaaatgtaatctattgtttctcttagattttatgccaaggttatataaagcaattccaggtcactgagccagttgaagtaacatataatagggaggaaaaatatgtctaccaatggaaattataccatgattcttcagtgatctcagttttctcagatgataactggttgggagcatctgtgaacaagatcatgagaaataaaccagatttgaatagccacacatgagaagatgcttctagatgtgttagtataagttatcgtccttgactgtaacctactaatagaaaatctaacataatcttaccttaggaagatcaaccagaaacaggcacagagacataactcaacatttctatcagtggtttgaccagttccaagga

SEQ ID NO: 16543 - DNA, 585 bp, Homo sapiens
  MAP TO AL008723.8; EXPRESSED IN PLACENTA, SIGNAL = 1.3
gatgtgtgccaaggacactgatactggaggctggggcatggcagtctgtactattaatggtaacacacttgttaaatggcatacttgcattaagaaggctaagaaagaaggctattgtaagcatatcttggctgttgtcttcattcaacaaagccttacaagaaataagtggctagtttgtgagcagcaataaaggaaatagagaaattccagaaagttagggcttagcaaaattaaaaagctgtctgcttccagatgccaactaacttgatacaggattgacaacaccattgagcaacaaaggcccaaattacctcagggcaaaaggcagattaaaaagatccagatagactcaaggtaagtgccatgatattgtgtgtgagagagacgggggagcaaagaaggtaaataagttgagatctacatctgaaaaataacttttgggggagttacggtacagggaactctttggaaacaaattaaaagcagactaagtttttaaggacattgtattacaaaagaaacccacagtttgaactaaaaaaggctcggactattcatgacttaaaacaagctatggctccc

SEQ ID NO: 16544 - DNA, 571 bp, Homo sapiens
  MAP TO AC007900.1; EXPRESSED IN PLACENTA, SIGNAL = 2.7
  unsure 136
tgatccaagtgtgcttttctcataactacagatacttatccttcacatacagtactttcactgttgggtttgtaccctgaggcagttttgtgaggaatacaatgcttaaaagtatacaagcacaacatccaaaaangtaaggaggatccaaataggaaggaatcctacaacataaactctggcattggtagccagaaaaaaatatagtgttatcctataaatacctgctggctgggaaactgacagaggactgatgtgatgttgctagcatactgagccatttccttcttgatagacttctccacattggggggaatgcggccagacacactggtcataatatcttgcaattctaggagaggcagggagggatctctgagggttttcatcaatcgctctacccagtcttttacctagaaagaaagcattggtaaaataggacccaagttaacacaatcccccaaataaaaagatatatagttgtcattctgtatacgtgggaaattggttccagaaccaccactcatatatgaaaatctgcacatacttgagccctacggaacccatgtat

SEQ ID NO: 16545 - DNA, 558 bp, Homo sapiens
  MAP TO AC009290.1; EXPRESSED IN PLACENTA, SIGNAL = 1.2
  unsure 300
  unsure 443
  unsure 488
aaaatcagtgtttgccaggggtacgaggggggagcgatatgaataggtagagcacagaagaattttaatgcagtgaaagtaccctgtttgatactataatggtggatacatgtcattatgaatttgtccaaacccatagaatatatgacactgagaatgaaccctaatgtaaactacgacttttggtgataatgatgtattcatgtaggtttataaattaaaacgaatatacctctctggttgaggatgttgataagaaggaggctatgtacgtgtgggggtatgggatatatgaaaaantctctgtaccttctgctcagttttgccatgaacctaaaactgctcttaaaattaaagtatatttttaaaattccatgattaatagtctattacaaataaaagaaggtattgtactcacagaatataagcaggaatattatganagaaagattatgcaggaataacagtttttgaaaattatatatgtntacttaaaattaaaatgccaatttaatatttccaagataaagtcaaagaagttattcagagagtgggacc

SEQ ID NO: 16546 - DNA, 566 bp, Homo sapiens
  MAP TO AL022329.9; EXPRESSED IN PLACENTA, SIGNAL = 2.3
gagcagatatattgagggtgggttttcaaaaccctgaagttattttctgcagttgagtttctgcgtgttaaggttggccctgtgttgcaggaggggatggtggctaaggccatgaagtttctggcttttaggctggtctgcatttcacgcagttgtggcaagaagggtctcttgtaaagctgatatgaagtcaagacatccgtatctcttccatcctggggatggttactcacgatgtaggctgtattgttaaaaatgtgtcactcttcccttccagtatccggagtgtgatgcagaagtaccttgcagagagaaatgaaataacctttgacaagattttcaatcagaaaattggtaagtcctgcttgttcatttggcatacggtaattttagtgatgaaattgggcgatactatagtaatatatgaatgcaccccctagtgctttatatcctctatagctgtggctgggaataaaggaaatttcatgtaattaataaggtatttaatgatgacttacattcctagtaacatattctatgattaagctcttgggaaatgggtaatt

SEQ ID NO: 16547 - DNA, 562 bp, Homo sapiens
  MAP TO Z86090.10; EXPRESSED IN PLACENTA, SIGNAL = 1.3
gcccccagcaactactaatctactttctgtctctacggatttgcctattctggacatttcacataaatgggatcatacagtatgtggtcctttatgacaggcttctttcacttagcataatgttttcaaggtttatccatgttgaagcatgtattggtacaccattccttttcattgccaaataatattcaactgtatagatataccacattttatttatccactcatcagctgatgggcatttggactattccatgttttccctattatgaataatgctattatgaatattcatgtaaaagtttctgtgttggtatattttttcaattctcttgagtatataacgatgagaagaattgctagtcaaatggtaattctacgttatgctatctgactttaacactaagcaaattttagcactatgacatacatcagggtgctgaattcctatgagttgctttaatcctcttcccaaaaaaattcatcaatttgctcttattcatagtctaaaaaaaaacttcccaaggttacttccttccatacagccacagacgaaggtttt

SEQ ID NO: 16548 - DNA, 557 bp, Homo sapiens
  MAP TO Z83844.5; EXPRESSED IN PLACENTA, SIGNAL = 1.5
agggcagctacaaaaaccaggccagcctctgaaaggtgctccacatctcattaaaaaccgtgaaatcgcactgccccactatcagaatagctcagaggagaaggtctgccagtaccaagtgctggtggggatacggagaagagcagctcccaggcgctgctggtgcaaatgtgctttgttgcacccacggcaggaaactgaccagcttctcatcaagttaaatacgcatctaccctatggcctagcatttccactcttgcttacacatccaggagaaatgagtccttacatgcacaaaaggatgagtaccgtaatactcacatcagcaaataaacaatacagctgtgtgtcagtagtagaatgaataaattgtggtcgattcatacgttagaatacagcaatttaaaaacaactgctacacacaaaaatgttggtgaatctttcagacacaatgttgagcaaaaatagccacagaagagtgtaaggctgtacgattttatttaggtgaggttcaagaacagacaaaacacggtgatagtggtcagaagagcgggtac

SEQ ID NO: 16549 - DNA, 494 bp, Homo sapiens
  MAP TO AC004909.2; EXPRESSED IN HELA, SIGNAL = 0.6; EXPRESSED IN BT474, SIGNAL = 2.3; EXPRESSED IN HBL100, SIGNAL = 0.75
ttacaaaataacaatcacattgtcttcaagacttttactttggagatccttaaaattatgtttaatcctcctctcccgtcaactgtgggaactttgggaatgtacttcccaaacttctctttcagcaacagtttcatcttctttaaataggttaatagctatttaacatgggtcttgtgtagattacatggaataatatatgaaaggcaccttgtttaaccctataataataataaacagtagctgtattaatggtgtattaatggtaatgacggtgatgattatgatagtgatgacgtttatgctgttgatgatgacaatgacaacatgatgtacatgaatttattcactgtgctgggcagcggagagctaaaagacatagatcccgacctcaaaagacttaccatctagttgttgacacacacaaattgttaaaacacatacaaattgcactgtgcttttaaaaactgaaaagtgcaaataaagactagagg

SEQ ID NO: 16550 - DNA, 463 bp, Homo sapiens
  MAP TO AL035455.28; EXPRESSED IN BT474, SIGNAL = 5.7; EXPRESSED IN HBL100, SIGNAL = 2.2
ttttcaatgaccttggacgactaacagaaacatatttaaatagagaaagaaatgggacagctttcatgacctcagtaccctgtgcattatttattcagtagcaacactctttccagaagggcggcagctcttcagcaactataacatgatatgaaaactggacattactcttaccttctccaacttcatttcactgatcacaatatcagagactagactgctctaagtaagacaggaattctaaccaggaagatcattctgtgttaagcggcttttacagaggaaatggataaggcacagagatactcactaatttctataaagagttcatttatgtttatcgcgttttttgcgctggtctctacaaaaattgcatgaatagagtcggcgtagtcctttgcatctctctccatgacttctctggaaggcaacaactacatatcagaaattctacccatgaaga

SEQ ID NO: 16551 - DNA, 477 bp, Homo sapiens
  MAP TO AP000406.1; EXPRESSED IN BT474, SIGNAL = 2.2; EXPRESSED IN HBL100, SIGNAL =   1; EXPRESSED IN HELA, SIGNAL = 1.4
tccaccatggactgttttccataaattttcttatgaccttcctttagtttccattcaaattcacctatgtcagaccgaaaacggccatccttgcataaggctccttcaatagtctcacccttcaaggcataaatacaaagtttacttcctttttcatgaagttcgttgatcttaacaatcttctttcttgtccttcctatagcaacaacatgaaaaagaatgcattccatgtttggattttcacattggcgtaatatgtgtccatcttctttgctactctttctttgaccaaatgtaattttaaaatgagaatcactaggcaggcacttgagaggcattcctaaatttatatgtccatctattgtcttttcttcataaacaataatgttcttattaaactgattctttatcctttcactgaaatagtcattagcactcagggctgagtagatactctcgctgggtttaccatatgct

SEQ ID NO: 16552 - DNA, 467 bp, Homo sapiens
  MAP TO AL078623.21; EXPRESSED IN BT474, SIGNAL = 1.9
agttcaccaaactccccaccccactggctgaattcactcagacctctctctggggtaaaattgttcagtagctttcagcctccaacccgtacctgctagagtaaaaccagcaagaacaaccctgaaaaacttctgacccccactcttgttattctgaatctattttataggaaaagttttcctactggaggttttgagtactctacatcttacacagttgctgtcttaaggggaaactatttgccagaaatttgtgaattctcacacagtaagaaaaataatcattggatttggaacaattttactaacctcatttctcttactatgttggttaaaggacattgattggatgatgtaataacaatagcaacatcaacaatagtaatcacaaactcctgtgtgatcgtattctttatggtaaatgttatcattattttagtcttcaaagcaactctatgaagtaaggg

SEQ ID NO: 16553 - DNA, 487 bp, Homo sapiens
  MAP TO AL031428.9; EXPRESSED IN BT474, SIGNAL = 1.3; EXPRESSED IN HELA, SIGNAL =   3; EXPRESSED IN HBL100, SIGNAL = 1.6
acatggctcgagattccaagttagggatttgaatcagacagtttgaccccaaatgactctgaagtccatgtttaatactcttactctaaactgttagggctaaattgagatttaagataaaatgatgagattattaagacaggataagaattctgcaggacaagcaggtcttaaaccgaactaacccattaaatccccatggctccttatgtaccaaatcgtcttcattgcactgaaggcacttgtgattggctagtggctctcttttccaaaattccccagatctgtgctatttcttaggattccaagtaaaaccagttaggcatgtatgtataccacaccttgcatagggcggtcagatccctgtgtttgcttttcactaagaactcggcagtaatatctctgggtggctttacttcagatgcttctttgtattgctgatggagttctttaattttctctttcaaatttaccatctaagaaggaa

SEQ ID NO: 16554 - DNA, 485 bp, Homo sapiens
  MAP TO AL109613.10; EXPRESSED IN BT474, SIGNAL = 2.3
gggatgatggaagacaagggtctagaacgtttttctgttttatgtctagaccgagtgatagtgaggtgtatttactgaataatactttgtgcctagaatattgtaatcttgtaatttttttttaattcaggaaattcagcaaagcagcattttgtattagaagtaatttgtatacttgacatttgaaaaaaatagggcttaagtggaaactgtgtcattaatatttaatttttggaattgatcctgaggtgatcaatttataaataatatatagaattctcatgtttatgatacttgatcagagataattttttgttttatagtcctgagggaagttacactgatgatgcaaaccaggaagtccgtgggccaccccagcagcatggtcaccacaatgagtttgatgatgaatttgaggatgatgatcccttgcctgctattggacactgcaaagctatctacccttttgatggtatgattttctt

SEQ ID NO: 16555 - DNA, 448 bp, Homo sapiens
  MAP TO AC007566.1; EXPRESSED IN BT474, SIGNAL = 0.7; EXPRESSED IN HBL100, SIGNAL = 0.69
cggagagccttttggaagtccaatgttgttaaaactaattctgtttaaaaataaacaaaacttcttttactagttatattcactatatgaattttcaaaatatgccatcatcttagctggaaacactaattttctactcaaataactgcttattcaaatactacaatggaatatatttaattcttgtcttactacaattacatttctccacaatagaaagaagattccaagttcaggttttaatagtaaaacatactttctctggtggatatactctgacgagagagtcgagaatgtatggctcgatccacaagtactgtaaaatctctagccacaaacccgccagtttctttagctacatgctgcaggtcaagatcggtgaacttgtttatatcacagtccaatttattttttattacattacacagaatttcacatctttgttcct

SEQ ID NO: 16556 - DNA, 456 bp, Homo sapiens
  MAP TO AC009637.2; EXPRESSED IN BT474, SIGNAL = 1.1
  unsure 147
  unsure 269
ggaagatttcctttggaagcttttgttggagtggaggaggtgaaaagagtattgctaaggtagagaatggagaatgttgactctcacagccctctgacaaattagaatcctagaataagacaactttaaatgtgtagactcggaccngtggctattcaatggacaattttagatttgcataggactatgccttgattccttagagtatcattgtgagatggttgtatattctgactagaaataacaccattttctctttgcagcacctngagagtttattcagtgacgataatactcacaagaccctttttggatttgtggcccaacccacaagttatagttccttctctgaatatttcatccagattgtgaagagcagcttctggcagccacagttgtactatgtgacccctacttcccatgcccaggactgattcgaccccgtagtagacacct

SEQ ID NO: 16557 - DNA, 482 bp, Homo sapiens
  MAP TO AC009405.2; EXPRESSED IN BT474, SIGNAL = 0.95; EXPRESSED IN HBL100, SIGNAL = 1.1
tgcattatctacgaaagagggctaatataattgtactctctaattaactcttgcagatgctatgaggcccccaactcacaatattgttgaaagtcctctaagagccacaaagccttcttagttatcaggatagaacgatgtttatgaatgggcaagaaggagaagggaaggtatgtgtttgtatatagagggtttgtgtggggaagacattcattcaatattcaacagatgtttgttagtgtaggcttaagctgtgtctactgtaggagttaggactgtgtggaggtggaatttgaccctggagttgattcagtggagaacattgggatccctctgaacatgaactcatcaagaagggagatgacatcatggcgcatatgcctcgcttcaagccaaagcaccactgtgggagaggtgaggtgggattcccaggggactgtcctgcactccagacccttttgacagatgcctgagccctaaag

SEQ ID NO: 16558 - DNA, 489 bp, Homo sapiens
  MAP TO AC009639.2; EXPRESSED IN BT474, SIGNAL =   1; EXPRESSED IN HELA, SIGNAL = 1.3
  unsure 54
  unsure 464
aaggatctgaaaccaggcaggcaatctccagagtctgctcatttgctcattaanccgcaatgcttaaaccctgagaagcaatttgtgggcatggaaacaataacttcgtgtcccttccagctctctacaaagaaaacttttttttttaaagggaaggaaaaaatttttaatcctagcaaaaggctgtgtaacttcagttgccaaaacccttggatctcaaacatctactttctaaatcaccagagtgtgagactccaaaacaatgaatatgcactcagaaaacgaaggcaagcttaaaagaactcactctccataggcaccttctcccagggtttgcaccaagtcccagtcttccacaaagggcactgccatgactccaccgagcacctcggctgtaaaaggcaggaatccagaaaagatgtagagtgtaagatcaccagtgaagccactgagccccgcctctnccccaggattgcccacgaaaattaa

SEQ ID NO: 16559 - DNA, 486 bp, Homo sapiens
  MAP TO AC010740.2; EXPRESSED IN BT474, SIGNAL = 3.9
cctacaggccctcatgattcttcctgtgggtccagacagtaatagttttcttaaaaggggatccaagatgctagggaagctggctctgccttgatctcactttttccagtgcagaaaccatgagtctaggaggaatcattcatgcatggtgcctggcagattgggggaggggcattatgaatcgaaaggcccatttctcttactgtctgttcagagtttttcacttctctatggcttcagggatcatctcagtctcagacttgagttcctggatgttgctggtgatcatcttggcactggataattatttttggttttctcttggggagagtgaagccatctggcttctcttctgcaattttgatggtgtcagtctcttcaactggggcaatttaaacatgccaattaacctaacatgcatatttttgggatgtgggatgaaaccagagcactcagagaaaacccacacagacatggggagaacag

SEQ ID NO: 16560 - DNA, 463 bp, Homo sapiens
  MAP TO AC010877.1; EXPRESSED IN BT474, SIGNAL = 1.4
ttttacttgtccaaattagagcccaaataaataatatatctttaattagggatgagtttattgtagattatgatcattgcatttttatagtcaaatgtcagttattctcaactttaaatattttaatattgtcatcgtccagcatgcacatttgaaaatttgaggaaaagaaaaattaccatgtgaatagactttagaacccagattcacaaagttatttctaattggtataccttttatgtaaaatattcagtagttactctcacaaatagttttttcccacaataggtattgtcttttgaaaattctgaagcaatatcagacattgagagaagctcttgttgcagcaggaaaagaggttatatggcatgggcggacaaatgatgaaccagctcattactgtagcatttgtgaggtgagtaactgtttctactgatagttgttttgttttggattctctagg

SEQ ID NO: 16561 - DNA, 457 bp, Homo sapiens
  MAP TO AC010090.1; EXPRESSED IN BT474, SIGNAL = 1.4; EXPRESSED IN HBL100, SIGNAL =  44
aagcctgtatgtgtaccccctaaatctaaaataaaagttgaaattatatttagaaataaataaagctttttttaaacttaagtctcataccctggagatgaaatatatctttcatatcctgttctgtcacctccttgctatgcaattttgagcaatttttttaacctcactatgcctcagtttccttctctgggaaatggtgataataatagtacctaacttgcacatcctaaagttgtgaggagtgaaaaggatactgctcataaagtgcttagtacagagcctggcccacagcaatagcactggtctgatatcagacatcacctgctttcttcttctccaactgctcctcctccacatcatcatcattatcatcatcatcacttttagaccaatactctctatataattttatgtctttaaaaatggaaaaccatgcagttaggagtcataaaaa

SEQ ID NO: 16562 - DNA, 485 bp, Homo sapiens
  MAP TO AP000148.1; EXPRESSED IN BT474, SIGNAL = 0.73
ctcctccctggtaaaagctgacatacttccttccttaaagacagtgtagaggtctccccctgtaggaacacatgtcttatcctgcactcatctcctttcctggatattagaccaattatttggacgtcacagcttagctggagaaagcatttggtcagataagggattaaagggactattatacaaagagctgcaggaaatagtcttacttcccttggggagagaagtgaacctcatccttcaaggaaggacatgagagaaaatagaaatgcatggtacaaaaatgtcgtttataatacataaattgaaatgaatgaatgaatgactcagctcatatcatccccccaagaatattctatgtcctgtcaaggcagaaatactccttgttgtgcatgctaatggccttttttcatatttctattatagaaattattacattgctgttatttttcacagtcatgtctcctctgctgctggaggaaatt

SEQ ID NO: 16563 - DNA, 476 bp, Homo sapiens
  MAP TO AC008164.2; EXPRESSED IN BT474, SIGNAL = 0.84
ctcttggggtggaactcttggggtagaatatgtatatgtgtgtgtgtatatatatatatatctatatatgcacacacacacagagggttttatgtacgtgtgtatgtacatatgcatgtacctacgtgtgtgtatatatgggtatatatgtgtgtatgtatatatgtgtacattatgtagaatttattctagaacctagctcagagcatggtgcagttgacctcctatcacccctgctggctgcaagatgaatggatgggctagacttaatctttcacctgcacacttccccagttgtgccaagatctctgcacttcgtggtactggatgttcacaagctccaggaggtagcctgggaccaggtacagaagatgagactgaagctcagggaggaaatggcttggcaaagcccacagctgtgaggacatcaggatccaaactcttgtctaattgtcccctctttcactgttcatgct

SEQ ID NO: 16564 - DNA, 453 bp, Homo sapiens
  MAP TO AL031667.17; EXPRESSED IN BT474, SIGNAL =   1; EXPRESSED IN HBL100, SIGNAL = 1.9; EXPRESSED IN HELA, SIGNAL = 0.99
tccctttttatcttctgagattgccactagattctcagtaattgcttgtgaattaaaatcatatcccttattccctttcagtactattataaactctccattttcaggggtcgatcataatctttcttttagtctactaccacagtactatgggtaaatgttcaagaaattagagtgaaggttggaataccccagtaatcgttaacttgggattgaggcaggtaactaggtctcatttccctggacaggtaaagaaactgcagtctatcctaaaaccaatgatgcttcggcggctgaaagatgatgtggaaaagaaccttgctcccaaacaagagacgatcattgaggtggaactgaccaatatccagaaaaagtactaccgtgccatcctcgagaagaacttttccttcctgaccaagggggcaaatcagcacaacatgcccaatctcatca

SEQ ID NO: 16565 - DNA, 496 bp, Homo sapiens
  MAP TO AC007239.2; EXPRESSED IN BT474, SIGNAL = 0.74
tttccagtcataagattagagcgcttagtttagtttccttaaataataatttctctgtgtaggccaagtgaccaaattggactctctgaggcccctcaacaatctagtgacatgaacccagacaggaaatatcattttccctagtaattaactaccaaagtttcaacacacctttgctactttgcatcctgtaaacagaatccaatattctgaacgatattttttaccctcctggtaaagggatcactctacttaccagaatgaagacagtaaagaatatgacaacaatggcagccgtaataaacaattttttccgaggaaacacagcagcaggaaggagaaacactaacgcaaaacagatggcacctcgaagtcctccataggcaatgatgaactggtccttaaaggtcaggggaatggtccggaacctattaatgacctgagtcaggacaaaaacacctgcaaagaaagaaaacccaagaggaaacagactggg

SEQ ID NO: 16566 - DNA, 459 bp, Homo sapiens
  MAP TO AL021393.1; EXPRESSED IN BT474, SIGNAL = 1.4
attggccaagtcgtttgaagttgctagccaagttggatcttatgttgcccctgccccgtgagacactcaaatccgtgcttagagtgcaagtgaagtttcttaacttccaaaggagaacagcagtgtgaacaaaatgcaaagcagtaagagagaactgtagctctgaggcactagggccaaggtccaattgaatgggtgtggagccctcttatctcctcagccttctatttgggtcttcactattggatctaaacagtgaagcagagggactatgctctctttcaaattgatcaccttagttctcaaaacatccagaagtatcacatacgtggagaacctgcccacgccagtgttgttttgttgtgggtgcaccattgacttacccagtattctcaaggtcttcgaactgatgattctgctcaatttcatttctctttggccctggaaaggcagttgagt

SEQ ID NO: 16567 - DNA, 447 bp, Homo sapiens
  MAP TO AL132774.1; EXPRESSED IN BT474, SIGNAL = 1.3; EXPRESSED IN HELA, SIGNAL = 1.4; EXPRESSED IN HBL100, SIGNAL = 2.2
ctactacttttgcggctcccagggctgaatgtgtaattggtattgataatttacattcttgttctgtaaatgttcatgatgtacaagagagatttttttgattggaagagccatttgtagagagggatagaaggatgcatgcacaactgatcacaacttggctttggttctcttcaagttttttgtttttttttttttaattagaattccagaaggagaaaatgaaaccacaaccttgaccaaggacttaaatacaatgggactaatgaaaaatgtaatatctcaatgtagcagccttgtatggtcagtgaaaaaaaaaactaatgggaatctggaggcttgtgttagatcatgccaactgaatttagttggtattatagtcctggctgttacagacattgtgactgtaaatgaatcaattccctgtgatagcacctggtgtgccat

SEQ ID NO: 16568 - DNA, 454 bp, Homo sapiens; identical to SEQ ID NO: 3580
  MAP TO AC007263.3; EXPRESSED IN BT474, SIGNAL = 0.64

SEQ ID NO: 16569 - DNA, 444 bp, Homo sapiens
  MAP TO AL117355.1; EXPRESSED IN BT474, SIGNAL = 1.2; EXPRESSED IN HELA, SIGNAL = 1.5; EXPRESSED IN HBL100, SIGNAL = 0.94
ggtgcatgactgtacaccaaagtgttcacagtggttattatggtggtaggtttattgtgttttatgttttctacaatagatttttactttatattcagaaaaatgtgtctttttttatattttaggtaagatctatattttctacataatgatagcttctaagaattatatttatctaatgcttagatttttggactaatttttaatataaaaaatgatggttatcttataataatagaagtgtatttgatatattttcatctgtatttacagctctgaaagagaatctttactatgaagctggcaaaatgcttgccatttctttagttcacggtggtccttcacctggtttcttttctaaaaccttgtttaactgccttgtttatggaccagaaaatacccagccaattttagatgatgtttcagactttgatgtggcacaga

SEQ ID NO: 16570 - DNA, 474 bp, Homo sapiens
  MAP TO AC004900.2; EXPRESSED IN BT474, SIGNAL = 1.2; EXPRESSED IN HELA, SIGNAL = 1.6; EXPRESSED IN HBL100, SIGNAL = 1.5
ctgggaatggtcccatttagtcactctttccagctgctgtcaccacacactgaaagggagcttcgtcctgagtcagactccatggatgaaacattcagcatcacatgtaacctattgttcttcacaacaccctactccactacctgctaagagatgttctacatggtacacaaaccctgcactcgagtctcaggcccacagctgtctcctcagacctacctccgcggggtgcagtcatcatgcgggggaatgatgacaaccttcaccgtgacagatgttctcaggaggtcgatcatctgctcatggctcagagtggctaccgccaccttgcagatctccaccaggcgactgccctgcctcagccctgcctgccaggcataaccgtagggctccacatccgccacaatgccctcatagttgacatggaagccaagctgtcctagcccatttcttcgcagagtcatctccaccgat

SEQ ID NO: 16571 - DNA, 471 bp, Homo sapiens; identical to SEQ ID NO: 4
  MAP TO AC007363.3; EXPRESSED IN HELA, SIGNAL = 6.7; EXPRESSED IN BT474, SIGNAL = 1.1

SEQ ID NO: 16572 - DNA, 477 bp, Homo sapiens
  MAP TO AC007182.3; EXPRESSED IN BT474, SIGNAL = 0.65
agccctacagaggagaggtgataaaacacacttcatcgccttaaccattttttttttttttggccaaatacagctctattgagtcctcaagttctcttttctttttcctgtagctattggtcaaaaaagtcagagacctgggaatgtgtaagcaggcatggagaagagctctccttcgggtgcaggcttttggtaaatagagggatggagggttcatgcagagacgaaggcatggaaggatggctggacggataccacacaccaccagagcctgctttcactcagaagggagatgcagacccatgtaatcctccccgtctctgcttcccaggactcatctgatgatgtgagaagagttcagaggagggagaaaaatcgtattgccgcccagaagagccgacagaggcagacacagaaggccgacaccctgcacctggtaagtgttcagatcaatcttcatcctcgtgagctttaggc

SEQ ID NO: 16573 - DNA, 413 bp, Homo sapiens
  MAP TO AL049652.16; EXPRESSED IN HELA, SIGNAL = 1.1; EXPRESSED IN HBL100, SIGNAL = 1.1; EXPRESSED IN BT474, SIGNAL = 1.4
atttgctcaaggtcacagggcaaaatagcagagttcacacatagacttatcacttactccaagcccttaagcactctaatgcctctcatgcctctccactgccctccacctgaagtgggcctcacactttcaagttccctactagctctgaaagtctaagtgggtgatcactgagcctttcccctggttccagctctttagctgctctggttaactggctctcatgggattgggggtgtgtgattgcagtcaccggaagaaaagaatgcgacagctgcagaagaaaataaagaatggaacactgaacataaagcaggacgacccctttgaactcttcatagcagccacaaacattcgctactgctactacaacgagacccacaagatcctgggcaataccttcggcatgtgtg

SEQ ID NO: 16574 - DNA, 477 bp, Homo sapiens
  MAP TO AB026898.1; EXPRESSED IN BT474, SIGNAL = 1.6; EXPRESSED IN HELA, SIGNAL = 1.4
cctagggattatttaggggcagttaaatatcctctactacctcactagacatccaaaggagatgctggcataacatactatttgaatatcagccagctactttttgttttagattggaattgaaaataagttattaattttaaacttctgtatttcctcatatttgctgtttttttcatttctgcacagttaagtttatgagaaggttcacatgtgttttgattctaaaatggatctgaattatattgaatgatttagagatttttagaaaattatgtcttctgttttcaggttctgttctggatattattaagcacattgtggcaaaaggggaacacaaaagtggagtcctagatgaatctaccattgctacgatactccgagaagtactggaagggctggaatatctgcataaaaatggacagatccacaggtatgtaaaagacaatactcttgtgttacatcatctcattaagg

SEQ ID NO: 16575 - DNA, 397 bp, Homo sapiens
  MAP TO AL121716.2; EXPRESSED IN BT474, SIGNAL = 1.3
tacccaccgagactattgggattaagattattaaaatactatgatcaaaatttatcctgaagtatgactacttcaaaatagttaattcaaaataagaaacagaatttattaattttataaaagagtgtgacaaggtagatgtttggttctttattttaattatttgtgtttattttaggtcactgttcatcatgttagatagccttaacagtctcgatggttctactagctctgtgggacaagcctggctgaaccaagtcctacaaagacatgatattgcacgagttttggaaccattgctattgctcctgcttcatccaaaaactcagagggtttcagtacagcgtgtacaagcagaacgttattggaataagtctccctgttatccaggagagga

SEQ ID NO: 16576 - DNA, 460 bp, Homo sapiens; identical to SEQ ID NO: 10412
  MAP TO AC007262.4; EXPRESSED IN HELA, SIGNAL = 1.3; EXPRESSED IN BT474, SIGNAL = 1.5; EXPRESSED IN HBL100, SIGNAL = 0.68

SEQ ID NO: 16577 - DNA, 475 bp, Homo sapiens
  MAP TO AC007876.1; EXPRESSED IN BT474, SIGNAL =  13; EXPRESSED IN HELA, SIGNAL =  39
taggcctttgtcatggattgttttgagtgcaagttaaacactgtttgtttacaaatggctcgagtaatagcagtgagccatgacacatagaaatgatgccttaataatgtctttaatttttttttccatgtaaattccttggttgaactgttttacaaatctgggggccgccatttcaggtatggctagcctcctattggggaatttttaccactcttcttcaatgtagttcttatttttccaggcaaaccaagccctttcatttggagagtagcttgggatctctaggagaagaatctccaggaggagaggcataactaaggcttcctctttagaaggtagagttgtcattgcagcctggtttgcttctttgactgtctttctattttctttagcctttagtgtttttgctttttggtacctcttgcagtgcatcactgacatctgtattgagacccctacagcatcttagagc

SEQ ID NO: 16578 - DNA, 495 bp, Homo sapiens
  MAP TO AC009758.1; EXPRESSED IN BT474, SIGNAL = 0.97; EXPRESSED IN HELA, SIGNAL = 0.97
  unsure 335
  unsure 418
  unsure 432
ttctggggcaataaccaaactggctgttgcaactgcagttgtgctgcagaaaaacaagatattaacacggagcgtgaaggtgccgcaagatcagccgcctgctgagcaagatcagtgggttgtggctgattttttgccacagggaaggcaggtattggaggttgtaaaattagaggaaattgccaggcttcgggatccccatattctcttgcctgtgctatagccctcataagaggagtgtcatttttaggaatgtatgtgacttgtcacggtagccaccggaccagaagcagaaaaaagttggaattttgaatggaggaaaagttgagaacctngtaaaccaggatgagacgagattacctgccgagcagatctttcatgggcctgaaatccaggctgccccggtaattgcagaccnaggctacaggggangcctgaggtttcttaaagggaacccgatattccaagagagatccaggcttcaagggaaacatt

SEQ ID NO: 16579 - DNA, 469 bp, Homo sapiens
  MAP TO AC010968.1; EXPRESSED IN BT474, SIGNAL = 1.1; EXPRESSED IN HBL100, SIGNAL = 1.8
gctcattgtccctatactgttgctgtgtttatttctcagaacaatgatgttcttttataatagcaatttggttgtcaaattttagtaatttcacattgatacttttatctaatttatggtacatatttgaatttaatccagttggcccaataatgttctttagagaagttttttccagtttaagatccaattcaggataatatattgtgtttagtcactatgtaaacatttatttttaatagaccattggcctgaaaatcttaagtgttgaatttttgttcttttaacagctaaaccaggtggacaggtgaaatgtcagtatatctctgctgtggataaagttatatttgtggatgattatgcagtagggtgtaggaaggaccttaatggaatcttgttgttagacactgctctgcaaactccagtttcaaagcaggatgatgtggttcagcttgaattacccgttaca

SEQ ID NO: 16580 - DNA, 482 bp, Homo sapiens
  MAP TO AP000426.1; EXPRESSED IN BT474, SIGNAL = 0.96
tcttgatcttgtgttggggccaaacaataggtaagaaggactactgagaagatttcaccaactggattattgatgaaaggatggaatggaagggatcggtcccttagaaaaacagctagttattcaaaggggtgggtcttagggaggaagcgggtggggaaagaatcctggaagtagaaagctattcattcctccagcccccagcctccctcccagatggtccccagaatcaagcgtctctcagctctgagtcctgaggtgagaggagggtttcacttcctgcctagggttaccaagtgctggaagagccattaccactgacatgagctgacttggagtgttgaaatgaaagaactgagtgtcttacccttctcgttcatcatccgtgttgtaatacacctgtggaacaaaacaataggcttactgtaggtcagagacaagaaatggaaaaaatattacgtgatgtacagactttcctaagg

SEQ ID NO: 16581 - DNA, 1954 bp, Homo sapiens
  MAP TO AC004943.1; EXPRESSED IN BT474, SIGNAL = 1.1
ggccttggtttgatgtaacacagacctcatatggatctccagagtggaactctggctgtaggccacattacaagtgttacacttaaaaggtttgttgtctgggctgctggtgggttctggctgaccggttgctgattcttgaagggctctctttaacttatgcaggtgggagacagaattgtagtgtactagcaggatattcttttgagtgaaagattccttgcagacggtacacttgtaagggcgagaagggtctaggaacttttccatagtaaaattgggaccttttctgaaaggcagagctctctttggctctgagcccgagtcttcttgtactgacccagagtcactgcccgttgggctctgtttatcttccaagtcactctcttcctccttgtcttcctcaacaattatggtatggtcctctgccagagtggggtctcccattgccaggaggtccccattggccagcaggccaccataaagctgttggatgtcagcctcactcagctccaggtggcttgtctcaaggtgcttcttcagagcctggaaagttcggaaactgcgctgacaaagacagcacatggtggcagctctgatcacatggtactgagaatggagctgcaacttttcaatggtcttgaaggccaggctacactgattacagcggtacttgtacacatggcgatctgacaccggcagctgaggcctcttggcatgcacttcattaaaatgcgtctgaagggcagcagaagttttgaaaacctggttgcaccccttcttccagcagatgaagcctgagtcttctctcacagagcctgggtcagcaggggatggtttcaaatctccgctttgctctgtgcttgcggatggcaagatgttctttcccagatcctctgaggtttctgttaaaaaaaaaaaaaaaatcaaacccaaagataaagaaggctttgtttcaaggatggcacccagagcggtctacctagtcaggcctcatgaacacagaatctgatgatgagggaagtgcccaacctgaatgacagaatctctgcggagcgcctcctgctttcttttgttcctccaatagagcacatattataaacagggtgcacatgaacagagatggataaaaggaaatacaaaaagtttcaatgcataatagacccatgtcatatcacagatctaacagtcttttaaatagcatttaattgcttgactcagaatcctcaatttctcaagagctggtttgaaggttactgatcttagactggatttcccttttatgttcatcttttatgtaataagcatttagcacagtagatctgaagtgtagaatatgtgaattaatgctgtcctaagttgtgaggaatttacaagaactgctgaacatcgtaatataagaaatttggggatacatatttttaggcatttaatttcttgttataatgtgacttctgattgccatctctattcaataagcaattaacattcaagtgttcaattatttaaaatacatttttttccctacaatgagatcatcacactcataaataccgagaccctttaacaggtcatttgtccattgtctaatatggaaaactcacaagaaagagagaaggcaggacagtagtgtggccaaactcttcccaacttagaactcttcccaccttagaggtgaacgatgtaggacagcctcacagaggtctaaccattcatctagccaggaaacactatgtggcaccaactactgtctacaacaatgttctttccatcagcatctctgtgcttcatcctaagccaatcccaaaaaactcagaacgaaagacaactaatccagtgtacctaaaaatcaacccacaagtccctactaattaagtcctcagaaatacagtgtttaatggcttagaatggtagggcctactgactgagtctctggttattcactccctaattg

SEQ ID NO: 16582 - DNA, 445 bp, Homo sapiens
  MAP TO AC011504.2; EXPRESSED IN BT474, SIGNAL = 1.1
gttgcctatttgtcatccccaaattgactaatttcaagttcctaatatcatttttaaaatgatttttttaatatataacaatgaaggaggctatctaagagggcatcactcacatgcttgagcctgggctaaaaaatttttaagcattatttataaatgggattattgttttccaaagttctcctccacaaagagattagctgccaccatgcccaggggggtctccccaagtcctttttaattccctgcctagaggtggaaggtggttggactggaacaggaggaagaagcctgctccggcagttttcctggaattgcctggaaacttttactttctgtttcctctgctgataatgactgtcttcggctctgcagccagctcccctctccccccctccagccccctgttgctgcagcctccccgagctccggtataaagtttggc

SEQ ID NO: 16583 - DNA, 470 bp, Homo sapiens
  MAP TO AC008123.9; EXPRESSED IN BT474, SIGNAL =  51
agaagtggacccacacagttcaaactcatgttgttcaagggtcaactctatagattagcattcccatttgggaaaatgaagcacacagggagaccaagtaacttttccaagttcacacaagtagtgggtgatagaagccagatttatatgcttagatagtctggcttctaaatctatacacttagccacttcacttcatggtctgcttagaaagacagcttgtcagtgaggtgtggttgatgtttccccaagccttagcaaaggtaaaatggacccccagcatttttaaggtttgcctccttaaaagcacattcacacactcaaactgtgttgttggaaaacagaatgaatacttaaggtttcaaaggctctccagaactgaaaagaggcacagaggctgcaggatcagcaggatgggtgccaaaacctgctgtggcaccatgcctttgcaaaggtggatcttcagagga

SEQ ID NO: 16584 - DNA, 446 bp, Homo sapiens
  MAP TO AC008012.8; EXPRESSED IN HBL100, SIGNAL = 1.2; EXPRESSED IN BT474, SIGNAL = 1.1
tgaacctattgcataattggctattgtctcttattttcattaccttctctctgagaattgaagagcagtaatcacagttgcttcctgaatccagtaaatgtttgggatacacccctactagttcaacacattgattgcccattacacttacttataaagcccattgatgaatgtgacttacttaggcatttggtaatcatgattgtatttattgttcacaggggaattttatattacacggcattctaatctctcagaaatccatgttgctttccatctctgtgtggatgaccatgtgaaatcgggaaacatcactgctcgtgatcctgccattatgggactccgaaatatactcaaagtttgctgtacccatgacatcacaacaataagcattcctctcttgctggtacatgatatgtcagaggtaagcagatagaaaaatcctg

SEQ ID NO: 16585 - DNA, 476 bp, Homo sapiens
  MAP TO AL117332.2; EXPRESSED IN BT474, SIGNAL = 1.5; EXPRESSED IN HELA, SIGNAL = 6.2
aatgcctataaataattaagctcacccatttatctatgcctccttccctttgacagtaagccaaaagttcaaaagcaagggcagtcgccaacatccccagtatttcacagtactgagcacaaaataagcacaaaacacacacacaaaaaaacatctgaatgaatgactgaaggatgaggctttctttctcaagttcatcactgtcaacatttttcattatttagctgactttcattctagacactggtaacacagcaaaaaaaaacaaaatggaggcttctaattattttagcacttaccactccatctattgccatgtagagaagtcttcttggtcttacaatactgaaaagtctgtcaatgtactcaaaaattgcaaccatcatttcatcttcattttttggtgctggtctataatgacaaccaaacaatgtaatataatataatgtttcctctgtgatttgctatatcagtga

SEQ ID NO: 16586 - DNA, 479 bp, Homo sapiens
  MAP TO AC007282.2; EXPRESSED IN BT474, SIGNAL = 1.1; EXPRESSED IN HBL100, SIGNAL = 1.7; EXPRESSED IN HELA, SIGNAL = 0.82
tgacatttaggaacttctgagttgactatatttggatgaaattttggacttatgaattgatgctggaatgggtgaagtcttttgggaatattttgtttacaatggtctcatcccctcaaaaaagaacagaagtagactggccttaaaactttttgaagtaacattgatactctataattctattttgaaaactatcatggtcagtgacacattttgctcagcatttcctcctgaagaagttagacagatctggagtcataggcattacctgtcaaaagctgaaattgtactcagagccaaaagcaagtacagaagactctggaatggatacgctagggtcttgtattgttgcagaaggtttgagaggttggatagctgatctcctgctagaacatatatcacaacaatattccacacagcacagccagccaagaatccatgagaaaagagaccaatcatcctgaatggaaaagggtttg

SEQ ID NO: 16587 - DNA, 477 bp, Homo sapiens
  MAP TO AC011356.1; EXPRESSED IN BT474, SIGNAL = 0.97; EXPRESSED IN HELA, SIGNAL = 4.3; EXPRESSED IN HBL100, SIGNAL = 0.97
gtctgtctcagggatgacccagaaaaaatgagttgagaatggtggcaaattacattatctgtattaatttcttttttacttatacaggaagcaatgaagttacaacaagatatgaggaaaaaaagacaggaagtgttagaaaagcaaatagaatgccaaaaggtaagacaagagctcattatttgcatgctagaattgatgtatagaattgattttaaaagtattattcataatttttaaagacttctttatattaaagtttattaagcatggttttacctttttctatttatttcgtagatgttaatatccaagttagaaaaaaacaaaaacatgaaaccagaagaaagagcaaatataatgaagactttgaaagagcttggagagaagatctcacaattaaaagatgaattaaaaacatcttctgcagtctccacaccatctaaagtgaagacaaaaacggaggtatctatttgc

SEQ ID NO: 16588 - DNA, 455 bp, Homo sapiens
  MAP TO AC006348.2; EXPRESSED IN BT474, SIGNAL = 1.1
actgtaaatgttcagcagagtgtctgactcacggcaaacactcgtggtggttgtgctggtgtgaggagtgatcatggtaacaacggtagtagtagtggcaaaggtaatggcagtagtagagggagtagtggcagcatggtagtggtagtagtcatgaggatggtaatagtggcgacagtggtagtggtggtggtaacagttgtagtagtagtgatagaaatggtaggagtaatgatagtaggaatggtggtggtaagagttgttatggggtggtagtaatggtagtagtgattttagtatgtagcagcaatggtagtggtagtggcagtaatggtaatagtggcagtagcagtagtggtggagggagaggtagccataacttccctgacactctcctaccaccctagcaagattaaggtaagcccctaagcaggggtagcccacagatgggagaa

SEQ ID NO: 16589 - DNA, 401 bp, Homo sapiens
  MAP TO AC007189.6; EXPRESSED IN BT474, SIGNAL = 5.2
tctctgggtcagacatccatctaagtggttgcagtgatttgtttttttgcacactcactttcagtaacccctaaaaccctctcttcccccagtacctcctcctaagcacttcccacacagagtcatcttgcagatatcactcatcgagaatccagacatcttatgcaggactatcattatagtgaagaaattattagccatctcctggctgtcagtgttgcaaggatctaaggatgttgccatgactacaaggatgtttgggcacaatcgagatttacaattgctttttttatcagtaatctgcctggcagagccaactttgcctaccatcttcaaatctaggaaaatgtggccagcttttccttccagaacactgatgttgaaggtgagatttcagccca

SEQ ID NO: 16590 - DNA, 475 bp, Homo sapiens
  MAP TO AL021332.1; EXPRESSED IN BT474, SIGNAL =   1
acacaaatttgaccctgctggttaaagattctaaactttatacgttttagaaatcaagtttgcaacatgttcactctcatagtagtctgtgttttcattcctctttgatcgagctggcacctctactgtataactatttctatcttccataatagtcattgttttgaatgcctgccattcatttttgtgtcattcacttacccagcacaactgcattgcacagaacaaatgctttttaaaaagtggttaaacaaattatcgcaaattatcctacccatgatgataactggaattactattccaaagtccacctctggaagaaaaaatagagtcctatttaattttgtgatttttctgtttatgtcagttgacactataatgcacacgctgtataagcaagttgtcagtgctaaacaaatagaactgagtgtaaagatgggtgaaataatcagaatgaccaagccgctgatcaagt

SEQ ID NO: 16591 - DNA, 453 bp, Homo sapiens
  MAP TO AL034551.14; EXPRESSED IN HELA, SIGNAL = 2.2; EXPRESSED IN BT474, SIGNAL =   1
gagagggaagaggggacatcaaaagagaagaacattcacaaggcagttggagtttaaaggcttgctctcctcctgtgtagacattatgcaaggtcttctcatcactccaattctgggcccacaactgtatatgtgtttttgtcaattgtggaatacagaccaaccttaactttagggcatcaattgacagccacattccacaagatttgactgcctcagccaccacctccttggcctcttacccaagttcaagtggcaacttaaaaaagccaaagtactggtaagggcaaaagatcactccggagttatgatagcatttctgtgctactccaagggctttccgaatcactagacatgccaatgtctgacaaatgatacgtttaatagagatgaaccctaagctcaccctgagaaacaagattttggatgccacccaatcagaggcacaatcac

SEQ ID NO: 16592 - DNA, 392 bp, Homo sapiens
  MAP TO AC007030.2; EXPRESSED IN BT474, SIGNAL = 1.1; EXPRESSED IN HELA, SIGNAL = 1.1
cctcctaatggcagggaacttaataatttagttgtagctctgtaaaaatcactaaattctgagtattagtttcctcatctgtaaacatgggtttgagacctctggtcagcccaccttacagggatgctgggaacgtccaatgagatgattcagaaataaaataagctttccacatcatgaagtcctaaacacatataagggattctcagtcagtaaatgctaaaaccgaaaccaaaaacccaaacaaacaaaacagacaaaaaaacccaactacagtcctttcctcagactgcctctcagtgggcctcagagcccggggcagctgctgcagctggcgaggccaatctgccatcactcagaaattccacagttggacagaaatcaggacaggc

SEQ ID NO: 16593 - DNA, 402 bp, Homo sapiens; identical to SEQ ID NO: 15714
  MAP TO AC009957.4; EXPRESSED IN BT474, SIGNAL = 0.92

SEQ ID NO: 16594 - DNA, 435 bp, Homo sapiens
  MAP TO AL034374.2; EXPRESSED IN HELA, SIGNAL =   1; EXPRESSED IN BT474, SIGNAL = 0.94
ttcaaaatgagccttgctccctggtactcatgcaacagtgtgatcctattttcctcacctgcccgtctcaaaccttccacaccatacagaaggaccagaaagaacctggaaagttgccctctaagtcagagaatattgtacctattccttaatatgtccccagtggtatctccctcatctcacccaatcagcacagaaagttcacttaactaaaaaagggttttgtgtgcataggtacataaactatcattaaaagcaacttgaacacaaagctgaaagcctgacctagacatttacagaaacagcaccttttctgaaagccttagtttcaactctcctccctgctcacacctgttccccaagtccccgtctctaatacttacagtggccgcaggggacccagttcatcacaaaccaccagatgttcagcatcga

SEQ ID NO: 16595 - DNA, 451 bp, Homo sapiens
  MAP TO AL109928.5; EXPRESSED IN BT474, SIGNAL = 1.6; EXPRESSED IN HBL100, SIGNAL = 1.8
taccctctgaaggatggtggctcttttcaaccagcagaggaggagggaaaaaataaaagagaaaagaactccataaatgatttgaaaatgagctgtagactgtcttttgatcattatcaaagacaacgtaaataataaatgaagtgcaaaagccacaagctctgagtttgcaatgatgactcggcgctgggcttcctctggccagaggagcagcaggtgctaatgaaatcctctctctggggttccagcctttggattatgagactcgcccagcgcaaagcctcatcattgtcgtggagaatgaggagaggctcgtcttctgtgagagaggaaagcttcagccgccaaggaaggcagcagccagcgccactgtgagtgtgcaggtgacagacgccaacgacccaccagcctttcacccccagagcttcattgtcaataaagaggagggcgc

SEQ ID NO: 16596 - DNA, 471 bp, Homo sapiens
  MAP TO AL049875.2; EXPRESSED IN BT474, SIGNAL = 0.88
agtaagtggaaccccacgctcatgccagcagtgcagccatgccaccccacagactgaacactcccagtaatagctgctctgtgtttcttgggggtggagcccccaggggcaactaaaagcctgtctgccattgcctctgatgtggtactacccctactactctcagactaacaaaggagcaagaaaataaatgccttatccacacttccaacaagctgcagtcaacccaaggagacgaggccagtctgtgtcccatgggtcctgcccatcccccctgctcatcaccaagcagggaacccacaacttgggcacagagcacacactctctatccttggctgattgcactgtgaaattgctgacctgcatctctctggggtggagcccccaggagacaagcaaaaggcccttggccacaaccattactaaggtccctttctctgtcctacttagggaggaaacataaaccatga

SEQ ID NO: 16597 - DNA, 467 bp, Homo sapiens
  MAP TO AL096677.18; EXPRESSED IN BT474, SIGNAL = 0.96
gagcagcccctcaaaagagaaaatgtgtgtgttatcctgtgtgtgtgtggcatgaacttatgcaaaaaccattgcacagtctcttgctgctctcccctcgagttcagctgctgatgaagggggaggaggaggagaggagagctgtgggtgtccaccaccagctgctcttaaatcctgccagggcaggtagggtcagtgtgattcgacttgtccctgaggagtacagagaacactcttcctgttcctctgcagctgaaggatgatggctgagccctggcaggccctacagctcctgttggccattctattgactctgatggccctcccctaccaagcaaggaagaaaacctttctaagcgtccatgaagtgatggcagtagaaaactatgcgaaggacagcttgcagtggatcaccgaccagtataacaaggaaagtgatgacaagtaccacttcaggatcttccgag

SEQ ID NO: 16598 - DNA, 453 bp, Homo sapiens
  MAP TO AL035530.11; EXPRESSED IN HBL100, SIGNAL = 1.7; EXPRESSED IN HELA, SIGNAL = 1.5; EXPRESSED IN BT474, SIGNAL = 0.95
ggccacctaatggttccttcacaagcgcctcacactttcagatccaggtatgtttgtggtgtgtcttcctttgcagatgctgtctggaaagtgaagagaaggctaatcaaggaccgatctggatagaaagggacacacacggaccaagcgtctaattgggggttgcccaggtctcactggtgcctggcttcccttggagcatttccattgcagttcacagtcaatccaagaatcagcgaaattctcattttcttttttccaggtcttccaagagctacagagtcgaacagaagctgcatctatctggcgtgcaggctgtcacctgtgacagagaggaaaggcaggatggggacaaagaccaggatctcactatcagtttaggaaattctctggtcttcatgctggcttctgacccttgtgtcgccgagtttccgtgagtgccagcagtttcaa

SEQ ID NO: 16599 - DNA, 462 bp, Homo sapiens
  MAP TO AL049872.3; EXPRESSED IN HELA, SIGNAL = 1.1; EXPRESSED IN BT474, SIGNAL = 1.2; EXPRESSED IN HBL100, SIGNAL = 0.72
ttcaagatgttccttgatcgtgttcagttgagatacctcagatgctagttcagtaacactatcaagggttttagggtcagccacaggtgcggttcgactctgctcttccctgagtcgttccaattcttcttgcagatgattattttcctctttcatggatccaagacttcggtctttttcctctatggtctgtcttaaaatttcattttttcttaaggcctgagaatatttatccaattcctcctgcagctttgaacttctttctttaagcttttcaataaaaatttctttcttgtttataagttgtgtcaactgcttctgctcttctaaactagatgacaaaacgtccttagtttctttatggtcagtatccatttgttcaatattctttttgagttctgctatttccatgtctttcttttgattgagtttaattaaatgctcatgttccagctgtaaggc

SEQ ID NO: 16600 - DNA, 469 bp, Homo sapiens
  MAP TO AP000251.1; EXPRESSED IN BT474, SIGNAL = 1.8
tttagacaaggcaattgaggctgagacattcagcaacttggccaagaggcctgaacactgtccagaggcctgaacagtgatggaattccaaaaatcccaaaatccccaaatgcctgctcttcaccgtcaatgctattctgtctcccttcacaacagtgtagcttttcagtctggcaaatggaaaccagctcaacgtactaaagcatatttgtgtggctatgaaactcctagaggaagcagagccacgaagatgaatggagatctacaaataaaactgtggggcaccccagtgcccgactgtatgagcccccctggtgggcacacacctggacgcctcctggtggaagcaaggcgccttctgatccacactgagccatcagctgtccccaccagctggtcagccgcacttcgcatccccagaaccaacctccaagaccccggacccctggcctggaaatgtaagtgggca

SEQ ID NO: 16601 - DNA, 454 bp, Homo sapiens
  MAP TO AL096700.6; EXPRESSED IN BT474, SIGNAL =  29; EXPRESSED IN HBL100, SIGNAL = 0.92
tgatggctttgtaattgtgtcagtttggctaggctgaactacctttctcagaattccctctcttgtatgtttctggttagggtgggccaggagatttgggaggtaaaaggaaaggagttgctattttgcagcttacacatgctgtggctgatctgcagattcacctcattggtgtgaaacagtagctaggcctgcaattgctctacctacccctggatcctatcagcttctctgatttctgggctgtgtacatgtgtttagctccatgaccgaaagccttggcttctgcagggcaactcgatgaccaaggtcagagatggtaagaaaggacacaggcttcagttcatttttgtggggtgccagcttgtgcttgtgggttttagcctgctcgtgatcttccttcctgactacctgccctgtagactttgagctccagcatcagatatggagacca

SEQ ID NO: 16602 - DNA, 453 bp, Homo sapiens
  MAP TO AL049835.3; EXPRESSED IN BT474, SIGNAL = 0.62
cccagaaacagaagcaaaagtttgatttaaataacattaagccaataactctacaatcttagactcttacattctatttctttctcttcttacttcttaaacacaaatggataattgttctagaaaagttttttcccatggttccattcatgcatcactttttggaataaattaggatgcaagtatttggcttatttgagtttaataatagctcttatgtgtttaattagatttatgatatcacagcacatattcaactgaagaactcaaagagttttggctttttatgacatgaaaggcagcatgataaagaggatgtcctttggagtcccatggtatgatttccaatactggactttcctcttcctagctgtgtaaccttggatgtgacatttaacacttagagctttaatttcctcatccataatatggggaaaattaagtagggtaatg

SEQ ID NO: 16603 - DNA, 462 bp, Homo sapiens
  MAP TO AC008174.1; EXPRESSED IN BT474, SIGNAL = 0.63
cagtttctgttggatagaagaaaggttttctataggcattttcacaatttcagaaaactcatatttggagatatgtttaaactgcaagtccacaaatgactctaacatgtttaaaaccgtttctacaatctcttgaacaatttggttgctggagcccacagaaatttggtcttttgtctttgtgttatagattggtaaactgctgaggctatgcttgtttggaaaaccatatttacttttagcagtaatgtgttctttactgtttgatagagtttcttcactatctggagtgggaatttgggacagaaagcatagctgtagtttttcaagtagcatttcaacaatttcccttccaaacatattaatttgtgctttagtatcctcggctctagtagaagctcctttaaaatgattataaaacctgctttcacaattctcaagagggggcaaatttaaaagtga

SEQ ID NO: 16604 - DNA, 381 bp, Homo sapiens
  MAP TO AC004885.2; EXPRESSED IN BT474, SIGNAL = 0.68
tacatgaatgaatgccctggacatgcagtaccacagaggatacaaaagcattcagctcagacagctctgccttggagagtcaggcaaacaggaggggaaaacaggcccatggtaaatgactttaccaggatatatacttccatcaaaatacatcccaccaagcacagatgttcagagggctataaaatgatgtacaattcacaataataagggacagagggcagacagggctaatctgggcaggctttactgatgaatgggaactgagccaggttttgaagggagtgagcgtagcgaatcattcacaggtgagggcgggaaacctaagaacagcataggggagaggtctgtggatactgtagaaaagcagtgagttgaaga

SEQ ID NO: 16605 - DNA, 377 bp, Homo sapiens
  MAP TO AC011308.2; EXPRESSED IN HBL100, SIGNAL = 0.98; EXPRESSED IN BT474, SIGNAL = 0.92
tgcatccaatggaatgattgcttcttctaattttacagagtcactttgtgtggaatgattttcaactacagatgtgtcctagggtgttggttaggtagggtacattggctttggttccacatgggcacagtagtgtagtctctgtagtttttatagctgtagccaatgtcagcaatgccagtgacagcctaagtggcctaatgttcaggagtttgtgtggctacttgagcacagcctcatcactcaggacaggggcaccaagctgttctgtgagctgagggtgccccagggctgctccttcaccaggttgggcatgttgttctcactggacaagaccacctgttccatgggggggcagtgtgccttgagggcttaaa

SEQ ID NO: 16606 - DNA, 477 bp, Homo sapiens; identical to SEQ ID NO: 16572
  MAP TO AC007182.3; EXPRESSED IN BT474, SIGNAL = 0.67

SEQ ID NO: 16607 - DNA, 474 bp, Homo sapiens; identical to SEQ ID NO: 16030
  MAP TO AC007043.3; EXPRESSED IN BT474, SIGNAL =  11

SEQ ID NO: 16608 - DNA, 460 bp, Homo sapiens
  MAP TO AC007733.1; EXPRESSED IN BT474, SIGNAL = 0.72
  unsure 400
cttggaagaggtccaagagggccacttgagagatcaagtgcactgtttgacctttcacttggggttttatacggtgctatgcttctggggtcctgcatctcttttccctgattatttctttggagtgggctgtttacatgtgtatacgtggcaacatgtgggaggagctgcatgtgtagaatgtttactggaagtatacacatgctcacttcagtcattcttctcttaccagtcaaatgttcctagaaggccatatatgagttaagctttgcccttttgcctcctagtgcaagcgcatctggagatcttatcaggaagctgctgatcatcagattcaggtgtttctccttactgggagaccgcctttccctggcacggctgcaatcaattattacaactnaactgcctgaccatcacctgatggcttccgaacattccaggtatgtgtaagggcctggga

SEQ ID NO: 16609 - DNA, 467 bp, Homo sapiens
  MAP TO AC009973.2; EXPRESSED IN BT474, SIGNAL = 1.7; EXPRESSED IN HBL100, SIGNAL = 0.96
ttgacctcagaatgacggtgactctagcaaggcactggggagccagactctgctgcatttgtgtgcaaatcccctacgagtttcaaatggctccacgcatcaacaaaacctcttagttcttaagaaaaggagacagaagagatttggacactgaagagaaacacagccatgcctgagctccctgctggtaggaaaatgtgtgcctaaggttgcttttctctcaggtttccatatttttgtttcctcttgcggacgtgccgctggagctggagcttgttggtgaagaacagctgtctccagcctgtgtcctccgccagggccctcacgtcaggagtgatggtgtcgcaggtcgactggactatctgttcccacagtttatcagacatgcacagctgtgggtgggaaaagtcagaggtgggttacagcacacatgtgttaactcattatcaaactcttgctgcctgtgg

SEQ ID NO: 16610 - DNA, 472 bp, Homo sapiens
  MAP TO AL096817.12; EXPRESSED IN BT474, SIGNAL = 7.7
ccatattccctttcaatattatctacgtagatatttatgctacatagtttgtacatttttggttcacctaacatcatataaataaaagttttccatatcatacacactcttcttttaaatcatcagtgttaacaggtacacttgctagcagatagataaaactatggtttaaatagcctcctaatgtgcagttttaaacattaagtctgtaatagctaaacctagttttgccattgcttcaggaagtgacagctaaaactaagacagagatgtatcaaaacatggatgacgaaatgaagagagagcacttggctgcagaacagcgcatggtccacagaatccaaaggattatgatggaatgccacagagagaaggtcgaagctgtggagaaagccagggctgaagaaagacacatcgcccaggaagcaatccaggcccagaaaaggtattccagagaactcatttacaaatt

SEQ ID NO: 16611 - DNA, 461 bp, Homo sapiens
  MAP TO AC007652.1; EXPRESSED IN HELA, SIGNAL = 8.3; EXPRESSED IN BT474, SIGNAL =   4
gcagcaattttcccagtcactcggtagtaattctcccagtcactcagtagtaatttttccagtccttcctttcggctacttattcagataaccgtgcaatgaagaaagaagaatatatataggtattttagaaattgttggataacataaggtcttgacctagggagttgacactgatgcccaggagcctccaaagcaaccatggcctaccttttagaattagagtgtatgaggaacagataataattggagccctgaacctagtccagcttgccgcaggctcactggcctcctggaaccacccagtatcattttcccagttcctgaacatgtaattggaattgtcatacttggtagttggcataaccattgctcctggattttgccacccaaacttcactttctaccttgaactgttgttggtccatgaagaacagcttggactcaaaccccttggctct

SEQ ID NO: 16612 - DNA, 412 bp, Homo sapiens
  MAP TO AL109843.6; EXPRESSED IN BT474, SIGNAL =  48
gtgaaaggtgggggaaagacaggactattagagttcagtttttttttttttaatggggaatgggctgaatagaattttccttaacagcagttttcttctatgtaacaaattagcaaataagaaaatgtccataattgttcattagaccatgaattttatttttttttactttgagctttctcatatctagatattgacgaaaagatgccagtttctccctaggcaagttttaaacagccaggtctttttttttttttttttttttctagtgataccttctgcagccgtcatttccagggctgagactataaatgctacagtgcccaagaccataatttattgggatagtcaaacaacaattgaaaaggtttcctgtgaaatgagatacaaggctacaacaaaccaaacttgg

SEQ ID NO: 16613 - DNA, 455 bp, Homo sapiens
  MAP TO AP000169.1; EXPRESSED IN BT474, SIGNAL = 2.3
cagcctcggttcaaaaatgtaaaatctgccatgcaggcagtttcaaagacttaacctatgcccttgtataattattatttttacttcttttatagcaacgttcattttctaacctgaaggtggttcaggtgatgttctaatctgcttttgagtttgaaaatgcatctaccagatgattcatggtggctgccgaggtggtgaataccgaggatcccaaaatgaaaaattacggagggaaacttagaaaagtagtactctctcacagccagagtggtgctggtgaccctccagtccaggctaaaacaggtaagcaaaatatttgccttgtttttaatatacatcaagcaaaacaaggtttaactctatctgtggcatctacagcagctgtctccaagatggaggacaatgatggggaccaggaggaggtcagcagcctcaatggctgatgttctgaa

SEQ ID NO: 16614 - DNA, 433 bp, Homo sapiens
  MAP TO AC009401.1; EXPRESSED IN BT474, SIGNAL = 1.3
gaatgcgggacaacttcaattattttaatatacaagtaatgagagtcctaaaaggaaagaagagagagggaggatatgaaaacaattcgaaaaaataatttctaggaattttagcacttttactttaaaaaaaaaaactatacaaattcaataagcttaacaaactcaaaacacaagaaacatgaagaaaactagataaaaataccctgtaatcagccaaaaccactgcaaaaaaaaatcttattaaaaaccagaggaaaaaacacatgaataaaaataagaataccagtagattccttatcacaaataatgaaagcaaaaagaaaacggagcacatctttaaggtactaaaagaaaaaaatgctataaagctataattctttagcaacaaaactatctataaaaataaatgggaaataaaaacctttacaga

SEQ ID NO: 16615 - DNA, 463 bp, Homo sapiens
  MAP TO AC010879.1; EXPRESSED IN BT474, SIGNAL = 1.2
ggctgggtgttagaaaatgcaagataatatatagctgcaggtagagtccagtgaaagcaccatggagggaaatttatctctacccagggacagttggcaaagcaatcttcggcaatctgtgtgggaattaaacaattaaggaaaagtagagaggacaatacagatagagaaacaaaagccataccaatggtggtgataatattataatccacttattcattcatgcacttcacaaatattaagctttgaataggacctagactctgcaaggtagtaccgaagaaaacaaagacccacagtcttggagtttacattctgaagaggaaaagcagacatggcaaacaagtataccatgaatatagatctctgatcaactcctttctcctcatccttctcaatgtcatcaacatgaatatcatctttatacttgaggcagactagagatcgatcacatcccaggagg

SEQ ID NO: 16616 - DNA, 1939 bp, Homo sapiens
  MAP TO AC004381.1; EXPRESSED IN BT474, SIGNAL = 1.6; EXPRESSED IN HBL100, SIGNAL = 1.2
cacttgtggttcctgaagaaagtatggtaaatgcagtaaacattaatatataaaataaaaataaaatagtgtaagatgttatcagaatactcatgtttggaaattcaaggaacaattaggattcatacatgaaaggttatcaattcctcattgaaggcctgagtctcaaagaatttttggtggaaatacttaaatttctgtcacaaatatggcttgtttctggagaactaaaagtgagtccccctgtggaatgagatggaaccatgctgttggctctttccttttgaagtgtttgttcccatttgaaataaccacaacattttctgttttcttggtatttcccgatagggcaacaatagaagacttttccatggttcggtccattattagaaacaacaagtctcttagatctccgaccacacttgcataatggaggtgtcattttcccactcttccatggctcttgtaggttaactgtagaagttaatatagatgggagacgcctccaggaagaacttcttactggggagcaatcagatgatgtaggcttttcttcatgaatagtgaagggttgtttttttgctggtgggaaagcttggggactgcatggattccttttggtaccacctgaaagaagaggatgtttccccaaaactaaaggatgagacatattggcattaactctgttgaaggtacttgatttgtgttcaggtaacttaaaggcagaaatatctgaacctggatctttggcttcttttacattataaatagtagtgtgaggactcttgtacacaatagacttagaagtctcagatttttgaggagtttcctctatgtctccaaagttttcatgacttgacatttccaattctttcaaaaccattaatctttctccagaattaaatgaaatctctaagtctgagtcactaatgggaactgtacagtctacgttttcctcaggctgagatgctggcagtaaaaccacatcctcccaatcagccaacacaggtaaacagtccagagtagagctcatttccaaatcagaaacatgatgaacagttggaacggtggtagaaacaagtaccaattctgaaccaactgttgaagccttagatttggtattaaatgcaagatgttcattttttccttgcttttgcatatagataggtgaattcaaggtaggagactgcaactgccccacagaagtagaggacttagtattaaaaagaggtaaggaacttttgacattgtgaagacttgcttttatattgttttttacttgtaattgatcctgttgtgcctttataggagaatttgcacaaattgacttcatttgaactttttcatgaggatttattatatttttaggctccttattatatatgctgggaccctggatgctaatgttacaggcagacatttcttcaacttgaattgtattcaaatttctggccagaatgctgaaattcttcttagtgggaacctatgattccacagacaaatgcaacagctttagaaactgtgcattcgttaatttcttcagtatacagttttatgacaaaaaagagaaatgtcattgatttataaatgactgcacacattaaatctacgtttcaaagaacgtatgactgtttatgaagtttgagatgacagaataaaaaggcaagacactactaaccttgttcaacgaccttgtaattttcattacacaaccatctctgatcattttccaagcaagaagggcagtattccgagaatcgtccaaccctgaggatacagatatcaaacactgaatttagtggtactagtactatttccttagtactaaagaaataacttaaaaagaaaaacaccacttgtgtagaaattggaacacagttttagttttatgaccatctactaattttaatcatgataaactggtcttggaagtggaagg

SEQ ID NO: 16617 - DNA, 500 bp, Homo sapiens
  MAP TO AC011345.1; EXPRESSED IN BT474, SIGNAL = 1.9
gagctattgttgataaaggaggagactcatttatcttaagaagccacataaaagaaaataagtgaaatatgattaggcctatgccaagtgttcagattaaattcctaccatcacaatccctgctgctgggtgagtgcttcccaccagtaaagtccgattaagatgctggcctgagtgatattaaaaatacacactgtgaaaatccctcccagaatagattccttcatggggtatgtaccccaagggagccacctctcctgtcttctattttcatttggaaaagttgtcagttgtacatgacagtgtcttttatgagatttcaagttacagcttcaaagggcccagtgccgttttgatacttgtgagaaaggtttccagggataagttcagaaatatgaaagctagtatgcgtacacctggcactagcgctgtcttacctattaatttggccctctcctcaagttataatgtccaaattggccttccaaaagatggcatca

SEQ ID NO: 16618 - DNA, 446 bp, Homo sapiens
  MAP TO AC010740.3; EXPRESSED IN BT474, SIGNAL =   1
gcatctgatttcttcacagccaagaggattcaatcttgatgaattacttaacaaagaaaataatttactatagtcttagctaaatattcagtcttgtatgtaggaggaaaaaggaagtgagatattttttcttcactaacaggaaaaagcaagagtggtgctttcttttcaggcaaatatgtaggttattgctggcaaatggctggacaattttggagttttctgaaaagaattaatcctgagtcaagaatatattttgatgtttactttgttttttagtgtatatttcttctcagtgagtaggtctacatctaatattttcaatccatatgtcttttgaattaagaaaactctactggaccgatggaaacacaattaacatggcaaatatggatggcagtaatagcaagattctgtttcagaatcagaaggagccagttggtaag

SEQ ID NO: 16619 - DNA, 487 bp, Homo sapiens
  MAP TO AC009475.2; EXPRESSED IN BT474, SIGNAL =   1
tccccatgtgattaaattcttctacaataagattttgaatcattgcaaattattctattgcttgaatttatcacaatttattttgaatgcttcagtagtttccagtttttcactattataagcaatgctctaacaaacatccttgtacataaatcttggatttgtgttttttattattcatttattttaaaataaataaaagtatttattttatttttaggataaattcctgaaacttggtaccactttcagatcaccttttccttttctgggctaaacacaggaatcttgctttaaacaggaagagtaaagaaaggtttggactcactgattttctcttcttctcttgtacatttaggacttgataagtcggttttattgcttccaattcaattgctttgccaagttttctggaaataaaacataaaagacacataagcataatatcagcgtttacatctactttccaaattactttctggggaaa

SEQ ID NO: 16620 - DNA, 478 bp, Homo sapiens
  MAP TO AL121578.1; EXPRESSED IN BT474, SIGNAL = 1.8
gccaaaaagatttgaagcaaggcattcaatagtgtctattacaggaggtattttcttttcaagatggaaggaaggacctaaataagattagaaaggagagtgagggcattttactaatgtcccactgggaagaaataataagtcagttcactatataaatccagatttaagcatatagaagcctgggaaggaaaatcaaatagacacatcacacttgtgtacacgctgacattttctgtctgctgtcttattgatgatttgattgttttttctcatgcagctacctgctccctgatgatagcaaagccaccaagcacaaaactctggtaataaaaaagagtgttaaccctcagtggaatcatacattcatgttcagtggcatccatccccaggatataaagaatgtttgcctagaacttactatctgggacaaggaggccttttccagcaacatctttctgggaggagttcgtttgaa

SEQ ID NO: 16621 - DNA, 409 bp, Homo sapiens
  MAP TO AC007110.3; EXPRESSED IN BT474, SIGNAL = 0.97
agaagtcagagtgtgtgccatagtaatcatatgtaattttaaggactagaaaagtcaataaatgtcatctgttaaacaggcctgacttcctaaaaaatctgaatgttcctttgactgagagtaagaaactatcaccaacaacaggaaggtacccaagcttgtctcataggttttactctgacatatccttcacagagaggtgaaacatgtttaatctatatttagaagtaacttccaggttataagttctaactgatagcagttctgggtttgtgtcagtggcagcttttcagaacataaggagaaaaccatggagcagacctgcatggcattaagaaataatcagcctactgaaaatggctatgcagcttttactcagaagaagaacactgcatgtatggggtgagtg

SEQ ID NO: 16622 - DNA, 455 bp, Homo sapiens
  MAP TO AL118522.3; EXPRESSED IN BT474, SIGNAL = 1.2
aaaattgggaaaatttcagccattatttcttaaaatatttttgtggtcccttccctttctctcttctacttttttgggacctttggattacatgtattttacgccacttgatatcatcccatagatgactgaggctctttcatcttttcctctttttttctctgtgcttcattttagatctcttctattactatgccttgaagtttttaatcttttatttggcagtgtctaatcttctgttaatcttatctagtgtatctttcttttcaggtcttatatttttcatctctacaaatttcattttgttctcttatatcttccatgtctttcctcactatgttgatggtttcctctacatcattttgtataagaagcctatttgtaatagctgcgttaacacccttgttggctaattccatcatttctgtgatttctgggtctatttgtgttaattg

SEQ ID NO: 16623 - DNA, 479 bp, Homo sapiens
  MAP TO AL049765.16; EXPRESSED IN BT474, SIGNAL = 1.3; EXPRESSED IN HBL100, SIGNAL =   1
cctacaatatccacagagactagctgaatctatctgtatcagctgagataagctagcttgtgctgtggtaccaaatgaccgccatgttgtcctgacttataaacagcaaaggttgatttcttgctcatgctctatgtctatttcaagttagctggtgggctctttaaatatcctcattgaggaaagctggtgaacagagtctttattccctggatggtggtttgttgctatggcaaggcaacaaaagaacatggcagtttattcattttcctctatagttttcaccatggaagtaacatgtcttacttttgctcacattacattggctgaagcacatcttctgaccatgctgaacttggaggaggtgggaatgcacgatttcaccattttcctgaaaggaggggaactgtaacattggtgtatagccccaaatgtcaccatattgccacacctcatattgtgggaggtcaacgaagatc

SEQ ID NO: 16624 - DNA, 474 bp, Homo sapiens
  MAP TO AC007461.8; EXPRESSED IN BT474, SIGNAL = 0.95
agggggaagtctgaaagctcaccatcacggagctccaactccttcttcctgggatgcggcacttgcctgtgaagccacaggaggctggaggggtagaggctgggggcaggaagaggaggaagtgaggaagggggcgatgcccgggagggctctgggagagtaaccaattccttcactgggggcaggcgggagtctccagggtcactatggggcaacctgtgaagggaagggaggaaagggatttccggaagtctcccgctctccctcctgcctgcttccctccttcccctagcggttgattgcgaggagcagcggaaggaaggatgtatcaaaccgaaagaagaaagaacccctgccagtcgcccccatgacatccgactctgaacggcagcgatctagaggctgtggcgtgttgcagattaacagcagcgagggcaggaggcaaatcagatgccgcaggagctgactgttttc

SEQ ID NO: 16625 - DNA, 458 bp, Homo sapiens
  MAP TO AC009957.2; EXPRESSED IN BT474, SIGNAL = 1.3
aagagtcatagtggagacaatcttatgacatgaggaaaacaaatcagaaaaataaagacacctttatttcttcttattaacacaaatgatataaaactttaagtgttatatacttatttaaataatgggataagcctattttgaaaaataacacattgctaaattatttgtattttctgagtatgaaatttgaacttatttttattaaaaattttatacatgtatgtaatggaaaaaatatacattttttggttgttatttaggatctgaaggtttgaatgggccaatgagtatcctcatcattgaagcattctatggaggctcccataaacagctggtggatcttcttcaagaagagttaggagactgtgtcgtttatacccttcctgcaaagaaatggcattggagagcccggacatctgctttatatttctctcagaccattcccatcagtgagc

SEQ ID NO: 16626 - DNA, 479 bp, Homo sapiens
  MAP TO AC008171.1; EXPRESSED IN BT474, SIGNAL = 0.62
catactaccagctaagcaaccggttgtccccactcccagcatcaagtcttgctcgaagtaaccagatttaggcagtcagatcttcaaagggcgcacgtaaccacatagaagggtagaactacagagtgctgttattcattcttttgcattttacatgttagcgtttctctgtatactaactgagtgtgcccctgaccatgggtattgattattttttctctgtacagacggtctgtctgataagagctctcactctggccaaggagctctgaattgtgagtctgcccctcaggggaattcggagctagaggacatggaaaataaagccaggaaagtcaaaaaaacgaaagagaaggagaagaaaaaggaaaagggcaaattgaaagtcaaggagaaaaagcgcaaagaggagaatgaagatccagaaaggaaaataaagaagaagggcttcggcgccatgctgaggtatgggcctgctt

SEQ ID NO: 16627 - DNA, 496 bp, Homo sapiens
  MAP TO AL096763.9; EXPRESSED IN BT474, SIGNAL =   1
caaagccatgggtcacaagcccatgaggagtttactaccattccctcaatcagaggttgtcatcaaatccacagatgaaacattacgtatcttcctaatgtgattctacctcctttatgagcagaaaaagaggtttggcgattactacaggtgtcaatgcaaactactctgccagtacagcaggctgattttggaattagaacttgagaaacttacaaaatagtcttaacagttaaaaaaaaaaaaaaagtttggcagctgccgttcaggtgcttgggtcagtggcgtcgggatctcctggctttgactcctgctccagctctggaggggtcactgctggaagcgactgagacctggcttcagcccttctgacgtcatgtctaaggctacggataccgctgttgatggaggtcacacacgacttccagtctcttccattttccgagagatcacaaattgggtagttttcttggaggaactctgatggtaaagaccc

SEQ ID NO: 16628 - DNA, 412 bp, Homo sapiens
  MAP TO AC011330.4; EXPRESSED IN BT474, SIGNAL = 1.4
tccttccagagacccaattctgtcagagatcctaagacacttagagttgtcctgaggttagactataggctttaaacccccggcaactcctccaagatgcagggaaagcaaactccttggcaccattctctagtgtgtcacaagtagctgacggctctttactaaggaaataagacaataagaacctcatttcccgaaccagtattcccaccaccattccctcccattttccttcatagaccccaacctttggagtggaaagagatgaggcagtggcaggatggccagttttccacaggttcattaaggattacatcttctcccagaatgacaacagtcaggtagtcaaatctgcagagtcgctctaggatttgagtcattggcttggacttggatttcttggtcatggcac

SEQ ID NO: 16629 - DNA, 467 bp, Homo sapiens
  MAP TO AC004947.2; EXPRESSED IN BT474, SIGNAL = 0.65
aatgccagaaggcaaggaccgttggaggtcatcttacaacctacccaccaaagctttgtcttcagtttggagaagttttgagttactattcgcagcataccaagaacagtatctgcaatcagtaactgccatgcaagtatttgttaataaagggtaagtattgtcttgtgacacttttatagaatatacattaagtgtactgagtttcaatataaactgtatttcttattgtgagtaaaggtcaaaaaaaatttaggattttggtctttcacagaaatgtgaagcccctgaatgatttcatcagagaggagtggcaccatcaggtttacattctgaaaagatggctttggctgcagtatgaagaatgggttgaggagctcatgagacaaccaggtgggaggctctcgcagaagatgaggcagagatgatggtggctcatgggcaggactgagaaatggccacaagga

SEQ ID NO: 16630 - DNA, 423 bp, Homo sapiens
  MAP TO AC012449.1; EXPRESSED IN BT474, SIGNAL = 2.1
tcaaagtcatcctgtaaagtcactgaaatcatgatgtaattgctaggacctgggcctagcataagtaacaaaatcatataaatatctaactatctcaataggtgcagaaaaagaatttgtcagaattcaacatccttttatgattaaaaaaaataactttgaacaaattaggtatagaaggaatgtaccacaacacgataaaggccatatatggaaatcctatagctaacatacccaatggtgaaaagttgcaagttttttctctataatgaggaataagaaaaggatgctcactctcatcaattctgttcagcataacactggaaatactagccatagaaactagacaagaaaaagaaataaaagttatccaaatagagaaggaagtgaaattgtcactgtttgatgagatgatcatgtgga

SEQ ID NO: 16631 - DNA, 390 bp, Homo sapiens
  MAP TO AL121761.1; EXPRESSED IN BT474, SIGNAL = 1.2
ttggagcttcgtgaaagagggttggctgctgggatgtgcttgtgagtcctgccatttgttttagttatttttctacaaccagcagcttctggcttcctttcttcctgatgttgatgttctcacctcccacaatctgagacgagaggtggattttgcaggctcagagaggatcagcaccctgcccgaggcccatagtcagcagcccttccccgggtcccctgggttcccctaccaaccccccaaaggctgctgcctcctcctggtgccctctgaacctgttctgtgccctgcaggtgttcggcgtccacctgaacaagtggcagctggacaagaagctgggctgtgggtgcctcctcctgtatggtgtgttcctgtgcttctccatcatga

SEQ ID NO: 16632 - DNA, 368 bp, Homo sapiens
  MAP TO AP000018.2; EXPRESSED IN BT474, SIGNAL = 1.4
gtgaggagaggctgaaatggggctggggttggtttaatttgaaggtcaagaaggaactacaggaagaagggacatttgagctgatatctgaggaatgagagagagatagcagggaaacagctggtctgtccagacatgataatctcatatttattccatgttttaggtgcagcttcaaacttaccatcttagcattgtaagaagcctccccttctgcctctcctgcccctctaccttaccttgtggctcttttcttgggtcaggagcctggaggtctgggagtccagctctgagcctgctccctgctcatacctgctgtttctctcttctgttacacatccttctctctctgactcagctaggtccaa

SEQ ID NO: 16633 - DNA, 444 bp, Homo sapiens
  MAP TO AL079341.13; EXPRESSED IN BT474, SIGNAL = 0.97
atttgtggagaatgggatgcgaagggcaggttatgccatagttagtgatgtaacagtacctgaaagcaagccccttcccccagggaccagcacccagttagcagaactagtggtgcttacccaagccttagaactgagaaagaaaaaaagaataaatgtgaacacagatagcaagtacgcttatctaatcctacatgcccatgctgcaatatggaaagaaagggagttcctaacatctgggggaacccccaataaataccacaaggaaatcatggagttactgcatgctgtacaaaaacccaaggaggtggcagtcataccctgccaaagccatcaaaaaggtgaagagaaaaggcagaaggaaaccgtcgggcagatgctgagcgccaaaattgctgccaggcggaacctcccaacagaaatacctatggaaggacccttggt

SEQ ID NO: 16634 - DNA, 476 bp, Homo sapiens
  MAP TO AP000076.1; EXPRESSED IN BT474, SIGNAL = 1.8
aataccataccgcttctgaaatcatgtatgagacaatatttatcccaagaatccattaatgactgaaccttgacactttctcaatctgactattcaggacataatggtatattcagtgctgtttgtgttaaagaagagagaaaaatgtgacttgaaacagttagggaaaggtttctttgagaatttgaactgcctctttaacctacatgtaataccagtaggtagaaaggaagattaggaatttatgcatcaatttggaataaataatgccattaaagaaagatttctttaatattctgctgaggaatttgttacttacctctgaagggcatattactccatctgtcaggatatgccttctcttggtagcattacaactcaaaggcaagtcgatgggaaatttaatcctttccccaggcatagtgttagagtagaggacaaatgctagaattatggtgaagcagaatacgaattga

SEQ ID NO: 16635 - DNA, 360 bp, Homo sapiens
  MAP TO AL132633.1; EXPRESSED IN BT474, SIGNAL = 0.96
aaaaagcaagatggggaaggggaagggaagattagattttatttgcacacaaaatgaacatctacagtctgcacactctttttgggaatggctctgtgttttggattaggttgggtttttaaaatctttatcttttcctcccaagttctactcagttcatgaacatcattaaaactcagacagagtactcttctgggcctcattcatgcaaattctggactattcaaaaggaagaacataaagattacacagaaagcccaggaaaatgcactctgagggtggttattaatgacatcaatgaatttggggagcaggattaaaccactgagccactttcacaaacgtaattccaaagtgtgg

SEQ ID NO: 16636 - DNA, 490 bp, Homo sapiens
  MAP TO AC009613.2; EXPRESSED IN BT474, SIGNAL = 0.97
cgcatacaaacaacatgttcacttatcattttgctgtagtccaaatgtttgtgtacccccaaaattcatatgttgaaatttaacctccaaggtgatggcattagtagctgaggcttttggaggtaattaggttatgagggtggatccttcatgaataggatttgtgcctttgtaaaagagatctcagagaactagtagttccttctactacatatgaacacagcaaaaaaggtaccatctaggagccagaaagtaagccctcacccaatatagaatctgccttgattttagacttcccagactccagaaataaatttttattatttataagccactctttttgtgatattgttacagcagcccaaactaagacttctgtttttatctgaatttctttttgccacaatctcctcatgaccagtcttatccatggattaaaacccatgacatcttcctgatccttcaagtacttgggacctgactcttcatt

SEQ ID NO: 16637 - DNA, 498 bp, Homo sapiens
  MAP TO AF145206.1; EXPRESSED IN BT474, SIGNAL =  25
atggcatttgtgttttgctctttatttttaaaacctttactcttttgtacttaggaattttgtatttttgtcgtagtgtttgtctttgtacctatgttttttttttcagtagcaccagctgttttcttatttaactttttcctatctgatatatcaatatttagtgatatactacaacccccacctactttctaaaagacaacgggtggttcatttttcctttccctctatcttttcctctctttgttaaagtcatattatttccgtttttcataacacgtaacatttgtatgctagtctttcttccctgcctctgcctttgttttagccttgtatgtacaattatattgttatgcagacgactggtcgttttgctgaaatttttataatcatctcttattccaatgaagctcaccccccgttagacacacaattccctgtgttgctgtatgtctaaaatggctttctgtaatcttggcacttagacagtttgactgg

SEQ ID NO: 16638 - DNA, 473 bp, Homo sapiens
  MAP TO AJ009632.2; EXPRESSED IN BT474, SIGNAL = 3.4
ttttctttcttcctatgaaatacagctgtggaatttaagaatttagcagccgtaattttctattcaccttctctccttaagactaagtaattatagttcctactattttttgcagatgactctttaaatatttcaaaatgctgtctaaattctttatcagtcactgtctctcatttgattagggagcagaagataaagggtagcctgagacggaaatctaagaatcagaagttggaaactgttacccatgtttaaggcttgacaatcaagaccaagaggcagaactggggcatgcagcagctgaggacaaagtagttcccagagctgtagaatgcattgaggccaaatcagtggacacgtgcaaccagccacaatctaaagtgagaagatcgatagaggagagaggtaaggcaaggtcatgatggaaaacttaaacacttctgttaaaagtaagcatctcaagggagactcgt

SEQ ID NO: 16639 - DNA, 473 bp, Homo sapiens
  MAP TO AC005476.3; EXPRESSED IN BT474, SIGNAL = 0.81
tcttcttggaaaatgaaagattttgtaattaaaataatcaccccatgttctgttttttacaagtctgattatattttagcaccagatttttcttggcaggtggaaggtgtctggtttgagtgggaagagtattgcccagaggagagactaagagccaaagctagaagcccatttgctattttatccttatccttcttgttcttcaatctaaggagcaagatgggacttagaccaggagtggacatgattgcactgaccgaggatttctctgtctgggtagttgtcactcctatgccaaaagagcgttaccttgcccaccaagactccccacagtggtttccaccgcagcctgcttggcacaccgaaccaaatcaacagcatctgcaaggccagcatcattcatgttttggtaaagatcaaggaaatgagaggaaaagggtaatcagaaattctcataccagaagccaaagaaa

SEQ ID NO: 16640 - DNA, 457 bp, Homo sapiens
  MAP TO AB020863.1; EXPRESSED IN HBL100, SIGNAL = 2.3
ccagttccacttccttggagttctaaaagcatacattttagattaagtaaaaccttacagaagaaaagggcagaaagacagtgccaaacaacgtaatgaaattcaagggctgtttggaaaaaatgcaacctaaaatgattccagtgtagaagcttccacagcttatgagctacgcatactaaacagtcttttataagcatgtgctttgctctctgaaaggaacgctcaacagtgttgggtgagtgggagctctttatagcagcttgtccctcttgcttcagtctttgtgggtgtcgttaaacaggatgaaaggcctgtgacgatccaagacacttggaggttgatccacagaggactgggacacaccacgagaatctcccagagtgtcattacagtggaagacttcgagacgattgatgcaggatattacatttgcactgctcagaatcttcaagga

SEQ ID NO: 16641 - DNA, 451 bp, Homo sapiens
  MAP TO AL078602.10; EXPRESSED IN HBL100, SIGNAL =   1
tgtgatgactctggctgatgtaatgaccccagcgataactctggctggtgtaatgaccccagatggtgtgatgactctggcaggctggcacgtgtgatgactctagcacatgcgatgaccctggagggtgtgatgaccccagctggtatgatgattctggcaggcatgatgactctagcaggtgtgatgaccctggagggtgtgatgaccccagctggtgtgatgactctggctggtgtaattatcccagctgttgtgatgactctggcaggtgtgacgaccctggctggtgtgatgactctaacaggtgtgatgactctggctggtgtgatgaccctggcaggtgtgatgaccctggctagtgttatttatgattctggcaagtgtgatgattccggcctgtttgatgactctggctggtgtaattaccccaactggtgtgagaaccctg

SEQ ID NO: 16642 - DNA, 480 bp, Homo sapiens
  MAP TO AC007869.1; EXPRESSED IN HBL100, SIGNAL = 0.87
tcccaccactaaataattcctctcccactccaaaaaaatttttagaaatactacaagaaaatgtggggaaacaagcctaaatttaaaaaacaaagtacagagggaaaaatatatataaaatgtggctgacttttgaaaagtctatggtagaagaactgaaaatcaagctaggtcctaataccctctgtaagtaataattgatatattttgtttaaaaaaaagtgaaatcaaatcaaactttaattcctgttttgtttctgctggattctcatgtagggctaattcaccttgcagggtctgagagggaacaggcagagttcaccctggaaggatctatgggtcagaagagcaagagccttgaatgccgagttactgggagctgtaagttccggtcaaaccagaccagatgagaaccataaaacccgatgcctcttgggaggtttgacagtggaaatgaaggtaagacatgttgcatgtgtg

SEQ ID NO: 16643 - DNA, 494 bp, Homo sapiens
  MAP TO AC005235.2; EXPRESSED IN HBL100, SIGNAL = 0.87
accgaagtaatggagtcagttatcaactgacagctctgagatatgactagagattatcaaacattatttggaatcttctctgaaacatacatggaaaagtggaaagtgttctttgtagctgataagaactcatgaagtgatgtagaatagaaccagagaagggaccttagagttcaattgtccaacaagctcattttcagctgagaaaactaagcctcagagaagagaaactttaatataaatcatggtcattgcaaatacatttaaaatgatgaaaatctctcctgtccatttaccttctgcagattatctttcattccaatgcagcaagtgccattttctctggatttttttccttctgttgttgactcgtctttctcagtgctgtaaacttcttgttgactcatcgctgaaatgaattatttgtgtttatttaacattcagtctgcacttttttactcatgttaaatatgtggactctgggactacctgga

SEQ ID NO: 16644 - DNA, 469 bp, Homo sapiens
  MAP TO AC011402.1; EXPRESSED IN HBL100, SIGNAL = 1.2; EXPRESSED IN HELA, SIGNAL = 1.9
agctcacccaatggaatgaccaaacctggaacaatttgaccaccaaaataaatagtgtattattgaattataaccaaaatattaaatacatattcacgagactttgtacttctctatctcaatatttatactgatataaatccttttctaagtacatgaatatatcaataaagagaaagagacatatgttccttatagaggaatttgaaatggtttatggagatactctgttctcaaagagttgaagcttaactcctcattccccaatgtgggctgcacttactggctttcttccaaataatgggctatgaaaagggggtcaaaattagttttatagttgagaaacaccacctggaccagatgataaagtttagcatcacgggtgatgtcatattaatagcatgtatccataatatctgatgagaaaggtatctgatctctttaatttagaggttctttccccaaatcc

SEQ ID NO: 16645 - DNA, 478 bp, Homo sapiens
  MAP TO AC010739.2; EXPRESSED IN HBL100, SIGNAL = 0.91
gatgtccctcagtcatgtttattctaccatttacagtatgaaagccattcttttcattggagaaaagaaaacaaaacagaagctaagcattactgtctttttttctctcaagacacttcaaggtcatattcaaagccttcaaaagaagaacttgaggttaaaaaaaatgctgtgctaagactggaaaatacccacataattagttgaaaagttacattaaccgtctacaccatgatagttatcatctatctataagatatcaagagagtaggcagaggcgttgagaagaatatgatgagtctgagtaaaataactggtcctcctggggaacctgccagattatcacattatctcaaaaatgaccacgttgtggtcaagaacatcagctttaggaaatataacaccaaaggctccttctttgaagctgccacaatgtagatctattcaaaatgtgcctggcagtaagcttcattaagcc

SEQ ID NO: 16646 - DNA, 377 bp, Homo sapiens
  MAP TO AL122035.1; EXPRESSED IN HBL100, SIGNAL = 1.8
tcaatgatcagattccagattccatacaatataaaaaatgtggaagaaaaaaagcttacctttaaccttcggatttggatgtcagagaaccttctcactccatttactgatggcaccaaacgattaaagagagccttaaagaaaagaaaggggctttaaaatgagaggagccccactgctttgctacctgcatcctcagcacccaagacaccaacactaattcagatggttcaatactttcaaaactgttcaatggggttcatggggctttggcatcctaccttgtctgtctgggtcagttcatgaaatatccgagcatcaatggccgcagcaacgaggttattagctgcagtgatggcatggatgtcacctgtgag

SEQ ID NO: 16647 - DNA, 1915 bp, Homo sapiens
  MAP TO AC005164.1; EXPRESSED IN HELA, SIGNAL =   1; EXPRESSED IN HBL100, SIGNAL =   1
ttccccaaattgcacttcactggtggttttcagtgacaaagcaaattattattcattgtaattctcaggaaacaattacgaacatatatataatgtaaaacaagaccagtcacaagtttattctgtaatttttctttaacaggtattcaattctgtagaaaattgcaaatatttatttttaatatttacatttgggtctgtaaacaaagctggtaaaaaaatcctaagaatttccatacatatttataaaaatttcaagaatatgatccttatcacttctgaaaagtatgcattttttaaattctaaaagccagtaaatgtagaagttgaaggggacgagaaaaacgctgttaacagattatctgaattttcctcttcccaaatatctaaaacattgcatataccactcttttctgtgtagcttgtgaaacccaaaaattctgatttctcttcactagtctgaaacaagtctagtaaagactgtaccggtgaactacaaattctgttttcttcttgtgtaataaattcagttcttttatcaaattcagcatttggttccagattttcttttctatttcgtcctaatattattttcacttttcgatgtattttaccagaaggtaaactatccatattcttgaagtcacattcattgggttcctcaggaggagtatggaatggagcctttgcctgaacagttaggtgctcttgtgaactgtttattgttatcagaccagaatcatgagtaaatattgaatgaaggtccttttccttgagatcctttgctggaaaaagcacagtatctgacttctgttttggttgagatccactattatctgtactgaaatcagaaacatgtacagatgcctgtatgttacatttatagtgatctacccttagttcttctaagtcattttcacttaatgtgtgttcggaaatgtcaagaatgcattcctgtttgtttttatgtagaggtagctgtgtaaaattctgtcttatgtcatcttcagctgtacttaacatggaacatttattactcattttctcattaagccctctcaattcatttgaagggtgggggatgggctctgaaataaacaggagctttttttcagtttcctgggtctctttatacaggaaattctgctccttcactgttgtatcatcttcctggcaatctttctgagaaatatgttgcaattccactttttccttttgttcagtctttttcaggacacttgcagaaacaggagaaagggatccaacactgtattttattctttgtaggaaaaatagaagaaaaatattaaaataattgctatcaaaacaaattcctgagtagttagaaattaaattagtaaaaacattatataatctttaagaaacctatttaacttaggaaattttacaaaaatacaaacatcttaacattttgccaaatttacttgagctgtttttaaagtaatacaacttttcagatatagctgaaaaccctagtgtacctctcttctcctctacattccctgcctccctcccagataaccaatatcctgaattttgacatttaaaattactttaatcatgtaaatgaaagaaattgatagtaaagggatttgagcctgcccctaattttgctttcattattctgaacaatttcttaacttctgtgctttgatttacattaatgcacattttactcttcattttacttagcaatgtggagaataagtatttactgagaaacctatggcaaaaacatatattttaaatttacatttaagaatatttaatatcaaagtgagctagaaacttagtatctttatactttcaaaggtgacaaagttgtaacttttaagcttcaaacatatttgacctaaaattattttcttcatggagcatcttgatatccctgaaa

SEQ ID NO: 16648 - DNA, 491 bp, Homo sapiens
  MAP TO AC010089.1; EXPRESSED IN HBL100, SIGNAL = 4.4
cccaaatgtccataacaggtaactagataaagaaatgttggtgtattcatacaatgaaatactattcagcaaaaaaaaaaaaaaaaaaaaaaaaaaggtctatggatacatacaacaatatgaatgaatgttaaagtaattatgctgaataaaagaagccacaccaaaataaactacttattgtattattacattggtatatgcctctagacaattaaaaccaatctgtatgacagaaaggagatcagtggttgcctgagaagagggtacatggagagagacaggaaggagagattacaaaggagcacaaggataccttttgggatgatgtttatgttcactatattgatcggcttcatgggtatatacgtatgtcaaaacttatcaaattgtacactagatacatatgctgtttattttatgtcacttatacttcaaaatgctgttaaaactctcaccaaattaggtatgcaaggaatgttcctcaacag

SEQ ID NO: 16649 - DNA, 474 bp, Homo sapiens
  MAP TO AL096865.5; EXPRESSED IN HELA, SIGNAL = 0.99; EXPRESSED IN HBL100, SIGNAL = 0.92
tacggacagcttaacatggggatttaataaaaatgtacatattttctgtgaagaatccaacaacaaatgaaagaagtttttgcctgcctttgaaatgggtggaccctgaaacattggtctgtttgaagtggcatcacaacccatacacagatgcttcattcctgtcggccattactggactggactagaacactaagtcctgataagacacatcatttgcaatgagaatatattctgtttgtaagcctttctgatgtgccattattgctgctgtgtttcctgttttatgtaggtggtagccctcggagaggtaccagatgggactgtggttactgtcatggcgggtaacgatgaaaattattctgctgagctccggaatgcctctgctgttatgaaaaaccaagtagcaaggttcaacgatctgagatttgtgggccggagtggacgaggtaggtctctgacttttgatactga

SEQ ID NO: 16650 - DNA, 434 bp, Homo sapiens
  MAP TO AC009834.2; EXPRESSED IN HBL100, SIGNAL = 1.1
ccatggccaaacaagaaaaggttaagtaggcttacacattctgggaccaacaggtcagaagttttactctcataatataaaatgccatgttctgagaacagccttctaggccagtgtgagcctaaaagctccagtgaggaaggagaaaaataaaagggtcaaaaagaggcaaagcagagatgtaaataaagcctttcaaagagtgcatttgctatcacaaatggtgcttcttttaggacacagcccaagcaatattgcctgcttattaccccaaatgaaacatgaagaatctatcacaaaggagaacttgacaaatagttacctgtttcttaaatgacttacccactcttccataacacccagaagggagcgctatctgaatgtccgttttcacaacagctttctccataggtggtattgtgtaatcataggca

SEQ ID NO: 16651 - DNA, 473 bp, Homo sapiens
  MAP TO AJ239320.2; EXPRESSED IN HBL100, SIGNAL = 0.91; EXPRESSED IN HELA, SIGNAL = 1.1
ggtcacaggacagctaaatcagcatatacacagccagaccagatctgagcactgccagtagggcataagcaactgaaaggttttctttcatctaacccttcatgtggttttgctcaactcatatggtttgcttgtttagtgagttatatgtggctaaaccaaaagattaagattgacagttaacacatgatttcttaacgaaaaatattaaaaaaatcatacaagttataaaaaaaattagtctgtccatctcccatcactgcctggtaatgactttacctagcccatattctatggagtccggatgatcatcatcgccctcttggctgaccttctggagatgctgcagataagcatcagtgtggaaggtggccatctcctccatggaggccactttaggcttaactatcctaataataacagagagaacaaagagaggtcagtgagtcagacccagcgtatgccagaagcta

SEQ ID NO: 16652 - DNA, 453 bp, Homo sapiens
  MAP TO AF111167.2; EXPRESSED IN HBL100, SIGNAL = 1.2
tggaaactctgcatatttgtggtatagaaacccttgctaagagctagctcatgtaagcctcagaacaatactgggagatattattaccccactttatagataagggaaatgcagagagataatgttatttgccaaggatcacaaaaccagaaggtggtagagctgtatctcaaacgcatgtcttctgactgtgaatcctgttctttttcttttctaccatgaaaaaaatgtggaaaaatgctttgataactttaaggccatacatgatataacatactaattattatcaccactgcttctacctctagcactgccattgccacaaacgccatcactatcaccatcaccatcacaaccattactactaccatcaccatcaccaccaccaccatcaacacctataccataactaccatctccaccatcatcagcaccattatcatcaccatgcca

SEQ ID NO: 16653 - DNA, 357 bp, Homo sapiens
  MAP TO AF064857.1; EXPRESSED IN HBL100, SIGNAL = 0.93
aagtatcccgatttttccaatgtaattttgttcttttttgcaggatttcgtattcaatttcaaaagtaagtttgaaaccacatctattttctgaaaacaaaacaaaaaaaattgaacaacaacaataataacaacaatacgtacacacaactgcgggatttttggatttatgttatccagaattaagtaccggaggtagacaatgctgaaaaacacgtatgccgatcacaaactcatagggcaacatgaactgtgggatgaaacagatgggttgccactgcctacctttgacttgctctggttcccttagggaaatggagattttcttagtgtctggcatttgcagctctttccaca

SEQ ID NO: 16654 - DNA, 447 bp, Homo sapiens
  MAP TO Z98200.8; EXPRESSED IN HBL100, SIGNAL = 0.91; EXPRESSED IN HELA, SIGNAL = 1.4
tttgtttgaatgtacaaatggttgacattctagaatactttggtcagtattatggacttagaatatgaaatttctgtatggatataaatttctacaatgactgtattttgaaccaggtttttttcctggcagaagaagttgtcctcaactatcagtaggtttttagaggtatgtattgagtctaaattctagattcctgtttagttattagcaaaataattataagaaattgaagacaagttaaatataaaatagaaagatattgtttgctcttgttccagatgaacatcactcgaaaactatggagtcgaactttcaactgttcagtcccttgcagtgacacagtgcctgtaattgctgtttctgtgttcattctctttctacctgttgtcttctaccttagtagctttcttcactcagagcaaaagaaacgcaaactcattctgc

SEQ ID NO: 16655 - DNA, 466 bp, Homo sapiens
  MAP TO AC007365.2; EXPRESSED IN HBL100, SIGNAL = 1.5; EXPRESSED IN HELA, SIGNAL = 1.1
attgtggcaataatggtcgctgtcctaattaagtttacagtgttggcaggagagacagagaacacaaaataaacagtaaatatatattggatgatatggtgtgataagaagaaaaatacagtaggctgggatctagagaaggttggggggcacactttcagtgaatggtcaggaaaggcttcttccagcagaggctgaagcggggagggagggagttcagcacaggtctgagaaaggcccctgtgaggaaggaggaccaggcaccaggtgaccaatcctgatggggctgggatagcccagtaggagtgatgacccacagggtcagttcccactgctgggggtttctggatgacgaggttgttgagcacccccatgcttatggataccatgagaggaagcataggggatagagggacaagctaaatgacactaggaggagacaatcagataaatccagaatgtggga

SEQ ID NO: 16656 - DNA, 471 bp, Homo sapiens
  MAP TO AL049611.24; EXPRESSED IN HBL100, SIGNAL = 0.91; EXPRESSED IN HELA, SIGNAL = 1.8
gatttgcctccttgtgatgcagtgattaacagatggcaggaaaggaggctgagcaagaagggaggaaattcaaaaactgcccccagtcgggccttcctgatgtggaggtcagctatcggcctgtgggcaagtgttcagttattggtcagctcagtctcaaagctgtgattagaagcttccctgatttcatcaagtaagaactttggtcaccgagatgagactgatcaagaataaataccatgtgcagtcatttccttcctttctctacagcaagcaaactgaaaaggatccaggcgtgcaggaattggaagcattaatagacacaattcagaagcaactgaaagatcactcatgcaaagacaacattcgtgaggcatttcaaatttatgacaaggaagcttcaggatatgtggacagagacatgttctttaaaatctgtgaatcgcttaacgtcccagtggatgactcctt

SEQ ID NO: 16657 - DNA, 385 bp, Homo sapiens
  MAP TO AL122035.1; EXPRESSED IN HBL100, SIGNAL = 1.3; EXPRESSED IN HELA, SIGNAL = 0.97
gtcagatgtcctccgaaaggtaggccaggcagccgattttggccctcttaaaatgctgagcgctgacggtgcctgtgagtgataaggcagccaacacaagggctgtctgcccgtcccttgcttttgctgcctgttaatcacgaggataagagcaactcaatgaagaaacaggcagaagtcatccaacttccttttggccgtcagcacactgccgataatcagatacttcaacccaccactcaccgtggggccgcccccgtgcatcttgagagccctgacagtggcaacaagcaccaccacgtgggggcagaggccggaataccggcatttgatgttaaaaaacttttccattccaatgtctgctccaaatcctgcttccgtcact

SEQ ID NO: 16658 - DNA, 469 bp, Homo sapiens
  MAP TO AC007077.2; EXPRESSED IN HBL100, SIGNAL = 0.83; EXPRESSED IN HELA, SIGNAL = 0.69
ttctgtgaaaggtaagtcacaaaatctttaaatatgtcataattaaaaatgaaagcaatcagaaaagatactgttttaaaacaagttctttgtgaacagagatctcatgcctttggcctctattgtgtcctcaacacctgatatggtgtgggcttcaacaaatgtttatttaatgaatgattagatggattgtagtatactattctcctagccactgacaaattgtggcctattaagactaggggagtaaatactccaactcactcccctcctgtcctacaaatgtactgctcatgcttctgttgcctaaacccaactggaaaccagaaggcaagggaatgtgttaagagctcataggtaggtggagaggggtggcaagtggttctggagctgccaacagtatccactatctgcacactgctgttttccatgcagtcactggagataagaagctagatgtacatgacga

SEQ ID NO: 16659 - DNA, 385 bp, Homo sapiens
  MAP TO AC007249.2; EXPRESSED IN HELA, SIGNAL = 1.9; EXPRESSED IN HBL100, SIGNAL = 1.4
tattgtcagttgtgtcccgcccttccctaacagggtcacgtatactcacccccatgtcaaaaacacagcgggcatcagagattgcctgcacgaaggtctcaggatcggtacagccgcttcctacatggaagctggggtaaaataaagagacgagacactgtgtcttagtatttcttaaaataatagcaaacactaggagaaagcctgtaaaactcaaactgttcaatgtcttgacctctagctatcccaccaaaatctcacctgacaccaacaacatcgatatttagctctttcgcccgttccaaaaggagcctgctggttctgagcgtggcaccgaatttcacactgagacgacagactgctttggaatcatcagtggcaatcc

SEQ ID NO: 16660 - DNA, 426 bp, Homo sapiens
  MAP TO AF064858.1; EXPRESSED IN HBL100, SIGNAL = 3.5
caacgcatttgccttgtaacttcctatagtgccatgcttttgtctaacatgtttctctatgccttgcttttcctaaactttagtagttggagctagaggtttgatcagatttgagtttaaattcttgagtgttaagatgacttcatagatgttgctgggctcttctatcagaaagtatttaaaaccagcttctctcaggttttcttgtggtttccattgccttgatccatgaattcattaggagtttcaaaatgtgacattagatcatcccttctttgtttactaattggaatcctttcgcccatcaattcttttgttatcctgcagtttgtattgtgaaggcaaagattagtaaatgccttatcttttctctttatcaacttcagagtagcgatgtggttcatgaccatcttccagttgtgagca

SEQ ID NO: 16661 - DNA, 482 bp, Homo sapiens
  MAP TO AC005018.2; EXPRESSED IN HBL100, SIGNAL = 1.3
aaaccccaggtttcttccctataaaatggaattgttcatgttggctcaacttcccttccagatttcttgtgagaatccaaacagttaaaaggtaaagtatttcttaaagtgggaaagaggcacacgaataattgggaatttatctaggtattttcacaaagcccatatcccctcctcctggagcagttttgtgaggtttgataagagcttgtctggagacctcagctctggtcacatgagcaacacaccactttcttcctgctgagcttgagccatggcccagctgtggccgtggtgacagtgaccagaatgatgaccagggctgtgcttttctctcctttcttcccttttctcagagccctgcccagcaacagcaaaatacaaatcctctagactcctgcactctccacccacttcctcctgctcagattcctcatctccctgcttccccataaatggcatttctcgtgaaaaacgggcct

SEQ ID NO: 16662 - DNA, 435 bp, Homo sapiens
  MAP TO AL031302.1; EXPRESSED IN HBL100, SIGNAL = 1.1
gggttggaactgcttgattcacttttttttttttttggaatttctgacaaatcttattttattcagatagcagtctgatcacacctggtccaacaacactcaaataataaatcaaatataatcagatgttaagactggtcttcaaacattctagccaatgatgccacgcttgcctgtgatctctctgacataaaaccacgtcgacacctcagtggccaccaaaccgttcagcaaagcttccttaactgtgagctgtttgaagctaccagtctgagcactactgactatttttttcaggctctgaatagctctagggatctcagcaggggtgggaggaaccagctcaaccgtggtgtagtaccaaaatgcggccaatcgaggcttcaagtaagtcacagcagcattcaccagtgctggggtcttctccacaaggtt

SEQ ID NO: 16663 - DNA, 458 bp, Homo sapiens
  MAP TO AC008008.2; EXPRESSED IN HBL100, SIGNAL = 0.98; EXPRESSED IN HELA, SIGNAL = 0.72
tgacaagttttccttcatgcacaagaaagtattatttgtttaacctcccaaacatattctcatgatctcatgataaacacagaaagtccatactggctgactctagtcacactccttattaaaaacaaaagcaataaccagccaatcagatattctttagattggggtcaccatctctaggatagtagtcctgatggacctattgagaaggacctgcttaactgtcaaacatctcctctgaaatggtatcccagttgtgtgtgcttttccactgataagcattcttgacccccacagctcccaaccctcccacaattagagaagagctctgcacagcttcatatgacaccatcactgtgcattggacctccgatgatgagttcagcgtggtctcctacgagctccagtacaccatattcaccggacaagccaacgtcgttagtgagtatctcatggcc

SEQ ID NO: 16664 - DNA, 442 bp, Homo sapiens
  MAP TO AL049748.1; EXPRESSED IN HBL100, SIGNAL = 2.3
cagcacgtgtaatgaccaataagaagatggtcacaccatatgcaaatggtaagaaattataatcttcgaaagagtgtttattcttgtgtaaatatatgaagtttttataaacttctaagaatgtctttatttccgtcttaagacagtttgatttgtgttgaagtagtctctttacctgggagagtattttatttttacagaataactttgtcattacaattgagctaagtttttagttattaaggtgttatgttctaagtaatgttcatcttttacacagtgcaaacatgctatctagttgcctattaacccaaattggatcccacctgagcaccttctttttcagctgctgtagctctttctaatatgttagacttgtccgtaatacccctggatgcccactgactcttacttttagttctgactttcattcatctgagca

SEQ ID NO: 16665 - DNA, 482 bp, Homo sapiens
  MAP TO AP000501.1; EXPRESSED IN HBL100, SIGNAL = 1.3
gagaaggcattgagtgagggaaacgggcttgggaattccggagattgttatcctgccctgcccgctgtctgaggggattctcctcaagtaccctggaatgttcctgtggcccctgtggatcgccaccacaaagatcatgaggttctgttgccctggcaacccgttgtccagcgcctctgcactggggctgccaaggttccaggaagaggcaggactgcccggcccagccttggaggaagacttctgggcagaagcggaacacaggagcagagacacatagtcttggctccagtttcgtttcagttatgcccaccctttcagtgttcatggatgtgcccctcgcccacaagctagagggcagcttgttaaagacctacaaacaagatgattacccgaacaagatattcttagcctatagaggtagatgcctagcagttctgaagtataagacttaagtgatggtaactgcctctaggaggaca

SEQ ID NO: 16666 - DNA, 479 bp, Homo sapiens
  MAP TO AC011087.1; EXPRESSED IN HBL100, SIGNAL = 8.8
ctatataggggaaaacatgataaagagaaaaacattgcacataagaatgaaaaagttatgatcatttaaatgatacatacataaaagacatagtttaaacaagataatttttctttttatttgaaaaaatcctaatttattctcttaaattatgagaccataatattatttgtttcttgttatttgacaactgctatttatttttatcatgttccggagttatatagacctaaaacactatctttgtgggaaaaaaaatattttgagacagatgtctgggggagtatattcttccttacacatctttttatggacagacttccgttagaaagtgaaagactggaagatagcattggaggacaagatgacatggagttgacttactcgagggagaagggtattgcaggtaggtgggagaactcttctaacagatttttaagcgttatgtattgaggaaaagggggaagagagtcagatga

SEQ ID NO: 16667 - DNA, 446 bp, Homo sapiens
  MAP TO AC007314.3; EXPRESSED IN HBL100, SIGNAL = 0.71
cagaccccttggtttctctgaagcagcactggcccattaatgagtgcctaacagctgctctactgcatgcatcaggagaaatgcctttaaataaataagataatactcctaagcccaatgtcaaacacttaatatggaattaattacatctcaagtataatcaaagactcttctaacttacaaagaaaacattacattaaagaaacagtagcaaattctaactgataaggagtacattactttttcacgaagttcttgttgctctaagagtcttagtttcttcttccttttttcactaatttttgaaacaagtggattcagaagcctaaattcttcactctcttcatctacttggaagtcagggttctcaaacataactttaaatcgatcatcggtgagaatattaggaagactctacaaggaggaaaaagtacgtaaaaatttaa

SEQ ID NO: 16668 - DNA, 482 bp, Homo sapiens
  MAP TO AL049868.10; EXPRESSED IN HBL100, SIGNAL = 0.93
aaagggtaaaaaccagcataggcttgatattcaaaaataagtaatttattttcttcttaaagcttttgcttgggaaattgtatgtttgatatgtgaaaaatgcattatctaaaataaatctgatatttacgttgagacgaatatactgtcaatttagaggtttttggcaataaaagagattgacattttaaatcagtctactgagataggaacgtgtaataattctatatggatattttcttttgtctaggtaaaatggaccatggaagtaatttgctatggactgacccttccattggatggagagactgtaaaatattgcgttgatgtatatacagactggattatggctttagtgttgccaaaagattctattccattgccagttattaaagagcctaatcaatatgttcaaactatactaaaacacctacagaatctttttgtaccaaggtaagctatacctgtctatctggcccatt

SEQ ID NO: 16669 - DNA, 469 bp, Homo sapiens
  MAP TO AC006346.1; EXPRESSED IN HBL100, SIGNAL = 1.2
gcccgagtcttatcatctcctaaaaacaatatagcagagactaactccaacatatgttaattagccttatccttaacctcattcacatcattctgtctatcaccttcgtttgtcttatctcatttggtccccaagttttactctgtaggtatttcagatttacaaactagaaggcagtctgttattggaaggcaattacaagcttttatgttgaacatgaaatatgttagaaagaggatatgggacacaaatctgaccctacatacagaagaaaagtaatcagcacctgatgtcatcctcattggcaaacataatcactgctcgagcattaggtgtttctagcaggcgtttgataattttttcaaattctccaggtcttggttcacgtgggattttctgtgactgagcaatgcaaacaccacctatttaaaaaagaagggaggtggtgattcagaaagagcatttattt

SEQ ID NO: 16670 - DNA, 427 bp, Homo sapiens; identical to SEQ ID NO: 2861
  MAP TO AC007642.4; EXPRESSED IN HBL100, SIGNAL = 7.5

SEQ ID NO: 16671 - DNA, 471 bp, Homo sapiens
  MAP TO AP000120.1; EXPRESSED IN HELA, SIGNAL = 0.98; EXPRESSED IN HBL100, SIGNAL = 0.67
tgccatttaaatttttactgtgtaacaatcatggattgtaaaaaaagtgaataaaatgtacgcagtcagtttaaagactaacaaaatatgcattaaatcaccagccaggttaagaagaaatactattacttataccctggcatctccctcccacctttacatagccaaatccagaaaagatccgttttcctaaccttgttcgcctattttattatttaaattgcagcaggagggaagcatgtctactttatccaatttcacacagacgctggaagacgtcttccgaaggatttttattacttatatggacaattggcgccagaacacaacagctgagcaagaggccctccaagccaaagttgatgctgagaacttctactatgtcatcctgtacctcatggtgatgattggaatgttctctttcatcatcgtggccatcctggtgagcactgtgaaatccaagagacggga

SEQ ID NO: 16672 - DNA, 464 bp, Homo sapiens
  MAP TO AL049832.2; EXPRESSED IN HBL100, SIGNAL = 1.4
tgcctctacctcctgcaaagaggccagcaactgtggccaaaagatgggaccacgcacaaggggcagttcccagggagcccagtgcagagaggatgccccgcccctaaactgtcagggtcctgttgctcttgtcttctaagcctccctcactaccacccccaccttccttctcccagtccagccatcattcaactaaccctgttttgtcttctgctttgcacttcgcactacctgatggtacatatttgtttgtttattgcctctctctcacctggccccttctaacacccccagcacctacaacagtacctgacatacaaaagatccttcagcattgtggtggacgctataatagcgttgcctccgctgaagagagctgcctggcccaagtcacggcatcctccccaggttggactgatggaggtccagcatctgtttccaattccgaacaactttgaggagca

SEQ ID NO: 16673 - DNA, 468 bp, Homo sapiens
  MAP TO AL079337.3; EXPRESSED IN HBL100, SIGNAL = 4.1
ttgccttagccaacagtcagacagtcttccaaagcagaattgccttctaaactgcaactgaccacaggtgcatgaatgagcctgatcaagaccaaaagaagggcccagctgagcacagcacaaattgtcaacctgccgatgcatggactatatacatgtttgatgttttaacccaccacattcgagagtggtttgttgtacagtaaaagctaactgattcacctgtcattaggaattaagccaactaattttgtggtaggatttccttttttcctttctttattcaaagccagaatatctcagtcttgtccataaacctcaatctgaaaacagagagaacaatgcaaagaaagaaaaactttatgatgattctatgacactttcaccaaacactaagaaaacaaacataaaatgaacaacttggttttcaaacagaaataataaatctgtaagggcccacatataaat

SEQ ID NO: 16674 - DNA, 357 bp, Homo sapiens
  MAP TO AC006348.2; EXPRESSED IN HBL100, SIGNAL =   1
ttgaaaaattccttggaagacacaaactatcagaactgactcaggaaggattagatctactgaatattcctgagtctgttaaacaattgaatttgtaattaacagtcttcacataaagaaaactatagctcaattcgtgaattgtaccaaaatgtaaagaagaaatgatatgaattctacacaaactcgtaaaactgaagaggagggaacagctgccggttcactctataaggccagcattacaagcattgcatggattcctacgccagaaagaggcttcacgagaaactggagctgccggtcattatccatcatgaacccagaggcacatatgctttcaaatgttagtaacgcgaa

SEQ ID NO: 16675 - DNA, 469 bp, Homo sapiens
  MAP TO AC010904.1; EXPRESSED IN HBL100, SIGNAL = 1.1
tctccagctccatgtcatcctgtattctcataaagtttatgtttctcctagtacttccatttctgatttgctactttcacctaattattgacaaccctgtgtcttggttttcagctgttctctgctgtcttcctaaatgtggcaaagatgaaccataatgtcctgttgacctttttttgtaatccctacaaaatgctgccaaaaagtctccacccaaggcatatttttattgaagtttgaggataatgatggggatgatgaggtgggcaaggatcaccttcagcatagcttggcaaacgactggcattttcatattgcatgatatgattcttaagagtcctttcctctccagtgctccacaccctgagctgcttgttgctatagacccagtgaggcaccatgcctttggcttccggataccatctagcttgctactgataacatacccatagaacatgacatctaccaa

SEQ ID NO: 16676 - DNA, 430 bp, Homo sapiens
  MAP TO L78810.1; EXPRESSED IN HBL100, SIGNAL = 0.94
tggcctaagtgacgggatagacagaagtgccatgaactgagatggaggacgctatgggagaagcaggttggctttttgtttttgttttttgagggtgggtgaaaacatcaggagttcaactgcgcaatgcttgttagccattcaaatggagatggagagttggctacatgagtctggagttcaggggagaggtcagggccggagacataattagggagtgatcagtacatgggtggtatttaaagccaggagaccagatgagatcacttagggcttgagcctggggatacttccacattagaccccacaaagaagactgagaaggagcagttggtgaagaaggaaaaggaaagtgtggtgtccaggaagccaagtgaaggtggtatgtcaaggaggagtggtgagctgctgagggcccagtaagatgaag

SEQ ID NO: 16677 - DNA, 485 bp, Homo sapiens
  MAP TO AC007510.4; EXPRESSED IN HBL100, SIGNAL =   1; EXPRESSED IN HELA, SIGNAL = 0.62
tctgatggagtgacaggaaggatagataggtgttttggaggaagtgagggatgtgagggagagggaaaggccagaaacctaagggtctcgattggcgggtagacccaaaaggatcaggtgctcactgactccaggcagggtgatttgttgctggcagcccagcattcacttacattcatgtgcccataagtctgagactccacttctttagctacaaaacagggacaaccatactaagacatgatagtattacaagtgtcaaatgccaaaatgttggtgagcaacctcaaagcatggcaccaggtctgtgaggctgatgacagtgaagaaggctctatacacccagaaaaaggataatggaagacagaagggctccactaaaaggagaggggcaatgctgcagttttcctgcttcctggctttgcccatggctacctctgaggagttgctcaggacactgtgcttgttaggaacaaagggcctcc

SEQ ID NO: 16678 - DNA, 446 bp, Homo sapiens
  MAP TO AL022727.1; EXPRESSED IN HBL100, SIGNAL = 1.6
gctattgcttgtatctgtagctggataaatatctcaatgaagcatataaagggaactgtataaaaattctactaccattatggtgcacactctctggaagtgggatacttttgtcttcaatctgtttgcaagtgagcggttgacaatgcatggacagactttgagtttatgtggttctttctttaggtataagaaaaagatgaatgatgattaaaaaaaatgcaagttcggaagacttctttattctacttggattttctaattggcctcagctggaagtagttctctttgtggttatcttgatcttctacctgatgacactgacaggaaacctgttcatcatcatcctgtcatacgtggactcccatctccacacaccaatgtacttcttcctttcaaacctctcatttctggatctctgccacaccaccagctctatccctcag

SEQ ID NO: 16679 - DNA, 392 bp, Homo sapiens
  MAP TO AL031132.1; EXPRESSED IN HBL100, SIGNAL = 1.7
cccccttatggtttatggttgaagcagattctattttcttacaaatgctgtgttctgatatttaaaatgttgtctggcatcattaggtctcaatcccttcttagaacaaaatgttcctgctctctcccatttgaagagtattctttcttcagatgagttttctaaactttcctattaaacttgctggaatgtgaatggggaaattagaaagatttttgtttttttgtgtgtcagtgaggtgattcatcacagcacatttcttagaatttggagggaatcctgggtctgggagtgctggtgacttggaacaggttctgctgcagctgggtgaacttggtctttgtagacttctctctcaagtttatctcaagagggggatttgaccaaagagt

SEQ ID NO: 16680 - DNA, 426 bp, Homo sapiens
  MAP TO AL096771.11; EXPRESSED IN HBL100, SIGNAL = 0.92; EXPRESSED IN HELA, SIGNAL =   1
gccagtggtgtcattttagctcttgctcagtatagtggggatcccagaacagagtggcagttaaatgcacacagagacaagaagagcttgttgcaagctgtggcaaacttgccgtacaaaggaggcaatactctcacaggtgagtaaggactgtctgacagtctttcagctcatgcttctggttaaggtttgtggctgaatggtgatgtgactgattctcttttaaaaatcccactaggcatggctttgaatttcattcgccaacagaacttcaggacccaagctggcatgagacctcgagctcgaaaaattggtgtgctcattactgatggaaaatcacaagacgatgttgaagcaccttcaaagaaactcaaggatgagggagtggagctgtttgctattggtacgcactgaaaaggacagtga

SEQ ID NO: 16681 - DNA, 400 bp, Homo sapiens
  MAP TO AL035460.13; EXPRESSED IN HBL100, SIGNAL = 0.91
tgttagtcttttccgccccgggctcctgcagggacaagatgggaggatgctcgggtgctcagggatcctccagcctcccttgtccaccccttctcctaaccccaacttctttcccacccttccagccactcagccagcttccatccattcatctgtcccagtgtgtgtgtgtgtgtgtgtgtgtgtgtgtgtgtgtgtgtgtgtgtgtgtgtggttgggggttccctcccggggccagtcccagccaagcccatgagcctctcactcggtccttttccacgaagtcgatgaaggctgtgcgctccacctccacgggctgcccctgccggtcgtacatggccagcacgaagtggaagaagttggatttcctgaggttggagggaggctgcttctcaaaatg

SEQ ID NO: 16682 - DNA, 408 bp, Homo sapiens
  MAP TO AC009972.3; EXPRESSED IN HBL100, SIGNAL = 1.1
aggctgggctggataaaaactaagtgagaaatttgtttcttgagcatataagagagcacggttagggctgatgatagtcccatccgaactgcaatatgacagagggatgataaagtaagaagggtgctaactggagacttgtttagacactgtaagatgaggttgtgctgtagaggtgacagtgttgtaactgtctgtgacttgtttcgtgctgttttgagttttctaattccctttaagtaggctgccaaaatttctatgccagtggagtcttgtggctccactggaccagagaaagatgagaaagtaaacaatgttaaagcagtgagcaattcactaaatggatatgcaagtcacaataataagcctgaggtaggtggacataaagctgtgtccttcggttgcttt

SEQ ID NO: 16683 - DNA, 476 bp, Homo sapiens
  MAP TO AC007282.2; EXPRESSED IN HBL100, SIGNAL = 1.6
gggctgtggcaattctatttcatcagcattttcttcatgaaatagaatatgtgatgacaaacttctcttccaaggtgtaggtaattgattttccaagttcattggtgtttcacttggctctttcacttctatctccaattctgagaatattggtgcagtgaatatttgcctcataatgtagtcatgtacagtgccacttgaacctgatttggagttaggtacttcgcttattaaatgtttctttttggtactactattttttttaattggaaaatctctctcatcagcttcgaagtgttttttagagacatgttcttctacctctggagattgtcctggtccactttctaaaaatgaatctgcaggaatatttttaattatctgacccccttctgaaagtgaatattcaggaatatttttaattacttgaccaccttctaaaagtgaatctgcaggaatattttcaattatttgac

SEQ ID NO: 16684 - DNA, 410 bp, Homo sapiens
  MAP TO AC011504.2; EXPRESSED IN HBL100, SIGNAL = 3.4
tgtggcccttgtttcttttcttgactccactgaataatatgggattatttcttcagatgtgggtgccttgcatgggtacaacgaataatattccaggcagacacaggccatatttgcaaccctcctagactgtagccaagagcaaatgtgttgaagtaggcatcaaaagctctgccagctttctcctctgcccgtgcctacaagctgaaagtgacttgctaaagaaaaaggaggtggatccaagttttttaaaggtctgttaccaggaacaaggagacatcaggcaacagaccttcctaattttgtcttctcaaggtcagcaatgttgtctacatgcccattcgcttgttcttatcctccgagtctatagcaaggttggcctcgatcaaggtgacatgaaggtgcatgct

SEQ ID NO: 16685 - DNA, 465 bp, Homo sapiens
  MAP TO AC007563.1; EXPRESSED IN HBL100, SIGNAL = 0.71; EXPRESSED IN HELA, SIGNAL = 0.62
ccaatcttcttagcaaattcagagttatttccataacaccacactgcctgaaacctatgctctttactgcttactagaggggagtgtgatttactctggacaacaggaaaggagtagaaaataacatcaaagcttctgggaatgggagcccacttcaaatgctcctctgagagggagatactgcctgatccatccattctgaaactatgcacagaaccactgatacatagcaggtagctgcccctcctcctttaccttgtaggttgggtggagtgtgacccaccccaactccaaagacaggccccgattggtctaaaccagtcagataatccctttcaatttaccataaaagttgatccaggaataagcaataatccaaatttaagtgaagcagcccatggcattcccctgggaatcacagtgatgggttcaagttggcccaatgggagtgaagctcaggaccag

SEQ ID NO: 16686 - DNA, 403 bp, Homo sapiens
  MAP TO AL008728.1; EXPRESSED IN HBL100, SIGNAL = 0.92
ccatgcctctacctgactggatgaggcgcacccacttagtggagggaggtctgttttactcaaagtcgtctgataagtgcccatctcatttaaaaaataccttcacagcaacgtagagattggagttgctgggtaccacagcccaatcaagaggacacaaaactaaccaccacactcgcttctgaattcctcagacattgaacacagcctctgtacgagcccctaaggaaacagaggttggctttgccaaaaactaccttaatttctagatttaacacactcagcttctcgtggctaaagacaccgaccccagtgctgcctctccaggatcagtgacagaccccgaggttctggagccgggaaaaaaccatgacattgtgcaggtagatgaaatgccgcgttg

SEQ ID NO: 16687 - DNA, 466 bp, Homo sapiens
  MAP TO AL035086.12; EXPRESSED IN HBL100, SIGNAL =   1; EXPRESSED IN HELA, SIGNAL = 0.72
ctgtttcatgagagaaattgagcatgtttaaaacagggctaatcgtttatctctactaatttctcttttaatttataagatggtcttactagaaaaagtttctaggtattcatctgtatctcccaaaagatgagaaaaataaaaaaagtcaacgtgaaatatcacttctatgttcaattagaatcttctagaaacatcctaaaaggatatcagaataataatttaaaaaaatttttaattcttccccaaacaaatccttattaaaaataatgtaaataccaataaatagaaatcagcggcatttctcaaggagcatcctacctgatttttcaagaagttcaattacagctttggcaacaggtgaaacaaaacattcatgggcatcccctcgcaccagcttccccaggtttatgtctgttactctgaatcagaaaataaagaagtaggttaagtcaaagcccagcca

SEQ ID NO: 16688 - DNA, 472 bp, Homo sapiens
  MAP TO AL049830.2; EXPRESSED IN HBL100, SIGNAL = 1.2
gacaaggtaaagtggtgagggttatcttctgttacagtgatgggtattccattttggacctctaagtgcagtgctgactgcctcttatctagattaacttgaaacattcaggattttccagtttttaagaagaaacaacttttgatccttttggatatcttttatgtgtctcccccattaggctgtctgtcggaataatggcttcttctcttaccacatgcccaactggtttggcaccacaaaatacgtaaagcctctggtacagaagctgtgcactcatgaacaaatgatgtgcagcaagacctgttataactcagtgaacattgcctttctaattgatggctccagcagtgttggagatagcaatttccgcctcatgcttgaatttgtttccaacatagccaagacttttgaaatctcggacattggtgccaagatagctgctgtacagtttacttatgatcagcgcacg

SEQ ID NO: 16689 - DNA, 458 bp, Homo sapiens
  MAP TO AC010149.2; EXPRESSED IN HBL100, SIGNAL = 0.94
aacacctgtttccgttccagtttctccagtaccattcactccaactccagaggacaccatggaacaccatttcctcggctggaagtgggaccatctccggcgacctctgcttctcctctccttttctactgtacaggagcacttacagaaacacttgaaaaagttccccactcataggagacctgtcagttagcaaattgtaccctgaagttttggtctaggatatcaaagcataacttattttggggctgctttaccagattgtgacataataaactttacttacttcaaacattttatttgtgatgagatcacgatcacggaggccctcgaggaatggaaatgtcttttttattgcatttgaaatctccaccttatttcttttgaagtgcttgaatacaatgtcatagagcagcctgtcatctacaccctggtcttccgtgaacatcctagggaaa

SEQ ID NO: 16690 - DNA, 415 bp, Homo sapiens
  MAP TO AL034345.3; EXPRESSED IN HBL100, SIGNAL = 1.5
atgcgaatgaatccaaaagccattactgcacctcagatgtttggcagactggacactgctaccaatgactggacagatgggattttttctactctgtggagaaaaacattaaaagctaaaaaaggtatacacaaacctcctttgtgatcattttttccctgctagcgtattaacacagtatttttttgatttttccattttaattacttgcaagtgaaaagtgattttctgttttaattattttcaggtgaaaacattttcctcattttagatggtcctgtggatgccatctggattgagaacttaaattccgttttggatgacaataaaactctgacgttagctaatggagatcgcattcccatggcccctagttgtaagcttctgtttgaagtccacaatatcgagaacgcct

SEQ ID NO: 16691 - DNA, 370 bp, Homo sapiens
  MAP TO AC007358.2; EXPRESSED IN HBL100, SIGNAL = 1.1
tgcataagcataatgttcctccattataaagaggataattctgtcaacttccacttaataaaatcaattttttaataacaaaatttgtctattcattcctgcagcaatagtatctaagcataattccaagtataatctgtacacagctgttccaaagtcattattggagaatcttggaattagacgggacattggaggtcagctcttctaacctccaacatgggaatccctcctatagctctcatatcttcagagaggcagaggaatcccactactgttgtgggaactctttgtattgatggacaggtaaaactgctcaagaactcttgctgatgcgtcaacagtagcatccctgagctttcgattggta

SEQ ID NO: 16692 - DNA, 479 bp, Homo sapiens
  MAP TO AC007768.1; EXPRESSED IN HBL100, SIGNAL = 1.2
  unsure 29
tgcttgagatagatggagaatgggaatanggttctaggtcagtgattcccaatttttagtgtcaagaacattcttctgggaaagttttaaaatgctgattccagaatatcttactgacacccacagcaccatttggaaattcgaggtgggtcccagaatctatatcttttacaagtatcccaggtgattctgaggcaagcagtccatagaccagtctatgagaaacagtgctccaagctatggacccaagagaagagactgtgcaaacccagagttaaagactccatgagcagattaactggccatggaacttgctctcctggcaatatatttggacaaagagagggaaaaactgaaccaaactttgtgtctccggagattaaaagaagtaccagaagcaaatctcatccccgtcttggaggtaagaaatgggaaagaccagctagaacaactgtaatagcaaagctcagaattgaggg

SEQ ID NO: 16693 - DNA, 456 bp, Homo sapiens
  MAP TO AC006318.2; EXPRESSED IN HBL100, SIGNAL = 0.92
atcttgggatgatctgggtggtggtgacatgaaaggacacacacataagaatatatcaagttatcccttaagatgagtacatttgattgtatgttaattatacctctctaaaaaaatagaaagttttttttaaatccctgattgaaatccaggtgttcctgccttccccttcagatatcaccatggtgtagagaaagaacctcagactacacctcagagccccaggctccagccctcactagctgtctctccttggttaaatgccttttcctacctgtaactcaggtcatcatccttaaaccagaaatagataacctgatagttagggtcaagggtcctcaaaattgcagctgaatcagcatcagagctctttgtcctcctgattcaagcatcagagacagaaaataaaacaaaaaacaacaacaacaaaaaaaaacacctctttgtcaggcaggt

SEQ ID NO: 16694 - DNA, 490 bp, Homo sapiens
  MAP TO AC009508.2; EXPRESSED IN HBL100, SIGNAL =   1
cctccagaactgcaagccaattaaatctcttttctttataaattacctagtctcaagtatttctttatagcaatgcaagtacagcctaacacacttattgggataagaaggataatgtgggaatattatgaacaatggcatgccaacaaagtagagaacctcgatgaaatggacaaattcctagaaaggttatattcctataaaactgatacaagaagtaggaaatataaagagacctgtaacatggaaagagagggaataagtaattagaaaattcttacaaagaaaaacacaggccaagatgactacatggtgaattctaccaaacatgtaaagaagagctactactattccttcacaagctcttctgaaaaacagaagaggaggaacactttccagctcatcctataaggccaatattaccctgataccaatggtagacaaatcgcgagaagaggaaactacaaaaatgtcttatgaatacaggtgc

SEQ ID NO: 16695 - DNA, 442 bp, Homo sapiens
  MAP TO AL033532.15; EXPRESSED IN HBL100, SIGNAL = 0.99
ctccagaggcagaactccacctggtcatcctcccccagcaagggcccctgacactctccagggaactaaggcagtcagagggacactgcaccagatgagcgcccgtcagtaatccctcaattctctaagtctgaggcatgcttaccggtcgatggcaatgaccccgagggttagcatgctggcagagctgatcagcaggtagaggagggcagagaagttgcaccacactacaccaaagatccattccctgcggatggagctcgtcaccacaaaaggcagcaccaacacggacagcaggaagttggacagagtcaggctgaagacgaacttgttgctgagggtgaggaggtaggacttcttgtacaaggtgaccacgatgaccaggtttcccaggcagacaaaaatggtgatgacaatgatggcgatgaactgggtgatgatg

SEQ ID NO: 16696 - DNA, 403 bp, Homo sapiens
  MAP TO AL078623.24; EXPRESSED IN HBL100, SIGNAL = 1.5
agagtaaacaggaaacattcttcttcttatgaagactttagcctccaccctatagaagacatcactcatgggttctcctaagcccacagcaaacttctggcccccgctttaccccaccccccgcacccatcctctccagagttaaaacaaatttctctcttcacctcacacagagcaattcagtcttctcttttattgcctttgatctttctgtcatcatgcttcagggtctctctcttcccattccaagaagctcttcaagacattcttgaagacattcaagacattcaagaagacattcaagacattcaagaagacattcaagacattcttgatagacctattgcttctgtgactataagaggctctaatattccacatggccacaaaatactgccatctg

SEQ ID NO: 16697 - DNA, 445 bp, Homo sapiens
  MAP TO AC007653.1; EXPRESSED IN HBL100, SIGNAL = 0.7
aggccaagctcacacttccctcctgtcagtcgcaaaggggagcatgcaaaaagatgtaaatggcttgataccacctgttggtgcaactctaaagacagccccagaacagcctttcagcaggggcatctggctctgtaaagggcgacaaataagcaactctggcccagcgcagaagccttcagggaagactgtccaaagagggtgcttttcatttccacagggtaagagcgattgcaaggtctttgatttgctctttcacccagatgaactgatcgcttatgaactaacgagaagggaagcagaagcaaacagaagaccccttcctgagttggtacgtgccaagataccatttagtgcctgccttcaggccttctctgaaccagaaaatgttgatgatttctggagcagtgccctacaagcaaagtctgcgggtgtgaagtaagtg

SEQ ID NO: 16698 - DNA, 470 bp, Homo sapiens
  MAP TO AL049780.2; EXPRESSED IN HBL100, SIGNAL = 0.74
aagcatgagctgtgcctagagatcagcggtataactttgttttgctttgtttcacaatttggtttaataagagtgatttcatttacctcaagtgctatttcttcataatgctgtgtaatgctaaagctttgattatgtgcgtgtgtggtttttttctccaataggcaattatttccagtcagagaaggaaaccagtgcctggcattctcaccatctttctacctaccatgatcaagtgcttgtcagttgaagtacaagccaaattgcgttctggtttggccataagctccttgggccaatgtgttgaggaacttgccctcaacagtattgatgctgaagcaaaatgtgtggctgtcagggtgaatatggaaaccttccaagttcaagtgatagacaatggatttgggatggggagtgatgatgtagagaaagtgggaaatcgttatttcaccagtaaatgccactcggta

SEQ ID NO: 16699 - DNA, 471 bp, Homo sapiens
  MAP TO AL035633.15; EXPRESSED IN HBL100, SIGNAL = 1.1
ggagtctctgctgttggtggaacatacaagaggtttattacattagagcaacaccaattagtctttaaaaaccacatggcgttcacatttgcaataataacttgtcagtttgatttgaattccatttcaataattgcgtgatgggttctcttctttgaaattactgtcatgtacgagtaaccaggttttccttggacaaatgtgttggtatcaaagttaatgtgaacctgctgactgaagatcttttttggccctaatgttttagggttctcccaacatgtctttctagaaggggacacgcagccccaagagcaactgatcagccagtcattaggggaaaacatcctgctcgctcaaggtcgagtgagcactctagtatcagaacactgtgttctatgcaccaccttgtccctggagggtcggcgccaccttctccgcttctgacaaggtcgctattcagtgtccccctca

SEQ ID NO: 16700 - DNA, 380 bp, Homo sapiens
  MAP TO AC009559.2; EXPRESSED IN HBL100, SIGNAL = 4.7
  unsure 196
  unsure 215
tgagtgcactgcaaaagattgattcagacacctcctatgatatatacacctaatgactataacattggctgatacatggcaggcactgaacagatattgaatgaatggaagggaactaaaaacagagccttcttcattttccttagcccttcacactccaaatccctcagtaaggtcagctgtacagtaactattngcctggtagaataagtaanggtgggtttatgacttacaactgaaatgtttcattgtactttggtgaccatgtgttgctttttgtttttgtgccttgttttctcttcttgtctccaaggttgggtcccagtatacaaacttccacaaaggggcggaacattgctgtggtctgccagtttaggtca

SEQ ID NO: 16701 - DNA, 395 bp, Homo sapiens
  MAP TO AC009972.2; EXPRESSED IN HBL100, SIGNAL = 4.9
atgcctctggtacttgctggaaattgtagatttttcatgtatttcataaaatactacctagtggtaatagagtaagatcacaacagatcaacagagctgcactcaatgaatttatgcaagatcttgagaataaagatgggaactatacacccgacattattttccaaggttatctcttaggttagttgtttttttttttgactgcttcacacataaaaatagcctcctttaaaacactcattaatgaatagcacatgcaaccaagaggacaaagtatgaattaattgtcaattcttgcaccatgttggtgcaaacatggttaacaaacaagagattagatggactctcattcttctatatgaatgaatggggtggggggaatccaacaggaatct

SEQ ID NO: 16702 - DNA, 497 bp, Homo sapiens
  MAP TO AC010082.2; EXPRESSED IN HBL100, SIGNAL = 0.97
tagcccttggtgactgtctgcaatcaacattatgtgaaagttattttaccaaggataattatcatcacttctgtttgagaataaagactggatttgtaactggtggtagaaaaaatgactgacaataagcagattgaggatctgtaattattaatttatcattccttgtatcacatcctctatggctcttcaagaccagctgtggtttcagtgcatttccaagcctaaggaacaaaccaggaagaatgcaaacactggtctcagagataacaagtcacatcagagcttacgtgccccgatgtgttgactgtctaaagctttttgtattgcctgttttagatccttctgaagggcatttccctcaccacatccaattgatgaattgcctttttcacagaggtcaggttttgggatcaaggcaaagggaaagtggaggaaatctgggcctggataactaaaataaaacaaattagacaaaagaagaaagcaaagatagg

SEQ ID NO: 16703 - DNA, 377 bp, Homo sapiens
  MAP TO AL132719.1; EXPRESSED IN HBL100, SIGNAL = 1.3
tttcctagcagcacagctcccaagtctttcctccctgtgcctgtgtggggtttgctgaaggtcctctctcttccccatgccggtttttgtccatgaaagtctctgacagggtttagtaatttcttccacggcctggctgccctcacttaagttggatcagtgacccagttcccatcttttagctcctctgagggaaagtgctgtctatggtcacaggtactctatttaatctttacaggaactcaaggagaagaggatttgcacaaatgggacaggagttttgcaccccctgacctatactgttatttctaaacttcccaacatctctctcaggtgtatgatccatgttttggaggtgaagacaatgaggatgggca

SEQ ID NO: 16704 - DNA, 480 bp, Homo sapiens
  MAP TO AF187000.1; EXPRESSED IN HBL100, SIGNAL = 0.93
gcaccaggctgagtgatttgtaacactacccctgaaaattctcatacaatcacttctgttaggtgattgagaggtgtaggtggaagacatgggagattggcgagaaccacgtgaaaatctgccttttccaaatcagcccaggtgtggcctctcacaattttccctcctcaatcatttccctccatggcaactggcagggtaggcaggggcttgtgggccccacatattccattttttccattccagtttcctgctgaaacttcttgtgcaggaattgccccaagagacaacaggagccaaactaccttatggagtagtggcaggaattcacagggtgtcacactcacctgacgagatttcagagggcgccctggccacgcctcttggcactctgtcaaatcaactttctccttatttctattcattgcagaaatgtgaaaattcaaagctagagtaaaataaacaatgataatacagcca

SEQ ID NO: 16705 - DNA, 470 bp, Homo sapiens
  MAP TO AL049708.6; EXPRESSED IN HBL100, SIGNAL = 1.1
tgcaacatcatatctcaagcgtagcaatgtgaattgcagtctacagcttaggaaagtgagaaatagaactttccttttcttatcacacttatttctattttagcccccatctgacaaggcagcagcagattcatctgatcagttaaagcattctctgtcctgatagttgtctattgccgagggcagtagaggcaggaaggtcactgaggccctagagcttcctcccccagggttcagggcctgtctggtgtcactgtgagtccccttctccctgaggttgtaggcaaagaccagggcactggggcgcttggtcctctcagacctctcaggattcagggcacagggtccttctgatgggatctgctgatgtaccctagaaaacaatgctaccgcaatgagctttctatgaaatctgtcagaagttccattatttcctatggtagattcagaaagtggaattaccaagtcaa

SEQ ID NO: 16706 - DNA, 457 bp, Homo sapiens
  MAP TO AC008038.1; EXPRESSED IN HBL100, SIGNAL = 0.75
tgggagagataagagtagcagtgtactgtctgacctggaggctatgtagattctaaacatataagaaaagtatttgcggtaggtcccaagtggtaaaatgcatcagtgaacaaataacgcaaccattccaaagtgaccaaagaaaaaatgacattgttacagaggacgaactaactacctgctttgcttcttcacttcctggccactttacaaccaggaaaagcagttgaagttctaatttattaatttttaaataaatatacaagaaaacagcagatgtggtaatagaatcaatgataaaaaatagtcataccctctcctccagtctagccagctgttctttgtagaatgcatcctgcttctttagcactcggtctttctcttccagctgcctagcctaaaaaaagaaatgaggaatatactatatcaagaaaaagcagcaacagcaaagcaaaag

SEQ ID NO: 16707 - DNA, 401 bp, Homo sapiens
  MAP TO AC011232.3; EXPRESSED IN HBL100, SIGNAL = 1.1
tgtcagctgtgcttggaaagaacttaacagaaagctgagtagtaatgcagtgtctcagattaccagaatgtgcctcctgaaaggaaatgtgcgtgtttgctttgatgttcctacaactaagtcagaaaggttacaggcagagtggcatgattccgactggatattctcagtgccagccaaattacctgaaattgaagaatattatgatagaaacacatcttctaattccagacagaggagtggttggtcaagtggccagtcgggccgatcaggtggtcgatctggcagccggtcagttagacagagtccacaagggagtcgctcaggaagttgacaagatggtagaagatgaagagggaatagaaatcgatcaagaagtgggagccacaaacggagttttg

SEQ ID NO: 16708 - DNA, 403 bp, Homo sapiens
  MAP TO AE000660.1; EXPRESSED IN HBL100, SIGNAL = 1.1
agggagacgtggacagaaaggggaaaaaagaaaagaggagtgagagagacctgcgtagctcaggagctaaatatctaatctgattttatgtgatgcttcccattgtctttctaaacagaggtgaatggacaacaggtaatgcaaattcctcagtaccagcatgtacaagaaggagaggacttcaccacgtactgcaattcctcaactactttaagcaatatacagtggtataagcaaaggcctggtggacatcccgtttttttgatacagttagtgaagagtggagaagtgaagaagcagaaaagactgacatttcagtttggagaagcaaaaaagaacagctccctgcacatcacagccacccagactacagatgtaggaacctacttctgtgcagggcaca

SEQ ID NO: 16709 - DNA, 487 bp, Homo sapiens
  MAP TO AC005043.2; EXPRESSED IN HBL100, SIGNAL =   1
ttcctgttaggactggtgccagagtttcttaccccacctcgcctggatctggaagcatgacctgtaaccccttgccgtggggcctcactgtgaagtgagtgagctgaagttggttgaggtggggtgggtggtaagtctggccaggaaggcacagctggtcatctctccctgcctcaggcctttccttcttatcctagtcctctcaacaaggcatcccaagaccttgatgagatgtggaagggtaatggtggcaagacaaagtgagaggcttgccgaggtcacccggcctcaccttggggctcagccagctccctccagcatcatgcttgcactctcctccctgtttgagaggacagcggggcttgccccacccctttctgccattgaagtcctggtggtaggccatagttctcagctccgccatgacatttattaacagggctttgggaaaatatgttttaatactgccagagttctccctagaaaa

SEQ ID NO: 16710 - DNA, 484 bp, Homo sapiens
  MAP TO AL049563.4; EXPRESSED IN HBL100, SIGNAL = 0.75
aaatcatcccagaaagatagctgtctgtacattgaatagatttgacacatatatttcacagttttttaatttggaaattttcatattatctttactcattatttgtatttaaagtgctcctgctgcaattgctgtgatctttcttatagttagttttattttcacacataagaacatccatttatgttgcatggggttctgttttggtgaatttttgtatataaagtagactgtatacatcctttctttcagatacttttccgaatgctgattcttcatctgtccctcatggagcagtctattatccagtaatgtcagatccctatgggcagccacctttgccaggttttgactcctgccttccggttgtgccagattattcctgtgttcccccctggcatccagttggtacagcatatggtggttcttctcaaattcatggtgctataaatcctgggccaattggctgtattgctccatctcc

SEQ ID NO: 16711 - DNA, 479 bp, Homo sapiens
  MAP TO AL049593.4; EXPRESSED IN HBL100, SIGNAL = 1.2
ttttaaacgatgtatgcacaatgaatttaaaatttctctctgttgcagatggtagcaaaaacatatgattaatagggggatgtgatcaaaatgtagaactgacttggaaatctttctctttttgatattcttgagcatatgattggaaggaagaaagattcagacatttcagaaatggggtaaggggtgcaggggagagcagattcttccccccccactcactcccaccaattctagggagttatctcacaagataaaagaacacctgagtatattttgagttgtgctgttaggtcagaaataagaaatgggagaagaatgccattatttccattctaactctttggtcaaatccccctcttgagataaacttgagagagaagtctacaaagaccaagttcacccagctgcagcagaacctgttccaagtcaccagcactcccagacccaggattccctccaaattctaagaaatgtgc

SEQ ID NO: 16712 - DNA, 494 bp, Homo sapiens
  MAP TO AC008126.9; EXPRESSED IN HBL100, SIGNAL = 0.95
tttcccagtcctaattttcatagctagagaacagagacaagagtttctaccttgcaggttttcaccaggagtgaaatgaaagaacatatgtagagtgcttcataaataacaggtgttcagcatttgttccttcacctcctccctctccctgcctgctgacgtcagttaacagcctgaccctttttctgctaaaagacataagataggtttgtcagatgtgtatttatcttccaaagttttcctactgccattacgaaaggattgaaaaagtgaaagcaataaataaacattaaaatagaaatagcagaaagaaaacattgactccacagagcttgctgcctctagaccgtgtttgcattgaacatcaacatgaatattctgatacttttcaggatgaacgccacctttttcctaagtattgcagcatttctttcaataaaattggtttttaaggtaatatataatttgccttcatcagagtatctaaagtattt

SEQ ID NO: 16713 - DNA, 478 bp, Homo sapiens
  MAP TO AC008280.2; EXPRESSED IN HBL100, SIGNAL = 0.98
aaaactcatctttttccctagcagataacaattcatgttaagtaggcactgtctctaaatatattctcctagtctcatctttcaacattatctgctaaatttaactacagatccttaagttacatttttttccataaatggtgttaagcaaaggtattttaatgtgggaagaacatagtgcaaggtagaaataatcttgattttatttctgatgctctcgttgacaatggaaaacttatttcgccttcttcttctgtaaattttatacaatgacaatgctttacagctttgtggtaagaaaaaaatatgaagatgtagcaaatataaaaattgctatgatggctgacactgttgttggtgatcttgctctgcttataggaacacagacattttacttagacttaactttcagaaattcaacctttagagtctcaagtaagttaacaataatatctgcatttgtataatgctttacagc

SEQ ID NO: 16714 - DNA, 469 bp, Homo sapiens
  MAP TO AC009232.1; EXPRESSED IN HBL100, SIGNAL = 5.5
gagcaccactcattccactgtgattggaggtggtgcactttggaggatggagcagggaacacacagcagatagacggccactgccagaccactcatggtaaggattcggtctttaccctaaaagtgagcaacaagaagctggcaaaggctttggattggactgcatgttagtgtgcattcaaatataattttgattttcatgtgcagaatggcttgaaggacgtgggagatcttgggaatacttttgcaggtctcccaatgaaagactatagcaaaggagtggcagtggagatggaggaaaaacagatggagaaagattttgctggaaaaatgattgagaagtttatagggactgaggaaaagaggattcaggaaagacacctagttttctgcttcacgcaactgatgatggtgaagctgtcctctgagttaaagaatgggcagatggggacaaggaccattgatggct

SEQ ID NO: 16715 - DNA, 454 bp, Homo sapiens
  MAP TO AC010985.1; EXPRESSED IN HBL100, SIGNAL = 1.4
aaaatgggcagaagtatttcaaactacatcttgaagtaaagctttatgaaataaagagagcagcggggattatgaggttggtggcaaagggcacagaaaccaatcagtaaataaagtagtgagaaaattatagggtgagaaaaatatacaagacatgatccctgcccgaagagaacctacattccgataaaatcacaagttatttgcttcaaacaataaagttctattctacatgtcctaattaaaatgccaatagaagctcacaaactacctgaaatttagttacatacatgttgtttttaacagaatctttcagttcaaaaatgttctctacttgaggcttaagtaattgtttcatgtcatcatcagtatatatttttaacctaaaagagcagaattttgtcatgtttgacaaacaagtgacaacattttagggctatgaaagaggccacag

SEQ ID NO: 16716 - DNA, 475 bp, Homo sapiens
  MAP TO AL109750.5; EXPRESSED IN HBL100, SIGNAL = 1.5
ccaagtctgcctgattcgagcagattgatgtatgagttccctaggcctgccataacaatgcatttctgatgttttaagccacccatgaccacaagctgggttgcttaaaacaccagaaatgtattgtctcatatttctagaggctagaagtctaaaatcaaggcattgacaggttcctgctctctctgaaactcctaggaaaagatctttccttggttcttcttagcttctggtgcaacaatccttggtgttctttggccggtggatgcatcattctcatccctgccttcatttatgcatggtgttatccctctctgtcacttctactttccttataagggcaccaatcatattaaattaaaggatcacattactccgtactatcgcatcttaactaattacatctgcaatgaccatatttccaaataagattacattcttactttctagaaaggacatgattttcagggactaa

SEQ ID NO: 16717 - DNA, 395 bp, Homo sapiens
  MAP TO AC012073.1; EXPRESSED IN HELA, SIGNAL = 1.2
tatcccaagtcctccactcggggagaatgggaagaatctattctcaggtcctagccaaacagtgatacgtctgtgagcagccaggaactggttcttgaacaagcctttgaggacccctagtggcagaaagccacctcagcacaggcccatgagcttgaactgaggactttgcgggcgggaggaaggagacaatacagatccccagtcacgcttcatcttactcgtgctcccgaaaacgcttgtggtcgtattcatcaaagacgggacgccaggcatagaggttgatggtggccacggcgcctgcgacgagcagcatgagcgtgagcttcaccatgtggctgacctgcaccagcatgatggtggcgatgagggacagcacggccacatagttgtaa

SEQ ID NO: 16718 - DNA, 420 bp, Homo sapiens
  MAP TO AC011561.2; EXPRESSED IN HELA, SIGNAL = 1.1
cccgggtaggaatttggtagatgcaggtgtttgattaatttccccttccttttgtttctcttctcagccgtgtgtctctttcctctgtcattcattcaaccattcattcattcattcaataaacacttactgaggttcacactcagtcaaggaactgagaacactaatgccattactagttctctctagaaactcactagcaggaaataaaagtatccccaaggagaaagccttgggaattaaaattttttgcacaacaaacgtttattgagcactgactgtggcactttgctttttagtgatgaacaagatggacacaaccccagccctggtggagcttaaaacctcacaggtattagatgagcatgagataaataattctacgagccatgaaagtcatgaaagggagaatgcaacagc

SEQ ID NO: 16719 - DNA, 476 bp, Homo sapiens
  MAP TO AC010721.1; EXPRESSED IN HELA, SIGNAL = 1.3
cctccccaacagctactatccttcttcccttactaaagcattccaattttgttcaagaagagaatgttcttagctcaagtaataagagattattatatcttgataattaaagtgaaaaaatatctaaaatccaacttggacaggtagctgcaaacataggttaactgtactcctttgaattgtgaatagcacaggtcacaccactgtactcaaccgccctttagccaggactatggttctatgattcttgaaatataaggctttaactttgccttctgaagcgtttgttcttttattcttttccaatagttcccatggctgatagccatcactcagacatctgccaagcatgttcttattcctattccacaacaatatactatgtaaaggaaaattcattgtcttctattttggatgaaaagtaaggtagtaaatgtattttgttgttctttagcctctgaaacagtctttttgtg

SEQ ID NO: 16720 - DNA, 456 bp, Homo sapiens
  MAP TO AC009958.1; EXPRESSED IN HELA, SIGNAL = 1.4
aaacaatgttgcaatcaacaggataaagtaatccagatttagattaaagaaatatgttacattcgagataattttctattaaagataatgtattccatgacaagcataattaaatctgtagttttaaccagacagacaacatatacagtaaaaatttggtttatagcaagtggtgtataagacaaaattaataacaagtctccagagtatatttttacacataccaaaaagtaaggacacacatacaatcaaaattttattcatttcttcatcacaggcaccagtttggagcctggagatgctgcacgttctcctgtgagcagaaaactcaccaggaccctgcacagcccgagggcctcaaacgcagcctccctaggagctcagcctctcagtgcagcaccagcaactgcagcgcccagagatggagtccacagcagatgggctcaggtgaagatg

SEQ ID NO: 16721 - DNA, 462 bp, Homo sapiens
  MAP TO AL035414.18; EXPRESSED IN HELA, SIGNAL = 0.93
cgtcaggctttgagagacttgtttcataaacatgccttgcctcagttttgaaccctccattcgagttcctttacagaattgtcccttgagaacgataaactgttgtgatcagaacagaaaagggtcagccaagcagtgatcagagaacaggggcaggcagaactcaacagccactgggcaatggggtttaaatgaagagccataacattgaacgaggctcctaggagctcctaaggactctggaacctttccacggggtcttcaaccttcacaggtcccggggtgctgagcccaagaaagagatggaagtcaaagaccagcacgatcagacacacacctttcttctcattccatacaccaccctgcagtaccaccgtgactgctaccatcccgcgagcaccttgcctttgaggatttgaccagttttcatccgagtagtaatgtatccgatgtccactggct

SEQ ID NO: 16722 - DNA, 467 bp, Homo sapiens
  MAP TO Z82214.22; EXPRESSED IN HELA, SIGNAL = 0.6
acagggaccctaaaggaagccatggcggacggacaggctgtctagtgccacccttagctcctactgccagagagctcaggcaggtgcccaggccatggcctgccacgaacagggaaaaggtctgtttttcctttccagcaggtgacgagatggagggcgcccaggcatgggggccaaggtggtagcatcccaaaagtgttcccacagcagccctgggaacccggaaggagacagtggtaagagcactgtggacacacgaacaggaggatctgtaaggctgtgagcagcgtccccgagccccagccagtgactctccaccactgtccacccacatgccgcagaaaggagcaggggctgcagagccacagcctggggctggagtcccggctgcgtcacaagcagtggcgctcacttcctctccctcagctgtgcatgaggggcggcagcgggtacttctcatggccctt

SEQ ID NO: 16723 - DNA, 459 bp, Homo sapiens
  MAP TO AC011376.1; EXPRESSED IN HELA, SIGNAL = 1.1
cacagctttcattattagctccgttttacagaaagtaacgcaattatcacaaggttacacagctagtgaacagcagcatcagggttcgatctcagataaatctgctttaagagaaccacttcactttactgccttctcaatagaacataatcaagaatctttcagatgctcctaattgggctgaaaatagcagctgttttgaaactgcaaaaatgaatggtaccataactgtgaaataaaaatgaactataactttaatgtacttaacatttatgtagaattttatctacctgtttgtggttgtcagcagtcttacctgaaccaattctctgtatgcagatttagcaaggttataaggtaccaaaagattagacccaagaaaatagagaacttccaatccagtaaaaatcatagcaaatttattgatgataacaattgtctccaaaggaacaaggcaga

SEQ ID NO: 16724 - DNA, 475 bp, Homo sapiens
  MAP TO AL078638.6; EXPRESSED IN HELA, SIGNAL = 1.1
tcatgtgccaagtcctgaaggtggatggggctttgttcctggatttggaagtctccccattccctaggctagtgggtctcagctcctggcatcttatcaggacatgggtaaaagcctatataatgctgaggggaagaggaagcgaagaagaaagagctgggattggttccctttctacagggcaagtaaggcagagaaggcctgagaaaacaatattctagactcaggcaacacagtttatcctctcatgcacaggctgcaaaattatgtaccttttgtgcttcatccttctggtgtcttttttcttctgcagctattctccgttgttcttctttctcttttcgctccttcagctttctctgtctttcctccatctgtttttcatattggagcttggtctttctttctttttcaagtagttgtgtttctttattggctgaaatattccaaatacattttcaaggtgtaagagcca

SEQ ID NO: 16725 - DNA, 377 bp, Homo sapiens
  MAP TO AL109759.1; EXPRESSED IN HELA, SIGNAL = 0.96
tttattaagaaatgagactgcattaaattttatttaaaatgaggtttcatattttgaacagtagtataataaaatacataattattttaatatagctaatcactgtggtattaattatgtgctaaaaattaatgtgaattaagaatatctgggccaaagtcagtttttaatggttaaaaaaatagagaggaaaatggtaagtatatgcttttacagatatatgcagagttaccttagacaaggcagcatcccgttcttctattagtgcactcatttcttctgcagttattctcattttacattccttggtcttgtagattctatccacaattatagctccattcttctgaatagctatccctgtgtctgcattgttt

SEQ ID NO: 16726 - DNA, 494 bp, Homo sapiens
  MAP TO AC007363.3; EXPRESSED IN HELA, SIGNAL = 0.82
cccttcaactgagcttttggagaaatgaagattttgcaatgggaaagtattctatcttcagaagtacggtgacagcagtcttatttttgaatctacatcctcccttgaatctaggaggaggacacaaataacatacccccggcccagttctccagtgctccccattcacccagcccagtagatgctcagacagagctgttactctaaaagcccaatttcccatttccctagcacaaagcaacacatggtctacctactgacccatctcctggctcctgtggcccactgattgtggtctggggatgctggtggtagaagcagcagaaggggatggccttggcaaggtggtgggggtggccacagctacagtgacagccagaagctgcatcagagtgaccggctgtgcagttgtccctggaataggtggcctctgataggcttttgtggtctcacctgtaagaaaatggaattataccaaggcccacaaaataacc

SEQ ID NO: 16727 - DNA, 402 bp, Homo sapiens
  MAP TO AL035079.14; EXPRESSED IN HELA, SIGNAL = 0.94
caatcagaaatatgccataggaacttaactcttgcttacgtcaattagcctatcataaaattggtttcattacatgtcgtttaaagtcaaagtttccaagaacctattgatgttaagtgaggacttattgtatttttattccttcaatgatgggagaaatggaagactgctatttttaaaagaaactattttatatataatgtttaacctgaggaaataaccatcatttatttactaatttccctactgctggatgtttttcctttctcccacaaatggagatttgacacttgtgttaaaggtcttccaatcctttgggaaataacacttgacccaggtgctgtgaaacaatctttttacagcaaataaacacagcacttacctgctcctttagcatgcaca

SEQ ID NO: 16728 - DNA, 491 bp, Homo sapiens
  MAP TO AP000036.1; EXPRESSED IN HELA, SIGNAL = 0.96
tccatctgataggaatgaatttgactattttatgtatcttcaagtccacagcctctggcataaagccagatgcttacagaaagcttaataaatagttattaaaatgttttttaaaagggctggtagaaactgaactgaactaaaattaactcagttcaagcttctgggaagggtgatgtcactaagaagcagcagcagttctttttccagccctaaagcctgtgtttggtgtttactattaaagcaactccacctctgacctcaccgtgggtgaggaggaaaaaaagactcttctttttcacatttttgccctcaactttaagagcatttgcaaaccaagagagctcgtctattttttcattcatgttgttgagaagcttctcagggaaatatctctctacacttttgcagccctttctaataaggatgttcaaagtctgcagataagagttcatgatgtccagtttttgagtgggaaagacgacagggta

SEQ ID NO: 16729 - DNA, 458 bp, Homo sapiens
  MAP TO AP000042.1; EXPRESSED IN HELA, SIGNAL = 0.94
aaaggctttttaagcgaggcaaccaaccacctctgtccaggtggccaggaagattaaatgtccaggtggtgttacatacagctcaacccttatcctacaaagcatagtttctcacccaccacagccaagcgaaagtcatcaagtgtctcctgttgtttcccacgttctaaaattggaggaaagttattgcacaagtgcctaagtagtgcagctgatccatctggaaaggctgttcttaaaccttggcttaaaacacctccaaattccttaaacagcatagcaaaatcaagaacatattttcaaaagacaatttaatcaatatctcttacattgaaacacacacacacatatatacacgcgccttttataaatacatattttatagcacttttagaaatgggggaaatgtcacgaaacaaaacatcaagaagtgagggtcacaactccatgatggcaag

SEQ ID NO: 16730 - DNA, 376 bp, Homo sapiens
  MAP TO AC007721.10; EXPRESSED IN HELA, SIGNAL = 1.9
ttcatgcatataccccttgtatgtaaatgtttgtaaatttaatgccattgtaattaggggggttttattcttcttttttagcctggagatttgaaaaagagaattgaatctctgatagacagagactatatggagagagacaaagacaatccgaatcagtaccactacgtggcctgacgcatctgcagacggttccccttcatgaaacactagaatgtaccctcagagcaggaagcacacctgtgccatttctgggactctgattgatccagctgtggacattggaaggcgaaggaagggaggtggctcctgggtcatctttcacaaggctcaagacttcaacctgcagatgtatctttttccctccagtttttcc

SEQ ID NO: 16731 - DNA, 446 bp, Homo sapiens
  MAP TO AC012106.1; EXPRESSED IN HELA, SIGNAL = 4.3
atttgagagagccccatgtctacctatttctgaacatgaacatacatgtaatactgagaatgccagttatataatccaatcaaattatttgtgttgctatattttaccctacaccattatttgattctatttcttacagctgcaagaaaattgtctaataaagaaatactaagccaaagaggaactgaaaatgaaaaaaatttgatgtgagaaagtgactttattgggcatgattaatacatagcatagatattagtaatctcctttacatttattactttttaaacaaacattaccaatttacccctttactttgatgctcagacacaccttcagatccttactacgattctccagattgatcataaaattttgaaatctattgcattcctgacaataaataatgataatactcaggaaaaaagactggtttccattgtttgcat

SEQ ID NO: 16732 - DNA, 479 bp, Homo sapiens
  MAP TO AL049647.7; EXPRESSED IN HELA, SIGNAL = 3.9
tctcttgcttgcattcctccttggtatttgtgctgctgccaccccagttccagcccccaatgcctaataacatcctgatagatcaatagagttgtgttttagcaggtctaacatcatgttgtatctctggcctctcaaatggcagagctactcctctgcttggtgcttaaggcctcatcagggccctgaccgcctgtgtcaccttacagtctccatcctccaggatatgccgaggagtgcatggagtgcacacacagactgcttgctgtttattgagtaagctttgtcagtctgtgctaggtctgtttcacaatccactctccatctgccctggtcaaactcttctccattgtgtatctgcttcttatatatcaccagagacaatttctccctcaggtaaacacctgaatacttcaggtttcccttccacgtgacacccagcatatcctgcttcatatgcaatttgtctgtctgcatcc

SEQ ID NO: 16733 - DNA, 377 bp, Homo sapiens; identical to SEQ ID NO: 4596
  MAP TO AC007738.1; EXPRESSED IN HELA, SIGNAL = 1.1

SEQ ID NO: 16734 - DNA, 416 bp, Homo sapiens
  MAP TO AF099810.1; EXPRESSED IN HELA, SIGNAL =   1
ttgtgactccaggagagctgttttttgccctgacaaatactgacatctggttactgacaatgctggaccttagatagtgactgtagtcaagaagagacctgggaaaaagtcctggaaatgctgggcctccctatgtggcttctataaactaaatgtgagtgttattagtacagagtgttattagtacattgtgtgccttgagggggttctaaaggaagcagaggttttaacaattttacacaccctgattcttcatttctgcctgttttttaaacctcttcaagcttaggcctgaaatcagcttcctgctgggatctgcctccctcaatttgcacaggggtctttgtaatgattgccatgagtagtgatctgggagaatgcctgatgttgttgtgtgcatgagtgtccatgaagga

SEQ ID NO: 16735 - DNA, 471 bp, Homo sapiens
  MAP TO AL009051.1; EXPRESSED IN HELA, SIGNAL =   1
cagttgcttacgcagagtgctccagcttgcaagtggaagggtcatgcgggagcccaggcaggaaccccactcacttgagactttctcctcagcttggggcctgcaggtgcccacctcccccatgtgggccaccttatcagaaggaatctgaaatgttgaagtccacaggaaacagtaaaagaatgcgggttctggattctgccacaaataatcctgtgtccacagacaattaattttgctatacctttttcttcacatactagaaagagctgaaaagaaatctgagatctcccaaacatcctctgattttagagatggggctcatggtaacaaggataggagtgactttcctggcatcatttcacccattcattcacccactgagtgtttactttgtgccaggcatattggacctcagggagcttacagtgaggagatcaacaaatttcccgcaatggaagtttggaagga

SEQ ID NO: 16736 - DNA, 1964 bp, Homo sapiens
  MAP TO AC004505.1; EXPRESSED IN HELA, SIGNAL =   1
cagaacttgccttctcggtccgtctcgaaacccagcctgttcagctcggtgcagttgtaccgacagagcagcaagatgtgcgggactgtgttcacaggggccagcagattccgatgccgacagtgcagcgcggcctatgacaccctagtcgagctgactgtgcacatgaatgaaacgggccactatcaagatgacaaccgcaaaaaggacaagctcagacccacgagctattcaaagcccaggaaaagggctttccaggatatggacaaagaggatgctcaaaaggttctgaaatgtatgttttgtggcgactccttcgattccctccaagatttgagcgtccacatgattaaaacaaaacattaccaaaaagtgcctttgaaggagccagtcccaaccatttcctcgaaaatggtcaccccggctaagaaacgcgtttttgatgtcaatcggccgtgttcccccgattcaaccacaggatcttttgcagattctttttcttctcagaagaacgccaacttgcagttgtcctccaacaaccgctatggctaccaaaatggagccagctacacctggcagtttgaggcctgcaagtcccagatcttaaagtgcatggagtgtgggagctcccatgacaccttgcagcagctcaccacccacatgatggtcacaggtcactttctcaaggtcaccagctctgcctccaagaaagggaagcagctggtattagacccgttagcagtggagaaaatgcagtcgttgtctgaggccccaaacagtgattctctggctcccaagccatccagtaactcagcatcagattgtacagcctctacaactgagttaaagaaagagagtaaaaaagaaaggccagaggaaaccagcaaggatgagaaagtcgtgaaaagcgaggactatgaagatcctctacaaaaacctttagaccctacaatcaaatatcaatacctaagggaggaagacttggaagatggctcaaagggtggaggggacattttgaaatctttggaaaatactgtcaccacagccatcaacaaagcccaaaacggggcccccagctggagtgcctaccccagcatccacgcagcctaccagctgtctgagggcaccaagccgcctttgcctatgggatcccaggtactgcagatccggcctaatctcaccaacaagctgaggcccattgcaccaaagtggaaagtgatgccactggtttctatgcccacacacctggccccttacactcaagtcaagaaagagtcagaagacaaagatgaagcggtgaaggagtgtgggaaagaaagtccccacgaagaggcctcatctttcagccacagtgagggcgattctttccgcaaaagtgaaacacctccagaagccaaaaagaccgagctgggtcccctgaaggaggaggagaagctgatgaaagagggcagcgagaaggagaaaccccagcccctggagcccacatctgctctgagcaatgggtgcgccctcgccaaccacgccccggccctgccatgcatcaacccactcagcgccctgcagtccgtcctgaacaatcacttgggcaaagccacggagcccttgcgctcaccttcctgctccagcccaagttcaagcacaatttccatgttccacaagtcgaatctcaatgtcatggacaagccggtcttgagtcctgcctccacaaggtcagccagcgtgtccaggcgctacctgtttgagaacagcgatcagcccattgacctgaccaagtccaaaagcaagaaagccgagtcctcgcaagcacaatcttgtatgtccccacctcagaagcacgctctgtctgacatcgccgacatggtcaaagtcctccccaaagccaccaccccaaagccagcctcctcctccagggtcccccccatgaagctggaaatggatgtcaggcgctttgaggatgtctccag

SEQ ID NO: 16737 - DNA, 466 bp, Homo sapiens
  MAP TO AC007597.2; EXPRESSED IN HELA, SIGNAL = 0.6
cacctgggttcagtatcttgtgtctattagatcagaagtggaaaggcagaggccagcccgtatgcttgttttattttatttaaatcaccagcaccccagcaagtgttttgcacaggaaatttctcattatttaattattttgggttttttgattaaattctgtacattcccattttagcttatcttgagttataacattaaaattaaggtagtcatcagctgaattataagacttaattagataagattatttaagatagtgatttctcattagattggccctgttcatattaacttttctgtttttttcttcagtctgcatgaagaaatcagtgatttttatgaatacatgtctccaagacctgaggaggagaagatgcggatggaggtggtgaacaggatcgagagtgtaattaaggagctctggcccagcgctgacgtgagtcccttcctgggtagcttatgc

SEQ ID NO: 16738 - DNA, 401 bp, Homo sapiens
  MAP TO AC010734.1; EXPRESSED IN HELA, SIGNAL = 3.2
tggttatgctggtaaatccaacagacagccctaaggaagaaatgagtcgcagagaataaactccatcttcctacctaacaggatttccttatcgcaaatgggagattcgtaaatgcaagacttaaaagccaagaaatctctttttcttgccaaccggggattcctttcccacatgcattcccaaagtctcagctggtgctgattgtgtccagcagcctaaatcacaaggaggctcttaacaatatacaggctgcagtttggacagggtcactatctttagagcaaagtgtgctgcctcccccagctacaagtcagctgtcctttcctcatctccctcaacctccagccccagggagaaatgcattagcaaaagccagagcaggcagggttgatttgaaaga

SEQ ID NO: 16739 - DNA, 447 bp, Homo sapiens
  MAP TO AL035469.7; EXPRESSED IN HELA, SIGNAL = 0.66
gagtgtgtcccttccctgtcgctaatgggaagcaccacagtgaaagtctaaatatatcagctaggaagccttacagacctaccttcctgttctggcctctgataggatataaccttaggggagctgtttaattcttttaagcctcatttattcatctgtgggagacaaattctcctcacaaatttgctgttaagattagaggtaatgaatattaatgtttaacacatttttggtacatatgaagagctcaataaacagctatttccacaaaagtttctaatatcaccgactccactatcaccactatcatcccatcgtcatggccattaccatcactcaccaccagaatcattatcatcatcatctccttcattttggatcatcaaggttgtctctagtcctgtttttactatttcttgttctacctcatctgtttccattaacagt

SEQ ID NO: 16740 - DNA, 450 bp, Homo sapiens
  MAP TO AC007035.2; EXPRESSED IN HELA, SIGNAL = 1.1
tcttagctttctttgttccacaagaggcttactggaacccctgcacagtgtgtcaaactgcaggcaaatcctttatcagcacatccttttgaaactgtcattgaactgtatggacctaaggagtgataagctttaataatatcctgtcccttttatcccttcttcctttcagctttattgctggattctttatctaaacttaggttttacagcctagacaaatgcaattctccttgccttcaaaagtgatgcttaacctagcttgtattgatgtgtaggattttttaactgcttattttctaaaataataaatgctttcttgtaaataaccttgagcttcacttggaaagtttcagtgtcgtggatcacaatatctgaaatgaaacacatcataaaaacaaggcttctagaactccagagactgataaatggctaagtcgtgccttcaaa

SEQ ID NO: 16741 - DNA, 419 bp, Homo sapiens
  MAP TO AL078591.17; EXPRESSED IN HELA, SIGNAL = 1.1
gtccctaatgaggcttggctattaattcctattcttaggttcctattctattctgtatcatatattttcctattttacttacttttaggtggtttttcttagcagcagggattgtgattgaaataggtcatatgcttaactgtattgttctattctattattaattttggaagtcaaacaataacaatatgacaaatgtctcttttctgatttatcaatatataggtaaaaatcaggtttgttttcataaaaattttctaaaggtaaataatactcattaaaatgctctaaaatcacttctctttaacttaccctcaaagtatggtgctcttgtgctaataatattcttagttcttcgtgtagcgttataacttccagaaactgtccccataaagccatcaaaagtgagcaaagttgcg

SEQ ID NO: 16742 - DNA, 467 bp, Homo sapiens
  MAP TO AC007253.2; EXPRESSED IN HELA, SIGNAL = 0.69
tgaaagtgaagttattcgtgtagcaatttaataaaacttaattcaaggaaataaaggtaattgagtttgagggtgatgattgtaatagatggtctttaaagcttcaatagaggatcaacaagatttttcttatttaggaaaaatatttaatgaaatgcaaagacttataaatgaagatccaggaagttggttgaatgccatttcaatttggaaaaatcttcttgaacttgatgcaaaaaaggaaaaactttctcagagagatgataaccaactaaaaagaaaagtgggagaaaatgaaatcattgcaaagaaattaaaaatagaacaaatgcaaaagatagaagagaatagggactgccagctggaaaaacaaataaaagaagaaactctggagcaaagagattttaccactaaaagcgaaaagtttcaagaagaagaatttcagaatgacatagagaaagcaattg

SEQ ID NO: 16743 - DNA, 392 bp, Homo sapiens
  MAP TO AC005973.2; EXPRESSED IN HELA, SIGNAL = 0.88
gccacaagtggtaggacaggagaagggctgggggacgcgtctgtcgtcgtgtagggggcgcagctggagggcgtaaccagcccgtaccaggagaagccgtgtttgtgaggtcagcgcgcggcgccttcggtagctgggaggaggaacggtgatgtcatgccttccgggctcctcaggttccttattttcgtcatggtggtcgccacgctcattgtcatgaattgcgtcatcgtgctcaacgtgtcccagcggacgcccaccacccacgccatgtccccgcggctgcgccacgtaagcgcggagggggcggtgcagcccgggtcggggtggggcttcgtactaacctcgtcccctaagccccgcccctgccccaggttctcctggagctgctg

SEQ ID NO: 16744 - DNA, 472 bp, Homo sapiens
  MAP TO AC007386.3; EXPRESSED IN HELA, SIGNAL = 0.62
ttcctttccttgggtgtaggaaggacatctctggaatgaagattttcttcggaggaaggtcagataattctcttaaggccctcttcaggggagcagagtgaggagaaggtgagagtggcctccctgcttctgctgttttctcaaatgccaacgtgctatatttgtggatactatgtcttgaactctgtcagtatcaacttagtaatatagttcttagtactatttatagaagaaagggatgatgaaggcaaaaatggagacccacaaaagtcatactctggccctggagaaagagtttaagagtttcacaaccaatacacatgtgggttacaatgtggttcttggaaatgagtatagacatggcattgctgtgacctatcatgtcttttcctttatgagtctgtcaaaatttcccatgacaaactagctctatgttgcttctttaaggttaacttaggacaccagaaggcca

SEQ ID NO: 16745 - DNA, 479 bp, Homo sapiens
  MAP TO AC009444.1; EXPRESSED IN HELA, SIGNAL = 1.2
  unsure 170
  unsure 351
tcatttcagtttattcacaaaaatacctcataataactattattgttatgcagacaaggaaactaatgctgacattacttgttttactagtttacctgtagtattttgatagtgttgatcactccttagccccagaaatgctcttttctctgtgggttacactttttttnggccttttctttagttgaatctttctttttcttactgtgcctttacttttctcctcctacttcctaaatgtagatctcccccaaagtctgagtgttacccttcaacttttgtctctatctacatatcttattcccttcaggtctcatccattctccagacttcaagtatttcctccatgangaagttctccaaaatctctttctctacctcttacttggcctttgactccaatgctacatatccaactgcctccaaagtatctatgcttgcctgtttctctatcatctcaaacattagaaaacccctca

SEQ ID NO: 16746 - DNA, 384 bp, Homo sapiens
  MAP TO AL118517.5; EXPRESSED IN HELA, SIGNAL = 3.9
caaagaagctgccagtagggggggtccttataaatctacttgatcatgtgattgagctaggcttgtcaaagtccttaggtcagatgcaaggcttaagaaaagacctaaccctgaagtcaccaaggtaactggacttgaatgagcatattatagattccattgtccttatcttggccaagagtcaaaagccagacatttaggcatcccccaactagagatgaagctgttctagtccagctgcagataaactatctccaccatgcttttcaatgaaccattgtcatatttcctttttgtgaggtagcaaggtattacttttgtgttcatcatgtctatcagtgttcccagtatcatgataaatggcaaacacaataaaaacaatga

SEQ ID NO: 16747 - DNA, 420 bp, Homo sapiens
  MAP TO AC007432.7; EXPRESSED IN HELA, SIGNAL = 1.8
cctttctaattgaatatatgccccatatctaatattaagagtttagaaaaatattaaatataatcccatatctcaaaatctgctatttccctttttagcatgatgctgtcctcctctccttttgaatgtgtgtgcacaattcacctgctatttaatattctgattttgcaattatcacaaatatttcatatttccaaataggcagataatattatcttgttaacttagtacaattcaacaaagagtcaggtaaaccagtcaatgtggtgaaaagcatgcttgttcttttctgcttagatgtggcccatagcaatgatcatcatcatcttcatcatcatcataattatcaccagcattcagagagtctagaatttttaaaaatatttttcttgttggtcctgtgctttctttccgctgatc

SEQ ID NO: 16748 - DNA, 493 bp, Homo sapiens
  MAP TO AJ239323.2; EXPRESSED IN HELA, SIGNAL = 1.8
agcattccaggcttcatctcaccctaaagtcatatcagcctcctgtgtgtgggcaccatcttaacacctgccaccacctgagagaactccttgtccttctgcttgttcactattgtatcccaagcatcaagtgtagtgcctagcacagagcaggacctcagagaatacagtgcttgctgaacactggctggtggtgcaaagctggactgcttagttcctgtttcctgcctggagatatgtctcttacctggttgtataccaccttctgggcacactacacttacccggccacagggggttctggctcttacattacaagtcacaacctgatcatcaccattgaagtacaaccctgtgtgagtgatggagggcatgcttatttcaggctcttttacttcttcaccaagtgattttaggcacatgacttgacctttctggacctcagtaacctcatctgcaaattaagaatgatgataaaacctgcctcattgga

SEQ ID NO: 16749 - DNA, 471 bp, Homo sapiens
  MAP TO AC009310.1; EXPRESSED IN HELA, SIGNAL = 1.4
gcagcatgagtaaagactaatacaaaggtggatccttcatatggtacaatggggaatttgggtgtccagtttagtttaatgcacactagagactctttccggattctggaattagattgacctccctgctggtttttattgttgggaattttggcatttcccagtgccatgagagtcttttagtgggaagttaggagaggctgtgtcaggtgggtgattgctagctcaataatattttcagctgaatgcttgacttattttttctaaattaggatttctcaggcaactgtgttgtttatcatttgatcactcttccttccaaagccagcagtggcattgctgagaagctccatgatttcagctttgcttttaatgggcttctgcctaggtttgcctttaatggggccacccttttctctcatctctgtacaattcaaaccacatttgaaaggaccatttgaaaacagggtt

SEQ ID NO: 16750 - DNA, 433 bp, Homo sapiens
  MAP TO AC010881.1; EXPRESSED IN HELA, SIGNAL = 4.3
ccgtggaacttctttatggctcaatgcctgcggcatttctcaacagtagtagcacaatacagagagttattcctgctctcttcctctatctgggggaaatattcagcaaagcatattatacaagcaaaacccattatgggtctgtctcctggccaaattgagtcaggtaggaaaatgaggcatgttttaggtatgtagccacaaagatgattttatgaaagcaaatggccttattaccatgtcaatctgttgaaacctcctttaggatgtactttgtattgggataaccaagcttgtttctctttgtagcatcccttccctctcttttccccaggaaatagattgatactccaaacatattcacagattttgttgaacatgctatagaaatcactcagattcaaaacatcatgcttggtgtgtagttgatgga

SEQ ID NO: 16751 - DNA, 490 bp, Homo sapiens
  MAP TO AL121652.1; EXPRESSED IN HELA, SIGNAL = 1.5
tcttaagtcaaatctctccaatacctcaaattagggattaatgttactggaaattctgaagtaatctcatagtttccatctttaaaaactcctcctgtgactgtgtttccctggatctcgtcatctaccaaatcagttaacatttaaacattgctcctttctgtcatactcaaactagtagagaataatttttcacatttggtttttgcctcttcattccaatttagattctaagctgattccactgaaactgctcttgcaaggttcttaattcacctctgtgcagcatttgatactcttcctccctctttgctaaataaagctcatcctctctgtgatattgctcattctcagttctctctaagcagaactctactggctctgctttatctcctcttccacttaatgctggtatgtccatctgatctaactccccctttgttcctactccttatactctctctggagattgactctctaaacaatggca

SEQ ID NO: 16752 - DNA, 455 bp, Homo sapiens
  MAP TO AC007006.3; EXPRESSED IN HELA, SIGNAL = 1.4
acagtcaccagtgacgttccctttaagtcctgatgttagtaagttgagccttaatactttcgctttcttggtccgtctagtcaaagttttatcaattaacactctcaacaaaattcaaactgagcaatgtataaaatcgattatacactatgatcaagtgagatttactcatggaatacagagttgacctggtatccaaaaatcactcaagcaataaaggaaattccaataaacacatgatcatctcaatagacacacaaaaaaaaccatccaacagaacctaacactttttcatgataaaaatcattaacagacaaatagaaggaaacttcctcaattctataaagaatatccaggaaaaacccacagttaacatcataattaatggtgagagactgaattattcccctaaaactaagaataagaaaatacgtcctctttcagcatgtatattc

SEQ ID NO: 16753 - DNA, 419 bp, Homo sapiens
  MAP TO AP000084.1; EXPRESSED IN HELA, SIGNAL = 0.94
atgtgttgggttgaatgtggagaataaagggaagggataagagctaactcaaaagtttcaggctttggaactagatacaagtttgaaacactgaaaaagaacaagatgtgtgataggaggccttggagattgtgatattttgggggacatgttgaaaatgggatgtttctgagacatacaagtggaagaatcaaccaggcacctaattattcatgtctggagctcagtaggaaagccagcactacaaagacaaattgtgaattctatgatgtctttgtattaactcaggctgtacatgaaagtgtaaagagatttcctagcagggagagcatagagtgtgaagaggagagacaaagattgagctcgacccaggaaaggacggaatgtgcaaaggagtcagagacagagcatctcaggca

SEQ ID NO: 16754 - DNA, 456 bp, Homo sapiens
  MAP TO AL049775.2; EXPRESSED IN HELA, SIGNAL = 0.95
catacatgcctctgaacaaaccaagtatgttatgtttctgagtgaccctatttctgcagtactataagtcaataagagcatggaatttgatgttatttggttaaaacaaatatagtgctgtagtaattgcaactatttcctagttgcatgttctatgccttttacaaaggtcatctagtttctttatgcccagggactattcatccatcgctctatctatccctcaatctttccagatagctttaggtagcttaaaactcttgaaagctattctgaaatattatctcactgattccttatgggacctcagattgaagatgtcaaagagtttttgcagactaccttttcaaacaaagtaatcatctgaaggtcgttctttgactcgttcatttgtgttacaaacagatcttgaatgcctgccacgtatggctgtaggctctggggaaataacggtga

SEQ ID NO: 16755 - DNA, 455 bp, Homo sapiens
  MAP TO AP000035.1; EXPRESSED IN HELA, SIGNAL = 0.71
tttttaaagggaacaaatgaaggatttgctctcataacctagtcacctcccaaatgtcccatctcctaaccccatcacattgggcattaggtttcaataaataaattttgggaaggcacaaacattcagcccacagcattgattctgttatttctccaatcagggcttccttgggtcctctcactctcagttttctgcagaaattctcaggaaccagcttttattttcacttgattggtcttcttgctcttctctcctgggtccagagagaacaagaaccttggacaatcagcctttgcctaagagcaccagacatagccatttgtcctttggttcacacccagttgtgcctgggcactctctcccatcaactggctctgcccttacccagctcaacaacttggaggaaaagggtagccctcctcctacacagctgaggaacctgaggtaaggcc

SEQ ID NO: 16756 - DNA, 491 bp, Homo sapiens
  MAP TO AL022319.2; EXPRESSED IN HELA, SIGNAL = 0.98
cgcattatagacctggtccgagtttctagatgcaaattcttaggaacaccctcagcgccagggcttgctctgtaacagctccatctgaaccgggatacgaaaagaaagaccgttatttttatgaggttgtgttcatgaaacgagaagcatgatgaggtagaagagggccaaaggaagaggctatctttcgaagctcccaaaagaggacgcagaaattgtgtgattcactattgagtgattatacatcacaatgtatgtcataaaatacttcagaatgcacatttacatgctatcctcatcacttttgggctctgagttattaaagaaaagaaacttttctttgtctctataaagcttccttttcattttcatctgcagttggaggttagccttagcaaaaatactgctggtatgtaccacagaattaagacagttcaagaaacttacattgctatcttcaccagaaattccatttttcttccatcctctca

SEQ ID NO: 16757 - DNA, 391 bp, Homo sapiens
  MAP TO AJ011929.1; EXPRESSED IN HELA, SIGNAL = 2.8
ggacagacgtcttctgggtgtgtgcacctgtgtgtaactccaggtggtgcatgtgggtcacctgtgctgtcactgatcaataatattgatcaccatgcttttgatcttctctcctcctggatggcagggtgagatcatctttcttctcccgtgactccccccagcgcctgggagggtcctgagcatgcgtgtgacctcagcaattttgtgatactgcctgatttgtgctttttcttgtttgtttgctctctcctctccgacaaacagctttacattcagcccatgatgggggccggcctgaattatgaatgttaccgattcggcatttccccatccacaaatgcgctggtgatcggtgccacggtgatggagggcttctacgtcatcttcg

SEQ ID NO: 16758 - DNA, 483 bp, Homo sapiens
  MAP TO AL049744.7; EXPRESSED IN HELA, SIGNAL = 0.67
agcattccagaagttcctgcatgcccccttccattagcttgagtaaccgttaacttgactactaacagctaaaatagttttgcttatcttttttttgaataaaaaaacaagaagttttttgcaaaatttaaatacacatagtcagaaatataaatgggatataatattgtttatattttgtattaatgaaagcattgtatacagatagtgtagcatcacacaaaaaggtatgtgtatattcttaataataatatttgaattaaattttgtgagctatgtgaagggaggctaaatttttatatctgcaggtatcaacggttgtacttatgtgaaatcgtgggcattgagaaagatttggagaaaccagaaattttgtatattgctaatgaaaacgaacattggtacaattactttaaagaactctgtagcggaatctaccaaatttgaaaatatccacatgttgcagtctgtcagttctattcc

SEQ ID NO: 16759 - DNA, 475 bp, Homo sapiens
  MAP TO AC007464.2; EXPRESSED IN HELA, SIGNAL = 0.79
gcagagctccagtggaagtagaatctccacttcagcaaagttactaccacgccaagattagatccctatttgggaagttgggtgctgagatttggggctggagcacagacatcagtgcttctgaaaatttcacgccccttcatctgtccaaacctatgggtgagcagaagtaacccactcctctctgctaagatctggtgaccactgccttacaagagaatgagagccagaaccacttcctccctatccctcacccctacttaagacctatcccaccagctctcctagctaccaggtcaacacttacgtctcagcacaatatggctgggaacatgttgggcctgctgaaaaggagaaggactgttccccaaaagagctgcaagcccttaccaacatgtatcagcaggagctgggagagtggagcctgaaggcctgggatcaaggtcaaggtgagacataggaggacaagggcaaa

SEQ ID NO: 16760 - DNA, 474 bp, Homo sapiens
  MAP TO AC007429.11; EXPRESSED IN HELA, SIGNAL = 1.1
tgctctgttttacgtcgtgggaataacagttagggttatggaggcccaggaatggaaagatggtgtgagttgcagttgctagcctgttgaagattaaacaaaaatccagccatgtaatatggtgatggcagcccttacatgagggtagtattaactcttcacagtagtgagttgtagccacttgggtcgagacctcatgaactcttttctcgcttgctatcaatccgatacaaaatgcagtagtccctttctagtccgaggttttgctttccaaggtttcagttacctgtggtcaaccaccatctcaaaatataaatgggaaattccagaaatagaccactgataagttttaagttgagcaccgttctgaggagcgtgatgaaacctcacagcagcccgctccatcctgcccactcatgagtcatccccttgcccagcacatccatgctgtgtacactacccgcctgttagcag

SEQ ID NO: 16761 - DNA, 471 bp, Homo sapiens
  MAP TO AL079306.2; EXPRESSED IN HELA, SIGNAL = 4.1
tgatttttcttccacgttttgatttacttgattttaaaacatgtgtaactagtttaatctagagtagaaataaagtgctgttttttaaatgtcaagacaattttacaactttctcactgctaagtgatttagcatagactgtgcaaaaatggtaaggtgacaacatccagagtctgtcagtgaaaaaaaaaaaactccattaataccattaatcacaagaacagaagaatgctcatgaatatctccccctcatctttaatttttattctaacagccatctaccacgtacctggcaagatacaaaagaaaaaaaacagacacacttattccttgcactatcaactcacaatatttgaggacactaaaacagtggtgagtataatttacaacctcacctccaataccaccccaagtagagaagtccataatcttcccatatttctgcccattgccaccaaccttcagataaca

SEQ ID NO: 16762 - DNA, 444 bp, Homo sapiens
  MAP TO AL031775.1; EXPRESSED IN HELA, SIGNAL = 1.9
tgaagtctctcaatatggcggtttctattgtcagtttttctagttctttttgatatatttgttacagtactacattaataaatagcacacatctttctcattttatagttatcaaagatcagcataaacactcaatattaggtgccctagagggttttttgtttttggtatgttgtgggatttccttcatttaggtagctgaaaatgaaatggtatacttggtatttgtcataaattgatgtttttcattaggtacagcccagatgtgatatttctacaggaagttattcccccatattatagctacctaaagaagagatcaagtaattatgagattattacaggtaacaatttttgttattcaacttgtcttttctttgaaaaacagatcagtgaaagagataaatcaaagttggtctattgggacatagagaggaaaaagca

SEQ ID NO: 16763 - DNA, 468 bp, Homo sapiens
  MAP TO AC006390.8; EXPRESSED IN HELA, SIGNAL = 1.1
ggagcttagaatttctgcaacgtgtaacaatgttcctacatctgtgatccattctaattttaatacaacataaaagtattgatacgatataaaagtattgattgatatgcatggtatgtggtgttgagcatttcttaattacataattgaataaacttctgagcatttatttacttaatcaaatgtttaaaagttttaaaatgactgaacattggtaaaaactctgagaagctctagaagaaatgaaagagtgaaatcagagggactttaagactaaaatgaaactaccaagacgaagggtggagcacaaggaagagaaaatgatcatagacagaagcagcgatgtgataacaaacatcagtatcaacagggaagaggactgtgggtttcagctgagtaaggtgggtcttggctactgttgccacaccctatagctctaattctcctgatataaatttgcttttcaca

SEQ ID NO: 16764 - DNA, 458 bp, Homo sapiens
  MAP TO AC007450.1; EXPRESSED IN HELA, SIGNAL = 1.3
ttccaagcacatcgtagcactagtttctacccaatggataatgtggaacacattcttgcctattcattggaacgttccctgagatgccccagtaagcaacactttattagtttggttcctgtatgtttggaaaatcaataaaaatgtgtttgttttttaataggctataattctaactttttactaatttagtctagtctttctgtccccaaatactaggtttggcagtgaacagtctttaagctgggtcccttttggcgtgggaaccctgagtaaatgcacactcattctattcaacaaatacacacggagattggttcccaacacacatctaacaacaaatatggaagtggtggacccttacctgaaaacaagctccaggattgtctctaaagtagtattcacatagaacaaacatgtcatttctatatggcacaccttacggggcttcatctgac

SEQ ID NO: 16765 - DNA, 466 bp, Homo sapiens
  MAP TO AC009236.1; EXPRESSED IN HELA, SIGNAL = 0.85
aataatcaggacctaaaactcttccatccatatggctccctgctgttgggaaggtattttcacatatggcatattatggaaactgctcaagaaggctacagttctcccaaaaagtcttcttagttagcagtagggttcgttttctcaccttttcttaaatctcaaattgtgaaaaaagaaggctccgcatacgctgtctccatttcatgacttgcacatctccttccacattgagtggagctgctttcagtacaatgaccactaatgttgcggttctaatcctgggacccttcctgagtcctcactggctctgctgtatttgttcctgtcacccaccagcttccaattcacctccacctcctcccaggccatcttttcctagtccacctcctcccagtttaccccctcccaatccaccatctcctcctccctgtccacctccacctcctctcagttcacctctgcc

SEQ ID NO: 16766 - DNA, 483 bp, Homo sapiens
  MAP TO AL035667.12; EXPRESSED IN HELA, SIGNAL = 0.68
ttgcatttaccttctccaaatagttatattctgaattatatatatttttctgactaaaaatacttgaaattttatcagaaaacttttgcatttcaaaagacacaaatcaagaaagagaaaaaccccacagactgtgagaaaatattttctaatcaatatctaagggatgtgtatacagaatacagaaagaaatcttacagctcaataatgagaaagcaagcaatccacttcaaaaataggcaacggatttttgaatggctatttccctaatgaagatataatagacgaatgaccagtatttacatgaaaagatgctcaacgtcattggtgataaagaaaatgcaaatcaaaagcacaatgagatactacttcacacctattagaatagctgtaatcaaaagacagacaataacaagatttggtgaggatgtggggaaattggagctcacatacactgcaggtaggaatgtaaatggtggcgtc

SEQ ID NO: 16767 - DNA, 500 bp, Homo sapiens
  MAP TO AL034395.6; EXPRESSED IN HELA, SIGNAL = 1.5
aagagcaccatctccctcacagaatttttgtgacatttcaatgagatctagtaagtaaaaggcctaatacagggctcggcacagagtcaaagctcaacgaacacttacttccttctttcctctggcctcttaatcagtgacgttattctgcgacttcagatgtctccggtgaaagtacagtgctgtggaggatgcggctgtcacagcctgctggtgaacgggcccattagatagaggtgcagagtgggcattgctttccagatggataaaaaagcaaaggctaaaatgtaacataaatgaggaggatcttatttgcacagccactttctgttcgtcattggccacgatttcagcagcaatcacagccgcctggttatttcgctgtggagtgggagtggagattgctagtacataaaagttttccaagagatctgagtcgtttgcagttaggtaccaaaccacacaatcctgtagatagatcatagcagtgaaaggcaagg

SEQ ID NO: 16768 - DNA, 389 bp, Homo sapiens
  MAP TO AF108083.1; EXPRESSED IN HELA, SIGNAL = 2.3
ccaatgattgtatcccccagcaatcagcagcatccatttcctagccccttgcccaccaaactatccttgaaaacccctaacctctaaaccttcagggagactaatctgagtgatcactctgtctctccaggtggcatggctggccttgcatcgataaatctctttctttactgcagtgccgctgtctcagtgaattgattttgtctggagattacaggtcctataaatgccaagtgaaacaccccggatgaagcagctcatatgcttcatatgcgtgtgatgtggaactggctttttgatgactgggatgttcacttgctgaagaggcccattactcaggtcatggtaaatgctgtggttaaggggccccttttaatgtggatgctcca

SEQ ID NO: 16769 - DNA, 450 bp, Homo sapiens
  MAP TO AL035072.7; EXPRESSED IN HELA, SIGNAL = 2.1
tttttgttgtcgcaagttggggtgacgccgctggcatccaatgtgtacagagcagggatgctgctaagcgtcctttgctcagaacagccccaaccacaaagaattatctgattcaaaatgtcagtactgcagacaccgagaaactgatttaaacaagcaaataccacacaactattaaaatagtatctaacatatgctaagtgctgagaattttacatttatcatctccttttaatctttttacagcactttgaaaggggtagagactcttctgtcattcctatttgcagacgaagaaattaaggcagacagagtaagggaccttgcccaggatcacacagctagtgaaaggcagagtcaggatttgaacccaggctcatctgaatccagaggccaggatcttacctactgtgctgtttggccttggaaagctgccttgggtaatttgtt

SEQ ID NO: 16770 - DNA, 381 bp, Homo sapiens
  MAP TO AL109622.10; EXPRESSED IN HELA, SIGNAL =  32
tgaagatggggaggtattggctaacagatgcaaaattacagctagataggaagaatgagttctggtgttcttcagaactgtaggatgattatggttaactgtaatttactgtatacgtttaaaaacctaaaagagaggattttgaatattcccaacacacacaaatcacccggattttgtcattatgcaatgtatgcacatgttgaagtgccattctgtattccccaaatatgtacaatttttacatgtcaaataaaaataaaaggaacaaaaaccaatgagctattatctcacctttttggatagctattatcagaaagataatacaacaagtctcgatgaggttttggagaaaagcaaagtgttgtacgctgttggtgg

SEQ ID NO: 16771 - DNA, 435 bp, Homo sapiens
  MAP TO AC006328.3; EXPRESSED IN HELA, SIGNAL = 0.61
tagaagcagtgcctgacacgcaaaaggctctcaacaaatactatcctttactaatatcctgtgtgtctgtatcagagctggtggggtggagggacagaaagaagtgggagaaaggtaaagagatgggcaaatgatctctaaagtctctctggcactaacacaattctttattatgtgttttgtctggctctttatattgatagctgttccagaggcaatcaatacctattagtcggttttattcttatttttctgtctgatcttacaggggagcaaactgtggcaaaacatgaacttacttctcaggaaattaaccattatgttggcaatcactgtgattatttgaacagcagcatctggacaaatttagtcacatgaagtacagaagagagatttctcatggttaaaatgaagctctctttatttgcttctgct

SEQ ID NO: 16772 - DNA, 401 bp, Homo sapiens
  MAP TO AL078600.14; EXPRESSED IN HELA, SIGNAL = 2.7
tttgcccacacatttctgactgattctttctgaataatgcccacatgcacactgggggaatggggtggagccactggaagtttgtgcgttgtgcaaggatgagcgtgggctcttcaacttggttattcaagctgaaggtggcctggtattcaatctgtgaggtgggagcccgttggcaggaatccctctagctttgctgagcgctgtttttttcgtttttgtttttgttttttttccttttcacccactaaattctgctctgctcacccttcagtgtgtccatatgcctatctttcttggtcgtgacacaagaacccagatttagctgaactaaggagcaaaaattctgcatcactatgtttactatctgggtgataggatcattcataccgcaaacctca

SEQ ID NO: 16773 - DNA, 470 bp, Homo sapiens
  MAP TO AC011003.1; EXPRESSED IN HELA, SIGNAL =  12
tttgcaagttgcttggtttcttttcctccttcacggatgcctgtgtgtcatagatttggtctctttacataatcccatatgtctcagagactttgttcattcttctttattctcttttctttatttttgtctgcctcaattattttggagaaccagtcttcgagctctgagattgtttcctcagctggttaattctgctgctaatatttgtgattgtgttatgaaattcttaaagtgaggttttcagctctttcaaatcagtttcattctttctttaaaaatggccatttcatctttcatttcctgtatcattttattgtattcttcagattccttgcattgggtttcaactttctcctgaatgtcaattatcttcattcctatccatattctgaattctgtttctgccatttcatccatttgagcctggttaagaatcattgctaggaaggacactggtgtggtcattg

SEQ ID NO: 16774 - DNA, 390 bp, Homo sapiens
  MAP TO AL096793.8; EXPRESSED IN HELA, SIGNAL = 7.8
aaaaagaaattgcaaacaagggaaacataacctgaagtgactattttgctacaggaaaaatatgtttgctttagttttacatagatttagaaatatctcctaacaaatatttcctccttacagtttactcagagagtacttttaaatgacatttatttatgttatattactaacaacagtggtttaccacaatatattttacatatttgttgtgtgtggcgatgtgtgtgtgttatatgtataacatttaaaattactcttcaaaataggaacaaaaggtccagttacatcttctggctaaagaagactatcataagcaactgagtgaaattgagaaatattatgccacaataacaggtcaatttggattggtaaaagagaatcatgaaa

SEQ ID NO: 16775 - DNA, 446 bp, Homo sapiens
  MAP TO AL034384.1; EXPRESSED IN HELA, SIGNAL = 0.9
cctccgtgaactctcataggacatttctatgtcctatgacatagaaggtacagagtgcttgcagccttatggtgtaattatttatagaaggttagttcctgtagggcagttcttttttatccatgtctgcatctcccactctgtcttcttcccttatcagaatctcatgcactctttagggtcccactcagatgtcacttctgctggaaatctttctctggtctctttagccagaagtcagtctacaaacacttccctaagcaccctctctgtgctaggtactgtgctaagcactgagtatgacatgctggtaaacctttggaactttccctggagaaagtgggaagccaccatattttcaagcaaggaagatggtcagagcagtgttgtggaaaggtttctctaccacagtatggaggacaaatgggaaagccaagactggaggc

SEQ ID NO: 16776 - DNA, 377 bp, Homo sapiens
  MAP TO AL096865.7; EXPRESSED IN HELA, SIGNAL = 1.1
tgctcacacccagtgaaattaggagctagtttttctgaaaacattgtttgaattttcaatatcataaaataaatgaaaaaggcctgagtactcagaaaaacactcaacttcatctggatgtatttaaatcaaatcttcagtaattctattcagaaaaagaaggtgctgatttgtatacagactagtctacatttcatcaaaggagcctaatgtgcttattctattatcagtatcaaaagtcagagacctacctcgtccactccggcccacaaatctcagatcgttgaaccttgctacttggtttttcataacagcagaggcattccggagctcagcagaataattttcatcgttacccgccatgacagtaaccacag

SEQ ID NO: 16777 - DNA, 1965 bp, Homo sapiens
  MAP TO AC005678.1; EXPRESSED IN HELA, SIGNAL = 1.3
cagcacttatagtctacaaagtaccactttcattcgacaccatctggtgcatcaattctactctcctgtagtcttatatgactaaatatgtggatcttatctatcccaaactaggctacaaactctctgagaaaagagtttggggttatcttcttgttctccacagcacgtagtacaatgggcagcacacagtgaattcttattaaatatctgaggtttccttataacaatggtgactgaagttttgccccaataattgtaaagctaaatagtatttctcactggcctgaactctgtgagataacttccctgtagtcatcacacagaaacagatttttctcctttgtggatagtctgatgttgagtaagagctgagttctgcctgaatgatttcccacactctttacatacataggtaccacgtctattatggattctctggtgtttactaagatctgacctctgtctgaaggcttttccacactcatcacattggtagggcttctccccagtgtggattctctgatgctgaatgaggctggtgattcctcggaaggcattcccacactcatcacacttgtagggcctctctccagtgtggattctctgatgttccgtgaggactgatctttgagtaaacgccttcccacacttatcacatttatagggtctttctccagtgtgaattcgctgatgttctgtaagacttgtcctttgaataaaggctttttcacatacgtcacatttgtagggtttttccccagtgtgaattctctgatgctgaataaggccactctgactgaaggatttcccacattccttacactgatagcatttttctttgtggtggatttcctgatgggaaacaagggatgagttataaacaaaggcttttccacactcgttgcactcatacggcttggcgccggtatgaactccttgatgctgagtaagtatggaacgccgactaaaacttttattacactgagtgcactgataaggtttgtctcttgtgtggatcttgatatggtgaaagaggcctgctttctgactaaaggctttgccacagtcattacagtgatagtgtttttctcctgtgtgaagtctctgatgttggttaagagctgaccaccggccaaaggctttgccacattcattacacttatacggtttctctccagtgtgtattattttgtgtcgaataagcacagttctcccacggaaagcttttccacattcttcgcatttgtagggtctgtctccagtatggatcctctgatgttctatgaggtgtgagtgctgactaaaagcttttccacagtcatcacatccgtaagattcttctcctggacagattctctgatgttcagtatggtcagagttctcagtcaggcttactccattttcatcacaggtaggttgtttatcttctctggagcaagcagagggctcttctgttatttcttcaggttcacgagtttctccacacctagcagacttggacatatcattttcaaatttactggatgtcttcccatgtggttccatttcttcagaaacttcttgctttaaattcccatactcatttccagtctcaacatctaaaactaagaagggatcataaatgttacctctttctacctttaaaatgtatccatacattttaatattaagcagctgtttagaaataaaaaatgcaagagtctaccatcttagtgataaagagagcaaaatatatttgtttcaatatggaaaacatatgcatcaaaaaaatatctggaaggacacacgaaaaattagtaacagttacaacctatttcagagtaggaggaagagactaggtggctgggaaaatcgagtagaatagaaacttttcattaaataacttaaaaaatttttgtttttgagccatgtacatttttacctacttaaaaaattaaatgaaaatgaaaaggatgcagagaa

SEQ ID NO: 16778 - DNA, 462 bp, Homo sapiens
  MAP TO AL049594.4; EXPRESSED IN HELA, SIGNAL = 0.63
tgctgatggaaatgagggagaagatctttaactgaggcggtcatagacacccttggattgcccacagggcgtgttgttatggagggcaatgacaggaaatcaacactgccccaaaagtcccagctggggagcctctactttgtgacatacaagggaaaccatggaaatcaaggaagaggctgtggcctagaaggcttcaaattgaagtctggggaaattagagaacaggctcagaatgtcctgggagctgtgggcccagacaaggttggaaaccgtggcctggcatcttccctgctgtagaagtggaagatgaaatggtgactcctgcggcgggcattgccatgcgtcagggtgagctccggggcaggtggaggcagcaaaggcctctcaggaccgcggaagggcctcatcagccaccacatccccacctgcgggcgcgacggcctcatcatctcctccaga

SEQ ID NO: 16779 - DNA, 478 bp, Homo sapiens
  MAP TO AL031684.11; EXPRESSED IN HELA, SIGNAL = 0.6
tggtttttgccttctattcccttgtacaatggttgccttgaattatatcatggctgaggaaggaggtgtttgcaccgtagccaatacccactgttacacttggataagtacttctaacaaagtagagatcaagttggaaaaatccgtacacacactaaatagtaaattagagcaaccagtgttaaaatgtttggcttttttatctcttcagctgactaccctctaaagtcagaacatggccaaaattcagtcttcaacttttgttactcactattgcaattattgttgccattgttgttcttgctgtaatatttaagttattcaagttattccttacacgagtttgcttagaaataacagtgtaaccaaagtaatggttgccaagatgctcaatacggtcaatcaagcctatggttcagaaaagatatctgatttgacaacttttttgggacttaagcagactggagagcactcccct

SEQ ID NO: 16780 - DNA, 422 bp, Homo sapiens
  MAP TO AL121578.1; EXPRESSED IN HELA, SIGNAL =   1
gtttgggtttccctcaaaggtttagcatttatttagcctataacctattacgttttgcctttctctataacttcttatcaacccttagttttaaatatcacctctaagtggatacctccaagacttccatttccacatcttatcttttccatctgctatacattttcccacttgtatgtccaagggtcactcgacattcatcatgattgtagccaaactcacagcttttatgtcaaaccacttcccctttcatttcatttgtttctgtgaatggcattaatgatctcttggtttctcacatttgaaatcttggagtcaattttgcttctaacttttcctttgctctcaatatccaaaccactaccaagtccattcatttctttaattataatgtatctagaagccatcctctctcatctccc

SEQ ID NO: 16781 - DNA, 416 bp, Homo sapiens
  MAP TO AL031274.1; EXPRESSED IN HELA, SIGNAL = 1.8
ggtttcccttgtagcccttcagctctcagccccactctagaatgacagtgacagatgaatgctaaaaatcagcaagagaaacagaagctagagaaggtgctggcttcctcttcaggcttccaaactctagtaaatggcaagcatattttataatccttcctgaacattcatgaatccccttccactgaagtaacatctcccaagacttgcagcaattcttgtccaaccaaggagagagccccagaatgagagagggaggtaaagagaagggagagctggctgaattgttcactgacaagtctcctccctgttcatgtttttgtttaggactcagctgaaagagtttgtgctaaatgatgagctcccaggacgcatcatcactgggaaagtgttcatcaggccaagcataaaagagg

SEQ ID NO: 16782 - DNA, 379 bp, Homo sapiens
  MAP TO AL049822.19; EXPRESSED IN HELA, SIGNAL =   1
tgatctcaacgcctcttgtgacaggatccattttcccaactcgatcaaaagcaatgttgatggtgccatgaaaatttttcaaacacagtaaatagagaaaaagtaacccagaaaattgaaatatttccttttgaaggttttggagtattctgttctctccttggtagcgtacagatcagctgttttcagaaaaagctgcctgcttagttcttccaaagcatccacttcctgttgagtaagtggtaatactttctatcattccccagaatcctgatggtttgttatgcacctcccctttctggaacatcgttctctgtgccattgccatccttttctttgtggttatgatcatatccatggtttggagcagtcgctgttc

SEQ ID NO: 16783 - DNA, 426 bp, Homo sapiens
  MAP TO AC007498.2; EXPRESSED IN HELA, SIGNAL =  15
tttgccaatggtttgtctcccaccccagtgaatggtggggctttggatttgacatctagtcacgcagagaaaatcatcaaagaagattctttggggatcctcttcccttttagagaccggggtaaatttaaaaacactgcttgtgacatttgtggcaaaacatttgcttgtcagagtgccttggacattcactatagaagtcataccaaagagagaccatttatttgcacagtttgcaatcgtggcttttccacaaagggtaatttgaagcagcacatgttgacacatcagatgcgagatctgccatcccagctctttgagcccagttccaaccttggccccaatcagaactcagcggtgattcccgccaactcgttgtcatctctcatcaagacagaggtcaacggcttcgtgcatgtttctcct

SEQ ID NO: 16784 - DNA, 457 bp, Homo sapiens
  MAP TO AC009224.1; EXPRESSED IN HELA, SIGNAL = 0.63
aggaaagcaattctggatggtcttttctcagccttcaaaaagaaaatgtatccattgaatgctggaaagcatcattttattgttgttctaaaaaatattgataaacttcctagtgtggtgagtatactttaaaatgatttgaaaattggcggctccgtactgctatctaacaaagtttcatatccaatgaaatactgaaatcttaagaaaaaacaaaagcttggttcaacaaaatcagatttttagacatccattgttcttatttgcacttttcttttttagcttgtgaaaattcatcacatttagaaactcagttatctcagcacatgcagaatcacattccatattcacatccaagccctgttcactatttatatttacaatgttgttcgaagttgtggtatttgctttactattttcatcactactttcatgcttcagttaacaacttttgagc

SEQ ID NO: 16785 - DNA, 469 bp, Homo sapiens
  MAP TO AC011370.1; EXPRESSED IN HELA, SIGNAL =  24
ctatcttggatagagcactggacaaaaggtaggcactgtttacaatccactgacaagaaaacacatgaagaagcaaaccccacagcgctctgaaacctggaagagatgggttctacatgggtctgatgggattactgtactaaccagcctccgaatatcccgctccgactcccacttgatcttcgagatggcttcttggtgggactgatgctcactccgaaggtccccagccttgattttatctgcttggatcatattgctcagagcctcgtccacctgcttcttggccgttttcaggtccgcaatttcctgtaagagcttaaggcgctctgtgtcaaacagtttccgggcctcctcccgggcctcaatggtgagcgctgtccttactttgtcactgctgccgtcgcggagagcacagagagcagacttgagcctctggatctctccatcacgtaccttcaccgtcctt

SEQ ID NO: 16786 - DNA, 415 bp, Homo sapiens
  MAP TO Z95325.2; EXPRESSED IN HELA, SIGNAL = 0.61
agtctttggaaagcactcactgtgcaaaattatttggaattcttctaaatgagagatttgccttttctgtcccatttatgtatttattcaattacttatttatatcagcatagacttctaggtgtttattttatactttgggttataatccagtactacaatatttattttattgcttaaattgtttcagctttggccattgggaactctttcagtaggctcctgcgtacctttgacatgcccccaacattgtggattttttcatacacttccttactttcttgcactggatgttccagactcatcttgtatatttcctgctccagtcctggagtcagaaaccatttcttcaagttgtggttaggagaatttttgatctgctcaatcctaagaaagtgctaaaggtggccaaaaa

SEQ ID NO: 16787 - DNA, 461 bp, Homo sapiens
  MAP TO AC009483.2; EXPRESSED IN HELA, SIGNAL = 1.2
tttaaatatgggttaatcttcaaagtcttacatcttagcctctctgtaataccacatgtcacaaagaaattatatttatgtattagtggaaagatggcactcttaacacacaggttgtaaagaacatacataattcattcatttaacagaaaagaaaaatatcactgggccagtttttaaatctgccactgctagccgtgtggcccttagcaattaacttctttgagttttctttctctctctctctctctctctctctctctctctctctctttagaggcagagtctcaccatgatgccaagactggacttagacttcaacacttgggctcaagttatccttcagtctcagcttcctaagtggctgagactaaagatacatagcactgagaccaggtttttcactctgaaattttttctcataggtaagatggttattccatcctatttctctcacagga

SEQ ID NO: 16788 - DNA, 478 bp, Homo sapiens
  MAP TO AC008124.8; EXPRESSED IN HELA, SIGNAL = 1.2
tgtttagtcctccaggattggtctatagagagttaaatgtgtttggcttttaaaattggaaaccagaatttttatgactattttttccactttgaactattgtaaagtttattttggaaaatcaaagctagaaaaaaatttctttgttttagatcatcactactcagaatgtggtccactgtgggcagcagcatcccagcatatcctggaagcttgttaaaactacagaatctcagccccaatcccatacctgctgaatcagaatatgcatttaaacaagatcacttggtgatttgtatgtacattaacattcgaaaagcaactattcttggtgctttctgctttatcctgaagtaccatctcagcctcaatggggggagtgacagatttattgggaactaaaaatgcatctgaaaattttatgtatctcatccctaaagtcagcatcttacttaatcgagaaatacctgccaaattc

SEQ ID NO: 16789 - DNA, 461 bp, Homo sapiens
  MAP TO AL049591.12; EXPRESSED IN HELA, SIGNAL = 0.68
ctagcacacccaatagaaaaatggatagagaatatgaacaagcgatttagagaataaactcaaaaaggtagcagaaatatgataaggtgttcaaaatcactgaaaatcagatatatgaaaattaaaacagtgtgcatatcattttacacttattagactggcaaaattctaaaagctataaaacgacaaatgtaggcatgtggtaatagaacaaaggttctgttctgttggcaggagtgtagactgttgcagccattacagacagcaactgatctgtacacagtcaaattaccaatatggccaacagtttcactaaggatagaaaccaaagattctcacaaaggccaataagaagacacagacaaaacattcacgtcagaattgtttatggcatcaggaagatgaaggtaaccagaaagttcctcattagaaaagtggacaggtaaaatatggtacacaca

SEQ ID NO: 16790 - DNA, 458 bp, Homo sapiens
  MAP TO AC009758.1; EXPRESSED IN HELA, SIGNAL = 9.2
  unsure 122
tgagaactgtttagtggtatcaggtctattgatatctaaatatttagatgtcagtaaaaatgagagtttcttgtgggcaggaaccatagattatgcttctccatgtctatgagaacttctangtggattttgtttaaggactaggaatggtaacaagggctcatcatagaaggtgattgaactctctaatcctatgtaccctggatactcttcctagaaggtgaaggagcctatgaagatcaacaaggagaatttccaagagtcatgtcagcctccagtatcacctcaacacatccaacttccttcttgttgatggggattccaggcctggagcacctgcacatctggatctccatccccttctcagcatatacactggccctgcttggaaactgcaccctccttctcatcatccaggctgatgcagccctccatgagcccatatacctctttctggc

SEQ ID NO: 16791 - DNA, 523 bp, Homo sapiens
  MAP TO AC002524.1; EXPRESSED IN HELA, SIGNAL = 1.7
cctcggttaaatcttggctctaccactttgaagatcttaaatttgggtagtagaggacatgaaagccaaagatatctttagaagggtatgaccctcagactgggtccgtgtcccatttgccctttacaagctgtagactcttgggcaaatatggcaggcaggctctaagatggccccagtgatcccaacctactggtattcacacccttgtataatctccccttaagtgtggggtgaacatactgacttgcttctaagaaataaaatgcagcaaagctgatggcatgtcatttacatgattatgttaccagagattatgacttctgtcttgttacttaagtatttctattgccttctcagcttgcctgttttgatgaagcaagctgccaaattggagaggattatgtttaaggaagtgaaggcagcttcttcccaacagccgggaactgagtccttcaatccaacaacctatgagacaataaattctgccaacagccatgtgagtttggactgcatcattccc

SEQ ID NO: 16792 - DNA, 506 bp, Homo sapiens
  MAP TO AL135744.2; EXPRESSED IN HELA, SIGNAL = 1.7
gattgtggcaatgtgaaacggtgttgcaatgccaaacacgggcattattacagtctcatatttcttatcgatgtagatcttcatttcccgaatatgtggttccttaggcatcagagatgggtttttataggacacattagacttgcgagctctggagtgggataaaaaaacaactgagaaatttctgcagtcccacagaaccctcagatgatctcactgctcagtgaaaactcttacttctgaatctgctgttctcccttttgttcagtcaatcgcctctttgcttcttcattgagttgagccgctagttctttctgatgtgctcttcgcttctcttctgcagtcatttcattctggtgaatggaaaatccaatttatcacaacacgtgagccatatgacagccgagatcaatgtaatttaaaatagtaaacttactcttgttctttctgtaagtaatgctgcccgagaacctcttcccaaaaggtcctctgcctcatctttctcc

SEQ ID NO: 16793 - DNA, 517 bp, Homo sapiens
  MAP TO AC023202.2; EXPRESSED IN HELA, SIGNAL = 1.7
gtcagttggctcttggaaggcaaaaataataacattacatagggtttataatttatagcaataaaatatatgacagcacaagaaatagaagtgtaaattgaaacattgctgtaagactcttacttcataagtgaaatgatatattaattcaaggtatacagtgataaattaggggtttatattatctctagaatgaacactaaaataaaattcatagaggtcctgagaaatcaagaagtcatcctggatcacgaggtgtcaaccagcaatgccttgagcaccagtggtatcatcccagccctggatcttcctaccaaagcattaggtcatggcctaagcctttttatccttattagactcctgaaaaaggtgtctatatgtaaagaggaagaagtaggggcatatgaggcatttaagaaaccatcttatttcagtcattctgtgaatgatacccagttcacattctgatggccctctgtgatctgcataattgtactgcattgtggttggcatgtaa

SEQ ID NO: 16794 - DNA, 596 bp, Homo sapiens
  MAP TO AC017067.2; EXPRESSED IN HELA, SIGNAL = 1.8
aacaaccctatgctgaggtgtacctttttcacacatacaaacacacatgtgagtatctcttatggtgctgaaatttaagactcagaaagtaattgctgaaggaaatgtttttgattaatcttggtgaagaataatatcctaacttacattctgcaaattacttcttcaacaagtacaatacaaactctttaaatggtcttacaatatgtcaaccgtgaatatgattatgttatttttgtttttaaagcatgtgaatcttcttttgataaacacaatgtctacacttcaggtgcttggcaaaataagaatcataggtagaacaattttgccattgttacaaaacttttgaagttacaatctagaatattgttcagtgcattttataatgaatctcacaataatgtcttctcagagttcaaagacaggaaagagttactttactaggaaaaagaaaaacccaggattccttttattagctaacaaaaaccatgtaaacctttgtaattctgtattttgttaagagtcagagctaaatttcatgctcaagtaatttactgcgttttcctcactctatcgcattgccccttgttaaacca

SEQ ID NO: 16795 - DNA, 506 bp, Homo sapiens
  MAP TO AC012632.2; EXPRESSED IN HELA, SIGNAL = 1.6
tagtacacggaacgccagtggtgtcacttcaactaacatgaataaatgatattaacagtgggggccacgcactatggttcaatttaccttaaacattgccagtaaagtttctttcttaacttccagtctttcaaaagcttgtttttctttaatgattttcttacacaaagcctccagagaagagaaatcattgctagacacacccctgaaggagaagaaagtataatcttttcattccattcgaatcacaccatggcttcgaaaaatgttcatttggaaatagtatttggaatacttcaagggttttaatattaaaaaattagactattgcatcgtatcttagaattctaaacaaaacatttttcataagtaatttttacattttatattttcagtagcttctaccttggtcatccatggagacctttctcactagtgaccccttcccgcaactctatcaccaggttttaaaggagaggggaggaccagtctccctgaatttccca

SEQ ID NO: 16796 - DNA, 594 bp, Homo sapiens
  MAP TO AC012632.2; EXPRESSED IN HELA, SIGNAL = 3.8
ttttccatggagccaatctgggtaattttttcattaaaattcttcttctgcctgtttgctgcggaactctttgagctgctgtagccgctcgatagtttcagaaatggtgcgttccccgtggaccttattgtctcttgtgcggatattaacagtgccactgattttctctttttcaccaacaactaaaacaaacacacaaagctttgtcagacttaatctaaagatatggaagaattcacactgaacatctgaaaagaaatgatcctaggacccaaaacctaccccatagcttctgatacattaaaaggtacaagtgaccatgtgttgatatttaaaagaaactctttgcaatatctaaaactactgtgcttatggagtcaatctagacaacgtaacaaccaaataataaaaccccaaacatcatgaatatcttttttcaagtaatcccacataaggcattatcttgagaaagtaatccaatagatgtgtttaaaagcaatgcgtcttcattcttgttataatagcaaaatattttctcacagacatccatgatttaagtgaaaaaaaaaaaaacccagtatgtatgcatgagcc

SEQ ID NO: 16797 - DNA, 522 bp, Homo sapiens
  MAP TO AC005137.1; EXPRESSED IN HELA, SIGNAL = 1.7
acgctgacctaccaccaaactcatctggtctgaggactggcctccagggaggaggaggaagttggctggggacacagcgggcaggaagcaagctaggtggggtcgtgtggtggggtgggaggcgggacagggcatccagggctggctgcactcactgccgctccatctcctgctgctcctggaggatcttgttggactccatcgccagccgcttctgcatgagaagctcctgccgctgcagctcacgctgccgcgcctctgccagccgctcccggtctgtcatgaacagctcccggccctcatgggagaaaagaggccccttgctcagcccccggggaacctggggatcccctgacacacccctgggggccgagatgcaggtggtcttctcagcaccatcaggcactgcggctcccgcaatccctgacccaaacttcttgctgggcagaagtcctctcgctctgctctgtcagagcttcagggaaggagaccagccaccctgggagtgtgtggcagagatca

SEQ ID NO: 16798 - DNA, 577 bp, Homo sapiens
  MAP TO AL096700.14; EXPRESSED IN HELA, SIGNAL = 3.8
ttaatcagtgtgggttccccaacccttgccttaggtgggtcttaaaatgaacactcacaaccttctcctatattcttttaggcctgatctccgtggaagaatttcgtgccatgtggaaactttttagttctcactacaatgttcacattgatgattcccaagtcaataagcttgccaacataatggacttgaacaaagatggaagcattgactttaatgagtttttaaaggctttctatgtagtgcatagatatgaagacttgatgaaacctgatgtcaccaaccttggctaaacacaaatgagagcttccctcaggctccctgaaacagctaggcccaaatcacaagtacagtcctttccaacacccctgaaattcatagtcagtagcagagaaaagcagatcccaattcatcccacaaacagatgcatagtatgggttttggaagtccctagcaagctgttattggtaagattaggttaaatgtcagtaataggatttggtttcagcattagtacctacatattgccagtgagaaactgggttggacctagtggtgttgtcgtgagtgccaccta

SEQ ID NO: 16799 - DNA, 546 bp, Homo sapiens
  MAP TO AC004808.1; EXPRESSED IN HELA, SIGNAL = 2.3
atggatgccttatttgtgcccacagcctgtggctttcaggctatacagtatgtccgtgacagtcttctgatatacttgtccggtatctgtatcactggaacaaatcaaaacaagaccccttattcaaatgcaggcaaatttcagcacttacttatagtggatccagactcaggcctgttcagggagctgatgatgacaaagccgaagccctcattctctttgcggtgaatgaccacatcactggtctgcaggctgtgggaggcgaagccttcagggggagaggcattgctactgggggcagcgtggttgctgttggtgtaggttgcgtagtcactgcgtggagagctgtggtgggtggatacagagcctggacttctcccgttctctgggcagggctcccctgcaaaatataccacacacaggtaatcaattaccttacaagggtctcaatgaatgcttcctatgtactaggcactgttctagacagtggtattgttacaagactggttgaactgcttctctttctcccagatttgcagagcattt

SEQ ID NO: 16800 - DNA, 577 bp, Homo sapiens
  MAP TO AC019219.2; EXPRESSED IN HELA, SIGNAL = 6.5
aatcccatcatgaagcttgggccctgtgatggttaatattgagtgtcaacttgattgtcttgaaggatgcaaagtattgatcctgggtgtgtctgtgagggtgttgccaaaggagattaacatttgagtcagtgggctggggaaggcagacccacccttaatctagtgggcacaatctaatcagctgccagcacggctagaatataaagcaggccaaaaaaaaaaaaaaaaaaaacaccctgaaaagactacactggcctagcctcccagcctacaactttctcccatgctgaatgcttcctgccatcgaatatcagactccaagttcttcagttttgagactggactggctctccttgctcttcagcttgcagacggcctgttgtggaaccttgtgatcatgtgagttaatacttaatgaactgccatatatatatatatatatatctcctattagttctgttcctctagggaaccccaagtaatacagattttggtaccagaagtggttctagaggaatagaatattaaggatggagttctttagttagttttggggtttctggagttggttgct

SEQ ID NO: 16801 - DNA, 516 bp, Homo sapiens
  MAP TO AC012632.2; EXPRESSED IN HELA, SIGNAL = 2.2
gcatacctgcactccagttggaagacctctttaaaaaaaaaaaaaaaaaaagtggggatctaatcaggtgcagaagatataatacaaagatgttgcgtttaaatgctcttctgatcacataatttgtttttaatgaaaatgttgttaaaggagggaagaacccaggatgaattgtagcatgtgaaaatcttcagtagaaattcaaagctgccgaataccagtgtcctgggcagttcatgggtttcagggcaaacagctccttctccacctcaaaggagaacatgttctcgctgtagtgctgccagtggcccgaggtcatccagagtcggctgttgaagatgtttggggtgactacctcctggaatcctcttttcctatattcgctctgatagaaaataaacagaaacatgtgtaggcaaataaatgctcatacttcaagtgggagtaaaaacttaaagagtgattttatactctctcatgaaaaagatggacacatgccatgattcagaaatccca

SEQ ID NO: 16802 - DNA, 571 bp, Homo sapiens
  MAP TO AL133262.2; EXPRESSED IN HELA, SIGNAL = 2.1
atgaaccaaaaacaccctggcggtgtttatttgctaaaggtctatcacactgaacacgggggatggaggtatttaaagcatgtccttttcataacacttaatctaaacatgcatctcctaatcatacatttcagttgtttatgaataccaacagggaaaaataagttcattatttgtccatgatacacagcacctaacaactacctaaatctcaagaagaaatattccagctcaatcatacctttttcagctcttctttggagaacttttcataaggattatgttccagataggtaatgtgctctgaattattggtaccaaaccctacagttttgccttttttatttccagatggttcataagggtgatgtagaaggtcataatgaagcattgtgatcatttcttttttgattagttcttcacttttctgtaaatctgttaaaggcggttctacatttaagggtcttagaatagtttcatttacctaaaattttaaaacaaatacaattaccaaacatatcactataatatattaatgttattacctgttacagcatgaattaaacagcgg

SEQ ID NO: 16803 - DNA, 586 bp, Homo sapiens
  MAP TO AL121761.5; EXPRESSED IN HELA, SIGNAL = 7.7
ccacaccttctcctaggcacctccttatcaagaggtaaagttgaatgcctgtctcttgagtctgagtgggtttgtgtctcacttgtacccaatagaatgcagcagaaataatactgcattacttctgaggataatttggaaagaaaaagatagtgcaatttccaccttgctgtctggtacattcttgctggagtgctgagctgccatgcaagcagttagactgttctgaggctaccatgctatgaggaaacccaaactagccccgggcaaacagatcacatgacaaagccctgaagctacatgaagaaagagagagataccgtagcagtctccagctgttccagccataccttcccgttccccacccccacacactctgccttttgttccagttccagttaccatctggctgcaaccacatttgagactctgagccagaacaacccagccaagcccttcctgaattccagacactcagaaaccatggcaataataaaatgattattgttttaagccactgagtcttgcggtgactagttatatagcaatagataatgaggatgcatgaagcgtgaagatgcatgaa

SEQ ID NO: 16804 - DNA, 580 bp, Homo sapiens
  MAP TO Z86090.10; EXPRESSED IN HELA, SIGNAL = 2.2
tttttaattgggccatttgtcatattattaaatttttaaagttttttaaaacatattctggatatatatagcatgtgtaaatatttcctcccaagtctgtggcttacctttttagtttcttatggtgtcttctaaagaacagaaggctttaattttaataaagtgcaatttatcaatttttacttttatggtgagtgctccttacacgtgctagaaaaaaaaaaatctgcctatgtcaaggtctcaaagatttagtcccatgatttctcctataagttttatgcttttagtttgtatgtttaggtctacaaaccatttcaaattaatttttatgtatcatatgagactgggattgaggttcatttctttacatacaaatatccacttgttccagcaatagctgttaaaaagactatactttccccttctgaattatgtttgcgctattgctgaaaatcaattgactatatatgtatgtatctatttctggactctttatggtgttccaatgactggtaaatactgcattgtcttgattactcttgctttataacaagttttgaaatcaagtaattttgtt

SEQ ID NO: 16805 - DNA, 555 bp, Homo sapiens
  MAP TO Z95114.19; EXPRESSED IN HELA, SIGNAL = 1.4
tggaagcttttgcaggagtctgggtgaaatgagagggctgactggatgagggtgtttgcagactggatgagggtgtttgcagactggatgagggtgtttgctgtctggctatctctctctgttcctctatttctcatggactttctctcaacctacacacaggcccctctgattttagtcagccttgtgtgacccatgtcattcgtgggccctggctgctagatggggaccatgcctgcacttgggccaagccagatgtctacaagctttccctgagtgcctcacaggccactgggcactggggtcgcccagaaatgaccgaccagaagaacaagcagaaggggccatggaggcctagctccctgagtccctggaagaaggatcatgaggaagtgaagtcaggcaccgagagcccaggggagcccatccatcagcaccacaaaggcacaggcatagatcagtgttgcttgaacccagatctccagaacacaagaggagagagccaggtggacctgagatatcatcttgtccagcccctctttcccagctgatgag

SEQ ID NO: 16806 - DNA, 592 bp, Homo sapiens
  MAP TO AB016897.1; EXPRESSED IN HELA, SIGNAL = 5.2
cagttaaatctctactagttgacctggaggtatatacaggcacacctcagagatgttgcaggttcgatgccagagaccgtcacggtaaatctggcatcgcagtatagtgaatcacaggagtgttttggtttcccaatatgtataaaagttatgcttttagtaaagtgtgcagtagcattgtgtttaagaaaaaatggacctaccttaatataaaaatactttattacttaaaaaatgctaacagtcatctgagccttcagcaagttataatctttttgctggtgcaggggcttgcgtggatgttgatagccactgactgaccagggtggtggttgctgaaggtgagttaggttggctgtggcaactccctaaaatacaacaaatgaagtttgctgcattgattgactcttcctttcacaaaacattctctgtagcatatgatactgttagataacattttatgtacagtaaaatgtctttcggaattgaagtcagtcctcccaacccctgccactgctttatcaactaagtttatataatatttgaaatcctttgttttcatttcaacagtgttcacagcatcttcaccagg

SEQ ID NO: 16807 - DNA, 574 bp, Homo sapiens
  MAP TO AC007556.2; EXPRESSED IN HELA, SIGNAL = 1.3
acaagacctcccatcaccagaagaaacatttccagctgccatatgccccatttgaaaagaaagtttgcagcttgtgtaaacaatgatgaggcgcatgcattgggctgccagttgaaaacttaactcacttgagatttcaacttctaaatttttttttgcttcattttaggcagaggattgaacgcagcactctgacgggcgtggatcgtgaagtcattgtcaatgcagccgttcatgcttttggcttgactctctatggccagtatatttactggactgacttgtacacacaaagaatttaccgagctaacaaatatgacgggtcaggtcagattgcaatgaccacaaatttgctctcccagcccaggggaatcaacactgttgtgaagaaccagaaacaacagtgtaacaatccttgtgaacagtttaatgggggctgcagccatatctgtgcaccaggtaaggcactgaccatgaaaattagaacatggagaataatgatcacaataccaattggtaaggaaagctgaagttctcacaggagaaaaaattcaaattctccttgatgtcaggg

SEQ ID NO: 16808 - DNA, 566 bp, Homo sapiens
  MAP TO AC005300.10; EXPRESSED IN HELA, SIGNAL = 1.5
cctctaggtgtctttccaccactaaaattctctaagcttacggttttcctggaatagtgagtggcatggggaaggaaagactaacaacagtctcagaggtggtaagtggcagatccagaccagagcccaggtgtcctgactccaaggccccttgctgctgaaccaggctgcaggcagtcacactgagacagcctgagggccagagaggagacggagaaaagacctcacaactcatcaaagaggacctctcttaccttcaatgcgggggaagtcattcctcgggaggggctgcagagagacaaaggagaggctatcaacacaagtcgccttccactccaggagaaccacaaccccacctccagggtgctgggaggggaggggagacacactccacagaccccacacccgtggtcaagcccaagccaagggaaagctggagaggactgagaaagatgcaagaaaggcgaaaagacaatggccaggtggggccacagaacaggcaggacaccatgggtgaagtcaccaggaggaagggtggtcagctgtctttctctggtgggagagga

SEQ ID NO: 16809 - DNA, 587 bp, Homo sapiens
  MAP TO AB016897.1; EXPRESSED IN HELA, SIGNAL = 1.2
tttcttcctttccgtctttttcttataatgtaacataagatgaattaataataataaactttacttgactgtatttaagttacaagatgtcaaaaaaaagtgaacatcaaccaagaacttcgtgtcctcttctggggaaagagctggtgtattgtcggttgtacgaaactgtaccactgggtgcagaggtatgacttcttgttgtctttatatggaaactaagtatggtttaaagagctgtgcatgagtgccaggttgacaaggggaggactgtgatggttagttttctgtgtcaacctggcaaggctaccatccccattaattcattctatcaaacaacaggtgttgctgtgaaggaagccaatgtgattaaagtccataatcagttgactttaagtaaaaaaattataacagataacctgggtggtcctgattcagccaaaaggccttctggggagaccaggggcctctcaggtgaggaaaagctcctggcagacggctgcttcagcctactcagcctggtgtctgccctaagatgccggactcacctcacctcttgttgcccaggccagctctctgtgctgagt

SEQ ID NO: 16810 - DNA, 580 bp, Homo sapiens
  MAP TO AC004909.2; EXPRESSED IN HELA, SIGNAL = 4.5
aaaactcatttctttttatttttcagctttattgaggtatgattgacaaataaaacttgtatataattaaggtatataacgtgatgttttaatatacattcatgtactgcataacaatcttttagtcaacaacagaccgcatatacaatggtgggctcctaagattacaatggagctgaaaaattcctattgtctagtaggcaaggcatcatagtgcaatgtgatactcacctgtttgtgttgatgccgatataaacaaacctgcggcattgccagtcatgtaaaagtatagcacacacaataacatacagtatataataataataaatgactattactggtttatgtatttgctggaggggcggggccctcagggacaacctcttgctaaggcaatgaagaagggaaatgtggggtcagagcccccacacaaagttcctactagggcactgcctagtggagccatgagaagtggaccacagtcctccagacctcaaaatgttagatccattaccagcttggattgtgtgcctggaaaagctgcagacactcaatgaccgcccatgaaagcagcagagat

SEQ ID NO: 16811 - DNA, 583 bp, Homo sapiens
  MAP TO AC007564.9; EXPRESSED IN HELA, SIGNAL = 1.3
aaatgctaacttgagagctatttgcataattcccatgtgaaaattaccagcatatattttacaatgataacatttgaaatatcagggcaaagaaaaagataccaccccagggatggagaaaattagcaaactgatccgtgaatagagttggactgaagctattattcacatcttttagccagaataaaaatattaactaccagcaagagaacaggatcctctgaacagacttaccatctctgataggtgagaacatgtcacctaaactacttttcccagtatcatcaaagctggagaaatcctgattttttccactgtctgtttccttagataaagtgtctgtgtttatgcttcgaggcaaaccttataggaattagatataaaaatcaatgttattacatctaaataaattttatcataagctaggttgtaaaaattaatgtatcactcatattgttggtaatattacaactatgagcataaggagaataaaacagaatatgacaagagctaaagttaatcaggattttcatggaacaataaaacagaatatgacaagagctaaagttaaccaggattttca

SEQ ID NO: 16812 - DNA, 596 bp, Homo sapiens
  MAP TO AC007462.2; EXPRESSED IN HELA, SIGNAL = 1.3
tattggcagagctacatgggaagtatttcatgtcctgtaataggtaattcctcagaggaaatcaataacttggcattcttgttttatacattgctgttatggagttagtaaatatcagtcaaacctgggaaatgaaaccgccctctgaaaatctaccaaatctcttcattgggcttgcctagctaaggggcagactctggactatggcatcagtagcaccctaagaagataggcagtttactgaccacacgcggacctagtgacccttactgtggaatgctgagtggaaatctgtggaacttctgcaaaataatatttcaattgctgcagaatgttatttgattgatatttacaaccttccattgtgtatgatcatgtttaaaatgtatatgtgtctatacattgctgtgaatgtgtatgtgtgtttatatatgtgcatttttgtaatgcatgatgtatttaatatataaatacatacttttggtgaacacgttcaggcaattcaaaaactagctaagtgaagcgtttccccttaccatacattccctcatcaatttactctgttctccatagataaccactaaaataatttggcg

SEQ ID NO: 16813 - DNA, 596 bp, Homo sapiens
  MAP TO AC008022.1; EXPRESSED IN HELA, SIGNAL = 1.8
  unsure 523
  unsure 553
aaaataacccgagaggctccagaaactaaaagaaaaaaaaagatcaatgactgggtttaacaagagattacacattattagagagagaattagaaattacctaaaatatttcaaagacagacagtaacaaaaaatataaaagaaagtctaagatacagagaggaaaaagtccaacatacgttttattcagagtataagaagggtgagagaatgggcagaagaaatattttaaaagataatcaccgagaattttccagaacaaatgaaagatgttgatcacgagtacccagtgaaaggcccagtgaaacccaatcgcactaagtggaagaaacccactcctagacacatcacagtgaaacttcacagaattatgacaaaagtaacagaagtgagggggaaaagaaaaccagagaaaattaagattaccttcaaagagtgtagttgtcttcccagcagaaacagtggaggctatagacaataaaatgatatcttcaatgaattcaaagaaaacaattgccaatcntagaattgtattatcagtgaaagcatcttntcaaaaatgagagcaaataaagccattttcagacaaaaactga

SEQ ID NO: 16814 - DNA, 572 bp, Homo sapiens
  MAP TO AL021707.2; EXPRESSED IN HELA, SIGNAL = 1.4
cgctccactttctcctctgtctcttaaataaaacaagggtttgtgaccactggccttaagtgcacagaactcctaccttccttgcccaggaacaaaacactgagtagttcttataacagtccacacgtctgtcctattgcactgtcagatctgaaggggaaaaacttgatgagatgtttggggaagtggcaagggcagacccactgtagaggccacagcacgtcacagaggactgaaggggctgaggcgagagggaggttgggcagaactgttacacatcggtcctccaactctgatgagcctctacctcttctggtaccaccagcaggagttcacagttctttcctcgcaaatgatgttttagaaacttcctatggaaaaagagatagagaaaatgaaatgctggcaagttgcaaattccagtctcaggaccacaaagtcacctgaaacctcactctaccctcggcagtccaaaacacatccctgtagtcatctggttttggagggttccacatttggttaccctccaatctgtccagttaaaattccaacctgaattttgctcatccttg

SEQ ID NO: 16815 - DNA, 572 bp, Homo sapiens
  MAP TO AL021707.2; EXPRESSED IN HELA, SIGNAL = 1.4
aggcagggagagaatccaagggcacaggaatttcatttcctttgtcaaataaccagagatgagctcagtgtccccaacctaagaaatgaagcagcctagcaacttagtcacaaaaggtgccgattacctgagctcgctctcgcctccaatccactcgggcatcttgagtttggagtcgaggttgtagtaggcccctcccacctctcgaacacagatccagtgctgccttttgaggggcagtttcagtggaccccagcataggctggagggcagattcatgatgaagcccatgacgttagtgagggcaatgacaccgacatccctgcaggggagaaatggtggcaggctctgatgcagcccattttccaaggttccctggctgtaataccacaactggctacctccccactcatgccatgagcccaagtactaaaagcttataccacaaccgtgctgttctccatcaagtcaagcctgattcagattacctgcgcttgtcccaccaaacagcttcatagcctttggtctgaagtgctgccataatgacattcacatcgtagttgccatttccc

SEQ ID NO: 16816 - DNA, 572 bp, Homo sapiens
  MAP TO AL021707.2; EXPRESSED IN HELA, SIGNAL = 1.2
tcctttaccatcaggaagcgtgcctcttctttaccatcactcacacacaggtgcctctcctttaccatcaggaagcgtgcctcttctttaccatccatcactcacacacaggtgcctctcctttaccatcaggaagcgtgcctcttctttaaccatcactcacacacaggtgcctctcctttaccatcaggaagcgtgcctcttctttgccatcactcacacacaggtgcctctcctttaccatcaggaagcgtgcctcttctttaaccatcactcacacacaggtgcctctcctttaccatcaggaagcgtgcctcttctttacccgcactcacacacaggtgcctctcctttaccatcagccatctctgggatgcagacggaaagacccggtggcattgccctgcagcctccgcacaggtaagatcgacatgcatggataaacgagcctcatccactcgtaaggagctctctgagccccgctctttgctttgtctttctcacttttcctcgtgtttcttcagactggcagtctagtggagtgattaagagcacagacttgggtgccagac

SEQ ID NO: 16817 - DNA, 565 bp, Homo sapiens
  MAP TO AL022319.2; EXPRESSED IN HELA, SIGNAL = 2.3
ttgcctccaaaggtaccaactcgaccagatacacataaataagaaaaagggaacagaaggaatagcagcataaaataaatagtacacactaagatggaaagaataaaagcagcatataaataattacactaaaagtaaatggactaaattctctccttaaaaggcagagactttctgagtggaggaaggttgtggagcaggtcatgtgccctggatcatgcttctctttgttcctccatagtccctggagacagccctcaagtactgcaactatatgttcaccactgtctttgtgctggaggctgtgctgaagctggtggcatttggtctgaggcgcttcttcaaggaccggtgagtggccaggctggattagggcagtaatagggtagactgcaggatgaagaagcagtcctgacccttagggaagtctggagcagcctgaagaggggaaccagtaagcatctaggcacggatggacaggcaccccagctgctgcttatagctctgaacaggaaataattatggtatcatctgatgggcgtagggcattctacctggcccttct

SEQ ID NO: 16818 - DNA, 578 bp, Homo sapiens
  MAP TO AL022327.17; EXPRESSED IN HELA, SIGNAL = 1.7
tgtcttacacagattggatgaaacatagtattatgtcactgttaatttttaaggactgttggaaaagacattgtttaccaataaatctgtcccgcagaatcacgagacttcaataaagacaattattttctttggatgcataaatctctcaactttagtcaaactcacgagctgtgaataacatttaccacctatttccagctcaacaaacatttgctgacaccattcgtgggagtggggctgtgggtgtcaggcgtctgcgcgaagctcgtgtgaactcacgtttattgctgatgggttcaggactagtttgcatccaaaccaaattaaacacgtagtggtcacagcaaacgtggaaacaaacaatatctgaaagttgggaatctgaaaaacaaggcaggaggggttttccttctttgaataataaaagaaaaaaggtaacagataaaccacacttcaggccattcactaaaaattatcctgattaggacataatggtggggagtcctgcgtgctcagcccgctctcccctctgtgcggcaaaggctgggctgggcaggagctttactgtctggggg

SEQ ID NO: 16819 - DNA, 578 bp, Homo sapiens
  MAP TO AL022318.2; EXPRESSED IN HELA, SIGNAL = 1.2
accgcctctcctttgattgtcatcttgattgatttgtggacaagacaacccaggcccctgccctctccaggactagggccagttcagaacccaaacccaatctgactcccctggagctctgactctgaacaaaataagacaaaaccagaaaacacggtcagagcaatgtggatcccagtggttgagacctccagggctgtgcatgggttcctgctcctggaccctgcactgtcactcgttcttgtgcttcctgagcccagattctgtaatttacccttcaaccccgtgagctctgttacgtttctcgttagctatggtccacttcttttgcttgaaaccgaagatccctaatggatagagaaggtgatacaagattccaggaaacaggaagcagagggaatgtgctgtggggagacagaggcgccacagccccctatcggcgacacctggctccaagcagtttttttctctggttcttaagcctctctcctccccgactcaccctccctccctgaaggtgtcttctctgcttttgcctttgagatggcctcttccttccccttttctggtctccttcc

SEQ ID NO: 16820 - DNA, 591 bp, Homo sapiens
  MAP TO AP000352.2; EXPRESSED IN HELA, SIGNAL = 1.5
tggagggaaattaagtatgctgttagctgtaaataccttttatcagattgctatggtttgaatgtatcccccacagtttatatgttggaaatgtaatccccgatgcaacagtgttgacaagtggaacctttaagagttaattaggtcatgagggatctgcctttatgagtggattaatgttgttattatgggaataggttcattattgcaaggatgggcttgttacagaagtgagttcatcccccttttgctttgtcatgctctctcacccttctgccttccaccacgcagtgatgcagtaaggcctttgccaggtactggcactggcgccatgctctttgactctccagtttccaggactgtgagccaatacattactgtttttttataaattacccaggctcagatattctgttatagcagcaccaaattgactaagatacagattgaggaggtctcttccactttgggtctactggcaggttttttttttttttaatcattacagtcatgcttcagagatattgtgggtttggttccagaccactgcaataaagtgaatatctatcacaataaagcaagtcacacaaa

SEQ ID NO: 16821 - DNA, 558 bp, Homo sapiens
  MAP TO Z95114.19; EXPRESSED IN HELA, SIGNAL = 1.9
tgattcttttctgatagtaagtcccaaatctgtcttttagccaatcttatccctccctgatcctctgagaaaccagactcctagatacggacctttcaaatgcttctttgcttctgggcttttaataatccccctgagattattcaccagctaaaggatggtggggacagaacagcacttgactgataaaggcccccatcctcctggtctgtcactctcacatcccaccgttccctggggtaccccctggaggccagcacacgacctctccagatccctgttgacaccacttgttggggaaaggcagctcgagcatcccatggacatccgtctgaaaggttggccccaatctggttccttccttgatggaggacgacattaaaagaagacaaaggagagaatttggggtgactgatctattgctgcttaggccaagtctaaccattgaaagtctccaaatctcacacctaagggtccctagctcttgtagaacaccacagagattttccagttcaaggttttggtctatcacacgatgggagaaagctggcaagaaga

SEQ ID NO: 16822 - DNA, 560 bp, Homo sapiens
  MAP TO Z95114.19; EXPRESSED IN HELA, SIGNAL = 1.8
ctgcagctccccataatttcacaatattggttgggatcccatcactccttcctctaattgggcttttgattcctctttcattctgtcaagtactgcctgtgttcccccattacatgaactagccttgacttccacttctgagggtattaaagcagacttacacagcatggaaaaaccctactttagtatcactgttgatatttgtcttaacatgacaaatcacatttttgtatagaaacaaggcatatctctgcttgtctgctaattaaacggggatttggccctagtttacatcatccccaaactcactcttatcgatagcattcccctccctatacacgctcaatctggtaaaactgaaagaggagttttaacagcactgactataattggcgttctggctggtattggcacgggaactggaggacctccttaactccatttttactgcccagaaactcttcttaaaaattactcaacaaattattaatctaactaaccaggtcaataccctttcagaacaaattgcttcattagcaagcatagtcttatgaaattga

SEQ ID NO: 16823 - DNA, 599 bp, Homo sapiens
  MAP TO Z82201.1; EXPRESSED IN HELA, SIGNAL = 1.2
cagtggtttcgtggaggtgggaggagggagtgatgatgaattgctaaagggcatatggaagatttttggggtggcgaaaatatttgatatcttgattgatatcttgtgatggttttatggatattgacatatgatgaatttcatcatattgtatcatttaaatgtgtgcagagtattgtatataaagtataccacaatgcagatacagtaaatgtaaaaaaagaattataaaaaattatatgactgaaggcaggggctcacaaagtgtggtctgaggacacttccagagcatcggcgaggccagaactagttttctgttaacactgaggtgtgatttaccttcttcactcgattcttttatgcatgtagagtcgagtccatcagaggcaacatgtgtgatcatgtcctcactctgaccacaaataaaatgtattcttgtgtagattgtgctttctaacatttttaaggttgtaggcttagggtgtaaatgagggactaggggtaggttttcagtgattaactcagtttctttatagcctttctaccaggctctctgctagagaccttcagttacacttgctataactgctgtaacctca

SEQ ID NO: 16824 - DNA, 566 bp, Homo sapiens
  MAP TO AC007092.4; EXPRESSED IN HELA, SIGNAL = 1.2
tcaaactttttcctgtaactctcaagagtaaacagaagtggtttacatgtgattcttgttaatgttaagatagtatccagtctcagttggagtggcagtatgaaaagatagagaaatattttcgattacatttaccttccttttcctttgaagattcaaattctctcattctctctcctctctccttttttttctctctctctccctcccttcctcctctcctcactgtctctcactctcccttttctcattccttcctcctacctttacctcactttctctttttctcttctccctatgcttctctttccatcttcctctccaacaccatctccctttctctctctgtctgtctaggagaaagattaaccctagaataaaaacaagagactttaggcgtcataatcatatttgaataccagctctaccgcctcccagctatgagccagggcattgacttaattgctcaaatttcagtgacctcatatctgcagtagacctacactccttctcatgtaaagctatggtgtggatcataaaaaagaacataaacaaagtgcccagca

SEQ ID NO: 16825 - DNA, 561 bp, Homo sapiens
  MAP TO AC007556.2; EXPRESSED IN HELA, SIGNAL = 1.6
tgccaatagaaaatgtgagtggtacagaaattggctggagggcccagagagggactatcccactgcagtgtggtggcagagatgatagtgtaaatgagggtgagtggccagctgacacgtggacgagaggtattgagaggatgcctaggctctgctgtcacctggcagagccacttccagttgctgggtattcaggttattcattctgtcaggacctaactgctgttctcacccgctttccagtgcccaacctttgcaaacagatctgcagccacctctgccttctgagacctggaggatacagctgtgcctgtccccaaggctccagctttatagaggggagcaccactgagtgtgatgcaggtaggagcactgcccaagcagctatgggggcctgggagcactcctctgctgccttcaggagtcagaagaatccctgtatgctgggtcctttgcagcagagtggggatggctggaaggagggttaagggatgtgggaggtatgaacagagttgagtgggacttagggggcaaacagaactgtgttccagtgactgctga

SEQ ID NO: 16826 - DNA, 564 bp, Homo sapiens
  MAP TO AC007539.8; EXPRESSED IN HELA, SIGNAL =   3
tttgggagctattggagagggtagtagaaatgtctttttaggacatttctaggctgacattggctttcttggactttagtcctttttggaaatttgttggttaggccatagattccccccacttccccctgcttctcaagtcaatgccaagggcatgcgtgcctgatgctccagccagccctcgaggtttcacccagagaatgaccacccttttctccatgcgctcctgatcttaacaccacatttctctttgggcaggtttaaggattaccgagagccgccatgggccccgaacccttatgagttttcgaaacagtactggtttattctgtccgcccgtctggcttttgtcataatcttccaggtgagttgctgggatagggaatagcccattcgaatccgggctgcaggagtaaggacactgcactcattgcttgcacctacctccaggttccggtggtactctgtgacataagaaagcttcatgtgtggcaggcagaagtgagggctcctttccgggttgaagcaggaggactcttgagagggctttctttaatgggtgga

SEQ ID NO: 16827 - DNA, 580 bp, Homo sapiens
  MAP TO AC008151.1; EXPRESSED IN HELA, SIGNAL = 1.2
ccaggtgggaagaaaaccagcagaatgagatagtgtgagagcatgggaggagaatgctttccatggggacagagagagtggtcggttgagtctcctttgtggctctttctcaagatggaaggttctagagcatgtttgaatattcttaggatgctccagcagagtggggtgactgcaggagagaaggccttgaggaggaagggaacaggacccagaactcaggtgaggggtggcctctgataggagcaagactaggcgggcaggcacagagcacaggcacagatgcaggtggattggataggggaggggacagtttctgtctggatcagctctattttctcagtgaagaacaaggtgagttcatctgctggccagtagccagcgtggagggggatgtgttagggaggcttgaggtgagagtaggagacataaagtgatatgaaaaagctctctgtgggtgagaaaccaaactgatcagcacatagcttctccccttctcttatcttcatgtaataatttccaacaggtaaaatgattgagtcgtgggtcctggccacatcaattcctcatttgtccctca

SEQ ID NO: 16828 - DNA, 573 bp, Homo sapiens
  MAP TO AC008151.1; EXPRESSED IN HELA, SIGNAL = 1.4
tcaaggcattcgtgtagagatgctataaatttaacatctacatataatttcaagtgagcaagacctacagatgcagaaactgcttacccaacagaaaggagcattgaggtgaatttggagagagactggggaaaaggtgggatttcctagtgtgcgaatcagaacctctgtataaggccatgccatgggagaatgtctagggaggctggccacagagcactccaagaaaaatgctgacctgggcaggagcaactctcacaacagaatgcatcctgtgcttcccccagaaagaagcctcctccctgatcctgctggcctttccctctccatctcccccaacccctgagtaagcccaggatcggcagaagagcctcagttccttcttccctaagggaccctctgtgatggtatctgccataaagcagccacagcagctttggactgcagtgtgggtcagacaatgccctgcagtcttggctcagccactcagcagctgcagggccctcagcaagccacccacctctcttggctacatcttcctgtgtcaggaaggccatcttgccatcactgttg

SEQ ID NO: 16829 - DNA, 548 bp, Homo sapiens
  MAP TO AC007539.8; EXPRESSED IN HELA, SIGNAL = 1.6
tgggtcatgaaacgtcacacagcagataaataatggcagagctcaggtcgctgtgcatttcatgagtgcttgtcaaccagtggtgatggtgagccctgactcgggcagtcctgggatacctgcccaaatgaataaggggtgaaagaagaggacacaagggtggctccctttgggaagagcagaagttgaggctctcgttccttcccttctgtcttcactccttccctaccatcaatgtttctctactgcatgatgaacaaagatgggtgggaaagagagaaagactctcttcatttctgttatgtattcattgtcctggtagctttttccaggttgcctactcttttcagtgaggtaggtttctcttctctttcccagcctcaaccttcactattctgtttctgtatcagaagacaatcaaaacctaacacatcatccacaaattctgacctggcatgtccaggattccagagggccctggttaccctttgtccagggcctgcagttgggtgatgatgatgagaccaaggagagggcaagctcttaca

SEQ ID NO: 16830 - DNA, 587 bp, Homo sapiens
  MAP TO AC008022.1; EXPRESSED IN HELA, SIGNAL = 2.6
  unsure 56
  unsure 428
tacgctgaattctgaagggcagtgaccatgcaaacccctcacaggtctggcatgcnagagagcagaggaaacccatgcccctgtatttaggcaaggctcagaggctttggcactcactgagtaaggccctggaatgtagacttaattctggggagatggggttggaggagagaccttgaattgcatggaattagtctctaacagagggttgcattataaattaagatgattagagaacaggtaagttgcattctttacatacctgagcttgaaaactgagaattgtcctcataacaaatagaagaattctgattttatttctttgctttggtggtggtgctggttggattttgatgttggccatgagccccggggatttccttaagcatgatcctcggaagctgtctcactttctccctggctttgcntctccacagggctgctgaccaccagcagcacggacctctggaggccaaaacaggcctgacagtcacagatgtgtttgccatctcatctttatgtgagtggagtaaggaaagatgaaagccacagaatgagacctttctggacatgactgtacaggagcc

SEQ ID NO: 16831 - DNA, 575 bp, Homo sapiens
  MAP TO AL022327.17; EXPRESSED IN HELA, SIGNAL = 1.8
aagaaaatgaaatatgtcaacaacacaataaacaaatctggcccaactcatgatactgaacaatttcagaattacatattatttgcaccaagaaatatttacaaaaattgatgaccaaaagcaactgacaatcatctaatgactcacaatcctccatctgacatgtactcctccatctgacatgcactcctccatctgacgtgcactcctccatctgatgtgcactcctccatctgacgtgcactcctccatctgacgtgcacacctccatctaacgtgccctcctccatctgatgacgtgcactcctccatctgacgtgcattcctccatctgacaatgtgtactcctccatctgacgtgcactactccatctgacgaaatgcactcctccatcagatgatgtgtactcctccatctgacatgcactcctccatctgacaacatgcactcctccatctgatgatgtgtactcctccatctgacatgcactcctccatctgacaacgtgcactcctccatttgacgtgaactcctccatctaacgacgtgtacccctccatctgacaacgtgcac

SEQ ID NO: 16832 - DNA, 566 bp, Homo sapiens
  MAP TO AC008022.1; EXPRESSED IN HELA, SIGNAL = 1.2
  unsure 227
gaaagcccaaaaacactactttacatttacagactctggatttattacgaaggagacactacagataaagggtaaactttccaataaatggtactgggattcatggatatgacatgaaaaatatgtaattcgactatcactttacacaatgcataaaaatcaattgcaatggatgtccttagactgggtaatttacaaaggaaagaggtttcattggttcatggttnctggaaacatgatgctggcatcggctcagtttctgcagtggtctcaggaaacttacaatcatggcggaaggtgaaggaggagcaggcatgtcacagagcccaagtaggagcaagagagagagaatggcgggaggtgctacacacttttaaacaaccagatctcatgagaactcactcactatcaggagaacagcaccaagtggatggtgataattcattcatgaaggatccacctccatgatccaatcacctcccaccaggctccacctccaacactggggattatgattagatgtgagatttgggcagggacacagatccaaaccatatcaatgggct

SEQ ID NO: 16833 - DNA, 569 bp, Homo sapiens
  MAP TO AL079295.1; EXPRESSED IN HELA, SIGNAL = 5.8
caatgagccattttcaatttcctttcactagcagtggcatgacccatatcccatctcaccccagcccttccccactccatactctggataaaatttttaatgaaccctgtttttactgctccagcaaatcctaacccctttcatctctaaacctcaacaacatttgctggtcttggttcactcatttttttttaatcttaaatacatacttcttttttgttaattccatgtttgtaggtcttgtatcctgaatgagactgcaaattgtactcaacgtaaaggcctagtgggcaatgacacatcttatctcagcatcatcagttggtcatgccaactgactggcatataacaggcacataataaacattatggaactatttgttgaggtgatctggatggcagaaacagcatactacgtatacttctcttatatgaatctctcagagcacaccactgggaaagcccaacataaagtgtggcagagctaaatcacaagcaactcctcaagagaggaagggagaagaacatgagcattcattaataccaacccatctttcattagattccca

SEQ ID NO: 16834 - DNA, 564 bp, Homo sapiens
  MAP TO AC008166.1; EXPRESSED IN HELA, SIGNAL =  21
tggaacctttgtgttctcccttatatctatataagttccagactttattcaagggccaacccatgcctcatcttttccatgaagttcctagtaatgtaactctctatcttgtcttttccccttttatattctttggtgttctgtagtggttgagagcaaatactcagaattagacagccttacttcaaatgtcagctgcatgaccctgaggaagttccttaacctttctaagtatgtttcctaatctataaacaaatacattaaagcatatgatatacttcactgggctttgattgaaaattccaggtcataattcagttcaactacttaatatatagctgatacatactaaaaattcaataaatattgatatttagctacatttactattatcacataatttattaattcatgtgtttaaactgtgtcatgggggaaaatatatcttcctaatcactatgctacgtaagcttatcaaggataggaactatgtgctacacttgcttttaaatttcttataaaatatagcttagaaatgagacactggatgaatataaaatgtga

SEQ ID NO: 16835 - DNA, 318 bp, Homo sapiens
  MAP TO AC007463.3; EXPRESSED IN PLACENTA, SIGNAL = 1.5; EXPRESSED IN BT474, SIGNAL = 1.1; EXPRESSED IN BONE MARROW, SIGNAL = 1.4; EXPRESSED IN FETAL LIVER, SIGNAL = 1.1; EXPRESSED IN LUNG, SIGNAL = 1.3; EXPRESSED IN HELA, SIGNAL = 1.2; EXPRESSED IN ADULT LIVER, SIGNAL =   1; EXPRESSED IN BRAIN, SIGNAL = 1.5; EXPRESSED IN HEART, SIGNAL = 1.3; EXPRESSED IN HBL100, SIGNAL = 1.1; NT HIT: AL163248.2, EVALUE 7.00e-32; EST_HUMAN HIT: R17795.1, EVALUE 0.00e+00; SWISSPROT HIT: P44737, EVALUE 8.90e-01
aaaccagaagctgccacaaatgatggtgctaaatctgtgcttgaaatggtgggacagaaatgcaaggtgactttacaaaggatggatgatttgagtctctgttcctatatccatgatttgactgtgcaaaagaagtccttactacttctccacccaccaattctggtgacagttagggggtttgtggccctagcctacatcattctcccctgctggatgcttcctgctcttgaacatcggactccaggttcttcagttttgggactcggactggctctccttgctcttcagcttgcagatggcctattgtgggatctt

SEQ ID NO: 16836 - DNA, 83 bp, Homo sapiens
  MAP TO AC007403.2; EXPRESSED IN HEART, SIGNAL = 2.3; EXPRESSED IN HELA, SIGNAL = 4.1; EXPRESSED IN ADULT LIVER, SIGNAL = 3.3; EXPRESSED IN BRAIN, SIGNAL =   3; EXPRESSED IN BT474, SIGNAL = 2.7; EXPRESSED IN BONE MARROW, SIGNAL = 3.2; EXPRESSED IN HBL100, SIGNAL = 2.7; EXPRESSED IN FETAL LIVER, SIGNAL = 2.8; EXPRESSED IN PLACENTA, SIGNAL = 2.4; EXPRESSED IN LUNG, SIGNAL = 3.7; NT HIT: AL163207.2, EVALUE 3.00e-15; EST_HUMAN HIT: T64110.1, EVALUE 5.00e-17
gaagatcaaaccagcccacatcctaatccagaccaaggccctaattctcttcaattctatgaaggccgtgagaggtgaggaag

SEQ ID NO: 16837 - DNA, 128 bp, Homo sapiens
  MAP TO AC007393.3; EXPRESSED IN BT474, SIGNAL = 0.99; EXPRESSED IN FETAL LIVER, SIGNAL = 1.2; EXPRESSED IN HELA, SIGNAL = 1.2; EXPRESSED IN ADULT LIVER, SIGNAL = 1.1; EXPRESSED IN PLACENTA, SIGNAL = 0.87; EXPRESSED IN BONE MARROW, SIGNAL = 0.7; EXPRESSED IN HBL100, SIGNAL = 1.1; EXPRESSED IN LUNG, SIGNAL = 1.3; EXPRESSED IN BRAIN, SIGNAL = 1.8; EXPRESSED IN HEART, SIGNAL = 0.93; NT HIT: AF081459.1, EVALUE 3.00e-66; SWISSPROT HIT: O43913, EVALUE 8.00e-20; EST_HUMAN HIT: BF203982.1, EVALUE 1.00e-56
atgtctgagctctttcaaatctcgacaaacagtgtagaaaactccaagaagaatgttaatgtaggcagcatagaaatcagctgaatactctggaggatgatcatgggacaggatcttttgaaggttgc

SEQ ID NO: 16838 - DNA, 182 bp, Homo sapiens
  MAP TO AC007392.3; EXPRESSED IN BT474, SIGNAL = 1.8; EXPRESSED IN BONE MARROW, SIGNAL = 7.6; EXPRESSED IN LUNG, SIGNAL = 3.4; EXPRESSED IN ADULT LIVER, SIGNAL =   3; EXPRESSED IN HELA, SIGNAL =   3; EXPRESSED IN FETAL LIVER, SIGNAL = 2.8; EXPRESSED IN HBL100, SIGNAL = 6.1; EXPRESSED IN PLACENTA, SIGNAL = 2.2; EXPRESSED IN HEART, SIGNAL = 2.8; EXPRESSED IN BRAIN, SIGNAL = 4.2; NT HIT: X77665.1, EVALUE 9.10e-02; SWISSPROT HIT: Q91740, EVALUE 6.40e+00; EST_HUMAN HIT: AI306564.1, EVALUE 2.50e+00
tggtaaatattatctcctaagtagtactgtttgaaaatcacatctactcgtcttccagtgtatctggtacctggactatctaactggtacctggaccgttctccacttatgtttcctttgggtgaagatttcaaagatttctggtaaaaccaaatgtgctcttggggaaagtatatcatgaa

SEQ ID NO: 16839 - DNA, 229 bp, Homo sapiens
  MAP TO AC007392.3; EXPRESSED IN BT474, SIGNAL = 1.8; EXPRESSED IN HELA, SIGNAL = 1.3; EXPRESSED IN ADULT LIVER, SIGNAL = 1.1; EXPRESSED IN BONE MARROW, SIGNAL = 1.4; EXPRESSED IN HBL100, SIGNAL = 1.7; EXPRESSED IN FETAL LIVER, SIGNAL = 1.4; EXPRESSED IN LUNG, SIGNAL = 1.2; EXPRESSED IN BRAIN, SIGNAL = 1.1; EXPRESSED IN PLACENTA, SIGNAL = 1.4; EXPRESSED IN HEART, SIGNAL = 1.5; EST_HUMAN HIT: AI732278.1, EVALUE 2.10e-01; NT HIT: L22219.1, EVALUE 5.50e-01; SWISSPROT HIT: P51610, EVALUE 3.90e+00
atcttttccccaaactggagttaagtggacaggaataagaatggatactgggaagagaccactaggctttcgtagctgccaaacaatgatgataacaatagtgatgatgatcataataaaaatcatcatagttaccatttattatgtgctgtgtgccaggtgtgtaagctttgtacatttttcttgtttagtcccccaaatccttaaagtacttgtgttggcacccatt

SEQ ID NO: 16840 - DNA, 215 bp, Homo sapiens
  MAP TO AC007392.3; EXPRESSED IN FETAL LIVER, SIGNAL =  16; EXPRESSED IN HEART, SIGNAL =  17; EXPRESSED IN PLACENTA, SIGNAL = 6.7; EXPRESSED IN BT474, SIGNAL =  40; EXPRESSED IN BONE MARROW, SIGNAL = 9.3; EXPRESSED IN HBL100, SIGNAL =  19; EXPRESSED IN LUNG, SIGNAL =  11; EXPRESSED IN HELA, SIGNAL =  18; EXPRESSED IN ADULT LIVER, SIGNAL =  11; EXPRESSED IN BRAIN, SIGNAL =   9; SWISSPROT HIT: P97367, EVALUE 5.00e-18; EST_HUMAN HIT: BE613007.1, EVALUE 1.00e-105; NT HIT: gi4505150, EVALUE 1.00e-105
ggctgcaaagtatgccaggggagtatgtagcccggggtggtccaatgggtgtgagtatgggacagccaagttatacccaaccccagatgcccccccatcctgctcagctgcgtcatgggccccccatgcatacgtacattcctggacaccctcaccacccaacagtgatgatgcatggaggaccgccccaccctggaatgccaatgtcagcatca

SEQ ID NO: 16841 - DNA, 227 bp, Homo sapiens
  MAP TO AC007382.2; EXPRESSED IN HELA, SIGNAL = 5.9; EXPRESSED IN FETAL LIVER, SIGNAL = 3.9; EXPRESSED IN LUNG, SIGNAL = 6.2; EXPRESSED IN HEART, SIGNAL = 3.9; EXPRESSED IN BT474, SIGNAL = 3.8; EXPRESSED IN BONE MARROW, SIGNAL = 5.4; EXPRESSED IN ADULT LIVER, SIGNAL = 4.8; EXPRESSED IN BRAIN, SIGNAL = 5.5; EXPRESSED IN PLACENTA, SIGNAL = 4.7; EXPRESSED IN HBL100, SIGNAL = 4.1; SWISSPROT HIT: O42163, EVALUE 3.00e-12; EST_HUMAN HIT: BE743922.1, EVALUE 1.00e-125; NT HIT: M15892.1, EVALUE 5.40e-01
cttgtttgcaaagttgggctccaccacatactgcttctcattttcagcagcaccttcaatggtgatgaagaaaatgttgattcctgactctctcgcaagtcttgaagcctcctccactttgtccgtgggccagccatccaccatcaccaccaccacattgggagccccgcttctgtttccattggctttggaaaagaagttcttggtcacaaaggagatggcccgac

SEQ ID NO: 16842 - DNA, 107 bp, Homo sapiens
  MAP TO AC007372.4; EXPRESSED IN HEART, SIGNAL = 2.6; EXPRESSED IN BT474, SIGNAL =   2; EXPRESSED IN BONE MARROW, SIGNAL = 3.5; EXPRESSED IN HELA, SIGNAL = 3.4; EXPRESSED IN BRAIN, SIGNAL = 2.9; EXPRESSED IN PLACENTA, SIGNAL = 2.3; EXPRESSED IN HBL100, SIGNAL = 2.4; EXPRESSED IN FETAL LIVER, SIGNAL = 2.3; EXPRESSED IN LUNG, SIGNAL = 2.6; EXPRESSED IN ADULT LIVER, SIGNAL = 2.7; NT HIT: AL163303.2, EVALUE 4.00e-15; EST_HUMAN HIT: W92224.1, EVALUE 7.00e-14
cttcagtgaaggaagtcactgtggatatgacagaaatagtaagagaactagagttagaagtggcgcccgaagatgtgactggattgctgcaatctcatactaaaact

SEQ ID NO: 16843 - DNA, 338 bp, Homo sapiens
  MAP TO AC007372.4; EXPRESSED IN ADULT LIVER, SIGNAL = 1.3; EXPRESSED IN BRAIN, SIGNAL = 0.95; EXPRESSED IN HEART, SIGNAL = 1.1; EXPRESSED IN PLACENTA, SIGNAL = 1.7; EXPRESSED IN BT474, SIGNAL = 1.7; EXPRESSED IN HELA, SIGNAL = 2.5; EXPRESSED IN LUNG, SIGNAL = 1.7; EXPRESSED IN FETAL LIVER, SIGNAL = 1.2; EXPRESSED IN HBL100, SIGNAL = 1.7; EXPRESSED IN BONE MARROW, SIGNAL = 1.8; SWISSPROT HIT: P26809, EVALUE 3.00e-03; NT HIT: AL163246.2, EVALUE 1.00e-100; EST_HUMAN HIT: AI216352.1, EVALUE 3.00e-77
gttatctgcagaagatggcagggccatgctccaaaatcctacaggcctctgctgtgattcacctatgagggcctgccaaaggctccaaacagcatctctatctgccactaacacctcaagcatgattggatctgttgggtcatatggcccaagtggaagagcagcttgcacagcagcctggaccttttgcagaaccttctccggttctggattccactcaaaaatggcagccttttgaatcactagataaaggggctggagtagcccacccaaatgaggaatgtgttgcctccaaaatccaaatagacccactaggcgttgtgcctctttcttggttg

SEQ ID NO: 16844 - DNA, 202 bp, Homo sapiens
  MAP TO AC007372.4; EXPRESSED IN BT474, SIGNAL = 0.75; EXPRESSED IN HBL100, SIGNAL = 0.8; EXPRESSED IN LUNG, SIGNAL = 0.77; EXPRESSED IN HELA, SIGNAL = 1.4; EXPRESSED IN ADULT LIVER, SIGNAL =   1; EXPRESSED IN BRAIN, SIGNAL = 1.6; EXPRESSED IN PLACENTA, SIGNAL = 1.4; EXPRESSED IN BONE MARROW, SIGNAL = 0.89; EXPRESSED IN FETAL LIVER, SIGNAL = 1.2; EXPRESSED IN HEART, SIGNAL = 1.5; EST_HUMAN HIT: BE770446.1, EVALUE 1.00e-110; NT HIT: AF093774.1, EVALUE 1.00e-110; SWISSPROT HIT: Q92813, EVALUE 2.00e-34
acacgttcaaaggctaccccgtaagctatgttggcgttattgtccatgcggtcagccacaactcggcactggggcggcaaggagaaacgctccagaagctgctgggctgctgcacatcgatcttcctggttctggtgcttcttcacctcaaaagacaaagaggagtcccccggtatcgcccagccatctgatggatgagcct

SEQ ID NO: 16845 - DNA, 517 bp, Homo sapiens
  MAP TO AC007363.3; EXPRESSED IN BONE MARROW, SIGNAL = 2.6; EXPRESSED IN HBL100, SIGNAL = 1.8; EXPRESSED IN ADULT LIVER, SIGNAL = 1.8; EXPRESSED IN BRAIN, SIGNAL = 1.9; EXPRESSED IN BT474, SIGNAL = 1.9; EXPRESSED IN LUNG, SIGNAL = 2.3; EXPRESSED IN HELA, SIGNAL = 2.5; EXPRESSED IN PLACENTA, SIGNAL = 2.5; EXPRESSED IN FETAL LIVER, SIGNAL = 2.3; EXPRESSED IN HEART, SIGNAL = 2.5; EST_HUMAN HIT: BF037138.1, EVALUE 0.00e+00; NT HIT: AF069553.1, EVALUE 2.80e-01; SWISSPROT HIT: O43405, EVALUE 1.00e-49
ccttcagatgggcagccatggctgggatccggacgtcgtcgtaggacctcccgtcggtgatgaggatcattaacttcctcttgttgggcttggacttcttgaagagctgctccagggcgaagttgatggcagcccccgtgctggtgccaccactccagtagcccaccctcttgatggcgttgaggatgtcaggcttgctgctgtacttgtcgaacccaaactccagccgctgttcgtaggtgtactgcacggccccgatgcgcgtgtccgtgtcggaaatctcaaactctttggtgaggttggtcacaaactggaggacggtgcggaagttgcccgtccccacactgctggagccgtcgatgacgaagccaatgtcagccgagttcaagcaggtcttgctgcaggccaggcggtcagtgtcgcagacccgcttcaccagaggctgcagggtcttgtggaggccaaaccagctctgcacgtggagcgagtagaagccgtttgttctgcacacggccta

SEQ ID NO: 16846 - DNA, 249 bp, Homo sapiens
  MAP TO AC007263.3; EXPRESSED IN HBL100, SIGNAL = 8.3; EXPRESSED IN FETAL LIVER, SIGNAL =   7; EXPRESSED IN HELA, SIGNAL = 8.1; EXPRESSED IN ADULT LIVER, SIGNAL = 7.5; EXPRESSED IN PLACENTA, SIGNAL = 8.8; EXPRESSED IN LUNG, SIGNAL = 9.5; EXPRESSED IN HEART, SIGNAL = 3.4; EXPRESSED IN BRAIN, SIGNAL = 9.2; EXPRESSED IN BT474, SIGNAL = 7.6; EXPRESSED IN BONE MARROW, SIGNAL = 6.1; NT HIT: AF164623.1, EVALUE 5.10e-01; EST_HUMAN HIT: AW846120.1, EVALUE 1.00e-02; SWISSPROT HIT: Q12329, EVALUE 4.80e+00
tggtggcggtggtggtagtggtggtggtggtggtggtggtggtggtggtggtggtggtggtggtcgtggtggtggtgttggtgttggtggtgttggtgttggtgttggtgatggtggtggtggtggtggtcgtggtggtggtagtgatggtggtggtggtggtgcatgtgtgttggcatgggcatgggagcaggagcccgaagaatagcatagctcagcagaactttctgcagtggtggaagtactctg

SEQ ID NO: 16847 - DNA, 543 bp, Homo sapiens
  MAP TO AC007263.3; EXPRESSED IN BT474, SIGNAL = 3.3; EXPRESSED IN HBL100, SIGNAL = 1.1; EXPRESSED IN FETAL LIVER, SIGNAL = 1.6; EXPRESSED IN HELA, SIGNAL = 1.3; EXPRESSED IN ADULT LIVER, SIGNAL = 1.4; EXPRESSED IN PLACENTA, SIGNAL = 1.1; EXPRESSED IN BONE MARROW, SIGNAL = 2.6; EXPRESSED IN LUNG, SIGNAL = 1.6; EXPRESSED IN HEART, SIGNAL = 1.4; EXPRESSED IN BRAIN, SIGNAL =   1; SWISSPROT HIT: O00409, EVALUE 5.00e-97; EST_HUMAN HIT: BE676347.1, EVALUE 0.00e+00; NT HIT: gi4885136, EVALUE 0.00e+00
atgggtccagtcatgcctcccagtaagaagccagaaagctcaggaattagtgtctccagtggactgagtcagtgttacgggggcagcggtttctccaaggcccttcaggaagacgatgacctcgacttttctctgcctgacatccgattagaagagggggccatggaagatgaagagctgaccaacctgaactggctgcacgagagcaagaacttgctgaagagctttggggagtcggtcctcaggagtgtcagccccgtccaggacctggacgatgacacccccccatcccctgcccactctgacatgccctacgatgccaggcagaaccccaactgcaaacccccctactccttcagctgcctcatatttatggccatcgaggactctccaaccaagcgcctgccagtgaaggatatctacaactggatcttggaacattttccgtattttgcaaatgcacctactgggtggaaaaactcagtgagacacaatttatcattgaataagtgttttaagaaagtggacaaagagaggagtcag

SEQ ID NO: 16848 - DNA, 111 bp, Homo sapiens
  MAP TO AC007253.2; EXPRESSED IN PLACENTA, SIGNAL = 1.6; EXPRESSED IN HBL100, SIGNAL = 1.6; EXPRESSED IN FETAL LIVER, SIGNAL = 1.1; EXPRESSED IN LUNG, SIGNAL = 1.3; EXPRESSED IN BT474, SIGNAL = 1.4; EXPRESSED IN BONE MARROW, SIGNAL =   2; EXPRESSED IN HELA, SIGNAL = 1.7; EXPRESSED IN ADULT LIVER, SIGNAL = 1.1; EXPRESSED IN BRAIN, SIGNAL = 1.2; EXPRESSED IN HEART, SIGNAL = 1.4; EST_HUMAN HIT: AA714294.1, EVALUE 3.00e-26; NT HIT: AL163209.2, EVALUE 4.00e-31
ggtccccggactcatcctgtggtcatttccccagtgccagaatgcataattagcacagacatacttagcaactggcagaacccccacattggctccccaactggtggggtg

SEQ ID NO: 16849 - DNA, 117 bp, Homo sapiens
  MAP TO AC007252.2; EXPRESSED IN BONE MARROW, SIGNAL = 6.6; EXPRESSED IN HBL100, SIGNAL = 4.7; EXPRESSED IN ADULT LIVER, SIGNAL = 4.2; EXPRESSED IN BRAIN, SIGNAL = 6.1; EXPRESSED IN BT474, SIGNAL = 4.9; EXPRESSED IN PLACENTA, SIGNAL = 6.7; EXPRESSED IN HEART, SIGNAL =   6; EXPRESSED IN HELA, SIGNAL = 4.6; EXPRESSED IN LUNG, SIGNAL = 5.1; EXPRESSED IN FETAL LIVER, SIGNAL = 4.7; NT HIT: U91328.1, EVALUE 5.50e-02; EST_HUMAN HIT: AA334947.1, EVALUE 5.00e-59
attattttggggagcttgttgttttttaatgtagggttcaagtcctgtagtgaaatctgtttcatatttgcaatcagttttcagctcctggaagaatcccaaattggtaagtccctg

SEQ ID NO: 16850 - DNA, 149 bp, Homo sapiens
  MAP TO AC007243.2; EXPRESSED IN HELA, SIGNAL = 2.2; EXPRESSED IN BT474, SIGNAL = 3.1; EXPRESSED IN BONE MARROW, SIGNAL = 4.7; EXPRESSED IN HBL100, SIGNAL = 2.7; EXPRESSED IN FETAL LIVER, SIGNAL = 3.1; EXPRESSED IN LUNG, SIGNAL = 3.2; EXPRESSED IN ADULT LIVER, SIGNAL = 2.9; EXPRESSED IN BRAIN, SIGNAL = 3.8; EXPRESSED IN PLACENTA, SIGNAL = 4.2; EXPRESSED IN HEART, SIGNAL = 3.1; NT HIT: AL163227.2, EVALUE 4.00e-16; EST_HUMAN HIT: AI831462.1, EVALUE 8.00e-27; SWISSPROT HIT: P18102, EVALUE 5.10e+00
aagttatttccaagggcactgcccctgacccctccagatctcacgtcctcacatttcaaaacaacctcagcctggactttatcgtccatatcactatcagcgttttgggcaaagctgttaaacaagtctctaggaagttccaaactttc

SEQ ID NO: 16851 - DNA, 101 bp, Homo sapiens
  MAP TO AC007243.2; EXPRESSED IN PLACENTA, SIGNAL =   1; EXPRESSED IN BT474, SIGNAL = 0.97; EXPRESSED IN LUNG, SIGNAL = 1.1; EXPRESSED IN HELA, SIGNAL = 1.4; EXPRESSED IN ADULT LIVER, SIGNAL = 0.84; EXPRESSED IN BRAIN, SIGNAL = 1.5; EXPRESSED IN HEART, SIGNAL = 0.92; EXPRESSED IN BONE MARROW, SIGNAL = 0.75; EXPRESSED IN FETAL LIVER, SIGNAL = 0.9; EXPRESSED IN HBL100, SIGNAL = 0.93; EST_HUMAN HIT: AU136741.1, EVALUE 3.00e-04; NT HIT: AL163207.2, EVALUE 6.00e-08
tggcgtgctctcaatgaccagccacttgtgtcttcttccccggatgtgttcctctccacatctagctgcttctgtgtgtctgcccactagggtctcgggtt

SEQ ID NO: 16852 - DNA, 154 bp, Homo sapiens
  MAP TO AC007182.3; EXPRESSED IN PLACENTA, SIGNAL = 1.6; EXPRESSED IN BT474, SIGNAL = 6.7; EXPRESSED IN BONE MARROW, SIGNAL = 0.94; EXPRESSED IN HBL100, SIGNAL = 4.7; EXPRESSED IN FETAL LIVER, SIGNAL =  13; EXPRESSED IN LUNG, SIGNAL = 3.6; EXPRESSED IN HELA, SIGNAL = 4.8; EXPRESSED IN ADULT LIVER, SIGNAL = 3.9; EXPRESSED IN BRAIN, SIGNAL = 3.6; EXPRESSED IN HEART, SIGNAL = 1.9; EST_HUMAN HIT: AI906282.1, EVALUE 1.00e-81; SWISSPROT HIT: P25073, EVALUE 6.80e+00; NT HIT: gi6005718, EVALUE 1.00e-81
aagaggagagacgacgaaggaagaagatggccaaggtggaaaacgagaaagtcctggaggtgataatgctggcctcagtttctcttcttctgtctggatactggttctacttctagataccggagcccgaccagcatacccaggatggagaaac

SEQ ID NO: 16853 - DNA, 134 bp, Homo sapiens
  MAP TO AC007182.3; EXPRESSED IN PLACENTA, SIGNAL =   1; EXPRESSED IN FETAL LIVER, SIGNAL = 0.98; EXPRESSED IN LUNG, SIGNAL = 0.88; EXPRESSED IN HELA, SIGNAL = 0.69; EXPRESSED IN BRAIN, SIGNAL = 3.3; EXPRESSED IN HEART, SIGNAL = 1.6; EXPRESSED IN ADULT LIVER, SIGNAL = 1.5; EXPRESSED IN BONE MARROW, SIGNAL = 1.1; EST_HUMAN HIT: BE086735.1, EVALUE 3.00e-01; SWISSPROT HIT: O19179, EVALUE 5.20e+00; NT HIT: gi8923349, EVALUE 8.00e-57
gtatttgggatcatctttaccatctcccagggccagattattgacaactatggaaccaagcctgggaacatcttcctgtgtgtgttccttactcttggagcagccctcactggtgagttggagcctgagggcaa

SEQ ID NO: 16854 - DNA, 169 bp, Homo sapiens
  MAP TO AC007182.3; EXPRESSED IN PLACENTA, SIGNAL = 6.7; EXPRESSED IN LUNG, SIGNAL = 9.5; EXPRESSED IN HELA, SIGNAL =  14; EXPRESSED IN BT474, SIGNAL = 7.3; EXPRESSED IN HBL100, SIGNAL =  17; EXPRESSED IN FETAL LIVER, SIGNAL =  14; EXPRESSED IN BRAIN, SIGNAL =  11; EXPRESSED IN BONE MARROW, SIGNAL =  10; EXPRESSED IN ADULT LIVER, SIGNAL = 5.4; EXPRESSED IN HEART, SIGNAL = 7.9; NT HIT: X07990.1, EVALUE 3.30e-01; SWISSPROT HIT: P10220, EVALUE 7.50e-01
atggctaagaacagtagctgaggggtttggacctgcttccttcctctgagagggctgacaccttgaagttctttaagcagggacggtggggtcaatgcaacgccaaggaccatgaatgtgagtacatcatgcaggtcgggcagaggagagatcacagttgcctgggaga

SEQ ID NO: 16855 - DNA, 681 bp, Homo sapiens
  MAP TO AC007182.3; EXPRESSED IN PLACENTA, SIGNAL = 3.3; EXPRESSED IN BT474, SIGNAL = 1.4; EXPRESSED IN LUNG, SIGNAL = 1.6; EXPRESSED IN FETAL LIVER, SIGNAL = 2.8; EXPRESSED IN BONE MARROW, SIGNAL = 0.66; EXPRESSED IN HELA, SIGNAL = 0.72; EXPRESSED IN ADULT LIVER, SIGNAL = 3.9; EXPRESSED IN BRAIN, SIGNAL = 0.72; EXPRESSED IN HEART, SIGNAL = 1.3; NT HIT: gi11434933, EVALUE 0.00e+00; EST_HUMAN HIT: BE281496.1, EVALUE 0.00e+00; SWISSPROT HIT: Q11073, EVALUE 9.00e-18
gagactgtggcgatggtgaatgaaggtcccaaccaggaagagagcgatgacacccctgtgccggagtccgcactccaagcggaccccagcgtctcggtccatcccagcgtctcggtccatcccagcgtctccatcaaccccagcgtctctgtccaccccagcagttcggcccaccccagtgccttagcccaacccagtggcttggctcaccccagtagctcgggccctgaggacctcagcgtgatcaaggtgagcaggcgccgttgggccgtggtcctggtgtttagctgctactccatgtgcaactcctttcagtggatccagtacggctccatcaataacatcttcatgcacttctacggtgtcagtgcctttgccattgactggctgtccatgtgctacatgctgacttacatccctctgctcctgccagtggcttggctgctggagaagttcggcctgcgcaccattgctctcactggctcggctctcaactgcctgggggcctgggtgaagctgggcagcctgaagccgcatctctttccggtcaccgtggtgggccagctcatctgctctgtggcccaggttttcatcctgggcatgccctcccgcatcgcttccgtctggttcggggctaatgaggtttcaacagcctgctccgtggctgtctttggcaatcag

SEQ ID NO: 16856 - DNA, 169 bp, Homo sapiens
  MAP TO AC007132.2; EXPRESSED IN PLACENTA, SIGNAL = 9.9; EXPRESSED IN BONE MARROW, SIGNAL =  11; EXPRESSED IN LUNG, SIGNAL = 9.4; EXPRESSED IN HELA, SIGNAL = 7.1; EXPRESSED IN ADULT LIVER, SIGNAL = 6.9; EXPRESSED IN BT474, SIGNAL = 5.7; EXPRESSED IN HBL100, SIGNAL =  10; EXPRESSED IN FETAL LIVER, SIGNAL = 8.8; EXPRESSED IN BRAIN, SIGNAL =  11; EXPRESSED IN HEART, SIGNAL = 8.3; SWISSPROT HIT: P19137, EVALUE 1.30e+00; EST_HUMAN HIT: AA705346.1, EVALUE 5.00e-26; NT HIT: U93163.1, EVALUE 1.00e-31
gtccttcaggaagtattccagaagaaagcattgttatcataggagaggacatctccacgggtgttattgtccctgaagactttccggtgggacaagatacagaggtggaagacagtgatatgcatgatcttgaccttgtgtaggcctaggataatgtgtgtgtttgtgt

SEQ ID NO: 16857 - DNA, 175 bp, Homo sapiens
  MAP TO AC007132.2; EXPRESSED IN BT474, SIGNAL = 1.2; EXPRESSED IN HELA, SIGNAL = 0.77; EXPRESSED IN BONE MARROW, SIGNAL = 0.63; EXPRESSED IN HEART, SIGNAL = 2.3; EXPRESSED IN BRAIN, SIGNAL = 3.2; EXPRESSED IN ADULT LIVER, SIGNAL = 3.4; EXPRESSED IN PLACENTA, SIGNAL = 1.6; EXPRESSED IN LUNG, SIGNAL = 0.7; EXPRESSED IN FETAL LIVER, SIGNAL = 0.82; EXPRESSED IN HBL100, SIGNAL =   1; EST_HUMAN HIT: AI160189.1, EVALUE 2.00e-33; SWISSPROT HIT: P35928, EVALUE 1.70e+00; NT HIT: AL163207.2, EVALUE 4.00e-32
gatgggtttatctggggtttctgtttttgcttcttcctcattttctcttgccacagccatgaaagaagagcctttgcctcccgccatgattctgaagcctccccggccatgtggaactgcaagtccaattaaacctttttttgttcccagtttgggtatgtgtttatcagcagca

SEQ ID NO: 16858 - DNA, 98 bp, Homo sapiens
  MAP TO AC007103.4; EXPRESSED IN BONE MARROW, SIGNAL = 1.4; EXPRESSED IN HBL100, SIGNAL = 1.8; EXPRESSED IN FETAL LIVER, SIGNAL = 1.3; EXPRESSED IN LUNG, SIGNAL = 1.2; EXPRESSED IN ADULT LIVER, SIGNAL = 0.77; EXPRESSED IN BRAIN, SIGNAL = 1.1; EXPRESSED IN BT474, SIGNAL = 1.2; EXPRESSED IN HELA, SIGNAL = 0.85; EXPRESSED IN PLACENTA, SIGNAL = 1.3; EXPRESSED IN HEART, SIGNAL = 1.3; EST_HUMAN HIT: BF002932.1, EVALUE 2.00e-02; NT HIT: X79037.1, EVALUE 1.80e-01; SWISSPROT HIT: P78716, EVALUE 1.40e+00
aatacagataaagcttggctcagtcatctcctgttgtgaggtctcgttcctagcaggccacaaacccttactaatctgtggcccaagggtggggatcc

SEQ ID NO: 16859 - DNA, 138 bp, Homo sapiens
  MAP TO AC007092.3; EXPRESSED IN HBL100, SIGNAL = 9.9; EXPRESSED IN FETAL LIVER, SIGNAL = 9.6; EXPRESSED IN BRAIN, SIGNAL =  14; EXPRESSED IN BT474, SIGNAL = 7.5; EXPRESSED IN PLACENTA, SIGNAL =  15; EXPRESSED IN HEART, SIGNAL = 7.9; EXPRESSED IN ADULT LIVER, SIGNAL = 7.1; EXPRESSED IN HELA, SIGNAL = 9.2; EXPRESSED IN LUNG, SIGNAL =  10; EXPRESSED IN BONE MARROW, SIGNAL =  11; SWISSPROT HIT: Q59467, EVALUE 5.10e+00; EST_HUMAN HIT: AW895550.1, EVALUE 3.00e-02; NT HIT: U32693.1, EVALUE 2.70e-01
taaattcttgaagccccagtacagatttagcaaattgcctcttattaatgtcaatgaacatttgaaaatgtaagaagaattgggactgaatacttttcccttggatggtcctgtcttttcagcgtcgagaaactcctg

SEQ ID NO: 16860 - DNA, 132 bp, Homo sapiens
  MAP TO AC007032.2; EXPRESSED IN BONE MARROW, SIGNAL = 5.1; EXPRESSED IN HBL100, SIGNAL = 7.9; EXPRESSED IN ADULT LIVER, SIGNAL =  11; EXPRESSED IN BRAIN, SIGNAL = 1.2; EXPRESSED IN HEART, SIGNAL = 1.8; EXPRESSED IN BT474, SIGNAL = 8.7; EXPRESSED IN FETAL LIVER, SIGNAL =  13; EXPRESSED IN PLACENTA, SIGNAL = 2.4; EXPRESSED IN HELA, SIGNAL = 2.7; EXPRESSED IN LUNG, SIGNAL =  12; EST_HUMAN HIT: AL135656.1, EVALUE 1.00e-68; SWISSPROT HIT: P43490, EVALUE 2.00e-20; NT HIT: gi11420721, EVALUE 1.00e-68
accatattcctcaaggtctccttttccttcctccagtgtaacaaaattccctgctggcgtcctatgtaaagataatcggccctttttggaccttttgttgggatcagcaactgggtccttgaagacgttaat

SEQ ID NO: 16861 - DNA, 455 bp, Homo sapiens
  MAP TO D83253.1; EXPRESSED IN BONE MARROW, SIGNAL = 1.8; EXPRESSED IN FETAL LIVER, SIGNAL = 4.3; EXPRESSED IN HELA, SIGNAL = 3.4; EXPRESSED IN ADULT LIVER, SIGNAL =   3; EXPRESSED IN BRAIN, SIGNAL = 6.7; EXPRESSED IN HEART, SIGNAL = 2.5; EXPRESSED IN PLACENTA, SIGNAL = 3.2; EXPRESSED IN BT474, SIGNAL =  14; EXPRESSED IN HBL100, SIGNAL =   5; EXPRESSED IN LUNG, SIGNAL = 4.2; EST_HUMAN HIT: AA403192.1, EVALUE 0.00e+00; SWISSPROT HIT: P53804, EVALUE 4.00e-80; NT HIT: D83327.1, EVALUE 0.00e+00
atttgatatcacccagacaccgccagcatacataaacgtgttaccaggtttgccccagtacaccagcatatatacacccttggccagcctttctcctgaatatcagctaccaagatcagtaccagtggtgccgtcttttgtagccaatgacagagcagataaaaatgctgctgcctattttgagggtcatcatttgaatgctgagaatgttgctggtcaccagattgcctctgaaacacagatccttgagggctctttgggaatatctgtaaagtcacactgcagcacaggtgatgctcatacagtcctgagtgagtctaacagaaatgatgagcactgtggaaattctaacaacaaatgtgaagtaattccagaaagcaccagtgcagtaacaaacattccacacgtgcagatggttgccatacaggtaagagttaaatagaaaagtcttctta

SEQ ID NO: 16862 - DNA, 211 bp, Homo sapiens
  MAP TO AB000882.1; EXPRESSED IN BONE MARROW, SIGNAL = 2.8; EXPRESSED IN LUNG, SIGNAL = 3.9; EXPRESSED IN ADULT LIVER, SIGNAL =   4; EXPRESSED IN PLACENTA, SIGNAL = 3.1; EXPRESSED IN BT474, SIGNAL =  10; EXPRESSED IN HBL100, SIGNAL =  12; EXPRESSED IN FETAL LIVER, SIGNAL = 6.1; EXPRESSED IN HELA, SIGNAL = 5.8; EXPRESSED IN BRAIN, SIGNAL = 2.9; EXPRESSED IN HEART, SIGNAL = 3.4; NT HIT: gi11417725, EVALUE 1.00e-115; EST_HUMAN HIT: BE902632.1, EVALUE 1.00e-115; SWISSPROT HIT: Q13838, EVALUE 5.00e-36
atggcagagaacgatgtggacaatgagctcttggactatgaagatgatgaggtggagacagcagctgggggagatggggctgaggcccctgccaagaaggatgtcaagggctcctatgtctccatccacagctctggctttcgtgacttcctgctcaagccagagttgctccgggccattgtcgactgtggctttgagcatccgtcagaag

SEQ ID NO: 16863 - DNA, 107 bp, Homo sapiens
  MAP TO AB000882.1; EXPRESSED IN PLACENTA, SIGNAL = 0.84; EXPRESSED IN BT474, SIGNAL = 1.1; EXPRESSED IN HBL100, SIGNAL =   6; EXPRESSED IN FETAL LIVER, SIGNAL = 2.3; EXPRESSED IN LUNG, SIGNAL = 2.7; EXPRESSED IN HELA, SIGNAL =   4; EXPRESSED IN ADULT LIVER, SIGNAL = 1.7; EXPRESSED IN BRAIN, SIGNAL = 1.4; EXPRESSED IN BONE MARROW, SIGNAL = 2.1; EXPRESSED IN HEART, SIGNAL = 1.5; NT HIT: AF021226.1, EVALUE 7.00e-54; EST_HUMAN HIT: AW851096.1, EVALUE 7.00e-54
ctggaccctctgccgctgatgttttcttcttgcaacaagggacacagagaataataataataacaaaacatggcatagcagcagaaacatatggaaagtctgtccgt

SEQ ID NO: 16864 - DNA, 172 bp, Homo sapiens
  MAP TO AB008681.1; EXPRESSED IN BT474, SIGNAL = 1.3; EXPRESSED IN HBL100, SIGNAL = 1.4; EXPRESSED IN BRAIN, SIGNAL = 1.7; EXPRESSED IN HEART, SIGNAL = 1.5; EXPRESSED IN ADULT LIVER, SIGNAL = 1.7; EXPRESSED IN PLACENTA, SIGNAL = 1.5; EXPRESSED IN BONE MARROW, SIGNAL = 1.1; EXPRESSED IN FETAL LIVER, SIGNAL = 1.6; EXPRESSED IN LUNG, SIGNAL = 1.2; EXPRESSED IN HELA, SIGNAL = 1.3; EST_HUMAN HIT: BE733986.1, EVALUE 2.00e-71; NT HIT: X77533.1, EVALUE 2.00e-92; SWISSPROT HIT: Q13705, EVALUE 3.00e-30
aggctgagacacgggagtgcatctactacaacgccaactgggagctggagcgcaccaaccagagcggcctggagcgctgcgaaggcgagcaggacaagcggctgcactgctacgcctcctgggccaacagctctggcaccatcgagctcgtgaagaagggctgctggctaga

SEQ ID NO: 16865 - DNA, 1058 bp, Homo sapiens
  MAP TO AB023051.1; EXPRESSED IN HEART, SIGNAL = 5.6; EXPRESSED IN BT474, SIGNAL =  51; EXPRESSED IN BONE MARROW, SIGNAL =  51; EXPRESSED IN HBL100, SIGNAL = 1.1e+02; EXPRESSED IN FETAL LIVER, SIGNAL =  30; EXPRESSED IN LUNG, SIGNAL = 6.6; EXPRESSED IN HELA, SIGNAL =  23; EXPRESSED IN ADULT LIVER, SIGNAL =  15; EXPRESSED IN PLACENTA, SIGNAL =   9; EXPRESSED IN BRAIN, SIGNAL =  17; EST_HUMAN HIT: BE740605.1, EVALUE 0.00e+00; SWISSPROT HIT: P05218, EVALUE 0.00e+00; NT HIT: AF141349.1, EVALUE 0.00e+00
ttaggcctcctcttcggcctcctcaccgaaatcctcctcctcttctgcggtggcatcctggtactgctgatactcagagacgaggtcgttcatgttgctctcagcctcggtgaactccatctcgtccatgccctcgcctgtgtaccagtggaggaaggccttccggcggaacatggcagtgaactgctccgagatgcgcttgaagagctcctggatggctgtgctattgccaatgaaggtgactgccatcttgaggccacgaggtgggatgtcacagacggctgtcttgacattgttggggatccattccacaaagtagctgctgttcttgttctgcacgttaagcatctgctcatcgacctccttcatggacatccgaccacggaagacagcagccacggtgaggtatcggccgtggcgggggtcacaggcagccatcatgttcttggcatcgaagacctgctgggtgagttccggcactgtgagagctcgatactgctggcttccacggctggtgagaggggcaaagccaggcataaagaaatggagacgtgggaaggggaccatgttgactgccaacttgcggaggtcagcattgagctggccagggaaacggaggcaggtggtgacaccactcatggtggctgagacaaggtggttcagatccccgtaggttggtgtggtcagcttcagagtgcggaagcagatatcatagagggcctcgttgtcaatgcaataggtctcatcagtattctctaccaactgatggacggagagggtggcattgtagggctcgaccacggtgtcagacactttgggtgaaggcaccacactgaaggtattcatgatgcgatcagggtattcttctcggatcttgctgataaggagagtgcccattccagagcctgtgcccccgcccagtgagtgggtcagctggaagccctgcaggcagtcacagctctctgcctccttccgtaccacatccaggacagaatcaaccagctcggcgccctctgtgtagtggcctttggcccagttgttacctgccccagactgac

SEQ ID NO: 16866 - DNA, 150 bp, Homo sapiens
  MAP TO AB023051.1; EXPRESSED IN HBL100, SIGNAL =  44; EXPRESSED IN BRAIN, SIGNAL = 8.6; EXPRESSED IN BT474, SIGNAL =  28; EXPRESSED IN PLACENTA, SIGNAL = 8.6; EXPRESSED IN HEART, SIGNAL = 6.1; EXPRESSED IN ADULT LIVER, SIGNAL = 7.2; EXPRESSED IN HELA, SIGNAL =  19; EXPRESSED IN LUNG, SIGNAL = 8.3; EXPRESSED IN FETAL LIVER, SIGNAL =  22; EXPRESSED IN BONE MARROW, SIGNAL =  13; NT HIT: AF141349.1, EVALUE 4.00e-56; SWISSPROT HIT: P05218, EVALUE 1.00e-16; EST_HUMAN HIT: BE899364.1, EVALUE 6.00e-56
ctgtggcttcattgtagtacacagagatgcggtccagctgcaggtcgctgtccccgtggtaggtgccggtggggtcgatgccatgttcatcactgatcacctcccagaactgccgagggggagcaacgagaccacaacaggtcaagtccc

SEQ ID NO: 16867 - DNA, 118 bp, Homo sapiens
  MAP TO AC000052.8; EXPRESSED IN HBL100, SIGNAL = 2.9; EXPRESSED IN HEART, SIGNAL = 2.6; EXPRESSED IN BT474, SIGNAL = 2.5; EXPRESSED IN BONE MARROW, SIGNAL = 4.2; EXPRESSED IN HELA, SIGNAL = 2.8; EXPRESSED IN ADULT LIVER, SIGNAL = 2.8; EXPRESSED IN BRAIN, SIGNAL = 4.2; EXPRESSED IN PLACENTA, SIGNAL = 7.3; EXPRESSED IN FETAL LIVER, SIGNAL = 3.4; EXPRESSED IN LUNG, SIGNAL =   3; EST_HUMAN HIT: AI908338.1, EVALUE 4.00e-07; NT HIT: gi9507032, EVALUE 3.00e-07
agaagaagaagaggaagaggaagaggaggaggaggaggaggaagaaaagaagaagaagaagaaacagtttctccactggaggtgggagctgccattatgatgattccgcagttaatgg

SEQ ID NO: 16868 - DNA, 177 bp, Homo sapiens
  MAP TO AC000052.8; EXPRESSED IN BONE MARROW, SIGNAL = 1.4; EXPRESSED IN HBL100, SIGNAL = 1.2; EXPRESSED IN FETAL LIVER, SIGNAL = 1.8; EXPRESSED IN ADULT LIVER, SIGNAL = 1.7; EXPRESSED IN BRAIN, SIGNAL = 2.8; EXPRESSED IN BT474, SIGNAL = 1.1; EXPRESSED IN LUNG, SIGNAL = 2.5; EXPRESSED IN PLACENTA, SIGNAL = 2.3; EXPRESSED IN HEART, SIGNAL = 1.3; EXPRESSED IN HELA, SIGNAL = 1.2; NT HIT: D49737.1, EVALUE 1.60e+00; EST_HUMAN HIT: BF183653.1, EVALUE 9.60e+00; SWISSPROT HIT: P20186, EVALUE 3.80e+00
aaacagtgggcccggagctcaaaagcagctgctccgaatctgcggacaactgtaaagcaatgaagggcaagaatccccggccctcggatagcagctaccccggcccagccgcccaagggtgcgtgagagacctctccacggtggcagacaggggcgctctatccgagaacggagtca

SEQ ID NO: 16869 - DNA, 118 bp, Homo sapiens
  MAP TO AC000052.8; EXPRESSED IN BT474, SIGNAL = 1.4; EXPRESSED IN HELA, SIGNAL = 1.5; EXPRESSED IN ADULT LIVER, SIGNAL = 5.7; EXPRESSED IN PLACENTA, SIGNAL = 1.7; EXPRESSED IN BONE MARROW, SIGNAL = 1.7; EXPRESSED IN HBL100, SIGNAL = 1.2; EXPRESSED IN FETAL LIVER, SIGNAL = 2.8; EXPRESSED IN LUNG, SIGNAL = 1.6; EXPRESSED IN BRAIN, SIGNAL = 3.6; EXPRESSED IN HEART, SIGNAL = 1.8; NT HIT: AY008285.1, EVALUE 2.00e-60; EST_HUMAN HIT: AV661919.1, EVALUE 3.00e-60; SWISSPROT HIT: P53320, EVALUE 2.10e-01
gccaaccttaacaacctggggttcaacgagctcgccggtaaggcgtcctttgcacattccttcgtgtcaggctgtgtggcaggttccatagctgcggtcgcagtgacgcctctagatg

SEQ ID NO: 16870 - DNA, 98 bp, Homo sapiens
  MAP TO AC000353.21; EXPRESSED IN PLACENTA, SIGNAL = 1.8; EXPRESSED IN BT474, SIGNAL = 2.9; EXPRESSED IN HEART, SIGNAL = 2.3; EXPRESSED IN HELA, SIGNAL = 3.3; EXPRESSED IN LUNG, SIGNAL = 2.8; EXPRESSED IN HBL100, SIGNAL = 1.7; EXPRESSED IN BONE MARROW, SIGNAL = 2.8; EXPRESSED IN FETAL LIVER, SIGNAL = 2.6; EXPRESSED IN BRAIN, SIGNAL = 2.6; EXPRESSED IN ADULT LIVER, SIGNAL = 2.6; NT HIT: U73200.1, EVALUE 1.80e-01
gcctccaatctcaaactggcctccaggccgtgggcctgatggggagctgctggcattgccgcagggctcatccccaccagcggaggagatattcgtag

SEQ ID NO: 16871 - DNA, 189 bp, Homo sapiens
  MAP TO AC000353.21; EXPRESSED IN BONE MARROW, SIGNAL = 3.5; EXPRESSED IN HBL100, SIGNAL = 4.6; EXPRESSED IN BRAIN, SIGNAL = 5.3; EXPRESSED IN HEART, SIGNAL = 4.3; EXPRESSED IN PLACENTA, SIGNAL = 2.9; EXPRESSED IN BT474, SIGNAL = 3.7; EXPRESSED IN FETAL LIVER, SIGNAL =   4; EXPRESSED IN LUNG, SIGNAL = 4.4; EXPRESSED IN HELA, SIGNAL = 5.5; EXPRESSED IN ADULT LIVER, SIGNAL = 4.9; SWISSPROT HIT: P51519, EVALUE 2.80e+00
gctgggctgcaagggccccctggtctggtcctacctgcagctggcagcttcgggggccgccacagcgtatttcagctccttcagtgcctattgcgtcttccggttcctgatgggcatgaccttctctggcatcatcctcaactccgtctccctggtgagtccagccgaggagaggccaggaagggcggg

SEQ ID NO: 16872 - DNA, 205 bp, Homo sapiens
  MAP TO AC000353.21; EXPRESSED IN BONE MARROW, SIGNAL =   3; EXPRESSED IN HBL100, SIGNAL = 1.1; EXPRESSED IN ADULT LIVER, SIGNAL = 1.8; EXPRESSED IN HEART, SIGNAL = 1.9; EXPRESSED IN PLACENTA, SIGNAL = 1.2; EXPRESSED IN BT474, SIGNAL = 2.6; EXPRESSED IN LUNG, SIGNAL = 1.4; EXPRESSED IN HELA, SIGNAL =   2; EXPRESSED IN BRAIN, SIGNAL = 2.4; EXPRESSED IN FETAL LIVER, SIGNAL = 1.8; SWISSPROT HIT: O76082, EVALUE 1.00e-06; EST_HUMAN HIT: AA707332.1, EVALUE 2.80e+00
gcagatggggatgggctttgcctctgtccacgcccgcctcgggggcctgacggcgcccctggttaccacacttggggaatacagcaccatcctgccacccgtgagctttggggccaccgcaatcctggctgggctggccgtctgcttcctgactgagacccgcaacatgcccctggtggagaccatcgcagccatggagaggagg

SEQ ID NO: 16873 - DNA, 432 bp, Homo sapiens
  MAP TO AC000353.21; EXPRESSED IN FETAL LIVER, SIGNAL =  93; EXPRESSED IN LUNG, SIGNAL = 1.7; EXPRESSED IN PLACENTA, SIGNAL = 2.1; EXPRESSED IN BT474, SIGNAL = 1.7; EXPRESSED IN HEART, SIGNAL = 1.4; EXPRESSED IN BRAIN, SIGNAL = 1.7; EXPRESSED IN ADULT LIVER, SIGNAL = 1.4; EXPRESSED IN HELA, SIGNAL = 1.2; EXPRESSED IN HBL100, SIGNAL = 1.5; EXPRESSED IN BONE MARROW, SIGNAL = 1.5; EST_HUMAN HIT: BF033636.1, EVALUE 1.60e+00; NT HIT: AF016585.1, EVALUE 2.70e-01; SWISSPROT HIT: P48988, EVALUE 2.00e-10
gtgccccggagaggccatggagctgagcagcaagaagaagcttcacgccctgtccctggccgagaagatccaggtgctggaactcctggatgagtccaagatgtcccagtcggaggtggcccggcgcttccaggtttcccagccccagatctcgcgcatctgcaagaataaggagaagctgctggcggactggtgcagcggcacagccaaccgagagcgcaagcgcaagcgggagtccaagtacagcgggatcgacgaggctctgctctgctggtaccacattgcccgggccaaggcctgggacgtgacggggcccatgctgctccacaaagccaaggagctggccgatatcatgggccaggacttcgtgcccagcatcggctggctggtccgctggaaacgccgaaacaacgtcggctttggggcccgcca

SEQ ID NO: 16874 - DNA, 889 bp, Homo sapiens
  MAP TO AC002470.5; EXPRESSED IN HEART, SIGNAL = 0.97; EXPRESSED IN ADULT LIVER, SIGNAL =  15; EXPRESSED IN PLACENTA, SIGNAL = 0.89; EXPRESSED IN BT474, SIGNAL = 0.77; EXPRESSED IN BONE MARROW, SIGNAL = 0.87; EXPRESSED IN LUNG, SIGNAL = 0.88; EXPRESSED IN HELA, SIGNAL = 0.64; EXPRESSED IN HBL100, SIGNAL = 0.74; EXPRESSED IN FETAL LIVER, SIGNAL =  23; EXPRESSED IN BRAIN, SIGNAL = 0.82; SWISSPROT HIT: P05546, EVALUE 0.00e+00; EST_HUMAN HIT: AV694748.1, EVALUE 0.00e+00; NT HIT: gi11417803, EVALUE 0.00e+00
atgaaacactcattaaacgcacttctcattttcctcatcataacatctgcgtggggtgggagcaaaggcccgctggatcagctagagaaaggaggggaaactgctcagtctgcagatccccagtgggagcagttaaataacaaaaacctgagcatgcctcttctccctgccgacttccccaaggaaaacaccgtcaccaacgactggattccagagggggaggaggacgacgactatctggacctggagaagatattcagtgaagacgacgactacatcgacatcgtcgacagtctgtcagtttccccgacagactctgatgtgagtgctgggaacatcctccagctttttcatggcaagagccggatccagcgtcttaacatcctcaacgccaagttcgctttcaacctctaccgagtgctgaaagaccaggtcaacactttcgataacatcttcatagcacccgttggcatttctactgcgatgggtatgatttccttaggtctgaagggagagacccatgaacaagtgcactcgattttgcattttaaagactttgttaatgccagcagcaagtatgaaatcacgaccattcataatctcttccgtaagctgactcatcgcctcttcaggaggaattttgggtacacactgcggtcagtcaatgacctttatatccagaagcagtttccaatcctgcttgacttcaaaactaaagtaagagagtattactttgctgaggcccagatagctgacttctcagaccctgccttcatatcaaaaaccaacaaccacatcatgaagctcaccaagggcctcataaaagatgctctggagaatatagaccctgctacccagatgatgattctcaactgcatctacttcaaag

SEQ ID NO: 16875 - DNA, 202 bp, Homo sapiens
  MAP TO AC002470.5; EXPRESSED IN PLACENTA, SIGNAL =   4; EXPRESSED IN BT474, SIGNAL = 3.7; EXPRESSED IN LUNG, SIGNAL = 7.1; EXPRESSED IN ADULT LIVER, SIGNAL = 4.4; EXPRESSED IN HEART, SIGNAL = 3.9; EXPRESSED IN BONE MARROW, SIGNAL = 4.7; EXPRESSED IN BRAIN, SIGNAL = 4.7; EXPRESSED IN HELA, SIGNAL =   4; EXPRESSED IN FETAL LIVER, SIGNAL = 4.6; EXPRESSED IN HBL100, SIGNAL = 3.9; NT HIT: gi11417810, EVALUE 1.00e-110; EST_HUMAN HIT: BF381101.1, EVALUE 6.00e-63; SWISSPROT HIT: P50090, EVALUE 4.00e-05
ctcgctgtcggagctgggctggacgacctcccaggtctggaagtccacgtcatagcagtgcagctcgttgggcagcgtgttgtcggccgcacccccaaacacatagaggtggcggtcaaaggccaccatggtatgcccgtagcgccgctgcgggggtggtggggagccccggagcaggtgttcagttgggatgcgtgtccac

SEQ ID NO: 16876 - DNA, 363 bp, Homo sapiens
  MAP TO AC006230.11; EXPRESSED IN PLACENTA, SIGNAL = 4.6; EXPRESSED IN BT474, SIGNAL = 9.5; EXPRESSED IN HBL100, SIGNAL =  24; EXPRESSED IN FETAL LIVER, SIGNAL = 4.4; EXPRESSED IN LUNG, SIGNAL = 3.3; EXPRESSED IN HEART, SIGNAL = 2.4; EXPRESSED IN ADULT LIVER, SIGNAL = 1.9; EXPRESSED IN BRAIN, SIGNAL = 4.2; EXPRESSED IN BONE MARROW, SIGNAL = 4.9; EXPRESSED IN HELA, SIGNAL = 5.6; EST_HUMAN HIT: BE783003.1, EVALUE 0.00e+00; NT HIT: gi6857825, EVALUE 0.00e+00; SWISSPROT HIT: P18617, EVALUE 9.50e+00
caaacgcaaagaccgctcagatgagaagtccaaggatcgctcaaaagataaaggggccaccaaggagtcgagtgagaaggatcgcggccgggacaaaacgcgaaagaggcacagcgcttccagtggtagcagcagtaccaggtctcggtccagctcgacttccagctcaggctccagcaccagcactggctcaagcagtggctccagctcttcctcagcctccagccgctcaggaagctccagcacctcccgcagctccagctctagcagctcttctggctctccaagtccttctcggcgcagacacgacaacaggaggcgctcccgctccaaatccaaaccacctaaaagagatgaaaagga

SEQ ID NO: 16877 - DNA, 158 bp, Homo sapiens
  MAP TO AC006160.9; EXPRESSED IN BT474, SIGNAL =  29; EXPRESSED IN FETAL LIVER, SIGNAL =  30; EXPRESSED IN HELA, SIGNAL =  20; EXPRESSED IN PLACENTA, SIGNAL = 9.3; EXPRESSED IN BONE MARROW, SIGNAL = 9.3; EXPRESSED IN HBL100, SIGNAL =  37; EXPRESSED IN LUNG, SIGNAL =  14; EXPRESSED IN ADULT LIVER, SIGNAL =  10; EXPRESSED IN BRAIN, SIGNAL =  15; EXPRESSED IN HEART, SIGNAL =   8; SWISSPROT HIT: Q00402, EVALUE 5.00e+00; EST_HUMAN HIT: AA310141.1, EVALUE 3.00e-24; NT HIT: AF054187.1, EVALUE 2.00e-27
cccaggtggagaccgggtctggaacagaagctgacagtgataaatcagtaccagagctcgaggaacaggattccacagagataccacacaagcagcccagctggcagcagcagctgaaatcaatgagtgtcaatcagtaaagcaaaacagagttagag

SEQ ID NO: 16878 - DNA, 152 bp, Homo sapiens
  MAP TO AC006160.9; EXPRESSED IN LUNG, SIGNAL = 1.2; EXPRESSED IN HELA, SIGNAL =   1; EXPRESSED IN PLACENTA, SIGNAL = 2.6; EXPRESSED IN FETAL LIVER, SIGNAL = 1.4; EXPRESSED IN BRAIN, SIGNAL =   1; EXPRESSED IN HEART, SIGNAL = 0.97; EXPRESSED IN BT474, SIGNAL = 0.91; EXPRESSED IN BONE MARROW, SIGNAL = 0.94; EXPRESSED IN HBL100, SIGNAL = 0.89; EXPRESSED IN ADULT LIVER, SIGNAL = 1.9; EST_HUMAN HIT: AA533658.1, EVALUE 5.10e-01; NT HIT: AB033102.1, EVALUE 1.00e-77; SWISSPROT HIT: Q10707, EVALUE 3.40e-01
gttcctggaggagactcagcaagcccagcgggccagggaggtggagacactgcgccaggaacaccggaaggagatgcaggccatggtggcagatttcagtagtgcccaggcccagctccaggcccggctggctgccctggaagccgagtaag

SEQ ID NO: 16879 - DNA, 225 bp, Homo sapiens
  MAP TO AC006160.9; EXPRESSED IN BT474, SIGNAL = 1.1; EXPRESSED IN HELA, SIGNAL = 1.2; EXPRESSED IN BRAIN, SIGNAL = 1.3; EXPRESSED IN PLACENTA, SIGNAL = 0.6; EXPRESSED IN HBL100, SIGNAL = 1.1; EXPRESSED IN FETAL LIVER, SIGNAL = 2.1; EXPRESSED IN LUNG, SIGNAL = 5.8e+02; EXPRESSED IN ADULT LIVER, SIGNAL =   1; EXPRESSED IN HEART, SIGNAL = 0.82; SWISSPROT HIT: P02565, EVALUE 6.00e-03; NT HIT: AB033102.1, EVALUE 1.00e-114
accaagaaagaggcaagtgctgagacagaatatatgaagcaacaatatgaagaagaccttcgtaaaatcaaacatcagacagaagaggagaagaaacatctcaaagaccagctagtgaagcgactagaagacttggtaaagaagcacaccgtggaaatcaaatccgttcgctcgtccgtggaggctgaaagaaagaaactgcagagggtgagacctacttccata

SEQ ID NO: 16880 - DNA, 157 bp, Homo sapiens
  MAP TO AC006111.2; EXPRESSED IN PLACENTA, SIGNAL = 0.89; EXPRESSED IN LUNG, SIGNAL = 1.2; EXPRESSED IN HELA, SIGNAL = 2.7; EXPRESSED IN BRAIN, SIGNAL = 1.2; EXPRESSED IN HEART, SIGNAL = 1.4; EXPRESSED IN BT474, SIGNAL = 7.9; EXPRESSED IN HBL100, SIGNAL = 3.6; EXPRESSED IN FETAL LIVER, SIGNAL = 2.2; EXPRESSED IN BONE MARROW, SIGNAL = 2.2; EXPRESSED IN ADULT LIVER, SIGNAL = 1.6; NT HIT: gi7706484, EVALUE 5.00e-74; SWISSPROT HIT: Q12931, EVALUE 1.00e-21
ctggggacctgtcctcaaacttctcctccttgtagtgatccacgactatgtccgtctccacagagatcagcttcttcttgtcaaactcacgaaggtgcagcagggtgagctcatcaaactgctcaaagcagaagagaacctgcaggtggccaagagc

SEQ ID NO: 16881 - DNA, 114 bp, Homo sapiens
  MAP TO AC006111.2; EXPRESSED IN BONE MARROW, SIGNAL = 1.2; EXPRESSED IN ADULT LIVER, SIGNAL = 1.6; EXPRESSED IN BRAIN, SIGNAL = 1.7; EXPRESSED IN BT474, SIGNAL = 2.6; EXPRESSED IN HBL100, SIGNAL = 2.2; EXPRESSED IN FETAL LIVER, SIGNAL = 2.1; EXPRESSED IN LUNG, SIGNAL = 1.2; EXPRESSED IN HELA, SIGNAL = 1.1; EXPRESSED IN PLACENTA, SIGNAL = 1.7; EXPRESSED IN HEART, SIGNAL = 1.2; EST_HUMAN HIT: AA631940.1, EVALUE 2.00e-48; NT HIT: AE001884.1, EVALUE 2.10e-01; SWISSPROT HIT: P51848, EVALUE 2.30e+00
ctgtcactgccatccacagaggtggccacggattcttgagaggctgggatctgggcgtcatcattgaggcctggaggtgcctccttggtgggcgacctgcttgggggtgtgatg

SEQ ID NO: 16882 - DNA, 911 bp, Homo sapiens
  MAP TO AC006111.2; EXPRESSED IN BONE MARROW, SIGNAL = 5.3; EXPRESSED IN ADULT LIVER, SIGNAL = 4.5; EXPRESSED IN HEART, SIGNAL = 4.4; EXPRESSED IN PLACENTA, SIGNAL = 5.8; EXPRESSED IN BT474, SIGNAL = 4.4; EXPRESSED IN HBL100, SIGNAL = 6.2; EXPRESSED IN FETAL LIVER, SIGNAL = 5.9; EXPRESSED IN LUNG, SIGNAL = 6.9; EXPRESSED IN HELA, SIGNAL = 4.7; EXPRESSED IN BRAIN, SIGNAL = 6.8; SWISSPROT HIT: P33076, EVALUE 8.00e-03; NT HIT: AF319938.1, EVALUE 2.30e+00; EST_HUMAN HIT: AA631949.1, EVALUE 1.00e-35
gagctcgcacagggtcctcgggggccacagctctgcatcctggggccccgtcctgctgcgccacaggtggcctagcgccatccccgtgagcctgcagaaggctgggacggtgcacatcaggtacagggccctgtcagcctgcacttggctcagcatccagcccagaagggcctggtcctcggggaacatctgctccaaacacaccttgatctcctcctcgttaaagccccggatctccgtcatccggtccaccaggccccctgggatctggccagatgcactgggacgggaggtgatccagatggaaacttccggaaagaggttgccacggatgatgttggtgatcaggtggtccaccgggatctccttctttgggtccgtgcaggccacggtgttggagaagtccagaggcgtcctgcactcatccaagccgtccaggatcaggagggccctggctgggactgccaccgccaggctgggctccccgacgtgcgggaagaccgagcagatgagtcggtcggcacacagcttctcgtgggtgttgagatcccggaaggtcagaggcagcaccagcgagaagtccttgccgacctgcccatgggcccagaggcggacgaagtgcctcaccagggtggtcttgcccatgccggccaccccgatagtgatggagacccggggtgggacagacacccgggagagaggcaggaagagccggtccagggcgacggtcctggcggggtgcccgcccccgcgggtggcctccacctgtgtgaagtcgtgttccctcagctgcaggtccgtcaggccctccaccagcaggagggaggccagcctgtgccagggtccgcccagctccgggccacctcccaccttgctcagcagggccttgcggtgcctctgtatccttgagt

SEQ ID NO: 16883 - DNA, 642 bp, Homo sapiens
  MAP TO AC006111.2; EXPRESSED IN ADULT LIVER, SIGNAL =  11; EXPRESSED IN FETAL LIVER, SIGNAL =  17; EXPRESSED IN LUNG, SIGNAL =  17; EXPRESSED IN HELA, SIGNAL =  20; EXPRESSED IN HEART, SIGNAL =  11; EXPRESSED IN PLACENTA, SIGNAL =  12; EXPRESSED IN BONE MARROW, SIGNAL =  15; EXPRESSED IN BRAIN, SIGNAL =  15; EXPRESSED IN BT474, SIGNAL =  13; EXPRESSED IN HBL100, SIGNAL =  18; EST_HUMAN HIT: AA631949.1, EVALUE 3.00e-39; SWISSPROT HIT: Q01705, EVALUE 1.70e-01; NT HIT: AE004781.1, EVALUE 4.10e-01
actgacagagaagcttggtggtggggaggggacggcttctgctctctcctctgccccttccccagcccctgccccctgccctggtatccacctgagcttccggcagtagagcagctggggcagcaggctctgaaggacgccctggctgaggctcagggacaggttggcctcctgggcacaggcgtcggacacctgcaggaggtaggccagggcagcgcggtgcgcgggaccagtcagcctggccagggccccgctctccatggcctcctccacgctgcgggccagctcggtgtgctgcagctcatgcaggcagtgcaacacgttgatggcccgtgcacagactgcggcatcggggcgcaggcagccctgcaggagctcagccacctgggtccggtaggcctggtgctcgccttgggccagcagggagccggccaggagggcattgaccctcggagacaagaggccggagaggaagcgcaggaacacgtccagcctcccgtcctctgcctgcatggcccgctgggctgcgctcctgaaatgcgtgaggaagcccagcctgggccaggatacgccgctctcagtgaagaggtcgaagatggccctcctggatgcgccatagtaatacgcggctgccacaaactc

SEQ ID NO: 16884 - DNA, 343 bp, Homo sapiens
  MAP TO AC006052.5; EXPRESSED IN HEART, SIGNAL =   3; EXPRESSED IN PLACENTA, SIGNAL = 2.9; EXPRESSED IN BT474, SIGNAL = 3.2; EXPRESSED IN BONE MARROW, SIGNAL = 2.4; EXPRESSED IN LUNG, SIGNAL =   3; EXPRESSED IN HELA, SIGNAL = 2.8; EXPRESSED IN ADULT LIVER, SIGNAL = 2.1; EXPRESSED IN BRAIN, SIGNAL = 5.1; EXPRESSED IN HBL100, SIGNAL = 2.6; EXPRESSED IN FETAL LIVER, SIGNAL = 2.4; NT HIT: AL163246.2, EVALUE 3.00e-68; SWISSPROT HIT: P19028, EVALUE 1.00e-04; EST_HUMAN HIT: AW340174.1, EVALUE 4.00e-83
ccaggattcacgggtacaggaatcaaagggtggaagtggaagtggcaccactcaccatcacccttagagattcactagcaaaatttttgcttcctgttcctgaaacgttatgttctcctggcctggagatcttagttccagagggaggaatactgccaccaggagaaacaacgattccattaaactataagttaagattgccatctggacactttgggctcctcctacctttaagtcaacaggctaaaaaggaagttacaatgttgattggggtgattcacccggactatcaagatgaaatcattctactactccacaacggaggtaaggaagagtatgcatg

SEQ ID NO: 16885 - DNA, 182 bp, Homo sapiens
  MAP TO AC006052.5; EXPRESSED IN HBL100, SIGNAL = 1.5; EXPRESSED IN FETAL LIVER, SIGNAL = 1.1; EXPRESSED IN BRAIN, SIGNAL = 2.8; EXPRESSED IN BT474, SIGNAL = 1.5; EXPRESSED IN BONE MARROW, SIGNAL = 2.4; EXPRESSED IN HELA, SIGNAL = 2.2; EXPRESSED IN ADULT LIVER, SIGNAL = 1.4; EXPRESSED IN PLACENTA, SIGNAL = 2.1; EXPRESSED IN LUNG, SIGNAL = 1.9; EXPRESSED IN HEART, SIGNAL = 1.9; SWISSPROT HIT: P23074, EVALUE 4.00e-06; NT HIT: AL163209.2, EVALUE 1.00e-50; EST_HUMAN HIT: AA403053.1, EVALUE 3.00e-42
aggaattgtggagattcgtgctaccaccaaggacttgaaagatgcagggttggtgattcccaccaaatacccattcaactctcccatttggcctctgcagaagacaggtgggtcttggagaatgacaatgaattatcgtgagcttaaccaagtggtgactccaattgcagctgctgtaccag

SEQ ID NO: 16886 - DNA, 107 bp, Homo sapiens
  MAP TO AC006052.5; EXPRESSED IN HEART, SIGNAL = 1.4; EXPRESSED IN PLACENTA, SIGNAL =   2; EXPRESSED IN FETAL LIVER, SIGNAL = 1.8; EXPRESSED IN LUNG, SIGNAL = 1.5; EXPRESSED IN HELA, SIGNAL = 1.6; EXPRESSED IN ADULT LIVER, SIGNAL = 1.9; EXPRESSED IN BRAIN, SIGNAL = 1.4; EXPRESSED IN BT474, SIGNAL = 1.5; EXPRESSED IN BONE MARROW, SIGNAL = 2.5; EXPRESSED IN HBL100, SIGNAL = 1.7; NT HIT: AL163209.2, EVALUE 9.00e-32; EST_HUMAN HIT: AA055018.1, EVALUE 6.00e-36; SWISSPROT HIT: P70213, EVALUE 3.10e-02
aagcagatactgagcctcaaatctgctaagattgccctgagtgagagtcttatctccagtagagaaagagctgaaattgtgaagaaacagacaaaagctcttatcac

SEQ ID NO: 16887 - DNA, 140 bp, Homo sapiens
  MAP TO AC005973.2; EXPRESSED IN PLACENTA, SIGNAL = 1.5; EXPRESSED IN HBL100, SIGNAL = 1.4; EXPRESSED IN FETAL LIVER, SIGNAL = 1.3; EXPRESSED IN LUNG, SIGNAL = 1.6; EXPRESSED IN HELA, SIGNAL = 1.3; EXPRESSED IN BRAIN, SIGNAL = 2.2; EXPRESSED IN BT474, SIGNAL =   2; EXPRESSED IN BONE MARROW, SIGNAL = 1.9; EXPRESSED IN ADULT LIVER, SIGNAL = 1.2; EXPRESSED IN HEART, SIGNAL =   1; NT HIT: gi11426939, EVALUE 3.00e-66; EST_HUMAN HIT: AW843642.1, EVALUE 7.00e-64; SWISSPROT HIT: Q23356, EVALUE 1.00e-13
ccagagctggtcatcgtttcccggggggctcttcttgatgaaggctccgtagtaggtggcgatgttgcggtggtgagagtactttttcagcatgttgatctcctgtttgatctcttcctcctcgtcctaagcagatggga

SEQ ID NO: 16888 - DNA, 257 bp, Homo sapiens
  MAP TO AC005973.2; EXPRESSED IN HEART, SIGNAL = 3.6; EXPRESSED IN BT474, SIGNAL = 8.4; EXPRESSED IN BONE MARROW, SIGNAL = 7.8; EXPRESSED IN HELA, SIGNAL = 5.2; EXPRESSED IN BRAIN, SIGNAL = 2.4; EXPRESSED IN PLACENTA, SIGNAL = 5.2; EXPRESSED IN FETAL LIVER, SIGNAL =   5; EXPRESSED IN LUNG, SIGNAL = 6.6; EXPRESSED IN ADULT LIVER, SIGNAL = 4.6; EXPRESSED IN HBL100, SIGNAL = 8.5; NT HIT: gi11426939, EVALUE 2.00e-44; EST_HUMAN HIT: BE929101.1, EVALUE 2.00e-38
ctctcgggcccaggctggtttgtcagcgggattcatgccccgaccataatggtacaggggcttcctgtccccaggcaggagctgctgctgctgctgtttctgaagctgctgctgctgttgctgctgctgcagggacttgaggtaggcatgctcctgctgcagctgcctctggagacgttctgactgccgctgctcctccagctgcttccgcttgtattcctgggcccaagggtagggagagagggctcagcagggtg

SEQ ID NO: 16889 - DNA, 179 bp, Homo sapiens
  MAP TO AC005973.2; EXPRESSED IN ADULT LIVER, SIGNAL = 1.3; EXPRESSED IN BRAIN, SIGNAL = 1.9; EXPRESSED IN HEART, SIGNAL = 0.97; EXPRESSED IN PLACENTA, SIGNAL = 1.5; EXPRESSED IN BT474, SIGNAL = 2.5; EXPRESSED IN HELA, SIGNAL = 1.7; EXPRESSED IN LUNG, SIGNAL = 2.2; EXPRESSED IN FETAL LIVER, SIGNAL =   2; EXPRESSED IN HBL100, SIGNAL = 2.9; EXPRESSED IN BONE MARROW, SIGNAL = 2.2; EST_HUMAN HIT: BE312777.1, EVALUE 2.00e-74; NT HIT: gi11426939, EVALUE 2.00e-74; SWISSPROT HIT: Q23356, EVALUE 5.00e-15
agatggtgatgagcaggttgagcccctccagcacatccatctgctggaagcgtcgccgcccaatgagtccatacaccttgccctgcccacttcggtccagcaacatcagcccgttctccgtgcccaccagcaggttgacccctgcaacaggagcccttgggcaggtcagaggctcagcc

SEQ ID NO: 16890 - DNA, 612 bp, Homo sapiens
  MAP TO AC005973.2; EXPRESSED IN BT474, SIGNAL = 3.7; EXPRESSED IN HELA, SIGNAL = 5.9; EXPRESSED IN PLACENTA, SIGNAL = 4.9; EXPRESSED IN BONE MARROW, SIGNAL = 5.7; EXPRESSED IN FETAL LIVER, SIGNAL = 8.6; EXPRESSED IN LUNG, SIGNAL =   5; EXPRESSED IN ADULT LIVER, SIGNAL = 4.4; EXPRESSED IN BRAIN, SIGNAL =  15; EXPRESSED IN HEART, SIGNAL = 5.1; EXPRESSED IN HBL100, SIGNAL = 6.4; NT HIT: gi4502312, EVALUE 8.00e-39; EST_HUMAN HIT: BF526960.1, EVALUE 1.00e-38; SWISSPROT HIT: P23956, EVALUE 1.00e-29
acatgtccaacaacagccccgagtatgctttggttttcaccatctcgggtgctatggccaccatggtctccagtggcctgggtgctgcctgtggcatggccaagaatggcaccggcatcatggccatgtctgtcatgtggccagagctgatccacatgaagtccatcatcccagtggtcatggctggtatcatcaccatctatggcctagtggcggctgtcccccctgccaactccctgaatgatgacaacagtctctatagcagtttcctccagctgggcgctggcctgagtggcctggcagccggctttgccatcgtcatcgtgggggacactggcaagtgtggcactgcccagcagccccgactatttgtaggcatgatactgatcctcatctttgccaaggtgctcattctctccacaaagcagcccctctcaaaacccaccagtcacagaatacgatgtaaagaccacccctcctcattccggaacaaacagcctgacacgcatgtgctgggcagctggccctcagtagttgatcttctaagtgtacagtgtcctcgtgttcatcgtctgttggccaggccttgccccctcccgccccatgctgtgg

SEQ ID NO: 16891 - DNA, 284 bp, Homo sapiens
  MAP TO AC005921.3; EXPRESSED IN HEART, SIGNAL = 0.85; EXPRESSED IN ADULT LIVER, SIGNAL =  47; EXPRESSED IN BRAIN, SIGNAL = 2.3; EXPRESSED IN BONE MARROW, SIGNAL = 3.4; EXPRESSED IN HBL100, SIGNAL =   8; EXPRESSED IN FETAL LIVER, SIGNAL = 3.2; EXPRESSED IN HELA, SIGNAL = 3.2; EXPRESSED IN PLACENTA, SIGNAL = 2.3; EXPRESSED IN BT474, SIGNAL =  12; EXPRESSED IN LUNG, SIGNAL = 2.3; EST_HUMAN HIT: AV703798.1, EVALUE 2.00e-48; NT HIT: gi7706534, EVALUE 1.00e-48; SWISSPROT HIT: Q11175, EVALUE 4.60e+00
gaaaagttaaggaaaagaaccgaagaacctgatcgtgatgagcgtctaaaaaaggagaagcaagaaagagaagaaagagaaaaagaacgggagagagaaagggaagaaagagaaaggaaaagacgaagggaagaggaagaaagagaaaaagaaagggctcgtgacagagaaagaagaaagagaagtcgttcacgaagtagacactcaagccgaacatcagacagaagatgcagcaggtctcgggaccacaaaaggtcacgaagtagagaaagaaggcggagcag

SEQ ID NO: 16892 - DNA, 329 bp, Homo sapiens
  MAP TO AC005921.3; EXPRESSED IN BONE MARROW, SIGNAL = 2.1; EXPRESSED IN ADULT LIVER, SIGNAL =  19; EXPRESSED IN BRAIN, SIGNAL = 0.76; EXPRESSED IN BT474, SIGNAL =  13; EXPRESSED IN HBL100, SIGNAL = 4.3; EXPRESSED IN LUNG, SIGNAL = 9.2; EXPRESSED IN HELA, SIGNAL = 2.5; EXPRESSED IN PLACENTA, SIGNAL = 1.8; EXPRESSED IN FETAL LIVER, SIGNAL = 8.2; EXPRESSED IN HEART, SIGNAL = 1.4; EST_HUMAN HIT: BF336682.1, EVALUE 0.00e+00; SWISSPROT HIT: O15438, EVALUE 7.00e-44; NT HIT: gi9955971, EVALUE 0.00e+00
ggttcttggtgatgctggcagccatggccatggcagcgggtggcatccaggctgcccgtgtgttgcaccaggcactgctgcacaacaagatacgctcgccacagtccttctttgacaccacaccatcaggccgcatcctgaactgcttctccaaggacatctatgtcgttgatgaggttctggcccctgtcatcctcatgctgctcaattccttcttcaacgccatctccactcttgtggtcatcatggccagcacgccgctcttcactgtggtcatcctgcccctggctgtgctctacaccttagtgcaggtgtggggtgggcgtgat

SEQ ID NO: 16893 - DNA, 478 bp, Homo sapiens
  MAP TO AC005921.3; EXPRESSED IN FETAL LIVER, SIGNAL =   1; EXPRESSED IN ADULT LIVER, SIGNAL = 1.2; EXPRESSED IN PLACENTA, SIGNAL = 1.4; EXPRESSED IN BONE MARROW, SIGNAL = 1.3; EXPRESSED IN HBL100, SIGNAL = 2.9; EXPRESSED IN LUNG, SIGNAL = 1.4; EXPRESSED IN HELA, SIGNAL = 1.3; EXPRESSED IN BRAIN, SIGNAL =   3; EXPRESSED IN BT474, SIGNAL = 6.9; EXPRESSED IN HEART, SIGNAL = 1.2; SWISSPROT HIT: P50555, EVALUE 5.60e-01; EST_HUMAN HIT: BE741337.1, EVALUE 0.00e+00; NT HIT: X99000.1, EVALUE 3.00e-01
aagaaaaatggctggaatgctggcgctggtcctgcatacgtcccattttgaggctccagagacattggtggcttggacgggacagaagaaaacagggagcggctctgactcactggtggctgacaaacaggacccggttttgtgctttctggtgttctgagtatggcagagggggccgacacatcaccattctgaactagtgccaaagaggtgtggtcccggggaaaggtccctaacaggggaggttccccagggggaagcaatggaggtgagccatctgcagggggtgatgcagggggtgtggaggggcccccattctgcatctgggctgaatcctctgctgtgggtgtatagataaaagggaaggctgggttggccaaatagttgggaacaaagggcagttctgactccttcttcagctgggggaggttgtcatcatcatcatcatcatcatcttcttcttccacttaaaaagaag

SEQ ID NO: 16894 - DNA, 750 bp, Homo sapiens
  MAP TO AC005883.6; EXPRESSED IN BRAIN, SIGNAL = 5.8; EXPRESSED IN HEART, SIGNAL = 4.1; EXPRESSED IN HBL100, SIGNAL =  55; EXPRESSED IN HELA, SIGNAL =  28; EXPRESSED IN ADULT LIVER, SIGNAL =  11; EXPRESSED IN BT474, SIGNAL =  37; EXPRESSED IN BONE MARROW, SIGNAL =  25; EXPRESSED IN FETAL LIVER, SIGNAL =  28; EXPRESSED IN PLACENTA, SIGNAL = 9.8; EXPRESSED IN LUNG, SIGNAL =  14; NT HIT: X52967.1, EVALUE 0.00e+00; EST_HUMAN HIT: BE748843.1, EVALUE 0.00e+00; SWISSPROT HIT: P18124, EVALUE 1.00e-107
gctagaaccatggagggtgtagaagagaagaagaagaaggttcctgctgtgccagaaacccttaagaaaaagagaaggaatttcgcagagccgaagatcaagcacctgagaaagaagtttgcccaaaagatgcttcaaaaggcaaggaggaagcttatctatgaaaaagcaaagcactatcacaaggaatataggcagttgtacagaactgaaattcaaatgccaaggatagcaagaaaagctggcaacttctatgtacctgcaaaacccaaattggcgtttgtcatcaggatcagaggtgtcaatggtgtaagcccaaagatccgaaaggtgttgcagcttcttcgcctttgtcaaatcttcaatgaaacctttgtgaagctcaacaaggcttcaattaacatgctgaggattgtagagccatacattgcatgggggtgcccaaatctgaagtcagtaaatgaactaatttacaagcgtggttatggcaaaatcaataagaagggagttgcttcgacagataacactttgattgctcgatctcttggtaaatatagcatcaactgcatggaggatcttattcatgagatctatactgttggaaaatgcttcaaagaagcaaataacttcctgtggcccttcaaattatcttctccacaaggcagaatgaagaaaaaaaccacccattttgtagaagtggagatgctggcaacagggaggaccagatcaacaggcttactagaagactga

SEQ ID NO: 16895 - DNA, 151 bp, Homo sapiens
  MAP TO AC005632.2; EXPRESSED IN FETAL LIVER, SIGNAL = 2.7; EXPRESSED IN LUNG, SIGNAL = 3.2; EXPRESSED IN HEART, SIGNAL = 2.1; EXPRESSED IN BONE MARROW, SIGNAL = 2.4; EXPRESSED IN HELA, SIGNAL = 4.3; EXPRESSED IN ADULT LIVER, SIGNAL = 2.6; EXPRESSED IN BRAIN, SIGNAL = 3.1; EXPRESSED IN PLACENTA, SIGNAL = 2.7; EXPRESSED IN BT474, SIGNAL = 5.6; EXPRESSED IN HBL100, SIGNAL =  12; NT HIT: L78810.1, EVALUE 7.00e-24; EST_HUMAN HIT: AA557683.1, EVALUE 7.00e-25; SWISSPROT HIT: O54101, EVALUE 3.90e+00
agtgttacagttcataaaggcggcctgtctggaggtgttagttccttctggtgggttcctggtcttgctggcctcaggagtgaagctgcagacctttgcggtgagtgttacagctcttaaaggtggcacggacccaaagcgtgagcagcag

SEQ ID NO: 16896 - DNA, 402 bp, Homo sapiens
  MAP TO AC005632.2; EXPRESSED IN BT474, SIGNAL =  13; EXPRESSED IN BONE MARROW, SIGNAL =  11; EXPRESSED IN HELA, SIGNAL = 8.6; EXPRESSED IN ADULT LIVER, SIGNAL = 9.6; EXPRESSED IN BRAIN, SIGNAL =  13; EXPRESSED IN PLACENTA, SIGNAL =  16; EXPRESSED IN HEART, SIGNAL = 8.1; EXPRESSED IN LUNG, SIGNAL =  12; EXPRESSED IN FETAL LIVER, SIGNAL =  12; EXPRESSED IN HBL100, SIGNAL =  11; NT HIT: gi10946995, EVALUE 4.00e-83; SWISSPROT HIT: gi115267, EVALUE 1.30e+00; EST_HUMAN HIT: BE727080.1, EVALUE 0.00e+00
atggaaactggtgcagggggcagcggcgttccgcggccggaagggaagggggaggtgccgaggctgcgcgccggctgctcctccccacccccagcctttgccctgaagggggctggatgggcaaggcggccgcgatggctcgagctcgggcggtggcggcggtggccggaggcggcggtgcctcctcctcctcgccccggcgccggcggtgatccgagcgagcggccgcggcccccgatgagactgctggcgggctggctgtgcctgagcctggcgtccgtgtggctggcgcggaggatgtggacgctgcggagcccgctcacccgctccctgtacgtgaacatgactagcggcccgggtgggccggcggcggccgcgggcggcaggaaggagaaccaccag

SEQ ID NO: 16897 - DNA, 154 bp, Homo sapiens
  MAP TO AC005632.2; EXPRESSED IN PLACENTA, SIGNAL = 1.2; EXPRESSED IN BONE MARROW, SIGNAL = 4.9; EXPRESSED IN LUNG, SIGNAL = 1.4; EXPRESSED IN HEART, SIGNAL = 0.88; EXPRESSED IN BT474, SIGNAL = 2.2; EXPRESSED IN HBL100, SIGNAL = 2.8; EXPRESSED IN FETAL LIVER, SIGNAL = 1.6; EXPRESSED IN HELA, SIGNAL = 1.3; EXPRESSED IN ADULT LIVER, SIGNAL = 0.9; EXPRESSED IN BRAIN, SIGNAL = 1.1; EST_HUMAN HIT: BF333707.1, EVALUE 5.00e-72; SWISSPROT HIT: P14907, EVALUE 2.30e+00
tgtgatttcctcatgtctttggtggctaaagcacaactgccatgctgaacactggtgaactcagggctggtcacattgttaaccctcagctcttgccccaatgacttccgaccataagtattttccccagatcccccattgacaccgtagccac

SEQ ID NO: 16898 - DNA, 200 bp, Homo sapiens
  MAP TO AC005632.2; EXPRESSED IN BRAIN, SIGNAL = 0.97; EXPRESSED IN HEART, SIGNAL = 0.9; EXPRESSED IN PLACENTA, SIGNAL = 1.2; EXPRESSED IN BT474, SIGNAL = 3.6; EXPRESSED IN BONE MARROW, SIGNAL = 6.9; EXPRESSED IN ADULT LIVER, SIGNAL =   1; EXPRESSED IN HELA, SIGNAL = 2.7; EXPRESSED IN LUNG, SIGNAL = 2.3; EXPRESSED IN FETAL LIVER, SIGNAL =   3; EXPRESSED IN HBL100, SIGNAL = 3.9; EST_HUMAN HIT: AW965313.1, EVALUE 1.00e-109; NT HIT: D86974.1, EVALUE 1.00e-109
tatatagttgaagtcagctttcaggttgagggaagtgctactggtactctttttcaagtcatggatagcgttctgccattcctgcacagcagcccaatcggcagttgagatgtagcactcacatgctttgtttcctaaataatttataacctcaggggaagagtcagtcggtttggacagcacactttttctggattcac

SEQ ID NO: 16899 - DNA, 259 bp, Homo sapiens
  MAP TO AC005301.16; EXPRESSED IN PLACENTA, SIGNAL = 2.5; EXPRESSED IN BT474, SIGNAL = 1.1; EXPRESSED IN FETAL LIVER, SIGNAL = 0.8; EXPRESSED IN LUNG, SIGNAL = 5.5; EXPRESSED IN ADULT LIVER, SIGNAL = 0.8; EXPRESSED IN BRAIN, SIGNAL = 1.5; EXPRESSED IN HEART, SIGNAL = 5.8; SWISSPROT HIT: P04275, EVALUE 2.00e-42; EST_HUMAN HIT: AU140168.1, EVALUE 1.00e-125; NT HIT: M60676.1, EVALUE 0.00e+00
tgtcaccctcacctgtgaagcctgccaggagccgggaggcctggtggtacctcccacagatgccccggtgagccccaccactctgtatgtggaggacatctcagaaccgctgttgcacgatttctactgcagcaggctactggacctgatcttcctgctggatggctcctccaggctgtccgaggctgagtttgaagtgctgaaggcctttgtggtggacatgatggagcggctgcgcatctcctagaagtgggtccgc

SEQ ID NO: 16900 - DNA, 171 bp, Homo sapiens
  MAP TO AC005301.16; EXPRESSED IN HEART, SIGNAL = 2.6; EXPRESSED IN LUNG, SIGNAL = 3.7; EXPRESSED IN BRAIN, SIGNAL =   1; EXPRESSED IN PLACENTA, SIGNAL = 1.9; NT HIT: M60676.1, EVALUE 7.00e-92; EST_HUMAN HIT: AL133966.1, EVALUE 2.00e-52; SWISSPROT HIT: P04275, EVALUE 5.00e-15
tcatcccctgccacctgccataacaacatcatgaagcagacgatggtggattcctcctgtagaatccttaccagtgacgtcttccaggactgcaacaagctggtgaggaccttgagggtagtgggaagcagatggtcccaaggcttggcccagtggtatggacacagagtg

SEQ ID NO: 16901 - DNA, 771 bp, Homo sapiens
  MAP TO AC005301.16; EXPRESSED IN BT474, SIGNAL = 0.79; EXPRESSED IN HEART, SIGNAL = 2.8; EXPRESSED IN PLACENTA, SIGNAL =  24; EXPRESSED IN FETAL LIVER, SIGNAL = 0.85; EXPRESSED IN LUNG, SIGNAL = 5.6; EXPRESSED IN ADULT LIVER, SIGNAL = 0.67; EXPRESSED IN BRAIN, SIGNAL = 0.91; EXPRESSED IN BONE MARROW, SIGNAL = 1.2; NT HIT: M60676.1, EVALUE 0.00e+00; SWISSPROT HIT: P04275, EVALUE 1.00e-118; EST_HUMAN HIT: BE903681.1, EVALUE 0.00e+00
aagaaggtcatcgtgatcccggtgggcattgggccccatgccaacctcaagcagatccgcctcattgagaagcaggcccctgagaacaaggccttcgtgctgagcggtgtggatgagctggagcagcaaagggaagagatcgttagctacctctgtgaccttgcccctgacgcccctcctcctactctgcccccccacatggcacaagtcactgtgggcccggggctcttggggctttcgaccctggggcccaagaggaactccatggttctggatgtggcatttgtcctggaaggatcggacaaaattggtgaagccaacttcaacaggagcaaggagttcatggaggaggtgattcagcggatggatgtgggccaggacagcatccacgtcacggtgctgcagtactcctacatggtgaccgtggagtaccccttcagcgaggcacagtccaaaggggacatcctgcagcgggtgcgagagatccgctaccagggtggcaacaggaccaacactggggtggccctgctgtacccctccgaccacagcttcttggtcagccagggtgaccgggagcaggtgcccaacctggtctccatggtcaccagaaatcctgcctctgataagatcaagaggttgcctggagacatccaggtggtgcccattggagtgggccctaatgccaacgttcaggagctggagaggatcggctggcccaatgcccccatcctcatccaggactttgagacgctcccctgagaggctcctgac

SEQ ID NO: 16902 - DNA, 668 bp, Homo sapiens
  MAP TO AC005301.16; EXPRESSED IN ADULT LIVER, SIGNAL = 1.3; EXPRESSED IN BRAIN, SIGNAL = 1.5; EXPRESSED IN HEART, SIGNAL = 1.5; EXPRESSED IN BONE MARROW, SIGNAL = 1.3; EXPRESSED IN HBL100, SIGNAL = 1.2; EXPRESSED IN HELA, SIGNAL = 1.7; EXPRESSED IN PLACENTA, SIGNAL = 1.6; EXPRESSED IN BT474, SIGNAL = 1.1; EXPRESSED IN FETAL LIVER, SIGNAL = 1.3; EXPRESSED IN LUNG, SIGNAL = 1.8; SWISSPROT HIT: P51811, EVALUE 5.00e-43; NT HIT: gi11418230, EVALUE 1.00e-100; EST_HUMAN HIT: BE791300.1, EVALUE 2.50e+00
cattttccctgttatcagttacttatggggccattcgctgcaatatactggccatccagatcagcaatgatgatactaccattaagctaccgccgatagaattcttctgtgtcgtgatgtggcgttttttggaggttatctcacgtgtagtgactctggcatttttcattgcatctctgaaactgaagagcctacccgttttgttaatcatatattttgtatcattgttggcaccgtggctggagttttggaaaagtggagctcatcttcctggcaacaaagaaaataattccaatatggtgggtacagtactgatgcttttcttgatcacactgctatatgctgccatcaacttctcctgctggtcagcagtgaaactgcagttgtcagatgacaaaataattgacgggagacagaggtggggccatagaatcctacactacagctttcagtttttagaaaatgtgataatgatattggtatttaggttctttggagggaaaactttgctgaattgttgtgactcattaattgccgtgcagctcatcataagctacctattggccactggctttatgctcctcttctatcagtatttgtacccatggcagtcaggcaaagtgttgccaggacgtactgaaaatcagccagaagcaccgtactattat

SEQ ID NO: 16903 - DNA, 191 bp, Homo sapiens
  MAP TO AC004882.2; EXPRESSED IN LUNG, SIGNAL = 1.5; EXPRESSED IN HELA, SIGNAL = 3.1; EXPRESSED IN PLACENTA, SIGNAL = 0.85; EXPRESSED IN BONE MARROW, SIGNAL = 1.1; EXPRESSED IN FETAL LIVER, SIGNAL = 2.5; EXPRESSED IN ADULT LIVER, SIGNAL = 3.1; EXPRESSED IN BRAIN, SIGNAL = 1.2; EXPRESSED IN HEART, SIGNAL = 0.82; EXPRESSED IN BT474, SIGNAL = 2.1; EXPRESSED IN HBL100, SIGNAL = 1.9; SWISSPROT HIT: P47923, EVALUE 1.70e+00; EST_HUMAN HIT: BE908158.1, EVALUE 1.00e-103
cctcttcctccgagttctccggatgtgatgatgcttgactgactgcctctgctgtcaccgtgaccccgttaggctccccattaggctcctcaatcaccgatgggtctttagcatctgtggctttccgtctgtccaccccttcccatgcactctcgactgcctggaggatgtaggcagtccgcgtctcgtcc

SEQ ID NO: 16904 - DNA, 216 bp, Homo sapiens
  MAP TO AC004882.2; EXPRESSED IN BONE MARROW, SIGNAL = 2.9; EXPRESSED IN HBL100, SIGNAL =  12; EXPRESSED IN ADULT LIVER, SIGNAL =   7; EXPRESSED IN BRAIN, SIGNAL =   6; EXPRESSED IN PLACENTA, SIGNAL = 3.2; EXPRESSED IN HEART, SIGNAL = 9.5; EXPRESSED IN HELA, SIGNAL = 3.8; EXPRESSED IN LUNG, SIGNAL = 3.2; EXPRESSED IN FETAL LIVER, SIGNAL = 8.9; EXPRESSED IN BT474, SIGNAL = 7.8; NT HIT: gi9994180, EVALUE 1.00e-118; EST_HUMAN HIT: AV715728.1, EVALUE 1.00e-118; SWISSPROT HIT: P00130, EVALUE 2.70e-02
aagctgtggaaacacatcaagcacaagtatgagaacaagtagttccttggaggcccccatccaggccagaaggaccaggtccacccagcagctgtttgcccagagctggagcctcagcttgaagatgatgctcaaggtactcttcatggaccaccattcgctgttggcaagaaacggctttacttacaaaacagactctttaccttctgctgtgtt

SEQ ID NO: 16905 - DNA, 127 bp, Homo sapiens
  MAP TO AC004882.2; EXPRESSED IN LUNG, SIGNAL = 0.83; EXPRESSED IN PLACENTA, SIGNAL = 0.9; EXPRESSED IN BT474, SIGNAL = 1.4; EXPRESSED IN HBL100, SIGNAL = 1.3; EXPRESSED IN FETAL LIVER, SIGNAL = 4.6; EXPRESSED IN HELA, SIGNAL = 0.93; EXPRESSED IN BRAIN, SIGNAL = 1.3; EXPRESSED IN BONE MARROW, SIGNAL = 0.94; EXPRESSED IN ADULT LIVER, SIGNAL = 2.8; EXPRESSED IN HEART, SIGNAL = 1.5; NT HIT: gi11417953, EVALUE 1.00e-65; SWISSPROT HIT: Q05900, EVALUE 1.20e-01; EST_HUMAN HIT: N41603.1, EVALUE 1.00e-65
ctcggaacatgtcgtaccagaccttcttggccttgaggtgctgcagcccgttcaggtgcttcttgcggttgtggaggttgtcctggaaggagcggtcgcagtagtcacagaagtatcgcttccccat

SEQ ID NO: 16906 - DNA, 220 bp, Homo sapiens
  MAP TO AC004882.2; EXPRESSED IN HELA, SIGNAL = 1.6; EXPRESSED IN BRAIN, SIGNAL = 1.1; EXPRESSED IN HEART, SIGNAL =   1; EXPRESSED IN BT474, SIGNAL = 0.87; EXPRESSED IN BONE MARROW, SIGNAL = 0.97; EXPRESSED IN LUNG, SIGNAL =   1; EXPRESSED IN ADULT LIVER, SIGNAL = 0.98; EXPRESSED IN FETAL LIVER, SIGNAL = 0.92; EXPRESSED IN HBL100, SIGNAL = 2.7; EXPRESSED IN PLACENTA, SIGNAL = 0.62; NT HIT: L27142.1, EVALUE 1.00e-121; SWISSPROT HIT: P35240, EVALUE 3.00e-22; EST_HUMAN HIT: AI272170.1, EVALUE 1.00e-120
atgcggtctgaggagacagctgacctgttggctgaaaaggcccagatcaccgaggaggaggcaaaacttctggcccagaaggccgcagaggctgagcaggaaatgcagcgcatcaaggccacagcgattcgcacggaggaggagaagcgcctgatggagcagaaggtgctggaagccgaggtgctggcactgaagatggctgaggagtcagagaggaggt

SEQ ID NO: 16907 - DNA, 121 bp, Homo sapiens
  MAP TO AC004882.2; EXPRESSED IN BONE MARROW, SIGNAL = 0.68; EXPRESSED IN FETAL LIVER, SIGNAL = 0.85; EXPRESSED IN LUNG, SIGNAL = 0.82; EXPRESSED IN HELA, SIGNAL = 1.8; EXPRESSED IN BRAIN, SIGNAL = 0.89; EXPRESSED IN HEART, SIGNAL = 1.1; EXPRESSED IN HBL100, SIGNAL = 1.5; EXPRESSED IN ADULT LIVER, SIGNAL =   1; EXPRESSED IN PLACENTA, SIGNAL = 0.69; EXPRESSED IN BT474, SIGNAL = 0.7; EST_HUMAN HIT: H55159.1, EVALUE 4.00e-62; SWISSPROT HIT: P46662, EVALUE 5.00e-05; NT HIT: gi4557794, EVALUE 3.00e-62
ggagcggcagcgcctcgctcgagagaagcagatgagggaggaggctgaacgcacgagggatgagttggagaggaggctgctgcagatgaaagaagaagcaacaatggccaacgaagcactg

SEQ ID NO: 16908 - DNA, 1209 bp, Homo sapiens
  MAP TO AC004832.2; EXPRESSED IN BT474, SIGNAL = 1.9; EXPRESSED IN HELA, SIGNAL = 0.73; EXPRESSED IN ADULT LIVER, SIGNAL = 5.5; EXPRESSED IN BONE MARROW, SIGNAL = 4.1; EXPRESSED IN HBL100, SIGNAL =   3; EXPRESSED IN FETAL LIVER, SIGNAL = 3.7; EXPRESSED IN LUNG, SIGNAL = 5.3; EXPRESSED IN BRAIN, SIGNAL =  10; EXPRESSED IN PLACENTA, SIGNAL = 2.1; EXPRESSED IN HEART, SIGNAL = 1.8; NT HIT: gi4758977, EVALUE 0.00e+00; SWISSPROT HIT: P20761, EVALUE 4.00e-07; EST_HUMAN HIT: BE514786.1, EVALUE 0.00e+00
gacttttccatctgcatcagtaacatcaccccagcagatgccggcacctactactgtgtgaagttccagaaagggagccctgacgtggagttgaagtctggagcaggcactgagctgtctgtgcgtgccaaaccctctgcccccgtggtatcgggccccgcagcgagggccacacctgaccacacagtgagcttcacctgcgagtctcatggcttctcacccagagacatcagcctgaaatggttcaaaaatgggaatcagctctcagacttccagaccaacgtggaccccgcaagagagagcgtgtcctacagcatccacagcacagccaatgtggtgctgacccgcggggacattcactctcaagtcatctgcgaggtggcccacgtcaccttgcggggggactcttttcgtgggactgccaacttgtctgagactatccaagttccacccaccttggaggttactcaacagcccatgagggcagagaaccaggtgaatatcacctgccaggtgacgaaattctacccccagagactacagttgacctggttggagaacggcaatgtgtcccggacagaaacggcctcaactcttacagagaacaaggatggcacctacaactggatgagctggctcctggtgaatgtatctgcccacagggatgatgtgaagctcacctgccaggtggagcatgacgggcagtcagcggtcagcaaaagccatgacctgaaggtctcagcccacctgaaggagcagagctcaaataccgccgctgagaacactggacctaatgaacagaacatctatattgtggtgggcgtggtgtgcaccttgctggtggccctactgatggaggctctctacctcgtccgaatcagacagaagaaagcccagggctccacttcttctacaaggttgcatgaacccgagaagaatgccagaaaaataacccaggacacaaatgatatcacatatgcggacctgaacctgcccaaggggaagaagcctgctccccgggccgcggagcccaacaaccacacagagtatgccagcattcagaccagcctgcagcctgcgtcggaggacaccctcacctatgctgacctggacatggtgcacctcaaccggacccccaagcagctggcccccaagcccgagctgtccttctcagagtatgccagcatccaggtcccgaggaagtgaatg

SEQ ID NO: 16909 - DNA, 186 bp, Homo sapiens
  MAP TO AC004832.2; EXPRESSED IN FETAL LIVER, SIGNAL =   2; EXPRESSED IN LUNG, SIGNAL = 0.79; EXPRESSED IN HEART, SIGNAL = 1.2; EXPRESSED IN BT474, SIGNAL = 1.2; EXPRESSED IN BONE MARROW, SIGNAL = 1.2; EXPRESSED IN HELA, SIGNAL = 0.89; EXPRESSED IN ADULT LIVER, SIGNAL = 6.7; EXPRESSED IN PLACENTA, SIGNAL = 0.92; EXPRESSED IN BRAIN, SIGNAL = 1.8; EXPRESSED IN HBL100, SIGNAL = 1.9; SWISSPROT HIT: P49193, EVALUE 8.00e-07; NT HIT: gi11417966, EVALUE 1.00e-100; EST_HUMAN HIT: AV646993.1, EVALUE 3.00e-86
atccaacagtatctgtcagggggtatgtgtggctatgacctggatggctgcccagtctggtacgacataattggacctctggatgccaagggtctgctgttctcagcctccaaacaggacctgctgaggaccaagatgcgggagtgtgagctgcttctgcaagagtgtgcccaccagaccacaaag

SEQ ID NO: 16910 - DNA, 138 bp, Homo sapiens
  MAP TO AC004032.7; EXPRESSED IN HELA, SIGNAL = 2.9; EXPRESSED IN ADULT LIVER, SIGNAL = 0.78; EXPRESSED IN BRAIN, SIGNAL =   1; EXPRESSED IN BONE MARROW, SIGNAL = 0.75; EXPRESSED IN FETAL LIVER, SIGNAL = 0.78; EXPRESSED IN LUNG, SIGNAL = 1.2; EXPRESSED IN HEART, SIGNAL = 1.3; EXPRESSED IN PLACENTA, SIGNAL = 0.83; EXPRESSED IN HBL100, SIGNAL = 0.94; NT HIT: gi11417901, EVALUE 1.00e-68; EST_HUMAN HIT: AA339316.1, EVALUE 3.00e-63; SWISSPROT HIT: Q10571, EVALUE 2.00e-20
agggaccgccaggtgggcacggaggctcgagccttggcgtcacccacgtcgtctgtgcagtggacagacaggcactgcaagtggctgccaggctgggatgctgaggccttgtttgcagggaggtcgtgggctgtggag

SEQ ID NO: 16911 - DNA, 571 bp, Homo sapiens
  MAP TO AC006333.3; EXPRESSED IN BONE MARROW, SIGNAL = 4.1; EXPRESSED IN HBL100, SIGNAL = 3.2; EXPRESSED IN FETAL LIVER, SIGNAL = 2.8; EXPRESSED IN ADULT LIVER, SIGNAL = 2.1; EXPRESSED IN BRAIN, SIGNAL = 2.7; EXPRESSED IN BT474, SIGNAL = 2.9; EXPRESSED IN LUNG, SIGNAL =   3; EXPRESSED IN PLACENTA, SIGNAL = 3.9; EXPRESSED IN HEART, SIGNAL = 3.3; EXPRESSED IN HELA, SIGNAL = 2.5; EST_HUMAN HIT: AA487504.1, EVALUE 2.40e-02; NT HIT: Z22532.1, EVALUE 3.10e-01; SWISSPROT HIT: Q02357, EVALUE 7.00e-08
tgcactgaaatatcttatcccagtaacatctaaaaatgcaattcggaaaagtgggctaacaccaattcactcagcagcagatggacaaaatgcacagtgtctagaactgctcattgaaaatggttttgatgtcaacactctacttgctgaccacatttcccagagctatgacgatgagaggaagactgcgctgtattttggcgtttctaataatgacgttcattgcacagaagtccttctggctgcaggtgcagacccaaacttagatcccctcaactgtctacttgttgcagtgagggccaataattatgaaattgtcaggctgcttctctcccatggagctaatgtcaattgttattttatgcatgtgaatgacactcgtttccccagtgtcattcaatatgctctaaacgacgaggtaatgctgaggctattgctgaataatggctatcaagtggagatgtgctttgactgcatgcatggtgacatctttggaaattcatttgtgtggtcagagatacaggaagaggtgctgccaggatggacatcttgtgtaataaaagataacccg

SEQ ID NO: 16912 - DNA, 290 bp, Homo sapiens
  MAP TO AC006333.3; EXPRESSED IN PLACENTA, SIGNAL = 0.62; EXPRESSED IN HEART, SIGNAL =  42; EST_HUMAN HIT: AA953770.1, EVALUE 0.00e+00; SWISSPROT HIT: P29536, EVALUE 9.00e-08; NT HIT: X94363.1, EVALUE 3.80e-02
cttctgggtctgacaaagcagggaccatgtctacctttggctaccgaagaggactcagtaaatacgaatccatcgacgaggatgaactcctcgcctccctgtcagccgaggagctgaaggagctagagagagagttggaagacattgaacctgaccgcaaccttcccgtggggctaaggcaaaagagcctgacagagaaaacccccacagggacattcagcagagaggcactgatggcctattgggaaaaggagtcccaaaaactcttggagaaggagaggctgggggaa

SEQ ID NO: 16913 - DNA, 274 bp, Homo sapiens
  MAP TO AC006333.3; EXPRESSED IN BRAIN, SIGNAL = 0.7; EXPRESSED IN HEART, SIGNAL =  31; EST_HUMAN HIT: C04498.1, EVALUE 1.00e-110; SWISSPROT HIT: P29536, EVALUE 1.00e-28
ccgctttgctgaagccctcaaggacaacactgtggtgaagacgttcagtctggccaacacgcatgccgacgacagtgcagccatggccattgcagagatgctcaaagtcaatgagcacatcaccaacgtaaacgtcgagtccaacttcataacgggaaaggggatcctggccatcatgagagctctccagcacaacacggtgctcacggagctgcgtttccataaccagaggcacatcatgggcagccaggtggaaatggagattgtcaagctg

SEQ ID NO: 16914 - DNA, 289 bp, Homo sapiens
  MAP TO AC006343.2; EXPRESSED IN FETAL LIVER, SIGNAL = 0.85; EXPRESSED IN LUNG, SIGNAL = 0.82; EXPRESSED IN HELA, SIGNAL = 0.87; EXPRESSED IN PLACENTA, SIGNAL =  17; EXPRESSED IN BT474, SIGNAL = 0.72; EXPRESSED IN BONE MARROW, SIGNAL = 0.79; EXPRESSED IN HBL100, SIGNAL = 0.7; EXPRESSED IN ADULT LIVER, SIGNAL = 1.5; EXPRESSED IN BRAIN, SIGNAL = 0.78; EXPRESSED IN HEART, SIGNAL = 1.1; NT HIT: gi11419966, EVALUE 0.00e+00; SWISSPROT HIT: P19801, EVALUE 7.00e-54; EST_HUMAN HIT: AW962599.1, EVALUE 0.00e+00
cttgcccaggtgatggcctgctcctcctgccagcctgggggcagcacctggtcggccatggagtggatctgcaggcggtacgtgcgcttgtggccccaggggttctcctgggggctggtaaagagcaggtacttaggcagcttccttttgaagcggaaggccgcctggcgctcccaggagtactgcgtctgctccagagttggctggaccacgcggtgtcttgggctccaggggttggtgatgttttctagcttcatctgcagtgtctggaagctgttcttggtgcctg

SEQ ID NO: 16915 - DNA, 696 bp, Homo sapiens
  MAP TO AC006390.8; EXPRESSED IN HBL100, SIGNAL =  51; EXPRESSED IN FETAL LIVER, SIGNAL =  38; EXPRESSED IN HEART, SIGNAL =  15; EXPRESSED IN BONE MARROW, SIGNAL =  17; EXPRESSED IN ADULT LIVER, SIGNAL =   6; EXPRESSED IN PLACENTA, SIGNAL =  12; EXPRESSED IN BT474, SIGNAL =  31; EXPRESSED IN LUNG, SIGNAL =  15; EXPRESSED IN HELA, SIGNAL =  33; EXPRESSED IN BRAIN, SIGNAL =  15; EST_HUMAN HIT: AU120931.1, EVALUE 0.00e+00; SWISSPROT HIT: P49312, EVALUE 8.00e-68; NT HIT: gi4504444, EVALUE 0.00e+00
agcaatggggaaggctcactctcacagactgtgtggtctgagagatccaaacaccaacagctccaggggctttgggtttgtcaccaatgccactgtggaggaggtggaggcagccatgaatgcaaggccacacaaggtgaatggaagagttgtgaaaccaaagagagctgtctcaagagaagattctcaaagagcaggtgtccacttaactgtgaaaaaggtatttgttggtggcattaaagaagacactgaagaacatcaccaaagagatgatttcagacaatttgggaaaaccgaagtgattgaaatcataactgaatgaggcagtagcaagaaaaggggctttgcttttgtaagctttgaagaccatgactccaaggataagactgtcatttggaaacgccatcccgtgaatggctacaactgtgaagttaggaaagccttgtcacacaagagatggctagtgcttcatccagccaaagaggtcaaaatggttctggaaactttggtggtggtcgtagaggtggttttgatgggaatgacaactttagtcatagaggaaacttcagtggttgtgctggctttggtggcacccatgatggtggtggatgtggtggcagcggggatggctataaggaatttggtaatgatgaaagcaattttggaggtggtggaagctacaatgattttggcaat

SEQ ID NO: 16916 - DNA, 233 bp, Homo sapiens
  MAP TO AC006390.8; EXPRESSED IN HBL100, SIGNAL = 0.96; EXPRESSED IN FETAL LIVER, SIGNAL = 1.1; EXPRESSED IN BRAIN, SIGNAL = 2.3; EXPRESSED IN PLACENTA, SIGNAL = 1.1; EXPRESSED IN BT474, SIGNAL = 1.9; EXPRESSED IN BONE MARROW, SIGNAL = 1.1; EXPRESSED IN LUNG, SIGNAL = 1.4; EXPRESSED IN HELA, SIGNAL = 0.9; EXPRESSED IN ADULT LIVER, SIGNAL = 1.6; EXPRESSED IN HEART, SIGNAL = 1.9; EST_HUMAN HIT: AI807917.1, EVALUE 5.00e-60; NT HIT: AL161544.2, EVALUE 1.40e-01; SWISSPROT HIT: P03111, EVALUE 1.60e-01
ctcttccagttctgcagctgcctgttcctttgtcagtttaattatttccctcccaaggctgtttacttcttcctcagaaggtaactggggtaatgaaggatgaaagagcttgcattggttcccgcggctctgatttgctggggagttgacagcgggcctcccagcatcctcaggcgctgtcaacgcctcagcagcggcacaactttcatcttcttcttgcttctgagcctccc

SEQ ID NO: 16917 - DNA, 95 bp, Homo sapiens
  MAP TO AC006432.15; EXPRESSED IN PLACENTA, SIGNAL = 2.2; EXPRESSED IN LUNG, SIGNAL = 3.2; EXPRESSED IN HBL100, SIGNAL = 2.2; EXPRESSED IN FETAL LIVER, SIGNAL = 2.3; EXPRESSED IN HELA, SIGNAL = 2.9; EXPRESSED IN BRAIN, SIGNAL = 3.7; EXPRESSED IN BT474, SIGNAL = 2.3; EXPRESSED IN BONE MARROW, SIGNAL = 3.2; EXPRESSED IN ADULT LIVER, SIGNAL = 2.3; EXPRESSED IN HEART, SIGNAL = 3.1; NT HIT: AL163303.2, EVALUE 5.00e-08; EST_HUMAN HIT: AW993411.1, EVALUE 2.00e-07; SWISSPROT HIT: Q32001, EVALUE 1.40e+00
ttcccctgtatgtggtcatagaagtcttccatgttgatggttgctgtggtgtgagagcagaagaaaaacacattggaggtggtttttccacacac

SEQ ID NO: 16918 - DNA, 160 bp, Homo sapiens
  MAP TO AC006432.15; EXPRESSED IN BRAIN, SIGNAL = 1.9; EXPRESSED IN BT474, SIGNAL = 1.9; EXPRESSED IN BONE MARROW, SIGNAL = 2.1; EXPRESSED IN HELA, SIGNAL = 1.9; EXPRESSED IN ADULT LIVER, SIGNAL = 1.8; EXPRESSED IN HEART, SIGNAL = 1.8; EXPRESSED IN PLACENTA, SIGNAL = 1.7; EXPRESSED IN HBL100, SIGNAL = 2.3; EXPRESSED IN FETAL LIVER, SIGNAL = 1.5; EXPRESSED IN LUNG, SIGNAL = 1.6; EST_HUMAN HIT: AU118789.1, EVALUE 6.00e-78; SWISSPROT HIT: O46392, EVALUE 1.00e-03; NT HIT: gi4758135, EVALUE 1.00e-49
atttatcactgtagtcggacacactcccagctggcccagtttgtgcatgaggtgaagaagagcccctttggcaaggatgttcggctggtctccctcggctcccggcaggtaaacagtagccagtatttccaccaggggccatcctgctcctttccccaca

SEQ ID NO: 16919 - DNA, 201 bp, Homo sapiens
  MAP TO AC006440.3; EXPRESSED IN BONE MARROW, SIGNAL = 0.67; EXPRESSED IN LUNG, SIGNAL =   1; EXPRESSED IN ADULT LIVER, SIGNAL =   1; EXPRESSED IN BRAIN, SIGNAL = 0.69; EXPRESSED IN PLACENTA, SIGNAL = 0.82; EXPRESSED IN HBL100, SIGNAL = 2.5; EXPRESSED IN FETAL LIVER, SIGNAL = 0.79; EXPRESSED IN HELA, SIGNAL = 0.69; EXPRESSED IN HEART, SIGNAL = 1.5; EST_HUMAN HIT: AW275237.1, EVALUE 1.00e-100; SWISSPROT HIT: Q02224, EVALUE 1.70e-02
atagtagagctgaagctggagcatgaacaggagaagacgcacctattacagcagcataacgcagagaaggatagcctagtccgagaccatgaacgggaaattgaaaacctggaaaaacagcttcgcgctgccaatatggagcacgaaaatcaaattcaggagttcaagaaacgagatgcacaggtaattatcaataatatt

SEQ ID NO: 16920 - DNA, 1930 bp, Homo sapiens
  MAP TO AC006440.3; EXPRESSED IN PLACENTA, SIGNAL = 5.6; EXPRESSED IN LUNG, SIGNAL = 6.4; EXPRESSED IN HEART, SIGNAL = 4.7; EXPRESSED IN HBL100, SIGNAL = 5.7; EXPRESSED IN BT474, SIGNAL = 4.5; EXPRESSED IN BONE MARROW, SIGNAL = 7.1; EXPRESSED IN FETAL LIVER, SIGNAL = 6.5; EXPRESSED IN HELA, SIGNAL = 5.2; EXPRESSED IN ADULT LIVER, SIGNAL =   6; EXPRESSED IN BRAIN, SIGNAL = 6.5; NT HIT: AF107045.1, EVALUE 2.00e-15; EST_HUMAN HIT: AA459933.1, EVALUE 4.00e-93; SWISSPROT HIT: Q15417, EVALUE 8.00e-18
tcttaattttttagtggattgaaaaccatggtcacatagttcatcagaaaagcacttcaaggatgtcagtagctttggattctaaagcaattaactataacctttctaaacaagagacagtaaaaattctcggatttttccaaattctgttctgcgattatagtactggagatcagtgcttgtgacaaataacaggtattaagcatgtcatcaggctggtttagaatgcaagcaaggtgatgtgcaaatctaaatgaaattgaataatgagtagaacataggagagtagggagatatccctagaacctaggtctactataactttagtccgtgagtcagtcttttaaaataaccacacaggggtactcacaacattgaatttttgtacaaaaatggggaaccagattatgatgcatggtggatcttactgatgacttcagaaaaggtgcttgagtattcttagaagccagccagccagctagcctttccccagtatacactaattcagataaagaatatttcactcagatacatatgagaagataataggtttcaaatttttgaagttataaatatataatgtgttttttttatgactaaatacctggagaggagatcaggaggtaactctccattgatcagggtcataggctgacaattcctaaagctctaaggagtgtagagggctgggggcattttcttgagaaccatagtgatggaaaaccagtgggattccagaagggaccttgaagctctgcaaactcagctagaccatatgactgaggcccacactcatataccacccagtcatctccagggggcgctatgcaagtaagatgccagcatctcccaccagtttccactttagccagtagcatcagagaccctcgcatgcgtgtgcagcctcccccactactagaaccacaatgatactctacatgaagggtccctccactgatttatcagggtcaagaacaagattaaatatgattgtcaggcaaaagaagattttcacaagtggatagaagaggtgactagcataagcactgaaccagctttcaactgggcttaaaaaatgacttaatcctcttcaaacttaaccagattcaatgaagaaagtcaatgagccttccttgaactgccgtgtcttcctttctaaactattcaggtgtgtggtatgaagctactggacatttttataatcaagtgatattttgaaactggaaacatgactcatgtctgtcagcatgacattggagtcaaggtcatacaggaaaagcaagacattttgatgaaggaaaatcataagctgaatttgcagataggataaacaaacatgctagtgaggtaggtatgacagcctaagagatcagcaggtatctttatcctcccaaatggtaaacaaactgtttaagtactcaagaataagctagcaaacaggcagtaacaaatgagccagggttagatgctggtactgggtactagaagatgcatctatgtccagaagctaccattgtaatcagtggacatctcaacaatccctttgcagatgaatatcaacaagttgtgtccgggcttgggtggtgagtgtatgactccagatgttatgctgctccagcagaaccagtcactcttgtggaagccaaggaatgggaacagaagaatatgaaatctgtggtactgatcatcagtcttaatatccaaatgaatatcatggtacataccatgatggctatcaaagatgggttttgttgttgttgttgttgttgttgttgttgtttttgagacagagtcttactccatcactcaggctggtgtgcagtggcacaatcacagcttactccatcctcgacttccccaggctcaggtgttcctcctacctcaggctcccaagcagctggaactacaggtgtgcaccaccaagcccagc

SEQ ID NO: 16921 - DNA, 80 bp, Homo sapiens
  MAP TO AC006482.2; EXPRESSED IN FETAL LIVER, SIGNAL = 8.7; EXPRESSED IN LUNG, SIGNAL = 8.3; EXPRESSED IN PLACENTA, SIGNAL =  13; EXPRESSED IN HEART, SIGNAL = 6.4; EXPRESSED IN BRAIN, SIGNAL =  11; EXPRESSED IN ADULT LIVER, SIGNAL = 6.1; EXPRESSED IN HELA, SIGNAL = 7.5; EXPRESSED IN HBL100, SIGNAL = 8.9; EXPRESSED IN BONE MARROW, SIGNAL =  12; EXPRESSED IN BT474, SIGNAL = 9.5; NT HIT: AL163227.2, EVALUE 6.00e-26; EST_HUMAN HIT: BE062167.1, EVALUE 2.00e-28
atttgtggaactttgaacttgagatagatgatttagagcatctggcagaagaaatttctaagcagcaaagcattcaagag

SEQ ID NO: 16922 - DNA, 102 bp, Homo sapiens
  MAP TO AC006482.2; EXPRESSED IN HEART, SIGNAL = 0.96; EXPRESSED IN PLACENTA, SIGNAL = 1.1; EXPRESSED IN BT474, SIGNAL = 0.72; EXPRESSED IN BONE MARROW, SIGNAL = 0.99; EXPRESSED IN LUNG, SIGNAL = 0.78; EXPRESSED IN HELA, SIGNAL = 0.82; EXPRESSED IN ADULT LIVER, SIGNAL = 0.78; EXPRESSED IN BRAIN, SIGNAL = 1.6; EXPRESSED IN HBL100, SIGNAL = 0.8; EXPRESSED IN FETAL LIVER, SIGNAL = 0.91; NT HIT: AB037570.1, EVALUE 3.40e+00; EST_HUMAN HIT: BF240627.1, EVALUE 3.20e-01; SWISSPROT HIT: P02769, EVALUE 4.10e+00
ccagacagtaagcatcccaagaacaagaaccatatttccccgtttccttgtattgatcacagttgaatctgatactactagaaggaatcattattggcagag

SEQ ID NO: 16923 - DNA, 127 bp, Homo sapiens
  MAP TO AC006483.2; EXPRESSED IN PLACENTA, SIGNAL = 0.69; EXPRESSED IN HBL100, SIGNAL = 1.1; EXPRESSED IN FETAL LIVER, SIGNAL = 0.76; EXPRESSED IN LUNG, SIGNAL = 0.8; EXPRESSED IN HELA, SIGNAL = 0.99; EXPRESSED IN BRAIN, SIGNAL = 1.6; EXPRESSED IN BT474, SIGNAL =   2; EXPRESSED IN ADULT LIVER, SIGNAL = 0.86; EXPRESSED IN HEART, SIGNAL = 1.1; NT HIT: Z49429.1, EVALUE 2.40e-01; EST_HUMAN HIT: BF125544.1, EVALUE 1.00e-65; SWISSPROT HIT: Q9Z9H0, EVALUE 1.80e-02
cggtgtggatgaggctcttgtcaaggcacagggctgcaagcttccgacaggtacgccggacgttcagaatcagatctgtgctggggacgtgactcaggatgtgaaggaggatctcatcagagaaccc

SEQ ID NO: 16924 - DNA, 293 bp, Homo sapiens
  MAP TO AC006483.2; EXPRESSED IN BRAIN, SIGNAL =  18; EXPRESSED IN HEART, SIGNAL =  48; EXPRESSED IN BONE MARROW, SIGNAL =  81; EXPRESSED IN ADULT LIVER, SIGNAL =  28; EXPRESSED IN PLACENTA, SIGNAL =  24; EXPRESSED IN BT474, SIGNAL =  85; EXPRESSED IN HBL100, SIGNAL =  78; EXPRESSED IN FETAL LIVER, SIGNAL =  37; EXPRESSED IN LUNG, SIGNAL =  45; EXPRESSED IN HELA, SIGNAL =  40; SWISSPROT HIT: P53505, EVALUE 5.00e-51; NT HIT: gi11420427, EVALUE 0.00e+00; EST_HUMAN HIT: BF663023.1, EVALUE 0.00e+00
atcatgtttgagaccttcaacaccccagccatgtacgttgctatccaggctgtgctatccctgtacgcctctggccgtaccactggcatcgtgatggactccggtgacggggtcacccacactgtgcccatctacgaggggtatgccctcccccatgccatcctgcgtctggacctggctggccgggacctgactgactacctcatgaagatcctcaccgagcgcggctacagcttcaccaccacggccgagcgggaaatcgtgcgtgacattaaggagaagctgtgctacgt

SEQ ID NO: 16925 - DNA, 177 bp, Homo sapiens
  MAP TO AC006512.12; EXPRESSED IN LUNG, SIGNAL = 5.5; EXPRESSED IN BRAIN, SIGNAL = 2.2; EXPRESSED IN PLACENTA, SIGNAL = 6.6; EXPRESSED IN BONE MARROW, SIGNAL = 3.8; EXPRESSED IN HBL100, SIGNAL = 6.6; EXPRESSED IN FETAL LIVER, SIGNAL =  11; EXPRESSED IN HELA, SIGNAL = 3.5; EXPRESSED IN ADULT LIVER, SIGNAL = 6.9; EXPRESSED IN BT474, SIGNAL = 5.9; EXPRESSED IN HEART, SIGNAL =   2; NT HIT: gi11436324, EVALUE 4.00e-66; EST_HUMAN HIT: W26367.1, EVALUE 8.00e-92; SWISSPROT HIT: Q15818, EVALUE 2.20e+00
gcagtcatggagtaacccatgaagagccagtggatggtctgttgcaccaaatagtagaagggctggaggacagtaatggcggccagcttgctcagggtggggctctcttgaatgagcctggcagcctggggagggaggaggagctcatcagcatcttgtcccttatattccccttca

SEQ ID NO: 16926 - DNA, 143 bp, Homo sapiens
  MAP TO AC006552.7; EXPRESSED IN HELA, SIGNAL =  11; EXPRESSED IN HEART, SIGNAL = 5.1; EXPRESSED IN FETAL LIVER, SIGNAL = 9.6; EXPRESSED IN LUNG, SIGNAL = 9.4; EXPRESSED IN ADULT LIVER, SIGNAL = 8.6; EXPRESSED IN BRAIN, SIGNAL = 4.5; EXPRESSED IN PLACENTA, SIGNAL = 8.1; EXPRESSED IN BT474, SIGNAL =  12; EXPRESSED IN BONE MARROW, SIGNAL =  14; EXPRESSED IN HBL100, SIGNAL =  31; NT HIT: AL163249.2, EVALUE 5.00e-43; EST_HUMAN HIT: AA313487.1, EVALUE 3.00e-54
ctcgaaggtctgcagtttcacttctgaagctagtgagaccacgaacccaccaggaggaacgaacaactccagacgcaccgccttaagagctgtaacactcaccgcgaaggtctgcagcttcactcctgagccagcaagaccac

SEQ ID NO: 16927 - DNA, 672 bp, Homo sapiens
  MAP TO AC006581.16; EXPRESSED IN HEART, SIGNAL =  13; EXPRESSED IN PLACENTA, SIGNAL =  41; EXPRESSED IN BRAIN, SIGNAL =  23; EXPRESSED IN HELA, SIGNAL =  25; EXPRESSED IN FETAL LIVER, SIGNAL =  28; EXPRESSED IN HBL100, SIGNAL =  46; EXPRESSED IN BONE MARROW, SIGNAL =  17; EXPRESSED IN BT474, SIGNAL =  71; EXPRESSED IN ADULT LIVER, SIGNAL =  15; EXPRESSED IN LUNG, SIGNAL =  29; NT HIT: gi11038623, EVALUE 0.00e+00; EST_HUMAN HIT: AW959289.1, EVALUE 0.00e+00; SWISSPROT HIT: P47179, EVALUE 1.00e-01
ccacctacacacagatccagccccattcactgattcagcaacagcaacagatccacctccagcagaaacaggtggtgatccagcagcagattgccatccaccaccagcagcagttccagcaccggcagtcccagctccttcacacagctacacacctccagttggcgcagcagcagcagcagcaacaacagcaacagcagcaacagcagcagccgcaagccaccaccctcactgcccctcagccaccacaggtcccacctactcagcaggtcccaccttcccagtcccagcagcaagcccaaaccctggtcgttcagcccatgcttcagtcttcacccttgtctcttccacctgatgcagcccctaagccaccaattcccatccaatccaaaccacctgtagcacctatcaagccgcctcagttaggggccgctaagatgtcagctgcccagcaaccaccaccccatatccctgtgcaagttgtaggcactcgacagccaggtacagcccaggcacaggctttggggttggcacagctggcagctgctgtacctacttcccgggggatgccaggtacagtgcagtctggtcaggcccatttggcctcctcgccaccttcatcccaggctcctggtgcactgcaggagtgccctcccacattggcccctggga

SEQ ID NO: 16928 - DNA, 227 bp, Homo sapiens
  MAP TO AC006581.16; EXPRESSED IN FETAL LIVER, SIGNAL = 0.88; EXPRESSED IN LUNG, SIGNAL = 2.6; EXPRESSED IN PLACENTA, SIGNAL = 1.8; EXPRESSED IN BONE MARROW, SIGNAL = 1.3; EXPRESSED IN HBL100, SIGNAL = 1.9; EXPRESSED IN ADULT LIVER, SIGNAL = 0.85; EXPRESSED IN BRAIN, SIGNAL = 2.1; EXPRESSED IN HEART, SIGNAL = 2.6; EXPRESSED IN BT474, SIGNAL = 1.5; EXPRESSED IN HELA, SIGNAL = 0.66; NT HIT: AB018556.1, EVALUE 1.00e-115; SWISSPROT HIT: P39769, EVALUE 5.00e-08; EST_HUMAN HIT: AL045854.1, EVALUE 1.00e-118
aaaaagctgaatcagtggctaatgtgaatgctaatactccaagcagtgaactagtagccttgacccccgccccttcagtaccgcctcctacactagccatggtgtctagacaaatgggtgactcaaaacccccacaggccatcgtgaagccccagattctcacccacatcattgaaggctttgttatccaggaaggagcagaacctttcccggtgagggcagggcca

SEQ ID NO: 16929 - DNA, 110 bp, Homo sapiens
  MAP TO AC006581.16; EXPRESSED IN PLACENTA, SIGNAL = 1.6; EXPRESSED IN BT474, SIGNAL = 1.6; EXPRESSED IN HBL100, SIGNAL = 2.9; EXPRESSED IN LUNG, SIGNAL = 2.3; EXPRESSED IN HELA, SIGNAL = 1.2; EXPRESSED IN ADULT LIVER, SIGNAL = 1.2; EXPRESSED IN HEART, SIGNAL = 1.6; EXPRESSED IN BONE MARROW, SIGNAL = 2.4; EXPRESSED IN FETAL LIVER, SIGNAL = 1.3; EXPRESSED IN BRAIN, SIGNAL =   3; NT HIT: X56256.1, EVALUE 1.00e-55; EST_HUMAN HIT: BE746901.1, EVALUE 2.00e-55; SWISSPROT HIT: P24668, EVALUE 7.00e-17
cgctagggtgtgtcgattgcaggagatcatcaccactgcacgacgctgctccttgccacagtggttgtcatattcatcaccccctttatagatcagcatgatccaattac

SEQ ID NO: 16930 - DNA, 108 bp, Homo sapiens
  MAP TO AC007002.2; EXPRESSED IN BRAIN, SIGNAL = 0.76; EXPRESSED IN FETAL LIVER, SIGNAL = 1.1; EXPRESSED IN LUNG, SIGNAL = 1.1; EXPRESSED IN HELA, SIGNAL = 0.97; EXPRESSED IN ADULT LIVER, SIGNAL = 1.1; EXPRESSED IN PLACENTA, SIGNAL = 1.5; EXPRESSED IN BT474, SIGNAL = 1.1; EXPRESSED IN BONE MARROW, SIGNAL = 1.5; EXPRESSED IN HBL100, SIGNAL = 0.91; EXPRESSED IN HEART, SIGNAL = 1.2; EST_HUMAN HIT: AA188730.1, EVALUE 6.00e-02; SWISSPROT HIT: P27197, EVALUE 3.10e+00
cggatgccggtggctgctgcaccccattccctgcagcccagccacgtgccgggtgctctccagctttcttccagctgccagcggctcctcttacaatgccaaccagca

SEQ ID NO: 16931 - DNA, 132 bp, Homo sapiens
  MAP TO AC007033.3; EXPRESSED IN PLACENTA, SIGNAL = 1.8; EXPRESSED IN BT474, SIGNAL = 2.3; EXPRESSED IN HEART, SIGNAL = 3.5; EXPRESSED IN ADULT LIVER, SIGNAL = 2.9; EXPRESSED IN HELA, SIGNAL = 2.1; EXPRESSED IN LUNG, SIGNAL = 1.6; EXPRESSED IN FETAL LIVER, SIGNAL = 3.2; EXPRESSED IN BONE MARROW, SIGNAL = 1.5; EXPRESSED IN BRAIN, SIGNAL = 2.5; EXPRESSED IN HBL100, SIGNAL = 3.8; EST_HUMAN HIT: BF675972.1, EVALUE 1.70e+00
tcatgtagaagaatctctctgttaaacacacagagagagagacagaagaagaagaaggaggaggaggaggagaaggaggagaaagaggaggagcagcaaaatcatttacatggttattcagttcagtgtaac

SEQ ID NO: 16932 - DNA, 190 bp, Homo sapiens
  MAP TO AC007041.3; EXPRESSED IN BT474, SIGNAL = 6.8; EXPRESSED IN BONE MARROW, SIGNAL = 9.6; EXPRESSED IN HBL100, SIGNAL = 7.1; EXPRESSED IN HELA, SIGNAL =  10; EXPRESSED IN ADULT LIVER, SIGNAL = 7.8; EXPRESSED IN PLACENTA, SIGNAL = 8.2; EXPRESSED IN FETAL LIVER, SIGNAL = 8.3; EXPRESSED IN LUNG, SIGNAL = 8.4; EXPRESSED IN BRAIN, SIGNAL =  11; EXPRESSED IN HEART, SIGNAL = 8.1; EST_HUMAN HIT: AI588883.1, EVALUE 1.00e-103; NT HIT: D87078.2, EVALUE 1.00e-103; SWISSPROT HIT: P25822, EVALUE 4.00e-18
gtgcatgattatctttctctgagcaggttcagccatatcaatcatcttttgaaccacgtaattggcatactggtccttcatcatggtgtataaggcactgtgaggaccatcattctggcagcaaacctcgtcaatcagtaaagctctctcagcacgggaggcatgagtaacacacttttctactacattg

SEQ ID NO: 16933 - DNA, 268 bp, Homo sapiens
  MAP TO AC007041.3; EXPRESSED IN BT474, SIGNAL = 4.3; EXPRESSED IN BONE MARROW, SIGNAL = 2.5; EXPRESSED IN HEART, SIGNAL = 1.5; EXPRESSED IN LUNG, SIGNAL = 3.2; EXPRESSED IN PLACENTA, SIGNAL = 2.4; EXPRESSED IN HBL100, SIGNAL = 2.4; EXPRESSED IN FETAL LIVER, SIGNAL = 2.3; EXPRESSED IN HELA, SIGNAL = 1.4; EXPRESSED IN ADULT LIVER, SIGNAL = 2.1; EXPRESSED IN BRAIN, SIGNAL = 3.5; EST_HUMAN HIT: AI114743.1, EVALUE 0.00e+00; SWISSPROT HIT: P92965, EVALUE 6.30e-01; NT HIT: AF315591.1, EVALUE 0.00e+00
ctgctgggaattgtagtcaaaaaggcctacagtagctcctgaagagtccattggtacctgattaccaggatagtcaaactgtaaggattccagaccaacttgttccatggcatccagattctgagtttcaggatttgaaaattcttcaacaagtggtttattagctgtaggattaggaagaggccccagtccttctgagggattagtattggggcccaagcgctcaactacttcagttggagaggcttgacgacttccaggagtacga

SEQ ID NO: 16934 - DNA, 618 bp, Homo sapiens
  MAP TO AC007051.3; EXPRESSED IN LUNG, SIGNAL = 1.4; EXPRESSED IN HELA, SIGNAL = 1.6; EXPRESSED IN BRAIN, SIGNAL = 1.7; EXPRESSED IN PLACENTA, SIGNAL = 0.9; EXPRESSED IN HBL100, SIGNAL = 1.9; EXPRESSED IN ADULT LIVER, SIGNAL = 0.82; EXPRESSED IN HEART, SIGNAL =   1; EXPRESSED IN BT474, SIGNAL = 1.5; EXPRESSED IN BONE MARROW, SIGNAL = 1.2; EXPRESSED IN FETAL LIVER, SIGNAL = 2.2; NT HIT: AB037784.1, EVALUE 0.00e+00; SWISSPROT HIT: P22760, EVALUE 2.00e-42; EST_HUMAN HIT: BE154994.1, EVALUE 0.00e+00
tttactcaagatgccagcctaaaaaataagctcaaactacaagctttaatttatccagttcttcaagctttagattttaacacaccatcttatcagcaaaatgtgaacaccccaatcctgccccgctatgtcatggtgaagtattgggtggactacttcaaaggcaactatgactttgtgcaggcaatgatcgttaacaatcacacttcacttgatgtggaagaggctgctgctgtcagggcccgtctaaactggacatccctcttgcctgcatccttcacaaagaactacaagcctgttgtacagaccacaggcaatgccaggattgtccaggagcttcctcagttgctggatgcccgctccgccccactcattgcagaccaggcagtgctgcagctcctcccaaagacctacattctgacgtgtgagcatgatgtcctcagagacgatggcatcatgtatgccaagcgtttggagagtgccggtgtggaggtgaccctggatcactttgaggatggctttcacggatgtatgattttcactagctggcccaccaacttctcagtgggaatccggactaggaatagttacatcaagtggctagatcaaaacctgtaa

SEQ ID NO: 16935 - DNA, 174 bp, Homo sapiens
  MAP TO AC007051.3; EXPRESSED IN HBL100, SIGNAL = 2.7; EXPRESSED IN BT474, SIGNAL = 2.6; EXPRESSED IN BONE MARROW, SIGNAL = 1.8; EXPRESSED IN FETAL LIVER, SIGNAL =  33; EXPRESSED IN LUNG, SIGNAL = 2.1; EXPRESSED IN HELA, SIGNAL = 2.5; EXPRESSED IN ADULT LIVER, SIGNAL = 5.8; EXPRESSED IN BRAIN, SIGNAL = 2.3; EXPRESSED IN PLACENTA, SIGNAL = 1.4; EXPRESSED IN HEART, SIGNAL = 1.6; EST_HUMAN HIT: BE799642.1, EVALUE 4.00e-79; NT HIT: AF238997.1, EVALUE 1.00e-93; SWISSPROT HIT: P38865, EVALUE 8.00e-05
ctcctgcaaacagtgctgcacatcatccaggtggtcataagctacctcctcatgctcatcttcatgacctacaatgggtacctctgcattgcagtaacagcaggggccggtacaagatacttcctcttcagctggaagaaggcagtggtagtggacatcacagagtattgccat

SEQ ID NO: 16936 - DNA, 153 bp, Homo sapiens
  MAP TO AC007051.3; EXPRESSED IN PLACENTA, SIGNAL = 1.8; EXPRESSED IN BT474, SIGNAL = 0.9; EXPRESSED IN FETAL LIVER, SIGNAL = 1.1; EXPRESSED IN LUNG, SIGNAL = 3.4; EXPRESSED IN ADULT LIVER, SIGNAL = 1.1; EXPRESSED IN BONE MARROW, SIGNAL =   1; EXPRESSED IN HBL100, SIGNAL = 0.97; EXPRESSED IN HEART, SIGNAL = 1.1; SWISSPROT HIT: P50591, EVALUE 3.00e-19; EST_HUMAN HIT: AU140043.1, EVALUE 8.00e-71; NT HIT: gi11435130, EVALUE 5.00e-71
gatcatggctatgatggaggtccaggggggacccagcctgggacagacctgcgtgctgatcgtgatcttcacagtgctcctgcagtctctctgtgtggctgtaacttacgtgtactttaccaacgagctgaagcaggtcagtgcagtgcagtg

SEQ ID NO: 16937 - DNA, 104 bp, Homo sapiens
  MAP TO AC007092.3; EXPRESSED IN HEART, SIGNAL =  14; EST_HUMAN HIT: AA316121.1, EVALUE 1.30e+00; NT HIT: gi8922672, EVALUE 7.50e-01; SWISSPROT HIT: Q09904, EVALUE 4.10e+00
aatcctgcatcctctgccacatttagcttctctgccatcaacctgccatatttcttcatgggctcggccactagtacttcagatcctcccaggagtcccatggc

SEQ ID NO: 16938 - DNA, 190 bp, Homo sapiens
  MAP TO AC007092.3; EXPRESSED IN HBL100, SIGNAL = 0.9; EXPRESSED IN HEART, SIGNAL = 0.78; EST_HUMAN HIT: AV731140.1, EVALUE 2.00e-28; NT HIT: AL163210.2, EVALUE 4.00e-35; SWISSPROT HIT: Q01886, EVALUE 3.70e+00
agtggttttgaccaaaatgctgatagtgatatggacaatgaagtccaggctgaggtggtcccagatggagatgaggaacttactgggaactggaataaaggtctctcttgctaggcttcagatgagagactggcaatattttgcccctgccctagagatgtgtgaaactttgaacttaagagagatgatt

SEQ ID NO: 16939 - DNA, 1836 bp, Homo sapiens
  MAP TO AC007281.3; EXPRESSED IN FETAL LIVER, SIGNAL = 0.64; EXPRESSED IN HELA, SIGNAL = 0.68; EXPRESSED IN ADULT LIVER, SIGNAL = 0.69; EXPRESSED IN HEART, SIGNAL = 6.1; EXPRESSED IN LUNG, SIGNAL = 0.83; EXPRESSED IN BRAIN, SIGNAL = 1.3; EXPRESSED IN PLACENTA, SIGNAL = 0.68; NT HIT: X91213.1, EVALUE 0.00e+00; EST_HUMAN HIT: AW452398.1, EVALUE 0.00e+00; SWISSPROT HIT: P32418, EVALUE 0.00e+00
gttgtgacagttggaagtgtcatgtacaacatgcggcgattaagtctttcacccaccttttcaatgggatttcatctgttagttactgtgagtctcttattttcccatgtggaccatgtaattgctgagacagaaatggaaggagaaggaaatgaaactggtgaatgtactggatcatattactgtaagaaaggggtgattttgcccatttgggaaccccaagacccttcttttggggacaaaattgctagagctactgtgtattttgtggccatggtctacatgtttcttggagtctctatcatagctgatcggttcatgtcctctatagaagtcatcacatctcaagaaaaagaaataaccataaagaaacccaatggagagaccaccaagacaactgtgaggatctggaatgaaacagtttctaacctgaccttgatggccctgggatcttctgctcctgagattctcctttcagtaattgaagtgtgtggccataacttcactgcaggagacctcggtcctagcaccatcgtgggaagtgctgcattcaatatgttcatcattattgcactctgtgtttatgtggtgcctgacggagagacaaggaagattaagcatttgcgtgtcttctttgtgacagcagcctggagcatctttgcctacacctggctttacattattttgtctgtcatatctcctggtgttgtggaggtctgggaaggtttgcttactttcttcttctttcccatctgtgttgtgttcgcttgggtagcggataggagacttctgttttacaagtatgtctacaagaggtatcgagctggcaagcagagggggatgattattgaacatgaaggagacaggccatcttctaagactgaaattgaaatggacgggaaagtggtcaattctcatgttgaaaatttcttagatggtgctctggttctggaggtggatgagagggaccaagatgatgaagaagctaggcgagaaatggctaggattctgaaggaacttaagcagaagcatccagataaagaaatagagcaattaatagaattagctaactaccaagtcctaagtcagcagcaaaaaagtagagcattttatcgcattcaagctactcgcctcatgactggagctggcaacattttaaagaggcatgcagctgaccaagcaaggaaggctgtcagcatgcacgaggtcaacactgaagtgactgaaaatgaccctgttagtaagatcttctttgaacaagggacatatcagtgtctggagaactgtggtactgtggcccttaccattatccgcagaggtggtgatttgactaacactgtgtttgttgacttcagaacagaggatggcacagcaaatgctgggtctgattatgaatttactgaaggaactgtggtgtttaagcctggtgatacccagaaggaaatcagagtgggtatcatagatgatgatatctttgaggaggatgaaaatttccttgtgcatctcagcaatgtcaaagtatcttctgaagcttcagaagatggcatactggaagccaatcatgtttctacacttgcttgcctcggatctccctccactgccactgtaactatttttgatgatgaccacgcaggcatttttacttttgaggaacctgtgactcatgtgagtgagagcattggcatcatggaggtgaaagtattgagaacatctggagctcgaggaaatgttatcgttccatataaaaccatcgaagggactgccagaggtggaggggaggattttgaggacacttgtggagagctcgaattccagaatgatgaaattgtgtaagtt

SEQ ID NO: 16940 - DNA, 362 bp, Homo sapiens
  MAP TO AC007381.2; EXPRESSED IN PLACENTA, SIGNAL = 4.9; EXPRESSED IN BONE MARROW, SIGNAL = 9.9; EXPRESSED IN LUNG, SIGNAL = 8.9; EXPRESSED IN HELA, SIGNAL = 9.7; EXPRESSED IN BRAIN, SIGNAL = 3.9; EXPRESSED IN HEART, SIGNAL =  10; EXPRESSED IN BT474, SIGNAL = 7.7; EXPRESSED IN HBL100, SIGNAL = 9.3; EXPRESSED IN FETAL LIVER, SIGNAL = 6.2; EXPRESSED IN ADULT LIVER, SIGNAL = 5.8; NT HIT: gi7549743, EVALUE 1.90e-01; EST_HUMAN HIT: AW935764.1, EVALUE 2.30e-01; SWISSPROT HIT: O15126, EVALUE 9.80e+00
agaccctggtgcagataatcatcatccactcagtgacaagaagctgagcgccgcttcggtaccaaggagaccgaatgtggcagggcaccaaggtgccatcttagatgcatccaggcagcagcagcacacagggaggtgtatgtgtttgcaagttgttgggttttttttcctccttctccttcttcttcttcatcttctccctctgttctctcaccctgctcagagaatcctctttcttgagagggatgccgttaactcagctgctcttagcatgcttccttttccctgtgcctgccgggccaaattcagccctgcagtcaatactgttggaaaagaaaatgacattaatttgtgtaaaagtg

SEQ ID NO: 16941 - DNA, 163 bp, Homo sapiens
  MAP TO AC007393.3; EXPRESSED IN BONE MARROW, SIGNAL = 1.3; EXPRESSED IN BRAIN, SIGNAL = 1.2; EXPRESSED IN HEART, SIGNAL = 0.99; EXPRESSED IN PLACENTA, SIGNAL = 1.1; EXPRESSED IN BT474, SIGNAL = 2.2; EXPRESSED IN HBL100, SIGNAL = 1.5; EXPRESSED IN LUNG, SIGNAL = 1.1; EXPRESSED IN HELA, SIGNAL = 1.6; EXPRESSED IN ADULT LIVER, SIGNAL = 1.1; EXPRESSED IN FETAL LIVER, SIGNAL =   1; NT HIT: U53220.1, EVALUE 2.00e-05; EST_HUMAN HIT: AA010206.1, EVALUE 6.00e-10; SWISSPROT HIT: P16799, EVALUE 3.80e+00
agtcagttcctacctggtagtcacaagaccagatgaggccagtttcttggtatgggttaccagtccagatggcgccagctggtccatcagaatgcagggtctgggaagtacctcaaacaccaatcttagggttcacaatagtagtgttatctataggagaaat

SEQ ID NO: 16942 - DNA, 181 bp, Homo sapiens
  MAP TO AC007401.2; EXPRESSED IN PLACENTA, SIGNAL = 2.1; EXPRESSED IN BT474, SIGNAL = 1.9; EXPRESSED IN HBL100, SIGNAL = 3.6; EXPRESSED IN HELA, SIGNAL = 4.4; EXPRESSED IN ADULT LIVER, SIGNAL = 1.9; EXPRESSED IN HEART, SIGNAL = 1.1; EXPRESSED IN BONE MARROW, SIGNAL = 1.7; EXPRESSED IN FETAL LIVER, SIGNAL = 1.8; EXPRESSED IN LUNG, SIGNAL = 1.8; EXPRESSED IN BRAIN, SIGNAL = 2.2; NT HIT: AF198490.1, EVALUE 1.00e-72; EST_HUMAN HIT: BE081333.1, EVALUE 4.00e-75; SWISSPROT HIT: P03355, EVALUE 2.00e-08
atgcccattaccatcccattaaaatctaatcacctttaccccactcaacgccaatatcccatcccacagcatgctttaaaaggattaaagcctgttaccactcgcctgctacagcatgggcttctaaaacctataaactctccttaccattcccccattttacctctcctaaaacgagaca

SEQ ID NO: 16943 - DNA, 136 bp, Homo sapiens
  MAP TO AC007401.2; EXPRESSED IN HBL100, SIGNAL = 2.2; EXPRESSED IN FETAL LIVER, SIGNAL = 3.5; EXPRESSED IN HELA, SIGNAL = 1.2; EXPRESSED IN BRAIN, SIGNAL = 0.73; EXPRESSED IN BT474, SIGNAL =   2; EXPRESSED IN BONE MARROW, SIGNAL = 1.7; EXPRESSED IN LUNG, SIGNAL = 1.9; EXPRESSED IN ADULT LIVER, SIGNAL = 2.7; EXPRESSED IN PLACENTA, SIGNAL = 2.1; EXPRESSED IN HEART, SIGNAL = 1.1; SWISSPROT HIT: Q9ZZM4, EVALUE 3.00e+00
ccaatgacaactggggttctggggcacaacccagcaccttagaggatacaaccgaaaggacaataggtcatgctcaaccaacagggtgctctgtgaccaaggtgctggaaaagcccctcccacactcctaccccag

SEQ ID NO: 16944 - DNA, 103 bp, Homo sapiens
  MAP TO AC007421.11; EXPRESSED IN PLACENTA, SIGNAL =  11; EXPRESSED IN BT474, SIGNAL =  28; EXPRESSED IN BONE MARROW, SIGNAL = 8.5; EXPRESSED IN HBL100, SIGNAL =  45; EXPRESSED IN FETAL LIVER, SIGNAL =  28; EXPRESSED IN LUNG, SIGNAL =  13; EXPRESSED IN HELA, SIGNAL =  19; EXPRESSED IN BRAIN, SIGNAL = 5.7; EXPRESSED IN HEART, SIGNAL = 4.4; EXPRESSED IN ADULT LIVER, SIGNAL =  15; EST_HUMAN HIT: BE410174.1, EVALUE 2.00e-51; SWISSPROT HIT: P29562, EVALUE 2.00e-14; NT HIT: gi11425053, EVALUE 2.00e-51
tgaaatctcgagcatgcatcttctcggtgagccagtccaccttcctccgggtgttgatgaagatgactgcctgggtgatggtcagggtttcatacaagtcaca

SEQ ID NO: 16945 - DNA, 1105 bp, Homo sapiens
  MAP TO AC007541.9; EXPRESSED IN HELA, SIGNAL = 2.1; EXPRESSED IN FETAL LIVER, SIGNAL =   2; EXPRESSED IN LUNG, SIGNAL = 0.96; EXPRESSED IN ADULT LIVER, SIGNAL = 1.4; EXPRESSED IN HEART, SIGNAL = 1.4; EXPRESSED IN BT474, SIGNAL = 1.5; EXPRESSED IN BONE MARROW, SIGNAL = 0.63; EXPRESSED IN BRAIN, SIGNAL = 0.89; EXPRESSED IN PLACENTA, SIGNAL = 0.68; EXPRESSED IN HBL100, SIGNAL = 0.91; EST_HUMAN HIT: AI623701.1, EVALUE 0.00e+00; SWISSPROT HIT: O49845, EVALUE 1.90e-01; NT HIT: AY008301.1, EVALUE 0.00e+00
aaagatgcgatcacctccaaaatacagacctttcttagcatgcttcacctatacaactgataaacagtcgagcaaagaaaatacaagaacagtggaaaagctctataaatgttcagttgacattaggaaaattcgtagattaaaaggatgggtacttttagaggatgaaacctatgttgaagaaattgcgaatattttacaagaactaggtgccgatgagactgctgtagccagtattttggaacgctgcccggaagcaattgtctgtagtccaaccgctgttaacacccagagaaaactctggcagttggtctgcaaaaatgaggaagagttaatcaagttaatagagcagtttccagaatctttctttactattaaagaccaagagaaccagaagctgaatgttcagttctttcaagagttgggactaaaaaatgtggtcattagcagacttttgacagctgcacctaatgtttttcataatcctgttgagaagaataagcaaatggtaagaattctccaagagagttatctagatgtaggtggctctgaggccaacatgaaagtttggctactaaaattgttaagccaaaacccatttattttgttaaattctcccacagctataaaggaaacactagaatttctccaggagcaaggtttcaccagctttgaaattctccagcttctatccaaactcaaaggatttctttttcaactttgcccaagaagtatacagaatagtatttccttctctaaaaatgcttttaaatgcacagatcatgacctgaagcaattagttttgaaatgtcctgcccttttatattattctgttccagttttagaagagagaatgcaaggattattgagagaaggaatttccatagctcagataagagagacgccaatggttcttgaattaacaccacagatagtacagtacaggataaggaaactgaattcctcaggctacagaataaaggatggacatctagcaaatctaaatggatcaaaaaaagagtttgaagctaattttggcaaaattcaggccaaaaaagtaaggccattatttaaccctgtggcaccattaaatgttgaagaatga

SEQ ID NO: 16946 - DNA, 213 bp, Homo sapiens
  MAP TO AC007552.4; EXPRESSED IN PLACENTA, SIGNAL = 4.3; EXPRESSED IN BT474, SIGNAL =   3; EXPRESSED IN LUNG, SIGNAL =  10; EXPRESSED IN HELA, SIGNAL = 5.5; EXPRESSED IN BRAIN, SIGNAL = 4.6; EXPRESSED IN BONE MARROW, SIGNAL = 3.7; EXPRESSED IN HBL100, SIGNAL =   4; EXPRESSED IN FETAL LIVER, SIGNAL = 3.6; EXPRESSED IN ADULT LIVER, SIGNAL =   3; EXPRESSED IN HEART, SIGNAL = 2.6; SWISSPROT HIT: P12344, EVALUE 2.00e-09; EST_HUMAN HIT: BE795965.1, EVALUE 4.00e-30; NT HIT: Z25466.1, EVALUE 4.00e-38
gagtggaccctggtcccaagcagcagaaggaaatagcaacagtggtgaagaaaacaaaaatctctttgcactcttcgacatggcctaccaaggctttgccagtggcaatggtaacaaggatgcctgggctgtgcgccactctgccaattatacgccattgtcgctgccaatcatacaccaagaacatggtcttacacagtgagggtgtggcag

SEQ ID NO: 16947 - DNA, 146 bp, Homo sapiens
  MAP TO AC007561.2; EXPRESSED IN BT474, SIGNAL = 0.97; EXPRESSED IN BONE MARROW, SIGNAL = 0.7; EXPRESSED IN HELA, SIGNAL = 1.4; EXPRESSED IN PLACENTA, SIGNAL = 0.6; EXPRESSED IN HBL100, SIGNAL = 1.2; EXPRESSED IN FETAL LIVER, SIGNAL = 1.4; EXPRESSED IN LUNG, SIGNAL =   1; EXPRESSED IN ADULT LIVER, SIGNAL = 2.4; EXPRESSED IN BRAIN, SIGNAL =   1; EXPRESSED IN HEART, SIGNAL = 0.94; SWISSPROT HIT: O33197, EVALUE 3.10e+00; NT HIT: AE000882.1, EVALUE 7.20e-02
tctttgccatggacaaaatgatcaaaaccagctgctccgtggagttcttcattgaaaggaagagagaggtggagttggcagtgaagcgggatctgcagacacacttcagcatcaagctgacttatcactcctctggaaacggttaa

SEQ ID NO: 16948 - DNA, 241 bp, Homo sapiens
  MAP TO AC007561.2; EXPRESSED IN HEART, SIGNAL = 0.86; EXPRESSED IN BONE MARROW, SIGNAL = 0.65; EXPRESSED IN HBL100, SIGNAL = 0.7; EXPRESSED IN FETAL LIVER, SIGNAL = 1.1; EXPRESSED IN LUNG, SIGNAL = 2.1; EXPRESSED IN ADULT LIVER, SIGNAL = 0.76; EXPRESSED IN PLACENTA, SIGNAL = 1.6; NT HIT: gi11430587, EVALUE 0.00e+00; EST_HUMAN HIT: AA683489.1, EVALUE 0.00e+00; SWISSPROT HIT: O60462, EVALUE 3.00e-33
tgcttaaggccatcgtagagctcgaagttgtagttctccagtgtggtgcagcttcgggagctcaggcccgagtaggaacaggtgcagtagagcaggaggcctgcacaggtggcccccaggaggacgcccagtgagctcatggcgatgatggtgatgaggatgggatccagggtgtacagccagctcttttctttgtcggtcgagggggcgccagaccctgaggttgcagaagaagaattgc

SEQ ID NO: 16949 - DNA, 112 bp, Homo sapiens
  MAP TO AC007632.4; EXPRESSED IN BRAIN, SIGNAL = 2.2; EXPRESSED IN HEART, SIGNAL = 1.8; EXPRESSED IN PLACENTA, SIGNAL = 1.6; EXPRESSED IN BT474, SIGNAL = 1.5; EXPRESSED IN HBL100, SIGNAL = 1.6; EXPRESSED IN FETAL LIVER, SIGNAL = 2.8; EXPRESSED IN LUNG, SIGNAL = 2.4; EXPRESSED IN ADULT LIVER, SIGNAL = 2.7; EXPRESSED IN BONE MARROW, SIGNAL = 2.8; EXPRESSED IN HELA, SIGNAL = 3.3; NT HIT: U82695.2, EVALUE 6.00e-11; EST_HUMAN HIT: AW627674.1, EVALUE 1.00e-12; SWISSPROT HIT: P92698, EVALUE 3.10e+00
caggaacgtgaattggccgacacctggatctggaacttcccagctccaaagctgtgagaaataaaagtctgttgtttaaacttcccagtctgtggtattttcttatggtagc

SEQ ID NO: 16950 - DNA, 102 bp, Homo sapiens
  MAP TO AC007642.4; EXPRESSED IN PLACENTA, SIGNAL = 0.91; EXPRESSED IN HBL100, SIGNAL = 1.4; EXPRESSED IN FETAL LIVER, SIGNAL =   2; EXPRESSED IN LUNG, SIGNAL = 1.4; EXPRESSED IN BRAIN, SIGNAL = 1.4; EXPRESSED IN BT474, SIGNAL = 1.1; EXPRESSED IN BONE MARROW, SIGNAL =   1; EXPRESSED IN HELA, SIGNAL = 1.8; EXPRESSED IN ADULT LIVER, SIGNAL = 1.4; EXPRESSED IN HEART, SIGNAL = 1.4; NT HIT: AF223391.1, EVALUE 9.00e-16; SWISSPROT HIT: P56428, EVALUE 5.30e+00; EST_HUMAN HIT: AI276522.1, EVALUE 6.00e-15
ttgtcccactagaaggtcttcaggggcaacagcacacaaggagctgtcatctatgataacaatgccttcttctggaatacatccagaagaacctacctgagg

SEQ ID NO: 16951 - DNA, 90 bp, Homo sapiens
  MAP TO AC007652.1; EXPRESSED IN BT474, SIGNAL = 1.2; EXPRESSED IN BONE MARROW, SIGNAL =   2; EXPRESSED IN HBL100, SIGNAL = 1.5; EXPRESSED IN FETAL LIVER, SIGNAL = 1.6; EXPRESSED IN HELA, SIGNAL = 1.7; EXPRESSED IN ADULT LIVER, SIGNAL = 1.5; EXPRESSED IN PLACENTA, SIGNAL = 1.7; EXPRESSED IN LUNG, SIGNAL = 2.1; EXPRESSED IN BRAIN, SIGNAL = 2.4; EXPRESSED IN HEART, SIGNAL = 1.9; NT HIT: AF217532.1, EVALUE 1.60e-01; EST_HUMAN HIT: BE267001.1, EVALUE 7.50e-01; SWISSPROT HIT: P12790, EVALUE 3.10e+00
gattcacagaccaagcagcatgcaaggcctcactcgaccctaccagcaggaccattcccagccccactcctcactccctagctgagtcct

SEQ ID NO: 16952 - DNA, 162 bp, Homo sapiens
  MAP TO AC007653.1; EXPRESSED IN HEART, SIGNAL = 0.94; EXPRESSED IN PLACENTA, SIGNAL = 0.79; EXPRESSED IN BONE MARROW, SIGNAL = 0.67; EXPRESSED IN HBL100, SIGNAL = 1.8; EXPRESSED IN FETAL LIVER, SIGNAL = 0.99; EXPRESSED IN ADULT LIVER, SIGNAL = 0.91; EXPRESSED IN BRAIN, SIGNAL =   2; EXPRESSED IN BT474, SIGNAL = 0.66; EXPRESSED IN LUNG, SIGNAL = 0.6; NT HIT: gi7706670, EVALUE 7.00e-61; EST_HUMAN HIT: AI090876.1, EVALUE 8.00e-61; SWISSPROT HIT: P50542, EVALUE 2.00e-13
  unsure 5
  unsure 8
  unsure 10
  unsure 128
gggcngancncttggcgaacggagaccgcagcgaggaagccgtggaggcctatacgcgagcactggagattcagccaggattcatccggtccagatacaacctaggaataagctgcatcaacctgggncgcctacaggtgaagtacagcaacaggccaagga

SEQ ID NO: 16953 - DNA, 211 bp, Homo sapiens
  MAP TO AC007732.1; EXPRESSED IN FETAL LIVER, SIGNAL = 2.3; EXPRESSED IN LUNG, SIGNAL = 1.6; EXPRESSED IN PLACENTA, SIGNAL = 1.1; EXPRESSED IN BT474, SIGNAL =   5; EXPRESSED IN BONE MARROW, SIGNAL = 2.4; EXPRESSED IN HBL100, SIGNAL = 2.7; EXPRESSED IN HELA, SIGNAL = 2.5; EXPRESSED IN ADULT LIVER, SIGNAL = 1.3; EXPRESSED IN BRAIN, SIGNAL =   2; EXPRESSED IN HEART, SIGNAL = 0.95; NT HIT: gi4505938, EVALUE 1.00e-115; EST_HUMAN HIT: AA426111.1, EVALUE 1.00e-102; SWISSPROT HIT: P08775, EVALUE 5.00e-35
ccgctccaggaagacgtctctcttggtgaatttgcgcactgctgtgagtgtgtcctgcacaatacccatgacaggccgattgctctggggggtgacaatcatgcgaggaaccatggccagctcctggatctctgctcgcgtctccagagactgtggcaggtgcaagttcatctcatccccgtcaaagtctgcattgtacggagttgtcacg

SEQ ID NO: 16954 - DNA, 244 bp, Homo sapiens
  MAP TO AC007732.1; EXPRESSED IN ADULT LIVER, SIGNAL = 3.6; EXPRESSED IN PLACENTA, SIGNAL = 3.7; EXPRESSED IN BT474, SIGNAL =   5; EXPRESSED IN BONE MARROW, SIGNAL = 5.5; EXPRESSED IN HBL100, SIGNAL = 4.8; EXPRESSED IN LUNG, SIGNAL = 4.3; EXPRESSED IN HELA, SIGNAL = 4.1; EXPRESSED IN HEART, SIGNAL = 3.2; EXPRESSED IN FETAL LIVER, SIGNAL = 3.8; EXPRESSED IN BRAIN, SIGNAL = 4.4; NT HIT: gi4505938, EVALUE 0.00e+00; EST_HUMAN HIT: T05471.1, EVALUE 2.00e-78; SWISSPROT HIT: P08775, EVALUE 5.00e-44
  unsure 5
cacgngagagcgggggcacaggcagcactgtgacaatcatccactctggccgtgcatagcggggctccatgcccagcacaaaacactcctcatctgagatgcgtttgaagatctcatgcactcgctctggactcagcaggatcttcttctcctgagagtcctcattaacgtgcttccattccgcatacagctctaggccagaacgccggatcctgggctggtaccgcccacagccaccatggcc

SEQ ID NO: 16955 - DNA, 76 bp, Homo sapiens
  MAP TO AC007733.1; EXPRESSED IN BONE MARROW, SIGNAL = 1.3; EXPRESSED IN FETAL LIVER, SIGNAL = 1.9; EXPRESSED IN LUNG, SIGNAL = 1.5; EXPRESSED IN HELA, SIGNAL = 2.2; EXPRESSED IN ADULT LIVER, SIGNAL = 1.5; EXPRESSED IN BRAIN, SIGNAL = 0.74; EXPRESSED IN HEART, SIGNAL = 1.1; EXPRESSED IN PLACENTA, SIGNAL = 1.8; EXPRESSED IN BT474, SIGNAL = 1.7; EXPRESSED IN HBL100, SIGNAL = 2.5; EST_HUMAN HIT: AI828471.1, EVALUE 8.90e-01; NT HIT: AJ002005.1, EVALUE 3.20e-02
caaagaggttctgagcagtagcatcagatccttctttaggcacaggggcacagtgacaaatatgattttcaagacc

SEQ ID NO: 16956 - DNA, 103 bp, Homo sapiens
  MAP TO AC007741.1; EXPRESSED IN BT474, SIGNAL =   1; EXPRESSED IN BONE MARROW, SIGNAL = 1.2; EXPRESSED IN HEART, SIGNAL = 1.6; EXPRESSED IN PLACENTA, SIGNAL = 1.1; EXPRESSED IN BRAIN, SIGNAL =   2; EXPRESSED IN ADULT LIVER, SIGNAL = 1.4; EXPRESSED IN HELA, SIGNAL = 1.4; EXPRESSED IN LUNG, SIGNAL = 1.2; EXPRESSED IN FETAL LIVER, SIGNAL = 0.93; EXPRESSED IN HBL100, SIGNAL = 0.97; NT HIT: AL163284.2, EVALUE 4.00e-12; EST_HUMAN HIT: AL118979.1, EVALUE 6.00e-15; SWISSPROT HIT: Q15776, EVALUE 7.20e+00
gtaacagcttctgcttctggggaggcctcaggaagcttccaatcatggcagaagacaaagggggaatgaagtgtcccacctaaggggagcaagagagaagcag

SEQ ID NO: 16957 - DNA, 297 bp, Homo sapiens
  MAP TO AC007741.1; EXPRESSED IN BRAIN, SIGNAL = 2.3; EXPRESSED IN HEART, SIGNAL =   2; EXPRESSED IN BONE MARROW, SIGNAL = 3.4; EXPRESSED IN HBL100, SIGNAL =  22; EXPRESSED IN ADULT LIVER, SIGNAL =  13; EXPRESSED IN PLACENTA, SIGNAL =  18; EXPRESSED IN BT474, SIGNAL =  52; EXPRESSED IN FETAL LIVER, SIGNAL = 8.7; EXPRESSED IN LUNG, SIGNAL = 5.6; EXPRESSED IN HELA, SIGNAL =  17; SWISSPROT HIT: P05783, EVALUE 6.00e-44; NT HIT: gi11434787, EVALUE 1.00e-115; EST_HUMAN HIT: BE903054.1, EVALUE 1.00e-114
actgcctggcctcctacctggacagagtgaggagactggataccaagaatcggaagctggagagcaaaatccgggagcacctggagaagaagggaccccaagtcagagactggagccattacttcaagaccgtggaggacctgagggctcagatcttcgcaaatactgtggacaatgcccgcatcgttctgcaagtcgacaatgcccatcttgctgatgactttagagtcaagtatgtgacagagctggccatgcgccagtctatggagagcgacatccatgggctccgcaaggtca

SEQ ID NO: 16958 - DNA, 156 bp, Homo sapiens
  MAP TO AC007741.1; EXPRESSED IN LUNG, SIGNAL = 6.5; EXPRESSED IN HEART, SIGNAL = 0.92; EXPRESSED IN PLACENTA, SIGNAL =  14; EXPRESSED IN BT474, SIGNAL =  57; EXPRESSED IN HBL100, SIGNAL =  21; EXPRESSED IN FETAL LIVER, SIGNAL =  15; EXPRESSED IN ADULT LIVER, SIGNAL =  14; EXPRESSED IN BONE MARROW, SIGNAL = 1.5; EXPRESSED IN HELA, SIGNAL =  20; SWISSPROT HIT: P05783, EVALUE 4.00e-14; EST_HUMAN HIT: AA196273.1, EVALUE 4.00e-51; NT HIT: X12883.1, EVALUE 1.00e-50
ctgcacctggagtcagagctggcacagacctgggcagagggacagtgccaggcccaggagtacgaggccctgctgagcatcagggtcaagctggaggctgagatcgccacctaccaccacctgctggaagatgtgaggacttcaatcttagcgatg

SEQ ID NO: 16959 - DNA, 110 bp, Homo sapiens
  MAP TO AC007751.3; EXPRESSED IN PLACENTA, SIGNAL = 6.3; EXPRESSED IN HBL100, SIGNAL = 5.5; EXPRESSED IN FETAL LIVER, SIGNAL = 6.2; EXPRESSED IN BRAIN, SIGNAL = 7.5; EXPRESSED IN BT474, SIGNAL = 5.3; EXPRESSED IN BONE MARROW, SIGNAL =   6; EXPRESSED IN HELA, SIGNAL = 5.7; EXPRESSED IN ADULT LIVER, SIGNAL = 5.7; EXPRESSED IN HEART, SIGNAL = 5.4; EXPRESSED IN LUNG, SIGNAL = 5.4; NT HIT: AL163227.2, EVALUE 9.00e-38; EST_HUMAN HIT: AA777621.1, EVALUE 3.00e-41
tgtgggaaagtttggaacttcctagagacttgttgaatggctttgaccaaaatgctgataatgatatagacaatgaaatccaggctgaggtagtctcagatggagataag

SEQ ID NO: 16960 - DNA, 219 bp, Homo sapiens
  MAP TO AC007751.3; EXPRESSED IN BT474, SIGNAL =  40; EXPRESSED IN HELA, SIGNAL =  11; EXPRESSED IN ADULT LIVER, SIGNAL = 8.5; EXPRESSED IN HEART, SIGNAL = 2.4; EXPRESSED IN PLACENTA, SIGNAL =   9; EXPRESSED IN BONE MARROW, SIGNAL =  37; EXPRESSED IN HBL100, SIGNAL =  58; EXPRESSED IN FETAL LIVER, SIGNAL =  14; EXPRESSED IN LUNG, SIGNAL = 9.8; EXPRESSED IN BRAIN, SIGNAL = 5.2; SWISSPROT HIT: P01252, EVALUE 1.00e-08; EST_HUMAN HIT: AA307750.1, EVALUE 2.00e-23; NT HIT: S41694.1, EVALUE 2.00e-24
atgctccaccgtgaagcagccgtggacaccagctccgagatcaccaccaagggcataaaggagaaggaagttatggggaggcagaaaatggaagagatgtccctgctaatgggaaggctaattaggaaaatcaggatcagaaggctggcaatgagagagatgaaaaagaagaagaaggaagtggggaggaagaggaagagaaataagaagataatggtg

SEQ ID NO: 16961 - DNA, 110 bp, Homo sapiens
  MAP TO AC007841.1; EXPRESSED IN HBL100, SIGNAL =  11; EXPRESSED IN LUNG, SIGNAL =  36; EXPRESSED IN BRAIN, SIGNAL =  11; EXPRESSED IN BT474, SIGNAL =  11; EXPRESSED IN PLACENTA, SIGNAL =  15; EXPRESSED IN HEART, SIGNAL = 6.7; EXPRESSED IN ADULT LIVER, SIGNAL = 9.9; EXPRESSED IN HELA, SIGNAL = 9.9; EXPRESSED IN FETAL LIVER, SIGNAL =  12; EXPRESSED IN BONE MARROW, SIGNAL =  13; NT HIT: AL163210.2, EVALUE 5.00e-27; SWISSPROT HIT: P53115, EVALUE 1.80e+00; EST_HUMAN HIT: AI002836.1, EVALUE 4.00e-34
agacttgttgaatggctttgacaaaaacactgataatgatacggacaatgaaatcccggctgatgtggtctcagatggagatgaggaacttgttgggaactggagcaaag

SEQ ID NO: 16962 - DNA, 1635 bp, Homo sapiens
  MAP TO AC007842.1; EXPRESSED IN BONE MARROW, SIGNAL = 0.85; EXPRESSED IN LUNG, SIGNAL =   1; EXPRESSED IN HELA, SIGNAL = 1.1; EXPRESSED IN HEART, SIGNAL = 1.5; EXPRESSED IN PLACENTA, SIGNAL = 0.7; EXPRESSED IN BT474, SIGNAL = 1.4; EXPRESSED IN HBL100, SIGNAL = 1.2; EXPRESSED IN FETAL LIVER, SIGNAL = 0.85; EXPRESSED IN ADULT LIVER, SIGNAL =   1; EXPRESSED IN BRAIN, SIGNAL = 1.3; EST_HUMAN HIT: T56945.1, EVALUE 0.00e+00; NT HIT: gi4507974, EVALUE 2.00e-32; SWISSPROT HIT: Q99676, EVALUE 0.00e+00
atttggaatacaagtatattaccaagaatttgctttcagaaaagaatgtttgcaaaatctatttatctcaattgcagacaggggaaaaaagtaaaaacaccatccatgaggacaccattttcagaaatggtttgcagtgtaaacatgaatttgagagacaagagagacatcagatgggatgcgttagtcaaatgctaatccaaaaacaaatatctcatcctctacatccaaaaattcatgctagagagaaatcatatgaatgtaaggaatgtagaaaggcctttagacaacagtcataccttattcaacatctgagaattcacactggtgagagaccctataaatgtatggaatgtggaaaggccttttgtcgagtgggagaccttagagtacatcacacaatccatgctggggagagaccctatgaatgtaaagaatgtgggaaggcctttagacttcattatcaccttactgaacatcagagaatacattctggtgtgaaaccctacgagtgtaaggaatgtgggaaagcctttagtcgtgttagagaccttagagtacatcagacaattcatgctggagagagaccttatgaatgtaaagaatgtgggaaggcctttagacttcattatcaactaactgaacatcaaagaattcatactggtgagaggccttatgaatgtaaggtttgtggcaagacctttagggtacaacgacatattagtcaacatcagaaaattcatactggtgtcaaaccctataaatgtaatgaatgtgggaaggcctttagtcatggctcataccttgttcaacatcagaaaattcatactggtgaaaaaccctacgaatgtaaagaatgtggtaagtcctttagttttcatgcagaacttgctcgacatcgtagaattcatactggtgagaaaccctatgaatgtagagaatgtggaaaagcctttcgtcttcaaacggaacttactcggcatcatagaactcatactggtgagaaaccctatgaatgtaaggaatgtgggaaggcctttatttgtggttatcaacttactttacatctgagaactcacaccggtgagattccctatgaatgtaaggaatgtggaaaaaccttcagtagtcgctatcatctcactcaacactacagaattcatactggtgagaaaccctacatatgtaacgaatgtggaaaagcctttcgtcttcaaggagaacttacccgacatcacagaattcatacatgtgagaaaccctatgaatgtaaggaatgtgggaaggcttttattcatagcaatcaatttatttcacaccagcgaattcacaccagtgagagcacctacatatgtaaagaatgtgggaagatttttagtcgtcgctataatcttactcaacattttaaaattcatactggtgaaaaaccctacatatgtaatgaatgtgggaaagcctttcgatttcaaacagaacttactcagcatcacagaattcatactggtgaaaaaccctataaatgtacagaatgtgggaaggcctttattcgtagcactcatctcacgcaacatcacagaattcatactggtgagaaaccctacgaatgtacggaatgtgggaagacgtttagtcggc

SEQ ID NO: 16963 - DNA, 257 bp, Homo sapiens
  MAP TO AC008101.6; EXPRESSED IN HBL100, SIGNAL = 2.2; EXPRESSED IN FETAL LIVER, SIGNAL =   2; EXPRESSED IN PLACENTA, SIGNAL = 2.3; EXPRESSED IN BT474, SIGNAL = 1.9; EXPRESSED IN LUNG, SIGNAL = 2.4; EXPRESSED IN HELA, SIGNAL = 1.9; EXPRESSED IN ADULT LIVER, SIGNAL = 1.9; EXPRESSED IN BRAIN, SIGNAL = 2.9; EXPRESSED IN HEART, SIGNAL = 2.3; EXPRESSED IN BONE MARROW, SIGNAL = 2.2; NT HIT: AB018970.1, EVALUE 5.30e-01; EST_HUMAN HIT: BE348399.1, EVALUE 9.00e-28; SWISSPROT HIT: P32941, EVALUE 2.30e+00
tgagtaacatcctagataatagtcccagtcaaaaaccccattgaggttgaaggactggaaactgacctgtgtgaaaaagagctatcagtgcaggaaaagactcatgctgattttgaccttcctctggcccttttccctcaactgcttggtggggagtagcgaggagaaggagcatgtggcaccctcattggaggctggagcactgctgcagaaagtgatctcttactcatacttcaagacacagcctaagtatgacc

SEQ ID NO: 16964 - DNA, 200 bp, Homo sapiens
  MAP TO AC008133.1; EXPRESSED IN HEART, SIGNAL = 1.1; EXPRESSED IN ADULT LIVER, SIGNAL = 1.5; EXPRESSED IN BRAIN, SIGNAL = 1.4; EXPRESSED IN PLACENTA, SIGNAL = 1.1; EXPRESSED IN BONE MARROW, SIGNAL = 1.3; EXPRESSED IN HBL100, SIGNAL = 2.1; EXPRESSED IN FETAL LIVER, SIGNAL = 1.5; EXPRESSED IN HELA, SIGNAL = 2.6; EXPRESSED IN BT474, SIGNAL = 2.2; EXPRESSED IN LUNG, SIGNAL = 1.7; SWISSPROT HIT: P49771, EVALUE 2.80e+00
  unsure 24
tcattcattcatcaagtccagcgnctgctgcctcccctgtctgtgcaatccgctcactcctctccctccttgcttctcccccctccactcagaccttcccatctcttccccgggaggctccacttggctcctgaccaatctcggcgctctcttcttgcttttccagtgtattctccaccttgcggccaagatcaaccttt

SEQ ID NO: 16965 - DNA, 163 bp, Homo sapiens
  MAP TO AC008133.1; EXPRESSED IN BT474, SIGNAL = 1.7; EXPRESSED IN HELA, SIGNAL = 2.3; EXPRESSED IN PLACENTA, SIGNAL = 1.8; EXPRESSED IN HBL100, SIGNAL =   2; EXPRESSED IN FETAL LIVER, SIGNAL = 1.7; EXPRESSED IN LUNG, SIGNAL = 2.4; EXPRESSED IN ADULT LIVER, SIGNAL = 1.9; EXPRESSED IN BRAIN, SIGNAL = 2.6; EXPRESSED IN BONE MARROW, SIGNAL = 1.8; EXPRESSED IN HEART, SIGNAL =   2; EST_HUMAN HIT: AW813783.1, EVALUE 2.00e-39; SWISSPROT HIT: P41458, EVALUE 2.60e-01; NT HIT: AL163227.2, EVALUE 1.00e-28
gggtggggacaaaataccaccagtctctttgctaaagcctagcaagagtgacctttgctccagctttcaacaagttcctcatctccatctgagaccacctcagcctggacttcattgtccatgtcactgtcagcattttggtcaaagccatttgatgagtctc

SEQ ID NO: 16966 - DNA, 106 bp, Homo sapiens
  MAP TO AC008151.1; EXPRESSED IN PLACENTA, SIGNAL = 5.8; EXPRESSED IN BT474, SIGNAL = 4.5; EXPRESSED IN LUNG, SIGNAL = 6.4; EXPRESSED IN HELA, SIGNAL = 5.7; EXPRESSED IN HEART, SIGNAL = 6.3; EXPRESSED IN BONE MARROW, SIGNAL = 6.7; EXPRESSED IN HBL100, SIGNAL = 4.4; EXPRESSED IN FETAL LIVER, SIGNAL = 4.6; EXPRESSED IN ADULT LIVER, SIGNAL = 5.3; EXPRESSED IN BRAIN, SIGNAL = 7.6; SWISSPROT HIT: P17661, EVALUE 7.00e+00; NT HIT: AF018093.1, EVALUE 9.00e-01
ttccaggtttgtgctcatcagggacaccctgttgcacaaagaagaaactgacctggtacctcccttggcggggaatccattcctggggagaagatgagaggagaac

SEQ ID NO: 16967 - DNA, 80 bp, Homo sapiens
  MAP TO AC008170.1; EXPRESSED IN BONE MARROW, SIGNAL =   9; EXPRESSED IN FETAL LIVER, SIGNAL =  13; EXPRESSED IN LUNG, SIGNAL = 7.6; EXPRESSED IN BRAIN, SIGNAL = 4.9; EXPRESSED IN PLACENTA, SIGNAL = 8.1; EXPRESSED IN BT474, SIGNAL =  13; EXPRESSED IN HBL100, SIGNAL =  14; EXPRESSED IN HELA, SIGNAL =  10; EXPRESSED IN ADULT LIVER, SIGNAL = 7.8; EXPRESSED IN HEART, SIGNAL = 3.7; NT HIT: X12696.1, EVALUE 2.50e+00; EST_HUMAN HIT: AW502240.1, EVALUE 6.50e-01
accagattctcatggaccccactgccatgctggccagacatcttgctgccattgttttcctgttatttactcccaaacag

SEQ ID NO: 16968 - DNA, 492 bp, Homo sapiens; identical to SEQ ID NO: 140
  MAP TO AC008278.1; EXPRESSED IN PLACENTA, SIGNAL =  24; EXPRESSED IN BRAIN, SIGNAL =  17; EXPRESSED IN HELA, SIGNAL =  17; EXPRESSED IN LUNG, SIGNAL =  22; EXPRESSED IN FETAL LIVER, SIGNAL =  19; EXPRESSED IN HBL100, SIGNAL =  19; EXPRESSED IN BONE MARROW, SIGNAL =  28; EXPRESSED IN BT474, SIGNAL =  19; EXPRESSED IN HEART, SIGNAL =  15; EXPRESSED IN ADULT LIVER, SIGNAL =  12; NT HIT: AL163279.2, EVALUE 3.00e-10; EST_HUMAN HIT: BE163247.1, EVALUE 2.00e-21; SWISSPROT HIT: P39193, EVALUE 5.00e-06

SEQ ID NO: 16969 - DNA, 100 bp, Homo sapiens
  MAP TO AC008271.1; EXPRESSED IN BT474, SIGNAL = 8.8; EXPRESSED IN BONE MARROW, SIGNAL =  12; EXPRESSED IN HBL100, SIGNAL =  11; EXPRESSED IN HELA, SIGNAL =  12; EXPRESSED IN BRAIN, SIGNAL =  13; EXPRESSED IN PLACENTA, SIGNAL = 9.3; EXPRESSED IN FETAL LIVER, SIGNAL =  10; EXPRESSED IN LUNG, SIGNAL =  12; EXPRESSED IN ADULT LIVER, SIGNAL = 8.6; EXPRESSED IN HEART, SIGNAL = 9.4; SWISSPROT HIT: P23963, EVALUE 1.20e-01; NT HIT: L78810.1, EVALUE 9.00e-10; EST_HUMAN HIT: H69089.1, EVALUE 1.00e-09
ctagtctgaaatttccatgtaactaacaggaaaagatatgctaagaatgaggtataaattagccacacgtggtggtgcatgcctgtagtcacagctactc

SEQ ID NO: 16970 - DNA, 105 bp, Homo sapiens
  MAP TO AC008272.1; EXPRESSED IN LUNG, SIGNAL = 1.7; EXPRESSED IN HELA, SIGNAL = 1.5; EXPRESSED IN ADULT LIVER, SIGNAL = 1.3; EXPRESSED IN PLACENTA, SIGNAL = 1.2; EXPRESSED IN BONE MARROW, SIGNAL = 1.6; EXPRESSED IN FETAL LIVER, SIGNAL = 1.4; EXPRESSED IN BRAIN, SIGNAL = 1.6; EXPRESSED IN HEART, SIGNAL = 4.3; EXPRESSED IN BT474, SIGNAL = 1.3; EXPRESSED IN HBL100, SIGNAL = 1.3; EST_HUMAN HIT: AA904982.1, EVALUE 4.00e-47; SWISSPROT HIT: P02995, EVALUE 1.40e+00; NT HIT: AB050641.1, EVALUE 3.00e-47
cccctcaagcccttcagtgtctgtaggcttctcacgaggctgctcctgagcttgcctctctgccctcgactggctgaatgtcctttctgcttcttgaaggtctgc

SEQ ID NO: 16971 - DNA, 223 bp, Homo sapiens
  MAP TO AC008272.1; EXPRESSED IN PLACENTA, SIGNAL = 3.1; EXPRESSED IN BT474, SIGNAL = 3.4; EXPRESSED IN BONE MARROW, SIGNAL = 2.8; EXPRESSED IN HBL100, SIGNAL = 2.9; EXPRESSED IN FETAL LIVER, SIGNAL = 2.3; EXPRESSED IN LUNG, SIGNAL = 2.4; EXPRESSED IN HELA, SIGNAL = 1.7; EXPRESSED IN ADULT LIVER, SIGNAL = 1.4; EXPRESSED IN BRAIN, SIGNAL = 1.9; EXPRESSED IN HEART, SIGNAL = 2.2; NT HIT: X57147.1, EVALUE 2.00e-92; EST_HUMAN HIT: BE295714.1, EVALUE 1.00e-94; SWISSPROT HIT: P21414, EVALUE 9.00e-16
tacttgtgtttttgcattgcatgcaataattctataatttccttgtggcatttaacaggggttcccccagaggttaggaactccctctctttccatattgcagcatgggcatgtaggattagataagcatatttgctatctgtatacacatttattctttttccctttcccagttctaaggctcgggtaagtgccactagtgctgctaactgggcactggtcc

SEQ ID NO: 16972 - DNA, 328 bp, Homo sapiens
  MAP TO AC008272.1; EXPRESSED IN BONE MARROW, SIGNAL = 3.9; EXPRESSED IN HBL100, SIGNAL = 2.6; EXPRESSED IN LUNG, SIGNAL = 2.8; EXPRESSED IN ADULT LIVER, SIGNAL = 2.2; EXPRESSED IN PLACENTA, SIGNAL = 3.5; EXPRESSED IN BT474, SIGNAL = 2.6; EXPRESSED IN FETAL LIVER, SIGNAL = 2.6; EXPRESSED IN HELA, SIGNAL = 2.2; EXPRESSED IN BRAIN, SIGNAL = 3.4; EXPRESSED IN HEART, SIGNAL = 2.8; SWISSPROT HIT: P08548, EVALUE 2.00e-03; EST_HUMAN HIT: AA906420.1, EVALUE 1.00e-12; NT HIT: U52111.2, EVALUE 2.00e-13
acaattaaaaccaatctgtatgacagaaaggagatcagtggttgcctgagaagagggtacatggagagagacaggaaggagagattacaaaggagcacaaggataccttttgggatgatgtttatgttcactatattgatcggcttcatgggtatatacgtatgtcaaaacttatcaaattgtacactagatacatatgctgtttattttatgtcacttatacttcaaaatgctgttaaaactctcaccaaattaggtatgcaaggaatgttcctcaacagaataaatgccatattggacaagcccacagccaacatcatacccaatg

SEQ ID NO: 16973 - DNA, 322 bp, Homo sapiens
  MAP TO AC009222.1; EXPRESSED IN HBL100, SIGNAL = 1.7; EXPRESSED IN HELA, SIGNAL = 1.9; EXPRESSED IN ADULT LIVER, SIGNAL = 1.4; EXPRESSED IN HEART, SIGNAL = 0.96; EXPRESSED IN PLACENTA, SIGNAL = 0.88; EXPRESSED IN BRAIN, SIGNAL = 1.4; EXPRESSED IN FETAL LIVER, SIGNAL = 1.5; EXPRESSED IN LUNG, SIGNAL = 1.5; EXPRESSED IN BONE MARROW, SIGNAL = 1.8; EXPRESSED IN BT474, SIGNAL = 2.8; NT HIT: X57147.1, EVALUE 9.00e-99; EST_HUMAN HIT: AW503208.1, EVALUE 1.00e-106; SWISSPROT HIT: P26808, EVALUE 2.00e-15
  unsure 22
atacaaggaaaggatctcaccnatctggactactcatgttgtaaatggcatactaggtaccaaaggaaatttatggctatcagacacccacctgcttagataccaagtgctactccttgagggactggtgcttcaaatatgcacatgtgtgaccctcaaccctgctacttttctcccagaggatgtggaaccaatagagcatgactgccaacaaattgtggcccagacttatgccacccgagaggatctcttagaagtccccttagctaatcctgaccttaacctatataccagtggaagtttatttgtggagaatgggata

SEQ ID NO: 16974 - DNA, 178 bp, Homo sapiens
  MAP TO AC009222.1; EXPRESSED IN HBL100, SIGNAL = 7.7; EXPRESSED IN LUNG, SIGNAL = 8.8; EXPRESSED IN BRAIN, SIGNAL =  10; EXPRESSED IN BT474, SIGNAL = 8.7; EXPRESSED IN PLACENTA, SIGNAL =  11; EXPRESSED IN HEART, SIGNAL = 7.3; EXPRESSED IN ADULT LIVER, SIGNAL = 6.3; EXPRESSED IN HELA, SIGNAL = 6.6; EXPRESSED IN FETAL LIVER, SIGNAL =   8; EXPRESSED IN BONE MARROW, SIGNAL = 9.3; NT HIT: AL163227.2, EVALUE 4.00e-41; EST_HUMAN HIT: AA720574.1, EVALUE 8.00e-52; SWISSPROT HIT: O73673, EVALUE 3.30e-01
cttttctccagttcccaaaaagatccttatctccatctgagaccacctcagcctggacttcattgtccatatcactatcagaattttggtcaaagccattcaacaagtctataggaagttccaagttttcccacatctgcctgtcttctgagccctccaaatctctcggaagttccca

SEQ ID NO: 16975 - DNA, 631 bp, Homo sapiens
  MAP TO AC009223.1; EXPRESSED IN BRAIN, SIGNAL = 8.9; EXPRESSED IN HBL100, SIGNAL =  71; EXPRESSED IN HEART, SIGNAL = 9.1; EXPRESSED IN BT474, SIGNAL =  24; EXPRESSED IN BONE MARROW, SIGNAL =  54; EXPRESSED IN FETAL LIVER, SIGNAL =  35; EXPRESSED IN HELA, SIGNAL =  35; EXPRESSED IN ADULT LIVER, SIGNAL = 6.7; EXPRESSED IN PLACENTA, SIGNAL =  13; EXPRESSED IN LUNG, SIGNAL =  14; NT HIT: X06747.1, EVALUE 0.00e+00; SWISSPROT HIT: P09867, EVALUE 5.00e-17; EST_HUMAN HIT: BE792794.1, EVALUE 0.00e+00
ggccctgccaccactgtgcttggctaaggttacaaatctattacaaccggtagcttccctgtcacttctctggctctcctctcttgctaagctttgtttcctaattaaaattttctgccactgccatagctactgcttctactggaaccgccatcaccacctttgtttcatggtttggcaaagtattggcctccaccaccataagggccagagcttctgcatccaaagtttcctcccttcatgggtccaaaatttgaagagtgattgttgcaattgccaaaatcattgtagcttccaccacctccaaaattgcttccatcattaccaaatccattatagccatccccactgccaccgtatccactaccactatggctgccaccaaagccaccacaaccattgaagtttcctccatgaccaaagttgtcattcccactgaaaagacctccatgaccaccaccaaagtttccggaacaacttcgacctctttggctggatgaacactagccatctctcactttgacagggctttcctaacttcacagttgtggccattcacagtatggtatttctgaatgacagtcttatccatggagtcatggtcatcaaaggttacaaaggcaaagcccct

SEQ ID NO: 16976 - DNA, 106 bp, Homo sapiens
  MAP TO AC009233.1; EXPRESSED IN BRAIN, SIGNAL =   9; EXPRESSED IN LUNG, SIGNAL = 7.1; EXPRESSED IN HELA, SIGNAL = 7.7; EXPRESSED IN ADULT LIVER, SIGNAL = 6.8; EXPRESSED IN PLACENTA, SIGNAL = 6.1; EXPRESSED IN BT474, SIGNAL =  11; EXPRESSED IN BONE MARROW, SIGNAL = 6.6; EXPRESSED IN HBL100, SIGNAL =  24; EXPRESSED IN HEART, SIGNAL = 4.8; EXPRESSED IN FETAL LIVER, SIGNAL = 7.9; EST_HUMAN HIT: AI126611.1, EVALUE 4.00e-07; NT HIT: L77569.1, EVALUE 2.00e-07
gaagtcagtgaaactaagaacccaccggaaggaatcaactccagacacatcttggtgaccgtgaagggacacatcttggtgactgtggcaggacaattgccaagca

SEQ ID NO: 16977 - DNA, 196 bp, Homo sapiens
  MAP TO AC009233.1; EXPRESSED IN PLACENTA, SIGNAL =  28; EXPRESSED IN HELA, SIGNAL =  24; EXPRESSED IN HEART, SIGNAL =  11; EXPRESSED IN BONE MARROW, SIGNAL =  26; EXPRESSED IN HBL100, SIGNAL =  79; EXPRESSED IN FETAL LIVER, SIGNAL =  24; EXPRESSED IN ADULT LIVER, SIGNAL =  19; EXPRESSED IN BRAIN, SIGNAL =  20; EXPRESSED IN BT474, SIGNAL =  33; EXPRESSED IN LUNG, SIGNAL =  24; SWISSPROT HIT: P35372, EVALUE 6.40e+00; NT HIT: AB035344.1, EVALUE 5.00e-90; EST_HUMAN HIT: BE243895.1, EVALUE 2.00e-86
agcattggcaacccgctggggtccccttccacactgtggaaggtttcttctttcgctctttgcagtaaatcttgctactgctcactctttgggtccacgctgcttttatgagctgtaacactcaccgcgaagatctgcagcttcactcctgagccaagcaagaccacgagcccaccgggaggaaggaacaactcca

SEQ ID NO: 16978 - DNA, 120 bp, Homo sapiens
  MAP TO AC009241.1; EXPRESSED IN BT474, SIGNAL = 1.8; EXPRESSED IN BONE MARROW, SIGNAL = 3.5; EXPRESSED IN FETAL LIVER, SIGNAL = 2.7; EXPRESSED IN ADULT LIVER, SIGNAL = 3.5; EXPRESSED IN BRAIN, SIGNAL = 3.5; EXPRESSED IN PLACENTA, SIGNAL = 3.2; EXPRESSED IN HBL100, SIGNAL = 2.9; EXPRESSED IN LUNG, SIGNAL = 3.4; EXPRESSED IN HELA, SIGNAL = 3.5; EXPRESSED IN HEART, SIGNAL =   3; NT HIT: U67360.1, EVALUE 1.00e-03; EST_HUMAN HIT: AL119426.1, EVALUE 3.00e-04; SWISSPROT HIT: Q9VYQ7, EVALUE 3.10e+00
aaaggcaacaaatcatactggtccacggcccgggagttggggacccctgggttatacagccatagtatctggaacacagccaagaggtaacttgaactaagccttggaaacaagaaacta

SEQ ID NO: 16979 - DNA, 290 bp, Homo sapiens
  MAP TO AC009291.1; EXPRESSED IN BT474, SIGNAL = 6.1; EXPRESSED IN HBL100, SIGNAL = 3.2; EXPRESSED IN HEART, SIGNAL = 2.4; EXPRESSED IN PLACENTA, SIGNAL = 2.1; EXPRESSED IN BRAIN, SIGNAL = 2.1; EXPRESSED IN ADULT LIVER, SIGNAL = 1.2; EXPRESSED IN HELA, SIGNAL =   2; EXPRESSED IN LUNG, SIGNAL = 1.9; EXPRESSED IN FETAL LIVER, SIGNAL = 2.6; EXPRESSED IN BONE MARROW, SIGNAL = 4.4; NT HIT: gi10181209, EVALUE 3.00e-55; SWISSPROT HIT: O52199, EVALUE 2.60e+00; EST_HUMAN HIT: BF036881.1, EVALUE 0.00e+00
gaatcttcaaggatacctacctctgatacatcatctagatctcatatttttagaagagaatcaaatgaagtggttcaccttgaagcacagaatgatcctcttggagctgctgccaacagaccacaagcatctgcagcatcaagcagtgccacaacaggtggctctacatcagattcggctcaaggtggaagaaatacaggaatatcagggattcttcctggttccttattccggtttgcagtccctccagcacttgggagtaatttgaccgacaatgtcatgatcacagt

SEQ ID NO: 16980 - DNA, 473 bp, Homo sapiens
  MAP TO AC009300.1; EXPRESSED IN ADULT LIVER, SIGNAL = 2.1; EXPRESSED IN BRAIN, SIGNAL = 3.1; EXPRESSED IN HEART, SIGNAL = 2.4; EXPRESSED IN BONE MARROW, SIGNAL = 2.3; EXPRESSED IN LUNG, SIGNAL = 2.6; EXPRESSED IN HELA, SIGNAL = 2.7; EXPRESSED IN PLACENTA, SIGNAL =   3; EXPRESSED IN BT474, SIGNAL = 2.2; EXPRESSED IN HBL100, SIGNAL = 1.7; EXPRESSED IN FETAL LIVER, SIGNAL = 2.1; EST_HUMAN HIT: BF203746.1, EVALUE 3.00e-42; SWISSPROT HIT: P32602, EVALUE 2.80e+00; NT HIT: AL163218.2, EVALUE 6.00e-73
ttccttcctaggcctctgggcctgtgatgggaggggcttccacaaacgtccctgacatgccctggagacattttccccattgttttggtgattaagattcagcctcttgttacttgtgcaaatttctgcagcaggcatgggcttgaatttctccccaccaagtgcgtttttcttctctatcacatcatcagcctacaaactttccaaacttttatgctctgcttcctcttgaacactttgccacttagaaatttcttctgacagatatcctaaattatctttctcaagttcaaaattccacagatctttagggcaggagcaaaatgccaccagtttttttgctaaagcatagcaagaatcacctttgttccagttcacagcaagttcctcatctccatctgagaccacctcatcgtggacttcattgtccatatcagtatcagcattttggtcaaagccattcaacaagtctc

SEQ ID NO: 16981 - DNA, 342 bp, Homo sapiens
  MAP TO AC009300.1; EXPRESSED IN FETAL LIVER, SIGNAL =  93; EXPRESSED IN LUNG, SIGNAL =  43; EXPRESSED IN HELA, SIGNAL =  62; EXPRESSED IN PLACENTA, SIGNAL =  38; EXPRESSED IN BT474, SIGNAL =  94; EXPRESSED IN HEART, SIGNAL =  16; EXPRESSED IN BRAIN, SIGNAL =  26; EXPRESSED IN ADULT LIVER, SIGNAL =  16; EXPRESSED IN HBL100, SIGNAL = 1.4e+02; EXPRESSED IN BONE MARROW, SIGNAL =  39; EST_HUMAN HIT: BE901720.1, EVALUE 0.00e+00; NT HIT: gi4504444, EVALUE 0.00e+00; SWISSPROT HIT: P09651, EVALUE 2.00e-08
aagccctgtcaaagtgagagatggctagtgttcatccagccaaagaggtcgaagttgttccggaaactttggtggtggtcatggaggtcttttcagtgggaatgacaactttggtcatggaggaaacttcaatggttgtggtggctttggtggcagccatagtggtagtggatacggtggcagtggggatggctataatggatttggtaatgatggaagcaattttggaggtggtggaagctacaatgattttggcaattgcaacaatcactcttcaaattttggacccatgaagggaggaaactttggatgcagaagctctggcccttatggtggtggagg

SEQ ID NO: 16982 - DNA, 191 bp, Homo sapiens
  MAP TO AC009301.1; EXPRESSED IN PLACENTA, SIGNAL = 7.6; EXPRESSED IN BT474, SIGNAL =  14; EXPRESSED IN HBL100, SIGNAL =  27; EXPRESSED IN LUNG, SIGNAL = 8.8; EXPRESSED IN HELA, SIGNAL =  16; EXPRESSED IN FETAL LIVER, SIGNAL =  19; EXPRESSED IN HEART, SIGNAL = 7.4; EXPRESSED IN BONE MARROW, SIGNAL =   9; EXPRESSED IN ADULT LIVER, SIGNAL = 3.7; EXPRESSED IN BRAIN, SIGNAL = 8.3; SWISSPROT HIT: P53120, EVALUE 9.60e-01; NT HIT: M37984.1, EVALUE 1.80e+00
aaaaggaggtaacagagagagagagatcaattactggataagctcaccatggtgcccagatgaacatgcacactggccagcagcccctcttaacctgccacgtgggccaagcccctgcactgctgtctgtggagcctgccctgggccaccctggtcaggtttcccgagtgcaggaggtgcattctactcag

SEQ ID NO: 16983 - DNA, 148 bp, Homo sapiens
  MAP TO AF095901.1; EXPRESSED IN PLACENTA, SIGNAL = 1.7; EXPRESSED IN BT474, SIGNAL = 2.7; EXPRESSED IN LUNG, SIGNAL = 1.9; EXPRESSED IN BRAIN, SIGNAL = 1.4; EXPRESSED IN BONE MARROW, SIGNAL = 2.8; EXPRESSED IN HBL100, SIGNAL = 3.3; EXPRESSED IN FETAL LIVER, SIGNAL = 2.4; EXPRESSED IN HELA, SIGNAL = 2.5; EXPRESSED IN ADULT LIVER, SIGNAL = 1.5; EXPRESSED IN HEART, SIGNAL = 1.6; NT HIT: X80916.1, EVALUE 4.00e-78; EST_HUMAN HIT: AA402697.1, EVALUE 5.00e-78; SWISSPROT HIT: P46055, EVALUE 2.00e-23
accggacaggaacatgagcttatcgagagcatgcccctgttggaatggtttgctaacaactataaaaaatttggagctacgttggaaattgtcacagataaatcacaagaagggtctcagtttgtgaaaggatttggtggaattggag

SEQ ID NO: 16984 - DNA, 243 bp, Homo sapiens
  MAP TO AF111168.2; EXPRESSED IN PLACENTA, SIGNAL =  13; EXPRESSED IN BT474, SIGNAL = 0.85; EXPRESSED IN BONE MARROW, SIGNAL = 0.92; EXPRESSED IN HBL100, SIGNAL = 0.82; EXPRESSED IN FETAL LIVER, SIGNAL = 0.75; EXPRESSED IN LUNG, SIGNAL = 0.92; EXPRESSED IN ADULT LIVER, SIGNAL = 0.96; EXPRESSED IN BRAIN, SIGNAL =   1; EXPRESSED IN HELA, SIGNAL = 0.97; EXPRESSED IN HEART, SIGNAL = 1.4; NT HIT: AF111168.2, EVALUE 0.00e+00; SWISSPROT HIT: P31157, EVALUE 1.50e+00; EST_HUMAN HIT: BE731965.1, EVALUE 1.00e-112
ctgggtatcagggttaggggtactcaaggttgtgttggccaatcccggcagcttctgcagctccagccgcaacggagtaacctctggggtcctgggaggggtggcgttgcctggggtcatggctgctggctcagtgacagtccagcatccatgttggtgtggctctgcctgcaggtgggttctggggagcagtggtgcctcctcctcttccttcagaggcctaggatctggggaggctgagac

SEQ ID NO: 16985 - DNA, 137 bp, Homo sapiens
  MAP TO AF111169.2; EXPRESSED IN HELA, SIGNAL =  12; EXPRESSED IN BT474, SIGNAL =  15; EXPRESSED IN ADULT LIVER, SIGNAL = 5.5; EXPRESSED IN HEART, SIGNAL = 3.6; EXPRESSED IN PLACENTA, SIGNAL = 5.6; EXPRESSED IN FETAL LIVER, SIGNAL =  18; EXPRESSED IN LUNG, SIGNAL = 8.3; EXPRESSED IN BRAIN, SIGNAL =   3; EXPRESSED IN BONE MARROW, SIGNAL =  19; EXPRESSED IN HBL100, SIGNAL =  38; EST_HUMAN HIT: BE296411.1, EVALUE 1.00e-59; NT HIT: gi4506612, EVALUE 5.00e-58; SWISSPROT HIT: P47198, EVALUE 4.00e-17
caaggttcccagcttttccattcactttgatcctttcttgcaaaaactgctcaaaattggcagcatccatgattccatcttctacagggtgggtgcaatcaagagtgaacttcagaaccttcttcttttttttgtcc

SEQ ID NO: 16986 - DNA, 805 bp, Homo sapiens
  MAP TO AF118808.1; EXPRESSED IN FETAL LIVER, SIGNAL = 1.2; EXPRESSED IN LUNG, SIGNAL = 0.87; EXPRESSED IN PLACENTA, SIGNAL =   1; EXPRESSED IN HEART, SIGNAL = 1.1; EXPRESSED IN BRAIN, SIGNAL = 1.2; EXPRESSED IN ADULT LIVER, SIGNAL = 1.4; EXPRESSED IN HELA, SIGNAL = 0.94; EXPRESSED IN HBL100, SIGNAL = 6.3; EXPRESSED IN BONE MARROW, SIGNAL = 0.74; EXPRESSED IN BT474, SIGNAL = 4.1; NT HIT: U88086.1, EVALUE 1.00e-04; EST_HUMAN HIT: BE295973.1, EVALUE 0.00e+00; SWISSPROT HIT: P49910, EVALUE 7.00e-38
gaaaaagaggaaatgattccaaagcaggacatttctgaagaattggaatcccagagagcaaaatcagaagatcatgtaaggaatatttttaaggaaactgaagagatgagtaaaactgagggaaagttagagaattgctggagaaaatatgcagtagaaggagttaagaactcattctcccagaagagcaatttcagagaaattaccatgaggtatgtgaaaaccctctctagagagaatggccagaagttcaatgctgttggagaaaactgcattacagactcaaatcctgccaaacatcttagagggtctagagaggagagtctccatccaagtgtgtcaagtgtagaaaacttgcaacaacatgaggacctcattaacctccagagtttccaattaggagaaagagcctatcagacagatgtgttagtgaaagtgcccagacagagctcagttcttagtgagaatcagaggatgaataatccagagagatggtttgagagtactgggtgtggaaaaacttacaatcagaacagagcttttaaccagcaccagagatttcatagtggagagaagacctatgagcacaatgaatgtggaaaagctttcagttggccctctatcctcagtaaacatcagagaatccacactggtaagaaactctacacatgtgaggattgtggcaaatctttcagtgttcactcatactttattcagcattgtaaaattcacactagagaaaaaccctatgagtgtattaaatgtgggaaagcttttagtacacattcatcttatgttcaacatc

SEQ ID NO: 16987 - DNA, 1322 bp, Homo sapiens
  MAP TO AF118808.1; EXPRESSED IN BT474, SIGNAL = 7.1; EXPRESSED IN FETAL LIVER, SIGNAL = 2.4; EXPRESSED IN PLACENTA, SIGNAL = 2.4; EXPRESSED IN BONE MARROW, SIGNAL = 2.4; EXPRESSED IN HBL100, SIGNAL = 6.7; EXPRESSED IN LUNG, SIGNAL = 2.6; EXPRESSED IN HELA, SIGNAL = 3.9; EXPRESSED IN ADULT LIVER, SIGNAL = 2.4; EXPRESSED IN BRAIN, SIGNAL = 5.4; EXPRESSED IN HEART, SIGNAL =   3; NT HIT: U09413.1, EVALUE 1.00e-14; SWISSPROT HIT: P52742, EVALUE 0.00e+00; EST_HUMAN HIT: BE885790.1, EVALUE 0.00e+00
aatgtgaaaccaagggagagagtcaaaatacagacttgagtccgaagccattaatttcagagcaaacagtgattctggggaaaacacccttggggaggattgatcaagaaaataatgaaacaaagcaaagcttctgtctgagtccaaactctgttgaccaccgtgaagttcaggtcttaagccaaagcatgccactcactccgcaccaggcagtgcctagtggagagaggccctacatgtgtgttgagtgtgggaagtgctttggccggagttcccacctccttcagcatcagcgtatccacactggagagaagccctatgtgtgcagtgtatgtgggaaggccttcagccagagctcagtccttagtaaacacaggagaattcacacaggtgagaagccctatgagtgtaatgagtgtggaaaagcctttagagtgagctcagatcttgctcagcatcacaagatacatacaggagagaagcctcacgaatgtcttgagtgtcggaaagccttcactcaactctcacatctcattcagcaccagcggatccacacgggagaaaggccatatgtgtgtccgttgtgtgggaaagccttcaaccatagcactgttctgcggagccaccagagggtacacactggggagaagcctcacaggtgcaatgagtgtgggaaaaccttcagtgtgaagaggacactgctgcagcaccagaggatccacaccggggagaacccctacacgtgcagcgagtgtgggaaggccttcagcgaccgctcagtcctcattcagcaccacaacgtgcacaccggggagaagccctatgagtgcagtgagtgtgggaagaccttcagccaccgctccacactgatgaatcacgagcggatccacaccgaggaaaagccctatgcatgctacgaatgtgggaaggccttcgttcagcactcacacctgatccagcaccagagagtccacactggggagaagccctatgtgtgtggtgaatgtgggcacgccttcagtgcacgccggtctctgatccagcatgagagaatccacacaggtgaaaagcccttccagtgcacagaatgtggcaaagccttcagcctgaaagcaactctgattgtgcacctgaggacccacacgggcgagaagccatatgagtgcaatagctgcgggaaggccttcagccagtactcagtgctcatccagcaccagcggatccacacaggcgagaagccctatgagtgcggggagtgtgggcgtgccttcaaccagcatggccacctaatccagcaccagaaagtgcacagaaagttgtga

SEQ ID NO: 16988 - DNA, 763 bp, Homo sapiens
  MAP TO AF118808.1; EXPRESSED IN PLACENTA, SIGNAL = 4.7; EXPRESSED IN BONE MARROW, SIGNAL = 1.6; EXPRESSED IN FETAL LIVER, SIGNAL =   2; EXPRESSED IN LUNG, SIGNAL = 1.3; EXPRESSED IN HELA, SIGNAL = 2.3; EXPRESSED IN BRAIN, SIGNAL = 1.4; EXPRESSED IN HEART, SIGNAL = 1.5; EXPRESSED IN BT474, SIGNAL = 3.9; EXPRESSED IN HBL100, SIGNAL = 3.8; EXPRESSED IN ADULT LIVER, SIGNAL = 1.6; NT HIT: gi11177859, EVALUE 0.00e+00; EST_HUMAN HIT: AW361209.1, EVALUE 0.00e+00; SWISSPROT HIT: P51522, EVALUE 1.00e-107
aggaagcaccagagggtccacactggagagaagccttatgagtgtaatgattgtggcaagcccttcagtcgggtctccaacctcattaagcaccacagggttcacactggagagaagccctataagtgcagtgactgtgggaaagcatttagtcagagctccagccttattcagcatcggagaattcacactggagaaaagcctcacgtgtgtaatgtatgtggaaaagcctttagttatagctcagtgctccgaaagcaccagatcatccacacgggagagaagccgtacagatgcagtgtctgtgggaaggccttcagccacagctcagccctcattcagcaccagggcgtgcacacaggcgacaagccctacgcctgccacgagtgtgggaagacctttggtcgcagctccaacctcatccttcaccagcgagtccacactggagagaagccctatgaatgtactgaatgtggaaaaaccttcagccagagctcaaccctcattcagcatcagaggattcataatgggctgaagccccatgaatgtaaccagtgtggtaaagccttcaaccgaagctcaaatctcattcaccaccagaaagttcatactggggaaaaaccctacacctgtgttgaatgtggtaagggcttcagccaaagctcacacctcattcagcatcagataatccacacgggcgagcgcccctacaaatgcagtgagtgtgggaaagccttcagtcagcgttcggtcctcatccagc

SEQ ID NO: 16989 - DNA, 185 bp, Homo sapiens
  MAP TO AF165138.1; EXPRESSED IN BT474, SIGNAL = 0.86; EXPRESSED IN HBL100, SIGNAL = 0.69; EXPRESSED IN BRAIN, SIGNAL = 1.2; EXPRESSED IN PLACENTA, SIGNAL = 0.89; EXPRESSED IN BONE MARROW, SIGNAL = 2.5; EXPRESSED IN FETAL LIVER, SIGNAL = 1.2; EXPRESSED IN LUNG, SIGNAL = 1.5; EXPRESSED IN HELA, SIGNAL = 0.83; EXPRESSED IN ADULT LIVER, SIGNAL = 1.1; EXPRESSED IN HEART, SIGNAL = 1.2; EST_HUMAN HIT: BF210987.1, EVALUE 1.00e-100; SWISSPROT HIT: P29355, EVALUE 3.30e-01; NT HIT: gi11545870, EVALUE 1.00e-100
aactcctgcagagtcttggattttttgctgttactccttcggtttgcctttattttcttgggggctgcttcctcttctgagatgacatccacataaatgaatttgaagtttcccactttattgttcaacattcctgtccacatccccattggtgttttgcaaataatgtctatgatgtctccttt

SEQ ID NO: 16990 - DNA, 100 bp, Homo sapiens
  MAP TO AJ239321.2; EXPRESSED IN HBL100, SIGNAL = 2.8; EXPRESSED IN FETAL LIVER, SIGNAL = 2.9; EXPRESSED IN LUNG, SIGNAL = 2.6; EXPRESSED IN HELA, SIGNAL = 2.7; EXPRESSED IN BRAIN, SIGNAL =   4; EXPRESSED IN BT474, SIGNAL = 3.4; EXPRESSED IN PLACENTA, SIGNAL = 4.2; EXPRESSED IN HEART, SIGNAL = 2.6; EXPRESSED IN ADULT LIVER, SIGNAL = 2.7; EXPRESSED IN BONE MARROW, SIGNAL = 3.9; NT HIT: AL163202.2, EVALUE 8.00e-50; EST_HUMAN HIT: AA720574.1, EVALUE 2.00e-35
ttcccaacaagttcctcatctccatctgagaccacttcagcctggactttattgtccatatcactatcagtattttggtcagagccattcaataagtctc

SEQ ID NO: 16991 - DNA, 626 bp, Homo sapiens
  MAP TO AJ239321.2; EXPRESSED IN BONE MARROW, SIGNAL =  14; EXPRESSED IN ADULT LIVER, SIGNAL = 8.3; EXPRESSED IN BRAIN, SIGNAL =  30; EXPRESSED IN PLACENTA, SIGNAL =  27; EXPRESSED IN BT474, SIGNAL =  57; EXPRESSED IN HBL100, SIGNAL =  15; EXPRESSED IN FETAL LIVER, SIGNAL =  24; EXPRESSED IN LUNG, SIGNAL =  17; EXPRESSED IN HELA, SIGNAL = 7.3; EXPRESSED IN HEART, SIGNAL =  18; EST_HUMAN HIT: AI566486.1, EVALUE 4.00e-45; NT HIT: AL163202.2, EVALUE 0.00e+00; SWISSPROT HIT: P28160, EVALUE 3.00e-76
gagacaaaccctacaaatgtaaagattgtggcaaaatttttaagtggtcttcgaaccttactatacatcagagaattcatagtggagagaaaccctacaaatgtgaagaatgtggcaaagcctttaagcaatcttcaaaactgaatgaacatatgagagctcatactggagagaaattctacaaatgtgaagaatgtggcaaagcttttaagcacccttcaggccttactctacataagagaattcatactggagagaacccttacaaattcgaagaatgtgataaagccttttattgggttttaagctttactaaacatatgataattcataggggagagaaaccctacaaatatcaagaatgtggcaaagcttttaagtggtcttcaaaccttactatacacaagagaattcatacgggagagaaaccctgcaaatgtgaagaatgtggcaaagcttgtaagcagtctttggggcttactattcaaaagagaattcatactgaagagaaaccctacaaatgtgaagaatgtggtaaagccttttactggtccttaagctttactaaacatgatagttcatactggagagaagcactacagttgtcaagaatgcatcaaagcttt

SEQ ID NO: 16992 - DNA, 347 bp, Homo sapiens
  MAP TO AL020993.1; EXPRESSED IN BT474, SIGNAL = 8.4; EXPRESSED IN HELA, SIGNAL = 7.1; EXPRESSED IN ADULT LIVER, SIGNAL = 1.9; EXPRESSED IN PLACENTA, SIGNAL = 2.9; EXPRESSED IN BONE MARROW, SIGNAL = 1.4; EXPRESSED IN HBL100, SIGNAL = 8.8; EXPRESSED IN FETAL LIVER, SIGNAL = 4.5; EXPRESSED IN LUNG, SIGNAL = 5.1; EXPRESSED IN BRAIN, SIGNAL = 4.6; EXPRESSED IN HEART, SIGNAL = 3.6; EST_HUMAN HIT: BF330245.1, EVALUE 1.00e-126; NT HIT: gi4503092, EVALUE 1.00e-126; SWISSPROT HIT: P49674, EVALUE 4.00e-40
caatgcccaggtgcgtgttgatggaagcgtagcgggccgtgccggtcaggttcttgttttcccggtagggaatgtgctggtgggtgcgggcgtcccggtacttcttggccaggccgaagtcgatgatgtagaccaggttgcccttcttccccagccccatgaggaagttgtcgggcttgacgtcccggtggatgaagttcttggagtggatatactcgatgcggctgatctggggaggaggggggccatttgttcaacagaggggcccttgcctagcactctgggccaggcaggggctggggccacagaggtggaaaggcagagggagaaaggcctgccttcgacca

SEQ ID NO: 16993 - DNA, 159 bp, Homo sapiens
  MAP TO AL023513.1; EXPRESSED IN LUNG, SIGNAL = 0.68; EXPRESSED IN ADULT LIVER, SIGNAL =   1; EXPRESSED IN HEART, SIGNAL =   1; EXPRESSED IN PLACENTA, SIGNAL = 1.4; EXPRESSED IN HELA, SIGNAL = 0.62; EXPRESSED IN FETAL LIVER, SIGNAL = 0.75; EXPRESSED IN HBL100, SIGNAL = 0.68; EXPRESSED IN BONE MARROW, SIGNAL = 0.69; EXPRESSED IN BT474, SIGNAL = 0.63; NT HIT: AJ248284.1, EVALUE 1.20e+00; EST_HUMAN HIT: AI378582.1, EVALUE 2.40e-02
atccttgaatcccccaagcccaggaggctcgacaaatgatgttactattactgtcgttgatattgttagcaaaatgaatgtggtctttatcacacctctgctttgttgcaacttcccctctttgataaggacgtggtggatgactcctgaggtaaccat

SEQ ID NO: 16994 - DNA, 488 bp, Homo sapiens
  MAP TO AL023913.5; EXPRESSED IN HBL100, SIGNAL =  44; EXPRESSED IN BRAIN, SIGNAL =  11; EXPRESSED IN BT474, SIGNAL =  43; EXPRESSED IN BONE MARROW, SIGNAL =  12; EXPRESSED IN HELA, SIGNAL =  27; EXPRESSED IN ADULT LIVER, SIGNAL =  12; EXPRESSED IN PLACENTA, SIGNAL =  12; EXPRESSED IN FETAL LIVER, SIGNAL =  28; EXPRESSED IN LUNG, SIGNAL =  12; EXPRESSED IN HEART, SIGNAL =  17; EST_HUMAN HIT: BF205439.1, EVALUE 1.00e-111; NT HIT: U43701.1, EVALUE 1.00e-111; SWISSPROT HIT: P29316, EVALUE 8.00e-45
gaagagagcttttcacaagatggtgccaaagatgaagaaggaagcttccgtccctcctaaagccaaggccaaagcaaaggctttgaaggccaagaaggcagtgctgaaaggtgtccacagccacatacacacacacataaagaaaatctgcacgacccccgcccaccaagacactgtgacttcagaggcagcccaaatatcctcgaaagagcacccccaggagaaacaagcttggccactatgtcatcatcaagtttctgctgaccactgagtctcccatgaagaagacagaagacaacagcacacctgtgttcattgtggatgttaaagccaacaagcaccagatcaaacaggctgtgaaaaagctctgtgacattgatgtggccaaggtcaacaccctggttaggactgatagagagaagaaggcacatattcttctgggtcctgattatgatgctttggatgttgccaacaaaattgggatcatc

SEQ ID NO: 16995 - DNA, 366 bp, Homo sapiens
  MAP TO AL023913.5; EXPRESSED IN FETAL LIVER, SIGNAL = 1.2; EXPRESSED IN LUNG, SIGNAL = 1.5; EXPRESSED IN PLACENTA, SIGNAL = 1.3; EXPRESSED IN BT474, SIGNAL = 1.4; EXPRESSED IN BONE MARROW, SIGNAL = 1.3; EXPRESSED IN HBL100, SIGNAL = 1.5; EXPRESSED IN ADULT LIVER, SIGNAL = 1.7; EXPRESSED IN BRAIN, SIGNAL = 2.6; EXPRESSED IN HEART, SIGNAL = 1.2; EXPRESSED IN HELA, SIGNAL = 1.8; NT HIT: U51062.1, EVALUE 2.00e-04; EST_HUMAN HIT: AA706907.1, EVALUE 1.00e-03
aatgtatctgcattgctactatgtggacatagagagaggtggaggaggtggcagaggtgatggaagtgatgatgatgatgttggcagaggagatggatggtcaggtggtggtggtgatggtggcagtgggagcggtggtggtgatggaggtgatgatggtgattataatggtggtggtaataaaggtggaggtaatgggcatgctggttaagatggtgtggaggtggtagagccagtggaaaaggtaaggtggtgataattgaggcagtggtggtgttagtaggagtagggatagtgatggtggaggtgatggcggtggaggtgttagtggtggttgtggtgggacaggcaatgatgttggtaaaa

SEQ ID NO: 16996 - DNA, 110 bp, Homo sapiens
  MAP TO AL031121.5; EXPRESSED IN HELA, SIGNAL =   3; EXPRESSED IN HEART, SIGNAL =   3; EXPRESSED IN BT474, SIGNAL = 2.3; EXPRESSED IN ADULT LIVER, SIGNAL = 2.8; EXPRESSED IN BRAIN, SIGNAL = 3.5; EXPRESSED IN PLACENTA, SIGNAL = 2.6; EXPRESSED IN BONE MARROW, SIGNAL = 3.3; EXPRESSED IN HBL100, SIGNAL = 2.2; EXPRESSED IN FETAL LIVER, SIGNAL =   5; EXPRESSED IN LUNG, SIGNAL = 3.5; EST_HUMAN HIT: AW895129.1, EVALUE 5.50e+00
tataattattccactttctactgcaattttcatgctagaaataaattcctttttgcccccacatccccttatgggtattgcctcttctctgcttctctcttcaacagaac

SEQ ID NO: 16997 - DNA, 173 bp, Homo sapiens
  MAP TO AL031431.8; EXPRESSED IN FETAL LIVER, SIGNAL = 3.5; EXPRESSED IN LUNG, SIGNAL = 3.6; EXPRESSED IN HELA, SIGNAL = 3.2; EXPRESSED IN ADULT LIVER, SIGNAL = 2.9; EXPRESSED IN BT474, SIGNAL = 3.3; EXPRESSED IN PLACENTA, SIGNAL = 4.3; EXPRESSED IN HEART, SIGNAL = 2.9; EXPRESSED IN BRAIN, SIGNAL = 3.6; EXPRESSED IN HBL100, SIGNAL = 3.4; EXPRESSED IN BONE MARROW, SIGNAL = 3.9; SWISSPROT HIT: P40600, EVALUE 5.00e+00; NT HIT: gi11422946, EVALUE 2.00e-92; EST_HUMAN HIT: AU132886.1, EVALUE 3.00e-92
aagtactgccacatccgcctggcaggctccaaggatccccgggcctatttcaagaccaagacatggtggctgggcctgttcctgatgcttctgggcgagctgggtgtgttcgcctcctacgccttcgcgccgctgtcactcatcgtgcccctcagcgcagtttctgtgatagg

SEQ ID NO: 16998 - DNA, 118 bp, Homo sapiens
  MAP TO AL031671.11; EXPRESSED IN PLACENTA, SIGNAL = 4.4; EXPRESSED IN BT474, SIGNAL = 3.9; EXPRESSED IN BONE MARROW, SIGNAL = 5.9; EXPRESSED IN HBL100, SIGNAL = 4.2; EXPRESSED IN FETAL LIVER, SIGNAL = 4.5; EXPRESSED IN HELA, SIGNAL = 5.1; EXPRESSED IN ADULT LIVER, SIGNAL = 2.9; EXPRESSED IN LUNG, SIGNAL = 5.8; EXPRESSED IN HEART, SIGNAL = 3.8; EXPRESSED IN BRAIN, SIGNAL = 4.9; EST_HUMAN HIT: AA278790.1, EVALUE 3.00e-13; SWISSPROT HIT: P57239, EVALUE 9.30e+00; NT HIT: AF260225.1, EVALUE 3.00e-13
agccaccacattcccttaagccaaaaacctaaccagagaaaggctctagctccctccaatattatgaaggctgaaagaggtgagaaagctgcagaagaaaagttggaagttagcagaa

SEQ ID NO: 16999 - DNA, 290 bp, Homo sapiens
  MAP TO AL034371.16; EXPRESSED IN HBL100, SIGNAL = 9.7; EXPRESSED IN BRAIN, SIGNAL =   6; EXPRESSED IN PLACENTA, SIGNAL = 6.8; EXPRESSED IN HEART, SIGNAL = 4.3; EXPRESSED IN ADULT LIVER, SIGNAL = 2.9; EXPRESSED IN HELA, SIGNAL = 4.3; EXPRESSED IN LUNG, SIGNAL = 5.1; EXPRESSED IN FETAL LIVER, SIGNAL = 4.2; EXPRESSED IN BONE MARROW, SIGNAL = 4.9; EXPRESSED IN BT474, SIGNAL = 6.3; NT HIT: AF070687.1, EVALUE 1.50e-01; EST_HUMAN HIT: BE018970.1, EVALUE 0.00e+00; SWISSPROT HIT: P53288, EVALUE 1.30e+00
gtgagctgatcaaccttgccatgtactgtgagaggataaggaggaaattttggccagagtggcaccacgatgatgacaataccatctatgagtctgaggagagcagcgaaggcagcaaaacccacaccccgctgctggattttagcttttactcaaggacagagacctttgaagatgagggagcagaaaacagtttttccagaaccccagacacagattttactggacactcactctttgattcggatgtggacatggatgactatacagaccacgaacagtgcaagtga

SEQ ID NO: 17000 - DNA, 84 bp, Homo sapiens
  MAP TO AL034402.9; EXPRESSED IN PLACENTA, SIGNAL =  36; EXPRESSED IN BONE MARROW, SIGNAL = 1.5e+02; EXPRESSED IN ADULT LIVER, SIGNAL =  34; EXPRESSED IN BRAIN, SIGNAL =  44; EXPRESSED IN HEART, SIGNAL = 1.2e+02; EXPRESSED IN BT474, SIGNAL = 1.3e+02; EXPRESSED IN HBL100, SIGNAL = 1.3e+02; EXPRESSED IN FETAL LIVER, SIGNAL =  46; EXPRESSED IN LUNG, SIGNAL =  68; EXPRESSED IN HELA, SIGNAL =  77; NT HIT: AF014363.1, EVALUE 7.00e-07; SWISSPROT HIT: P23343, EVALUE 1.00e-06; EST_HUMAN HIT: C02758.1, EVALUE 1.00e-05
catggagcacagcattgtcaccaaatgggatgacatggagatctggcaccataacttttacaacaagctatgtgcggctcccga

SEQ ID NO: 17001 - DNA, 244 bp, Homo sapiens
  MAP TO AL034402.9; EXPRESSED IN ADULT LIVER, SIGNAL =  48; EXPRESSED IN BRAIN, SIGNAL =  13; EXPRESSED IN HEART, SIGNAL = 1.1e+02; EXPRESSED IN BT474, SIGNAL = 2.6e+02; EXPRESSED IN BONE MARROW, SIGNAL = 3.2e+02; EXPRESSED IN HBL100, SIGNAL = 2.6e+02; EXPRESSED IN FETAL LIVER, SIGNAL = 1.1e+02; EXPRESSED IN HELA, SIGNAL =  75; EXPRESSED IN PLACENTA, SIGNAL =  56; EXPRESSED IN LUNG, SIGNAL = 1.2e+02; NT HIT: AF110103.1, EVALUE 4.00e-54; EST_HUMAN HIT: AA325584.1, EVALUE 3.00e-52; SWISSPROT HIT: P53473, EVALUE 8.00e-17
aagatcaagatcattgctcctcctgtgcataaatactctgtgtgtttcgatggctccatcctggcctccctgtccacctcccagcagatgtggatcagcaagcaaaaataccaagaggccggccccttcatcacccacagcaagtgcttctaggcggactgttacttagttgcattacacccattcttgacaaaaacccaacttgccagaaaacaagatgagattggtgtggccttactattat

SEQ ID NO: 17002 - DNA, 154 bp, Homo sapiens
  MAP TO AL034402.9; EXPRESSED IN BONE MARROW, SIGNAL = 9.3; EXPRESSED IN HBL100, SIGNAL =  21; EXPRESSED IN PLACENTA, SIGNAL = 7.2; EXPRESSED IN FETAL LIVER, SIGNAL = 9.1; EXPRESSED IN HELA, SIGNAL =  10; EXPRESSED IN ADULT LIVER, SIGNAL = 9.7; EXPRESSED IN BRAIN, SIGNAL = 7.7; EXPRESSED IN BT474, SIGNAL = 9.8; EXPRESSED IN HEART, SIGNAL = 4.3; EXPRESSED IN LUNG, SIGNAL =  11; NT HIT: X56838.1, EVALUE 3.00e-41; EST_HUMAN HIT: AI190764.1, EVALUE 2.00e-43; SWISSPROT HIT: P12258, EVALUE 3.00e+00
caactccggacgcatcacctttaagagctataacactcaccgcaaatgtctgcagcttcactcctgacgtcagcgagaccacaaacccaccagaaggaagaaactccggacacatccgaacatcagaaggagcaaactccggacacaccatctt

SEQ ID NO: 17003 - DNA, 167 bp, Homo sapiens
  MAP TO AL034403.17; EXPRESSED IN BONE MARROW, SIGNAL = 2.6; EXPRESSED IN ADULT LIVER, SIGNAL = 1.6; EXPRESSED IN BRAIN, SIGNAL = 1.8; EXPRESSED IN PLACENTA, SIGNAL = 2.3; EXPRESSED IN HELA, SIGNAL = 2.2; EXPRESSED IN LUNG, SIGNAL = 2.3; EXPRESSED IN FETAL LIVER, SIGNAL = 2.6; EXPRESSED IN HBL100, SIGNAL = 2.5; EXPRESSED IN BT474, SIGNAL = 2.7; EXPRESSED IN HEART, SIGNAL = 2.5; SWISSPROT HIT: P11328, EVALUE 8.60e+00; EST_HUMAN HIT: AA629929.1, EVALUE 2.00e-07; NT HIT: AF200719.1, EVALUE 1.00e-16
ttcctgcctctcctgcctccccttccacctcctccacctcttctgcctctgccacctctgagacagcaagaccaaccctttcctcttcctcctcctcctgagcctgttcaatgtgaagacaaggaggatgaagacctctatgataatccaagggcacttaataaata

SEQ ID NO: 17004 - DNA, 549 bp, Homo sapiens
  MAP TO AL034553.12; EXPRESSED IN PLACENTA, SIGNAL = 2.4; EXPRESSED IN BT474, SIGNAL = 7.7; EXPRESSED IN BONE MARROW, SIGNAL = 4.4; EXPRESSED IN FETAL LIVER, SIGNAL = 2.9; EXPRESSED IN HELA, SIGNAL = 2.8; EXPRESSED IN ADULT LIVER, SIGNAL = 2.3; EXPRESSED IN BRAIN, SIGNAL =   3; EXPRESSED IN HBL100, SIGNAL = 4.2; EXPRESSED IN LUNG, SIGNAL = 2.9; EXPRESSED IN HEART, SIGNAL =   2; SWISSPROT HIT: P52746, EVALUE 2.00e-03; EST_HUMAN HIT: AW007743.1, EVALUE 1.00e-121; NT HIT: AB018327.1, EVALUE 0.00e+00
ctgatagcctatacgttcatggtcttcgatgacatgctgtaccaaagcttcataggactttggcatgaaaaggcatcgcttgcagtgaatactactctcttctcgggcattcgagcctaaggggactgccccattgagtgatttttctcctgcctttgctatgtaaggtgctgccacatgctgaaaatgttccctgtaaatgtgcttcctaactatttcataaagaggatctcggtaagtgcacttcttacagtaataaacagcttgctctacactgtcagcctgcttaggtttaaggccatcatttttgtttttatctttgaaagtgctgaggctgctacttggtgcgctggcgttcggagcatgaaatattttaatgtgtgtttccaaagtctttttgtctgcattgaaggtacagtaggggcaattaaggagaatcctattttcaaagtcttcactatggacattgcggaaatgacttttgtaggcagagaagaattttgaggaaaatggacaagcgctgcagcagaaaggttttgtccgatagtc

SEQ ID NO: 17005 - DNA, 712 bp, Homo sapiens
  MAP TO AL035403.10; EXPRESSED IN BT474, SIGNAL = 3.6; EXPRESSED IN BONE MARROW, SIGNAL = 7.1; EXPRESSED IN FETAL LIVER, SIGNAL = 7.9; EXPRESSED IN HELA, SIGNAL = 2.6; EXPRESSED IN ADULT LIVER, SIGNAL = 2.7; EXPRESSED IN BRAIN, SIGNAL = 4.2; EXPRESSED IN HBL100, SIGNAL = 2.8; EXPRESSED IN LUNG, SIGNAL =  11; EXPRESSED IN PLACENTA, SIGNAL = 5.3; EXPRESSED IN HEART, SIGNAL = 4.6; NT HIT: S76830.1, EVALUE 0.00e+00; SWISSPROT HIT: Q16570, EVALUE 1.00e-127; EST_HUMAN HIT: BE222481.1, EVALUE 0.00e+00
atggcctcctctgggtatgtcctccaggcggagctctccccctcaactgagaactcaagtcagctggacttcgaagatgtatggaattcttcctatggtgtgaatgattccttcccagatggagactatggtgccaacctggaagcagctgccccctgccactcctgtaacctgctggatgactctgcactgcccttcttcatcctcaccagtgtcctgggtatcctagctagcagcactgtcctcttcatgcttttcagacctctcttccgctggcagctctgccctggctggcctgtcctggcacagctggctgtgggcagtgccctcttcagcattgtggtgcccgtcttggccccagggctaggtagcactcgcagctctgccctgtgtagcctgggctactgtgtctggtatggctcagcctttgcccaggctttgctgctagggtgccatgcctccctgggccacagactgggtgcaggccaggtcccaggcctcaccctggggctcactgtgggaatttggggagtggctgccctactgacactgcctgtcaccctggccagtggtgcttctggtggactctgcaccctgatatacagcacggagctgaaggctttgcaggccacacacactgtagcctgtcttgccatctttgtcttgttgccattgggtttgtttggagccaaggggctgaagaaggcattgg

SEQ ID NO: 17006 - DNA, 130 bp, Homo sapiens
  MAP TO AL035461.11; EXPRESSED IN BT474, SIGNAL = 1.3; EXPRESSED IN BONE MARROW, SIGNAL = 0.97; EXPRESSED IN FETAL LIVER, SIGNAL = 1.7; EXPRESSED IN HELA, SIGNAL = 1.2; EXPRESSED IN PLACENTA, SIGNAL = 0.59; EXPRESSED IN HBL100, SIGNAL = 1.1; EXPRESSED IN LUNG, SIGNAL = 0.96; EXPRESSED IN ADULT LIVER, SIGNAL = 1.3; EXPRESSED IN BRAIN, SIGNAL = 0.81; EXPRESSED IN HEART, SIGNAL = 1.9; NT HIT: gi11421634, EVALUE 2.00e-67; EST_HUMAN HIT: AI697857.1, EVALUE 2.00e-67; SWISSPROT HIT: P06978, EVALUE 1.00e-04
ttggatggatttattgctcgaaactgggccaatcaaagatcagctttgggaagtgctcttgatccacttgctgataaaatacttatcagtatcttatatgttagcttgacctatgcagatcttattccag

SEQ ID NO: 17007 - DNA, 224 bp, Homo sapiens
  MAP TO AL035541.12; EXPRESSED IN BT474, SIGNAL = 0.84; EXPRESSED IN FETAL LIVER, SIGNAL =  20; EXPRESSED IN LUNG, SIGNAL = 0.94; EXPRESSED IN ADULT LIVER, SIGNAL =  19; EXPRESSED IN HEART, SIGNAL = 1.1; SWISSPROT HIT: P35558, EVALUE 2.00e-38; NT HIT: U31519.1, EVALUE 1.00e-123; EST_HUMAN HIT: R86197.1, EVALUE 1.00e-121
cagttgtcatacttcttcagccgcctgaggatgccctcttcctccatctggcccagaagccgcccattctcctcctcagagccgtcacagatgtggatgtgatcaggctgacacagctcagcgttattctcgagaaactccctcactgcctggggtaggctgtccaggcttccctggacaactttggccgagaggttcaggccgttttgcagctgaggaggcat

SEQ ID NO: 17008 - DNA, 411 bp, Homo sapiens
  MAP TO AL035563.18; EXPRESSED IN ADULT LIVER, SIGNAL =  30; EXPRESSED IN BONE MARROW, SIGNAL =  93; EXPRESSED IN BRAIN, SIGNAL = 8.2; EXPRESSED IN HEART, SIGNAL =  12; EXPRESSED IN PLACENTA, SIGNAL =  40; EXPRESSED IN BT474, SIGNAL =  78; EXPRESSED IN HBL100, SIGNAL = 1.1e+02; EXPRESSED IN LUNG, SIGNAL =  53; EXPRESSED IN HELA, SIGNAL =  60; EXPRESSED IN FETAL LIVER, SIGNAL =  84; SWISSPROT HIT: P10126, EVALUE 1.00e-35; NT HIT: gi11418792, EVALUE 3.00e-53; EST_HUMAN HIT: BE748687.1, EVALUE 2.00e-55
ggcaacctggttggtgacagcacaaatgacccatcaatggaagcagctggcttcactgctcaggtgattaccctgaaccatcaaggccaaatcaatactggctgtgccactgtgctggattgtcacatggctcttattgcttgcaagtttgctgagctgatggagaagattggtcaccattctggtgagaaggtggaagatgaacccaaattcttcaaatcgggtgatgccgccattgttgatatggttctgtgtgtagagagcttctctgaccgttttcttctgggtccctttgctgttgatgatgtgatacagacagttgctgtggacgtcattaaagcagtggacaagaagcctgcaggagctggcaaggccaccaagtctgcccagaaatctcagaaggccaaatga

SEQ ID NO: 17009 - DNA, 297 bp, Homo sapiens
  MAP TO AL035603.11; EXPRESSED IN HBL100, SIGNAL =  32; EXPRESSED IN ADULT LIVER, SIGNAL = 7.9; EXPRESSED IN FETAL LIVER, SIGNAL =  27; EXPRESSED IN LUNG, SIGNAL =  20; EXPRESSED IN HELA, SIGNAL =  50; EXPRESSED IN HEART, SIGNAL = 8.3; EXPRESSED IN PLACENTA, SIGNAL = 5.6; EXPRESSED IN BT474, SIGNAL =  27; EXPRESSED IN BONE MARROW, SIGNAL =   8; EXPRESSED IN BRAIN, SIGNAL = 7.5; NT HIT: AB015610.1, EVALUE 2.00e-93; SWISSPROT HIT: P12750, EVALUE 3.00e-35; EST_HUMAN HIT: W00563.1, EVALUE 3.00e-90
cctgctagatttatggatgtcatcagcattgacaagggacacaatttctgtctgatctatgacaccaagggttgctttggtgtacattgtattacacctgaggaggtcaagtacaagttatgcaaagtgagaaaaatcttagtgggcacaaaaggaatccctcatctggtgactcatgatgcttgtaccatctgctaccctgatcccctcatcaaggttaatgaaaccgttcagattgactcggagactggcaagatactgatttcatcaagcttgatgctggtaaccagcatatgg

SEQ ID NO: 17010 - DNA, 123 bp, Homo sapiens
  MAP TO AL035652.5; EXPRESSED IN LUNG, SIGNAL = 1.6; EXPRESSED IN HEART, SIGNAL = 1.1; EXPRESSED IN BRAIN, SIGNAL = 1.1; EXPRESSED IN ADULT LIVER, SIGNAL = 1.2; EXPRESSED IN HELA, SIGNAL = 1.3; EXPRESSED IN HBL100, SIGNAL = 2.5; EXPRESSED IN BONE MARROW, SIGNAL = 1.9; EXPRESSED IN BT474, SIGNAL = 1.6; EXPRESSED IN PLACENTA, SIGNAL = 1.7; EXPRESSED IN FETAL LIVER, SIGNAL = 3.5; SWISSPROT HIT: P11387, EVALUE 1.00e-17; NT HIT: M60697.1, EVALUE 2.00e-63; EST_HUMAN HIT: AI954577.1, EVALUE 2.00e-63
cagtttctcttccttgctcatctgtttccgagcttccgtctgggctttgaaatactggctcatctgggtaaaatcacatttgcttaggttggtgataatattcttctcttcattagtcatttc

SEQ ID NO: 17011 - DNA, 164 bp, Homo sapiens
  MAP TO AL035652.5; EXPRESSED IN ADULT LIVER, SIGNAL = 1.6; EXPRESSED IN PLACENTA, SIGNAL = 3.4; EXPRESSED IN BONE MARROW, SIGNAL = 2.8; EXPRESSED IN LUNG, SIGNAL = 2.7; EXPRESSED IN HELA, SIGNAL = 1.7; EXPRESSED IN BT474, SIGNAL = 2.8; EXPRESSED IN HBL100, SIGNAL = 3.2; EXPRESSED IN FETAL LIVER, SIGNAL = 3.9; EXPRESSED IN BRAIN, SIGNAL = 3.6; EXPRESSED IN HEART, SIGNAL = 2.9; NT HIT: M60694.1, EVALUE 5.00e-31; EST_HUMAN HIT: AW996485.1, EVALUE 7.00e-09
catttccacttctgttcctcttctttcttcggcttctttttcttgttatctggctcaggaacttttttatctttatctttattcttgggttttttcaatttaccatcctacaaagaaacatggtgagaaagcacttaaataaagactgatcacacttctggagg

SEQ ID NO: 17012 - DNA, 126 bp, Homo sapiens
  MAP TO AL035681.13; EXPRESSED IN PLACENTA, SIGNAL = 1.3; EXPRESSED IN HEART, SIGNAL = 1.1; EXPRESSED IN BONE MARROW, SIGNAL = 2.3; EXPRESSED IN BT474, SIGNAL = 2.6; EXPRESSED IN BRAIN, SIGNAL =   2; EXPRESSED IN ADULT LIVER, SIGNAL = 1.4; EXPRESSED IN HELA, SIGNAL = 2.8; EXPRESSED IN LUNG, SIGNAL = 1.9; EXPRESSED IN FETAL LIVER, SIGNAL = 2.1; EXPRESSED IN HBL100, SIGNAL = 3.8; EST_HUMAN HIT: AL120211.1, EVALUE 6.00e-65; SWISSPROT HIT: P46060, EVALUE 2.00e-10; NT HIT: gi11418177, EVALUE 1.00e-46
agtttgaggctcttgcctttgaaactcagctgtcccccggccacctgagtcttggcaagtgtctctgccagcttggcaatgtcttccgaggccatgttgactaggctggtgggctcccctggagat

SEQ ID NO: 17013 - DNA, 237 bp, Homo sapiens
  MAP TO AL035701.13; EXPRESSED IN HEART, SIGNAL = 1.3e+02; EXPRESSED IN PLACENTA, SIGNAL =  58; EXPRESSED IN BONE MARROW, SIGNAL = 3e+02; EXPRESSED IN HBL100, SIGNAL = 2.6e+02; EXPRESSED IN ADULT LIVER, SIGNAL =  68; EXPRESSED IN BRAIN, SIGNAL =  68; EXPRESSED IN BT474, SIGNAL = 3.1e+02; EXPRESSED IN FETAL LIVER, SIGNAL =  92; EXPRESSED IN LUNG, SIGNAL = 1e+02; EXPRESSED IN HELA, SIGNAL = 1.2e+02; NT HIT: D50659.1, EVALUE 0.00e+00; EST_HUMAN HIT: BF084019.1, EVALUE 6.00e-79; SWISSPROT HIT: Q27250, EVALUE 5.00e-27
gcatctgctcgcagtccatttgcggtggatgatggaggggcccgactcgttgtactcctgcttgctaatccacatctgctggaaggtggacagtgaggccaggatggagccaccgatccacacaaagtacttgcactctgggggcacgatatcttgatcttcatggtgctggatgccagggcagtgatctccttctgcatcctattggggatgccagggtacatggtggtgacgcca

SEQ ID NO: 17014 - DNA, 371 bp, Homo sapiens
  MAP TO AL035702.7; EXPRESSED IN HBL100, SIGNAL = 1.5; EXPRESSED IN LUNG, SIGNAL = 1.8; EXPRESSED IN HELA, SIGNAL = 2.2; EXPRESSED IN ADULT LIVER, SIGNAL = 5.8; EXPRESSED IN BRAIN, SIGNAL = 2.2; EXPRESSED IN HEART, SIGNAL = 2.2; EXPRESSED IN PLACENTA, SIGNAL = 1.7; EXPRESSED IN BT474, SIGNAL = 1.9; EXPRESSED IN BONE MARROW, SIGNAL = 1.7; EXPRESSED IN FETAL LIVER, SIGNAL = 3.6; EST_HUMAN HIT: AW956508.1, EVALUE 3.40e-01; SWISSPROT HIT: P49259, EVALUE 3.00e-04; NT HIT: AB002328.1, EVALUE 2.30e-01
ctgtggtccagatcagtggtcagaccttcatgcgatttgaccaagtgatgacatggtcctcggccctgctgtactgccgcagccaccacacggatctggccgacctgcagatggtgacggatgagacaggcaaggaggccttgagatccatcatgagtgagactgaagcctggattggcctctacctcaatgcaaactccggatctctgagctggtccagtgacctgggggccagcatcccctcctggctgcaggtgccgatgatggtgagaggactgtgcacagctcttggcatctatatgacctactccccaaaagtgtactcagtgaactgctcttccctgctgcccttcttctgcttctatggtgag

SEQ ID NO: 17015 - DNA, 203 bp, Homo sapiens
  MAP TO AL035702.7; EXPRESSED IN HBL100, SIGNAL = 1.1; EXPRESSED IN ADULT LIVER, SIGNAL =   1; EXPRESSED IN BRAIN, SIGNAL =   1; EXPRESSED IN PLACENTA, SIGNAL = 1.6; EXPRESSED IN HEART, SIGNAL =   1; EXPRESSED IN HELA, SIGNAL = 0.76; EXPRESSED IN LUNG, SIGNAL = 0.92; EXPRESSED IN FETAL LIVER, SIGNAL = 0.94; EXPRESSED IN BT474, SIGNAL = 0.61; NT HIT: gi11422621, EVALUE 1.00e-111; EST_HUMAN HIT: W46168.1, EVALUE 7.00e-99; SWISSPROT HIT: P10587, EVALUE 1.20e+00
ctgctgatgatgcttttcatctggctatctttttcttcctgctgtcttcggagccgctcctcgctgtcctccagtcgggccttgtattccagcagcagcttctgcatctgctgctcctgcaccagcaagcggcgttcatattcctccagtcgccggctggaaactctcaggcgctccttcagtttagtaatttcttgttcata

SEQ ID NO: 17016 - DNA, 153 bp, Homo sapiens
  MAP TO AL049540.11; EXPRESSED IN HEART, SIGNAL =  12; EXPRESSED IN PLACENTA, SIGNAL =  20; EXPRESSED IN FETAL LIVER, SIGNAL =  57; EXPRESSED IN ADULT LIVER, SIGNAL =  29; EXPRESSED IN BT474, SIGNAL =  72; EXPRESSED IN BONE MARROW, SIGNAL =  87; EXPRESSED IN HBL100, SIGNAL = 1.8e+02; EXPRESSED IN LUNG, SIGNAL =  21; EXPRESSED IN HELA, SIGNAL =  52; EXPRESSED IN BRAIN, SIGNAL =  12; EST_HUMAN HIT: BE746020.1, EVALUE 9.00e-49; NT HIT: gi4506718, EVALUE 3.00e-44; SWISSPROT HIT: P25444, EVALUE 4.00e-19
gggtgcagggatgaagtgcaccagcacagagccacagtggcctgtcaccttacaagggacggtgtggggcttgccgatcttgctcccccagtagcctctgcacatggggacaatggagagctagcccaggatgatggccccgcggatggcgtg

SEQ ID NO: 17017 - DNA, 138 bp, Homo sapiens
  MAP TO AL049540.11; EXPRESSED IN ADULT LIVER, SIGNAL = 1.5; EXPRESSED IN BRAIN, SIGNAL = 1.7; EXPRESSED IN HEART, SIGNAL = 1.7; EXPRESSED IN PLACENTA, SIGNAL = 1.6; EXPRESSED IN BT474, SIGNAL = 1.3; EXPRESSED IN BONE MARROW, SIGNAL = 1.9; EXPRESSED IN HBL100, SIGNAL = 1.9; EXPRESSED IN LUNG, SIGNAL = 1.8; EXPRESSED IN HELA, SIGNAL = 1.8; EXPRESSED IN FETAL LIVER, SIGNAL = 1.4; NT HIT: U71207.1, EVALUE 3.00e-63; SWISSPROT HIT: O00167, EVALUE 2.00e-17; EST_HUMAN HIT: BE047830.1, EVALUE 4.00e-63
tctcctttgtccttaggcccaactgtgtcaatgtgctggtcaccaccactcaactaattcctgccctggccaaagtcctgctatatggcctggggtctgtgtttcctattgagaacatctacagtgcaaccaagacag

SEQ ID NO: 17018 - DNA, 285 bp, Homo sapiens
  MAP TO AL049540.11; EXPRESSED IN FETAL LIVER, SIGNAL = 4.7; EXPRESSED IN ADULT LIVER, SIGNAL =   3; EXPRESSED IN BRAIN, SIGNAL = 3.7; EXPRESSED IN PLACENTA, SIGNAL = 3.1; EXPRESSED IN BT474, SIGNAL =  14; EXPRESSED IN BONE MARROW, SIGNAL = 4.3; EXPRESSED IN HBL100, SIGNAL =   3; EXPRESSED IN LUNG, SIGNAL = 4.3; EXPRESSED IN HELA, SIGNAL = 4.3; EXPRESSED IN HEART, SIGNAL = 2.8; NT HIT: AF273045.1, EVALUE 0.00e+00; EST_HUMAN HIT: AA689414.1, EVALUE 1.00e-130; SWISSPROT HIT: Q15326, EVALUE 1.00e-17
actgggtgcaggacttcatgtgctcaggccagtgggcttgctggcaggggtagtcacagtagctagtgttccaacagcagtaaaagatggcctccttcttgcagttggcgcaccactgcttcttcttggtctcatccaccgcctgctgcttctccaactccagctgcttcttcacctcggcgatgagccggtcccgctcctgctccaggctctgccgcatctccgccatggtcagctctggtggaggaggggaagaacaccgctcatcacctgaccccagcctgg

SEQ ID NO: 17019 - DNA, 378 bp, Homo sapiens
  MAP TO AL049591.12; EXPRESSED IN PLACENTA, SIGNAL = 1.9; EXPRESSED IN BT474, SIGNAL = 1.9; EXPRESSED IN LUNG, SIGNAL = 2.1; EXPRESSED IN BRAIN, SIGNAL = 2.4; EXPRESSED IN HBL100, SIGNAL = 2.6; EXPRESSED IN FETAL LIVER, SIGNAL = 1.9; EXPRESSED IN HELA, SIGNAL = 4.2; EXPRESSED IN ADULT LIVER, SIGNAL = 1.9; EXPRESSED IN BONE MARROW, SIGNAL = 1.3; EXPRESSED IN HEART, SIGNAL = 1.7; NT HIT: AB035523.1, EVALUE 2.40e-01; EST_HUMAN HIT: T53018.1, EVALUE 2.40e-01; SWISSPROT HIT: Q12986, EVALUE 9.00e-01
atgaagggcagtgggtagattggaaccctgggcttttcctgagattcccctagcagtagaggcccgtgagcttgttctcatcaatgtcacaaaacagaccaaccttacgctgcaatccagcctgcacccctgcttgcccccagttcccgatggtgaagatcacccagtgcgtgaggacgagaaagtgggagcagcaaggccagatggtggcctccaagacagagtgtgtggtcgtgtgctggtggtagcagtagaggaggaggctctgctccacgtcgacaaccccaccgacttttccgaagtggtcaaagaaaaacagcaggtcttctggcagccctgcaagagggaaagagaagcatccaccgttgctggtggttt

SEQ ID NO: 17020 - DNA, 613 bp, Homo sapiens
  MAP TO AL049610.9; EXPRESSED IN HELA, SIGNAL =  13; EXPRESSED IN PLACENTA, SIGNAL = 7.7; EXPRESSED IN LUNG, SIGNAL = 4.2; EXPRESSED IN ADULT LIVER, SIGNAL = 4.9; EXPRESSED IN BRAIN, SIGNAL = 4.8; EXPRESSED IN HEART, SIGNAL = 2.9; EXPRESSED IN BT474, SIGNAL = 7.3; EXPRESSED IN BONE MARROW, SIGNAL = 3.9; EXPRESSED IN HBL100, SIGNAL =  28; EXPRESSED IN FETAL LIVER, SIGNAL = 8.9; NT HIT: gi11419791, EVALUE 0.00e+00; SWISSPROT HIT: Q15014, EVALUE 1.00e-116; EST_HUMAN HIT: BF679985.1, EVALUE 0.00e+00
cactggcagtaaagagagatgcagaattctttgccagatattttaggaaatcatgcaaatagcccaacaataatgcaaggcttttctcatcaaggggcgtataggccaacattgctccaattcttacaaataatctcagtaggtgtggtgctccataaacctgggacattggagcatcagggtgagccaagaggatttcagcatactggggcctctcaaatttgtagagcagctgagtgcccaacatcacattgaaatattcttttattcctgccacaacttcattaaccgcatattccttattatcaacatttccctgcgatttcttgcaatttgcatactcctccagaattgcatctacatttttcttggcagggagttgaaacagctgcttctgcctggtaactaagtcccagtcctcaacaagccatggttttaattcttcaggaatcttcactttaacctccattctattcttaaacgcctcctcactttcaacagtggggtctgcccgggcccttttcttccgagggggctgaggtgcttcgctggtactgccaccatctccgtttccaggagtcttctgcttgttctttctggtcttcctcacgga

SEQ ID NO: 17021 - DNA, 251 bp, Homo sapiens
  MAP TO AL049631.7; EXPRESSED IN PLACENTA, SIGNAL = 2.2; EXPRESSED IN BT474, SIGNAL = 2.1; EXPRESSED IN BONE MARROW, SIGNAL = 3.2; EXPRESSED IN HBL100, SIGNAL = 2.4; EXPRESSED IN LUNG, SIGNAL = 2.8; EXPRESSED IN ADULT LIVER, SIGNAL = 3.4; EXPRESSED IN BRAIN, SIGNAL = 2.8; EXPRESSED IN FETAL LIVER, SIGNAL = 2.9; EXPRESSED IN HELA, SIGNAL = 2.2; EXPRESSED IN HEART, SIGNAL = 3.3; SWISSPROT HIT: P54366, EVALUE 2.00e-06
cgccacaacgtcgggatattgagattcatcgaaaaagttctctagctcctgcagctgaaactgcgtgaacgcggtgcggcggcggcgtttcctctctgggggctgtggtccctcagcggtttgtggcccctccgccggctgtggcccctccacggtcgtctggggcggctcctcctgctcttgcttcagctcgagcaggggcggctcctcctgctgttgctccggcttggtcaggggcggctcctcctgct

SEQ ID NO: 17022 - DNA, 90 bp, Homo sapiens
  MAP TO AL049642.5; EXPRESSED IN PLACENTA, SIGNAL = 5.6; EXPRESSED IN BT474, SIGNAL = 6.5; EXPRESSED IN BONE MARROW, SIGNAL = 6.6; EXPRESSED IN HEART, SIGNAL = 4.8; EXPRESSED IN ADULT LIVER, SIGNAL = 7.2; EXPRESSED IN HELA, SIGNAL = 8.2; EXPRESSED IN LUNG, SIGNAL = 7.8; EXPRESSED IN HBL100, SIGNAL = 5.9; EXPRESSED IN BRAIN, SIGNAL =   8; EXPRESSED IN FETAL LIVER, SIGNAL = 7.4; NT HIT: AL163227.2, EVALUE 9.00e-13; EST_HUMAN HIT: AW983880.1, EVALUE 6.00e-17
ctcactctgggcttcactgtcaatatcatcatcagcattttggtctaaaccattcaacaggtctctaggaagttccaaacttttcctcat

SEQ ID NO: 17023 - DNA, 150 bp, Homo sapiens
  MAP TO AL049642.5; EXPRESSED IN HBL100, SIGNAL = 4.4; EXPRESSED IN HELA, SIGNAL = 6.9; EXPRESSED IN HEART, SIGNAL = 6.4; EXPRESSED IN PLACENTA, SIGNAL = 5.3; EXPRESSED IN BT474, SIGNAL = 5.1; EXPRESSED IN BONE MARROW, SIGNAL = 6.5; EXPRESSED IN FETAL LIVER, SIGNAL = 5.8; EXPRESSED IN LUNG, SIGNAL = 5.5; EXPRESSED IN ADULT LIVER, SIGNAL = 5.9; EXPRESSED IN BRAIN, SIGNAL = 8.9; SWISSPROT HIT: Q9QYA9, EVALUE 1.40e+00; NT HIT: AL163210.2, EVALUE 5.00e-46; EST_HUMAN HIT: AL119158.1, EVALUE 2.00e-42
gaacctctgagagacttgctgaatggctttgacaaaaatgctgatagtgatatgaacaataaggtccaggctgaggaggtatcaaatggagaagagtaagttgttgggaactggagtaaaagtgactcttgttctgttttagcaaagaga

SEQ ID NO: 17024 - DNA, 457 bp, Homo sapiens
  MAP TO AL049651.2; EXPRESSED IN FETAL LIVER, SIGNAL = 1.7; EXPRESSED IN LUNG, SIGNAL = 1.5; EXPRESSED IN PLACENTA, SIGNAL = 5.1; EXPRESSED IN HELA, SIGNAL = 1.6; EXPRESSED IN HEART, SIGNAL = 1.5; EXPRESSED IN BRAIN, SIGNAL = 1.8; EXPRESSED IN ADULT LIVER, SIGNAL = 1.7; EXPRESSED IN HBL100, SIGNAL = 2.7; EXPRESSED IN BONE MARROW, SIGNAL = 1.6; EXPRESSED IN BT474, SIGNAL = 1.8; EST_HUMAN HIT: AI565065.1, EVALUE 1.00e-106; SWISSPROT HIT: O84562, EVALUE 2.00e+00; NT HIT: AF179881.1, EVALUE 5.00e-52
ataaagaaaattgtaaggttcttgtatcggttcgaatcccgagagcgtgccaacagacaacacgaggcgatgtggagcaacatgctgttttaatgagcgcctgggtgcaggcgggctgaggcctaaaatggcgtcagccccaagtgaggacaggacaaaggttttatagtctcctttaaacaggaagtgtcctagtctgacgtaattgctacgttgtacccggatggcctgtttctcaatcttcaggggtacgtgtcttctggccggctctcttcctgcttctgctatcttgctggcacaggctgctgatgcaagtggtcttgcaccttgggactgggcctgagaagggaggagttactcatccctttaagctatcaggccccagggagaatcttacaaaaatcaagaaatttcacattgaacagtaccagtatgaaatgcacaggccacatttgaa

SEQ ID NO: 17025 - DNA, 136 bp, Homo sapiens
  MAP TO AL049690.17; EXPRESSED IN BT474, SIGNAL =  11; EXPRESSED IN FETAL LIVER, SIGNAL = 6.7; EXPRESSED IN PLACENTA, SIGNAL = 4.2; EXPRESSED IN BONE MARROW, SIGNAL =  11; EXPRESSED IN HBL100, SIGNAL = 8.9; EXPRESSED IN LUNG, SIGNAL =  12; EXPRESSED IN HELA, SIGNAL =  12; EXPRESSED IN ADULT LIVER, SIGNAL = 6.3; EXPRESSED IN BRAIN, SIGNAL =   9; EXPRESSED IN HEART, SIGNAL =  16; NT HIT: AF047031.1, EVALUE 3.00e-01; EST_HUMAN HIT: AW302996.1, EVALUE 2.00e-08; SWISSPROT HIT: Q99091, EVALUE 2.30e+00
atcctggaattatcagacctgaaattcaaagtaattataattaataggctaaggccgctaatggacaaaggagacaacatgcaggaagagataggtaatataagcagagagatggaaactcttaaaaagaatctaa

SEQ ID NO: 17026 - DNA, 404 bp, Homo sapiens
  MAP TO AL049710.18; EXPRESSED IN ADULT LIVER, SIGNAL = 4.3; EXPRESSED IN BRAIN, SIGNAL = 2.4; EXPRESSED IN HEART, SIGNAL = 3.1; EXPRESSED IN PLACENTA, SIGNAL = 1.3; EXPRESSED IN BT474, SIGNAL = 4.6; EXPRESSED IN FETAL LIVER, SIGNAL = 3.5; EXPRESSED IN HELA, SIGNAL = 5.4; EXPRESSED IN LUNG, SIGNAL = 1.6; EXPRESSED IN HBL100, SIGNAL = 4.1; EXPRESSED IN BONE MARROW, SIGNAL = 1.7; SWISSPROT HIT: P00506, EVALUE 3.00e-33; EST_HUMAN HIT: BE294440.1, EVALUE 3.00e-45; NT HIT: gi11430402, EVALUE 2.00e-51
agtcctgcagatgtcttgcaaaattcagccagtaccccaatgagcaggtattccttgtccaaattttttgtggcagtctgggcctctgccttgcagatgttagacagcagataaagctttctgttgttgtcctggttggcaccaattaccagattcacctttttgctatcaatgtctctcttaaaggctttggtgactcccaggataggatctggaagtcccatgtccacgtgggcccgccagaagctagtcctgttggaggctgccatggcaaggcccagttggaaggcagcggtgatccaggaggtgatgtagcctgagtgcggcagggccatggtggacgggaggagggcagttgagtagctgcagaacagagtggagggcaagcgggcccctcccacttt

SEQ ID NO: 17027 - DNA, 237 bp, Homo sapiens
  MAP TO AL049712.12; EXPRESSED IN BONE MARROW, SIGNAL = 4.2; EXPRESSED IN HBL100, SIGNAL =   9; EXPRESSED IN FETAL LIVER, SIGNAL = 2.7; EXPRESSED IN ADULT LIVER, SIGNAL = 1.2; EXPRESSED IN PLACENTA, SIGNAL = 0.84; EXPRESSED IN BT474, SIGNAL = 3.5; EXPRESSED IN LUNG, SIGNAL = 0.87; EXPRESSED IN HELA, SIGNAL = 3.1; EXPRESSED IN BRAIN, SIGNAL = 1.5; EXPRESSED IN HEART, SIGNAL = 0.83; SWISSPROT HIT: O00567, EVALUE 1.00e-22; EST_HUMAN HIT: BF125936.1, EVALUE 1.00e-103; NT HIT: gi11421204, EVALUE 1.00e-103
ccatggaggaccgtgaggcatccagaatagccttagccttggccccatccattgtcagctcctccagcttctccagcttgtcctcattcagttcccttcggtttccaataaactgggcaagacggcagtatgtggcattgtcgttgatgatcttcaccagctccggaaagtgatacccgtaccactccctgcaaagagccacagtcactccctggcccagctgcttcatcaaaaacc

SEQ ID NO: 17028 - DNA, 179 bp, Homo sapiens
  MAP TO AL049712.12; EXPRESSED IN HBL100, SIGNAL = 2.2; EXPRESSED IN FETAL LIVER, SIGNAL = 2.7; EXPRESSED IN LUNG, SIGNAL = 2.3; EXPRESSED IN HELA, SIGNAL = 2.1; EXPRESSED IN BRAIN, SIGNAL =   2; EXPRESSED IN PLACENTA, SIGNAL = 3.7; EXPRESSED IN BT474, SIGNAL = 2.4; EXPRESSED IN HEART, SIGNAL = 2.2; EXPRESSED IN ADULT LIVER, SIGNAL = 2.3; EXPRESSED IN BONE MARROW, SIGNAL = 3.3; NT HIT: gi6678933, EVALUE 3.50e-01; EST_HUMAN HIT: BF340130.1, EVALUE 2.40e+00; SWISSPROT HIT: P70091, EVALUE 2.20e+00
ccgctgaccctgacactcatccttactccaatcctcctgatgatgcagatacggatcatcgccctgactgtgtgacgctcactctggtaccatcacctgagcctgtctctcactctcatgttgaacctcgaagtctaaggttgaagttcatgcccaagatcaaagtcaagggtaagggt

SEQ ID NO: 17029 - DNA, 241 bp, Homo sapiens
  MAP TO AL049780.2; EXPRESSED IN HEART, SIGNAL = 1.5; EXPRESSED IN PLACENTA, SIGNAL = 2.2; EXPRESSED IN BRAIN, SIGNAL =   5; EXPRESSED IN ADULT LIVER, SIGNAL = 2.7; EXPRESSED IN HELA, SIGNAL =   2; EXPRESSED IN FETAL LIVER, SIGNAL = 2.5; EXPRESSED IN HBL100, SIGNAL = 1.4; EXPRESSED IN BONE MARROW, SIGNAL = 1.7; EXPRESSED IN BT474, SIGNAL = 3.9; EXPRESSED IN LUNG, SIGNAL = 1.6; EST_HUMAN HIT: BE547173.1, EVALUE 4.00e-86; NT HIT: L77569.1, EVALUE 2.30e+00; SWISSPROT HIT: Q03593, EVALUE 6.10e+00
gagctggaaaatgcagaatttatccccatgcctgacagcccatctcctctcagtgcagcgttttcagaatctgagaaagataccctgccctatgaagagctgcaaggactcaaagtggcctctgaagctcctttggaacacaaaccccaagtagaagcctcggtaactgagctttttgcctttgaatcacaactaggtaaacagtcactgcaagctctgcctggttcttctggcctcgctc

SEQ ID NO: 17030 - DNA, 2353 bp, Homo sapiens
  MAP TO AL049780.2; EXPRESSED IN FETAL LIVER, SIGNAL = 1.9; EXPRESSED IN PLACENTA, SIGNAL = 1.9; EXPRESSED IN BT474, SIGNAL = 2.6; EXPRESSED IN BONE MARROW, SIGNAL = 1.6; EXPRESSED IN HBL100, SIGNAL = 1.9; EXPRESSED IN LUNG, SIGNAL = 1.9; EXPRESSED IN ADULT LIVER, SIGNAL = 1.6; EXPRESSED IN BRAIN, SIGNAL = 3.1; EXPRESSED IN HEART, SIGNAL = 1.9; EXPRESSED IN HELA, SIGNAL =   2; EST_HUMAN HIT: AU121422.1, EVALUE 0.00e+00; SWISSPROT HIT: Q13316, EVALUE 1.50e-01; NT HIT: AF195658.1, EVALUE 0.00e+00
agtatgatgtgtgcatggagccagccaaaactctgattgaatttcagaactgggacactctcttgttttgcattcaggaaggagtgaaaatgtttttaaagcaagaaaaattatttgtggaattatcaggtgaggatattaaggaatttagtgaagataatggttttagtttatttgatgctactcttcagaagcgtgtgacttccgatgagaggagcaatttccaggaagcatgtaataatattttagattcctatgagatgtttaatttgcagtcaaaagctgtgaaaagaaaaactactgcagaaaacgtaaacacacagagttctagggattcagaagctaccagaaaaaatacaaatgatgcatttttgtacatttatgaatcaggtggtccaggccatagcaaaatgacagagccatctttacaaaacaaagacagctcttgctcagaatcaaagatgttagaacaagagacaattgtagcatcagaagctggagaaaatgagaaacataaaaaatctttcctggaacatagctctttagaaaatccgtgtggaaccagtttagaaatgtttttaagcccttttcagacaccatgtcactttgaggagagtgggcaggatctagaaatatggaaagaaagtactactgttaatggcatggctgccaacatcttgaaaaataatagaattcagaatcaaccaaagagatttaaagatgctactgaagtgggatgccagcctctgccttttgcaacaacattatggggagtacatagtgctcagacagagaaagagaaaaaaaaagaatctagcaattgtggaagaagaaatgtttttagttatgggcgagttaaattatgttccactggctttataactcatgtagtacaaaatgaaaaaactaaatcaactgaaacagaacattcatttaaaaattatgttagacctggtcccacacgtgcccaagaaacatttggaaatagaacacgtcattcagttgaaactccagacatcaaagatttagccagcactttaagtaaagaatctggtcaattgcccaacaaaaaaaattgcagaacgaatataagttatgggctagagaatgaacctacagcaacttatacaatgttttctgcttttcaggaaggtagcaaaaaatcacaaacagattgcatattatctgatacatccccctctttcccctggtatagacacgtttccaatgatagtaggaaaacagataaattaattggtttctccaaaccaatcgtccgtaagaagctaagcttgagttcacagctaggatctttagagaagtttaagaggcaatatgggaaggttgaaaatcctctggatacagaagtagaggaaagtaatggagtcactaccaatctcagtcttcaagttgaacctgacattctgctgaaggacaagaaccgcttagagaactctgatgtttgtaaaatcactactatggagcatagtgattcagatagtagttgtcaaccagcaagccacatccttaactcagagaagtttccattctccaaggatgaagattgtttagaacaacagatgcctagtttgagagaaagtcctatgaccctgaaggagttatctctctttaatagaaaacctttggaccttgagaagtcatctgaatcactagcctctaaattatccagactgaagggttccgaaagagaaactcaaacaatggggatgatgagtcgttttaatgaacttccaaattcagattccagtaggaaagacagcaagttgtgcagtgtgttaacacaagatttttgtatgttatttaacaacaagcatgaaaaaacagagaatggtgtcatcccaacatcagattctgccacacaggataattcctttaataaaaatagtaaaacacattctaacagcaatacaacagagaactgtgtgatatcagaaactcctttggtattgccctataataattctaaagttaccggtaaagattcagatgttcttatcagagcctcagaacaacagataggaagtcttgactctcccagtggaatgttaatgaatccggtagaagatgccacaggtgaccaaaatggaatttgttttcagagtgaggaatctaaagcaagagcttgttctgaaactgaagagtcaaacacgtgttgttcagattggcagcggcatttcgatgtagccctgggaagaatggtttatgtcaacaaaatgactggactcagcacattcattgccccaactgaggacattcaggctgcttgtactaaagacctgacaactgtggctgtggatgttgtacttgagaatggtaagtacgtagtattcat

SEQ ID NO: 17031 - DNA, 362 bp, Homo sapiens
  MAP TO AL049842.5; EXPRESSED IN FETAL LIVER, SIGNAL =  20; EXPRESSED IN LUNG, SIGNAL = 0.66; EXPRESSED IN PLACENTA, SIGNAL = 0.82; EXPRESSED IN BONE MARROW, SIGNAL = 0.67; EXPRESSED IN ADULT LIVER, SIGNAL =  16; EXPRESSED IN HEART, SIGNAL = 0.94; EXPRESSED IN BT474, SIGNAL = 0.71; NT HIT: X87344.1, EVALUE 1.20e-02; EST_HUMAN HIT: BE378471.1, EVALUE 8.50e-02; SWISSPROT HIT: Q01836, EVALUE 1.50e-02
aggttatgaatttactgccctgcagggaccaaagtgttcctggactgcttataataacactccaataagtggtgccagccaaagtgctttgctgggcagtagcagtaggatccatgcttgttcacatgtgccagcaggagcagcagcacagtggggtgcatactcgttggctgaggtgaggttctggttggcacagatgtgccagtctccatgtgcatgtttgcagtgttggtggtcatagcatagcatgtgctgggggtgagaccattggtgactgtgggcacattcatgtcagtgacactgttggtgcaggggcagggcactggcaggaacagggttggcactttctgtgcattcctttg

SEQ ID NO: 17032 - DNA, 224 bp, Homo sapiens
  MAP TO AL049872.3; EXPRESSED IN PLACENTA, SIGNAL = 4.5; EXPRESSED IN BONE MARROW, SIGNAL = 5.4; EXPRESSED IN HBL100, SIGNAL = 4.2; EXPRESSED IN FETAL LIVER, SIGNAL = 4.3; EXPRESSED IN LUNG, SIGNAL =   5; EXPRESSED IN HELA, SIGNAL = 3.7; EXPRESSED IN BT474, SIGNAL =   3; EXPRESSED IN BRAIN, SIGNAL = 4.7; EXPRESSED IN HEART, SIGNAL = 4.3; EXPRESSED IN ADULT LIVER, SIGNAL = 3.3; EST_HUMAN HIT: BE537913.1, EVALUE 2.00e-90; SWISSPROT HIT: P54252, EVALUE 7.00e-25; NT HIT: gi11434814, EVALUE 2.00e-90
cttgcatacttagctgaatagccctgcggagatctgcttcctcatcttccatgtcaatttcttggcgacttagtgccagagccctctgcaaatcctcctcatcttcgtctaacattcctgagccatcatttgcttctaacactcgttccaggtctgttttatggactctaaagaacaaaagcactggtaataactgcaaccaatcttctattttagacataaca

SEQ ID NO: 17033 - DNA, 317 bp, Homo sapiens
  MAP TO AL049873.2; EXPRESSED IN PLACENTA, SIGNAL =  11; EXPRESSED IN BT474, SIGNAL =  54; EXPRESSED IN HBL100, SIGNAL = 1e+02; EXPRESSED IN LUNG, SIGNAL =  19; EXPRESSED IN BRAIN, SIGNAL =  23; EXPRESSED IN BONE MARROW, SIGNAL =  44; EXPRESSED IN FETAL LIVER, SIGNAL =  44; EXPRESSED IN HELA, SIGNAL =  39; EXPRESSED IN ADULT LIVER, SIGNAL =  20; EXPRESSED IN HEART, SIGNAL =  17; EST_HUMAN HIT: AV756940.1, EVALUE 0.00e+00; NT HIT: gi4506632, EVALUE 0.00e+00; SWISSPROT HIT: P12947, EVALUE 8.00e-42
gcctttccaacttggacgcggcagaatggttcccgcaaagaagggtggcgagaagaaaacgggccgttgccatcaacgaagtggtaacccgagaatataccatcaacattcacaagcgcatccatggagtgggcttcaagaaacgtgcaccttgggcactcaaagagattcggaaatttgccatgaaggagatgggaactccagatgtgcgcattgacaccaggctcaacaaagctgtctgggccaaaggaataaggaatgtcctataccgaatccatgtgaggctgtccagaaaacgtaatgaggatgaagattca

SEQ ID NO: 17034 - DNA, 312 bp, Homo sapiens
  MAP TO AL049873.2; EXPRESSED IN BRAIN, SIGNAL = 4.7; EXPRESSED IN HEART, SIGNAL = 3.5; EXPRESSED IN PLACENTA, SIGNAL = 6.5; EXPRESSED IN ADULT LIVER, SIGNAL = 6.7; EXPRESSED IN HELA, SIGNAL =  11; EXPRESSED IN LUNG, SIGNAL = 8.8; EXPRESSED IN FETAL LIVER, SIGNAL = 8.9; EXPRESSED IN HBL100, SIGNAL =  15; EXPRESSED IN BONE MARROW, SIGNAL = 6.5; EXPRESSED IN BT474, SIGNAL = 8.6; NT HIT: AF132000.1, EVALUE 0.00e+00; EST_HUMAN HIT: AA789225.1, EVALUE 0.00e+00; SWISSPROT HIT: Q60847, EVALUE 1.10e+00
aattgcagactgctcctgcaggaagccttcagggcctgggaggcctttatctggctcaaaagctagggctacttctcgaaggacttccaaatgctcctcagcagctgatagtgactggtcaatccactccaggccccccgtcagatggcaggcattccttgtcaccagcaccaggcgactgacagacaggagcagggtagtcgtccctgtgtccaggagcttggggtccaacggagggtacatcgacttcacaacatcatctaccctggggctgttccacttggccaccacaatcatgtcgctgacaatggc

SEQ ID NO: 17035 - DNA, 366 bp, Homo sapiens
  MAP TO AL049873.2; EXPRESSED IN BRAIN, SIGNAL =   9; EXPRESSED IN HBL100, SIGNAL =  15; EXPRESSED IN HELA, SIGNAL =  17; EXPRESSED IN ADULT LIVER, SIGNAL = 7.1; EXPRESSED IN HEART, SIGNAL = 4.7; EXPRESSED IN BT474, SIGNAL =  11; EXPRESSED IN BONE MARROW, SIGNAL = 9.4; EXPRESSED IN LUNG, SIGNAL =  12; EXPRESSED IN PLACENTA, SIGNAL =   6; EXPRESSED IN FETAL LIVER, SIGNAL =  11; NT HIT: AL163227.2, EVALUE 9.00e-72; SWISSPROT HIT: P93563, EVALUE 4.30e+00; EST_HUMAN HIT: BE144727.1, EVALUE 1.00e-43
caagctacagctcagaccaccacttcagagggtacagctcagaccactactttagagagtgcaagccccaagccttggcagcttctacatgatgttgggcctgtgggtgcacagaagtcaagaattgtggtttgggaacctccacctagatttcagaggaggtatggaaaggcctgaatgtccaggtagaagtctgctgcaggggtggagtcctcatagagaacctctgctaaggcagtgtgaaaaggaaatgtggggttggagcccccacacagagttcccactggggtactgcctagtggaactgtgagaagagggtcactgtcctccagaccccagaatggtagatccactgatagcttgcac

SEQ ID NO: 17036 - DNA, 200 bp, Homo sapiens
  MAP TO AL050310.5; EXPRESSED IN BONE MARROW, SIGNAL = 1.8; EXPRESSED IN ADULT LIVER, SIGNAL = 1.9; EXPRESSED IN HEART, SIGNAL = 1.1; EXPRESSED IN PLACENTA, SIGNAL = 6.1; EXPRESSED IN HBL100, SIGNAL =   1; EXPRESSED IN FETAL LIVER, SIGNAL = 4.8; EXPRESSED IN HELA, SIGNAL = 1.2; EXPRESSED IN BRAIN, SIGNAL = 0.72; EXPRESSED IN BT474, SIGNAL = 1.2; EXPRESSED IN LUNG, SIGNAL = 1.1; SWISSPROT HIT: Q9VIF0, EVALUE 3.20e-01; NT HIT: gi11422486, EVALUE 5.00e-78; EST_HUMAN HIT: BE645190.1, EVALUE 7.00e-72
  unsure 86
  unsure 100
  unsure 196
ctgcagggataaatgccggctgtgggagctgcaggttagtcagagcctgttggcagtggaaaacagtgggattaaagaccggggtnggcaccattgggcnttttccagtgctgatctctttggtatcagttgcagtgtaccaggctgcagggcctgtggggggagagatggtactagtactagagaaagtaacaanatgt

SEQ ID NO: 17037 - DNA, 303 bp, Homo sapiens
  MAP TO AL050310.5; EXPRESSED IN BT474, SIGNAL = 0.72; EXPRESSED IN BONE MARROW, SIGNAL = 1.5; EXPRESSED IN HELA, SIGNAL = 0.83; EXPRESSED IN ADULT LIVER, SIGNAL = 1.5; EXPRESSED IN PLACENTA, SIGNAL = 3.3; EXPRESSED IN HBL100, SIGNAL = 0.76; EXPRESSED IN FETAL LIVER, SIGNAL = 4.4; EXPRESSED IN LUNG, SIGNAL = 1.1; EXPRESSED IN HEART, SIGNAL = 0.92; NT HIT: gi11422486, EVALUE 1.00e-109; EST_HUMAN HIT: AU139230.1, EVALUE 1.00e-103; SWISSPROT HIT: Q37617, EVALUE 1.40e+00
  unsure 33
agctgccttgagtctggcttgcaagtgtgcagngaggatgaaagtacttgcatttctcccgcgagcatcgacctttgatgtaatccatgcagattgtcacagtattatcactcgcttcaatcatggaagcatcagtagggtgagcatagcggcaatcattctccccacgggtacaatttccacgctgaaattctcggcaaaccttagaacacacacatgcacatacacacgcatcacactgatgactggaagctgactggcttttatttattttgctagtgaatgtaacagtaattatatata

SEQ ID NO: 17038 - DNA, 196 bp, Homo sapiens
  MAP TO AL050311.13; EXPRESSED IN HEART, SIGNAL = 4.8; EXPRESSED IN HELA, SIGNAL =   5; EXPRESSED IN ADULT LIVER, SIGNAL = 4.1; EXPRESSED IN BRAIN, SIGNAL = 5.5; EXPRESSED IN PLACENTA, SIGNAL = 4.4; EXPRESSED IN BT474, SIGNAL = 3.4; EXPRESSED IN BONE MARROW, SIGNAL = 4.8; EXPRESSED IN HBL100, SIGNAL = 3.8; EXPRESSED IN FETAL LIVER, SIGNAL = 3.1; EXPRESSED IN LUNG, SIGNAL =  12; EST_HUMAN HIT: BE972733.1, EVALUE 4.40e-02; NT HIT: AF136389.1, EVALUE 9.90e-02; SWISSPROT HIT: P19070, EVALUE 2.80e+00
gggagagaatgagtcttcacctgtagcaagaggaggggtgtgctgtccatcactctgtgtcacctattgggaggaaccttccacccatgggagactgacacacactaaatacactgatctttctataccttttttcttttctggtggttggcatggttatgatctttgccatcttccatatggtagaaatcctcac

SEQ ID NO: 17039 - DNA, 153 bp, Homo sapiens
  MAP TO AL050321.8; EXPRESSED IN FETAL LIVER, SIGNAL = 1.3; EXPRESSED IN LUNG, SIGNAL = 0.64; EXPRESSED IN HELA, SIGNAL = 0.69; EXPRESSED IN ADULT LIVER, SIGNAL = 3.3; EXPRESSED IN HEART, SIGNAL = 0.87; EXPRESSED IN BT474, SIGNAL = 0.61; NT HIT: AF252257.1, EVALUE 4.00e-81; EST_HUMAN HIT: AB040380.1, EVALUE 2.00e-80; SWISSPROT HIT: Q00143, EVALUE 2.30e+00
ctcttctccattcagggtggacgaacagaaatgaaatgtaagcttcattgtatttcacatcaggaaccatgaagccaaaggcaatgatgacttttttataaagaacaacaacactgaagtctgggtactgcagacactcagacaggtcaatgc

SEQ ID NO: 17040 - DNA, 810 bp, Homo sapiens
  MAP TO AL050331.11; EXPRESSED IN BT474, SIGNAL =   4; EXPRESSED IN HBL100, SIGNAL = 3.4; EXPRESSED IN HELA, SIGNAL = 1.9; EXPRESSED IN ADULT LIVER, SIGNAL = 1.9; EXPRESSED IN PLACENTA, SIGNAL = 1.5; EXPRESSED IN BONE MARROW, SIGNAL = 1.5; EXPRESSED IN FETAL LIVER, SIGNAL = 2.6; EXPRESSED IN LUNG, SIGNAL = 2.4; EXPRESSED IN BRAIN, SIGNAL = 9.2; EXPRESSED IN HEART, SIGNAL = 2.5; SWISSPROT HIT: Q01105, EVALUE 4.00e-39; EST_HUMAN HIT: BF346321.1, EVALUE 0.00e+00; NT HIT: gi11141912, EVALUE 0.00e+00
ctgccttggtgggcctcgaattcctctacggggcccttcacccatcaggtagtattgtaggggattgggccacagttctcctttgataatctctgcaattctgtcgaattctagaaggctgtggtctgaaaaccagttgaagaaactagggatagtgttcccttcccggtttctgtggatatgagcctgggggtcttggcctcggtgccagcggattggagtggaaagagacaccacccggccagaggatctgcgttcatattccttgacaagcccctcatttcggaagtaggggttgccctgaaagatgaacttgaatttgcagcctgctctggggtgtttaagctcctccacctccaaattgatcatgtacctcagcatgtcttcatcttggccactgatcataggtgacagctgggggtggtttcgaaaggcagtaacccagaaacctgggatattctggataatgaaacttctgcgctgcatgtggagccttcgcatgcggccaaacttgcgctcaagctgaaggaaggccctgtcagcctgggcatttacgtttgacaactcttgatcgatggcctccagtgagtccatgcagttattgatcttcggggccctgggccgtgtctcctctttcacccctcctgccacctttttttccttctgcactaccttcttttcctccatcgccgcccctgcttctccctccttttccactgctgccgagatggcgcgttttttagtcgtcacttccttggccttcttccccggtatcatctgagaccccaagccccctgcgccacaggcttc

SEQ ID NO: 17041 - DNA, 1186 bp, Homo sapiens
  MAP TO AL050331.11; EXPRESSED IN HELA, SIGNAL =   2; EXPRESSED IN BT474, SIGNAL = 4.6; EXPRESSED IN ADULT LIVER, SIGNAL = 2.5; EXPRESSED IN HEART, SIGNAL = 1.6; EXPRESSED IN PLACENTA, SIGNAL =   2; EXPRESSED IN FETAL LIVER, SIGNAL = 3.1; EXPRESSED IN LUNG, SIGNAL = 2.7; EXPRESSED IN BRAIN, SIGNAL = 3.5; EXPRESSED IN BONE MARROW, SIGNAL = 3.1; EXPRESSED IN HBL100, SIGNAL = 4.9; NT HIT: gi6678444, EVALUE 0.00e+00; SWISSPROT HIT: Q01534, EVALUE 3.00e-37; EST_HUMAN HIT: BE884424.1, EVALUE 0.00e+00
aaaaccaagtgaagaagctgcagatgaggtcttggtttctgcgaatgaaggactggggttcatgccccctgcgccatataattggagtagaaagagacaccactcggccggaggatcttacctcatattccttgacaatcagcttgtttctgaagtaggggtttcttctaaagaagaacttgaacttgcaaccggttctagggtgtctgagttccttcacctctaaattggttatgtaccttaacatctctgcatcttggcccctaatcatggcggacaactgggggtggtttcgaaaagcagtcatccagaagcccgggatattctgaatgatgtagttcctccgctccaggtagtgtcgacgcatccgcccaaacttgtgctccagctgttggaaggccctgtcggcctgagcattcacagtgtccagttccagctggatggcctccagagggtccatgcggagagcctcatgcaaaggccagggcccttcttcctccctcgcctcctcctccaatctatcctcctccgccacttctatttcttcaccttctggcggctgctcctctacctccatctgctcctccattacctccttctccgccaggccttccttcaccacctcagcgctctccctctcagccacggctgctgagacggtggcgcactttcctgtcttcacctcctccgcctcagcctccgcccccgccgtcagctcagacgcggatctctgggcgccacagatttctagggccttctctccaccctgaacgccctttttcaggctgcggtcggctgccatcaccacagaagcggctgccaggccttcggcgggaggctggccctcttcctgcccggctttgatcgccacatgaccgcgacccccaacaactcggatctggggagtaccgccacggcccgcggcatcctggggtacgcccccctcctctgaaggcggtggaggcgggagcgcgacggtctccgagcctccctcacccggctccgccatcacctgtgtcgcctcgctttggtcgcggagcctcaggtactggtgtgcgtcctggtcgctcgggacttggtcagaaataatgatgctgtgggtttggaggggagtggtcctcttgaccccatccaggccgctcatgttgctaacagtcggaccaaccgcaggcgaacgcccgttttc

SEQ ID NO: 17042 - DNA, 105 bp, Homo sapiens
  MAP TO AL050401.5; EXPRESSED IN BT474, SIGNAL =  32; EXPRESSED IN FETAL LIVER, SIGNAL =  23; EXPRESSED IN LUNG, SIGNAL =  35; EXPRESSED IN PLACENTA, SIGNAL =  12; EXPRESSED IN BONE MARROW, SIGNAL =  28; EXPRESSED IN HBL100, SIGNAL =  30; EXPRESSED IN HELA, SIGNAL =  34; EXPRESSED IN ADULT LIVER, SIGNAL =  18; EXPRESSED IN BRAIN, SIGNAL =  24; EXPRESSED IN HEART, SIGNAL =  29; EST_HUMAN HIT: BF207175.1, EVALUE 3.30e-01; SWISSPROT HIT: O15118, EVALUE 5.30e+00; NT HIT: X06633.1, EVALUE 5.70e-02
aaatccaaagtggtagatccaagaagcctgatgatacaagtgatttctaataaaatccatgaaaagtcagagaatatgacaatccccatcataaaattcaaggaa

SEQ ID NO: 17043 - DNA, 115 bp, Homo sapiens
  MAP TO AL050401.5; EXPRESSED IN ADULT LIVER, SIGNAL =  11; EXPRESSED IN BRAIN, SIGNAL = 7.7; EXPRESSED IN PLACENTA, SIGNAL = 7.2; EXPRESSED IN BT474, SIGNAL =  40; EXPRESSED IN BONE MARROW, SIGNAL =  13; EXPRESSED IN HBL100, SIGNAL =  25; EXPRESSED IN LUNG, SIGNAL =  14; EXPRESSED IN HELA, SIGNAL =  18; EXPRESSED IN HEART, SIGNAL =  24; EXPRESSED IN FETAL LIVER, SIGNAL =  11; SWISSPROT HIT: P35232, EVALUE 3.00e-11; EST_HUMAN HIT: BE562337.1, EVALUE 1.00e-34; NT HIT: S85655.1, EVALUE 1.00e-34
gatcctcaagtcggtggtgtctcactttgatgctggagaactaatcacccagagagagctgctctccaggcaggtgagtgacaatcttacggagtgagcagccacctttgggctc

SEQ ID NO: 17044 - DNA, 195 bp, Homo sapiens
  MAP TO AL078593.9; EXPRESSED IN FETAL LIVER, SIGNAL = 0.68; EXPRESSED IN HEART, SIGNAL = 1.3; EXPRESSED IN ADULT LIVER, SIGNAL = 0.78; EXPRESSED IN PLACENTA, SIGNAL = 2.2; EXPRESSED IN LUNG, SIGNAL = 1.3; NT HIT: gi7662247, EVALUE 7.00e-86; SWISSPROT HIT: Q27309, EVALUE 2.80e+00; EST_HUMAN HIT: AA236482.1, EVALUE 1.00e-85
tactgactcctgggctgatgggcgaatcttcagaatcctttagtgcctcagaagatgaaggccacagggaataccaagccaatgactctgactcggacgggcctatcttgtacaccgatgatgaggacgaagacgaagatgaggatggcagtggagaaagtaagactgttttcaagaggcagggaggagcgtggg

SEQ ID NO: 17045 - DNA, 116 bp, Homo sapiens
  MAP TO AL078593.9; EXPRESSED IN BT474, SIGNAL = 3.6; EXPRESSED IN HBL100, SIGNAL = 4.4; EXPRESSED IN BRAIN, SIGNAL = 4.6; EXPRESSED IN PLACENTA, SIGNAL = 3.9; EXPRESSED IN BONE MARROW, SIGNAL = 4.5; EXPRESSED IN FETAL LIVER, SIGNAL = 3.9; EXPRESSED IN LUNG, SIGNAL = 4.2; EXPRESSED IN HELA, SIGNAL = 5.1; EXPRESSED IN ADULT LIVER, SIGNAL = 3.8; EXPRESSED IN HEART, SIGNAL = 4.1; NT HIT: gi7662247, EVALUE 3.00e-59; EST_HUMAN HIT: AV721897.1, EVALUE 5.00e-59
atcaaacttggcaacagaccatctaagaaagaactagaggacaaaaacatcttgcagcgtacatctgaagaagagaggcaggaaatccgacaacaaattggaaccaagttagtcag

SEQ ID NO: 17046 - DNA, 236 bp, Homo sapiens
  MAP TO AL078612.8; EXPRESSED IN HBL100, SIGNAL = 7.7; EXPRESSED IN FETAL LIVER, SIGNAL = 2.9; EXPRESSED IN PLACENTA, SIGNAL = 2.8; EXPRESSED IN BT474, SIGNAL = 4.5; EXPRESSED IN LUNG, SIGNAL = 2.2; EXPRESSED IN ADULT LIVER, SIGNAL = 2.7; EXPRESSED IN HEART, SIGNAL = 1.5; EXPRESSED IN BONE MARROW, SIGNAL =   2; EXPRESSED IN BRAIN, SIGNAL = 1.6; EXPRESSED IN HELA, SIGNAL = 6.1; EST_HUMAN HIT: C17509.1, EVALUE 1.00e-107; NT HIT: gi11438391, EVALUE 1.00e-109; SWISSPROT HIT: Q15293, EVALUE 8.00e-37
cttgtttttgtctgattcatataccagatgcctggcctcagcctgtgcatgatcataatcttgagggaggatccagtggcgaatctcatctttgtctaacttcccgtccttgttcagatcccggaattcgttaaactgctcccgttctgataaaacccagtctggctcagggccattctcctcatgggaaaacatatccgctagaagggaaggttattgttggttacaaaggaaag

SEQ ID NO: 17047 - DNA, 301 bp, Homo sapiens
  MAP TO AL078622.6; EXPRESSED IN BONE MARROW, SIGNAL = 4.9; EXPRESSED IN HBL100, SIGNAL = 3.9; EXPRESSED IN ADULT LIVER, SIGNAL =   3; EXPRESSED IN BRAIN, SIGNAL = 3.8; EXPRESSED IN PLACENTA, SIGNAL = 2.7; EXPRESSED IN BT474, SIGNAL = 3.5; EXPRESSED IN FETAL LIVER, SIGNAL = 3.5; EXPRESSED IN LUNG, SIGNAL = 3.7; EXPRESSED IN HELA, SIGNAL = 3.9; EXPRESSED IN HEART, SIGNAL = 4.6; EST_HUMAN HIT: AA226519.1, EVALUE 1.10e+00; NT HIT: AF135187.1, EVALUE 4.70e-02; SWISSPROT HIT: P39188, EVALUE 1.40e+00
agccgtaatagcaccactgcactttgacctggatagcagagtgagaccctgtctcgaagaagaagagaaaaagaagaagaagaagaagaagaagaagaagaagaagaagaagaagaagaagaagaagaagaagaagaagaagaagaggaagaagaagaagaagaaggaggaggaggaggaggaggaggaggaggaggaggagaagggaataagatgagaggaagaaggaagaagaacaagaggaagaagaagaaggaggaaaaggaggaagaggaggaggaggaaaataaggagaaggagg

SEQ ID NO: 17048 - DNA, 349 bp, Homo sapiens
  MAP TO AL078622.6; EXPRESSED IN LUNG, SIGNAL =  11; EXPRESSED IN PLACENTA, SIGNAL = 5.8; EXPRESSED IN BT474, SIGNAL = 5.4; EXPRESSED IN HBL100, SIGNAL =   8; EXPRESSED IN FETAL LIVER, SIGNAL = 6.5; EXPRESSED IN BRAIN, SIGNAL = 9.1; EXPRESSED IN BONE MARROW, SIGNAL = 8.8; EXPRESSED IN HELA, SIGNAL = 6.4; EXPRESSED IN ADULT LIVER, SIGNAL = 5.7; EXPRESSED IN HEART, SIGNAL =   8; EST_HUMAN HIT: AA425445.1, EVALUE 2.00e-08; NT HIT: AL163281.2, EVALUE 1.00e-05; SWISSPROT HIT: Q61001, EVALUE 1.30e+00
cttcactgtccctcgctgccttcttctctgtgtccacaggtcttctaaagacaccagtcattggacttagggcacatctgattaatccaggatgacctcatctcaagatccgtaacttgattacatttgcaaagacccttgttccaagaaaggcacagtcccaggttcacagtgagcctgttgtgggggcccccattcagcccattacacagcttgtgggctgtgctaagagtgaatcaggcctgccttcccagtctcccctgcttccttctctggaaattggcatgaaccgtgtgccaggccggcttgtaggcttgcagggagggtgggtggattcgcgcctggttgc

SEQ ID NO: 17049 - DNA, 853 bp, Homo sapiens
  MAP TO AL079300.10; EXPRESSED IN LUNG, SIGNAL = 0.67; EXPRESSED IN FETAL LIVER, SIGNAL = 0.78; EXPRESSED IN HEART, SIGNAL = 3.4; EXPRESSED IN PLACENTA, SIGNAL = 0.89; NT HIT: U70540.1, EVALUE 2.20e+00; EST_HUMAN HIT: BE246780.1, EVALUE 0.00e+00; SWISSPROT HIT: P42329, EVALUE 3.50e+00
ttaccagacgactggggcctccacactaaggaggggcagggctggcagtgacgagggaaacctctcgctgagggttggggcaaagtcacccctggaaatcgaaggggccgctggtggtctcttgaggtccaccagcctcaaatgcatctcttcagacggtgttgggggcacaaccctactccccgaaaagtcgaaaacccaattcagttcctgcgagtccctcttagaatccagaccgagcatggggagaaaactgagctctccgaccacacccagggacatgctgttgtcgcccacactgcgtcctcggaggcggtgtctggagtcctctgtggacgatgcgggctgtccagaccttggaaaggagccgcttgttttccagaaccgccagtttgcccacctgatggaggaacctctaggcagtgacccattcagctggaaactcccaagcctcgactacgaacgcaagaccaaagtggacttcgatgacttcctcccagctatccggaagccccagacacctacctccttggctggatcagccaaaggtgggcaagacggttcacagcgttcaagcatccactttgaaacggaagaggctaaccgttcctttctctcggggatcaagaccattttgaagaagagcccggagcccaaggaggatcccgctcacctgtctgactcgtcctcatcctccggctccatcgtgtccttcaaaagtgctgacagcatcaaaagtcgaccaggaatcccacgacttgcgggtgacggtggcgagcgaacgtcccccgagcggagagagccagggacggggaggaaagacgacgatgttgcgagcataatgaagaaatac

SEQ ID NO: 17050 - DNA, 165 bp, Homo sapiens
  MAP TO AL079300.10; EXPRESSED IN HEART, SIGNAL = 1.6; SWISSPROT HIT: O67650, EVALUE 5.00e+00; EST_HUMAN HIT: BF683313.1, EVALUE 5.70e-01
tcagctcttcgttccctgcaattcctgtcttgcccgacccctgcagagtggaagaaggtgatggatgggcagagaaatgggagatggacagctaccagggaagaatctgtgatttgggagccttttggtgacatgcacattcaaaggactaggaaagaatggctt

SEQ ID NO: 17051 - DNA, 669 bp, Homo sapiens
  MAP TO AL079301.14; EXPRESSED IN HBL100, SIGNAL = 7.8; EXPRESSED IN FETAL LIVER, SIGNAL = 5.2; EXPRESSED IN HELA, SIGNAL = 8.2; EXPRESSED IN BRAIN, SIGNAL = 8.4; EXPRESSED IN PLACENTA, SIGNAL = 4.7; EXPRESSED IN HEART, SIGNAL = 4.3; EXPRESSED IN ADULT LIVER, SIGNAL = 5.6; EXPRESSED IN LUNG, SIGNAL = 6.2; EXPRESSED IN BONE MARROW, SIGNAL = 7.8; EXPRESSED IN BT474, SIGNAL =   7; EST_HUMAN HIT: BE011604.1, EVALUE 1.10e-01; NT HIT: gi9628932, EVALUE 1.10e-01
atcaacaccatcaccatcaccatcaccatgggcaccaccgccactaccatcacaatgatcaccatcaccaccaccatcaccagcagcaccaccaccatcaccatgagcaccaccatcaccatcagcaccaccaccactaccatcaccatgatcaccattatcaccaacactatgacaaccatcctcatcaccatcaccatgacaaccatcaccagcagcagcaccaccatcaccatcagcaccaccaccactaccatcacaatgatcaccattatcaccatcactatgacaaccatcctcatcaccaccatcaccatgacaaccatcaccagcagcagcaccaccaacaccatgagcaccaccatcaccatgagcacccccatcaccagcagcatcaccgccactaccatcacaatgatcaccattatcaccatcattatgacaaccatcatcaccaccatcaccagcagcaccatcatgagcaccaccgccactaccatcacaatgatcaccattatcacgacaaccatcatcaccatgacaacattaccagcagcaccaccaccatcaccatgacacccatcaccaggagcaccaccatcaccatcctcattaccacctgcatccgcatgatccaatccagatgcatccagaggtcctttcttgagg

SEQ ID NO: 17052 - DNA, 106 bp, Homo sapiens
  MAP TO AL079301.14; EXPRESSED IN ADULT LIVER, SIGNAL = 4.6; EXPRESSED IN BONE MARROW, SIGNAL = 5.3; EXPRESSED IN BRAIN, SIGNAL = 3.9; EXPRESSED IN HEART, SIGNAL = 3.4; EXPRESSED IN PLACENTA, SIGNAL = 5.9; EXPRESSED IN BT474, SIGNAL = 4.4; EXPRESSED IN FETAL LIVER, SIGNAL = 4.8; EXPRESSED IN LUNG, SIGNAL = 4.8; EXPRESSED IN HELA, SIGNAL = 5.1; EXPRESSED IN HBL100, SIGNAL =   7; NT HIT: AF168770.1, EVALUE 1.90e-01; EST_HUMAN HIT: AW934719.1, EVALUE 5.90e-02; SWISSPROT HIT: P32324, EVALUE 7.00e+00
acacccgctaccccaaagctgcacaccccctgctccaccacttcctctctaaaggaggtgagccccatccagaaatcccacttccaaaggcccggctcccacgggc

SEQ ID NO: 17053 - DNA, 331 bp, Homo sapiens
  MAP TO AL079301.14; EXPRESSED IN BRAIN, SIGNAL =  14; EXPRESSED IN HEART, SIGNAL = 4.6; EXPRESSED IN PLACENTA, SIGNAL =  14; EXPRESSED IN HBL100, SIGNAL =  20; EXPRESSED IN FETAL LIVER, SIGNAL = 9.3; EXPRESSED IN HELA, SIGNAL =  13; EXPRESSED IN ADULT LIVER, SIGNAL = 9.4; EXPRESSED IN BT474, SIGNAL =  13; EXPRESSED IN BONE MARROW, SIGNAL =  13; EXPRESSED IN LUNG, SIGNAL =  11; EST_HUMAN HIT: BF356102.1, EVALUE 4.70e+00; NT HIT: gi6679306, EVALUE 2.70e+00
atcatcactatcatcatcatcaccatcaccaccaccatcaccatcatcatcaccatcatcaccaccataaccaccatcaccatcatcatgatcaccatcatcatcaccaccatcaccaccatcatcaccatcacaaccaccatcatcaccaccactaccaccatcatcaccaccaccatcaccatcaccaccctcattaccaccaccatcatcatcaccatcaccaccaccaccaccaccatcatcatcatcatcaccaccacaaaagggccagtaagagctgaagaagcatgaccttcacatctttccatctggtcaggtggccagggaa

SEQ ID NO: 17054 - DNA, 195 bp, Homo sapiens
  MAP TO AL079301.14; EXPRESSED IN HBL100, SIGNAL =   2; EXPRESSED IN HELA, SIGNAL = 2.4; EXPRESSED IN FETAL LIVER, SIGNAL = 2.2; EXPRESSED IN LUNG, SIGNAL = 2.1; EXPRESSED IN ADULT LIVER, SIGNAL = 1.6; EXPRESSED IN HEART, SIGNAL = 1.8; EXPRESSED IN PLACENTA, SIGNAL = 2.4; EXPRESSED IN BT474, SIGNAL = 2.5; EXPRESSED IN BONE MARROW, SIGNAL = 2.6; EXPRESSED IN BRAIN, SIGNAL = 2.2; NT HIT: AE002201.2, EVALUE 1.50e+00; SWISSPROT HIT: P22305, EVALUE 8.30e+00
cggctgctgaagaaggagtgtggcgccctcaggaccagcagtgtgtctgcagatggggcgagtagcagcctcgtgtgttcgctgctcacacaagtgaaatcaaagacacagcccatgattcggttcctgaagagacaaaggcgttggaggaaaaacttggtaaatcacaaggctaatcatcatagccagcagctc

SEQ ID NO: 17055 - DNA, 101 bp, Homo sapiens
  MAP TO AL079340.7; EXPRESSED IN LUNG, SIGNAL = 1.7; EXPRESSED IN HEART, SIGNAL =   3; EXPRESSED IN ADULT LIVER, SIGNAL = 2.1; EXPRESSED IN HELA, SIGNAL = 3.3; EXPRESSED IN FETAL LIVER, SIGNAL = 2.6; EXPRESSED IN BONE MARROW, SIGNAL = 2.6; EXPRESSED IN BT474, SIGNAL = 8.2; EXPRESSED IN PLACENTA, SIGNAL = 1.5; EXPRESSED IN BRAIN, SIGNAL =   3; EXPRESSED IN HBL100, SIGNAL = 2.1; EST_HUMAN HIT: AW500196.1, EVALUE 4.00e-03; SWISSPROT HIT: O09012, EVALUE 9.10e+00; NT HIT: gi6005708, EVALUE 3.40e+00
ttgcaagaaaggaaaactggctttaggtttccctgttggacatgtgcttggtcggagggcttgtagatctgtcccttggcctcctggtgcagagaagagaa

SEQ ID NO: 17056 - DNA, 353 bp, Homo sapiens
  MAP TO AL079352.2; EXPRESSED IN BONE MARROW, SIGNAL = 1.7; EXPRESSED IN FETAL LIVER, SIGNAL = 4.8; EXPRESSED IN LUNG, SIGNAL = 2.7; EXPRESSED IN PLACENTA, SIGNAL = 2.5; EXPRESSED IN BT474, SIGNAL =   5; EXPRESSED IN HBL100, SIGNAL = 4.7; EXPRESSED IN HELA, SIGNAL = 2.5; EXPRESSED IN ADULT LIVER, SIGNAL = 4.5; EXPRESSED IN BRAIN, SIGNAL = 3.7; EXPRESSED IN HEART, SIGNAL = 2.6; SWISSPROT HIT: P43644, EVALUE 4.20e+00; NT HIT: gi9055265, EVALUE 3.00e-12; EST_HUMAN HIT: AL037549.3, EVALUE 1.00e-104
agggatgatgacttacctgctgcgaatgatgaccagctgggccattatctgcagcatgtggtacctgccttccatgaccagaggggcagatgaagatgccgtccagtttatgaatacgataaaatccgccatcgccaggcagggagaacttgtcgacctgctgtgggatgggggcctgaagagggagaaggtaaaggacatgttcaaggaggagcagcagaagctatacaaaaagatgattgtgaggaaccacgaggacaggagtcgctcatgagcttgcttcgagctggctggggccaccgtgtggagtgatcccgggctaggagctggagttgccgccgctgcctccactg

SEQ ID NO: 17057 - DNA, 604 bp, Homo sapiens
  MAP TO AL080272.3; EXPRESSED IN PLACENTA, SIGNAL = 4.5; EXPRESSED IN BRAIN, SIGNAL = 4.4; EXPRESSED IN HEART, SIGNAL = 3.5; EXPRESSED IN BONE MARROW, SIGNAL = 4.3; EXPRESSED IN BT474, SIGNAL = 3.1; EXPRESSED IN ADULT LIVER, SIGNAL = 4.7; EXPRESSED IN HELA, SIGNAL = 3.9; EXPRESSED IN LUNG, SIGNAL = 3.2; EXPRESSED IN FETAL LIVER, SIGNAL = 2.8; EXPRESSED IN HBL100, SIGNAL = 3.3; SWISSPROT HIT: P30119, EVALUE 4.00e+00; NT HIT: AL163246.2, EVALUE 4.00e-69; EST_HUMAN HIT: AI831462.1, EVALUE 4.00e-82
agaaagtttggaacttcctagaggcttgttgaatggctttgaccaaaatgctgataattatatggacaatgaaatccagactgatgtaatctcagataaagatgaggaacttgttgggaactggagtaaagatgactcttgctatgttttagcaaagagactggcagcattttacccctgccctggagatttggggaactttgaacttgagggaggtaatttagggtatctggtggaagaaatctctaagcagcaaaacattcaagggttgacttgcatgctgttaaatacattccattttaaaagggaaacagaacataaaagttcagaaaatttgcagcctgaccatgtaatagaaaaaaaaaattcttgtgaggagaaattcaagctagctgcagaagtttgcataagtaatgaggagccaaatgtttattgccaagacaatggggaaaatgtctccagggcatttcagagacctttgtggcagcccctcccatcacagacccagaggcctaataggaaaaaaatggtttactgtgctaggcccagggccttgctgctttgtgcagtctctgtgcttggtcctttgtgttccagccatggc

SEQ ID NO: 17058 - DNA, 176 bp, Homo sapiens
  MAP TO AL096772.5; EXPRESSED IN LUNG, SIGNAL = 2.1; EXPRESSED IN HEART, SIGNAL =   1; SWISSPROT HIT: P48423, EVALUE 8.50e+00; NT HIT: AB019120.1, EVALUE 6.00e-12; EST_HUMAN HIT: BE007080.1, EVALUE 1.00e-50
ttgccacaaaaagtcctacggctgaagaatacactgttaatattgagatcagttttgaaaatgcatccttcctggatcctatcaaagcctacttgaacagcctcagttttccaattcatgggaataacactgaccaaattaccgacattttgagcataaatgtgacaacaggtgag

SEQ ID NO: 17059 - DNA, 227 bp, Homo sapiens
  MAP TO AL096772.5; EXPRESSED IN FETAL LIVER, SIGNAL = 0.65; EXPRESSED IN PLACENTA, SIGNAL = 0.68; EXPRESSED IN LUNG, SIGNAL = 3.1; EXPRESSED IN ADULT LIVER, SIGNAL = 0.64; EXPRESSED IN HEART, SIGNAL = 1.4; NT HIT: AB018301.1, EVALUE 1.00e-120; SWISSPROT HIT: Q61188, EVALUE 7.10e-01
cacgtgctctctacggttaatgtcatccttggcaagcccgtcttgaacacctggaaggttttacaacagcaatggaccaatcagagttcacagctactacattcagtggaaagattttcccaagcattacagtcgggagatagccctcctttgtccttctcccaaactaatgtgcagatgagcagcatggtaatcaagtccagccacccagaaacctatcaacagag

SEQ ID NO: 17060 - DNA, 382 bp, Homo sapiens
  MAP TO AL109618.1; EXPRESSED IN BONE MARROW, SIGNAL = 3.1; EXPRESSED IN HBL100, SIGNAL =  16; EXPRESSED IN ADULT LIVER, SIGNAL = 7.5; EXPRESSED IN BRAIN, SIGNAL =   4; EXPRESSED IN PLACENTA, SIGNAL = 7.5; EXPRESSED IN HEART, SIGNAL = 4.7; EXPRESSED IN HELA, SIGNAL = 6.9; EXPRESSED IN LUNG, SIGNAL = 5.5; EXPRESSED IN FETAL LIVER, SIGNAL = 9.6; EXPRESSED IN BT474, SIGNAL =  23; SWISSPROT HIT: O02771, EVALUE 1.60e-02; EST_HUMAN HIT: BE745818.1, EVALUE 0.00e+00; NT HIT: gi5453805, EVALUE 0.00e+00
ccctccaacaagagatggagggcgaggaggtagaggtggttatggatatcctccagattattatggatatgaagattattatgattattatggttatgattaccataactatcgtggtggatatgaagatccatactatggttatgaagattttcaagttggagctagagaaggggtggtagaggagcaaggggtgctgctccatccagaggtcgtggggctgctcttccccgtggtagagccggttattcacagagaggaggacctggatcagcaagaggcgttcgaggtgcgagaggaggtgcccaacaacaaagaggccgcgggcagggaaaaggggtcgaggctggtcctgacctgttacaatgaagactgacttggt

SEQ ID NO: 17061 - DNA, 101 bp, Homo sapiens
  MAP TO AL109618.1; EXPRESSED IN HELA, SIGNAL = 1.3; EXPRESSED IN BT474, SIGNAL = 0.95; EXPRESSED IN HBL100, SIGNAL = 0.88; EXPRESSED IN FETAL LIVER, SIGNAL = 2.2; EXPRESSED IN LUNG, SIGNAL = 1.6; EXPRESSED IN BRAIN, SIGNAL = 2.1; EXPRESSED IN PLACENTA, SIGNAL = 2.1; EXPRESSED IN ADULT LIVER, SIGNAL =   1; EXPRESSED IN HEART, SIGNAL = 1.3; NT HIT: U23839.1, EVALUE 2.00e-13; SWISSPROT HIT: Q61851, EVALUE 1.00e-03; EST_HUMAN HIT: AL043614.1, EVALUE 1.00e-05
aggagttccatggaaagcatcacattgggcatcaagctgtgacaccagcagtggagcctggtcatggagagtgtggttcccttggacagtgaccattccac

SEQ ID NO: 17062 - DNA, 261 bp, Homo sapiens
  MAP TO AP000023.1; EXPRESSED IN PLACENTA, SIGNAL = 3.8; EXPRESSED IN BT474, SIGNAL =  14; EXPRESSED IN BONE MARROW, SIGNAL = 6.2; EXPRESSED IN HBL100, SIGNAL =  17; EXPRESSED IN FETAL LIVER, SIGNAL =  11; EXPRESSED IN LUNG, SIGNAL = 5.2; EXPRESSED IN HELA, SIGNAL =  10; EXPRESSED IN BRAIN, SIGNAL = 6.9; EXPRESSED IN ADULT LIVER, SIGNAL =   3; EXPRESSED IN HEART, SIGNAL = 6.5; EST_HUMAN HIT: BF569034.1, EVALUE 2.00e-76; NT HIT: AL163201.2, EVALUE 0.00e+00; SWISSPROT HIT: O00303, EVALUE 2.00e-35
ggagcatggtctcgaagtcatcgggaactatttttggtacttggttaaccaggctcatcaggaagtggcccaccttcctgatggtattgtcagctgacacctttccagatagtatatcctctgcatattgcaacactatgctcagggtatcctggatgcgagctgatgcccctcctacttgctgcaagtcacttgagagtccaaccactctgttggggctaaagcaggtcttcatgatcaggtcaactctgatgcattcag

SEQ ID NO: 17063 - DNA, 131 bp, Homo sapiens
  MAP TO AP000030.1; EXPRESSED IN HEART, SIGNAL = 2.1; EXPRESSED IN PLACENTA, SIGNAL = 1.9; EXPRESSED IN FETAL LIVER, SIGNAL = 1.5; EXPRESSED IN HELA, SIGNAL =   2; EXPRESSED IN BT474, SIGNAL = 1.5; EXPRESSED IN BONE MARROW, SIGNAL = 2.3; EXPRESSED IN HBL100, SIGNAL = 1.6; EXPRESSED IN LUNG, SIGNAL = 2.1; EXPRESSED IN ADULT LIVER, SIGNAL = 2.8; EXPRESSED IN BRAIN, SIGNAL = 2.5; SWISSPROT HIT: Q01636, EVALUE 1.30e+00; EST_HUMAN HIT: F32977.1, EVALUE 4.30e-01; NT HIT: gi11426244, EVALUE 2.90e-01
tggacgcctcctggtggaagcaaggcgccttctgatccacactgagccatcagctgtccccaccagctggtcagccgcacttcgcatccccagaaccaacctccaagaccccggacccctggcctggaaat

SEQ ID NO: 17064 - DNA, 208 bp, Homo sapiens
  MAP TO AP000031.1; EXPRESSED IN LUNG, SIGNAL = 1.1; EXPRESSED IN BT474, SIGNAL = 2.1; EXPRESSED IN BONE MARROW, SIGNAL =   1; EXPRESSED IN HBL100, SIGNAL = 2.3; EXPRESSED IN HELA, SIGNAL = 0.96; EXPRESSED IN ADULT LIVER, SIGNAL = 1.3; EXPRESSED IN BRAIN, SIGNAL = 1.1; EXPRESSED IN HEART, SIGNAL = 1.2; EXPRESSED IN PLACENTA, SIGNAL = 1.6; EXPRESSED IN FETAL LIVER, SIGNAL = 2.4; NT HIT: AB032998.1, EVALUE 3.00e-97; SWISSPROT HIT: O95104, EVALUE 8.00e-07; EST_HUMAN HIT: BE938382.1, EVALUE 7.00e-69
aatggtgcctgtggaggaggaggagaggcagcagcgggtgcagcagcagcaggcacggtggcggtgggtgcagggggtactgcggcagcaggtgctgtcgtggtgacggcagtggtatcctctttctttgattcttccacagcttctggctcatcatcatagtcaaatctatcaagcaacttctggaataattatgtcaatatttcat

SEQ ID NO: 17065 - DNA, 96 bp, Homo sapiens
  MAP TO AP000032.1; EXPRESSED IN BRAIN, SIGNAL = 4.2; EXPRESSED IN HEART, SIGNAL = 3.4; EXPRESSED IN PLACENTA, SIGNAL = 3.3; EXPRESSED IN BT474, SIGNAL = 3.4; EXPRESSED IN BONE MARROW, SIGNAL = 4.2; EXPRESSED IN HBL100, SIGNAL = 4.1; EXPRESSED IN FETAL LIVER, SIGNAL = 3.5; EXPRESSED IN HELA, SIGNAL = 5.3; EXPRESSED IN ADULT LIVER, SIGNAL =   4; EXPRESSED IN LUNG, SIGNAL = 4.6; NT HIT: AF032682.1, EVALUE 1.70e-01; EST_HUMAN HIT: AA700326.1, EVALUE 4.00e-12
aacaataaaaatgatgatgatgatgatgatgatgatgatattttagaagaactggaaatgctcttttacagcatctcagcactaaagccacactaa

SEQ ID NO: 17066 - DNA, 273 bp, Homo sapiens
  MAP TO AP000033.1; EXPRESSED IN BONE MARROW, SIGNAL = 9.2; EXPRESSED IN FETAL LIVER, SIGNAL = 8.6; EXPRESSED IN PLACENTA, SIGNAL = 7.3; EXPRESSED IN BT474, SIGNAL = 6.6; EXPRESSED IN HBL100, SIGNAL = 8.3; EXPRESSED IN LUNG, SIGNAL =  20; EXPRESSED IN HELA, SIGNAL = 7.5; EXPRESSED IN ADULT LIVER, SIGNAL = 6.1; EXPRESSED IN BRAIN, SIGNAL = 9.9; EXPRESSED IN HEART, SIGNAL = 6.2; NT HIT: gi11526184, EVALUE 8.00e-93; EST_HUMAN HIT: AW001114.1, EVALUE 8.00e-93; SWISSPROT HIT: O60287, EVALUE 5.00e-29
ggtgctgctgtggggcccagcggccgtggagcatcacaagacgtgccggagcctgggcaggtcactgtggcagcagccgagtgtcggggacatccttcgcctgctggaccgggaccggatgatgcagaccatcctgcacttcccccagaaccggaggctgctgccccccgaggttgggctgctgctgttctgtccctacccaccccttcaccccagcctcaggggctccatctgcaccctcagcttcgtttttcttgttatttacctttttat

SEQ ID NO: 17067 - DNA, 399 bp, Homo sapiens
  MAP TO AP000033.1; EXPRESSED IN PLACENTA, SIGNAL = 4.6; EXPRESSED IN HEART, SIGNAL = 3.8; EXPRESSED IN HBL100, SIGNAL = 3.8; EXPRESSED IN FETAL LIVER, SIGNAL = 4.9; EXPRESSED IN LUNG, SIGNAL = 3.3; EXPRESSED IN HELA, SIGNAL = 4.1; EXPRESSED IN BRAIN, SIGNAL = 3.8; EXPRESSED IN BT474, SIGNAL =   3; EXPRESSED IN BONE MARROW, SIGNAL = 3.5; EXPRESSED IN ADULT LIVER, SIGNAL = 3.2; EST_HUMAN HIT: H14174.1, EVALUE 0.00e+00; SWISSPROT HIT: O60287, EVALUE 4.00e-59; NT HIT: gi11526184, EVALUE 0.00e+00
aaatgctcaaggataagaacaagcctgtcatgccagcccgagccaaaggcccacggggccgaaagaggaggcctggggaggcagaggagatggctgaccctgagctgatggcatctaccttggagacatgcaagggcctcctgaggtccatcttgacttactggagaccagtgatccctggtcctgaccccactcaggagcctgtggactcagccagccccgagagcgatgcgccaggccccgtatatgctgccgcttccctggcagtcagttgggtgctgcggtcggtggccgagcacccgctcagcagggcagaggctgcaggactcattggctggcttaagagccatattttgccacaccctgtggtcgtggctgacctccttaaggacagtgccg

SEQ ID NO: 17068 - DNA, 169 bp, Homo sapiens
  MAP TO AP000041.1; EXPRESSED IN HBL100, SIGNAL = 1.4; EXPRESSED IN FETAL LIVER, SIGNAL = 1.8; EXPRESSED IN BRAIN, SIGNAL = 1.4; EXPRESSED IN PLACENTA, SIGNAL = 1.7; EXPRESSED IN HEART, SIGNAL = 1.9; EXPRESSED IN ADULT LIVER, SIGNAL = 1.4; EXPRESSED IN HELA, SIGNAL = 1.2; EXPRESSED IN LUNG, SIGNAL = 1.5; EXPRESSED IN BONE MARROW, SIGNAL = 1.7; EXPRESSED IN BT474, SIGNAL = 1.6; EST_HUMAN HIT: BE710087.1, EVALUE 1.50e-01; SWISSPROT HIT: P43606, EVALUE 8.60e+00; NT HIT: AF283836.1, EVALUE 3.90e-01
aggaggcctcagccatatctgaatggctttctctggcctctgatttattgatgaagctgaagcgacttgctggagaaaggcctggagccttctttgtctccgagatgaagtacaataggccacagggcggagatctcttgtgatgctctcgggtcctgcctttctcttg

SEQ ID NO: 17069 - DNA, 697 bp, Homo sapiens
  MAP TO AP000043.1; EXPRESSED IN BONE MARROW, SIGNAL = 2.1; EXPRESSED IN HBL100, SIGNAL = 1.5; EXPRESSED IN PLACENTA, SIGNAL = 1.2; EXPRESSED IN BRAIN, SIGNAL = 1.7; EXPRESSED IN HELA, SIGNAL = 1.8; EXPRESSED IN FETAL LIVER, SIGNAL = 1.8; EXPRESSED IN BT474, SIGNAL =   1; EXPRESSED IN HEART, SIGNAL = 1.5; EXPRESSED IN ADULT LIVER, SIGNAL = 1.5; EXPRESSED IN LUNG, SIGNAL =   2; NT HIT: X89772.1, EVALUE 0.00e+00; EST_HUMAN HIT: AA351431.1, EVALUE 0.00e+00; SWISSPROT HIT: P48551, EVALUE 1.00e-123
aattttcataactttttagcctggccatttcctaacctgccaccgttggaagccatggatatggtggaggtcatttacatcaacagaaagaagaaagtgtgggattataattatgatgatgaaagtgatagcgatactgaggcagcgcccaggacaagtggcggtggctataccatgcatggactgactgtcaggcctctgggtcaggcctctgccacctctacagaatcccagttgatagacccggagtccgaggaggagcctgacctgcctgaggttgatgtggagctccccacgatgccaaaggacagccctcagcagttggaactcttgagtgggccctgtgagaggagaaagagtccactccaggacccttttcccgaagaggactacagctccacggaggggtctgggggcagaattaccttcaatgtggacttaaactctgtgtttttgagagttcttgatgacgaggacagtgacgacttagaagcccctctgatgctatcgtctcatctggaagagatggttgacccagaggatcctgataatgtgcaatcaaaccatttgctggccagcggggaagggacacagccaacctttcccagcccctcttcagagggcctgtggtccgaagatgctccatctgatcaaagtgacacttctgagtcagatgttgaccttggggatggttata

SEQ ID NO: 17070 - DNA, 204 bp, Homo sapiens
  MAP TO AP000043.1; EXPRESSED IN HBL100, SIGNAL = 2.9; EXPRESSED IN LUNG, SIGNAL = 5.8; EXPRESSED IN HELA, SIGNAL = 5.2; EXPRESSED IN ADULT LIVER, SIGNAL =   4; EXPRESSED IN BRAIN, SIGNAL = 3.6; EXPRESSED IN HEART, SIGNAL = 3.3; EXPRESSED IN PLACENTA, SIGNAL = 3.7; EXPRESSED IN BT474, SIGNAL = 4.8; EXPRESSED IN BONE MARROW, SIGNAL = 4.4; EXPRESSED IN FETAL LIVER, SIGNAL = 4.1; NT HIT: AF223391.1, EVALUE 2.00e-15; EST_HUMAN HIT: AW995965.1, EVALUE 2.00e-12; SWISSPROT HIT: Q46339, EVALUE 2.80e+00
atggacagagcagtgcatgaagacccacatcgtcaaattttactccaagaactaacacaggatcataccaggaaaaccaaaagaaaccacagaccctttgaaggcggtgaattgctgctgcaggctctgtgtcccctacaaaatgcatatggtgaaatcctagcccccaatgtgatgctattaggaggtggtgcctttggaagg

SEQ ID NO: 17071 - DNA, 194 bp, Homo sapiens
  MAP TO AP000051.1; EXPRESSED IN PLACENTA, SIGNAL = 4.2; EXPRESSED IN FETAL LIVER, SIGNAL = 2.6; EXPRESSED IN ADULT LIVER, SIGNAL = 2.5; EXPRESSED IN BT474, SIGNAL = 3.2; EXPRESSED IN HEART, SIGNAL = 2.8; EXPRESSED IN BRAIN, SIGNAL = 4.4; EXPRESSED IN HELA, SIGNAL = 3.7; EXPRESSED IN LUNG, SIGNAL = 3.6; EXPRESSED IN HBL100, SIGNAL = 4.3; EXPRESSED IN BONE MARROW, SIGNAL =   6; NT HIT: AL163279.2, EVALUE 1.00e-10; EST_HUMAN HIT: AW836820.1, EVALUE 2.00e-18; SWISSPROT HIT: P11369, EVALUE 1.00e-05
cgggagagcgcagagcacattgaggcagtagacatgcgctccaggccacttgggatgtcctgctctccatagaaatatactaacattatacattctcaatatgcaaatggccaatatgcacatgaaaagatgctcaacaacactaatcattagaaaaatgcaaaacaaagccacagtgagataccacctcacac

SEQ ID NO: 17072 - DNA, 91 bp, Homo sapiens
  MAP TO AP000052.1; EXPRESSED IN ADULT LIVER, SIGNAL =   6; EXPRESSED IN LUNG, SIGNAL =  12; EXPRESSED IN HELA, SIGNAL = 8.7; EXPRESSED IN PLACENTA, SIGNAL = 8.6; EXPRESSED IN BT474, SIGNAL = 6.6; EXPRESSED IN BONE MARROW, SIGNAL =  11; EXPRESSED IN FETAL LIVER, SIGNAL = 9.3; EXPRESSED IN BRAIN, SIGNAL = 8.1; EXPRESSED IN HEART, SIGNAL = 5.4; EXPRESSED IN HBL100, SIGNAL = 8.8; EST_HUMAN HIT: BE874516.1, EVALUE 1.10e+00; NT HIT: U48848.1, EVALUE 6.40e-01; SWISSPROT HIT: P74764, EVALUE 7.10e+00
gccacagacaggcagttgagggcatgaatgttcatcgagcagtggacggcacagatgtttctgcttttcagagccagcagcaacaaaccaa

SEQ ID NO: 17073 - DNA, 130 bp, Homo sapiens
  MAP TO AP000090.1; EXPRESSED IN HBL100, SIGNAL = 2.9; EXPRESSED IN ADULT LIVER, SIGNAL = 2.7; EXPRESSED IN HEART, SIGNAL = 4.4; EXPRESSED IN PLACENTA, SIGNAL = 2.4; EXPRESSED IN BT474, SIGNAL = 4.7; EXPRESSED IN BRAIN, SIGNAL = 9.3; EXPRESSED IN HELA, SIGNAL = 7.3; EXPRESSED IN LUNG, SIGNAL = 5.5; EXPRESSED IN FETAL LIVER, SIGNAL = 3.3; EXPRESSED IN BONE MARROW, SIGNAL = 1.8; EST_HUMAN HIT: AA100382.1, EVALUE 2.00e-67; NT HIT: X06989.1, EVALUE 2.00e-67; SWISSPROT HIT: P05067, EVALUE 6.00e-22
ctaagcagcggtagggaatcacaaagtggggatgggtcttgcactgcttgcggccccgcttgcaccagttctggatggtcactggttggttggcttctaccacattggtgatctgcagttcagggtagac

SEQ ID NO: 17074 - DNA, 153 bp, Homo sapiens
  MAP TO AP000091.1; EXPRESSED IN BONE MARROW, SIGNAL =   9; EXPRESSED IN LUNG, SIGNAL =  12; EXPRESSED IN PLACENTA, SIGNAL =  12; EXPRESSED IN BT474, SIGNAL = 7.5; EXPRESSED IN HBL100, SIGNAL =   9; EXPRESSED IN FETAL LIVER, SIGNAL =  12; EXPRESSED IN HELA, SIGNAL = 8.7; EXPRESSED IN ADULT LIVER, SIGNAL = 9.5; EXPRESSED IN BRAIN, SIGNAL =  15; EXPRESSED IN HEART, SIGNAL =  11; EST_HUMAN HIT: AA810408.1, EVALUE 5.20e-01; NT HIT: AJ271735.1, EVALUE 3.00e-01; SWISSPROT HIT: P40798, EVALUE 1.70e+00
ggaattcttgacattctaagcattcagatctaatcagtctgccaatacgaattgagttcctactatgtgtcagaagtcgggagtggctctggacgtgcacagagccacagcatcgtatgcacgcacaaaccccgctctcctggttcttgaaat

SEQ ID NO: 17075 - DNA, 129 bp, Homo sapiens
  MAP TO AP000093.1; EXPRESSED IN PLACENTA, SIGNAL = 2.5; EXPRESSED IN BT474, SIGNAL = 4.6; EXPRESSED IN HBL100, SIGNAL =   8; EXPRESSED IN FETAL LIVER, SIGNAL = 4.3; EXPRESSED IN HELA, SIGNAL = 7.2; EXPRESSED IN ADULT LIVER, SIGNAL = 3.6; EXPRESSED IN BRAIN, SIGNAL = 3.3; EXPRESSED IN BONE MARROW, SIGNAL = 4.6; EXPRESSED IN LUNG, SIGNAL = 3.8; EXPRESSED IN HEART, SIGNAL = 3.2; EST_HUMAN HIT: AW366799.1, EVALUE 2.90e-01; SWISSPROT HIT: P35560, EVALUE 4.00e+00; NT HIT: M26501.1, EVALUE 2.50e-01
gtgatagcaagggatgctgaatgcgttcatgagttcgagaacctgggttctgagctggaagtccacatcagagcgtgcgctaagtgcaagtgcaatgagtcagaagctaatgaaaagggtccaaagtgt

SEQ ID NO: 17076 - DNA, 451 bp, Homo sapiens
  MAP TO AP000100.1; EXPRESSED IN BRAIN, SIGNAL = 5.6; EXPRESSED IN HEART, SIGNAL = 4.5; EXPRESSED IN BT474, SIGNAL = 3.7; EXPRESSED IN BONE MARROW, SIGNAL = 3.1; EXPRESSED IN LUNG, SIGNAL = 7.6; EXPRESSED IN PLACENTA, SIGNAL = 3.6; EXPRESSED IN ADULT LIVER, SIGNAL =   5; EXPRESSED IN HELA, SIGNAL = 5.6; EXPRESSED IN FETAL LIVER, SIGNAL = 4.8; EXPRESSED IN HBL100, SIGNAL = 3.4; NT HIT: D16471.1, EVALUE 6.10e-02
aaggcttagttctactcgaatgaaactctggttcaagccttccaggccaatgaaaaattccagccaactgagaccaagcaaatgtggctgtatccacatattcagagccaggccttgggcagggcaggtgacaaggagcatgtcatttgggggaacctagcactgagtgaaatcatcacagttaattctttactagctgtgtcagaatttcggctcattttaatcttggtgttcaatgaacaccctgaggtcttcctcatgagtcccctgcattctgatgaaattgcctttagtgtcttaggaggccgtgtggttcagagcatgggtgtggagttgagagatgtccattccactccaggtttcaccctaaaaagcagtgtgaggtggaacgagttattctgaggctcaattttttcatctataaaatgatcattattattatcaccgtcac

SEQ ID NO: 17077 - DNA, 269 bp, Homo sapiens
  MAP TO AP000102.1; EXPRESSED IN BT474, SIGNAL = 6.2; EXPRESSED IN BONE MARROW, SIGNAL = 9.7; EXPRESSED IN HBL100, SIGNAL = 6.4; EXPRESSED IN FETAL LIVER, SIGNAL = 7.4; EXPRESSED IN LUNG, SIGNAL = 9.6; EXPRESSED IN ADULT LIVER, SIGNAL = 6.8; EXPRESSED IN PLACENTA, SIGNAL = 5.9; EXPRESSED IN HELA, SIGNAL = 9.1; EXPRESSED IN BRAIN, SIGNAL = 9.1; EXPRESSED IN HEART, SIGNAL = 6.8; EST_HUMAN HIT: AW956935.1, EVALUE 0.00e+00; NT HIT: gi11526184, EVALUE 0.00e+00; SWISSPROT HIT: O60287, EVALUE 8.00e-40
tcatgagctcccgggcttgggccttctcaatggctgctctcaggtcttcctggagcttgaggtctctttcaatgaggctccacttgtgcaagaggacaaggacgtccttggtggaaagcactgtctcatttacggtgaatctgttcatgtccctaaaggcctgtatgacagtggcccggtacctcagcacggagtcaagtgtcccgaagaagttggtcagctggacgggggccaaggtgggcctgtttgggagtcaatgttacagactg

SEQ ID NO: 17078 - DNA, 125 bp, Homo sapiens
  MAP TO AP000102.1; EXPRESSED IN BT474, SIGNAL = 1.7; EXPRESSED IN BONE MARROW, SIGNAL = 1.5; EXPRESSED IN FETAL LIVER, SIGNAL = 1.6; EXPRESSED IN LUNG, SIGNAL =   2; EXPRESSED IN HELA, SIGNAL = 2.2; EXPRESSED IN PLACENTA, SIGNAL = 1.4; EXPRESSED IN HBL100, SIGNAL = 1.6; EXPRESSED IN ADULT LIVER, SIGNAL = 1.5; EXPRESSED IN BRAIN, SIGNAL = 2.9; EXPRESSED IN HEART, SIGNAL = 1.7; EST_HUMAN HIT: BF334583.1, EVALUE 2.00e-64; NT HIT: AF231919.1, EVALUE 1.00e-64
gctgtgtacacgcctgattcctgccacacctctttattcaggcagtggtcaacagtttttaatgccctcttcaaaatgacagaaataagggataaggctgtgtgcctcactgaggtgctgtccaa

SEQ ID NO: 17079 - DNA, 158 bp, Homo sapiens
  MAP TO AP000110.1; EXPRESSED IN PLACENTA, SIGNAL =   5; EXPRESSED IN ADULT LIVER, SIGNAL = 3.1; EXPRESSED IN HEART, SIGNAL = 2.6; EXPRESSED IN BT474, SIGNAL = 2.7; EXPRESSED IN BONE MARROW, SIGNAL = 3.3; EXPRESSED IN HBL100, SIGNAL = 2.8; EXPRESSED IN FETAL LIVER, SIGNAL = 2.3; EXPRESSED IN LUNG, SIGNAL = 3.5; EXPRESSED IN HELA, SIGNAL =   3; EXPRESSED IN BRAIN, SIGNAL = 3.8; EST_HUMAN HIT: AW296213.1, EVALUE 2.10e+00; NT HIT: gi6753635, EVALUE 2.00e-02; SWISSPROT HIT: P08170, EVALUE 5.00e+00
gtggtggtggtggtggtggtcgtggtgctggttttgttccatttgcttgcttccggtggcttcactcacatgcttcctctgcagtcctggttccccacagccatgggcagaaggtacagcctatatatgagtctctatcagtgcacaggtgtccagtg

SEQ ID NO: 17080 - DNA, 144 bp, Homo sapiens
  MAP TO AP000111.1; EXPRESSED IN BT474, SIGNAL = 0.92; EXPRESSED IN HELA, SIGNAL = 1.1; EXPRESSED IN ADULT LIVER, SIGNAL = 0.82; EXPRESSED IN PLACENTA, SIGNAL = 0.87; EXPRESSED IN BONE MARROW, SIGNAL = 0.98; EXPRESSED IN HBL100, SIGNAL = 1.2; EXPRESSED IN FETAL LIVER, SIGNAL = 0.98; EXPRESSED IN LUNG, SIGNAL = 1.1; EXPRESSED IN BRAIN, SIGNAL = 1.6; EXPRESSED IN HEART, SIGNAL = 1.2; NT HIT: D87675.1, EVALUE 3.00e-07; EST_HUMAN HIT: AW138710.1, EVALUE 5.00e-07; SWISSPROT HIT: Q14149, EVALUE 8.80e+00
tcacagttctggagactggaagtctgaaatcaaggtgtcagcagaattggttccttctgagatctctcttcttggctcatagatggcggatttctgagtcttcacatggtcacccctctgtgtctgtgtcctaatctcctcttc

SEQ ID NO: 17081 - DNA, 195 bp, Homo sapiens
  MAP TO AP000111.1; EXPRESSED IN PLACENTA, SIGNAL =   4; EXPRESSED IN BONE MARROW, SIGNAL = 4.6; EXPRESSED IN HBL100, SIGNAL = 5.1; EXPRESSED IN FETAL LIVER, SIGNAL = 3.5; EXPRESSED IN ADULT LIVER, SIGNAL = 4.1; EXPRESSED IN BRAIN, SIGNAL = 8.5; EXPRESSED IN BT474, SIGNAL = 3.2; EXPRESSED IN LUNG, SIGNAL = 4.7; EXPRESSED IN HELA, SIGNAL =   6; EXPRESSED IN HEART, SIGNAL = 4.3; SWISSPROT HIT: P48551, EVALUE 2.00e-21; EST_HUMAN HIT: BF109229.1, EVALUE 2.00e-66; NT HIT: gi11526196, EVALUE 7.00e-77
tgtcttttgaaccaccagagtttgagattgttggttttaccaaccacattaatgtgatggtgaaatttccatctattgttgaggaagaattacagtttgatttatctctcgtcattgaagaacagtcagagggaattgttaagaaggtaagtggcttctcctgttaggatcaaaacagttctgagtgggcaatca

SEQ ID NO: 17082 - DNA, 158 bp, Homo sapiens
  MAP TO AP000112.1; EXPRESSED IN LUNG, SIGNAL = 1.6; EXPRESSED IN ADULT LIVER, SIGNAL = 1.8; EXPRESSED IN BRAIN, SIGNAL = 1.1; EXPRESSED IN HEART, SIGNAL = 1.7; EXPRESSED IN PLACENTA, SIGNAL = 1.6; EXPRESSED IN BT474, SIGNAL =   3; EXPRESSED IN BONE MARROW, SIGNAL = 2.7; EXPRESSED IN HBL100, SIGNAL = 2.5; EXPRESSED IN FETAL LIVER, SIGNAL = 1.9; EXPRESSED IN HELA, SIGNAL = 1.8; NT HIT: U08988.1, EVALUE 8.00e-82; EST_HUMAN HIT: AI904079.1, EVALUE 1.00e-54; SWISSPROT HIT: Q08334, EVALUE 3.00e-16
catggtctgcctggcactcctcggctgcttcgccttgctgtggtgcgtttacaagaagacaaagtacgccttctcccctaggaattctcttccacagcacctgaaagaggtaggtaggatggagtgagatgtggatttgaaaaccttgatcggaaaga

SEQ ID NO: 17083 - DNA, 197 bp, Homo sapiens
  MAP TO AP000112.1; EXPRESSED IN LUNG, SIGNAL = 1.6; EXPRESSED IN HELA, SIGNAL = 1.4; EXPRESSED IN ADULT LIVER, SIGNAL = 1.4; EXPRESSED IN HEART, SIGNAL = 1.1; EXPRESSED IN PLACENTA, SIGNAL = 0.9; EXPRESSED IN BT474, SIGNAL = 1.9; EXPRESSED IN FETAL LIVER, SIGNAL = 1.3; EXPRESSED IN BRAIN, SIGNAL = 1.3; EXPRESSED IN BONE MARROW, SIGNAL = 1.8; EXPRESSED IN HBL100, SIGNAL = 1.5; SWISSPROT HIT: P22415, EVALUE 4.00e-14; NT HIT: X60459.1, EVALUE 1.00e-107; EST_HUMAN HIT: AW937895.1, EVALUE 7.00e-34
tccagactgagggcactggtgccatcagtggctatcctaccactcaattcatgacccaggtggtgatccagggtgatatcaccagttatgatgcagttaacacagaggggaaagctgctgagatacactatactttcccacccctgcagtgggagatggggcagggggtaccacatcagggagtacagctgctgttg

SEQ ID NO: 17084 - DNA, 120 bp, Homo sapiens
  MAP TO AP000113.1; EXPRESSED IN BONE MARROW, SIGNAL = 2.6; EXPRESSED IN HBL100, SIGNAL = 4.4; EXPRESSED IN FETAL LIVER, SIGNAL = 3.4; EXPRESSED IN ADULT LIVER, SIGNAL =   2; EXPRESSED IN BRAIN, SIGNAL = 2.9; EXPRESSED IN HEART, SIGNAL =   2; EXPRESSED IN PLACENTA, SIGNAL = 3.1; EXPRESSED IN HELA, SIGNAL = 2.6; EXPRESSED IN LUNG, SIGNAL = 3.7; EXPRESSED IN BT474, SIGNAL = 2.7; NT HIT: gi5031782, EVALUE 1.00e-58; SWISSPROT HIT: P38484, EVALUE 9.00e-17; EST_HUMAN HIT: AW163746.1, EVALUE 8.00e-61
ctgcccgctcctcagcacccgaagattcgcctgtacaacgcagagcaggtcctgagttgggagccagtggccctgagcaatagcacgaggcctgttgtctaccaagtgcagtttaaatag

SEQ ID NO: 17085 - DNA, 162 bp, Homo sapiens
  MAP TO AP000121.1; EXPRESSED IN PLACENTA, SIGNAL = 1.6; EXPRESSED IN BT474, SIGNAL = 1.3; EXPRESSED IN BONE MARROW, SIGNAL = 1.6; EXPRESSED IN FETAL LIVER, SIGNAL = 2.1; EXPRESSED IN LUNG, SIGNAL = 2.1; EXPRESSED IN HELA, SIGNAL = 2.3; EXPRESSED IN BRAIN, SIGNAL =   2; EXPRESSED IN HEART, SIGNAL = 1.3; EXPRESSED IN HBL100, SIGNAL =   2; EXPRESSED IN ADULT LIVER, SIGNAL = 1.9; SWISSPROT HIT: P50469, EVALUE 4.60e-01; NT HIT: M61840.1, EVALUE 3.70e-01; EST_HUMAN HIT: AA306264.1, EVALUE 2.00e-86
gttcttgagcacgtgcccctgctgctgtatatcttggcagcaaaaacattaattctctgcctgacatttgctggggtgaaaatgtatcaaagaaaaaggttggaggcaaaacaacaaaaactggaggctgaaaggaagaagcaatcagagaaaaaagataac

SEQ ID NO: 17086 - DNA, 222 bp, Homo sapiens
  MAP TO AP000130.1; EXPRESSED IN PLACENTA, SIGNAL = 2.6; EXPRESSED IN HBL100, SIGNAL = 1.8; EXPRESSED IN FETAL LIVER, SIGNAL = 1.7; EXPRESSED IN HELA, SIGNAL = 1.2; EXPRESSED IN ADULT LIVER, SIGNAL = 1.5; EXPRESSED IN BRAIN, SIGNAL = 2.3; EXPRESSED IN BONE MARROW, SIGNAL = 2.2; EXPRESSED IN HEART, SIGNAL =   4; EXPRESSED IN BT474, SIGNAL = 1.8; EXPRESSED IN LUNG, SIGNAL = 1.6; SWISSPROT HIT: Q13009, EVALUE 3.00e-35; NT HIT: gi11526176, EVALUE 1.00e-122; EST_HUMAN HIT: AA326765.1, EVALUE 1.00e-54
ggttgctggtgagaaaggcgagggggctctcgccaaggtcggcagggccgtccactcggtggggcgggctttccagcagctccactccttcctccagctcggggtaggtcctcaccaggaggcccagcgagggctgtgagaggaaatctttgagcatagaagagttcagggcgtcagcagcacgattattgatctcaagaatctcatctcctgctttcaggc

SEQ ID NO: 17087 - DNA, 264 bp, Homo sapiens
  MAP TO AP000130.1; EXPRESSED IN LUNG, SIGNAL = 1.2; EXPRESSED IN PLACENTA, SIGNAL =   1; EXPRESSED IN BT474, SIGNAL = 1.6; EXPRESSED IN BONE MARROW, SIGNAL = 1.2; EXPRESSED IN HBL100, SIGNAL = 2.4; EXPRESSED IN FETAL LIVER, SIGNAL = 0.93; EXPRESSED IN ADULT LIVER, SIGNAL = 1.1; EXPRESSED IN BRAIN, SIGNAL = 2.2; EXPRESSED IN HELA, SIGNAL = 1.3; EXPRESSED IN HEART, SIGNAL = 1.1; EST_HUMAN HIT: AW197823.1, EVALUE 3.00e-58; NT HIT: gi4507500, EVALUE 1.00e-124; SWISSPROT HIT: Q13009, EVALUE 2.00e-28
atctaatattgttttctttttctttgagtcagtgactgaagacagctgcatttcacccattttcttcatcttttcatccatgtcaatcttctgttccagttttttgatctctgatttcaggagtcggagcgtgtcttccttgtggtggtgcctcgcgaccgcagtggcgcaggcagagtggatggcggtgatccagttttcaagctccgtctggctagtggtctgtaccaggaagaaggggcaggaagaaaaaggcacctctta

SEQ ID NO: 17088 - DNA, 972 bp, Homo sapiens
  MAP TO AP000131.1; EXPRESSED IN FETAL LIVER, SIGNAL = 1.3; EXPRESSED IN LUNG, SIGNAL = 1.2; EXPRESSED IN HELA, SIGNAL = 1.3; EXPRESSED IN BRAIN, SIGNAL = 1.7; EXPRESSED IN BT474, SIGNAL = 1.4; EXPRESSED IN BONE MARROW, SIGNAL = 1.2; EXPRESSED IN PLACENTA, SIGNAL = 1.4; EXPRESSED IN HEART, SIGNAL = 1.1; EXPRESSED IN ADULT LIVER, SIGNAL = 1.3; EXPRESSED IN HBL100, SIGNAL = 1.5; EST_HUMAN HIT: R14902.1, EVALUE 2.00e-99; NT HIT: gi11526176, EVALUE 0.00e+00; SWISSPROT HIT: Q13009, EVALUE 0.00e+00
gttgctatggctaatttgtgggttggtggcaccttcagagagacagtgagatttcctacagggaagtgtgttataattactgtacggaggagtctcttcagcagcagctggtggcatcttatggtttgcaagattgggaatatcagacaccaaattccgacagtagcctgcaaatttgctccccggccccccgtttgctgtcactccagagtttttctgagcatacaagtcacccaaggaattggctctctgacaggtgctgagctgccgcggactcgcccgcgtttccatcccccgagcctcctcgcagtccttctcttcggcggaacccaagatttcttcgttgcttgttaaatgttcttggctcagatcagagagtgagaattccaggctgtcctcccgccagatgtctgcagatttggagcgtttcttcttaaagctcgccgtctccatgaaagtgggcccattggatgtataggaatgctgcctcctgcctccctcagccaaatatgtagcgtcatccccgtaaagcctgctctcctcagtgtctggcatgctctgcacagaggctgctgtgaggacgatgctgctgtctacgctgggagtgacagaagagtcagtgtaagacacaggtctcaagcccatgtccactcggtccacccagatggggctcccgaagtcttctagggtaccatcttgggagaagggctccaggccattttcagccagggactgggggatgctgggggtgctgctggatcgggtgctcacttcggagttcctgtggatcaccttccccgaggaagcgtgcctggtcctccgcgtcttgtgcgagaggcgcagggagcgggaagtgtgcttgcgccccaggctggcatgcttttctccataaaactcgtgctctacatgttgactttctgcgtttcccatggttttatggtctgcagcaaagcggggggaaaggggagaatt

SEQ ID NO: 17089 - DNA, 87 bp, Homo sapiens
  MAP TO AP000132.1; EXPRESSED IN HEART, SIGNAL = 1.5; EXPRESSED IN BT474, SIGNAL = 2.5; EXPRESSED IN BONE MARROW, SIGNAL = 1.1; EXPRESSED IN HBL100, SIGNAL = 1.2; EXPRESSED IN LUNG, SIGNAL = 0.6; EXPRESSED IN ADULT LIVER, SIGNAL =   1; EXPRESSED IN BRAIN, SIGNAL = 0.93; EXPRESSED IN PLACENTA, SIGNAL = 0.69; EXPRESSED IN FETAL LIVER, SIGNAL = 0.81; EXPRESSED IN HELA, SIGNAL = 1.2; NT HIT: AL161547.2, EVALUE 1.50e-01; EST_HUMAN HIT: BE153583.1, EVALUE 4.60e-02
ctggtcgttccctcttcctctccccactcctcccatatcctcaaagctgccatcacctacaacagctccctctggaagcagcagcat

SEQ ID NO: 17090 - DNA, 741 bp, Homo sapiens
  MAP TO AP000133.1; EXPRESSED IN BONE MARROW, SIGNAL = 3.6; EXPRESSED IN HBL100, SIGNAL = 2.1; EXPRESSED IN BRAIN, SIGNAL = 3.1; EXPRESSED IN HEART, SIGNAL = 2.6; EXPRESSED IN PLACENTA, SIGNAL = 1.9; EXPRESSED IN BT474, SIGNAL = 2.1; EXPRESSED IN FETAL LIVER, SIGNAL =   2; EXPRESSED IN LUNG, SIGNAL = 2.2; EXPRESSED IN HELA, SIGNAL = 2.4; EXPRESSED IN ADULT LIVER, SIGNAL = 2.2; EST_HUMAN HIT: AV754098.1, EVALUE 0.00e+00; SWISSPROT HIT: Q57814, EVALUE 3.00e+00; NT HIT: AF151064.1, EVALUE 0.00e+00
agcaagaccctatttcgaaacaacaacaacaaaagaaaggttataagcgccatggctatgactagtgtcaaattgcttgccattgttttaagaaagccagatacctggattggactctggggtgttctccgagggacaccttcgtcacacaaactctgtacttcctggaatcgatatagcactaagttatgtgcaccaaattataaaagacttatccataatattttctcactgaaattctcagggcttttaatatctccagaatatatttttccattttccataagactcaaaagtaataaaagctctaataaatctactacaaagtcactgcaaaaagtagaagatgaagaggactctgaggaagacagcaatcatgatgagatgagtgagcaggaagaggagcttgaggatgaccctacgatagtcaaagactatcaagacctggaaaaagcagtgcagtctttttggtatgacgatgtcctgaagacaggcctagatattgggagaaacaaagtggaagatgcgttctacaaaggtgaactcaggctgaatggggaaaagttatggaagaaaaacagaacggtcaaagtgggagatacactggatcttctcattggagatcttctggatccaatgtatctgggagatatattggatcttctgtttggagaggataaagaaggaggaaccgagacagtgatgaggattctcctgaaaaaagtgtttgaagactgaaag

SEQ ID NO: 17091 - DNA, 147 bp, Homo sapiens
  MAP TO AP000140.1; EXPRESSED IN PLACENTA, SIGNAL = 1.7; EXPRESSED IN BT474, SIGNAL = 3.4; EXPRESSED IN HBL100, SIGNAL = 3.1; EXPRESSED IN HEART, SIGNAL = 1.9; EXPRESSED IN ADULT LIVER, SIGNAL = 2.4; EXPRESSED IN BRAIN, SIGNAL = 7.2; EXPRESSED IN BONE MARROW, SIGNAL = 1.3; EXPRESSED IN FETAL LIVER, SIGNAL = 2.1; EXPRESSED IN LUNG, SIGNAL = 3.3; EXPRESSED IN HELA, SIGNAL = 3.8; EST_HUMAN HIT: AW844292.1, EVALUE 2.00e-77; NT HIT: gi11526152, EVALUE 1.00e-77; SWISSPROT HIT: Q95241, EVALUE 4.00e-10
ctccaccacaccatgatgaatggatgtgtactgtttcttcttcagcatcaccaaggtgatgacgatcactgtcgctatgacaacaccgcccaccatgagtccaatgattgcacctttgtttgaacccacatcttctgcaaagaacac

SEQ ID NO: 17092 - DNA, 230 bp, Homo sapiens
  MAP TO AP000141.1; EXPRESSED IN BT474, SIGNAL = 1.5; EXPRESSED IN FETAL LIVER, SIGNAL = 1.3; EXPRESSED IN LUNG, SIGNAL = 3.2; EXPRESSED IN ADULT LIVER, SIGNAL = 1.5; EXPRESSED IN PLACENTA, SIGNAL = 2.1; EXPRESSED IN BONE MARROW, SIGNAL = 0.9; EXPRESSED IN HBL100, SIGNAL = 1.5; EXPRESSED IN HELA, SIGNAL = 1.5; EXPRESSED IN BRAIN, SIGNAL = 3.5; EXPRESSED IN HEART, SIGNAL = 2.3; EST_HUMAN HIT: W27334.1, EVALUE 1.00e-92; NT HIT: D87675.1, EVALUE 1.00e-127; SWISSPROT HIT: Q95241, EVALUE 7.00e-27
ggctggagatcgtccaggctgaactctccattcacgggaaggagctccacggtggttttcgtttcggtcaaagatggcatgagagcatcgtttccgtaactgatccttggttcactaatcatgttggccaagacgtcatctgaatagttttgctctttctgaagcagctcatctaaaccaaacaaaaccatctctttggtgagtaacaacaatcacaacagcagcagcag

SEQ ID NO: 17093 - DNA, 226 bp, Homo sapiens
  MAP TO AP000141.1; EXPRESSED IN HBL100, SIGNAL = 1.3; EXPRESSED IN BRAIN, SIGNAL =   3; EXPRESSED IN PLACENTA, SIGNAL = 1.5; EXPRESSED IN BT474, SIGNAL = 1.6; EXPRESSED IN BONE MARROW, SIGNAL = 0.79; EXPRESSED IN LUNG, SIGNAL = 2.4; EXPRESSED IN HELA, SIGNAL = 1.5; EXPRESSED IN ADULT LIVER, SIGNAL = 1.3; EXPRESSED IN FETAL LIVER, SIGNAL = 1.2; EXPRESSED IN HEART, SIGNAL =   2; NT HIT: D87675.1, EVALUE 1.00e-124; EST_HUMAN HIT: BE819323.1, EVALUE 2.00e-90; SWISSPROT HIT: P08592, EVALUE 5.00e-11
acagtttcatcgtaaaaggcaagctgttctattaacttccatattcctcaaacagataactcacttcctcaattttcctctgggggaaaatacatgtccatgtgcagcatcaaaagaacagcttacttaccaacttcatcctgaatctcctcggccactgcaggcacgttgtagagcagggagagagactgattcatgcgctcataaatcacacggaggtgtgtca

SEQ ID NO: 17094 - DNA, 176 bp, Homo sapiens
  MAP TO AP000141.1; EXPRESSED IN HELA, SIGNAL =  10; EXPRESSED IN BT474, SIGNAL =  12; EXPRESSED IN FETAL LIVER, SIGNAL = 6.4; EXPRESSED IN LUNG, SIGNAL = 9.5; EXPRESSED IN PLACENTA, SIGNAL = 6.1; EXPRESSED IN BONE MARROW, SIGNAL = 6.6; EXPRESSED IN HBL100, SIGNAL =  11; EXPRESSED IN ADULT LIVER, SIGNAL = 6.4; EXPRESSED IN BRAIN, SIGNAL =  33; EXPRESSED IN HEART, SIGNAL = 9.5; SWISSPROT HIT: P08592, EVALUE 1.00e-24; NT HIT: M34872.1, EVALUE 8.00e-95; EST_HUMAN HIT: AW582310.1, EVALUE 3.00e-86
ccgaggaggaacagcctgcagagcggtgatgtagttctccagggccaggcggcggcggtcattgagcatggcttccactctggccatgtgtgtctccaccagctgctgtctctcgttggctgcttcctgttccaaagattccactttctcctggaaatgctgccatcataaacaca

SEQ ID NO: 17095 - DNA, 169 bp, Homo sapiens
  MAP TO AP000142.1; EXPRESSED IN BRAIN, SIGNAL = 4.5; EXPRESSED IN BONE MARROW, SIGNAL =   4; EXPRESSED IN ADULT LIVER, SIGNAL = 3.6; EXPRESSED IN PLACENTA, SIGNAL = 4.1; EXPRESSED IN BT474, SIGNAL = 4.6; EXPRESSED IN HBL100, SIGNAL = 5.3; EXPRESSED IN LUNG, SIGNAL =   4; EXPRESSED IN HELA, SIGNAL = 4.7; EXPRESSED IN HEART, SIGNAL = 3.4; EXPRESSED IN FETAL LIVER, SIGNAL = 3.2; NT HIT: X06981.1, EVALUE 1.00e-90; EST_HUMAN HIT: AW072570.1, EVALUE 2.00e-90; SWISSPROT HIT: P05067, EVALUE 3.00e-31
tggcgctgccacacacggccatgcagtactcttctgtgtcaaagttgttccggttgccgccacatccgccgtaaaagaatggggcacacttcccttcagtcacatcaaagtaccagcgggagatcattgctcggcacggccccgtctcggcttgttcagagcacacctc

SEQ ID NO: 17096 - DNA, 203 bp, Homo sapiens
  MAP TO AP000142.1; EXPRESSED IN HELA, SIGNAL =  20; EXPRESSED IN BRAIN, SIGNAL =  22; EXPRESSED IN HEART, SIGNAL =  14; EXPRESSED IN BT474, SIGNAL =  15; EXPRESSED IN HBL100, SIGNAL =  16; EXPRESSED IN FETAL LIVER, SIGNAL =  15; EXPRESSED IN ADULT LIVER, SIGNAL =  13; EXPRESSED IN PLACENTA, SIGNAL =  15; EXPRESSED IN BONE MARROW, SIGNAL =  16; EXPRESSED IN LUNG, SIGNAL =  20; NT HIT: D87675.1, EVALUE 3.00e-82; EST_HUMAN HIT: BE615368.1, EVALUE 5.00e-82
ctcgaaccacctcttccacagactctgtggtggtggtggtggtggtggcaatgctggtggttctctctgtggcttcttcgtagggttcctcagcctcttcctctacctcatcaccatcctcatcgtcctcgtcatcatcggcttcttcttcttccacctcagccacttcttcctcctctgctacttctactactttgtcttca

SEQ ID NO: 17097 - DNA, 141 bp, Homo sapiens
  MAP TO AP000143.1; EXPRESSED IN PLACENTA, SIGNAL = 3.3; EXPRESSED IN HEART, SIGNAL = 1.9; EXPRESSED IN BRAIN, SIGNAL = 1.8; EXPRESSED IN ADULT LIVER, SIGNAL =   2; EXPRESSED IN HELA, SIGNAL = 3.1; EXPRESSED IN LUNG, SIGNAL = 2.3; EXPRESSED IN FETAL LIVER, SIGNAL = 2.7; EXPRESSED IN HBL100, SIGNAL = 5.5; EXPRESSED IN BONE MARROW, SIGNAL = 1.8; EXPRESSED IN BT474, SIGNAL = 5.7; NT HIT: D87675.1, EVALUE 4.00e-74; EST_HUMAN HIT: T19845.1, EVALUE 3.20e-01
aagggcatcacaattcttcattgctctctgggatcactcactgtgagggaggtcatcagctgccatgttctgagacatttggtgctaaaaccaggaaagtttttggcaaaatacactggatcaccctacctgacaaaccaa

SEQ ID NO: 17098 - DNA, 85 bp, Homo sapiens
  MAP TO AP000150.1; EXPRESSED IN BONE MARROW, SIGNAL = 0.65; EXPRESSED IN HBL100, SIGNAL = 2.2; EXPRESSED IN LUNG, SIGNAL = 0.94; EXPRESSED IN ADULT LIVER, SIGNAL = 1.9; EXPRESSED IN BRAIN, SIGNAL = 1.2; EXPRESSED IN PLACENTA, SIGNAL = 1.1; EXPRESSED IN BT474, SIGNAL = 2.2; EXPRESSED IN FETAL LIVER, SIGNAL = 1.4; EXPRESSED IN HELA, SIGNAL = 1.3; EXPRESSED IN HEART, SIGNAL = 1.7; EST_HUMAN HIT: BF431843.1, EVALUE 1.00e-40; NT HIT: gi11526250, EVALUE 7.00e-41
tttacttcactaatagaaatatctcttaaggctggaatggcctcctcttggtatttcttctgctgttgattttttgcatagttat

SEQ ID NO: 17099 - DNA, 194 bp, Homo sapiens
  MAP TO AP000150.1; EXPRESSED IN BT474, SIGNAL = 1.6; EXPRESSED IN HELA, SIGNAL = 1.1; EXPRESSED IN BRAIN, SIGNAL = 1.6; EXPRESSED IN PLACENTA, SIGNAL = 1.1; EXPRESSED IN HBL100, SIGNAL =   1; EXPRESSED IN FETAL LIVER, SIGNAL = 1.1; EXPRESSED IN LUNG, SIGNAL = 1.2; EXPRESSED IN ADULT LIVER, SIGNAL =   1; EXPRESSED IN BONE MARROW, SIGNAL = 1.5; EXPRESSED IN HEART, SIGNAL = 1.2; NT HIT: D84294.1, EVALUE 3.00e-76; EST_HUMAN HIT: AW804984.1, EVALUE 4.00e-70; SWISSPROT HIT: P53804, EVALUE 2.00e-24
atggacaattttgctgagggagatttcactgtggcggattatgccttgttagaagattgccctcacgtggatgattgtgtctttgctgctgaatttatgagcaatgattatgttcgtgtgactcagctttactgtgatggggtggtaagtaggtttgctaatttttcatttttgacattgtgtattgaaggttt

SEQ ID NO: 17100 - DNA, 439 bp, Homo sapiens
  MAP TO AP000151.1; EXPRESSED IN FETAL LIVER, SIGNAL = 2.2; EXPRESSED IN HELA, SIGNAL = 3.3; EXPRESSED IN ADULT LIVER, SIGNAL = 2.2; EXPRESSED IN BRAIN, SIGNAL = 3.3; EXPRESSED IN BT474, SIGNAL = 5.3; EXPRESSED IN BONE MARROW, SIGNAL = 1.7; EXPRESSED IN LUNG, SIGNAL = 2.2; EXPRESSED IN HEART, SIGNAL = 1.1; EXPRESSED IN PLACENTA, SIGNAL = 1.2; EXPRESSED IN HBL100, SIGNAL = 2.4; EST_HUMAN HIT: AA403192.1, EVALUE 0.00e+00; NT HIT: gi11526252, EVALUE 0.00e+00; SWISSPROT HIT: P53804, EVALUE 4.00e-80
atttgatatcacccagacaccgccagcatacataaacgtgttaccaggtttgccccagtacaccagcatatatacacccttggccagcctttctcctgaatatcagctaccaagatcagtaccagtggtgccgtcttttgtagccaatgacagagcagataaaaatgctgctgcctattttgagggtcatcatttgaatgctgagaatgttgctggtcaccagattgcctctgaaacacagatccttgagggctctttgggaatatctgtaaagtcacactgcagcacaggtgatgctcatacagtcctgagtgagtctaacagaaatgatgagcactgtggaaattctaacaacaaatgtgaagtaattccagaaagcaccagtgcagtaacaaacattccacacgtgcagatggttgccatacaggtaagagttaaa

SEQ ID NO: 17101 - DNA, 407 bp, Homo sapiens
  MAP TO AP000151.1; EXPRESSED IN PLACENTA, SIGNAL = 1.4; EXPRESSED IN BONE MARROW, SIGNAL = 0.98; EXPRESSED IN HEART, SIGNAL = 0.86; EXPRESSED IN BT474, SIGNAL = 1.2; EXPRESSED IN BRAIN, SIGNAL = 0.78; EXPRESSED IN HBL100, SIGNAL = 0.88; EXPRESSED IN FETAL LIVER, SIGNAL = 1.1; EXPRESSED IN LUNG, SIGNAL =   1; EXPRESSED IN HELA, SIGNAL = 0.81; EXPRESSED IN ADULT LIVER, SIGNAL = 1.1; SWISSPROT HIT: P02702, EVALUE 6.90e+00; EST_HUMAN HIT: AW845293.1, EVALUE 0.00e+00; NT HIT: AJ006345.1, EVALUE 1.00e+00
aacctggctccgagctttgcactgggcattggagaggccttcaatggctcttccccggtctggcacttcctcttcttccctgaccctcgagtcatgggcagcagtggaggggcatgaaccctccttctgcagcatctgccccatctcctcctgggccgagtcatgccttgggagagacagcaaaaccctgaacagcagttcaaggtcttctcagccttggggtgatgcctccagtgccactccctgaacttgatcccactgccagggctgcctgcattcgcccactccctcagcaggggtttttagagcatgagtttgagctaggttttctgccagctgctaaagacccagatgggactcattttgtgccttcaaggcgctcagagttaagaggcagtgagctagag

SEQ ID NO: 17102 - DNA, 171 bp, Homo sapiens
  MAP TO AP000151.1; EXPRESSED IN BONE MARROW, SIGNAL = 4.5; EXPRESSED IN HBL100, SIGNAL =   8; EXPRESSED IN FETAL LIVER, SIGNAL =   6; EXPRESSED IN ADULT LIVER, SIGNAL =   3; EXPRESSED IN BRAIN, SIGNAL = 3.3; EXPRESSED IN PLACENTA, SIGNAL = 3.1; EXPRESSED IN BT474, SIGNAL = 6.5; EXPRESSED IN LUNG, SIGNAL = 3.9; EXPRESSED IN HELA, SIGNAL = 6.1; EXPRESSED IN HEART, SIGNAL = 5.9; NT HIT: AF201660.1, EVALUE 8.50e-02; EST_HUMAN HIT: BF026628.1, EVALUE 1.00e-91; SWISSPROT HIT: Q05319, EVALUE 5.00e+00
ccaccagcttcctcggagccttcctgctgcagccgctcagggagagcaggcctttcctccagccctgtggcctgcacagacctcctcagctgggcctccaaggaggagcaggagggtactaacatttggaacctgccttcaaggcacgtattcatgctttttaagcattta

SEQ ID NO: 17103 - DNA, 110 bp, Homo sapiens
  MAP TO AP000152.1; EXPRESSED IN PLACENTA, SIGNAL =  11; EXPRESSED IN LUNG, SIGNAL =  14; EXPRESSED IN HELA, SIGNAL =  16; EXPRESSED IN BT474, SIGNAL =  14; EXPRESSED IN HBL100, SIGNAL =  14; EXPRESSED IN FETAL LIVER, SIGNAL =  12; EXPRESSED IN BRAIN, SIGNAL =  16; EXPRESSED IN BONE MARROW, SIGNAL =  20; EXPRESSED IN ADULT LIVER, SIGNAL = 9.6; EXPRESSED IN HEART, SIGNAL =  10; NT HIT: L78810.1, EVALUE 2.00e-17; EST_HUMAN HIT: C18939.1, EVALUE 1.00e-30; SWISSPROT HIT: P39097, EVALUE 1.80e+00
atgcactcgcactcctcaggccttgggtggtcgataggactggccgtggtggagcagggggcggcgctcgtcggggaggctcgggctgcacaggaacccacggaggcggg

SEQ ID NO: 17104 - DNA, 381 bp, Homo sapiens
  MAP TO AP000160.1; EXPRESSED IN FETAL LIVER, SIGNAL = 7.9; EXPRESSED IN HELA, SIGNAL = 9.3; EXPRESSED IN BRAIN, SIGNAL =  14; EXPRESSED IN PLACENTA, SIGNAL =  10; EXPRESSED IN BT474, SIGNAL =  13; EXPRESSED IN BONE MARROW, SIGNAL =   6; EXPRESSED IN HEART, SIGNAL = 3.8; EXPRESSED IN ADULT LIVER, SIGNAL = 8.6; EXPRESSED IN LUNG, SIGNAL = 8.8; EXPRESSED IN HBL100, SIGNAL = 8.8; EST_HUMAN HIT: AA811864.1, EVALUE 9.60e-01
ggtggtggcaggaagatgctcatggaggtgacagtaaccatgatggtggaaatggagcaggaggtaaaagttgtgatggaggtaggggtgggggctgtgatggtaatggtaatagtgatggtgatggtggtggtgatggttggtggtggtgatggtggtgatattggtgatggtgttgcctgtgatgctgtggtagtgatgatcatggtggtggtggtggtggtgctaatggtgatggtggtgatggaggtaatgggagtggcagcattggaggtgttgaggaggctggtggtgggaggggaatggttgtgacacagcctctggacaaggcacatagtaaggagggattcatccctcaaattcctctcaatgcctgcatac

SEQ ID NO: 17105 - DNA, 326 bp, Homo sapiens
  MAP TO AP000161.1; EXPRESSED IN BT474, SIGNAL = 2.3; EXPRESSED IN HBL100, SIGNAL = 2.3; EXPRESSED IN LUNG, SIGNAL = 1.6; EXPRESSED IN BRAIN, SIGNAL = 1.9; EXPRESSED IN PLACENTA, SIGNAL =   3; EXPRESSED IN BONE MARROW, SIGNAL =   2; EXPRESSED IN FETAL LIVER, SIGNAL = 1.9; EXPRESSED IN HELA, SIGNAL = 2.4; EXPRESSED IN ADULT LIVER, SIGNAL = 3.7; EXPRESSED IN HEART, SIGNAL =   2; EST_HUMAN HIT: BF240552.1, EVALUE 4.70e+00
gaagaagaagaagaggaggaagaggaggaagaagaggaagaagaaggaggaggaggagggaagagaagaagaaggaggacgaggaggaggaggaggcggtggcagtggcggtggaggaggaggagggggaggaggagggggaggagggggaggaggagggggtggaggaggaagaagaaggaagaagaggaaggaagaagaagaaagaagaagaaagaagaaggaagaagaagaagaaagaagaaggaagaagaagaaagaagaagaagaacactgtttggtgggagctatattccaggctccatagctggttactccaagtgaag

SEQ ID NO: 17106 - DNA, 223 bp, Homo sapiens
  MAP TO AP000161.1; EXPRESSED IN BRAIN, SIGNAL = 1.5; EXPRESSED IN HBL100, SIGNAL = 1.1; EXPRESSED IN FETAL LIVER, SIGNAL = 1.6; EXPRESSED IN HEART, SIGNAL = 1.4; EXPRESSED IN BT474, SIGNAL = 1.1; EXPRESSED IN BONE MARROW, SIGNAL = 1.5; EXPRESSED IN HELA, SIGNAL = 1.5; EXPRESSED IN ADULT LIVER, SIGNAL = 1.6; EXPRESSED IN PLACENTA, SIGNAL = 1.3; EXPRESSED IN LUNG, SIGNAL = 1.5; NT HIT: S74129.1, EVALUE 1.00e-13; EST_HUMAN HIT: AA305004.1, EVALUE 2.00e-12; SWISSPROT HIT: P43218, EVALUE 2.10e+00
ctcctgtatgagttccctggggttgctgtgacaaaggacactgagagagtgtctcagataatggacattcattgtcacacagttctgaggctggaagtccaagatcaaggtgctagcagggttggttccttctgacagcaatgaagaagaatctgttcctggcctcttttctggcttctggtagccttgggcattccttggcttgaaggtggtcatcttcttc

SEQ ID NO: 17107 - DNA, 326 bp, Homo sapiens
  MAP TO AP000161.1; EXPRESSED IN HELA, SIGNAL = 2.2; EXPRESSED IN HEART, SIGNAL = 2.2; EXPRESSED IN PLACENTA, SIGNAL =   2; EXPRESSED IN FETAL LIVER, SIGNAL = 3.8; EXPRESSED IN LUNG, SIGNAL = 2.9; EXPRESSED IN ADULT LIVER, SIGNAL = 2.8; EXPRESSED IN BRAIN, SIGNAL = 2.2; EXPRESSED IN BT474, SIGNAL = 9.7; EXPRESSED IN BONE MARROW, SIGNAL = 5.2; EXPRESSED IN HBL100, SIGNAL = 4.5; NT HIT: AF115549.2, EVALUE 1.70e-01; EST_HUMAN HIT: AW804759.1, EVALUE 1.00e-115; SWISSPROT HIT: Q28640, EVALUE 6.30e-02
agcaggcttgattctcacacacatacgcagtggcctggtcttcctgccttcggagggtactcaggaaaggcagccagtgggacaggaaactcgaggggtccccatcagccagaatcagcaccatgttaggaatgtagacagggtggacgcactgcaccagaactttggtgtccttggcctggcggtctccacagatggtgatctgcctgagggtctgctgctgggctgagagggcacggaccatctccggcaatgccaccgggacatggtgcatgtgctgggagaaggcagtcactaggcacacacacttgtccatccagtccttg

SEQ ID NO: 17108 - DNA, 311 bp, Homo sapiens
  MAP TO AP000162.1; EXPRESSED IN BRAIN, SIGNAL = 6.7; EXPRESSED IN FETAL LIVER, SIGNAL = 6.4; EXPRESSED IN LUNG, SIGNAL =   8; EXPRESSED IN HELA, SIGNAL = 8.2; EXPRESSED IN ADULT LIVER, SIGNAL = 5.7; EXPRESSED IN PLACENTA, SIGNAL = 5.6; EXPRESSED IN BT474, SIGNAL = 5.3; EXPRESSED IN BONE MARROW, SIGNAL = 7.7; EXPRESSED IN HBL100, SIGNAL = 5.4; EXPRESSED IN HEART, SIGNAL = 5.3; EST_HUMAN HIT: BE162586.1, EVALUE 0.00e+00; SWISSPROT HIT: Q99712, EVALUE 6.00e-53; NT HIT: Y10745.1, EVALUE 0.00e+00
tgtttccagagcctggcaatggatgccattcacatcggcatgtccagcacccccctggtgaagcacactgctggggctgggctcaaggccaacagaccccgcgtcatgtccaagagtgggcacagcaacgtgagaattgacaaagtggatggcatatacctactctacctgcaagacctgtggaccacagttatcgacatgaagtggagatacaaactcaccctgttcgctgccacttttgtgatgacctggttcctttttggagtcatctactatgccatcgcgtttattcatggggacttagaacccgg

SEQ ID NO: 17109 - DNA, 202 bp, Homo sapiens
  MAP TO AP000162.1; EXPRESSED IN BT474, SIGNAL = 0.76; EXPRESSED IN BONE MARROW, SIGNAL = 1.6; EXPRESSED IN LUNG, SIGNAL = 3.8; EXPRESSED IN ADULT LIVER, SIGNAL = 1.1; EXPRESSED IN PLACENTA, SIGNAL = 1.3; EXPRESSED IN HBL100, SIGNAL = 0.83; EXPRESSED IN FETAL LIVER, SIGNAL =   1; EXPRESSED IN HELA, SIGNAL = 0.65; EXPRESSED IN HEART, SIGNAL = 0.91; NT HIT: D87291.1, EVALUE 1.00e-110; SWISSPROT HIT: Q99712, EVALUE 4.00e-32; EST_HUMAN HIT: BF028418.1, EVALUE 1.00e-105
agaccatcaagttcagccactgtgcagtcatcaccaagcagaatgggaagctgtgcttggtgattcaggtagccaatatgaggaagagcctcttgattcagtgccagctctctggcaagctcctgcagacccacgtcaccaaggagggggagcggattctcctcaaccaagccactgtcaaattccacgtggactcctcctc

SEQ ID NO: 17110 - DNA, 138 bp, Homo sapiens
  MAP TO AP000170.1; EXPRESSED IN FETAL LIVER, SIGNAL = 2.4; EXPRESSED IN LUNG, SIGNAL = 2.9; EXPRESSED IN HELA, SIGNAL = 2.6; EXPRESSED IN BRAIN, SIGNAL = 2.7; EXPRESSED IN BT474, SIGNAL = 2.4; EXPRESSED IN ADULT LIVER, SIGNAL = 2.8; EXPRESSED IN PLACENTA, SIGNAL =   3; EXPRESSED IN HEART, SIGNAL = 2.6; EXPRESSED IN HBL100, SIGNAL = 1.8; EXPRESSED IN BONE MARROW, SIGNAL = 2.9; EST_HUMAN HIT: AA456538.1, EVALUE 2.00e-02; NT HIT: U83991.1, EVALUE 2.70e-01
cattgccagatgatccatggagggcaaaatcaccccttgttgaaagccacttctcaaacccatgaccacagatctgtttcatcaggtcaacatccttcaccataaatttcagggatctggaggagtggagggtggaga

SEQ ID NO: 17111 - DNA, 132 bp, Homo sapiens
  MAP TO AP000171.1; EXPRESSED IN PLACENTA, SIGNAL =  16; EXPRESSED IN HELA, SIGNAL =  11; EXPRESSED IN FETAL LIVER, SIGNAL =  12; EXPRESSED IN BT474, SIGNAL =  11; EXPRESSED IN BONE MARROW, SIGNAL =  18; EXPRESSED IN HBL100, SIGNAL =  11; EXPRESSED IN LUNG, SIGNAL =  13; EXPRESSED IN ADULT LIVER, SIGNAL = 8.8; EXPRESSED IN BRAIN, SIGNAL =  13; EXPRESSED IN HEART, SIGNAL = 9.4; EST_HUMAN HIT: AW816405.1, EVALUE 1.00e-68; SWISSPROT HIT: Q9XSA7, EVALUE 2.00e-14; NT HIT: AB035520.1, EVALUE 2.00e-23
aatagccctctgcctgatgaaatagatgcctacagcaccgaggatgtcactgtttctggaaggaagtttctggatggggacgagctgacgctggctgactgcaacctcttacccaagctccatattattaag

SEQ ID NO: 17112 - DNA, 112 bp, Homo sapiens
  MAP TO AP000171.1; EXPRESSED IN PLACENTA, SIGNAL = 2.9; EXPRESSED IN HBL100, SIGNAL = 2.8; EXPRESSED IN LUNG, SIGNAL = 2.9; EXPRESSED IN HELA, SIGNAL = 2.4; EXPRESSED IN BRAIN, SIGNAL =   3; EXPRESSED IN BT474, SIGNAL = 2.6; EXPRESSED IN BONE MARROW, SIGNAL = 3.1; EXPRESSED IN FETAL LIVER, SIGNAL = 2.7; EXPRESSED IN ADULT LIVER, SIGNAL = 2.2; EXPRESSED IN HEART, SIGNAL = 2.9; NT HIT: AB035520.1, EVALUE 1.00e-18; EST_HUMAN HIT: AW816405.1, EVALUE 8.00e-57; SWISSPROT HIT: Q9Y696, EVALUE 3.00e-12
catctggagatacttgaataatgcttatgctagagatgagttcacaaatacgtgtccagctgatcaagagattgaacacgcatattcagatgttgcaaaaagaatgaaatga

SEQ ID NO: 17113 - DNA, 95 bp, Homo sapiens
  MAP TO AP000171.1; EXPRESSED IN BT474, SIGNAL =  24; EXPRESSED IN HELA, SIGNAL =  28; EXPRESSED IN PLACENTA, SIGNAL =  30; EXPRESSED IN BONE MARROW, SIGNAL =  25; EXPRESSED IN FETAL LIVER, SIGNAL =  28; EXPRESSED IN LUNG, SIGNAL =  31; EXPRESSED IN ADULT LIVER, SIGNAL =  25; EXPRESSED IN BRAIN, SIGNAL =  44; EXPRESSED IN HBL100, SIGNAL =  24; EXPRESSED IN HEART, SIGNAL =  29; NT HIT: X04044.1, EVALUE 7.90e-01
tcatcttaatctgtgtaagaaatactgaagctgtccaaaagttcaaatttgaacccaatgctgaatttaaaggtgttgccccaaaaaacattagg

SEQ ID NO: 17114 - DNA, 261 bp, Homo sapiens
  MAP TO AP000173.1; EXPRESSED IN BRAIN, SIGNAL = 1.7; EXPRESSED IN HEART, SIGNAL =   2; EXPRESSED IN BONE MARROW, SIGNAL = 2.1; EXPRESSED IN HELA, SIGNAL = 1.5; EXPRESSED IN PLACENTA, SIGNAL = 1.2; EXPRESSED IN BT474, SIGNAL = 0.88; EXPRESSED IN ADULT LIVER, SIGNAL = 1.4; EXPRESSED IN LUNG, SIGNAL = 1.7; EXPRESSED IN FETAL LIVER, SIGNAL = 1.5; EXPRESSED IN HBL100, SIGNAL = 1.5; EST_HUMAN HIT: T40608.1, EVALUE 9.40e-01; NT HIT: U66060.1, EVALUE 1.60e-01
atctttagggttctgggtcctttcatcaaatttcctctgctcacaccatgatctccattgtctcctcctcctcctcctgctcctccagttcctctttcctttcttcttctttacctcctccctccttgcttccttccgcctcttcctcctcctccttcttcttcaactattatctaccaagctgtgcctgggctgcccccagtgttttgcagtgtgaggaacttctacaggccagcttggccactgaaagaagccagtgat

SEQ ID NO: 17115 - DNA, 120 bp, Homo sapiens
  MAP TO AP000182.1; EXPRESSED IN HEART, SIGNAL = 2.9; EXPRESSED IN FETAL LIVER, SIGNAL = 3.3; EXPRESSED IN ADULT LIVER, SIGNAL = 3.3; EXPRESSED IN BRAIN, SIGNAL = 3.8; EXPRESSED IN BONE MARROW, SIGNAL = 4.4; EXPRESSED IN LUNG, SIGNAL = 4.8; EXPRESSED IN HELA, SIGNAL = 4.6; EXPRESSED IN PLACENTA, SIGNAL = 3.1; EXPRESSED IN BT474, SIGNAL =   3; EXPRESSED IN HBL100, SIGNAL = 3.2; NT HIT: AF009039.1, EVALUE 5.00e-58; EST_HUMAN HIT: AW057518.1, EVALUE 3.90e-01; SWISSPROT HIT: Q62910, EVALUE 4.00e-15
atcactattcagagtatttcccagtagcaaaacatcaatggcctcttgcttggagctgtcaaagaagttattctgaattgttcgggtaacagagcgagcaccatcttttaactttccagc

SEQ ID NO: 17116 - DNA, 268 bp, Homo sapiens
  MAP TO AP000182.1; EXPRESSED IN BONE MARROW, SIGNAL = 0.99; EXPRESSED IN HBL100, SIGNAL = 1.1; EXPRESSED IN ADULT LIVER, SIGNAL = 1.1; EXPRESSED IN BRAIN, SIGNAL = 1.4; EXPRESSED IN PLACENTA, SIGNAL = 0.97; EXPRESSED IN BT474, SIGNAL = 0.77; EXPRESSED IN FETAL LIVER, SIGNAL = 0.77; EXPRESSED IN LUNG, SIGNAL = 0.93; EXPRESSED IN HELA, SIGNAL = 0.7; EXPRESSED IN HEART, SIGNAL = 1.3; NT HIT: gi4507334, EVALUE 1.00e-120; SWISSPROT HIT: O43426, EVALUE 1.00e-35
aagactcaaatctaaactgatgccagatgcagaccatgcaaaataaaagtttcctgaattcaaaactttccgcacttctgaaatgcgatcctcatctgaagaatcgattcgcagtgatataaactcagtggaagtaactcggaaaacttcagattcttgaatttttccaacagacatacatccagtgactaggaccagataatgtaacatagtatcacctgcaaaacccaaagattttactggatgaaaaatcccaacattttcaagc

SEQ ID NO: 17117 - DNA, 168 bp, Homo sapiens
  MAP TO AP000182.1; EXPRESSED IN HELA, SIGNAL = 1.8; EXPRESSED IN PLACENTA, SIGNAL =   2; EXPRESSED IN BT474, SIGNAL = 2.5; EXPRESSED IN HBL100, SIGNAL = 2.4; EXPRESSED IN FETAL LIVER, SIGNAL = 1.6; EXPRESSED IN LUNG, SIGNAL = 2.6; EXPRESSED IN BRAIN, SIGNAL = 1.9; EXPRESSED IN BONE MARROW, SIGNAL = 2.8; EXPRESSED IN ADULT LIVER, SIGNAL = 1.9; EXPRESSED IN HEART, SIGNAL = 1.9; EST_HUMAN HIT: BF215569.1, EVALUE 7.00e-90; NT HIT: AF231920.1, EVALUE 4.00e-90
attactgggagttttgaaagggactgtattatctgttttttgagatttggcatctgatgatccataggccgtataactataaggaatgccataggatgagccgtaaggcattgtctggtaagtgttctggtagtacatattcacttctgcgggttgactggcttgaac

SEQ ID NO: 17118 - DNA, 879 bp, Homo sapiens
  MAP TO AP000183.1; EXPRESSED IN BT474, SIGNAL =   3; EXPRESSED IN HBL100, SIGNAL = 3.1; EXPRESSED IN FETAL LIVER, SIGNAL = 3.1; EXPRESSED IN BRAIN, SIGNAL = 3.3; EXPRESSED IN PLACENTA, SIGNAL = 4.3; EXPRESSED IN HEART, SIGNAL = 2.5; EXPRESSED IN ADULT LIVER, SIGNAL = 2.7; EXPRESSED IN HELA, SIGNAL = 2.5; EXPRESSED IN LUNG, SIGNAL = 2.9; EXPRESSED IN BONE MARROW, SIGNAL = 3.9; EST_HUMAN HIT: AL041876.1, EVALUE 9.00e-37; NT HIT: AL163208.2, EVALUE 8.00e-25; SWISSPROT HIT: P40242, EVALUE 1.40e-01
ctcttttctccatctcttcacctgtaatgtggcaagcaaagggcatgtctcaaccctgtttgtgttacagctcttttagcctcgccatttggcaggtcccaagtcttgtcctgtgaccaggaagaataggtatgctgacaagtggagggcgagcaagaagaagaggagctttattgagtaatagaacagctgagaggagaccctcagtttgtagctcctttccacagtcagggtgtcctgatgaatgttcagctcctagcagagagggtagctcctctctacagctggtcatcctgtcatctgctctgctctggttgagcatggggcttttatgggcctcagtggggagaaagtgtatatcaattggtccatgggtggccatggggggcacctggaaaaggcaccacaaattcccactttggtctgcagttctggcagcctcgcccccagccatcaggccctccctggcctgaggtggggcctcaccagggacccacctccttctgcccaggagcctgtctgcccccctgccactgtccatggtgcccaggctacttgtgacaagtagcacctgcagaccagtgccgagctaccctcagtgcccctctcagcttccccaccatgcttgtcagtgcccaatgtctagaggaggctgaggcagcagggggctggtgtgtctggtgtgccagtactgccccaagtgtgcgcgtacctggctgggctgtgacagtgcccatgctggactccaaccccgctccaagatcagagcaggtgctgggagctgggagaggccaggcagcaggagcagacacccctgagggtgcagagtgcagagacacccaggtcctgcacctgggagggcaggactcctgccctctc

SEQ ID NO: 17119 - DNA, 739 bp, Homo sapiens
  MAP TO AP000190.1; EXPRESSED IN PLACENTA, SIGNAL = 5.2; EXPRESSED IN BONE MARROW, SIGNAL = 3.7; EXPRESSED IN HBL100, SIGNAL = 5.2; EXPRESSED IN FETAL LIVER, SIGNAL = 8.1; EXPRESSED IN LUNG, SIGNAL = 5.4; EXPRESSED IN HELA, SIGNAL = 3.6; EXPRESSED IN ADULT LIVER, SIGNAL = 3.1; EXPRESSED IN BRAIN, SIGNAL =   5; EXPRESSED IN BT474, SIGNAL =  14; EXPRESSED IN HEART, SIGNAL =   4; EST_HUMAN HIT: BE256886.1, EVALUE 0.00e+00; SWISSPROT HIT: P18583, EVALUE 9.00e-59; NT HIT: gi11526208, EVALUE 0.00e+00
gcgctctatgatgtcccctatggctgagcgctctatgatgtcagcttatgaacgctccatgatgtcagcttatgaacgctccatgatgtccccaatggctgatcgatctatgatgtccatgggtgctgaccggtctatgatgtcgtcatactctgctgctgaccggtctatgatgtcatcgtactctgcagctgaccgatctatgatgtcatcttatactgctgatcgttcaatgatgtctatggctgctgattcttacaccgattcttacactgacacatatacagaggcatatatggtgccacctttgcctcctgaagagcccccaacaatgccaccgttgccacctgaggagccaccaatgacaccaccattgcctcctgaggaaccaccagagggtccagcattgcccactgagcagtcagcattaacagctgaaaatacttggcctacagaggtgccatcatcaccatctgaagagtctgtatcgcagcctgagcctcctgtgagtcaaagtgagatttcggagccttcagcagtgcctactgattattcagtgtcagcatcagatccctcagttttagtatcagaggctgctgtgactgttccagaaccaccaccagagccagaatcttcaattacgttaacacctgtagagtctgcagtagtagcagaagaacatgaagttgttccagagagaccagtgacttgtatggtatctgaaactcccgccatgtca

SEQ ID NO: 17120 - DNA, 1086 bp, Homo sapiens
  MAP TO AP000190.1; EXPRESSED IN PLACENTA, SIGNAL = 4.3; EXPRESSED IN BT474, SIGNAL = 7.1; EXPRESSED IN LUNG, SIGNAL =   4; EXPRESSED IN HELA, SIGNAL = 3.8; EXPRESSED IN BRAIN, SIGNAL = 4.6; EXPRESSED IN BONE MARROW, SIGNAL =  15; EXPRESSED IN HBL100, SIGNAL =   5; EXPRESSED IN FETAL LIVER, SIGNAL = 4.4; EXPRESSED IN ADULT LIVER, SIGNAL = 3.1; EXPRESSED IN HEART, SIGNAL = 3.1; NT HIT: gi11526208, EVALUE 0.00e+00; EST_HUMAN HIT: AI801337.1, EVALUE 0.00e+00; SWISSPROT HIT: P18583, EVALUE 1.00e-42
tagcagctctgctcagccctaaagaaagtagtggaggagaaaaagaagtacctccccctcctaaagagacactgcctgattcaggattttctgccaatattgaggatattaatgaagcagatttagtgagaccgttacttcctaaggacatggaacgtcttacaagccttagagctggcattgaaggacctttacttgcaagtgatgttggacgtgacagatctgctgccagcccggttgtaagtagtatgccagaaagagcttcagagtcttcttcagaggaaaaagatgattatgaaatttttgtaaaagttaaggacactcacgaaaaaagcaagaaaaataagaaccgtgataagggggagaaagagaagaaaagagactcttcattaagatctcgaagtaagcgttccaaatcttctgaacacaaatcacgcaagcgtaccagtgaatctcgttctagggcaagaaagagatcatctaagtccaagtctcatcgctctcagacacgttcacggtcacgttcaagacgcaggaggagaagcagcagatcaagatcaaagtctagaggaagaagatctgtatcaaaagagaagcgcaaaagatctccaaagcacagatccaagtctagggaaagaaaaagaaaaagatcaagctccagggataaccgaaagacagttagagctcgaagtcgaaccccaagtcgtcggagtcggagtcatactccaagtcgtcgacgaaggtctagatctgtgggtagaagaaggagctttagcatttccccaagccgccgcagccgcacccccagccgccgcagccgcacccccagccgccgcagccgcacccccagccgccgcagccgcacccccagccgccggagccgcacccctagccgtcggagccgcaccccaagccgccggagaagatcaaggtctgtggtaagaagacgaagcttcagtatctcaccagtcagattaaggcgatcaagaacacccttaagaagaaggtttagcagatctcccatccgtcgtaaaagatccaggtcttctgaacgaggcagatcacccaaacgtctgacagatttgg

SEQ ID NO: 17121 - DNA, 252 bp, Homo sapiens
  MAP TO AP000190.1; EXPRESSED IN LUNG, SIGNAL = 0.63; EXPRESSED IN HEART, SIGNAL =   2; EXPRESSED IN BT474, SIGNAL = 0.93; EXPRESSED IN BONE MARROW, SIGNAL = 0.8; EXPRESSED IN HBL100, SIGNAL =   2; EXPRESSED IN FETAL LIVER, SIGNAL = 0.99; EXPRESSED IN HELA, SIGNAL = 0.88; EXPRESSED IN ADULT LIVER, SIGNAL = 0.76; NT HIT: gi11526206, EVALUE 0.00e+00; SWISSPROT HIT: P22102, EVALUE 2.00e-43; EST_HUMAN HIT: AU131027.1, EVALUE 0.00e+00
ctaaagtctggtcaccacaaccatcaggtgctggagaggagtactggagggaagattttgccacgattttcctcacaaggctaaatccattgctatgaagaccagatgaagctattccaacaacaacatcaccctcagtgattctttccaggtgagggagtttctgatctcgctccatggcaccaacggcaaacccagctaggtcatactctccagggggatacatgtcaggcatttctgctgtttcacctc

SEQ ID NO: 17122 - DNA, 772 bp, Homo sapiens
  MAP TO AP000190.1; EXPRESSED IN HBL100, SIGNAL = 2.3; EXPRESSED IN FETAL LIVER, SIGNAL = 2.5; EXPRESSED IN HELA, SIGNAL = 4.5; EXPRESSED IN ADULT LIVER, SIGNAL = 1.9; EXPRESSED IN PLACENTA, SIGNAL = 1.4; EXPRESSED IN HEART, SIGNAL =   2; EXPRESSED IN BRAIN, SIGNAL = 3.8; EXPRESSED IN LUNG, SIGNAL = 2.9; EXPRESSED IN BONE MARROW, SIGNAL = 1.8; EXPRESSED IN BT474, SIGNAL = 3.9; NT HIT: AF193597.1, EVALUE 4.00e-91; EST_HUMAN HIT: AA480002.1, EVALUE 0.00e+00; SWISSPROT HIT: P08640, EVALUE 2.00e-05
aaatatgggtttatatgatttaatctaactctactttggggaatgtctgacaaaattaatttctattacttttagacttgaaagagggctccagaaaaagtagatgcgtatctgtacaaacagatcctactgatgaaattcccactaaaaagtcaaagaagcataaaaagcacaaaaacaaaaagaagaaaaagaagaaagaaaaggaaaaaaaatataaaagacagccagaagaatctgagtcaaagacgaaatctcatgatgatgggaacatagatttagaatctgattcctttttaaagtttgattctgaaccttcagctgtggcgctggagcttcctacaagagcatttggcccatctgagaccaatgaatcccctgcagttgtgctagaacctcctgtagtatcaatggaggtatcagagccacacatcttagaaactctgaagccagctacaaaaactgcagaactgtcagttgtatctacatcagtaatctcagagcagtcagagcagtctgtggcagtaatgccagaaccatccatgacaaagattctggattcctttgcagcagcaccagtgcctactacaacactggtgttgaagtcatctgagccagttgtaacaatgtcagtggagtatcagatgaagtctgtgctgaaatctgtggagagcacatctccagagccatcaaagatcatgttggtagagcccccagtagcaaaagtgttagagccttcagaaacccttgtggtatcatcagagacacctac

SEQ ID NO: 17123 - DNA, 277 bp, Homo sapiens
  MAP TO AP000190.1; EXPRESSED IN PLACENTA, SIGNAL =  20; EXPRESSED IN LUNG, SIGNAL =  18; EXPRESSED IN HEART, SIGNAL =  13; EXPRESSED IN BT474, SIGNAL =  17; EXPRESSED IN BONE MARROW, SIGNAL =  23; EXPRESSED IN HBL100, SIGNAL =  21; EXPRESSED IN FETAL LIVER, SIGNAL =  19; EXPRESSED IN HELA, SIGNAL =  22; EXPRESSED IN ADULT LIVER, SIGNAL =  13; EXPRESSED IN BRAIN, SIGNAL =  19; EST_HUMAN HIT: AU118276.1, EVALUE 0.00e+00; NT HIT: X63751.1, EVALUE 0.00e+00; SWISSPROT HIT: P18583, EVALUE 7.00e-14
cagagacagcagaaacatttgattccatgagagcctcaggacatgttgcctcagaagtatctacatccttgttggttccagcagtaactactccagtgctggcagagagcattctggagccgccagccatggctgccccagagtcttcagctatggctgtcctggagtcttcggctgtgaccgtcctggagtcttcgactgtgactgtcctggagtcttcgactgtaactgtcctggagccttcggttgtgactgtcccggagcctcctgttgtggc

SEQ ID NO: 17124 - DNA, 188 bp, Homo sapiens
  MAP TO AP000191.1; EXPRESSED IN PLACENTA, SIGNAL = 2.2; EXPRESSED IN LUNG, SIGNAL = 2.7; EXPRESSED IN HELA, SIGNAL = 2.2; EXPRESSED IN ADULT LIVER, SIGNAL = 2.4; EXPRESSED IN BT474, SIGNAL = 2.5; EXPRESSED IN BONE MARROW, SIGNAL = 2.6; EXPRESSED IN HBL100, SIGNAL = 2.4; EXPRESSED IN FETAL LIVER, SIGNAL = 2.2; EXPRESSED IN BRAIN, SIGNAL = 3.3; EXPRESSED IN HEART, SIGNAL =   3; NT HIT: gi11526212, EVALUE 3.00e-14; EST_HUMAN HIT: AU126260.1, EVALUE 9.00e-28; SWISSPROT HIT: P34498, EVALUE 4.90e+00
ctgcctctgagccgccccaacggcctgcaccttcaccaccgccaccttccagtccttcgtcagagagcccgccccctgctcccattggtcaggccgctcgtcactcctgaagggcggggtcggactcgcgaggctgtccagaacgccatggcaaccggtctcggaactacatctcccgtcatgttccg

SEQ ID NO: 17125 - DNA, 180 bp, Homo sapiens
  MAP TO AP000192.1; EXPRESSED IN FETAL LIVER, SIGNAL = 1.6; EXPRESSED IN LUNG, SIGNAL = 1.8; EXPRESSED IN HELA, SIGNAL = 1.6; EXPRESSED IN ADULT LIVER, SIGNAL =   2; EXPRESSED IN BRAIN, SIGNAL = 1.9; EXPRESSED IN BONE MARROW, SIGNAL = 1.4; EXPRESSED IN PLACENTA, SIGNAL = 1.5; EXPRESSED IN BT474, SIGNAL = 1.3; EXPRESSED IN HEART, SIGNAL = 1.5; EXPRESSED IN HBL100, SIGNAL = 1.2; NT HIT: gi11526214, EVALUE 1.00e-84; EST_HUMAN HIT: BE871545.1, EVALUE 2.00e-84; SWISSPROT HIT: Q50360, EVALUE 2.20e-02
gtatgggaggtatcgccagcatgccaccgcttacagctgttgctccagtgccaatgggatccattccagttgttggaatgtctccaaccctagtatcttctgttcccacagcagctgtgccccccctggctaacggggctccccctgttatacaacctctgcctgcatttgctcatcctg

SEQ ID NO: 17126 - DNA, 198 bp, Homo sapiens
  MAP TO AP000193.1; EXPRESSED IN BT474, SIGNAL = 1.7; EXPRESSED IN BONE MARROW, SIGNAL = 1.5; EXPRESSED IN HBL100, SIGNAL = 1.6; EXPRESSED IN FETAL LIVER, SIGNAL = 2.5; EXPRESSED IN LUNG, SIGNAL = 1.2; EXPRESSED IN ADULT LIVER, SIGNAL = 2.3; EXPRESSED IN BRAIN, SIGNAL = 1.3; EXPRESSED IN PLACENTA, SIGNAL = 1.7; EXPRESSED IN HELA, SIGNAL = 1.2; EXPRESSED IN HEART, SIGNAL = 1.4; EST_HUMAN HIT: AA985166.1, EVALUE 2.00e-74; SWISSPROT HIT: Q01722, EVALUE 4.30e-01; NT HIT: gi4504796, EVALUE 3.00e-79
gctgcaaaacgggaacttgaaaggcaacgacaacttgagtgggaacggaatcgaaggcaagaactactaaatcaaagaaacaaagaacaagaggacatagttgtactgaaagcaaagaaaaagactttggaatttgaattagaagctctagtgagtgaagtttggttatactttgaaaatatactaagatggaaccat

SEQ ID NO: 17127 - DNA, 270 bp, Homo sapiens
  MAP TO AP000193.1; EXPRESSED IN HBL100, SIGNAL = 2.2; EXPRESSED IN HELA, SIGNAL = 1.6; EXPRESSED IN BRAIN, SIGNAL = 2.3; EXPRESSED IN PLACENTA, SIGNAL = 1.6; EXPRESSED IN BT474, SIGNAL =   2; EXPRESSED IN BONE MARROW, SIGNAL = 1.8; EXPRESSED IN FETAL LIVER, SIGNAL = 3.2; EXPRESSED IN LUNG, SIGNAL = 1.6; EXPRESSED IN ADULT LIVER, SIGNAL = 2.7; EXPRESSED IN HEART, SIGNAL = 2.2; EST_HUMAN HIT: AA773263.1, EVALUE 1.00e-112; SWISSPROT HIT: Q15811, EVALUE 2.00e-45; NT HIT: gi11526214, EVALUE 0.00e+00
gtggatgaaagccaaactggagaacccggctggcttggaggagaattaaaaggaaagacagggtggttccctgcaaactatgcagagaaaatcccagaaaatgaggttcccgctccagtgaaaccagtgactgattcaacatctgcccctgcccccaaactggccttgcgtgagacccccgcccctttggcagtaacctcttcagagccctccacgacccctaataactgggccgacttcagctccacgtacgtgttggtgggctctttc

SEQ ID NO: 17128 - DNA, 200 bp, Homo sapiens
  MAP TO AP000193.1; EXPRESSED IN BRAIN, SIGNAL = 1.6; EXPRESSED IN HBL100, SIGNAL = 1.2; EXPRESSED IN FETAL LIVER, SIGNAL = 1.5; EXPRESSED IN LUNG, SIGNAL = 1.5; EXPRESSED IN HEART, SIGNAL = 1.5; EXPRESSED IN PLACENTA, SIGNAL = 1.5; EXPRESSED IN BT474, SIGNAL = 1.1; EXPRESSED IN BONE MARROW, SIGNAL = 1.5; EXPRESSED IN HELA, SIGNAL = 1.5; EXPRESSED IN ADULT LIVER, SIGNAL = 1.5; NT HIT: gi11526214, EVALUE 2.00e-99; SWISSPROT HIT: P07359, EVALUE 2.20e+00; EST_HUMAN HIT: H54945.1, EVALUE 1.00e-47
agcgctgagagtccgcaagaagatgtccggggagaagatgcctgtgaagatgattggagacatcctgagcgcacagctgccgcacatgcagccctacatccgcttctgcagccgccagctcaacggggctgccctgatccagcagaagacggatgaggccccagacttcaaggagttcgtcaaagtaaggagccaggctg

SEQ ID NO: 17129 - DNA, 158 bp, Homo sapiens
  MAP TO AP000201.1; EXPRESSED IN BT474, SIGNAL = 1.9; EXPRESSED IN BONE MARROW, SIGNAL = 1.9; EXPRESSED IN FETAL LIVER, SIGNAL =   2; EXPRESSED IN LUNG, SIGNAL =   2; EXPRESSED IN ADULT LIVER, SIGNAL = 1.3; EXPRESSED IN BRAIN, SIGNAL = 1.2; EXPRESSED IN HEART, SIGNAL = 1.4; EXPRESSED IN PLACENTA, SIGNAL = 2.2; EXPRESSED IN HBL100, SIGNAL = 1.8; EXPRESSED IN HELA, SIGNAL = 1.5; NT HIT: AF026200.1, EVALUE 3.00e-84; EST_HUMAN HIT: AA789199.1, EVALUE 2.00e-79; SWISSPROT HIT: O14867, EVALUE 2.00e-24
ttgcgacagcgctgtgcagcaattctgtttttacttcttcttcgaatatcatggatacaatccagctgttctggagtaagcttgtgcattttcaacaaggactgaaaatcatttcgagacagtgaaattatccgttgtgcattgaatggcagttttac

SEQ ID NO: 17130 - DNA, 185 bp, Homo sapiens
  MAP TO AP000201.1; EXPRESSED IN HBL100, SIGNAL =   1; EXPRESSED IN LUNG, SIGNAL = 1.2; EXPRESSED IN BRAIN, SIGNAL = 0.83; EXPRESSED IN PLACENTA, SIGNAL = 1.8; EXPRESSED IN BT474, SIGNAL = 1.3; EXPRESSED IN BONE MARROW, SIGNAL = 0.96; EXPRESSED IN FETAL LIVER, SIGNAL = 1.8; EXPRESSED IN HELA, SIGNAL = 1.1; EXPRESSED IN ADULT LIVER, SIGNAL =  26; EXPRESSED IN HEART, SIGNAL =   1; NT HIT: AL163249.2, EVALUE 1.00e-100; SWISSPROT HIT: O14867, EVALUE 2.00e-29; EST_HUMAN HIT: AA402241.1, EVALUE 1.00e-84
cttgagtggaagtaactgctgcatgccgccagcacggaccggtgagcgcggaaccgctgtccctccacaaagatggtgacatcgcacagcacatctttcttccgctggtcattaaggctgagtaaaacattggtgctatgcacagaagattcataggcaaaaaccgagttctcactcagagacat

SEQ ID NO: 17131 - DNA, 154 bp, Homo sapiens
  MAP TO AP000203.1; EXPRESSED IN PLACENTA, SIGNAL = 2.7; EXPRESSED IN FETAL LIVER, SIGNAL = 2.3; EXPRESSED IN LUNG, SIGNAL = 2.3; EXPRESSED IN ADULT LIVER, SIGNAL = 2.2; EXPRESSED IN BONE MARROW, SIGNAL = 3.1; EXPRESSED IN HBL100, SIGNAL = 2.3; EXPRESSED IN BRAIN, SIGNAL = 4.2; EXPRESSED IN HEART, SIGNAL = 3.1; EXPRESSED IN BT474, SIGNAL = 2.5; EXPRESSED IN HELA, SIGNAL = 2.6; NT HIT: AL163210.2, EVALUE 2.00e-21; EST_HUMAN HIT: AI831462.1, EVALUE 3.00e-27; SWISSPROT HIT: P16794, EVALUE 1.00e+00
aatggctttgacaaagatgatgctgatagtgatatggaaaatagcatccaggtcggggtggtctcagatggagataaggaacttgctgggaattggagcagaggtgacccttcttatgttttacaaagagactggcagcattttgaccctgccc

SEQ ID NO: 17132 - DNA, 467 bp, Homo sapiens
  MAP TO AP000213.1; EXPRESSED IN FETAL LIVER, SIGNAL = 8.1; EXPRESSED IN BRAIN, SIGNAL = 5.5; EXPRESSED IN HEART, SIGNAL = 5.4; EXPRESSED IN BONE MARROW, SIGNAL =  10; EXPRESSED IN HBL100, SIGNAL =  12; EXPRESSED IN LUNG, SIGNAL = 7.1; EXPRESSED IN ADULT LIVER, SIGNAL = 7.3; EXPRESSED IN PLACENTA, SIGNAL = 7.3; EXPRESSED IN BT474, SIGNAL =  11; EXPRESSED IN HELA, SIGNAL = 9.2; NT HIT: AB032998.1, EVALUE 1.00e-125; SWISSPROT HIT: O95104, EVALUE 2.00e-45; EST_HUMAN HIT: AA883099.1, EVALUE 1.00e-124
acgaggagcctctgctgctgagccagaatccttttcgggttcaacggatgaggtagcctcagcaggtaactcttcagaaggctttaggactgcagcctcagacacccccttctcaagttctgaagcagtgtctacatttcccacttggctaatgggaggttcaacggttttgttaccacctgccctgtctgtcacctcaggcttttcctttcctcgggcttcttccttctctctacgagactctctatctctagaatctctctctctgtctcgatgcccactagagcgtctatttctctcttccaagtctctgtgcctgtcccggtcagggctcctccttccccactctctcctgtcacggttactattatctctatcatcattacggttcccataccgttcccggtcattttccaccctatttccaaaagatcttcttccaaacctttcttggtctctacctgaat

SEQ ID NO: 17133 - DNA, 182 bp, Homo sapiens
  MAP TO AP000213.1; EXPRESSED IN HBL100, SIGNAL = 3.2; EXPRESSED IN FETAL LIVER, SIGNAL = 2.9; EXPRESSED IN PLACENTA, SIGNAL = 3.6; EXPRESSED IN BT474, SIGNAL = 2.2; EXPRESSED IN LUNG, SIGNAL =  41; EXPRESSED IN ADULT LIVER, SIGNAL = 2.9; EXPRESSED IN BRAIN, SIGNAL = 2.7; EXPRESSED IN HEART, SIGNAL = 2.7; EXPRESSED IN BONE MARROW, SIGNAL = 3.1; EXPRESSED IN HELA, SIGNAL = 2.9; NT HIT: AB032998.1, EVALUE 5.00e-96; EST_HUMAN HIT: BE938382.1, EVALUE 6.00e-69; SWISSPROT HIT: O95104, EVALUE 1.00e-06
aatggtgcctgtggaggaggaggagaggcagcagcgggtgcagcagcagcaggcacggtggcggtgggtgcagggggtactgcggcagcaggtgctgtcgtggtgacggcagtggtatcctctttctttgattcttccacagcttctggctcatcatcatagtcaaatctatcaagcaactt

SEQ ID NO: 17134 - DNA, 103 bp, Homo sapiens
  MAP TO AP000085.1; EXPRESSED IN BRAIN, SIGNAL = 2.3; EXPRESSED IN HEART, SIGNAL = 2.2; EXPRESSED IN BT474, SIGNAL = 1.7; EXPRESSED IN BONE MARROW, SIGNAL = 2.1; EXPRESSED IN HBL100, SIGNAL = 1.9; EXPRESSED IN HELA, SIGNAL = 2.1; EXPRESSED IN ADULT LIVER, SIGNAL = 1.7; EXPRESSED IN PLACENTA, SIGNAL = 1.8; EXPRESSED IN FETAL LIVER, SIGNAL = 1.8; EXPRESSED IN LUNG, SIGNAL = 2.3; NT HIT: AF107723.1, EVALUE 8.70e-01; EST_HUMAN HIT: R46482.1, EVALUE 4.00e-03
cttccgctgagccagtgtgaggtcagggtgttgaggaagcgagtccctgcagtcagactccagctggctgtcgtcctgcttctgcttattccacagaatgagt

SEQ ID NO: 17135 - DNA, 77 bp, Homo sapiens
  MAP TO AP000223.1; EXPRESSED IN LUNG, SIGNAL = 2.9; EXPRESSED IN HELA, SIGNAL = 5.2; EXPRESSED IN ADULT LIVER, SIGNAL = 2.2; EXPRESSED IN BRAIN, SIGNAL = 3.1; EXPRESSED IN HEART, SIGNAL = 2.7; EXPRESSED IN PLACENTA, SIGNAL = 2.3; EXPRESSED IN BT474, SIGNAL = 1.7; EXPRESSED IN BONE MARROW, SIGNAL = 2.5; EXPRESSED IN HBL100, SIGNAL = 2.3; EXPRESSED IN FETAL LIVER, SIGNAL = 2.3; EST_HUMAN HIT: BE384084.1, EVALUE 9.00e-01; NT HIT: AF107723.1, EVALUE 6.10e-01
ggtgttgaggaagcgagtccctgcagtcagactccagctggctgtcgtcctgcttctgcttattccacagaatgagt

SEQ ID NO: 17136 - DNA, 350 bp, Homo sapiens
  MAP TO AP000230.1; EXPRESSED IN LUNG, SIGNAL =  11; EXPRESSED IN BT474, SIGNAL =  13; EXPRESSED IN HBL100, SIGNAL = 9.4; EXPRESSED IN FETAL LIVER, SIGNAL =  10; EXPRESSED IN BRAIN, SIGNAL = 9.4; EXPRESSED IN PLACENTA, SIGNAL =  14; EXPRESSED IN BONE MARROW, SIGNAL =  13; EXPRESSED IN HELA, SIGNAL = 9.3; EXPRESSED IN ADULT LIVER, SIGNAL = 8.4; EXPRESSED IN HEART, SIGNAL = 6.7; EST_HUMAN HIT: BE263672.1, EVALUE 3.00e-63; SWISSPROT HIT: O83558, EVALUE 4.60e-01; NT HIT: AL163210.2, EVALUE 2.00e-63
ccccatgctgtgtgcagcctggggacttggtgccttgtgtcccagctgctccagccatggctgaaaggggccaacatagagctcggattgtggcttcagagggtgcaagctgtaagccttggcagcttccatgtggtgttgagcctgccagtgcacagaagtcaaaaattggggtttgggaacctctgcctagatttcagaagatgtatggaaatgcctggatgccctggcagaagtctgctgtaggggaggggccctcatggagaatctctgctagggcagtacagaagggaaatgtgggatcggagccccagcacagaatccctactggggcaccgcctagtggagct

SEQ ID NO: 17137 - DNA, 196 bp, Homo sapiens
  MAP TO AP000230.1; EXPRESSED IN PLACENTA, SIGNAL = 3.9; EXPRESSED IN BT474, SIGNAL = 5.2; EXPRESSED IN BONE MARROW, SIGNAL = 4.6; EXPRESSED IN HBL100, SIGNAL = 3.7; EXPRESSED IN LUNG, SIGNAL = 4.7; EXPRESSED IN HELA, SIGNAL = 5.7; EXPRESSED IN ADULT LIVER, SIGNAL = 7.4; EXPRESSED IN BRAIN, SIGNAL = 8.5; EXPRESSED IN FETAL LIVER, SIGNAL = 4.4; EXPRESSED IN HEART, SIGNAL =  13; NT HIT: U91328.1, EVALUE 4.00e-35; EST_HUMAN HIT: AI223036.1, EVALUE 2.00e-40; SWISSPROT HIT: P51812, EVALUE 1.30e+00
agacctactgggctgcattctcagacagctggttaagctttctaagtcacaggatgagatgggcggttggcacaagatacaagtcataaagtccttgctgataaaacagattgcagtaaagaagctggccaaaacccaccataacaaagaaggccacatgagtgacctctggtcattctcactactcattatatgc

SEQ ID NO: 17138 - DNA, 187 bp, Homo sapiens
  MAP TO AP000146.1; EXPRESSED IN HBL100, SIGNAL = 0.9; EXPRESSED IN FETAL LIVER, SIGNAL = 1.2; EXPRESSED IN HEART, SIGNAL = 3.6; EXPRESSED IN PLACENTA, SIGNAL =   1; EXPRESSED IN BRAIN, SIGNAL = 1.9; EXPRESSED IN ADULT LIVER, SIGNAL = 1.9; EXPRESSED IN HELA, SIGNAL = 1.5; EXPRESSED IN LUNG, SIGNAL = 1.2; EXPRESSED IN BONE MARROW, SIGNAL = 0.99; EXPRESSED IN BT474, SIGNAL = 1.2; SWISSPROT HIT: P21647, EVALUE 4.90e+00; EST_HUMAN HIT: AW955415.1, EVALUE 7.00e-04; NT HIT: AF029308.1, EVALUE 4.00e-04
aatgagtctatcttcaagtttgctcattccttcttctgccaattcaaatctactgttgggcccatctagtataattttcatttcagttcttgtgtttatcagctccagaatttccataataatttttatctctttattgatactttgtcttgtgttggacatcgtcatcatgacttcctttactttt

SEQ ID NO: 17139 - DNA, 1268 bp, Homo sapiens
  MAP TO AP000241.1; EXPRESSED IN HELA, SIGNAL = 1.1; EXPRESSED IN ADULT LIVER, SIGNAL = 0.7; EXPRESSED IN HEART, SIGNAL = 0.9; EXPRESSED IN BT474, SIGNAL = 1.9; EXPRESSED IN BONE MARROW, SIGNAL = 2.8; EXPRESSED IN FETAL LIVER, SIGNAL = 1.6; EXPRESSED IN LUNG, SIGNAL = 1.1; EXPRESSED IN PLACENTA, SIGNAL = 1.2; EXPRESSED IN HBL100, SIGNAL = 2.9; NT HIT: gi6680763, EVALUE 9.00e-93; SWISSPROT HIT: O14867, EVALUE 0.00e+00; EST_HUMAN HIT: AU135531.1, EVALUE 0.00e+00
ctcacattcttgttctctggctgaacaggattcactgtctccttcggtgtccgtctcagagtcgtctcccaagctaatgacacaagcatatgggcaaggttcttgctggggttctgaaacataatcatcgtttccaatttccaaattgcttgaacagccttcagtactcagagtacttataaaagggcagttgacagaacttaatgttgtgaaagtcctttgacctggttctgggctctcactaatcctgatacctaaccacggacactcagaccgtttctgtgagatctgttctgagccatctttggccacagcaggtgataactgcatttggcaaggagtgtccgtgctgcaaatgtcactccagaagccttttgctaggtgttctgccacttctcgctccacactactcctatcactagatgcaacactactatcttccctggtgcccaagtcggatttcaaaggtaaatcctgactttcaccaaatgttttttcttggacgtctgtacctgacaaaggcttttctgttaacactgttgtgttttgcataccagcaaaattcaagtcaccatattggtcatatgtgtgtaaaagagacaaagaataaagtccatgagggtctatggaagaattgtgggggaaaggagtcacttctgatttttcagttgggcactgagaagcaggatctttcttcgtttcttcaggttccattgctaatttactttcgtcacattttaacatcacctgcaaatctctacactccgggactcctcccaggcattcattttcagacctttcatttggctgaacagaagcatgaatgtctttgacactagattccccagtacggactctgtcagttccaaatgctttttggaattttctgtatttggggcataaagaaggcaaggccagagcagcatccttctctaagcacatggactcatatgtctgactggcactgtcttgtagaggaggtgaggcttttgcatttccttgatacctgcggagtttacactgaggagtctgaacatttttattttccagaaattcctccacttcatcagtttctagatccctctggtccaaaagtgaaagtttaaggtctgttttctgacagtgtgatgaaaagcatttttttcttgggcattcttgctggtctgcagtggagtccaaaaacttaaatttcagaaactgaaagcaggattcctcaatattatgtacacttaaaaactccacacatttgcacacttcatccacattct

SEQ ID NO: 17140 - DNA, 656 bp, Homo sapiens
  MAP TO AP000260.1; EXPRESSED IN BT474, SIGNAL = 3.2; EXPRESSED IN HELA, SIGNAL = 3.8; EXPRESSED IN ADULT LIVER, SIGNAL = 3.3; EXPRESSED IN BRAIN, SIGNAL =   5; EXPRESSED IN PLACENTA, SIGNAL = 4.1; EXPRESSED IN BONE MARROW, SIGNAL = 4.9; EXPRESSED IN HBL100, SIGNAL = 3.8; EXPRESSED IN FETAL LIVER, SIGNAL = 3.8; EXPRESSED IN LUNG, SIGNAL = 5.4; EXPRESSED IN HEART, SIGNAL = 4.2; SWISSPROT HIT: P57058, EVALUE 1.00e-109; EST_HUMAN HIT: BF529471.1, EVALUE 0.00e+00; NT HIT: gi11526180, EVALUE 0.00e+00
attcctttggctgccgcaatattttccgcaaaacctcagattccaattgtgtggcttcttcttccatggagttcatccccgtgccaccgcccaggaccccgaggattgtgaagaaaccggagccccatcagccagggcccggaagcactggcatcccccacaaggaagaccccctgatgctggacatggtgcgctccttcgagtctgtggatcgcgacgaccacgtagaagtgctgtctccctctcatcactacaggattctgaactccccggtcagcttggctcgcagaaattccagcgagaggacgctgtccccgggtctgccatccggaagcatgtcgcctctccatactcctttgcatccaactctggtctcttttgctcacgaagataagaacagccccccaaaagaggagggcctgtgttgcccacctccggttcccagcaatggccccatgcagcctctggggagccccaattgtgtgaaaagccgaggccggttccctatgatgggcatcggacagatgttaaggaagcgccatcagagtctgcagccatctgcagataggcccctggaggccagcctgcccccactgcagcccctagcccctgtgaaccttgcctttgacatggccgatggggtcaagacccagtgc

SEQ ID NO: 17141 - DNA, 357 bp, Homo sapiens
  MAP TO AP000263.1; EXPRESSED IN PLACENTA, SIGNAL = 1.2; EXPRESSED IN LUNG, SIGNAL = 1.5; EXPRESSED IN HELA, SIGNAL = 1.4; EXPRESSED IN ADULT LIVER, SIGNAL = 1.2; EXPRESSED IN BRAIN, SIGNAL = 1.5; EXPRESSED IN HEART, SIGNAL = 1.4; EXPRESSED IN BT474, SIGNAL = 1.2; EXPRESSED IN BONE MARROW, SIGNAL = 1.1; EXPRESSED IN HBL100, SIGNAL = 1.1; EXPRESSED IN FETAL LIVER, SIGNAL = 1.2; NT HIT: D16471.1, EVALUE 4.80e-02; SWISSPROT HIT: P06561, EVALUE 7.10e+00
gtggctgtatccacatattcagagccaggccttgggcagggcaggtgacaaggagcatgtcatttgggggaacctagcactgagtgaaatcatcacagttaattctttactagctgtgtcagaatttcggctcattttaatcttggtgttcaatgaacaccctgaggtcttcctcatgagtcccctgcattctgatgaaattgcctttagtgtcttaggaggccgtgtggttcagagcatgggtgtggagttgagagatgtccattccactccaggtttcaccctaaaaagcagtgtgaggtggaacgagttattctgaggctcaattttttcatctataaaatgatcattattatt

SEQ ID NO: 17142 - DNA, 835 bp, Homo sapiens
  MAP TO AP000281.1; EXPRESSED IN HEART, SIGNAL =   2; EXPRESSED IN FETAL LIVER, SIGNAL = 1.7; EXPRESSED IN LUNG, SIGNAL = 2.2; EXPRESSED IN HELA, SIGNAL = 2.2; EXPRESSED IN PLACENTA, SIGNAL = 2.4; EXPRESSED IN BT474, SIGNAL = 2.5; EXPRESSED IN BONE MARROW, SIGNAL = 2.9; EXPRESSED IN HBL100, SIGNAL = 1.9; EXPRESSED IN ADULT LIVER, SIGNAL = 2.2; EXPRESSED IN BRAIN, SIGNAL = 2.7; EST_HUMAN HIT: AL041876.1, EVALUE 9.00e-37; SWISSPROT HIT: P40242, EVALUE 1.30e-01; NT HIT: AL163208.2, EVALUE 7.00e-25
atgtctcaaccctgtttgtgttacagctcttttagcctcgccatttggcaggtcccaagtcttgtcctgtgaccaggaagaataggtatgctgacaagtggagggcgagcaagaagaagaggagctttattgagtaatagaacagctgagaggagaccctcagtttgtagctcctttccacagtcagggtgtcctgatgaatgttcagctcctagcagagagggtagctcctctctacagctggtcatcctgtcatctgctctgctctggttgagcatggggcttttatgggcctcagtggggagaaagtgtatatcaattggtccatgggtggccatggggggcacctggaaaaggcaccacaaattcccactttggtctgcagttctggcagcctcgcccccagccatcaggccctccctggcctgaggtggggcctcaccagggacccacctccttctgcccaggagcctgtctgcccccctgccactgtccatggtgcccaggctacttgtgacaagtagcacctgcagaccagtgccgagctaccctcagtgcccctctcagcttccccaccatgcttgtcagtgcccaatgtctagaggaggctgaggcagcagggggctggtgtgtctggtgtgccagtactgccccaagtgtgcgcgtacctggctgggctgtgacagtgcccatgctggactccaaccccgctccaagatcagagcaggtgctgggagctgggagaggccaggcagcaggagcagacacccctgagggtgcagagtgcagagacacccaggtcctgcacctgggagggcaggactcctgccctctc

SEQ ID NO: 17143 - DNA, 133 bp, Homo sapiens
  MAP TO AP000184.1; EXPRESSED IN ADULT LIVER, SIGNAL = 2.1; EXPRESSED IN BONE MARROW, SIGNAL = 3.1; EXPRESSED IN BRAIN, SIGNAL = 1.8; EXPRESSED IN PLACENTA, SIGNAL = 3.8; EXPRESSED IN BT474, SIGNAL = 3.3; EXPRESSED IN LUNG, SIGNAL = 3.2; EXPRESSED IN HELA, SIGNAL =   3; EXPRESSED IN HEART, SIGNAL = 2.9; EXPRESSED IN HBL100, SIGNAL = 2.8; EXPRESSED IN FETAL LIVER, SIGNAL = 4.6; SWISSPROT HIT: Q99279, EVALUE 9.20e+00; NT HIT: AJ229042.1, EVALUE 3.00e-10; EST_HUMAN HIT: AA781159.1, EVALUE 9.00e-14
ggtattgccagaggaaattgacattgaagttggtgggctgggagaggaaaacccaccctttatgtgggtgggcaccatccaatcagctgccagcaaggctagagcagagcagacgcagaaggagaaggtgcaa

SEQ ID NO: 17144 - DNA, 133 bp, Homo sapiens; identical to SEQ ID NO: 17143
  MAP TO AP000282.1; EXPRESSED IN PLACENTA, SIGNAL = 1.8; EXPRESSED IN BT474, SIGNAL = 2.7; EXPRESSED IN BONE MARROW, SIGNAL = 2.4; EXPRESSED IN ADULT LIVER, SIGNAL = 2.2; EXPRESSED IN HELA, SIGNAL = 3.1; EXPRESSED IN LUNG, SIGNAL = 4.2; EXPRESSED IN FETAL LIVER, SIGNAL = 2.1; EXPRESSED IN HBL100, SIGNAL = 2.8; EXPRESSED IN HEART, SIGNAL = 2.8; EXPRESSED IN BRAIN, SIGNAL =   3; EST_HUMAN HIT: AA781159.1, EVALUE 9.00e-14; NT HIT: AJ229042.1, EVALUE 3.00e-10; SWISSPROT HIT: Q99279, EVALUE 9.20e+00

SEQ ID NO: 17145 - DNA, 203 bp, Homo sapiens
  MAP TO AP000300.1; EXPRESSED IN HBL100, SIGNAL = 1.2; EXPRESSED IN FETAL LIVER, SIGNAL = 1.8; EXPRESSED IN LUNG, SIGNAL = 1.7; EXPRESSED IN HELA, SIGNAL = 1.9; EXPRESSED IN ADULT LIVER, SIGNAL = 1.6; EXPRESSED IN HEART, SIGNAL = 1.2; EXPRESSED IN BT474, SIGNAL = 2.9; EXPRESSED IN PLACENTA, SIGNAL = 0.96; EXPRESSED IN BRAIN, SIGNAL = 2.6; EXPRESSED IN BONE MARROW, SIGNAL = 0.84; NT HIT: AF055066.1, EVALUE 4.00e-04; EST_HUMAN HIT: R17879.1, EVALUE 3.00e-58; SWISSPROT HIT: Q10977, EVALUE 5.50e-01
gactggggaactagaggtgcccggaaagggaagtcgggaagaagagactattcctgttggttcctccccagagatgggagatggtgaacaggcgtgtggagggcggaataatggtccccaaagatgtccacgccctcatcctcagagtccgtgaacctgggaatgtgctgcctgacgtacaaaagggactccgcagatgtgag

SEQ ID NO: 17146 - DNA, 301 bp, Homo sapiens
  MAP TO AP000311.1; EXPRESSED IN HEART, SIGNAL = 2.2; EXPRESSED IN HBL100, SIGNAL = 3.2; EXPRESSED IN FETAL LIVER, SIGNAL =   3; EXPRESSED IN BRAIN, SIGNAL = 2.6; EXPRESSED IN PLACENTA, SIGNAL = 2.3; EXPRESSED IN BT474, SIGNAL = 2.2; EXPRESSED IN BONE MARROW, SIGNAL = 3.4; EXPRESSED IN HELA, SIGNAL = 3.7; EXPRESSED IN ADULT LIVER, SIGNAL =   3; EXPRESSED IN LUNG, SIGNAL = 2.2; SWISSPROT HIT: O35601, EVALUE 3.50e-01; NT HIT: AF114487.1, EVALUE 1.00e-122; EST_HUMAN HIT: BE542917.1, EVALUE 4.00e-62
taacgtttgaagataagaagcgggagaactttgaacgtggcaacctggaactggagaaacgaaggcaagctctcctggaacagcagcgcaaggagcaggagcgcctggcccagctggagcgggcggagcaggagaggaaggagcgtgagcgccaggagcaagagcgcaaaagacaactggaactggagaagcaactggaaaagcagcgggagctagaacggcagagagaggaggagaggaggaaagaaattgagaggcgagaggtaagcaggcgagagtggagccacccggagttagtgtg

SEQ ID NO: 17147 - DNA, 142 bp, Homo sapiens
  MAP TO AP000330.1; EXPRESSED IN BONE MARROW, SIGNAL = 3.9; EXPRESSED IN FETAL LIVER, SIGNAL = 4.1; EXPRESSED IN ADULT LIVER, SIGNAL = 3.4; EXPRESSED IN PLACENTA, SIGNAL = 3.7; EXPRESSED IN BT474, SIGNAL = 3.2; EXPRESSED IN HBL100, SIGNAL = 4.2; EXPRESSED IN LUNG, SIGNAL = 5.2; EXPRESSED IN HELA, SIGNAL = 3.6; EXPRESSED IN BRAIN, SIGNAL =   5; EXPRESSED IN HEART, SIGNAL = 3.6; NT HIT: AB035520.1, EVALUE 4.00e-25; EST_HUMAN HIT: AW816405.1, EVALUE 1.00e-74; SWISSPROT HIT: Q9Y696, EVALUE 1.00e-15
taattacttaaatagccctctgcctgatgaaatagatgcctacagcaccgaggatgtcactgtttctggaaggaagtttctggatggggacgagctgacgctggctgactgcaacctcttacccaagctccatattattaag

SEQ ID NO: 17148 - DNA, 122 bp, Homo sapiens
  MAP TO AP000330.1; EXPRESSED IN PLACENTA, SIGNAL = 2.3; EXPRESSED IN LUNG, SIGNAL = 2.6; EXPRESSED IN HEART, SIGNAL = 2.1; EXPRESSED IN HBL100, SIGNAL = 1.8; EXPRESSED IN FETAL LIVER, SIGNAL = 1.9; EXPRESSED IN HELA, SIGNAL = 2.1; EXPRESSED IN BRAIN, SIGNAL = 2.6; EXPRESSED IN BT474, SIGNAL = 2.1; EXPRESSED IN BONE MARROW, SIGNAL = 2.4; EXPRESSED IN ADULT LIVER, SIGNAL = 2.3; NT HIT: AB035520.1, EVALUE 1.00e-24; EST_HUMAN HIT: AW816405.1, EVALUE 9.00e-63; SWISSPROT HIT: Q9XSA7, EVALUE 5.00e-14
aaatgactggcatctggagatacttgaataatgcttatgctagagatgagttcacaaatacgtgtccagctgatcaagagattgaacacgcatattcagatgttgcaaaaagaatgaaatga

SEQ ID NO: 17149 - DNA, 95 bp, Homo sapiens; identical to SEQ ID NO: 17113
  MAP TO AP000330.1; EXPRESSED IN HBL100, SIGNAL =  22; EXPRESSED IN ADULT LIVER, SIGNAL =  26; EXPRESSED IN BT474, SIGNAL =  17; EXPRESSED IN BONE MARROW, SIGNAL =  28; EXPRESSED IN HELA, SIGNAL =  21; EXPRESSED IN BRAIN, SIGNAL =  21; EXPRESSED IN HEART, SIGNAL =  20; EXPRESSED IN PLACENTA, SIGNAL =  25; EXPRESSED IN FETAL LIVER, SIGNAL =  27; EXPRESSED IN LUNG, SIGNAL =  33; NT HIT: X04044.1, EVALUE 7.90e-01

SEQ ID NO: 17150 - DNA, 152 bp, Homo sapiens
  MAP TO AP000341.1; EXPRESSED IN HELA, SIGNAL = 2.4; EXPRESSED IN ADULT LIVER, SIGNAL = 1.7; EXPRESSED IN BRAIN, SIGNAL = 2.3; EXPRESSED IN HEART, SIGNAL = 1.8; EXPRESSED IN PLACENTA, SIGNAL = 1.5; EXPRESSED IN BT474, SIGNAL = 1.4; EXPRESSED IN BONE MARROW, SIGNAL = 2.1; EXPRESSED IN HBL100, SIGNAL = 1.8; EXPRESSED IN FETAL LIVER, SIGNAL = 1.4; EXPRESSED IN LUNG, SIGNAL =   2; NT HIT: AL163303.2, EVALUE 1.00e-80; SWISSPROT HIT: O60241, EVALUE 4.00e+00
agggcagagcctgcccagtggagaggaatggactggatggcgccagctgggcctgcttctcgccctgcacttcagcttgtgcctcctttggccccaaaattataggtacagactacaaggaaataagagagagacagaacgggatccactca

SEQ ID NO: 17151 - DNA, 188 bp, Homo sapiens
  MAP TO AP000341.1; EXPRESSED IN PLACENTA, SIGNAL = 4.6; EXPRESSED IN BONE MARROW, SIGNAL = 5.2; EXPRESSED IN ADULT LIVER, SIGNAL = 3.2; EXPRESSED IN BRAIN, SIGNAL = 4.3; EXPRESSED IN BT474, SIGNAL = 5.2; EXPRESSED IN HBL100, SIGNAL = 4.6; EXPRESSED IN FETAL LIVER, SIGNAL = 4.4; EXPRESSED IN LUNG, SIGNAL = 4.9; EXPRESSED IN HELA, SIGNAL = 3.8; EXPRESSED IN HEART, SIGNAL = 3.2; NT HIT: AL163303.2, EVALUE 1.00e-102; SWISSPROT HIT: O15499, EVALUE 2.20e-02
ctgcgtaaggctccagctcccctgctggcactggtgaagcaagcagccattttggggctgccctagaatggccgcggcgactctctgcctctggaggtggactgcaggcacctctccgagcgagcttgggagccccagctgacaaccagccaacacctgaagcgctcactcctgcagctgcaaggaaa

SEQ ID NO: 17152 - DNA, 176 bp, Homo sapiens
  MAP TO D83253.1; EXPRESSED IN PLACENTA, SIGNAL = 3.2; EXPRESSED IN FETAL LIVER, SIGNAL = 2.1; EXPRESSED IN LUNG, SIGNAL = 2.8; EXPRESSED IN BT474, SIGNAL = 2.5; EXPRESSED IN HEART, SIGNAL = 3.7; EXPRESSED IN BRAIN, SIGNAL = 4.4; EXPRESSED IN ADULT LIVER, SIGNAL =   3; EXPRESSED IN HELA, SIGNAL = 2.9; EXPRESSED IN HBL100, SIGNAL = 1.9; EXPRESSED IN BONE MARROW, SIGNAL = 2.6; NT HIT: gi11526252, EVALUE 3.00e-76; EST_HUMAN HIT: AW804984.1, EVALUE 4.00e-70; SWISSPROT HIT: P53804, EVALUE 2.00e-24
atggacaattttgctgagggagatttcactgtggcggattatgccttgttagaagattgccctcacgtggatgattgtgtctttgctgctgaatttatgagcaatgattatgttcgtgtgactcagctttactgtgatggggtggtaagtaggtttgctaatttttcatttttgac

SEQ ID NO: 17153 - DNA, 248 bp, Homo sapiens
  MAP TO D83253.1; EXPRESSED IN PLACENTA, SIGNAL = 1.9; EXPRESSED IN BT474, SIGNAL = 2.3; EXPRESSED IN BONE MARROW, SIGNAL = 2.5; EXPRESSED IN HBL100, SIGNAL = 1.8; EXPRESSED IN HEART, SIGNAL = 2.4; EXPRESSED IN FETAL LIVER, SIGNAL = 2.1; EXPRESSED IN LUNG, SIGNAL = 2.7; EXPRESSED IN HELA, SIGNAL = 2.4; EXPRESSED IN ADULT LIVER, SIGNAL = 2.8; EXPRESSED IN BRAIN, SIGNAL = 3.1; EST_HUMAN HIT: T05087.1, EVALUE 1.00e-100; NT HIT: gi11526252, EVALUE 4.00e-88; SWISSPROT HIT: P53804, EVALUE 8.00e-28
ggtcattatcgttattgtgatgctctttctatgctgggggaatatgactgggccctgcaagcaaacataaaagctcaaaaactctgtaaaaatgaccctgagggaatcaaggatctaattcagcagcatgtaaagttacaaaaacaaatagaagacctacaaggtatttcacctaagattcttttggttacagtcttaattccctttcaaactttggagggtgggtttcttggattaacagaggacca

SEQ ID NO: 17154 - DNA, 636 bp, Homo sapiens
  MAP TO AB016897.1; EXPRESSED IN PLACENTA, SIGNAL = 4.4; EXPRESSED IN FETAL LIVER, SIGNAL = 5.4; EXPRESSED IN BT474, SIGNAL = 5.9; EXPRESSED IN HEART, SIGNAL = 3.7; EXPRESSED IN BRAIN, SIGNAL = 2.7; EXPRESSED IN ADULT LIVER, SIGNAL = 3.4; EXPRESSED IN HELA, SIGNAL = 1.9; EXPRESSED IN LUNG, SIGNAL = 6.2; EXPRESSED IN HBL100, SIGNAL = 2.3; EXPRESSED IN BONE MARROW, SIGNAL = 0.86; NT HIT: gi11419159, EVALUE 0.00e+00; EST_HUMAN HIT: AI418780.1, EVALUE 0.00e+00; SWISSPROT HIT: P55196, EVALUE 6.00e-95
ggctgccgtctgcgcaggtggctgctgctgaacggagaaagagagaagaacatcagcgttggtatgagaaggagaaggcccgcctggaggaggagcgggagaggaagcggagagagcaggagaggaagttgggccagatgcgcactcagtccttaaaccctgctccgttttctcccctgactgcacagcagatgaagcccgaaaagccttccacactccagcggccacaggaaacagtcattcgggagctgcagcctcagcagcagccccgcacgatcgagcgcagagacttgcagtacattacagtcagcaaagaggagctttcctcgggggacagtctgtcccccgacccgtggaagcgggacgccaaggagaagctggagaagcagcagcagatgcacatcgtggacatgctgagcaaggagatccaggagctccagagcaaaccggaccgcagcgccgaggagagcgaccggctgcgcaagctcatgctggagtggcagttccagaagagactccaggagtcgaagcagaaggacgaagatgacgaggaggaggaggacgatgatgtggacaccatgctgatcatgcagcgcctggaggctgaacgaagagcgagggtaaaggggggagtgc

SEQ ID NO: 17155 - DNA, 349 bp, Homo sapiens
  MAP TO Z98946.15; EXPRESSED IN PLACENTA, SIGNAL = 0.74; EXPRESSED IN BONE MARROW, SIGNAL = 2.5; EXPRESSED IN LUNG, SIGNAL = 2.1; EXPRESSED IN HELA, SIGNAL = 1.1; EXPRESSED IN HEART, SIGNAL = 0.86; EXPRESSED IN HBL100, SIGNAL = 1.6; EXPRESSED IN FETAL LIVER, SIGNAL = 1.1; EXPRESSED IN ADULT LIVER, SIGNAL = 0.71; EST_HUMAN HIT: BE907487.1, EVALUE 0.00e+00; NT HIT: gi4505256, EVALUE 0.00e+00; SWISSPROT HIT: P26041, EVALUE 7.00e-48
ctctgcgggagcaacttgtctccggccaggtagccagacttatgcacttccttattgaagtcgccatacttagactggacagcatacgaggccagcagcacagcggtctcaggcgggcagtaaatatcatcattgagaatgccctctttcacttgcagaaagaacaggcgctgagtgatgtcctgaatcaattcctcggacacatcctcagggtagaacttggcacggaacttaaagagcagggggctttccttccgcacatcctgggcagtcacctgggaagagtaagggttatggactctcaaaaaataggttttaagggtaatggagtggctgtagggtggggaga

SEQ ID NO: 17156 - DNA, 123 bp, Homo sapiens
  MAP TO Z98742.5; EXPRESSED IN BONE MARROW, SIGNAL = 1.3; EXPRESSED IN ADULT LIVER, SIGNAL =   1; EXPRESSED IN PLACENTA, SIGNAL = 1.7; EXPRESSED IN BT474, SIGNAL = 2.1; EXPRESSED IN HBL100, SIGNAL = 1.4; EXPRESSED IN FETAL LIVER, SIGNAL = 1.8; EXPRESSED IN LUNG, SIGNAL = 1.9; EXPRESSED IN HELA, SIGNAL = 1.4; EXPRESSED IN BRAIN, SIGNAL = 1.4; EXPRESSED IN HEART, SIGNAL = 1.4; NT HIT: M29482.1, EVALUE 6.90e-02; EST_HUMAN HIT: AW771104.1, EVALUE 1.80e-02; SWISSPROT HIT: P25391, EVALUE 4.00e+00
tgtggatgagggagacaaggagaataatttcattcattcattcactcaaaaatcatatttgcacgtcaagtaccaatcattgcgctaagtgcttaggaaacaatgacacaatgtccttgcctt

SEQ ID NO: 17157 - DNA, 113 bp, Homo sapiens
  MAP TO Z98051.6; EXPRESSED IN ADULT LIVER, SIGNAL = 4.3; EXPRESSED IN HEART, SIGNAL = 2.9; EXPRESSED IN BONE MARROW, SIGNAL = 6.1; EXPRESSED IN BRAIN, SIGNAL = 1.1; EXPRESSED IN PLACENTA, SIGNAL = 3.2; EXPRESSED IN BT474, SIGNAL = 7.1; EXPRESSED IN FETAL LIVER, SIGNAL = 8.8; EXPRESSED IN LUNG, SIGNAL = 4.1; EXPRESSED IN HELA, SIGNAL = 7.3; EXPRESSED IN HBL100, SIGNAL =  12; NT HIT: AL163283.2, EVALUE 9.00e-04; EST_HUMAN HIT: AA403255.1, EVALUE 1.00e-04
atggacccaggtgtggctcatgtctcagctcaggaaggtacaagtcgtaaaccttggtggcatccacatggtgataattctgcaggcccgcataaagtaagagctgtggaggc

SEQ ID NO: 17158 - DNA, 262 bp, Homo sapiens
  MAP TO Z93930.10; EXPRESSED IN BT474, SIGNAL =  43; EXPRESSED IN HBL100, SIGNAL =  11; EXPRESSED IN FETAL LIVER, SIGNAL =  20; EXPRESSED IN LUNG, SIGNAL = 8.8; EXPRESSED IN HEART, SIGNAL = 3.8; EXPRESSED IN PLACENTA, SIGNAL = 4.6; EXPRESSED IN BONE MARROW, SIGNAL = 3.1; EXPRESSED IN BRAIN, SIGNAL = 1.7; EXPRESSED IN HELA, SIGNAL =  22; EXPRESSED IN ADULT LIVER, SIGNAL =  25; SWISSPROT HIT: P17861, EVALUE 3.00e-35
ccacattagcttggctctctgtctcagagggtatctctaagactaggggcttggtatatatgtggtcaaaacgaattagttcattaatggcttccagcttggctgatgacgtccccactgacagagaaagggaggctggtaaggaactgggtccttctgggtagacctctgggagctcctccaggctggcaggctctggggaagggcatttgaagaacatgactgggtccaagttgtccagaatgcccaacaggatatcaga

SEQ ID NO: 17159 - DNA, 159 bp, Homo sapiens
  MAP TO Z86090.10; EXPRESSED IN LUNG, SIGNAL =  26; EXPRESSED IN ADULT LIVER, SIGNAL =  23; EXPRESSED IN BRAIN, SIGNAL =  17; EXPRESSED IN HEART, SIGNAL = 8.4; EXPRESSED IN PLACENTA, SIGNAL =  16; EXPRESSED IN BONE MARROW, SIGNAL =  23; EXPRESSED IN HBL100, SIGNAL =  65; EXPRESSED IN HELA, SIGNAL =  50; EXPRESSED IN BT474, SIGNAL =  40; EXPRESSED IN FETAL LIVER, SIGNAL =  33; EST_HUMAN HIT: AW316976.1, EVALUE 7.00e-18; SWISSPROT HIT: P36578, EVALUE 3.00e-04; NT HIT: D23660.1, EVALUE 2.00e-15
ggcctctagtgctgctggtgctgctggtgctgctggtgctggtgctggtgctgctgctgctgctgccaccgccgccgctgccttatccacctggagtttgtggttgctggcctggcaaagcctggtgttgcagagcatggtctttgcatatgggtttag

SEQ ID NO: 17160 - DNA, 535 bp, Homo sapiens
  MAP TO Z86090.10; EXPRESSED IN PLACENTA, SIGNAL =  32; EXPRESSED IN BRAIN, SIGNAL = 1e+02; EXPRESSED IN BT474, SIGNAL = 3.3e+02; EXPRESSED IN BONE MARROW, SIGNAL =  56; EXPRESSED IN HBL100, SIGNAL = 2.2e+02; EXPRESSED IN FETAL LIVER, SIGNAL = 1.2e+02; EXPRESSED IN LUNG, SIGNAL =  26; EXPRESSED IN HELA, SIGNAL = 1.1e+02; EXPRESSED IN ADULT LIVER, SIGNAL =  90; EXPRESSED IN HEART, SIGNAL = 1.2e+02; EST_HUMAN HIT: BF337211.1, EVALUE 5.00e-66; NT HIT: AF261085.1, EVALUE 7.00e-64; SWISSPROT HIT: P04406, EVALUE 1.00e-69
tccttggaggccatgtggaccatgaggttcaccaccctgtcataccaggaaatgagcttgacaaagtcattgttgagggcaatgccagccccagcattgaagatggaagaatgggtgtcactgtcaaagtcagaggagacgaccttgtgctcagtacagcccaggatgcccttgaggatctccctcaatgcctgcttcaccatcctcttgatgtcactgtatttggcaggtttctccagatggcaggtcaggtccatgaccaacatgttggtggtggggacgtggaaggccacgccagtgagcttcccattcagctcggggatgactttgcccacaggcttggcaggaatgatgttctagagagccctgcagccatcacactacaatttcccagaggtaccatcagtagtcttctaggtggcactgaaggcatgaactgtggtcatgagtccttccatggtgccaaagttgtcatggatgaccttggccaggggggttaagcaactggtggtgcaggaggcattgctgataatct

SEQ ID NO: 17161 - DNA, 1580 bp, Homo sapiens
  MAP TO Z84476.6; EXPRESSED IN HEART, SIGNAL = 0.8; EXPRESSED IN LUNG, SIGNAL = 1.6; EXPRESSED IN HELA, SIGNAL = 1.9; EXPRESSED IN ADULT LIVER, SIGNAL = 1.2; EXPRESSED IN BRAIN, SIGNAL = 1.4; EXPRESSED IN PLACENTA, SIGNAL = 0.96; EXPRESSED IN BT474, SIGNAL = 2.6; EXPRESSED IN BONE MARROW, SIGNAL = 1.2; EXPRESSED IN HBL100, SIGNAL = 2.3; EXPRESSED IN FETAL LIVER, SIGNAL = 1.5; SWISSPROT HIT: Q14585, EVALUE 0.00e+00; EST_HUMAN HIT: BF508689.1, EVALUE 0.00e+00; NT HIT: U71600.1, EVALUE 0.00e+00
ctgacaagatgtggcctgagaatgaaaaggcaagttcacaacaagagatttttgaaaatggagaagcctactggatgaaatttaacagtctcctaaaagttgattcccgggatcctaaggttagagaagtttgtgttcaggatgtcaaattagagaatcaatgggaaacatctataagggagaaactgagagaagagaaagaaggctctgaggaagtgacctgcaaaaaaggaaagaaccagaaagtgcttagtaaaaacttgaatccaaactcaaaacatagtcaatgtaataaagttcttatagcacagaaactccatgaatgtgccaggtgtggcaaaaacttcagttggcactcagatctaattctccatgagcaaattcattctggtgagaaaccccatgtgtgtaatgagtgtgggaaagcattcaagaccagaaatcagctttctatgcaccggataatccacacaggggagaaaccttttaattgcacccagtgtgggaaggctttcaacagtagatcagctctttgccgacataaaaaaacccacagtggggagaagcctcacgagtgcagggactgtgggaaggccttcaagaccaggaaccgtctctgtatgcatcagcttatccacaccggggagaagccttacaaatgtaactgctgtgggaaggccttccagtttaagcattcccttaccatccatggcagaatccacactggggagaagccatatgaatgtgaggagtgcgggaaggccttcagtgggagttcagacctcaccaaacacataagaatccacactggggaacgaccttatgagtgcagcaagtgtggaagggccttcagtcggagctcagacctaagcaaacacaaacgaatccatactcgggagaaacactatgggtgtccccagtgtggaaaagacttcagcatcaaggcagaactcaccaaacacagaaggatccacactgaagagaaacgttacaggtgtgaggagtgtgggaaagcctttcgtcataactgtaagcgcagggctcatgaacgagagcatacaggggagaagccctatcaatgcagggattgtgggaaaaccttccaagataagcactgccttaccatccatcagagaatccacactggagagaaaccttacaaatgtttagagtgtgggaaagctttcagtgggaagtcaaacttgaccaatcatcgaagaattcacactggagagaagcctcacaaatgtgaggtatgtggaatggccttccatcatagttcagtcctgaggcagcacaaaagaatccacactggtgagaagccatacacctgcagtgagtgtggcacgtccttccgtcagggctcagctctgattggacataagcgagttcatactggggagaaaccttatgaatgtgaggaatgtggaaaagcttttagagtgagctcaaatcttactggacataagaaaagaaaacatcaagtatggagtacccatgaacttgatgggagtaggaaatccctctctccagtgactgtttctcagacctcagtagtcagtattttgaccagtgcctga

SEQ ID NO: 17162 - DNA, 102 bp, Homo sapiens
  MAP TO AP000337.1; EXPRESSED IN ADULT LIVER, SIGNAL = 5.6; EXPRESSED IN BONE MARROW, SIGNAL = 6.1; EXPRESSED IN HBL100, SIGNAL = 5.3; EXPRESSED IN BRAIN, SIGNAL = 6.9; EXPRESSED IN HEART, SIGNAL =   6; EXPRESSED IN PLACENTA, SIGNAL = 5.6; EXPRESSED IN BT474, SIGNAL =   5; EXPRESSED IN LUNG, SIGNAL = 6.5; EXPRESSED IN HELA, SIGNAL = 7.2; EXPRESSED IN FETAL LIVER, SIGNAL = 5.4; EST_HUMAN HIT: BF383019.1, EVALUE 3.20e-01; SWISSPROT HIT: Q43909, EVALUE 4.10e+00; NT HIT: AF206618.1, EVALUE 8.60e-01
cgtaatgtgtcttgagggcatctgtgaccaggggaccactgcccagagagtggaggtcctggtgagggagtgtggagagcagcagcgtgaccttgatctgcc

SEQ ID NO: 17163 - DNA, 116 bp, Homo sapiens
  MAP TO AP000326.1; EXPRESSED IN PLACENTA, SIGNAL = 2.7; EXPRESSED IN BT474, SIGNAL = 2.5; EXPRESSED IN BONE MARROW, SIGNAL = 3.4; EXPRESSED IN BRAIN, SIGNAL =   3; EXPRESSED IN ADULT LIVER, SIGNAL =   3; EXPRESSED IN HBL100, SIGNAL = 2.5; EXPRESSED IN FETAL LIVER, SIGNAL = 3.4; EXPRESSED IN LUNG, SIGNAL = 4.1; EXPRESSED IN HELA, SIGNAL = 4.5; EXPRESSED IN HEART, SIGNAL = 2.8; EST_HUMAN HIT: AA513569.1, EVALUE 3.00e-14; NT HIT: M17262.1, EVALUE 4.00e-09; SWISSPROT HIT: P39188, EVALUE 3.00e-06
tcatgtctgtaatttcagcactgtgggaggccaaggcaggaagattgcttgagcccaggaggtcagcactgtagtgagctgtggttgtgccactacactccagcctggcgacagag

SEQ ID NO: 17164 - DNA, 86 bp, Homo sapiens
  MAP TO AP000317.1; EXPRESSED IN LUNG, SIGNAL =   4; EXPRESSED IN BRAIN, SIGNAL = 3.5; EXPRESSED IN HEART, SIGNAL = 1.7; EXPRESSED IN PLACENTA, SIGNAL = 4.4; EXPRESSED IN HBL100, SIGNAL =   4; EXPRESSED IN HELA, SIGNAL = 4.9; EXPRESSED IN ADULT LIVER, SIGNAL = 2.7; EXPRESSED IN BT474, SIGNAL = 3.3; EXPRESSED IN BONE MARROW, SIGNAL = 4.7; EXPRESSED IN FETAL LIVER, SIGNAL = 3.8; NT HIT: AB026898.1, EVALUE 7.00e-01; EST_HUMAN HIT: AA059299.1, EVALUE 1.20e-02
ctccaggccacttgggatgtcctgctctccatagaaatatactaacattatacattctcaatatgcaaatggccaatatgcacatg

SEQ ID NO: 17165 - DNA, 258 bp, Homo sapiens
  MAP TO AP000266.1; EXPRESSED IN PLACENTA, SIGNAL = 2.7; EXPRESSED IN BT474, SIGNAL = 2.9; EXPRESSED IN BONE MARROW, SIGNAL = 2.5; EXPRESSED IN FETAL LIVER, SIGNAL = 2.6; EXPRESSED IN HELA, SIGNAL = 2.5; EXPRESSED IN ADULT LIVER, SIGNAL = 2.5; EXPRESSED IN HEART, SIGNAL = 2.1; EXPRESSED IN LUNG, SIGNAL = 2.1; EXPRESSED IN HBL100, SIGNAL = 2.6; EXPRESSED IN BRAIN, SIGNAL = 2.4; SWISSPROT HIT: O60287, EVALUE 7.00e-40; NT HIT: gi11526184, EVALUE 0.00e+00; EST_HUMAN HIT: AW956935.1, EVALUE 0.00e+00
tcatgagctcccgggcttgggccttctcaatggctgctctcaggtcttcctggagcttgaggtctctttcaatgaggctccacttgtgcaagaggacaaggacgtccttggtggaaagcactgtctcatttacggtgaatctgttcatgtccctaaaggcctgtatgacagtggcccggtacctcagcacggagtcaagtgtcccgaagaagttggtcagctggacgggggccaaggtgggcctgtttgggagtcaat

SEQ ID NO: 17166 - DNA, 223 bp, Homo sapiens
  MAP TO AP000247.1; EXPRESSED IN BT474, SIGNAL =   2; EXPRESSED IN LUNG, SIGNAL = 1.8; EXPRESSED IN ADULT LIVER, SIGNAL =   2; EXPRESSED IN PLACENTA, SIGNAL = 2.6; EXPRESSED IN BONE MARROW, SIGNAL = 2.1; EXPRESSED IN HBL100, SIGNAL = 1.7; EXPRESSED IN FETAL LIVER, SIGNAL = 1.6; EXPRESSED IN HELA, SIGNAL = 1.2; EXPRESSED IN BRAIN, SIGNAL = 2.1; EXPRESSED IN HEART, SIGNAL = 1.5; NT HIT: gi11526176, EVALUE 1.00e-122; EST_HUMAN HIT: AA326765.1, EVALUE 3.00e-55; SWISSPROT HIT: Q13009, EVALUE 3.00e-35
gggttgctggtgagaaaggcgagggggctctcgccaaggtcggcagggccgtccactcggtggggcgggctttccagcagctccactccttcctccagctcggggtaggtcctcaccaggaggcccagcgagggctgtgagaggaaatctttgagcatagaagagttcagggcgtcagcagcacgattattgatctcaagaatctcatctcctgctttcaggc

SEQ ID NO: 17167 - DNA, 972 bp, Homo sapiens
  MAP TO AP000247.1; EXPRESSED IN FETAL LIVER, SIGNAL = 0.74; EXPRESSED IN LUNG, SIGNAL = 0.91; EXPRESSED IN PLACENTA, SIGNAL =   1; EXPRESSED IN BT474, SIGNAL = 1.1; EXPRESSED IN BONE MARROW, SIGNAL = 0.87; EXPRESSED IN HBL100, SIGNAL = 1.1; EXPRESSED IN ADULT LIVER, SIGNAL = 0.88; EXPRESSED IN BRAIN, SIGNAL = 2.3; EXPRESSED IN HEART, SIGNAL = 0.89; EXPRESSED IN HELA, SIGNAL = 0.8; SWISSPROT HIT: Q13009, EVALUE 0.00e+00; NT HIT: gi11526176, EVALUE 0.00e+00; EST_HUMAN HIT: R14902.1, EVALUE 1.00e-100
tgttgctatggctaatttgtgggttggtggcaccttcagagagacagtgagatttcctacagggaagtgtgttataattactgtacggaggagtctcttcagcagcagctggtggcatcttatggtttgcaagattgggaatatcagacaccaaattccgacagtagcctgcaaatttgctccccggccccccgtttgctgtcactccagagtttttctgagcatacaagtcacccaaggaattggctctctgacaggtgctgagctgccgcggactcgcccgcgtttccatcccccgagcctcctcgcagtccttctcttcggcggaacccaagatttcttcgttgcttgttaaatgttcttggctcagatcagagagtgagaattccaggctgtcctcccgccagatgtctgcagatttggagcgtttcttcttaaagctcgccgtctccatgaaagtgggcccattggatgtataggaatgctgcctcctgcctccctcagccaaatatgtagcgtcatccccgtaaagcctgctctcctcagtgtctggcatgctctgcacagaggctgctgtgaggacgatgctgctgtctacgctgggagtgacagaagagtcagtgtaagacacaggtctcaagcccatgtccactcggtccacccagatggggctcccgaagtcttctagggtaccatcttgggagaagggctccaggccattttcagccagggactgggggatgctgggggtgctgctggatcgggtgctcacttcggagttcctgtggatcaccttccccgaggaagcgtgcctggtcctccgcgtcttgtgcgagaggcgcagggagcgggaagtgtgcttgcgccccaggctggcatgcttttctccataaaactcgtgctctacatgttgactttctgcgtttcccatggttttatggtctgcagcaaagcggggggaaaggggagaat

SEQ ID NO: 17168 - DNA, 115 bp, Homo sapiens
  MAP TO AP000246.1; EXPRESSED IN HBL100, SIGNAL =   1; EXPRESSED IN LUNG, SIGNAL = 1.8; EXPRESSED IN BRAIN, SIGNAL = 2.2; EXPRESSED IN PLACENTA, SIGNAL = 1.9; EXPRESSED IN BT474, SIGNAL = 1.2; EXPRESSED IN BONE MARROW, SIGNAL =   2; EXPRESSED IN FETAL LIVER, SIGNAL =   2; EXPRESSED IN HELA, SIGNAL = 2.2; EXPRESSED IN ADULT LIVER, SIGNAL = 1.3; EXPRESSED IN HEART, SIGNAL = 1.5; EST_HUMAN HIT: BE158633.1, EVALUE 3.70e-01; SWISSPROT HIT: P08548, EVALUE 5.30e-02
tttgtagttttcactatagagatctttcacttggtcgattaaatttattcctagggctttgtttttgcttcggtagctagtataaatgggattgctttccttttcagattgttct

SEQ ID NO: 17169 - DNA, 281 bp, Homo sapiens
  MAP TO AP000226.1; EXPRESSED IN FETAL LIVER, SIGNAL = 1.3; EXPRESSED IN LUNG, SIGNAL = 1.6; EXPRESSED IN HELA, SIGNAL = 1.9; EXPRESSED IN ADULT LIVER, SIGNAL = 1.3; EXPRESSED IN BT474, SIGNAL = 1.8; EXPRESSED IN PLACENTA, SIGNAL = 1.6; EXPRESSED IN HEART, SIGNAL = 1.4; EXPRESSED IN BRAIN, SIGNAL = 0.94; EXPRESSED IN HBL100, SIGNAL = 1.4; EXPRESSED IN BONE MARROW, SIGNAL = 0.9; SWISSPROT HIT: Q06546, EVALUE 5.00e-42; EST_HUMAN HIT: AU140126.1, EVALUE 1.00e-111; NT HIT: D13318.1, EVALUE 0.00e+00
catagggtatcccaaggcgttcttgttctttcctatagccttccagtgcagcagcccatcttgtcacttgttctgaagtttcatctgaaatggttgtgatgtgttttgtgccatcaagagttatcacttgagcttcttcaacaagatgtgcttctgattcagcatggtgggcatctggatcaataacaacctcaacagtgtccgcaggtttaacaatttcaaggatgtttaactttggttcaattcctgaacagtggataaaaaaaaattgtaaatctaaa

SEQ ID NO: 17170 - DNA, 298 bp, Homo sapiens
  MAP TO AP000216.1; EXPRESSED IN BT474, SIGNAL = 2.7; EXPRESSED IN HBL100, SIGNAL = 2.2; EXPRESSED IN BRAIN, SIGNAL = 4.1; EXPRESSED IN PLACENTA, SIGNAL =   2; EXPRESSED IN HEART, SIGNAL = 1.4; EXPRESSED IN ADULT LIVER, SIGNAL = 1.4; EXPRESSED IN HELA, SIGNAL = 1.2; EXPRESSED IN LUNG, SIGNAL = 1.5; EXPRESSED IN FETAL LIVER, SIGNAL = 1.9; EXPRESSED IN BONE MARROW, SIGNAL = 1.9; NT HIT: D80006.1, EVALUE 0.00e+00; SWISSPROT HIT: Q14689, EVALUE 2.00e-18; EST_HUMAN HIT: BF346610.1, EVALUE 0.00e+00
tgccgtattcacctggaccaacctgctggtggtggtggtggagctggatgggctagagcaggatgccctggacctggtggccctggtgaccaacgtggtgctggaggagcactacctggtcgtgggagtggtggtcatcgtggacccaggggtgatccctatcaactctcggggtgagaagcagcgcatgcacctgcgggacggcttcctggctgaccagctggaccccatctatgtcgcctacaacatgtgagcgcagcacaccggcccaggtgccggagatgaatgagccccagca

SEQ ID NO: 17171 - DNA, 132 bp, Homo sapiens
  MAP TO AP000216.1; EXPRESSED IN PLACENTA, SIGNAL = 0.81; EXPRESSED IN BT474, SIGNAL = 0.96; EXPRESSED IN LUNG, SIGNAL = 0.8; EXPRESSED IN HELA, SIGNAL =   1; EXPRESSED IN BRAIN, SIGNAL =   1; EXPRESSED IN HBL100, SIGNAL = 0.75; EXPRESSED IN FETAL LIVER, SIGNAL = 0.71; EXPRESSED IN ADULT LIVER, SIGNAL = 0.83; EXPRESSED IN BONE MARROW, SIGNAL = 1.4; EXPRESSED IN HEART, SIGNAL = 1.6; NT HIT: Z35865.1, EVALUE 1.60e-02; EST_HUMAN HIT: AL040229.1, EVALUE 1.00e-25; SWISSPROT HIT: Q9Y2E4, EVALUE 2.70e-01
cccccaaaggactggcaccctctggcccaggacacagggactgggactgcctacattgaggtaatgactgttcctaacttagagaatgtaaaaacatgtcccacaggcttaagtcttgcttttcataagaat

SEQ ID NO: 17172 - DNA, 156 bp, Homo sapiens
  MAP TO AP000207.1; EXPRESSED IN BT474, SIGNAL = 5.2; EXPRESSED IN LUNG, SIGNAL = 2.1; EXPRESSED IN BRAIN, SIGNAL =   2; EXPRESSED IN PLACENTA, SIGNAL =   2; EXPRESSED IN HBL100, SIGNAL = 2.4; EXPRESSED IN FETAL LIVER, SIGNAL =   2; EXPRESSED IN HELA, SIGNAL = 1.8; EXPRESSED IN ADULT LIVER, SIGNAL = 1.7; EXPRESSED IN BONE MARROW, SIGNAL = 1.2; EXPRESSED IN HEART, SIGNAL = 1.8; EST_HUMAN HIT: BE886203.1, EVALUE 4.00e-51; NT HIT: gi11433063, EVALUE 3.00e-51; SWISSPROT HIT: Q05086, EVALUE 3.00e-09
acatgcagcttttgccttttcattttcattcttctcttcatcctttgcttgaagagacttcagttcttccttggtgtgttgtttagctttccagaagctctctaccaatgcctcagcactagaaaaaactcttccaataacacagttaagggggaa

SEQ ID NO: 17173 - DNA, 116 bp, Homo sapiens
  MAP TO AP000196.1; EXPRESSED IN HBL100, SIGNAL =  14; EXPRESSED IN HELA, SIGNAL =  12; EXPRESSED IN BRAIN, SIGNAL =  14; EXPRESSED IN BT474, SIGNAL =  11; EXPRESSED IN BONE MARROW, SIGNAL =  17; EXPRESSED IN FETAL LIVER, SIGNAL =  14; EXPRESSED IN LUNG, SIGNAL =  14; EXPRESSED IN ADULT LIVER, SIGNAL = 8.8; EXPRESSED IN PLACENTA, SIGNAL =  12; EXPRESSED IN HEART, SIGNAL =  10; EST_HUMAN HIT: BF035327.1, EVALUE 4.00e-10; NT HIT: AF020503.1, EVALUE 6.00e-14
tggtctggatagaagctcaaaccagccgcaagagcctcttaagccaaagcctaatccacagcaaggtcatcaataacgaggcaaaaccctccaccagcaaaaagattacaacttgc

SEQ ID NO: 17174 - DNA, 203 bp, Homo sapiens
  MAP TO AP000187.1; EXPRESSED IN BONE MARROW, SIGNAL =   4; EXPRESSED IN FETAL LIVER, SIGNAL = 3.8; EXPRESSED IN LUNG, SIGNAL = 4.4; EXPRESSED IN HELA, SIGNAL = 4.1; EXPRESSED IN PLACENTA, SIGNAL = 3.3; EXPRESSED IN BT474, SIGNAL = 3.6; EXPRESSED IN HBL100, SIGNAL = 2.8; EXPRESSED IN HEART, SIGNAL = 3.2; EXPRESSED IN ADULT LIVER, SIGNAL = 5.4; EXPRESSED IN BRAIN, SIGNAL =   4; NT HIT: AF223391.1, EVALUE 2.00e-15; EST_HUMAN HIT: AW995965.1, EVALUE 9.00e-12; SWISSPROT HIT: Q46339, EVALUE 2.80e+00
atggacagagcagtgcatgaagacccacatcgtcaaattttactccaagaactaacacaggatcataccaggaaaaccaaaagaaaccacagaccctttgaaggcggtgaattgctgctgcaggctctgtgtcccctacaaaatgcatatggtgaaatcctagcccccaatgtgatgctattaggaggtggtgcctttggaag

SEQ ID NO: 17175 - DNA, 92 bp, Homo sapiens
  MAP TO AP000146.1; EXPRESSED IN BT474, SIGNAL =   3; EXPRESSED IN BONE MARROW, SIGNAL =   3; EXPRESSED IN LUNG, SIGNAL = 3.8; EXPRESSED IN ADULT LIVER, SIGNAL = 2.2; EXPRESSED IN BRAIN, SIGNAL = 2.7; EXPRESSED IN PLACENTA, SIGNAL = 4.2; EXPRESSED IN HBL100, SIGNAL = 2.5; EXPRESSED IN FETAL LIVER, SIGNAL = 3.6; EXPRESSED IN HELA, SIGNAL = 2.2; EXPRESSED IN HEART, SIGNAL = 2.6; NT HIT: AF275948.1, EVALUE 4.90e-02
tctccacaggtgattctgatacatagtgtgagttgatagtagtgatataatccatctcccaaataacagactttgggaaaaagaggttgcta

SEQ ID NO: 17176 - DNA, 99 bp, Homo sapiens
  MAP TO AP000146.1; EXPRESSED IN HBL100, SIGNAL = 1.5; EXPRESSED IN BRAIN, SIGNAL = 1.8; EXPRESSED IN BT474, SIGNAL = 1.1; EXPRESSED IN BONE MARROW, SIGNAL = 1.9; EXPRESSED IN FETAL LIVER, SIGNAL = 1.8; EXPRESSED IN HELA, SIGNAL = 1.4; EXPRESSED IN ADULT LIVER, SIGNAL = 1.6; EXPRESSED IN PLACENTA, SIGNAL = 1.9; EXPRESSED IN LUNG, SIGNAL = 1.6; EXPRESSED IN HEART, SIGNAL = 2.4; NT HIT: gi4502532, EVALUE 1.80e-01; EST_HUMAN HIT: AI689238.1, EVALUE 2.10e-01
cttgttctttattttcaaggttattttgactattgtgggtctcctgcctccactttatcgacaactttttcttttgtaagtggaaaactactgtagtat

SEQ ID NO: 17177 - DNA, 89 bp, Homo sapiens
  MAP TO AP000137.1; EXPRESSED IN HELA, SIGNAL = 2.7; EXPRESSED IN HEART, SIGNAL = 1.6; EXPRESSED IN BT474, SIGNAL =   2; EXPRESSED IN FETAL LIVER, SIGNAL = 1.7; EXPRESSED IN LUNG, SIGNAL = 2.2; EXPRESSED IN ADULT LIVER, SIGNAL = 1.8; EXPRESSED IN BRAIN, SIGNAL = 2.4; EXPRESSED IN PLACENTA, SIGNAL = 1.2; EXPRESSED IN BONE MARROW, SIGNAL = 1.7; EXPRESSED IN HBL100, SIGNAL = 2.6; NT HIT: AF011920.1, EVALUE 3.00e-03; EST_HUMAN HIT: T74242.1, EVALUE 1.80e-02
ctttgaattgttctcgctgctgctgctgctgctgcatctcttctgcctccagttggagaaagctctctgctttgaaggctttatgtaat

SEQ ID NO: 17178 - DNA, 211 bp, Homo sapiens
  MAP TO AP000136.1; EXPRESSED IN BT474, SIGNAL =  21; EXPRESSED IN BONE MARROW, SIGNAL = 9.2; EXPRESSED IN HBL100, SIGNAL =  16; EXPRESSED IN LUNG, SIGNAL = 4.1; EXPRESSED IN ADULT LIVER, SIGNAL = 7.8; EXPRESSED IN BRAIN, SIGNAL = 9.6; EXPRESSED IN HEART, SIGNAL =  13; EXPRESSED IN PLACENTA, SIGNAL = 6.8; EXPRESSED IN HELA, SIGNAL =  14; EXPRESSED IN FETAL LIVER, SIGNAL =  12; SWISSPROT HIT: P75566, EVALUE 1.30e+00; NT HIT: AJ238786.1, EVALUE 1.10e-01; EST_HUMAN HIT: AA398735.1, EVALUE 3.30e-02
acacatgcagtcttcttattttcggtcctataatcaatgaaccgtgaaacatttgttctttgtcgcttccctttttcactttttagaaaaggaatattatatctgtttctacataagaaagtcagtggaaatttgaagtaaacttctagatgactatccatagtatacatttttttaatatcaagaaaaccaaagcacatgtcaattttat

SEQ ID NO: 17179 - DNA, 114 bp, Homo sapiens
  MAP TO AP000117.1; EXPRESSED IN BONE MARROW, SIGNAL = 1.9; EXPRESSED IN HBL100, SIGNAL = 8.3; EXPRESSED IN LUNG, SIGNAL = 2.2; EXPRESSED IN ADULT LIVER, SIGNAL = 4.5; EXPRESSED IN BRAIN, SIGNAL = 4.5; EXPRESSED IN PLACENTA, SIGNAL = 1.7; EXPRESSED IN BT474, SIGNAL = 5.7; EXPRESSED IN FETAL LIVER, SIGNAL = 5.6; EXPRESSED IN HELA, SIGNAL = 4.5; EXPRESSED IN HEART, SIGNAL =  18; NT HIT: gi4502302, EVALUE 4.00e-58; SWISSPROT HIT: P48047, EVALUE 2.00e-14; EST_HUMAN HIT: N98935.1, EVALUE 7.00e-58
ttagacaatctcccgcatagccctgcccagcttctgaatcttggtcttgacagacatgtcaacatatttctcgccaatgcgcacaatcattccacccaagattgacggatcagt

SEQ ID NO: 17180 - DNA, 337 bp, Homo sapiens
  MAP TO AP000097.1; EXPRESSED IN PLACENTA, SIGNAL = 3.4; EXPRESSED IN HELA, SIGNAL = 2.7; EXPRESSED IN HEART, SIGNAL = 1.1; EXPRESSED IN LUNG, SIGNAL = 3.1; EXPRESSED IN BT474, SIGNAL = 4.4; EXPRESSED IN BONE MARROW, SIGNAL = 2.4; EXPRESSED IN HBL100, SIGNAL = 2.2; EXPRESSED IN FETAL LIVER, SIGNAL = 3.8; EXPRESSED IN ADULT LIVER, SIGNAL = 1.4; EXPRESSED IN BRAIN, SIGNAL = 1.1; EST_HUMAN HIT: AU134963.1, EVALUE 0.00e+00; NT HIT: gi6680763, EVALUE 1.00e-17; SWISSPROT HIT: O14867, EVALUE 3.00e-60
ctttcatttggctgaacagaagcatgaatgtctttgacactagattccccagtacggactctgtcagttccaaatgctttttggaattttctgtatttggggcataaagaaggcaaggccagagcagcatccttctctaagcacatggactcatatgtctgactggcactgtcttgtagaggaggtgaggcttttgcatttccttgatacctgcggagtttacactgaggagtctgaacatttttattttccagaaattcctccacttcatcagtttctagatccctctggtccaaaagtgaaagtttaaggtctgttttctgacagtgtgatgaaa

SEQ ID NO: 17181 - DNA, 158 bp, Homo sapiens
  MAP TO AP000097.1; EXPRESSED IN BT474, SIGNAL = 2.8; EXPRESSED IN HBL100, SIGNAL =   2; EXPRESSED IN HELA, SIGNAL = 2.2; EXPRESSED IN ADULT LIVER, SIGNAL = 1.8; EXPRESSED IN BRAIN, SIGNAL =   2; EXPRESSED IN PLACENTA, SIGNAL = 1.7; EXPRESSED IN BONE MARROW, SIGNAL = 2.2; EXPRESSED IN FETAL LIVER, SIGNAL = 2.2; EXPRESSED IN LUNG, SIGNAL = 1.5; EXPRESSED IN HEART, SIGNAL = 2.3; EST_HUMAN HIT: AA577847.1, EVALUE 1.00e-07; SWISSPROT HIT: P10272, EVALUE 5.00e-09; NT HIT: X57147.1, EVALUE 2.00e-55
ccacaaccagtggcatacctaagtaaggaaattgatgtagtagcgaaaggctggcctcactctttaagggtagttgtggcggtggccatcttagtgtcagaggctatcaaaataatacaaggaaaggatctcactgtctggactactcatgatgtaaa

SEQ ID NO: 17182 - DNA, 700 bp, Homo sapiens
  MAP TO AP000097.1; EXPRESSED IN PLACENTA, SIGNAL = 1.3; EXPRESSED IN BT474, SIGNAL = 2.1; EXPRESSED IN BONE MARROW, SIGNAL = 1.9; EXPRESSED IN HBL100, SIGNAL = 1.3; EXPRESSED IN FETAL LIVER, SIGNAL = 1.7; EXPRESSED IN LUNG, SIGNAL = 1.5; EXPRESSED IN HELA, SIGNAL = 1.3; EXPRESSED IN ADULT LIVER, SIGNAL = 0.74; EXPRESSED IN BRAIN, SIGNAL = 0.83; EXPRESSED IN HEART, SIGNAL = 0.98; NT HIT: gi6680763, EVALUE 5.00e-93; SWISSPROT HIT: O14867, EVALUE 1.00e-115; EST_HUMAN HIT: AU134963.1, EVALUE 1.00e-121
acattcttgttctctggctgaacaggattcactgtctccttcggtgtccgtctcagagtcgtctcccaagctaatgacacaagcatatgggcaaggttcttgctggggttctgaaacataatcatcgtttccaatttccaaattgcttgaacagccttcagtactcagagtacttataaaagggcagttgacagaacttaatgttgtgaaagtcctttgacctggttctgggctctcactaatcctgatacctaaccacggacactcagaccgtttctgtgagatctgttctgagccatctttggccacagcaggtgataactgcatttggcaaggagtgtccgtgctgcaaatgtcactccagaagccttttgctaggtgttctgccacttctcgctccacactactcctatcactagatgcaacactactatcttccctggtgcccaagtcggatttcaaaggtaaatcctgactttcaccaaatgttttttcttggacgtctgtacctgacaaaggcttttctgttaacactgttgtgttttgcataccagcaaaattcaagtcaccatattggtcatatgtgtgtaaaagagacaaagaataaagtccatgagggtctatggaagaattgtgggggaaaggagtcacttctgatttttcagttgggcactgagaagcaggatctttcttcgtttct

SEQ ID NO: 17183 - DNA, 184 bp, Homo sapiens
  MAP TO AP000087.1; EXPRESSED IN HBL100, SIGNAL = 1.2; EXPRESSED IN FETAL LIVER, SIGNAL = 1.2; EXPRESSED IN LUNG, SIGNAL = 1.2; EXPRESSED IN BRAIN, SIGNAL =   1; EXPRESSED IN PLACENTA, SIGNAL = 1.7; EXPRESSED IN HEART, SIGNAL =   1; EXPRESSED IN ADULT LIVER, SIGNAL = 0.94; EXPRESSED IN HELA, SIGNAL = 0.88; EXPRESSED IN BONE MARROW, SIGNAL =   1; EXPRESSED IN BT474, SIGNAL = 1.3; NT HIT: gi11526150, EVALUE 1.00e-99; SWISSPROT HIT: Q06546, EVALUE 5.00e-29; EST_HUMAN HIT: AI954742.1, EVALUE 2.00e-99
gagatttgtgtacaagtttgtctgtgacttgaagactcttattggatacagtgcagcggagttgaaccgtttggtcacagaatgtgaacagaagaaacttgcaaagatgcagctccatggaattgcccagccagtcacagcagtagctctggctactgcttctctgcaaacggaaaaggataat

SEQ ID NO: 17184 - DNA, 123 bp, Homo sapiens
  MAP TO AC007912.2; EXPRESSED IN HBL100, SIGNAL = 0.83; EXPRESSED IN LUNG, SIGNAL = 1.1; EXPRESSED IN ADULT LIVER, SIGNAL = 1.5; EXPRESSED IN BRAIN, SIGNAL = 1.1; EXPRESSED IN HEART, SIGNAL = 0.9; EXPRESSED IN PLACENTA, SIGNAL = 1.4; EXPRESSED IN BT474, SIGNAL = 0.87; EXPRESSED IN BONE MARROW, SIGNAL = 0.98; EXPRESSED IN FETAL LIVER, SIGNAL = 0.91; EXPRESSED IN HELA, SIGNAL =   1; SWISSPROT HIT: Q42716, EVALUE 3.00e+00; EST_HUMAN HIT: BF592783.1, EVALUE 4.00e-01; NT HIT: S75898.1, EVALUE 2.30e-01
actcaaagtcactacttttctccacgaagccctcttcttggagggacactgtctcctggagagttgccacacacctctctttctctggttctggtacaacccccaattctcctcctttcagct

SEQ ID NO: 17185 - DNA, 134 bp, Homo sapiens
  MAP TO AC007912.2; EXPRESSED IN PLACENTA, SIGNAL = 2.3; EXPRESSED IN BONE MARROW, SIGNAL = 2.8; EXPRESSED IN LUNG, SIGNAL =   3; EXPRESSED IN ADULT LIVER, SIGNAL = 2.7; EXPRESSED IN BRAIN, SIGNAL = 3.7; EXPRESSED IN BT474, SIGNAL = 2.4; EXPRESSED IN HBL100, SIGNAL = 2.3; EXPRESSED IN FETAL LIVER, SIGNAL = 2.5; EXPRESSED IN HELA, SIGNAL = 3.2; EXPRESSED IN HEART, SIGNAL =   4; NT HIT: gi11440643, EVALUE 1.00e-12; EST_HUMAN HIT: BF002470.1, EVALUE 2.00e-12; SWISSPROT HIT: P15730, EVALUE 8.90e+00
acaggaagagatctctctctgcatatgcactgaaaataggccacaagaagacggccatctgcaagccaggaagagagccctcaccagagactgaccctgcagacaccttgatcttggacttccagcctccagaa

SEQ ID NO: 17186 - DNA, 150 bp, Homo sapiens
  MAP TO AC007903.1; EXPRESSED IN BRAIN, SIGNAL = 2.4; EXPRESSED IN LUNG, SIGNAL = 1.9; EXPRESSED IN HELA, SIGNAL = 1.9; EXPRESSED IN ADULT LIVER, SIGNAL = 2.3; EXPRESSED IN PLACENTA, SIGNAL = 1.7; EXPRESSED IN BT474, SIGNAL = 1.7; EXPRESSED IN BONE MARROW, SIGNAL = 1.7; EXPRESSED IN HBL100, SIGNAL = 1.4; EXPRESSED IN HEART, SIGNAL = 1.9; EXPRESSED IN FETAL LIVER, SIGNAL = 1.6; NT HIT: AL163210.2, EVALUE 5.00e-37; EST_HUMAN HIT: BE156318.1, EVALUE 4.00e-41
ggagatgagaaacttgttgagaactggaataaaggtgactcttgttatgttttagcaaagagactggtgacatttttccactgccctagaaatctgtggaactttgaacttgagagcgatgatgttagggtatgtggtggaagaaatttc

SEQ ID NO: 17187 - DNA, 107 bp, Homo sapiens
  MAP TO AC007903.1; EXPRESSED IN ADULT LIVER, SIGNAL = 1.7; EXPRESSED IN PLACENTA, SIGNAL = 0.75; EXPRESSED IN FETAL LIVER, SIGNAL = 0.64; EXPRESSED IN LUNG, SIGNAL =   1; EXPRESSED IN BT474, SIGNAL = 0.64; EXPRESSED IN HEART, SIGNAL = 1.1; EST_HUMAN HIT: BF241482.1, EVALUE 4.00e-04; NT HIT: J05451.1, EVALUE 5.90e-02
aaaaggaagtgcctcagagggtgacgagaatgcagatggcgatgaagaggatggtgatgacgatgattaaatgtgaggtcccagtctcagggcttttacatgtatta

SEQ ID NO: 17188 - DNA, 346 bp, Homo sapiens
  MAP TO AC007842.1; EXPRESSED IN PLACENTA, SIGNAL = 1.3; EXPRESSED IN FETAL LIVER, SIGNAL = 2.4; EXPRESSED IN LUNG, SIGNAL = 1.6; EXPRESSED IN BT474, SIGNAL = 4.7; EXPRESSED IN HEART, SIGNAL = 3.4; EXPRESSED IN BRAIN, SIGNAL = 1.8; EXPRESSED IN ADULT LIVER, SIGNAL = 1.9; EXPRESSED IN HELA, SIGNAL = 2.8; EXPRESSED IN HBL100, SIGNAL = 3.1; EXPRESSED IN BONE MARROW, SIGNAL = 2.9; EST_HUMAN HIT: AW754180.1, EVALUE 0.00e+00; SWISSPROT HIT: P47245, EVALUE 1.40e+00; NT HIT: J03998.1, EVALUE 3.40e+00
cactgccctcatgatagctggatcttctagttcattttcaatcaccatcttactgagcctttctgccagattttcctcatggtcacccaacaagtccatttcttccctttctccattgcctgtttgttcattaactgccactggtagcttttcttccaattcagccaggcactcatgtgcttcctgccaatcatcatcaactgcacctgacccaaaaatatcatcattgaattgatcaatctcttcatcttcttctctcagtccctgaaattcatcttcatcttcatccagaagacaatcctcccaagactcatagtggaacattcttggggaggtgggggggagt

SEQ ID NO: 17189 - DNA, 205 bp, Homo sapiens
  MAP TO AC007842.1; EXPRESSED IN BRAIN, SIGNAL =   1; EXPRESSED IN HEART, SIGNAL = 1.5; EXPRESSED IN PLACENTA, SIGNAL = 1.2; EXPRESSED IN BONE MARROW, SIGNAL = 2.2; EXPRESSED IN HELA, SIGNAL = 2.8; EXPRESSED IN BT474, SIGNAL = 2.5; EXPRESSED IN ADULT LIVER, SIGNAL = 2.1; EXPRESSED IN LUNG, SIGNAL = 1.4; EXPRESSED IN FETAL LIVER, SIGNAL = 2.6; EXPRESSED IN HBL100, SIGNAL = 4.2; SWISSPROT HIT: Q63570, EVALUE 3.00e-13; NT HIT: AF020736.1, EVALUE 9.00e-49; EST_HUMAN HIT: BF219718.1, EVALUE 1.00e-48
gatgagatcccagcactgtccgtgtcccggccccagaccggcctgtccttcctgggccctgagcctgaggacctggaggacctgtacagccgctacaaggtacattcgacccccaacccagaccttgcacaggacctgacatctcatactcttccccactttccaccactctctggatcagcaagtctggagccatccccttctg

SEQ ID NO: 17190 - DNA, 327 bp, Homo sapiens
  MAP TO AC007842.1; EXPRESSED IN PLACENTA, SIGNAL = 2.2; EXPRESSED IN BT474, SIGNAL = 2.7; EXPRESSED IN BONE MARROW, SIGNAL = 1.3; EXPRESSED IN FETAL LIVER, SIGNAL =   2; EXPRESSED IN LUNG, SIGNAL = 2.3; EXPRESSED IN HELA, SIGNAL =  12; EXPRESSED IN ADULT LIVER, SIGNAL = 1.3; EXPRESSED IN BRAIN, SIGNAL = 1.6; EXPRESSED IN HBL100, SIGNAL = 1.1; EXPRESSED IN HEART, SIGNAL = 1.4; NT HIT: gi4503680, EVALUE 0.00e+00; EST_HUMAN HIT: AW863406.1, EVALUE 3.00e-68; SWISSPROT HIT: Q28983, EVALUE 1.00e-11
ccggactttgccgatctcgtccttgtggatggagatgttggtgccgagggcagccacggtgacgactctcacgtaggacacagcagggttgccccggttctggttcttggtggtgacggtgaagggtgtcaggccctgggtgctgacccccgggcagccagttgttgccagcacatagttacaggtgccctggaagtcaaacttccggccatcgaaggagtggtagtgtgggtcgccccacagccagcacgtggcctcatagttgggcaggcacacgccctggccaccctgctccttgcatgtctcctgtggccggcatgtcacgcc

SEQ ID NO: 17191 - DNA, 719 bp, Homo sapiens
  MAP TO AC007842.1; EXPRESSED IN BONE MARROW, SIGNAL = 2.2; EXPRESSED IN LUNG, SIGNAL = 2.9; EXPRESSED IN HELA, SIGNAL = 2.3; EXPRESSED IN PLACENTA, SIGNAL = 2.3; EXPRESSED IN BT474, SIGNAL = 2.2; EXPRESSED IN HBL100, SIGNAL =   2; EXPRESSED IN FETAL LIVER, SIGNAL = 2.2; EXPRESSED IN ADULT LIVER, SIGNAL = 2.2; EXPRESSED IN BRAIN, SIGNAL = 2.5; EXPRESSED IN HEART, SIGNAL =   2; NT HIT: gi4503680, EVALUE 0.00e+00; SWISSPROT HIT: Q04833, EVALUE 2.90e+00
ctgcctggagcccacgggagccagtgatacccccatggttgtaggtcagctttgtggcctggctggccacaacgaaggccaaatcatagcgagattgggaggccagcgtgggtactacatagtgggtgccccaggcagacgtgggtagcagctgctcaaccacatggttgcaggtcgtatgtttctgcgcacagctgtggccagagaggacagccacggggctactagctgtgacctttgaccccgagagatccactgagctctgtagctgggccacattgtagggctgtagagtcactcttaggacatcgcctgctggatagaacttgccattgaatgtcactgaccccttcagcgtgacactgaccgaggcacctgcggcaccggccaccacggcaaactccttgacattcctggctgaggtgccggggggtgtgagcacaaaatactcggtgcctagggcctggatgggccgcagcagtgtcagctccgctgtgtcaggcttggcatttagtgcctgcacagagatggcatagtcagaatggatcaccaccgcatgctggaagatcttgctgcctatcatctcagccttggcactgatgttgaccatgaccgactccccgggcctcactgtgaccttctttgaggtgttgtctgcctggctgaggatggagactgaagcggggctctctgacagactggagataaggaggcggggg

SEQ ID NO: 17192 - DNA, 556 bp, Homo sapiens
  MAP TO AC007842.1; EXPRESSED IN BONE MARROW, SIGNAL = 1.2; EXPRESSED IN FETAL LIVER, SIGNAL = 1.1; EXPRESSED IN HELA, SIGNAL = 1.2; EXPRESSED IN ADULT LIVER, SIGNAL = 1.4; EXPRESSED IN BRAIN, SIGNAL = 1.2; EXPRESSED IN PLACENTA, SIGNAL = 2.2; EXPRESSED IN BT474, SIGNAL = 1.9; EXPRESSED IN HBL100, SIGNAL = 1.2; EXPRESSED IN LUNG, SIGNAL = 1.6; EXPRESSED IN HEART, SIGNAL = 1.2; NT HIT: gi4503680, EVALUE 0.00e+00; EST_HUMAN HIT: BE958675.1, EVALUE 1.30e-01; SWISSPROT HIT: Q28983, EVALUE 2.00e-27
atctccagtccccaaccgagatgccaagctccagacaggcctgggcataggcgctgaggccacggcacaggctgagccgctccccaccgaccacacacaggtcatatacacactgctccaggaagggcctggggtccagggtgtcatggcagacagcgaaggggccatcgagcttggtcagcatgccacagagtcggtcgccctcatagtgttgggcctggcctggggtgcaggcgggacagttgttctggcagccatcctcacacaggtagtccccatcatccagcttccagctacttgcgaactccacagcgtcaggagccagagccccgtcaggcgtgaggaagtcgtctgctgggtcaccattatagttgccacacagcccgcacacctggtcttggaagcgtgcaggcaggctgagtgccagctggcagtcccagtcataagtgaccaccagcccaaagaccagctccaccacggcccgtggtccgctctggtacacacgcaggcgaccctcactcagggagactggcaggcgcgagcgctggttgtcaac

SEQ ID NO: 17193 - DNA, 617 bp, Homo sapiens
  MAP TO AC007842.1; EXPRESSED IN BT474, SIGNAL =   2; EXPRESSED IN BONE MARROW, SIGNAL = 1.3; EXPRESSED IN ADULT LIVER, SIGNAL = 1.4; EXPRESSED IN HEART, SIGNAL = 1.6; EXPRESSED IN PLACENTA, SIGNAL = 1.4; EXPRESSED IN HBL100, SIGNAL = 1.2; EXPRESSED IN FETAL LIVER, SIGNAL = 1.5; EXPRESSED IN LUNG, SIGNAL = 1.7; EXPRESSED IN HELA, SIGNAL = 1.6; EXPRESSED IN BRAIN, SIGNAL = 1.4; NT HIT: gi4503680, EVALUE 0.00e+00; EST_HUMAN HIT: AW859265.1, EVALUE 6.00e-03; SWISSPROT HIT: Q28983, EVALUE 7.00e-25
atgaatatatataaggctgagtcccccagttgccacttccgatactcacggcaaagttcttcactcctccaggggtgcactgtggctccagcagcctggcatgcagcagcataggtggccagtgcgtcacacagtggcccagactggcctggcagcaggcagcggtcatagacacagtcgcgcacggcaccctgggggtccagcttgctatggcactcccggaagggccccttggggtcggcaaggattccacactcattcttgctctgcagctgctgggccaccagggagtccagcttgggacagtcacccggttcagttgctccacagccgggcctcgtctcttcttgccagctgttcccaaaggccagtgcattggcagcttgacccccaccccgcagagccaggtcatcagctgggtccccgttgaagttcccacagagtccacacagggcctcagcatagctgctgggcaccttggcagtcactcgtgcattccagtcataagtgacagtcaggccaaagtccgtgcgcacgacggcatccctgccctgtcggaacacctgcacctgcccatctgctgcttggaagggcagatactgaaggacgtcatccac

SEQ ID NO: 17194 - DNA, 574 bp, Homo sapiens
  MAP TO AC007842.1; EXPRESSED IN HBL100, SIGNAL = 3.6; EXPRESSED IN BT474, SIGNAL = 3.3; EXPRESSED IN BONE MARROW, SIGNAL = 3.1; EXPRESSED IN HELA, SIGNAL = 3.5; EXPRESSED IN ADULT LIVER, SIGNAL = 2.6; EXPRESSED IN BRAIN, SIGNAL = 2.8; EXPRESSED IN PLACENTA, SIGNAL = 2.5; EXPRESSED IN FETAL LIVER, SIGNAL = 2.9; EXPRESSED IN LUNG, SIGNAL =   3; EXPRESSED IN HEART, SIGNAL = 2.4; NT HIT: gi4503680, EVALUE 0.00e+00; EST_HUMAN HIT: AW380407.1, EVALUE 0.00e+00; SWISSPROT HIT: Q28983, EVALUE 6.00e-26
cacagccaacctgtgcccgccagtcttcgatgacaaccccagcagcctggcaggcggccacataggaagccagagccttgcaaagaatgtcacggtccccaccacccatgcagacgtccagaacacagcccttgaagaagctctcaggtggcacatgagcatggcaggtggtgaaagggccccctgtgccgggggccaggggtccgcagaagccagggccctcgtactgctccaaccggtcctcagggcacgttgggcaggacccccgacattcgtcccaacacagtgggtcccagcctggggctcgccagctgccgccccagatgggtatggagggagccagtgtgccattagggaagacctggtcattgttggggttgcggtccatgttaccgcagagcccgcacactgcgccatgatagctgctgggcagcgtcacgtctacccgccagttccagtcatagctgacttgcagtccaaagtcagccaccagcagtgccttcgatgcaccctgggtcactgaaatccgcccgtcggccacagagacaggcaaggctgtgagcacaccgttcac

SEQ ID NO: 17195 - DNA, 555 bp, Homo sapiens
  MAP TO AC007842.1; EXPRESSED IN BT474, SIGNAL = 1.6; EXPRESSED IN BONE MARROW, SIGNAL = 0.65; EXPRESSED IN ADULT LIVER, SIGNAL = 0.65; EXPRESSED IN PLACENTA, SIGNAL = 1.9; EXPRESSED IN FETAL LIVER, SIGNAL = 0.8; EXPRESSED IN LUNG, SIGNAL = 1.2; EXPRESSED IN BRAIN, SIGNAL = 0.84; EXPRESSED IN HELA, SIGNAL = 0.61; EXPRESSED IN HEART, SIGNAL = 0.9; EST_HUMAN HIT: AA593854.1, EVALUE 9.00e-02; NT HIT: gi4503680, EVALUE 0.00e+00; SWISSPROT HIT: Q28983, EVALUE 5.00e-20
gtaggcatggatgttgctgcagagaatgctcaggttcccaccacccaggcagagatcaaagatgcaatctttcaagggaccctggggatccaccagcttgtggcaagaggacagtggccctgtggggctggagaggagcccacagaactcctccttctgatacttcttctccagctcgggaggacactcctcgctggggatacagccctcgctccccggcgggcaggtgggcggcggcaggcagggagagtcgggcaccacctcctcccaggagttgccgaactcattggcgttgcctgcctgcgagccattgggcttctggaagtcatccttggggtcgccgttgtagttcccacacaggccacacatcagctggtagtagtttccagggacggtgacccgcacatagtacacaaggtcgtaggccacacgcaggccgaagtcggtctcaatcacaacatctgaaccatgctgggaggcacggatctggccgttggccagcaccacgggcagcttcatgtccacaccgttcacctgggaggggaagagaggcag

SEQ ID NO: 17196 - DNA, 418 bp, Homo sapiens
  MAP TO AC007732.1; EXPRESSED IN BONE MARROW, SIGNAL = 2.7; EXPRESSED IN HBL100, SIGNAL = 3.8; EXPRESSED IN ADULT LIVER, SIGNAL = 1.4; EXPRESSED IN HEART, SIGNAL = 0.84; EXPRESSED IN PLACENTA, SIGNAL = 0.96; EXPRESSED IN BT474, SIGNAL = 3.2; EXPRESSED IN LUNG, SIGNAL = 1.4; EXPRESSED IN HELA, SIGNAL = 1.8; EXPRESSED IN BRAIN, SIGNAL = 1.3; EXPRESSED IN FETAL LIVER, SIGNAL = 1.7; NT HIT: X74870.1, EVALUE 0.00e+00; EST_HUMAN HIT: BF530978.1, EVALUE 1.00e-96; SWISSPROT HIT: P08775, EVALUE 3.00e-31
  unsure 328
tgatattctcagagacccccttcatggggtcactctcaccgtgtgcggctgcttccataagcacgtccacctgaacagagcagaccggccccatgagacccctccacacacagcacctgactgtcccatcaccacagcccagctgcccaaagtgtgtgcccttcttctcacactactccctccttctgccctattcagaaattccactgttaccgtttcctcaaaggaacacttcatgagtggtcctgtgtcctggcggttgactccgtgtcgggtgatggccatcaagtggccacgacaggtcatggtatcacacaagagagccaangtgtcggtaattgacataggagccatcaaaggagatgacgtggtacagctcccgctccagggccttccgcacggcttcaatgcccagcac

SEQ ID NO: 17197 - DNA, 164 bp, Homo sapiens
  MAP TO AC007722.1; EXPRESSED IN ADULT LIVER, SIGNAL = 1.7; EXPRESSED IN PLACENTA, SIGNAL = 1.4; EXPRESSED IN BONE MARROW, SIGNAL = 3.1; EXPRESSED IN LUNG, SIGNAL = 1.7; EXPRESSED IN HELA, SIGNAL = 1.4; EXPRESSED IN BT474, SIGNAL = 1.5; EXPRESSED IN HBL100, SIGNAL =   2; EXPRESSED IN FETAL LIVER, SIGNAL =   4; EXPRESSED IN BRAIN, SIGNAL =   2; EXPRESSED IN HEART, SIGNAL = 1.3; NT HIT: M33320.1, EVALUE 6.00e-83; SWISSPROT HIT: P08514, EVALUE 3.00e-18
  unsure 146
gatgaggcagacttccgggacaagctgagccccattgtgctcagcctcaatgtgtccctaccgcccacggaggctggaatggcccctgctgtcgtgctgcatggagacacccatgtgcaggagcaggtagggacaggcagggacanggccagggaggtgcagga

SEQ ID NO: 17198 - DNA, 133 bp, Homo sapiens
  MAP TO AC007722.1; EXPRESSED IN PLACENTA, SIGNAL = 1.1; EXPRESSED IN LUNG, SIGNAL = 0.88; EXPRESSED IN HBL100, SIGNAL =   2; EXPRESSED IN FETAL LIVER, SIGNAL = 1.1; EXPRESSED IN HELA, SIGNAL = 0.98; EXPRESSED IN BRAIN, SIGNAL = 1.6; EXPRESSED IN BT474, SIGNAL = 2.2; EXPRESSED IN BONE MARROW, SIGNAL = 1.1; EXPRESSED IN ADULT LIVER, SIGNAL =   1; EXPRESSED IN HEART, SIGNAL =   1; EST_HUMAN HIT: N23527.1, EVALUE 1.70e+00; NT HIT: AF160252.1, EVALUE 2.00e-69; SWISSPROT HIT: O07046, EVALUE 2.30e+00
tcaagatgactcccagcggagatccctcccagctgaagaggggagcagtggcaaaaaggatgaaggtgggggtggtagcagctcccaagaccatggtgggaggaaacacaaaggtgaacttccaccttcatcc

SEQ ID NO: 17199 - DNA, 287 bp, Homo sapiens
  MAP TO AC007683.2; EXPRESSED IN PLACENTA, SIGNAL =  28; EXPRESSED IN BT474, SIGNAL =  80; EXPRESSED IN LUNG, SIGNAL =  41; EXPRESSED IN HBL100, SIGNAL =  92; EXPRESSED IN BRAIN, SIGNAL =  16; EXPRESSED IN BONE MARROW, SIGNAL =  23; EXPRESSED IN FETAL LIVER, SIGNAL =  57; EXPRESSED IN HELA, SIGNAL =  51; EXPRESSED IN ADULT LIVER, SIGNAL =  21; EXPRESSED IN HEART, SIGNAL =  19; NT HIT: U43701.1, EVALUE 2.00e-96; SWISSPROT HIT: P29316, EVALUE 1.00e-33; EST_HUMAN HIT: AA788740.1, EVALUE 1.00e-98
atcccaattttgttggcaatatccaaagcattgtaatcaggagccagtggagcttatgccttcttcctgcatcaggcctaatcagggcatggactttggccacatcagtgtcatagagcttcttcacagcctgtttgatctggtgcttggtggctttaacatccacagtgaacacaagtgtgttgttgtcttctatcttcttcatggcagactcagtggtcagaggaaactctgtgacagcatagtggtcaagcttgtttctcctggggacgctcttcttaagggag

SEQ ID NO: 17200 - DNA, 366 bp, Homo sapiens
  MAP TO AC007683.2; EXPRESSED IN BONE MARROW, SIGNAL =  26; EXPRESSED IN FETAL LIVER, SIGNAL =  96; EXPRESSED IN LUNG, SIGNAL =  48; EXPRESSED IN ADULT LIVER, SIGNAL =  37; EXPRESSED IN PLACENTA, SIGNAL =  18; EXPRESSED IN BT474, SIGNAL = 7.5e+02; EXPRESSED IN HBL100, SIGNAL = 1.1e+02; EXPRESSED IN HELA, SIGNAL =  51; EXPRESSED IN BRAIN, SIGNAL =  28; EXPRESSED IN HEART, SIGNAL =  43; NT HIT: gi11525847, EVALUE 0.00e+00; SWISSPROT HIT: P14118, EVALUE 2.00e-39; EST_HUMAN HIT: BF128593.1, EVALUE 0.00e+00
ggacaaagtcttgatgatctcctccttcttggcctggaggtgctcttcatagctcttgtgtgcttccttggtcttagatctgcgggcctcagcctgatcagccaggagcttcttgcgggccttgtctgccttcagcttgtggatgtgttccatgagaatctgcttgttttttaacacattcctcttcaccttcaggtacaggctgtgatacatgcggcgatcaatcttcttagattcacggtatcttctgagcagccggtgcagaatcctcattctcctcatccacgtgaccttctctggcattcgggcattggctgtacccttccgcttacctatgcccatatgcctgcccttccggcaggccaa

SEQ ID NO: 17201 - DNA, 382 bp, Homo sapiens
  MAP TO AC007683.2; EXPRESSED IN PLACENTA, SIGNAL = 0.77; EXPRESSED IN LUNG, SIGNAL = 0.92; EXPRESSED IN BT474, SIGNAL = 0.89; EXPRESSED IN HBL100, SIGNAL = 0.74; EXPRESSED IN FETAL LIVER, SIGNAL = 1.3; EXPRESSED IN HELA, SIGNAL = 0.89; EXPRESSED IN ADULT LIVER, SIGNAL = 1.2; EXPRESSED IN BRAIN, SIGNAL = 1.7; EXPRESSED IN BONE MARROW, SIGNAL = 1.2; EXPRESSED IN HEART, SIGNAL = 1.1; SWISSPROT HIT: Q10562, EVALUE 3.00e-20; NT HIT: U12539.1, EVALUE 2.00e-01; EST_HUMAN HIT: AI857635.1, EVALUE 9.00e-72
atagctgcaaggtcaaaaggtccaaatctttttcctatctcttcaaaagcagggcaataaccagtatctcctgcgaaaaaaaatcgattccaaggccccaagacagaccagctgccccatagcaccttgttgtcatccattagagtccttttacaccagtgctgggaaggtgtaaagacaaaagtgaccttatcatgtccggggacacaattctcctcccaccagtccaactcaatcacattctcacagccacatttttgcatccagtcaaggagacccaaaggcacaaaccatctcaactcattaccaaatcgctcattcaaagcaatgacagaattgtagtccagatggtcatagtggttgtgactgataaggaccgcat

SEQ ID NO: 17202 - DNA, 191 bp, Homo sapiens
  MAP TO AC007653.1; EXPRESSED IN PLACENTA, SIGNAL = 0.73; EXPRESSED IN BT474, SIGNAL = 0.76; EXPRESSED IN BONE MARROW, SIGNAL = 0.68; EXPRESSED IN HBL100, SIGNAL = 0.87; EXPRESSED IN FETAL LIVER, SIGNAL = 0.74; EXPRESSED IN LUNG, SIGNAL = 0.85; EXPRESSED IN HELA, SIGNAL = 1.1; EXPRESSED IN ADULT LIVER, SIGNAL = 0.7; EXPRESSED IN BRAIN, SIGNAL = 0.87; EXPRESSED IN HEART, SIGNAL = 1.5; EST_HUMAN HIT: AI090876.1, EVALUE 1.00e-84; SWISSPROT HIT: P50542, EVALUE 2.00e-11; NT HIT: gi11434970, EVALUE 2.00e-89
ctctgttctggaaggggtgaaggaattatatctggaagctgcccaccaaaatggagatatgatcgacccagacctgcagacaggtctaggggttctgttccacctgagtggagaatttaatagagcaatagatgcatttaacgctgccttaactgttcggccagaggtaagacagcacagcacagcaagaa

SEQ ID NO: 17203 - DNA, 334 bp, Homo sapiens
  MAP TO AC007642.4; EXPRESSED IN PLACENTA, SIGNAL = 1.2; EXPRESSED IN HBL100, SIGNAL = 3.4; EXPRESSED IN LUNG, SIGNAL = 1.3; EXPRESSED IN BRAIN, SIGNAL = 1.6; EXPRESSED IN BT474, SIGNAL = 1.7; EXPRESSED IN BONE MARROW, SIGNAL = 1.8; EXPRESSED IN FETAL LIVER, SIGNAL = 2.7; EXPRESSED IN HELA, SIGNAL = 3.4; EXPRESSED IN ADULT LIVER, SIGNAL = 1.8; EXPRESSED IN HEART, SIGNAL = 2.2; EST_HUMAN HIT: BE389855.1, EVALUE 1.00e-45; NT HIT: gi11422072, EVALUE 2.00e-20
  unsure 320
agagcagtgcaagccacacagctggcctgaagcaccaggacagacatgtgggcggcagatgtcacaactggggaactgtcaaaggtggattaacagagtccccaaaatttacattcagaaacaattatcttatcattgcagtgacttgcatcaatcaaatataactaaggaaacccttgaaggtgaagaacatgcggtggcaggcattgaaaaggaggagaatgaagctgaggaggtaaaggcagaggctccaaaagggatgactttgagtgagtggaaggctgtccaacataaggactgggcggaggtagaatttcatngtctgaaaaccacg

SEQ ID NO: 17204 - DNA, 148 bp, Homo sapiens
  MAP TO AC007632.4; EXPRESSED IN HBL100, SIGNAL = 4.9; EXPRESSED IN HELA, SIGNAL = 8.6; EXPRESSED IN ADULT LIVER, SIGNAL = 9.6; EXPRESSED IN HEART, SIGNAL = 5.8; EXPRESSED IN PLACENTA, SIGNAL = 3.6; EXPRESSED IN BRAIN, SIGNAL = 6.6; EXPRESSED IN LUNG, SIGNAL = 7.7; EXPRESSED IN FETAL LIVER, SIGNAL = 5.2; EXPRESSED IN BONE MARROW, SIGNAL = 5.2; EXPRESSED IN BT474, SIGNAL = 5.2; NT HIT: L78810.1, EVALUE 2.00e-12; EST_HUMAN HIT: AA247432.1, EVALUE 1.00e-10; SWISSPROT HIT: P95549, EVALUE 3.90e+00
ctgcccaccagtcccgtgctgtgcacccactcagcccttgggcggtggatgggactgggtgctgtgaagcagggggcggtgctcttaggggaggctcgggccctgcaggagcccacggcaggggtaggcatggcgggctgcaggtccc

SEQ ID NO: 17205 - DNA, 215 bp, Homo sapiens
  MAP TO AC007603.1; EXPRESSED IN BRAIN, SIGNAL = 2.2; EXPRESSED IN HELA, SIGNAL = 2.2; EXPRESSED IN ADULT LIVER, SIGNAL = 1.9; EXPRESSED IN PLACENTA, SIGNAL = 2.4; EXPRESSED IN BT474, SIGNAL =   2; EXPRESSED IN BONE MARROW, SIGNAL = 2.5; EXPRESSED IN HBL100, SIGNAL = 1.9; EXPRESSED IN FETAL LIVER, SIGNAL = 1.8; EXPRESSED IN LUNG, SIGNAL = 2.7; EXPRESSED IN HEART, SIGNAL =   2; SWISSPROT HIT: P37935, EVALUE 1.50e+00; NT HIT: AF155218.1, EVALUE 4.30e-01; EST_HUMAN HIT: BE961826.1, EVALUE 7.60e-01
ccaaggggcgactgctcagttccatttccaccattcagaacctggagaaagatggggagaatccaatccagcagatgtcccctttgcaagcaaatcccatgaatgagctgaagaggagactaaagacggtttgcagaccttctgggatccttctgggtcctctgttcacaggatgcccagggaagcctctgtctttgatgggaatccagtcatga

SEQ ID NO: 17206 - DNA, 401 bp, Homo sapiens
  MAP TO AC007603.1; EXPRESSED IN FETAL LIVER, SIGNAL = 5.6; EXPRESSED IN HELA, SIGNAL = 6.1; EXPRESSED IN HEART, SIGNAL = 5.2; EXPRESSED IN BT474, SIGNAL = 5.9; EXPRESSED IN BONE MARROW, SIGNAL =   7; EXPRESSED IN LUNG, SIGNAL = 7.7; EXPRESSED IN ADULT LIVER, SIGNAL = 4.2; EXPRESSED IN BRAIN, SIGNAL =   7; EXPRESSED IN PLACENTA, SIGNAL = 6.2; EXPRESSED IN HBL100, SIGNAL = 5.1; EST_HUMAN HIT: AA491809.1, EVALUE 6.00e-06; NT HIT: AF217403.1, EVALUE 4.00e-06; SWISSPROT HIT: P23961, EVALUE 1.00e-02
ttcccaaactcccggcctcaagctatctcctgtctcagcccccagggtgccgggattacaggcatgagccaccacacccagctcaggaaagctttcttaaacctcctcctcagaaattctgcctagaaagaaacaatgacatgaaaagattccataaacacactcagggattcagggctcttcagcattcattttttttcttggcctcacacgtggctgagtttggccggccctggaatgtgcaccgaccccagtcccaggaccccaccagccacagtgccaatattaaaaccttccaggatgcaaatcctgaagccacgaacaaagccaggcctgagttcatcctagcaggaccgggcttcccactggctgtcagcgacccctcctcccaaagttgtcct

SEQ ID NO: 17207 - DNA, 234 bp, Homo sapiens
  MAP TO AC007563.1; EXPRESSED IN FETAL LIVER, SIGNAL =  12; EXPRESSED IN PLACENTA, SIGNAL = 1.9; EXPRESSED IN BT474, SIGNAL = 3.1; EXPRESSED IN BONE MARROW, SIGNAL = 0.89; EXPRESSED IN HBL100, SIGNAL = 1.2; EXPRESSED IN LUNG, SIGNAL = 1.6; EXPRESSED IN ADULT LIVER, SIGNAL = 8.3; EXPRESSED IN BRAIN, SIGNAL = 1.3; EXPRESSED IN HEART, SIGNAL = 2.2; EXPRESSED IN HELA, SIGNAL = 0.67; EST_HUMAN HIT: BF316189.1, EVALUE 1.00e-117; NT HIT: S37722.1, EVALUE 1.00e-129; SWISSPROT HIT: P18065, EVALUE 2.00e-37
gcttcttgggctcctccaggccaaggtgatgcttgccacccttgcccatctgccggtgctgctcagtgaccttctcccggaacacggccagctccttcatacccgacttgaggggcttccggccagcactgcctcccccgcccaacatgttcatggtgctgtccacgtggttctccaccaggcctccttctgagtggtcatcgccattgtctgccaagagaggaagggaagaaa

SEQ ID NO: 17208 - DNA, 249 bp, Homo sapiens
  MAP TO AC007563.1; EXPRESSED IN ADULT LIVER, SIGNAL = 2.2; EXPRESSED IN BRAIN, SIGNAL = 2.6; EXPRESSED IN HEART, SIGNAL = 1.7; EXPRESSED IN BONE MARROW, SIGNAL = 2.7; EXPRESSED IN HBL100, SIGNAL = 2.8; EXPRESSED IN FETAL LIVER, SIGNAL = 2.3; EXPRESSED IN HELA, SIGNAL = 2.7; EXPRESSED IN PLACENTA, SIGNAL = 2.7; EXPRESSED IN BT474, SIGNAL = 2.4; EXPRESSED IN LUNG, SIGNAL = 2.8; SWISSPROT HIT: P08547, EVALUE 9.00e-23; NT HIT: AL163246.2, EVALUE 7.00e-84; EST_HUMAN HIT: AV730761.1, EVALUE 6.00e-82
aaatgttctgtatatatctgttaagcccatttgttctaaggtatactttaaatccattgtttcttttttgactttctgtcttgatgacctgtctagtgctgtcagtggagtattgaagtcccccactattattgtgttgccatctatctcatttcttaggtctattagtaattgttttataaatttgggagctccagtgttagatgcatatatgtttacaatcatgatattttcctattggactaggcc

SEQ ID NO: 17209 - DNA, 330 bp, Homo sapiens
  MAP TO AC007562.2; EXPRESSED IN BT474, SIGNAL = 3.7; EXPRESSED IN HBL100, SIGNAL = 4.9; EXPRESSED IN LUNG, SIGNAL = 4.7; EXPRESSED IN HELA, SIGNAL = 2.9; EXPRESSED IN PLACENTA, SIGNAL = 5.8; EXPRESSED IN FETAL LIVER, SIGNAL = 3.7; EXPRESSED IN HEART, SIGNAL = 3.5; EXPRESSED IN BONE MARROW, SIGNAL = 4.7; EXPRESSED IN ADULT LIVER, SIGNAL = 2.7; EXPRESSED IN BRAIN, SIGNAL = 4.2; NT HIT: gi4503098, EVALUE 2.00e-96; EST_HUMAN HIT: AI083681.1, EVALUE 2.10e-01; SWISSPROT HIT: Q00657, EVALUE 8.00e-38
cagaggtgggggcttcgggaagccttgctgacacacaacatggcggcaggctgcagactggaggaggtggaggagtatgaggacaatacctatggccattatgaagctttctccaccctggcccccagggcttggctgtccatggatctagctgagccatgcatgcttgagccagggctgcctcctgtctttaccaatttcacccagctgctgactatcagcccagtggtggtgaccgagggtggcacagccgagtggtggcatgtgcagcccatgctggccctgatggaggctgaactgcataaatcccaggtgctgttcagcgtgacc

SEQ ID NO: 17210 - DNA, 165 bp, Homo sapiens
  MAP TO AC007562.2; EXPRESSED IN BT474, SIGNAL =   5; EXPRESSED IN HBL100, SIGNAL = 3.7; EXPRESSED IN FETAL LIVER, SIGNAL =   2; EXPRESSED IN HELA, SIGNAL = 2.5; EXPRESSED IN BRAIN, SIGNAL = 2.8; EXPRESSED IN PLACENTA, SIGNAL = 1.5; EXPRESSED IN BONE MARROW, SIGNAL = 2.3; EXPRESSED IN LUNG, SIGNAL = 3.1; EXPRESSED IN ADULT LIVER, SIGNAL = 1.4; EXPRESSED IN HEART, SIGNAL = 1.5; EST_HUMAN HIT: AI124669.1, EVALUE 8.00e-62; NT HIT: AF248953.1, EVALUE 3.00e-35; SWISSPROT HIT: Q08379, EVALUE 2.00e-09
gccagtgcccaggaggagcaaagcgtgtgctgccagcccctggctcacccagtggcctcatcccagaaaaagccagaggcagcggccccagccccagagactgggggtgaatctgtgtgtggggacacccactgggccctgcaggaggccatggagaagctgcag

SEQ ID NO: 17211 - DNA, 118 bp, Homo sapiens
  MAP TO AC007543.4; EXPRESSED IN FETAL LIVER, SIGNAL = 1.4; EXPRESSED IN LUNG, SIGNAL = 1.9; EXPRESSED IN HEART, SIGNAL = 1.4; EXPRESSED IN BONE MARROW, SIGNAL =   2; EXPRESSED IN HELA, SIGNAL = 1.5; EXPRESSED IN ADULT LIVER, SIGNAL = 1.5; EXPRESSED IN BRAIN, SIGNAL = 2.3; EXPRESSED IN PLACENTA, SIGNAL = 1.5; EXPRESSED IN BT474, SIGNAL = 1.4; EXPRESSED IN HBL100, SIGNAL = 1.2; SWISSPROT HIT: Q99965, EVALUE 6.90e+00; EST_HUMAN HIT: BF238203.1, EVALUE 1.50e+00; NT HIT: AE002230.2, EVALUE 1.40e-02
cccatctttggctccgtccattatcagggtcttaaactgggctttcttcttgtttttgcctatcatttatgttttcagctacttaacctgtatattctaaatgttgaaaactctcttt

SEQ ID NO: 17212 - DNA, 135 bp, Homo sapiens
  MAP TO AC007543.4; EXPRESSED IN BT474, SIGNAL = 2.1; EXPRESSED IN BONE MARROW, SIGNAL =   3; EXPRESSED IN HELA, SIGNAL = 2.3; EXPRESSED IN ADULT LIVER, SIGNAL = 1.7; EXPRESSED IN BRAIN, SIGNAL = 2.3; EXPRESSED IN HBL100, SIGNAL = 2.2; EXPRESSED IN FETAL LIVER, SIGNAL = 2.1; EXPRESSED IN LUNG, SIGNAL = 2.9; EXPRESSED IN PLACENTA, SIGNAL = 2.8; EXPRESSED IN HEART, SIGNAL = 2.2; SWISSPROT HIT: Q9ZDR0, EVALUE 8.90e+00
cccgtgtaagatttcctctgtgaatttcattaagttctcagtggtcagacacattcagcccaacatcctgcagcaaccagagggtgaaaaatggacacagcaagagatcctgctgttgttaaccaataaagcaaa

SEQ ID NO: 17213 - DNA, 105 bp, Homo sapiens
  MAP TO AC007542.2; EXPRESSED IN HBL100, SIGNAL = 4.3; EXPRESSED IN HELA, SIGNAL = 5.2; EXPRESSED IN ADULT LIVER, SIGNAL =   5; EXPRESSED IN BT474, SIGNAL =   4; EXPRESSED IN FETAL LIVER, SIGNAL = 4.5; EXPRESSED IN LUNG, SIGNAL = 6.4; EXPRESSED IN HEART, SIGNAL = 5.6; EXPRESSED IN PLACENTA, SIGNAL = 4.5; EXPRESSED IN BONE MARROW, SIGNAL = 5.4; EXPRESSED IN BRAIN, SIGNAL = 6.1; EST_HUMAN HIT: AV761502.1, EVALUE 2.10e-02; NT HIT: L10700.1, EVALUE 5.70e-02
aataccacgtttttactcacaatgctaaaaaaaacttgcaagttgctctagcagatgtcgttactagagccaaggaagggagagagagggggacagccaaaggct

SEQ ID NO: 17214 - DNA, 129 bp, Homo sapiens
  MAP TO AP000087.1; EXPRESSED IN HELA, SIGNAL = 2.3; EXPRESSED IN ADULT LIVER, SIGNAL =   3; EXPRESSED IN BRAIN, SIGNAL = 1.5; EXPRESSED IN HEART, SIGNAL = 6.2; EXPRESSED IN PLACENTA, SIGNAL = 1.6; EXPRESSED IN LUNG, SIGNAL = 1.2; EXPRESSED IN FETAL LIVER, SIGNAL = 3.6; EXPRESSED IN HBL100, SIGNAL = 4.9; EXPRESSED IN BONE MARROW, SIGNAL = 2.5; EXPRESSED IN BT474, SIGNAL = 1.9; SWISSPROT HIT: P18859, EVALUE 1.00e-15; EST_HUMAN HIT: AV734299.1, EVALUE 1.00e-66; NT HIT: M37104.1, EVALUE 9.00e-66
ttctgtataggatcaagttccttattaaatgccactgctgtaacaccaatgttcctccgcaaatggactgagacggctgaccgaatgacagaggagaacctgaagagcctctgaagaatcatgctgatt

SEQ ID NO: 17215 - DNA, 196 bp, Homo sapiens
  MAP TO AP000056.1; EXPRESSED IN HBL100, SIGNAL =  26; EXPRESSED IN LUNG, SIGNAL =  36; EXPRESSED IN HELA, SIGNAL =  32; EXPRESSED IN ADULT LIVER, SIGNAL =  26; EXPRESSED IN BT474, SIGNAL =  22; EXPRESSED IN PLACENTA, SIGNAL =  23; EXPRESSED IN HEART, SIGNAL =  22; EXPRESSED IN BRAIN, SIGNAL =  30; EXPRESSED IN FETAL LIVER, SIGNAL =  30; EXPRESSED IN BONE MARROW, SIGNAL =  38; NT HIT: AL163303.2, EVALUE 2.00e-06; EST_HUMAN HIT: AA628592.1, EVALUE 1.00e-16; SWISSPROT HIT: P23964, EVALUE 8.50e-02
aggtgacttggatcatgggggcggacgtcccccttgctgttctcgtgatagcgagttctcatgagatctgtttttttgttgttgttgttgtttgttttgttttgttttgttttgagacaaggtctcactctgtcatccaggctgaagtgcagtgtggtgtgatagctcattgcaacctcaacctccttggctcaag

SEQ ID NO: 17216 - DNA, 198 bp, Homo sapiens
  MAP TO AP000056.1; EXPRESSED IN BT474, SIGNAL =  13; EXPRESSED IN HELA, SIGNAL =  10; EXPRESSED IN HEART, SIGNAL = 7.2; EXPRESSED IN BRAIN, SIGNAL = 8.4; EXPRESSED IN ADULT LIVER, SIGNAL = 6.7; EXPRESSED IN LUNG, SIGNAL =  12; EXPRESSED IN HBL100, SIGNAL =   9; EXPRESSED IN BONE MARROW, SIGNAL =  15; EXPRESSED IN PLACENTA, SIGNAL =  14; EXPRESSED IN FETAL LIVER, SIGNAL =  11; SWISSPROT HIT: P79218, EVALUE 6.30e+00; EST_HUMAN HIT: AI421744.1, EVALUE 1.20e-01
atggagcttacagttggtatacgatatagaatgaatgatgtaataaaaggcaagtgccaaattatggcccagacagtgagtcttggtgattgtctgaaggatgcagaggctgccatgggccagcagtgctttgtggagaagatgggaattgtactaagccttgaaggttgctgcttctggaataagctcaaggacaac

SEQ ID NO: 17217 - DNA, 107 bp, Homo sapiens
  MAP TO AP000047.1; EXPRESSED IN PLACENTA, SIGNAL = 1.3; EXPRESSED IN BONE MARROW, SIGNAL = 1.9; EXPRESSED IN LUNG, SIGNAL = 1.4; EXPRESSED IN HELA, SIGNAL = 1.4; EXPRESSED IN BRAIN, SIGNAL = 1.3; EXPRESSED IN HEART, SIGNAL = 1.3; EXPRESSED IN BT474, SIGNAL = 1.1; EXPRESSED IN HBL100, SIGNAL = 1.6; EXPRESSED IN FETAL LIVER, SIGNAL = 1.6; EXPRESSED IN ADULT LIVER, SIGNAL = 1.2; NT HIT: gi4826679, EVALUE 2.00e-50; EST_HUMAN HIT: AA812537.1, EVALUE 7.00e-54; SWISSPROT HIT: O95825, EVALUE 2.00e-12
ctccagcatctaggacaatatctactcccaggccacctgtttcttccaaacagctttcagcaacatgaactttcccattagatacatcaatcactcgggctgtaaag

SEQ ID NO: 17218 - DNA, 133 bp, Homo sapiens
  MAP TO AP000046.1; EXPRESSED IN PLACENTA, SIGNAL = 5.2; EXPRESSED IN BT474, SIGNAL = 5.3; EXPRESSED IN FETAL LIVER, SIGNAL = 4.9; EXPRESSED IN HELA, SIGNAL = 2.4; EXPRESSED IN ADULT LIVER, SIGNAL =   3; EXPRESSED IN BONE MARROW, SIGNAL = 3.2; EXPRESSED IN HBL100, SIGNAL = 5.1; EXPRESSED IN LUNG, SIGNAL = 3.8; EXPRESSED IN BRAIN, SIGNAL = 3.7; EXPRESSED IN HEART, SIGNAL = 2.8; NT HIT: gi11526208, EVALUE 3.00e-69; EST_HUMAN HIT: AA385067.1, EVALUE 4.00e-69; SWISSPROT HIT: P18583, EVALUE 1.00e-07
gcccagctttgccagccctaataagaagcatgctaaagccacagcagctactgtggttcttcaagcaatgggccttgtaccaaaggacctcatggctaatgccacttgcttcaggagtgcctcacgtagatag

SEQ ID NO: 17219 - DNA, 339 bp, Homo sapiens
  MAP TO AP000046.1; EXPRESSED IN BONE MARROW, SIGNAL = 7.7; EXPRESSED IN ADULT LIVER, SIGNAL = 5.2; EXPRESSED IN PLACENTA, SIGNAL = 7.6; EXPRESSED IN BT474, SIGNAL = 7.8; EXPRESSED IN HBL100, SIGNAL = 7.9; EXPRESSED IN LUNG, SIGNAL = 8.2; EXPRESSED IN HELA, SIGNAL = 7.1; EXPRESSED IN BRAIN, SIGNAL = 8.3; EXPRESSED IN FETAL LIVER, SIGNAL = 8.9; EXPRESSED IN HEART, SIGNAL = 5.4; NT HIT: gi11526208, EVALUE 0.00e+00; SWISSPROT HIT: P18583, EVALUE 2.00e-52; EST_HUMAN HIT: AU123890.1, EVALUE 0.00e+00
caggtgaagaaccacatgctgaggaacacctgaaaggtgacttttacgaaagtgaacatggtataaatatagaccttaatataaataatcatttaattgctaaagagatggaacataatacagtgtgtgctgctggtactagtcctgttggggaaattggtgaagagaaaattttgcccaccagtgagactaaacagcgcacagtattggatacctaccctggtgttagtgaagctgatgcaggagaaactctatcttctactggtccttttgctctggaacctgatgcaacaggaactagtaagggtattgaatttaccacagcatctactctcagtt

SEQ ID NO: 17220 - DNA, 241 bp, Homo sapiens
  MAP TO AP000046.1; EXPRESSED IN PLACENTA, SIGNAL = 1.1; EXPRESSED IN BT474, SIGNAL = 2.5; EXPRESSED IN BONE MARROW, SIGNAL = 2.8; EXPRESSED IN ADULT LIVER, SIGNAL = 1.5; EXPRESSED IN HEART, SIGNAL =   1; EXPRESSED IN HBL100, SIGNAL = 7.2; EXPRESSED IN FETAL LIVER, SIGNAL =   2; EXPRESSED IN LUNG, SIGNAL =   1; EXPRESSED IN HELA, SIGNAL = 2.5; EXPRESSED IN BRAIN, SIGNAL = 1.5; NT HIT: AF008653.1, EVALUE 1.00e-129; EST_HUMAN HIT: AI363014.1, EVALUE 0.00e+00; SWISSPROT HIT: P22102, EVALUE 1.00e-34
agctatggcacgaaagccgacgtctttcctataaattgctccctcaaactttatagcagctagtcctttcttggcttcctcaagggctgatatgagattttcccggatggctgtgactgcaagaactctacccccatgagttactactttgccatttttgagggcagtgcctgcatggaacacctccagtcctagagcttgagcctcaggaaaccctagaagagagcatatttgacatatg

SEQ ID NO: 17221 - DNA, 392 bp, Homo sapiens
  MAP TO AP000046.1; EXPRESSED IN LUNG, SIGNAL = 8.1; EXPRESSED IN BRAIN, SIGNAL = 3.2; EXPRESSED IN HEART, SIGNAL = 2.6; EXPRESSED IN BT474, SIGNAL =  20; EXPRESSED IN BONE MARROW, SIGNAL =  16; EXPRESSED IN PLACENTA, SIGNAL = 3.8; EXPRESSED IN ADULT LIVER, SIGNAL = 8.8; EXPRESSED IN HELA, SIGNAL =  19; EXPRESSED IN FETAL LIVER, SIGNAL =  21; EXPRESSED IN HBL100, SIGNAL =  37; NT HIT: gi4506728, EVALUE 0.00e+00; SWISSPROT HIT: P46782, EVALUE 6.00e-55; EST_HUMAN HIT: BE888145.1, EVALUE 0.00e+00
gcataggagctggaggaggccttggtggcattgatgagctcatccgccaggcactcagcaatggtcttgatgttccagaaggcagcctcacgagtgcctgtgcacagcagccagacgacctgattcacacagtgcagtggggacatgtccacagcctgttgtctcacagtccctgctcgcccaatgcatgtggagtcctcccagggaccactgttgatgatggcgttcaccaggacctggagagggttctcgcctgtgagcaggtggatgaaatcgaaggcatgcttgatgatgcacatgatcatgagcttgttgctgttgttgcagccgtgcatcatcatggagttagtgaggggctccacaatggggcactgagctttgcggaagcattt

SEQ ID NO: 17222 - DNA, 966 bp, Homo sapiens
  MAP TO AP000046.1; EXPRESSED IN PLACENTA, SIGNAL = 2.8; EXPRESSED IN BT474, SIGNAL = 6.4; EXPRESSED IN BONE MARROW, SIGNAL = 1.9; EXPRESSED IN BRAIN, SIGNAL = 3.9; EXPRESSED IN HELA, SIGNAL = 7.3; EXPRESSED IN HBL100, SIGNAL = 3.5; EXPRESSED IN FETAL LIVER, SIGNAL = 5.5; EXPRESSED IN LUNG, SIGNAL = 3.7; EXPRESSED IN ADULT LIVER, SIGNAL = 2.7; EXPRESSED IN HEART, SIGNAL = 2.4; EST_HUMAN HIT: BF331621.1, EVALUE 0.00e+00; NT HIT: gi11526208, EVALUE 0.00e+00; SWISSPROT HIT: P18583, EVALUE 3.00e-30
atttagtgagaccgttacttcctaaggacatggaacgtcttacaagccttagagctggcattgaaggacctttacttgcaagtgatgttggacgtgacagatctgctgccagcccggttgtaagtagtatgccagaaagagcttcagagtcttcttcagaggaaaaagatgattatgaaatttttgtaaaagttaaggacactcacgaaaaaagcaagaaaaataagaaccgtgataagggggagaaagagaagaaaagagactcttcattaagatctcgaagtaagcgttccaaatcttctgaacacaaatcacgcaagcgtaccagtgaatctcgttctagggcaagaaagagatcatctaagtccaagtctcatcgctctcagacacgttcacggtcacgttcaagacgcaggaggagaagcagcagatcaagatcaaagtctagaggaagaagatctgtatcaaaagagaagcgcaaaagatctccaaagcacagatccaagtctagggaaagaaaaagaaaaagatcaagctccagggataaccgaaagacagttagagctcgaagtcgaaccccaagtcgtcggagtcggagtcatactccaagtcgtcgacgaaggtctagatctgtgggtagaagaaggagctttagcatttccccaagccgccgcagccgcacccccagccgccgcagccgcacccccagccgccgcagccgcacccccagccgccgcagccgcacccccagccgccggagccgcacccctagccgtcggagccgcaccccaagccgccggagaagatcaaggtctgtggtaagaagacgaagcttcagtatctcaccagtcagattaaggcgatcaagaacacccttaagaagaaggtttagcagatctcccatccgtcgtaaaagatccaggtcttctgaacgaggcagatcacccaaacgtctgacagatttgg

SEQ ID NO: 17223 - DNA, 912 bp, Homo sapiens
  MAP TO AP000046.1; EXPRESSED IN HBL100, SIGNAL = 6.4; EXPRESSED IN FETAL LIVER, SIGNAL =  10; EXPRESSED IN HELA, SIGNAL = 4.6; EXPRESSED IN BRAIN, SIGNAL = 5.5; EXPRESSED IN HEART, SIGNAL = 4.7; EXPRESSED IN ADULT LIVER, SIGNAL = 3.2; EXPRESSED IN LUNG, SIGNAL = 8.6; EXPRESSED IN BONE MARROW, SIGNAL = 3.7; EXPRESSED IN BT474, SIGNAL =  16; EXPRESSED IN PLACENTA, SIGNAL =  18; EST_HUMAN HIT: AU131351.1, EVALUE 0.00e+00; NT HIT: gi11526208, EVALUE 0.00e+00; SWISSPROT HIT: P18583, EVALUE 6.00e-66
tccatgggtgctgaccggtctatgatgtcgtcatactctgctgctgaccggtctatgatgtcatcgtactctgcagctgaccgatctatgatgtcatcttatactgctgatcgttcaatgatgtctatggctgctgattcttacaccgattcttacactgacacatatacagaggcatatatggtgccacctttgcctcctgaagagcccccaacaatgccaccgttgccacctgaggagccaccaatgacaccaccattgcctcctgaggaaccaccagagggtccagcattgcccactgagcagtcagcattaacagctgaaaatacttggcctacagaggtgccatcatcaccatctgaagagtctgtatcgcagcctgagcctcctgtgagtcaaagtgagatttcggagccttcagcagtgcctactgattattcagtgtcagcatcagatccctcagttttagtatcagaggctgctgtgactgttccagaaccaccaccagagccagaatcttcaattacgttaacacctgtagagtctgcagtagtagcagaagaacatgaagttgttccagagagaccagtgacttgtatggtatctgaaactcccgccatgtcagctgaaccaactgtgttagcatcagagcctcctgttatgtcagagacagcagaaacatttgattccatgagagcctcaggacatgttgcctcagaagtatctacatccttgttggttccagcagtaactactccagtgctggcagagagcattctggagccgccagccatggctgccccagagtcttcagctatggctgtcctggagtcttcggctgtgaccgtcctggagtcttcgactgtgactgtcctggagtcttcgactgtaactgtcctggagccttcggtt

SEQ ID NO: 17224 - DNA, 569 bp, Homo sapiens
  MAP TO AP000046.1; EXPRESSED IN BONE MARROW, SIGNAL = 4.5; EXPRESSED IN ADULT LIVER, SIGNAL = 2.2; EXPRESSED IN PLACENTA, SIGNAL = 4.2; EXPRESSED IN BT474, SIGNAL =   6; EXPRESSED IN FETAL LIVER, SIGNAL = 5.3; EXPRESSED IN LUNG, SIGNAL = 4.3; EXPRESSED IN HELA, SIGNAL = 3.5; EXPRESSED IN BRAIN, SIGNAL =   4; EXPRESSED IN HBL100, SIGNAL = 3.8; EXPRESSED IN HEART, SIGNAL = 3.5; EST_HUMAN HIT: AA853678.1, EVALUE 1.00e-110; SWISSPROT HIT: P08674, EVALUE 2.00e-16; NT HIT: gi9910307, EVALUE 0.00e+00
acaagaccgcaggagttgccggagctgcctaagaccacagcgttggagctgcaggagtcgtcggtggcctcagcgatggagttgccggggccacctgcgacctccatgccggagttgcaggggccccctgtgactccagtgctggagttacctgggccctctgctaccccggtgccagagttgccagggcccctttctaccccagtgcctgagttgccagggccccctgcgacagcagtgcctgagttgccagggccctctgtgacaccagtgccacagttgtcgcaggaattgccagggcttccagcaccatccatggggttggagccaccacaggaggtaccagagccatctgtgatggcacaggagttgccagggctgcctttggtgacagcagcagtagagttgccagagcagcctgcggtaacagtagcaatggagttgaccgaacaacctgtgacgacgacagagttggagcagcctgtggggatgacaacggtggaacatcctgggcatcctgaggtgacaacggcaacagggttgctggggcagcctgaggcaacgatggt

SEQ ID NO: 17225 - DNA, 189 bp, Homo sapiens
  MAP TO AP000036.1; EXPRESSED IN BT474, SIGNAL = 1.2; EXPRESSED IN BONE MARROW, SIGNAL = 1.2; EXPRESSED IN FETAL LIVER, SIGNAL = 1.3; EXPRESSED IN HELA, SIGNAL = 1.1; EXPRESSED IN ADULT LIVER, SIGNAL = 1.2; EXPRESSED IN PLACENTA, SIGNAL = 1.4; EXPRESSED IN HBL100, SIGNAL = 1.2; EXPRESSED IN LUNG, SIGNAL = 1.5; EXPRESSED IN BRAIN, SIGNAL = 1.7; EXPRESSED IN HEART, SIGNAL = 1.3; NT HIT: gi11526180, EVALUE 8.00e-89; SWISSPROT HIT: P57058, EVALUE 2.00e-26; EST_HUMAN HIT: AA418916.1, EVALUE 9.00e-89
ccctgacaaatagcgctccagtttcttgtttaagaggaagtagatggccaggatgtggcaggcgcggttggagagcacagtgttgatcacgtcgctgttcttgtaacccagcttctcggtcatgtgcagcacgacgctcgggctcagatcttccagagaaatcctgcgaggtgcagagagagaggacca

SEQ ID NO: 17226 - DNA, 423 bp, Homo sapiens
  MAP TO AP000036.1; EXPRESSED IN BT474, SIGNAL = 3.1; EXPRESSED IN BONE MARROW, SIGNAL = 3.3; EXPRESSED IN HELA, SIGNAL = 4.7; EXPRESSED IN HEART, SIGNAL = 4.4; EXPRESSED IN PLACENTA, SIGNAL = 3.8; EXPRESSED IN HBL100, SIGNAL = 3.2; EXPRESSED IN FETAL LIVER, SIGNAL = 3.7; EXPRESSED IN LUNG, SIGNAL = 5.6; EXPRESSED IN ADULT LIVER, SIGNAL =   5; EXPRESSED IN BRAIN, SIGNAL = 4.6; SWISSPROT HIT: P04930, EVALUE 6.40e-01; NT HIT: AE000463.1, EVALUE 8.90e-01
ggacctggatggagtgggcctgaatggagtgcacctggatggagtggacctggatggagtggatctggatggagtggacttggatgaagtggatctggatggattggacctggatggagtggactcggatggagtggacccagatagagtggatctggatggagtgaatccggatggagtgcacctggatggagcgcacctggatgaagttcacttggatggagtggacctggatggaattcacttggatggagtggacctggatacagtggacctggatggagtggacctggatacagtggacctggatggagtggacccgaatggagaggacctggatggagtggatctggatggagtggatctcgatggaatggacctggatggaatagacctgggtggaatagacctggatggaggaaa

SEQ ID NO: 17227 - DNA, 124 bp, Homo sapiens
  MAP TO AP000026.1; EXPRESSED IN BT474, SIGNAL = 0.68; EXPRESSED IN HEART, SIGNAL = 0.85; EXPRESSED IN BONE MARROW, SIGNAL = 1.8; EXPRESSED IN HBL100, SIGNAL = 0.75; EXPRESSED IN FETAL LIVER, SIGNAL = 0.91; EXPRESSED IN LUNG, SIGNAL = 0.92; EXPRESSED IN HELA, SIGNAL = 0.8; EXPRESSED IN ADULT LIVER, SIGNAL = 0.74; EXPRESSED IN PLACENTA, SIGNAL = 1.4; SWISSPROT HIT: Q9ZKF7, EVALUE 4.00e+00; EST_HUMAN HIT: BE968588.1, EVALUE 5.00e-13; NT HIT: AL163203.2, EVALUE 1.00e-61
tttggagaatgtcaactatatttttatcagagctgatttgttccagtggaacaacagtggcgtagacatcgcccacaaggttctgcatactcaggaagactgggttacacgtccacagcagggt

SEQ ID NO: 17228 - DNA, 113 bp, Homo sapiens
  MAP TO AL096827.3; EXPRESSED IN HEART, SIGNAL = 1.6; EXPRESSED IN FETAL LIVER, SIGNAL = 1.2; EXPRESSED IN PLACENTA, SIGNAL = 2.3; EXPRESSED IN BONE MARROW, SIGNAL = 2.3; EXPRESSED IN HBL100, SIGNAL = 1.6; EXPRESSED IN ADULT LIVER, SIGNAL = 1.2; EXPRESSED IN BRAIN, SIGNAL = 1.5; EXPRESSED IN BT474, SIGNAL = 1.5; EXPRESSED IN LUNG, SIGNAL = 1.4; EXPRESSED IN HELA, SIGNAL = 2.1; NT HIT: AL163246.2, EVALUE 1.00e-27; EST_HUMAN HIT: AA714294.1, EVALUE 3.00e-25; SWISSPROT HIT: P28873, EVALUE 6.90e+00
ctatgccaattatacattctggcactggggaaatgaccacaggatgagtctggaaacccactggacccactgtaagtgggatttgagctgaaacatcattaattacctgactt

SEQ ID NO: 17229 - DNA, 461 bp, Homo sapiens
  MAP TO AL096827.3; EXPRESSED IN BT474, SIGNAL = 1.6; EXPRESSED IN BONE MARROW, SIGNAL = 2.4; EXPRESSED IN HBL100, SIGNAL =   2; EXPRESSED IN FETAL LIVER, SIGNAL = 1.8; EXPRESSED IN PLACENTA, SIGNAL = 2.2; EXPRESSED IN LUNG, SIGNAL = 1.8; EXPRESSED IN HELA, SIGNAL = 1.9; EXPRESSED IN ADULT LIVER, SIGNAL = 1.4; EXPRESSED IN BRAIN, SIGNAL = 1.3; EXPRESSED IN HEART, SIGNAL = 1.5; EST_HUMAN HIT: BE064410.1, EVALUE 6.00e-59; NT HIT: X89211.1, EVALUE 9.00e-54; SWISSPROT HIT: P25059, EVALUE 3.10e-01
acttagaggtaagaggggcccaaagtggccaggtggcagtcttagcttccagcttaatggaattgttgttgtgtctcctggtggcagtgttcctccctctgtaactaagacatctaggccagcaggacataatgttgtgggaacaggaagcaaaaattttctagtgggtcactaggggtaatggtgagtggtgtgacatccacttccactcctcgattcctggatccatgaattctagctacgagaggaagagtaccatatattggatgctgatccagagcatacacagccttctggaaagctttgccctagctctgcaaagtattgtccacctagttggcattgtaattgtgacttcaaaaggccattgtaccattctatcaatccagctgcttcaggatgatggggaatataataagaccagtgaattccatgagcatgagcccagtgctgcccctctt

SEQ ID NO: 17230 - DNA, 87 bp, Homo sapiens
  MAP TO AL096757.1; EXPRESSED IN HBL100, SIGNAL = 1.4; EXPRESSED IN LUNG, SIGNAL = 1.6; EXPRESSED IN ADULT LIVER, SIGNAL = 1.8; EXPRESSED IN PLACENTA, SIGNAL = 1.6; EXPRESSED IN BT474, SIGNAL = 1.3; EXPRESSED IN HEART, SIGNAL = 1.2; EXPRESSED IN BRAIN, SIGNAL = 1.4; EXPRESSED IN HELA, SIGNAL = 1.4; EXPRESSED IN FETAL LIVER, SIGNAL = 1.4; EXPRESSED IN BONE MARROW, SIGNAL = 1.7; EST_HUMAN HIT: BE217913.1, EVALUE 5.00e-42
ttgcctatcttctgctttctgaactgcgggacaaggagcatggtgtgtgggagcttagcctgcaaagttgtctgagatcaagtccag

SEQ ID NO: 17231 - DNA, 149 bp, Homo sapiens
  MAP TO AL096757.1; EXPRESSED IN PLACENTA, SIGNAL = 1.4; EXPRESSED IN BONE MARROW, SIGNAL = 1.7; EXPRESSED IN FETAL LIVER, SIGNAL = 1.3; EXPRESSED IN ADULT LIVER, SIGNAL = 1.2; EXPRESSED IN BRAIN, SIGNAL = 1.3; EXPRESSED IN BT474, SIGNAL = 1.6; EXPRESSED IN HBL100, SIGNAL = 1.3; EXPRESSED IN LUNG, SIGNAL = 1.3; EXPRESSED IN HELA, SIGNAL = 1.1; EXPRESSED IN HEART, SIGNAL = 1.4; EST_HUMAN HIT: H96460.1, EVALUE 2.00e-03; SWISSPROT HIT: Q15746, EVALUE 2.30e+00; NT HIT: AF293962.1, EVALUE 8.50e-02
atggggacactgagcctcagagagaagaacgatgtggccagggtcccgcagcgaggatgcggcagaatcaggattggaacccagacctgtctgactccagagctttcggggactaggattctttctgcacgcctttctctctcgccaag

SEQ ID NO: 17232 - DNA, 264 bp, Homo sapiens
  MAP TO AL096757.1; EXPRESSED IN PLACENTA, SIGNAL = 1.8; EXPRESSED IN BT474, SIGNAL = 2.1; EXPRESSED IN BONE MARROW, SIGNAL =   1; EXPRESSED IN HBL100, SIGNAL = 2.2; EXPRESSED IN FETAL LIVER, SIGNAL = 1.7; EXPRESSED IN LUNG, SIGNAL = 1.8; EXPRESSED IN HELA, SIGNAL = 1.9; EXPRESSED IN ADULT LIVER, SIGNAL = 1.6; EXPRESSED IN BRAIN, SIGNAL = 2.3; EXPRESSED IN HEART, SIGNAL = 1.8; NT HIT: AB000732.1, EVALUE 9.90e+00
catggcctccaggatgggtggctacaaaacaatgatgatgatgatgatggtgatggtgatgatgatgatggtgatgatgatagtgatgatgatgatggtgatgatgatagtgatgatgatgctgataatgatggtgatggtgatggcgatgatggtgatggtgatgatgatgtaacgatgatggtgatgataatgatggcaatggtgatggtgatgatggtgatggtgatgataatagtgatggtgatgatgatggtgatggtg

SEQ ID NO: 17233 - DNA, 128 bp, Homo sapiens
  MAP TO AL078477.5; EXPRESSED IN HEART, SIGNAL =   5; EXPRESSED IN PLACENTA, SIGNAL = 5.4; EXPRESSED IN FETAL LIVER, SIGNAL = 4.5; EXPRESSED IN LUNG, SIGNAL = 7.2; EXPRESSED IN HELA, SIGNAL = 4.3; EXPRESSED IN BT474, SIGNAL = 3.7; EXPRESSED IN BONE MARROW, SIGNAL = 4.8; EXPRESSED IN HBL100, SIGNAL = 5.4; EXPRESSED IN ADULT LIVER, SIGNAL = 4.4; EXPRESSED IN BRAIN, SIGNAL = 9.6; NT HIT: U19719.1, EVALUE 3.00e-07
agtgagggcaaccctctggaagaataccctaaagataaacaggatagagcacaggtccccattctcttgcctgaatcactgcagttttagaaaacataagttcaatgatcctagcctctgcctcttca

SEQ ID NO: 17234 - DNA, 1044 bp, Homo sapiens
  MAP TO AL078477.5; EXPRESSED IN PLACENTA, SIGNAL = 1.4; EXPRESSED IN FETAL LIVER, SIGNAL = 0.69; EXPRESSED IN HELA, SIGNAL = 0.94; EXPRESSED IN BT474, SIGNAL = 0.82; EXPRESSED IN BONE MARROW, SIGNAL = 1.1; EXPRESSED IN HBL100, SIGNAL = 0.67; EXPRESSED IN LUNG, SIGNAL = 0.67; EXPRESSED IN ADULT LIVER, SIGNAL = 0.69; EXPRESSED IN HEART, SIGNAL = 0.94; EST_HUMAN HIT: AW562333.1, EVALUE 2.50e-01; SWISSPROT HIT: P54675, EVALUE 4.00e-03
atttacagctttttgaaaaaagcttcaagaatgaaattgatactgttgtttctcaggatgaaaatcaaagtgaaatctccttaagcaaaaccctctccttagataaagaagtaattagtcaaggacaaacctcgaatgttacggacaacagaaaatcagttactacagaaataaaagacaagatatgcttggaaaaagacaatggatgtacagaatttaaatcaccaaataatcattttgtagtgttagatacagcaatagaaacagaaaaaatacatctagaaagaaccagaggattagatgttcaccatacagatgtaaatctggaggttgaaaataacaaaacatcatttaacagtattttaaatgagacagcacacaatacatatcacaataataataaagatgtttctgaaaatgagccattcaaacaattcagattgcttccagggactcgagaacatgctctagagaaggaaattacaaatagtgaccaaaccaaagcagatttggactcgtctctagatataaaaaaaaatcctgttccatgtcagaaatatagtttacggaattcaagtaatgttatgttagatgataaacaatgtaaaataaaacaaatacaactgttaactaaaaaaagtgagtgcagcatattactttctaaacaaacttcagattttctgcaagtctgtaatgatactttagagaaatctgaactaactgttccctgtgatatagtaatcgaccaccatgtttcatatgctgcttttagtgctaattcaaaactacttctgaagaactcagataaaaatgtccatagtatgtctatgttggtgaaacctaactcaagccctgggggaaaaactatgtgtaaaaatatgagtgatatgcaaaacagtcaatttaataactgtttgggatacttagaaaacactaatgtgaacatttcccatcttcatcttaacaatgagaatagtcatgcttcacaagccaaagatgtgaaaactgctgttcacatgaaaacttgcacagaaacagagtttt

SEQ ID NO: 17235 - DNA, 173 bp, Homo sapiens
  MAP TO AL050337.6; EXPRESSED IN LUNG, SIGNAL = 2.3; EXPRESSED IN HEART, SIGNAL = 1.7; EXPRESSED IN BRAIN, SIGNAL = 1.4; EXPRESSED IN PLACENTA, SIGNAL = 2.4; EXPRESSED IN BT474, SIGNAL = 1.4; EXPRESSED IN BONE MARROW, SIGNAL = 1.2; EXPRESSED IN HBL100, SIGNAL = 1.6; EXPRESSED IN FETAL LIVER, SIGNAL = 1.6; EXPRESSED IN HELA, SIGNAL = 0.84; EXPRESSED IN ADULT LIVER, SIGNAL = 1.6; SWISSPROT HIT: P15260, EVALUE 8.00e-30; NT HIT: J03143.1, EVALUE 5.00e-93; EST_HUMAN HIT: AU143746.1, EVALUE 8.00e-93
catctcggcatacagcaaattcttctgactttgcataggcagattctttttgtccaaccctggctttaactctgacccaaagagaatttgatggatcaccaacatgatcagaaatattacaataatgatgagaaatattgatgcaggcatcaatccattctgaattcttaaca

SEQ ID NO: 17236 - DNA, 567 bp, Homo sapiens
  MAP TO AL050337.6; EXPRESSED IN PLACENTA, SIGNAL = 4.4; EXPRESSED IN LUNG, SIGNAL = 4.2; EXPRESSED IN HEART, SIGNAL =   2; EXPRESSED IN HBL100, SIGNAL = 3.9; EXPRESSED IN FETAL LIVER, SIGNAL =   3; EXPRESSED IN HELA, SIGNAL = 1.3; EXPRESSED IN BRAIN, SIGNAL =   2; EXPRESSED IN BT474, SIGNAL = 1.9; EXPRESSED IN BONE MARROW, SIGNAL = 6.5; EXPRESSED IN ADULT LIVER, SIGNAL = 3.8; SWISSPROT HIT: P15260, EVALUE 9.00e-84; EST_HUMAN HIT: BF577044.1, EVALUE 0.00e+00; NT HIT: J03143.1, EVALUE 0.00e+00
caaggactctttaccgctatcatccacaagtagatccactagcacatgtggtttatcataaccaaaggaggtgggggcttttattacggttatgagctcttgtccttctgtttttatttcacctttattatttgggggaaattctgagtcagataaggagctatgtgattccagacagctggaatcagtatcaaaaccatttctggagtgatcactctcagaacaatttctggagtgatacgagtttaaagcgatgctgccaggttcagactggttactacttaaaggtgaagaactctctctctctattggagtcagatggctgcccgggaccacgtcaggaatattttcttcagtagtcaccacttctgttatactagaaagttcttctgtatgttccacttttcctggattgtcttcggtatgcatgcctggaactgttgctggagacaacggctcttcacagaccacctccttttctaaggaaaatggctggtatgacgtgatgagtgatacatattttgattcaggttttgtctctaaagtagcacttcttaccacagagat

SEQ ID NO: 17237 - DNA, 277 bp, Homo sapiens
  MAP TO AL050327.6; EXPRESSED IN HBL100, SIGNAL = 1.7; EXPRESSED IN HELA, SIGNAL = 2.4; EXPRESSED IN ADULT LIVER, SIGNAL = 2.8; EXPRESSED IN PLACENTA, SIGNAL = 2.2; EXPRESSED IN BONE MARROW, SIGNAL = 1.9; EXPRESSED IN BT474, SIGNAL = 2.6; EXPRESSED IN HEART, SIGNAL = 1.8; EXPRESSED IN BRAIN, SIGNAL = 1.7; EXPRESSED IN LUNG, SIGNAL = 2.4; EXPRESSED IN FETAL LIVER, SIGNAL = 2.7; NT HIT: AF173642.1, EVALUE 6.70e-01; SWISSPROT HIT: P22448, EVALUE 4.50e-02; EST_HUMAN HIT: BE671538.1, EVALUE 2.50e-01
tctcgccagctgctggcttcctcaccgcctctgagtcttcaatatacatttctggatggaggaagaattggagggaagcgggggggtgtgtggccagcaaggccgatggagactcccggtcctcagcagccccctgacctttgtcttggcctcccccgactggtggatgggggcagcctgcgaagagcccagggtcagctgtgccgagggccgctgggaacaaaagactgtaagggattgcagatgggcctgccacgatgtcagaataataattcat

SEQ ID NO: 17238 - DNA, 168 bp, Homo sapiens
  MAP TO AL050327.6; EXPRESSED IN HBL100, SIGNAL = 0.92; EXPRESSED IN FETAL LIVER, SIGNAL = 1.1; EXPRESSED IN LUNG, SIGNAL = 0.92; EXPRESSED IN HELA, SIGNAL = 0.77; EXPRESSED IN BRAIN, SIGNAL = 0.9; EXPRESSED IN PLACENTA, SIGNAL = 1.4; EXPRESSED IN HEART, SIGNAL = 1.2; EXPRESSED IN ADULT LIVER, SIGNAL = 0.93; EXPRESSED IN BONE MARROW, SIGNAL = 1.3; EXPRESSED IN BT474, SIGNAL = 1.3; EST_HUMAN HIT: F36530.1, EVALUE 9.00e+00; NT HIT: AF295529.1, EVALUE 3.90e-01; SWISSPROT HIT: P14605, EVALUE 2.20e+00
atgaacaaagaaacattaaactcaaaaagacaaaagcggaatgtctacaaaatacctcagaacagtcttcttaattttaggggaaacgactgggtcattttcttccagtgctgtcagaaagcaaagatcctctcctgggagaaagactgcttcaaagtcctccaagat

SEQ ID NO: 17239 - DNA, 166 bp, Homo sapiens
  MAP TO AL050326.3; EXPRESSED IN LUNG, SIGNAL =  10; EXPRESSED IN HEART, SIGNAL =   8; EXPRESSED IN PLACENTA, SIGNAL = 6.6; EXPRESSED IN BONE MARROW, SIGNAL = 8.8; EXPRESSED IN HBL100, SIGNAL = 7.8; EXPRESSED IN FETAL LIVER, SIGNAL = 5.2; EXPRESSED IN ADULT LIVER, SIGNAL = 6.5; EXPRESSED IN BRAIN, SIGNAL =  10; EXPRESSED IN BT474, SIGNAL = 6.8; EXPRESSED IN HELA, SIGNAL = 8.2; NT HIT: AF029726.1, EVALUE 2.10e-02; EST_HUMAN HIT: BE740868.1, EVALUE 8.90e+00
gatgacgatatgatgatggtgatgaagatggtaacagtgctactggtagtgatgatgatggtgatgatagtgatggtgatgatggtgatggtgattatgatgacactgatgatgatgatgttgagaggaggctaataatgatgaggatggtgatgttactggtggt

SEQ ID NO: 17240 - DNA, 77 bp, Homo sapiens
  MAP TO AL050326.3; EXPRESSED IN LUNG, SIGNAL = 6.9; EXPRESSED IN ADULT LIVER, SIGNAL = 4.8; EXPRESSED IN BRAIN, SIGNAL = 6.5; EXPRESSED IN BT474, SIGNAL = 4.3; EXPRESSED IN HEART, SIGNAL = 4.4; EXPRESSED IN PLACENTA, SIGNAL =   5; EXPRESSED IN HELA, SIGNAL = 5.9; EXPRESSED IN FETAL LIVER, SIGNAL = 4.4; EXPRESSED IN HBL100, SIGNAL = 4.4; EXPRESSED IN BONE MARROW, SIGNAL = 4.6
atgatatagtgatgatgatggtgacaatggtggtgataatgatgatagcgatggtgatgatgacagtaatgatgatg

SEQ ID NO: 17241 - DNA, 440 bp, Homo sapiens; identical to SEQ ID NO: 443
  MAP TO AL050306.5; EXPRESSED IN BT474, SIGNAL = 1.1; EXPRESSED IN BONE MARROW, SIGNAL = 0.75; EXPRESSED IN HBL100, SIGNAL = 1.3; EXPRESSED IN FETAL LIVER, SIGNAL = 0.92; EXPRESSED IN HELA, SIGNAL = 1.5; EXPRESSED IN ADULT LIVER, SIGNAL = 0.91; EXPRESSED IN BRAIN, SIGNAL =   2; EXPRESSED IN LUNG, SIGNAL = 0.8; EXPRESSED IN HEART, SIGNAL = 0.98; EST_HUMAN HIT: AA324262.1, EVALUE 0.00e+00; SWISSPROT HIT: O18917, EVALUE 2.90e-01

SEQ ID NO: 17242 - DNA, 552 bp, Homo sapiens
  MAP TO AL050306.5; EXPRESSED IN FETAL LIVER, SIGNAL = 1.1; EXPRESSED IN HELA, SIGNAL = 2.5; EXPRESSED IN ADULT LIVER, SIGNAL = 1.1; EXPRESSED IN BRAIN, SIGNAL = 0.97; EXPRESSED IN PLACENTA, SIGNAL = 0.75; EXPRESSED IN BT474, SIGNAL = 1.6; EXPRESSED IN BONE MARROW, SIGNAL = 1.2; EXPRESSED IN HBL100, SIGNAL = 2.4; EXPRESSED IN LUNG, SIGNAL =   1; EXPRESSED IN HEART, SIGNAL = 0.91; NT HIT: D86479.1, EVALUE 6.00e-03; EST_HUMAN HIT: BE798944.1, EVALUE 0.00e+00; SWISSPROT HIT: P53669, EVALUE 9.10e-01
ctgagctaacctgccatgcagagccctgcaaagctcctcttttctgggccagaagcctagcattctcggcagtgggggactcttgccctgtagagaaaggccccacctccattctgtcttcctcttcatcatcttcatcatcttcatcctcctcttcctcctcttggtcatcattttcttcctcctcctctacctggtctggcaagacctctttctcctccttctcctcttccttgacatcattaacactgccctgctcctcctgttgctgggcctttgcttcagacccgaagctggagctggctggcttgacgctccaatacaggctgtctagtgtatatggagacttcccaatgggggaggcctcagagccctcctgcaccaggctgttttctccactctgggtataaatggaacagatgcgcagcagcttctcctgctcctcgtctggcaggccctgccccatggctttgaagatgctgagcaaagggagggatggggtaggaaagattcaaaatctcaagccacttcataccccaacactccagggtt

SEQ ID NO: 17243 - DNA, 863 bp, Homo sapiens
  MAP TO AL050306.5; EXPRESSED IN ADULT LIVER, SIGNAL = 1.5; EXPRESSED IN HBL100, SIGNAL = 1.5; EXPRESSED IN LUNG, SIGNAL = 2.1; EXPRESSED IN HELA, SIGNAL = 2.6; EXPRESSED IN PLACENTA, SIGNAL = 1.4; EXPRESSED IN BT474, SIGNAL = 2.7; EXPRESSED IN BONE MARROW, SIGNAL = 1.8; EXPRESSED IN FETAL LIVER, SIGNAL = 1.7; EXPRESSED IN BRAIN, SIGNAL = 1.7; EXPRESSED IN HEART, SIGNAL = 1.5; SWISSPROT HIT: P38898, EVALUE 1.20e-02; NT HIT: AF085717.1, EVALUE 1.20e-01
gtgacttctccaaactgaacatcaacagcatgcataaccgagagtattacatggctgaagtagaccggggggtgtatgcccggaatcctaacctctgttctgacagccgtgtgagccataccaggaatgacaactattcctcttacaacaacgtgtatttggctgtagctgatacccatcctgaaggcaatttgaagctgcaccgctcagcatcccagaaccgacttcagccttttcctcatggttaccatgaagccttaacacgagtgcagagctatggcccagaggattctaagcaaggcccccacaaacagtcagtcccccacttagctctgcatgcccagcacccatcaactggaacacgttccagctgtcctgcagactaccccatgcctcccaatatccatcctggggcaaccccccagccaggccgtgccctggtgatgactcggatggatagcatttccgactcccgcctctatgagagcaaccccgtgaggcaaagacgacctcccctgtgccgggaacagcatgccagctgggacccgctgccctgtacaactgactcctatggctaccactcctatcccttgagtaacagcctcatgcaaccatgttatgagccagtcatggtacggagcgtgcctgaaaagatggagcagctttggaggaatccttgggttggaatgtgcaatgattccagggagcatatgatcccagaacaccagtatcagacctacaagaacctctgcaatattttcccttctaacatcgtccttgcagtgatggagaagaatccccacacagcagatgcccagcaactggcagccttgattgttgctaagcttagggctgcacgttga

SEQ ID NO: 17244 - DNA, 109 bp, Homo sapiens
  MAP TO AL050305.9; EXPRESSED IN FETAL LIVER, SIGNAL = 1.4; EXPRESSED IN HEART, SIGNAL = 3.8; EXPRESSED IN PLACENTA, SIGNAL = 0.75; EXPRESSED IN BT474, SIGNAL = 0.97; EXPRESSED IN BONE MARROW, SIGNAL = 0.78; EXPRESSED IN HBL100, SIGNAL = 1.5; EXPRESSED IN LUNG, SIGNAL = 0.91; EXPRESSED IN HELA, SIGNAL = 1.6; EXPRESSED IN ADULT LIVER, SIGNAL =   1; EXPRESSED IN BRAIN, SIGNAL = 1.2; NT HIT: D11476.1, EVALUE 7.90e-01; EST_HUMAN HIT: AA410196.1, EVALUE 5.40e+00
caggtccccatcttctgcagggccaaaatgttcatgtgcttaataagtacaatatgagtagcacaagtgggaccagtctgcttgtagcatgaggtgacaacatcatcac

SEQ ID NO: 17245 - DNA, 302 bp, Homo sapiens
  MAP TO AL049837.3; EXPRESSED IN PLACENTA, SIGNAL = 3.3; EXPRESSED IN BT474, SIGNAL = 3.2; EXPRESSED IN BONE MARROW, SIGNAL = 2.1; EXPRESSED IN FETAL LIVER, SIGNAL = 2.2; EXPRESSED IN HELA, SIGNAL = 2.2; EXPRESSED IN ADULT LIVER, SIGNAL = 1.8; EXPRESSED IN BRAIN, SIGNAL = 2.1; EXPRESSED IN HEART, SIGNAL = 2.4; EXPRESSED IN HBL100, SIGNAL = 2.5; EXPRESSED IN LUNG, SIGNAL = 2.9; NT HIT: AL163209.2, EVALUE 5.00e-76; EST_HUMAN HIT: AW998611.1, EVALUE 1.00e-98; SWISSPROT HIT: P03356, EVALUE 2.00e-09
accaaattaacacatttcctggtacctggtatgcaaccactgacttggcaaatgcctttttctccattcctgtccataaggctcaccagaagcaatttgctttcagctggcaagaccagcaatatacatttactgtcctacttcaggggtatatcaactctctggctttgtgtcataatcttattcggagcaaccttgattgctttttgcttctgcaagatatcacactggtccattacactgatgacattatgctgattggatccagtgagcaagaagtagcaaacacactggacttattg

SEQ ID NO: 17246 - DNA, 158 bp, Homo sapiens
  MAP TO AL049836.2; EXPRESSED IN HELA, SIGNAL = 3.6; EXPRESSED IN ADULT LIVER, SIGNAL = 2.7; EXPRESSED IN BT474, SIGNAL = 3.1; EXPRESSED IN HBL100, SIGNAL = 2.5; EXPRESSED IN FETAL LIVER, SIGNAL = 2.8; EXPRESSED IN LUNG, SIGNAL = 3.7; EXPRESSED IN HEART, SIGNAL = 3.4; EXPRESSED IN PLACENTA, SIGNAL = 2.6; EXPRESSED IN BONE MARROW, SIGNAL = 3.3; EXPRESSED IN BRAIN, SIGNAL = 3.7; SWISSPROT HIT: P17312, EVALUE 1.70e+00; NT HIT: AF195953.1, EVALUE 2.00e-27; EST_HUMAN HIT: AI866347.1, EVALUE 5.00e-28
aactggccctcatcagacaccaaatctgccagcaccttgatcttggacttcccagcctccagaactgtgagaaagaagtgtcttttgtttataagccacccaatctgtagtagtttgttatagcagcccaaatggactaagacacaggggtcaatggt

SEQ ID NO: 17247 - DNA, 596 bp, Homo sapiens
  MAP TO AL049836.2; EXPRESSED IN LUNG, SIGNAL = 2.3; EXPRESSED IN ADULT LIVER, SIGNAL = 1.7; EXPRESSED IN BRAIN, SIGNAL = 2.3; EXPRESSED IN HEART, SIGNAL =   2; EXPRESSED IN PLACENTA, SIGNAL = 2.5; EXPRESSED IN BONE MARROW, SIGNAL = 2.1; EXPRESSED IN HBL100, SIGNAL = 1.6; EXPRESSED IN HELA, SIGNAL = 2.2; EXPRESSED IN BT474, SIGNAL = 1.8; EXPRESSED IN FETAL LIVER, SIGNAL = 1.8; SWISSPROT HIT: Q61127, EVALUE 1.40e+00
agaaaaccacctgctgcatgtggaggcttctactgcttacccatattatatgctcttcttcctccaggcgacagatgaacacagtctctgaccccagcaattagcctgggcttgggactagctctggccaaagggctctgagaggaagcgatgtgaatcgctcctagactaaagccattgacaccaccagactcggcagcgccatctctctcctgtggcacgtgtggaggctgagcctgaaaatggtaacctggacccaggctgctccagggaagacatttccctggagagttactcaagtccccagcaaactttgcaggagccataaaagcaagaaataaagcatctgttgggtttagccagtgagagagttcctttgttgctgcagcagaacttaggctatcctgactaattcagctagtaaaagaagcagcaggagcacttgtctgtctctctctgggatccaggtggaggacaagtctcccctgacaatcacagccacagacctcacttcacaggagggtggggttcgaattcatactccctttgtgttcaaggaaactccaaaccataaaattaaagatatttcaggtatg

SEQ ID NO: 17248 - DNA, 850 bp, Homo sapiens; identical to SEQ ID NO: 450
  MAP TO AL049836.2; EXPRESSED IN BT474, SIGNAL = 3.2; EXPRESSED IN BONE MARROW, SIGNAL = 2.5; EXPRESSED IN HEART, SIGNAL = 4.3; EXPRESSED IN BRAIN, SIGNAL = 5.8; EXPRESSED IN ADULT LIVER, SIGNAL = 5.6; EXPRESSED IN LUNG, SIGNAL = 5.9; EXPRESSED IN FETAL LIVER, SIGNAL =  33; EXPRESSED IN PLACENTA, SIGNAL =  11; EXPRESSED IN HELA, SIGNAL = 5.3; EXPRESSED IN HBL100, SIGNAL = 3.6; EST_HUMAN HIT: AA366556.1, EVALUE 2.00e-53; NT HIT: AF093746.1, EVALUE 3.00e-02; SWISSPROT HIT: P06333, EVALUE 3.00e-06

SEQ ID NO: 17249 - DNA, 160 bp, Homo sapiens
  MAP TO AL049776.2; EXPRESSED IN FETAL LIVER, SIGNAL = 1.2; EXPRESSED IN LUNG, SIGNAL = 0.92; EXPRESSED IN BT474, SIGNAL = 1.3; EXPRESSED IN BONE MARROW, SIGNAL = 2.7; EXPRESSED IN HBL100, SIGNAL = 0.99; EXPRESSED IN ADULT LIVER, SIGNAL = 1.2; EXPRESSED IN BRAIN, SIGNAL =   1; EXPRESSED IN HEART, SIGNAL = 1.2; EXPRESSED IN PLACENTA, SIGNAL = 1.7; EXPRESSED IN HELA, SIGNAL = 0.83; SWISSPROT HIT: Q07283, EVALUE 2.20e+00; NT HIT: gi8923599, EVALUE 4.00e-53; EST_HUMAN HIT: N36757.1, EVALUE 4.00e-75
aaatggttaacatctaaagcaactttttgctttgttcttacctgtaattcttcattatctaacagttctctgctttttctttgtagaaagacagctcttgattcctctcttaatttctgtagtaagacttcatcttcagcaggcagctgaaaatacaagg

SEQ ID NO: 17250 - DNA, 355 bp, Homo sapiens
  MAP TO AL049776.2; EXPRESSED IN BT474, SIGNAL = 2.9; EXPRESSED IN HELA, SIGNAL = 3.7; EXPRESSED IN PLACENTA, SIGNAL = 1.6; EXPRESSED IN BONE MARROW, SIGNAL = 3.4; EXPRESSED IN HBL100, SIGNAL = 4.6; EXPRESSED IN FETAL LIVER, SIGNAL = 2.4; EXPRESSED IN LUNG, SIGNAL = 1.8; EXPRESSED IN ADULT LIVER, SIGNAL = 1.9; EXPRESSED IN BRAIN, SIGNAL =   3; EXPRESSED IN HEART, SIGNAL = 4.5; NT HIT: gi11421829, EVALUE 1.00e-128; EST_HUMAN HIT: BE384475.1, EVALUE 1.00e-128; SWISSPROT HIT: P49643, EVALUE 5.30e+00
atggcccaagtcaaagtatttggagctggttatccaagtctggcaactatgacggtgagtgactggtataagcaacattggaaatatggagcattaccagatcagggaatagccaaggcaacaccagaggaattcagaaaagcagctcagcaacaggaaggtcaagaagaaaaggaggaagaggatgatgaacaaacactctacagagttcgggagtgggatgactggaagggcatccatcctagggactatggcagccaacagagcatgggctgatcttcccacaaatgagaggactgaagggtgcacacctcccacgccaaggaaaaccatgcagtcctcatctccctgggct

SEQ ID NO: 17251 - DNA, 192 bp, Homo sapiens
  MAP TO AL049776.2; EXPRESSED IN BRAIN, SIGNAL = 1.2; EXPRESSED IN BONE MARROW, SIGNAL = 1.1; EXPRESSED IN HBL100, SIGNAL = 1.4; EXPRESSED IN FETAL LIVER, SIGNAL = 1.1; EXPRESSED IN LUNG, SIGNAL = 0.83; EXPRESSED IN ADULT LIVER, SIGNAL = 1.2; EXPRESSED IN HEART, SIGNAL = 2.2; EXPRESSED IN PLACENTA, SIGNAL = 0.96; EXPRESSED IN BT474, SIGNAL = 1.1; EXPRESSED IN HELA, SIGNAL = 1.5; EST_HUMAN HIT: BE787285.1, EVALUE 4.00e-76; NT HIT: gi4557662, EVALUE 2.00e-76; SWISSPROT HIT: P46465, EVALUE 1.70e+00
aagtagtgactgaacctgccggttcccggatagtccagaagaaggtgttcaagggcctggacctccttgagaaggctgccgaaatgttatcgcagcttgacttgttcagctaaaatgaagatttggaagtgattgcttccaccgacctgaagtacctgttggtgccagtgtttcaaggagccttcaccatga

SEQ ID NO: 17252 - DNA, 190 bp, Homo sapiens
  MAP TO AL049767.9; EXPRESSED IN BT474, SIGNAL = 1.8; EXPRESSED IN ADULT LIVER, SIGNAL = 1.5; EXPRESSED IN HEART, SIGNAL = 2.1; EXPRESSED IN BONE MARROW, SIGNAL = 2.3; EXPRESSED IN BRAIN, SIGNAL = 1.9; EXPRESSED IN HELA, SIGNAL = 2.2; EXPRESSED IN PLACENTA, SIGNAL = 2.2; EXPRESSED IN LUNG, SIGNAL = 2.2; EXPRESSED IN FETAL LIVER, SIGNAL = 1.6; EXPRESSED IN HBL100, SIGNAL = 1.7; SWISSPROT HIT: Q03699, EVALUE 1.70e+00; EST_HUMAN HIT: AV731713.1, EVALUE 1.00e-39; NT HIT: AL163209.2, EVALUE 1.00e-50
gagacctctggctttttaccaggggaactgtgtactggggaaagggaaatgatcagacatttcagggactactggacactggctctgagctgacgttgattccaggggacccaaaacatcattgtggtcctccaggaccaaaagtaagggcttatggagatcaggtaattaacggagttttggctcaggt

SEQ ID NO: 17253 - DNA, 159 bp, Homo sapiens
  MAP TO AL049767.9; EXPRESSED IN ADULT LIVER, SIGNAL =   5; EXPRESSED IN BRAIN, SIGNAL = 7.7; EXPRESSED IN PLACENTA, SIGNAL = 5.3; EXPRESSED IN BT474, SIGNAL = 4.9; EXPRESSED IN HEART, SIGNAL = 5.4; EXPRESSED IN FETAL LIVER, SIGNAL = 7.6; EXPRESSED IN HELA, SIGNAL = 6.1; EXPRESSED IN LUNG, SIGNAL = 6.5; EXPRESSED IN HBL100, SIGNAL = 5.2; EXPRESSED IN BONE MARROW, SIGNAL = 6.8; NT HIT: AL163303.2, EVALUE 1.00e-37; EST_HUMAN HIT: BE390947.1, EVALUE 2.00e-40; SWISSPROT HIT: P21333, EVALUE 2.60e-01
ctctgtccctgtggctttgcagggtacagcccccctccaggcttctttcatgggctggcattgtctgtggcttctcaaggtgcacattgcaagctgtcagtggatctaccattctggggtctgcaggatggtggccctcttctcacagctccattaggc

SEQ ID NO: 17254 - DNA, 143 bp, Homo sapiens
  MAP TO AL049745.9; EXPRESSED IN BT474, SIGNAL =   1; EXPRESSED IN BONE MARROW, SIGNAL = 1.4; EXPRESSED IN HBL100, SIGNAL =   1; EXPRESSED IN BRAIN, SIGNAL = 1.5; EXPRESSED IN ADULT LIVER, SIGNAL = 1.3; EXPRESSED IN LUNG, SIGNAL = 1.4; EXPRESSED IN PLACENTA, SIGNAL = 1.1; EXPRESSED IN HEART, SIGNAL = 1.1; EXPRESSED IN HELA, SIGNAL = 1.5; EXPRESSED IN FETAL LIVER, SIGNAL = 1.2; NT HIT: D86980.1, EVALUE 1.10e+00
tgggtggtgtggtggaagggcagtggaatgaggaagctgaagatttggcaagactagtggaaatgatagctcttggtgcccagaaccatagtttcctgcctatcaggtttgtaagtgtcttgcctggcagggtaggtttgcct

SEQ ID NO: 17255 - DNA, 118 bp, Homo sapiens
  MAP TO AL049737.4; EXPRESSED IN BT474, SIGNAL = 1.5; EXPRESSED IN HBL100, SIGNAL = 1.8; EXPRESSED IN FETAL LIVER, SIGNAL = 1.5; EXPRESSED IN LUNG, SIGNAL = 1.4; EXPRESSED IN BRAIN, SIGNAL = 1.5; EXPRESSED IN PLACENTA, SIGNAL =   2; EXPRESSED IN HEART, SIGNAL = 1.5; EXPRESSED IN ADULT LIVER, SIGNAL = 1.5; EXPRESSED IN HELA, SIGNAL = 1.3; EXPRESSED IN BONE MARROW, SIGNAL = 1.8; NT HIT: AF106953.2, EVALUE 8.70e-01; EST_HUMAN HIT: AI858600.1, EVALUE 1.50e+00
actgagtgcctaccagttgtcaagtatgatgttagtgttgcgaatccagaagggagcaaagcaggaaagttctgctctcaaggagccacgtgttcctgttcccaggagcgtcaaggaa

SEQ ID NO: 17256 - DNA, 98 bp, Homo sapiens
  MAP TO AL049696.8; EXPRESSED IN FETAL LIVER, SIGNAL = 1.2; EXPRESSED IN HELA, SIGNAL = 2.3; EXPRESSED IN BRAIN, SIGNAL = 1.5; EXPRESSED IN HEART, SIGNAL = 1.5; EXPRESSED IN PLACENTA, SIGNAL = 1.6; EXPRESSED IN ADULT LIVER, SIGNAL = 1.2; EXPRESSED IN LUNG, SIGNAL = 1.7; EXPRESSED IN HBL100, SIGNAL = 1.8; EXPRESSED IN BONE MARROW, SIGNAL = 1.9; EXPRESSED IN BT474, SIGNAL = 1.3; EST_HUMAN HIT: AL046445.1, EVALUE 3.00e-16; SWISSPROT HIT: P30797, EVALUE 7.00e+00; NT HIT: AJ006345.1, EVALUE 1.00e-08
tccccaacccccaggccatggaccagtatggtccctgccctgttaggaacctggccactcagcaggaggtgagcagcaggcaagggagcattactgcc

SEQ ID NO: 17257 - DNA, 319 bp, Homo sapiens
  MAP TO AL049636.21; EXPRESSED IN BT474, SIGNAL =   4; EXPRESSED IN BONE MARROW, SIGNAL = 2.2; EXPRESSED IN HBL100, SIGNAL = 9.2; EXPRESSED IN HELA, SIGNAL = 3.1; EXPRESSED IN ADULT LIVER, SIGNAL = 3.8; EXPRESSED IN BRAIN, SIGNAL = 5.6; EXPRESSED IN PLACENTA, SIGNAL = 2.3; EXPRESSED IN FETAL LIVER, SIGNAL = 4.9; EXPRESSED IN LUNG, SIGNAL = 2.6; EXPRESSED IN HEART, SIGNAL = 3.6; EST_HUMAN HIT: BE767589.1, EVALUE 1.00e-83; NT HIT: gi4507712, EVALUE 1.00e-109; SWISSPROT HIT: Q99615, EVALUE 3.00e-31
atttccttgaacttcccctcctccttctgaacctcagcactgcctccactgtgccaatctggatggtgcatcaaggcccatttgtgataagctttcttggtctcgtcctcagaggcattattgtccactcccagaatcttgtagtaatctttcttcttactcttcttcagtttcagctgtgcattttttaggagctgtttgtgttcttttgttttctctgtctgatacactttttcataattgtgcactgcttcttcatactgtttggtgttcatgtaacactgagctcttctcaagcaggcttttaaataggtgtcat

SEQ ID NO: 17258 - DNA, 694 bp, Homo sapiens
  MAP TO AL049595.5; EXPRESSED IN HEART, SIGNAL = 3.2; EXPRESSED IN BONE MARROW, SIGNAL = 3.5; EXPRESSED IN FETAL LIVER, SIGNAL = 4.3; EXPRESSED IN HELA, SIGNAL = 6.1; EXPRESSED IN ADULT LIVER, SIGNAL = 4.2; EXPRESSED IN BRAIN, SIGNAL = 3.1; EXPRESSED IN PLACENTA, SIGNAL = 3.4; EXPRESSED IN BT474, SIGNAL = 3.4; EXPRESSED IN HBL100, SIGNAL = 5.9; EXPRESSED IN LUNG, SIGNAL = 3.5; EST_HUMAN HIT: BE746231.1, EVALUE 2.00e-07; NT HIT: gi11417523, EVALUE 0.00e+00; SWISSPROT HIT: P28222, EVALUE 1.00e-120
tttaccaggactccatctccctaccctggaaagtactgctggttatgctattggcgctcatcaccttggccaccacgctctccaatgcctttgtgattgccacagtgtaccggacccggaaactgcacaccccggctaactacctgatcgcctctctggcggtcaccgacctgcttgtgtccatcctggtgatgcccatcagcaccatgtacactgtcaccggccgctggacactgggccaggtggtctgtgacttctggctgtcgtcggacatcacttgttgcactgcctccatcctgcacctctgtgtcatcgccctggaccgctactgggccatcacggacgccgtggagtactcagctaaaaggactcccaagagggcggcggtcatgatcgcgctggtgtgggtcttctccatctctatctcgctgccgcccttcttctggcgtcaggctaaggccgaagaggaggtgtcggaatgcgtggtgaacaccgaccacatcctctacacggtctactccacggtgggtgctttctacttccccaccctgctcctcatcgccctctatggccgcatctacgtagaagcccgctcccggattttgaaacagacgcccaacaggaccggcaagcgcttgacccgagcccagctgataaccgactcccccgggtccacgtcctcggtcacctctat

SEQ ID NO: 17259 - DNA, 93 bp, Homo sapiens
  MAP TO AL049575.7; EXPRESSED IN PLACENTA, SIGNAL = 1.1; EXPRESSED IN FETAL LIVER, SIGNAL = 1.4; EXPRESSED IN LUNG, SIGNAL = 1.6; EXPRESSED IN HELA, SIGNAL = 1.4; EXPRESSED IN BRAIN, SIGNAL = 1.5; EXPRESSED IN HEART, SIGNAL = 0.96; EXPRESSED IN BT474, SIGNAL = 1.3; EXPRESSED IN BONE MARROW, SIGNAL = 1.3; EXPRESSED IN ADULT LIVER, SIGNAL = 1.1; EXPRESSED IN HBL100, SIGNAL = 1.2; SWISSPROT HIT: P15289, EVALUE 7.00e+00; EST_HUMAN HIT: BE964961.2, EVALUE 7.30e-02
gacagcactgaaggatgtccctgatgggactgtggacaacgaggggagcatgctggtgagaggcaaacctgacacatcggctgcttcttgtcc

SEQ ID NO: 17260 - DNA, 202 bp, Homo sapiens
  MAP TO AL049575.7; EXPRESSED IN BRAIN, SIGNAL = 2.3; EXPRESSED IN BT474, SIGNAL = 1.4; EXPRESSED IN HBL100, SIGNAL = 1.5; EXPRESSED IN HELA, SIGNAL = 1.3; EXPRESSED IN ADULT LIVER, SIGNAL = 1.4; EXPRESSED IN PLACENTA, SIGNAL = 1.7; EXPRESSED IN BONE MARROW, SIGNAL = 2.1; EXPRESSED IN FETAL LIVER, SIGNAL = 1.6; EXPRESSED IN LUNG, SIGNAL = 1.6; EXPRESSED IN HEART, SIGNAL = 1.5; NT HIT: U10991.1, EVALUE 6.00e-34; EST_HUMAN HIT: AI742431.1, EVALUE 4.80e-01
ctttgctctctgcggcaggtttatcatggtgtcaggcttgaagtcgttcttgttcttcctgcagagcacggcagtgatgatgatgatgatgaccgtgaccacggcaatgggcgccagcactgcagcgatgatccacaggttattgggcgggttcttcaccacggctgtgggaaagagccagcaggagggacatgacaagcaa

SEQ ID NO: 17261 - DNA, 93 bp, Homo sapiens
  MAP TO AL049557.19; EXPRESSED IN PLACENTA, SIGNAL =   1; EXPRESSED IN BONE MARROW, SIGNAL = 1.9; EXPRESSED IN HBL100, SIGNAL = 1.3; EXPRESSED IN ADULT LIVER, SIGNAL = 0.97; EXPRESSED IN BRAIN, SIGNAL = 1.4; EXPRESSED IN HEART, SIGNAL = 1.5; EXPRESSED IN HELA, SIGNAL = 0.96; EXPRESSED IN BT474, SIGNAL = 1.1; EXPRESSED IN FETAL LIVER, SIGNAL = 1.6; EXPRESSED IN LUNG, SIGNAL = 1.4; NT HIT: gi4506412, EVALUE 1.00e-45; SWISSPROT HIT: P10113, EVALUE 5.00e-11; EST_HUMAN HIT: AV661065.1, EVALUE 2.00e-45
tttgcactagtatattctattacagctcagtccacgtttaacgacttacaggacctgagggaacagattttacgggttaaggacacggaagat

SEQ ID NO: 17262 - DNA, 472 bp, Homo sapiens
  MAP TO AL049557.19; EXPRESSED IN BRAIN, SIGNAL = 1.2; EXPRESSED IN BONE MARROW, SIGNAL = 2.8; EXPRESSED IN ADULT LIVER, SIGNAL =  15; EXPRESSED IN PLACENTA, SIGNAL =  22; EXPRESSED IN BT474, SIGNAL =  56; EXPRESSED IN HBL100, SIGNAL =  21; EXPRESSED IN FETAL LIVER, SIGNAL =  11; EXPRESSED IN LUNG, SIGNAL = 5.6; EXPRESSED IN HELA, SIGNAL =  15; EXPRESSED IN HEART, SIGNAL = 1.3; NT HIT: gi11434787, EVALUE 0.00e+00; SWISSPROT HIT: P05783, EVALUE 1.00e-63; EST_HUMAN HIT: BE378641.1, EVALUE 0.00e+00
gtcctgagatttgggggcatctgcctccatggtcaacccagagctggcaatctgggcttgtaggccttttacttcccctttatggttcttcttcatgaagaacagctcttcgttgagagcctcgatctctggcttcagctgcagccaagtgacattgatgtcatcattgaccttgtggagtccgtggatgtcactctccacagactggcacatggccagctctgtctcatacttgactctaaagtcatcagtagcaagatgggcattgtcaatctgcagaacgatgtgggcattgtccacagtatttaagaagatctgagctctcacgtcctcgatggtcttgaagtaatggccccagtccctgagctggggtcccttcttctccaggtgctcctggattttgctctccagcttccggttctcggtttccaggctctcactctgtccaggtaggaggccaggcattgaggcg

SEQ ID NO: 17263 - DNA, 117 bp, Homo sapiens
  MAP TO AL049556.13; EXPRESSED IN BT474, SIGNAL = 2.1; EXPRESSED IN FETAL LIVER, SIGNAL = 1.6; EXPRESSED IN LUNG, SIGNAL =   2; EXPRESSED IN PLACENTA, SIGNAL = 2.4; EXPRESSED IN HELA, SIGNAL = 1.5; EXPRESSED IN HEART, SIGNAL = 1.7; EXPRESSED IN BRAIN, SIGNAL = 1.7; EXPRESSED IN ADULT LIVER, SIGNAL = 1.5; EXPRESSED IN HBL100, SIGNAL = 1.6; EXPRESSED IN BONE MARROW, SIGNAL = 2.7; EST_HUMAN HIT: AW071549.1, EVALUE 4.10e+00; NT HIT: X17012.1, EVALUE 8.60e-01
ctctttttcctccctgtcttcctcctctttcttatctgcttccctctcttcctcttcttcctccttttctaaatgtccttctcaaatggacattaggtttcatacactctcctacct

SEQ ID NO: 17264 - DNA, 119 bp, Homo sapiens
  MAP TO AL035697.18; EXPRESSED IN HBL100, SIGNAL = 2.1; EXPRESSED IN FETAL LIVER, SIGNAL = 2.4; EXPRESSED IN LUNG, SIGNAL = 1.5; EXPRESSED IN ADULT LIVER, SIGNAL = 2.1; EXPRESSED IN PLACENTA, SIGNAL = 2.3; EXPRESSED IN BONE MARROW, SIGNAL = 3.1; EXPRESSED IN HEART, SIGNAL = 1.6; EXPRESSED IN BT474, SIGNAL = 2.4; EXPRESSED IN HELA, SIGNAL = 1.7; EXPRESSED IN BRAIN, SIGNAL = 1.5; EST_HUMAN HIT: AW832810.1, EVALUE 8.00e-14; NT HIT: AF135446.1, EVALUE 3.00e-16; SWISSPROT HIT: P35658, EVALUE 4.00e+00
aaaaaagagtccagtgatgtggcaaacatcaccgttgtcttagaaattgccacagccacgtcaagcttcagcagccgcaaccctgatcagtcagcagccatcaacatgaaggtaagacc

SEQ ID NO: 17265 - DNA, 142 bp, Homo sapiens
  MAP TO AL035697.18; EXPRESSED IN BT474, SIGNAL = 2.4; EXPRESSED IN BONE MARROW, SIGNAL =   3; EXPRESSED IN FETAL LIVER, SIGNAL = 3.2; EXPRESSED IN HELA, SIGNAL = 3.4; EXPRESSED IN ADULT LIVER, SIGNAL = 4.5; EXPRESSED IN HEART, SIGNAL = 2.3; EXPRESSED IN PLACENTA, SIGNAL = 4.3; EXPRESSED IN HBL100, SIGNAL = 2.8; EXPRESSED IN LUNG, SIGNAL = 3.5; EXPRESSED IN BRAIN, SIGNAL =   4; SWISSPROT HIT: Q50638, EVALUE 6.70e+00; NT HIT: AF195953.1, EVALUE 5.00e+00
ctgtcctgttcctgggcctggagatgagggtccacctctcccaggtcctgaggactttcctcctggagcctagcctgccagtgagtaggctgctctgatctcttctccctgcactccaacatcttgctttcagctttgccct

SEQ ID NO: 17266 - DNA, 129 bp, Homo sapiens
  MAP TO AL035696.14; EXPRESSED IN FETAL LIVER, SIGNAL = 1.2; EXPRESSED IN HELA, SIGNAL = 1.5; EXPRESSED IN BRAIN, SIGNAL = 1.5; EXPRESSED IN HEART, SIGNAL = 1.2; EXPRESSED IN BT474, SIGNAL = 1.4; EXPRESSED IN BONE MARROW, SIGNAL = 1.2; EXPRESSED IN PLACENTA, SIGNAL = 1.4; EXPRESSED IN ADULT LIVER, SIGNAL = 1.2; EXPRESSED IN LUNG, SIGNAL = 4.4; EXPRESSED IN HBL100, SIGNAL = 1.1; SWISSPROT HIT: P79760, EVALUE 4.00e+00; NT HIT: AF118569.1, EVALUE 4.50e+00; EST_HUMAN HIT: AW838547.1, EVALUE 7.40e-02
ttagatctcactatgagcttctgctgtggcacaggctggcaggctgctcctgtactgactcaaggaaccatgacgaccttctgactcaccggcacctcttcctgctgcttctctgtacaacgagtcccc

SEQ ID NO: 17267 - DNA, 209 bp, Homo sapiens
  MAP TO AL035696.14; EXPRESSED IN BONE MARROW, SIGNAL = 3.5; EXPRESSED IN ADULT LIVER, SIGNAL = 2.3; EXPRESSED IN HEART, SIGNAL = 2.1; EXPRESSED IN LUNG, SIGNAL = 2.8; EXPRESSED IN HELA, SIGNAL = 3.5; EXPRESSED IN PLACENTA, SIGNAL = 2.7; EXPRESSED IN BT474, SIGNAL = 2.8; EXPRESSED IN HBL100, SIGNAL = 5.1; EXPRESSED IN FETAL LIVER, SIGNAL = 2.9; EXPRESSED IN BRAIN, SIGNAL = 1.8; NT HIT: AF139822.1, EVALUE 1.90e+00; SWISSPROT HIT: O43474, EVALUE 1.90e-01; EST_HUMAN HIT: AU146707.1, EVALUE 2.00e-04
cgagacctgtacttgtgtgacggatggttcatacaagtattgaaggtccacatcaccagcatcggccagctcaaagaccagcatgggtggaggaccagcctccagccagtcagctccaggagacacgcctggccaggaccagctacaggatttgcaggccccattgcaagatgaaaatgagggatccatggttcaaaaatgactaagaa

SEQ ID NO: 17268 - DNA, 319 bp, Homo sapiens
  MAP TO AL035687.13; EXPRESSED IN PLACENTA, SIGNAL =  50; EXPRESSED IN BT474, SIGNAL =  81; EXPRESSED IN BONE MARROW, SIGNAL =  83; EXPRESSED IN LUNG, SIGNAL =  57; EXPRESSED IN ADULT LIVER, SIGNAL =  35; EXPRESSED IN BRAIN, SIGNAL =  16; EXPRESSED IN HBL100, SIGNAL = 1.3e+02; EXPRESSED IN FETAL LIVER, SIGNAL =  84; EXPRESSED IN HELA, SIGNAL =  79; EXPRESSED IN HEART, SIGNAL =  14; NT HIT: X62245.1, EVALUE 8.00e-87; EST_HUMAN HIT: BE387666.1, EVALUE 9.00e-84; SWISSPROT HIT: P10126, EVALUE 4.00e-40
atatttgttgtgacaatgttgctggtggcagcaaaaatgacctgcaaatggaagcagctggattcactgctcaggtgattatcctgaacaagccagaccaaatcactggtggctatgtccctgtactggattgccacacagctcacattgtttgcacgtctgctgagctgaaggaaaagattgaatactattctggtaataagctggaagatggccctaaattcttgaaatctgatgatgctgccattgttgatatggttcctgacaagcccatgtgtgttgacagcctctctgactattctcttctgggtcgttttgc

SEQ ID NO: 17269 - DNA, 181 bp, Homo sapiens
  MAP TO AL035687.13; EXPRESSED IN HEART, SIGNAL =   1; EXPRESSED IN BONE MARROW, SIGNAL = 1.4; EXPRESSED IN HELA, SIGNAL = 0.96; EXPRESSED IN ADULT LIVER, SIGNAL = 0.94; EXPRESSED IN BRAIN, SIGNAL = 0.91; EXPRESSED IN PLACENTA, SIGNAL = 1.5; EXPRESSED IN BT474, SIGNAL = 1.5; EXPRESSED IN FETAL LIVER, SIGNAL = 1.2; EXPRESSED IN LUNG, SIGNAL = 1.1; EXPRESSED IN HBL100, SIGNAL =   1; EST_HUMAN HIT: BF527890.1, EVALUE 2.00e-10; SWISSPROT HIT: P14963, EVALUE 1.00e-07; NT HIT: J04617.1, EVALUE 1.00e-10
gtagcttttccacaacatgtttgcctccagaacacatgctgctaaaaccacccctaaaagccaaaatgcaaaggaagagattcttaacagcattattgttattggacacatagatctgggaaagtccatgactactggccatctgatccccaaatgtgattgtatcaacaaaagaaccatt

SEQ ID NO: 17270 - DNA, 137 bp, Homo sapiens
  MAP TO AL035686.11; EXPRESSED IN BT474, SIGNAL = 1.1; EXPRESSED IN BONE MARROW, SIGNAL = 1.5; EXPRESSED IN LUNG, SIGNAL = 1.6; EXPRESSED IN HELA, SIGNAL = 0.93; EXPRESSED IN ADULT LIVER, SIGNAL = 1.3; EXPRESSED IN BRAIN, SIGNAL = 1.4; EXPRESSED IN PLACENTA, SIGNAL = 1.9; EXPRESSED IN HBL100, SIGNAL = 1.1; EXPRESSED IN FETAL LIVER, SIGNAL = 1.2; EXPRESSED IN HEART, SIGNAL = 1.4; EST_HUMAN HIT: BE744001.1, EVALUE 1.80e+00; NT HIT: D16412.1, EVALUE 3.10e-01; SWISSPROT HIT: P45306, EVALUE 5.10e+00
agaggttttgcagtttcctgaatgtcacatacctgtgccaggagagcgaggtacacgatttggtctccaacttcaacctgagcgtgggggaggaggtaggagagtgtcctttatcatattcaataggcttctggtag

SEQ ID NO: 17271 - DNA, 157 bp, Homo sapiens
  MAP TO AL035686.11; EXPRESSED IN HBL100, SIGNAL = 1.6; EXPRESSED IN FETAL LIVER, SIGNAL = 1.7; EXPRESSED IN BRAIN, SIGNAL = 1.9; EXPRESSED IN BT474, SIGNAL = 2.7; EXPRESSED IN BONE MARROW, SIGNAL = 2.1; EXPRESSED IN HELA, SIGNAL = 1.8; EXPRESSED IN ADULT LIVER, SIGNAL =   2; EXPRESSED IN PLACENTA, SIGNAL = 1.9; EXPRESSED IN LUNG, SIGNAL = 1.9; EXPRESSED IN HEART, SIGNAL = 1.6; NT HIT: AL163284.2, EVALUE 1.00e-15; EST_HUMAN HIT: BE408611.1, EVALUE 1.00e-19; SWISSPROT HIT: P12589, EVALUE 1.00e+00
aggctccactaattctgtttggtttgccacttccaccatgtctgacgtaatttcctccactgaagtcttacactcctctaagtcatccctaagggttggaatcaacgtcttcctaactcctgttactgttgatattttgacctcctcccataaatca

SEQ ID NO: 17272 - DNA, 108 bp, Homo sapiens
  MAP TO AL035686.11; EXPRESSED IN PLACENTA, SIGNAL = 2.8; EXPRESSED IN FETAL LIVER, SIGNAL = 1.8; EXPRESSED IN LUNG, SIGNAL = 2.5; EXPRESSED IN HELA, SIGNAL =   1; EXPRESSED IN BT474, SIGNAL = 1.1; EXPRESSED IN BONE MARROW, SIGNAL = 2.2; EXPRESSED IN HBL100, SIGNAL = 1.9; EXPRESSED IN ADULT LIVER, SIGNAL = 2.3; EXPRESSED IN BRAIN, SIGNAL = 1.8; EXPRESSED IN HEART, SIGNAL =   2; NT HIT: AF098004.1, EVALUE 5.00e-02; EST_HUMAN HIT: AI581121.1, EVALUE 2.40e-01
tactgctggagtaccagacattataacgacattccagccatcaggaaggaagagccagagacataaaagcacccaccacctccttttgaatatatttcccggaagctg

SEQ ID NO: 17273 - DNA, 293 bp, Homo sapiens
  MAP TO AL035610.2; EXPRESSED IN FETAL LIVER, SIGNAL = 2.6; EXPRESSED IN LUNG, SIGNAL = 3.3; EXPRESSED IN HELA, SIGNAL =   3; EXPRESSED IN PLACENTA, SIGNAL = 4.1; EXPRESSED IN BT474, SIGNAL = 4.4; EXPRESSED IN BONE MARROW, SIGNAL = 2.7; EXPRESSED IN HBL100, SIGNAL = 2.9; EXPRESSED IN ADULT LIVER, SIGNAL = 2.1; EXPRESSED IN BRAIN, SIGNAL = 2.6; EXPRESSED IN HEART, SIGNAL = 2.3; EST_HUMAN HIT: BE064410.1, EVALUE 2.00e-26; SWISSPROT HIT: P03177, EVALUE 3.00e+00; NT HIT: AL163246.2, EVALUE 0.00e+00
cacaggaacaggaagcaaaaattttgctagtgaatcactaggggtgatggtgagtggtgccgcttccacgtccccccccgattgctggacccatgaaacctggatatataggagaaacaccaccatatattggacactgattcagagcaaactcagtcttcaggagaactttgcccagccctgcaaagtattgtcactagttggaattgtaattgtgatttcaaaaggccattccaccattctctcaatgctgcttcaggatgatggggaacaaggtaagaccagtgaattcc

SEQ ID NO: 17274 - DNA, 275 bp, Homo sapiens
  MAP TO AL035610.2; EXPRESSED IN BT474, SIGNAL = 5.2; EXPRESSED IN FETAL LIVER, SIGNAL = 5.1; EXPRESSED IN HELA, SIGNAL = 7.2; EXPRESSED IN PLACENTA, SIGNAL = 5.9; EXPRESSED IN BONE MARROW, SIGNAL = 6.8; EXPRESSED IN HBL100, SIGNAL = 5.4; EXPRESSED IN LUNG, SIGNAL = 6.8; EXPRESSED IN ADULT LIVER, SIGNAL = 5.7; EXPRESSED IN BRAIN, SIGNAL = 9.3; EXPRESSED IN HEART, SIGNAL =   7; NT HIT: AL163246.2, EVALUE 0.00e+00; SWISSPROT HIT: P30270, EVALUE 3.40e+00; EST_HUMAN HIT: AA746130.1, EVALUE 0.00e+00
ggaaagagcagacctgctgagtcttctggccctcaccgttctcccgtgctggattcttctggccctcaaacatcagactccacgttcttcagcttttggactcatggacttacaccagtggtgtgccagggcctcttgagcctttggtcacagactgaaggctacactgtcagcttctctaattttgaggttttgggactcagactgatccaccactggcttccttgctcctcaacttgcagatggcttctcacgggacttgactttatgatcat

SEQ ID NO: 17275 - DNA, 225 bp, Homo sapiens
  MAP TO AL035610.2; EXPRESSED IN ADULT LIVER, SIGNAL = 2.6; EXPRESSED IN BRAIN, SIGNAL = 2.8; EXPRESSED IN BT474, SIGNAL = 2.1; EXPRESSED IN PLACENTA, SIGNAL = 2.3; EXPRESSED IN HEART, SIGNAL = 2.1; EXPRESSED IN HELA, SIGNAL =   3; EXPRESSED IN LUNG, SIGNAL = 2.7; EXPRESSED IN FETAL LIVER, SIGNAL = 2.3; EXPRESSED IN HBL100, SIGNAL = 2.3; EXPRESSED IN BONE MARROW, SIGNAL = 2.1; NT HIT: AL163246.2, EVALUE 1.00e-124; EST_HUMAN HIT: BE149264.1, EVALUE 2.00e-09; SWISSPROT HIT: O70521, EVALUE 1.70e+00
cccaagcctcaaacactcttgcattctgtgcacctacaaagtaaacaccatgtagaagccaccaacacttatggcttgcaccctctggtgctgtggcctaagctgttcctggactactttgagccactgctggagctgaagctgacaggatacagggagccatgtcctaaggctgtgcagggcagcagggccctgggcatggcccacaaaaccattctctcctcc

SEQ ID NO: 17276 - DNA, 370 bp, Homo sapiens
  MAP TO AL035470.7; EXPRESSED IN BT474, SIGNAL = 4.3; EXPRESSED IN BONE MARROW, SIGNAL = 4.7; EXPRESSED IN HBL100, SIGNAL = 8.2; EXPRESSED IN ADULT LIVER, SIGNAL = 2.7; EXPRESSED IN PLACENTA, SIGNAL =   3; EXPRESSED IN FETAL LIVER, SIGNAL = 4.4; EXPRESSED IN LUNG, SIGNAL = 3.8; EXPRESSED IN HELA, SIGNAL = 3.2; EXPRESSED IN BRAIN, SIGNAL = 2.6; EXPRESSED IN HEART, SIGNAL = 2.9; EST_HUMAN HIT: AW055198.1, EVALUE 9.00e-42; SWISSPROT HIT: P28732, EVALUE 7.50e+00; NT HIT: gi5730038, EVALUE 5.00e-42
acttcgtagcccaattcattcaacttttgaagcactggttgtttgatgtgcggttgggcattatcatgagaatttggccttttctgttgaccaatgtcggctgcaggcattgcagttttcggtgcatctaattgatttactgagcatacttcttagatgtgatggttttgctgggattccgaaagctgtagtggatcagactggcagcaggccaccaaacagtgcccatgatcttcttttggtgcaagaagctttggagtttctttttggtccaatcactgagctggttttctccagttgtcatatacaatccactttttatcgcatgtcacaatccgatcaagaaatagttcattgttgttgcatagaa

SEQ ID NO: 17277 - DNA, 370 bp, Homo sapiens; identical to SEQ ID NO: 17276
  MAP TO AL035470.7; EXPRESSED IN LUNG, SIGNAL = 2.3; EXPRESSED IN ADULT LIVER, SIGNAL = 2.1; EXPRESSED IN BRAIN, SIGNAL = 2.7; EXPRESSED IN PLACENTA, SIGNAL = 1.1; EXPRESSED IN BT474, SIGNAL = 2.4; EXPRESSED IN HEART, SIGNAL = 1.3; EXPRESSED IN FETAL LIVER, SIGNAL = 2.7; EXPRESSED IN HELA, SIGNAL = 2.9; EXPRESSED IN HBL100, SIGNAL = 3.6; EXPRESSED IN BONE MARROW, SIGNAL = 1.4; EST_HUMAN HIT: AW055198.1, EVALUE 9.00e-42; NT HIT: gi5730038, EVALUE 5.00e-42; SWISSPROT HIT: P28732, EVALUE 7.50e+00

SEQ ID NO: 17278 - DNA, 103 bp, Homo sapiens
  MAP TO AL035417.15; EXPRESSED IN HELA, SIGNAL = 7.4; EXPRESSED IN BT474, SIGNAL =  10; EXPRESSED IN HBL100, SIGNAL = 8.8; EXPRESSED IN FETAL LIVER, SIGNAL = 9.4; EXPRESSED IN LUNG, SIGNAL = 9.4; EXPRESSED IN BRAIN, SIGNAL =  10; EXPRESSED IN PLACENTA, SIGNAL =  12; EXPRESSED IN BONE MARROW, SIGNAL =  13; EXPRESSED IN ADULT LIVER, SIGNAL = 6.3; EXPRESSED IN HEART, SIGNAL = 7.5; NT HIT: AF003100.1, EVALUE 4.80e-02; SWISSPROT HIT: P87552, EVALUE 9.10e+00
atggcttgctttggggcaaatatcattagcactgccacctgctcctattgctctattgaagccttccatcccttcagcttcccttctcttactagctacagtg

SEQ ID NO: 17279 - DNA, 465 bp, Homo sapiens; identical to SEQ ID NO: 481
  MAP TO AL035400.13; EXPRESSED IN BONE MARROW, SIGNAL = 4.8; EXPRESSED IN ADULT LIVER, SIGNAL =  16; EXPRESSED IN BRAIN, SIGNAL = 7.2; EXPRESSED IN PLACENTA, SIGNAL = 5.9; EXPRESSED IN BT474, SIGNAL =  10; EXPRESSED IN HBL100, SIGNAL =  19; EXPRESSED IN FETAL LIVER, SIGNAL = 8.1; EXPRESSED IN LUNG, SIGNAL =   6; EXPRESSED IN HELA, SIGNAL = 6.3; EXPRESSED IN HEART, SIGNAL =   7; EST_HUMAN HIT: BE161049.1, EVALUE 1.00e-75; SWISSPROT HIT: P16053, EVALUE 3.60e+00; NT HIT: AL163249.2, EVALUE 5.00e-46

SEQ ID NO: 17280 - DNA, 136 bp, Homo sapiens
  MAP TO AL035086.12; EXPRESSED IN BT474, SIGNAL = 1.5; EXPRESSED IN LUNG, SIGNAL = 2.2; EXPRESSED IN HELA, SIGNAL = 1.4; EXPRESSED IN BRAIN, SIGNAL = 1.3; EXPRESSED IN PLACENTA, SIGNAL = 2.6; EXPRESSED IN BONE MARROW, SIGNAL = 1.5; EXPRESSED IN HBL100, SIGNAL = 1.3; EXPRESSED IN FETAL LIVER, SIGNAL =   2; EXPRESSED IN ADULT LIVER, SIGNAL = 1.6; EXPRESSED IN HEART, SIGNAL = 1.4; NT HIT: AB033035.1, EVALUE 7.00e-48; EST_HUMAN HIT: AI207794.1, EVALUE 4.00e-31; SWISSPROT HIT: P23610, EVALUE 5.90e-01
ctggactgtgtgctgcagcttgggattcttgtagtggaagacgctgaagctgagcggctcttttggaatcacctccacaagcatgaggttgccacactagagcagagagagcagagagggtgaggcacactcagga

SEQ ID NO: 17281 - DNA, 106 bp, Homo sapiens
  MAP TO AL035086.12; EXPRESSED IN PLACENTA, SIGNAL = 0.98; EXPRESSED IN LUNG, SIGNAL = 1.1; EXPRESSED IN HELA, SIGNAL = 1.5; EXPRESSED IN ADULT LIVER, SIGNAL = 1.1; EXPRESSED IN BT474, SIGNAL =   2; EXPRESSED IN BONE MARROW, SIGNAL = 1.7; EXPRESSED IN HBL100, SIGNAL = 1.2; EXPRESSED IN FETAL LIVER, SIGNAL = 1.1; EXPRESSED IN BRAIN, SIGNAL = 1.7; EXPRESSED IN HEART, SIGNAL = 1.4; NT HIT: M14123.1, EVALUE 2.00e-29; EST_HUMAN HIT: AW086063.1, EVALUE 1.00e-27; SWISSPROT HIT: P10267, EVALUE 2.00e-11
aatccactggtggcactgacagtaggtacttctaccaaccaattttgggttgtaggcattaagcatcctggtgccctccccaggcaaataggaggataacaatacc

SEQ ID NO: 17282 - DNA, 766 bp, Homo sapiens
  MAP TO AL035086.12; EXPRESSED IN LUNG, SIGNAL = 4.9; EXPRESSED IN HELA, SIGNAL = 2.8; EXPRESSED IN ADULT LIVER, SIGNAL = 5.8; EXPRESSED IN PLACENTA, SIGNAL = 4.3; EXPRESSED IN BT474, SIGNAL = 3.5; EXPRESSED IN BONE MARROW, SIGNAL = 3.9; EXPRESSED IN HBL100, SIGNAL = 3.1; EXPRESSED IN FETAL LIVER, SIGNAL =   6; EXPRESSED IN BRAIN, SIGNAL = 3.5; EXPRESSED IN HEART, SIGNAL = 2.6; SWISSPROT HIT: P24043, EVALUE 1.60e-01; EST_HUMAN HIT: BE674115.1, EVALUE 2.00e-62; NT HIT: AB033035.1, EVALUE 0.00e+00
ctttggagaaggaagaagggcagggtgcacataccaatggcgggccctccttgcttcttctcttccaagatggcagccaggtctttgtgcatggatttctgatgctgactggccggcggctgctccagctccagacttttcacttttaaaagttgattcgccttcttaatcttctgactgtactgccgagccatcataaacaccctgctttttgtcttatctgtggcctccatccccaggtcagggttttctgggtctgtttgagacaggccactgttggccaggtcgtagggattgtccatgaggggcatttcactagccagagaaagccggttaaggctcataaaggagccttctttagaaatcaggtcttcctcaaaggggcagttggcgcggctggctctgccagccctgctcttcacgggcgtgaggagagcctggctctcaggcagggacagcgtggacacagagcgccccacgtcccggctcagctcaggggtgctctctgcgtgcagcctgtctggcacatcatccttgctcacaggaaacgctgccaggagacggtctctggccttgtcttcatttttcttgatgtaattttccaggtcattccagatttcatctacttcttcggacagtttatcagatacaggcttatgaggcatagacaagttaccactgggagagtcatacagcaaactcagataaccatgatcgggagtggcctgatggtaaggggcttcgtcctcactgagctggaggctgt

SEQ ID NO: 17283 - DNA, 87 bp, Homo sapiens
  MAP TO AL034420.16; EXPRESSED IN PLACENTA, SIGNAL = 1.8; EXPRESSED IN FETAL LIVER, SIGNAL = 1.5; EXPRESSED IN LUNG, SIGNAL = 1.3; EXPRESSED IN HEART, SIGNAL = 0.92; EXPRESSED IN HBL100, SIGNAL = 1.1; EXPRESSED IN BRAIN, SIGNAL = 1.2; EXPRESSED IN BT474, SIGNAL =   1; EXPRESSED IN BONE MARROW, SIGNAL = 1.4; EXPRESSED IN HELA, SIGNAL = 0.83; EXPRESSED IN ADULT LIVER, SIGNAL =   6; EST_HUMAN HIT: BF666964.1, EVALUE 1.10e+00; NT HIT: D87675.1, EVALUE 6.00e-01
ctcagagcagtaatggggaagaatgagattttgaatcctaaagcactagaggaaatgttcttcaactatgcctcagaggtgtcctag

SEQ ID NO: 17284 - DNA, 558 bp, Homo sapiens
  MAP TO AL034420.16; EXPRESSED IN BRAIN, SIGNAL =   2; EXPRESSED IN BONE MARROW, SIGNAL = 1.8; EXPRESSED IN PLACENTA, SIGNAL = 1.8; EXPRESSED IN BT474, SIGNAL = 1.7; EXPRESSED IN HEART, SIGNAL = 1.6; EXPRESSED IN ADULT LIVER, SIGNAL = 1.6; EXPRESSED IN HELA, SIGNAL = 1.9; EXPRESSED IN LUNG, SIGNAL = 1.8; EXPRESSED IN FETAL LIVER, SIGNAL = 2.1; EXPRESSED IN HBL100, SIGNAL = 1.8; SWISSPROT HIT: Q62441, EVALUE 1.10e-01; EST_HUMAN HIT: AU132898.1, EVALUE 0.00e+00; NT HIT: gi11420514, EVALUE 0.00e+00
agacatgtggctgcccaaggtcttcagagtgtcggcccctgccccgcttgagtggagggcgtgggaggcccacatgttcacctggatgcggatctgctcggtgagctggatctgctgtagctgctgctgctgcagacacaagatctgctcgaggacccacgggatgctgttggcaccaggcacgggggcagggagtgcatccgcgctccgctgattcaccgccaccttggtgccccgtagtgcctgcaaggtcacattagtgttggccactttgcctttggctaaatagcttatgtcctggggggtgggtggcagggctgtctctgtctttaggtacaccacagactccgcatccggcttctccttcatgtcctctgagctgccgccattctccctgtgacagtccttactgccgggactggtgggctggtggctcagtacagctccggagaagtcttctgaaggcacaggcccctcgctgtcattcatgatgaggacaggtggatttttagtgcaatttttcttatgttccaggaactcagagatgctgaagaactc

SEQ ID NO: 17285 - DNA, 132 bp, Homo sapiens
  MAP TO AL034406.1; EXPRESSED IN BT474, SIGNAL = 8.8; EXPRESSED IN BONE MARROW, SIGNAL = 1.3; EXPRESSED IN FETAL LIVER, SIGNAL = 2.6; EXPRESSED IN LUNG, SIGNAL = 1.8; EXPRESSED IN HELA, SIGNAL = 3.4; EXPRESSED IN ADULT LIVER, SIGNAL = 2.4; EXPRESSED IN BRAIN, SIGNAL =   1; EXPRESSED IN HEART, SIGNAL = 1.5; EXPRESSED IN PLACENTA, SIGNAL = 4.5; EXPRESSED IN HBL100, SIGNAL = 2.6; SWISSPROT HIT: P20946, EVALUE 4.00e+00; EST_HUMAN HIT: BE729914.1, EVALUE 4.40e-01; NT HIT: AF198349.1, EVALUE 2.00e-08
ctgtgttagaattaagatcatcaggctctgattcggtcccattttggcttccatttccctgaagagtgttcatagccataagcttcatcttctgaagtttcatcgcctcagccatcgctgcagctgttatac

SEQ ID NO: 17286 - DNA, 355 bp, Homo sapiens
  MAP TO AL033397.7; EXPRESSED IN BT474, SIGNAL = 1.7; EXPRESSED IN BONE MARROW, SIGNAL = 3.1; EXPRESSED IN HBL100, SIGNAL = 1.4; EXPRESSED IN FETAL LIVER, SIGNAL = 5.2; EXPRESSED IN LUNG, SIGNAL = 1.2; EXPRESSED IN HELA, SIGNAL = 1.4; EXPRESSED IN ADULT LIVER, SIGNAL = 2.4; EXPRESSED IN BRAIN, SIGNAL = 2.3; EXPRESSED IN PLACENTA, SIGNAL = 1.2; EXPRESSED IN HEART, SIGNAL = 1.4; NT HIT: gi11418925, EVALUE 2.00e-63; EST_HUMAN HIT: AA355230.1, EVALUE 2.00e-61; SWISSPROT HIT: P48506, EVALUE 1.00e-23
acagcattattttaaaagactactttaagaaattgaacattctaagattataccatgctgtctatattatgagattaagaaaaatagatatcataccagatgctctcttcttaattagctttaggtagttcagaatactacatctggtgtccacatccacttccatgttttcaaggtaagagttcagaattgggatcagtccaggaaacacaccttcctacaagaagcaggacactttatgaactccctgccgggggatgtgcacagtgaggggtactgtacagggccaccctcctaccttcccattgatgatggtgtctatgctcatgagggtgtactcctctgcagcgagctc

SEQ ID NO: 17287 - DNA, 169 bp, Homo sapiens
  MAP TO AL031770.12; EXPRESSED IN ADULT LIVER, SIGNAL = 1.2; EXPRESSED IN BRAIN, SIGNAL = 1.5; EXPRESSED IN BONE MARROW, SIGNAL = 1.7; EXPRESSED IN HBL100, SIGNAL = 1.3; EXPRESSED IN LUNG, SIGNAL = 1.6; EXPRESSED IN HELA, SIGNAL = 1.7; EXPRESSED IN PLACENTA, SIGNAL = 1.8; EXPRESSED IN BT474, SIGNAL = 1.6; EXPRESSED IN FETAL LIVER, SIGNAL = 1.3; EXPRESSED IN HEART, SIGNAL = 1.5; EST_HUMAN HIT: AW503458.1, EVALUE 3.00e-61; NT HIT: gi8922829, EVALUE 2.00e-61; SWISSPROT HIT: P49452, EVALUE 3.80e+00
tcaaaatgacatgaaggaatcacacaacacattggaagagaaatccttgcctttcagatctttcacgtagccctctttgcaactgtgcatgagctgaaggatccacttgtgttgggctccaatgcattgccaagcagggtcaccagacgcatgaaggtcagacaggtac

SEQ ID NO: 17288 - DNA, 142 bp, Homo sapiens
  MAP TO AL031770.12; EXPRESSED IN PLACENTA, SIGNAL = 1.8; EXPRESSED IN BONE MARROW, SIGNAL = 1.1; EXPRESSED IN HBL100, SIGNAL = 1.2; EXPRESSED IN ADULT LIVER, SIGNAL = 0.91; EXPRESSED IN BRAIN, SIGNAL = 1.1; EXPRESSED IN HEART, SIGNAL = 1.2; EXPRESSED IN BT474, SIGNAL = 1.4; EXPRESSED IN HELA, SIGNAL = 0.96; EXPRESSED IN FETAL LIVER, SIGNAL = 0.92; EXPRESSED IN LUNG, SIGNAL =   1; SWISSPROT HIT: Q12730, EVALUE 2.30e+00; NT HIT: gi11418795, EVALUE 1.00e-74; EST_HUMAN HIT: AA826350.1, EVALUE 1.00e-74
ctgttggaggcaggcagtccttccaatcaaaatatcctgcataaattccaggttctaaggagccaacgatgggatctgctttcaactcgatgtaattttcaaagagtctttgatctagttctttcaatgaggccatgctaac

SEQ ID NO: 17289 - DNA, 110 bp, Homo sapiens
  MAP TO AL031676.2; EXPRESSED IN HBL100, SIGNAL = 1.6; EXPRESSED IN FETAL LIVER, SIGNAL = 1.7; EXPRESSED IN ADULT LIVER, SIGNAL = 1.6; EXPRESSED IN BRAIN, SIGNAL = 1.6; EXPRESSED IN HEART, SIGNAL = 1.4; EXPRESSED IN PLACENTA, SIGNAL = 1.8; EXPRESSED IN BT474, SIGNAL = 1.4; EXPRESSED IN HELA, SIGNAL = 1.7; EXPRESSED IN LUNG, SIGNAL = 2.4; EXPRESSED IN BONE MARROW, SIGNAL = 1.8; NT HIT: X96422.1, EVALUE 3.20e+00
gtcacctttgtccaaggagacatccttagaatcacaatagtaggagaagacgatggaagaggagaggagagaagggaaaggaggagggaagggagggaaagaagaaaagg

SEQ ID NO: 17290 - DNA, 205 bp, Homo sapiens
  MAP TO AL031656.10; EXPRESSED IN BRAIN, SIGNAL = 4.1; EXPRESSED IN HEART, SIGNAL = 3.2; EXPRESSED IN BONE MARROW, SIGNAL =   3; EXPRESSED IN PLACENTA, SIGNAL = 3.1; EXPRESSED IN BT474, SIGNAL = 2.6; EXPRESSED IN ADULT LIVER, SIGNAL = 2.4; EXPRESSED IN HELA, SIGNAL = 5.4; EXPRESSED IN LUNG, SIGNAL = 2.4; EXPRESSED IN FETAL LIVER, SIGNAL = 2.9; EXPRESSED IN HBL100, SIGNAL = 2.8; NT HIT: X95926.1, EVALUE 4.80e-01; EST_HUMAN HIT: AA723007.1, EVALUE 8.00e-03; SWISSPROT HIT: P36372, EVALUE 1.20e+00
atgactacccatgcctacctccataggaatgttgctagcattggcattaacgagcagaattacactgttaaaggtcaagccagagagaggacaccaaatcccatccatagcagagagaatgggcagcaagtgctgcaaatggaggctgccaggtggaggtgtacagagaggtttctgcctcagagaactgaaaatccaaatacta

SEQ ID NO: 17291 - DNA, 132 bp, Homo sapiens
  MAP TO AL031587.3; EXPRESSED IN BT474, SIGNAL = 2.5; EXPRESSED IN BONE MARROW, SIGNAL =   4; EXPRESSED IN FETAL LIVER, SIGNAL = 3.4; EXPRESSED IN LUNG, SIGNAL = 3.5; EXPRESSED IN ADULT LIVER, SIGNAL = 3.7; EXPRESSED IN PLACENTA, SIGNAL = 3.4; EXPRESSED IN HBL100, SIGNAL =   3; EXPRESSED IN BRAIN, SIGNAL = 4.5; EXPRESSED IN HEART, SIGNAL =   3; EXPRESSED IN HELA, SIGNAL = 2.5; SWISSPROT HIT: Q9PC26, EVALUE 3.10e+00; NT HIT: Z68308.1, EVALUE 6.40e-02; EST_HUMAN HIT: AA382780.1, EVALUE 5.00e-43
ctgggagatttcagcaaggatgattcctcggtactgtttgccctgtcccagggcctccatgtcagccaggaattctttcctctcctggatttccttcaccactggacagaggagagggctgtcaggttccca

SEQ ID NO: 17292 - DNA, 280 bp, Homo sapiens
  MAP TO AL031390.4; EXPRESSED IN BRAIN, SIGNAL = 2.7; EXPRESSED IN HBL100, SIGNAL = 4.4; EXPRESSED IN LUNG, SIGNAL = 2.3; EXPRESSED IN HELA, SIGNAL = 3.5; EXPRESSED IN ADULT LIVER, SIGNAL = 3.1; EXPRESSED IN PLACENTA, SIGNAL = 1.7; EXPRESSED IN BT474, SIGNAL = 3.2; EXPRESSED IN BONE MARROW, SIGNAL = 1.6; EXPRESSED IN FETAL LIVER, SIGNAL = 6.3; EXPRESSED IN HEART, SIGNAL = 2.2; SWISSPROT HIT: Q09215, EVALUE 1.00e-06; EST_HUMAN HIT: AV713010.1, EVALUE 0.00e+00
cgaaggggaaagcggcgagatgactgaccgctacaccatccatagccagctggagcacctgcagtccaagtacatcggcacgggccacgccgacaccaccaagtgggagtggctggtgaaccaacaccgcgactcgtactgctcctacatgggccacttcgaccttctcaactacttcgccattgcggagaatgagagcaaagcgcgagtccgcttcaacttgatggaaaagatgcttcagccttgtggaccgccagccgacaagcccgaggagaactga

SEQ ID NO: 17293 - DNA, 462 bp, Homo sapiens
  MAP TO AL031320.6; EXPRESSED IN BT474, SIGNAL =  14; EXPRESSED IN LUNG, SIGNAL =   4; EXPRESSED IN HELA, SIGNAL =  18; EXPRESSED IN ADULT LIVER, SIGNAL = 6.6; EXPRESSED IN BRAIN, SIGNAL =  14; EXPRESSED IN HEART, SIGNAL = 2.7; EXPRESSED IN PLACENTA, SIGNAL = 2.6; EXPRESSED IN BONE MARROW, SIGNAL = 8.2; EXPRESSED IN FETAL LIVER, SIGNAL =  10; EXPRESSED IN HBL100, SIGNAL =  30; NT HIT: X02344.1, EVALUE 1.00e-74; SWISSPROT HIT: P32882, EVALUE 4.00e-49; EST_HUMAN HIT: AW438710.1, EVALUE 1.00e-72
acccccagtatggcctctatctaacagaggctgccattttcaggggctggatgtccatgagggaggtagaggagaaaatgcttcatgtccaaaccaagaacagcagctactttgctgactggatcccctacaatgggaaaacagctttctgggacatcccatccgcaggactaaaaacgtccaccactttcatcagtaacaacacggccatccaggagctgctcagagacgtctcagagcagttcacagccatgttcaggtgcaaggccttcctgcactggtacatgggcgagggcaagaatgagatggaattcactggggccgagagcaacatgaatgacctggtatcagagtaccaacagtatcaggatgccactgttgaggaggagggagagtctgaggagtggactgaggaaatgggggcgtagagccttctgttactgggttaagggcgggggtggt

SEQ ID NO: 17294 - DNA, 763 bp, Homo sapiens
  MAP TO AL031297.4; EXPRESSED IN LUNG, SIGNAL = 1.1; EXPRESSED IN HELA, SIGNAL = 1.1; EXPRESSED IN BRAIN, SIGNAL = 1.3; EXPRESSED IN HEART, SIGNAL = 1.1; EXPRESSED IN BT474, SIGNAL = 2.7; EXPRESSED IN BONE MARROW, SIGNAL = 1.5; EXPRESSED IN PLACENTA, SIGNAL = 1.8; EXPRESSED IN ADULT LIVER, SIGNAL = 1.4; EXPRESSED IN FETAL LIVER, SIGNAL = 1.3; EXPRESSED IN HBL100, SIGNAL = 1.5; EST_HUMAN HIT: BF025840.1, EVALUE 0.00e+00; SWISSPROT HIT: P16884, EVALUE 2.40e-02; NT HIT: gi11423156, EVALUE 0.00e+00
tcttacctttaaccagtattttatgagaataattattttccctacaggcgatccattttctcagcctattaaatttcccataaatggactctcagatgtaaaaaatacttcggaggacagtgaaaacttcccatcaagttctaaaaagtctgaggagtggcctgactggagtgaacctgaggagcctgaaaatcaaactgtcaacatacagatttggcctagagaaccttgtgatgatgtcaagtcccagtgcactaccttggatgtggaagagtcatcttgggatgactgcgagcccagcagcttagatactaaagtaaacccaggaggtggaatcactgctacaaaacctgttacctcaggggagcagaagcctattcctgctttgctttcactcactgaagagtctatgccttggaaatcaagcttaccccaaaagattagccttgtacaaaggggggatgacgcagaccaaatcgagccgccaaaagtgtcatcacaagaaaggccccttaaggttccatcagaacttggtttaggagaggaattcaccattcaagtaaaaaagaagccagtaaaagatcctgagatggattggtttgctgatatgatcccagaaattaagccttctgctgcttttcttatattacctgaactgaggacagaaatggtcccaaaaaaggatgatgtctccccagtgatgcagttttcctcaaaatttgctgcagcagaaattactgaggtgagtacttttatggagtaa

SEQ ID NO: 17295 - DNA, 261 bp, Homo sapiens
  MAP TO AL031287.3; EXPRESSED IN ADULT LIVER, SIGNAL = 1.2; EXPRESSED IN BRAIN, SIGNAL = 1.3; EXPRESSED IN HEART, SIGNAL = 1.6; EXPRESSED IN PLACENTA, SIGNAL = 0.95; EXPRESSED IN BT474, SIGNAL = 1.3; EXPRESSED IN HELA, SIGNAL = 1.1; EXPRESSED IN LUNG, SIGNAL = 1.1; EXPRESSED IN FETAL LIVER, SIGNAL = 1.4; EXPRESSED IN HBL100, SIGNAL = 0.81; EXPRESSED IN BONE MARROW, SIGNAL = 0.9; EST_HUMAN HIT: BE747286.1, EVALUE 0.00e+00; NT HIT: gi11425522, EVALUE 0.00e+00
gtggaacaagtcaatcagatatttcaactcttcctacggtcccatcaagtcctgatttggaagtgagtgaaactgcaatggaagtagatactccagctgaacaatttcttcagccttctacatcctctacaatgtcagctcaggctcattcgacatcatctcccacagaaagccctcattctactcctttgctatcttctccagacagtgaacaaaggcagtctgttgaggcatctggacaccacacacatcatcagtctg

SEQ ID NO: 17296 - DNA, 186 bp, Homo sapiens
  MAP TO AL031287.3; EXPRESSED IN FETAL LIVER, SIGNAL = 1.8; EXPRESSED IN LUNG, SIGNAL = 1.2; EXPRESSED IN HELA, SIGNAL = 1.1; EXPRESSED IN PLACENTA, SIGNAL = 1.2; EXPRESSED IN BT474, SIGNAL =   2; EXPRESSED IN BONE MARROW, SIGNAL = 1.4; EXPRESSED IN HBL100, SIGNAL = 1.4; EXPRESSED IN ADULT LIVER, SIGNAL = 1.3; EXPRESSED IN BRAIN, SIGNAL = 1.3; EXPRESSED IN HEART, SIGNAL = 4.2; EST_HUMAN HIT: BE180609.1, EVALUE 1.00e-100; NT HIT: gi11425522, EVALUE 1.00e-38
gttttgacaacaattcgttcagggcaccgagcaaacatatttagtgcaaagttcttaccttgtacaaatgataaacagattgtatcctgctctggagatggagtaatattttataccaacgttgagcaagatgcagaaaccaacagacaatgccaatttacgtgtcattatggaactacttatgag

SEQ ID NO: 17297 - DNA, 479 bp, Homo sapiens; identical to SEQ ID NO: 501
  MAP TO AL031280.6; EXPRESSED IN HEART, SIGNAL = 1.6; EXPRESSED IN HBL100, SIGNAL = 1.8; EXPRESSED IN FETAL LIVER, SIGNAL = 3.4; EXPRESSED IN BRAIN, SIGNAL = 3.2; EXPRESSED IN PLACENTA, SIGNAL = 4.1; EXPRESSED IN BT474, SIGNAL = 1.5; EXPRESSED IN BONE MARROW, SIGNAL = 2.2; EXPRESSED IN LUNG, SIGNAL = 2.3; EXPRESSED IN HELA, SIGNAL =   2; EXPRESSED IN ADULT LIVER, SIGNAL = 2.1; EST_HUMAN HIT: BE793214.1, EVALUE 4.50e-01; NT HIT: AL021929.1, EVALUE 1.60e-02; SWISSPROT HIT: P56591, EVALUE 4.90e+00

SEQ ID NO: 17298 - DNA, 104 bp, Homo sapiens
  MAP TO AL023807.6; EXPRESSED IN BT474, SIGNAL = 1.3; EXPRESSED IN HBL100, SIGNAL = 1.4; EXPRESSED IN BRAIN, SIGNAL = 1.4; EXPRESSED IN HEART, SIGNAL = 1.5; EXPRESSED IN PLACENTA, SIGNAL = 1.3; EXPRESSED IN BONE MARROW, SIGNAL = 1.7; EXPRESSED IN FETAL LIVER, SIGNAL = 1.3; EXPRESSED IN LUNG, SIGNAL = 1.5; EXPRESSED IN HELA, SIGNAL = 1.3; EXPRESSED IN ADULT LIVER, SIGNAL = 1.3; EST_HUMAN HIT: BE618246.1, EVALUE 1.30e+00
aacccattaaaatgctgctgtataccttgtacttattgaagacattgtccttggcaataagagtttcagctttagcaaggaaggcatgcattgaacaaatgata

SEQ ID NO: 17299 - DNA, 142 bp, Homo sapiens
  MAP TO AL023807.6; EXPRESSED IN ADULT LIVER, SIGNAL = 9.3; EXPRESSED IN HEART, SIGNAL = 5.3; EXPRESSED IN BT474, SIGNAL =  12; EXPRESSED IN BONE MARROW, SIGNAL =  11; EXPRESSED IN HBL100, SIGNAL =  18; EXPRESSED IN FETAL LIVER, SIGNAL =  12; EXPRESSED IN HELA, SIGNAL =  17; EXPRESSED IN BRAIN, SIGNAL = 4.3; EXPRESSED IN PLACENTA, SIGNAL = 7.1; EXPRESSED IN LUNG, SIGNAL =  13; SWISSPROT HIT: Q92540, EVALUE 9.10e+00; NT HIT: X69465.1, EVALUE 8.10e-02; EST_HUMAN HIT: H65790.1, EVALUE 1.20e-01
cggttgcctcccaggggtttcccacaccatcattcaggggattcccttgacctgtcttctgtgtggaatctcctatttttctattttccttcccttcttcttggtttcctgcctccattttgtagagcacatccttcagtag

SEQ ID NO: 17300 - DNA, 207 bp, Homo sapiens
  MAP TO AL023656.8; EXPRESSED IN PLACENTA, SIGNAL = 0.87; EXPRESSED IN LUNG, SIGNAL = 0.85; EXPRESSED IN HBL100, SIGNAL = 0.69; EXPRESSED IN FETAL LIVER, SIGNAL = 0.8; EXPRESSED IN HELA, SIGNAL = 0.69; EXPRESSED IN BRAIN, SIGNAL = 1.8; EXPRESSED IN BT474, SIGNAL = 0.77; EXPRESSED IN BONE MARROW, SIGNAL = 0.92; EXPRESSED IN ADULT LIVER, SIGNAL = 0.77; EXPRESSED IN HEART, SIGNAL = 0.89; EST_HUMAN HIT: AA251503.1, EVALUE 7.30e-01; SWISSPROT HIT: Q04652, EVALUE 2.00e-03; NT HIT: gi11422501, EVALUE 4.90e-01
aataagtggataagccgtagccccatgctgcagagaagggtctaccattccatggctgctgtacaaaggaagctttatgttcttggaggcaatgacctagactacaataatgaccggatccttgtgcgccatatagattcttacaacatagacactgaccagtggacacgttgtaatttcaacctgctgactggcaagtacctttga

SEQ ID NO: 17301 - DNA, 79 bp, Homo sapiens
  MAP TO AL022397.1; EXPRESSED IN PLACENTA, SIGNAL = 2.1; EXPRESSED IN BONE MARROW, SIGNAL = 1.9; EXPRESSED IN HBL100, SIGNAL = 1.6; EXPRESSED IN FETAL LIVER, SIGNAL = 2.3; EXPRESSED IN ADULT LIVER, SIGNAL = 2.2; EXPRESSED IN BRAIN, SIGNAL = 1.5; EXPRESSED IN BT474, SIGNAL =   2; EXPRESSED IN LUNG, SIGNAL = 2.1; EXPRESSED IN HELA, SIGNAL = 1.4; EXPRESSED IN HEART, SIGNAL =   2; NT HIT: M59815.1, EVALUE 6.30e-01
ggagcctcaaaaatatctccgtgttcttcacaaatctcaagtgcccactgaaaaagacgatgaggcagaagagctgtaa

SEQ ID NO: 17302 - DNA, 215 bp, Homo sapiens
  MAP TO AL022240.8; EXPRESSED IN HBL100, SIGNAL = 7.2; EXPRESSED IN FETAL LIVER, SIGNAL = 5.8; EXPRESSED IN HEART, SIGNAL = 5.1; EXPRESSED IN PLACENTA, SIGNAL = 3.2; EXPRESSED IN BT474, SIGNAL =  11; EXPRESSED IN BONE MARROW, SIGNAL = 4.5; EXPRESSED IN LUNG, SIGNAL = 5.6; EXPRESSED IN HELA, SIGNAL = 7.4; EXPRESSED IN ADULT LIVER, SIGNAL =  14; EXPRESSED IN BRAIN, SIGNAL = 5.7; NT HIT: gi7657016, EVALUE 1.00e-118; EST_HUMAN HIT: AW160820.1, EVALUE 1.00e-118; SWISSPROT HIT: P13654, EVALUE 2.10e-02
ctgggctgagcttttggacaaggtgctgtgccagtctacacccctcagccagctgttcttggaggtcctgcccctgggacttgtccggctcatccggagtgaggagggcctggagatgctcattcaatgagcgggaggcatctctcccttcccgcaacttctcccttaactgggtcagctctcgttcctgagcgtgaaccaggactttatattgc

SEQ ID NO: 17303 - DNA, 185 bp, Homo sapiens
  MAP TO AL022240.8; EXPRESSED IN HEART, SIGNAL = 2.6; EXPRESSED IN FETAL LIVER, SIGNAL = 7.6; EXPRESSED IN PLACENTA, SIGNAL = 7.8; EXPRESSED IN BT474, SIGNAL =  19; EXPRESSED IN BONE MARROW, SIGNAL =  17; EXPRESSED IN HBL100, SIGNAL =  17; EXPRESSED IN LUNG, SIGNAL =   7; EXPRESSED IN HELA, SIGNAL =  11; EXPRESSED IN ADULT LIVER, SIGNAL =  14; EXPRESSED IN BRAIN, SIGNAL = 4.3; EST_HUMAN HIT: BF475411.1, EVALUE 5.00e-91; SWISSPROT HIT: O35177, EVALUE 1.30e+00; NT HIT: gi7657016, EVALUE 1.00e-93
taaggtactcactgtccacgtcaagagccaagccaaggtactgttcctccaatgagtaaacagcactgctgtagggctggcctaagtcaggcagttcaagataacctgaaggagtcgaataacatctacccagtgagtcctgcaagacttcaggctctttctcatccagcagctccctgctgagc

SEQ ID NO: 17304 - DNA, 252 bp, Homo sapiens
  MAP TO AJ010597.1; EXPRESSED IN PLACENTA, SIGNAL = 4.4; EXPRESSED IN BONE MARROW, SIGNAL = 5.3; EXPRESSED IN FETAL LIVER, SIGNAL = 4.9; EXPRESSED IN BRAIN, SIGNAL = 5.4; EXPRESSED IN HEART, SIGNAL = 3.9; EXPRESSED IN BT474, SIGNAL = 5.2; EXPRESSED IN HBL100, SIGNAL = 4.2; EXPRESSED IN LUNG, SIGNAL =   7; EXPRESSED IN HELA, SIGNAL = 6.3; EXPRESSED IN ADULT LIVER, SIGNAL = 5.8; NT HIT: AL163210.2, EVALUE 0.00e+00; EST_HUMAN HIT: BE728616.1, EVALUE 1.00e-58; SWISSPROT HIT: O85709, EVALUE 1.70e+00
agggtgcaagccccaaaccttggcaccttccacgtggtgttgagcctgcgggtgcacagaagtcaagaagtgaggtttgggcacctccacctagatttcagaagatgtatagaaatgcctggatgtccaggcagaagtttgctacagagttggggtcctcatggacaacctctgctagggcagtacggaagagaaatgtggggttggagcccacacagagagtccctactggggcaccacctagtggaactg

SEQ ID NO: 17305 - DNA, 173 bp, Homo sapiens
  MAP TO AJ006996.1; EXPRESSED IN BONE MARROW, SIGNAL = 1.3; EXPRESSED IN ADULT LIVER, SIGNAL = 1.3; EXPRESSED IN PLACENTA, SIGNAL = 1.2; EXPRESSED IN BT474, SIGNAL = 0.98; EXPRESSED IN FETAL LIVER, SIGNAL = 1.1; EXPRESSED IN LUNG, SIGNAL = 1.5; EXPRESSED IN HELA, SIGNAL = 1.2; EXPRESSED IN BRAIN, SIGNAL = 1.8; EXPRESSED IN HEART, SIGNAL = 1.9; EXPRESSED IN HBL100, SIGNAL = 0.99; NT HIT: AL163202.2, EVALUE 3.00e-63; EST_HUMAN HIT: AI873630.1, EVALUE 4.00e-69
tggacactaaagtaatattaaaaccactcactctcactggtaatttacaaaatacagttttaataaacagcaatatcgacaacaacaatagcagtgatgaaacctctgaggcaagagagaatgttaattttagcaaagagtgtcttgtcaactggacaagccttaccagttcc

SEQ ID NO: 17306 - DNA, 472 bp, Homo sapiens; identical to SEQ ID NO: 510
  MAP TO AJ006996.1; EXPRESSED IN PLACENTA, SIGNAL = 1.6; EXPRESSED IN HBL100, SIGNAL = 1.4; EXPRESSED IN FETAL LIVER, SIGNAL = 1.7; EXPRESSED IN BRAIN, SIGNAL = 2.1; EXPRESSED IN BT474, SIGNAL = 1.5; EXPRESSED IN BONE MARROW, SIGNAL = 1.8; EXPRESSED IN HELA, SIGNAL = 1.8; EXPRESSED IN ADULT LIVER, SIGNAL = 1.8; EXPRESSED IN LUNG, SIGNAL = 1.8; EXPRESSED IN HEART, SIGNAL = 1.7; EST_HUMAN HIT: AI082459.1, EVALUE 3.00e-08; NT HIT: AJ229041.1, EVALUE 5.00e-09; SWISSPROT HIT: P08472, EVALUE 9.50e-01

SEQ ID NO: 17307 - DNA, 264 bp, Homo sapiens
  MAP TO AC009307.1; EXPRESSED IN LUNG, SIGNAL = 1.4; EXPRESSED IN ADULT LIVER, SIGNAL =   1; EXPRESSED IN BRAIN, SIGNAL = 1.1; EXPRESSED IN HEART, SIGNAL = 1.6; EXPRESSED IN PLACENTA, SIGNAL =   1; EXPRESSED IN BT474, SIGNAL = 2.7; EXPRESSED IN BONE MARROW, SIGNAL = 0.97; EXPRESSED IN HBL100, SIGNAL =   1; EXPRESSED IN HELA, SIGNAL = 1.7; EXPRESSED IN FETAL LIVER, SIGNAL = 0.92; NT HIT: gi4507758, EVALUE 6.40e-01; EST_HUMAN HIT: BE178586.1, EVALUE 1.00e-60; SWISSPROT HIT: P03316, EVALUE 3.70e-01
ctgcaactgagttgggccgtggcattattagtgagctggagccctgagaataagggactggaccatctccagctgaggattctgctttgggcagcgtgctctctgctgacccggtggtctcctcttctgccactggggagcagttatctgccctgcggtcatgaagcactcccttctgaacccctaatcttaggtttccatctttattccattccaaactggagccactccggtcatcattttcggatgaacttgtaattgtgg

SEQ ID NO: 17308 - DNA, 290 bp, Homo sapiens
  MAP TO AC009307.1; EXPRESSED IN BT474, SIGNAL = 1.6; EXPRESSED IN BONE MARROW, SIGNAL = 1.1; EXPRESSED IN HEART, SIGNAL = 2.3; EXPRESSED IN ADULT LIVER, SIGNAL = 1.1; EXPRESSED IN HELA, SIGNAL = 2.9; EXPRESSED IN LUNG, SIGNAL = 1.6; EXPRESSED IN FETAL LIVER, SIGNAL = 1.8; EXPRESSED IN PLACENTA, SIGNAL = 1.2; EXPRESSED IN BRAIN, SIGNAL = 1.1; EXPRESSED IN HBL100, SIGNAL = 0.97; SWISSPROT HIT: P22567, EVALUE 9.80e-01; EST_HUMAN HIT: AV747510.1, EVALUE 4.10e+00
ctgggctcacacaggaaggccgtgttttccccgtctgctctccatacaagccactccctgaaggacgggtggcagaacatgcgggttttgtctcgcctcttaatgaggaagcaggagagggcgtccatcctctgctgaaagtcttcccatccctgctccccctggatgtggccagcattaatagcctgaaagatctgctcgtctgtcatggggtggagggatgcgagggccacgttgagaatcggaagtgccctctcaaaggcggactgggtcatgaacttcatgttgca

SEQ ID NO: 17309 - DNA, 202 bp, Homo sapiens
  MAP TO AC009307.1; EXPRESSED IN LUNG, SIGNAL = 2.8; EXPRESSED IN PLACENTA, SIGNAL =  12; EXPRESSED IN HBL100, SIGNAL = 1.9; EXPRESSED IN FETAL LIVER, SIGNAL = 2.3; EXPRESSED IN BRAIN, SIGNAL = 1.7; EXPRESSED IN BT474, SIGNAL = 2.4; EXPRESSED IN BONE MARROW, SIGNAL = 1.9; EXPRESSED IN HELA, SIGNAL = 2.1; EXPRESSED IN ADULT LIVER, SIGNAL = 1.4; EXPRESSED IN HEART, SIGNAL = 2.9; EST_HUMAN HIT: AA199818.1, EVALUE 2.00e-56; SWISSPROT HIT: P54353, EVALUE 1.10e-01; NT HIT: AB046856.1, EVALUE 1.00e-04
acaacttcctcgtggccaaggtgagactggacgcacaggattggggcattatttaacacttctgtcctgtagttcacgttggcccctcccaaaatcaggagacggctcacctgttggacaaggccccccaacaagattgtcacatgtatgtcatctaaacatttctggaaatgggcagtatcctcaattttcggtatcattt

SEQ ID NO: 17310 - DNA, 100 bp, Homo sapiens
  MAP TO AC009307.1; EXPRESSED IN BT474, SIGNAL =  24; EXPRESSED IN HELA, SIGNAL =  35; EXPRESSED IN ADULT LIVER, SIGNAL =  27; EXPRESSED IN PLACENTA, SIGNAL =  28; EXPRESSED IN BONE MARROW, SIGNAL =  26; EXPRESSED IN FETAL LIVER, SIGNAL =  26; EXPRESSED IN LUNG, SIGNAL =  37; EXPRESSED IN HBL100, SIGNAL =  23; EXPRESSED IN BRAIN, SIGNAL =  48; EXPRESSED IN HEART, SIGNAL =  37; NT HIT: AJ278120.1, EVALUE 7.00e-04; SWISSPROT HIT: P77736, EVALUE 2.40e-02; EST_HUMAN HIT: AW189533.1, EVALUE 4.00e-49
ggcatcgccatagaaggcagccaggtccaagggtgtgcggccattcttgtctgtctggtctattgcagctccttcttcaaccagatactggaccactgcc

SEQ ID NO: 17311 - DNA, 163 bp, Homo sapiens
  MAP TO AC009306.1; EXPRESSED IN PLACENTA, SIGNAL = 9.2; EXPRESSED IN LUNG, SIGNAL = 3.9; EXPRESSED IN ADULT LIVER, SIGNAL = 2.7; EXPRESSED IN BONE MARROW, SIGNAL = 3.7; EXPRESSED IN HBL100, SIGNAL = 3.6; EXPRESSED IN FETAL LIVER, SIGNAL = 3.4; EXPRESSED IN HELA, SIGNAL = 3.7; EXPRESSED IN BRAIN, SIGNAL = 3.5; EXPRESSED IN BT474, SIGNAL = 5.5; EXPRESSED IN HEART, SIGNAL =   3; SWISSPROT HIT: P70537, EVALUE 8.90e+00; NT HIT: AF003528.1, EVALUE 4.00e-56; EST_HUMAN HIT: BE463763.1, EVALUE 2.00e-49
atgcgacctgaactgcctaccacgaactgggtgttttctgacccatctaaccataaagtaggtcatgcacagcagtattccatcatcgaatggaagtggtatatacatggttgggctcgagcaggtcctgaaggcacaagtaagttacatgaggaagtggctc

SEQ ID NO: 17312 - DNA, 202 bp, Homo sapiens
  MAP TO AC009277.1; EXPRESSED IN HBL100, SIGNAL = 0.78; EXPRESSED IN LUNG, SIGNAL = 1.2; EXPRESSED IN ADULT LIVER, SIGNAL = 0.9; EXPRESSED IN BRAIN, SIGNAL = 1.5; EXPRESSED IN PLACENTA, SIGNAL =   1; EXPRESSED IN BT474, SIGNAL = 1.4; EXPRESSED IN HEART, SIGNAL = 1.2; EXPRESSED IN HELA, SIGNAL = 0.95; EXPRESSED IN FETAL LIVER, SIGNAL = 0.93; EXPRESSED IN BONE MARROW, SIGNAL =  13; NT HIT: U84550.1, EVALUE 1.00e-110; EST_HUMAN HIT: AV752839.1, EVALUE 4.00e-70; SWISSPROT HIT: Q09441, EVALUE 8.40e-02
ggttacggaggatgcagatccctatgtgcagcctgaagatgaaaactatgaaaatgactctgtccggcagctggagaatgagctccagatggaggaatacctgaaacagaagctgcaagatgaagcttatcaggtacagggatccaggcccaccccaccccacctcttctgcctcaaccccttggtagctgggtctttgaca

SEQ ID NO: 17313 - DNA, 121 bp, Homo sapiens
  MAP TO AC009266.1; EXPRESSED IN BT474, SIGNAL =   1; EXPRESSED IN FETAL LIVER, SIGNAL = 0.97; EXPRESSED IN LUNG, SIGNAL = 0.98; EXPRESSED IN PLACENTA, SIGNAL = 1.4; EXPRESSED IN HEART, SIGNAL = 1.2; EXPRESSED IN BRAIN, SIGNAL =   1; EXPRESSED IN ADULT LIVER, SIGNAL = 1.2; EXPRESSED IN HELA, SIGNAL = 0.74; EXPRESSED IN HBL100, SIGNAL = 1.2; EXPRESSED IN BONE MARROW, SIGNAL = 1.4; SWISSPROT HIT: Q07092, EVALUE 7.00e-02; EST_HUMAN HIT: T05056.1, EVALUE 6.20e+00; NT HIT: AF109905.1, EVALUE 1.10e+00
ttgggcagttcatggcagggactaccagccagccacccaggattccctgggccatgcggcccagtcccagcagggaggggagggtgatagtgagctgctgctacttgcaggttactcttga

SEQ ID NO: 17314 - DNA, 75 bp, Homo sapiens
  MAP TO AC009266.1; EXPRESSED IN PLACENTA, SIGNAL = 1.9; EXPRESSED IN BT474, SIGNAL = 2.3; EXPRESSED IN BONE MARROW, SIGNAL = 2.9; EXPRESSED IN HBL100, SIGNAL = 1.9; EXPRESSED IN LUNG, SIGNAL = 2.7; EXPRESSED IN HELA, SIGNAL = 1.6; EXPRESSED IN BRAIN, SIGNAL = 2.8; EXPRESSED IN FETAL LIVER, SIGNAL = 3.2; EXPRESSED IN HEART, SIGNAL = 1.9; EXPRESSED IN ADULT LIVER, SIGNAL = 1.9; NT HIT: AB013139.1, EVALUE 1.30e-01; EST_HUMAN HIT: AV731410.1, EVALUE 2.20e-01
  unsure 32
  unsure 59
  unsure 62
  unsure 71
cccaagtggccaaggtcgcagtgagccacgantcgctttcctgcacttcagccttggtngancagagtgangacc

SEQ ID NO: 17315 - DNA, 192 bp, Homo sapiens
  MAP TO AC009266.1; EXPRESSED IN BT474, SIGNAL = 0.67; EXPRESSED IN HBL100, SIGNAL = 0.68; EXPRESSED IN HELA, SIGNAL = 0.78; EXPRESSED IN BRAIN, SIGNAL = 3.2; EXPRESSED IN PLACENTA, SIGNAL = 0.63; EXPRESSED IN BONE MARROW, SIGNAL = 0.93; EXPRESSED IN LUNG, SIGNAL = 0.82; EXPRESSED IN ADULT LIVER, SIGNAL = 0.94; EXPRESSED IN HEART, SIGNAL = 0.83; NT HIT: AB037763.1, EVALUE 2.00e-89; EST_HUMAN HIT: AW160503.1, EVALUE 5.00e-47; SWISSPROT HIT: P50232, EVALUE 2.00e-22
  unsure 2
  unsure 3
  unsure 152
  unsure 171
  unsure 173
tnnggatttgggtgtagggtatcccatagaatgtaaaggtctcatcaaaagctggatccaaggtttttctcagcactctagttttcactttatgcttcttctctgggaggatcgtcattttgatatatgggtcagaggtcatcgactgctcnatccatggctggcaagccnancgggcttccttgatattga

SEQ ID NO: 17316 - DNA, 467 bp, Homo sapiens
  MAP TO AC009237.1; EXPRESSED IN PLACENTA, SIGNAL = 1.2; EXPRESSED IN BONE MARROW, SIGNAL = 1.6; EXPRESSED IN HBL100, SIGNAL = 1.9; EXPRESSED IN LUNG, SIGNAL = 1.8; EXPRESSED IN BT474, SIGNAL = 1.4; EXPRESSED IN FETAL LIVER, SIGNAL = 1.3; EXPRESSED IN HELA, SIGNAL = 1.1; EXPRESSED IN ADULT LIVER, SIGNAL = 1.5; EXPRESSED IN BRAIN, SIGNAL = 1.1; EXPRESSED IN HEART, SIGNAL = 1.1; EST_HUMAN HIT: BF028005.1, EVALUE 0.00e+00; NT HIT: X87825.1, EVALUE 6.00e-70; SWISSPROT HIT: Q95157, EVALUE 1.00e-46
agaagacaccaaggtgaggattcatgatgactgggtagtgcagggggtgacagatggccacaaatcggtcataggccatcactgtcaggagcatgtcttctatacatgcaaaaaggacaaagaaagacatctgtgtcaggcagcccgcataagagatgactctgctatgcgactgcatgtccacaatcatcttgggaaccatggccgaggtgaaaccgatgtcagcccagcacaggttggagaggaagaagcacatgggggtgtggaggtgggagtcagagctgacagccaggatgatgagcaggttcctcagcaccgtgaccaggtacatggacagggacagcccagggaggacgggctgcagttctggatcctctgagagtcccaggaggaggaattctgagatacctgtgagattccatggctctgtgtgtcttggacaccttaagaagaaaagaggattggaa

SEQ ID NO: 17317 - DNA, 164 bp, Homo sapiens
  MAP TO AC009236.1; EXPRESSED IN BT474, SIGNAL = 1.6; EXPRESSED IN HELA, SIGNAL = 1.6; EXPRESSED IN ADULT LIVER, SIGNAL = 1.5; EXPRESSED IN PLACENTA, SIGNAL = 1.8; EXPRESSED IN BONE MARROW, SIGNAL = 1.9; EXPRESSED IN HBL100, SIGNAL = 1.4; EXPRESSED IN FETAL LIVER, SIGNAL = 1.8; EXPRESSED IN LUNG, SIGNAL = 1.7; EXPRESSED IN BRAIN, SIGNAL = 1.8; EXPRESSED IN HEART, SIGNAL = 1.5; NT HIT: gi11429000, EVALUE 1.50e+00; EST_HUMAN HIT: AI793130.1, EVALUE 2.50e-02; SWISSPROT HIT: P36715, EVALUE 6.60e+00
agaaaggccagggctggctggtgccaaggacagaagacctgcctccctggcctgtacctgcacgaactcaactcccaggaactgaggccactcctgtctctcatctccgtgctcaaggctttgagcccagtatccagccttagttcacctaaccctctgcacat

SEQ ID NO: 17318 - DNA, 105 bp, Homo sapiens
  MAP TO AC009236.1; EXPRESSED IN FETAL LIVER, SIGNAL = 1.6; EXPRESSED IN BRAIN, SIGNAL =   2; EXPRESSED IN HEART, SIGNAL = 1.4; EXPRESSED IN PLACENTA, SIGNAL = 1.9; EXPRESSED IN BT474, SIGNAL = 1.3; EXPRESSED IN BONE MARROW, SIGNAL = 1.4; EXPRESSED IN ADULT LIVER, SIGNAL = 1.6; EXPRESSED IN HELA, SIGNAL = 1.8; EXPRESSED IN LUNG, SIGNAL = 1.5; EXPRESSED IN HBL100, SIGNAL = 1.4; NT HIT: gi11427197, EVALUE 8.90e-01; EST_HUMAN HIT: AA634445.1, EVALUE 1.00e-52; SWISSPROT HIT: P19351, EVALUE 1.80e+00
tccccctggcacagcacacttcttcctcctgtgaagtcaggtagaattttgcttgtctctccatcacaggacttatttcatccttgtctttgttacgcctgtatc

SEQ ID NO: 17319 - DNA, 108 bp, Homo sapiens
  MAP TO AC009227.1; EXPRESSED IN BT474, SIGNAL = 2.1; EXPRESSED IN BONE MARROW, SIGNAL = 1.8; EXPRESSED IN FETAL LIVER, SIGNAL = 2.2; EXPRESSED IN ADULT LIVER, SIGNAL = 2.3; EXPRESSED IN BRAIN, SIGNAL = 3.1; EXPRESSED IN PLACENTA, SIGNAL =   2; EXPRESSED IN HBL100, SIGNAL = 2.2; EXPRESSED IN LUNG, SIGNAL = 2.5; EXPRESSED IN HELA, SIGNAL = 2.3; EXPRESSED IN HEART, SIGNAL = 2.4; EST_HUMAN HIT: H60606.1, EVALUE 3.40e-01
gctgaggaggaagacgaaagcacagttctgagcatgagagctcacattctgtttctaccaggtgctgaagaaaagcaagacagggtaagttatggatctatcaaagcc

SEQ ID NO: 17320 - DNA, 90 bp, Homo sapiens
  MAP TO AC009227.1; EXPRESSED IN PLACENTA, SIGNAL = 1.9; EXPRESSED IN FETAL LIVER, SIGNAL =  56; EXPRESSED IN LUNG, SIGNAL = 3.4; EXPRESSED IN HELA, SIGNAL = 2.3; EXPRESSED IN ADULT LIVER, SIGNAL = 1.4e+02; EXPRESSED IN BRAIN, SIGNAL = 2.2; EXPRESSED IN HEART, SIGNAL = 2.2; EXPRESSED IN BT474, SIGNAL = 1.7; EXPRESSED IN HBL100, SIGNAL = 1.7; EXPRESSED IN BONE MARROW, SIGNAL = 2.2; NT HIT: U32689.1, EVALUE 6.30e-01; EST_HUMAN HIT: AA363496.1, EVALUE 4.40e+00
ttcatggccaagcctaaaaatgagagaggaggtttgccgtctgatggaaatcgaggtctccatcatggatctccggcaattagaggataa

SEQ ID NO: 17321 - DNA, 318 bp, Homo sapiens
  MAP TO AC008277.1; EXPRESSED IN FETAL LIVER, SIGNAL = 0.95; EXPRESSED IN LUNG, SIGNAL = 1.4; EXPRESSED IN BT474, SIGNAL = 1.5; EXPRESSED IN BONE MARROW, SIGNAL = 1.1; EXPRESSED IN ADULT LIVER, SIGNAL = 0.9; EXPRESSED IN BRAIN, SIGNAL = 0.99; EXPRESSED IN HEART, SIGNAL = 1.1; EXPRESSED IN PLACENTA, SIGNAL = 1.7; EXPRESSED IN HELA, SIGNAL = 0.6; SWISSPROT HIT: P05470, EVALUE 1.50e+00; NT HIT: gi11430990, EVALUE 1.00e-115; EST_HUMAN HIT: AA179811.1, EVALUE 1.00e-115
ggaatgcagtggtgtcttttgaaagaagaggatgtcattcctcgtatcagggcaatggaaggtcgtagaggaagaccaccaaatccagatagacaacgagcaagagaggaatccaggatgagacgtcggaaaggtcgacctccaaatgttggcaatgctgaattcctagataacgcagatgcaaagttgctaagaaaactgcaagctcaaggtaagaaacataatgtgtctgacactaataatcatactaaaaagtatactaaaagtatttctaatatttttgacttaggattgacactgctctcaatttttaaaaag

SEQ ID NO: 17322 - DNA, 626 bp, Homo sapiens
  MAP TO AC008277.1; EXPRESSED IN HELA, SIGNAL = 1.1; EXPRESSED IN BT474, SIGNAL = 2.3; EXPRESSED IN HBL100, SIGNAL = 1.3; EXPRESSED IN FETAL LIVER, SIGNAL = 1.1; EXPRESSED IN LUNG, SIGNAL = 1.3; EXPRESSED IN BRAIN, SIGNAL = 1.7; EXPRESSED IN PLACENTA, SIGNAL = 1.6; EXPRESSED IN BONE MARROW, SIGNAL = 2.2; EXPRESSED IN ADULT LIVER, SIGNAL = 0.94; EXPRESSED IN HEART, SIGNAL = 1.2; SWISSPROT HIT: P53349, EVALUE 4.90e-01; NT HIT: gi11430990, EVALUE 0.00e+00; EST_HUMAN HIT: T19315.1, EVALUE 0.00e+00
gagaaaaactgaaaaaggcagaaagtgtccagatcaaagaagaaatgtttgagacttctggggacagtttaaattgttcaaatacagatcactgtgaacaaaaggaagatcttaaagaaaaagataacacaaatctattccttcagaaacctggctctttttccaaattaagcaagcttttggaagtagctaagatgcctcctgagtcagaggttatgacccccaaaccaaatgctggtgcaaatgggtgcacgttgtcttatcagaacagtggaaaacattcactgggcagcgttcagtcaacagcaacgcaaagcaatgtggaaaaggcagactctaataatctgtttaatactggttcaagtggtccagggaagttctacagtcctctccccaatgaccagttactaaaaacgctgactgaaaagaatagacaatggtttagtcttttgccacgaacaccctgtgatgacacttcacttactcatgccgatatgtcaactgcttctttggtgactcctcagtctcagccaccatctaagtcaccttcacctaccccagctcctcttggatcttctgctcagaatcctgttggcttaaatccatttgctttatcacctcttcag

SEQ ID NO: 17323 - DNA, 95 bp, Homo sapiens
  MAP TO AC008267.1; EXPRESSED IN FETAL LIVER, SIGNAL = 3.8; EXPRESSED IN HELA, SIGNAL = 3.4; EXPRESSED IN HEART, SIGNAL = 1.6; EXPRESSED IN PLACENTA, SIGNAL = 1.6; EXPRESSED IN LUNG, SIGNAL = 2.9; EXPRESSED IN ADULT LIVER, SIGNAL = 3.3; EXPRESSED IN BRAIN, SIGNAL = 2.3; EXPRESSED IN BT474, SIGNAL = 7.2; EXPRESSED IN BONE MARROW, SIGNAL =   7; EXPRESSED IN HBL100, SIGNAL = 3.4; EST_HUMAN HIT: AW468897.1, EVALUE 1.00e-30; NT HIT: AF109718.1, EVALUE 1.00e-05
atgaagactggtgtgggaagaatccttttggatgcacttcagcagggacccctgatccctgggtcacaggcctgtactgggccacacaacaggag

SEQ ID NO: 17324 - DNA, 147 bp, Homo sapiens
  MAP TO AC008267.1; EXPRESSED IN BT474, SIGNAL = 2.6; EXPRESSED IN HBL100, SIGNAL = 1.8; EXPRESSED IN FETAL LIVER, SIGNAL = 1.4; EXPRESSED IN LUNG, SIGNAL = 1.8; EXPRESSED IN BRAIN, SIGNAL = 1.4; EXPRESSED IN PLACENTA, SIGNAL = 1.4; EXPRESSED IN HELA, SIGNAL = 1.2; EXPRESSED IN HEART, SIGNAL = 1.3; EXPRESSED IN ADULT LIVER, SIGNAL = 1.5; EXPRESSED IN BONE MARROW, SIGNAL = 1.5; NT HIT: gi7657495, EVALUE 1.00e-65; SWISSPROT HIT: P42286, EVALUE 5.10e+00; EST_HUMAN HIT: R19787.1, EVALUE 2.00e-65
cccagtccttccataaaccggcaaaccagcattgaaatggatagagtgtctaaggagttcatagaatttctcaagaccttctgcaagacaggccaagaaatctataaactgaccaagctgtttttggaagggatgcattacaaaagg

SEQ ID NO: 17325 - DNA, 448 bp, Homo sapiens
  MAP TO AC008267.1; EXPRESSED IN PLACENTA, SIGNAL = 8.4; EXPRESSED IN BT474, SIGNAL =  19; EXPRESSED IN HBL100, SIGNAL =  18; EXPRESSED IN FETAL LIVER, SIGNAL =  14; EXPRESSED IN LUNG, SIGNAL = 6.8; EXPRESSED IN HELA, SIGNAL = 9.3; EXPRESSED IN BRAIN, SIGNAL =  28; EXPRESSED IN BONE MARROW, SIGNAL =  11; EXPRESSED IN ADULT LIVER, SIGNAL = 7.9; EXPRESSED IN HEART, SIGNAL =  11; EST_HUMAN HIT: BE904659.1, EVALUE 0.00e+00; SWISSPROT HIT: P34991, EVALUE 5.00e-57; NT HIT: Z47087.1, EVALUE 0.00e+00
tttgcgtacctgggcttcctcctcttcagtaaagtcatttttgatattgaatgtcttgcgaatctcctcaggagttttccccttgatcatattggcaacagtcttgcatgtaacatcaagcaaacctttgatgtctaagtagtttgcagcccgaatgagttcaaaaagtgttccttgagcaactttcaggaattcttggtcccaaacagggatatcgtctgtttgcttttctttgttctcatcatcttcagggggaggagggtcatccttgtggtgggtgcaccactgaatgaccttttttaatactgctgcattcacatttggtagaggaactgggtcatctccttcatcatccattcccaaatcttccaacgtggtcttgatagtcacagattgtttggcaatttccacatcaactgcaaatatctctccatcaaaactctgcaac

SEQ ID NO: 17326 - DNA, 775 bp, Homo sapiens
  MAP TO AC008267.1; EXPRESSED IN FETAL LIVER, SIGNAL =   4; EXPRESSED IN HELA, SIGNAL = 4.7; EXPRESSED IN BRAIN, SIGNAL = 4.3; EXPRESSED IN HEART, SIGNAL =   4; EXPRESSED IN PLACENTA, SIGNAL = 4.5; EXPRESSED IN BT474, SIGNAL = 4.5; EXPRESSED IN BONE MARROW, SIGNAL = 4.5; EXPRESSED IN HBL100, SIGNAL = 5.4; EXPRESSED IN LUNG, SIGNAL = 4.2; EXPRESSED IN ADULT LIVER, SIGNAL = 3.9; SWISSPROT HIT: P38409, EVALUE 1.00e-119; NT HIT: gi11426106, EVALUE 0.00e+00; EST_HUMAN HIT: BE740136.1, EVALUE 0.00e+00
agtacaggatattgtcctccagcaggtccttcttgttgaggaaggtgatgacgggggagttctggaaccaggggtagtcgatgatggtccggaacagggctttgctctcctccatccggttctcgttgtccgactccaccaggacttggtcgtattcactgagggcgacgagaaacgggatggacgtcaggttctcaaagcagtggatccacttcctctgcgccgaccgctgtcccccaacatccgccatcctgaagatgatgttctccaggtcgaaagacgccggtggtgggcacgcggacccgcagcacgtcctgctgggtgggcaggtagctcgaggtggcgatgcagtctacgtcggtcacgcagtacttggccgagtccgagagctggtactcgcgcctgcggtcgtagcactcgtggatgccggggtcgtcccacagggtcttgatggcgctgacgtaccgatgctcaaaggtggtcaccttctccacgtccacctctcggatctggagcgcattggccttgttctgctccaacttgtagaggatcttcagcgtctccatggcccggatcatggcctgcatggcggtgaaaatgttctggtagacgagcttggtgaagccccttttgtcctcctcctagtacccggcgccatggatgatgcgcatctgcttgatgaaggtgctcttcccgctctcgcccgtgaggagcagcagcagcttgagctggcgccgggcgtcgcgcttgtcccccgcagctgcttctggatctc

SEQ ID NO: 17327 - DNA, 195 bp, Homo sapiens
  MAP TO AC008266.1; EXPRESSED IN BT474, SIGNAL = 1.8; EXPRESSED IN BONE MARROW, SIGNAL = 2.2; EXPRESSED IN LUNG, SIGNAL = 2.3; EXPRESSED IN ADULT LIVER, SIGNAL = 2.1; EXPRESSED IN HELA, SIGNAL =   2; EXPRESSED IN HBL100, SIGNAL = 1.6; EXPRESSED IN PLACENTA, SIGNAL = 1.9; EXPRESSED IN HEART, SIGNAL = 1.8; EXPRESSED IN BRAIN, SIGNAL = 2.7; EXPRESSED IN FETAL LIVER, SIGNAL = 1.8; SWISSPROT HIT: Q21973, EVALUE 5.60e-01; EST_HUMAN HIT: AA335987.1, EVALUE 1.00e-106
ctgtgaaaaccttctttaagcttttactgatccagatgttgtccagagacttcgagccttgagggttcttggtgctgatgttggtgaaggtgtgcgcggggatcaggtggtggaacttttctttcctcaggatatcatagtcattgctgtctggcccttggccaaaatcccctaagataatgacatccttttctc

SEQ ID NO: 17328 - DNA, 96 bp, Homo sapiens
  MAP TO AC008167.1; EXPRESSED IN HELA, SIGNAL = 2.5; EXPRESSED IN BT474, SIGNAL =   7; EXPRESSED IN FETAL LIVER, SIGNAL = 3.1; EXPRESSED IN LUNG, SIGNAL = 2.8; EXPRESSED IN PLACENTA, SIGNAL = 2.1; EXPRESSED IN BONE MARROW, SIGNAL = 1.7; EXPRESSED IN HBL100, SIGNAL = 3.8; EXPRESSED IN ADULT LIVER, SIGNAL = 1.8; EXPRESSED IN BRAIN, SIGNAL = 2.1; EXPRESSED IN HEART, SIGNAL = 1.8; NT HIT: AF309871.1, EVALUE 8.00e-01; EST_HUMAN HIT: BE907634.1, EVALUE 3.00e-47
atgcaagaatctcaagagcccaatttggaaaacatttgggggcaagaagctgcagaggtagatcaagagctcgttgaactactagtgaaagaaacg

SEQ ID NO: 17329 - DNA, 84 bp, Homo sapiens
  MAP TO AC008166.1; EXPRESSED IN PLACENTA, SIGNAL = 5.1; EXPRESSED IN BONE MARROW, SIGNAL = 5.5; EXPRESSED IN LUNG, SIGNAL = 4.3; EXPRESSED IN ADULT LIVER, SIGNAL = 3.3; EXPRESSED IN HEART, SIGNAL = 4.3; EXPRESSED IN BT474, SIGNAL = 4.9; EXPRESSED IN HBL100, SIGNAL = 5.6; EXPRESSED IN FETAL LIVER, SIGNAL = 3.3; EXPRESSED IN HELA, SIGNAL = 5.1; EXPRESSED IN BRAIN, SIGNAL = 5.3; NT HIT: AL163248.2, EVALUE 3.00e-12; EST_HUMAN HIT: AV721403.1, EVALUE 1.00e-18
cctgcccttgaacatcggactctgagttcttcagttttgggacttggataggctctccttgctcctcagcttgcagctggccta

SEQ ID NO: 17330 - DNA, 232 bp, Homo sapiens
  MAP TO AC008166.1; EXPRESSED IN HELA, SIGNAL = 2.9; EXPRESSED IN BRAIN, SIGNAL = 4.3; EXPRESSED IN HEART, SIGNAL = 2.6; EXPRESSED IN PLACENTA, SIGNAL = 3.8; EXPRESSED IN BT474, SIGNAL = 2.5; EXPRESSED IN BONE MARROW, SIGNAL = 2.8; EXPRESSED IN HBL100, SIGNAL = 2.9; EXPRESSED IN LUNG, SIGNAL = 3.6; EXPRESSED IN ADULT LIVER, SIGNAL = 2.5; EXPRESSED IN FETAL LIVER, SIGNAL = 2.6; EST_HUMAN HIT: AA401219.1, EVALUE 2.10e-01; SWISSPROT HIT: P25531, EVALUE 4.00e+00
cagcaggctagaagtacaaaactctcaagtggaaatagtcttgaaatagctgataaaacaagctgtgaagctgagaaacactttagcacttatgtattcatacttcactgtgcctgtcttaataacacatccaggagctcctatttcagagtcagggacttcagagtgttccaaagcagacaaatcattcactttagagttcagaaaagtatgttcatatcctgcctgtctc

SEQ ID NO: 17331 - DNA, 564 bp, Homo sapiens
  MAP TO AC008166.1; EXPRESSED IN FETAL LIVER, SIGNAL = 4.5; EXPRESSED IN BONE MARROW, SIGNAL = 5.1; EXPRESSED IN HBL100, SIGNAL = 3.9; EXPRESSED IN ADULT LIVER, SIGNAL = 3.9; EXPRESSED IN BRAIN, SIGNAL = 5.8; EXPRESSED IN PLACENTA, SIGNAL = 4.8; EXPRESSED IN BT474, SIGNAL = 5.3; EXPRESSED IN LUNG, SIGNAL = 5.3; EXPRESSED IN HELA, SIGNAL = 5.1; EXPRESSED IN HEART, SIGNAL = 5.8; EST_HUMAN HIT: AA984295.1, EVALUE 7.00e-95; NT HIT: AL163209.2, EVALUE 0.00e+00; SWISSPROT HIT: P23074, EVALUE 5.00e-17
aacccccacattggccccctaactggtagagtgagggatattatggtgggaaaggcaaaatggaagctattagagctgcctctacctagaaaaatggtaaataaaaaacaatattgcatctctggagggatggtggagattagtgccaccatcaaggacttaaaagatgcaggagtggtgattcccaccacatccccgttcaactctcctatttggcctgtgcagaagacagacggctcttggagaatgacagtggattatcataagctaagccaggtggtgactccaattgcagctgttgtaccagatgtggttttattgcttgagcaaattaacacatctcctggtacctggtatgtagacactgatttggcaaatgcattcttctccattcctgtccataaggcccaccagaagcaattggccttcagctggcaaggccagcaatgcacctttactgtcctacctcaggggtatatcaactctctggctttgtgtcataatcttattgagagagaccatgatcacttcacttctgcaagatatcacacttgtccattacat

SEQ ID NO: 17332 - DNA, 181 bp, Homo sapiens
  MAP TO AC008157.1; EXPRESSED IN PLACENTA, SIGNAL =  11; EXPRESSED IN LUNG, SIGNAL =   9; EXPRESSED IN HELA, SIGNAL =  13; EXPRESSED IN BT474, SIGNAL =  54; EXPRESSED IN HBL100, SIGNAL =  17; EXPRESSED IN FETAL LIVER, SIGNAL = 7.7; EXPRESSED IN BRAIN, SIGNAL =  21; EXPRESSED IN BONE MARROW, SIGNAL =  16; EXPRESSED IN ADULT LIVER, SIGNAL = 6.3; EXPRESSED IN HEART, SIGNAL = 5.2; EST_HUMAN HIT: AW630116.1, EVALUE 2.00e-84; NT HIT: U28964.1, EVALUE 1.00e-84; SWISSPROT HIT: P35215, EVALUE 3.00e-26
accctccaagatgacctacgggctcctacaacatttttataagcaactgagagaagattcctctcctcattggataattcagctccttgctcagttacagacttcatgcaggctgccatgttatcatattgctcagcctgctcagccagtttggccttctgaaccagctcatttttttcca

SEQ ID NO: 17333 - DNA, 97 bp, Homo sapiens
  MAP TO AC008087.1; EXPRESSED IN FETAL LIVER, SIGNAL =  35; EXPRESSED IN HELA, SIGNAL =  97; EXPRESSED IN ADULT LIVER, SIGNAL =  16; EXPRESSED IN BRAIN, SIGNAL = 6.8; EXPRESSED IN HEART, SIGNAL =  11; EXPRESSED IN BONE MARROW, SIGNAL =  21; EXPRESSED IN PLACENTA, SIGNAL = 4.4; EXPRESSED IN BT474, SIGNAL =  30; EXPRESSED IN LUNG, SIGNAL =  22; EXPRESSED IN HBL100, SIGNAL =  51; EST_HUMAN HIT: BE560290.1, EVALUE 7.00e-36; NT HIT: AB015610.1, EVALUE 4.00e-39; SWISSPROT HIT: P12750, EVALUE 1.00e-09
cctcatctggtgactcatgatgctcgcaccatccgctaccctgacccctcatcaaggtgaatgacaccattcagattgatttggagactggcaagat

SEQ ID NO: 17334 - DNA, 192 bp, Homo sapiens
  MAP TO AC007967.2; EXPRESSED IN HEART, SIGNAL = 0.89; EXPRESSED IN BONE MARROW, SIGNAL = 1.6; EXPRESSED IN HELA, SIGNAL = 1.1; EXPRESSED IN ADULT LIVER, SIGNAL = 1.1; EXPRESSED IN BRAIN, SIGNAL = 1.1; EXPRESSED IN PLACENTA, SIGNAL = 1.1; EXPRESSED IN BT474, SIGNAL = 1.7; EXPRESSED IN HBL100, SIGNAL = 1.1; EXPRESSED IN FETAL LIVER, SIGNAL = 2.1; EXPRESSED IN LUNG, SIGNAL = 1.2; SWISSPROT HIT: P26808, EVALUE 2.00e-05; EST_HUMAN HIT: BE838799.1, EVALUE 1.00e-54; NT HIT: M10976.1, EVALUE 2.00e-55
aaatcccaagtaatgtacctgctgttggcagatctgagctttttccttggacaccttatacctacagtcctccaggtgccagaggagggcatccgttcccttggtgcacccgactgtcatggggtgtcccagcaggtcatcaacttactggagcaacactcagcctaggtctctggtgggaaacttctggag

SEQ ID NO: 17335 - DNA, 184 bp, Homo sapiens
  MAP TO AC007967.2; EXPRESSED IN BT474, SIGNAL =   4; EXPRESSED IN BONE MARROW, SIGNAL =   3; EXPRESSED IN HBL100, SIGNAL = 2.5; EXPRESSED IN BRAIN, SIGNAL = 1.8; EXPRESSED IN HEART, SIGNAL = 1.9; EXPRESSED IN PLACENTA, SIGNAL = 1.7; EXPRESSED IN FETAL LIVER, SIGNAL = 1.5; EXPRESSED IN LUNG, SIGNAL = 1.7; EXPRESSED IN HELA, SIGNAL = 1.8; EXPRESSED IN ADULT LIVER, SIGNAL = 1.9; NT HIT: AB008681.1, EVALUE 7.00e-21; EST_HUMAN HIT: AA663213.1, EVALUE 9.00e-24; SWISSPROT HIT: Q07510, EVALUE 4.30e-01
ctccaaactctcgggctgcaggtaagctgcattcttttcattgaaggccagggattgatctaacaatagcatgacatctctgaaagcaagatcaaaggtttgccctagaccctgtaggacatctatgtacctatttgaaacttccaaaaacttccccaggtcttcctttatctgatttaaatca

SEQ ID NO: 17336 - DNA, 107 bp, Homo sapiens
  MAP TO AC007967.2; EXPRESSED IN BRAIN, SIGNAL = 1.7; EXPRESSED IN HEART, SIGNAL = 1.5; EXPRESSED IN HBL100, SIGNAL = 1.1; EXPRESSED IN PLACENTA, SIGNAL = 1.4; EXPRESSED IN BT474, SIGNAL = 0.74; EXPRESSED IN BONE MARROW, SIGNAL = 0.86; EXPRESSED IN FETAL LIVER, SIGNAL = 1.7; EXPRESSED IN LUNG, SIGNAL = 1.2; EXPRESSED IN HELA, SIGNAL = 1.1; EXPRESSED IN ADULT LIVER, SIGNAL = 1.4; NT HIT: S76404.1, EVALUE 9.10e-01; EST_HUMAN HIT: AW103851.1, EVALUE 5.30e+00; SWISSPROT HIT: Q9ZH76, EVALUE 1.90e+00
ttgtctgtgtggttctgcttgggctgcaggggttccatgtccttcatttttctgtgggtctgaactgggaggtgggcaagacccaccagctttcaaatcacctcccc

SEQ ID NO: 17337 - DNA, 150 bp, Homo sapiens
  MAP TO AC007966.2; EXPRESSED IN HELA, SIGNAL = 1.2; EXPRESSED IN HEART, SIGNAL = 1.4; EXPRESSED IN BT474, SIGNAL = 0.84; EXPRESSED IN BONE MARROW, SIGNAL = 0.89; EXPRESSED IN FETAL LIVER, SIGNAL = 0.95; EXPRESSED IN LUNG, SIGNAL =  44; EXPRESSED IN ADULT LIVER, SIGNAL = 1.1; EXPRESSED IN BRAIN, SIGNAL = 1.7; EXPRESSED IN PLACENTA, SIGNAL = 0.96; EXPRESSED IN HBL100, SIGNAL = 0.91; SWISSPROT HIT: P08547, EVALUE 2.00e-04; NT HIT: AB007970.1, EVALUE 4.00e-19; EST_HUMAN HIT: AI741196.1, EVALUE 2.00e-12
ataaaaatggttaacatgtatatgaaaagttgctcaacattactaatcatcaggaagatgaaaatcaaaaccgcaatgacatattgcctcacacctgataagacagctattataaaaaccaaaaaggtaagtcttaaggtaaaggatgtg

SEQ ID NO: 17338 - DNA, 83 bp, Homo sapiens
  MAP TO AC007910.1; EXPRESSED IN BONE MARROW, SIGNAL = 1.8; EXPRESSED IN FETAL LIVER, SIGNAL = 2.1; EXPRESSED IN LUNG, SIGNAL = 1.7; EXPRESSED IN ADULT LIVER, SIGNAL = 2.5; EXPRESSED IN BRAIN, SIGNAL = 1.7; EXPRESSED IN HEART, SIGNAL = 1.7; EXPRESSED IN PLACENTA, SIGNAL =   2; EXPRESSED IN HBL100, SIGNAL = 1.7; EXPRESSED IN BT474, SIGNAL = 1.7; EXPRESSED IN HELA, SIGNAL = 1.4; EST_HUMAN HIT: BE617619.1, EVALUE 2.00e-39; NT HIT: gi5803210, EVALUE 9.00e-40; SWISSPROT HIT: P79303, EVALUE 4.00e-09
ttgaaagtataccagatatgcttgaattggatcacctcacagtttcaggagatgtgacatttggaaaaaatgtttcattaaag

SEQ ID NO: 17339 - DNA, 379 bp, Homo sapiens
  MAP TO AC007906.2; EXPRESSED IN BONE MARROW, SIGNAL = 1.6; EXPRESSED IN HBL100, SIGNAL = 1.4; EXPRESSED IN FETAL LIVER, SIGNAL = 1.5; EXPRESSED IN LUNG, SIGNAL = 1.4; EXPRESSED IN ADULT LIVER, SIGNAL = 1.4; EXPRESSED IN BRAIN, SIGNAL = 1.9; EXPRESSED IN PLACENTA, SIGNAL = 1.4; EXPRESSED IN BT474, SIGNAL = 2.1; EXPRESSED IN HELA, SIGNAL = 1.4; EXPRESSED IN HEART, SIGNAL = 1.8; EST_HUMAN HIT: AV710288.1, EVALUE 0.00e+00; SWISSPROT HIT: Q64663, EVALUE 1.20e+00
ggccccacattggactgccatctgatacatctggaaacaaaccattgggttggttttggggatggattggagaacaattaaactgagagtgtggagataacacatgttcagctgggctaccaaaagattgattaacatggtgaaattttattgaatcaaattgatttaactgttcaaaatcagtcatcttctgatgtgttggagtaccttgaacatggttcagtgaatctatgtgcaacggttcaaattctgcacccaaattcaattcatcaactagtgaaacaggtcctggttgtacaaatgcatcatctgacaaaccttctaaggtctcaccaaaaagattggcatcatcaaaaaagtccatcattggatctgtcat

SEQ ID NO: 17340 - DNA, 175 bp, Homo sapiens
  MAP TO AC007906.2; EXPRESSED IN BONE MARROW, SIGNAL = 4.6; EXPRESSED IN HBL100, SIGNAL = 2.7; EXPRESSED IN FETAL LIVER, SIGNAL = 3.4; EXPRESSED IN ADULT LIVER, SIGNAL = 5.4; EXPRESSED IN PLACENTA, SIGNAL = 4.6; EXPRESSED IN BT474, SIGNAL = 4.1; EXPRESSED IN LUNG, SIGNAL = 4.4; EXPRESSED IN HELA, SIGNAL = 5.1; EXPRESSED IN HEART, SIGNAL = 4.1; EXPRESSED IN BRAIN, SIGNAL = 4.3; SWISSPROT HIT: Q9Y6J0, EVALUE 1.70e+00; NT HIT: AL163227.2, EVALUE 8.00e-27; EST_HUMAN HIT: AW844142.1, EVALUE 2.00e-21
atgctgatacaagaggtgggctcccacagccttgggcatttccatccctgtggctttgcagactacaactcccctcctggctgctgtcatgggctgctgttgagtgtctgcagcttttcccaggcgtacagtgcaaaatgtcagtggatctatcattttggggtctggaggatgg

SEQ ID NO: 17341 - DNA, 250 bp, Homo sapiens
  MAP TO AC007900.1; EXPRESSED IN PLACENTA, SIGNAL = 1.3; EXPRESSED IN BONE MARROW, SIGNAL =   1; EXPRESSED IN HBL100, SIGNAL = 1.2; EXPRESSED IN FETAL LIVER, SIGNAL = 1.9; EXPRESSED IN ADULT LIVER, SIGNAL = 1.1; EXPRESSED IN BRAIN, SIGNAL = 1.7; EXPRESSED IN HEART, SIGNAL = 1.2; EXPRESSED IN BT474, SIGNAL = 9.7; EXPRESSED IN LUNG, SIGNAL = 1.3; EXPRESSED IN HELA, SIGNAL = 1.7; EST_HUMAN HIT: BF379942.1, EVALUE 3.00e-19; SWISSPROT HIT: Q13085, EVALUE 5.00e-36; NT HIT: X68968.1, EVALUE 1.00e-117
ctgttccatgtgttcaaatactgctggagtagcaatagtagcaggtgcttcttcaataatcttctgatgcctgcgttgtacagagcaatcacgaccaaacaaagagatagcattgccatattggtccgctaagatctgcacctccagatgacgagattgtttggctagtctcatcacaaatatgggagatccaggaacttcagcttgaacctgtattagaaaagggggaaaaaaaaaaccaattcttaaa

SEQ ID NO: 17342 - DNA, 129 bp, Homo sapiens
  MAP TO AC007900.1; EXPRESSED IN LUNG, SIGNAL = 2.2; EXPRESSED IN PLACENTA, SIGNAL = 1.1; EXPRESSED IN BT474, SIGNAL = 8.4; EXPRESSED IN BONE MARROW, SIGNAL = 1.2; EXPRESSED IN HBL100, SIGNAL = 1.5; EXPRESSED IN FETAL LIVER, SIGNAL = 1.8; EXPRESSED IN HELA, SIGNAL = 2.1; EXPRESSED IN ADULT LIVER, SIGNAL = 1.2; EXPRESSED IN BRAIN, SIGNAL = 2.1; EXPRESSED IN HEART, SIGNAL = 1.3; EST_HUMAN HIT: BE181738.1, EVALUE 7.40e-02; NT HIT: gi11426423, EVALUE 7.00e-67; SWISSPROT HIT: Q13085, EVALUE 1.00e-18
cttcttgatagacttctccacattggggggaatgcggccagacacactggtcataatatcttgcaattctaggagaggcagggagggatctctgagggttttcatcaatcgctctacccagtcttttac

SEQ ID NO: 17343 - DNA, 99 bp, Homo sapiens
  MAP TO AC007900.1; EXPRESSED IN PLACENTA, SIGNAL = 0.91; EXPRESSED IN BT474, SIGNAL = 3.8; EXPRESSED IN FETAL LIVER, SIGNAL = 1.1; EXPRESSED IN LUNG, SIGNAL = 0.98; EXPRESSED IN HELA, SIGNAL = 1.7; EXPRESSED IN ADULT LIVER, SIGNAL =   1; EXPRESSED IN BONE MARROW, SIGNAL = 1.3; EXPRESSED IN HBL100, SIGNAL = 0.9; EXPRESSED IN BRAIN, SIGNAL = 1.7; EXPRESSED IN HEART, SIGNAL = 0.93; EST_HUMAN HIT: D63113.1, EVALUE 1.20e+00; NT HIT: gi11426423, EVALUE 4.00e-49; SWISSPROT HIT: Q28559, EVALUE 4.00e-13
gaatctaattgcacgttcatttcgaaacatttcataagaccacctacggatagaccgcatgcatttcactgctgcaatgccattgttagcaataagaac

SEQ ID NO: 17344 - DNA, 87 bp, Homo sapiens
  MAP TO AC007880.1; EXPRESSED IN ADULT LIVER, SIGNAL = 2.8; EXPRESSED IN BONE MARROW, SIGNAL = 2.8; EXPRESSED IN HBL100, SIGNAL = 2.8; EXPRESSED IN BRAIN, SIGNAL = 3.1; EXPRESSED IN HEART, SIGNAL = 2.6; EXPRESSED IN PLACENTA, SIGNAL = 4.7; EXPRESSED IN BT474, SIGNAL = 2.8; EXPRESSED IN LUNG, SIGNAL = 3.3; EXPRESSED IN HELA, SIGNAL = 2.9; EXPRESSED IN FETAL LIVER, SIGNAL = 3.4; NT HIT: gi5802999, EVALUE 6.00e-01; SWISSPROT HIT: P30650, EVALUE 7.10e+00
tagccagctgtgaccaagaagaggacaaccggagcaacaatcttagacacaaggatggaagctgtaaggcaggggaggagttccagg

SEQ ID NO: 17345 - DNA, 216 bp, Homo sapiens
  MAP TO AC007880.1; EXPRESSED IN PLACENTA, SIGNAL = 1.8; EXPRESSED IN BT474, SIGNAL = 3.4; EXPRESSED IN HEART, SIGNAL = 1.4; EXPRESSED IN HELA, SIGNAL = 2.3; EXPRESSED IN LUNG, SIGNAL = 2.3; EXPRESSED IN FETAL LIVER, SIGNAL = 4.2; EXPRESSED IN HBL100, SIGNAL = 1.9; EXPRESSED IN BONE MARROW, SIGNAL =   2; EXPRESSED IN BRAIN, SIGNAL = 2.9; EXPRESSED IN ADULT LIVER, SIGNAL = 1.3; NT HIT: M10976.1, EVALUE 2.00e-52; EST_HUMAN HIT: BE838799.1, EVALUE 6.00e-51; SWISSPROT HIT: P21414, EVALUE 4.00e-14
ctgctgttggcagatctgagctttcttcttggacaccttatacccacagtcctccaggtgctggagcacggtatccattcccttggtgcgcccgactgctgtggggtgtcccagcaggaggtcatcaatgtactggagcaacacgcaacctaggtctctagcggggaacttttggaagtctcgagccaatgcctccctgaagatggtgggggagtt

SEQ ID NO: 17346 - DNA, 195 bp, Homo sapiens
  MAP TO AC007880.1; EXPRESSED IN FETAL LIVER, SIGNAL = 1.5; EXPRESSED IN LUNG, SIGNAL = 1.6; EXPRESSED IN PLACENTA, SIGNAL = 2.2; EXPRESSED IN BT474, SIGNAL = 1.7; EXPRESSED IN BONE MARROW, SIGNAL = 1.9; EXPRESSED IN HBL100, SIGNAL = 1.4; EXPRESSED IN HELA, SIGNAL =   1; EXPRESSED IN ADULT LIVER, SIGNAL = 1.2; EXPRESSED IN BRAIN, SIGNAL = 1.4; EXPRESSED IN HEART, SIGNAL = 1.6; SWISSPROT HIT: O77638, EVALUE 1.60e+00; EST_HUMAN HIT: AW131316.1, EVALUE 1.20e-01; NT HIT: X56338.1, EVALUE 9.80e-02
aagtgggtgaatgcgggccacagtggcatgaccagcgctcaggctggggcccaggcgggatttgagaataaagggatcttcttggagtacacagtcctgggactggggaagaaggctgtcaccttcatcagaggggacttggaactcctggatttaaattttgactcccaggagggcatctggttgctcagggga

SEQ ID NO: 17347 - DNA, 177 bp, Homo sapiens
  MAP TO AC007877.3; EXPRESSED IN HBL100, SIGNAL = 0.74; EXPRESSED IN FETAL LIVER, SIGNAL = 0.8; EXPRESSED IN HELA, SIGNAL =   1; EXPRESSED IN ADULT LIVER, SIGNAL = 0.78; EXPRESSED IN BRAIN, SIGNAL = 0.8; EXPRESSED IN HEART, SIGNAL = 0.95; EXPRESSED IN PLACENTA, SIGNAL = 1.6; EXPRESSED IN LUNG, SIGNAL = 1.1; EXPRESSED IN BONE MARROW, SIGNAL =   1; EXPRESSED IN BT474, SIGNAL = 0.7; EST_HUMAN HIT: BF314855.1, EVALUE 1.50e-01; NT HIT: AL161584.2, EVALUE 1.60e+00; SWISSPROT HIT: Q03495, EVALUE 2.90e+00
ctggctgtctggaggcttcacgcttttgaaaccagcaacgtaggccatggcacaactggctctagcaccaagtgcctggcagaagcagcagaattgcccactttttccaatacaaactaaaaccagaaagatatagtactccctagctttccctgtcaatacacactgtttcatcag

SEQ ID NO: 17348 - DNA, 182 bp, Homo sapiens
  MAP TO AC007876.1; EXPRESSED IN BONE MARROW, SIGNAL = 1.9; EXPRESSED IN FETAL LIVER, SIGNAL = 0.99; EXPRESSED IN LUNG, SIGNAL = 0.7; EXPRESSED IN ADULT LIVER, SIGNAL = 0.78; EXPRESSED IN PLACENTA, SIGNAL = 0.76; EXPRESSED IN BT474, SIGNAL = 0.64; EXPRESSED IN HELA, SIGNAL = 0.7; EXPRESSED IN BRAIN, SIGNAL = 0.96; EXPRESSED IN HEART, SIGNAL = 0.87; EST_HUMAN HIT: BF111566.1, EVALUE 9.90e+00; NT HIT: U67582.1, EVALUE 4.20e-01; SWISSPROT HIT: P39931, EVALUE 2.90e+00
gcttaacaactttacagcgagggatggcaaatggcaactggttctctatattcaggctttctttgatgtctaccttaaatgtaaccttccactgtgtcaagcttgcactgctcataaaatctttctttttaataaaaatcctccccaggtctttccttactatgaaactccttttaacccag

SEQ ID NO: 17349 - DNA, 930 bp, Homo sapiens
  MAP TO AC007876.1; EXPRESSED IN HBL100, SIGNAL = 4.5; EXPRESSED IN HELA, SIGNAL = 7.6; EXPRESSED IN ADULT LIVER, SIGNAL = 5.4; EXPRESSED IN PLACENTA, SIGNAL = 5.3; EXPRESSED IN BRAIN, SIGNAL =   8; EXPRESSED IN HEART, SIGNAL = 3.1; EXPRESSED IN LUNG, SIGNAL = 4.7; EXPRESSED IN FETAL LIVER, SIGNAL = 6.6; EXPRESSED IN BONE MARROW, SIGNAL = 2.5; EXPRESSED IN BT474, SIGNAL = 4.7; NT HIT: gi9635487, EVALUE 0.00e+00; SWISSPROT HIT: P10272, EVALUE 3.00e-37; EST_HUMAN HIT: BE150340.1, EVALUE 0.00e+00
tggctgctgccaccctaatacttttagaggccttcaaaatcaactatgctcaactcactctctacaactctcataatttccaaaatctattttcttcctcacacctgatgcatatactttctgctccctgcctctttcagctatactcactctttgttgagtctcccacaattaccattgttcctggcccagacttcaatcttgcctcccacattattccggataccacacctgaccctcatgactgcatctctctgacccacctgacattcaccccatctccccacatttccttcttccctgtttctcactctgatcacacttggtttattgatggcagttccacaaggcctaatcgccactcaccagcaaaggcaggctatgcaatagtatcttccacatctgttattgaggctaccattctgccctgctccactacctctcagcaagccaagctagttgccttatctcaggccctcactcttgcaaaaggactacatgtcaatatttatactgactctaaatatgccttccatattctgcactaccatgcagtcatattggctgaaagaattttccttactacacaagggtcctccatcattaatgcttctttaataaaaactctgctcgaggccgctttacttccaaaggaagctggggtcattcactgcaagaggcatcaaaaggcgtcagatcccattgctctaggcaacgcttgtgctgataaggtggctaggcaagcagctagctttccaacttctgtctctcacagcaattctgatgcagataaggtggctagacaagcagctagctctccaacttctgtccctgacggccagtttttctccttcacatcggccactcccacctactcccccgctgaaacctccacctatcaatctcttctcacacaaggcaaatggttct

SEQ ID NO: 17350 - DNA, 117 bp, Homo sapiens
  MAP TO AC007860.6; EXPRESSED IN PLACENTA, SIGNAL = 1.1; EXPRESSED IN BT474, SIGNAL =   1; EXPRESSED IN BONE MARROW, SIGNAL =   1; EXPRESSED IN HEART, SIGNAL =   1; EXPRESSED IN ADULT LIVER, SIGNAL = 6.8; EXPRESSED IN HELA, SIGNAL = 1.3; EXPRESSED IN LUNG, SIGNAL = 1.2; EXPRESSED IN FETAL LIVER, SIGNAL = 3.8; EXPRESSED IN BRAIN, SIGNAL = 1.1; EXPRESSED IN HBL100, SIGNAL = 1.2; SWISSPROT HIT: Q60519, EVALUE 9.30e+00; NT HIT: AF289667.1, EVALUE 1.60e-02; EST_HUMAN HIT: L49075.1, EVALUE 7.00e-05
atgcttataagcaggaaacctcctccttctgtgttagaacatattcttgtggtcaggggctggatttttttaccttcttcatgcctggcacataatagatgctcaaatagtgcatga

SEQ ID NO: 17351 - DNA, 146 bp, Homo sapiens
  MAP TO AC007860.6; EXPRESSED IN PLACENTA, SIGNAL =   2; EXPRESSED IN BONE MARROW, SIGNAL = 2.2; EXPRESSED IN HBL100, SIGNAL = 2.1; EXPRESSED IN ADULT LIVER, SIGNAL = 1.3; EXPRESSED IN BRAIN, SIGNAL = 1.7; EXPRESSED IN BT474, SIGNAL = 3.2; EXPRESSED IN FETAL LIVER, SIGNAL = 2.1; EXPRESSED IN LUNG, SIGNAL = 1.6; EXPRESSED IN HELA, SIGNAL = 1.7; EXPRESSED IN HEART, SIGNAL = 1.8; EST_HUMAN HIT: AA719723.1, EVALUE 4.90e-01; SWISSPROT HIT: O60879, EVALUE 4.50e-01
gattaactacatctcaatagggagcctggttaacaacaggggagtgaaaaggaggctatttttcactctcccaactggtgaatgcctggaaggggtgatgggggcacttggagggctgccccctgcggtgcagggggagacaggac

SEQ ID NO: 17352 - DNA, 163 bp, Homo sapiens
  MAP TO AC007857.1; EXPRESSED IN LUNG, SIGNAL = 1.5; EXPRESSED IN HELA, SIGNAL = 1.8; EXPRESSED IN HEART, SIGNAL = 1.7; EXPRESSED IN PLACENTA, SIGNAL =   2; EXPRESSED IN FETAL LIVER, SIGNAL = 1.4; EXPRESSED IN ADULT LIVER, SIGNAL =   2; EXPRESSED IN BRAIN, SIGNAL = 1.8; EXPRESSED IN BT474, SIGNAL = 1.6; EXPRESSED IN BONE MARROW, SIGNAL = 1.6; EXPRESSED IN HBL100, SIGNAL = 1.4; NT HIT: Z73640.1, EVALUE 1.30e+00; EST_HUMAN HIT: BE910342.1, EVALUE 2.20e+00
gtcacacacacacacatcattgtcatcatcaccatcatcatcgtcgtcgtcatcattgtcatctactgtattcacatggaaaaagctggtcctagctctgccccactacgtggtgcctggcatgaatacctgcttttgcaacatgctaagaaggaaggcttca

SEQ ID NO: 17353 - DNA, 201 bp, Homo sapiens
  MAP TO AC007847.1; EXPRESSED IN FETAL LIVER, SIGNAL = 1.5; EXPRESSED IN LUNG, SIGNAL = 1.4; EXPRESSED IN PLACENTA, SIGNAL = 2.5; EXPRESSED IN BONE MARROW, SIGNAL = 1.2; EXPRESSED IN HBL100, SIGNAL = 0.98; EXPRESSED IN ADULT LIVER, SIGNAL = 1.1; EXPRESSED IN BRAIN, SIGNAL = 1.1; EXPRESSED IN HEART, SIGNAL = 1.1; EXPRESSED IN BT474, SIGNAL = 0.94; EXPRESSED IN HELA, SIGNAL = 0.91; NT HIT: AL163282.2, EVALUE 2.60e-02; SWISSPROT HIT: P10387, EVALUE 4.20e-01
aagggggagtgtggatgcagacacagacgtgtgtggagggcggtctacagggagagacgcagggaaagtgccagttgcaggcggggatgggaatgctcgtctacaagcccaggagcacagagattgctgcaaagccccagaagctgggaagtggccagaagggattcccctccaagctttagagggagcatggctctgtag

SEQ ID NO: 17354 - DNA, 259 bp, Homo sapiens
  MAP TO AC007847.1; EXPRESSED IN HEART, SIGNAL = 1.4; EXPRESSED IN PLACENTA, SIGNAL = 5.5; EXPRESSED IN BT474, SIGNAL = 1.4; EXPRESSED IN LUNG, SIGNAL = 2.1; EXPRESSED IN HELA, SIGNAL = 0.93; EXPRESSED IN ADULT LIVER, SIGNAL = 1.3; EXPRESSED IN BRAIN, SIGNAL =   2; EXPRESSED IN BONE MARROW, SIGNAL =   1; EXPRESSED IN HBL100, SIGNAL = 1.4; EXPRESSED IN FETAL LIVER, SIGNAL = 2.2; NT HIT: gi4826683, EVALUE 1.00e-114; EST_HUMAN HIT: BE275502.1, EVALUE 1.00e-116; SWISSPROT HIT: P53355, EVALUE 6.00e-30
  unsure 6
  unsure 192
agttcncaagatcaggatgacgtccgtcttgttctcatagacctcgtgcagggtgatgacattggggtgctggatctccttcaggatgctgacctcccgctcgatgtcctcgcggctcacaccccgccggctggacttagtcctccttttcttgatgaatttggcggcatactggaggccggtgcttttctncacggcatttcttcacaaccgcaaactgtccactgaaaagagaagatggaggattctttatcgttca

SEQ ID NO: 17355 - DNA, 133 bp, Homo sapiens
  MAP TO AC007846.1; EXPRESSED IN BRAIN, SIGNAL = 2.1; EXPRESSED IN BT474, SIGNAL = 1.4; EXPRESSED IN LUNG, SIGNAL = 1.9; EXPRESSED IN HELA, SIGNAL = 2.4; EXPRESSED IN ADULT LIVER, SIGNAL =   2; EXPRESSED IN HEART, SIGNAL = 1.5; EXPRESSED IN PLACENTA, SIGNAL = 1.5; EXPRESSED IN BONE MARROW, SIGNAL = 1.7; EXPRESSED IN HBL100, SIGNAL = 1.5; EXPRESSED IN FETAL LIVER, SIGNAL = 1.7; EST_HUMAN HIT: AW295600.1, EVALUE 4.40e-01; NT HIT: M84484.1, EVALUE 7.50e-02; SWISSPROT HIT: P25691, EVALUE 6.80e+00
  unsure 20
  unsure 61
  unsure 91
ttctggatccaagcctgggnctgacgcagctgctgctcctgctggtcctccatagagacangccggggtttcctgtcccaatccatcacanggaagtcttccctgggctcctagtcactctgggtgggcttcc

SEQ ID NO: 17356 - DNA, 133 bp, Homo sapiens
  MAP TO AC007846.1; EXPRESSED IN HBL100, SIGNAL = 1.6; EXPRESSED IN FETAL LIVER, SIGNAL = 1.5; EXPRESSED IN ADULT LIVER, SIGNAL = 1.4; EXPRESSED IN BRAIN, SIGNAL = 1.2; EXPRESSED IN HEART, SIGNAL = 1.1; EXPRESSED IN PLACENTA, SIGNAL = 1.4; EXPRESSED IN BT474, SIGNAL = 2.4; EXPRESSED IN HELA, SIGNAL = 1.4; EXPRESSED IN LUNG, SIGNAL = 1.7; EXPRESSED IN BONE MARROW, SIGNAL = 2.2; SWISSPROT HIT: Q9Z2I3, EVALUE 2.30e+00
  unsure 86
  unsure 111
cctccactgtttctgagaaatcagtggtagtccttatcattgttatcctatataaaatgtgtcttttttttcctctggctcccttncaagattttgtctttattttcagcnaggttgagtatgatatgggtgg

SEQ ID NO: 17357 - DNA, 84 bp, Homo sapiens
  MAP TO AC007846.1; EXPRESSED IN PLACENTA, SIGNAL = 6.4; EXPRESSED IN BT474, SIGNAL = 1.6; EXPRESSED IN BONE MARROW, SIGNAL = 1.8; EXPRESSED IN HBL100, SIGNAL = 1.7; EXPRESSED IN HELA, SIGNAL = 1.4; EXPRESSED IN ADULT LIVER, SIGNAL =   2; EXPRESSED IN BRAIN, SIGNAL = 1.6; EXPRESSED IN HEART, SIGNAL = 1.8; EXPRESSED IN LUNG, SIGNAL = 1.4; EXPRESSED IN FETAL LIVER, SIGNAL = 5.5; NT HIT: AB030912.1, EVALUE 5.80e-01; EST_HUMAN HIT: BE278630.1, EVALUE 2.60e-01
tttctaagaaggtctcaggcaaagctgcagctactggtccagggccacacttccagtagcaagacatcttacatccagttcctg

SEQ ID NO: 17358 - DNA, 225 bp, Homo sapiens
  MAP TO AC007846.1; EXPRESSED IN PLACENTA, SIGNAL =  47; EXPRESSED IN BONE MARROW, SIGNAL = 0.91; EXPRESSED IN LUNG, SIGNAL =   1; EXPRESSED IN HELA, SIGNAL = 1.4; EXPRESSED IN ADULT LIVER, SIGNAL = 1.1; EXPRESSED IN BT474, SIGNAL =   1; EXPRESSED IN HBL100, SIGNAL = 1.2; EXPRESSED IN FETAL LIVER, SIGNAL = 1.2; EXPRESSED IN BRAIN, SIGNAL = 1.1; EXPRESSED IN HEART, SIGNAL = 1.8; SWISSPROT HIT: Q14137, EVALUE 1.70e+00; EST_HUMAN HIT: BE792777.1, EVALUE 8.00e-01; NT HIT: AK024424.1, EVALUE 3.40e-02
tcagaagaagagcatcgaagactttgaggggaagggagtgaggtctgatgggcgaggagactttaaaaactcaggtggagcatttatgggcaaggacaatgaagtatactctgactctgggctgttctgcagtgacttcagtctagacaaaagtctggataaaagaggaggaggggtcattggatagctttgtgacggtcccataggctgcaggaggagttgttt

SEQ ID NO: 17359 - DNA, 198 bp, Homo sapiens
  MAP TO AC007790.1; EXPRESSED IN HELA, SIGNAL = 2.1; EXPRESSED IN ADULT LIVER, SIGNAL = 2.9; EXPRESSED IN BRAIN, SIGNAL = 2.4; EXPRESSED IN HEART, SIGNAL = 1.9; EXPRESSED IN PLACENTA, SIGNAL = 1.6; EXPRESSED IN LUNG, SIGNAL = 2.1; EXPRESSED IN FETAL LIVER, SIGNAL = 2.3; EXPRESSED IN HBL100, SIGNAL = 1.7; EXPRESSED IN BONE MARROW, SIGNAL = 1.9; EXPRESSED IN BT474, SIGNAL = 2.8; SWISSPROT HIT: O52715, EVALUE 3.70e+00; NT HIT: AL163279.2, EVALUE 4.00e-01; EST_HUMAN HIT: AW853132.1, EVALUE 1.00e-44
ttcctgctgatgcagcagtgcctccttggatacaggatcattcctgctctaggctttttcctgagaggggcagctctcctgggattctggcgaatcaaatgcttcatctcaacagatttgtttatattcgccccttttccatgtggtgggaggaaaaactttttcactactttctttaattcaatgcttggggactgc

SEQ ID NO: 17360 - DNA, 84 bp, Homo sapiens
  MAP TO AC007786.1; EXPRESSED IN BT474, SIGNAL = 1.8; EXPRESSED IN BONE MARROW, SIGNAL = 2.7; EXPRESSED IN HELA, SIGNAL = 1.7; EXPRESSED IN ADULT LIVER, SIGNAL = 1.5; EXPRESSED IN HEART, SIGNAL = 1.9; EXPRESSED IN PLACENTA, SIGNAL = 1.6; EXPRESSED IN HBL100, SIGNAL =   2; EXPRESSED IN FETAL LIVER, SIGNAL = 1.7; EXPRESSED IN LUNG, SIGNAL = 2.1; EXPRESSED IN BRAIN, SIGNAL = 2.5; EST_HUMAN HIT: BF027639.1, EVALUE 6.50e-02
tctcagagtccacagcactgtgttagaagacagagaagagaaaaagaagctcacagtcttaagggtgacagccctaaaatattg

SEQ ID NO: 17361 - DNA, 129 bp, Homo sapiens
  MAP TO AC007786.1; EXPRESSED IN PLACENTA, SIGNAL = 3.6; EXPRESSED IN HBL100, SIGNAL = 2.8; EXPRESSED IN FETAL LIVER, SIGNAL = 2.6; EXPRESSED IN BRAIN, SIGNAL = 2.1; EXPRESSED IN BT474, SIGNAL = 3.2; EXPRESSED IN BONE MARROW, SIGNAL = 3.1; EXPRESSED IN LUNG, SIGNAL = 2.7; EXPRESSED IN HELA, SIGNAL = 2.2; EXPRESSED IN ADULT LIVER, SIGNAL = 1.5; EXPRESSED IN HEART, SIGNAL = 2.4; NT HIT: AJ277546.2, EVALUE 1.00e-06; SWISSPROT HIT: O15063, EVALUE 6.00e-01; EST_HUMAN HIT: AV729795.1, EVALUE 7.00e-06
tgggtcctgaaggaatttgctgccctgaaggaaagggccttgggtgaggccagtgctgtgctggcttccagtctcactcagcactggccaagtggtggtggccataggggtgcttgcatcaccatatcc

SEQ ID NO: 17362 - DNA, 104 bp, Homo sapiens
  MAP TO AC007786.1; EXPRESSED IN HELA, SIGNAL = 1.5; EXPRESSED IN PLACENTA, SIGNAL = 1.1; EXPRESSED IN BT474, SIGNAL = 1.1; EXPRESSED IN BONE MARROW, SIGNAL =   1; EXPRESSED IN FETAL LIVER, SIGNAL = 1.1; EXPRESSED IN LUNG, SIGNAL = 1.1; EXPRESSED IN ADULT LIVER, SIGNAL = 1.4; EXPRESSED IN HBL100, SIGNAL =   1; EXPRESSED IN BRAIN, SIGNAL = 1.2; EXPRESSED IN HEART, SIGNAL = 2.2; NT HIT: AE004605.1, EVALUE 8.80e-01
atgcaatagagggtgatccattccaaactaaggcaggaaagcaaatacaacatgtgccataagattctggaagccttcctgcaggcagtggtccctgagctggt

SEQ ID NO: 17363 - DNA, 80 bp, Homo sapiens
  MAP TO AC007786.1; EXPRESSED IN HBL100, SIGNAL = 1.8; EXPRESSED IN ADULT LIVER, SIGNAL = 1.7; EXPRESSED IN BRAIN, SIGNAL = 1.2; EXPRESSED IN HEART, SIGNAL = 2.6; EXPRESSED IN BT474, SIGNAL = 1.1; EXPRESSED IN BONE MARROW, SIGNAL = 1.3; EXPRESSED IN FETAL LIVER, SIGNAL = 1.6; EXPRESSED IN HELA, SIGNAL = 1.6; EXPRESSED IN PLACENTA, SIGNAL =   1; EXPRESSED IN LUNG, SIGNAL = 0.96; NT HIT: AF232006.1, EVALUE 5.40e-01
acagttgtccaggtacctcagtggccattgtcagcagactcaacaggtctgtaagtgtgaccagatccagcagaggggct

SEQ ID NO: 17364 - DNA, 601 bp, Homo sapiens
  MAP TO AC007786.1; EXPRESSED IN LUNG, SIGNAL = 1.4; EXPRESSED IN ADULT LIVER, SIGNAL = 4.1; EXPRESSED IN HEART, SIGNAL = 2.6; EXPRESSED IN BONE MARROW, SIGNAL = 2.7; EXPRESSED IN HBL100, SIGNAL = 7.9; EXPRESSED IN PLACENTA, SIGNAL = 1.8; EXPRESSED IN BRAIN, SIGNAL = 2.6; EXPRESSED IN HELA, SIGNAL = 3.9; EXPRESSED IN FETAL LIVER, SIGNAL = 4.7; EXPRESSED IN BT474, SIGNAL = 4.2; EST_HUMAN HIT: BE379481.1, EVALUE 0.00e+00; SWISSPROT HIT: P47985, EVALUE 1.00e-108; NT HIT: gi11425415, EVALUE 0.00e+00
ttaaccaacaatcaccatatcgtcactggtgaactcatacgtggggacttcaaggttgagaggagcaggacccaatctgatcctgccagatgcatcatagtgtgacccatggcaagggcagtaataaccaccaaaatctcctgcatttgcaatgggtacacagccaagatgagtgcaaacacctatcaggataacccattcaggtttctttactcgatctagatcatgctgtgggtccctcaactgtgataattcaactgcagcttcctgctcaatttccttctgggttctatgacgcacaaacaggggtttgcctctccatttgaaagccatgttcttgccttctggaatatcggataacttgatttcgattttcgccagggccaacacatcagcagaagcactcatgctggaaacgaactgggtgacggcattcttggcagcatatgcgacacccacagtagttactccagttaccaaataggagaaacctttcctagcctcgctgctttctcttgaagacttcgtactatctaaaacttcaaggcggcggtattcagagaagtcaggcaccttgatgtctgtgtgggaataacaaaca

SEQ ID NO: 17365 - DNA, 159 bp, Homo sapiens
  MAP TO AC007776.1; EXPRESSED IN PLACENTA, SIGNAL = 1.7; EXPRESSED IN HBL100, SIGNAL = 5.5; EXPRESSED IN LUNG, SIGNAL = 1.5; EXPRESSED IN HELA, SIGNAL = 2.3; EXPRESSED IN ADULT LIVER, SIGNAL =   2; EXPRESSED IN BRAIN, SIGNAL = 0.74; EXPRESSED IN HEART, SIGNAL = 1.1; EXPRESSED IN BT474, SIGNAL =  35; EXPRESSED IN BONE MARROW, SIGNAL = 2.9; EXPRESSED IN FETAL LIVER, SIGNAL = 2.8; NT HIT: gi4506228, EVALUE 5.00e-80; EST_HUMAN HIT: AU121647.1, EVALUE 9.00e-80; SWISSPROT HIT: P14685, EVALUE 8.00e-11
  unsure 136
ctgtgtagtagaggtacctggcccactcattgttgttggcctgctctgggaacacagacttggacaccagcttctcagcctggtcgtacaagctgtagtgtaggtaattccgcagcaggaggttcaacagggtggncctgcccgtctgcgtcatgccga

SEQ ID NO: 17366 - DNA, 123 bp, Homo sapiens
  MAP TO AC007776.1; EXPRESSED IN HEART, SIGNAL = 1.4; EXPRESSED IN BT474, SIGNAL =  15; EXPRESSED IN LUNG, SIGNAL = 2.1; EXPRESSED IN HELA, SIGNAL = 2.2; EXPRESSED IN ADULT LIVER, SIGNAL = 4.5; EXPRESSED IN BRAIN, SIGNAL = 1.8; EXPRESSED IN PLACENTA, SIGNAL = 1.7; EXPRESSED IN BONE MARROW, SIGNAL = 2.4; EXPRESSED IN FETAL LIVER, SIGNAL = 3.9; EXPRESSED IN HBL100, SIGNAL = 1.9; NT HIT: gi11435154, EVALUE 4.00e-03; EST_HUMAN HIT: BE868715.1, EVALUE 8.00e-58; SWISSPROT HIT: P53224, EVALUE 1.60e-01
ttgagaccccggaccagggcaaggcgaggctgctaacccactgggagcagatggattatggggtccagttcacggcctctcggaagttcttgaccatcacacccatcgtgctgtgagtgcctg

SEQ ID NO: 17367 - DNA, 145 bp, Homo sapiens
  MAP TO AC007750.2; EXPRESSED IN BT474, SIGNAL = 2.7; EXPRESSED IN LUNG, SIGNAL = 1.2; EXPRESSED IN HELA, SIGNAL =   1; EXPRESSED IN FETAL LIVER, SIGNAL = 1.4; EXPRESSED IN PLACENTA, SIGNAL = 1.1; EXPRESSED IN BONE MARROW, SIGNAL = 1.1; EXPRESSED IN HBL100, SIGNAL = 1.7; EXPRESSED IN ADULT LIVER, SIGNAL = 0.95; EXPRESSED IN BRAIN, SIGNAL = 1.1; EXPRESSED IN HEART, SIGNAL = 1.1; NT HIT: gi11428476, EVALUE 2.00e-76; EST_HUMAN HIT: AW583251.1, EVALUE 3.00e-76; SWISSPROT HIT: P01275, EVALUE 4.00e-22
tttcccagaagaggtcgccattgttgaagaacttggccgcagacatgctgatggttctttctctgatgagatgaacaccattcttgataatcttgccgccagggactttataaactggttgattcagaccaaaatcactgacagg

SEQ ID NO: 17368 - DNA, 171 bp, Homo sapiens
  MAP TO AC007750.2; EXPRESSED IN PLACENTA, SIGNAL = 1.7; EXPRESSED IN BT474, SIGNAL =   1; EXPRESSED IN FETAL LIVER, SIGNAL = 1.1; EXPRESSED IN HELA, SIGNAL = 1.5; EXPRESSED IN ADULT LIVER, SIGNAL = 1.3; EXPRESSED IN BONE MARROW, SIGNAL = 1.2; EXPRESSED IN HBL100, SIGNAL = 0.93; EXPRESSED IN LUNG, SIGNAL = 1.2; EXPRESSED IN BRAIN, SIGNAL = 1.3; EXPRESSED IN HEART, SIGNAL = 1.3; EST_HUMAN HIT: C02434.1, EVALUE 1.00e-87; SWISSPROT HIT: P27487, EVALUE 3.00e-13; NT HIT: gi11428474, EVALUE 8.00e-92
tgtaaggtctgtatttgctgttaattggatatcttatcttgcaagtaaggaagggatggtcattgccttggtggatggtcgaggaacagctttccaaggtgacaaactcctctatgcagtgtatcgaaagctgggtgtttatgaagttgaagaccagattacagctgtcag

SEQ ID NO: 17369 - DNA, 292 bp, Homo sapiens
  MAP TO AC007750.2; EXPRESSED IN PLACENTA, SIGNAL = 1.6; EXPRESSED IN FETAL LIVER, SIGNAL = 1.6; EXPRESSED IN LUNG, SIGNAL = 1.5; EXPRESSED IN HELA, SIGNAL = 1.5; EXPRESSED IN BT474, SIGNAL = 1.4; EXPRESSED IN BONE MARROW, SIGNAL = 1.3; EXPRESSED IN HBL100, SIGNAL = 1.7; EXPRESSED IN ADULT LIVER, SIGNAL = 1.3; EXPRESSED IN BRAIN, SIGNAL = 1.1; EXPRESSED IN HEART, SIGNAL = 1.4; NT HIT: gi11545921, EVALUE 1.00e-82; EST_HUMAN HIT: BE882040.1, EVALUE 3.00e-78; SWISSPROT HIT: O69174, EVALUE 6.50e+00
ctgcaaaagaaggaaatcgcaaagaacgtgtttgtgcagaacatttgaggaagtacaatgaggccctacaaattaatgacacaattcgaatgatagatgcgtatactcatcttgaaactttctataatgaagagaaagataagaagtttgcagtcatagaagatgatagtgatgagggtggtgatgatgagtattgtgatggtgatgaagatgaggatgatttaaagaaacctttgaaactggatgaaacagatagatttctcatgactttattttttggtaagattcaaag

SEQ ID NO: 17370 - DNA, 78 bp, Homo sapiens
  MAP TO AC007746.1; EXPRESSED IN HEART, SIGNAL = 2.1; EXPRESSED IN HBL100, SIGNAL = 3.9; EXPRESSED IN FETAL LIVER, SIGNAL = 2.6; EXPRESSED IN BRAIN, SIGNAL = 5.2; EXPRESSED IN PLACENTA, SIGNAL = 3.8; EXPRESSED IN BT474, SIGNAL = 9.7; EXPRESSED IN BONE MARROW, SIGNAL =   4; EXPRESSED IN LUNG, SIGNAL = 3.4; EXPRESSED IN HELA, SIGNAL = 3.5; EXPRESSED IN ADULT LIVER, SIGNAL =   2; EST_HUMAN HIT: AV761055.1, EVALUE 3.60e+00
tactattgactatcatcatcatcatcatcatcatcatcatcatcatcatcatcactatcaacatccttagtcttgata

SEQ ID NO: 17371 - DNA, 215 bp, Homo sapiens
  MAP TO AC007740.1; EXPRESSED IN HBL100, SIGNAL = 6.6; EXPRESSED IN FETAL LIVER, SIGNAL = 5.8; EXPRESSED IN LUNG, SIGNAL = 5.4; EXPRESSED IN HELA, SIGNAL = 8.5; EXPRESSED IN ADULT LIVER, SIGNAL = 2.9; EXPRESSED IN BRAIN, SIGNAL = 1.9; EXPRESSED IN HEART, SIGNAL = 3.2; EXPRESSED IN PLACENTA, SIGNAL = 2.5; EXPRESSED IN BT474, SIGNAL = 3.8; EXPRESSED IN BONE MARROW, SIGNAL = 3.9; NT HIT: AF032897.1, EVALUE 1.00e-105; EST_HUMAN HIT: AA496139.1, EVALUE 1.00e-104; SWISSPROT HIT: Q12809, EVALUE 1.00e-16
gcctcctgggatccacatcagattcaaacctcaacaaatacagcaccattaacaagattccacagctcactctgaatttttcagaggtcaaaactgagaaaaagaattcatcacctccttcttcagataaaaccattattgcacccaaggttaaagatcgaacacacaatgtgactgagaaagtgacccaggtaggacacaattttcttatcaat

SEQ ID NO: 17372 - DNA, 86 bp, Homo sapiens
  MAP TO AC007720.1; EXPRESSED IN BT474, SIGNAL = 8.3; EXPRESSED IN BONE MARROW, SIGNAL = 6.7; EXPRESSED IN HELA, SIGNAL =  16; EXPRESSED IN ADULT LIVER, SIGNAL =   8; EXPRESSED IN PLACENTA, SIGNAL = 9.4; EXPRESSED IN FETAL LIVER, SIGNAL = 7.4; EXPRESSED IN LUNG, SIGNAL = 8.5; EXPRESSED IN BRAIN, SIGNAL =  17; EXPRESSED IN HEART, SIGNAL = 6.5; EXPRESSED IN HBL100, SIGNAL = 9.7; NT HIT: AL163284.2, EVALUE 5.00e-26; EST_HUMAN HIT: BF130500.1, EVALUE 4.00e-28
  unsure 41
  unsure 45
ttctcacggagcaaagaacaggagtacaggggattgatctncccnaagggaggtcccccgatctgagtcacggcaccaaatttcat

SEQ ID NO: 17373 - DNA, 146 bp, Homo sapiens
  MAP TO AC007720.1; EXPRESSED IN HEART, SIGNAL = 3.8; EXPRESSED IN LUNG, SIGNAL =   5; EXPRESSED IN ADULT LIVER, SIGNAL =   5; EXPRESSED IN BRAIN, SIGNAL = 5.2; EXPRESSED IN PLACENTA, SIGNAL =   3; EXPRESSED IN BT474, SIGNAL = 3.3; EXPRESSED IN BONE MARROW, SIGNAL = 3.4; EXPRESSED IN HBL100, SIGNAL = 3.2; EXPRESSED IN FETAL LIVER, SIGNAL = 2.7; EXPRESSED IN HELA, SIGNAL = 4.7; NT HIT: AL163282.2, EVALUE 2.00e-18; EST_HUMAN HIT: AW813783.1, EVALUE 1.00e-28; SWISSPROT HIT: Q12018, EVALUE 5.10e+00
gttcctcatcgccatctgagaccacctcagcctggatttcattgtccatatcagtatcagcatattggtcaaaggcattccacaagtctccgggaaatttccatactttcccacatctatcttcttctgagccctgcaaacttttc

SEQ ID NO: 17374 - DNA, 166 bp, Homo sapiens
  MAP TO AC007707.10; EXPRESSED IN PLACENTA, SIGNAL = 2.5; EXPRESSED IN FETAL LIVER, SIGNAL = 2.5; EXPRESSED IN LUNG, SIGNAL = 1.7; EXPRESSED IN ADULT LIVER, SIGNAL =   2; EXPRESSED IN BT474, SIGNAL = 1.4; EXPRESSED IN HEART, SIGNAL = 1.9; EXPRESSED IN BRAIN, SIGNAL = 2.5; EXPRESSED IN HELA, SIGNAL = 1.4; EXPRESSED IN HBL100, SIGNAL = 1.4; EXPRESSED IN BONE MARROW, SIGNAL =   2; SWISSPROT HIT: P20589, EVALUE 5.20e+00; NT HIT: AB023216.1, EVALUE 2.00e-82; EST_HUMAN HIT: AW900428.1, EVALUE 9.00e-70
cttgtactcaagttgcccggttggttgcaagttttgcataggcaacaggttgtgcatgaagttcacattaggggccacctgcaggaatggagcctgggggttgactccaggaaagccaggtaggagcttctgcagatcttccataacttccgtgctgatacaaaac

SEQ ID NO: 17375 - DNA, 367 bp, Homo sapiens
  MAP TO AC007707.10; EXPRESSED IN PLACENTA, SIGNAL =  15; EXPRESSED IN BT474, SIGNAL =  27; EXPRESSED IN BONE MARROW, SIGNAL =  13; EXPRESSED IN LUNG, SIGNAL =  14; EXPRESSED IN HELA, SIGNAL =  16; EXPRESSED IN ADULT LIVER, SIGNAL =  14; EXPRESSED IN BRAIN, SIGNAL =  27; EXPRESSED IN FETAL LIVER, SIGNAL =  20; EXPRESSED IN HEART, SIGNAL =  15; EXPRESSED IN HBL100, SIGNAL =  15; SWISSPROT HIT: P38427, EVALUE 5.00e-01; EST_HUMAN HIT: BE767903.1, EVALUE 1.00e-103; NT HIT: AB023216.1, EVALUE 1.00e-109
agagtcagcattttgataagataaagcctggcgctctgtcatgctctgtcccccaaggctgggagccagactccccgcatccccttggttcatgtgcctgaacagttcctggtattcttgctgttgctgctgctgctgctgctgctgccgttgttgctgctgccttttaatgagctgtgcaaactctgttgggggcagccggatgtccgagtggccggtgagcgaatgccggggagaaagcagtccttgaaggatgtggggtacctgctggtgtcttgtatagtctggcggcgtgggagacagcagggcctgctgcagtgccgacgtggtatagtgtggcggctgctgatgtgcactgggagggaag

SEQ ID NO: 17376 - DNA, 326 bp, Homo sapiens
  MAP TO AC007707.10; EXPRESSED IN HEART, SIGNAL = 5.3; EXPRESSED IN FETAL LIVER, SIGNAL =   6; EXPRESSED IN LUNG, SIGNAL = 7.3; EXPRESSED IN PLACENTA, SIGNAL = 7.1; EXPRESSED IN BT474, SIGNAL =   4; EXPRESSED IN BONE MARROW, SIGNAL =  15; EXPRESSED IN HBL100, SIGNAL = 4.2; EXPRESSED IN HELA, SIGNAL = 5.9; EXPRESSED IN ADULT LIVER, SIGNAL =   8; EXPRESSED IN BRAIN, SIGNAL =   7; NT HIT: J04066.1, EVALUE 0.00e+00; SWISSPROT HIT: P23035, EVALUE 4.70e+00; EST_HUMAN HIT: AI223443.1, EVALUE 7.60e-02
acctccccacacatcagtttctgattgaagataatgatagaatatgccatcgccctgagttatggcaggggttactgtgtggcaagcagaataacgctccccaaagatgtccacagcctcatccctggaacctgtggctttgctaccttccatggcaaaaaaagattttgctagtgtgattaaggacctggagatggggtggttggcctggattctccaggtgggcccattgtcatcacaggggtccttaattatacaagagggaggcagtggcctcagagtcagagaaagagatgtgaggatggcagtggagatcagactcgtga

SEQ ID NO: 17377 - DNA, 174 bp, Homo sapiens
  MAP TO AC007707.10; EXPRESSED IN ADULT LIVER, SIGNAL =   4; EXPRESSED IN PLACENTA, SIGNAL = 3.3; EXPRESSED IN BT474, SIGNAL = 3.8; EXPRESSED IN BONE MARROW, SIGNAL = 5.1; EXPRESSED IN HBL100, SIGNAL = 3.7; EXPRESSED IN LUNG, SIGNAL = 3.8; EXPRESSED IN HELA, SIGNAL = 4.4; EXPRESSED IN BRAIN, SIGNAL = 4.6; EXPRESSED IN HEART, SIGNAL = 3.7; EXPRESSED IN FETAL LIVER, SIGNAL = 3.5; NT HIT: gi11440021, EVALUE 2.00e-86; EST_HUMAN HIT: AI146755.1, EVALUE 1.00e-93; SWISSPROT HIT: O75312, EVALUE 4.00e-26
ctccagagccctgacagacaaagtgtagcgcactccctggtcctggatcctgcctgccgactggatctccgtgttgttccagccacagtgctcgcaggaaaaggagctcactattatttctctgaagaagggaatcttggtgagcaggaggcgcgtcatgccctggtgaagtag

SEQ ID NO: 17378 - DNA, 147 bp, Homo sapiens
  MAP TO AC007707.10; EXPRESSED IN BT474, SIGNAL = 1.7; EXPRESSED IN HBL100, SIGNAL = 2.4; EXPRESSED IN LUNG, SIGNAL = 1.7; EXPRESSED IN HELA, SIGNAL = 2.3; EXPRESSED IN ADULT LIVER, SIGNAL = 2.3; EXPRESSED IN PLACENTA, SIGNAL = 1.3; EXPRESSED IN BONE MARROW, SIGNAL = 2.1; EXPRESSED IN FETAL LIVER, SIGNAL = 1.9; EXPRESSED IN BRAIN, SIGNAL = 1.5; EXPRESSED IN HEART, SIGNAL = 1.4; EST_HUMAN HIT: BE272349.1, EVALUE 1.00e-74; NT HIT: gi4508020, EVALUE 1.00e-74; SWISSPROT HIT: Q62384, EVALUE 8.00e-22
ctaccgttgcggagccaggcctgcctcatagccctctgtcttcatgtcattgagccctagctcctcattttggtcaaaggtgcgcttgtaacgctccaccttcatctcaggatcatcttcaggcgcatacacattctgcaaggtcaa

SEQ ID NO: 17379 - DNA, 488 bp, Homo sapiens
  MAP TO AC007707.10; EXPRESSED IN HBL100, SIGNAL = 2.1; EXPRESSED IN FETAL LIVER, SIGNAL = 2.2; EXPRESSED IN LUNG, SIGNAL = 2.1; EXPRESSED IN ADULT LIVER, SIGNAL = 1.5; EXPRESSED IN BRAIN, SIGNAL = 1.8; EXPRESSED IN HEART, SIGNAL = 1.7; EXPRESSED IN PLACENTA, SIGNAL = 1.9; EXPRESSED IN BT474, SIGNAL = 2.2; EXPRESSED IN HELA, SIGNAL = 3.3; EXPRESSED IN BONE MARROW, SIGNAL = 1.8; SWISSPROT HIT: P30640, EVALUE 2.00e-07; NT HIT: gi11545830, EVALUE 3.10e-01; EST_HUMAN HIT: BF104898.1, EVALUE 0.00e+00
gtcatgacgggcccttctgagttgctgtgtgtctgaagagccaagagtcctcctagatgtgtcaggggagttgttatggacccttctgggggaagagatatctgaggaaccatgacgggctcgcctaggaggagagggatctggtgaatcatgacggactctcctaggagatgcacctgaagaattatgctgaggcctccttgggggagaaggatctggagaatcatgacgggccctccttgggggtgaagtgtctgaggagtcatgacggatcctcctgggaggagatgtgtctgagtcatgacgagcccctctgaggggagaaggatctggggtgtcatgacgggccctcctaggagatggatccggggtgtcatgacggtccttcctaggagatggatctggggtaccatgacggaccctcctaggagatgaatccggggtatcgtgacgaaaatgtctgtttgagggtaggtcttcgttgtggc

SEQ ID NO: 17380 - DNA, 116 bp, Homo sapiens
  MAP TO AC007707.10; EXPRESSED IN BT474, SIGNAL = 4.3; EXPRESSED IN HBL100, SIGNAL = 3.1; EXPRESSED IN HELA, SIGNAL = 2.4; EXPRESSED IN BRAIN, SIGNAL = 2.7; EXPRESSED IN PLACENTA, SIGNAL = 4.4; EXPRESSED IN HEART, SIGNAL =   3; EXPRESSED IN ADULT LIVER, SIGNAL = 2.3; EXPRESSED IN LUNG, SIGNAL = 2.6; EXPRESSED IN FETAL LIVER, SIGNAL = 3.1; EXPRESSED IN BONE MARROW, SIGNAL = 4.6; NT HIT: M38284.1, EVALUE 5.50e-02; EST_HUMAN HIT: AA939339.1, EVALUE 4.00e-03; SWISSPROT HIT: P51522, EVALUE 6.90e+00
cagaagccttcccaactgccagaatttccagcatccactgttcctctgaagagcaaaagctcttcaccaggctcttcacctcccagcttattctgtggtcttctctggacaaggaa

SEQ ID NO: 17381 - DNA, 314 bp, Homo sapiens
  MAP TO AC007670.1; EXPRESSED IN HELA, SIGNAL = 1.9; EXPRESSED IN HEART, SIGNAL = 0.79; EXPRESSED IN BT474, SIGNAL = 1.7; EXPRESSED IN BONE MARROW, SIGNAL = 3.1; EXPRESSED IN FETAL LIVER, SIGNAL = 2.3; EXPRESSED IN LUNG, SIGNAL = 0.84; EXPRESSED IN ADULT LIVER, SIGNAL = 0.94; EXPRESSED IN BRAIN, SIGNAL = 0.75; EXPRESSED IN PLACENTA, SIGNAL = 0.8; EXPRESSED IN HBL100, SIGNAL = 8.1; NT HIT: J00146.1, EVALUE 1.00e-106; EST_HUMAN HIT: BE887227.1, EVALUE 8.00e-79; SWISSPROT HIT: P00375, EVALUE 5.00e-27
  unsure 195
  unsure 249
gtcgattcttctcaggaatggagaaccagatcttcctacccataatcaccaaattctgtttaccttctactgaggaggttgtggtcactctctggaaatacctgaattcattcctgagcggtggccagggcaggtcctcgttcttgccgatgcccatgttctggggggacacagtgacgacgcagtttagcaaanctaaccatgacagcagcgatgagcacctccgagcctgctcactacaccaagatngcacggccaagattggcctattttattttttaattgacaactaataattgtacatatccgtgagg

SEQ ID NO: 17382 - DNA, 262 bp, Homo sapiens
  MAP TO AC007637.5; EXPRESSED IN FETAL LIVER, SIGNAL = 1.7; EXPRESSED IN ADULT LIVER, SIGNAL = 4.7; EXPRESSED IN PLACENTA, SIGNAL = 2.8; EXPRESSED IN BT474, SIGNAL = 0.78; EXPRESSED IN BONE MARROW, SIGNAL = 0.9; EXPRESSED IN HBL100, SIGNAL = 0.87; EXPRESSED IN LUNG, SIGNAL = 0.96; EXPRESSED IN HELA, SIGNAL = 0.98; EXPRESSED IN BRAIN, SIGNAL = 1.3; EXPRESSED IN HEART, SIGNAL = 2.7; NT HIT: gi4501854, EVALUE 1.00e-112; SWISSPROT HIT: O00763, EVALUE 2.00e-34; EST_HUMAN HIT: BE545477.1, EVALUE 6.00e-05
gtacagagtgagatcccaggctcgcccatctttctcatgaagctggcccagcacgcccgtcacctggaagttcagatcctcgctgaccagtatgggaatgctgtgtctctgtttggtcgcgactgctccatccagcggcggcatcagaagatcgttgaggaagcaccggccaccatcgccccgctggccatattcgagttcatggagcaggtacacttctcagagcccagggggcagcttcagagagagccgtctcagctca

SEQ ID NO: 17383 - DNA, 527 bp, Homo sapiens
  MAP TO AC007637.5; EXPRESSED IN HELA, SIGNAL = 1.3; EXPRESSED IN ADULT LIVER, SIGNAL = 4.6; EXPRESSED IN PLACENTA, SIGNAL = 0.64; EXPRESSED IN BT474, SIGNAL = 0.67; EXPRESSED IN BONE MARROW, SIGNAL = 0.69; EXPRESSED IN LUNG, SIGNAL = 0.83; EXPRESSED IN FETAL LIVER, SIGNAL = 0.88; EXPRESSED IN BRAIN, SIGNAL = 0.76; EXPRESSED IN HEART, SIGNAL = 1.5; NT HIT: gi4501854, EVALUE 0.00e+00; SWISSPROT HIT: O00763, EVALUE 2.00e-80
cgagccaggagccctttccagcctctgataactcaggggagacaccgcagagaaatggggagggccacactctgcccaagacacccagccaggccgagccagcctcccacaaaggccccaaagatgccggtcggcggagaaactccctaccaccctcccaccagaagcccccaagaaaccccctttcttccagtgacgcagcaccctccccagagcttcaagccaacgggactgggacacaaggtctggaggccacagataccaatggcctgtcctcctcagccaggccccagggccagcaagctggctccccctccaaagaagacaagaagcaggcaaacatcaagaggcagctgatgaccaacttcatcctgggctcttttgatgactactcctccgacgaggactctgttgctggctcatctcgtgagtctacccggaagggcagccgggccagcttgggggccctgtccctggaggcttatctgaccacaggtgaagctgagacccgcgtccccactatgagg

SEQ ID NO: 17384 - DNA, 210 bp, Homo sapiens
  MAP TO AC007626.1; EXPRESSED IN BT474, SIGNAL = 4.1; EXPRESSED IN BONE MARROW, SIGNAL = 5.5; EXPRESSED IN HBL100, SIGNAL = 4.8; EXPRESSED IN BRAIN, SIGNAL =  13; EXPRESSED IN PLACENTA, SIGNAL = 4.8; EXPRESSED IN FETAL LIVER, SIGNAL = 5.9; EXPRESSED IN LUNG, SIGNAL = 5.1; EXPRESSED IN HELA, SIGNAL = 6.4; EXPRESSED IN ADULT LIVER, SIGNAL = 5.6; EXPRESSED IN HEART, SIGNAL = 4.5; EST_HUMAN HIT: AV703736.1, EVALUE 1.00e-101; NT HIT: U29103.1, EVALUE 1.00e-112; SWISSPROT HIT: P49675, EVALUE 8.00e-30
ttacctgatgacacccttctgctcaggcatgttcccgaagtctgtggccatgccagccagcacacaggtggagcctcggcgcttggcacagcgcacgctcacaaagtcacggggccccaccaggtttcctgctgcctcggcagccagctcgtgagtaatgaatgtatcttttccgatcttctgcaggacctaccaggccatggggaacca

SEQ ID NO: 17385 - DNA, 175 bp, Homo sapiens
  MAP TO AC007626.1; EXPRESSED IN LUNG, SIGNAL = 1.3; EXPRESSED IN BT474, SIGNAL = 3.1; EXPRESSED IN BONE MARROW, SIGNAL = 2.2; EXPRESSED IN HBL100, SIGNAL = 3.1; EXPRESSED IN FETAL LIVER, SIGNAL = 3.7; EXPRESSED IN HELA, SIGNAL = 1.1; EXPRESSED IN ADULT LIVER, SIGNAL = 1.4; EXPRESSED IN BRAIN, SIGNAL = 1.4; EXPRESSED IN PLACENTA, SIGNAL = 1.8; EXPRESSED IN HEART, SIGNAL = 1.2; SWISSPROT HIT: P49763, EVALUE 2.30e+00; EST_HUMAN HIT: AL046866.2, EVALUE 5.00e-94; NT HIT: AF056717.1, EVALUE 3.00e-94
ccattggaacacccgtttaacaaagatggctatcggtatattctagctgagcctgatccgcacgcccctgaccccgagaagctggaacttgactgctgggcaggaaaacctattcctggagacctctacagagcctgcttgtatgaacgggttttgttagccctacatgatcgag

SEQ ID NO: 17386 - DNA, 148 bp, Homo sapiens
  MAP TO AC007607.2; EXPRESSED IN PLACENTA, SIGNAL = 2.8; EXPRESSED IN HEART, SIGNAL = 1.6; EXPRESSED IN BRAIN, SIGNAL = 2.3; EXPRESSED IN ADULT LIVER, SIGNAL = 1.4; EXPRESSED IN HELA, SIGNAL = 1.6; EXPRESSED IN LUNG, SIGNAL = 2.4; EXPRESSED IN HBL100, SIGNAL =   2; EXPRESSED IN BONE MARROW, SIGNAL = 2.6; EXPRESSED IN BT474, SIGNAL =   2; EXPRESSED IN FETAL LIVER, SIGNAL = 2.2; NT HIT: AF221712.1, EVALUE 3.00e-69; SWISSPROT HIT: P52737, EVALUE 1.20e-01; EST_HUMAN HIT: AW962987.1, EVALUE 3.00e-69
ctgtgaaacacacggggcatttgaaggtgccgcccatgccctcgaagctgtgctcaatgaggtgacagaggagcttggccggggagtcgaacatctggttgcacagcttacactcgtggttgatgccttcctctgcaaggaaaacccg

SEQ ID NO: 17387 - DNA, 120 bp, Homo sapiens
  MAP TO AC007607.2; EXPRESSED IN BT474, SIGNAL = 3.8; EXPRESSED IN BONE MARROW, SIGNAL = 9.4; EXPRESSED IN HELA, SIGNAL = 3.1; EXPRESSED IN PLACENTA, SIGNAL =  14; EXPRESSED IN FETAL LIVER, SIGNAL = 2.5; EXPRESSED IN LUNG, SIGNAL = 4.3; EXPRESSED IN ADULT LIVER, SIGNAL = 2.7; EXPRESSED IN BRAIN, SIGNAL = 3.3; EXPRESSED IN HBL100, SIGNAL = 2.2; EXPRESSED IN HEART, SIGNAL = 3.1; SWISSPROT HIT: Q01484, EVALUE 2.40e+00; NT HIT: AP000061.1, EVALUE 2.70e-01; EST_HUMAN HIT: AA450061.1, EVALUE 2.70e-01
gtcccccacaccccagttttcctggggcttctccacatcggagccatcctcctggagcaggcttcctgtccgctgaccacagactcccatcacaacatcgctctgcaccttgcagaggct

SEQ ID NO: 17388 - DNA, 1663 bp, Homo sapiens
  MAP TO AC007607.2; EXPRESSED IN BONE MARROW, SIGNAL = 1.6; EXPRESSED IN HBL100, SIGNAL = 0.83; EXPRESSED IN FETAL LIVER, SIGNAL = 0.94; EXPRESSED IN ADULT LIVER, SIGNAL = 0.85; EXPRESSED IN PLACENTA, SIGNAL = 1.9; EXPRESSED IN BT474, SIGNAL =   1; EXPRESSED IN LUNG, SIGNAL = 1.4; EXPRESSED IN HELA, SIGNAL = 0.9; EXPRESSED IN BRAIN, SIGNAL = 1.1; EXPRESSED IN HEART, SIGNAL = 1.1; EST_HUMAN HIT: T80616.1, EVALUE 0.00e+00; SWISSPROT HIT: Q05481, EVALUE 9.00e-30; NT HIT: AF221712.1, EVALUE 0.00e+00
ttgccactgcgcgatagcgccgcttcttggaaacacggcactcagggtacgtggctcctgtggggaccagaggagccccaaggagaggagcagggagcaggatgaggtggactgcacttacccggggcactggcgatgtctgggtgcctttccggggcccactggtctccggcgtgaggtcacggtggtccacctgcatgtggctctccaggtcttcggcactctcaaacttgacactgcactcggggcaacggaggccggcacagggccggtcggcgggctcgggcggggccaggccacccacctgtccgttggcgctgcgggccatgcagccggcgcagaggccgtagggcagcccattgacgtcaagcttcaccaggtcctgcttgctgcggaactccttgaggcacagggcgcacttgtagagcttctgcagcccctggccattgggggaggacgccgctgagctgcccgccagcttctgcatgtggaaggtgccatggatcttgagctcaagcgtggaagtgactgtctgcatgcagaccacacagcggaagcccgtgagtgagttgcgcaggtcagggtgcatctggcagtgctcaataaactcctcctcgctctgcaggggcatcttgcagatgcgacaggtgcccgtgtccaggctcttgctgtgggtcaccttgtgttcggtgagcgtcagcagcgaagggaagcgctcaccacagatgggacacatgtagtgcttggcagggccccggtgcgtctgcaggtgctcccgtagcccgttctccgagaagaaagtccgtgaacaaacgttgcacttgtgactgcccttgataaactcagccttcttgcgtgagccatcatcctcgcccggccggatattgtggtcccgcagccggtgattctgcagcagcacctccatggtgtaggccgccccacagatgtcacagccgtacatgggctccgacgcgtccacgtcatcctcgctggcctcatggctgttaggtgcctcagggttcttaagcagcatgccctgcaggtcagcaggctcagctttcttggtggccattgggggtaccccattggccgtgccgttctcggtcgcagcatcaaacacacagtgcttctcccgcaggtgcttctccagcaggatgatggcgtggaaggccttgctgcagaacttacagttatacttcttgctgtgtgtggtgatgtggcactgcagctccacctcggtgctgaaggtctccccacagaagatgcacttgtgagccttggccgggttgcccaggtggctgtgtttgacgtgcacctgcaggtcagcctccttgcggaagtcccagttgcaggccgtgcagcggtacatcttcttctcattgctgtgcttcaccgccaggtgcacctggatggacaccttggagtcgaagacctcctgacacagggtgcagtggtacaacacaaaggtgtgcatgtccagcaggtgcttctgcaggtcatccaccgaggaaaattgcttgtcgcagctctcgcacacatagtgggtcgacgtggtcatgtaatgcactgtcaggtgctgcaggagggactcctgggagtcaaagtcctctttgcactgggggcacgcttgcttccgcagcagcagctccaggtgcagcttcag

SEQ ID NO: 17389 - DNA, 187 bp, Homo sapiens
  MAP TO AC007600.2; EXPRESSED IN HELA, SIGNAL = 2.3; EXPRESSED IN BRAIN, SIGNAL = 1.6; EXPRESSED IN HEART, SIGNAL = 3.4; EXPRESSED IN PLACENTA, SIGNAL = 1.3; EXPRESSED IN BT474, SIGNAL = 2.1; EXPRESSED IN BONE MARROW, SIGNAL = 1.8; EXPRESSED IN HBL100, SIGNAL = 6.7; EXPRESSED IN FETAL LIVER, SIGNAL =   3; EXPRESSED IN LUNG, SIGNAL = 1.3; EXPRESSED IN ADULT LIVER, SIGNAL = 2.5; EST_HUMAN HIT: AA569006.1, EVALUE 1.10e-01; SWISSPROT HIT: P21530, EVALUE 2.20e+00; NT HIT: gi11428491, EVALUE 4.40e-01
cacctcctctactttaactgtgctctcaggtggtttgcgctgagaatggatgtcctcatgaacatccttaccttcactgtggccttgttggtgaccctgagtttctcctccatcagtacttcatccaaaggcctgtcattgtcatacatcatccaggtaatgcctggtgcaaagttgggcttagtct

SEQ ID NO: 17390 - DNA, 248 bp, Homo sapiens
  MAP TO AC007600.2; EXPRESSED IN HEART, SIGNAL = 3.8; EXPRESSED IN FETAL LIVER, SIGNAL = 2.7; EXPRESSED IN ADULT LIVER, SIGNAL = 2.9; EXPRESSED IN BRAIN, SIGNAL = 4.3; EXPRESSED IN PLACENTA, SIGNAL = 2.6; EXPRESSED IN BONE MARROW, SIGNAL = 3.1; EXPRESSED IN LUNG, SIGNAL = 3.3; EXPRESSED IN HELA, SIGNAL = 4.2; EXPRESSED IN BT474, SIGNAL = 3.9; EXPRESSED IN HBL100, SIGNAL = 3.4; NT HIT: D79979.1, EVALUE 5.10e-01; EST_HUMAN HIT: AW341683.1, EVALUE 3.00e-12; SWISSPROT HIT: P31369, EVALUE 1.20e+00
acatcacccaaccagaagacccagatactgtcttgcttttagcaaatgccaccttgacatgggagcatgaagccagcaggaaaagtaccccaaagaaattgcagaaccagaaaaggcatttatgcaagaaacagaggtcagaggcatacagtgagaggagtccaccagccaagggagccactggcccagaggagcaaagtgacagcctcaaatcggttctgcacagcataagctttgtggtgagaaag

SEQ ID NO: 17391 - DNA, 252 bp, Homo sapiens
  MAP TO AC007600.2; EXPRESSED IN BT474, SIGNAL = 2.4; EXPRESSED IN FETAL LIVER, SIGNAL = 2.1; EXPRESSED IN LUNG, SIGNAL =   2; EXPRESSED IN PLACENTA, SIGNAL = 2.5; EXPRESSED IN HELA, SIGNAL = 1.6; EXPRESSED IN HEART, SIGNAL = 1.9; EXPRESSED IN BRAIN, SIGNAL = 1.8; EXPRESSED IN ADULT LIVER, SIGNAL = 1.8; EXPRESSED IN HBL100, SIGNAL = 1.9; EXPRESSED IN BONE MARROW, SIGNAL = 2.3; EST_HUMAN HIT: BE959924.2, EVALUE 3.60e+00; SWISSPROT HIT: O13146, EVALUE 3.00e+00; NT HIT: M58509.1, EVALUE 5.10e-01
ctcaggttaccaagggcagggcagtggcccagcggccactgggaggtcgtaggttgttgatcatggaccacagcttgactgtccgctgtgcccggcagttgcagagcgggtggacatgtggtagaaagaccgtgcccaaaggccgtacttgggttcaggcttcttttcttgcttccgatccagaccagggctgggttctgttcatgcagggagccaaggacctatgcaagaatgagaggccaatttttaaac

SEQ ID NO: 17392 - DNA, 219 bp, Homo sapiens
  MAP TO AC007600.2; EXPRESSED IN BONE MARROW, SIGNAL = 5.2; EXPRESSED IN ADULT LIVER, SIGNAL = 5.8; EXPRESSED IN BRAIN, SIGNAL = 5.5; EXPRESSED IN PLACENTA, SIGNAL = 4.2; EXPRESSED IN BT474, SIGNAL = 4.9; EXPRESSED IN HBL100, SIGNAL = 4.3; EXPRESSED IN FETAL LIVER, SIGNAL = 5.3; EXPRESSED IN LUNG, SIGNAL =   5; EXPRESSED IN HELA, SIGNAL = 4.4; EXPRESSED IN HEART, SIGNAL = 3.9; NT HIT: AF183923.1, EVALUE 2.80e-02; SWISSPROT HIT: Q63120, EVALUE 5.00e-14
atcatccttatcgatgaagccacagcctccattgacatggagacagacaccctgatccagcgcacaatccgtgaagccttccagggctgcaccgtgctcgtcattgcccaccgtgtcaccactgtgctgaactgtgaccacatcctggttatgggcaatgggaaggtgaaggctgcgtccttgggctggtgggaggatgagggctcaggctgctacccc

SEQ ID NO: 17393 - DNA, 234 bp, Homo sapiens
  MAP TO AC007600.2; EXPRESSED IN HELA, SIGNAL = 0.7; EXPRESSED IN ADULT LIVER, SIGNAL = 2.1; EXPRESSED IN BRAIN, SIGNAL = 0.76; EXPRESSED IN PLACENTA, SIGNAL = 1.1; EXPRESSED IN BT474, SIGNAL = 2.6; EXPRESSED IN BONE MARROW, SIGNAL = 0.68; EXPRESSED IN LUNG, SIGNAL = 0.81; EXPRESSED IN HEART, SIGNAL = 0.96; EXPRESSED IN FETAL LIVER, SIGNAL = 0.97; NT HIT: U66320.1, EVALUE 5.60e-01; EST_HUMAN HIT: BE089591.1, EVALUE 7.00e-50; SWISSPROT HIT: Q9QYM0, EVALUE 1.00e-08
atattgattataccaaagatcctggaatattcagaagagcagttggggaatgttgtccatggagtgggactctgctttgccctttttctctccgaatgtgtgaagtctctgagtttctcctccagttggatcatcaaccaacgcacagccatcaggttccgagcagctgtttcctcctttgcctttgagaagctcatccaatttaagtctgtaatacacatcacctcaggagag

SEQ ID NO: 17394 - DNA, 204 bp, Homo sapiens
  MAP TO AC007600.2; EXPRESSED IN PLACENTA, SIGNAL = 0.61; EXPRESSED IN BT474, SIGNAL = 1.3; EXPRESSED IN HBL100, SIGNAL = 0.83; EXPRESSED IN LUNG, SIGNAL = 0.74; EXPRESSED IN FETAL LIVER, SIGNAL = 1.2; EXPRESSED IN HEART, SIGNAL = 0.89; EXPRESSED IN HELA, SIGNAL = 1.3; EXPRESSED IN ADULT LIVER, SIGNAL =   2; EST_HUMAN HIT: BE252470.1, EVALUE 1.00e-102; SWISSPROT HIT: P36774, EVALUE 2.20e-02
agttctcctagctcctccctcattttacaggtgttgggaaactcctcaagtcggtccaactgctccacttcagcaatgggatatggcttctcttttaagacctgtacaatctggaaacggcataggcctgtaatcaacagagtgtagtggggcttgggccagttactgcccacaacctgaacggccagtgcagctgtgccaatc

SEQ ID NO: 17395 - DNA, 192 bp, Homo sapiens
  MAP TO AC007590.1; EXPRESSED IN BT474, SIGNAL =   2; EXPRESSED IN BONE MARROW, SIGNAL =   2; EXPRESSED IN FETAL LIVER, SIGNAL =   2; EXPRESSED IN HELA, SIGNAL = 1.9; EXPRESSED IN ADULT LIVER, SIGNAL = 1.7; EXPRESSED IN BRAIN, SIGNAL =   2; EXPRESSED IN PLACENTA, SIGNAL = 1.8; EXPRESSED IN HBL100, SIGNAL = 1.7; EXPRESSED IN LUNG, SIGNAL = 2.4; EXPRESSED IN HEART, SIGNAL = 1.8; SWISSPROT HIT: Q29058, EVALUE 2.20e+00
atggaccatggaaggcaagggacacagctgaagctcatggctgccctggtctgctctccagggatcaggtgtggaacaaggagctggggattctcctccaacccacatgtcctctgccattacagaccggtgaggcactgggctttgggactcctgggcttgcttgtccagcacaagatctggattgaggat

SEQ ID NO: 17396 - DNA, 197 bp, Homo sapiens
  MAP TO AC007567.1; EXPRESSED IN BRAIN, SIGNAL =   4; EXPRESSED IN PLACENTA, SIGNAL =   1; EXPRESSED IN BT474, SIGNAL = 4.1; EXPRESSED IN HEART, SIGNAL = 1.1; NT HIT: gi4826863, EVALUE 1.00e-107; SWISSPROT HIT: P35331, EVALUE 2.00e-27; EST_HUMAN HIT: BE257386.1, EVALUE 1.00e-107
gatgggcggacaacaatgttattagaaactgcagctccgcgttcgttccttgctgtacactgatagactccttcataggtctcagctttcccttcgctcatgatgttaattatgagcgttcctgtgccaggcttcatggtgaccagagggtctttatcgatgtcaaaatgagtcccattacgggtccaggaaaagct

SEQ ID NO: 17397 - DNA, 411 bp, Homo sapiens
  MAP TO AC007566.1; EXPRESSED IN ADULT LIVER, SIGNAL = 2.9; EXPRESSED IN BRAIN, SIGNAL = 3.2; EXPRESSED IN HEART, SIGNAL = 1.4; EXPRESSED IN BT474, SIGNAL = 2.8; EXPRESSED IN PLACENTA, SIGNAL = 2.2; EXPRESSED IN HELA, SIGNAL = 2.6; EXPRESSED IN LUNG, SIGNAL = 3.2; EXPRESSED IN FETAL LIVER, SIGNAL = 3.6; EXPRESSED IN HBL100, SIGNAL = 2.8; EXPRESSED IN BONE MARROW, SIGNAL = 1.9; NT HIT: AF149773.1, EVALUE 0.00e+00; EST_HUMAN HIT: BE150340.1, EVALUE 0.00e+00; SWISSPROT HIT: P10272, EVALUE 1.00e-30
aactggccatgagggacagaagttggaacgctaggtgcttctttagctaccttatcagcataagcatttcctagagtaatgggatctgacgccttttggtggcccttgcagtgtgtgactccagcttcctttggaagtaaagcagccttgagaagagtttttattaaagaggcattaatgatggaggacccttgcgtagtgaggaaacctctttcagcccatataacagcatggtggtgcaagatatggaaggcatatttagagtcagtataaatattgacgtgtagtccctttgcaagagtgaaggcccgagttaaggcaatcagttcggcttgctgagaggtagtggaggggggcagagcagtagcctcaatgatggatgtggaagattctatagcatagcctgccttt

SEQ ID NO: 17398 - DNA, 313 bp, Homo sapiens
  MAP TO AC007566.1; EXPRESSED IN BRAIN, SIGNAL =  18; EXPRESSED IN PLACENTA, SIGNAL =   2; EXPRESSED IN BT474, SIGNAL = 1.2; EXPRESSED IN BONE MARROW, SIGNAL = 0.96; EXPRESSED IN HBL100, SIGNAL = 1.7; EXPRESSED IN FETAL LIVER, SIGNAL = 1.1; EXPRESSED IN LUNG, SIGNAL = 1.5; EXPRESSED IN HELA, SIGNAL = 2.1; EXPRESSED IN ADULT LIVER, SIGNAL = 1.3; EXPRESSED IN HEART, SIGNAL = 1.4; NT HIT: AL161509.2, EVALUE 7.60e-01; EST_HUMAN HIT: BE069143.1, EVALUE 7.80e-01; SWISSPROT HIT: O13751, EVALUE 6.60e-01
aggcagaggaagggatgttttcaaggtaaggagtcagcaactcctgttacaatgtaaaataaatggtgttatcaataagaaccttgcttttcgattgagagccttggatagactgaaaacagaaggttatttgattgagctgcaagcagttgcaacactgttcaaatgccgaagtgaaggcaatgccatgcctaaaagtgcagagcaggccacagctgattcagccagtaatgagggcaaggtgctgggtgcaggagtgacagaaggtgccgaagacttcggggtaaaacgtggtggtgtgcatgggagaaaa

SEQ ID NO: 17399 - DNA, 438 bp, Homo sapiens
  MAP TO AC007557.1; EXPRESSED IN BT474, SIGNAL = 1.7; EXPRESSED IN BONE MARROW, SIGNAL = 2.2; EXPRESSED IN HBL100, SIGNAL = 1.8; EXPRESSED IN HELA, SIGNAL = 2.2; EXPRESSED IN BRAIN, SIGNAL = 2.5; EXPRESSED IN PLACENTA, SIGNAL = 1.4; EXPRESSED IN FETAL LIVER, SIGNAL = 1.7; EXPRESSED IN LUNG, SIGNAL = 1.6; EXPRESSED IN ADULT LIVER, SIGNAL = 1.4; EXPRESSED IN HEART, SIGNAL =   2; NT HIT: AL163303.2, EVALUE 3.00e-50; EST_HUMAN HIT: AW880885.1, EVALUE 9.00e-57; SWISSPROT HIT: P53840, EVALUE 5.00e-01
aagtttgccatgtggaatgactctttcgagaaagattttggagcatgtgatggtgtttgatatcattttatccacagtagaacttctttcaaaattgaaatcaatcctttcaaatcctgctgctgctttatcaactattttcattgaatgttccaaatcctttattgttatttcaacaacattgacagcatcttcaccaggagtagattccaccttaagaaaccactttttctgctcatccacaagaagcaacttctcatccattaaagcttgattgtgagattgcagcaattcagtcacatcttcaggctccacttctaattctagttctcttgctactaccatatctgcagttactttcttcactgaagtcttgaacccctcaaagtcatccatgagggttggaatcaacatcttccaaactcctgctagtgttac

SEQ ID NO: 17400 - DNA, 300 bp, Homo sapiens
  MAP TO AC007556.2; EXPRESSED IN PLACENTA, SIGNAL =   2; EXPRESSED IN BONE MARROW, SIGNAL = 0.85; EXPRESSED IN ADULT LIVER, SIGNAL = 1.2; EXPRESSED IN HEART, SIGNAL = 0.96; EXPRESSED IN HELA, SIGNAL = 1.9; EXPRESSED IN BT474, SIGNAL = 1.5; EXPRESSED IN HBL100, SIGNAL = 0.76; EXPRESSED IN FETAL LIVER, SIGNAL = 1.8; EXPRESSED IN LUNG, SIGNAL = 0.85; EXPRESSED IN BRAIN, SIGNAL = 1.2; NT HIT: gi11430460, EVALUE 0.00e+00; SWISSPROT HIT: P98164, EVALUE 1.00e-43
ctttcattcttgatgccttccaagctgataaccaaatgtccctgctctcagagaatcaccactgtgactccaatgaatggcagtgcgccaacaaacgttgcatcccagaatcctggcagtgtgacacatttaacgactgtgaggataactcagatgaagacagttcccactgtgccagcaggacctgccggccgggccagtttcggtgtgctaatggccgctgcatcccgcaggcctggaagtgtgatgtggataatgattgtggagaccactcggatgagcccattgaagaatgcagta

SEQ ID NO: 17401 - DNA, 270 bp, Homo sapiens
  MAP TO AC007556.2; EXPRESSED IN BONE MARROW, SIGNAL = 1.5; EXPRESSED IN FETAL LIVER, SIGNAL = 2.3; EXPRESSED IN ADULT LIVER, SIGNAL = 1.9; EXPRESSED IN BRAIN, SIGNAL = 3.8; EXPRESSED IN HEART, SIGNAL = 2.2; EXPRESSED IN PLACENTA, SIGNAL = 2.3; EXPRESSED IN BT474, SIGNAL = 1.9; EXPRESSED IN HBL100, SIGNAL = 1.5; EXPRESSED IN LUNG, SIGNAL = 1.7; EXPRESSED IN HELA, SIGNAL = 2.1; SWISSPROT HIT: P98164, EVALUE 4.00e-49; NT HIT: gi11430460, EVALUE 0.00e+00; EST_HUMAN HIT: AI359656.1, EVALUE 6.20e-02
cacttcacacctgctcaccgacagccttcacctgtgccaatgggcgatgtgtccaatactcttaccgctgtgattactacaatgactgtggtgatggcagtgatgaggcagggtgcctgttcagggactgcaatgccaccacggagtttatgtgcaataacagaaggtgcatacctcgtgagtttatctgcaatggtgtagacaactgccatgataataacacttcagatgagaaaaattgccgtaagtttatcttaagtgcttattgtg

SEQ ID NO: 17402 - DNA, 252 bp, Homo sapiens
  MAP TO AC007556.2; EXPRESSED IN LUNG, SIGNAL = 0.95; EXPRESSED IN PLACENTA, SIGNAL = 0.98; EXPRESSED IN BT474, SIGNAL = 0.89; EXPRESSED IN BONE MARROW, SIGNAL = 1.3; EXPRESSED IN FETAL LIVER, SIGNAL = 0.73; EXPRESSED IN HELA, SIGNAL = 0.94; EXPRESSED IN BRAIN, SIGNAL = 0.92; EXPRESSED IN ADULT LIVER, SIGNAL = 1.7; EXPRESSED IN HEART, SIGNAL = 0.93; EST_HUMAN HIT: AA368894.1, EVALUE 1.60e-01; SWISSPROT HIT: P98164, EVALUE 8.00e-49; NT HIT: gi11430460, EVALUE 0.00e+00
atgggaacagctgctcagatttcaatggtggttgtactcacgagtgtgttcaagagccctttggggctaaatgcctatgtccattgggattcttacttgccaatgattctaagacctgtgaagacatagatgaatgtgatattctaggctcttgtagccagcactgttacaatatgagaggttctttccggtgctcgtgtgatacaggctacatgttagaaagtgatgggaggacttgcaaagttacaggta

SEQ ID NO: 17403 - DNA, 146 bp, Homo sapiens
  MAP TO AC007546.5; EXPRESSED IN BONE MARROW, SIGNAL = 1.9; EXPRESSED IN HBL100, SIGNAL = 1.5; EXPRESSED IN ADULT LIVER, SIGNAL = 2.1; EXPRESSED IN PLACENTA, SIGNAL =   2; EXPRESSED IN BT474, SIGNAL = 1.7; EXPRESSED IN LUNG, SIGNAL = 2.1; EXPRESSED IN HELA, SIGNAL = 1.5; EXPRESSED IN BRAIN, SIGNAL = 3.2; EXPRESSED IN FETAL LIVER, SIGNAL = 1.6; EXPRESSED IN HEART, SIGNAL = 1.8; EST_HUMAN HIT: BF516262.1, EVALUE 3.00e-76; NT HIT: U82668.1, EVALUE 1.10e+00
catgctctgaatataagtgactttcgcagacttaccttggcattgcaggtaggatgggccccatgccagcatggttagattgttcttcaagctctgcagggaggatgtgcctttcagcaaagttcctctcccccttacagctccta

SEQ ID NO: 17404 - DNA, 196 bp, Homo sapiens
  MAP TO AC007546.5; EXPRESSED IN PLACENTA, SIGNAL = 2.3; EXPRESSED IN BT474, SIGNAL = 2.1; EXPRESSED IN BONE MARROW, SIGNAL = 3.4; EXPRESSED IN HELA, SIGNAL =   2; EXPRESSED IN ADULT LIVER, SIGNAL = 1.8; EXPRESSED IN HEART, SIGNAL = 1.7; EXPRESSED IN HBL100, SIGNAL = 2.2; EXPRESSED IN FETAL LIVER, SIGNAL = 1.8; EXPRESSED IN LUNG, SIGNAL = 2.1; EXPRESSED IN BRAIN, SIGNAL = 1.9; SWISSPROT HIT: P04936, EVALUE 3.70e+00; NT HIT: AF155103.1, EVALUE 1.00e-107; EST_HUMAN HIT: AW867799.1, EVALUE 1.00e-104
ggccatccaggagagcctcctcaccagcacagaaggcctgtgccccagcgccctgagcgagacaagccgttttgataatgacttgcagctagccatggagctctctgccaaagagctggaggaatgggagctccggctccaggaggaagaggctgagctccagcaagtcttacagctgtcactcactgacaaatag

SEQ ID NO: 17405 - DNA, 192 bp, Homo sapiens
  MAP TO AC007546.5; EXPRESSED IN HEART, SIGNAL = 0.91; EXPRESSED IN PLACENTA, SIGNAL = 1.9; EXPRESSED IN BT474, SIGNAL = 1.8; EXPRESSED IN BONE MARROW, SIGNAL = 1.9; EXPRESSED IN HBL100, SIGNAL = 0.96; EXPRESSED IN FETAL LIVER, SIGNAL = 0.75; EXPRESSED IN LUNG, SIGNAL = 0.89; EXPRESSED IN HELA, SIGNAL = 0.72; NT HIT: AF064604.1, EVALUE 5.00e-65; SWISSPROT HIT: P33077, EVALUE 1.30e+00; EST_HUMAN HIT: AL120745.1, EVALUE 9.00e-65
ttttacatgaggctgtgagcactggcgatcctgagatggtgtacacagttctccaacatcgagactaccacaacacatccatggcccttgagggagttcctgagctgctccaaaaaattctcgaggtatccatgaaaatgtggccaggccataatctgagctaaatgctgatacaattactggagacacagt

SEQ ID NO: 17406 - DNA, 259 bp, Homo sapiens
  MAP TO AC007540.3; EXPRESSED IN BT474, SIGNAL =   2; EXPRESSED IN BONE MARROW, SIGNAL = 1.9; EXPRESSED IN HBL100, SIGNAL = 1.3; EXPRESSED IN FETAL LIVER, SIGNAL = 1.4; EXPRESSED IN LUNG, SIGNAL = 2.4; EXPRESSED IN ADULT LIVER, SIGNAL = 1.2; EXPRESSED IN BRAIN, SIGNAL = 1.9; EXPRESSED IN HEART, SIGNAL = 1.5; EXPRESSED IN PLACENTA, SIGNAL = 1.8; EXPRESSED IN HELA, SIGNAL = 1.7; NT HIT: AF143230.1, EVALUE 1.30e-01; EST_HUMAN HIT: BF509039.1, EVALUE 1.00e-112; SWISSPROT HIT: Q24266, EVALUE 2.40e-02
ctttccacctggaggttgactttggaaggctccacgttggggttttcccattccatttgtgggcagtgcatgaaatagcaaagggtgtacagggcctcgggctcccagtacagtgccccctgcttgtggtgcaggggggtgccattgccgtggtgcttggcattgaggggctgcaggtgatgcattgcacgggacaccaggtcacctgtggacagaaggaagatttcagatcctccaggaagccaacattggcagagaa

SEQ ID NO: 17407 - DNA, 198 bp, Homo sapiens
  MAP TO AC007540.3; EXPRESSED IN PLACENTA, SIGNAL =   2; EXPRESSED IN BT474, SIGNAL = 1.3; EXPRESSED IN LUNG, SIGNAL =   1; EXPRESSED IN HEART, SIGNAL = 0.93; EXPRESSED IN BONE MARROW, SIGNAL = 1.2; EXPRESSED IN BRAIN, SIGNAL = 1.6; EXPRESSED IN ADULT LIVER, SIGNAL = 1.9; EXPRESSED IN HELA, SIGNAL = 1.1; EXPRESSED IN FETAL LIVER, SIGNAL = 5.7; EXPRESSED IN HBL100, SIGNAL = 1.7; SWISSPROT HIT: P06498, EVALUE 2.80e+00; NT HIT: AJ011969.1, EVALUE 4.00e-01; EST_HUMAN HIT: AA333768.1, EVALUE 3.00e-67
acatccacgtagccatgctcagcgctgtgatacatggcctccctcagggccctcagtttggccttgctgttgcggctggcgcacaaggggggcggggctgtctccgccaggtcagtcccctcggccagaatctcctccagggacaggatatcactcttctccttctctggctgggcgagcagtttgcggaacacattc

SEQ ID NO: 17408 - DNA, 169 bp, Homo sapiens
  MAP TO AC007540.3; EXPRESSED IN ADULT LIVER, SIGNAL = 2.5; EXPRESSED IN BRAIN, SIGNAL =   2; EXPRESSED IN HEART, SIGNAL = 1.4; EXPRESSED IN BT474, SIGNAL = 1.1; EXPRESSED IN BONE MARROW, SIGNAL = 2.3; EXPRESSED IN HBL100, SIGNAL = 1.7; EXPRESSED IN HELA, SIGNAL = 1.8; EXPRESSED IN PLACENTA, SIGNAL =   2; EXPRESSED IN FETAL LIVER, SIGNAL = 1.9; EXPRESSED IN LUNG, SIGNAL = 2.1; NT HIT: gi7662485, EVALUE 3.30e-01; SWISSPROT HIT: P27958, EVALUE 2.90e+00; EST_HUMAN HIT: BE870306.1, EVALUE 5.80e-01
gacggcttttccatctactcatgataatcacggggtcttctcccacctcccgccccagtcatgctgcgcggaactgctgtacacgtggcatggctttaagaacctgcaccagagggttgttcccctgcgaacatggcccagtttgactcaaagcctcctgttgaagtcc

SEQ ID NO: 17409 - DNA, 150 bp, Homo sapiens
  MAP TO AC007540.3; EXPRESSED IN LUNG, SIGNAL = 1.3; EXPRESSED IN ADULT LIVER, SIGNAL = 2.4; EXPRESSED IN BRAIN, SIGNAL = 1.6; EXPRESSED IN HEART, SIGNAL = 1.1; EXPRESSED IN PLACENTA, SIGNAL = 1.1; EXPRESSED IN BT474, SIGNAL = 1.4; EXPRESSED IN BONE MARROW, SIGNAL = 1.3; EXPRESSED IN HBL100, SIGNAL = 1.2; EXPRESSED IN FETAL LIVER, SIGNAL = 1.4; EXPRESSED IN HELA, SIGNAL = 1.1; EST_HUMAN HIT: AL040935.1, EVALUE 3.00e-79; SWISSPROT HIT: P41708, EVALUE 3.00e+00; NT HIT: Z49146.1, EVALUE 3.40e-01
cacggaacctttggaagacgacaagtggatggactgaattctgatggccaacgtcctctgtaagtcctggagcacatcctggccggtcccttcaccatttttgtcatacaggagctgcttgaatgcttcgttttcaatgaggaccatcat

SEQ ID NO: 17410 - DNA, 388 bp, Homo sapiens
  MAP TO AC007537.3; EXPRESSED IN BT474, SIGNAL = 1.2; EXPRESSED IN HBL100, SIGNAL = 2.6; EXPRESSED IN HELA, SIGNAL = 1.3; EXPRESSED IN HEART, SIGNAL = 1.3; EXPRESSED IN PLACENTA, SIGNAL = 1.4; EXPRESSED IN BONE MARROW, SIGNAL = 1.4; EXPRESSED IN FETAL LIVER, SIGNAL = 1.2; EXPRESSED IN LUNG, SIGNAL = 1.4; EXPRESSED IN BRAIN, SIGNAL = 1.3; EXPRESSED IN ADULT LIVER, SIGNAL = 1.1; SWISSPROT HIT: P41064, EVALUE 1.20e+00; NT HIT: X94639.1, EVALUE 2.40e-01; EST_HUMAN HIT: AA399486.1, EVALUE 0.00e+00
gatgatgacctaaacaccatagaattcaaaatcctcgcctactacaccagacatcatgtcttcaagagcacccctgctctcttctcaccaaagctgctgagaacaagaagtttgtcccagaggggcctggggaattgttcagcaaatgagtcatggacagaggtgtcatggccttgcagaaattcccaatccagtgagaaggccataaaccttggcaagaaaaagtcttcttggaaagcattctttggagtagtggagaaggaagattcgcagagcacgcctgccaaggtctctgctcagggtcaaaggacgttggaataccaagattcgcacagccagcagtggtccaggtgtctttctaacgtggagcagtgcttggagcatgaag

SEQ ID NO: 17411 - DNA, 78 bp, Homo sapiens
  MAP TO AC007527.6; EXPRESSED IN HBL100, SIGNAL = 1.5; EXPRESSED IN LUNG, SIGNAL = 0.71; EXPRESSED IN HELA, SIGNAL = 1.3; EXPRESSED IN BRAIN, SIGNAL = 1.1; EXPRESSED IN BT474, SIGNAL = 0.94; EXPRESSED IN BONE MARROW, SIGNAL = 0.78; EXPRESSED IN PLACENTA, SIGNAL = 2.4; EXPRESSED IN HEART, SIGNAL = 0.89; EXPRESSED IN ADULT LIVER, SIGNAL = 1.2; EXPRESSED IN FETAL LIVER, SIGNAL =   3; NT HIT: AJ277606.1, EVALUE 1.30e-01
gctcctcctcaggctggtgactccataggctcctgaatgtccttgtgatacagcttctggcttcccaaagcccacaat

SEQ ID NO: 17412 - DNA, 120 bp, Homo sapiens
  MAP TO AC007527.6; EXPRESSED IN PLACENTA, SIGNAL = 5.5; EXPRESSED IN BONE MARROW, SIGNAL = 5.9; EXPRESSED IN HBL100, SIGNAL = 4.7; EXPRESSED IN LUNG, SIGNAL =  13; EXPRESSED IN ADULT LIVER, SIGNAL =   3; EXPRESSED IN BRAIN, SIGNAL =   5; EXPRESSED IN BT474, SIGNAL = 5.1; EXPRESSED IN FETAL LIVER, SIGNAL = 4.4; EXPRESSED IN HELA, SIGNAL = 3.8; EXPRESSED IN HEART, SIGNAL = 4.4; NT HIT: U39713.1, EVALUE 2.30e-01; EST_HUMAN HIT: AW850177.1, EVALUE 2.70e-01; SWISSPROT HIT: Q09879, EVALUE 6.90e+00
gacatgcatgaagcctgtgtcaaggtgaatgtggctgacgaaaggaaaaaggaggacatttctccttgcaaaactctatataatcagaagctggatttgctcagtgatgtttgcatttta

SEQ ID NO: 17413 - DNA, 140 bp, Homo sapiens
  MAP TO AC007447.6; EXPRESSED IN PLACENTA, SIGNAL = 1.6; EXPRESSED IN FETAL LIVER, SIGNAL = 1.4; EXPRESSED IN LUNG, SIGNAL = 1.4; EXPRESSED IN ADULT LIVER, SIGNAL = 1.4; EXPRESSED IN BT474, SIGNAL = 1.8; EXPRESSED IN BONE MARROW, SIGNAL = 1.7; EXPRESSED IN HBL100, SIGNAL = 1.9; EXPRESSED IN HELA, SIGNAL = 1.1; EXPRESSED IN BRAIN, SIGNAL = 1.8; EXPRESSED IN HEART, SIGNAL = 2.1; NT HIT: AJ227897.1, EVALUE 3.00e-04; EST_HUMAN HIT: AI077927.1, EVALUE 1.00e-71; SWISSPROT HIT: P77736, EVALUE 8.80e+00
caaaagatcataaacatcaattctacgggacaattggggtggtttcagtcccctctttccacttatcagttcctcaatcctggggaagctggtcatcaatctttctggctgctttatgctgaagaggaggcatcctggaa

SEQ ID NO: 17414 - DNA, 1436 bp, Homo sapiens
  MAP TO AC007447.6; EXPRESSED IN HBL100, SIGNAL = 6.5; EXPRESSED IN PLACENTA, SIGNAL = 6.6; EXPRESSED IN BT474, SIGNAL =   6; EXPRESSED IN BONE MARROW, SIGNAL = 4.6; EXPRESSED IN LUNG, SIGNAL = 5.8; EXPRESSED IN HELA, SIGNAL =  12; EXPRESSED IN ADULT LIVER, SIGNAL = 6.8; EXPRESSED IN BRAIN, SIGNAL =  10; EXPRESSED IN FETAL LIVER, SIGNAL = 6.5; EXPRESSED IN HEART, SIGNAL = 6.4; EST_HUMAN HIT: BE081333.1, EVALUE 0.00e+00; SWISSPROT HIT: P03355, EVALUE 8.00e-72; NT HIT: gi9635487, EVALUE 0.00e+00
ggcctgtttcccttgcccccataacttttgtgggtattgacggccaagcttcaaaacaccttaaagctcccctactttggtgccaacttggacaaccttcttttaagcactcttttttagttatccccacctgcccagttcctttattaggccgagacattttaaccaaattatctgcttccctgactattcctggactacagccacatctcattgccactcttcttcccaacccaaagcttcctttgcgtcttcctcttgtatccccctaccttgacccacaagtatgggacatctttactccctccctggcaaccgatcacatgcccattaccatcccattaaaacctaatcacccttaccctgctcaacgccagtatcccatcccacagcacgctttaaagggattaaagcctgttatcactcgcctgttacagcatgggcttctaaaacctataaactctccttacaattcccccatttcacctgtccaaaaacctcacaagtcttacagattagttgaggatctgtgccttatcaaccaaattgttttgcttatctaccctgtggtgcccaacccatacactcttttgtcctcaatacattcctccacaactcactattccattcttgatcttaaagatgcttttttcactattctcctgtacccctcatcccagcctctctttgctttcacttggactgaccctgacacccatcagtcccagcagcttacctgggctgtgctgccgcagggtttcagggacagctctcattacttcagccaagctctttctcatgatttactttctttccacccctccgcttctcaccttattcaatatattgatgaccttcttctttgtagcccctcctttgaatcttctcaacaagacacccttctgctccttcagcatttattctccaaaggatattgggtgtccccctccaaagctcaaatttcttctccatccgtaatctacctcagcataattcttcataaaaatgcacatgctctccctgccaatcgtgtccgactgatctctcaaaccccaacaccttctacaaaacaacaactcctttccttcctaggcatggttggatactttcgattttggatgcctggtttcgccatcttaacaaaaccattatataaactcacaaaaggaaacctagctgaccccatagatcctaaatcctttctccattcctctttccgttccttgaagacagctttagagactgaagccaccctagctctccctgactcatcccaacccttttcattacccacagctgggctggaagtgcagggctgtgcagtcagaattgttacacaagggccgggaccacgccctgtagccttttgttccaaacaacttgaccttactgttttgcctagccctcaagtctgcatgcagcagccaccactgccc

SEQ ID NO: 17415 - DNA, 428 bp, Homo sapiens
  MAP TO AC007446.8; EXPRESSED IN HEART, SIGNAL = 1.5; EXPRESSED IN FETAL LIVER, SIGNAL = 1.3; EXPRESSED IN LUNG, SIGNAL = 1.3; EXPRESSED IN HELA, SIGNAL = 3.7; EXPRESSED IN PLACENTA, SIGNAL = 1.9; EXPRESSED IN BT474, SIGNAL = 1.7; EXPRESSED IN BONE MARROW, SIGNAL = 2.3; EXPRESSED IN HBL100, SIGNAL = 1.8; EXPRESSED IN ADULT LIVER, SIGNAL = 1.9; EXPRESSED IN BRAIN, SIGNAL = 1.7; NT HIT: AL163246.2, EVALUE 3.00e-78; EST_HUMAN HIT: BE064630.1, EVALUE 3.00e-41; SWISSPROT HIT: P70213, EVALUE 2.00e-16
aggcctgccaggactttggttacaggtctagaagcaaacaggggtgttgggggtagttcctgaggagaatcagcattatcttgcctggcaactgcctcaagagaggccatcactgttgcctcaggcagtgtatggttaatcacctcagtcaaaggtggcaagactgatggcagtgtgagtggaggagggaatgttgccaccactgggggcagggaggctgtttcctctggcaagaaaggcttatcagagtttacaagcttagcgtccccagcttcatcagggtcctcccacatttccccattccaagatgcagggtcccattcttttccaatcattgcccttactttatcagtagacaggtggtgaggctgagcatacaccttttgttgtaggtcagccacttgcatgataagagcttgtgtctgatt

SEQ ID NO: 17416 - DNA, 110 bp, Homo sapiens
  MAP TO AC007446.8; EXPRESSED IN BONE MARROW, SIGNAL = 2.9; EXPRESSED IN FETAL LIVER, SIGNAL = 1.7; EXPRESSED IN BRAIN, SIGNAL = 1.4; EXPRESSED IN ADULT LIVER, SIGNAL = 1.5; EXPRESSED IN PLACENTA, SIGNAL = 3.9; EXPRESSED IN BT474, SIGNAL = 1.9; EXPRESSED IN HEART, SIGNAL = 1.5; EXPRESSED IN HELA, SIGNAL = 2.4; EXPRESSED IN LUNG, SIGNAL = 2.3; EXPRESSED IN HBL100, SIGNAL = 2.5; NT HIT: AL163246.2, EVALUE 9.00e-38; EST_HUMAN HIT: AA601143.1, EVALUE 4.00e-46
atctgctgggtcatatggcccaagtggcagagcagcttgcacagcagcctagacctgttgcagagccttcttctgttctggaccccactcaaaactggcaacatttcggg

SEQ ID NO: 17417 - DNA, 158 bp, Homo sapiens
  MAP TO AC007436.1; EXPRESSED IN BT474, SIGNAL = 4.7; EXPRESSED IN BRAIN, SIGNAL = 8.9; EXPRESSED IN HEART, SIGNAL = 6.3; EXPRESSED IN BONE MARROW, SIGNAL = 6.2; EXPRESSED IN PLACENTA, SIGNAL =  18; EXPRESSED IN ADULT LIVER, SIGNAL =  22; EXPRESSED IN HELA, SIGNAL =   8; EXPRESSED IN LUNG, SIGNAL =  13; EXPRESSED IN FETAL LIVER, SIGNAL =  30; EXPRESSED IN HBL100, SIGNAL = 6.1; EST_HUMAN HIT: AA188327.1, EVALUE 4.00e-50; SWISSPROT HIT: P14370, EVALUE 3.00e-04; NT HIT: gi5031900, EVALUE 2.00e-54
agaattccagtccttttcctccactgagaaataataacaatggttaccatatttcatccagcggtctgggcagctaggacagctggcacaagtggagtagttggagcctaggagagaagaggacctggttcacatctttatggaccactcagtcttgg

SEQ ID NO: 17418 - DNA, 315 bp, Homo sapiens
  MAP TO AC007436.1; EXPRESSED IN BONE MARROW, SIGNAL = 1.9; EXPRESSED IN FETAL LIVER, SIGNAL =  49; EXPRESSED IN PLACENTA, SIGNAL = 4.3; EXPRESSED IN BT474, SIGNAL = 0.67; EXPRESSED IN LUNG, SIGNAL =  25; EXPRESSED IN HELA, SIGNAL = 3.5; EXPRESSED IN ADULT LIVER, SIGNAL =  35; EXPRESSED IN BRAIN, SIGNAL = 0.76; EXPRESSED IN HEART, SIGNAL = 3.2; EST_HUMAN HIT: W78811.1, EVALUE 0.00e+00; SWISSPROT HIT: P01023, EVALUE 1.00e-29; NT HIT: gi11436046, EVALUE 2.00e-97
caccctgttgtccgcaatgccctgttttgcctggagtcagcctggaagacagcacaagaaggggaccatggcagccatgtatataccaaagcactgctggcctatgcttttgccctggcaggtaaccaggacaagaggaaggaagtactcaagtcacttaatgaggaagctgtgaagaaaggtgagagcacacctgagatccttctcctggcccatcctctgtatcaagaactgcatggcaaaaatccctcactcctacctcctgtgatccctgtctcctctcttcttttctatatatcatatatattttgtcca

SEQ ID NO: 17419 - DNA, 228 bp, Homo sapiens
  MAP TO AC007436.1; EXPRESSED IN LUNG, SIGNAL =  17; EXPRESSED IN HELA, SIGNAL = 4.1; EXPRESSED IN PLACENTA, SIGNAL =   2; EXPRESSED IN BRAIN, SIGNAL = 1.2; EXPRESSED IN HEART, SIGNAL = 1.6; EXPRESSED IN BT474, SIGNAL = 0.64; EXPRESSED IN FETAL LIVER, SIGNAL =  23; EXPRESSED IN ADULT LIVER, SIGNAL =  23; EXPRESSED IN BONE MARROW, SIGNAL = 1.3; EST_HUMAN HIT: AA654833.1, EVALUE 1.00e-125; NT HIT: gi6226959, EVALUE 1.00e-123; SWISSPROT HIT: P01023, EVALUE 2.00e-34
gtcaattacaaggatcgtagtccctgttacggctaccagtgggtgtcagaagaacacgaagaggcacatcacactgcttatcttgtgttctccccaagcaagagctttgtccaccttgagcccatgtctcatgaactaccctgtggccatactcagacagtccaggcacattatattctgaatggaggcaccctgctggggctgaagaagctctccttctattatctg

SEQ ID NO: 17420 - DNA, 231 bp, Homo sapiens
  MAP TO AC007436.1; EXPRESSED IN HELA, SIGNAL = 8.4; EXPRESSED IN ADULT LIVER, SIGNAL =  19; EXPRESSED IN BRAIN, SIGNAL = 6.8; EXPRESSED IN PLACENTA, SIGNAL = 7.5; EXPRESSED IN HEART, SIGNAL = 7.7; EXPRESSED IN LUNG, SIGNAL =  20; EXPRESSED IN FETAL LIVER, SIGNAL =  22; EXPRESSED IN HBL100, SIGNAL = 5.1; EXPRESSED IN BONE MARROW, SIGNAL =   6; EXPRESSED IN BT474, SIGNAL = 5.7; EST_HUMAN HIT: T70551.1, EVALUE 1.00e-114; SWISSPROT HIT: P01023, EVALUE 7.00e-29; NT HIT: gi6226959, EVALUE 3.00e-98
tatatggttctggtcccctccctgctccacactgagaccactgagaagggctgtgtccttctgagctacctgaatgagacagtgactgtaagtgcttccttggagtctgtcaggggaaacaggagcctcttcactgacctggaggcggagaatgacgtactccactgtgtcgccttcgctgtgagtgtggctgtttgacttaatatacttggttcttttagtcagggtcat

SEQ ID NO: 17421 - DNA, 495 bp, Homo sapiens
  MAP TO AC007430.11; EXPRESSED IN PLACENTA, SIGNAL = 3.6; EXPRESSED IN LUNG, SIGNAL = 4.4; EXPRESSED IN HEART, SIGNAL = 3.3; EXPRESSED IN HBL100, SIGNAL = 3.2; EXPRESSED IN FETAL LIVER, SIGNAL = 3.1; EXPRESSED IN HELA, SIGNAL = 3.6; EXPRESSED IN BRAIN, SIGNAL =   5; EXPRESSED IN BT474, SIGNAL = 4.6; EXPRESSED IN BONE MARROW, SIGNAL = 5.6; EXPRESSED IN ADULT LIVER, SIGNAL = 3.6; NT HIT: gi11429464, EVALUE 0.00e+00; SWISSPROT HIT: P16591, EVALUE 3.00e-07; EST_HUMAN HIT: BF374154.1, EVALUE 1.00e-106
ctggtggggcagccatcgctgcgggtgaccttgtcagcagtgagcccatcggtcatggtgacgctgcgccgcttcatgtggctgcccttggggcctgaggggctgacggggctagcaggcttgctactcccctgtcccaggccatagctggcctcgaggtagcgcagtgggaaggtgcggttcaccgggcagtagatgatggcaccactctgctctgacacagccttgcggctgcccacatgatagcgcacgagggcgggcacgtggtcaaagctctcctgctcaaacaggtactggatgtgtgtgtagctctcgcctgccttcaccaccaccttgttgatcttgaagtgcaaggcctggttgcgccagcggcacgtgagcacatagtcgcccaggctggtgagtgagtcccggatgaggaagtcgccgttgcgttgtaccaaggtctccgagacctgcagaaggcatggttaggctggagtagggtggggccag

SEQ ID NO: 17422 - DNA, 331 bp, Homo sapiens
  MAP TO AC007430.11; EXPRESSED IN LUNG, SIGNAL = 6.9; EXPRESSED IN ADULT LIVER, SIGNAL = 4.5; EXPRESSED IN BRAIN, SIGNAL = 6.1; EXPRESSED IN HEART, SIGNAL = 4.4; EXPRESSED IN PLACENTA, SIGNAL = 5.5; EXPRESSED IN BT474, SIGNAL = 6.1; EXPRESSED IN BONE MARROW, SIGNAL = 6.6; EXPRESSED IN HBL100, SIGNAL = 5.8; EXPRESSED IN FETAL LIVER, SIGNAL = 6.1; EXPRESSED IN HELA, SIGNAL = 6.7; EST_HUMAN HIT: R16267.1, EVALUE 4.00e-06; NT HIT: gi7657612, EVALUE 1.70e-01; SWISSPROT HIT: P10587, EVALUE 2.20e-02
gtaccagcggaagtgggatgagctggctgtgcaggagaagatgttccgccaggagtttgagcagctggccaataacaagaaggagattgtggccttcctcaagcgcacgctcaaccagcaggtggatgagatcacagacctcaacgagcagctccagaacttgcagctagccaaagagatggagaaggatgccttcgaggcgcagctggcccaggtgcgccacgagttccaggagaccaaggaccagctcaccacggagaacatcatccttggtgaggaggggactggctggtgagcctgcaggcacacatcccagctctatcactgaccc

SEQ ID NO: 17423 - DNA, 252 bp, Homo sapiens
  MAP TO AC007430.11; EXPRESSED IN HBL100, SIGNAL = 3.7; EXPRESSED IN HELA, SIGNAL = 4.7; EXPRESSED IN BRAIN, SIGNAL = 4.5; EXPRESSED IN PLACENTA, SIGNAL = 4.6; EXPRESSED IN BT474, SIGNAL = 4.1; EXPRESSED IN BONE MARROW, SIGNAL = 3.5; EXPRESSED IN HEART, SIGNAL = 3.3; EXPRESSED IN ADULT LIVER, SIGNAL = 3.7; EXPRESSED IN LUNG, SIGNAL = 4.6; EXPRESSED IN FETAL LIVER, SIGNAL =   4; EST_HUMAN HIT: BE393258.1, EVALUE 2.40e+00; NT HIT: AJ233944.1, EVALUE 5.10e-01
atcagcatacctgggttaaatccacccttggcctctttccacatgatcctgacaggtgactttgttccctcctgtagtgcccgtggaggcgggaagctgagcccggctcccaggaagcacagtgagggctcagccattgatgatgatgatgatgatgatgatgatgatgatgatgatggtgatgatgatgatgctgctgctgttgacgatgagtccaagccaagcctggggagaaaagaataaatagtctca

SEQ ID NO: 17424 - DNA, 179 bp, Homo sapiens
  MAP TO AC007430.11; EXPRESSED IN PLACENTA, SIGNAL =   4; EXPRESSED IN HBL100, SIGNAL = 4.8; EXPRESSED IN LUNG, SIGNAL =   4; EXPRESSED IN BRAIN, SIGNAL =  14; EXPRESSED IN BT474, SIGNAL = 3.9; EXPRESSED IN BONE MARROW, SIGNAL = 3.3; EXPRESSED IN FETAL LIVER, SIGNAL = 3.1; EXPRESSED IN HELA, SIGNAL = 3.4; EXPRESSED IN ADULT LIVER, SIGNAL = 2.1; EXPRESSED IN HEART, SIGNAL = 3.1; NT HIT: AF004562.1, EVALUE 2.00e-55; EST_HUMAN HIT: AI002999.1, EVALUE 3.00e-55; SWISSPROT HIT: O08599, EVALUE 8.00e-15
gcatcacggaggaaaacctgaacaaactgatccagcacgcccagatacccccggaggatagtgagatcatcaccaacatggctcacctcggcgtgcccatcgtcaccgatgtaagaggccagctcagcttccgggggaggtgggaagggagctggcagatctgtctgcttctgctctga

SEQ ID NO: 17425 - DNA, 133 bp, Homo sapiens
  MAP TO AC007406.1; EXPRESSED IN BT474, SIGNAL = 8.5; EXPRESSED IN BONE MARROW, SIGNAL =  13; EXPRESSED IN FETAL LIVER, SIGNAL = 9.8; EXPRESSED IN HELA, SIGNAL = 8.4; EXPRESSED IN ADULT LIVER, SIGNAL = 7.6; EXPRESSED IN BRAIN, SIGNAL =  11; EXPRESSED IN PLACENTA, SIGNAL = 8.7; EXPRESSED IN LUNG, SIGNAL =  11; EXPRESSED IN HEART, SIGNAL = 8.1; EXPRESSED IN HBL100, SIGNAL = 8.8; SWISSPROT HIT: Q09302, EVALUE 8.90e+00; EST_HUMAN HIT: AU140236.1, EVALUE 1.70e+00
tagtttggaactaaaattgtgctctgaggacttcttcatccctgagcttctcactaaacaaatactactacgaatccaattccttgattgccctcccctccccgccaagcacaagagtggctacttggagctg

SEQ ID NO: 17426 - DNA, 611 bp, Homo sapiens
  MAP TO AC007406.1; EXPRESSED IN BT474, SIGNAL = 9.9; EXPRESSED IN HELA, SIGNAL = 7.9; EXPRESSED IN FETAL LIVER, SIGNAL = 8.6; EXPRESSED IN PLACENTA, SIGNAL = 7.9; EXPRESSED IN BONE MARROW, SIGNAL = 8.7; EXPRESSED IN HBL100, SIGNAL =  11; EXPRESSED IN LUNG, SIGNAL =   8; EXPRESSED IN ADULT LIVER, SIGNAL = 5.4; EXPRESSED IN BRAIN, SIGNAL = 6.8; EXPRESSED IN HEART, SIGNAL = 5.8; NT HIT: X77465.1, EVALUE 3.30e-01; SWISSPROT HIT: O10341, EVALUE 5.00e-04
actgatccttctgtcacctctaccaccacccggtacagggtggcagcatcagctcccggctcctacctggccttcggttttcacccttgttcccctcgtggaatctccattttgttaaaccttagatcactctatgtcacaccccaggtaaaggcctcccgtgggtttcccgtcccactcaaagaaaaaagctgcagcccctttagttgccttcaaggccatattggatgcattccacaccattcccctcagccacctgctctaccacgtccaccctgttccctgcacacgtggggtgtgttggatccattcccacaccatttccctcagccacatgctctaccacgtccaccctgttccctgccccttcagccacgtgctctaccacgtccaccctgttccctgcacacatgggttgtgttggatccattcccacaccattcccttcagccaccggctctaccacgtccaccctgttccctgcacacgtggggtgtgttggatccattcccacaccattcccctcagccaccggctctaccacgtccacccggttccctgcacacgtggggtgtgttagatgccgtgcctcctcagttccttcttcctag

SEQ ID NO: 17427 - DNA, 143 bp, Homo sapiens
  MAP TO AC007397.21; EXPRESSED IN PLACENTA, SIGNAL =  21; EXPRESSED IN HBL100, SIGNAL =  13; EXPRESSED IN LUNG, SIGNAL =  18; EXPRESSED IN HELA, SIGNAL =  14; EXPRESSED IN BT474, SIGNAL =  18; EXPRESSED IN BONE MARROW, SIGNAL =  14; EXPRESSED IN FETAL LIVER, SIGNAL =  23; EXPRESSED IN ADULT LIVER, SIGNAL =  14; EXPRESSED IN BRAIN, SIGNAL =  20; EXPRESSED IN HEART, SIGNAL =  12; NT HIT: AF052051.1, EVALUE 7.00e-42; EST_HUMAN HIT: AV736824.1, EVALUE 8.00e-43; SWISSPROT HIT: Q28462, EVALUE 3.90e+00
actgagcctgcagcttagggacggatgcacatggagtagtgagggaggaaggggacacccgcctagccagccagatcagctgaatcaaccctggcaatcgatggagtgacagatgccgcagccagatcaccctcacatcccct

SEQ ID NO: 17428 - DNA, 599 bp, Homo sapiens
  MAP TO AC007397.21; EXPRESSED IN ADULT LIVER, SIGNAL = 3.6; EXPRESSED IN BRAIN, SIGNAL = 2.9; EXPRESSED IN HEART, SIGNAL = 2.9; EXPRESSED IN PLACENTA, SIGNAL = 2.2; EXPRESSED IN BT474, SIGNAL = 2.6; EXPRESSED IN HELA, SIGNAL = 2.5; EXPRESSED IN LUNG, SIGNAL =   3; EXPRESSED IN FETAL LIVER, SIGNAL =   3; EXPRESSED IN HBL100, SIGNAL = 2.4; EXPRESSED IN BONE MARROW, SIGNAL = 2.8; EST_HUMAN HIT: BE702462.1, EVALUE 1.00e-66; NT HIT: gi6006003, EVALUE 0.00e+00; SWISSPROT HIT: Q01097, EVALUE 1.00e-106
gatgaatcctccatgttcttccagtttggcccatcaattgaacagcaagcttccgtaatgctcaacatcatggaagaatatgactggtacatcttttctatcgtcaccacctatttccctggctaccaggactttgtaaacaagatccgcagcaccattgagaatagctttgtgggctgggagctagaggaggtcctcctactggacatgtccctggacgatggagattctaagatccagaatcagctcaagaaacttcaaagccccatcattcttctttactgtaccaaggaagaagccacctacatctttgaagtggccaactcagtagggctgactggctatggctacacgtggatcgtgcccagtctggtggcaggggatacagacacagtgcctgcggagttccccactgggctcatctctgtatcatatgatgaatgggactatggcctccccgccagagtgagagatggaattgccataatcaccactgctgcttctgacatgctgtctgagcacagcttcatccctgagcccaaaagcagttgttacaacacccacgagaagagaatctaccagtccaatatgctaaatag

SEQ ID NO: 17429 - DNA, 176 bp, Homo sapiens
  MAP TO AC007390.2; EXPRESSED IN HELA, SIGNAL = 9.7; EXPRESSED IN ADULT LIVER, SIGNAL = 3.8; EXPRESSED IN PLACENTA, SIGNAL = 4.2; EXPRESSED IN BONE MARROW, SIGNAL = 2.8; EXPRESSED IN BT474, SIGNAL = 4.1; EXPRESSED IN HEART, SIGNAL = 2.6; EXPRESSED IN BRAIN, SIGNAL = 4.2; EXPRESSED IN LUNG, SIGNAL = 4.3; EXPRESSED IN FETAL LIVER, SIGNAL = 3.8; EXPRESSED IN HBL100, SIGNAL = 4.1; NT HIT: AL163213.2, EVALUE 7.00e-55; EST_HUMAN HIT: AI798376.1, EVALUE 8.00e-58; SWISSPROT HIT: P11137, EVALUE 1.50e-01
caagctcttgtgggaggaggttctggaggaacgccttgcagctgccgtcaggcgtttggaagttcttgtgtgctggagatgtggctggggtttggctcacagtggaggcaaggaattgcaacacagaaatatgttgctacttggctgctgctactctattattgttcaccttgaag

SEQ ID NO: 17430 - DNA, 554 bp, Homo sapiens
  MAP TO AC007390.2; EXPRESSED IN PLACENTA, SIGNAL = 1.2; EXPRESSED IN BT474, SIGNAL =   2; EXPRESSED IN LUNG, SIGNAL = 1.3; EXPRESSED IN BRAIN, SIGNAL = 1.2; EXPRESSED IN HEART, SIGNAL = 1.1; EXPRESSED IN BONE MARROW, SIGNAL = 2.3; EXPRESSED IN HBL100, SIGNAL = 2.1; EXPRESSED IN FETAL LIVER, SIGNAL = 1.7; EXPRESSED IN HELA, SIGNAL = 1.9; EXPRESSED IN ADULT LIVER, SIGNAL = 1.4; EST_HUMAN HIT: AU129715.1, EVALUE 0.00e+00; SWISSPROT HIT: Q03701, EVALUE 1.00e-101; NT HIT: gi11430542, EVALUE 0.00e+00
atatttgagcggaagagtagcctttctacttcaccagacacaactcctttcatattgggatgtttacaaagtaatgtctctaacagatgggatgcttttgtggcaattctgttctgaggatctcccagtttatttaccacttgcacaagaagagccttttcttcctcaggcttgttacaaagcagctcatgagccacggtaagggctcgagttttagtggttactaatgtatcatgacttaaagtttctaagacctgcacaaattcagccactaagtgtttcagctggtgttcaaaataccataatatcagtcttctatctcttgagtccttgttgccactggacaactgttccagtttgtcaaaaggacgctggctgaaaatcctcagcttccgattgtctggcaaaaggtctgtgataagcaactctttgaaagtatccaaggccataaggcactgctgtttgctgcccttctttttaacaaggttcacaagagtttctacaaactgaagtgtgtgaacggcatcatcctgaataagaagaatcatggctgc

SEQ ID NO: 17431 - DNA, 105 bp, Homo sapiens
  MAP TO AC007387.2; EXPRESSED IN PLACENTA, SIGNAL = 1.5; EXPRESSED IN LUNG, SIGNAL = 1.7; EXPRESSED IN BRAIN, SIGNAL = 1.4; EXPRESSED IN BT474, SIGNAL = 1.4; EXPRESSED IN BONE MARROW, SIGNAL = 2.7; EXPRESSED IN HBL100, SIGNAL =  25; EXPRESSED IN FETAL LIVER, SIGNAL = 1.5; EXPRESSED IN HELA, SIGNAL = 1.1; EXPRESSED IN ADULT LIVER, SIGNAL = 1.1; EXPRESSED IN HEART, SIGNAL = 1.3; NT HIT: AB007881.1, EVALUE 2.30e-01; EST_HUMAN HIT: BF035386.1, EVALUE 3.30e-01
aaggtaagcttcaacaggacactgccaggaagaagcatgaagaaagagataaacccagaggcggaatgaaccctttggcagtggagatatctgaccatggagatg

SEQ ID NO: 17432 - DNA, 126 bp, Homo sapiens
  MAP TO AC007387.2; EXPRESSED IN PLACENTA, SIGNAL = 1.8; EXPRESSED IN LUNG, SIGNAL = 1.9; EXPRESSED IN BRAIN, SIGNAL = 2.6; EXPRESSED IN HEART, SIGNAL = 1.6; EXPRESSED IN BT474, SIGNAL = 1.9; EXPRESSED IN BONE MARROW, SIGNAL =   2; EXPRESSED IN HBL100, SIGNAL = 1.2; EXPRESSED IN FETAL LIVER, SIGNAL = 1.4; EXPRESSED IN HELA, SIGNAL = 1.3; EXPRESSED IN ADULT LIVER, SIGNAL = 1.5; NT HIT: AF084363.1, EVALUE 1.00e-06; SWISSPROT HIT: P20742, EVALUE 3.00e+00
agagaagggtgtttcagatcacaaggtgcttctctgcggctggcagtagaggatgggctccagcaattcaaacaatacagcagacatgtgaccacaagggcagctctgacctatacctccctggag

SEQ ID NO: 17433 - DNA, 238 bp, Homo sapiens
  MAP TO AC007386.3; EXPRESSED IN PLACENTA, SIGNAL = 1.9; EXPRESSED IN BT474, SIGNAL = 5.7; EXPRESSED IN BONE MARROW, SIGNAL = 3.1; EXPRESSED IN FETAL LIVER, SIGNAL = 1.8; EXPRESSED IN LUNG, SIGNAL = 1.4; EXPRESSED IN ADULT LIVER, SIGNAL = 1.6; EXPRESSED IN BRAIN, SIGNAL = 2.5; EXPRESSED IN HBL100, SIGNAL = 3.1; EXPRESSED IN HELA, SIGNAL = 1.5; EXPRESSED IN HEART, SIGNAL = 1.4; NT HIT: U05235.1, EVALUE 0.00e+00; EST_HUMAN HIT: AU117468.1, EVALUE 1.00e-129; SWISSPROT HIT: P43007, EVALUE 1.00e-38
tcacagaaccgactccttggattccagttctggggcactggccacggggccagcggggttctggtgtgtcaccaggggcgatgtctcctcctcagacttgcagttggggatggcttccactttcacctcagcaagttcctgctcgcctttctttgttgccttctgattcaggtggtggagaatgcctgcacccagggcatccccttccacattcaccaccgtggtggtccggtccctg

SEQ ID NO: 17434 - DNA, 260 bp, Homo sapiens
  MAP TO AC007386.3; EXPRESSED IN BRAIN, SIGNAL = 0.69; EXPRESSED IN HBL100, SIGNAL = 1.1; EXPRESSED IN LUNG, SIGNAL = 1.6; EXPRESSED IN ADULT LIVER, SIGNAL = 0.88; EXPRESSED IN HEART, SIGNAL = 0.85; EXPRESSED IN PLACENTA, SIGNAL = 1.1; EXPRESSED IN BT474, SIGNAL = 1.9; EXPRESSED IN BONE MARROW, SIGNAL = 0.87; EXPRESSED IN FETAL LIVER, SIGNAL = 0.83; EXPRESSED IN HELA, SIGNAL = 0.83; NT HIT: AL163203.2, EVALUE 4.00e-08; EST_HUMAN HIT: R06035.1, EVALUE 7.00e-44
tcttctatggcataggagcagaagtctcaggatcctttgaaatgcacttcattgccttgtcacctcctgcacccccttctccctctcctaacttctctgctaaccaaacctcttgttatctacccaatgatgaaaccaaagtagttgtagaggttaaagatttaaaacaaactgtagcaactgaaacagagtatcaggacgcaaatgcttggctggaatggattaaatattctgttcgcacgcttaacaaaagcgactgt

SEQ ID NO: 17435 - DNA, 102 bp, Homo sapiens
  MAP TO AC007380.3; EXPRESSED IN HBL100, SIGNAL = 9.1; EXPRESSED IN LUNG, SIGNAL =  13; EXPRESSED IN PLACENTA, SIGNAL = 9.7; EXPRESSED IN BT474, SIGNAL = 9.8; EXPRESSED IN BONE MARROW, SIGNAL = 9.7; EXPRESSED IN FETAL LIVER, SIGNAL =  11; EXPRESSED IN HELA, SIGNAL =  10; EXPRESSED IN ADULT LIVER, SIGNAL = 8.2; EXPRESSED IN BRAIN, SIGNAL =  14; EXPRESSED IN HEART, SIGNAL =  11; NT HIT: AJ004799.1, EVALUE 6.00e-08; EST_HUMAN HIT: AW886438.1, EVALUE 2.00e-08; SWISSPROT HIT: P22304, EVALUE 7.00e+00
gtgatggtatttggaaatttggatagtatttggaaattcacgggcctttgggtggtaataaggtttagatgaggacatgagggtggggtcctcatgatggga

SEQ ID NO: 17436 - DNA, 186 bp, Homo sapiens
  MAP TO AC007380.3; EXPRESSED IN PLACENTA, SIGNAL = 1.9; EXPRESSED IN FETAL LIVER, SIGNAL = 1.6; EXPRESSED IN LUNG, SIGNAL = 2.2; EXPRESSED IN HELA, SIGNAL =   3; EXPRESSED IN ADULT LIVER, SIGNAL = 2.4; EXPRESSED IN BONE MARROW, SIGNAL = 3.9; EXPRESSED IN HBL100, SIGNAL = 3.1; EXPRESSED IN BRAIN, SIGNAL = 2.9; EXPRESSED IN BT474, SIGNAL = 1.6; EXPRESSED IN HEART, SIGNAL = 2.7; NT HIT: AL163303.2, EVALUE 9.00e-27; EST_HUMAN HIT: BE165980.1, EVALUE 2.00e-49; SWISSPROT HIT: P12830, EVALUE 1.70e+00
tccataagattgcagcaattcagtcacatcttcaggttccccttctaattctagttcttttgctatttccatcacatctgcagttacttcttccactgaagtcttgaaccccccatcgtcatccgtgagaattggaatcaatttcttccaaactcctgttaatgttgtaattttgacatcctccta

SEQ ID NO: 17437 - DNA, 276 bp, Homo sapiens
  MAP TO AC007377.3; EXPRESSED IN ADULT LIVER, SIGNAL = 0.82; EXPRESSED IN BRAIN, SIGNAL = 1.1; EXPRESSED IN BONE MARROW, SIGNAL = 0.99; EXPRESSED IN HBL100, SIGNAL = 1.1; EXPRESSED IN HEART, SIGNAL = 2.2; EXPRESSED IN PLACENTA, SIGNAL = 1.1; EXPRESSED IN BT474, SIGNAL = 0.8; EXPRESSED IN LUNG, SIGNAL = 1.2; EXPRESSED IN HELA, SIGNAL = 0.87; EXPRESSED IN FETAL LIVER, SIGNAL = 0.9; EST_HUMAN HIT: T19754.1, EVALUE 4.00e-67; SWISSPROT HIT: Q01728, EVALUE 1.00e-43; NT HIT: X91963.1, EVALUE 0.00e+00
gggaagatgatgacgacgatgaatgtggggaagagaagctgccctcctgtttcgattacgtgatgcactttctgactgtgttctggaaggtcctgtttgccttcgtcccccctactgaatactggaatggctgggcgtgtttcattgtctccatcctcatgattggcctactgacagctttcattggagacctggcttcccactttggctgcaccattggcctgaaagattctgtgactgcagtcgtgttcgtcgcacttggaacatcagtgccag

SEQ ID NO: 17438 - DNA, 88 bp, Homo sapiens
  MAP TO AC007370.7; EXPRESSED IN FETAL LIVER, SIGNAL = 6.6; EXPRESSED IN PLACENTA, SIGNAL = 8.3; EXPRESSED IN BT474, SIGNAL = 5.6; EXPRESSED IN BONE MARROW, SIGNAL = 8.7; EXPRESSED IN HBL100, SIGNAL =   6; EXPRESSED IN LUNG, SIGNAL = 6.4; EXPRESSED IN HELA, SIGNAL = 5.8; EXPRESSED IN ADULT LIVER, SIGNAL = 4.5; EXPRESSED IN BRAIN, SIGNAL =   6; EXPRESSED IN HEART, SIGNAL = 5.4; EST_HUMAN HIT: AA496175.1, EVALUE 2.70e-01
tttcttctgtccttaggacagatgagagagctgaacccaagactcaacattaagccagagattcacaagggagctgaagaggccccag

SEQ ID NO: 17439 - DNA, 81 bp, Homo sapiens
  MAP TO AC007370.7; EXPRESSED IN HBL100, SIGNAL = 4.6; EXPRESSED IN FETAL LIVER, SIGNAL = 5.3; EXPRESSED IN PLACENTA, SIGNAL = 3.8; EXPRESSED IN BT474, SIGNAL =   5; EXPRESSED IN ADULT LIVER, SIGNAL = 6.2; EXPRESSED IN BRAIN, SIGNAL = 5.9; EXPRESSED IN HEART, SIGNAL = 4.2; EXPRESSED IN BONE MARROW, SIGNAL = 6.8; EXPRESSED IN HELA, SIGNAL =   7; EXPRESSED IN LUNG, SIGNAL =   7; NT HIT: AL163246.2, EVALUE 7.00e-22; EST_HUMAN HIT: AU140358.1, EVALUE 1.00e-18
gcaaatttctgcacctggcttcaatttctcctcagaaaattgatttttcttttcaatcacattgtcaggctgcaaattttc

SEQ ID NO: 17440 - DNA, 103 bp, Homo sapiens
  MAP TO AC007370.7; EXPRESSED IN HBL100, SIGNAL = 3.4; EXPRESSED IN HELA, SIGNAL =   6; EXPRESSED IN ADULT LIVER, SIGNAL = 3.2; EXPRESSED IN BRAIN, SIGNAL = 4.3; EXPRESSED IN HEART, SIGNAL = 4.4; EXPRESSED IN PLACENTA, SIGNAL = 3.7; EXPRESSED IN LUNG, SIGNAL = 4.9; EXPRESSED IN FETAL LIVER, SIGNAL = 3.6; EXPRESSED IN BONE MARROW, SIGNAL = 3.8; EXPRESSED IN BT474, SIGNAL = 3.9; SWISSPROT HIT: Q13308, EVALUE 9.10e+00; NT HIT: AJ289880.1, EVALUE 2.00e-23; EST_HUMAN HIT: AU122176.1, EVALUE 2.00e-15
tctttctcccgtgctggatggttcctgccctcaaacatcggacttcaaatttttcagttttgggactggactggctgtccttgttcctcagcttgcagacagc

SEQ ID NO: 17441 - DNA, 121 bp, Homo sapiens
  MAP TO AC007367.3; EXPRESSED IN BRAIN, SIGNAL =  33; EXPRESSED IN HEART, SIGNAL =  20; EXPRESSED IN HBL100, SIGNAL =  27; EXPRESSED IN BT474, SIGNAL =  18; EXPRESSED IN BONE MARROW, SIGNAL =  21; EXPRESSED IN FETAL LIVER, SIGNAL =  17; EXPRESSED IN HELA, SIGNAL =  24; EXPRESSED IN ADULT LIVER, SIGNAL =  21; EXPRESSED IN PLACENTA, SIGNAL =  29; EXPRESSED IN LUNG, SIGNAL =  25; NT HIT: U67596.1, EVALUE 2.30e-01; EST_HUMAN HIT: AA453295.1, EVALUE 2.70e-01; SWISSPROT HIT: Q00474, EVALUE 4.00e+00
ggtcactgactagcatgcacaaggtggacaaaaatgtgaaaaaaatttttatatcagctccacataatcacatctctgccatttctattatgtgggattatgaaatttgtcatttgtctgc

SEQ ID NO: 17442 - DNA, 288 bp, Homo sapiens
  MAP TO AC007366.2; EXPRESSED IN BT474, SIGNAL = 4.7; EXPRESSED IN HBL100, SIGNAL = 4.2; EXPRESSED IN FETAL LIVER, SIGNAL = 4.8; EXPRESSED IN HELA, SIGNAL = 4.8; EXPRESSED IN ADULT LIVER, SIGNAL = 3.5; EXPRESSED IN BRAIN, SIGNAL =   5; EXPRESSED IN PLACENTA, SIGNAL = 5.1; EXPRESSED IN BONE MARROW, SIGNAL = 4.9; EXPRESSED IN LUNG, SIGNAL = 4.8; EXPRESSED IN HEART, SIGNAL =   4; NT HIT: gi11418370, EVALUE 0.00e+00; EST_HUMAN HIT: AI935203.1, EVALUE 0.00e+00; SWISSPROT HIT: P51817, EVALUE 3.00e-48
ctgtctaccagcttcttggcgaacccaaagtccgtgagcttaatgtggccatccctatccagcaggatgttctctggcttcaagtccctgtagacgatctctttggagtgcaggtactcgatggcacagatgatctctgcagagtagaagagccccgtggtgctggagaagcgcccccggttgcgcaggtagctgaagagctcgccgcccggcacgtactccatgagcatgtagaggaagcgctcgtcatgccacgtccagaacctgcggggacagacagcacatgct

SEQ ID NO: 17443 - DNA, 146 bp, Homo sapiens
  MAP TO AC007360.2; EXPRESSED IN HELA, SIGNAL = 1.9; EXPRESSED IN ADULT LIVER, SIGNAL = 1.9; EXPRESSED IN BT474, SIGNAL = 1.9; EXPRESSED IN HEART, SIGNAL = 1.9; EXPRESSED IN PLACENTA, SIGNAL = 1.6; EXPRESSED IN BONE MARROW, SIGNAL = 2.3; EXPRESSED IN FETAL LIVER, SIGNAL = 1.7; EXPRESSED IN LUNG, SIGNAL = 2.3; EXPRESSED IN BRAIN, SIGNAL = 2.7; EXPRESSED IN HBL100, SIGNAL = 1.8; SWISSPROT HIT: P16951, EVALUE 8.70e+00; NT HIT: L25105.1, EVALUE 5.00e-03; EST_HUMAN HIT: AI523067.1, EVALUE 2.20e-02
gttcccagaacactggcagccaatcatatttcttccaagaaggagatcaaaaggtatttgaggacccagtccaccgaaagtacctaaaggtactgagatgtgggttctcaaggccgcagctcatccagatcaccctccagcgatga

SEQ ID NO: 17444 - DNA, 199 bp, Homo sapiens
  MAP TO AC007326.22; EXPRESSED IN PLACENTA, SIGNAL = 3.1; EXPRESSED IN BT474, SIGNAL = 5.6; EXPRESSED IN BONE MARROW, SIGNAL = 2.5; EXPRESSED IN HBL100, SIGNAL =   3; EXPRESSED IN FETAL LIVER, SIGNAL = 2.6; EXPRESSED IN LUNG, SIGNAL = 2.9; EXPRESSED IN HELA, SIGNAL =   3; EXPRESSED IN ADULT LIVER, SIGNAL = 2.1; EXPRESSED IN BRAIN, SIGNAL = 3.4; EXPRESSED IN HEART, SIGNAL = 1.7; NT HIT: Y18890.1, EVALUE 1.00e-96; EST_HUMAN HIT: AI214968.1, EVALUE 1.00e-39; SWISSPROT HIT: P10266, EVALUE 3.00e-15
tcaccaggagaaaatcagcttcctgtttggatacccactagacatttgaagttctacaatgaacccatcggagatgcaaagaaaagggcctccgcggagatggtaacaccagtcacatggatggataatcctatagaagtatatgttaatgatagcgaatgggtacctggccccacagatgatcgctgccctgccaaac

SEQ ID NO: 17445 - DNA, 110 bp, Homo sapiens
  MAP TO AC007320.2; EXPRESSED IN FETAL LIVER, SIGNAL =  42; EXPRESSED IN HEART, SIGNAL =  34; EXPRESSED IN HELA, SIGNAL =  47; EXPRESSED IN ADULT LIVER, SIGNAL =  38; EXPRESSED IN BRAIN, SIGNAL =  65; EXPRESSED IN PLACENTA, SIGNAL =  32; EXPRESSED IN BT474, SIGNAL =  31; EXPRESSED IN BONE MARROW, SIGNAL =  31; EXPRESSED IN HBL100, SIGNAL =  29; EXPRESSED IN LUNG, SIGNAL =  53; NT HIT: gi4826973, EVALUE 4.00e-55; EST_HUMAN HIT: R42651.1, EVALUE 6.00e-05; SWISSPROT HIT: O35479, EVALUE 8.00e-10
ctgatatgggaccatgtttcccaaatactgctttaagcatcttctcattggtttctctattgaggccaccaatgaaaagcttgccaggatgatctgcttctaccattgtg

SEQ ID NO: 17446 - DNA, 207 bp, Homo sapiens
  MAP TO AC007317.3; EXPRESSED IN PLACENTA, SIGNAL = 1.4; EXPRESSED IN BT474, SIGNAL = 1.1; EXPRESSED IN LUNG, SIGNAL = 2.5; EXPRESSED IN HELA, SIGNAL = 1.4; EXPRESSED IN BRAIN, SIGNAL = 1.5; EXPRESSED IN HBL100, SIGNAL = 1.1; EXPRESSED IN FETAL LIVER, SIGNAL = 1.1; EXPRESSED IN ADULT LIVER, SIGNAL = 1.2; EXPRESSED IN BONE MARROW, SIGNAL = 1.5; EXPRESSED IN HEART, SIGNAL = 1.4; NT HIT: U32748.1, EVALUE 4.00e-04; SWISSPROT HIT: Q08582, EVALUE 1.70e+00
gaaaacattgttctcctggttcctttcttcaagaccagtacaagtcacagttggcagctgcttgtggcagagcttaatatttccttctgtctgaaatttatatctctcattcttttcctcgttatgagtttttgcaatattttttcttttctctttgcaccctctcttctcagttcccccatccccttccatcttattattcttcta

SEQ ID NO: 17447 - DNA, 178 bp, Homo sapiens
  MAP TO AC007317.3; EXPRESSED IN PLACENTA, SIGNAL = 1.4; EXPRESSED IN BONE MARROW, SIGNAL = 1.6; EXPRESSED IN ADULT LIVER, SIGNAL = 1.1; EXPRESSED IN HEART, SIGNAL = 1.2; EXPRESSED IN LUNG, SIGNAL = 1.1; EXPRESSED IN BT474, SIGNAL = 1.3; EXPRESSED IN HBL100, SIGNAL = 1.2; EXPRESSED IN FETAL LIVER, SIGNAL = 1.3; EXPRESSED IN HELA, SIGNAL = 0.91; EXPRESSED IN BRAIN, SIGNAL = 0.92; NT HIT: AJ271735.1, EVALUE 3.00e-14; EST_HUMAN HIT: AW857315.1, EVALUE 2.00e-30; SWISSPROT HIT: P21379, EVALUE 1.50e-01
aaggctgaaagaggtgagaaagctgcagaagaaaagtttgaagctagcagaagttggttcataaagtttaaggaaagacatcatctctataatataaacgtgcatggtgaagtagcaaatgctgatgtagaagctgcaggttatccagatgatctacctaacatcattgaagaaggtg

SEQ ID NO: 17448 - DNA, 107 bp, Homo sapiens
  MAP TO AC007316.2; EXPRESSED IN BONE MARROW, SIGNAL = 0.83; EXPRESSED IN FETAL LIVER, SIGNAL = 2.8; EXPRESSED IN HEART, SIGNAL = 1.2; EXPRESSED IN PLACENTA, SIGNAL = 1.6; EXPRESSED IN BT474, SIGNAL = 0.63; EXPRESSED IN BRAIN, SIGNAL = 1.3; EXPRESSED IN ADULT LIVER, SIGNAL = 2.5; EXPRESSED IN HELA, SIGNAL = 1.3; EXPRESSED IN LUNG, SIGNAL =   2; EXPRESSED IN HBL100, SIGNAL = 0.79; EST_HUMAN HIT: AL040948.1, EVALUE 5.30e+00; NT HIT: AJ131016.1, EVALUE 1.00e-11
gcctcaggaaatgtcctctcctatgaaagcaaattcaaaggattggaagaagcaactggtacatcagacatgcagctatcaatgtaaggacataagaactatgaaaa

SEQ ID NO: 17449 - DNA, 136 bp, Homo sapiens
  MAP TO AC007316.2; EXPRESSED IN BT474, SIGNAL = 8.4; EXPRESSED IN BONE MARROW, SIGNAL = 6.7; EXPRESSED IN LUNG, SIGNAL = 7.6; EXPRESSED IN ADULT LIVER, SIGNAL =   9; EXPRESSED IN HBL100, SIGNAL = 9.1; EXPRESSED IN FETAL LIVER, SIGNAL = 7.1; EXPRESSED IN HELA, SIGNAL = 6.4; EXPRESSED IN PLACENTA, SIGNAL = 7.1; EXPRESSED IN HEART, SIGNAL = 4.5; EXPRESSED IN BRAIN, SIGNAL = 4.4; EST_HUMAN HIT: AI149998.1, EVALUE 7.10e+00
tgtatttctccagccacatactccctgtgctatattcttgcagctgctgctgctgctgctgctgctgttgcctcccatgctgttcttattgactgctcagagttctggaccacccactagcctatatgatgcttta

SEQ ID NO: 17450 - DNA, 178 bp, Homo sapiens
  MAP TO AC007297.22; EXPRESSED IN ADULT LIVER, SIGNAL = 4.8; EXPRESSED IN HELA, SIGNAL = 1.2; EXPRESSED IN HEART, SIGNAL = 0.97; EXPRESSED IN PLACENTA, SIGNAL =   1; EXPRESSED IN FETAL LIVER, SIGNAL = 4.5; EXPRESSED IN LUNG, SIGNAL = 4.5; NT HIT: AL161581.2, EVALUE 3.50e-01; EST_HUMAN HIT: BE257168.1, EVALUE 1.70e+00; SWISSPROT HIT: P27586, EVALUE 6.70e+00
acaagtcatgcatggcccaccacaggactctgtgttaaatgcctttgttaacattatctctaaatcaggtttaagttggaaccatgtgagcataagtcatagggctataaggagtcttaagaagcatcttatccagcattccatccagtgcttgaatcccctccatagtagccccaac

SEQ ID NO: 17451 - DNA, 133 bp, Homo sapiens
  MAP TO AC007297.22; EXPRESSED IN BT474, SIGNAL = 1.3; EXPRESSED IN BONE MARROW, SIGNAL = 1.3; EXPRESSED IN HBL100, SIGNAL = 0.89; EXPRESSED IN LUNG, SIGNAL = 1.1; EXPRESSED IN HELA, SIGNAL = 0.94; EXPRESSED IN ADULT LIVER, SIGNAL = 0.89; EXPRESSED IN BRAIN, SIGNAL = 0.95; EXPRESSED IN PLACENTA, SIGNAL = 2.3; EXPRESSED IN FETAL LIVER, SIGNAL = 0.89; EXPRESSED IN HEART, SIGNAL = 0.95; NT HIT: AF125984.1, EVALUE 1.00e+00; EST_HUMAN HIT: BE314655.1, EVALUE 4.70e+00; SWISSPROT HIT: Q13797, EVALUE 1.30e+00
gattgtttctgaagtgccagacaggtttccctgccctaaggatttcattgcacatgcaggacgatcagaggatcttcgaccccaaccacctctcccacttggtccaggaatcctaaattggagactcattcct

SEQ ID NO: 17452 - DNA, 129 bp, Homo sapiens
  MAP TO AC007297.22; EXPRESSED IN HBL100, SIGNAL = 2.9; EXPRESSED IN FETAL LIVER, SIGNAL = 2.9; EXPRESSED IN HELA, SIGNAL = 2.8; EXPRESSED IN BRAIN, SIGNAL = 3.1; EXPRESSED IN BT474, SIGNAL = 2.6; EXPRESSED IN BONE MARROW, SIGNAL = 3.2; EXPRESSED IN LUNG, SIGNAL = 3.1; EXPRESSED IN ADULT LIVER, SIGNAL = 2.7; EXPRESSED IN PLACENTA, SIGNAL = 2.5; EXPRESSED IN HEART, SIGNAL = 2.4; SWISSPROT HIT: O67837, EVALUE 5.20e+00; EST_HUMAN HIT: AV688856.1, EVALUE 1.00e-04; NT HIT: AF053630.1, EVALUE 6.00e-05
gagagagtatgtttaggagacaacaccagggatgtcatcaagcaaccttttgataagattaaaattgtactggtagaaatcaggcactattcatcaacacaatggaagaatgaccccaagggcatttaa

SEQ ID NO: 17453 - DNA, 162 bp, Homo sapiens
  MAP TO AC007286.17; EXPRESSED IN FETAL LIVER, SIGNAL = 0.64; EXPRESSED IN LUNG, SIGNAL = 0.7; EXPRESSED IN PLACENTA, SIGNAL = 0.8; EXPRESSED IN HEART, SIGNAL = 0.84; EXPRESSED IN BRAIN, SIGNAL = 1.6; EXPRESSED IN ADULT LIVER, SIGNAL = 0.71; EXPRESSED IN HELA, SIGNAL = 0.64; EXPRESSED IN HBL100, SIGNAL = 0.69; EXPRESSED IN BONE MARROW, SIGNAL = 0.78; EXPRESSED IN BT474, SIGNAL = 0.84; NT HIT: L36897.1, EVALUE 3.70e-01; EST_HUMAN HIT: AI241481.1, EVALUE 4.00e-05
gtaaacctcagtctacagtcctgaaaaatattatgagtggcagagctaatgctgaatcaatatttacattttatgtaatacttagcatgcaattagagaatatattgattatattatttattcaacaaatatttatcaagtcattaaaatatgctatgccag

SEQ ID NO: 17454 - DNA, 144 bp, Homo sapiens
  MAP TO AC007277.2; EXPRESSED IN BT474, SIGNAL = 5.5; EXPRESSED IN BONE MARROW, SIGNAL =  10; EXPRESSED IN HELA, SIGNAL = 6.9; EXPRESSED IN BRAIN, SIGNAL = 6.8; EXPRESSED IN PLACENTA, SIGNAL = 6.8; EXPRESSED IN HBL100, SIGNAL =   6; EXPRESSED IN FETAL LIVER, SIGNAL = 5.4; EXPRESSED IN LUNG, SIGNAL = 6.9; EXPRESSED IN ADULT LIVER, SIGNAL = 4.5; EXPRESSED IN HEART, SIGNAL = 5.6; SWISSPROT HIT: Q62130, EVALUE 5.10e+00; NT HIT: AL163248.2, EVALUE 4.00e-19; EST_HUMAN HIT: AU117692.1, EVALUE 1.00e-23
catacccaggatcaatactttgtatccttcaatccagtcaagttgacactcagtattaaccatcacaggactcggacttgggagagtgttataggcccagctaggactagagatgatgattttgtgagtggcatcaatctgcat

SEQ ID NO: 17455 - DNA, 540 bp, Homo sapiens
  MAP TO AC007277.2; EXPRESSED IN HEART, SIGNAL = 4.6; EXPRESSED IN FETAL LIVER, SIGNAL =  21; EXPRESSED IN HELA, SIGNAL =  17; EXPRESSED IN ADULT LIVER, SIGNAL = 6.6; EXPRESSED IN BRAIN, SIGNAL =  10; EXPRESSED IN PLACENTA, SIGNAL = 3.9; EXPRESSED IN BT474, SIGNAL =  19; EXPRESSED IN BONE MARROW, SIGNAL = 9.6; EXPRESSED IN LUNG, SIGNAL = 9.4; EXPRESSED IN HBL100, SIGNAL =  22; SWISSPROT HIT: P07155, EVALUE 3.00e-68; NT HIT: gi11434209, EVALUE 0.00e+00; EST_HUMAN HIT: AU118601.1, EVALUE 0.00e+00
tcatcatatgcattttttgtgcaaacttgtcgggaggagtgtaagaagaagcacccagatgcctcagtcaacttctcagagttttctaagaagtgctcagagaggtggaaggccatgtctgctaaagataaaggaaaatttgaagatatggcaaaggtggacaaagaccgttatgaaagagaaatgaaaacctatatccctcctaaaggggagacaaaaaagaagttcgaggattccaatgcacccaagaggcctccttcggcctttttgctgttctgctctgagtattgcccaaaaatcaaaggagagcatcctggcctgcctattagcgatgttgcaaagaaactggtagagatgtggaataacacttttgcagatgacaagcagctttgtgaaaagaaggctgcaaagctgaaggaaaaatacaaaaaggatacagctacatatcgagctaaaggaaagcctgatgcagcaaaaaagggagttgtcaaggctgaaaaaagcaagaaaaagaaggaagaggaggacagaagatgaaga

SEQ ID NO: 17456 - DNA, 171 bp, Homo sapiens
  MAP TO AC007276.2; EXPRESSED IN BT474, SIGNAL =   2; EXPRESSED IN HBL100, SIGNAL = 1.3; EXPRESSED IN FETAL LIVER, SIGNAL = 1.4; EXPRESSED IN LUNG, SIGNAL = 1.2; EXPRESSED IN BRAIN, SIGNAL = 1.2; EXPRESSED IN PLACENTA, SIGNAL = 1.8; EXPRESSED IN HELA, SIGNAL = 1.3; EXPRESSED IN HEART, SIGNAL = 1.2; EXPRESSED IN ADULT LIVER, SIGNAL = 1.3; EXPRESSED IN BONE MARROW, SIGNAL = 1.6; NT HIT: Z70664.1, EVALUE 7.00e-27; SWISSPROT HIT: P21414, EVALUE 1.00e-08; EST_HUMAN HIT: AA421054.1, EVALUE 5.00e-25
gggggccagcctgtacacttcctaattgacactggggtggaacagtcagtactgcaaacacccttgggcagtgtctctaataataaggtggctgtgcaaggggctactggagctattcaggaatatcctgtcacccactcacgagaggtgagtttgggacagaaaagagta

SEQ ID NO: 17457 - DNA, 150 bp, Homo sapiens
  MAP TO AC007240.2; EXPRESSED IN BONE MARROW, SIGNAL = 5.5; EXPRESSED IN FETAL LIVER, SIGNAL = 2.7; EXPRESSED IN PLACENTA, SIGNAL = 2.7; EXPRESSED IN BT474, SIGNAL = 3.4; EXPRESSED IN HBL100, SIGNAL = 3.9; EXPRESSED IN LUNG, SIGNAL = 2.9; EXPRESSED IN HELA, SIGNAL = 5.5; EXPRESSED IN ADULT LIVER, SIGNAL = 2.8; EXPRESSED IN BRAIN, SIGNAL = 3.9; EXPRESSED IN HEART, SIGNAL = 2.7; EST_HUMAN HIT: BF210000.1, EVALUE 5.10e-01; SWISSPROT HIT: O68008, EVALUE 6.90e+00; NT HIT: AE001789.1, EVALUE 7.30e-02
tgtcaaacacctctggtcatcttcataaatgctgccatatgtaatccttgccacaaccctttgagatgggatggctaccttgattttacggatgaaaaaaataacaaggctcagagaatccaggtcatttaactcttctgagctctccat

SEQ ID NO: 17458 - DNA, 301 bp, Homo sapiens
  MAP TO AC007237.3; EXPRESSED IN PLACENTA, SIGNAL = 1.8; EXPRESSED IN BRAIN, SIGNAL = 0.83; EXPRESSED IN HEART, SIGNAL = 1.1; EXPRESSED IN FETAL LIVER, SIGNAL = 2.3; EXPRESSED IN LUNG, SIGNAL = 0.68; EXPRESSED IN HELA, SIGNAL = 0.65; EXPRESSED IN BONE MARROW, SIGNAL = 1.4; EXPRESSED IN ADULT LIVER, SIGNAL = 1.1; EST_HUMAN HIT: BF308122.1, EVALUE 1.80e-02; SWISSPROT HIT: Q05764, EVALUE 5.50e-02; NT HIT: gi11467755, EVALUE 2.90e+00
gccatccaagcacaagtcactgaggagctgagtgccctggaacgctaattctgccttcttctccatgctaggagattggcttcttgtgacctctggtgtggagggtttcaaaagaacagtttggtcctggagctgatctccagtctcatcaaggatgactggcataactccaggagcttgggtcatctttacaaattccacagctttgtcccttggtgatcccaggacattgggaaaatttttcacatttagcttcaggcatttgcggaatagcaatgtaggtgtgctggctgtgaataaa

SEQ ID NO: 17459 - DNA, 187 bp, Homo sapiens
  MAP TO AC007227.2; EXPRESSED IN BRAIN, SIGNAL = 1.6; EXPRESSED IN HEART, SIGNAL = 1.2; EXPRESSED IN BONE MARROW, SIGNAL = 2.5; EXPRESSED IN HBL100, SIGNAL = 2.6; EXPRESSED IN FETAL LIVER, SIGNAL = 1.8; EXPRESSED IN LUNG, SIGNAL = 1.9; EXPRESSED IN ADULT LIVER, SIGNAL = 2.3; EXPRESSED IN PLACENTA, SIGNAL = 1.4; EXPRESSED IN BT474, SIGNAL = 2.7; EXPRESSED IN HELA, SIGNAL = 1.7; NT HIT: AB007915.2, EVALUE 1.00e-101; EST_HUMAN HIT: BE613860.1, EVALUE 1.00e-101; SWISSPROT HIT: P40464, EVALUE 6.00e-03
agtgtctcgagtccaccagctcaggtcggaggctgagtttcttgaggctctcatagcccaccacaatgacaatggtggaaggtgtggctgagatgattctggccgagaggcccttcatgaggccccaaggcccttcttctgccatcagctgtctgaaggtcaggatgatggagttcttgccctcaac

SEQ ID NO: 17460 - DNA, 281 bp, Homo sapiens
  MAP TO AC007227.2; EXPRESSED IN HELA, SIGNAL = 4.7; EXPRESSED IN BT474, SIGNAL =  15; EXPRESSED IN FETAL LIVER, SIGNAL = 5.4; EXPRESSED IN LUNG, SIGNAL = 3.7; EXPRESSED IN PLACENTA, SIGNAL = 4.9; EXPRESSED IN BONE MARROW, SIGNAL = 4.6; EXPRESSED IN HBL100, SIGNAL =  16; EXPRESSED IN ADULT LIVER, SIGNAL = 6.6; EXPRESSED IN BRAIN, SIGNAL = 4.5; EXPRESSED IN HEART, SIGNAL = 4.4; SWISSPROT HIT: P39521, EVALUE 9.20e-01; NT HIT: AB029012.1, EVALUE 0.00e+00; EST_HUMAN HIT: BE244370.1, EVALUE 0.00e+00
atgaaccagagtccaaggaacctgtggagaaagaggaggagccagatcctgagcctcctcctgtaacaccccaagtgggtgagggcagaaagagccgtaagttctctcgcctctcctgtctccgccgtcgccgccacccacccaaagttggtgatgacagtgacctgagtgaaggctttgaatcggactcaagccatgactcagcccgggccagtgagggctcagacagtggctctgacaagagtcttgaaggtgggggaacggcctttgatgctgaaaca

SEQ ID NO: 17461 - DNA, 103 bp, Homo sapiens
  MAP TO AC007130.2; EXPRESSED IN FETAL LIVER, SIGNAL = 0.94; EXPRESSED IN ADULT LIVER, SIGNAL = 1.6; EXPRESSED IN HEART, SIGNAL = 1.1; EXPRESSED IN PLACENTA, SIGNAL = 0.89; EXPRESSED IN BT474, SIGNAL = 2.4; EXPRESSED IN BONE MARROW, SIGNAL = 0.66; EXPRESSED IN HBL100, SIGNAL = 1.6; EXPRESSED IN LUNG, SIGNAL = 0.6; EXPRESSED IN HELA, SIGNAL = 0.84; NT HIT: J04628.1, EVALUE 2.00e-20; EST_HUMAN HIT: BE294728.1, EVALUE 2.00e-51; SWISSPROT HIT: P29266, EVALUE 3.00e-13
gttcacctgcatcttgaaactctttgcaggcatcagggaacacatcataaataataagtggatagccatgtttcatgagattttttgccattggattccccat

SEQ ID NO: 17462 - DNA, 136 bp, Homo sapiens
  MAP TO AC007130.2; EXPRESSED IN FETAL LIVER, SIGNAL =  12; EXPRESSED IN BRAIN, SIGNAL =  14; EXPRESSED IN PLACENTA, SIGNAL =  15; EXPRESSED IN HEART, SIGNAL =  13; EXPRESSED IN ADULT LIVER, SIGNAL =  12; EXPRESSED IN HELA, SIGNAL =  20; EXPRESSED IN LUNG, SIGNAL =  15; EXPRESSED IN HBL100, SIGNAL =  12; EXPRESSED IN BONE MARROW, SIGNAL =  14; EXPRESSED IN BT474, SIGNAL =  14; NT HIT: J04628.1, EVALUE 1.00e-37; EST_HUMAN HIT: AV724870.1, EVALUE 3.00e-70; SWISSPROT HIT: P29266, EVALUE 4.00e-19
ctgcccagtcccaacagctccacagtacaccacgttggagcccatgcaccccagcaactcttgggcagcagcaaattcatcttcaactcctcccaccataaacgtgaggttcccagatcgtgcagctcctacacct

SEQ ID NO: 17463 - DNA, 561 bp, Homo sapiens
  MAP TO AC007106.6; EXPRESSED IN BRAIN, SIGNAL = 2.7; EXPRESSED IN HEART, SIGNAL =   2; EXPRESSED IN PLACENTA, SIGNAL =   4; EXPRESSED IN BT474, SIGNAL = 3.1; EXPRESSED IN HBL100, SIGNAL = 5.1; EXPRESSED IN FETAL LIVER, SIGNAL =   4; EXPRESSED IN HELA, SIGNAL = 4.9; EXPRESSED IN ADULT LIVER, SIGNAL =   4; EXPRESSED IN BONE MARROW, SIGNAL =   8; EXPRESSED IN LUNG, SIGNAL = 2.7; NT HIT: gi9635487, EVALUE 1.00e-123; EST_HUMAN HIT: BE150340.1, EVALUE 2.00e-80; SWISSPROT HIT: P10272, EVALUE 1.00e-26
ccctggctccttcagctatactcactctttattgagtctcccacagttaccattgttcctgtcctggacttcaatccggccttccacattattccggataccacacctgaccaccatgactgtatctctctgatccacttgacattcactccatttccccatatttccttctttcctgttcctcaccttgaacacacttggtttattgatggcagttccaccagacctaactgccactcaccagcaaaggcaggctatgctatagtatcttccacatctatcattgaggctactgctctgccccgctccactacctctcaacaagccaaactcattgcctatactgactctaaatgtgccttccatatcctgcaccaccatgctgttatatgggaagaaagaaatttcctcactatgcaaggggcctccatcattaatgcttttttaataaaaactcttctcaaagacattttacttccaaaagaagctggagtcattcactgcaagggccatcaaaaggcatcagatcctatcactcaggacaatgcttatgctgataag

SEQ ID NO: 17464 - DNA, 99 bp, Homo sapiens
  MAP TO AC007090.2; EXPRESSED IN ADULT LIVER, SIGNAL =  11; EXPRESSED IN HEART, SIGNAL =  10; EXPRESSED IN BONE MARROW, SIGNAL =  13; EXPRESSED IN HELA, SIGNAL =  12; EXPRESSED IN BRAIN, SIGNAL =  13; EXPRESSED IN PLACENTA, SIGNAL =  11; EXPRESSED IN BT474, SIGNAL = 8.6; EXPRESSED IN HBL100, SIGNAL = 9.1; EXPRESSED IN FETAL LIVER, SIGNAL =  11; EXPRESSED IN LUNG, SIGNAL =  15; EST_HUMAN HIT: BF676155.1, EVALUE 1.20e+00; NT HIT: D21070.1, EVALUE 7.10e-01; SWISSPROT HIT: P24394, EVALUE 4.10e+00
aagaagaccaagaaaactaacagtggaagacccagaaaaccaacaatcaatgagcaccttgtgggcactggaaactgtgctggaaagtggggcattcaa

SEQ ID NO: 17465 - DNA, 131 bp, Homo sapiens
  MAP TO AC007077.2; EXPRESSED IN HBL100, SIGNAL = 1.8; EXPRESSED IN HELA, SIGNAL = 2.5; EXPRESSED IN BRAIN, SIGNAL = 2.2; EXPRESSED IN BT474, SIGNAL = 1.8; EXPRESSED IN BONE MARROW, SIGNAL = 2.6; EXPRESSED IN HEART, SIGNAL = 1.7; EXPRESSED IN ADULT LIVER, SIGNAL = 1.7; EXPRESSED IN LUNG, SIGNAL = 2.4; EXPRESSED IN FETAL LIVER, SIGNAL = 1.9; EXPRESSED IN PLACENTA, SIGNAL = 2.4; EST_HUMAN HIT: AA572764.1, EVALUE 1.90e-02
ttagagagccacatgccccacttttgaggcaattaccccagttttcacattctctctctcctgtgtttcagagaacagatcgaacgttctcttcctccaggtccctgttgattgcctgaactgtgagagtg

SEQ ID NO: 17466 - DNA, 204 bp, Homo sapiens
  MAP TO AC007076.2; EXPRESSED IN BT474, SIGNAL =  13; EXPRESSED IN BONE MARROW, SIGNAL =  18; EXPRESSED IN HBL100, SIGNAL =  11; EXPRESSED IN FETAL LIVER, SIGNAL =  14; EXPRESSED IN LUNG, SIGNAL =  15; EXPRESSED IN HELA, SIGNAL =  15; EXPRESSED IN ADULT LIVER, SIGNAL = 9.8; EXPRESSED IN PLACENTA, SIGNAL =  12; EXPRESSED IN BRAIN, SIGNAL =  16; EXPRESSED IN HEART, SIGNAL =  12; NT HIT: X78562.1, EVALUE 1.90e+00
gtagtggtagcagagacgcctggcggtagtgatgatggtggagatagtagtgatgatggaggtagtgataatggaggtggtggtagatatggcagtagtgatggcaaaggtggtgttaacagtagtgatgtgaatgttcaaggtggtggtagtggtggtagtaatggtgagagtggtgataattatgaggaatgtgaggtgaaa

SEQ ID NO: 17467 - DNA, 198 bp, Homo sapiens
  MAP TO AC007076.2; EXPRESSED IN BRAIN, SIGNAL = 2.3; EXPRESSED IN HBL100, SIGNAL = 1.7; EXPRESSED IN ADULT LIVER, SIGNAL = 1.8; EXPRESSED IN HEART, SIGNAL =   2; EXPRESSED IN BT474, SIGNAL = 1.7; EXPRESSED IN BONE MARROW, SIGNAL = 2.5; EXPRESSED IN HELA, SIGNAL = 1.9; EXPRESSED IN PLACENTA, SIGNAL = 1.9; EXPRESSED IN FETAL LIVER, SIGNAL = 1.5; EXPRESSED IN LUNG, SIGNAL = 2.4; NT HIT: AJ237589.1, EVALUE 1.00e-90; EST_HUMAN HIT: BE468028.1, EVALUE 3.00e-08; SWISSPROT HIT: Q9UMR3, EVALUE 3.00e-28
ggcacgaacctggctggcaacggcgggtcggccttgccagccaccagccaggaggaccggtggtaggcgtagcggtacctcttgttgtccacagggacgatgtccatcaggactatgtacttggcctcaggatccacccccgaaaaggacacccggatggttggaaacatcctcctgacagagagagagagagagaat

SEQ ID NO: 17468 - DNA, 77 bp, Homo sapiens
  MAP TO AC007056.4; EXPRESSED IN PLACENTA, SIGNAL = 2.9; EXPRESSED IN LUNG, SIGNAL = 3.3; EXPRESSED IN ADULT LIVER, SIGNAL = 5.9; EXPRESSED IN BT474, SIGNAL = 2.6; EXPRESSED IN BONE MARROW, SIGNAL = 3.9; EXPRESSED IN HBL100, SIGNAL = 2.9; EXPRESSED IN FETAL LIVER, SIGNAL = 2.8; EXPRESSED IN HELA, SIGNAL = 2.6; EXPRESSED IN BRAIN, SIGNAL = 2.6; EXPRESSED IN HEART, SIGNAL = 2.7; NT HIT: AF099810.1, EVALUE 3.00e-36; EST_HUMAN HIT: AI140168.1, EVALUE 4.00e-02; SWISSPROT HIT: P06600, EVALUE 3.20e+00
atggcactgagtgacttcagagtacccagtgggaaggtgggctggaggtacatggatggggggatggagaatggggt

SEQ ID NO: 17469 - DNA, 465 bp, Homo sapiens
  MAP TO AC007050.23; EXPRESSED IN BRAIN, SIGNAL = 2.4; EXPRESSED IN ADULT LIVER, SIGNAL = 3.2; EXPRESSED IN PLACENTA, SIGNAL = 3.8; EXPRESSED IN BT474, SIGNAL = 3.9; EXPRESSED IN HBL100, SIGNAL = 6.9; EXPRESSED IN LUNG, SIGNAL = 3.5; EXPRESSED IN HELA, SIGNAL = 3.3; EXPRESSED IN HEART, SIGNAL =   2; EXPRESSED IN BONE MARROW, SIGNAL =  18; EXPRESSED IN FETAL LIVER, SIGNAL = 7.2; SWISSPROT HIT: P52591, EVALUE 5.00e-08; EST_HUMAN HIT: AL042278.1, EVALUE 0.00e+00; NT HIT: gi11417834, EVALUE 0.00e+00
atggactctctgtggggcccaggagctgggagtcacccctttggggtccacaacagccggctgtccccagacttgtgtccagggaagatagtgttgagggccctcaaggagagcggggcagggatgcctgagcaggacaaggaccctagagtccaagagaatcctggtgatcagagaagggtccccgaggtcaccggggatgcaccgtctgcatttcggcccctgcgggacaatggaggcctctctccctttgtgcccgggcccgggcctctgcagacagacctccatgcccagaggtcagaaatcagatatgaccagtcatcccagacctcctggacgagctcgtgcaccaaccgaaatgccatctccagctcctacagctccacgggaggcttgccggggctaaagcggaggagggggccagcctcatcccactgccagctgaccctcagttcctcaaagaca

SEQ ID NO: 17470 - DNA, 155 bp, Homo sapiens
  MAP TO AC007050.23; EXPRESSED IN HBL100, SIGNAL = 1.8; EXPRESSED IN LUNG, SIGNAL = 2.6; EXPRESSED IN HELA, SIGNAL = 2.8; EXPRESSED IN ADULT LIVER, SIGNAL =   2; EXPRESSED IN BRAIN, SIGNAL = 2.8; EXPRESSED IN BT474, SIGNAL = 2.4; EXPRESSED IN PLACENTA, SIGNAL = 2.4; EXPRESSED IN HEART, SIGNAL = 1.7; EXPRESSED IN FETAL LIVER, SIGNAL =   2; EXPRESSED IN BONE MARROW, SIGNAL = 2.4; EST_HUMAN HIT: AA417111.1, EVALUE 1.00e-04; SWISSPROT HIT: P23118, EVALUE 6.60e+00; NT HIT: AF281074.1, EVALUE 1.40e+00
gactcaggcataaaatttatccccaatctgtagatgatgaaactgaggctcagaacggttcatgtaaattcactgaaaccaggcattcaggtaatagaggaggagaggttcaagctccaaagccagtatctcctggtatcgctgacatagagtag

SEQ ID NO: 17471 - DNA, 108 bp, Homo sapiens
  MAP TO AC007050.23; EXPRESSED IN PLACENTA, SIGNAL = 1.4; EXPRESSED IN BONE MARROW, SIGNAL = 1.3; EXPRESSED IN HBL100, SIGNAL = 1.3; EXPRESSED IN FETAL LIVER, SIGNAL = 1.2; EXPRESSED IN LUNG, SIGNAL = 1.2; EXPRESSED IN ADULT LIVER, SIGNAL = 0.98; EXPRESSED IN BRAIN, SIGNAL = 1.2; EXPRESSED IN HEART, SIGNAL = 1.2; EXPRESSED IN BT474, SIGNAL = 1.4; EXPRESSED IN HELA, SIGNAL = 0.93; NT HIT: M23702.1, EVALUE 2.30e-01; EST_HUMAN HIT: BE387246.1, EVALUE 9.40e-01
gtgtcaacggcgaggctgtggctaccaagtcagtcctaggatccagtgtcaggagcagcacctgccaaatctctccaagttatgctcagaagacacagccaggacctg

SEQ ID NO: 17472 - DNA, 239 bp, Homo sapiens
  MAP TO AC007050.23; EXPRESSED IN HBL100, SIGNAL = 5.3; EXPRESSED IN LUNG, SIGNAL = 5.4; EXPRESSED IN PLACENTA, SIGNAL = 5.1; EXPRESSED IN BT474, SIGNAL = 5.1; EXPRESSED IN BONE MARROW, SIGNAL = 4.8; EXPRESSED IN FETAL LIVER, SIGNAL = 7.4; EXPRESSED IN HELA, SIGNAL = 4.5; EXPRESSED IN ADULT LIVER, SIGNAL = 3.8; EXPRESSED IN BRAIN, SIGNAL =   6; EXPRESSED IN HEART, SIGNAL = 4.3; SWISSPROT HIT: P29386, EVALUE 6.70e-01; NT HIT: AB037839.1, EVALUE 1.00e-42; EST_HUMAN HIT: BE904071.1, EVALUE 1.00e-42
tcatactcggaatatctggcgcaggtacgccagggcctcctccaggcactcgtccatcttctggacgctgtcctgccccatctcgcccaggtcatggctgaataggagccgttggtgtctgtggggccaaagcccagccacaacaggaaggagtggccagctggagtctccacacactggtccgagatggacctggccgtgtgcttggcctgcgtgatgagctgagtaaggtgcaggac

SEQ ID NO: 17473 - DNA, 316 bp, Homo sapiens
  MAP TO AC007050.23; EXPRESSED IN FETAL LIVER, SIGNAL =  25; EXPRESSED IN ADULT LIVER, SIGNAL =  18; EXPRESSED IN BRAIN, SIGNAL = 9.4; EXPRESSED IN BONE MARROW, SIGNAL =  33; EXPRESSED IN HBL100, SIGNAL =  39; EXPRESSED IN HEART, SIGNAL =  12; EXPRESSED IN PLACENTA, SIGNAL =  21; EXPRESSED IN BT474, SIGNAL =  34; EXPRESSED IN LUNG, SIGNAL =  24; EXPRESSED IN HELA, SIGNAL =  24; EST_HUMAN HIT: BF084780.1, EVALUE 1.00e-09; NT HIT: gi11422753, EVALUE 9.00e-10
cccagctgcagctccagcaggtggcgctgcagcagcagcagcaacagcagcagttccagcagcagcagcaggcggcgctacagcagcagcagcagcagcagcaacagcagcagttccaggctcagcagagtgccatgcagcagcagttccaagcagtagtgcagcagcagcagcagctccagcagcagcagcagcagcagcagcatctaattaaattgcatcatcaaaatcagcaacaggtaccaggtcccctgttcctgctcttggcctccctcctgcagcgtgagccctgggctggcatcagccacaatgctgg

SEQ ID NO: 17474 - DNA, 157 bp, Homo sapiens
  MAP TO AC007040.2; EXPRESSED IN HBL100, SIGNAL = 3.5; EXPRESSED IN FETAL LIVER, SIGNAL = 2.1; EXPRESSED IN LUNG, SIGNAL = 2.2; EXPRESSED IN HELA, SIGNAL = 2.6; EXPRESSED IN BRAIN, SIGNAL = 3.1; EXPRESSED IN PLACENTA, SIGNAL = 2.5; EXPRESSED IN BT474, SIGNAL = 2.3; EXPRESSED IN BONE MARROW, SIGNAL = 2.8; EXPRESSED IN ADULT LIVER, SIGNAL = 2.4; EXPRESSED IN HEART, SIGNAL = 2.2; EST_HUMAN HIT: BF512635.1, EVALUE 4.00e-82; NT HIT: U76419.1, EVALUE 6.00e-58; SWISSPROT HIT: P38869, EVALUE 8.00e-05
cacacgacaggatgaagttaggcgaggtcagcatgatgaaggggaaggtctggaggaggccaaagtagacgaggttggtgaataggcccactccaatcatgctggtggggaagcgctcaaagacgtagaggccaatcagtacagcggtggagaactg

SEQ ID NO: 17475 - DNA, 220 bp, Homo sapiens
  MAP TO AC007040.2; EXPRESSED IN PLACENTA, SIGNAL = 6.1; EXPRESSED IN BT474, SIGNAL = 5.5; EXPRESSED IN BONE MARROW, SIGNAL = 6.8; EXPRESSED IN HEART, SIGNAL = 4.5; EXPRESSED IN BRAIN, SIGNAL = 5.9; EXPRESSED IN ADULT LIVER, SIGNAL = 5.5; EXPRESSED IN LUNG, SIGNAL =   7; EXPRESSED IN FETAL LIVER, SIGNAL = 5.3; EXPRESSED IN HBL100, SIGNAL = 6.3; EXPRESSED IN HELA, SIGNAL = 5.9; NT HIT: gi7110734, EVALUE 1.00e-101; SWISSPROT HIT: P18488, EVALUE 4.00e-09; EST_HUMAN HIT: BF037978.1, EVALUE 1.00e-101
ccaaagggacaattcgggaaattgtcctgcctaagggcctggacctggaccggcccaagcggacacgtacatccttcactgccgagcagctgtaccgcctggagatggagttccagcgctgccagtatgtggtgggccgcgagcgcactgagctggcccgccagctgaacctctccgagacccaggtaagagaccagggccaggccactccactcttgtc

SEQ ID NO: 17476 - DNA, 167 bp, Homo sapiens
  MAP TO AC006987.2; EXPRESSED IN HBL100, SIGNAL = 1.7; EXPRESSED IN LUNG, SIGNAL = 3.3; EXPRESSED IN HELA, SIGNAL = 3.6; EXPRESSED IN BRAIN, SIGNAL = 1.7; EXPRESSED IN BT474, SIGNAL = 2.5; EXPRESSED IN BONE MARROW, SIGNAL = 1.4; EXPRESSED IN PLACENTA, SIGNAL = 1.8; EXPRESSED IN HEART, SIGNAL =   2; EXPRESSED IN ADULT LIVER, SIGNAL = 3.3; EXPRESSED IN FETAL LIVER, SIGNAL = 3.4; NT HIT: U95159.1, EVALUE 1.50e+00; EST_HUMAN HIT: AI246899.1, EVALUE 2.00e-70; SWISSPROT HIT: P28658, EVALUE 9.90e-01
gtgaggaggatgaaaaaatggaagaagatagtaaagaagaggaagaaaaagatcacagtgaagcgatgaagccagaggagccacctcaaaatttactgagagaaaaaatcatgaaactgcccctccctgaatctttaaaagcttacttgacatattttagagacaaa

SEQ ID NO: 17477 - DNA, 147 bp, Homo sapiens
  MAP TO AC006987.2; EXPRESSED IN HBL100, SIGNAL = 2.3; EXPRESSED IN HELA, SIGNAL = 2.3; EXPRESSED IN BT474, SIGNAL = 2.2; EXPRESSED IN BONE MARROW, SIGNAL = 2.3; EXPRESSED IN FETAL LIVER, SIGNAL = 2.3; EXPRESSED IN LUNG, SIGNAL =   3; EXPRESSED IN ADULT LIVER, SIGNAL =   2; EXPRESSED IN BRAIN, SIGNAL = 2.7; EXPRESSED IN PLACENTA, SIGNAL = 2.2; EXPRESSED IN HEART, SIGNAL = 2.4; EST_HUMAN HIT: AV741431.1, EVALUE 2.00e-03; NT HIT: AB001421.1, EVALUE 6.00e-24; SWISSPROT HIT: Q01534, EVALUE 2.00e-04
aatggccagcagctcctccagtgcagactctggggtcatgggcccagggccaggctgtgcccgctgggcctcctcctgccactccacgagggcctcctcctgggccaccacctccacctccacctccacctccacctccaccattat

SEQ ID NO: 17478 - DNA, 172 bp, Homo sapiens
  MAP TO AC006970.2; EXPRESSED IN BT474, SIGNAL = 1.5; EXPRESSED IN BONE MARROW, SIGNAL =   2; EXPRESSED IN HBL100, SIGNAL = 1.4; EXPRESSED IN ADULT LIVER, SIGNAL = 1.8; EXPRESSED IN BRAIN, SIGNAL = 1.9; EXPRESSED IN HEART, SIGNAL = 1.9; EXPRESSED IN PLACENTA, SIGNAL = 1.8; EXPRESSED IN FETAL LIVER, SIGNAL = 1.5; EXPRESSED IN LUNG, SIGNAL = 1.7; EXPRESSED IN HELA, SIGNAL = 1.7; EST_HUMAN HIT: N57026.1, EVALUE 5.90e-01; SWISSPROT HIT: Q44184, EVALUE 9.80e-01; NT HIT: M13241.1, EVALUE 4.00e-01
agagaataaccttttacaacaggcaaaattgatggctgattcaacagccccagaggcttgtgtagctcagcaacttacagcagccattcttcttgttcattttggtgaagttattcgtgcgaagagtaagggtccccactctgcccaggtgcaggaggagattcagaaaatt

SEQ ID NO: 17479 - DNA, 326 bp, Homo sapiens
  MAP TO AC006970.2; EXPRESSED IN PLACENTA, SIGNAL =  13; EXPRESSED IN BONE MARROW, SIGNAL =  16; EXPRESSED IN HBL100, SIGNAL =  48; EXPRESSED IN FETAL LIVER, SIGNAL =  88; EXPRESSED IN LUNG, SIGNAL =  53; EXPRESSED IN HELA, SIGNAL = 1.1e+02; EXPRESSED IN BRAIN, SIGNAL = 9.2; EXPRESSED IN HEART, SIGNAL =  19; EXPRESSED IN BT474, SIGNAL = 7.5; EXPRESSED IN ADULT LIVER, SIGNAL =  88; EST_HUMAN HIT: AA527771.1, EVALUE 0.00e+00; NT HIT: gi11995467, EVALUE 1.00e-129; SWISSPROT HIT: Q01629, EVALUE 3.00e-35
tgggatgacgatgagcagaatggtcatgaggatgcccaaagtcagggcccagatgttcaggcacttggcggtggaggcataggcctgggccccggtcaggtcgccaaccatcttcctgtccctagacttcatggagtaggtgaacgctatgaagcccaggcagcaggggttcatgaagagggtgttgaacagggaccagacaacatggttgggcatggaggtctcgctgcagatgtggatcacgtcgggagagcagggttgtggggcaccctggcacagccacctcatgctcctccttgagcatctcatagttgaggggctggccg

SEQ ID NO: 17480 - DNA, 273 bp, Homo sapiens
  MAP TO AC006966.3; EXPRESSED IN FETAL LIVER, SIGNAL = 5.8; EXPRESSED IN PLACENTA, SIGNAL =   7; EXPRESSED IN BT474, SIGNAL = 5.2; EXPRESSED IN BONE MARROW, SIGNAL = 7.6; EXPRESSED IN HBL100, SIGNAL = 6.5; EXPRESSED IN LUNG, SIGNAL = 6.5; EXPRESSED IN HELA, SIGNAL = 4.8; EXPRESSED IN ADULT LIVER, SIGNAL = 4.7; EXPRESSED IN BRAIN, SIGNAL = 5.4; EXPRESSED IN HEART, SIGNAL = 5.9; NT HIT: gi7705390, EVALUE 6.00e-47; SWISSPROT HIT: P54619, EVALUE 2.00e-05; EST_HUMAN HIT: BE763984.1, EVALUE 5.00e-58
gtccatcggctggtggtggtaaatgaagcagatagtattgtgggtattatttccctgtcggacattctgcaagccctgatcctcacaccagcaggtaaaatgctggtttctgacctttgccatcggcgtctaggaagggtgggaggtagaacaggaagtgcagcatttaaaccatcatttctccacccacctacagatcaaggctttgagtatattactttgaaaccattttcgttttctcttcagttgggaagtttaagtgttctgcgtgag

SEQ ID NO: 17481 - DNA, 210 bp, Homo sapiens
  MAP TO AC006840.13; EXPRESSED IN ADULT LIVER, SIGNAL = 1.2; EXPRESSED IN HEART, SIGNAL = 1.7; EXPRESSED IN BONE MARROW, SIGNAL =   2; EXPRESSED IN HBL100, SIGNAL = 2.4; EXPRESSED IN FETAL LIVER, SIGNAL = 2.5; EXPRESSED IN PLACENTA, SIGNAL = 1.6; EXPRESSED IN BT474, SIGNAL = 1.4; EXPRESSED IN LUNG, SIGNAL = 1.4; EXPRESSED IN HELA, SIGNAL = 1.4; NT HIT: AL163246.2, EVALUE 2.00e-16; SWISSPROT HIT: P11200, EVALUE 5.50e-01; EST_HUMAN HIT: AA372637.1, EVALUE 7.00e-31
ttagttccaaaggaaggaacactgccaccagaatacacaacaatgattccattcaactggaagttatgattgccacctggacactttgggctcctcctgcctctagggctaagaagagagttacagtgttgactggagtgattaacccagactatcaagatgaaatcagactattacttgcaacggaagtaaggatggatatgtctggaa

SEQ ID NO: 17482 - DNA, 135 bp, Homo sapiens
  MAP TO AC006840.13; EXPRESSED IN PLACENTA, SIGNAL = 5.8; EXPRESSED IN BRAIN, SIGNAL =   7; EXPRESSED IN HEART, SIGNAL = 3.4; EXPRESSED IN BONE MARROW, SIGNAL = 8.2; EXPRESSED IN HELA, SIGNAL =  14; EXPRESSED IN LUNG, SIGNAL = 8.2; EXPRESSED IN BT474, SIGNAL = 7.3; EXPRESSED IN ADULT LIVER, SIGNAL = 6.8; EXPRESSED IN FETAL LIVER, SIGNAL = 6.6; EXPRESSED IN HBL100, SIGNAL = 7.2; NT HIT: AL163210.2, EVALUE 5.00e-49; EST_HUMAN HIT: AW813786.1, EVALUE 2.00e-48; SWISSPROT HIT: Q92777, EVALUE 2.60e-01
tgactcggatcgggggacctaccttggagatcaatcccttgtcctcctgctctttgctccatgagaaagatccacctatgaccttgggtcctcagaccaaccagcccaaggaacatctcaccaattttaaattgg

SEQ ID NO: 17483 - DNA, 994 bp, Homo sapiens
  MAP TO AC006576.15; EXPRESSED IN HBL100, SIGNAL =   4; EXPRESSED IN HELA, SIGNAL = 4.1; EXPRESSED IN ADULT LIVER, SIGNAL = 3.5; EXPRESSED IN BRAIN, SIGNAL = 4.3; EXPRESSED IN PLACENTA, SIGNAL = 6.4; EXPRESSED IN BONE MARROW, SIGNAL = 4.9; EXPRESSED IN BT474, SIGNAL = 5.3; EXPRESSED IN HEART, SIGNAL = 7.7; EXPRESSED IN LUNG, SIGNAL =  13; EXPRESSED IN FETAL LIVER, SIGNAL = 4.3; NT HIT: M60675.1, EVALUE 0.00e+00; SWISSPROT HIT: P04275, EVALUE 0.00e+00; EST_HUMAN HIT: AU140638.1, EVALUE 0.00e+00
aaggcaagtttcaaccaaggccacacagaccagggaagccaggattagaacccgagtcgtatcttggcagatgcatgtagcaccaaggccatgccagccctcgcccagccctcccacctgcacacaaggtgccagcataccaggtgcaggggagagggtggggatctgcagcccctctccggagcagcacctctgcagcaccaggtcaggagcctctcgggggagcgtctcaaagtcctggatgaggataggggcattgggccagccaatcctctccagctcctgcacgttggcattagggcccactccaatgggcaccacctggatgtctccaggcagcctcttgatctcatcagaggcaggatttccggtgaccatgtagaccaggttgggcgcctgctcccggtcaccctggctgaccaagaagctgtggtcagagaggtaccgcagggccagcccagtgttggtcctgttgccgccctggtagcggatctctcgcacccgctgcaggatgtcccctttggactgtgcctcgctgaaggggtactccacagtcaccatgtaggagtactgcagcaccgtgacgtggatgctgtcctggcccacatccatccgctgaatcacctcctccatgaactccttgctcctgttgaagtcggcttcaccaattttgtccgatccttccaggacgaacgccacatccagaaccatggagttcctcttgggccccagggtcgaaacccccaagagccccgggcccacagtgacttgtgccatgtcggggggcagagtaggaggaggggcttcaggggcaaggtcacagaggtagctaacgatctcgtccctttgctgctccagctcatccacactgctcagcacgaaggccttgttctcaggggcctgcttctcgatgaggcggatctgcttgaggttggcatggggcccaatgcccaccgggatcacaatgaccttcttcttcttcaggccctggacg

SEQ ID NO: 17484 - DNA, 196 bp, Homo sapiens
  MAP TO AC006560.8; EXPRESSED IN PLACENTA, SIGNAL = 1.3; EXPRESSED IN HBL100, SIGNAL = 0.8; EXPRESSED IN FETAL LIVER, SIGNAL = 0.69; EXPRESSED IN LUNG, SIGNAL = 1.1; EXPRESSED IN BRAIN, SIGNAL = 0.71; EXPRESSED IN BT474, SIGNAL = 0.8; EXPRESSED IN BONE MARROW, SIGNAL = 0.81; EXPRESSED IN HELA, SIGNAL = 3.3; EXPRESSED IN ADULT LIVER, SIGNAL = 0.75; EXPRESSED IN HEART, SIGNAL = 1.1; NT HIT: gi9966844, EVALUE 5.00e-78; EST_HUMAN HIT: AA382811.1, EVALUE 5.00e-84
acaactgcagccgctctgtctctcaataaggctacacgctccaatgtccgggtgacagtgacagcaacagcagtcatcatcaacctcgtggtcatcctcatcctggacgagatctacggcgctgtggccaagtggctcaccaaaattggtactgtgtcaccgagacttctggctgtcctaggccctctttaagtca

SEQ ID NO: 17485 - DNA, 375 bp, Homo sapiens
  MAP TO AC006560.8; EXPRESSED IN BRAIN, SIGNAL = 1.1; EXPRESSED IN HBL100, SIGNAL = 0.79; EXPRESSED IN ADULT LIVER, SIGNAL = 0.92; EXPRESSED IN HEART, SIGNAL = 1.2; EXPRESSED IN BT474, SIGNAL = 0.73; EXPRESSED IN BONE MARROW, SIGNAL = 0.78; EXPRESSED IN FETAL LIVER, SIGNAL = 1.1; EXPRESSED IN HELA, SIGNAL = 1.1; EXPRESSED IN PLACENTA, SIGNAL = 0.92; EXPRESSED IN LUNG, SIGNAL = 3.1; EST_HUMAN HIT: AI061638.1, EVALUE 9.40e-01; NT HIT: AE002130.1, EVALUE 7.90e-01; SWISSPROT HIT: P79218, EVALUE 2.60e+00
ttgtgaatccaaactgggcacctttgaaattctgaaaatgtaaattcttaatcgtgtctaaaataagtagatcttattaaaagggaagaagaggaggaagaagaaggaggaggagaagaataaagagaaagaataggaggagaaagaggagcagaaggagcagcaataactactattacaacaatagcaataactatggaccacagcgagcaccatattgaaacccagttgtgcatattttttagcctttatcccataactggagtgttccatgctatttctagctctctggagacacaggcaggaaacaaaggtggcagtggcacccagcttgtcagtcgtggtgcttggctggtgtttcttgtgcgtggtgta

SEQ ID NO: 17486 - DNA, 130 bp, Homo sapiens
  MAP TO AC006560.8; EXPRESSED IN PLACENTA, SIGNAL = 5.1; EXPRESSED IN BONE MARROW, SIGNAL = 1.2; EXPRESSED IN LUNG, SIGNAL = 3.4; EXPRESSED IN ADULT LIVER, SIGNAL = 1.7; EXPRESSED IN BRAIN, SIGNAL = 2.6; EXPRESSED IN BT474, SIGNAL = 3.4; EXPRESSED IN HBL100, SIGNAL = 3.2; EXPRESSED IN FETAL LIVER, SIGNAL = 2.7; EXPRESSED IN HELA, SIGNAL = 2.6; EXPRESSED IN HEART, SIGNAL = 2.9; EST_HUMAN HIT: AA490128.1, EVALUE 2.00e-30; SWISSPROT HIT: Q08879, EVALUE 2.40e+00; NT HIT: AL163246.2, EVALUE 4.00e-28
gtgctgctgcagctgtccacttttgggtggtgcctgcgtattgtgcagacccatctgtgaaccaggcctgagtcttctcttcctctgtcaactgatcatagggagctccccacgagaccattggtgtaga

SEQ ID NO: 17487 - DNA, 99 bp, Homo sapiens
  MAP TO AC006536.2; EXPRESSED IN BONE MARROW, SIGNAL = 6.8; EXPRESSED IN HBL100, SIGNAL = 4.8; EXPRESSED IN LUNG, SIGNAL =   7; EXPRESSED IN HEART, SIGNAL = 5.1; EXPRESSED IN PLACENTA, SIGNAL =   5; EXPRESSED IN BT474, SIGNAL = 4.7; EXPRESSED IN FETAL LIVER, SIGNAL = 4.6; EXPRESSED IN HELA, SIGNAL = 6.4; EXPRESSED IN ADULT LIVER, SIGNAL = 5.3; EXPRESSED IN BRAIN, SIGNAL = 7.4; NT HIT: AF260225.1, EVALUE 1.00e-12; EST_HUMAN HIT: AI740607.1, EVALUE 8.00e-05; SWISSPROT HIT: P82711, EVALUE 7.20e+00
atgctgcagcaaggtgccatcctggaagcagagaccaagccctcaccagacaccaaatataccagtgccttgatcttcaacttcccagcctccacagct

SEQ ID NO: 17488 - DNA, 163 bp, Homo sapiens
  MAP TO AC006516.10; EXPRESSED IN BT474, SIGNAL = 0.62; EXPRESSED IN LUNG, SIGNAL = 1.4; EXPRESSED IN ADULT LIVER, SIGNAL = 1.3; EXPRESSED IN BRAIN, SIGNAL = 1.4; EXPRESSED IN HEART, SIGNAL =   2; EXPRESSED IN BONE MARROW, SIGNAL = 0.76; EXPRESSED IN HELA, SIGNAL = 0.92; EXPRESSED IN PLACENTA, SIGNAL = 0.76; EXPRESSED IN FETAL LIVER, SIGNAL = 0.76; EXPRESSED IN HBL100, SIGNAL = 0.78; EST_HUMAN HIT: AA758849.1, EVALUE 3.80e-01; SWISSPROT HIT: P44945, EVALUE 5.00e+00; NT HIT: AJ297848.1, EVALUE 3.70e-01
cttatagaagatctgagctacaagttgttcattttgcaaaatgtcagaatctaggagaagtgtgaccaccatgctccaataagttatttcatagacattcttaagctttttggagaacaccaccatttccaagaatttcctctgaatgaagaattagggctca

SEQ ID NO: 17489 - DNA, 100 bp, Homo sapiens
  MAP TO AC006476.3; EXPRESSED IN PLACENTA, SIGNAL = 1.9; EXPRESSED IN BT474, SIGNAL = 1.6; EXPRESSED IN FETAL LIVER, SIGNAL = 1.7; EXPRESSED IN LUNG, SIGNAL = 2.2; EXPRESSED IN HELA, SIGNAL =   2; EXPRESSED IN ADULT LIVER, SIGNAL = 1.7; EXPRESSED IN BRAIN, SIGNAL = 2.5; EXPRESSED IN HEART, SIGNAL = 1.9; EXPRESSED IN BONE MARROW, SIGNAL = 2.1; EXPRESSED IN HBL100, SIGNAL = 1.8; SWISSPROT HIT: P41587, EVALUE 6.00e-14; NT HIT: Y18423.1, EVALUE 1.00e-49; EST_HUMAN HIT: BE048208.1, EVALUE 1.00e-49
ctttgtgtttttctgtttgagacctcagaagctctgcacattttgtttcttcctcctgtatttccagatgaaatcggcattctgggtgaatgctgttcac

SEQ ID NO: 17490 - DNA, 195 bp, Homo sapiens
  MAP TO AC006430.15; EXPRESSED IN HELA, SIGNAL = 1.2; EXPRESSED IN ADULT LIVER, SIGNAL = 3.8; EXPRESSED IN PLACENTA, SIGNAL = 1.2; EXPRESSED IN BONE MARROW, SIGNAL = 1.2; EXPRESSED IN BT474, SIGNAL =   1; EXPRESSED IN HEART, SIGNAL = 0.99; EXPRESSED IN BRAIN, SIGNAL =   1; EXPRESSED IN LUNG, SIGNAL = 1.5; EXPRESSED IN FETAL LIVER, SIGNAL =   4; EXPRESSED IN HBL100, SIGNAL = 1.2; EST_HUMAN HIT: AV651321.1, EVALUE 5.00e-82; SWISSPROT HIT: P01031, EVALUE 2.00e-22; NT HIT: gi11427631, EVALUE 1.00e-84
ggagattaagcacaaaggaagctactccatcatcaacacgtgttacacttttgcttggatccaagtcagatgtctcttggtttacatcaattgtttgtgcattcagtgttactgggactcctcctaccaactggtcaagcgaatctttaacctgcacctgtttgtcaaaacaatccaaatctatttcaacagctc

SEQ ID NO: 17491 - DNA, 175 bp, Homo sapiens
  MAP TO AC006430.15; EXPRESSED IN HBL100, SIGNAL = 1.5; EXPRESSED IN FETAL LIVER, SIGNAL = 9.9; EXPRESSED IN BRAIN, SIGNAL = 0.88; EXPRESSED IN PLACENTA, SIGNAL = 1.1; EXPRESSED IN BT474, SIGNAL = 1.3; EXPRESSED IN BONE MARROW, SIGNAL =   1; EXPRESSED IN LUNG, SIGNAL = 0.99; EXPRESSED IN HELA, SIGNAL = 0.9; EXPRESSED IN ADULT LIVER, SIGNAL =  12; EXPRESSED IN HEART, SIGNAL = 1.2; NT HIT: M65134.1, EVALUE 3.00e-94; EST_HUMAN HIT: AV648298.1, EVALUE 5.00e-94; SWISSPROT HIT: P01031, EVALUE 4.00e-28
aatgggtcagaatgaaaaatgttccaatgatttcctgtttccaggtagtgaaaaacatagaatactgggacaacgctcatcagctccgcctctgcactccctttggggaggtgggttaggatattgatgccttcctgacttagaactgcagacaagatctcacctacaagcagtc

SEQ ID NO: 17492 - DNA, 115 bp, Homo sapiens
  MAP TO AC006430.15; EXPRESSED IN ADULT LIVER, SIGNAL = 6.7; EXPRESSED IN PLACENTA, SIGNAL = 1.1; EXPRESSED IN BONE MARROW, SIGNAL = 0.68; EXPRESSED IN HBL100, SIGNAL = 0.84; EXPRESSED IN FETAL LIVER, SIGNAL = 4.8; EXPRESSED IN LUNG, SIGNAL = 0.94; EXPRESSED IN HELA, SIGNAL = 0.76; EXPRESSED IN BT474, SIGNAL = 0.65; EXPRESSED IN BRAIN, SIGNAL = 0.86; EXPRESSED IN HEART, SIGNAL = 0.93; SWISSPROT HIT: P01031, EVALUE 8.00e-16; EST_HUMAN HIT: AV661765.1, EVALUE 2.00e-49; NT HIT: M65134.1, EVALUE 1.00e-58
tataattatgtaaggcacctttatgcttgtaagaaacatcgatgtccatactcaagcggagttgtttaaccaggagtgaatattccgtcaggccctcaatggcattgattgtgtc

SEQ ID NO: 17493 - DNA, 412 bp, Homo sapiens
  MAP TO AC006430.15; EXPRESSED IN HEART, SIGNAL = 1.4; EXPRESSED IN PLACENTA, SIGNAL = 1.4; EXPRESSED IN BT474, SIGNAL = 1.3; EXPRESSED IN HBL100, SIGNAL = 1.3; EXPRESSED IN LUNG, SIGNAL = 1.9; EXPRESSED IN BRAIN, SIGNAL = 1.7; EXPRESSED IN BONE MARROW, SIGNAL = 2.2; EXPRESSED IN FETAL LIVER, SIGNAL = 1.5; EXPRESSED IN HELA, SIGNAL = 1.3; EXPRESSED IN ADULT LIVER, SIGNAL = 1.6; SWISSPROT HIT: Q13077, EVALUE 4.00e-65; EST_HUMAN HIT: BE729693.1, EVALUE 0.00e+00; NT HIT: gi11427628, EVALUE 0.00e+00
cctctgctccaagctcaggatgcgctcacggtccagctggctctggtggatagaggtggccagggccaggtgggaggcctccacctccttgttgaggacagcaacaatgttctcaaacacacgcagcttcccctccagctcagccagaagcttctccttcatgaagtgctgcagggccagctcctcctggctctcggagcagggtgcccggtagcaatcgacctccaggtcccccgccacttccacggctgcctgcagctgcaggtctgacaggttctgctccagggccatgggcccagactccaggccacagcccagccgggccttccactgtttcatgaaccccaacagcaggtttaggtgggaggtctgggaggtgacctcatgctcttgcacagactgtgggcttccc

SEQ ID NO: 17494 - DNA, 178 bp, Homo sapiens
  MAP TO AC006356.3; EXPRESSED IN FETAL LIVER, SIGNAL = 1.4; EXPRESSED IN LUNG, SIGNAL = 1.8; EXPRESSED IN ADULT LIVER, SIGNAL = 1.5; EXPRESSED IN HEART, SIGNAL = 1.2; EXPRESSED IN PLACENTA, SIGNAL = 1.5; EXPRESSED IN HELA, SIGNAL = 1.4; EXPRESSED IN BRAIN, SIGNAL = 1.6; EXPRESSED IN BT474, SIGNAL =   1; EXPRESSED IN BONE MARROW, SIGNAL = 1.5; EXPRESSED IN HBL100, SIGNAL = 1.1; SWISSPROT HIT: P75914, EVALUE 1.70e+00; EST_HUMAN HIT: BE185417.1, EVALUE 4.20e-01; NT HIT: gi7706136, EVALUE 3.50e-01
gtcatcagggaagacttttctgaagagacaacattggaggcaagacctgaatcaaccgagggaaagagcaatgtggagatcatagggcaaagcattccaggaacaggaaacagcaacgcaaagttctttgcagcaatatgcctggtgtatttaagaaacagcacgtgggcccgtgtcg

SEQ ID NO: 17495 - DNA, 106 bp, Homo sapiens
  MAP TO AC006296.8; EXPRESSED IN HEART, SIGNAL = 1.8; EXPRESSED IN BRAIN, SIGNAL = 2.3; EXPRESSED IN PLACENTA, SIGNAL = 1.7; EXPRESSED IN BT474, SIGNAL = 1.3; EXPRESSED IN BONE MARROW, SIGNAL = 3.3; EXPRESSED IN HBL100, SIGNAL = 1.6; EXPRESSED IN FETAL LIVER, SIGNAL = 1.4; EXPRESSED IN HELA, SIGNAL = 2.1; EXPRESSED IN ADULT LIVER, SIGNAL = 1.9; EXPRESSED IN LUNG, SIGNAL = 1.6; NT HIT: AF050157.1, EVALUE 7.70e-01
gtaaaagccttcaggaagagcataaatccgaaggcatatatgaacttgagaagtttagcactctaagaattaacaagtgtcttgttggtagggaggggcattggac

SEQ ID NO: 17496 - DNA, 220 bp, Homo sapiens
  MAP TO AC006286.12; EXPRESSED IN FETAL LIVER, SIGNAL = 1.3; EXPRESSED IN LUNG, SIGNAL = 1.7; EXPRESSED IN HELA, SIGNAL = 2.2; EXPRESSED IN ADULT LIVER, SIGNAL = 1.2; EXPRESSED IN HEART, SIGNAL = 1.2; EXPRESSED IN BONE MARROW, SIGNAL = 1.3; EXPRESSED IN BRAIN, SIGNAL = 1.4; EXPRESSED IN PLACENTA, SIGNAL = 0.9; EXPRESSED IN BT474, SIGNAL = 1.5; EXPRESSED IN HBL100, SIGNAL = 1.9; NT HIT: AJ289880.1, EVALUE 7.00e-06; SWISSPROT HIT: Q9Y5S8, EVALUE 9.40e-01; EST_HUMAN HIT: H15038.1, EVALUE 4.00e-27
tttcatgatttccttgattgcttctgtcatatatcctgataagtcatgcacaacatctggacacagttttctccagcaggaatttattgttttgggcttgatggctttcatagctttttctgtaacaatgatgatgtcttcaatggtgtaatgcttccagactgtcatgatgttcctatcagggttatcttccatactgttgacaatcctttccatagag

SEQ ID NO: 17497 - DNA, 227 bp, Homo sapiens
  MAP TO AC006017.2; EXPRESSED IN PLACENTA, SIGNAL = 2.4; EXPRESSED IN BT474, SIGNAL = 1.8; EXPRESSED IN HBL100, SIGNAL =   2; EXPRESSED IN LUNG, SIGNAL = 1.9; EXPRESSED IN ADULT LIVER, SIGNAL = 1.5; EXPRESSED IN HEART, SIGNAL = 1.2; EXPRESSED IN BONE MARROW, SIGNAL = 2.3; EXPRESSED IN FETAL LIVER, SIGNAL = 1.7; EXPRESSED IN HELA, SIGNAL = 1.9; EXPRESSED IN BRAIN, SIGNAL = 1.6; SWISSPROT HIT: P25989, EVALUE 5.80e-01; NT HIT: gi11420105, EVALUE 1.00e-125; EST_HUMAN HIT: AA368411.1, EVALUE 1.00e-115
tagctgtttctgaaccatgctttgctgttcagtaacatgcttgagttgttctgcatcttcctctggaaattcacgcccagctttcttggcagtacgttgtttagctgaaagggccttcttagattttctgtgagcaccaatttgttcttcaagatacttctgctgcatttgaagcagctgttgggtctcctggagccactcttcatactgcttacgctgtgaatcat

SEQ ID NO: 17498 - DNA, 495 bp, Homo sapiens
  MAP TO AC006017.2; EXPRESSED IN PLACENTA, SIGNAL = 4.6; EXPRESSED IN FETAL LIVER, SIGNAL = 4.7; EXPRESSED IN HELA, SIGNAL = 4.2; EXPRESSED IN BRAIN, SIGNAL = 4.9; EXPRESSED IN HEART, SIGNAL = 3.9; EXPRESSED IN BT474, SIGNAL = 4.5; EXPRESSED IN BONE MARROW, SIGNAL = 4.7; EXPRESSED IN LUNG, SIGNAL = 4.7; EXPRESSED IN ADULT LIVER, SIGNAL = 3.5; EXPRESSED IN HBL100, SIGNAL = 3.4; EST_HUMAN HIT: W04955.1, EVALUE 0.00e+00; SWISSPROT HIT: P41479, EVALUE 7.80e-01; NT HIT: AB040939.1, EVALUE 0.00e+00
ctgccttcgctcattagtctgcatgaaagtttgggtggagggtgaattaattgatccttgttgtatattctgctgctgtaaaacctgccccatttgctgttggtgttgtggagactgctgaaggggtcctagaggttgcataaaatcacaaggtaagtcggaactgtagaagggaatctgggacacagatgtcctactactacttatctcagagcccaccataccatgctgctccatttccatcctctgctgcaaagctctttgtctatctacctcctgcatgagttggatccgttgtctctcttgctgttctcgtaaacgttccttacgttcccgttcttgaaaactttcactaaagggattgttgtcatcaaattctacccgaggtggtggtccactctgtggatttgcatttgagactgtccctggggctggtgtacaagtttttattggtaactgggcaattgggggctgaattctaggaggattgagggg

SEQ ID NO: 17499 - DNA, 169 bp, Homo sapiens
  MAP TO AC006017.2; EXPRESSED IN BT474, SIGNAL =  13; EXPRESSED IN HBL100, SIGNAL =  11; EXPRESSED IN LUNG, SIGNAL =  18; EXPRESSED IN HELA, SIGNAL =  11; EXPRESSED IN ADULT LIVER, SIGNAL = 7.4; EXPRESSED IN BRAIN, SIGNAL =  13; EXPRESSED IN BONE MARROW, SIGNAL =  17; EXPRESSED IN PLACENTA, SIGNAL =  18; EXPRESSED IN HEART, SIGNAL = 7.7; EXPRESSED IN FETAL LIVER, SIGNAL =  13; NT HIT: gi10864040, EVALUE 1.00e-90; EST_HUMAN HIT: BE694287.1, EVALUE 2.00e-90; SWISSPROT HIT: P27738, EVALUE 2.20e+00
ctgaatccgagaccgtgccagatacacattggatttccattcagttttcatcttccggtactgcgatgacttggagtgaacaaactgtttactataaggtgcgttcagttctccagtgactgtgctctgaaatgactttgaggtgctggtgctgtttaaggtgtgaggc

SEQ ID NO: 17500 - DNA, 251 bp, Homo sapiens
  MAP TO AC006017.2; EXPRESSED IN HBL100, SIGNAL =  12; EXPRESSED IN FETAL LIVER, SIGNAL =  12; EXPRESSED IN BRAIN, SIGNAL =  12; EXPRESSED IN PLACENTA, SIGNAL = 9.2; EXPRESSED IN HEART, SIGNAL = 9.8; EXPRESSED IN ADULT LIVER, SIGNAL = 9.9; EXPRESSED IN HELA, SIGNAL =  14; EXPRESSED IN LUNG, SIGNAL =  12; EXPRESSED IN BONE MARROW, SIGNAL =  11; EXPRESSED IN BT474, SIGNAL = 8.3; NT HIT: gi11545800, EVALUE 0.00e+00; EST_HUMAN HIT: BF351270.1, EVALUE 1.00e-126; SWISSPROT HIT: Q10473, EVALUE 9.00e-21
gagaagtccttgtgttcctggacagccactgtgaagtgaatgtgatgtggctgcagcccttgctggccgccatccgtgaggaccggcacaccgtggtgtgcccagtgattgacatcatcagcgccgacacgctggcctacagctcgtcccctgtcgtccgcggagggttcaactggggactgcacttcaaatgggatcttgtccccctttctgagctaggacgagcggagggagccactgcaccaataaag

SEQ ID NO: 17501 - DNA, 186 bp, Homo sapiens
  MAP TO AC006017.2; EXPRESSED IN ADULT LIVER, SIGNAL = 0.85; EXPRESSED IN PLACENTA, SIGNAL = 1.3; EXPRESSED IN BT474, SIGNAL = 2.2; EXPRESSED IN BONE MARROW, SIGNAL = 0.85; EXPRESSED IN FETAL LIVER, SIGNAL = 0.96; EXPRESSED IN LUNG, SIGNAL = 1.1; EXPRESSED IN HELA, SIGNAL = 0.91; EXPRESSED IN HBL100, SIGNAL = 1.4; EXPRESSED IN BRAIN, SIGNAL = 1.8; EXPRESSED IN HEART, SIGNAL = 0.93; NT HIT: gi11545800, EVALUE 3.00e-88; SWISSPROT HIT: Q10358, EVALUE 2.90e+00; EST_HUMAN HIT: AW370405.1, EVALUE 7.00e-77
ttaagaatgtgcccgtcaaggggtctgggccccacggaccatctccaaaaaaattctatccccgtttcactcgaggcccaagtcgagtgctcgagccacagttcaaagcaaacaaaattgacgatgtgatagacagtcgtgttgaagatccagaagaaggccacttgaaattctcttctgaattag

SEQ ID NO: 17502 - DNA, 116 bp, Homo sapiens
  MAP TO AC006017.2; EXPRESSED IN HELA, SIGNAL = 1.4; EXPRESSED IN ADULT LIVER, SIGNAL = 1.3; EXPRESSED IN HEART, SIGNAL = 1.1; EXPRESSED IN BT474, SIGNAL = 2.5; EXPRESSED IN BONE MARROW, SIGNAL = 2.5; EXPRESSED IN FETAL LIVER, SIGNAL = 1.5; EXPRESSED IN LUNG, SIGNAL = 1.7; EXPRESSED IN BRAIN, SIGNAL = 1.2; EXPRESSED IN PLACENTA, SIGNAL = 1.8; EXPRESSED IN HBL100, SIGNAL = 2.2; EST_HUMAN HIT: AV731601.1, EVALUE 2.00e-39; NT HIT: X57147.1, EVALUE 1.00e-42
tgctccattttctgtcctttctgaaccaccaaaggtttgtttgtctgagggccatgactaaggctgcagcctttctctgatctcgcttttccttttgggcctgttcctcttggtcc

SEQ ID NO: 17503 - DNA, 1012 bp, Homo sapiens
  MAP TO AC006017.2; EXPRESSED IN LUNG, SIGNAL = 1.9; EXPRESSED IN ADULT LIVER, SIGNAL = 1.7; EXPRESSED IN BRAIN, SIGNAL = 8.4; EXPRESSED IN PLACENTA, SIGNAL = 1.9; EXPRESSED IN BONE MARROW, SIGNAL = 1.6; EXPRESSED IN FETAL LIVER, SIGNAL = 1.9; EXPRESSED IN HELA, SIGNAL = 2.2; EXPRESSED IN HEART, SIGNAL = 1.4; EXPRESSED IN BT474, SIGNAL = 3.9; EXPRESSED IN HBL100, SIGNAL = 1.9; SWISSPROT HIT: Q03164, EVALUE 6.00e-36; NT HIT: gi11420105, EVALUE 0.00e+00; EST_HUMAN HIT: AU125551.1, EVALUE 0.00e+00
ctttaggtgagatgtcacttagaaccaggtcttcatggccttgttccacaatcctgatgacaaacactgggcgcccatccttctcctcaatggagcacaggtagcggcagcgcctattggcatagcgagtgctccagtacagccggctggcttcatagcccacagggaagagtgctttaggagaatggaatgcttgcatctgctgtggaagcagctgaccaattgtgtggaagatgaggctacccacgcgaaaggtatggtcccgttctcctcgttgcacgatgctagcaatctgtcgcacctcatcacgctgaacatagaccctcctgaagactgcaaagtaacttaattcttgctcatgaattccctttggtttgtgcatggggcaaagcatagttttgtccttaaaaaacatgcattgtgctttaatggcgcaagtgaagtgataaatgttggtgcatcgaaatctgtggcatccactagtggcacccgtcttgtgacagaagacacatttcatttgtaggcctctcctcagagctagctccacatttattaaggcaccagcctgagtctcatagacctccgtggaccacagagcgcagttcaagtggacccacagatccaagtcaaggttgagtagccttgctggtccatctgtcaatccatcaccttcttcatgacaaaagcaacatttccgatagtctttgggcacaggatcaggtttaagggaagtgcccaatttctttagaaattcatctatttcatcctcacaaggtggtttaaatgtccccttagggattacaatatgaatgctccacttcttccatttcattcctctccattttttattgagcggcctgcaatcttcaaacccaccatggacagctcttagccgaggcttcagcttgactgtcaccttcagctcatctggcttggcctcgacttgggctgcttcaaaagcaggagggaaggcgatgggtggtgaggcagggggagaagctttctctgggag

SEQ ID NO: 17504 - DNA, 396 bp, Homo sapiens
  MAP TO AC005537.2; EXPRESSED IN BRAIN, SIGNAL = 2.4; EXPRESSED IN PLACENTA, SIGNAL =   2; EXPRESSED IN BONE MARROW, SIGNAL = 3.4; EXPRESSED IN ADULT LIVER, SIGNAL = 1.8; EXPRESSED IN HEART, SIGNAL = 1.9; EXPRESSED IN BT474, SIGNAL =   2; EXPRESSED IN HBL100, SIGNAL = 2.7; EXPRESSED IN FETAL LIVER, SIGNAL = 1.6; EXPRESSED IN LUNG, SIGNAL = 2.7; EXPRESSED IN HELA, SIGNAL = 2.2; NT HIT: AJ271735.1, EVALUE 7.00e-51; EST_HUMAN HIT: BF035327.1, EVALUE 1.00e-111; SWISSPROT HIT: P50880, EVALUE 3.30e+00
cgaaccagaaacaacgttaccttaaaccaaagcccaatccagagcgaggccctaactctctttaattctatgaaggccgagagaagtgacaaagctgcagaagaaacgttggaagctagcataggtttgttcatgaggtttaaggaaagaagccatctccataacataaaagcacaaggtggagcagcaagtgctgatgtagaagctgcagtgggttttctagaagatctagctaagatcattgatgaaggtggctacactaaacaacaaattttcaatgtagacaagacagccttctattggaagaagatgccatctaggactttcctagctatagaggagaagtccatgcttggcttcaaagcttcaaaaaacaggtatactcttgttacgagc

SEQ ID NO: 17505 - DNA, 388 bp, Homo sapiens
  MAP TO AC005517.3; EXPRESSED IN BT474, SIGNAL = 3.3; EXPRESSED IN HELA, SIGNAL = 2.1; EXPRESSED IN BRAIN, SIGNAL = 2.1; EXPRESSED IN HBL100, SIGNAL = 2.7; EXPRESSED IN FETAL LIVER, SIGNAL = 2.5; EXPRESSED IN LUNG, SIGNAL = 2.4; EXPRESSED IN ADULT LIVER, SIGNAL = 1.4; EXPRESSED IN PLACENTA, SIGNAL = 2.3; EXPRESSED IN BONE MARROW, SIGNAL = 2.3; EXPRESSED IN HEART, SIGNAL = 1.7; EST_HUMAN HIT: BE241577.1, EVALUE 0.00e+00; SWISSPROT HIT: O14007, EVALUE 3.60e+00; NT HIT: D50331.1, EVALUE 5.20e-02
aaaacatgacccctggccggcctatgtcacctatacctctcagacagtgaaaagactcattgagaaaagcaaaactagagaactggaatgcatgcgtgccctcgaggaaagaccctgggcatcaaggcagaataaaccttccagcgtcattcagccgaaaaggaggaagtcttccaagtcttctggcaaagctgtgttcagggacacgctgtcagaatccacgttatcaatgtggggcgcttattcggtattggccatggctcctaccatgatcccagaacccacacacttacatgcggattccagagactgtccaactgaaaactataacaagatcatctttgcccgcaagcctatgatgaggatgctccctacagttcgctactga

SEQ ID NO: 17506 - DNA, 175 bp, Homo sapiens
  MAP TO AC005517.3; EXPRESSED IN PLACENTA, SIGNAL = 3.6; EXPRESSED IN LUNG, SIGNAL = 4.1; EXPRESSED IN HELA, SIGNAL = 3.5; EXPRESSED IN BT474, SIGNAL =   3; EXPRESSED IN BONE MARROW, SIGNAL = 4.3; EXPRESSED IN HBL100, SIGNAL = 2.9; EXPRESSED IN FETAL LIVER, SIGNAL =   3; EXPRESSED IN BRAIN, SIGNAL = 4.1; EXPRESSED IN ADULT LIVER, SIGNAL = 2.8; EXPRESSED IN HEART, SIGNAL = 3.1; NT HIT: AF018267.1, EVALUE 2.20e-02; SWISSPROT HIT: P26010, EVALUE 4.40e-01; EST_HUMAN HIT: AV731777.1, EVALUE 3.90e-02
ctggatgccgttaaaacctctccagaagatgctggtttcccagcccagcagcttcagagttacgcagggaggggcagaggctggagctggcggctgccccagcatgaggagctcatgtccccattggcatcttctctgtgacagatgccccaggtgccgggtgaataaatttatg

SEQ ID NO: 17507 - DNA, 90 bp, Homo sapiens
  MAP TO AC005497.2; EXPRESSED IN FETAL LIVER, SIGNAL = 8.4; EXPRESSED IN LUNG, SIGNAL = 7.2; EXPRESSED IN HELA, SIGNAL =  10; EXPRESSED IN BRAIN, SIGNAL =   2; EXPRESSED IN HEART, SIGNAL =   3; EXPRESSED IN BT474, SIGNAL = 0.77; EXPRESSED IN BONE MARROW, SIGNAL = 3.3; EXPRESSED IN PLACENTA, SIGNAL = 2.7; EXPRESSED IN ADULT LIVER, SIGNAL =  11; EXPRESSED IN HBL100, SIGNAL = 5.9; EST_HUMAN HIT: AV732818.1, EVALUE 1.80e-02; SWISSPROT HIT: P30318, EVALUE 3.10e+00
aataaattggattacatcaaaattgaaaatgttgtgctacaattgatactatcaagaaggaaaaaatacactttacagaataaggaataa

SEQ ID NO: 17508 - DNA, 344 bp, Homo sapiens
  MAP TO AC005480.3; EXPRESSED IN HELA, SIGNAL =   4; EXPRESSED IN ADULT LIVER, SIGNAL = 2.8; EXPRESSED IN HEART, SIGNAL = 2.7; EXPRESSED IN PLACENTA, SIGNAL = 2.9; EXPRESSED IN BONE MARROW, SIGNAL = 3.5; EXPRESSED IN FETAL LIVER, SIGNAL = 2.4; EXPRESSED IN LUNG, SIGNAL =   3; EXPRESSED IN BRAIN, SIGNAL = 2.9; EXPRESSED IN BT474, SIGNAL = 2.4; EXPRESSED IN HBL100, SIGNAL = 2.9; EST_HUMAN HIT: BE151344.1, EVALUE 5.50e-02; SWISSPROT HIT: Q60787, EVALUE 1.60e-01; NT HIT: AE000445.1, EVALUE 4.60e-02
ctgagctcttcaggaaaattcgcatccaaatgagagccctggacatgctccagatggcctcttcccctatcgcctcctctagtaaccgggctaacccacagccccgcacagccacccgaacccagcaggaaaagcttgggtttctgcacactaacttcagattccagcctcgggtgaatcctgtggtccctgactatgagggcctttacaaggccttccagagaagagcagccaaaagaagagaaacccaagaggccactcgcaacaagcccttcttgctgaggaccgccaacctgcgccaccctcagcggccctgtgatgctgccaccaccggaaggaggcag

SEQ ID NO: 17509 - DNA, 239 bp, Homo sapiens
  MAP TO AC005480.3; EXPRESSED IN BT474, SIGNAL = 2.1; EXPRESSED IN LUNG, SIGNAL = 1.2; EXPRESSED IN HELA, SIGNAL =   1; EXPRESSED IN ADULT LIVER, SIGNAL = 2.6; EXPRESSED IN BRAIN, SIGNAL = 1.1; EXPRESSED IN HEART, SIGNAL = 1.4; EXPRESSED IN BONE MARROW, SIGNAL = 1.5; EXPRESSED IN PLACENTA, SIGNAL = 4.8; EXPRESSED IN FETAL LIVER, SIGNAL = 2.4; EXPRESSED IN HBL100, SIGNAL = 1.8; NT HIT: gi4557426, EVALUE 8.00e-74; EST_HUMAN HIT: BE780916.1, EVALUE 2.00e-69; SWISSPROT HIT: P27744, EVALUE 6.70e-01
gggaggtgggctttgagccctgctatgccgaagtgctgagggtggtacgaggaaaacttcaccagccagaggaggtccagagaggttccttctatgctttctcttactattatgaccgagctgttgacacagacatgattggtgagttcaccccaggtgtcagtccagagaggaaggtggatagggctgtggtggggaaggtcaaggagaaagagcacttgaggtgctttgtcggggtg

SEQ ID NO: 17510 - DNA, 113 bp, Homo sapiens
  MAP TO AC005476.3; EXPRESSED IN HELA, SIGNAL = 2.8; EXPRESSED IN ADULT LIVER, SIGNAL = 2.8; EXPRESSED IN HEART, SIGNAL = 2.3; EXPRESSED IN BT474, SIGNAL = 2.3; EXPRESSED IN BONE MARROW, SIGNAL =   3; EXPRESSED IN FETAL LIVER, SIGNAL = 2.5; EXPRESSED IN BRAIN, SIGNAL = 2.8; EXPRESSED IN PLACENTA, SIGNAL = 2.2; EXPRESSED IN HBL100, SIGNAL = 2.1; EXPRESSED IN LUNG, SIGNAL = 3.6; EST_HUMAN HIT: AI202935.1, EVALUE 3.90e+00; SWISSPROT HIT: Q10578, EVALUE 6.90e+00; NT HIT: AF009254.1, EVALUE 9.80e-01
gctttctggctcagaaagcaccttgatattaggaagcctttgtgagccttctgagccgtgaagttataggggtatagggtagaggcaatccaggtcttatgcaccaatgtcag

SEQ ID NO: 17511 - DNA, 259 bp, Homo sapiens
  MAP TO AC005300.9; EXPRESSED IN BONE MARROW, SIGNAL = 5.4; EXPRESSED IN FETAL LIVER, SIGNAL = 5.1; EXPRESSED IN PLACENTA, SIGNAL = 6.8; EXPRESSED IN HEART, SIGNAL = 3.7; EXPRESSED IN BRAIN, SIGNAL = 5.4; EXPRESSED IN ADULT LIVER, SIGNAL = 3.5; EXPRESSED IN HELA, SIGNAL =   5; EXPRESSED IN LUNG, SIGNAL = 7.4; EXPRESSED IN HBL100, SIGNAL = 7.1; EXPRESSED IN BT474, SIGNAL = 7.7; EST_HUMAN HIT: BF528236.1, EVALUE 1.00e-113; SWISSPROT HIT: P36151, EVALUE 5.00e-03; NT HIT: gi11526291, EVALUE 1.00e-113
agcccacccacctttgggttcctgttggacatcgatggagtgcttgtgcggggccacagagtgatccctgctgctctgaaagccttccgaaggctggtgaactcccaggggcagctgcgggtgcccgtggtttttgttacaaatgctgggaacatcttacaacacagcaaagcccaggagctgtcagccctgctggggtgcgaggtgagaaggcagccagaggcatggaagcccaaggacctggttcctaatggagccg

SEQ ID NO: 17512 - DNA, 203 bp, Homo sapiens
  MAP TO AC005300.9; EXPRESSED IN HBL100, SIGNAL = 3.7; EXPRESSED IN FETAL LIVER, SIGNAL = 5.5; EXPRESSED IN LUNG, SIGNAL = 5.8; EXPRESSED IN HELA, SIGNAL = 4.1; EXPRESSED IN BRAIN, SIGNAL = 5.1; EXPRESSED IN PLACENTA, SIGNAL = 4.1; EXPRESSED IN HEART, SIGNAL = 3.6; EXPRESSED IN ADULT LIVER, SIGNAL = 3.6; EXPRESSED IN BONE MARROW, SIGNAL = 5.9; EXPRESSED IN BT474, SIGNAL = 3.3; EST_HUMAN HIT: BE795136.1, EVALUE 3.00e-83; NT HIT: gi11526293, EVALUE 1.00e-111; SWISSPROT HIT: Q56983, EVALUE 3.00e-03
gtgctgaaactggtgtctgacttgaggaaccaccctgtagccactctgatggccactgggcaccccatggtgatcagctctgatgacccagctatgtttggtgccaaaggcttgtcctatgatttctatgaggtcttcatgggcattggggggatgaaggctgacctgaggaccctcaaacagctggccatgaactctatcaa

SEQ ID NO: 17513 - DNA, 298 bp, Homo sapiens
  MAP TO AC005280.2; EXPRESSED IN FETAL LIVER, SIGNAL = 3.9; EXPRESSED IN LUNG, SIGNAL = 4.5; EXPRESSED IN ADULT LIVER, SIGNAL = 2.9; EXPRESSED IN BRAIN, SIGNAL = 4.3; EXPRESSED IN PLACENTA, SIGNAL = 5.9; EXPRESSED IN HBL100, SIGNAL = 4.5; EXPRESSED IN HEART, SIGNAL = 3.4; EXPRESSED IN BT474, SIGNAL = 5.3; EXPRESSED IN BONE MARROW, SIGNAL = 6.4; EXPRESSED IN HELA, SIGNAL = 3.6; EST_HUMAN HIT: AW361431.1, EVALUE 1.10e+00; NT HIT: AB010444.1, EVALUE 1.60e-01; SWISSPROT HIT: P15328, EVALUE 9.00e-02
cagtgcagccaactctacttccgtacaacgtgatgctactttggaaaagtgtgaaatcctacttaagtggaaggtgtaattattgcagagtatttcagggaggaagatggcaccagggaaataggcatgaaaatcaggttcttctattatttccacaacctggtctaattctccatgcccttgggatggcctgggtctgtgataggaaatatgtttttctgtctctatttgagcaacaacatccttcttatcagctgctccaatgaggaagacactgatgtccttttgcaggaaacta

SEQ ID NO: 17514 - DNA, 126 bp, Homo sapiens
  MAP TO AC005100.2; EXPRESSED IN LUNG, SIGNAL = 1.3; EXPRESSED IN HELA, SIGNAL = 1.3; EXPRESSED IN ADULT LIVER, SIGNAL = 1.2; EXPRESSED IN BRAIN, SIGNAL = 1.4; EXPRESSED IN HEART, SIGNAL = 1.6; EXPRESSED IN PLACENTA, SIGNAL = 1.2; EXPRESSED IN BT474, SIGNAL = 1.1; EXPRESSED IN BONE MARROW, SIGNAL = 1.3; EXPRESSED IN HBL100, SIGNAL = 1.1; EXPRESSED IN FETAL LIVER, SIGNAL = 1.3; EST_HUMAN HIT: AI266468.1, EVALUE 4.00e-65; SWISSPROT HIT: P11654, EVALUE 4.00e+00; NT HIT: AL163208.2, EVALUE 7.00e-14
ccagaggagggcacaaggagaagatggccatctgcaaacccagaaatgaggcctcaccagacactggatccatgagcaccttgatcttggactctccagcctccagaactgtgagaaataaatgtt

SEQ ID NO: 17515 - DNA, 100 bp, Homo sapiens
  MAP TO AC005100.2; EXPRESSED IN FETAL LIVER, SIGNAL = 0.77; EXPRESSED IN LUNG, SIGNAL = 0.74; EXPRESSED IN HELA, SIGNAL = 0.76; EXPRESSED IN ADULT LIVER, SIGNAL = 0.81; EXPRESSED IN HEART, SIGNAL = 2.2; EXPRESSED IN PLACENTA, SIGNAL = 0.78; EXPRESSED IN BT474, SIGNAL = 0.7; EXPRESSED IN BRAIN, SIGNAL =   1; EXPRESSED IN HBL100, SIGNAL = 1.6; NT HIT: AB021490.2, EVALUE 1.80e-01; EST_HUMAN HIT: BE739301.1, EVALUE 4.90e+00
tgatgatgatgatgatgatgatgatgttagaaagttccaaagggttgagatattttacacaattaatcagagaggctccagctacctcaatacagaggct

SEQ ID NO: 17516 - DNA, 309 bp, Homo sapiens
  MAP TO AC005076.2; EXPRESSED IN PLACENTA, SIGNAL = 1.1; EXPRESSED IN BT474, SIGNAL = 1.5; EXPRESSED IN BONE MARROW, SIGNAL = 1.1; EXPRESSED IN HBL100, SIGNAL = 1.2; EXPRESSED IN FETAL LIVER, SIGNAL = 1.5; EXPRESSED IN LUNG, SIGNAL = 1.4; EXPRESSED IN HELA, SIGNAL = 2.4; EXPRESSED IN ADULT LIVER, SIGNAL =   2; EXPRESSED IN HEART, SIGNAL = 1.6; EXPRESSED IN BRAIN, SIGNAL = 0.91; NT HIT: AL163209.2, EVALUE 1.00e-85; EST_HUMAN HIT: AA055018.1, EVALUE 8.00e-81; SWISSPROT HIT: P70213, EVALUE 4.00e-19
aactcagggattctatctcctggtctcagaagcagatactgagcctcaaatctgctaagactgccctgagtgagagtcttatcttcggtagagaaagagctgaaattgtggaaaaacagacacaagctcttatcatgcaagtggctgacctgcaacagaaggtgcatgcacagcctcaccaggtatctactgtaaaagtgagggcattgattggaaaagaatggaaccctgcaacttggaatggggatgtgctagaggacctgatgaagctggggacactgagtttgtaaactctgatgatacttcttt

SEQ ID NO: 17517 - DNA, 117 bp, Homo sapiens
  MAP TO AC005067.2; EXPRESSED IN PLACENTA, SIGNAL = 1.5; EXPRESSED IN FETAL LIVER, SIGNAL = 2.6; EXPRESSED IN HELA, SIGNAL = 2.3; EXPRESSED IN ADULT LIVER, SIGNAL = 3.2; EXPRESSED IN BRAIN, SIGNAL = 2.5; EXPRESSED IN HEART, SIGNAL = 1.7; EXPRESSED IN BONE MARROW, SIGNAL = 1.3; EXPRESSED IN LUNG, SIGNAL =   2; EXPRESSED IN BT474, SIGNAL = 1.7; EXPRESSED IN HBL100, SIGNAL = 1.5; SWISSPROT HIT: P20009, EVALUE 5.30e+00; NT HIT: AF003530.1, EVALUE 2.00e-07; EST_HUMAN HIT: AW139674.1, EVALUE 4.00e-06
caggctcaccaccacattgaagcggccaaggctcatggctttcaccctctagtgtggcagcctgagctgtatctgggcccctttgagccaaggctggaagctgaatggccagggatg

SEQ ID NO: 17518 - DNA, 172 bp, Homo sapiens
  MAP TO AC005067.2; EXPRESSED IN PLACENTA, SIGNAL = 5.5; EXPRESSED IN HEART, SIGNAL = 1.4; EXPRESSED IN BT474, SIGNAL = 4.6; EXPRESSED IN BRAIN, SIGNAL = 1.3; EXPRESSED IN ADULT LIVER, SIGNAL =  16; EXPRESSED IN HELA, SIGNAL = 3.9; EXPRESSED IN LUNG, SIGNAL =   3; EXPRESSED IN FETAL LIVER, SIGNAL =  12; EXPRESSED IN HBL100, SIGNAL = 2.3; EXPRESSED IN BONE MARROW, SIGNAL = 1.2; EST_HUMAN HIT: AU124645.1, EVALUE 3.00e-92; SWISSPROT HIT: P16435, EVALUE 3.00e-24; NT HIT: AF258341.1, EVALUE 1.00e-84
ctcggggacttcttcttttttctttctgaagaggaaccagtaggttaggagacccacgatgagcgaaaacagaatcatgtccgtcatgctgaaaagagatacttcttcggccaccgcctcggacacggtggagctggtgtccacgtgggagtctcccatgttgatcatgaaa

SEQ ID NO: 17519 - DNA, 213 bp, Homo sapiens
  MAP TO AC005060.2; EXPRESSED IN BONE MARROW, SIGNAL = 3.2; EXPRESSED IN ADULT LIVER, SIGNAL = 3.4; EXPRESSED IN PLACENTA, SIGNAL = 2.8; EXPRESSED IN BT474, SIGNAL =   3; EXPRESSED IN FETAL LIVER, SIGNAL = 3.4; EXPRESSED IN LUNG, SIGNAL =   5; EXPRESSED IN HELA, SIGNAL = 3.3; EXPRESSED IN BRAIN, SIGNAL = 3.7; EXPRESSED IN HEART, SIGNAL = 3.4; EXPRESSED IN HBL100, SIGNAL =   3; EST_HUMAN HIT: BE141511.1, EVALUE 7.50e-01; SWISSPROT HIT: P08183, EVALUE 1.00e-17
attttacctttccagcatgcttaagttcttgcttatctttgttggcaaatccagtcattgctgcggtttcaatcattcctgtcacggcaagtactggagcaatactcagaatcaggaatgtcatctcccatccatatataaaggaaatgataactgaaagtcccatgttagttgcattttgtgttaagacgccaatcctggaacctgttgcct

SEQ ID NO: 17520 - DNA, 434 bp, Homo sapiens; identical to SEQ ID NO: 734
  MAP TO AC005060.2; EXPRESSED IN HELA, SIGNAL =  79; EXPRESSED IN ADULT LIVER, SIGNAL =  36; EXPRESSED IN BT474, SIGNAL =  33; EXPRESSED IN HEART, SIGNAL =  25; EXPRESSED IN PLACENTA, SIGNAL = 9.4; EXPRESSED IN BONE MARROW, SIGNAL =  21; EXPRESSED IN FETAL LIVER, SIGNAL =  51; EXPRESSED IN LUNG, SIGNAL =  70; EXPRESSED IN BRAIN, SIGNAL =  23; EXPRESSED IN HBL100, SIGNAL =  24; EST_HUMAN HIT: N72421.1, EVALUE 2.60e-02; NT HIT: gi11436474, EVALUE 1.70e-02

SEQ ID NO: 17521 - DNA, 76 bp, Homo sapiens
  MAP TO AB023056.1; EXPRESSED IN LUNG, SIGNAL = 2e+02; EXPRESSED IN PLACENTA, SIGNAL =  36; EXPRESSED IN HBL100, SIGNAL = 1.4e+02; EXPRESSED IN FETAL LIVER, SIGNAL =  55; EXPRESSED IN BRAIN, SIGNAL =  20; EXPRESSED IN BT474, SIGNAL =  17; EXPRESSED IN BONE MARROW, SIGNAL =  95; EXPRESSED IN HELA, SIGNAL =  73; EXPRESSED IN ADULT LIVER, SIGNAL =  32; EXPRESSED IN HEART, SIGNAL =  44; NT HIT: AF055066.1, EVALUE 7.00e-31; EST_HUMAN HIT: AA382730.1, EVALUE 2.00e-35
ccagtgactacagctccaaggagaaccaggccagcaacgatacccacgatggggatggtgggctgagaagactgct

SEQ ID NO: 17522 - DNA, 87 bp, Homo sapiens
  MAP TO AB023057.1; EXPRESSED IN PLACENTA, SIGNAL = 5.6; EXPRESSED IN BT474, SIGNAL = 2.4; EXPRESSED IN BONE MARROW, SIGNAL =  23; EXPRESSED IN HBL100, SIGNAL =  23; EXPRESSED IN LUNG, SIGNAL =  27; EXPRESSED IN ADULT LIVER, SIGNAL =   7; EXPRESSED IN BRAIN, SIGNAL = 5.1; EXPRESSED IN FETAL LIVER, SIGNAL = 7.9; EXPRESSED IN HELA, SIGNAL =  18; EXPRESSED IN HEART, SIGNAL = 8.9; NT HIT: M32106.1, EVALUE 5.00e-42; EST_HUMAN HIT: BE620683.1, EVALUE 6.00e-30; SWISSPROT HIT: Q02256, EVALUE 7.10e+00
cgaccacagctccagtgaccacagctacaagtagaaccaggccagcaacgatgcccacgatggggatggtgggctgggaagatggct

SEQ ID NO: 17523 - DNA, 117 bp, Homo sapiens
  MAP TO AB023057.1; EXPRESSED IN LUNG, SIGNAL =  41; EXPRESSED IN HELA, SIGNAL =  24; EXPRESSED IN ADULT LIVER, SIGNAL = 8.6; EXPRESSED IN HEART, SIGNAL = 6.7; EXPRESSED IN PLACENTA, SIGNAL =  11; EXPRESSED IN BT474, SIGNAL = 4.2; EXPRESSED IN FETAL LIVER, SIGNAL =  12; EXPRESSED IN BRAIN, SIGNAL = 3.6; EXPRESSED IN BONE MARROW, SIGNAL =  30; EXPRESSED IN HBL100, SIGNAL =  34; NT HIT: S50740.1, EVALUE 8.00e-60; EST_HUMAN HIT: AI123699.1, EVALUE 3.00e-35; SWISSPROT HIT: Q9ZK89, EVALUE 4.10e+00
ccagtgactacagctgcaaggacaaccagaccagcaacgatacccatgatggggatggtgggcagggaagactgctctgggaaaggaggtgaaggtgagggtctctgacccccaggc

SEQ ID NO: 17524 - DNA, 270 bp, Homo sapiens
  MAP TO AB023057.1; EXPRESSED IN PLACENTA, SIGNAL = 1.2; EXPRESSED IN LUNG, SIGNAL = 3.1; EXPRESSED IN ADULT LIVER, SIGNAL =   1; EXPRESSED IN BONE MARROW, SIGNAL = 2.1; EXPRESSED IN HBL100, SIGNAL = 1.8; EXPRESSED IN FETAL LIVER, SIGNAL = 1.5; EXPRESSED IN HELA, SIGNAL = 1.5; EXPRESSED IN BRAIN, SIGNAL = 1.1; EXPRESSED IN BT474, SIGNAL = 0.87; EXPRESSED IN HEART, SIGNAL = 1.1; EST_HUMAN HIT: AU139120.1, EVALUE 0.00e+00; NT HIT: AF226990.2, EVALUE 0.00e+00; SWISSPROT HIT: P17693, EVALUE 1.00e-49
tggcctcgctctggttgtagtagccgcgcagggtctgcaggttcattctgtcagtctgtgcgtgggccttggtgttccgtgtctcctcttcccaatactctggcccctcctgctccacccacggcgcccgcggctccatcctcggacacgccgagtcgctgtcgaaccgcacgaactgcgtgtcgtccacgtagcccatggcgatgaagcggggctccccgcggccgggccgggacacggcggcgctgaaatacctcatggagtgggagc

SEQ ID NO: 17525 - DNA, 485 bp, Homo sapiens
  MAP TO AC003666.1; EXPRESSED IN FETAL LIVER, SIGNAL = 0.72; EXPRESSED IN HEART, SIGNAL = 2.4; EXPRESSED IN BRAIN, SIGNAL = 2.4; EXPRESSED IN ADULT LIVER, SIGNAL = 0.65; EST_HUMAN HIT: AW949577.1, EVALUE 3.00e-78; NT HIT: gi11641404, EVALUE 0.00e+00; SWISSPROT HIT: P51794, EVALUE 5.00e-72
ttattgcgagaatcagttccctcctctgggcaaatccaatgaggcgctcggagtctctggagaccaccacggggaagccgttgtagtcggtctccttgatgagcgtctccacgtcctcgacagtcatgctgtcctgggtgagcaccgacagtggcggctctccccgccggggccgcatgacgtcggtggccagtgtgcggtgagtaaactcgtccttcacgtcaaggaaagggtacccatttaagtggatgtgggcctcgtagatgccttctttcccaaatgcatcagctacccacttgctggtcacagccgccgccatcaggggcacgatgtactccagacccccggttaattcaaacatgatgaccaccaatgacaccgtcatcctggtaactccacctgcaacagaggggaggagtaagattccaaagtgcaagccgggcagctcacggaagcatgatttggggaaaatgacagacaggctg

SEQ ID NO: 17526 - DNA, 228 bp, Homo sapiens
  MAP TO AC003666.1; EXPRESSED IN HBL100, SIGNAL = 0.93; EXPRESSED IN FETAL LIVER, SIGNAL = 2.9; EXPRESSED IN LUNG, SIGNAL = 2.5; EXPRESSED IN ADULT LIVER, SIGNAL = 1.4; EXPRESSED IN BRAIN, SIGNAL = 0.97; EXPRESSED IN PLACENTA, SIGNAL = 2.5; EXPRESSED IN BT474, SIGNAL = 0.63; EXPRESSED IN HEART, SIGNAL = 0.81; EXPRESSED IN HELA, SIGNAL = 0.77; NT HIT: AB019432.1, EVALUE 1.00e-119; EST_HUMAN HIT: H38319.1, EVALUE 1.00e-119; SWISSPROT HIT: P51794, EVALUE 1.00e-36
ccgctccgcgtcaccaggcactgccgaagccccagtttccggaagatatccaccaccgtttccatcggagtgtggtctgtcactgtaaacgggctgaggttcaggatgcgccgcagcttcaggggatgtgggctgttggccggcagctcggggggttcctccgtgaagtacatgatggaattgctcacaatgccctcctgcctctgtctggcgttctctagaatgggg

SEQ ID NO: 17527 - DNA, 226 bp, Homo sapiens
  MAP TO AC004480.7; EXPRESSED IN BT474, SIGNAL = 6.9; EXPRESSED IN HEART, SIGNAL = 3.7; EXPRESSED IN PLACENTA, SIGNAL = 3.7; EXPRESSED IN BRAIN, SIGNAL = 7.8; EXPRESSED IN ADULT LIVER, SIGNAL = 4.5; EXPRESSED IN HELA, SIGNAL =   7; EXPRESSED IN LUNG, SIGNAL =   3; EXPRESSED IN FETAL LIVER, SIGNAL = 4.9; EXPRESSED IN HBL100, SIGNAL = 8.1; EXPRESSED IN BONE MARROW, SIGNAL = 6.1; NT HIT: AF155654.1, EVALUE 1.00e-124; EST_HUMAN HIT: AI815511.1, EVALUE 1.00e-124
gggttccggtgagaagaacgcccctactgcggtactgaggaagcggcaggaggagatgcggcccctggacatagacgaggtggaagcgcctgaggaagtggaggtgctggagcccgaggaggatttcgagcagttcctgctcccggtcatcaacgagatgcgcgaggacatcgcgtctcttatacgcgagcacgggcgggcgtacctgcggaccaggagcaagctg

SEQ ID NO: 17528 - DNA, 246 bp, Homo sapiens
  MAP TO AC004876.2; EXPRESSED IN BT474, SIGNAL = 0.77; EXPRESSED IN BONE MARROW, SIGNAL = 0.88; EXPRESSED IN HEART, SIGNAL = 1.5; EXPRESSED IN BRAIN, SIGNAL = 1.1; EXPRESSED IN ADULT LIVER, SIGNAL =   2; EXPRESSED IN LUNG, SIGNAL = 8.4; EXPRESSED IN HBL100, SIGNAL =   3; EXPRESSED IN PLACENTA, SIGNAL = 8.9; EXPRESSED IN HELA, SIGNAL = 1.8; EXPRESSED IN FETAL LIVER, SIGNAL =  20; NT HIT: J03764.1, EVALUE 0.00e+00; EST_HUMAN HIT: AI991331.1, EVALUE 0.00e+00; SWISSPROT HIT: P05121, EVALUE 1.00e-41
acaagggcatggcccccgccctccggcatctgtacaaggagctcatggggccatggaacaaggatgagatcagcaccacagacgcgatcttcgtccagcgggatctgaagctggtccagggcttcatgccccacttcttcaggctgttccggagcacggtcaagcaagtggacttttcagaggtggagagagccagattcatcatcaatgactgggtgaagacacacacaaaaggtgagcaggcag

SEQ ID NO: 17529 - DNA, 700 bp, Homo sapiens
  MAP TO AC004887.2; EXPRESSED IN LUNG, SIGNAL = 4.9; EXPRESSED IN HEART, SIGNAL = 4.5; EXPRESSED IN PLACENTA, SIGNAL = 5.3; EXPRESSED IN BT474, SIGNAL = 4.2; EXPRESSED IN BONE MARROW, SIGNAL =   5; EXPRESSED IN HBL100, SIGNAL = 4.9; EXPRESSED IN FETAL LIVER, SIGNAL = 5.2; EXPRESSED IN ADULT LIVER, SIGNAL = 5.7; EXPRESSED IN BRAIN, SIGNAL = 7.3; EXPRESSED IN HELA, SIGNAL = 5.6; NT HIT: AL163283.2, EVALUE 5.00e-04; EST_HUMAN HIT: AL046804.1, EVALUE 5.00e-10
aattacccagtcttgggtatttctttatagcaacacaataatggccttatacaagaggagaatgaggaggatgagtaagaggaggaggaggaaagttaggaggaggaggagagggaagatgaaaaggaggaggagaaggaggaagaggaaaattaggaggaggaggaggagacaaaggagaaggaggagaaggaggaaaattagaagggggagaagagggaagatgaggaggaggaggagaaggaggaaaattaggagggggaggagaagaggggagatgaggagaagaggggagaaggagaagaaggaaaattaggaggaggaggaggagaaaaaggagaaggaggagaaggaaaattaggaggagaagggggagaagagggaagatgaggaggaggaggagaaggaggaaaattaggaggagaagggggagaagagggaagatgaggagaaggaggagaaggaggaaaattaggagggggaggagaagaggggagatgaggagaagaggggagatgaggagaagaggggagatgagaagaggggagaaggaggaaaattaggaggaggaggaggaggaaggaggaagaatagtctagataaatgcattgcattggcattgaagtcatttgcagccattgattttcagaataaagtctggggaaaggccccccaggaaagttgattctgcagtgtttct

SEQ ID NO: 17530 - DNA, 694 bp, Homo sapiens
  MAP TO AC004890.2; EXPRESSED IN ADULT LIVER, SIGNAL = 1.3; EXPRESSED IN BT474, SIGNAL = 2.3; EXPRESSED IN HBL100, SIGNAL = 1.7; EXPRESSED IN HELA, SIGNAL =   1; EXPRESSED IN HEART, SIGNAL = 0.78; EXPRESSED IN PLACENTA, SIGNAL = 0.96; EXPRESSED IN BONE MARROW, SIGNAL =   2; EXPRESSED IN FETAL LIVER, SIGNAL = 1.1; EXPRESSED IN LUNG, SIGNAL =   1; NT HIT: AB037760.1, EVALUE 0.00e+00; EST_HUMAN HIT: AA766095.1, EVALUE 1.10e-01; SWISSPROT HIT: P18737, EVALUE 4.00e-35
atgaagagcttgtcatcaaagctgaaggccttgctagatcctcgttgtgccctgaggttccagtccctttctcttctccaccagcagcagcaaaggatgctttttcagatgtggctttcaaaagccagcagtctacatccatgacaccttttggacgtccagccactgacctgcctgaagcctctgagggacaagtgacttttactcagttgggtagctatcccctcccacctccagttggcgagcaggtgttctcatgccaccactgtggcaagaatctcagccaagacatgttgctgacccaccaatgtagccatgctactgagcaccccttaccctgtgcccagtgccctaagcactttactccacaggcggacctcagcagcacctcccaggaccatgccagcgagacaccccccacctgcccacactgtgccaggacttttactcacccatcaagacttacctaccatcttcgggtccataacagcactgagcgtcctttcccctgtcctgattgccccaagcgctttgctgaccaggctcgactcaccagccaccggagagctcatgcaagcgaaaggcccttccgctgtgcccagtgcggcaggagcttcagcttgaaaatcagcctcctgctccaccagcggggtcatgcacaagagcgccctttctcctgccctcagtgtggcat

SEQ ID NO: 17531 - DNA, 512 bp, Homo sapiens
  MAP TO AC004890.2; EXPRESSED IN HBL100, SIGNAL = 1.4; EXPRESSED IN FETAL LIVER, SIGNAL = 1.8; EXPRESSED IN LUNG, SIGNAL = 1.3; EXPRESSED IN HELA, SIGNAL =   2; EXPRESSED IN BRAIN, SIGNAL = 1.4; EXPRESSED IN BT474, SIGNAL = 3.7; EXPRESSED IN BONE MARROW, SIGNAL = 0.86; EXPRESSED IN PLACENTA, SIGNAL = 2.1; EXPRESSED IN HEART, SIGNAL = 1.1; EXPRESSED IN ADULT LIVER, SIGNAL = 1.1; NT HIT: gi11420492, EVALUE 0.00e+00; EST_HUMAN HIT: BE735242.1, EVALUE 0.00e+00; SWISSPROT HIT: O88553, EVALUE 3.00e-05
caggtggggtcatgatcaaacaggagctacagtatacacaggaaggccctgcggatcttcctggagagttctcatgcattgctgaagagcaggctttcctgagcccagagcagaccgaactctggggtggtcagggcagttctgtcctcttggaaacaggtcctggggactctactctagaggagcctgttggtagtagagttcctagcagcagcagaactgtgggctgcccgaagcagaaatctcataggcaggtacagctggaccaggaatgtgggcagggcctgaagctgaaaaaggacacttcccgcccctacgaatgttctgagtgtgagatcaccttccgctataagcagcagctggccacacatctgcgcagccactctgggtgggggtcttgtacacctgaggagccagaggagagccttaggcccaggccacggctgaaaccacagaccaaaaaggccaagctgcatcagtgtgatgtgtgcctgaggagcttcagctgcaag

SEQ ID NO: 17532 - DNA, 459 bp, Homo sapiens
  MAP TO AC004890.2; EXPRESSED IN PLACENTA, SIGNAL = 3.6; EXPRESSED IN BT474, SIGNAL = 8.3; EXPRESSED IN FETAL LIVER, SIGNAL = 3.3; EXPRESSED IN LUNG, SIGNAL = 2.3; EXPRESSED IN ADULT LIVER, SIGNAL = 2.2; EXPRESSED IN BONE MARROW, SIGNAL = 1.8; EXPRESSED IN HBL100, SIGNAL = 5.1; EXPRESSED IN HELA, SIGNAL = 2.8; EXPRESSED IN BRAIN, SIGNAL =   3; EXPRESSED IN HEART, SIGNAL = 2.2; NT HIT: D30612.1, EVALUE 1.00e-102; SWISSPROT HIT: P22340, EVALUE 8.10e-02; EST_HUMAN HIT: BE869735.1, EVALUE 0.00e+00
tgaccctgtgtctttaatccatcagcacaggagaaaacgacgctccacacctttaacttcttccacacttccttcacaagcaacagagaaaagctcctattttcagaccaccgagatttcactctggacggtggtggccgctattcaggctgtggagaagaagatggagtcccaggctgcccggctacagagcctggaggggcgcacggggacagccgagaagaagctggctgactgcgagaagatggccgtggagttcgggaaccagctggagggcaagtgggccgtgctggggaccctgctgcaggagtatgggctactgcagaggcggctggagaacgtggagaacctgctgcgcaacaggaacttctggatcctgcggctgcccccgggcagcaagggggaggcccccaaggtagtctcattgaggattaaaagttagaagagaagggggagcca

SEQ ID NO: 17533 - DNA, 108 bp, Homo sapiens
  MAP TO AC004936.2; EXPRESSED IN BONE MARROW, SIGNAL = 3.2; EXPRESSED IN ADULT LIVER, SIGNAL = 4.6; EXPRESSED IN BRAIN, SIGNAL = 6.2; EXPRESSED IN PLACENTA, SIGNAL = 3.7; EXPRESSED IN BT474, SIGNAL = 3.3; EXPRESSED IN HBL100, SIGNAL = 3.8; EXPRESSED IN LUNG, SIGNAL = 3.5; EXPRESSED IN HELA, SIGNAL = 4.9; EXPRESSED IN FETAL LIVER, SIGNAL = 3.5; EXPRESSED IN HEART, SIGNAL = 4.5; EST_HUMAN HIT: BE062167.1, EVALUE 7.00e-45; SWISSPROT HIT: P53115, EVALUE 6.90e+00; NT HIT: AL163227.2, EVALUE 4.00e-46
tactccagttcccaacaagttcctcatctccatctgagaccacctcagcctggatttcattgtccatatcattatcagcattttggtcaaagccattcaacaagtctc
